United States Patent Application Publication US 2017/0009304 A1 - sequence listing, part 26

SEQ ID NO: 539488 - DNA, 89 bp, Homo sapiens
gaagtggggaagacttttttcaaaaggtggataggcatgtagacctgctagaagttgcccaggaaactgatgggttttcaggaagtgac

SEQ ID NO: 539489 - DNA, 51 bp, Homo sapiens
cctttatatagaagggagagtaggccgaatccgggtgcatggtattggcgg

SEQ ID NO: 539490 - DNA, 75 bp, Homo sapiens
cccgtttctgcggacttgttctgaggccgagttttcggctttgtgagaaaccttaccatcaaacacgatggccag

SEQ ID NO: 539491 - DNA, 100 bp, Homo sapiens
tcaacgagtctgaagtgaaccgcggcgacaagtacatcgccaagtttcagggagaagacacggtcgtgatcgcgttggaatcgaagcctcttaaaatggc

SEQ ID NO: 539492 - DNA, 75 bp, Homo sapiens
cgatgcctccaacacagctatgcaggcacggctgcctgtcctaatggcagcttccactgcaccaacactggctat

SEQ ID NO: 539493 - DNA, 75 bp, Homo sapiens
gtttacggcgaagtctactcaacgtttccaagacctgcctagagctggaacgttacctccagagcgagccctgct

SEQ ID NO: 539494 - DNA, 83 bp, Homo sapiens
aaaagagatgtggggggattctcgacctgctaacagaactggaccttttcgccacaacagaaacactgccggggaggccgagc

SEQ ID NO: 539495 - DNA, 90 bp, Homo sapiens
atggcggcgcagccaccccgcgggatacgcctcagcgcggacttcagggccacaggtgctgccaagatgctccagggcacctgctccgtg

SEQ ID NO: 539496 - DNA, 100 bp, Homo sapiens
ttctcctatgactacgtctttgactggaacatgctgaaattcgccacgtgcgagcgagggtttgcagcaatggaagaaacgcaccagaagaagattgaag

SEQ ID NO: 539497 - DNA, 82 bp, Homo sapiens
tcatatagagaaagacagatggaagtctttaagtcctcctgcatatgcccaagaggattgggagtggaatggacaccagcag

SEQ ID NO: 539498 - DNA, 122 bp, Homo sapiens
cgccaccgtaaggctaggccgcgagcttagtcctgggagccgcctccgtcgccgccgtcagagccgccctatcagaggtgagagctacatggaagaggagataattttggacatcacagtga

SEQ ID NO: 539499 - DNA, 100 bp, Homo sapiens
ttgtgaaaaaattcaaagtcgaatatcatgctggtggctctacccagaattcaattaaagtggctcagcatgcagcagattggaataaatatgatgaccg

SEQ ID NO: 539500 - DNA, 80 bp, Homo sapiens
gacaacgccttaacccaaggaagtgactcaaactgtgagaacttcaggctcaaggatgtccaatcaatggatgagctgaa

SEQ ID NO: 539501 - DNA, 75 bp, Homo sapiens
tggaaattggactaaattaccagaatgcagggaggaaggaacagagccacagagaaaaatgacttgctcacaaca

SEQ ID NO: 539502 - DNA, 74 bp, Homo sapiens
acatggaggcaagactgtggaagttaaagtgtgtttaagcagaggaaaattattagttgaaaaagctatcaagg

SEQ ID NO: 539503 - DNA, 100 bp, Homo sapiens
gcttctttaagggctacgggaagatcctggaggtggatctgaagaacgggtgtcatggagaaactccagctgggcccagagattctgcagcgggaaaatc

SEQ ID NO: 539504 - DNA, 51 bp, Homo sapiens
acatagctggaaaggatcttacaggtgccgtgagcgatgtggagatgcagg

SEQ ID NO: 539505 - DNA, 76 bp, Homo sapiens
cggagctgggcgcggagcccctcacagtgcaggcctgcactgcccaaagtcttggaaacttgctggatatgatgta

SEQ ID NO: 539506 - DNA, 75 bp, Homo sapiens
tcccagaagttgttctaacgctgcctttgctttaaaacagtattacttgcgaggaattccagggaagaaatgtgg

SEQ ID NO: 539507 - DNA, 90 bp, Homo sapiens
taaaggagcaacagtttacagcccttccagatacagctaccaggctcagcttgtcaatcggaaacagaaattagagtctgtggaactttc

SEQ ID NO: 539508 - DNA, 75 bp, Homo sapiens
atccccaaggaggacggcgtgatcacggccagcgaggacagatacttgccagaactaatacagctgatgaaatac

SEQ ID NO: 539509 - DNA, 50 bp, Homo sapiens
gggctcccccgggatgatctacaggcctcattgctacgatttcagagtac

SEQ ID NO: 539510 - DNA, 50 bp, Homo sapiens
gtcgccgccactgccgcaggaggcgtgagtcctattttgtaacggattat

SEQ ID NO: 539511 - DNA, 75 bp, Homo sapiens
gcctgaggcggcggcgcgaggcagcggccctccaggcactgaagcgtaagaagaggtatgagaagcagctggcgc

SEQ ID NO: 539512 - DNA, 83 bp, Homo sapiens
gacaaaggcgcaagtcgagaggaaactgttgtgcctcttcatattggcgatcctgttgtattactgatctctcattacccaac

SEQ ID NO: 539513 - DNA, 90 bp, Homo sapiens
gcgggcgactggacggccggacaggccacggcatatgcctccaaggacggggtcctcactgaggccatgatggacgcctgtgtgcaagat

SEQ ID NO: 539514 - DNA, 75 bp, Homo sapiens
ctctctgcaagtccttaactttgttcactcattccagttgggccggtgcacaaacagcgtggtcaagtatgagct

SEQ ID NO: 539515 - DNA, 75 bp, Homo sapiens
gcctaggcattttgctgtctcctcctaatacgaatggcctgtccagaagacagccaaatacatccttcaaacaga

SEQ ID NO: 539516 - DNA, 96 bp, Homo sapiens
gcctgccatgccccagccagtccccacagcataacagtcgactggcacaggctgaggaaagacaacagctcgagtcactttataagaacctcagga

SEQ ID NO: 539517 - DNA, 92 bp, Homo sapiens
gggggccgctctgggatcccggccaccagcaattgtccgtactatactggcaattgctggagaagattttgcaattgttgcttctgatactc

SEQ ID NO: 539518 - DNA, 59 bp, Homo sapiens
cgcagtgaacaggcccagctcgggaaaggtctctaattaacagaagatggcaaagccca

SEQ ID NO: 539519 - DNA, 96 bp, Homo sapiens
aaagccactggcagtgattcaagtggtgtcattgatctcacaatggatgatgaagagagtggagcttcacaaggttctattattgtcaaggtccca

SEQ ID NO: 539520 - DNA, 83 bp, Homo sapiens
ccgcgcgcagggcctgcagcgggagctggacggcgagcgcgagcggcgcgagaaaatctgggcacgaaagcttctctctgtcc

SEQ ID NO: 539521 - DNA, 100 bp, Homo sapiens
agttggttggagatgtggattttgaaggactccctggaggaaaagcggaagcggcagcggtctgaacgcctggaacggattttccaacttagtgaggctc

SEQ ID NO: 539522 - DNA, 74 bp, Homo sapiens
ttggatcttacacttgaaatacagactgttggggaacaagaggtgcttgtgaatgacttcttcttggtggcttg

SEQ ID NO: 539523 - DNA, 80 bp, Homo sapiens
caatcccccactctttccgccctaatggaggtctccagtttcgagacaagaggagcagcagcggcaccgcccctcaccct

SEQ ID NO: 539524 - DNA, 90 bp, Homo sapiens
gttggtcatgaaagagattccttgcagagacagctcaacacggcacttccacaggttcagcagactgtacaggatctttttggcagagcc

SEQ ID NO: 539525 - DNA, 98 bp, Homo sapiens
atcgtcaacgggactcaggagcacacgaaagtccggctgagcgtctatggagccctgggcatttcacaaggggaccaacaaggcaccatggcgcagaa

SEQ ID NO: 539526 - DNA, 50 bp, Homo sapiens
ttctcctttcttaggatgccacagaatcggcaatgcctggcccactcctg

SEQ ID NO: 539527 - DNA, 114 bp, Homo sapiens
gcggggtctagcgcagcagcagaggccgaagacgagacgggatgaaggagtcgaatctgatgatttgaaaaaagatctacctctgatgcctcctcctccagattcatgtagcat

SEQ ID NO: 539528 - DNA, 100 bp, Homo sapiens
atttgaagtctgtgtcaaacatccatatcataagtggaattttggagatattcaaagactgctgcctcatatccgggggaatgtgggctttgtgttcacc

SEQ ID NO: 539529 - DNA, 83 bp, Homo sapiens
cgtcccctgcaccatgagctggggcaccgagctctgggaggaatcattatagattctaaaaatatattttcccttctctgtgg

SEQ ID NO: 539530 - DNA, 88 bp, Homo sapiens
ggagctttaccgcaattatggcatcctggccgatgccacggagcaagtgggccaggtacgtggtcatctcccgggaggagagggagca

SEQ ID NO: 539531 - DNA, 83 bp, Homo sapiens
ttaagcactattattcatgaggcaaatgaggaacagggcaatagtatgatggtaccatttggcccttttgccttcatgccagg

SEQ ID NO: 539532 - DNA, 75 bp, Homo sapiens
cggcctttgccccaatcttgtgtgggcactgaagggggactacaggttcgagagccacagacctccaccagcacg

SEQ ID NO: 539533 - DNA, 82 bp, Homo sapiens
cgcgcgcgaccgccgaatcgctcctgcagcagaggaatgtaacaacccctgctgcaatgcctctaattgtaccctgaggccg

SEQ ID NO: 539534 - DNA, 100 bp, Homo sapiens
ttttggaagaaggatctttgtgggaagacagggtgaatttatcacagaggaataacgagggagaggagaaagagctgacctgtcctggacgcagcataac

SEQ ID NO: 539535 - DNA, 75 bp, Homo sapiens
gagggagcacctggagctgttctggtctagagtgaatattcccaaggttcacgtacggccacgcgggcaccatct

SEQ ID NO: 539536 - DNA, 82 bp, Homo sapiens
gcagaatctgtcacagagggagatgtcaggtgggagaaaggatgagcaattcttaggttttggctcagatgaagaagtcaga

SEQ ID NO: 539537 - DNA, 73 bp, Homo sapiens
tacttggaatgaatccttctagagacgtccacggtgccttggaatttgtgtcgctgagtcagcaagcctttca

SEQ ID NO: 539538 - DNA, 100 bp, Homo sapiens
aagcgcagaaaactcctccagcagatccggcttgcccagaaagagaagacagccatggaagggtaccgtgagggttttctctggaagcgtggccgggaca

SEQ ID NO: 539539 - DNA, 100 bp, Homo sapiens
cagcagtgaaactactggtgaaaagccagagcagaacgatgatgacaccataaaatctcaggaggaacgggattttccaacagaaaccattaaatttggt

SEQ ID NO: 539540 - DNA, 75 bp, Homo sapiens
gccgccgtttccgcaaacagaatcgcgtttggctgtgctggtgctgacagctgcagaagaaattgtacatggtgc

SEQ ID NO: 539541 - DNA, 101 bp, Homo sapiens
ccagccgcacgaagcagcgggcccgggagtgggccaagatgtcgcacgcggccacaagcgccttatgccgctccataaagctgcagtgtgagctgtacccc

SEQ ID NO: 539542 - DNA, 121 bp, Homo sapiens
aaaggttcttcggtttgatcctactcagcttacaaagcaatggtacagcagttccatgaaagtcatttgcgtgtggttgactgatagattagacctccaactccatatttaccagctgaag

SEQ ID NO: 539543 - DNA, 100 bp, Homo sapiens
aggagaaattcgactatggcaacaagtacaagcggcgggtgccccggatgagcagcaccagcagtaagagggctccgaccacggcaacccagaggctgaa

SEQ ID NO: 539544 - DNA, 51 bp, Homo sapiens
agaaaaagaagattatccctcaggaagcgttgttgacgaccatggacatca

SEQ ID NO: 539545 - DNA, 88 bp, Homo sapiens
atgctggaggacatctgggggccacaaatgctccttctcctggagacgcaactcaagtgggagtctcgggtgactcaatatgaaaggg

SEQ ID NO: 539546 - DNA, 129 bp, Homo sapiens
tcgaagtaggagaaggacctgctgcacttcaggggaaatttcataccataattgagttcccacttgaaagacaacctctcctgtttcatctcctggcaacagaatgcatcctccttttgggaaactgcc

SEQ ID NO: 539547 - DNA, 75 bp, Homo sapiens
cttacaaagtccatgctaacctactatgagggtcgagcagagtgacctacggcatgatgagctccaatgtgtact

SEQ ID NO: 539548 - DNA, 100 bp, Homo sapiens
ggccgccatgtccacgttcaggcaggaggacgtggaggaccattatgagatgggggaggagctgggcagttacatgggaataggactctcggctcaaggc

SEQ ID NO: 539549 - DNA, 83 bp, Homo sapiens
atctgcgccggagagaatatcagcgacaggactacatggatgccatggctgagaagagtgttgcggagataggaacatgggag

SEQ ID NO: 539550 - DNA, 90 bp, Homo sapiens
attgtcaagaggtgcaaaaatcttagctctctcaatctctgtctgaactggatcataaatgacagacacgttggtcgtcattgcctccga

SEQ ID NO: 539551 - DNA, 82 bp, Homo sapiens
cccctgttgcgatggcgcagaaaccccgttgacaaggcactgctttttcatgacgttttgtaccaatggctagaagcagatc

SEQ ID NO: 539552 - DNA, 100 bp, Homo sapiens
tcttatttagttctggggagcgcctcgtcgacatgagtgatgtggaggaaaacaacttcgagggcagagtggtgaaatttaccaaatcctttgaattgat

SEQ ID NO: 539553 - DNA, 100 bp, Homo sapiens
gccggcggtccacggccggaatggcagcaagctcaggtgattttcttccacccccacctccacctctagatgattccagtgcccttccatctatctctgg

SEQ ID NO: 539554 - DNA, 74 bp, Homo sapiens
acaacatcagccgagccgcgggggaagctgcagtaaaggaagatgaagaagaagtttcagataagggcagtgat

SEQ ID NO: 539555 - DNA, 100 bp, Homo sapiens
aactacaatcaccatcttgttggtgcttcctcatgtattgaagaattccaatcccagttcatttttactccagttccaacaccatcttctgagatgatcc

SEQ ID NO: 539556 - DNA, 97 bp, Homo sapiens
tttgttaaggattccaagtaactcttatttgggggtgagaacatcaaaagcatcaaccagcagtcaggggcgcacgtggagcttcagaggaaccccc

SEQ ID NO: 539557 - DNA, 80 bp, Homo sapiens
tatcagtgcccgctttgttcagctgcagcatggagagatagataaacggatgaggcctgcctgtgttaatacacctagtg

SEQ ID NO: 539558 - DNA, 100 bp, Homo sapiens
acattccttcttagaagacttgactggtcttacattgctgcatcaagaaacccaagctgctgagaatgttcgcatcttaccacatacagttctttacatg

SEQ ID NO: 539559 - DNA, 82 bp, Homo sapiens
attcatttttgatcaggagaaagaagacagccatcatttgaaagggtgatgtttgccttggaaaaattatccagatatttgc

SEQ ID NO: 539560 - DNA, 50 bp, Homo sapiens
tagcaatttaaagatcctctccaagtaccatgacccgttgcagccatcag

SEQ ID NO: 539561 - DNA, 100 bp, Homo sapiens
cagccaagaccctggccctctcctctgcccagccggggcagctgctgcactggcccagggaggcctccagaggaagaagtccaagttccgcttgtccaag

SEQ ID NO: 539562 - DNA, 83 bp, Homo sapiens
tgggctgcatgggctctatcaaggaaaacaagtgtctgcttatgtcggatgctgaaatttctggaaaagacaatggaaatcag

SEQ ID NO: 539563 - DNA, 100 bp, Homo sapiens
caggaaaccatcagaaacctggactgtataggaggagatgttaaagtaacccatcttgcaggacgacattgaagattggtcttctgttgatctaagatga

SEQ ID NO: 539564 - DNA, 96 bp, Homo sapiens
ggcctcttagatccaaacgtcaagtcaatttttgtcacctgtggagactgggacttaaaagtcatgctctgataaccatgaggcttctcattctca

SEQ ID NO: 539565 - DNA, 100 bp, Homo sapiens
agaggtggagtccgttcttgtgggtgctgctgttctgggtgcctgtgcctcaggggatttcgcttctgtacaggtgatgctgtggagtcttcaaaaagcc

SEQ ID NO: 539566 - DNA, 99 bp, Homo sapiens
tgctcgagaattggaccaggacctccctggaaaagcaggagcagccccatgaggaccccgaaaggaaagaactgataaatttcaaacggaagagagtgg

SEQ ID NO: 539567 - DNA, 80 bp, Homo sapiens
ggattacaggcgtgagcctccgcgcccggccgatgccatggacaatattaccaggcagaaccaattctacgatacccaag

SEQ ID NO: 539568 - DNA, 100 bp, Homo sapiens
agctcacagagcagcttgagcagttcaagagggaagtgagctcacaatgactcaagctgccacatagtgttgattgtgaaatgccagttgaagcatatgt

SEQ ID NO: 539569 - DNA, 98 bp, Homo sapiens
cgccgccatcctcggcgcgactcgcttctttcggttctacctgggagaatccaccgccatccgccaccatgtattggtaaaggttttcaaggtgtcat

SEQ ID NO: 539570 - DNA, 82 bp, Homo sapiens
tgtcattaaacccatcgacaagaaggcacctaaaatgacagatggcgagacctggacaggaaatgccctcttcagattgacc

SEQ ID NO: 539571 - DNA, 100 bp, Homo sapiens
ggtcatgcatgacgaggctgtgacgcaccttgatgaccagatcctgcagctcacaggtccaatgatgcatcagcagcctccttctcagcaatacaatatg

SEQ ID NO: 539572 - DNA, 74 bp, Homo sapiens
cttgctctgggctgctccaggccaggccatgcgggatgctttggagtctgcaatgaagaatggcctgtggggtc

SEQ ID NO: 539573 - DNA, 98 bp, Homo sapiens
tgtgtggggggacccaggttgcctactgctctagtccaggaccagagacccccaactatatagcagatatcagttttagagaatgtggcgtggagaaa

SEQ ID NO: 539574 - DNA, 75 bp, Homo sapiens
gcgggggattgtgggagtctccgcgtcccgctcgctgggagagaggagccatgtggctagaaatcctcctcactt

SEQ ID NO: 539575 - DNA, 76 bp, Homo sapiens
tggaatgctcttttaccgatgctttaacatacagccactaggacgggctctacgagtgcattctctgtgcctgctg

SEQ ID NO: 539576 - DNA, 102 bp, Homo sapiens
ggaacttctgcccagctctccttggtgttgctctcttgccattcgtggatgagcgaaggctacgagctgccctagaagaggtatacccagacctcactccag

SEQ ID NO: 539577 - DNA, 75 bp, Homo sapiens
aggtacggatactcagttgtggagagctgattcccaaatctaaagcatgttcaaaagaaagctgcagaatggaaa

SEQ ID NO: 539578 - DNA, 116 bp, Homo sapiens
ggctgcgaaggcggcggctcctgccctctcgctttccctctcgcgtctctggctgcagcggagctggagtttgttcagatcatcatcatcgtggtggtgatgatggtgatggtggt

SEQ ID NO: 539579 - DNA, 74 bp, Homo sapiens
agcggccatgtacctcatcagcaagcgactcaagagcagccgagattcgggccctccaccctctacagtgagtg

SEQ ID NO: 539580 - DNA, 90 bp, Homo sapiens
cagaggaagacatttttaggagaagcattttgaatcagaaggcttaagaagaattctgcttttctccttttctgcaattagataaaaaag

SEQ ID NO: 539581 - DNA, 101 bp, Homo sapiens
tcgtgttcgtccgcggagatctctctcatctcgctcggctgcgggaaatcgggctgaagcgactgagtccgcgatggagcgctggagagcgaggtggcttc

SEQ ID NO: 539582 - DNA, 97 bp, Homo sapiens
ttcctgggaaggtggagccaccagcctctccttgccccaggccatttactgcaaggatgttctggacattgaacagttctctacggtcaagggcgtg

SEQ ID NO: 539583 - DNA, 100 bp, Homo sapiens
gaaaaattcaagaagttgaaaaacgcttttcacgtcacctggagagatgcacagggagaacgtggatttccaggcagtcccggttttcctggtttacagg

SEQ ID NO: 539584 - DNA, 74 bp, Homo sapiens
agatgcgggccctgctggaccagctcatgggcacggctcgggacggctgaccccgcactacatctacccaccag

SEQ ID NO: 539585 - DNA, 82 bp, Homo sapiens
cctatggatgacaatttaatttgtgcagtaaaattgttaaagacatcaactagtcaggcagtcttccgtctccagtctggca

SEQ ID NO: 539586 - DNA, 75 bp, Homo sapiens
tcctgtctagagttgtagcttccacctggtgccgtgagcgatgtggagatgcaggaacactatgatgagtttttt

SEQ ID NO: 539587 - DNA, 98 bp, Homo sapiens
cgctatgaagaaagtggttcaacagctccggctggaggccggactcaaccgcgtaaaagcagtacatgccacactactacccttcctgctcttgtgcg

SEQ ID NO: 539588 - DNA, 75 bp, Homo sapiens
ggcgaaggtgaccggggaccgaggactccttctcctcccccacgtcggcgctcaccttctcctagaagatactct

SEQ ID NO: 539589 - DNA, 75 bp, Homo sapiens
cttcgacattgccgtcgacggcgagcccttgggccgcgtctcctttgaggagccagcaccgctctttgaccttgc

SEQ ID NO: 539590 - DNA, 100 bp, Homo sapiens
cctctctcctgatacagcaggcgctcaccatgttccctggagatctacggaatccagaggcagcattgtctccaaccttccgtagtgacagcccagtgcc

SEQ ID NO: 539591 - DNA, 90 bp, Homo sapiens
cggatggacagcaggccccgcgccggaagcgaatttatttcagacttcgaaacaaagcaacagggttattcatgtcaaccaatggaaact

SEQ ID NO: 539592 - DNA, 74 bp, Homo sapiens
ctttgaaaatcaacgacaacttgagcacagaccctacagcttggggcctgggctcctctgaccatcctcattga

SEQ ID NO: 539593 - DNA, 100 bp, Homo sapiens
taagttgatccatccagatgaggatatatccctgatgatcttccaaaacccaagactactgaagtaattaggaaaggctcaattactgaatacacagcag

SEQ ID NO: 539594 - DNA, 83 bp, Homo sapiens
cgttttccggagggattccatcataggtcaaaatgcagatcttcgtgaaaacccttaccggcaagaccatcacccttgaggtg

SEQ ID NO: 539595 - DNA, 101 bp, Homo sapiens
gacagccaggcccgggagaagccgaatacatcaagcaatggtaacatctttaaatgaagataatgaaagtgtaactgttgaatggatagaaaatggagata

SEQ ID NO: 539596 - DNA, 88 bp, Homo sapiens
ggcgcgtcttctggagcaatgggagggaactctaatgatccaggacaaagaagttaccctggagtatgtatcaagcctggatttttgg

SEQ ID NO: 539597 - DNA, 100 bp, Homo sapiens
aagtgggatgtgtagactgttcaatgcaacaaggcaagtatcaccttttgccatgatagcatttctttcattggacagttccttacaagggctccactca

SEQ ID NO: 539598 - DNA, 82 bp, Homo sapiens
ttggaagcagccgatccagcctgcggagcctgtggggcagctcttttggtacaccagaaggccagaatggaacgacttcaaa

SEQ ID NO: 539599 - DNA, 98 bp, Homo sapiens
ggaggctgtgcgggccccgctccgcttcgaatggagtgaccgtctccttatcaagggaggcagaatcgtcaatgatgatcagtccttttatgctgata

SEQ ID NO: 539600 - DNA, 83 bp, Homo sapiens
cccgaaaaccagtctaccatggttactgctgacatgggaaatgggtcctgatgaatatgaagagatggaagaagaggaggagg

SEQ ID NO: 539601 - DNA, 100 bp, Homo sapiens
cgactataaacacctctactttgaatcggacgctgctaccgtcaatgaaattgtgctcaaggtgctaactttgagtacatcatcgcagaaaaaagaggga

SEQ ID NO: 539602 - DNA, 82 bp, Homo sapiens
atcaccaagatgctggaccgaggcctggatcccaatttccacgacccggagaccggagttctggacttcagtgaccccttca

SEQ ID NO: 539603 - DNA, 90 bp, Homo sapiens
gctgctcccatcattgatgtggtgcgatcgggtgtgaacggcatgtctgtggatgagaagcctgactcccccatgtatgtgtatgagtcc

SEQ ID NO: 539604 - DNA, 96 bp, Homo sapiens
acgggagtgtcctggacccagctgagcgggcggtcattcgcatcgcagatcgacgacatcgcggatggcgccgtgaagcccccacccaacaagtac

SEQ ID NO: 539605 - DNA, 74 bp, Homo sapiens
ggcttcgccatcgccagcttcagcaccctggaggccctggaggttgaaatcacaaagattagacacctttttag

SEQ ID NO: 539606 - DNA, 80 bp, Homo sapiens
tcgccaaggctggcgcagtcggaatactcccccagttgcaagaggcgcaggaccgtggaagacttcaacaaattctgcac

SEQ ID NO: 539607 - DNA, 97 bp, Homo sapiens
cttcatgccctccgagggcaagatggtgtcgagcccaaggtggtgtttgctaaggagcagctggcacgcaggaagctgcaggcagaggcaggagcca

SEQ ID NO: 539608 - DNA, 99 bp, Homo sapiens
gagctcgggccaatcagagggacggccccagaatggcatggaaatgttggcagtagatgctccaaggagacataaggtatccgtccatgttcttgccag

SEQ ID NO: 539609 - DNA, 112 bp, Homo sapiens
ccgggagctgcgggcgcccgggcgcccgaggcttcccggtgcgctccgccagacttaattcagtgcacaaatgagatgaatgtgaacatcccacagttggcagacagtttat

SEQ ID NO: 539610 - DNA, 100 bp, Homo sapiens
cggcgggtgcagaactacctgtacaacgtgctggagagaccccgcggctgggcgttcatctaccacgctttcgtgggctaagtgatggatcttgtactcc

SEQ ID NO: 539611 - DNA, 100 bp, Homo sapiens
cttaccagctgtatcaggatccaaggaacgtttggggtttcctagcagttccaagagcctctgagttcctgccttttttcatctctgaatccccaccatt

SEQ ID NO: 539612 - DNA, 100 bp, Homo sapiens
ctctgtggtgggtccctcagcccttctgagctctgtgctgaacaaggagtacaaaccaccaggaacccgtaaacttcataacattcttggagtggaaaca

SEQ ID NO: 539613 - DNA, 85 bp, Homo sapiens
ggcctaccaggaggccaggggtgtcgccatggacaggaagatgtcacccaagcgcatagctaaaagaaggtcccccccagcagat

SEQ ID NO: 539614 - DNA, 96 bp, Homo sapiens
aatggactggcccccttgagcctgtcccaagccctggtgccaggtgtccatccccgtgctgagatttctctatgaatcatcatcaagaactctggg

SEQ ID NO: 539615 - DNA, 101 bp, Homo sapiens
ctggcaagtctgaaggtcaagttttgacctgtagcagagaaccaattctggagaacagcctcacttctttgattgaatacttacataatgcattggaacat

SEQ ID NO: 539616 - DNA, 51 bp, Homo sapiens
gttctgctgaatcctattcctaagattcctcagttccttttagatgattgc

SEQ ID NO: 539617 - DNA, 100 bp, Homo sapiens
agatgctaagaaacgtgcccggcggatcctgcaggcttgtggcgggaacagcctggaaactcagccacctgtgacaaatttgagtgtctctgttgaaaac

SEQ ID NO: 539618 - DNA, 80 bp, Homo sapiens
agtgctcaaactcaccgaccagccggaaaactcaaatatatgtgaggtgtgcaacaaatggggacggctgttctgctgcg

SEQ ID NO: 539619 - DNA, 83 bp, Homo sapiens
gtttcagatgacaatgctccctctccttatatgcaatgtttttggaacagtgccagtggttgcttctgcacagacacagcctg

SEQ ID NO: 539620 - DNA, 98 bp, Homo sapiens
cagccagaaaccggggaccttaacaatccacctaagaaattcagaggtgtgaagatgccttaagaaaaaataagagcttaattgggccggatcaaaag

SEQ ID NO: 539621 - DNA, 50 bp, Homo sapiens
atttggagagtcagatgccattttgtactatactggcaattgctggagaa

SEQ ID NO: 539622 - DNA, 88 bp, Homo sapiens
ggggcgacgaggcgattgcgggggcctgggctaggtgtcatggagaaactccagctgggcccagagattctgcagcgggaaaatccaa

SEQ ID NO: 539623 - DNA, 100 bp, Homo sapiens
gaaggcgcccaagcagcagctgccggagcccgagtggatcggggacggagagaacacgagcccatcagcaaattgtggctactaatttgccccctgaaga

SEQ ID NO: 539624 - DNA, 100 bp, Homo sapiens
gtcacagtacactgaaaaggagccagcagagatgaatgtgaaggtgctggactttgagcactttctgcccatgctgcagacagtggccaagaacaaggac

SEQ ID NO: 539625 - DNA, 100 bp, Homo sapiens
tttaatcatactcaaaccatacagcagaagcaacctatttctgtgaaggtgatttcaggtcatcagactagtgctgagtcttggggtactggcagagctg

SEQ ID NO: 539626 - DNA, 88 bp, Homo sapiens
tcgcagtggtcgcttcttctccttggttctgacaacaaaggagattgtgacatattgctgggcctaacactaaggtgatgttagttat

SEQ ID NO: 539627 - DNA, 82 bp, Homo sapiens
agccactaagagtaattgcccatgacacaggaacatcactggatcaggatcagttcttaagagcagccccggtaactggagg

SEQ ID NO: 539628 - DNA, 87 bp, Homo sapiens
cccaagtagtccgatggcagcggctgcgccgaggcgcccgactcaggaaacaattgaagatgttgaagaaatgctcaacaaccttcc

SEQ ID NO: 539629 - DNA, 75 bp, Homo sapiens
gaactgtacagttacctccgtgtgtcacaggaagactcttaattatgatctagcccttaagtatttccagaaagc

SEQ ID NO: 539630 - DNA, 97 bp, Homo sapiens
tgagaacctacttaaagctatggcaaaggcactggaggattgagctaggtgggcagaaaagagcactggagaatgctggaggagaccttaaggatgg

SEQ ID NO: 539631 - DNA, 120 bp, Homo sapiens
agaagcattcgtgcagacagggcaaagaaaatgggactggttgaccaactggtggaacccctggctgtccagaccaaaacgaagaagacgttagccaaacccaatataaggaatgttgtg

SEQ ID NO: 539632 - DNA, 82 bp, Homo sapiens
gggagttctggtctcaggcaaggtggggactgggcacatcatcaatacggacttccttcgctgggcatctggctgggattct

SEQ ID NO: 539633 - DNA, 50 bp, Homo sapiens
aggggctccggctggtctgtggtgaggtcttgccaagaaatattgctgtt

SEQ ID NO: 539634 - DNA, 90 bp, Homo sapiens
cttacgagaactgtctgcaggcactggcagatgtagaagtaaagtatatagataaatctgttcagataagctccttatgaatccttcaga

SEQ ID NO: 539635 - DNA, 101 bp, Homo sapiens
ccaagctcgtagcctgccactccgtgcgtcttagtggtgcaatggctagtataagcgtgcgttcgagtaccccaggctctcctacacatgtaagcagtgga

SEQ ID NO: 539636 - DNA, 90 bp, Homo sapiens
actcattgccttatagttaagtgtacagcagatattttgggttatgtggtccgaatcagtggtgggaacgacaaacaaggtttccccatg

SEQ ID NO: 539637 - DNA, 100 bp, Homo sapiens
ccggaggcagagcggctgccatggtttgggccccatggtatccctgtgacagtatttcccaaaagggaatataaggataaaccagaagccatgccgctcc

SEQ ID NO: 539638 - DNA, 100 bp, Homo sapiens
ctgcgggagaggtttggaattgatgatcaagatttccaggtgtccaaggcagctgcagatttgatggcctactgtgaagcacatgccaaggaagaccccc

SEQ ID NO: 539639 - DNA, 121 bp, Homo sapiens
tgtgcagcccgggatatgagcctgtttctggggcaaaaacattcaagaatgagagcgagaacacctgtcaagatggtggatgcttccaaaagcatcgaagctgtccatgaggacatccgcg

SEQ ID NO: 539640 - DNA, 75 bp, Homo sapiens
ctcctgagcgccagcccggaggtggttgtcgcagtgggattccctggggatctcatcactgaaaacgcaaatcca

SEQ ID NO: 539641 - DNA, 75 bp, Homo sapiens
ccgaaaggtctgtgataatacattagatattatagcggtggtggttaataaggctgcagttatggtccatcagct

SEQ ID NO: 539642 - DNA, 101 bp, Homo sapiens
gggaaaccgctgcttcagagacacaggacccattccaacaatctcgtaaaacatggtggattactatgaagttctaggcgtgcagagacatgcctcacccg

SEQ ID NO: 539643 - DNA, 98 bp, Homo sapiens
agcaccagctcatcctatccaagcttctgagggaggaggacaacaagtactgcgccgactgcgaggccaaagaatgaggagaaacctgtgcaaatgat

SEQ ID NO: 539644 - DNA, 50 bp, Homo sapiens
cgcgggacaagaaaattcatgcgatatggaatatatgaacgctgtcgaga

SEQ ID NO: 539645 - DNA, 100 bp, Homo sapiens
gacagaagttcttgcccccggggagctggtgtggacagaggagggagcatggaatacctacatcagttgactttataggctgtgatccagctcatatggt

SEQ ID NO: 539646 - DNA, 90 bp, Homo sapiens
cagcttttaaggagttcttggacctgctgggggacacgatcacactgcaggatttcaaagggccctgccctgggagaagccctgccacac

SEQ ID NO: 539647 - DNA, 51 bp, Homo sapiens
cgcgacggtcgccgcccacggcgagcatcatggcagaacaggatgtggaaa

SEQ ID NO: 539648 - DNA, 75 bp, Homo sapiens
gttcgaggagtgcgtcaaggactccccgcgcttcaggggaccggaagctgttcgtggggatgctgaacaagcagc

SEQ ID NO: 539649 - DNA, 74 bp, Homo sapiens
atgagaccctggtggagtttgctattggacagtcattttgtttactcattcagccctgttgcaggtcccaataa

SEQ ID NO: 539650 - DNA, 100 bp, Homo sapiens
gcaccaaattgaaaacatctcccaatgaagatgagacccattgggcatgatggctaccatcccacctctgtagctgagtggctggattccattgaactgg

SEQ ID NO: 539651 - DNA, 99 bp, Homo sapiens
agggccgggcaattcccgaccgaaccaaacggcccagaggcagagctacacaaccatggaatccaaattaattcctgttctgtgcgactggtggatata

SEQ ID NO: 539652 - DNA, 100 bp, Homo sapiens
cacaaaaccaagcgaggccaggccgctctggaccgtctcaaggtgtttgacggcatcccaccgccctacgacaagaacttcatcacagctgaggagctgc

SEQ ID NO: 539653 - DNA, 100 bp, Homo sapiens
gtgatgagaagctgaagcagtgcctggtggccgaccttgtccacacagtccatcttctcggacaaactatttagtggaaaaggcttacattttcagccat

SEQ ID NO: 539654 - DNA, 50 bp, Homo sapiens
gccctgtctcctcgcagatgaggacaactacacctttgcccaacctggga

SEQ ID NO: 539655 - DNA, 75 bp, Homo sapiens
ttgtacttggattcagcaaggaaccttccgggccgttgctccagggagaactgcaaatatcttcatccaccccca

SEQ ID NO: 539656 - DNA, 76 bp, Homo sapiens
tgttctgacgacatgactttaaaggaatccttcaactgctttctaccaagcgttccatttgaacacgttaaaggaa

SEQ ID NO: 539657 - DNA, 90 bp, Homo sapiens
gcattcacagcatcactgccgagaggctcatcttcagccacgctgtgcagatggtttttcgttggaatatacgttgcacatttatggcga

SEQ ID NO: 539658 - DNA, 100 bp, Homo sapiens
gcaggagacacaagaagcggatccaggatggtgctgctccactggtgcctgctgtggctcctgtttccactcagctcaaggacccagaagttacccaccc

SEQ ID NO: 539659 - DNA, 75 bp, Homo sapiens
acctctacgccgacatcgacgccgcgtggcaggcgctgcgcacccgggtaacgccatcctctgaaaatcctaatg

SEQ ID NO: 539660 - DNA, 100 bp, Homo sapiens
ccgtgcgcacccaggagaaggagcagatcaagaccctcaacaacaagtttgcctccttcatagacaaggtagttttggatgttgggtgtggaactggaat

SEQ ID NO: 539661 - DNA, 140 bp, Homo sapiens
gctccagcgcgggtcggagtctgggggttcgcgcccgccgacccgcgccctgctccctctcagcacctgggcggacgttgtctatcaacgtctatgactacaactgccatgtggacttgatcagactgctcaggctggaa

SEQ ID NO: 539662 - DNA, 82 bp, Homo sapiens
cctggagttcttgcaagtcggccaggatgtctcagtacttggaccatgagactgtttcagccactttcatcgacagcagtgg

SEQ ID NO: 539663 - DNA, 90 bp, Homo sapiens
ggggaggttacgcagcaaaccatccagaagttggccttgattgtggctcagcatcgtgatcgttccaatgtcctgtctggcattaagatg

SEQ ID NO: 539664 - DNA, 101 bp, Homo sapiens
atccgatggcagcaccacttcgaccagcttcatcctcagacagttgttgacctcctgtactggagagacattaagaagactggagtggtgtttggtgccag

SEQ ID NO: 539665 - DNA, 101 bp, Homo sapiens
cgcttctcctacctctggctcaagttttcacttatcatctattccaccgtgttctgggatgtaaatgaagaccctggagaagatgtggccctcctctctgt

SEQ ID NO: 539666 - DNA, 139 bp, Homo sapiens
gccagggtctgcagggcctgggccgccgctgctacctgcagcgccgtgtggcacgacacaaaaatcagacacctggatttcattagcatcatgacctacgattttcatggagcctggcgtgggaccacaggccatcaca

SEQ ID NO: 539667 - DNA, 83 bp, Homo sapiens
gccgctctagcggccgggactctgaactatggcgatgaggtggaaagtgagaaatggtacctgtctacagacttcccttcaac

SEQ ID NO: 539668 - DNA, 75 bp, Homo sapiens
gtgaaagtgacgccttcgctcaacgaggacctgcaggtggaagtgatgaagggttacgactcactgattaaaaag

SEQ ID NO: 539669 - DNA, 80 bp, Homo sapiens
aacgtgaagatgtgtttaaagcagtacaagtccagcggagaaagttcattgtccccatatcttgtgtgatctgtaatgac

SEQ ID NO: 539670 - DNA, 107 bp, Homo sapiens
tgttggtctgctggtgggactcaatgttctcgatgccaatctctgcttgaaaggagaagacttggattctcagtaccagaagccaaaggaggttgtggtggccgagt

SEQ ID NO: 539671 - DNA, 98 bp, Homo sapiens
tggaagatgcggtgaatgaggggctggaaatagtgagaggacgtctgcaaaatgctgcatctagcctgattccaactcaaacaacgataacagctgga

SEQ ID NO: 539672 - DNA, 100 bp, Homo sapiens
ggtaaagatggcggagcgcgggtacagcttttcgctgactacattcagcttaaccagctcgaaaaagcagtggaagcagctcacacatttttcgtggcta

SEQ ID NO: 539673 - DNA, 82 bp, Homo sapiens
cttcttccttatacgtcaatgagcactatccacacgacaggcctacactctattcaaacagaaaactttagaaactgttcct

SEQ ID NO: 539674 - DNA, 74 bp, Homo sapiens
gcttgtgaccctgcagctcctcaaactatcagaggactcctgaaacctggagagctacctgctgtataaaggct

SEQ ID NO: 539675 - DNA, 51 bp, Homo sapiens
ctcggagctaatccacaatctccgcaacctctttattgtgcaaagctgcca

SEQ ID NO: 539676 - DNA, 98 bp, Homo sapiens
aagacagtgattgttataatcaaaacttaattcagtgcacaaatgagatgaatgtgaacatcccacagttggcagacagtttatttgaaagaactact

SEQ ID NO: 539677 - DNA, 76 bp, Homo sapiens
atgtctccaacatggaccgcctgggggactcggaactttgaaggagaagagccaggcgtgcggagggaacttgggg

SEQ ID NO: 539678 - DNA, 83 bp, Homo sapiens
aggcactgctttttcatgacggaaccgcggggaaaggcgaatgggtgcttttgaatgtgttcgtaaagtgtatcagacagatg

SEQ ID NO: 539679 - DNA, 98 bp, Homo sapiens
cgatactgagcttcttcctatttgccatgggtttatgatgctgcagtcaggtggttgaaatacgatgaacctaatcgccagccatttatggttgatat

SEQ ID NO: 539680 - DNA, 74 bp, Homo sapiens
acaagagcgttttgatggagcggctgaagaagagtcactcaagggaaaggattaatgccagatggtaccagcag

SEQ ID NO: 539681 - DNA, 97 bp, Homo sapiens
ttgaaggaacttggagttaatggtctaatttatgatagacttgtgcaccatggacaattttgctgagggagatttcactgtggcggattatgccttg

SEQ ID NO: 539682 - DNA, 100 bp, Homo sapiens
gggcagcagcggcgccgtgctcgctccaggagaaactaattcgagatgttgctcattgtcatggaattttgatcacatcttactcctacattcgattgat

SEQ ID NO: 539683 - DNA, 83 bp, Homo sapiens
attttcatgaaacaaccccaaataaaggaagtggaaccacttcaggatgttgacaatgcgtctctggcacgtcttgaccttga

SEQ ID NO: 539684 - DNA, 80 bp, Homo sapiens
aggcagccggtgccctgctcaatgggcctccacagttcagcaccgccccagaaatcaagagtcttgctctgtctcccagg

SEQ ID NO: 539685 - DNA, 75 bp, Homo sapiens
cacatggcccaggcagaccttgcagtcaaatgccggtggtggtgtgcacattgagccccggtatagacagttccc

SEQ ID NO: 539686 - DNA, 82 bp, Homo sapiens
gctagggaagatcgcaccgcggacgcccgctgagcttggcgcacgggccgaccagttccagggtctccctccactgctgtag

SEQ ID NO: 539687 - DNA, 51 bp, Homo sapiens
atcaaatgtgagcctatggatcaagggagtgcatccgccccaacccttttc

SEQ ID NO: 539688 - DNA, 126 bp, Homo sapiens
gttctctgaagatgattacacggcattaatctcccaaaatattctagaaggggaaaagctacttcaagcctccctgcccttcgctatcctgacgctggtgaacgccccgtacaagcgaggatttta

SEQ ID NO: 539689 - DNA, 82 bp, Homo sapiens
ggagatgggcagacggattcatttagagctgcggaacaggacgccctctgatgcttgggcactgtttaaaggaaagttccga

SEQ ID NO: 539690 - DNA, 100 bp, Homo sapiens
tggggcttgtaatccccccacagaccctggaagaaagcccctctcacacaggtacaggtttgcagattccgccagcagcacagcaagctctacagatgag

SEQ ID NO: 539691 - DNA, 98 bp, Homo sapiens
tgcgtcctcggggccactgcactgggtgattcacgtgtgcccaggccctgaggtgggccggacctgggagtggcaggcatcatgacggtgatgtcagc

SEQ ID NO: 539692 - DNA, 82 bp, Homo sapiens
cgatgtttcccttggtcaaaagcgcactaaatcgtctccaaggttcttaaaggtggacaggaagcacccacaaaacccaaag

SEQ ID NO: 539693 - DNA, 75 bp, Homo sapiens
cagagtgatgggaaacgcgtgagccaggccgagaggcagagaaagctgatggatttgtcaacctgcctgatttca

SEQ ID NO: 539694 - DNA, 100 bp, Homo sapiens
ctgactgttgtgaccttgagcgagtaaacataacggtcccacgtgagcggcaggatgggtttccagatttccaggattctgtgcaaacactcttccagca

SEQ ID NO: 539695 - DNA, 75 bp, Homo sapiens
ggcacgattctccctctcctagaggcggacacagcattgttggttttgccatgtactattttacctatgacccgt

SEQ ID NO: 539696 - DNA, 75 bp, Homo sapiens
ttctcaaggaaccacacatgtattaagatttgctgcagaaccttggcctgaaaatgctacattatatcagcaatt

SEQ ID NO: 539697 - DNA, 101 bp, Homo sapiens
ctgttctgcagatcagaaagaaggggttcctggtcatacaccagtactaccaaggacagcttttttcctgcaaggtggggcaagtccgtgggcatcatgtt

SEQ ID NO: 539698 - DNA, 76 bp, Homo sapiens
cctggctgggcctgcccaacaacgccgagagagtcctccttaccacacagggctaccacatactgttgattgtgat

SEQ ID NO: 539699 - DNA, 76 bp, Homo sapiens
ttattggagcgcagactgatggcgcaaaggggcagagcggcttgggtaaatccaccttaatcaacaccctcttcaa

SEQ ID NO: 539700 - DNA, 75 bp, Homo sapiens
agcggagttgtgttcttccccagagtgaagatagtccaagtcctaagagacagcgcctctctcattcagtctttg

SEQ ID NO: 539701 - DNA, 100 bp, Homo sapiens
ctactgcaaatagtatcatggcatcttatcagcaacagaagacttcggttcctgttcttgggcatcgagcgcctcaaacgaaagaaccagcccagggagc

SEQ ID NO: 539702 - DNA, 101 bp, Homo sapiens
gtaggcacccgagcagcgccagcggccgagcgggcggcttcctggcctgggcgctccggtggcggcggagaaccgggggcggctggcagacaagaggacag

SEQ ID NO: 539703 - DNA, 75 bp, Homo sapiens
ttcccagccatggcagattcctccgggcagcaggcaaacggggattcagcgtccgatcctttggaacagggactc

SEQ ID NO: 539704 - DNA, 83 bp, Homo sapiens
tctcgctcggctgcgggaaatcgggctgaagcgactgagtccgcgatggagacttcccaagtaagaagcggaagaggagccgc

SEQ ID NO: 539705 - DNA, 75 bp, Homo sapiens
gaacgtgctgcagcagagcgcggcgcagaagaatggcttcctttgggtggaagaggaaaattggtgagaaggtct

SEQ ID NO: 539706 - DNA, 100 bp, Homo sapiens
aaaaacatgagtcaatatgtattgtggcattcaaatcctagcactctgggagagggtcctaaaaaggtggggacgctgtggcgagaagccgggcttagct

SEQ ID NO: 539707 - DNA, 78 bp, Homo sapiens
agaggcgaagggctggtgggcgatgggcccgtggacatgcgcacctcacacagtttcattcattggctcccatgtact

SEQ ID NO: 539708 - DNA, 75 bp, Homo sapiens
cggaggaaggcggcgcaccccgagaggtgtgaccatgaagctcatggatgaggtcgccgggatcgtggctgcacg

SEQ ID NO: 539709 - DNA, 51 bp, Homo sapiens
cgccaggctctctggaggccaggagatggaactttatattgctgttggaat

SEQ ID NO: 539710 - DNA, 99 bp, Homo sapiens
caaaaaggaaaaaaaaatgacctaaacttttgagatagatttggctctaattctttcagtgacctgtatagttcctatgtaatcttttacttcctgctg

SEQ ID NO: 539711 - DNA, 88 bp, Homo sapiens
aaatgattttcctgttgcaatgcaggtacttaaacttcacccttgtttagcccctattaaggttgctttggatgtaggaagaggcccc

SEQ ID NO: 539712 - DNA, 99 bp, Homo sapiens
aggtcctggcgatcagcaccaagaacccactgcaggcctgtatgaactcaatctcaccaccgatagccctgccaccacgggagcggtggtgaccatctc

SEQ ID NO: 539713 - DNA, 73 bp, Homo sapiens
gaacggagccctctgccggctgctcctgctgaccctcgcggctgaaggtgatgtggccgccctcaaccgacgc

SEQ ID NO: 539714 - DNA, 50 bp, Homo sapiens
ttcctacacatgactatcagaagggtgtctcaaaggctgttgagcacatc

SEQ ID NO: 539715 - DNA, 87 bp, Homo sapiens
atggaggggattttgtcagcttgtcgtcaagctcggtcaaggagtgtgatgactggcgagcagatggctgccttccatccatcgtcc

SEQ ID NO: 539716 - DNA, 100 bp, Homo sapiens
aactcaagttggttttgcaggaggctatacttcaaatcctacttataaagaagtctgctcaggtgaagctttgttctaagaatatttgtttcatctagtt

SEQ ID NO: 539717 - DNA, 98 bp, Homo sapiens
agcgcccagcacctggtgcaagcaggatacaatgtctctttgctatatgaccttgaaaatcttccggcatccaaggattccattgtgcatcaagctgg

SEQ ID NO: 539718 - DNA, 50 bp, Homo sapiens
aatccatgttgagctgagctagtgtggaaccactttgacagcggttcgtg

SEQ ID NO: 539719 - DNA, 90 bp, Homo sapiens
ggccggccgctcctgccgtgcaaatgttcctcagcagcacatagcacctatcgggtaattgaacggcgcattcggcaagagctgcctttc

SEQ ID NO: 539720 - DNA, 96 bp, Homo sapiens
ctgaagttcacgactactagaaggggaggggagtggaaaggctctcagtgaaaaagcaaagtgcctgcattcgtgaggatgattgctcccgagggc

SEQ ID NO: 539721 - DNA, 100 bp, Homo sapiens
ctggaggcctctgttgtaggcaagatcaacaaaggtgtctactatgaaccatcctgtactcagaatgtgaatcatggtgtacttgtggttggctatggtg

SEQ ID NO: 539722 - DNA, 100 bp, Homo sapiens
gaatcgtcactgaggttgcagttggcgtgaagggtcctgatgaagaagctgttgtggatcttggcaaaactagctcaactgtgaacaccaagtttgaaaa

SEQ ID NO: 539723 - DNA, 90 bp, Homo sapiens
cctcttccatcatgagttcctgaggcagtccgatggggctactttattccagaacaatcacaggctgccactccccaccaccgtccccag

SEQ ID NO: 539724 - DNA, 105 bp, Homo sapiens
tacagagatgtgatgttggagaactatagcaatctggttttcttgggtggaaccgtcccaaaatgtcccttgctcagaagaaggatcgggtagctcaaaagaagg

SEQ ID NO: 539725 - DNA, 98 bp, Homo sapiens
cttttcttgacaatggaccaaagacgatcaatcaaattcgtcaagatgcagtaaaaatttctgtacgagcgacatgagcagtccaagcaggacctcaa

SEQ ID NO: 539726 - DNA, 101 bp, Homo sapiens
tgaagccgcctctgtattacttaccaggcacaggtaacagcatcatggtcatgaaaatgaatggatccctccatcaagaattgaagattgaggagaacttc

SEQ ID NO: 539727 - DNA, 97 bp, Homo sapiens
gaaggaacttggttccccctccctcagcttccgccccaaaagtgacagctggagtatcagccttggaagtatatacgccaaaagaaatcttcgtggc

SEQ ID NO: 539728 - DNA, 50 bp, Homo sapiens
gagatgaattgccattcttgcatgaggtggcttctggcacagcagcttaa

SEQ ID NO: 539729 - DNA, 83 bp, Homo sapiens
ctcgatcttgggacccaccgctgccctcagctccgagtccagggcgagatcccagcatggtgagtgcctacatgtacccagca

SEQ ID NO: 539730 - DNA, 90 bp, Homo sapiens
ctgaaaaaatgcagaccgccggggcattattcatttctccagctctgcaggtggcgaaagcagtgaacaatgccactgcacagtcgctgg

SEQ ID NO: 539731 - DNA, 50 bp, Homo sapiens
gcggcttgtggggccgaggacagacacagtgaattactggaactgaaacg

SEQ ID NO: 539732 - DNA, 74 bp, Homo sapiens
cattaagacttcccagcattcctacagatataaatagggaacaacctatcttcagcactcgagctcatgtcttc

SEQ ID NO: 539733 - DNA, 75 bp, Homo sapiens
gtgcaatcagaattgcatgcattttcagcattcagattacagtagaatgcacattccttgactatataatgggag

SEQ ID NO: 539734 - DNA, 50 bp, Homo sapiens
cagaacattgcacgatgcctcctggggatgccaacagacagatcagcgac

SEQ ID NO: 539735 - DNA, 82 bp, Homo sapiens
ggcaacttacccgagaacgtgcgggaagagaagatcatcgagcatttcaaacggttcattttccagacactgaaagagcaga

SEQ ID NO: 539736 - DNA, 100 bp, Homo sapiens
gcccccggtgcaagaggcgcaaacaagccaatcccaggaggaaaaacggcactttcccacacaggatggagccgggccaccctcacagctcctgccctgc

SEQ ID NO: 539737 - DNA, 91 bp, Homo sapiens
ctcgccggccgagggtggccctaggggcagcgagcaagacagcaagcagggactggtgattgcagctggaagtgcccatgaccgagctggc

SEQ ID NO: 539738 - DNA, 82 bp, Homo sapiens
ggatatgaagatcatgtcccaagatgccatgatgatcacggatgaggtcaaggttgaaccatgattccggtgacagagctcc

SEQ ID NO: 539739 - DNA, 88 bp, Homo sapiens
tgttgtggaccctagcacagaggcccacgacaatgatgagccgggcaccaacaacagccgtctgctcttcaacctgctgcctggcccc

SEQ ID NO: 539740 - DNA, 97 bp, Homo sapiens
tgtttctgctgaccgcgggccctgccctgggctggaacgaccctgattcacaatgacatcctttcaagaagtcccattgcagacttccaactttgcc

SEQ ID NO: 539741 - DNA, 76 bp, Homo sapiens
gtttcaaggagtttgggaaaaaccgcgaagtcatggggctctgtcgggaagctcttgcaagcttaggatatgaaaa

SEQ ID NO: 539742 - DNA, 74 bp, Homo sapiens
aaaaaatgcagtcaaagaagatggatccacctgatgagagttcagttgattccaccatctctagttcttcttcc

SEQ ID NO: 539743 - DNA, 98 bp, Homo sapiens
acggagcctgacctcttacttcctgtgggtgaccttgaggaaccctgggagctcaggaaggaaggagcgcccagaagcagggacagggagctggttgg

SEQ ID NO: 539744 - DNA, 75 bp, Homo sapiens
gcgtcttccgtgggcaacgtggccgacagcacagatcgtaaagctgaaaattgaaatcatgaaagtagacaggac

SEQ ID NO: 539745 - DNA, 101 bp, Homo sapiens
tggaggctccgggcgcggggaagtcatgctcgcttcacggaggcaatagctagccggcatagaatgtcaagctaaccaggcgtccgctacttcagaagagt

SEQ ID NO: 539746 - DNA, 83 bp, Homo sapiens
ccggagtttgacgaagaggtggtttttgaggttctgaaaaagacttcaagaaactgactaatcgcgatggctgcccctgacgg

SEQ ID NO: 539747 - DNA, 90 bp, Homo sapiens
ctcgtcaagcagctgtcggccaagctcatcgccaacgggcgccctgcgtccggcagaggaggcgagcatcccgctcaggtgatgaggaac

SEQ ID NO: 539748 - DNA, 100 bp, Homo sapiens
cgacggctctcctctgactgcagcgtcactcagcaacggcagcctttaacagttgagcacatgtatgaagacatcagtcaggatcatgtgaagaaaacag

SEQ ID NO: 539749 - DNA, 76 bp, Homo sapiens
agcaggacccgaggccaggagccaggggcccagaagcatccagcacgtgtatggtgcccagcaccccccctttgat

SEQ ID NO: 539750 - DNA, 100 bp, Homo sapiens
cagatcctgccccgtggccgcggccgtctcgtaggatgaaacaggcgcctatttaatcgacagagaccccacctactttgggcctgtgctgaactacctg

SEQ ID NO: 539751 - DNA, 75 bp, Homo sapiens
acgtccaatctgagcgtgctgcggacggcgctgcggtacatccagggctcttccgtgggcggcggcttcgcgggc

SEQ ID NO: 539752 - DNA, 75 bp, Homo sapiens
gttcaggcaggaaaacgtggatgattactacgacaccggcgaggaacttggcagacaagcatgagacgaagctga

SEQ ID NO: 539753 - DNA, 95 bp, Homo sapiens
gccctgaagaaaagggaaaacttgctgcggttgctcaagattcccctcttcccgcggcctcgccatggcgacccacggacagacttgcgcgcgtc

SEQ ID NO: 539754 - DNA, 75 bp, Homo sapiens
aaactccctaaaatctccgcagctctggttcctgttgcggccgatttgaatataacctgccgctttgcaggtgta

SEQ ID NO: 539755 - DNA, 100 bp, Homo sapiens
ccatgatttcgatgatgatgatcctgaggttttgcacactagggaccaagaagccctcggggacactgctgagaaaagactgccgaagggaagaccagcg

SEQ ID NO: 539756 - DNA, 98 bp, Homo sapiens
tacaacgtgctggagagaccccgcggctgggcgttcatctaccacgctttcgtaccccctggttgtggaatacgaggcattgctggtacaactacccc

SEQ ID NO: 539757 - DNA, 99 bp, Homo sapiens
ataccacgaggatccatctcgtctgctccaggggcaggctggttgtacatcctggagacctgaagaattctgttgaagtcgcactgaacaagttgctgg

SEQ ID NO: 539758 - DNA, 101 bp, Homo sapiens
ccgccccgccgcggccatggaggacgagcggaaaaacggagcctacggtcatcatcagatttgaaatatttaaagtggatacaaaactatttcagcaatgc

SEQ ID NO: 539759 - DNA, 100 bp, Homo sapiens
acatgtggaaggtgcgcgagctggtggacaaagcgccctgacccacgtgtcagaggactgtttccctttgctagatggctgcagaaagaacaggcagaaa

SEQ ID NO: 539760 - DNA, 100 bp, Homo sapiens
cggagagcagccaaagcgcccaatgtggtgctggtcgtgagcgactccttcgccattgaacacccagttcgaaccaatcagattccacgtcagattcctg

SEQ ID NO: 539761 - DNA, 48 bp, Homo sapiens
gaatgtgctttagaagttaaaaaggatgctcacaactgtattcctgag

SEQ ID NO: 539762 - DNA, 101 bp, Homo sapiens
ggctggttcttgggcgttcccgacccttagctacccacgatgtttcagacagtccccgacacgtcgtcttacatcaaggctggagtgcagtggcacgatct

SEQ ID NO: 539763 - DNA, 100 bp, Homo sapiens
tcctttcttcatcccaactgggcatcacataggttgttgatcattatgaaaatcctagaaacgtggggtcccttgacaagacatctaaaaatgttggaac

SEQ ID NO: 539764 - DNA, 98 bp, Homo sapiens
gcagcccctgcatctcagtcctgacatcgctgtccctggagcatcctccgctggagctggagcttgacaggtgctggagaatctggtaaaagcaccat

SEQ ID NO: 539765 - DNA, 75 bp, Homo sapiens
aagatatagataagaatgctgatggtttcattgatctagaagagtatattgaaaagtcctccatacattttctcc

SEQ ID NO: 539766 - DNA, 80 bp, Homo sapiens
catgagggtccccgctcagctcctggggctcctgctgctctggctcccaggttccagcaacagatagaaatgctttaagt

SEQ ID NO: 539767 - DNA, 100 bp, Homo sapiens
gaacccacaggtgcatttcacagcactctgggcgaaaattggatgtgaaaatgaagccagaccgagcattgacaagatatctaaagtcacctctcctgtg

SEQ ID NO: 539768 - DNA, 83 bp, Homo sapiens
ccgcctgcagcgattgcttcagcccaagttactgaaggagcgcatgaacctgaaggtgcccatctacttctccacggggctga

SEQ ID NO: 539769 - DNA, 83 bp, Homo sapiens
ctgtgggcacagacaaggagctcagtgacctcctggacttcagcatggtgtttgagaagtcccccctgcgggtgaagaacttc

SEQ ID NO: 539770 - DNA, 74 bp, Homo sapiens
ctcagcctccagagtagctggaaatacagaattctagcaaattggttaaaagtcaagttcatgggagatgaagg

SEQ ID NO: 539771 - DNA, 82 bp, Homo sapiens
ttcacctttgattccagtgtgaactgtcaatcataaggagttgatccccctcatattgtgtacagcatgtctacatcctgag

SEQ ID NO: 539772 - DNA, 73 bp, Homo sapiens
tatcagatgcctcgcagagcaccaggcccaccgtgaaagaccatgtctggacagaagtctattctccttctca

SEQ ID NO: 539773 - DNA, 50 bp, Homo sapiens
gcgagcggttccttgtgggctagatattgaaatggattccaggcgtgtgc

SEQ ID NO: 539774 - DNA, 100 bp, Homo sapiens
gccggttgccgggcgcgggcgagaaaggtttccctaggacttctgcatgcccatgccacacatatcctgtggcccccagagcgctggcagaaattggaat

SEQ ID NO: 539775 - DNA, 100 bp, Homo sapiens
gcaggagggaagtgagaagcccaactaaagccccacatttgcagctcattgaaggaaaggtggtggtcaccaatacaattccacatgaagtccagaagct

SEQ ID NO: 539776 - DNA, 95 bp, Homo sapiens
aaacacagatccagagtgttactggcttacaaattggattgaggcaatgagaagcacgaccttcatgttacctcccagcagggcagcagtgaacc

SEQ ID NO: 539777 - DNA, 100 bp, Homo sapiens
ccaactcacccaaggtctcagagcagctgctcaagcttgatgaacaagggatcccatacagtggtccacagaccaagtcctgcattgggtggtttgggta

SEQ ID NO: 539778 - DNA, 100 bp, Homo sapiens
accaggcgtccaggacgccgctgaccaccctcaacacggatatcagcatcctgtccttgcagacggagtctcacactgtcactaggctggagtgtcgtgg

SEQ ID NO: 539779 - DNA, 75 bp, Homo sapiens
gtcatattccacccattactaaggagagcgaagaggaactttactcctcctgtcgccagctgaggaggcggcaag

SEQ ID NO: 539780 - DNA, 100 bp, Homo sapiens
ccacgctcagcgccgagggcgagatcgtgcagaaatccagatggagacgtgagcccctggtgctatgtggcagagcacgaggatggtgtctactggaagt

SEQ ID NO: 539781 - DNA, 100 bp, Homo sapiens
gccagttaattactttgaatgtcacgagaagagaatgccttctagatgcaaaatcacctccaaaccagaccacttttcttgacttgcctgttttggccat

SEQ ID NO: 539782 - DNA, 75 bp, Homo sapiens
ggggaagacagctcccacaagtgccagtgagaagcggcagtatagaacaagtgtgtttcctgtaacaaatcgttc

SEQ ID NO: 539783 - DNA, 119 bp, Homo sapiens
agaagctggagctgagactgaagtcgcccgtgggggctgagcccgccgtctacccgtggccgctgccggtctacggtttccaggcctgaggtgcccgccctggccccaggagaatgaac

SEQ ID NO: 539784 - DNA, 82 bp, Homo sapiens
tggcatcctctgacatcactccagcagaagaaagggaaggaacacgctgcattactgcgtgcgaatggtttccaggtggata

SEQ ID NO: 539785 - DNA, 74 bp, Homo sapiens
gcaagaaccagagcatggggaagacactattgctaaagtcaaaggacctgagggcactcgctttgctcctgtca

SEQ ID NO: 539786 - DNA, 98 bp, Homo sapiens
tccaaaggaaaatgcatcttctaagtttttggcaccatatactactttttccagaattcatacaaagagtgtgtgtgcagtggcctcagggatccgga

SEQ ID NO: 539787 - DNA, 100 bp, Homo sapiens
attccaagtaactcttatttggcaaaatccatgtttggtgaccagagctgtatatattgatattctcttcctattgacttgctgcctcaacagatctgca

SEQ ID NO: 539788 - DNA, 75 bp, Homo sapiens
ctgcacctggccaggctgcggctggagccttatgccagcctggaccatcttggaggcagtgtaggatcatggaag

SEQ ID NO: 539789 - DNA, 128 bp, Homo sapiens
ccaaatcctccttcagcctcctggcgcccatccgcagcaaggacgtccgcagcaggtgagaagccctaccactgcaactgggacggctgcggctggaagtttgcgcgctcagacgagctcacgcgcca

SEQ ID NO: 539790 - DNA, 100 bp, Homo sapiens
tgcaggcctgcaggatttggtttcagcatgtccttctctgaatgatgaatacttttactactgtgacaacattaacggagttccgattctgaagaggcat

SEQ ID NO: 539791 - DNA, 100 bp, Homo sapiens
gtagagatggcttctgccggaaaaggaggacagttctggacacagctgggcaggaggaattcagcgccatgcgggagcaatacatgcgcacgggggatgg

SEQ ID NO: 539792 - DNA, 100 bp, Homo sapiens
atttcctggcctttaaaaatgacatcagtttctggaagaagaagaagagcatgatcggcatgtccaccaaggcagggccttgggtgtctccgtgactgac

SEQ ID NO: 539793 - DNA, 88 bp, Homo sapiens
agcatggagcagttcatcatcagccagctaaccagaacacatgatgttttaaagaatgcaaggactaacctagagttaaggaaactac

SEQ ID NO: 539794 - DNA, 101 bp, Homo sapiens
ggattggaggtgtcagtgttaaaggaacctctacaacgaaggtgaagccacggaagataaggggtagaaatatttctgtcatggctcattcaaagactagg

SEQ ID NO: 539795 - DNA, 60 bp, Homo sapiens
gaattataggaacctggtctccctgggaaatgctgtgattataaagccttctgaactgag

SEQ ID NO: 539796 - DNA, 80 bp, Homo sapiens
ggatcaacatgccaattgagtgaaaaatttatcaaagctggccccctcctccccgaagaataagctaccatggcagctgt

SEQ ID NO: 539797 - DNA, 83 bp, Homo sapiens
cgcgtctctctgctgcggcgcggggaccgctgtgctctcgtcactcacctgtggcgcccttggccgctcagtcaaggctctga

SEQ ID NO: 539798 - DNA, 82 bp, Homo sapiens
cctacaacagtttggcgtgcaacatggggcttgagaaaggtgccctctggtggtcagaagatgctgtgctgtctcgttagga

SEQ ID NO: 539799 - DNA, 50 bp, Homo sapiens
agcagtagcggcagccctgaggacggtaagaatgattgatgttggctgat

SEQ ID NO: 539800 - DNA, 82 bp, Homo sapiens
tgaagacagagatttattcgtaatgcgactcaaagctgcacggcagtctgtttatgagggcacaggagctgcaagttttgac

SEQ ID NO: 539801 - DNA, 101 bp, Homo sapiens
ggaagagtggctggaggaattcagtttcttgggggttataaacaacttgtgaaatgagtgatttggaagatgatgagacaccccagctttctgcccatgcc

SEQ ID NO: 539802 - DNA, 98 bp, Homo sapiens
ttaagtagctacaggggaaaatattctgagaacaactcgatcgtgtcgaagaaggcatgaaccatatcaaccaagacatgaaggaggctgagaaaaat

SEQ ID NO: 539803 - DNA, 90 bp, Homo sapiens
caaccgcgaggctgcaaagggtgtgaacccggaagcgatttcatagccacgcattccaggatgccttgaagattttctgtaggataaaag

SEQ ID NO: 539804 - DNA, 90 bp, Homo sapiens
ttcaatgacaacagcctcagtatggaggccttccagcaccgttctgtgtcctggtcgcagttcaacaagtgcacagccagagaacaacac

SEQ ID NO: 539805 - DNA, 83 bp, Homo sapiens
ttttgcagatcttcaacaagaggacccaggagaaattcgccctcaaagttaaacccatccagagtaatggctgcggccttacc

SEQ ID NO: 539806 - DNA, 96 bp, Homo sapiens
gccggggaggcagcgcgggatcccagcctcaggcgtgcgcggacggtgtgcgggagctggcagacctgaagcatgtgcatggcaagctgaagaagc

SEQ ID NO: 539807 - DNA, 83 bp, Homo sapiens
cccggagcctggaggagctgctgctggacgccaaccagctccgcgagctgcccgaggtcagcccaaggccaaccccactgtca

SEQ ID NO: 539808 - DNA, 100 bp, Homo sapiens
gctggaggaatgcatcacatctgcatcgaggttggcattgtgggaagaaccggagctggaaaaagttccctcatctcagccctttttagattgtcagaac

SEQ ID NO: 539809 - DNA, 96 bp, Homo sapiens
aaattatttatccaacagctcctcccagagagacacatctcaattcaaaggcagcttgctgatctagagaatttagcttttgtaactgatggaaat

SEQ ID NO: 539810 - DNA, 98 bp, Homo sapiens
cagagatcaaggagaaggaagaaatgaggaagatcattgggcgatacggtctcactgggaaacaacaggactttttttatgaagacatggagtccttg

SEQ ID NO: 539811 - DNA, 75 bp, Homo sapiens
caagatctcagagaaggaggaggtgaccacgcgcgagatccgggtcttcctccagcagctcaagggccgcgtagc

SEQ ID NO: 539812 - DNA, 71 bp, Homo sapiens
ggatcatcgcttggtaaacgaggtcgaatttacaagcactctcagcaacctttgattacctatgaaaaata

SEQ ID NO: 539813 - DNA, 98 bp, Homo sapiens
aaagttcctcacagtttaggtctcaaggcaagcctattgagttaacacctctgccgctgctaaaagcatgatgccttcttctgtagagtgggcgcttt

SEQ ID NO: 539814 - DNA, 100 bp, Homo sapiens
aaaatggcaacatggcaggcatctcagaccaaaggatcgccatcgacctggtctacgaccccttccgctttgacccagagaacagcaaggggaggtcacc

SEQ ID NO: 539815 - DNA, 75 bp, Homo sapiens
ttcaggaccaaaattgtggaaaagtcactctggtcacacagcggcagtgataaagagcacagggatgtggagaga

SEQ ID NO: 539816 - DNA, 101 bp, Homo sapiens
cgagcagaactacggcgagcggtctgaaccggacggcttttctcatttccacttgtacgtgtgcgctgcttttctcgtgagatggaggaaggaaatactag

SEQ ID NO: 539817 - DNA, 90 bp, Homo sapiens
aacttgtacagagatgtgatgttggagaactatagcaatctggttttcttggtactatactggcaattgctggagaagattttgcaattg

SEQ ID NO: 539818 - DNA, 97 bp, Homo sapiens
gctgcctctgcatacaaggccctgtttgctgggccaccagtcactgcacagggcgtccccctggataccagtaaactgtccactgaccagcggttac

SEQ ID NO: 539819 - DNA, 100 bp, Homo sapiens
ggaagctggtaggcacgggcggctccgcagtgaccggactcgggggagacgcccactattgcttggttctacttcctttatcccgattggccgtcggact

SEQ ID NO: 539820 - DNA, 75 bp, Homo sapiens
ccggcgccacctggagagaggccgcgtcctgggcagagatgccttattggaggaactggaacgctccacccttca

SEQ ID NO: 539821 - DNA, 109 bp, Homo sapiens
cagctacaaccaactagtggagaagatcatctcttgtaaacagtcagacaatagtgagctggttagtgaagagcataaccttcggtggcaggacaaatcaggccagcac

SEQ ID NO: 539822 - DNA, 75 bp, Homo sapiens
cctaccacctagaactggattgtgcggagcctcctcaacaagcccaagagtgagatgaccccagaggagctgcag

SEQ ID NO: 539823 - DNA, 100 bp, Homo sapiens
agcgcttgcagacgcactgctacaaggtccatgaccgcttggagaaccccctgcctgagcgtccccgggaaaaagaagaaccagtggttcgagagacagg

SEQ ID NO: 539824 - DNA, 75 bp, Homo sapiens
ggccatcttcggaccccccaacaccctctacgaaggcggctacttcaaggatattagaaatggctactccccagt

SEQ ID NO: 539825 - DNA, 90 bp, Homo sapiens
aagagaacttgtgctgtgaggaactttcttccaagataatgtccagtttggaagatgaaggcttttctagcctattgtgaagaatggcag

SEQ ID NO: 539826 - DNA, 80 bp, Homo sapiens
attccactatgacaaggagaaactccgagaagcttattctgctctctttgctgaactcggttatttcacagacactgatg

SEQ ID NO: 539827 - DNA, 100 bp, Homo sapiens
ttggagttcttacaacatggcagacattgacaaactggggactccactgtgagaccacttacaccaaggatggattttggacatacattactcagattgc

SEQ ID NO: 539828 - DNA, 74 bp, Homo sapiens
agcagttcagaagagccaaggaataaacatgcaatgaacccaaaagggtaattctgttccacaggatatctgct

SEQ ID NO: 539829 - DNA, 75 bp, Homo sapiens
gctgtggtatggaagatcaaacaaacttgttgggcttctcgacggagagaggtggaaaaggattattcatacctg

SEQ ID NO: 539830 - DNA, 74 bp, Homo sapiens
cctcttggggaaggctgtgtgggccagcccagccatggcaaactcagctttcaccagacccaggtgtcccagcg

SEQ ID NO: 539831 - DNA, 83 bp, Homo sapiens
ctcgcggaccaccctgctccgaaaactaagtgtggagatgtactttcctcagaatgactcttggattggtttggcacccctaa

SEQ ID NO: 539832 - DNA, 75 bp, Homo sapiens
gcacaggcaggaggcatggccaagggactgttgacattcagggatgtggccatagaattctctcgggaggagtgg

SEQ ID NO: 539833 - DNA, 75 bp, Homo sapiens
ccgtcccgtccgacagccaggcccgggagaaatggggtcgaggatttggtcttttgggttccatttttggaaagg

SEQ ID NO: 539834 - DNA, 74 bp, Homo sapiens
aggagctcggggactcccccaaagacaaggtggattttcaagacacgaatgctcggagtctggcagaaaggaag

SEQ ID NO: 539835 - DNA, 100 bp, Homo sapiens
actacaagagaggggtgagccagcagttctccctgccctccttcaagattgacttctcggaatggaaggatgacgagagtttatgtggccgaggcagaca

SEQ ID NO: 539836 - DNA, 83 bp, Homo sapiens
cacagttccaggctacatgcaggacttggaggtggagcaggccctgactccagcacttctcagaacttctggatgagttttcc

SEQ ID NO: 539837 - DNA, 80 bp, Homo sapiens
tgatacaccttttccacagggaattgagttgatcagtacaatggaacatgaattttcaataaaggaacgtggatttgaag

SEQ ID NO: 539838 - DNA, 75 bp, Homo sapiens
ggagagctgtgttctctgcagattctaagttcagccgtctgtatatctccccagatacctgaaactgaccacctg

SEQ ID NO: 539839 - DNA, 100 bp, Homo sapiens
gcacacgggctcagaaggccagggcgacagccgggcacgatgggaccagttactctccacaagaaaattcacacaaccacagtgctcttcatagttcaaa

SEQ ID NO: 539840 - DNA, 90 bp, Homo sapiens
tccgtatcagatccgccgacgactgcaagcagtttcgggaggagttcaacggcaccattgtctcctgtgcgggagcacacttgtccctgt

SEQ ID NO: 539841 - DNA, 100 bp, Homo sapiens
ccgcctccgtcacaaggagcccggcagtggcagcggcggcggtgtttactgggtggactctcagcagaagcgggttcgatacaagaggctgttttcctag

SEQ ID NO: 539842 - DNA, 100 bp, Homo sapiens
gtttcgacacacctcctttaataaagggattaaaatatccaggcatgccaaactttgcgccagatgaaccaggaaaaatcttcttgatggatctgaatga

SEQ ID NO: 539843 - DNA, 100 bp, Homo sapiens
ggatcactactcttggaatcaaagataaatccaaatactgcatatcagaaacaacaggcaccagttagaagacaaatgaaagctaagcaactcagtgcac

SEQ ID NO: 539844 - DNA, 80 bp, Homo sapiens
ataaaacagttgatagcaaagaagataaagttgacagcagaggcagaggacccagatgatgtggtaccagttggccaaag

SEQ ID NO: 539845 - DNA, 100 bp, Homo sapiens
ggcccgggaatcgccgccgccgccgccgcagagctgcagctcggggccgagggttccagcaacagatagaaatgctttaagttcactctggggaaagctg

SEQ ID NO: 539846 - DNA, 97 bp, Homo sapiens
ggaagagcagtacttccagttcctggccaagtttgagatcgccctgcccgtcgccaatgacaggctgctttgctggctctgcaagaaaatggactag

SEQ ID NO: 539847 - DNA, 96 bp, Homo sapiens
ttcagtagatacattgcctacattgaatcccaaggagctcatcgggcagggctagccaagaatgagtccctggaacgccagatgcgtgaaatggaa

SEQ ID NO: 539848 - DNA, 75 bp, Homo sapiens
ggaaacaatggcatttacagaaagagtcaacagcagtggcaacaggtactccaaagattcaggtttactcacgtc

SEQ ID NO: 539849 - DNA, 101 bp, Homo sapiens
gcacagcgccttgttccagcagggcctgatccagattctttcttgtggagaagttattcatgtgaagatccttggaattttggctcttattgatgaaggtg

SEQ ID NO: 539850 - DNA, 100 bp, Homo sapiens
aagagggtggctaatgattaaggagccagcattcgaacgttcactccattttattttctggtggagccggtggatacactctcagttagaggctcttctg

SEQ ID NO: 539851 - DNA, 90 bp, Homo sapiens
cgatttaaagctgagctgcgaggaaaatggcggcgggagaccattcccggagtaataaatccagttggagcagcagtgatgagaagaggg

SEQ ID NO: 539852 - DNA, 88 bp, Homo sapiens
cccgccgggtcaccttcgaggcggacgagaatgagaacatcaccgtggtgaagggcatccggatgccttcgtgaacagccaggaatgg

SEQ ID NO: 539853 - DNA, 78 bp, Homo sapiens
gtgcctggaaccagatgccctgtccgtcggcgctggtgtttggtgcacctcgatttggaggaagtagggcagggccct

SEQ ID NO: 539854 - DNA, 73 bp, Homo sapiens
aggcaaatattattgcacttcttgccacaatgttacagaggctaaagaattacctccaaagccattgtcaaga

SEQ ID NO: 539855 - DNA, 101 bp, Homo sapiens
gttcatcgagtttgcaaacacagtggcggagaaggtggaccggctgcgctcctggcagaaggctgtcttctactgcggcaaataatttcccgcatcttcac

SEQ ID NO: 539856 - DNA, 98 bp, Homo sapiens
ctgacagccacaaagtgaaagggagtgaggcggcgtggacgagtaagctgatgaacttattagtcctaaagacattgatcctgtccagcgctatgtcc

SEQ ID NO: 539857 - DNA, 90 bp, Homo sapiens
gacttgggcccagtttatggcttccagtggaggcattttggggcagaatacagagatatggaatcaggagttgtaagacgttcatcgccg

SEQ ID NO: 539858 - DNA, 96 bp, Homo sapiens
ggaggaacgccgagcagtacaaggaccaggtgctgctgcatgaggaggcgggtgattctggctttgtcagtctctctcggctgggcccatctctga

SEQ ID NO: 539859 - DNA, 83 bp, Homo sapiens
agctggccgagcaggctgagcgatacgacgttgatattcactgatggactccaaagaatcattaactcctggtagagaagaaa

SEQ ID NO: 539860 - DNA, 80 bp, Homo sapiens
agggaaaacttgctgcggttgctcaaggatcttactcagtgtgttacatgccaagaaaaacacattactgtaaagaagga

SEQ ID NO: 539861 - DNA, 100 bp, Homo sapiens
gagctgtggataacgggaggtgaatttccatgtcaacatagtcctggtaaaataccatgaagattttgaaaaaacaaaggggagaggctttactcccgtc

SEQ ID NO: 539862 - DNA, 51 bp, Homo sapiens
aacacctttacagcatcaaagaatactgaatgctggggcagtgattggaaa

SEQ ID NO: 539863 - DNA, 110 bp, Homo sapiens
tagctgtgctcgcgctactctctctttctggcctggaggctatccagctcccctgcagagcaaaaaaacttgtcggattcgggagaggagcctcggggggaggctgaggc

SEQ ID NO: 539864 - DNA, 74 bp, Homo sapiens
cacggggcgccagctctgcaggagaggcctctgagaaggaacccttgaaacacagccatgacagtgcagatcct

SEQ ID NO: 539865 - DNA, 98 bp, Homo sapiens
gcccccggacctgcaagtgccgcctccctccggaggtgcgcggaggcttggtgtgccagggagttgaccacatttggccatttcccagaagggcccca

SEQ ID NO: 539866 - DNA, 98 bp, Homo sapiens
gaccccctagaagtctagaaatggtattagaaaactactcggatgctccaatgacaccaaaacagattctgcaggtcatagaggcagaaggactaaag

SEQ ID NO: 539867 - DNA, 75 bp, Homo sapiens
ttccaacacagatgtccaagctgccaactggcccgttggaagaagagcggtttggcttccctgcattcagcggca

SEQ ID NO: 539868 - DNA, 100 bp, Homo sapiens
gattattacaaaagagagattctccagtgctagttgccgcagaccaatcaaaggggctgcaggccggccattagaactcagtgatttcaggatggaggag

SEQ ID NO: 539869 - DNA, 97 bp, Homo sapiens
ccgcgccccgcggcatgagccggtgaccaagctcggggccgagcgggaggcagccgtggccgagtttggtgaggattcatcaacctccagtatgatg

SEQ ID NO: 539870 - DNA, 90 bp, Homo sapiens
gagccgcggagccggcgctgagaggggctgcggccggagcgggcggctgagacaaaggcgacggtcctgtccaaaatgcattgctgtctt

SEQ ID NO: 539871 - DNA, 80 bp, Homo sapiens
gtccaacactatgctggtttgagggtgagcccatcactttctgtgaggagagttttgtaaagcaccgctcaagcgtgatg

SEQ ID NO: 539872 - DNA, 82 bp, Homo sapiens
tcgagcactaatatttaagaaagaagatgttaactttcaggacttgcaattgtgaccaaatatattacaaagggctggaaag

SEQ ID NO: 539873 - DNA, 97 bp, Homo sapiens
agccagccactgccctggaggaccagggggagagtttggagtgaagtttaatgttgccaatggaggtgaccaagaatatggcccaggtgaccaaagc

SEQ ID NO: 539874 - DNA, 96 bp, Homo sapiens
gtcagcctctggttcagactgcagtaaccaatctggaatcgatgtgtgaaaccaagttattatctctaaagaaggaagtttatgaaatagaattat

SEQ ID NO: 539875 - DNA, 75 bp, Homo sapiens
cagattccagcctccacatgtacatatggtgatcagcccatgacctaaacctccagacaaaataaaacggaaaat

SEQ ID NO: 539876 - DNA, 99 bp, Homo sapiens
gctccgtcgtggaagcaggactgcgccgcgtcttcctcaagggcgaagctgtgctcaggcccgggctggacgcagagccagagctgtccccagaggagc

SEQ ID NO: 539877 - DNA, 97 bp, Homo sapiens
cctcaggggccatggcgaagcacgagcagatcctggtcctcgatccgcccacagacctcaaattcaaagccaagaaaaccatgtgggaaaggctgac

SEQ ID NO: 539878 - DNA, 98 bp, Homo sapiens
ttctctgtaaacatgaaattggaagctgtagacccctggtctccttttgggatctctcctgctacagttgttaagggataaagtaattcctaataaag

SEQ ID NO: 539879 - DNA, 75 bp, Homo sapiens
acatgctcttgattttatacatcatttcaatgaaggctctgctgccatgaaggtgaagattaagtgctggaacgg

SEQ ID NO: 539880 - DNA, 97 bp, Homo sapiens
ggacggcttgttgcgggcacttctcacccctgagaatctgggacctcaacagatagaagatggtgagatttttgcaagtattaaccagaaggacggt

SEQ ID NO: 539881 - DNA, 100 bp, Homo sapiens
gggaagcatggggatccgggagaagcacccacaaaactagcatcctcctggaggagctcggcttttagcttccacaagaagagactatgagaagatacag

SEQ ID NO: 539882 - DNA, 96 bp, Homo sapiens
cggatattacctgtggagaccctcctgagacgttctgtgcaatgggccgttcccacatttcctgtatgccagggaccgttcgccgttggaactatc

SEQ ID NO: 539883 - DNA, 101 bp, Homo sapiens
ctttatcaaaatcccaggctgtcggaagcaaggtccagagggggcaaacctctttatttaccaccttccacaggaatttggagaccaggacattctgcaga

SEQ ID NO: 539884 - DNA, 98 bp, Homo sapiens
gcggtaggaagccggagacagcagggtgacagcaagagcctcctgatctagcagccaagactccccctgacctttggccatgtaccccaaccctctca

SEQ ID NO: 539885 - DNA, 75 bp, Homo sapiens
ccatagagctgaaggaagagtgcaaagactttgtggacagaaacgggagacccagaagttctgcctcactcccag

SEQ ID NO: 539886 - DNA, 75 bp, Homo sapiens
cggggctggcacactttttggagcacaatcatgatgctgcgattaatagatatagccgtttatcaaaaaaaagag

SEQ ID NO: 539887 - DNA, 74 bp, Homo sapiens
cgggagttcagaaaacagttccccctgcatgaaaaggattttgaagccttaactccaaacttgctggccaggac

SEQ ID NO: 539888 - DNA, 90 bp, Homo sapiens
ctcgtctttgttgtaggtttatctcagcgcctagcagacccagagacatctgtggaatttaagaacagtatggagctcatcagagtatat

SEQ ID NO: 539889 - DNA, 89 bp, Homo sapiens
gctggatcggacacaggcttaaattaccgcatcgtttgcacccctctgttctagggtggaatatcacccttacctcaaccaaagcaaac

SEQ ID NO: 539890 - DNA, 90 bp, Homo sapiens
gacttgacacgatattttttgctaagcagcgttatcgaactccttccagatccagatcaagggatcgtttcagacgtagtgagactcctc

SEQ ID NO: 539891 - DNA, 95 bp, Homo sapiens
aaaatgtcaacaaattgatggagccaatggccaaaggccctgccaagaattcagaaccagaggaggtcatcccatcccggctggatatccgtgtg

SEQ ID NO: 539892 - DNA, 96 bp, Homo sapiens
cagaacagtccatgctgatcttagtaactatgatgaagatggtgcttgctctactacccgaaggatagtgcccgaagttgctgcttggcatagatg

SEQ ID NO: 539893 - DNA, 75 bp, Homo sapiens
gttgttcccgagacgttgttgagtcccctgtgtcctcttctgggcatcgttggcttcacagtatgactgatgatc

SEQ ID NO: 539894 - DNA, 100 bp, Homo sapiens
gaagctgggattggagattccacccaaacttgctggtcactgggaggatggtgattgctcacaccaaagccttggacccctcccagcctgtgacctttgt

SEQ ID NO: 539895 - DNA, 113 bp, Homo sapiens
gcttcctctgctcgcggttagcccgtcagtccctgctctgtgcgcgcctccatctgggccatggatgggttggtcaaagaaaaagtgatgtatgaaaaagaggcaaaacaaca

SEQ ID NO: 539896 - DNA, 100 bp, Homo sapiens
gaccgggcgacgccgcgggaggttctggaaacgccgggagctgcgagtgtccaggacccttgaacatctgtgaagaaatgactattctgcatggaggctt

SEQ ID NO: 539897 - DNA, 57 bp, Homo sapiens
ataggactgcccatccactgagacatagtggccccagccattaaggagaggatgatg

SEQ ID NO: 539898 - DNA, 75 bp, Homo sapiens
ccgcgcccggagcaagacaccctgactgggatgcgcacaggtctcggccggggaagcctacctggtgtacacaga

SEQ ID NO: 539899 - DNA, 75 bp, Homo sapiens
tacatcgatagctatgagaaggacgttgccaagattaaccaggacccccagctggagagagatgcatatgtccag

SEQ ID NO: 539900 - DNA, 82 bp, Homo sapiens
cgcctccccggctggtcgccggaagccttgtgcaaactgcctgtggaggaaccgattgtgtccacagatgaggtcatcttcc

SEQ ID NO: 539901 - DNA, 104 bp, Homo sapiens
ccacaagctgccatggttggattattggagaacatggtgattctagtggtttccaagatggcaactatcaagagtgaacttattaagaatttcgcggaagagga

SEQ ID NO: 539902 - DNA, 75 bp, Homo sapiens
gcgactgtcattcacaaccccctgaaagcgtaagaatgattgatgttggctgatattggagtgctcattcacatg

SEQ ID NO: 539903 - DNA, 50 bp, Homo sapiens
ggagagtacatgagacgatgaagcaaagccctgaaaaccactcgcttgca

SEQ ID NO: 539904 - DNA, 101 bp, Homo sapiens
agaacagaagctcagagaagtgaagcaacttgcccagctatgagagacagagccaggatttgaaaccagctggcaaacttccccagactctgcgaggaaac

SEQ ID NO: 539905 - DNA, 50 bp, Homo sapiens
gaagggctccttcaagcccagcgagcatgagagctggcggtcaccatggc

SEQ ID NO: 539906 - DNA, 50 bp, Homo sapiens
gacatccgagcgaaagagaaagaggtggacccccaaaagtacaagggcat

SEQ ID NO: 539907 - DNA, 100 bp, Homo sapiens
ctcaacttcaaagacgttctcaaggagaaggcagacctggcgttacagtgtttctgccacctctgtacaaaagacaattttacttgtgtgacagatgggc

SEQ ID NO: 539908 - DNA, 83 bp, Homo sapiens
cggagtgattgcccggcagagcgcgacggcaaatggatacatcttgttttttcatattacatctacaagaggggacaagtacc

SEQ ID NO: 539909 - DNA, 83 bp, Homo sapiens
ggagagtccgacgcgcctggctaggagcgccgaccgcagggcctctacggacatatctgaagagatggattaagaatgctttg

SEQ ID NO: 539910 - DNA, 78 bp, Homo sapiens
tctggacacccttcgcgttgttgctcaggaggaacttgaacaagagtatggggaaccctttctggctgccatggaaaa

SEQ ID NO: 539911 - DNA, 98 bp, Homo sapiens
tggggaaccatttgtttttaactaccgggaagatttacacagatggaaccagaaaagatacgaggctctaggagagtctggccgggaccttcaacagt

SEQ ID NO: 539912 - DNA, 75 bp, Homo sapiens
cctgccgggagctagaactcaaggtgcccctggtggtccggcttgaaggaattacatgaatgacagtcttcgaac

SEQ ID NO: 539913 - DNA, 82 bp, Homo sapiens
tggaagcaggactgcgccgcgtcttcctcaagtgcagggctcgcggcctggcaagaatgtacagctgacagagaacgagatc

SEQ ID NO: 539914 - DNA, 75 bp, Homo sapiens
caactttgagtcagacctgtaggcctgatagactgattaaaccacaggaattgaatgatctggcacgggaccctc

SEQ ID NO: 539915 - DNA, 90 bp, Homo sapiens
gcctgtccgtcagtccctaggtatccgcactgctcagggagacaaggtctcaccgtattgcccaagctgatctcgagctcctgcgctcaa

SEQ ID NO: 539916 - DNA, 80 bp, Homo sapiens
ctcgcggaccggcgtccccggcgcgaagaggctggactcggattcgttgcctgagactgtggtacagacctccatgagcc

SEQ ID NO: 539917 - DNA, 51 bp, Homo sapiens
ggtctgaagaacgccctgtcatccgttgcatatggccaagtccttggagtt

SEQ ID NO: 539918 - DNA, 101 bp, Homo sapiens
ccaggatggactcgctgctcattgcagcgccatcatgaccgggtcctataacaacttcttcaggatgtttgatagagacacgcggagggatgtgaccctgg

SEQ ID NO: 539919 - DNA, 98 bp, Homo sapiens
agttgatgttcatttttaatcttttcgcccctcacgcttttgtaataatggtagatgacaaggtgaatttccattttattctgtttaacaacgtggat

SEQ ID NO: 539920 - DNA, 100 bp, Homo sapiens
agctgaaacgaaagggagccgccagcgcgtttggctgtgacctgacggagtatctggaaagctcgggacaggatggtttgagcacaaaatgaacataatt

SEQ ID NO: 539921 - DNA, 100 bp, Homo sapiens
caacaagcaccagattaaacaggctgtgaagaagctgtatgacattgatgtggccaaggtcaacaccctgattcgaatgttggctaccagggtatttagc

SEQ ID NO: 539922 - DNA, 75 bp, Homo sapiens
caggattcagcccagtcacagagcttggtacgcatagctgctaaattcatcactcatgcacccccaggggaattt

SEQ ID NO: 539923 - DNA, 74 bp, Homo sapiens
cggaagagcgctcccaggagaaacaaattcatgttacatgtaaagctgtcctcatttgtgactatggacctatg

SEQ ID NO: 539924 - DNA, 49 bp, Homo sapiens
gtctgtgtctaatctatcatgggggtcagctttggtgtacaactacgaa

SEQ ID NO: 539925 - DNA, 50 bp, Homo sapiens
cggagcggcgcgcgcgggacaagcaggttgaaatcacaaagattagacac

SEQ ID NO: 539926 - DNA, 90 bp, Homo sapiens
tcaacagctacccccgcttcagcgactggctgtacactttcaacgtgaggccggaggtggtgcagacagtaaggattgtatcctggagcc

SEQ ID NO: 539927 - DNA, 100 bp, Homo sapiens
cgcaccgcccggactcaccatgacaacaagggaggtgtcacagttttccatttagatcaacaacttcaagttcttaccatggaaaattccgagaagactg

SEQ ID NO: 539928 - DNA, 73 bp, Homo sapiens
ggagcaacgagcgcagcgccgaacaactctgctcatggtgattacatgcaaaataacgagagcagcttaatag

SEQ ID NO: 539929 - DNA, 100 bp, Homo sapiens
agcggcgcgcactataaaatggcgcgtgctgcaacccgcgcccgcttcggagagagaaatgctgggatcatggaagggaagtggttgctgtgtatgttac

SEQ ID NO: 539930 - DNA, 74 bp, Homo sapiens
ggcagtccacccaccgccgccgcctcccagatgtgtctgggaagctgaggatctgggataccacgcagaaggag

SEQ ID NO: 539931 - DNA, 50 bp, Homo sapiens
agagaaggcactcaagtttatgctctctgacacagctggctattctagtc

SEQ ID NO: 539932 - DNA, 100 bp, Homo sapiens
gtggggtggtgcacacagaacaacaaggtgttgatgccgccggacggctgaacaagctccaaacacttgtgaatgtcatgtttgtaagcaggaagcttct

SEQ ID NO: 539933 - DNA, 98 bp, Homo sapiens
ggggagcctcagcggtctgcgcctggcagcagcaccagcggacagggaagggcagagaaggccaccatggcgacactcctctcccatccgcagcagcg

SEQ ID NO: 539934 - DNA, 90 bp, Homo sapiens
cgtcgtcgtctgccttcgcttcacggcgccgagccgcggtccgactcttcaccaccaggagtgttccttgagaaggactatgagatttac

SEQ ID NO: 539935 - DNA, 83 bp, Homo sapiens
gaagagaccaccaaacaggctttgtcaaaatgatgcttcaacacccaggccaggtctctgcctcggaagtgagtgcttctgcc

SEQ ID NO: 539936 - DNA, 75 bp, Homo sapiens
cttccacgtggattctccagacgagagcagcagtggacgtcagctcagcgaggtcttcatccagctgccctcgcg

SEQ ID NO: 539937 - DNA, 98 bp, Homo sapiens
tgttctgccggaatttgaaaagtgcctgtgaccagaagtcagcagcttcccagaagccccgaagccggggcatcctccactcactcttctgctgtgtc

SEQ ID NO: 539938 - DNA, 90 bp, Homo sapiens
caacagcactatctacgtggtcgaacctggatacctagatgttggagtccggggtgacctggtctcagtgaagaaatctttaggccggaa

SEQ ID NO: 539939 - DNA, 75 bp, Homo sapiens
tgcaagcaggcaacctgaatacaggtggataagattgtggaccagctgcagcagttaatgcaggtgtatgacttg

SEQ ID NO: 539940 - DNA, 75 bp, Homo sapiens
ctctgctatgacccagattttatgctgtgggccctgagggaaaggatcacagaggcgctgagccgggatggctac

SEQ ID NO: 539941 - DNA, 80 bp, Homo sapiens
agaaccagatttgtgtaccatttgtctgacctacatatctgaagagatggattaagaatgctttggattaaggattgtgg

SEQ ID NO: 539942 - DNA, 95 bp, Homo sapiens
gggcatgttccgtggcctcgcccaggccgacgggtatgagacagagctggccatgcgccagtctgtggagaacgacatccatgggctccgcaagg

SEQ ID NO: 539943 - DNA, 100 bp, Homo sapiens
gatcgattttaccttggataccctgctttggaggaggaagatgactatctctttgatgatcctctgccaatacctttaaggcacaaagttccatacccgg

SEQ ID NO: 539944 - DNA, 100 bp, Homo sapiens
cgccgtggagggacgagacctgaccttgcagtacaacatctacaatgttggctcaaggagtcagacaaaaagctgggtatatcactccagttcctggagg

SEQ ID NO: 539945 - DNA, 83 bp, Homo sapiens
cttcctctgaaggcaaagtgacctgtggttgtggcagcactgcctgaaggtatgagaccagattctaatctttatggttttcc

SEQ ID NO: 539946 - DNA, 82 bp, Homo sapiens
ggctgacctcgctgtacgccgagcacccaggcgactgcctcatcttcaagatacgggacgtgcaggaaacactgatgcccca

SEQ ID NO: 539947 - DNA, 83 bp, Homo sapiens
gcgggagaagatggacaagagaaagctcgggcgacggccatcttcatccggaactgtggctgcaccatctgtcttcatcttcc

SEQ ID NO: 539948 - DNA, 87 bp, Homo sapiens
ggaatggagaaggaagaggagtcggtgtgttccagagaacaagccttcagacatttgctatattgacgctgagctgtcaggggactc

SEQ ID NO: 539949 - DNA, 75 bp, Homo sapiens
ccagccccgtgtccttcattgccacgtacagacatcaacgagtgtgcaacaccgtcgaaagtgtcatgcggaaaa

SEQ ID NO: 539950 - DNA, 83 bp, Homo sapiens
gacgtcatcatgctgaccaccaatcagatccgtaaggccaccagcttgggctccccacggagggcagcaagtgggacttgggg

SEQ ID NO: 539951 - DNA, 103 bp, Homo sapiens
acagttacagatttttgttatcttctggataaatctaagcaactgttcaatgggttaaggccagatcagaaaagggagctcaggtaccttccagagagtgaga

SEQ ID NO: 539952 - DNA, 100 bp, Homo sapiens
ctggagacacacaggcagacccatactgaaatccgagaggcctttcgggttctggaccgggatgggaacggcttcatctccaagcaggagctgggcatgg

SEQ ID NO: 539953 - DNA, 83 bp, Homo sapiens
ggcatttacatcctgtaccacggaaaccccgttgtgagcgtggatgcaactagagagacaaatcgcctaggaagactgatcaa

SEQ ID NO: 539954 - DNA, 83 bp, Homo sapiens
tggagcacctgaagagatgccagcagggactttgaacatgtcggggatcgccctcagcagactcgcccaggagaggaaagcat

SEQ ID NO: 539955 - DNA, 90 bp, Homo sapiens
gggaatcaccattgcaatacaaatgatctgcctggtgaatgctgagctgtaccccacattcgtcaggttacctacctgggcaaagtctcc

SEQ ID NO: 539956 - DNA, 98 bp, Homo sapiens
acagacttcttgttgtatttaatcgaggattgattctaatgacagaggaggcaacagacagatttctaccagagggctaccctctccccttggatctg

SEQ ID NO: 539957 - DNA, 74 bp, Homo sapiens
tgcgctgttccacctcattcaacttcaggttgaaatcacaaagattagacacctttttagataggtgttcttca

SEQ ID NO: 539958 - DNA, 83 bp, Homo sapiens
ggctgaagcaggtgtccgcggggcagacgtcggtgtatgccctggatgagaatgcggagctggagtttgttcagatcatcatc

SEQ ID NO: 539959 - DNA, 100 bp, Homo sapiens
aaaaagaaaatggggacaagtctgaggcccaggtttacatcctcagcaaggaggaaggtggccgccacaagccctttgtgtcccacttcatgcctgtcat

SEQ ID NO: 539960 - DNA, 97 bp, Homo sapiens
atcattatttgcagtatatgttgtcgggtacattgatatatgtaaattacggaagatcatttatatacacatggagcttgcagagctagaaagtgcc

SEQ ID NO: 539961 - DNA, 98 bp, Homo sapiens
aggggcccgagggcggggaccggcggcgctggaggagcgaggcagctgtactaggactgggaacgggttttgctggcacacctggatatctttctcca

SEQ ID NO: 539962 - DNA, 75 bp, Homo sapiens
aaatccaacgcacccagagtcaaagccaagagtccagcctctgatgaagcaggagagaaagaagccaagtctgat

SEQ ID NO: 539963 - DNA, 100 bp, Homo sapiens
cagaagaggactgggaccgggacctgctcctggacccggcctgggagaagcagcagagaaaggaaaacggacgatgtattactaagctggaaaacatggg

SEQ ID NO: 539964 - DNA, 83 bp, Homo sapiens
cgactccgcacggcactgccgacctccgggagcagcgcaggctttccatctgatggtcccctggtgtgtgccctggaacagga

SEQ ID NO: 539965 - DNA, 100 bp, Homo sapiens
gccgaggcaggcgcccaccgccggcggtgatgcggctgtgaagccctagtcgccttgagagaacctgggaaatttgatttagtttatcacaatgaaaatg

SEQ ID NO: 539966 - DNA, 100 bp, Homo sapiens
gacgccctgagctcccattaggagccgctggctgcggcagcaggggactagcgtgagagctctagaggacaaaatcccagtccttggcacaaactcagga

SEQ ID NO: 539967 - DNA, 100 bp, Homo sapiens
ttgacagtttcctgccaggcgccatcatcggcatagcccgggagatgcagccagtttacagtgcatctgggggaggtgttgtagccattgacaacaaaat

SEQ ID NO: 539968 - DNA, 96 bp, Homo sapiens
acttcaagaatgaagccgcggaccctcgcagaaacattggcaaatttggagcgacagatctatgcttttgagggaagctacctggaagacactcag

SEQ ID NO: 539969 - DNA, 100 bp, Homo sapiens
agtgagacaaatggagatagccaaacaaaattggctggcagagcaacagaaaatgcaggaacaacagatgcagagagaaggactccttctgtcacccagg

SEQ ID NO: 539970 - DNA, 100 bp, Homo sapiens
tgctgccggcggagactcccaggagctccggagaggaaccctccgaaggtgacttcagaactggaggttggtcaaagaaaaagtgatgtatgaaaaagag

SEQ ID NO: 539971 - DNA, 95 bp, Homo sapiens
ttgacgtggggaagccgaagaagcagcggagatcgattgtaagaacgacgtccatgaccagggtggtcgttctcgttaccggaccacttcttcag

SEQ ID NO: 539972 - DNA, 75 bp, Homo sapiens
accctgtgaaatttcatgaagcttggcagaagctatgcaaagctgagcaaataagggcgagactgaaaaatcaag

SEQ ID NO: 539973 - DNA, 131 bp, Homo sapiens
gcccaggtggaccccaagaagaccattcagatgggatctttccggatcaatccagatggcagccagtcagtggtggagcgcctagaagattatcagcgtcgccttgatacctccagcctgaagttgtcaga

SEQ ID NO: 539974 - DNA, 50 bp, Homo sapiens
ctctgatctcaacattttggctgaatttaagctatgaagaaggacatccc

SEQ ID NO: 539975 - DNA, 96 bp, Homo sapiens
gtgggacaaggattgatagaaagctactgatagtctttataaactttctctgcaaaccctcaacgcagacattttcttaaaacaacgccagacctc

SEQ ID NO: 539976 - DNA, 82 bp, Homo sapiens
gtcggagctcggcaggaagtgggaccggtgtctggcggatgcggtcgtgaagatagcactgctcagcacgcaggcatgtgag

SEQ ID NO: 539977 - DNA, 100 bp, Homo sapiens
ggacactggctccaaggaaaaagctgggagtgtccactcgccttccaccagcatggcaacgtcttcacagtaccgccagctgctcagtgactacgggcca

SEQ ID NO: 539978 - DNA, 90 bp, Homo sapiens
agaggggacccccgacccccaggaccacccctaccatgagacttctgcctggtgtcgaaggtggtgggcagatgccgggcctccatgcct

SEQ ID NO: 539979 - DNA, 82 bp, Homo sapiens
agaaatgcgagagctgcctgcagggctacttcctcctggacgggaagtgcaccaacggctggctgtcggcaattggattctt

SEQ ID NO: 539980 - DNA, 80 bp, Homo sapiens
gacgacagcagcagcagcgcgtctccttcagtgccctctggtggtcagaagatgctgtgctgtctcgttaggatgaatgg

SEQ ID NO: 539981 - DNA, 75 bp, Homo sapiens
ggaaaatcatattatagatggagtaaagttccagaaagctgagtctgatctggattacattcaatacaggctgga

SEQ ID NO: 539982 - DNA, 50 bp, Homo sapiens
gacgccgccgctgcctcccgcgtacctagtcgatagtcgctggttcaaac

SEQ ID NO: 539983 - DNA, 75 bp, Homo sapiens
ggattctggcatcagggaggctttcagccggagaagcgagtttcagctggcctgaccttcataagaagacccaga

SEQ ID NO: 539984 - DNA, 90 bp, Homo sapiens
cgcgtccgccgattcctcctccttggtcgccgcgtccttggctggcgtaacctgcacttgttgccaagtcttccatcttactagatgtga

SEQ ID NO: 539985 - DNA, 76 bp, Homo sapiens
tcgtgctcagttacagttatattgccatggtcagtttaggggctggtgcaaaggatgagttgcacattgttgaagc

SEQ ID NO: 539986 - DNA, 82 bp, Homo sapiens
agaaaaattaaagaagatgatgctccaagaacaatagcttgccctcataaatccagttacaacacagggatcacaacaaaca

SEQ ID NO: 539987 - DNA, 75 bp, Homo sapiens
gattcagatagctacaaaaggcaggctgcacctgaggagctcttgtccctggcaaagcgaaagcgcagtgactct

SEQ ID NO: 539988 - DNA, 81 bp, Homo sapiens
agcgccaagcaggagctgaaggacttcagcctcccctggtgaagacacaaactgtcaccatctcagataatgccaatgctg

SEQ ID NO: 539989 - DNA, 90 bp, Homo sapiens
tgctgggaacacctggagtctccgcgggcaggtgctggagaatctggtaaaagcaccattgtgaagcagatgaggatcctgcatgttaat

SEQ ID NO: 539990 - DNA, 74 bp, Homo sapiens
aaaaccttttctgggttgagcctagattccacaagaatcggaatgtcagttaatgctattcgcaagcagagtac

SEQ ID NO: 539991 - DNA, 82 bp, Homo sapiens
tgctcttcctcctgcctaccacagccctgtactacctggtgttcaccctggagcatcagatccatgctgctgctgactcgga

SEQ ID NO: 539992 - DNA, 75 bp, Homo sapiens
gttcgacaagctgctgatgactgtggtgttggggatgtcctttgcactgaccctgaactgccagattgacaaaac

SEQ ID NO: 539993 - DNA, 82 bp, Homo sapiens
cgtccccctgccccgttcacaattgttcaagaaggaagtgtatcttcatacatcaccacacctgaaagcaggtaaacttaac

SEQ ID NO: 539994 - DNA, 74 bp, Homo sapiens
actcgctcggtggagcagacgctactcccgctggtttctcaggctgcaagatcaaggccctgcgggccaagaca

SEQ ID NO: 539995 - DNA, 100 bp, Homo sapiens
caagaggaagcccgctgccttgtggaggagttgagaaaaaccaaggttcacctttcttggatcacatgcaaaggatgtttaggtctgtgaagaaaagaat

SEQ ID NO: 539996 - DNA, 50 bp, Homo sapiens
gcccatcccgttctctgatttgcagcaggggactgcagccttcagatgcc

SEQ ID NO: 539997 - DNA, 50 bp, Homo sapiens
aaaggatcatgaactagtgacctggaaagtaaaatgtttattggaggctt

SEQ ID NO: 539998 - DNA, 89 bp, Homo sapiens
tggctttggtcgggggccagcccccagccctggagaagctcaaaggcaaaggaaacctaaagatttttcatgatgatggtgtattctgg

SEQ ID NO: 539999 - DNA, 98 bp, Homo sapiens
tggggactcagaggagtacttcgccacttactttaatgagaagatctccattcctgaggaggaggatgactcactggttgtgtggaaggaagtcgatt

SEQ ID NO: 540000 - DNA, 90 bp, Homo sapiens
gtcttggcaactgtgttgctcttgtccttcggcagcgtggccgctagtcatatcgaggaataagacgagttggaagaagacctgatcaac

SEQ ID NO: 540001 - DNA, 100 bp, Homo sapiens
cagctcatgcaacatctcctctggggaaatgcagaagtatcaagtggggcagctgtattctgtggctgaggccagtaaaaatgaaacgggtggtggcgaa

SEQ ID NO: 540002 - DNA, 129 bp, Homo sapiens
ctccaatctgaggcaacccaacataaatctccagtgccccaagagtcacaagagagaggaatcaaggccagaggtgtgaacaaggtgtcagctctgaagggaaggtttttctaaggatggacccacacc

SEQ ID NO: 540003 - DNA, 75 bp, Homo sapiens
gtcatcaccgtagtcacagacacaggagccactcaaagtctcccgaaagctttcaagatgttagaaagttcaagc

SEQ ID NO: 540004 - DNA, 88 bp, Homo sapiens
cccagaccccagagctgtgaaccaggacaagaagaacatgctgttttcttgttcagcctgcaggacctctgctgccgggccatcgtct

SEQ ID NO: 540005 - DNA, 111 bp, Homo sapiens
gtctggagtttatctggagtgaggtggccggttcttggtgggatctgagcagagcctggagacacaggccccatccttcccaatggggacacttcagggagcggctctcag

SEQ ID NO: 540006 - DNA, 83 bp, Homo sapiens
ggcccgagccttagagccttagacaccggggaggagaccctggtcctgttcctagtgagaaagatcagtctaaagaaaaggag

SEQ ID NO: 540007 - DNA, 74 bp, Homo sapiens
ctgatagactgattaaaccacagagtgaaccagaggaaatgcctccagaagcaaagatgaggatgaagaatatt

SEQ ID NO: 540008 - DNA, 90 bp, Homo sapiens
gttccagtgcctcgagcgctcaggatggaggaagactcgatccgcctgcctgcgcacctgcgaagaagttgcctatgaagaaagggcctg

SEQ ID NO: 540009 - DNA, 50 bp, Homo sapiens
gcaatatctggcaagccgggtgacaagacagggtctcactctgtcgccca

SEQ ID NO: 540010 - DNA, 100 bp, Homo sapiens
cctacttccacttcgtgttcttcctagcttccctgtatgtgatgatgaccgtcaccaactggttcaaatcatagatgtcatagataaggaactaattcaa

SEQ ID NO: 540011 - DNA, 75 bp, Homo sapiens
cgcccggaaggccaccgctgcggtggtggaagatggatatgaattttttgctaaacgacagttggtaaccttatt

SEQ ID NO: 540012 - DNA, 90 bp, Homo sapiens
cgcggtgctcctcgggcgccaagcgcatcaagatggtgctcatgtggaccagtggtgacgccttcaagacggcctacttcctgctgaagg

SEQ ID NO: 540013 - DNA, 100 bp, Homo sapiens
gtacagtctgcacagctgggttggactgatagctgtcatatgctatttgttacagatattcaggagcagcatgtggactggcctttgtattcatataccc

SEQ ID NO: 540014 - DNA, 50 bp, Homo sapiens
caggcagagcccggagaaaagccacatgggacctcaggatggaaaccagc

SEQ ID NO: 540015 - DNA, 83 bp, Homo sapiens
ttctacagcttctgataatcaaccaactgttacaatcaaggtctatgaagaggagaaggcagagcccccccaggctatgaatg

SEQ ID NO: 540016 - DNA, 90 bp, Homo sapiens
gaaaccacagcagcccatgcacacagaatggcagccacattccagcttccagggcaccagttcgtgtctgggatgtccggccatttgccc

SEQ ID NO: 540017 - DNA, 75 bp, Homo sapiens
ggaagctccagcaccaacaacaatggtgtgatttggaaggaatcatgccaaatgttaccatcagcttgagtctcc

SEQ ID NO: 540018 - DNA, 90 bp, Homo sapiens
ggcgatgctcttcttggaaaaccagatccagaaactggaggagtcccgctcgaagctagcactagaaagtttgggatttggctcttacat

SEQ ID NO: 540019 - DNA, 73 bp, Homo sapiens
tgggtagcctcaccatgaaatcacagcttcagatcactgcaaaagatacagatattgtggatgaagccatcta

SEQ ID NO: 540020 - DNA, 100 bp, Homo sapiens
gtgcaggtgcaggcctctcagctttcctccctgccacaggagttagccctgcgtagccagttaccaacactggagcaggatggtgggactcaaaatccag

SEQ ID NO: 540021 - DNA, 104 bp, Homo sapiens
gcgacggccacaggggcggcgacggcgcagtgcgaagcgaaacagctcactgaaaactgaagctaatttggaagttttgaagtcaattcctagtgaaaaattaa

SEQ ID NO: 540022 - DNA, 100 bp, Homo sapiens
ccgcgctcctgctgccgttgctgggcctcgccgctgctgccgtcgcgggtgaaattgatcttcaaattctctccaaagttcaggctcaatacccaggagt

SEQ ID NO: 540023 - DNA, 82 bp, Homo sapiens
ggatcctgctcctctgggttgaaacccgggcgccgccaagatgccggaatgtatcctgtcaggtataatgtcagtgaatggc

SEQ ID NO: 540024 - DNA, 83 bp, Homo sapiens
atcacagactcctatttgaagtatttgacgaaaatagactggacttaaccaccaccatgtcgagcaaaagaacaaagaccaag

SEQ ID NO: 540025 - DNA, 100 bp, Homo sapiens
gcattgaagatcagtacaaaaattcttcaagaaatctaaggtgcctgaaggctggattgacggtggacccagtgattgtggaggcgttcttggccagcct

SEQ ID NO: 540026 - DNA, 73 bp, Homo sapiens
gtgaggagactcagcagaaggtgcaggaagagagaagggcacagttacctaagtatcaacgtaatcttcctcg

SEQ ID NO: 540027 - DNA, 96 bp, Homo sapiens
tcactgcagcctccacctcccagtgtcttctgtggcttcagcgtcacctagtgcaggctgccattcaacaaacgcattgtcaacagtcaaccaaaa

SEQ ID NO: 540028 - DNA, 100 bp, Homo sapiens
ggcgggacagcggggcggctggcgccgggggccggggagcgccaggaattacatgaatgacagtcttcgaaccaatgtgtttgttcgatttcaaccagag

SEQ ID NO: 540029 - DNA, 100 bp, Homo sapiens
ccatgaacggaagcgtctttgctcaaggatcccagttttctctggatgacgtggagaactacgatgacccgcacaaaacccctgcctccccagttgtcca

SEQ ID NO: 540030 - DNA, 100 bp, Homo sapiens
tgatgcagaagctactcaaatgcagtcggcttgtcctggctcttgccctcatcctggttctggaatcctcagttcaaggctcatggatttgagatcttat

SEQ ID NO: 540031 - DNA, 96 bp, Homo sapiens
cggcgctccgagagctccaggagaagcaggctctgatggagcagcagagacgatcaaagtggtcaaagcgttccatagttccctccacgaaagcat

SEQ ID NO: 540032 - DNA, 90 bp, Homo sapiens
tagatgactacacagttgagttgcctctgattggaaaagcagaattcttccatctctatgacaacaagcccattttagctttctggagaa

SEQ ID NO: 540033 - DNA, 119 bp, Homo sapiens
ttcggagcccctccacaagttccatctaggcctacgagggccccgcccagtgtcccaaggaaagaccacagcaagattctttcattcgtctcctcctagcctgggggaccaggctcgaa

SEQ ID NO: 540034 - DNA, 50 bp, Homo sapiens
ctgggagcctgctccctgctcagctgctgatcggagggtatggttggcat

SEQ ID NO: 540035 - DNA, 100 bp, Homo sapiens
ttaggaccacccaccatgcctatccaggttatgatgtgattgctcaagcccaatctgggactgggaaaacggccacatttgccatatcgattctgcagca

SEQ ID NO: 540036 - DNA, 80 bp, Homo sapiens
aagcagcgtgcgttcagccctggggctgctccagttacagcaccacccggccgctgcacccggctgctcccaggcccccc

SEQ ID NO: 540037 - DNA, 74 bp, Homo sapiens
ttgaacaactttcactgccatcggggacaaggatgaccagtgtcccagtgaaggaacgagtgaaggtgtctcag

SEQ ID NO: 540038 - DNA, 83 bp, Homo sapiens
ttagcgtcagaaataagccgttttttgacatctgtacttcaagaaaggtgtcattccacacatccacaaatctctgattggga

SEQ ID NO: 540039 - DNA, 98 bp, Homo sapiens
ttataggagccttctagaggaaactgtcgtgttttcacagtcaccaggagactaaagtccatcaaaaacatccagaaaattaccaagtctatgaaaat

SEQ ID NO: 540040 - DNA, 100 bp, Homo sapiens
cagacatgtggagctgtggagtcatcctcttcgccctgctcgtgaaatcaacgaccgggagcagaagttgcatgcccttaaggaggtattaaagaaattt

SEQ ID NO: 540041 - DNA, 90 bp, Homo sapiens
aaagaggaggggaggaggaggaggattcagggaataggagctggggagcccttctgcgccacaggcccgatgagagaaagggaaagttaa

SEQ ID NO: 540042 - DNA, 98 bp, Homo sapiens
tggaactgaacttagctcgacggggctgaccgctctggcccagggtgtcgtgccaagcggacctcgtgaaggacaacggccacaagtacttcctgtcg

SEQ ID NO: 540043 - DNA, 75 bp, Homo sapiens
ggagtgtgcgacggattgggaggtttgtgtctcaatctaataaggaagcctacgtgatctctctctatattaaca

SEQ ID NO: 540044 - DNA, 100 bp, Homo sapiens
ccagtaattgctcctttggccttctagggactgacttcaaagaaggaaggaaagaatcaggcagcgcgagcccagcattgacctgctgcaggccttcgtg

SEQ ID NO: 540045 - DNA, 82 bp, Homo sapiens
gggctccgcgcccggccggacccgggcccgagggcgtgatggtgggcatgggtcagaaggattcctatgtgggcgacgaggc

SEQ ID NO: 540046 - DNA, 75 bp, Homo sapiens
accccagcaaaagcagcgtggccgcttacaaacacgcagatggcaagaagattgatggcaggagggtccttgtgg

SEQ ID NO: 540047 - DNA, 100 bp, Homo sapiens
cgcggccgaagccctcctgaagcggcgcatacggaaactgaactagatgcagagcacgcccagaaggtcctggaaatggagcacacccagcaaatgaagc

SEQ ID NO: 540048 - DNA, 90 bp, Homo sapiens
tgaacaaaaaccagttgcgaaatggtctgaggcagagtgtggttcaattctggaacttttcaaagcctgactctcttcttgaaacagtgg

SEQ ID NO: 540049 - DNA, 100 bp, Homo sapiens
ggcactgccggactctcattctgcacaggacttctatgagaattatgagcccaaagagatcctgggcagaaaccagcctggacaccaagtctgtgtcaga

SEQ ID NO: 540050 - DNA, 82 bp, Homo sapiens
gaaggctcggggctgaagcggggccatcgatgcacccctcggagctaatagcggagatgagaaacagtgggtttgcactgaa

SEQ ID NO: 540051 - DNA, 80 bp, Homo sapiens
ccttctcaatctttccccacagctgtctacctgtccacctgcaaggattcaaagaaggttggcagagtcagcatatatga

SEQ ID NO: 540052 - DNA, 82 bp, Homo sapiens
gatgggggctgctcagacactgccagtcaaggcggataagaaggcggcacaagaaaagatgatccagcaggagcatgagcgg

SEQ ID NO: 540053 - DNA, 80 bp, Homo sapiens
agcagttggaattcctggaaatgacaataaaatcgccaaactgaggcagcaactacaacgcagtaaacagagtagtcgtc

SEQ ID NO: 540054 - DNA, 75 bp, Homo sapiens
ccgaaaacttgaaatcagaggagcatctgaaatcaagtaatattagagccccccaagatgaacccagtggtggag

SEQ ID NO: 540055 - DNA, 82 bp, Homo sapiens
gtgcgtggggctgcctcgccgcgtctcgccacgccgccgccatgtctgcgcatctgcaatggatggtcgtgcggaactgctc

SEQ ID NO: 540056 - DNA, 98 bp, Homo sapiens
tgattccttacttctccgccaacgcggtcatctcgcagaacgccatcaaccagctgcctgtttaaagaagaaaacccgtatgctagatttgaaaacaa

SEQ ID NO: 540057 - DNA, 100 bp, Homo sapiens
ggcatgtaacactccactttccaacttcgagtcacaccagaattataagattgttgccagcaaaggaggttttgaaatggtcaccaaagagaagaaatgg

SEQ ID NO: 540058 - DNA, 75 bp, Homo sapiens
acgtggcttatgagtacctttgtcatttggaagaagcgaagaggcagcagcctccttggaaagacgaaaagcatc

SEQ ID NO: 540059 - DNA, 113 bp, Homo sapiens
gccagtagccgcagcaccgcagccttgggcctcgcgccggctatggccgtgccctggggctgagccctcagggaaagcaggcaggatgggagagtcgccgatagaaccacctc

SEQ ID NO: 540060 - DNA, 100 bp, Homo sapiens
ctgttggaaccggcggcgttgcgtctaaaaaggcgaaagccttgaggttgaaggtgggacgagcctaatgaagtgaaatgcatcttctgcagacaccggg

SEQ ID NO: 540061 - DNA, 90 bp, Homo sapiens
gggactacttccacatggcctacaacgtcatcacgccctttctcttgctcaaggctgatgtccaagtgcagttgatcagcaaaggccaac

SEQ ID NO: 540062 - DNA, 122 bp, Homo sapiens
cagaatctgccggatggtgctggccacttgcttgggatcctttatcctggtcatcttctatttccaaaaggacggtcgggccctggaaggaacgctctcggaattggccgcggaaaccgatc

SEQ ID NO: 540063 - DNA, 100 bp, Homo sapiens
gctaaaatatctgaagattccaaagttctgcagcctcaaactgagaggctgatcatcaggggttcactttcagagaagttgagaatgcaggctgaacaag

SEQ ID NO: 540064 - DNA, 82 bp, Homo sapiens
ttctcgctccggagccgctgcacatttcggtcattgctagaatcgtggatggaagcagattcactgagttcaaagcctttta

SEQ ID NO: 540065 - DNA, 75 bp, Homo sapiens
acgtttttcctgataactggaaagttcctcaagatggagactttgactttagaaggcaacagtatggaggtgcaa

SEQ ID NO: 540066 - DNA, 83 bp, Homo sapiens
gatcgacaagtccgggagctgggcggccatttaccagattatgatgcatcattatcacagaagaaattcgtgtctatagcttt

SEQ ID NO: 540067 - DNA, 50 bp, Homo sapiens
tactcttggtagaaaaagggaggaaaatgtttataggaggccttagctgg

SEQ ID NO: 540068 - DNA, 100 bp, Homo sapiens
cttcagaaacagtgctgaagcctttaaatgcagcatctgcgatgtgaggaaaggcacctccaccagaattcagaaggagctggcggacatcactttagac

SEQ ID NO: 540069 - DNA, 50 bp, Homo sapiens
tgaatctctgttccaaatgctttgctggatgttgagaaagagaaggaaac

SEQ ID NO: 540070 - DNA, 90 bp, Homo sapiens
ggagtcgaaggccgtgaggtatttttctaagtttgagttcctgagatctagttggtgagagacatgatgttctaccggttgctgtcgatt

SEQ ID NO: 540071 - DNA, 90 bp, Homo sapiens
ctgcggctggtccaggccttccagtacacagacgagcatggggaagatcctggctctgcagagagaacagcccagaaaagaaagttcccc

SEQ ID NO: 540072 - DNA, 98 bp, Homo sapiens
gccgatgcaccgagtccagcccaggaaaatggagagtggctgccttttctctatcctctttcctttattcattatcagcgccaatgaagcaaagaccc

SEQ ID NO: 540073 - DNA, 100 bp, Homo sapiens
tcctctgtcccagctctgcggcccagggggtgacgtgatggcggcagcggtgctgacggaccgggcccagggatcagtgtccttcagggatgtggctatc

SEQ ID NO: 540074 - DNA, 75 bp, Homo sapiens
ctacagaaacaaaatgtcaacaaattgatgggcttttgaacacttgcagcaattagaattaataaagcccatgga

SEQ ID NO: 540075 - DNA, 100 bp, Homo sapiens
tttggtagctactttcattgtgaaagatcttctcatgaatgatcgggatcattttacttctccagatgaatatgatgaccctactgtgctctatgaagcc

SEQ ID NO: 540076 - DNA, 82 bp, Homo sapiens
ccttctactctagtacagtagtatctctattggtttccaatacttatctacaggaatcgccatgaccccagctctgagggag

SEQ ID NO: 540077 - DNA, 90 bp, Homo sapiens
atacagaacagattacaaatgagaagctggctatggttaaagcgttggagtcattcgttgcccagtttgcagccaagaatgtgcagagag

SEQ ID NO: 540078 - DNA, 75 bp, Homo sapiens
aaccacaagcaggtccaaagagagatgacttttttgaacgaaccattctgtgcaacagccttgtgtggagttgtg

SEQ ID NO: 540079 - DNA, 83 bp, Homo sapiens
tgcaaaagtcatggcaacttctggatgtgcagcaatcagatttatcattcgggttcgggaggccttgaggaaagcagagaagg

SEQ ID NO: 540080 - DNA, 89 bp, Homo sapiens
tgctcctttggttgaatccccaggcccttgttggggcacaaggtggcagggatcatagacggtatttctatgtaaacgaacagtcgggc

SEQ ID NO: 540081 - DNA, 78 bp, Homo sapiens
tctaaagagctggtctacctcgtgcagattgcttgtcagggcccttggaagaaaatcctcgctgtgtccaggctgagg

SEQ ID NO: 540082 - DNA, 74 bp, Homo sapiens
ttaaaatcctgctctggccggattccagactcgtgggggaaaggctgaaaaagcttgtggtgaaggggggcaaa

SEQ ID NO: 540083 - DNA, 51 bp, Homo sapiens
gcttcgtcttcatccagggcatcggactttccttatcccagttgattgtgc

SEQ ID NO: 540084 - DNA, 97 bp, Homo sapiens
gcaacaaaaagaaatcattgaacacggcatcgagctctatcatgagaagtttttctctcctacaagaagccataatcccctacatccctactctcat

SEQ ID NO: 540085 - DNA, 101 bp, Homo sapiens
ccccttgcctggacggaagcccgtgtgcaaatggaggtcgttgcacccagctgccctcccgggaggctgcctgcctgatgcagcaccgaggcttcctcctc

SEQ ID NO: 540086 - DNA, 90 bp, Homo sapiens
aggaactcggcagaggagaaattcagacggctcccgaggggagtgcatccgccccaacccttttccccctcgtctcctgtgagaattccc

SEQ ID NO: 540087 - DNA, 100 bp, Homo sapiens
cggagacgtgggcgccctccccgccaaggcccgtgcgaggcgtgagattcaacattttggggtgaaaatcagcatagttgaacctggctacttcagaacg

SEQ ID NO: 540088 - DNA, 73 bp, Homo sapiens
gaggtggcaccttccagatggggggtagcagcagccataacagtccagggccaaggcttgtgttcaatcgtgt

SEQ ID NO: 540089 - DNA, 97 bp, Homo sapiens
gggtgactatgtggacagaggctatttcagtatagagggcatcacatttgatgaattcaggtcatttttccagtttttaaacaacctagaagacttt

SEQ ID NO: 540090 - DNA, 82 bp, Homo sapiens
ggagagtgagcgagccttcacctacagcatcgtgggcgccggctcccagtttggtctttcttctgagaacacccgatgtgtg

SEQ ID NO: 540091 - DNA, 74 bp, Homo sapiens
ttgcctagtgggccttccttcccaggacaactacacctttgcccaacctgggattcaaatgaaagtgaaaatgt

SEQ ID NO: 540092 - DNA, 87 bp, Homo sapiens
gaacctatcgaaggacatgaagactaccacatgatgattcatgatgttgctatcaaaagttgagaaattgtcagaagaaatcatgga

SEQ ID NO: 540093 - DNA, 49 bp, Homo sapiens
aaagaagctgcagcggaggaaggcgaggaacgtcaaggtcgtgggaaat

SEQ ID NO: 540094 - DNA, 98 bp, Homo sapiens
tgctgagggcagtgttagaaaagaagctttgcagtctctcagactcagtcttcctatgcaagaaacgcaactgtgctgctctttggcgtaaattgcaa

SEQ ID NO: 540095 - DNA, 100 bp, Homo sapiens
caaggacttcatgatccagggcggagacttcaccaggggagatggcacaggaggaagcttacaggttcgctatcacctaaacaaggaagaaacccatgta

SEQ ID NO: 540096 - DNA, 112 bp, Homo sapiens
cagaggagagttctccaaacatgatcgtttactgcaaatacgctggggaggaggaggaggaagggagcggcagcagtgaaggatttgacccccctgccactgataggcagtt

SEQ ID NO: 540097 - DNA, 90 bp, Homo sapiens
gaagacggctctttcagagtgttcggaaaagatttgttcccgacaaggagttttctggttcagaccgtagacagagaggccgagaaggac

SEQ ID NO: 540098 - DNA, 88 bp, Homo sapiens
ggcgaagcacgctactacctggtgcagggcctgattgaggactgccagctggcgctgcagattgcccgtgaggcagaggctgccatct

SEQ ID NO: 540099 - DNA, 82 bp, Homo sapiens
gtctgggagcctgaggacatggagcaggagccagcacagcaggcactgccgccctgcactgtagcagatgcctaaataaagt

SEQ ID NO: 540100 - DNA, 100 bp, Homo sapiens
aaggctatgccctgcaactgcaccagttacaggcttgtgagaaggttggcatgcagatccctcgattctgttatcatgaaaggttgtctgttgctggaaa

SEQ ID NO: 540101 - DNA, 74 bp, Homo sapiens
acctttggaccctcgacctggttttgtctttgccccggacagagcgggatgccaccagcttgtccaaagggaag

SEQ ID NO: 540102 - DNA, 89 bp, Homo sapiens
gaaggccctgcggcccgggctggagtccgtgtgggtgacaagctcctggagaatttatagagcggcagcacgcaaagaacaggtattac

SEQ ID NO: 540103 - DNA, 74 bp, Homo sapiens
ctttattcaagatgacggaagcagatttaagaagtggtccaaaggcaaagttcgggacaagctcaataacttag

SEQ ID NO: 540104 - DNA, 83 bp, Homo sapiens
attcgcagtggtcgcttcttctccttgacatcatggttgacacaccagacgagcagtctatcatgacttacgtggcacagttt

SEQ ID NO: 540105 - DNA, 100 bp, Homo sapiens
ttcacctggtgtttgaatattgtgaccacacagttctccatgagttggacagataccaaagagggcccctccagccagcgtcaggtgcagaatggcccct

SEQ ID NO: 540106 - DNA, 100 bp, Homo sapiens
ctgtccggctgcgcggctaccgtggccgagctagatatttctccctcgagtggctgggaaacttggcaagagaccagaggacccaaatgcagacccttca

SEQ ID NO: 540107 - DNA, 80 bp, Homo sapiens
gggacttccagacactggaaaactggatgctgcagacactgaacgaggagccagtggagctccccacaccaagtgagaat

SEQ ID NO: 540108 - DNA, 90 bp, Homo sapiens
ggcggatggccccaggtgtaagcgcagaaagcaggcgaacccgcggcgcaataacgcacttctcagaacttctggatgagttttcccaga

SEQ ID NO: 540109 - DNA, 100 bp, Homo sapiens
acgcagccgctgtgcacgccgtcgcggagccagctgctcactggccgctaccagatcaagaagttggtatatgtttacctggttcgatatgctgaagaac

SEQ ID NO: 540110 - DNA, 75 bp, Homo sapiens
ttggccttacctcagagatcctgaactcttttgagcatgaggagtttttaacagaagccttgccagttggcctca

SEQ ID NO: 540111 - DNA, 100 bp, Homo sapiens
gaaaaagcaatggaaaggcccagatgatatcctactaggcatgttttatgacacagatggtggactattccataatagcatcacaagccggagccaccct

SEQ ID NO: 540112 - DNA, 75 bp, Homo sapiens
ttgaccacatcgtgctgcaccgaggcactgaagtggcagcagcatcagggattgcttcctcctggtatgaccata

SEQ ID NO: 540113 - DNA, 100 bp, Homo sapiens
cgaacactctttaatggaccagatcaggatttgagcggaagaacgaatgtaactttaaggcctgggaaagactggaaaaagcggaacacgaaagagaact

SEQ ID NO: 540114 - DNA, 82 bp, Homo sapiens
ccaccgctgccctcagctccgagtccagggcgagccgagagggtgacctctctgggcaaggactggcatcggccctgcctga

SEQ ID NO: 540115 - DNA, 82 bp, Homo sapiens
atcccaggcggtgacagagtggagccatggctagagtgcagggctcgcggcctggcaagaatgtacagctgacagagaacga

SEQ ID NO: 540116 - DNA, 75 bp, Homo sapiens
gcactgtttgcaaaggttgcagcaaccaaaagccaggtgtttctgcccagttttccttcatagtcagatgctctg

SEQ ID NO: 540117 - DNA, 107 bp, Homo sapiens
ttaacatctttaaggcaggagctgatgaagagagagcagagacagctcgtctggaagctgaatatggtgggcatgatcagatagatttgtatgacgatgtcatatct

SEQ ID NO: 540118 - DNA, 100 bp, Homo sapiens
aaggacaagcgcttcagcctcgttctctgtgagctgatctgtggatcgcggcgtgtcggatgcgacctaaagtcatgtggcacctccttcgaaggtacat

SEQ ID NO: 540119 - DNA, 75 bp, Homo sapiens
cccctcctcacccgaacatcagggccctccagactcaggcgccccaacacccaagatggatgaattgcagttgtt

SEQ ID NO: 540120 - DNA, 100 bp, Homo sapiens
caaccttcccagaaagtccaagctcgtggtgggtggaaaagtgttcgccgagatgaataatacggcagctagtccaatgtctactgcaacttcaagtagt

SEQ ID NO: 540121 - DNA, 98 bp, Homo sapiens
caacattgactacgaggaatggcggcggctgccgcaggacctgcagcatcccagaggttcgatacaagaggctgttttcctagcgtggcttgctgcct

SEQ ID NO: 540122 - DNA, 97 bp, Homo sapiens
tcgagtgccagaacccaaggaggtgcaaatggacagagccatactgcgttatagcggccgtgagctgtgtgtttgagggtgtgcagtatcaagaagg

SEQ ID NO: 540123 - DNA, 98 bp, Homo sapiens
caaatcaaattagtggttttgcataagcagtactataatggatgtagacagcacaatttccagtgggcgttcaactccagcaatgatgaatggacaag

SEQ ID NO: 540124 - DNA, 101 bp, Homo sapiens
tgtatatattgcatcttcctctggctctacagcgacctagaggatcaagacataatgggagcatttttagacaagccaaagatggaaaagcataatgccca

SEQ ID NO: 540125 - DNA, 76 bp, Homo sapiens
ggcattagcactaatgatcacttacaaggacgaccaggccaagcttaagaaggttctgctccagacgagcccttac

SEQ ID NO: 540126 - DNA, 83 bp, Homo sapiens
caggcggtgacagagtggagccatggctagaggtgagaattatgaagatgatgacctagtaaattctgatgaggttatgaaga

SEQ ID NO: 540127 - DNA, 75 bp, Homo sapiens
tcctgcaaaccagggtatcagagaaataatagtgtaatccttgctgatgaaatgggcctaggaaagaccatccag

SEQ ID NO: 540128 - DNA, 100 bp, Homo sapiens
tcttcccgcttgcgtcagggacctgcccgactcagtgatgtacctgtgtggtctaagctggaatctggtcaccttccatccatgcaacaacttgttcaaa

SEQ ID NO: 540129 - DNA, 83 bp, Homo sapiens
gcagagccgagtgcagaagatctgggtgcccgtggaccacaggccctcgttgcccagatgcatgttatttgaaagcaattgag

SEQ ID NO: 540130 - DNA, 100 bp, Homo sapiens
gcagatcagaggtagtcggacctttcccgctggcgcgcagcctcagctaggtaagaatgattgatgttggctgatattggagtgctcattcacatgaagt

SEQ ID NO: 540131 - DNA, 100 bp, Homo sapiens
atggacgacgggtttgtgagcctggactcgccctcctatgtcctgtacaggacccttgaacatctgtgaagaaatgactattctgcatggaggcttcttg

SEQ ID NO: 540132 - DNA, 50 bp, Homo sapiens
agagatctacatcttagtatcacgaaacctccacagctgttgagaaaaag

SEQ ID NO: 540133 - DNA, 83 bp, Homo sapiens
cgaaagccagcgagctcctcagcctcaggcttctcacggcattcagcagcagcgttgctgtaaccgacaaagacaccttcgaa

SEQ ID NO: 540134 - DNA, 75 bp, Homo sapiens
gcccccgaaggccctatcaggacatggagtatgaaagacggtttcttgagtacaggcgatcaggctgcaaagggg

SEQ ID NO: 540135 - DNA, 75 bp, Homo sapiens
agaacgccgccatccagccaccattccaagagttgtggaaagtaaaaatgtagccctaccaaaaggaactattgt

SEQ ID NO: 540136 - DNA, 75 bp, Homo sapiens
gagcgaacgaccaagagggtgttcgactgctagagccgagcgaagcacctgatggccaaaagaaaggaagaaaat

SEQ ID NO: 540137 - DNA, 83 bp, Homo sapiens
gatgctgctttggaatttgcagacttctatgattttagaaatttaaaagcctgttgattcaagaactttctaaagtatttccg

SEQ ID NO: 540138 - DNA, 100 bp, Homo sapiens
atctggaacccaggacacagaacaagggagggaagaaaagctcagccttaaacatagcaagcacgaggtagaactaacattgaacttagagagaaattca

SEQ ID NO: 540139 - DNA, 80 bp, Homo sapiens
agccaagctcatctctgagacccggaggaggttcgaagctgagtatgtgacagaaacctctgtagaggagcaggatgcaa

SEQ ID NO: 540140 - DNA, 100 bp, Homo sapiens
tgctcatcttgttctcgagttttctctgccatgttgctattgcaggacggaatgatgaccactggatcgtcgacacagactacgacacgtatgccgtgca

SEQ ID NO: 540141 - DNA, 98 bp, Homo sapiens
cgataaaagtgtgcagaccaagtcacaatatggagcttccgtttctgccaagcctgaactacccctcttttacactcctattgatctggtggacatta

SEQ ID NO: 540142 - DNA, 50 bp, Homo sapiens
gagcagggcttctctgtggaaggggaaatttgcagtggtgagaaaatgta

SEQ ID NO: 540143 - DNA, 75 bp, Homo sapiens
tgcagaggttcctctacagcaagtggctgtcgctgggcgcggactccaacgggagcggcgtctctgtgctgctgg

SEQ ID NO: 540144 - DNA, 75 bp, Homo sapiens
gccgatgggtggtgtgatgtctggggctgtccctgctgcagcagcccaggagtctcactctgtcgcccaggctgg

SEQ ID NO: 540145 - DNA, 75 bp, Homo sapiens
gggaccggtgtctggcggatgcggtcgtgaagataggtacatgtgaagattttttggcagcttagcgtggaaacc

SEQ ID NO: 540146 - DNA, 98 bp, Homo sapiens
gcggagagcgagagaggggagcagaaaatgacagatggcgagacctggacaggaaatgccctcttcagattgaccaaccgagcaccagcatctgggaa

SEQ ID NO: 540147 - DNA, 50 bp, Homo sapiens
aagtaattgtggaccctatacagaactgatagtgcatcagccgacccagg

SEQ ID NO: 540148 - DNA, 51 bp, Homo sapiens
tactctgtaacacccagctaccaggaaaatgtttataggaggccttagctg

SEQ ID NO: 540149 - DNA, 74 bp, Homo sapiens
atggtaaaatcaatcagcttcctcttttccttggagagcctgctatgagacgctctcctggtctgtgttctgac

SEQ ID NO: 540150 - DNA, 98 bp, Homo sapiens
ctgccgccggcgaaggaggaggcgttgccgggtccggaccctatttgtcagtggccttcctctggatatcaaacctcgggagctctatctgcttttca

SEQ ID NO: 540151 - DNA, 74 bp, Homo sapiens
atgcctctcagctgccacctgcctttgacctttttgaagcctttgcaaaaccatccagtccaatggatcagatg

SEQ ID NO: 540152 - DNA, 75 bp, Homo sapiens
tccatcaatgacatgatgagcagcatgtcagaccagaccgtccgggtgaagatcttcacttcaggtcagctccaa

SEQ ID NO: 540153 - DNA, 134 bp, Homo sapiens
caggagcaagtactccaggaagcacagagctgtaccagtacacggcccacgttgccaggtactccaaagattcaggtttactcacgtcatccagcagagaatggaaagtcaaatttcctgaattgctatgtgtc

SEQ ID NO: 540154 - DNA, 100 bp, Homo sapiens
tagcagctcccagagaagtttcgtggagtttatcttggagcctctttataagatcctcgcccaggcagtacttaattttcctaaatattgtgaacccgtg

SEQ ID NO: 540155 - DNA, 98 bp, Homo sapiens
aaagttgtgtcagtgaatacaaacagcatgtagagcgcatgaagtacaggacaataaagcttcctacacatatcaccaggaggatctctttgaaagat

SEQ ID NO: 540156 - DNA, 74 bp, Homo sapiens
gccgcgtcgaagacatggaccagggctacggagagaggtggagaagagcgagtacttgagaaagaagaggaaga

SEQ ID NO: 540157 - DNA, 75 bp, Homo sapiens
gatgagaagactatcatcattggccacagttctggggccatcgcggccatgaggacagagcgggatgccaccagc

SEQ ID NO: 540158 - DNA, 90 bp, Homo sapiens
aacgcgagtgggagcaccaggatctcgggctcggaacgagactgcacgcttccttcaaaatgtctactgttcacgaaatcctgtgcaagc

SEQ ID NO: 540159 - DNA, 100 bp, Homo sapiens
cttcagcgagactggccaggaatttgagttctttgagaacaccattgtgtcccgcattgcccgcatctgcaaggcacagttggcgggcagctcccaggtc

SEQ ID NO: 540160 - DNA, 90 bp, Homo sapiens
cgaagttgtggaggagctgaccaggaagacctactacaatgcagatcttcgtgaagactctgactggtaagaccatcaccctcgaggttg

SEQ ID NO: 540161 - DNA, 90 bp, Homo sapiens
gcgtgggcgtttcgcagactcctaaggggaagatggtgaaaggaatgggaggtgctatggatttagtgtccagtgcgaaaaccaaagtgg

SEQ ID NO: 540162 - DNA, 75 bp, Homo sapiens
cgctcagaagaaaatgcaaaaaaactaatggaattagcctgcaacatgaaggtctgccaaaatgtctgaaagatc

SEQ ID NO: 540163 - DNA, 83 bp, Homo sapiens
gcgactacagcatggtggagtcgcctctgatctgcaaagaaggagaaagcgtgcaggtttggtgcacctcgatttggaggaag

SEQ ID NO: 540164 - DNA, 100 bp, Homo sapiens
tatcagtggataggcctcaatgacaagatgtttgagcatgacttccgttggactgatggcagcacactgattttaacattatggcagggaggcatcagaa

SEQ ID NO: 540165 - DNA, 97 bp, Homo sapiens
gtgtgctctgagggagggtccgagccagccgctgttttgccggaggagcccctcaggcccttctgggctggctggctgagaaactacctactcttcg

SEQ ID NO: 540166 - DNA, 100 bp, Homo sapiens
gctgtcttcccgcttgcgtcagggacctgcccgactcagtgcagaaaggacccaggagcgataacagtaaatcaaataagatatttgtcggtggaattcc

SEQ ID NO: 540167 - DNA, 97 bp, Homo sapiens
gcaaatcatgcgctttgcaatgaaatctcgaaggggacctcatgtccctgtgggacacaatgcccccaagaggtatgaaggttattgaaaaccgggc

SEQ ID NO: 540168 - DNA, 85 bp, Homo sapiens
ggaaatgagggcaacttctgaagacttcaacaagaatatcaacacctttgagaacagaatgttaatgcttgatgggatgccggca

SEQ ID NO: 540169 - DNA, 100 bp, Homo sapiens
cacgaggccttcctgggcaaggaggactccaagaccttcgaccagctcaccccggacgagagcaaggagaggctaggaacaccttccaccatgaccacct

SEQ ID NO: 540170 - DNA, 100 bp, Homo sapiens
agatgtgatgttggagaactacagaaacctcgtctccctggcgacatggtatgcttaagcaacaggatctaagtattgccatggtggtgacatcacgcga

SEQ ID NO: 540171 - DNA, 80 bp, Homo sapiens
ttagggtcctttatatagaagggagagtagacagagaaagagctggacccagatgggctgaagaaggagtcagagcggga

SEQ ID NO: 540172 - DNA, 100 bp, Homo sapiens
ctgcttttcggttccgggtcttggccccgtccttacctcacagaatgcccttctgcctgcagggttccggcagaagaaccagacatcaaagtccaccaca

SEQ ID NO: 540173 - DNA, 98 bp, Homo sapiens
ttctgtatgttcttcgccattatattcagcaaagagctcctgggaaggtgctgctggatgcagtttgcaaccacctcaacctcgtggaaggtgactat

SEQ ID NO: 540174 - DNA, 101 bp, Homo sapiens
cgggacgcgctgcctgggctccgcgcagccggccgccaggaagctggctggggccaccggccggcgctgcctccctctctctatggacgtccgagcgcccc

SEQ ID NO: 540175 - DNA, 50 bp, Homo sapiens
ctcagcctcctgaggagctgggattacagactgcctcttcaaggtgtgcc

SEQ ID NO: 540176 - DNA, 100 bp, Homo sapiens
cggcctcgaacatcgtcagcccccaggaggccttgccgggccggaaggaacagacccctgtagcgggtgaggccgcaggcggtgctctgggtccgggagc

SEQ ID NO: 540177 - DNA, 83 bp, Homo sapiens
acaagccgtggaataggtgtatcaagtaatggtgcaaagcctgaatcccatgaagctgaggtcttgaagcagctggctgagaa

SEQ ID NO: 540178 - DNA, 75 bp, Homo sapiens
gcagtggtcgaatccagtagaaaactggtcaaggaagctgtgaaatgtccatatgagaaagtaaacttgagctgg

SEQ ID NO: 540179 - DNA, 74 bp, Homo sapiens
tggccacattaagctcacggactttgggttcgccaagaagctggtagacagctgactggaaataccggcatgca

SEQ ID NO: 540180 - DNA, 75 bp, Homo sapiens
cctggatttcctggttctgtgggctccgtggcaatgaattcttctgtgaagcatgaggctcagagactggagcag

SEQ ID NO: 540181 - DNA, 100 bp, Homo sapiens
agagtcctcagaagcatgtgtcttccccagctctgcagccacatactatccgtttgttcaggaaccaccagtgacagagagtccaatgtgctgattgctg

SEQ ID NO: 540182 - DNA, 81 bp, Homo sapiens
gaagaatggcagtgctcaaactcaccgaccaggggccacctacagatgctcctgcagtggacacagcagaacaagtctata

SEQ ID NO: 540183 - DNA, 87 bp, Homo sapiens
aaaagatcccccgcttgctcctcgctgaccccatcactgtgcaagctggggctgcagagtggagcctctaaggatctgctgttactt

SEQ ID NO: 540184 - DNA, 98 bp, Homo sapiens
aattttccccttggaaacaccagcatttgctataaaggaacaaggattccggagtcctaagcagacttaaagccaagaaaataagaagaggaaagaga

SEQ ID NO: 540185 - DNA, 96 bp, Homo sapiens
gaagcggtcatgtctcgctacacgaggccccccaacacctccctgttcatcaggaacgtcgcggacgccaccagtactatactggcaattgctgga

SEQ ID NO: 540186 - DNA, 50 bp, Homo sapiens
ggtttctccagtacggatggagggatctgctggaggaaggaaaggccacg

SEQ ID NO: 540187 - DNA, 75 bp, Homo sapiens
aagacatttcctgctcggaaccttgtttactaattgacttgcaccttcgagatcccctgtgtttacccagctgga

SEQ ID NO: 540188 - DNA, 75 bp, Homo sapiens
gtgagggtttcaatgaggtgctgaaacagtgccgacttgcaaacgaatttttggaaattcctcctttcaacaagc

SEQ ID NO: 540189 - DNA, 96 bp, Homo sapiens
aagactaaagcatctgtcagaaaaatctccagtctatgtgctgaagaagcagcagcccaagagcagacaggtcaggtggaggagtgcctcaaggtc

SEQ ID NO: 540190 - DNA, 50 bp, Homo sapiens
cggaggaggagacggcaggtcgggaaaaccagcattggaatcagctgatt

SEQ ID NO: 540191 - DNA, 51 bp, Homo sapiens
agctgtcggggccgcgagtcggacgaagagttgctacgatggaagttaaag

SEQ ID NO: 540192 - DNA, 96 bp, Homo sapiens
aagcaccccggcggccgcggtaatgctggtggtctgcatcaccaccggatcaacttcgacaaataggatacccacccaccatcccagggtctacaa

SEQ ID NO: 540193 - DNA, 98 bp, Homo sapiens
ggtcgcgccggcaagagcagcgggagcggcgcggggaagggggcggtgtccgcagagcaggaaataatgaagatgtttcattttcaagaccagcagat

SEQ ID NO: 540194 - DNA, 75 bp, Homo sapiens
cagggcaaagaaaatgggactggttgaccaactggtggaacccctgggagactacctaggtggagaagcgtactg

SEQ ID NO: 540195 - DNA, 100 bp, Homo sapiens
cataccgcggctccatcacccacggagagcacatctgcctgatccgcaaggtgaacgagaactggtacgagggacgcatcacgggcacggggcgccaagg

SEQ ID NO: 540196 - DNA, 73 bp, Homo sapiens
gaattcctgtgccacctcctcctttagaaaactgatcttaatacaggtgctttgtaacagagccagactggtt

SEQ ID NO: 540197 - DNA, 100 bp, Homo sapiens
aagctgctgcaccgcggcgccgacatcaattacgccaatgtggacggactcactgccctgcaccaggccaaagatgaagaggaagcctttctggattgga

SEQ ID NO: 540198 - DNA, 74 bp, Homo sapiens
gcagactgtaatgaagcattcattaagataaagatggcttttcggccagatacagtggaaggtcttgatgccca

SEQ ID NO: 540199 - DNA, 100 bp, Homo sapiens
cacgggtattgtaccgctgagggaaaggagcgggactccggacctccaggaggatggatagaatgacagaagatgctcttcgcttgaatctgttgaagcg

SEQ ID NO: 540200 - DNA, 87 bp, Homo sapiens
ctggagaacgctgaaagctggtgggcttgggaagacaaacgacgctctgaaatttggctcccaggacgtggcccagtggaacatcgg

SEQ ID NO: 540201 - DNA, 99 bp, Homo sapiens
ggaacctcgcagtcatttatcatcagacctcagaaaggtggtcttcaagctgacagagaagctgacggaacagaaggagtggatgaagatataattgtg

SEQ ID NO: 540202 - DNA, 51 bp, Homo sapiens
caggagtgaagctgcagaccttcgcgtagagacggggtttcaccgtgttag

SEQ ID NO: 540203 - DNA, 82 bp, Homo sapiens
cgtgtgcgtgctgaagggcgacggcccagtgcagggcatcatcaatttcgagcagaaggaatactcccccagttgcaagagg

SEQ ID NO: 540204 - DNA, 100 bp, Homo sapiens
ttatgggagggctggccaacttctgctacagacgactcagtttattacccagaactctttgtctgggtcagtcaagaaccatttccaaacaaggacatgg

SEQ ID NO: 540205 - DNA, 82 bp, Homo sapiens
agtgaccgcacaccattggtcagcgtgcttctggaagagtcctatcattgatcggcctgagtctaatagctttggggacagg

SEQ ID NO: 540206 - DNA, 100 bp, Homo sapiens
ctggaggatgtgcggggtgcgccggcagaggatccagtgttcaccatcctggccccggaaggtttacccaaggtccagcctagcccctaggcaccatgtc

SEQ ID NO: 540207 - DNA, 80 bp, Homo sapiens
aatgcaagaagactgatggagcaggcttgcaatattaaagaagaggcagaaatccaggcagaacttgaacgtttggaaag

SEQ ID NO: 540208 - DNA, 82 bp, Homo sapiens
tccttctccactttcgccagcccgtgccgcgagcgcggcctgcaggagattttcagctgaactctcatctctcaacactggc

SEQ ID NO: 540209 - DNA, 75 bp, Homo sapiens
gcccagagcccttggggcttccccaaagccagagagacaagaggagcagcagcggcaccgcccctcaccctggag

SEQ ID NO: 540210 - DNA, 50 bp, Homo sapiens
ttcagtggataataccaaaatgggggcttgtacatgacagctggaatagc

SEQ ID NO: 540211 - DNA, 100 bp, Homo sapiens
gctactatgctgaacggtgcagcagtgatggatgcagctcttctgttgataggttaagacatcagaattttatagatactcccgacagctccgttacgaa

SEQ ID NO: 540212 - DNA, 75 bp, Homo sapiens
cctaaaaaatgtcatttttaccaactgtgtaaaggatgaaaatgtcaagcagacctgcctagagctggaacgtta

SEQ ID NO: 540213 - DNA, 100 bp, Homo sapiens
atcaaggctgcctataatcaagtaaaaacaatagctcaaggaaacctttccaacacagatgtccaagctgccaatgaggactcttgtgaagatatgagtt

SEQ ID NO: 540214 - DNA, 50 bp, Homo sapiens
ggaaattgatggagaccccaagtgggagattaaatctcttgatgaacagt

SEQ ID NO: 540215 - DNA, 96 bp, Homo sapiens
cgttcgcgtcatcacggacgagaactggagagaactgctggaaggagactggatgatagaattgaaggaaaatcacctcggcagtgtttgaaggaa

SEQ ID NO: 540216 - DNA, 100 bp, Homo sapiens
tgaatgggcttgaccatctcacaactgctcgcgtgacgaccgcattcgtggcagacatatctgaagagatggattaagaatgctttggattaaggattgt

SEQ ID NO: 540217 - DNA, 98 bp, Homo sapiens
tgagccaccttgggaacctagctgatgataggggggttccatctcccaacttgtccatacttatcagatgtagacttcctagatgattcttcaacgga

SEQ ID NO: 540218 - DNA, 100 bp, Homo sapiens
ggataatggaggcctggactctgaggaatcctatccatatgaggcaacagatgtgggctctcttgatgagaagatgaagagcttggatgtgaatcaggac

SEQ ID NO: 540219 - DNA, 100 bp, Homo sapiens
ctgggatgggtgacgtcaggctgcccactgactgtcctgtccctgctgggccgtgtttggactcctgcctcgacctgcctagagctggaacgttacctcc

SEQ ID NO: 540220 - DNA, 80 bp, Homo sapiens
agtgggaaaaataaagtgttgagtaaacagaccaagttggagtagcacagaagagggaggatgctgtttccaaagaagtg

SEQ ID NO: 540221 - DNA, 100 bp, Homo sapiens
acgtgcggtgctcgtcgggagtgatcacctaccctacagtacgagctcaactggaggcagtcctgtgcggaaatctgaagaaaaaacagatacaaagcga

SEQ ID NO: 540222 - DNA, 90 bp, Homo sapiens
ctctgatatcttcctgtcatggttccccttctactacatgctgaagagagcacagtcagacgaactcgaaaaaatagaaaagcatggccg

SEQ ID NO: 540223 - DNA, 75 bp, Homo sapiens
agctttgtgagaagggcagaagttacagaatgtctgaaggggacagtgtgggagaatccgtccatgggaaacctt

SEQ ID NO: 540224 - DNA, 50 bp, Homo sapiens
aaggcactgctttttcatgacggaggagtatttgaagacttctgagcgga

SEQ ID NO: 540225 - DNA, 76 bp, Homo sapiens
gtgtacccacccaaggctaaaggcagagccaggtttccacttcaagcgtgacccttttgcctgtgggatgagctcc

SEQ ID NO: 540226 - DNA, 100 bp, Homo sapiens
ccaagaaaaaaaccacaaatgtttttctgttttgcctgaatacatgatttaaacaagagatttccacagaagatatctacgtctgcatgatctcctttgc

SEQ ID NO: 540227 - DNA, 73 bp, Homo sapiens
cagaagccatgcccctcaggctggaacttgccctgtctcctcgcagatgaggcctcatgcattgtgcgtcagc

SEQ ID NO: 540228 - DNA, 90 bp, Homo sapiens
tgtatgagcttgatggaaaagaactctgtagtgaaagattcagtgatctcttctccctggcggaggaatatgaggactcttccaccaagc

SEQ ID NO: 540229 - DNA, 75 bp, Homo sapiens
gttgtgttcctggcttccctctggatgctgacagaaacaaggaactacctgaagaagcaggtcacacccctcttc

SEQ ID NO: 540230 - DNA, 98 bp, Homo sapiens
ttgactttacaagaatatgaattcgaaaagcagttcaacgagaatgaagccatccaatggatgcaggaaaactggaattcatgatttgttcctgtagc

SEQ ID NO: 540231 - DNA, 83 bp, Homo sapiens
ccggaatcggggcgcttcgccccgggccccccagcatgaagaccccggcggacacagaaagaagcttccggttctgaggtcct

SEQ ID NO: 540232 - DNA, 50 bp, Homo sapiens
agatgatacctttctaacagcccaaagaaaccctaaagcaggcagcagct

SEQ ID NO: 540233 - DNA, 98 bp, Homo sapiens
ctacaaatgacttaagtcagcccacgggatttttagcccagcccatgaagttttatgagcaatatgatgatgatgaaattggagctctggataatgca

SEQ ID NO: 540234 - DNA, 120 bp, Homo sapiens
aaagaaggccctgagtcaaagaagatgcctcgaactaaacaaattcatcccagaaatctaagagacccctccacccttaaccaaatactgtatgtaggggtttggagcaaccaactgtcc

SEQ ID NO: 540235 - DNA, 75 bp, Homo sapiens
tcgcgacgctgctcaaaacctcgctccggaaaggggacacctggcctctgagcccaagctaagccatcatgtcct

SEQ ID NO: 540236 - DNA, 101 bp, Homo sapiens
tcgacgtaaagaacgccttctacatcggcagctaccagcagtgcataaacgaggcgcagcgggtgaagggctacttctacaagtccgaacagccagtccag

SEQ ID NO: 540237 - DNA, 82 bp, Homo sapiens
tgggaaagatctaccttctggaagctactactacgtggtgcttggaaagggaaatcctcattgacgattcaatttgttgaag

SEQ ID NO: 540238 - DNA, 101 bp, Homo sapiens
acctccatcaggaccccagatgtctgacagccctgtgtgacaccaagataagtaacgattttaaactgtctacggttcttaacctcatctgttaagttccc

SEQ ID NO: 540239 - DNA, 90 bp, Homo sapiens
gtacttcaagaggaggaatcacgctcggaaacaatggctgtcggaaaaggtaacagaagatggaactcgaaatcccaatgaaaaacctac

SEQ ID NO: 540240 - DNA, 50 bp, Homo sapiens
ctggtctctcccaccacacagagatccagaaccagaaccacagcccttct

SEQ ID NO: 540241 - DNA, 82 bp, Homo sapiens
ggacaagtgtttccggaagtgtatagggaaacctgggggctccctggacaactccgagcagcttgccttgcgccatggactg

SEQ ID NO: 540242 - DNA, 117 bp, Homo sapiens
gcagatggaaggcagaggctgcgcagagaatggagagctgtgtctgaggagccttggaacattcacccagttcctcagatgttagcaatgatggttgatttggaagaagatgaggac

SEQ ID NO: 540243 - DNA, 100 bp, Homo sapiens
atgtgtctcttctaagctgaataaagctgttttggaactgtcaggtacctcaaagcatcttggagtctctgtggatcgttatgagccggaatgtgagcct

SEQ ID NO: 540244 - DNA, 100 bp, Homo sapiens
gcaagtcggcgctcaccatccagttcatccaggttatcaatactctggctgaccatcatcatcgtgggactgactttggtggaagtccttggttacatgt

SEQ ID NO: 540245 - DNA, 100 bp, Homo sapiens
cggcgcgcgtggatcctgctcaccttgggcttggtggcctgcgtgtcggcggagtcgcgatgaagaacgatacagatacagggaatatgcagaaagaggt

SEQ ID NO: 540246 - DNA, 90 bp, Homo sapiens
gagccctgcctaaggtccagggctcgatctggccctaaccacagagtcaccttgagggggcaatggcggcttcctgtgttctactgcaca

SEQ ID NO: 540247 - DNA, 74 bp, Homo sapiens
gggaccccaggatgggggacaggaggctgcggggcctcagcgtgcctgccagtgtagagccggtggagcagctg

SEQ ID NO: 540248 - DNA, 100 bp, Homo sapiens
gcgcgagatggacctgcaggtgcagaagcagcccgacggccatggaggctgaagagacgatggaatgccttcaggagttccctgaacatcataaaatgat

SEQ ID NO: 540249 - DNA, 50 bp, Homo sapiens
tcgggcagtggctccgctgggataagtgagaactcaacagaggcaaaagc

SEQ ID NO: 540250 - DNA, 90 bp, Homo sapiens
cccggcgcaggagcggccgcgtttcggcctcagaagtgtctgacttccagcaactgctggcctgtgccagggtgcaagctgagcactgga

SEQ ID NO: 540251 - DNA, 83 bp, Homo sapiens
ctgggacttaggagggcaggaagagctgcagtctttgtgggacaagtgatgaacggcagcagccactcaccaacagccatcaa

SEQ ID NO: 540252 - DNA, 100 bp, Homo sapiens
ggacgaaagtgtcaaggcattacggctcccattgaggtctgctaccgctgccacggccccccctgctgccccggctggggagggtggtccccctgcaccc

SEQ ID NO: 540253 - DNA, 107 bp, Homo sapiens
cttccctgcactctcatcgctctcggcctcggcctcggcctccgacacggtgctggagaatctggtaaaagcaccattgtgaagcagatgaggatcctgcatgttaa

SEQ ID NO: 540254 - DNA, 75 bp, Homo sapiens
ccgggcgccctcgaccctcggatagcaaacgagatgctgctcagtggacggaagctgacagcgcaggaggcgtgt

SEQ ID NO: 540255 - DNA, 74 bp, Homo sapiens
acagtctgcatgtgcagttttcaggcttctgcaggagctacactctgtgtcctggctaccccaggaactggatc

SEQ ID NO: 540256 - DNA, 49 bp, Homo sapiens
ttaagaagtacaatagcattcgcgcttcagtatcagacacagcacagca

SEQ ID NO: 540257 - DNA, 100 bp, Homo sapiens
cagcaacatactttctattgccaggaactaggcacactgctaatgtgtctgatccacatcttcaagtctggcctttgaagacctcagcaaactaatgatc

SEQ ID NO: 540258 - DNA, 74 bp, Homo sapiens
gggaagaaggtccgcgttaaatattgccatgcaatcactgtggaatatcaaggtggcagtgctggtcaagccag

SEQ ID NO: 540259 - DNA, 51 bp, Homo sapiens
tttttgccaccacactccagcttggtgtcttgggacaaggtgcgcattcct

SEQ ID NO: 540260 - DNA, 82 bp, Homo sapiens
aaagcagcgtgcgttcagccctgggaagccatgcagtgacacccgctaagacttgttggtagccatgtcggagccccacagg

SEQ ID NO: 540261 - DNA, 100 bp, Homo sapiens
aggagccatagtacctacagcagcactccaggtaaattggcaggatgaggagcagcaaatcaaaagaggtgcctttaccaaatccaaggaactctcaaag

SEQ ID NO: 540262 - DNA, 75 bp, Homo sapiens
gtaaacaacagaagaactgagctatttttgaaagaacatgaccaccttcgaaagctctaaattatcttggtattc

SEQ ID NO: 540263 - DNA, 108 bp, Homo sapiens
atccgcgagttcctgcgcggctgcggggcttccctgcggctggagatgccttcaattaagttgcagagttctgatggagagatatttgaagttgatgtggaaattgcc

SEQ ID NO: 540264 - DNA, 82 bp, Homo sapiens
ctcgcggaccggcgtccccggcgcgaagaggctggactcggattcgttgcctgaggcggatgttcccattcctgtcatttac

SEQ ID NO: 540265 - DNA, 100 bp, Homo sapiens
ccacaatgtgcctttgcaggggagcctgagagccacagttcaaggagcagggacaagttacaggaatgttctccaagcagcaatccaaaagagtctcaag

SEQ ID NO: 540266 - DNA, 82 bp, Homo sapiens
gcaagcatggagcaacaggatcagagcatgaaggaaggggagccttcacgtaaatgggtccagtcatgcctcccagtaagaa

SEQ ID NO: 540267 - DNA, 100 bp, Homo sapiens
gcttttgatcctagacctggtcgtactaatgtccagcagacaactgatctagaaataccacccccagggctggtgaattaccagatctctgtcaagggca

SEQ ID NO: 540268 - DNA, 100 bp, Homo sapiens
gtcttgtgaagccatgaacgagctctttcagcccaccgtcagcgggatcatccagcacatagcgggctgacgcacgaggcacacaggaaggaggtggagc

SEQ ID NO: 540269 - DNA, 83 bp, Homo sapiens
ctgagggtctcggggcgggcgccgcgggacctctccgggccatgggagcggtggtgccccccccgggcacggggccatgtaca

SEQ ID NO: 540270 - DNA, 83 bp, Homo sapiens
atgccctgcagtacctgcagaaggtctctggagacatcttcagcagggcgaccattgacgaggtggagacggacgtggtggag

SEQ ID NO: 540271 - DNA, 50 bp, Homo sapiens
tgatgttgctctgggaatcctgattgagaacattgacatcaccaatttca

SEQ ID NO: 540272 - DNA, 74 bp, Homo sapiens
tggaaagttccaaactgtctgatgctggctatatcgagaagtttactgactttcttcggctctttgtgagtgtt

SEQ ID NO: 540273 - DNA, 74 bp, Homo sapiens
gctaagacaccgggacctcctggaagccaaaaatgattgatgactcttccgcgtctatttctctggcccagctt

SEQ ID NO: 540274 - DNA, 76 bp, Homo sapiens
attcacaagatccaatcccttgtccttaaaaggtggagccgccaccaaaatgcagattttcgtgaaaacccttacg

SEQ ID NO: 540275 - DNA, 88 bp, Homo sapiens
agggctgccccgccgagcagagagccaggccacatccacgtcctccgagcctacatcaagacccaagtgaacaaagagctggagcagc

SEQ ID NO: 540276 - DNA, 100 bp, Homo sapiens
cgagtggaagagctcggggatctggctcaggcccacatacagcaacttagcgaagctgccggtgaagatgcaagattcctaaaaaaggctttgtggaggt

SEQ ID NO: 540277 - DNA, 75 bp, Homo sapiens
agatcttcactatccaatacggcgcagttgtgtagcagttgagtaatgctggttagctgttaaggtggcgtgttg

SEQ ID NO: 540278 - DNA, 100 bp, Homo sapiens
tagtgaaatgggctaataatgctggcaaagtggaaaaatgtgcgggtgaggcgctcaggcaagttctggtcaaccgttactatggaaacgtcagaccttc

SEQ ID NO: 540279 - DNA, 90 bp, Homo sapiens
aggccgggacccggttccccggcccacagtgggggtgtgcaaacccgagagaactggtgttatagttttgccgctggactcttccctccc

SEQ ID NO: 540280 - DNA, 90 bp, Homo sapiens
ctcaatctttgatgactttgcacattatgaaaagcgtcaagaagaggaggaagccatgcgtagggcagggcaagaatcctttcgttccat

SEQ ID NO: 540281 - DNA, 83 bp, Homo sapiens
gcatcatcgacacccccgggatcctgtctggagagaagcagcggatcagcagagaactcccccactggaaaggattctgaaag

SEQ ID NO: 540282 - DNA, 83 bp, Homo sapiens
ggacaagtcggcgccccagagcggacgaggttgctacaagcctcaggaaaaatcagattacttgatgttggcagctgctttaa

SEQ ID NO: 540283 - DNA, 88 bp, Homo sapiens
gggcttcacggagattgtcttctgtgctgtcacctcgaatgagcaggtcaagattcttggtgccaccattgagaactccaggattgtc

SEQ ID NO: 540284 - DNA, 75 bp, Homo sapiens
ctcttccaaagaatgccacagaatcaggggaggcatgcttcaggtgagtttggctactgtgatttttgttgcaag

SEQ ID NO: 540285 - DNA, 74 bp, Homo sapiens
cagtcacctctcaactgtgtgccaaagagttgttgcctgcaatctctatccctttgtaaagacagtggcttctc

SEQ ID NO: 540286 - DNA, 74 bp, Homo sapiens
tgctgccgccccttgggctaaaaggtgtggatgaggtcaccattgtcaacattttgaccaaccgcagcaatgca

SEQ ID NO: 540287 - DNA, 80 bp, Homo sapiens
cctcctcagcggcgggctatgcctgcctaggtattcccaacgccagcccagcagccagtggccacaccactaatgacccc

SEQ ID NO: 540288 - DNA, 90 bp, Homo sapiens
actccctgacagaatactgccaaggagatcaaagacgctggccttcagacctgatcagactcccaggggcagccaccacatgtatgacag

SEQ ID NO: 540289 - DNA, 75 bp, Homo sapiens
aagaaagcgatttcctccgcctcttccaaagcggtttagatcctgataagcatcttgggaaaaccctggatcaaa

SEQ ID NO: 540290 - DNA, 50 bp, Homo sapiens
agatggtgatgggatattttctcctggacaaggcatttcaaatgtcatcg

SEQ ID NO: 540291 - DNA, 100 bp, Homo sapiens
ggtgcccgaggaggcagccaagctcgtagcctgccactccgtgcagtgatagattcgtgtggcctttcaaatgattgtgaagtggtggaaatggatccaa

SEQ ID NO: 540292 - DNA, 100 bp, Homo sapiens
tcgacttcaccatgaagacgctggagatccagggcaagcgggtcaagacccctctccctcagggccacaggccttggcacctctacctggggatgacgtc

SEQ ID NO: 540293 - DNA, 100 bp, Homo sapiens
ttctggcagaacgaggcaatttccctccctgcaggcggaaggaaggcaattagagcggtaatcactggccagcatcgaaatggtgtaatttcagcccgaa

SEQ ID NO: 540294 - DNA, 100 bp, Homo sapiens
tccaggcatgccccgctacgagctggctttaatcctgaaagccatgcagcgggtatcagcggcagggaaggaggctttgccatcttggctgcactgggac

SEQ ID NO: 540295 - DNA, 100 bp, Homo sapiens
caacgagatgctgggcctcgaggagggggaccttgaagacgacttcgaccctgcccagcacgaccagctcatgcaggtacttaaacttcacccttgttta

SEQ ID NO: 540296 - DNA, 98 bp, Homo sapiens
gcagccccgggccaggccgcggccggggcaggagcgcagctcttgaatgtcgtctctcaactagccaaacggaatctgcgactgctggtcctaggccg

SEQ ID NO: 540297 - DNA, 83 bp, Homo sapiens
gcctgtgcgcgcgtgcgcggacatggcctcaaacgttccagggtctccctccactgctgtagtaacccgggtccggggcctcg

SEQ ID NO: 540298 - DNA, 111 bp, Homo sapiens
ccaaggcgtgaggcgccgcccgggtgtccccgcggcgcaggaggcggtggagcgcagagcgggcgagcgcgacgccttcctgagtcctggatctttcttccttctggaaat

SEQ ID NO: 540299 - DNA, 90 bp, Homo sapiens
ctgggggattcgcagggaggatgtcgggacaccccggaagctgggaaatgcttcatcctcatctgcgatttctgcacactccccatcagt

SEQ ID NO: 540300 - DNA, 83 bp, Homo sapiens
ctttattttaaaagctgatgttccaaggtaccttgtggtctataatcctttagaacaagaccgaatctcgttggtctcagtct

SEQ ID NO: 540301 - DNA, 75 bp, Homo sapiens
gagggacccaccgtagagactaagcaagtagcatctctgattggagctgatcctcgtgagatcatttttactagt

SEQ ID NO: 540302 - DNA, 75 bp, Homo sapiens
acttcactccagtgcctccgacgcctcctgatggtggagccgccaccaaaatgcagattttcgtgaaaaccctta

SEQ ID NO: 540303 - DNA, 98 bp, Homo sapiens
agctggcgtactccggcagcgaaagcggtgcagacgggaggaaggatatgtgatggcgtccagtttggagctgggataaggttcctgtagccgacacc

SEQ ID NO: 540304 - DNA, 98 bp, Homo sapiens
aaggattctcagaacaacccgagcaactttcctatcctgtctctcctgatgaaggctcctgctgcttcttatgaggacacattcagctaacgtatttt

SEQ ID NO: 540305 - DNA, 88 bp, Homo sapiens
atgcgactcaaagctgcacggcagtctgtttatgaggttgaacgtcatagagaacatctcattaactacattatatttttgagaataa

SEQ ID NO: 540306 - DNA, 51 bp, Homo sapiens
gaggaaacctggtctcccggagccaggtatccatcatcccacgtggcaaag

SEQ ID NO: 540307 - DNA, 82 bp, Homo sapiens
gcagattgaggaacaaagataagggagaacaagcagaaactggtcagagaataagaaagccttgagttttgtgaaaaaccgg

SEQ ID NO: 540308 - DNA, 100 bp, Homo sapiens
tacaaggaatgttcattcgcaaagtttgtgctgggagccagtcttcacttgctttgacatcaacagggcaggcttcactgtataaataggagaggatgag

SEQ ID NO: 540309 - DNA, 101 bp, Homo sapiens
cgtaggccctgagcctgtgcaattatttcgagagtcaaaatgtggatttccgaggcaagaagcctggctttggcccttcaaagagactgtgaggaaatgtg

SEQ ID NO: 540310 - DNA, 75 bp, Homo sapiens
ggacactggcggccatggaactcaccgcgatcatctcagtccacattggaacgatctgaacagcagatcagggct

SEQ ID NO: 540311 - DNA, 100 bp, Homo sapiens
ggtgctggaggacttcccaacggaaacttttgagaagaactttgaaagagaaacccataaaataagtgagcaaaatgatgctgataatgctagtgtcctg

SEQ ID NO: 540312 - DNA, 100 bp, Homo sapiens
gcagcgacaccatggatctctcctttatggccgcgcagattctgtttctggcgtctgcatacgcaagtccccaactcgctgaggagagctgttcagctat

SEQ ID NO: 540313 - DNA, 100 bp, Homo sapiens
agcgcctggcctgcgcgccgctgcccgcgccacagatctcccttgagtttagaaatctggctgagaaataccaaacagtgattgccgacatttgccggag

SEQ ID NO: 540314 - DNA, 75 bp, Homo sapiens
ctcggtgattgaggacaagaccatcgagctcatggtgaaaggtgtagcagtcactcggcctacacccacagcatc

SEQ ID NO: 540315 - DNA, 100 bp, Homo sapiens
aagagtcaaaacaaataagttatgctatgaggatgacaaactctggagtaattggagccaagaaatgagtataggacacagcattgttggttttgccatg

SEQ ID NO: 540316 - DNA, 80 bp, Homo sapiens
atggaggctgagcatttattcagatgtctttggtggacttgggaaagaggttgctagaagcagcaagaaaaggccaagat

SEQ ID NO: 540317 - DNA, 100 bp, Homo sapiens
ccaaagagtggtactggaaccaggccccttcacagatgtagtcactacaaatcttaaattgcgaaatccatcggatagaaaagtgtgtttcaaagtgaag

SEQ ID NO: 540318 - DNA, 75 bp, Homo sapiens
aagaaattcaaagtgcatttgtttcagttctatcagaaaatgatggaattacatgaatgacagtcttcgaaccaa

SEQ ID NO: 540319 - DNA, 75 bp, Homo sapiens
gatgccagaggtcaacaaggttctggacaagatgaagtctttctgccaggaaatttgcgagaatccccgatttat

SEQ ID NO: 540320 - DNA, 50 bp, Homo sapiens
tccaattcaaaagatgtttgaaaagctggtacctcagccagaccccaacc

SEQ ID NO: 540321 - DNA, 95 bp, Homo sapiens
cacttatctcgaaagcctatcagcatagttaaggccttagaaaatttacgtgtatacctgtgtgagaaaatcatagctgagagacattttgatca

SEQ ID NO: 540322 - DNA, 50 bp, Homo sapiens
cgcaaccagcgcaaagactcagaggtggagtttgtccatatgctcaatgc

SEQ ID NO: 540323 - DNA, 90 bp, Homo sapiens
tggctgaggagttttcaatcccactttctgaaaaggatatgagcatgctcgaggagaggattaagcggtcagcaaagagaccctctgctg

SEQ ID NO: 540324 - DNA, 101 bp, Homo sapiens
cggatccagacttcactgtgaatgatgtcaaaatgtgtgtggcttctaaccgaaaatcttcagttggcgtaaaaaagaatagcaagagcagaacgttaacg

SEQ ID NO: 540325 - DNA, 82 bp, Homo sapiens
tggtactcctggttaatcaacagcttcgtcaacggaagctcttcgtgtggtgaagatcttacagaaccttgatccgccattt

SEQ ID NO: 540326 - DNA, 100 bp, Homo sapiens
tttcacaattgcagcagatgaagatccattggtaaattgatcaggatttttggcctaccctccaaagaaaagggccgttgctccagggagaactgcaaat

SEQ ID NO: 540327 - DNA, 75 bp, Homo sapiens
gccatttactctgatagttcaaatcccaccaaatattttggttgtgagctgggagcacagacccagtttgatgtt

SEQ ID NO: 540328 - DNA, 100 bp, Homo sapiens
ggccggccgacccttcctgtcgctgacggcgactgcgggaggccagattgttctctggggccggactgagaaatgcctgaaggagacgacggaggagatc

SEQ ID NO: 540329 - DNA, 100 bp, Homo sapiens
gtgaagctgtttcgggccagcgacccgctgctcagcgtcctcatgtggggggtaaaccactcgctcatggtgataaacaagacaaagtcaagcagaaagc

SEQ ID NO: 540330 - DNA, 83 bp, Homo sapiens
cctactattcaacggtacagcacaaagtcgccaaggtgcggtctttcgaccactccggaaagtacggaagccgcgctacgtca

SEQ ID NO: 540331 - DNA, 82 bp, Homo sapiens
gcattacaagccagcctctgggaccgaggtgatgtccttgcaaatatcaatggtgtgagcacagaaggttttacctacaaac

SEQ ID NO: 540332 - DNA, 97 bp, Homo sapiens
ctaacacagtggaaaggaaccgttctggatcagcatctgcctgcccttctgccatccgagcgccctgactgcgccacactgcaggccatggagaatg

SEQ ID NO: 540333 - DNA, 75 bp, Homo sapiens
gccggaacgggagccaacatggcagcggggttcgggcgatgctgcaggattcatgatgttgctatcaaaagttga

SEQ ID NO: 540334 - DNA, 99 bp, Homo sapiens
gaagacctcgaaataattgttgatcaaaagcagaacatgagcctttgactgctcctcagctcttggtcccagatgtctatctaaatctgaagctttcca

SEQ ID NO: 540335 - DNA, 97 bp, Homo sapiens
cgagcctggctggggagggcccgactgctccagcgtgatcagggccaaagcggtcagtgagaaggaagtggactctggaaacgacatttatggcaac

SEQ ID NO: 540336 - DNA, 74 bp, Homo sapiens
aaatatccgccatggagaaatcttggatcaacttgcagcagacatgtacaactttatggccaaagaaggggagt

SEQ ID NO: 540337 - DNA, 100 bp, Homo sapiens
ccgccggggacggtggacaagaagatggtggagaagtgctggaagctcatggacaaggtttgggccccatggtatccctgtgacagtatttcccaaaagg

SEQ ID NO: 540338 - DNA, 95 bp, Homo sapiens
tggcaataatattgaactgggcacagcatgcggaaaatactacagagtgtgcacactggctatcattgatccagagggtgatgagacaggagtga

SEQ ID NO: 540339 - DNA, 100 bp, Homo sapiens
ctcgccggacggctcccagggagagcagacgcgccagacgcgccaccctcggggcgccgacggtcacggtggagccccctgagctgcccgctgatctgca

SEQ ID NO: 540340 - DNA, 74 bp, Homo sapiens
acagacttcaaagttatggcaagagatgagttaattctaaggtgagcccaggccaggatgggggactccaggga

SEQ ID NO: 540341 - DNA, 88 bp, Homo sapiens
gcagactacatggcatctaccatagggatgttccatttaagcagacctcttccatagctgtagctggagcggtaattggagctgttct

SEQ ID NO: 540342 - DNA, 100 bp, Homo sapiens
gcaagatcgctccgggttgagatccacagagctaaacgttttagagtaccaaccattgtgtgctgtgaggtaaaggggaaggtgtggctcattgacttta

SEQ ID NO: 540343 - DNA, 83 bp, Homo sapiens
ccagacactggaaaactggatgctgcagacactgaacgaggagccagtggttcagaaaagagaccctcgtgactggactgcac

SEQ ID NO: 540344 - DNA, 98 bp, Homo sapiens
caagtggaggcgccgctctagcggccgggactctgaactatggcgaatttcgctaaggagtttgtgatcagtgatcggaaggagctggaggaagattt

SEQ ID NO: 540345 - DNA, 100 bp, Homo sapiens
cgagagaggaaagcatgatgggagccacgaagggactgtgtattttaaatgcagtttcagactgaattgggcagttgaccgaaccggaaagtggcaggag

SEQ ID NO: 540346 - DNA, 51 bp, Homo sapiens
gccgggagcccttagggaggcagatatccatctctcctcgaacaacaaatt

SEQ ID NO: 540347 - DNA, 83 bp, Homo sapiens
gtgccttcgagtgcgaggcgaggtggctcctgacgctaagagcctgattcggactccaccaaacactcaactccatcgaatag

SEQ ID NO: 540348 - DNA, 100 bp, Homo sapiens
cagtgccaccaaacacgacagtgagggcaagaccgcctggccctgaaggaccctgttcatacagtgtcactgcagcagttcatctacgagaagctcaagg

SEQ ID NO: 540349 - DNA, 100 bp, Homo sapiens
catcggtgcccagaagtcagcccagaccttcctgtctgagtgaccacggaccccccgcccgacgtgcacgtgagccgcgtcgggggcctggaggaccagc

SEQ ID NO: 540350 - DNA, 98 bp, Homo sapiens
taaaaagaggcgaaaggaagcaagcagttcagaagagccaaggaataaacatgcaatgaacccaaaaggaaatttacagcaacaatgtcaacaccaga

SEQ ID NO: 540351 - DNA, 50 bp, Homo sapiens
cacgcattctagactcccgaagagatttggtcgtattgggcgcctggtca

SEQ ID NO: 540352 - DNA, 75 bp, Homo sapiens
ctcacaaagcctctagatatctgtgtgaagtacttgtcaggtctccttgagggttttacagattcctgtggcaaa

SEQ ID NO: 540353 - DNA, 72 bp, Homo sapiens
gaccaactacctggtggtggctgccatgatgatttccattgtggggtagagttggctttgtgggacacagct

SEQ ID NO: 540354 - DNA, 80 bp, Homo sapiens
aacagcagatgtaccctcagtacgccacctactattacccccagtatctgcaagccaagagctcttcagaaaccaggctg

SEQ ID NO: 540355 - DNA, 90 bp, Homo sapiens
gaaattaattgctatcaatgcgaatgatcctgaagcctcaaagtttcatggatgtctttcagtgacttcctgaggcactattcccgcctg

SEQ ID NO: 540356 - DNA, 80 bp, Homo sapiens
gaaattcagaagccagagaggaaggccctgaatgaagccttgaagctcttcaagatgcactcccctcagacttctgccat

SEQ ID NO: 540357 - DNA, 100 bp, Homo sapiens
gatgatgttcaaaaagggaagttttgaaattggagccacagtttaccctgttgctatcaaggtagtaagcctggagaaaaattgaggccctggctgaaaa

SEQ ID NO: 540358 - DNA, 90 bp, Homo sapiens
ctactgcctggtgtacggcttcctgcccaacggctccctggaggaccgtctccactgccagctgaggcggcacctggagctgaaagagaa

SEQ ID NO: 540359 - DNA, 74 bp, Homo sapiens
ccgtgcccacggtgttcgcctttcaggaccccacacaggtacatcaggaacgtctctatcaagaatacaatttc

SEQ ID NO: 540360 - DNA, 101 bp, Homo sapiens
cttgcggaggtgcggctgcaggccgttgttggtcgagctggcgggtcccgcgggccaggccgtggagatgatcatgggaacagcaatagtagtcatgtaaa

SEQ ID NO: 540361 - DNA, 101 bp, Homo sapiens
ggagcccggctcccgcaccatggaggaggacgacagctacgatttgtgacattatttccaaatgggaacaggcttccaaagaacagcagcctggaaaatgt

SEQ ID NO: 540362 - DNA, 78 bp, Homo sapiens
ggctctgtggatgacgaggtttcccgcatcctggccagcaagaattttgtagccaccttggctaatgggatgagcctc

SEQ ID NO: 540363 - DNA, 100 bp, Homo sapiens
cttcgcgggaagacgcggcggcggcggcggaggatgagcctgcagagcgcgcagtacctccggacatgaaagatcagatgtcaacttcatctgtgcaggc

SEQ ID NO: 540364 - DNA, 100 bp, Homo sapiens
cctgcagtgggtttactgctgttccatctccccagactgcagcatgctgtgctctgcagctggagagaagtcggcctggttgcagtatgcttgaaatctg

SEQ ID NO: 540365 - DNA, 83 bp, Homo sapiens
atgctcttcggcctagtgcgccagggcctcaagtgcgatggtgaactaccgaggccaggtggtgagcctgatccggatgcgga

SEQ ID NO: 540366 - DNA, 51 bp, Homo sapiens
cagcgctcaccgacttctctgctggaaagggctacccctgcaaaacatgta

SEQ ID NO: 540367 - DNA, 51 bp, Homo sapiens
atctaccgtcaccagcagaagataaagccagagctggtggaacgtctcatt

SEQ ID NO: 540368 - DNA, 101 bp, Homo sapiens
ggactgcagttgtggctgccaggttgcagtgagccaggattgtgcgactgcactccagcctgggtgacagggtgaaacgccatctcaaaaaataaaaattg

SEQ ID NO: 540369 - DNA, 127 bp, Homo sapiens
gaaagccccagccacccatcaaatcagagagaaggaatccaccttcttacgctatggcagattttctggcatccttaaatcttgtgtcaaggattggttataatataaccagaaaccatgacggcgg

SEQ ID NO: 540370 - DNA, 74 bp, Homo sapiens
agagagagtctcaaaggagctgcagagcacgaacttccaggagccggtgcagccgctgacacagcagcaggtgg

SEQ ID NO: 540371 - DNA, 82 bp, Homo sapiens
tacttcatcgtggtaggctatgaccacgagaagccaggttactgaagctaaaggagatgtttaactccaagtttggatctat

SEQ ID NO: 540372 - DNA, 83 bp, Homo sapiens
gcgggagctggacggcgagcgcgagcggcgcgagaaaatagcctgggctggaagctcttctacgtcacaggctgcctgtttgt

SEQ ID NO: 540373 - DNA, 100 bp, Homo sapiens
ggcacccggtgtaccgcggcgagaagccccagctgcactacgcgctggccagctcagcgtccctggaagggaagggacaactgaagttcacctcaggacg

SEQ ID NO: 540374 - DNA, 75 bp, Homo sapiens
ggcagagggaacctacccagtccattgctgcctgctacaagctgggacgacatatatctttagcaaaggtggtgg

SEQ ID NO: 540375 - DNA, 75 bp, Homo sapiens
gagtgggcactgctgcagggggacccgtcagtggacatgaaggtgggcaccatgtccttgaagcttcaggcaagc

SEQ ID NO: 540376 - DNA, 99 bp, Homo sapiens
gtgccattttacattcccaccagcaatgtatgagagatccagtgtctccgaatcttcgccagcatttggtcaaaggtcgtgataaacatatcaataatt

SEQ ID NO: 540377 - DNA, 82 bp, Homo sapiens
gcgggagctggacggcgagcgcgagcggcgcgagaaactgcgtgcccagatgcgcgacctggcacggggcatgttcgtcttt

SEQ ID NO: 540378 - DNA, 94 bp, Homo sapiens
caaggtgaacgggcggcccctggagatgattgagccgcgcacgctacagtacaaggtcatgttccttggggaactggaagaaatattggatgtg

SEQ ID NO: 540379 - DNA, 74 bp, Homo sapiens
gcttttaccatgatttcttcctgggaaaggagagatgcttcctgaaacttggagagtggcagctgaatctacag

SEQ ID NO: 540380 - DNA, 75 bp, Homo sapiens
tttgaccacaacaagggccggattctcacccagatcctgataacttaagtgactctctcttttccggtgatgaag

SEQ ID NO: 540381 - DNA, 75 bp, Homo sapiens
ttctaaaaggatatgtgttgctaatacccatctttactggcatcctaaagaatttatccagttggcgaaggactt

SEQ ID NO: 540382 - DNA, 75 bp, Homo sapiens
gggcagttgtggccgtaggactgaacacggggaggatcagtgaatgcttgtgaaaagacctcatttatgtttctg

SEQ ID NO: 540383 - DNA, 101 bp, Homo sapiens
gcccaggagacccctctgctgcaccacttcatggtgtcccgcatgagatgtctgcagaatgagacttacagtgcgctgagccctggcaaaagtgaggacgt

SEQ ID NO: 540384 - DNA, 90 bp, Homo sapiens
aaagtgagcagtccagaaagcggcttatcgaacagagccgggagttcaagaagaacactccagagcagatcgccaaactgaggcagcaac

SEQ ID NO: 540385 - DNA, 101 bp, Homo sapiens
ccgccagccactcgcccctggcctcgcgggccgtgtctccggcatcatgtgtggattcttctctaatacttgatgttcctctgggtgtgatctcgagaatt

SEQ ID NO: 540386 - DNA, 75 bp, Homo sapiens
gtgatggcatcaaccgctacgactgtgtctgccaacctggcttcacagacctcctgccccccgaggtctgcagtc

SEQ ID NO: 540387 - DNA, 82 bp, Homo sapiens
gagctgagtggttgtgtggtcgcgtctcggaaaccggtagcgcttgcagcatggtgtggaaacaggaagagaactagaactg

SEQ ID NO: 540388 - DNA, 97 bp, Homo sapiens
ggcattttggggcagaatacagagatatggaatcagcatgtgccgaagcgccacctcagaagataaaaagaaatgagtctcatatttggcattcttt

SEQ ID NO: 540389 - DNA, 76 bp, Homo sapiens
cttggtaaataccgaatggacctggtgctccagctaaaggaatcctttgctgaacacctaggctattcaaatgggg

SEQ ID NO: 540390 - DNA, 87 bp, Homo sapiens
agcagaggccttctctagaccttgccaagatggcacagatggctgagagctagcaaggaaaactcaggaccatgatggctcagtttc

SEQ ID NO: 540391 - DNA, 82 bp, Homo sapiens
gaaacttttggctcaaatggagatcaatgattcaacacgggtcctaggcctacttacaagcctccagtctcaaattatccag

SEQ ID NO: 540392 - DNA, 101 bp, Homo sapiens
agggagactgttgttcccggagatgcggcgcgcagtgctggaactttgcctgtcacctttcgttgcctggaagaaaatctggggattgataagcgtgtgac

SEQ ID NO: 540393 - DNA, 90 bp, Homo sapiens
cgcttttcttaagacgctgcgcagagatcccatgttagatctggatattcaagaattagccagtcttaccactggaggaggagatgtgga

SEQ ID NO: 540394 - DNA, 50 bp, Homo sapiens
gtacgtggcctgggtgagagaggagacttcacagagaatgcagttgtctt

SEQ ID NO: 540395 - DNA, 97 bp, Homo sapiens
gcacatttcctgcatggctgcaatagcaagaaagcctattttctgtatatgtattccagatatctggtgagaataatgtttgaggtacaggacttga

SEQ ID NO: 540396 - DNA, 100 bp, Homo sapiens
tggtggcaagtattgctgtgggtgctgggacttcccgtccgcggcgtggaggatctctggaaacatggctacagaacatgttaatggaaatggtactgaa

SEQ ID NO: 540397 - DNA, 100 bp, Homo sapiens
ctggaatattgacccttatttatccagaagattgatcatcatatgggtttggctgctaatttacagaagattgtagatgatcccaaagctttaaaaacat

SEQ ID NO: 540398 - DNA, 119 bp, Homo sapiens
gaagtctaagagaagctctaagacgtttaaggaaatgctgcaggacagttctttattggtgaaaacatgaatccagatggcatggttgctctattggactaccgtgaggatggtgtgac

SEQ ID NO: 540399 - DNA, 74 bp, Homo sapiens
ggaggattcagggaataggagctggggagcccttctgcgccacagatgtcggtgcagatctcttgtccatgtgc

SEQ ID NO: 540400 - DNA, 101 bp, Homo sapiens
ctgcgcatctacttcctggaggagcgcatgcaacagaagtatgaggccagccgggaggacatctacaagcggaaaatatttacaccagcagctccagttca

SEQ ID NO: 540401 - DNA, 90 bp, Homo sapiens
gtctcagatcttttctacagcttctgataatcaaccaactgttacaatcaaggtctatgaagtgtttgattgcatcgaggtctatgcccc

SEQ ID NO: 540402 - DNA, 50 bp, Homo sapiens
caggcccgaagcaggcacgacctttgtgagtccattcttgcacaccgaga

SEQ ID NO: 540403 - DNA, 90 bp, Homo sapiens
tccctctgcccccccttccccacgcaaccccagatccatttacactttacaggcagctggtggaatttttgaagaaaatggaatctcgag

SEQ ID NO: 540404 - DNA, 100 bp, Homo sapiens
atttataaccgcgacttcaagatcaggacgagattgaggagctgcgggccgagatgctggagatgcgggacgtctatatggaggaggacgtgtatcagct

SEQ ID NO: 540405 - DNA, 100 bp, Homo sapiens
ccccacccaggcctgagcgaagcccacaaccccgccgggcacatgtgaaaggtaggtggagagttttcaaacactgttatcggccagatgaagaaatttg

SEQ ID NO: 540406 - DNA, 100 bp, Homo sapiens
ctggccccagtgctgcgtccttatcagccgagccgattagcctgaggcctgctcagtcgttcctaatgaataaaaatcaagtgccaaagcttcagcccca

SEQ ID NO: 540407 - DNA, 100 bp, Homo sapiens
cgggatcgtgaccgagaccgtgaccgagagcgtgaccgagagcgcgaatatcgtcatcgttagaaggccctgccctgggagaagccctgccacacgtcgt

SEQ ID NO: 540408 - DNA, 97 bp, Homo sapiens
ctcgactcggtcctgtttcgacagcgaacatgtcgcggcctgtcagggggatatgagactttctactcggaatatcctgagtgttgcgtggatgtaa

SEQ ID NO: 540409 - DNA, 96 bp, Homo sapiens
acagagcggtcggtgacagcctcaagggcttcagcaccgcgcccatggcagagccagaccgccccatcacaggtatatggaggagtgacctactat

SEQ ID NO: 540410 - DNA, 75 bp, Homo sapiens
gctggggaggcgaggccggacgcacctctgtttgggggtcctcagagtggttcgcctccagcacacagagctaca

SEQ ID NO: 540411 - DNA, 101 bp, Homo sapiens
gccttcaacatcatagaagtgatgagtgcctccaagttcaccttcaaggcggaagagtgatacaagaggtacttctcatcttctacctggttaccgcctaa

SEQ ID NO: 540412 - DNA, 98 bp, Homo sapiens
agttccattctcagttcttcctcccagagctgcagcggcgcctggacgactggtctctaattaacagaagatggcaaagcccagccacagcagctatg

SEQ ID NO: 540413 - DNA, 98 bp, Homo sapiens
ttgaagaagactatgcgaagaacttagctaagctctctcagaactccttggcttcacaggaggaagggacaatattcctagtattactgttttctcaa

SEQ ID NO: 540414 - DNA, 58 bp, Homo sapiens
tgtctggtagccaccggcactcacggtatctctcctaaatgtgtgatcaaggaattac

SEQ ID NO: 540415 - DNA, 82 bp, Homo sapiens
ggaaaaggtggagaatcaatttatggtggatattttaaaggtctcagcaagaagcagctgccaaaaaattcttttgactacc

SEQ ID NO: 540416 - DNA, 100 bp, Homo sapiens
ccagactgaggaagacccggaaacttaggggccacgtgagccacggccacggccgcatagctcacggatgattgatatccagaccaggatggctgggcga

SEQ ID NO: 540417 - DNA, 100 bp, Homo sapiens
aatctgggactttcttcgttgccatgaggaaagaattctccgaggtagctacagcaagctgggtagcaggcagatccaaaggatatcatgaagtttccag

SEQ ID NO: 540418 - DNA, 100 bp, Homo sapiens
cacacaaaagcacacaaagacctcctcctccacaggggagacagagacatcctcatcgtcaagttgagaaagggccaggagctgagacttcgagcctatg

SEQ ID NO: 540419 - DNA, 75 bp, Homo sapiens
gtctccagccttggtctgagtggactgtcctgcaggacacattggcgtgagacctgggagtacgttgtgccaaat

SEQ ID NO: 540420 - DNA, 100 bp, Homo sapiens
aatggtctcaatctctggaaaaacttcttgccaaccaaagtgccaagtcctgccctgccaacttcttggcagctgccgacgacaaactcagtgggttcca

SEQ ID NO: 540421 - DNA, 50 bp, Homo sapiens
ggtggtcattaagcggagatccggccctgggaggagcggggacactgagg

SEQ ID NO: 540422 - DNA, 100 bp, Homo sapiens
ttcagtcactggtttgcagagtccaggggccattaagtttaatgatggcctgagcttacaggaaagttgccgccttattgaagctctgtcctcatgccag

SEQ ID NO: 540423 - DNA, 51 bp, Homo sapiens
acttcctcttcagtcatcagtatttgagttttgtcaccggctcccacgtcg

SEQ ID NO: 540424 - DNA, 75 bp, Homo sapiens
agagtgtcttcatcttacccagtggaacctaagaaattaaattctccaggtggaagatggatgcctgaagtgtag

SEQ ID NO: 540425 - DNA, 96 bp, Homo sapiens
ccttggaaaggaaagcagctgagatccagaggagtggaaggctcccccttgactaaagcttcttcaaaactgctgtggtccttgtgtataaagatg

SEQ ID NO: 540426 - DNA, 100 bp, Homo sapiens
aaccaagtaccaagtgaagactttgaacgcactcctcagagtccgactctcccacctgctaaggtttggtgcacctcgatttggaggaagtagggcaggg

SEQ ID NO: 540427 - DNA, 90 bp, Homo sapiens
ctatgcttacggttttgagaagccttccgctattcagcagagagctattattccctgtattaaagagtgtgaacatggctacgcctcttc

SEQ ID NO: 540428 - DNA, 98 bp, Homo sapiens
aaaactcattcacgtcaactgctcaaacctccctcagatggggataacaaactttgaggacatgaagcaacaaggcgtgcaggtattttgatgaagga

SEQ ID NO: 540429 - DNA, 100 bp, Homo sapiens
ctcttctccctccccttcttgtctagggacaggaagatggttggcgacgtgaccggggcccaggcctatgcctccaccgccaagtgcctgaacatctggg

SEQ ID NO: 540430 - DNA, 111 bp, Homo sapiens
atagagatgtgatgttggagaactacagaaacctcgtctccctggttgctgctgacacgccgaccgcctgctgcttcagctacacctcccggcagattccacagaatttca

SEQ ID NO: 540431 - DNA, 101 bp, Homo sapiens
ttgaatttcaagaacagtaaagttggaacacagcagagggtgtgtaataaaatacagactgtggatattcataaggagaaagtggcacgaagagagattgg

SEQ ID NO: 540432 - DNA, 98 bp, Homo sapiens
ctgcccgtgtaccaggaggtgaagcccaacccgctgcaggacgcgaacctctgctcacgcgtgttcttctggtggaagttgatgggtcgaaactaaat

SEQ ID NO: 540433 - DNA, 80 bp, Homo sapiens
ccctggagtttctgcttcctccagagccagttgccactctaaattcagaagaggagagcgaccctccaacctacaaggat

SEQ ID NO: 540434 - DNA, 75 bp, Homo sapiens
aacgacttactggggagagaaagaaaaggaacgggagctgagagaaatggcgaaaagtcttttgaagacagcctc

SEQ ID NO: 540435 - DNA, 75 bp, Homo sapiens
tggagctggtgcagcggaagcgagtgaccatgggtagcaacaagagcaagcccaaggatgccagccagcggcgcc

SEQ ID NO: 540436 - DNA, 80 bp, Homo sapiens
gagtttccgatttaaagctgagctgcgaggaaaatggcggcgggaggtgactctcctattccatctgtttcttcgggatc

SEQ ID NO: 540437 - DNA, 100 bp, Homo sapiens
gcggcgctggcggcggtcgagccggcctgcggcagccggtaccagcagggaaatcctcattgacgattcaatttgttgaaggccaatttgtggactccta

SEQ ID NO: 540438 - DNA, 97 bp, Homo sapiens
aaaaaagatggcggcgggctcggatctgctggacgaggtcttcttcaacagcgaggtggacgagaaagtgacggagtctcagtggcgtgatcctggt

SEQ ID NO: 540439 - DNA, 75 bp, Homo sapiens
gtgaggcgacaagcaacaacaatcatagctggccctgggaggagcggggacactgaggacctctctccaaattgg

SEQ ID NO: 540440 - DNA, 75 bp, Homo sapiens
aatggaaagagaagactgatagagacttcgttaaggccatgtttttggtatactgtgcactggagaaagaacctg

SEQ ID NO: 540441 - DNA, 83 bp, Homo sapiens
cgtggacagcgaagctgctgcggttcctgagccggagatttggtcgtattgggcgcctggtcaccagggctgcttttaactct

SEQ ID NO: 540442 - DNA, 100 bp, Homo sapiens
cggagcggccggggcctggggctgcctgccgggcggccgggcgcggcgagcccaggtctcggcgcggaagatggccggcggcgtggacggccccatcggg

SEQ ID NO: 540443 - DNA, 101 bp, Homo sapiens
cctttaggatttgttagaaaggagacccgactgcaactgctggattgctgcaaggctgagggacgagaacgaggactcagaagctgctatcgaaaaaccca

SEQ ID NO: 540444 - DNA, 100 bp, Homo sapiens
ggtgaagctgctgagccgtggggagggcatccggacgctgctgtggaccttcatcaagtccttccagttacatctgtgaaaacgaggccatccctatgcc

SEQ ID NO: 540445 - DNA, 83 bp, Homo sapiens
cagggtcaaaggagagcacaaccatcgcagttggaagcccatggggcagatttgtgggcagattcaagtctcgcaaagagcgg

SEQ ID NO: 540446 - DNA, 100 bp, Homo sapiens
gtatgatgttgtcctgaagacggggctagatattgggagaaatagtattattgattccacagaatacagccaacctccaggtttcagtggcagttctcag

SEQ ID NO: 540447 - DNA, 83 bp, Homo sapiens
tgcggaagtgcagctgcctcagttcttagcgcagggaaagcaggcaggatgggagagtcgccgatagaaccacctcttccctg

SEQ ID NO: 540448 - DNA, 100 bp, Homo sapiens
tgtacaaaggagagtttaaacagccaaaacagttcattcatattcagcgctacattattggaattttgaagtcatgaaaacatcagatgaaccaacctgc

SEQ ID NO: 540449 - DNA, 75 bp, Homo sapiens
tttctctatgcgatctccagagctcgctttaccccggggaatgcagaatggcattgtgcccatcgtggagcctga

SEQ ID NO: 540450 - DNA, 89 bp, Homo sapiens
ctactacgagaggctgggccaactccagcacgggctgcgggacagatatgaggccccaggattcctggcgaggtcctcctccccttttc

SEQ ID NO: 540451 - DNA, 75 bp, Homo sapiens
ggaccataataatcaggagtgaagtcccagggatattctgtgctgatgttcttaatagttgctcctctttctgtc

SEQ ID NO: 540452 - DNA, 75 bp, Homo sapiens
agatggcactttccaaagtggatgcctccggggagatgatgaggagtctgatgaggaagctgtgaagaaaaccaa

SEQ ID NO: 540453 - DNA, 75 bp, Homo sapiens
tcctggaggaatccgagaagagcagagcggagggagccccagacacggtgcacagcgacttcaccgcggcagcca

SEQ ID NO: 540454 - DNA, 83 bp, Homo sapiens
agctgcagccgcacctggccaagggccggccttccagcatgtacttccagacccatgaccagattggcatgatcagtgccggc

SEQ ID NO: 540455 - DNA, 100 bp, Homo sapiens
tggtggtggtgctacagtccatcaagtaacagaagcatttaagcttatcacttcagataaaaagccactgaagatcctggtgtcgccatgggccgccgcc

SEQ ID NO: 540456 - DNA, 82 bp, Homo sapiens
ccggccggtgccagcacctttcggcttctgagacggcggcagcagcggcattcaggtcatttcatgggcaacaacacagtgc

SEQ ID NO: 540457 - DNA, 83 bp, Homo sapiens
aagtgcgagcccagcgggagaaaatcaaggagttgtcgagatgtccacagaaggaggatttggtggtactagcagcagtgatg

SEQ ID NO: 540458 - DNA, 50 bp, Homo sapiens
gtgcagcaggatttcacctccgggtgctggagaatctggtaaaagcacca

SEQ ID NO: 540459 - DNA, 82 bp, Homo sapiens
ttcgagagctaccgcgccagacagatagttcggatgtcgctgtggcaaagtccgagggccagcgctgccctggagattgagc

SEQ ID NO: 540460 - DNA, 100 bp, Homo sapiens
agagtcttttctttgccaagcaaaacagtttccaccacgctctgtatgtggatgtgatccgtgtgaacagctactactcttggtatcgcaactacgggca

SEQ ID NO: 540461 - DNA, 49 bp, Homo sapiens
ccccgttacaggccgtggcccaggttatagttgaagtcctgcctaatca

SEQ ID NO: 540462 - DNA, 133 bp, Homo sapiens
gcggggcacggagggcggtggcggcgggctcctgcgagaagcaagcggaacttcctgaggaatgttccggagaatcacagcagctgccactaggctgttccgcagtgatggctgtggcggcagtttctacacc

SEQ ID NO: 540463 - DNA, 85 bp, Homo sapiens
tcggttacctaggagagagaacgcagaggtatgtggaactgaccaactactgtgattataaagactacagggaaactatattgag

SEQ ID NO: 540464 - DNA, 82 bp, Homo sapiens
cccggccggcccggccccagccccatggacctccgagcaggtaatcattaccaaatgaggaggaaaggacgatgtcatcgag

SEQ ID NO: 540465 - DNA, 75 bp, Homo sapiens
cggaggctgagccggccgcgggcgcgaccggaggcaggtctgccatcatggatgttctcgcagaagcaaatggca

SEQ ID NO: 540466 - DNA, 75 bp, Homo sapiens
aattttagggtcctttatatagaagggagagtagtgcattagaccatggttgatgcaacaggggacatgtccaac

SEQ ID NO: 540467 - DNA, 100 bp, Homo sapiens
acaagaaggaaaattagagaagatccagaccaaggcaggtgaggcgctcatcctgtttgggctcagtaatcagctggctgtgacattccgggaagagaac

SEQ ID NO: 540468 - DNA, 100 bp, Homo sapiens
gagagcgtggagcgggctgggccagaggcgagtctggagccgggaaaaccgaaaacaccaagaaggtcattcagtacctggccgtggtggcctcctccca

SEQ ID NO: 540469 - DNA, 90 bp, Homo sapiens
gagcattgagatcgagaacctgcagaccagcttctaaccgaaaatcttcagttggcgtaaaaaagaatagcaagagcagaacgttaacga

SEQ ID NO: 540470 - DNA, 87 bp, Homo sapiens
agtaactggctctccggggtgaatgtcgtgctggtgatggcctacgggagcctgtcatccgtccttggctcaggatttggagagctt

SEQ ID NO: 540471 - DNA, 83 bp, Homo sapiens
caggcggtgacagagtggagccatggctagaggccgccatggcatcagatgaaggcaaactttttgttggagggctgagtttt

SEQ ID NO: 540472 - DNA, 82 bp, Homo sapiens
aaagggaccatgcggaggatggcgctgtccatgatcgagtgaaaggtgtagcagtcactcggcctacacccacagcatcgac

SEQ ID NO: 540473 - DNA, 90 bp, Homo sapiens
gttttggtttcatcaccttcaccaacccagagcatgcttcagttgccatgagagccatgaacggagaggaagaagaactttggcatcagc

SEQ ID NO: 540474 - DNA, 80 bp, Homo sapiens
tgtctgcgagccaggattcccggccgccatggcatcagatgaaggcaaactttttgttggagggctgagttttgacacca

SEQ ID NO: 540475 - DNA, 100 bp, Homo sapiens
aaagaaatgaattctgccaaagagaaatataaagaagctttagctaaaggtactactgagcgagtgtgcttgatccagggaacggttgaagcactgaatg

SEQ ID NO: 540476 - DNA, 82 bp, Homo sapiens
ccgtgatatgttccagttgcacatttcctgcaaggactccaaagtggtgagatcaggcctttgtgacactaaccacaaacga

SEQ ID NO: 540477 - DNA, 90 bp, Homo sapiens
ggaggccagtagcaccaggatatgtcttgacactgcccatctctaagataagaacctggaaaggggactctgttggccattggaaattgc

SEQ ID NO: 540478 - DNA, 101 bp, Homo sapiens
cgaattttgagaggttggtaaaaggagattggaaaccagaaggtgatgaatggctgaagatgtcataccctccaagccacaaaactgtggtgaatggaaaa

SEQ ID NO: 540479 - DNA, 100 bp, Homo sapiens
agaacatccttcccaggcagacggatgaggagcggctggagctgaggcaacagattggcaccaagctcaccagatctttcaagacatttttcccgctcct

SEQ ID NO: 540480 - DNA, 75 bp, Homo sapiens
gtcgacctaaagcctgactggggcaaggtgctgaagtccacaggggatgtggccggagggcgggccctgtacgag

SEQ ID NO: 540481 - DNA, 75 bp, Homo sapiens
cagaagaggcgttcgctgcgcgtgcacattccggttatgaagacagtatggagtttccagaccatagtagacatt

SEQ ID NO: 540482 - DNA, 109 bp, Homo sapiens
gacccgcgtgggcaccctgcaggtggtcagacatgtcatcaactcagctggagcatcagatccatgctgctgctgactcggagccccacagcttggcacaggctctctc

SEQ ID NO: 540483 - DNA, 100 bp, Homo sapiens
ccgatctgtcatcaatacctcagcaaaccagtccagctacgggggcccagccagccagcagctgagtgggggttacggaggcggctacggtggccagagc

SEQ ID NO: 540484 - DNA, 100 bp, Homo sapiens
cgagaagcaggtcatgatgttcagtgctaccttgagcaaagagatccgtccagtctgccgcaagttcatgcaagatggatcatagacggtatttctatgt

SEQ ID NO: 540485 - DNA, 50 bp, Homo sapiens
gaaggagcaggattaccaaaggggtttccaaggcaagaccggccctccag

SEQ ID NO: 540486 - DNA, 50 bp, Homo sapiens
ctgagccccagcaccagtcacctccaggggctttgttatgcacctaaagc

SEQ ID NO: 540487 - DNA, 100 bp, Homo sapiens
aaaaaactaattatggttcagcactggcctgagacagtatgcgagaaatgcttcttactgtgacaaaatgtccattgagctcagagtttttgagaataca

SEQ ID NO: 540488 - DNA, 100 bp, Homo sapiens
cgtctcagcaatagactgctcttgaggcaatgaatcgctccctggctaatgtgattcttggaggctatggcaccacttcaacagctggtggaaaacccat

SEQ ID NO: 540489 - DNA, 95 bp, Homo sapiens
cgcgggcggccatggagcgagcctagggcccgacaggtacgcatagctgctaaattcatcactcatgcacccccaggggaatttaatgaagtatt

SEQ ID NO: 540490 - DNA, 73 bp, Homo sapiens
tgcattcagtctagttcctggttgccggctgaaataacctggacactgatgaaattcaagttaactatcctgg

SEQ ID NO: 540491 - DNA, 75 bp, Homo sapiens
gccctggccgcgcactcgcctcagctgagcctggatcatggaaaatgctgagattaacaatatcatcaagattgt

SEQ ID NO: 540492 - DNA, 75 bp, Homo sapiens
gaccaaaattgtggaaaagtcactctgatgcagacaatctctttgaacatgaattgggggctctcaatatggctg

SEQ ID NO: 540493 - DNA, 75 bp, Homo sapiens
gaggaggaagaggaggcggccatgtatgaggaggagatggaaagggaaggactatggtgcagccctgcggggcct

SEQ ID NO: 540494 - DNA, 75 bp, Homo sapiens
ccacacctcattatccccactccagagggattcagcttgagatcttcttagcccagagagcagtggagttgagtg

SEQ ID NO: 540495 - DNA, 100 bp, Homo sapiens
ctgtttctatgctgagcaaggaggccagatctatgacgaaggctacctggtgaaggtggatgacagcagtgaagatctttcttggactccgtactgttgg

SEQ ID NO: 540496 - DNA, 102 bp, Homo sapiens
ttcgaagagcagcattggaaactctgtttacgttattatcaacacaggaccaggaaactaaatatattttgccaactttggaaaaagaattattcttggcag

SEQ ID NO: 540497 - DNA, 100 bp, Homo sapiens
ggtaaacctatagcagctgtgatgaatacctggaccaaacaaatgggatttcccctcatttatgtggaagctgaacagcatgtcaatccaaagaagcaaa

SEQ ID NO: 540498 - DNA, 127 bp, Homo sapiens
agaaggccctgagtcaaagaagatgcctcgaactaaacaaattcatcccagaaatctaagagtgttatagttttgccgctggactcttccctcccttcccccaccccatcaggatgatatgagactt

SEQ ID NO: 540499 - DNA, 100 bp, Homo sapiens
ggaccatgcggcggctgccattgccaaggctggcattccggctctggcaggctgccctgagcacgctcaaccccaaccccacggacagctgtcccctcta

SEQ ID NO: 540500 - DNA, 90 bp, Homo sapiens
ttgcataaagccaacattcgcaccgtcatggtcacagagaatggatcttggagaatgtctgaaagtccatgacctggctttaagagcgga

SEQ ID NO: 540501 - DNA, 100 bp, Homo sapiens
gcctgtcattgcaaaagctgacactctcaccctgaaggaacgggagcggctgaagaaaagggctgctctttggcgtaaattgcaatcgattagggatcgt

SEQ ID NO: 540502 - DNA, 75 bp, Homo sapiens
ccgacatggaacagggactcactgggggagatacaactcgtcaacgaatcaaattcagtgatgacagagtatgca

SEQ ID NO: 540503 - DNA, 142 bp, Homo sapiens
ccacccccatctcagaacagaagggtgggaagccagagccgcctgccatgccccagccagtccccacagcataacagacagatgtcatcaatgcttcttggtgggtcatgagcaacaagactcgggatgaactggaaagaag

SEQ ID NO: 540504 - DNA, 76 bp, Homo sapiens
gcttccatgcagcctgccttaccgccattcgttcctggttaactcggaaacacatccagaggctgcatgcagctgc

SEQ ID NO: 540505 - DNA, 110 bp, Homo sapiens
gtttcaagacaacagatgaattgtgaaagagagcagctaaggagagaacgaggtgctcaaagtccaactgaagaaatatgtaggagctgtccagatgctgaaaagagaag

SEQ ID NO: 540506 - DNA, 50 bp, Homo sapiens
ggaagcccttccgcggaccgaaagctaaactaaacggatattcactctga

SEQ ID NO: 540507 - DNA, 100 bp, Homo sapiens
ccaccccgacggccgagttgacggggtccgggagaagagcgaccctcacagtatcctggtcagatataggaggactggaaagtatcaaactgaagttgga

SEQ ID NO: 540508 - DNA, 99 bp, Homo sapiens
ctgcttatctaccagatatggctgaacatgacatggccggactcccctgcatcttgctgccaataagggccatcttcctgtggtccagatcttgctgaa

SEQ ID NO: 540509 - DNA, 95 bp, Homo sapiens
agggagcaagaggtgtcggaggtctcatctttgaactactgccggagcttctgccagggtttggattcaggatttgttcctagtgtccaagattt

SEQ ID NO: 540510 - DNA, 82 bp, Homo sapiens
tgcaacgttgtgatctggaggcacatctcaaaaacaggtgaaaaaccttttgaatgtccaaattgtcatgaacgatttgcta

SEQ ID NO: 540511 - DNA, 82 bp, Homo sapiens
tctcgctgtgacagagacaacaccgagtatgagaagtactggctgtgatcgaacttctcaaccctcagagacttagatcttc

SEQ ID NO: 540512 - DNA, 100 bp, Homo sapiens
tcctaaaactgatgaacagagatgcagacttcaggaagcttgcaaagatattctccttttcaaaaatcttgatcaggagctgtggctaaaggaagtggag

SEQ ID NO: 540513 - DNA, 100 bp, Homo sapiens
acacccctggatcctattactgcacgtgccctgtaggatttgttctgcttcctgatgggaaacgatgtcatcgacagtcattttgtttactcattcagcc

SEQ ID NO: 540514 - DNA, 75 bp, Homo sapiens
cgggctcctacctcctggacggcaagccgctcagcaagctccacatccccgtggaatccagcactacgccctgcc

SEQ ID NO: 540515 - DNA, 100 bp, Homo sapiens
gcctgcttgcagagctttccagcccgtttgtgaatcagcgtgtcaacctaagaaaaagtctacgccactgaagtatgaagttggagatctcatctgggca

SEQ ID NO: 540516 - DNA, 50 bp, Homo sapiens
cagcggcgcaaggagatactggctgtttgcagacaaggtcccaaagacag

SEQ ID NO: 540517 - DNA, 80 bp, Homo sapiens
gagcagccttcagggagcgtggagacaggcttctccagggaaagtgaccgaggcagtgaaagaggccattgacgcagggt

SEQ ID NO: 540518 - DNA, 50 bp, Homo sapiens
gcgcctgcgacctgcccgcctggaatttcgctaaggagtttgtgatcagt

SEQ ID NO: 540519 - DNA, 100 bp, Homo sapiens
aaactccaaatattagagcttagagaaaaccagttaaaaatgttgcctaataatcaacaagatgccacatcagtagcaactgagtcttcagaatcaagca

SEQ ID NO: 540520 - DNA, 50 bp, Homo sapiens
cagccctcatgtttgctgcactttctgttccaggagtagattttagcata

SEQ ID NO: 540521 - DNA, 100 bp, Homo sapiens
aagctctgaatcgtgttcctgaatgaaagaagtcagagttcacccagggcatgatcttacctacaatgaatggagagtcagtagacccagtggggcagcc

SEQ ID NO: 540522 - DNA, 83 bp, Homo sapiens
gtcatggtcccagaaacgtcactatcaagaagctataatggatttccagttcttaggaacaatttatttgaaagacctgaagg

SEQ ID NO: 540523 - DNA, 90 bp, Homo sapiens
gggagaggcaccaaatctggcctgggggcccgagaagcttcctctcaggtgattgaagatagtactggagtccgccgggtggtggtcaca

SEQ ID NO: 540524 - DNA, 78 bp, Homo sapiens
attcaaatgcgagatcttgagggttacaggggaagtgttcgccagttactacatgaaaagataagagatgcttatact

SEQ ID NO: 540525 - DNA, 75 bp, Homo sapiens
cccaccggaatggagaaggaagaggagtcggcctttgtggaggcccagaataagattactgtgccatttcttgag

SEQ ID NO: 540526 - DNA, 75 bp, Homo sapiens
gggctgctctatgtgtttggacagaatcgagagctccagatcatgagaaagctagatcactgtaacatagtccga

SEQ ID NO: 540527 - DNA, 74 bp, Homo sapiens
ggaagagaagatcatcgagcatttcaaacggttttgggatttgagattgacgcggtgaactctgtccagttttc

SEQ ID NO: 540528 - DNA, 80 bp, Homo sapiens
tgaaggaaattgcagaagcctaccttgggaaggaactgtggctgcaccatctgtcttcatcttcccgccatctgatgagc

SEQ ID NO: 540529 - DNA, 75 bp, Homo sapiens
cggattggcgctgaggtggcccgtggggcagggagtggacatccgccataacaaggaccgaaaggttcggcgcaa

SEQ ID NO: 540530 - DNA, 100 bp, Homo sapiens
ccgggatcgtgaccgagaccgtgaccgagagcgtgaccgagagcgcgaatatcgtcatcgttagaagggtgccaaagcatgctttctgcgggacattcct

SEQ ID NO: 540531 - DNA, 50 bp, Homo sapiens
gaactgcagaggttcctctacagcaaggtgtgagcagctgctggaagagg

SEQ ID NO: 540532 - DNA, 95 bp, Homo sapiens
cttcgatgtcaccagcccgaacagctttgacaacatctttaaccgggagaataaaggcagccccgttgatgactgaaaatgacaaagcatccacc

SEQ ID NO: 540533 - DNA, 75 bp, Homo sapiens
ctcttcccggcgtcagtaccaggagaaggctggacgactgtggcctcacggaagcacggtgcaaggacatcagct

SEQ ID NO: 540534 - DNA, 126 bp, Homo sapiens
cgcgcacaacacttcaccctctcgcctcgggtctcgggggccgctctgggatcccggccaccagcaattgtccgtatcagatgtagaaggtggtgatggactgcagctcagaaaggaacatactct

SEQ ID NO: 540535 - DNA, 100 bp, Homo sapiens
ttttccaacatcaagatcttcctggtgtccgagtgcgccctgatgctggcgcagggcacggtgggcgcctacctgagctgttcctttgggtaccatgctg

SEQ ID NO: 540536 - DNA, 80 bp, Homo sapiens
ctgcactgaaaggaaatgacggattttgtccaggtgcaggtacagcagtctccgcaacaggtctcggctcagctctcccc

SEQ ID NO: 540537 - DNA, 50 bp, Homo sapiens
gaggcaaactgtggcttcttacttccggacagggtctggctctgtcaccc

SEQ ID NO: 540538 - DNA, 100 bp, Homo sapiens
gtgtctactatattgatacccttggaagaattatgaatttaacagtaatgctggaaaccacccctactcctaatcccccgactacagaagaggagaaaac

SEQ ID NO: 540539 - DNA, 90 bp, Homo sapiens
ggcggcagaggattcgctcccagagcagctgcggccaggtccaggtgcaggtacagcagtctccgcaacaggtctcggctcagctctccc

SEQ ID NO: 540540 - DNA, 80 bp, Homo sapiens
agccagcaattgcccaaacccaaagtgtggagggttatgtaccgaaggactctaccgtgtcagcgggaataaaactgacc

SEQ ID NO: 540541 - DNA, 100 bp, Homo sapiens
cagcatattacctatcaggagaggaggttagcatggcctcattgaaagaactagatcaaagactctttgaaaattacatcgagttgaaagcagatcccat

SEQ ID NO: 540542 - DNA, 106 bp, Homo sapiens
gaacgaaaacgtagggaccacatcaaagacagctttcacagtttgcgggactcagtcccatcactccaaggagagaagaaacctttgttcaacaaaactgcagatg

SEQ ID NO: 540543 - DNA, 83 bp, Homo sapiens
tggtataccatcgtcaccatgacaacactaggcaagcgaccgatgttgaggtgggaactgaccttgtcccttctgtcacggtg

SEQ ID NO: 540544 - DNA, 133 bp, Homo sapiens
ggagacatggccaacatcgcggtgcagcgaatcaagcgggagttcaaggaggtgctgaagagcgaggagaaccttttggctaagcaaggactgcgacttctacgcggcctgagacggcgcaatgtgcaaaaga

SEQ ID NO: 540545 - DNA, 99 bp, Homo sapiens
caaggtcagggtgattaagctgtcaggtgggattcttctaacagagaaaatgccattgaggatgaagaggaggaggaggaggaagatgatgatgaggaa

SEQ ID NO: 540546 - DNA, 100 bp, Homo sapiens
taaaaagaactcttaacggccgatgcagctcttccaaagctaagatattaataaggcagcggaaagaagaaatatgaatacggctccatcaagacccagc

SEQ ID NO: 540547 - DNA, 75 bp, Homo sapiens
cggaggtcgataagctggaactgatgggatgtttcagcagcccctgagaaggaagaggaggaagctgagggcccg

SEQ ID NO: 540548 - DNA, 100 bp, Homo sapiens
tagaagaggagcatctgctccaggtgtgctccatcctctggtctccccattacaaggagctcatctcaggccatggctttgcacagaaccagctagttat

SEQ ID NO: 540549 - DNA, 83 bp, Homo sapiens
cgccacttgtccgcttcacactccgccgccatcatggtgaagctcgcgaagaatggcttattcagaagagcataaaggtatgc

SEQ ID NO: 540550 - DNA, 74 bp, Homo sapiens
tggaagcagccgatccagcctgcggagcctgtggggcagatgattttgccagaaggaatccaaagagagaataa

SEQ ID NO: 540551 - DNA, 51 bp, Homo sapiens
gcactggaaggagcagcgggccgcgcaggaatcttctgcggcttgtccata

SEQ ID NO: 540552 - DNA, 85 bp, Homo sapiens
cgccaccctgcgctgccgccgctctgaggagttaaaggtctcttttattcaaaaccttgtattttgtgtggaaagagtttaccgt

SEQ ID NO: 540553 - DNA, 100 bp, Homo sapiens
ccattttctattgaagaggtagaagtggccccaccaaaggcaaaggaagttcgcataaagagtcacctaaggtcctgcgagtacaagggtcgacccccaa

SEQ ID NO: 540554 - DNA, 75 bp, Homo sapiens
ggcactgctactgcgaagacagctggcaggaaactttgagggaaattttgagtcactggaccttgcggaatttgc

SEQ ID NO: 540555 - DNA, 74 bp, Homo sapiens
ccgggcttcggcccccaccagagactcggtgatgatgaacagtctacacagatggctgcaagttgggaagatga

SEQ ID NO: 540556 - DNA, 87 bp, Homo sapiens
ggcgtggcccagagaccaagatcactgataagaaatgttctcgacagcaagctattgagaagaatctacaaatgtgggaagaaatga

SEQ ID NO: 540557 - DNA, 100 bp, Homo sapiens
tttccacgactttctgggagactcacaaggcgaccagccagctcctgttggagacagattgggagtccattttgcagatctgcgacctgatccgccaagg

SEQ ID NO: 540558 - DNA, 100 bp, Homo sapiens
gcccgggcgagcagccctgcctccggacggtgcctcaggaaccctgaagctgggctgagccatgatgctgctgccagaacccctgcagagggcctggttt

SEQ ID NO: 540559 - DNA, 100 bp, Homo sapiens
ctctcctgctgccgtgtgagatatggctgcttcccgttctgccatgatgctttaaggaagcctcctatttcagtttctcaacatgaaagtcatcaagcaa

SEQ ID NO: 540560 - DNA, 101 bp, Homo sapiens
cccctcggcccctctgctgagccgctgcgtctccatgccaggggacatctcaggtggaagagatcatgcagctggtgaatgcctacttggccaacccctcc

SEQ ID NO: 540561 - DNA, 136 bp, Homo sapiens
aaaacagtcgccttgcacaggcctggtttaacactcatagggagcttttggagagcaactttactttagtgggcagcacagcattctcagaagcagtctactgagctcttccagtgcatgtacttcaaagacaaag

SEQ ID NO: 540562 - DNA, 101 bp, Homo sapiens
ttcctgtggtgaggtcaaccaaccagacgaaagaaagatctctgggagagtgggcaaatgacctgcggcacggccatggcgtatactactacatcaataat

SEQ ID NO: 540563 - DNA, 51 bp, Homo sapiens
tgcaacagaattacagagtatgatattactcttgtctctgctgctcctggg

SEQ ID NO: 540564 - DNA, 75 bp, Homo sapiens
acagatctcagagaaattggccatggaagctttggagcagtgtattttgttacctgtgcatgacagatgagtggt

SEQ ID NO: 540565 - DNA, 75 bp, Homo sapiens
ccaaggatgagattttgccagagaaaggacgagcagcaagtcagggagcttaagatttctgaggggagcacagct

SEQ ID NO: 540566 - DNA, 89 bp, Homo sapiens
ctcctcaaccgcgaagcacccagcggctggcgcctggagcgtcttttgtacctggagtagaacagaaaaattattatgtctgtgttccc

SEQ ID NO: 540567 - DNA, 100 bp, Homo sapiens
gtcgagtaccttccctgtcccatcgcaaacccaaagatccccgttcctggagattctgattgaggcacttccgttccggcgcccctccggtcatcaaccc

SEQ ID NO: 540568 - DNA, 82 bp, Homo sapiens
ctctccttttccctctccctttccctaagatctattaatgagatgaagcggttggaagaaatgtcaaatatgtttcagagct

SEQ ID NO: 540569 - DNA, 73 bp, Homo sapiens
actccctggctgctggagagttgaatgccagccaccagccatggagttatcattaccatgttggtgacctgtt

SEQ ID NO: 540570 - DNA, 50 bp, Homo sapiens
gaaaaagcactgactgctctgcttaagtggacccaagtggagagattgtg

SEQ ID NO: 540571 - DNA, 100 bp, Homo sapiens
aaaacagcagatttcccaagagcagcggaaaatgatccagtcacagggtatgagtattatagaacaattagaccctgtatcttttagcaattacttgaag

SEQ ID NO: 540572 - DNA, 75 bp, Homo sapiens
ctgtctttttcttcaatgggcagcatatgaaagtggattatgggaccaagaatcgccttcagccctgtctggtgc

SEQ ID NO: 540573 - DNA, 87 bp, Homo sapiens
cctcccgcgtgggcgtcccggagcctggccagctgcacttcaaccagaaggaatctggagaggaggtagaaattgaggaattctatg

SEQ ID NO: 540574 - DNA, 75 bp, Homo sapiens
gttacttccaagtcatcaccagaaagtgtgtcaggaagctgtctgggaagccttcaggactttttgggatcgact

SEQ ID NO: 540575 - DNA, 100 bp, Homo sapiens
ctggctgtacctcagcatcaaccacctctgcttctactccttcttcctgggcaaggaacggcaccgaggaagagaaccaatggcagaggccacatgtgca

SEQ ID NO: 540576 - DNA, 90 bp, Homo sapiens
gcgcggggaactcgacttgaccggcgccaaacagaacacaggagtgtggctagtcaagatgcagacaatctctttgaacatgaattgggg

SEQ ID NO: 540577 - DNA, 99 bp, Homo sapiens
aggtcctacgatgaggccatcctgcacctcgtagtggcagctgaggctttacagttctctatactctcccaagagccacagaaaatgaacacatttcag

SEQ ID NO: 540578 - DNA, 87 bp, Homo sapiens
gcgcggagcccagagccggttcggcgcgtcgactgcccagagtccgcggccggggcgcgggagctccgggattgtggagggctgcgg

SEQ ID NO: 540579 - DNA, 100 bp, Homo sapiens
ttaagtggagtggtggatcagaccaaagatgggtctgaatttcctgctgctgttcacaaagatgctttttatctttaactttttgttttccccacttccg

SEQ ID NO: 540580 - DNA, 98 bp, Homo sapiens
agggaagtggaagttaaattgactccgctgattctgcaacctctgtcagtagtctgtctgaatctttaccagttcaatgcacagatggcagtgtgcca

SEQ ID NO: 540581 - DNA, 90 bp, Homo sapiens
tagtggccgggacctcgcagctctacgtgtaccgcctcaaccgcgacgccgagggtctccgtctctccaccgggggcttcatccttccag

SEQ ID NO: 540582 - DNA, 89 bp, Homo sapiens
gacaaaaacagttgtgacagaacatgcactccatcaggtaattctgttccacaggatatctgctgtatggcagctgatggcagattagt

SEQ ID NO: 540583 - DNA, 90 bp, Homo sapiens
cgtcaagcacgtgacggtcatcggcggcgggctgatgggcgccggcattgcccaggatcgcaacaatgcaaggcaaattcatgaaggtgc

SEQ ID NO: 540584 - DNA, 75 bp, Homo sapiens
tgtccgaaagtgatgctacccgtggctgagtcatcactagagagtgggaagggcagcagcagcagagaatccaaa

SEQ ID NO: 540585 - DNA, 90 bp, Homo sapiens
gcggtccctgtgacctgtggagacacggccagatctgccctccaccgcctgtcttggttagatggctctggattaggattctcactggaa

SEQ ID NO: 540586 - DNA, 102 bp, Homo sapiens
ctccatccccgaccgccctcttctgtcttggaaacccctcctggagtttccccaaagccatggacagccctagtcttcgtgagcttcaacagcctctgctgg

SEQ ID NO: 540587 - DNA, 82 bp, Homo sapiens
ctagggaggacctcacttccccggggtgtaataatgttaactgagacctgcctagagctggaacgttacctccagagcgagc

SEQ ID NO: 540588 - DNA, 100 bp, Homo sapiens
ggactgcctcactgagcaaccaagagtatgatctcgtgaaatcttgagagaaactgaatgacgaatgaaactattgttcctgtttcacacagaagaaaac

SEQ ID NO: 540589 - DNA, 75 bp, Homo sapiens
agaaagagcttcacttctaaagtcccaggaaccaattcctgatgatcaaaaggtcagcccaaggctgccccctcg

SEQ ID NO: 540590 - DNA, 101 bp, Homo sapiens
cgttgctgaacgtgcgcagggaggtgacggtgacgttgtaaataatatgtatgagcccaaccgggacctgctggccagccacagcgcggaggacgaggccg

SEQ ID NO: 540591 - DNA, 51 bp, Homo sapiens
tgctgatatacatccaatgaggaatccagctcaaatgtcagaagaattgac

SEQ ID NO: 540592 - DNA, 100 bp, Homo sapiens
cgtcaagtacaccatgcacaaggtcttccagtttctgaacctagagaccgtccaggctggacttgaactccttcctcggctgaagtgatcctcctgcctc

SEQ ID NO: 540593 - DNA, 75 bp, Homo sapiens
atcattctgcaagcaggcaacctgaatacagagctgtaggtaaaacttgcctactgatcagttacacaaccaatg

SEQ ID NO: 540594 - DNA, 100 bp, Homo sapiens
gcagcgatggacggagacggtgacccaggtcaaacatgtgttgacatcaaggacaacgtggtggatgaagggttctacttcacccctaagggggacgacc

SEQ ID NO: 540595 - DNA, 100 bp, Homo sapiens
tttgagcatacaccgagagagtgaggagccagacgacaagcacacactatggcgctgaaacggattaataagatctttgaccatcagtctgtgacctgcc

SEQ ID NO: 540596 - DNA, 101 bp, Homo sapiens
ctgaactcacctaacaccgcagcagcaaccgggcccggccaggttcggcgttccgtgagtgaacggcgcatttctcctgggaggaatcctctactcctggc

SEQ ID NO: 540597 - DNA, 98 bp, Homo sapiens
gaggaggaggaggaggatgatctccagatacactcggaaggcggtgccacagagcttggagctggtactgctactataagctccaggttgacttctcc

SEQ ID NO: 540598 - DNA, 88 bp, Homo sapiens
cggaaaaccgaagttggaagtgtctcttagcagcgcgcggagaagaacggggagccagcccacagcccccatcccgtagcccttcctg

SEQ ID NO: 540599 - DNA, 74 bp, Homo sapiens
cctacttaaatgctgtgcgctggcaccctcagaacagggcggagaaactcatcatccacctgcggaaacatggc

SEQ ID NO: 540600 - DNA, 98 bp, Homo sapiens
agagacgcacagtagaaccgatctcagccttgctgatcatctcgtacagcagcagaaaatgaccatgttacagggtctgggggtggtggcatctcccc

SEQ ID NO: 540601 - DNA, 75 bp, Homo sapiens
acggatggtcttgaaacacaaatggtttttgtgaagcctggtgttcggtacagagaattgggaaacattatccag

SEQ ID NO: 540602 - DNA, 75 bp, Homo sapiens
ttcgagtgggacaaggattgatagaaagggtttttaatgaccacaacaagcaagcatgcagcttactgcttgaaa

SEQ ID NO: 540603 - DNA, 50 bp, Homo sapiens
tacacagacgagcatggggaaggaggattctctatgggaggatgcatggc

SEQ ID NO: 540604 - DNA, 90 bp, Homo sapiens
gccggggaccccgaggccgcgctgcggcttcttccagaccagctggtcttgcttctggagcatctcttggagcagaagactctgagcccc

SEQ ID NO: 540605 - DNA, 74 bp, Homo sapiens
gctctaccaggaagcccggaagatcgtgggggccatggtccagagccctgaagacaaggggtaacactccaaaa

SEQ ID NO: 540606 - DNA, 88 bp, Homo sapiens
aggtggggttggcatcccccacatacgaattttccagttcatatgaagaggtgatctctcaaataaatacgtcattacctgctcccca

SEQ ID NO: 540607 - DNA, 97 bp, Homo sapiens
gagagcctgagcatagagaacacgctgtgggctggcactgtggtcgcatcaggactcatctgatgatgtgagaagagttcagaggagggagaaaaat

SEQ ID NO: 540608 - DNA, 90 bp, Homo sapiens
cgaatatgggaagttttaaagacagaggaggatttccagactgtattaccatcatttgagctcttctcaaagtatggaaaattatattca

SEQ ID NO: 540609 - DNA, 75 bp, Homo sapiens
tcagtccttagtagcactatcagaggtctccagaaatgctttgggttcatctttcattgctgcaaggaacttcca

SEQ ID NO: 540610 - DNA, 130 bp, Homo sapiens
aagcaatgtttgaacaaactcgaagaacagctgtggaaagaagttgcaaaacactgggtgtcatggagaaactccagctgggcccagagattctgcagcgggaaaatccaaggcttatttatgccaggct

SEQ ID NO: 540611 - DNA, 51 bp, Homo sapiens
ggagcaggcttgcaatattaaagccaaagaggtgctgaaaaaatatttgga

SEQ ID NO: 540612 - DNA, 101 bp, Homo sapiens
gcttggctatgtgacgctgctggaggaaacacctcaggacacggcctacaacaccaagagagtttcagattgccaaaagacaaaacgggtaccacaaggat

SEQ ID NO: 540613 - DNA, 100 bp, Homo sapiens
cgtggccctcgatgtgctctgcgtgttgctgggaagaagatttctctccccatgtcagctgtagtctgcctctggcttcggcaccttcccagccttgaaa

SEQ ID NO: 540614 - DNA, 101 bp, Homo sapiens
cctgcctcagcctcacaagtagctgggactacagtgaccaggtatctcccagctccacattctgtaaggtgtacaccataaccccactgctcagcgacaac

SEQ ID NO: 540615 - DNA, 51 bp, Homo sapiens
gcggcggccgcagctgccacaaaccagaaaaagcttgtggtgaaggggggc

SEQ ID NO: 540616 - DNA, 83 bp, Homo sapiens
ggatgagataactgaaagggaagcagaaccatactatcgttatacgcagagcaatgggcgcaggccgtttggcatctctgccc

SEQ ID NO: 540617 - DNA, 50 bp, Homo sapiens
cgatggctcttttcatatcagagacatgccttgaattggaacgctaccta

SEQ ID NO: 540618 - DNA, 75 bp, Homo sapiens
gaggtgcggcgaaggaggcagaggcacttatgcttgtcaggtggcacaagaatggctcaactctccaaatagaga

SEQ ID NO: 540619 - DNA, 75 bp, Homo sapiens
accaacccccaaattggctgggacagagtggcagaatttagtgacatttggaagcttttcaaacatggttccctg

SEQ ID NO: 540620 - DNA, 75 bp, Homo sapiens
tcagattggagtaaggcattgctgtcccttgcaggatttggactgagcaacaaatttgaatctgaattcccttct

SEQ ID NO: 540621 - DNA, 88 bp, Homo sapiens
cctttgccgatccgccgcccgtccacacccgccgccaggggaacgcccttttgcttgtgactggcagggctgcgacaagaagttcgcc

SEQ ID NO: 540622 - DNA, 83 bp, Homo sapiens
gtagcctttgcatacaagaatgtgaaatttgttctcaagcacaaattcgtctgtgatggctgtttaaagaaaagtgcacgaac

SEQ ID NO: 540623 - DNA, 147 bp, Homo sapiens
agaaagcgcaactacgctccgctccgcgggccaagaaactggagaaactcggagtgtactccgcctgcaagctgcttttctaacccaaactgtatgtcttgatgacactacagtaaagtttgaaatatgggatacagctggtcaaga

SEQ ID NO: 540624 - DNA, 83 bp, Homo sapiens
ggtgtctttgctgagggtcacattgagctgcaggttgaatccggggtgcctttaggtagccaatctgaattctaaggacctct

SEQ ID NO: 540625 - DNA, 85 bp, Homo sapiens
accatttactcaatccatggaatgacaacaagaaagtgcagataagcagggatgggcagatatggatatttgatggtcctacagg

SEQ ID NO: 540626 - DNA, 90 bp, Homo sapiens
gggccctggatgtttcctttaacaagtttattcccttatcagatatttctccctcgagtggctgggaaacttggcaagagaccagaggac

SEQ ID NO: 540627 - DNA, 100 bp, Homo sapiens
cagctgtcgtgaagaagcaggaggctaagaaagtggtgaatcccctgtttgagaaaaggcctaagaattttggcattgtatttgattttcatcaagcagc

SEQ ID NO: 540628 - DNA, 99 bp, Homo sapiens
ggcggagccgggcacggagccgcccgcgcacttccaggtgcacagcgcgggagccgtcacggtgctcaaggcaggaatttgtggatgcttatgtgaatt

SEQ ID NO: 540629 - DNA, 74 bp, Homo sapiens
cggcacctgagcggcggagacggctgtagcacaagaatgtccagaggaggtttatgaccctcgatctctatatg

SEQ ID NO: 540630 - DNA, 90 bp, Homo sapiens
cagcaggtcttgagtttggcaacacagtgccggtggtggtgtgcacattgagccccggtatagacagttcccccagctgaccagatccca

SEQ ID NO: 540631 - DNA, 96 bp, Homo sapiens
gttcggcagccccggcctggccccggcccctcctgcccatggcggtggccgagctgtacacgcagttggatcgatcaacccgggaggtggagctgg

SEQ ID NO: 540632 - DNA, 76 bp, Homo sapiens
ctcatatcttcacttggcaaactcaacaagttcagccaggccctggccatccggagctataccaagttcgtgatgg

SEQ ID NO: 540633 - DNA, 100 bp, Homo sapiens
gtcccgcacgtctgccgctgccaccggcgcgcccgactgcagtcgacttcggcaggttcagagcatcctgacccagagcagcaagtctcggccggatggg

SEQ ID NO: 540634 - DNA, 75 bp, Homo sapiens
atgccgctcctaagcctgcacagccgcggcggcagcagcagtgagaggagtgtggccatctggggccgtgtggta

SEQ ID NO: 540635 - DNA, 98 bp, Homo sapiens
cagagttctagggttctaagtgatgtccaggaaggaggaggaataatatttatggagcatatattatggaacacagtattaatctctggagaagacac

SEQ ID NO: 540636 - DNA, 100 bp, Homo sapiens
gctgaccacaggaattggatctactagtgcagggtgaatcgaaacgcatcaccctggtcctccagcagccacagtctggaggtccccaaggacatcggca

SEQ ID NO: 540637 - DNA, 100 bp, Homo sapiens
cagcacacagaggatgatgctgactttgatgaaggtgtggatgaggtcaccattgtcaacattttgaccaaccgcagcaatgcacagagacaggatattg

SEQ ID NO: 540638 - DNA, 100 bp, Homo sapiens
ggagacgctgagtacttggcggccttcagttgtatatgaacacagatcaagattagagaaatccttgcaaaaagaaagacttgaacataaaaaagcaaag

SEQ ID NO: 540639 - DNA, 75 bp, Homo sapiens
cagagttcaaggaggccttccagctgtttgaccgaacaggtttacccaaggtccagcctagcccctaggcaccat

SEQ ID NO: 540640 - DNA, 100 bp, Homo sapiens
caacggccaacttcggcaagatccagatcgggatttacgtggagatcaagcgcagcgatgcacccttacccttctgaagaacagaaaaagcagttggcac

SEQ ID NO: 540641 - DNA, 90 bp, Homo sapiens
ccatgcagaatgccaccaagtatggcaacatgacagaggaccatgtgatgcacctgctccagcacctgaaggggaagaacgtgatccacc

SEQ ID NO: 540642 - DNA, 51 bp, Homo sapiens
tggtggcctattaccagaaatgacgtgttcctcatgatccggcgccacaag

SEQ ID NO: 540643 - DNA, 75 bp, Homo sapiens
cagccatgtgagcactgggggtggtgccagtttggagctcctggaaggtggacccaagtggagagattgtggaac

SEQ ID NO: 540644 - DNA, 100 bp, Homo sapiens
ctctgcagggcatgtgctaactaccagacgatgaaagaacatttcctctagtttctggataatgagcaggcacacagataacgaaggaggcccaacttca

SEQ ID NO: 540645 - DNA, 74 bp, Homo sapiens
atcatttttgcttatctgccttatgggcttgcagaaggaatctcactctcagcaatgccaagtgagtacaccta

SEQ ID NO: 540646 - DNA, 83 bp, Homo sapiens
cgagaacgtgcgggaagagaagatcatcgagcatttcaaacgggctgggttacgacccctacaaccctgagctgcccaagccc

SEQ ID NO: 540647 - DNA, 98 bp, Homo sapiens
tcaccccctgaaaatgttcgcctgctccaagtttgtctccactccctccttgaaactgttcaggttccattatcaaaacgagcaaaatttgttggacc

SEQ ID NO: 540648 - DNA, 58 bp, Homo sapiens
gcgccccagggcaagccccgctccggccaacaaatggcccactgcgtgaccttggttc

SEQ ID NO: 540649 - DNA, 83 bp, Homo sapiens
tgagtacacaatttcaggacctccctgcttccttgtagatcatttggccgtatggtctactgctgagccagtttctcagtcta

SEQ ID NO: 540650 - DNA, 101 bp, Homo sapiens
tgtgtgtggccctgcccccagggctggctgtttctgtgcttaaagccatcttccaggaagtgcatgtacaggagctgctccggacacaggaggagcttaag

SEQ ID NO: 540651 - DNA, 97 bp, Homo sapiens
tcgtggtgaaggtccggggcttgccctggtcttgctcggccgatgaagtgcagaggtttttttctggtctcggcgcggaagatggccggcggcgtgg

SEQ ID NO: 540652 - DNA, 90 bp, Homo sapiens
accgggacctgttggttgtcgcccatgatctgatccggaagatgtcacctgtgttcagcgacatgaccgtaggggaaggagagatggtct

SEQ ID NO: 540653 - DNA, 98 bp, Homo sapiens
tggctgcaaccgctggattaaattcagatgagagtgatagattcgtgtggcctttcaaatgattgtgaagtggtggaaatggatccaaaataataagt

SEQ ID NO: 540654 - DNA, 100 bp, Homo sapiens
ggcagacaaaaagcagagaataattctttgagtcgtgagatggagaataaagaaactctcaaagggttgcacaagatggatgatcgtccagaggaacgaa

SEQ ID NO: 540655 - DNA, 90 bp, Homo sapiens
ctggaggagccgccgagcggagacccgggagcaggagctgggcctaggtctgcgccctgggacaagaatccttcaagaaacaggaaaaaa

SEQ ID NO: 540656 - DNA, 82 bp, Homo sapiens
gagaccgggggaggcgacgctaagttgctgatcgtggcggttctctacttaaaagacaatgactactgatgaaggtgccaag

SEQ ID NO: 540657 - DNA, 50 bp, Homo sapiens
gaggagtccaacatcaccatgcagactcgcagggcaatgacattaaagtc

SEQ ID NO: 540658 - DNA, 98 bp, Homo sapiens
cttactgtacacgttgctggcaaagagaagagaagacgacccaccattttgatcatgcctagtcacagttggaatggtaacaaaaccagcaaatgaac

SEQ ID NO: 540659 - DNA, 97 bp, Homo sapiens
gcagagaacaagaagcgttcccaggacgacagggcccggcagctgaagggtctcgagcttctggaaaacatgacagaagtggttcggaaaggcattc

SEQ ID NO: 540660 - DNA, 100 bp, Homo sapiens
ctgccgtgctgaggaccgggggtggaggtggtgcctctggcagtgacgaggacgaagtgtccgagctggagctctcaaacactgctgtcctgcaccagat

SEQ ID NO: 540661 - DNA, 75 bp, Homo sapiens
ccagttacgatggcaaaacagcagtgaccgagatcgtcaacagtcaaggcggataagaaggcggcacaagaaaag

SEQ ID NO: 540662 - DNA, 100 bp, Homo sapiens
ccactgccaaggagatcatccagcactttaagggctgccctgcggacctagtggtgtgtgacggggctcctgatggctcagcaacagcctcaccaaggac

SEQ ID NO: 540663 - DNA, 75 bp, Homo sapiens
gaaaaagctgtggaaggctctggataaggaccagtacctgcccaggaaactggtaacagttgacaaatgggaacc

SEQ ID NO: 540664 - DNA, 100 bp, Homo sapiens
tccttccccgcggttcaggaatcgtcacccggcggcctctcattctgcagctcatcttctcaaaaacaggctccttggcgatcccagcaccatccatccg

SEQ ID NO: 540665 - DNA, 82 bp, Homo sapiens
ggaagtggagatagctgagctcactacagaaagtggatctcttcagcctgggaattatcttctttgagatgtcctatcaccc

SEQ ID NO: 540666 - DNA, 115 bp, Homo sapiens
ttggatttggctacacacttatagatcttctgcactgtttacaggcacagaaaatggtgtgaatggaacattaacttcaaatgtagcagactctccccggaataaaaaagagaaa

SEQ ID NO: 540667 - DNA, 119 bp, Homo sapiens
atgttttccctcagcagtcggatgggggaggactgctttatggacttgcatcaggagtagcaaacacagtctggaaaattgatgatcttatggattggcatcaggaaaataaagacaag

SEQ ID NO: 540668 - DNA, 100 bp, Homo sapiens
ccacggccaagccccagcacactagttgacaaagatcagggaagtcgagataacatgagtattgtactagtttgcttttcaaatgctcccaaggtctcag

SEQ ID NO: 540669 - DNA, 100 bp, Homo sapiens
aaagcagaagccactggagaaaaacggccaagaggcagacctaggaaatgggattatcattggcaatggcgttcattccttacgagtggctttactgcag

SEQ ID NO: 540670 - DNA, 100 bp, Homo sapiens
ggagaagctatagactacttctactccaccaggaagatttagaagcagcaacgcagcctcttgcctggaattgggatgatgcggctgaaaccaccttcct

SEQ ID NO: 540671 - DNA, 78 bp, Homo sapiens
cggcgagaagcggccgagccagcagcagcggaagaagtccctatagaaccatacaacatcccactgtcccaggccgaa

SEQ ID NO: 540672 - DNA, 75 bp, Homo sapiens
tatcactcgggctacggagcccacgtgaagcagaggagagcagtaagatccgtgctcccactaccatgaagaaat

SEQ ID NO: 540673 - DNA, 97 bp, Homo sapiens
gtgagctgcggcaggacggctggagatgtgctggtggacggacagccatgtgaccgcgaggctgtggcggcctgccaggtgggcgaccccgtgcgcc

SEQ ID NO: 540674 - DNA, 75 bp, Homo sapiens
cccggctatgaccagcctggactattccaggatctcacattcttgaaggtggcattgaagagcactaagatcgga

SEQ ID NO: 540675 - DNA, 90 bp, Homo sapiens
cacttccattacagtatgagtggcaaaaattgtctgactcacagaaaatgcccacttcatggttagcagatttcagaacttatatttcca

SEQ ID NO: 540676 - DNA, 80 bp, Homo sapiens
tctcaatcagaattactagattttctctcaaactacgaggatattcaaatagaagccttgctgatgagagcctgtgagcc

SEQ ID NO: 540677 - DNA, 74 bp, Homo sapiens
tgggacagctaccgcagcatgagcgaaagctacacgctggaggttagaaaatggatttctgactggaatctcac

SEQ ID NO: 540678 - DNA, 98 bp, Homo sapiens
aggagccgcctctgcggctccaggagggcgcaggagcgggactgagagcgcctggaggctcgagcggagggtggtcttcaagctgacagagaagctga

SEQ ID NO: 540679 - DNA, 88 bp, Homo sapiens
gattcgcagtggtcgcttcttctccttgagatgcttcctgggaattagaggaaaacgcttatcaagagcttctgcagcactatgagcg

SEQ ID NO: 540680 - DNA, 115 bp, Homo sapiens
gcagtccttcagggaagatgggaggcgaggagaagccgattgggaaaatgaggtacgttagtgttcgcgattttaaaggcaaagtgctaattgatattagagaatattggatgga

SEQ ID NO: 540681 - DNA, 100 bp, Homo sapiens
cctgaggaaagacttggaagagaccagcatgtcttcagtagccaaactacttcttgagcatagatagaaagtggatgtcaccagcagggctgtgatggaa

SEQ ID NO: 540682 - DNA, 100 bp, Homo sapiens
ggtggggaagacctgtgtcctgttccgcttctccgaggacgccttcaactccacttttatctccaccatagggcgccctgcgtccggcagaggaggcgag

SEQ ID NO: 540683 - DNA, 100 bp, Homo sapiens
tgaagccgacaagcccgggagacacagtgtcagaattacaagaagatggctgtgccacccacgtatgccgatcttggcaaatctgccagggatgtcttca

SEQ ID NO: 540684 - DNA, 100 bp, Homo sapiens
catggagtttgtgatgaagcaggctctaggaggttggactccatgaaagaattgcacaaaacaaatcgacagcagcatgagaaacatctgcaaagccgag

SEQ ID NO: 540685 - DNA, 74 bp, Homo sapiens
ctgtacttttggtggttggatcatttgaagtggtgtctacacttataaaagtcaaaatgcagatcttcgtgaaa

SEQ ID NO: 540686 - DNA, 100 bp, Homo sapiens
ccaagctacagtgcaagagtggctttatacaagatgctctaggcaactgtattggtgcccgcccctgcatccctaaaagcttcggctacagctcggtggt

SEQ ID NO: 540687 - DNA, 111 bp, Homo sapiens
agaaaccggggaccttaacaatccacctaagaaattcagaggtactaggttttgacaagcttgcatcatgcgtgagtataagctagtcgttcttggctcaggaggcgttgg

SEQ ID NO: 540688 - DNA, 75 bp, Homo sapiens
cgccacattaaccctttcattttgtttggaagatggaccaaagcgatacaattcagaatggacagtttagaagaa

SEQ ID NO: 540689 - DNA, 98 bp, Homo sapiens
cgcagtctggaaagctttaggagttcacagtgaacattaagccatcatgtaagaagtccagctattctgttggagtgaccaagttgaaaaaccacttg

SEQ ID NO: 540690 - DNA, 90 bp, Homo sapiens
caaatactgcatatcagaaacaacagagtcttcggatgactcctacgtgtccgctggagaagagcccctagaggcccctgtgtttgagat

SEQ ID NO: 540691 - DNA, 75 bp, Homo sapiens
cagccggccagccggggggcactgcccgcccgggctctgctcgatcaagtcatccgccaaagaagcctgtccagt

SEQ ID NO: 540692 - DNA, 75 bp, Homo sapiens
aggattttgcactcaccattaaatctatcaggattctaaactgccttcctcggttcgcagtacacttctggaact

SEQ ID NO: 540693 - DNA, 88 bp, Homo sapiens
ctcttccagataccatttggctttcggctgtgcaggagtgaacatggaaaggtttgcagaagaagcagatgttgtaatagttggtgca

SEQ ID NO: 540694 - DNA, 100 bp, Homo sapiens
ttttctacagcttctgataatcaaccaactgttacaatcaaggtctatgaagctacaacacaggataaccttgatgataagctaaggaagtttgaaattc

SEQ ID NO: 540695 - DNA, 100 bp, Homo sapiens
ctacatctcagtagtggacaccctgaagatagtgaccgaagagaccatgaccacaactatatgtggtagatggtggctttgtgaagcagttaaatcacaa

SEQ ID NO: 540696 - DNA, 82 bp, Homo sapiens
aggaacgctcactgtcagcgcctggaaacttgctcacatgccatggacaatattaccaggcagaaccaattctacgataccc

SEQ ID NO: 540697 - DNA, 100 bp, Homo sapiens
gttcgaaatatggcaactttgaaagatagcatttcagaagatggacacaaagaagaaggaggaacagttgaagcttctcaaggagaaatatggcatcaac

SEQ ID NO: 540698 - DNA, 88 bp, Homo sapiens
gacagcctcaagggcttcagcaccgcgcccatggcagagccagaccaattgaagaggagctgggcagcaaggctaagtttgccggcag

SEQ ID NO: 540699 - DNA, 100 bp, Homo sapiens
cggaggtcgataagctggaactgatgccagctgaggtgggtgtcctggttggcaaagaccggtcaagtttttacgtgaatgggctgacacttgggggcca

SEQ ID NO: 540700 - DNA, 75 bp, Homo sapiens
ctttggtctcctgggaccactcgttgctgacagtcagaaaggaagcagtttaagtgcacggtgtgtgactacaca

SEQ ID NO: 540701 - DNA, 100 bp, Homo sapiens
agcagtcgcctgctgcagtactcagatgccttggagcacttgctgaccacagccactgtatgatgctgcttaccttacaatgtacaatatctgcttcaca

SEQ ID NO: 540702 - DNA, 100 bp, Homo sapiens
catagaagaacaagatgatcaagatggctcttcatggaaatgcattgtcagacttaattcagtgcacaaatgagatgaatgtgaacatcccacagttggc

SEQ ID NO: 540703 - DNA, 100 bp, Homo sapiens
ctcagacatgttctcaccacccttgggaaagaatatggcaaagctgatgcaagatgggtttattttgatccaaccattgtgtctgtggaaattctgaccg

SEQ ID NO: 540704 - DNA, 74 bp, Homo sapiens
tgcagcatattacctatcaggagaggagacactgccctaaccatcatggaggtggccgaggtggaaagtcctct

SEQ ID NO: 540705 - DNA, 100 bp, Homo sapiens
tcagtgaccaaaagctacaagagatattcagccgaggtgatttgatgaaggctgctgcaggagagttcgcagatgatccctgctcttctgtgaagcgagg

SEQ ID NO: 540706 - DNA, 88 bp, Homo sapiens
aaggggggctttcgcagctccttccgcaagctctttaaaaagaagtacagcctgtacacccgcacctggctcgggtacctcttctacc

SEQ ID NO: 540707 - DNA, 90 bp, Homo sapiens
gcaggccaagatggaccacctggtcctatggcatttataagacgctgtttggcatatcgaaaagaagatcgatttgatgtgcaccagctg

SEQ ID NO: 540708 - DNA, 101 bp, Homo sapiens
atagaaaacgagagtatatgcgatgagtttgtttgctgctttgtggtgcacaagcggtgccatgaatttgtcacattctcctgccctggcgctgacaaggg

SEQ ID NO: 540709 - DNA, 83 bp, Homo sapiens
ctaaagcagcgtgcgttcagccctgggctgtggtcgccaggacccccccagagccaagaccttctccagaaggtgacccttcc

SEQ ID NO: 540710 - DNA, 75 bp, Homo sapiens
aaacatctggttggcaatatgatactcagtgttcactggcaggagtgcacgatctgattttctggagagatgtga

SEQ ID NO: 540711 - DNA, 50 bp, Homo sapiens
gtgattaagctgtcaggtgggctgctagtctatggggtccttacaaagac

SEQ ID NO: 540712 - DNA, 75 bp, Homo sapiens
atgaagcagtacggatatttttagaatttgagagagttgaatcagcaattaaagatagcccggagaccatcggca

SEQ ID NO: 540713 - DNA, 100 bp, Homo sapiens
ctgctccccagtcctccgccccctcgcgtcgcggccctgggcgggcgccgcgagccggaagatcaaattcccaggggcttccctaccattgacatgggcc

SEQ ID NO: 540714 - DNA, 82 bp, Homo sapiens
agaaggggaggttctctcacactctctagaagcagagcacaggaaaagtgggttgaagttgcctcaatgaaagtgcctagag

SEQ ID NO: 540715 - DNA, 90 bp, Homo sapiens
attccggacacataacaagcagcagtgaggacaccaaagtcggatgtcatggatcagaatttgttaaatttcctcccagaacaagaacat

SEQ ID NO: 540716 - DNA, 75 bp, Homo sapiens
ctggagcctgtgatcgaaagtctgctgaagaggcattgcacagatcaaacaagggagatgcacttatttacatgg

SEQ ID NO: 540717 - DNA, 50 bp, Homo sapiens
ctctgtcagaggaagatcccttggggattcgacattggaaatcacttctg

SEQ ID NO: 540718 - DNA, 100 bp, Homo sapiens
caagcagggaaagagagcgccaggtgcttagcaggcaaggggctcaaatagtttacctctgctgagatctgtcttggacaaattaagtgctaatcaacaa

SEQ ID NO: 540719 - DNA, 76 bp, Homo sapiens
ggtatgattacgtggaggtccgggatggttactggagaaaagccccccttttggctacccaaggtgcgaaaaagaa

SEQ ID NO: 540720 - DNA, 97 bp, Homo sapiens
aagatgccagaatggttatctacacacccttctcatggcaatcgagttgagtacttggatagacttatacctcagaatccttataagccaaagtggg

SEQ ID NO: 540721 - DNA, 87 bp, Homo sapiens
gggccagtctggagacagtcaaggcagatcgggagcggtgccgagaaaaatttccttactagatgacatttcatcgcaatgtccgat

SEQ ID NO: 540722 - DNA, 80 bp, Homo sapiens
cgagattggggccatgccaaggactatgtggagataaacaggggtcacatgacgacagaagccaagagggctgcaaagat

SEQ ID NO: 540723 - DNA, 82 bp, Homo sapiens
ccagatagaaaacggcgagagtgggcgagaacgtccactgcgggccggcgaaagctgagctagagccggtgcaggccacgca

SEQ ID NO: 540724 - DNA, 147 bp, Homo sapiens
accactgaagatgaggttgaaaaacctgacttttatcatcatattgataatctcaggagaactctatgcagaagcaacattttgtgattttccaaaaataaaccatggaattctatatgatgaagaaaaatataagccattttccca

SEQ ID NO: 540725 - DNA, 98 bp, Homo sapiens
ggaacacggctccatcatcacccaggcgcggagggaagacgccctggtgctcaccaagcaaggtcctggctataagtcaccatggcacagcaagctgc

SEQ ID NO: 540726 - DNA, 90 bp, Homo sapiens
tctcagccgccaaagaccccgtccggtagtgtgccccctaccaccggagccagagaatggtggctacatctgccacccccggccctgcag

SEQ ID NO: 540727 - DNA, 142 bp, Homo sapiens
atcaaaatggaggaagagagcggcgcgcccggcgtgccgagcggcaacggggctccgggccctaagggaacatccagtcatggataaaaatgagctggttcagaaggccaaactggccgagcaggctgagcgatatgatgac

SEQ ID NO: 540728 - DNA, 100 bp, Homo sapiens
accagcatccccaccatcaacatggagaacaagaccacgtggaagctaaaccagccccagaaatatttgaaaatgaagtcatggccctgctgagagactt

SEQ ID NO: 540729 - DNA, 100 bp, Homo sapiens
gaagcaagaaggccctggacacagcaatatctctgggctttcacagtcctgtcagccctcctgttgtggatctcagaactatcatggaaatagaagaaag

SEQ ID NO: 540730 - DNA, 75 bp, Homo sapiens
ccataggagacatggacgaagccttcaaatccatcaagctcatcaaaagaagtgagcttgtagtggacaaaacaa

SEQ ID NO: 540731 - DNA, 74 bp, Homo sapiens
gacagtcctcgtcagcactgactttcagctatggaatcgcaaatcacatacttagatggatttgatcaggagga

SEQ ID NO: 540732 - DNA, 100 bp, Homo sapiens
gtggggctgcggcgcctgggactgcaccgcaccgagggcgagctccagaggcggggtttcaccatgttgcccagactggtcttgaactcctgagcttaag

SEQ ID NO: 540733 - DNA, 95 bp, Homo sapiens
agaaggacaaggacagaatcaccagcactggctgaagtggtgctgattactatgattacggacatggactcagtgaggagacttatgattcctac

SEQ ID NO: 540734 - DNA, 82 bp, Homo sapiens
ggcgctcaccatgttccctggaggggcccagtgttggctgtggctatgggcagcaacagtgaatactgctacagtggcgggg

SEQ ID NO: 540735 - DNA, 75 bp, Homo sapiens
ctgaaggagttccaccaggccgggaagcccatcggaacatccagtcatggataaaaatgagctggttcagaaggc

SEQ ID NO: 540736 - DNA, 80 bp, Homo sapiens
tggaggggccggggctgggctcgcagtgtaaacaggaacatcgataagtagtgtaaaaacttgcacaatgaaatccgaag

SEQ ID NO: 540737 - DNA, 90 bp, Homo sapiens
atcggggcagacaccgccctgaacactatcaccgacgagctcgaggccatgagcagatataccagcccagtgaacccagctgtcttcccc

SEQ ID NO: 540738 - DNA, 100 bp, Homo sapiens
gtgaagctggcggagcaggaggatgggcggacctcaagtatgtgttgcccagtctctgatttaagtaatgagcttctcttttccaattctatttaccata

SEQ ID NO: 540739 - DNA, 90 bp, Homo sapiens
cggcggtccagggtcctgggcagtcgcgccagagctgagcggagggcgcggcgcgagaacgttccatggactgcagaactccagctgcat

SEQ ID NO: 540740 - DNA, 100 bp, Homo sapiens
cctgtggatgacatcatcatggagaacggcaaggtggtgggcgtgaagtctgagggagaggtgatggaaccagccctggaaggcacaggcaaagagggga

SEQ ID NO: 540741 - DNA, 75 bp, Homo sapiens
atggctggaagttcttggctgcggggtgatggaacaacaactggtcaattcagatacagatccacgggttttaga

SEQ ID NO: 540742 - DNA, 80 bp, Homo sapiens
tcaagcgaagccttgaaaaagctgccctgagacggtgtcccgccgaaaggcagcagtgaggatgccagagttcatgggtt

SEQ ID NO: 540743 - DNA, 82 bp, Homo sapiens
ccgcaccatgccgctcctaagcctgcacagccgcggcggcagcagcagtgagagatccgcctcacggacacgctgggcaggc

SEQ ID NO: 540744 - DNA, 76 bp, Homo sapiens
ggggacgtgcctgggcctggcctggttctgacagggagacaacagcaaatacaagagaagattgagcagaaccgac

SEQ ID NO: 540745 - DNA, 101 bp, Homo sapiens
gatcgcaccgcggacgcccgctgagcttggcgcacgggccgaccagctggccaactcagccaatccgcacatttagctctccaactaccatacaacgtgct

SEQ ID NO: 540746 - DNA, 80 bp, Homo sapiens
agaattgatcacatcatgaaaggttttaaaatcaaagatgggaaaatcggagaaaattgcccttccccatggccagcttg

SEQ ID NO: 540747 - DNA, 88 bp, Homo sapiens
ccgaccggcactggcagcactttcctgttgaagaaatcttcctggcgtgtggtttcaaagtaacaggccgcccgcctgaagaaactac

SEQ ID NO: 540748 - DNA, 154 bp, Homo sapiens
tccggagttggcggggccctgcgccggaggaggaggaccaggcccgcgggctcagctctcgccgccagcgggccgcagaaaaggggccttgctgttcaacaacatattttctatcgtgcctgcgatcttaatgggatgcagcagagtcgccaca

SEQ ID NO: 540749 - DNA, 51 bp, Homo sapiens
gcaccgccgaggactccagcacaccgaggatgaccaagatgctagacctgc

SEQ ID NO: 540750 - DNA, 82 bp, Homo sapiens
gccacccctcctttcaggtcaagacctgcctgaccagtgcacgcccaacccctgcgataggaaggggacccaagcctgccag

SEQ ID NO: 540751 - DNA, 96 bp, Homo sapiens
gcacagtggagaaaccgcctcgaaaacggagaagcagctaaacaagcattgaggaagcagcaaacaaaggcatggaagaaactacaacaacaaaaa

SEQ ID NO: 540752 - DNA, 100 bp, Homo sapiens
ataacaagttccgatcagaggtgaaaccaacagccagtgatatgctatacatgtctgttcggcacttgaagtactccttgtttaagaaatcactactggg

SEQ ID NO: 540753 - DNA, 74 bp, Homo sapiens
gcaaatcccctgctcagggtcttcatccagaaacgagtgaaaatgcctcgtgtaaaagcagctcaagctggaag

SEQ ID NO: 540754 - DNA, 75 bp, Homo sapiens
gaatggcacggtctgcctcagtccaccctgtaccctgggttccccccagcgagtcaatggcaaggtgaaaggaag

SEQ ID NO: 540755 - DNA, 74 bp, Homo sapiens
agattccttgcagagacagctcaacacggcacttccacagcaccagcaacaagtggtgcaggctgtggaacggg

SEQ ID NO: 540756 - DNA, 82 bp, Homo sapiens
gtgggtcggggatcggtcgcctgagaggtgtttgagaagtcccccctgcgggtgaagaacttcgggatctggctgcgctatg

SEQ ID NO: 540757 - DNA, 75 bp, Homo sapiens
aagcattgtatcacttcatctgcaaatatttcaataagtacccaaaagcataaatgcagttccaactacaacgaa

SEQ ID NO: 540758 - DNA, 100 bp, Homo sapiens
atcttcatgtgtctcttctaagctgaataaagctgttttggaactgtcaggtacctcaaagcgtaatactactgctggattctaaagcacaacaaacaga

SEQ ID NO: 540759 - DNA, 82 bp, Homo sapiens
agtggttgccacatcttctggttgctggatttgacccactgattctactgtgcaattcttgatctttgatggaaaacagatt

SEQ ID NO: 540760 - DNA, 50 bp, Homo sapiens
aaggattccaagtaactcttatttgtacaatgtttccatcaaggtgaacg

SEQ ID NO: 540761 - DNA, 50 bp, Homo sapiens
acatccctcacattgaaatatgagtttttggtcatgaagaggaagagagg

SEQ ID NO: 540762 - DNA, 87 bp, Homo sapiens
gagcggcgggacctcggcggactcgccatggaggaggaggttttgcactgattgcaaaaataaagtcctccgagcatacaatatcct

SEQ ID NO: 540763 - DNA, 82 bp, Homo sapiens
tgtgcagactcagactggccaaaattcaatccctgctttagctcagatgtcatttgtcagagtgaaccgctgtggtccccga

SEQ ID NO: 540764 - DNA, 75 bp, Homo sapiens
tcaccttagtcaccagatcgcagcaggagacaggtttgaagatgccgcatttggattggatgaattccaaattct

SEQ ID NO: 540765 - DNA, 48 bp, Homo sapiens
atcgattgcattggcaatgagacagcatgctacaagtgaaaactgatg

SEQ ID NO: 540766 - DNA, 100 bp, Homo sapiens
ccttctgccacatttgttttgagctaaatattgaggatcgaaagctgctttgcgtcgcagttggagcagcacccccaccgcaggtggcattgaagggagc

SEQ ID NO: 540767 - DNA, 90 bp, Homo sapiens
caatcgaccagatatcctggaccccgcgctgcttaggccggggcgtttcgacaggcagatctttattgattggtggaacgagaatgccta

SEQ ID NO: 540768 - DNA, 100 bp, Homo sapiens
caagccatggagaggttgctgtgatgtaaaattctcaaacaatgagatagataaaaagtacgcagccaaaaagttcaagaagaagtgttatggagatgga

SEQ ID NO: 540769 - DNA, 119 bp, Homo sapiens
gctggccaaagcctgcccagacggctcacctgtgcgggatggaacaaaagggaaaagtctgaagacgcttatgtccaaggggatcctgcaggtgcatcctccgatctgcgactgcccgg

SEQ ID NO: 540770 - DNA, 90 bp, Homo sapiens
ccacagttcagtgtattcgttctgtgcctgaactcaaagatgcccttaaaaggttcatcttccttcctgtacagtattttcaaacttccc

SEQ ID NO: 540771 - DNA, 100 bp, Homo sapiens
aacagcgaacagactttaaggaatgaaatgaaagtgctgctcatcttaagcaagtggctggaacaggtgtacccaagtcgtgagatggagaataaagaaa

SEQ ID NO: 540772 - DNA, 100 bp, Homo sapiens
ctcgctaacacggcttctccctgacctcttaatttcaggagatacactgcctctaggactgggacagatagccactgagtacctgcttcaaatcaccctg

SEQ ID NO: 540773 - DNA, 75 bp, Homo sapiens
ccagccattagcacaaccatgctcattgaaagacattgttccacagaattcagaaaatcctgccttgcttcgttg

SEQ ID NO: 540774 - DNA, 140 bp, Homo sapiens
cttgaatggcaactgatacataataagacacaatctattctgctgattcacaattatggagactgttgtcccttttgatgagaagaataagcctcattctgattcaacagcagagatcaaagaaaagacttctgttttct

SEQ ID NO: 540775 - DNA, 100 bp, Homo sapiens
gcattcgtgaagaagcccatcagtatttcttgaataccaggtagagctgaagtttcctgcaccaggcaagcctggaaattatcagtatactgtgtttctg

SEQ ID NO: 540776 - DNA, 100 bp, Homo sapiens
tttccgcttcttgaatttctctctgtaaaggagctctaagcgaaagacatgaggcctcagcctgaaatgaggttgttttgaggtcatctgatttctgact

SEQ ID NO: 540777 - DNA, 100 bp, Homo sapiens
ccgaccctgctaacccagactcacataagaggaaaggatcgccatgtgacacactggcatcaaggttcaaaccttgtactactcagctgatcacaagctg

SEQ ID NO: 540778 - DNA, 100 bp, Homo sapiens
ttcatacgcaggatgtcctcttcgtgctcaacagcaaagaagtggcacaggccaaggcaacagcattattgagaaaagcccttacagaagagtgtggccg

SEQ ID NO: 540779 - DNA, 96 bp, Homo sapiens
tgagaatcgtggagatgtttaaggattacccgccagccataaaagtactctctgaagatggcagaagctcaccaagctgtggcctttcagttcacg

SEQ ID NO: 540780 - DNA, 75 bp, Homo sapiens
accgccgcgactccgccgcgctgcgcacgcccagaatggcagttcggaaaaccctcattcctcctcagcctcctg

SEQ ID NO: 540781 - DNA, 100 bp, Homo sapiens
cggaaatcagctctacagttcaggcagacctgttatcctaaactaggtgagtcagcttttggtacatgtgatgattttcagtgtaaccaatgatgtaatg

SEQ ID NO: 540782 - DNA, 75 bp, Homo sapiens
ctagcgtcctggaattacttcaatcaagttatcaatactctggctgaccatcatcatcgtgggactgactttggt

SEQ ID NO: 540783 - DNA, 100 bp, Homo sapiens
cggagatgccccgcggcagccgcgctcggggctctaagatgtttctttctcagcaaaatagaggagaagcttacccctcttccagaagataatagtatga

SEQ ID NO: 540784 - DNA, 98 bp, Homo sapiens
ggcaggggaggaagccacctcgaggtgactgcttagaaaactgcacagcatctgatgaaattagcgaataagaacatcaaccatgtcttacactccag

SEQ ID NO: 540785 - DNA, 99 bp, Homo sapiens
catcgagcccattatgaaactgaaggtagccgaggggcagtaaaagcatctactgggggacatcctgttgtgaaggtgaatgatgatcaagaaccagag

SEQ ID NO: 540786 - DNA, 75 bp, Homo sapiens
cagaaacgtgacgagcaatgatgaacggttaagaagattgtctaccaaatatagaacagaaaagatatatcccac

SEQ ID NO: 540787 - DNA, 107 bp, Homo sapiens
tgcagaggccaagaccgttttgcccaagaaggagaaaatgaagctgaggcgtgagcaatggttgcagaagtggagcctttcaggctggcatggagagcttaaggggc

SEQ ID NO: 540788 - DNA, 89 bp, Homo sapiens
atgttggtgggatgttacgtggccggaatcattcccttggctgttaatttctcagaggcactaagtgaccgcttcagcggtgagatccc

SEQ ID NO: 540789 - DNA, 51 bp, Homo sapiens
taccttgtccatcacgtcatgctttaccgatttgttacaactcaagcaagg

SEQ ID NO: 540790 - DNA, 51 bp, Homo sapiens
aagaaagtggacaaagagaggagtcagataaactacaggcctccatctaat

SEQ ID NO: 540791 - DNA, 100 bp, Homo sapiens
tctactgtttacagtacgatgatgaaaaaattatcagtggcctacgagataattctattaagattgaggtggtgccttctgcctctgccctgatcatcaa

SEQ ID NO: 540792 - DNA, 100 bp, Homo sapiens
tgagcaaagagcacaatcatacaaaagaaaacaccatccggaccacgaccaggacttccaatagtagtcagacattatcatcctgtcatactatggagcc

SEQ ID NO: 540793 - DNA, 100 bp, Homo sapiens
ggggaagaccatcaccctcgaggagatctattgggaaactgattataaccactcgggcaccatcgatgcccacgagatgaggacagccctcaggaaggca

SEQ ID NO: 540794 - DNA, 100 bp, Homo sapiens
tcgggtcgttgtggtgcgctgtcttcccgcttgcgtcagggacctgcccgactcagtggtctgctgtgcacgtgctgcagaactccatagacagcctcac

SEQ ID NO: 540795 - DNA, 88 bp, Homo sapiens
gctaccaaatgcttattttctgcttccaaaggtccagagcattcagctgtctcaaatgcaggagcccatggaggagaggcaccaacag

SEQ ID NO: 540796 - DNA, 101 bp, Homo sapiens
cgacctactaagaactacctgagctacctgacagccccggattattctgcctttgaaaatcctcactatggatgggctcattgaggacattaagcatcggc

SEQ ID NO: 540797 - DNA, 90 bp, Homo sapiens
cacttgggtacaaacttatgaagaaggtctcttttatgctcaaaaaagcttctcctcttccttaaagccttttccgaaacagagcagaca

SEQ ID NO: 540798 - DNA, 89 bp, Homo sapiens
atagcgggaagaacaaaggaaggggagcccgggacccccgggggcgcagtgttctaagaacggaagcatctgggctggatggaatttag

SEQ ID NO: 540799 - DNA, 51 bp, Homo sapiens
gagacacggccagatctgccctccaaaactaattctgaagcaagcccttat

SEQ ID NO: 540800 - DNA, 100 bp, Homo sapiens
gcgcggggcacggagggcggtggcggcgggctcctgcgagaagcaagcggaacttcctgagggcccccgagtctgcgccccttaagagcaaaatgattta

SEQ ID NO: 540801 - DNA, 97 bp, Homo sapiens
gctgcgggtgttcttttggggtagtgtctgggatccagtacgagttgaatcattgttcaaataaggtagacgttacatccaagaggaaataatccag

SEQ ID NO: 540802 - DNA, 116 bp, Homo sapiens
ttctgagagagcctgtgtgtttaggaggatgtgagcacatcttctgtagataccagatgacaattttagcatcccagaaggtgaagaagatctggcaaaagcaattcagatggccc

SEQ ID NO: 540803 - DNA, 90 bp, Homo sapiens
caagcaggtcaccatgacggagctgaacgccatcatcgggcaaagtgaaaaggagagcttgttgaaggaaagagatcacattttgtcaac

SEQ ID NO: 540804 - DNA, 83 bp, Homo sapiens
gtaatgctggggaccctgagatcgtcaagtctcccagcgaccccaagcaataccggtgccactgattaatgaacttgaatcag

SEQ ID NO: 540805 - DNA, 103 bp, Homo sapiens
tgttcgacgtgcggcccgaatgccagcgcctcttctaccggggcaagcaggcgcactgcacactcgccggggggcacgccatgcaaatctccttctgggccaa

SEQ ID NO: 540806 - DNA, 100 bp, Homo sapiens
atccattccatgggttttattcacaggtacaaagaggatggtgaagctttgctaattttgctaccctcagaaaaagctatggtgcagcagcttcttcaga

SEQ ID NO: 540807 - DNA, 82 bp, Homo sapiens
cacagatcatctacactcagctagctgccaaatcaaagtttttaagtccctgctgtccactcccgcgggttttcccacttcc

SEQ ID NO: 540808 - DNA, 51 bp, Homo sapiens
cgccccgacgccgatccggccgagccaatcgtcattgaattttgagaagca

SEQ ID NO: 540809 - DNA, 100 bp, Homo sapiens
atctgcggggcatcgtgtctcgaccgcgtcttctgagtcagatggcccactgcgtgaccttggttcagctgtccatttcctgtgaccatctcattgacaa

SEQ ID NO: 540810 - DNA, 75 bp, Homo sapiens
gcggccaggccgtgcgccggcctttggtcgcctccgtgggcctcaatgattgtgaagatggaaagggtccaaccc

SEQ ID NO: 540811 - DNA, 83 bp, Homo sapiens
ccacagcggggcggcggcggcggcggctgcggcccaatatagcctgacatttaccccggtaactgctgggcatttaaaggctc

SEQ ID NO: 540812 - DNA, 76 bp, Homo sapiens
cgccgctcaccccgcggccgcaccttcccgccttctcagctcaaaagccaaaagtctctgagaacgactttgaaga

SEQ ID NO: 540813 - DNA, 90 bp, Homo sapiens
ctttactgtaaaaggaaattggtacccctataatgggcagtgtctaccagatattgttgaacaagagatttttcaatcaagactttggaa

SEQ ID NO: 540814 - DNA, 50 bp, Homo sapiens
ctattgtaagtgcagatggaacacaacagccaaaagaatgcaatggtgta

SEQ ID NO: 540815 - DNA, 74 bp, Homo sapiens
tggccctggactacctctgcaggagccaaaaacctgtatatcatctccgtgaaggggatcaagggacggctgaa

SEQ ID NO: 540816 - DNA, 76 bp, Homo sapiens
gaaaccgcggcgtggtgcatgatgcaacaccgaagtcttcctaatattctcaccgatgatcgatttaaagttatgt

SEQ ID NO: 540817 - DNA, 100 bp, Homo sapiens
cgcactggaactcccagtccagcatgccgtccacgccagacctgcgggtccggagtccccactacgtccattccacgagacctcagagttgggtgtcaca

SEQ ID NO: 540818 - DNA, 75 bp, Homo sapiens
tgactgtgaggaccgaactgatgaagccaactgccgtaatagcctgcagctggtgttttgagaagccctactgct

SEQ ID NO: 540819 - DNA, 50 bp, Homo sapiens
atggtgtccctccgggtgatggaatcccagatgcagtgactggttactac

SEQ ID NO: 540820 - DNA, 75 bp, Homo sapiens
cgatatgcagtttggtttggaggatcaatgctggcttccacggtttctatgatcagagatattcgagagagggag

SEQ ID NO: 540821 - DNA, 50 bp, Homo sapiens
tccccacatcaatgcactgccaatgcatatagcactttctacattgtggg

SEQ ID NO: 540822 - DNA, 111 bp, Homo sapiens
ggcaggccatgggcaagatatctcagtgttctccgctctcataggtcaggccaaggcagaggcttcctcaggagaccatcccactgacacagagatgaaggaggagcagaa

SEQ ID NO: 540823 - DNA, 110 bp, Homo sapiens
gaacaggggcagaaaatagcacacttttactctacgcaactgttgctttttcatggaagtgtttggattgtgagctatttcagaactgttctcaggactcattattttaa

SEQ ID NO: 540824 - DNA, 75 bp, Homo sapiens
ccaagaagatcatcattaaggacggaggcacggctaaatttattgtgaagaaatcagaagatgaagaagacgccg

SEQ ID NO: 540825 - DNA, 73 bp, Homo sapiens
gggaacaatgaggcctacgcagagctcatcgtccttgccaagacaatgcaaactccagtgaacattcccgtgc

SEQ ID NO: 540826 - DNA, 100 bp, Homo sapiens
attgatcctttctacaatgaatccttcagcttcaaagttccccaagaagaactggaaaatgccagcctagtgtttacagaggtggtgggacacacgcagg

SEQ ID NO: 540827 - DNA, 100 bp, Homo sapiens
atcattggaatttttgatgataccttttctatatggattacaatttgatcgctgggaattctccaccttaaagaaggtcctcgatgggcttcctggaata

SEQ ID NO: 540828 - DNA, 108 bp, Homo sapiens
ccgggacctgttggttgtcgcccatgatctgatccggaagatgtcacctcaagagtgagccatggagctacgtgtggggaacaagtaccgcctgggacggaagatcgg

SEQ ID NO: 540829 - DNA, 100 bp, Homo sapiens
gccgagggtctcagcgggatctggagtcaggggtcattcctgtcccaatcagctgctctactactgatgacattaaagatgccttcattacccaggcaca

SEQ ID NO: 540830 - DNA, 80 bp, Homo sapiens
cgctgaggtggatggagaagcagctgggggccttggctgtaaggacccctaagggatgctttcattggatttggaggaaa

SEQ ID NO: 540831 - DNA, 100 bp, Homo sapiens
gttccttggtgtcatccagccttagcaaaccagagggagttcatttatgggacttgcaagacagagttttagtaagaaagtatcaaggtgttacacaagg

SEQ ID NO: 540832 - DNA, 100 bp, Homo sapiens
gcaagttagtggattaaaatctcccaagaggaatgacaaacaaccagctcttcaggacccagatgatgtggtaccagttggccaaagaagagcctggtgt

SEQ ID NO: 540833 - DNA, 100 bp, Homo sapiens
gtcgtcttgggcttcctggtgctccgcaggatacaatgtctctttgctatatgaccttgaaaatcttccggcatccaaggattccattgtgcatcaagct

SEQ ID NO: 540834 - DNA, 101 bp, Homo sapiens
gctgccgccatcgtgccagcccctcgggacccagatgatgtggtaccagttggccaaagaagagcctggtgttggtgcatgtgctttggactagcatttat

SEQ ID NO: 540835 - DNA, 100 bp, Homo sapiens
ctcagaactgttccttcagccaaagaaacaagccgtggaataggtgtatcaagtaatggtgcaaagcctgaaaatcttgagctcaatgatgacaccattc

SEQ ID NO: 540836 - DNA, 100 bp, Homo sapiens
aatgccacggaccccgactccctgcagcatcaaaccatcagccaccacaatgtttgaagctggaaaggacaaagtaaatccagatgaatttgctgtggca

SEQ ID NO: 540837 - DNA, 98 bp, Homo sapiens
ttcaactgcgcagaatctaccaacttcgccaccctgcggtggattgactacggcaaagtggccactcaggtttggctcagaagaaggcggccccaaca

SEQ ID NO: 540838 - DNA, 100 bp, Homo sapiens
ctctgatgtcaatcttgagggctaggtgcagtcagcctcagtttccaaagccggaaaaggatcctctagtagccacggtgtggcagctgctctgaaccag

SEQ ID NO: 540839 - DNA, 80 bp, Homo sapiens
caagaaggcaacgacgttccatctgtggaaggacctaccaaccaggtgagcgacctgtgagagtttatgccgatggaata

SEQ ID NO: 540840 - DNA, 74 bp, Homo sapiens
gggctggagacaacagaaacagaaacgattgtggaaacagatgccgctcctacgaggactgctgtggctccagg

SEQ ID NO: 540841 - DNA, 100 bp, Homo sapiens
gaggccacagcccggactccatcgactcccccggctcttagactaatgccttcaattaagttgcagagttctgatggagagatatttgaagttgatgtgg

SEQ ID NO: 540842 - DNA, 100 bp, Homo sapiens
cgcgcctgcctccaggccgtcaagtacctcatgttcgccttcaacctgctcttctggatctcagcccaggagagccgtcgtaagaagaaggagtatgtgg

SEQ ID NO: 540843 - DNA, 51 bp, Homo sapiens
gagatgaagcctaagaatatgatcagcgagtgatagacagccaagcagaga

SEQ ID NO: 540844 - DNA, 97 bp, Homo sapiens
cgcaagcgtcagacacattgactattccattgtctagactttgtgttccaagatcagagatgaatgaagaaatgctgtgccaagaatttggaagatt

SEQ ID NO: 540845 - DNA, 50 bp, Homo sapiens
ggagaagcaggagccctactcggcagggctctgtacacatatgaagatgg

SEQ ID NO: 540846 - DNA, 75 bp, Homo sapiens
agagcgccaggcgccgcgggggacattctgagcatgtgagacctgaggactgcaaacagctataagaggctccaa

SEQ ID NO: 540847 - DNA, 100 bp, Homo sapiens
tggctgcattggaatcgctgaaccgtgcagtgctcgctgccatggatgccaccaagctgaaagaagatgctgatatgctacaacacggatgaacctggag

SEQ ID NO: 540848 - DNA, 82 bp, Homo sapiens
agcatcaactacctgcactttggggagcctaagtcctgatgtgaagttcatttccaatccgccctccatggtggcagcgggg

SEQ ID NO: 540849 - DNA, 90 bp, Homo sapiens
ggccaagggaaaaatttactgcagctgagatccagcggaggccctgcagctcccaatggactatgtccagcgggtcaagcggacccactc

SEQ ID NO: 540850 - DNA, 76 bp, Homo sapiens
caccaccgcactgtcgctgcccgcctgccctgaggagtccccgctgcttggaaaaaccatatggcatagttgaaaa

SEQ ID NO: 540851 - DNA, 100 bp, Homo sapiens
gtggtgggcggccagagcgccggcaagagctcggtgctcgagaacttcgtgggcagttgttgacctcctgtactggagagacattaagaagactggagtg

SEQ ID NO: 540852 - DNA, 80 bp, Homo sapiens
aaaacaaggtgcagagaatatgatacagatgtattcaaatggatcttcaaaggtgaagtggatcctaaagagaggatagc

SEQ ID NO: 540853 - DNA, 83 bp, Homo sapiens
ctgtgagatatcgcccttggtgtcttactctggagagtggagacctttggcgacttggcctttggcgacatcttcctccacct

SEQ ID NO: 540854 - DNA, 88 bp, Homo sapiens
gcagtggtcgcttcttctccttgaaagtggtggagagagagctggatgctcttttggaacagcaaaacaccattgaaagtaagatggt

SEQ ID NO: 540855 - DNA, 98 bp, Homo sapiens
tttaacacacctattgaacatactttcagagcttgtggagaaaatattcatggcttcagaaatacttccacctactatactggcaattgctggagaag

SEQ ID NO: 540856 - DNA, 98 bp, Homo sapiens
cctggcggtcttcatctcggatatccgcaactgatggacttgtcaatttctgcaaagtagccagctgggattttgagaggaattgcctagaatctgaa

SEQ ID NO: 540857 - DNA, 82 bp, Homo sapiens
ttacttttgtggggcacgacgagaaagtccgcagccccaaacaacaatgcagatcttcgtgaagactctgactggtaagacc

SEQ ID NO: 540858 - DNA, 106 bp, Homo sapiens
aaagaagtggagcgtgtcctgaaggagttccaccaggccgggaagcccatcggaagtccattggaatattaagcccaggagttgctttggggatggctggaagtgc

SEQ ID NO: 540859 - DNA, 90 bp, Homo sapiens
ttgacgaggctgcggtgtctgctgctattctccgagcttcgcaatgtgatcgtaaacttgttgataaagaagatatcgacactagcagca

SEQ ID NO: 540860 - DNA, 98 bp, Homo sapiens
ctgggtgttgcacagagatttgattgtgaaccatgcctttagtgaagaggaacattgagccccggcacttgtgccggggagctctgcctgaagggatt

SEQ ID NO: 540861 - DNA, 75 bp, Homo sapiens
ggcagtgtacagggctctgcaggctgccttggcaggttatgatgtgattgctcaagcccaatctgggactgggaa

SEQ ID NO: 540862 - DNA, 88 bp, Homo sapiens
ggcagtgccgcttcggccgaaggcccgagcgcccgaggcgtctgggatggtgtgggaccggatgccatggacaatattaccaggcaga

SEQ ID NO: 540863 - DNA, 74 bp, Homo sapiens
gctattgtggttgaacaatggacagtcctggaagtttgtgactggttatatcctctagttcctgatagatctcc

SEQ ID NO: 540864 - DNA, 101 bp, Homo sapiens
cgccggagccgcctcgtgcactctccaattaaggaacagctatatcctgcttccttctgtaagcagcatcgacttgtgcaagggttcagtcatgcagccac

SEQ ID NO: 540865 - DNA, 100 bp, Homo sapiens
ttcaatgtggccaagtctctgcagaagatagggcccatcctggacaacaggctccgtgtgtttgacagtggcgtcatggtaattgagcttcagtctcaca

SEQ ID NO: 540866 - DNA, 83 bp, Homo sapiens
gttttcgtacgggcggccgtgcgcgaggcgagacaatgcagatcttcgtgaagactctgactggtaagaccatcaccctcgag

SEQ ID NO: 540867 - DNA, 100 bp, Homo sapiens
agtgacccagaccctctcctttccctttgagaccgtgaagagaaagatgcaggtggtggacataatgcgagttaacgtggacaaggttctggaaagagac

SEQ ID NO: 540868 - DNA, 74 bp, Homo sapiens
gaattgctgaattagaactgcagaggttcctctacagcaaggtcgagtcccagacaccagaagtctgaatttgg

SEQ ID NO: 540869 - DNA, 90 bp, Homo sapiens
tataccattgaaaagccttcagagctgagaggatgacccctccggcgaaggtgtcctgccctcggcccgcggcccagccaccttcctccc

SEQ ID NO: 540870 - DNA, 103 bp, Homo sapiens
ttcaaaacttaggatctattttaacgtatgccttcttgggaactgccatctcctgcatcgtcataggatggactagaggcttttaccagatttcttaaaactg

SEQ ID NO: 540871 - DNA, 74 bp, Homo sapiens
cgagcgggcggcttcctggcctgggcgctccggtggcggcggagatttaaggaacagtgacaccccaccccagt

SEQ ID NO: 540872 - DNA, 96 bp, Homo sapiens
ggcggcggctctctggtccgcagcggcaacagtaacgaaaaacagggctgcatgggcatccagtggcgagacctcctgagtcccgtcaacgtggac

SEQ ID NO: 540873 - DNA, 50 bp, Homo sapiens
cggctcgcactgcgacccgaagatccgctttatcctcatccagaaccggg

SEQ ID NO: 540874 - DNA, 98 bp, Homo sapiens
agagatcaaaacaagccctccaggaactcacgcttgtaattccacatctgaagtcaaagatctattggaacagaaaagcaagttgaccatagaagtgg

SEQ ID NO: 540875 - DNA, 100 bp, Homo sapiens
aagagattcttcatctggcagagctctgcatagaagtcttacagcagaatgaagagcatcatgcagagcctccaggatcactaagttcaaggcccctttg

SEQ ID NO: 540876 - DNA, 83 bp, Homo sapiens
cctttagccatgtggatacctacggagcacgagaaatacggcgtgggcgatatgagtctcatccagtctgtgctgatctgcag

SEQ ID NO: 540877 - DNA, 74 bp, Homo sapiens
accaggtggaagatggatgtagagaaatggcgtgtgaagaggttattcagcttctcaaggctggaaaagcgaag

SEQ ID NO: 540878 - DNA, 101 bp, Homo sapiens
gtgacggcggagaggcgccccccgcagcagtgatgtcttggcattgcccattttcaagcaggaagattccagccttccattggatggtgaaacagagcacc

SEQ ID NO: 540879 - DNA, 83 bp, Homo sapiens
cgcgagtgggagcaccaggatctcgggctcggaacgagactgcacgtgccggtggtggtgtgcacattgagccccggtataga

SEQ ID NO: 540880 - DNA, 82 bp, Homo sapiens
gaagatgcctcgaactaaacaaattcatcccagaaatctaagagggggatatgagactttctactcggaatatcctgagtgt

SEQ ID NO: 540881 - DNA, 51 bp, Homo sapiens
tcactgggagcaaatatccagaacagaattttccagttcatatgaagaggt

SEQ ID NO: 540882 - DNA, 75 bp, Homo sapiens
aatatactcatcatcagtctatttagaagaggtgaccaagaatatggcccaggtgaccaaagccctggacaaggc

SEQ ID NO: 540883 - DNA, 83 bp, Homo sapiens
cttcccgcgtccgccgattcctcctccttggtcgccgcgtccttggctggcgtgacacaatgtttgcacgaggactgaagagg

SEQ ID NO: 540884 - DNA, 75 bp, Homo sapiens
aggagcggaggctgcgcccggtgcggggcgagggctgggctgcccgcgggtttgagaaatactttaagaggagtg

SEQ ID NO: 540885 - DNA, 90 bp, Homo sapiens
cgccggacccggtgtggagagcggtgctgaggctacgcgggctggagactcagggacaggaagatgtcacccaagcgcatagctaaaaga

SEQ ID NO: 540886 - DNA, 100 bp, Homo sapiens
cttaagaagcgggtttatgaggaattcacgaaagtggttcaggtgaccctgacgtcctccttggcttgaagcaagggtagctaatgagagaaggcagaac

SEQ ID NO: 540887 - DNA, 50 bp, Homo sapiens
ctgcatggttaccacagaccacaaactctgctttcccagcacgctgcctc

SEQ ID NO: 540888 - DNA, 51 bp, Homo sapiens
ctgaggcggcccagcggcggcaggtcaaaatgcagatcttcgtgaaaaccc

SEQ ID NO: 540889 - DNA, 51 bp, Homo sapiens
cttatcccggaagctaaacagtggaggcattcctagccgagtgtgacacag

SEQ ID NO: 540890 - DNA, 82 bp, Homo sapiens
ttcgtttccagcctcaggaatttatggtcgcctttttgaatgagtactgccctggaggagagctgtttgactatataatttc

SEQ ID NO: 540891 - DNA, 74 bp, Homo sapiens
ttcgttggctgccgtccccgctgctgtgcattggtgttatagttttgccgctggactcttccctcccttccccc

SEQ ID NO: 540892 - DNA, 100 bp, Homo sapiens
catctcagatctggagcatcggctgcaggggtcagtgatggagctgcttcaggccaaagatgaagaggaagcctttctggattggagtgatgatgatgat

SEQ ID NO: 540893 - DNA, 87 bp, Homo sapiens
aagacgctaaacgtgccctactctgccccgggggagagtgtactaatggtcacttgatgtgcgctggctgttttatccacctactag

SEQ ID NO: 540894 - DNA, 98 bp, Homo sapiens
ccagggaccctgtgcaggcctgctcctccgtttgcaaggtggtgaagtgggctctggagaagctggagctgaccaagtacgcagacaagccggctggc

SEQ ID NO: 540895 - DNA, 129 bp, Homo sapiens
tcgatatctggggaacttggcattcaacattaaaaagcggatccaaagacccaggaatgacaggtttctaagcatgaattgaggaacagaagaagcagagcagatgatcggagcagcatttgtttctcc

SEQ ID NO: 540896 - DNA, 90 bp, Homo sapiens
atcactcgctcccttgatgatcttgagcttcgagagctgtgcccaggagtgaacaaccagccctacctctgtgagagtggtcactgctgc

SEQ ID NO: 540897 - DNA, 82 bp, Homo sapiens
cccctacgcggttgaagagcctagcgacgaggagccggctttgagcaggaactgtggctgcaccatctgtcttcatcttccc

SEQ ID NO: 540898 - DNA, 107 bp, Homo sapiens
cacgcagcgaaggggcaggcctgaaattgtgaagccccaggaggcccccaaggaactcgtcatccctttgatccagaatggccatcgcaggcagccaccagcccggc

SEQ ID NO: 540899 - DNA, 100 bp, Homo sapiens
catgaagtgcactctgctgcttatcctcctccggcagtggaagaggcagcccctggaagagatcatcacctactacccagccatgaaggctgtgaacgag

SEQ ID NO: 540900 - DNA, 101 bp, Homo sapiens
ggccagtctgcaagtcctgcgcctcacagatttcatgatcctttggctgcatggagaaaatgggacagggcctgctaagttcaacatacctcacagtgtta

SEQ ID NO: 540901 - DNA, 75 bp, Homo sapiens
ctcaactttggtctcctgggaccactcgttgctgacagtcagaaacaaagttctcatatagatgtggttcgtttt

SEQ ID NO: 540902 - DNA, 96 bp, Homo sapiens
tggggcgcccagctgccaacaccaaggcagattttgcagtagaagcattggcaaaagctacctatgagcggctctttcgctggctcgttcatcgca

SEQ ID NO: 540903 - DNA, 101 bp, Homo sapiens
gcagaccaaggcagcgcagcagggtgagccccacccggagttcagcgcggactcccccagcccagccacagacccctttgcttctgtttttgggaatgaat

SEQ ID NO: 540904 - DNA, 100 bp, Homo sapiens
ccgacgaccccctgaactacttcctcggtggctgcgccggaggcctgactctgggagcacgcaacagccctcagcgcctttttccaggagaccaacatcc

SEQ ID NO: 540905 - DNA, 83 bp, Homo sapiens
ctttcgccagcccgtgccgcgagcgcggcctgcaggaggttaacacagaaatctgcctcctgggccatgccgcttctaaggcc

SEQ ID NO: 540906 - DNA, 75 bp, Homo sapiens
gcatggaggccggctgaggagcgccgctgcctcgcctcggtgtcccaccggccttccgggttccagcgccaggcc

SEQ ID NO: 540907 - DNA, 80 bp, Homo sapiens
agttggaagcagccgatccagcctgcggagcctgtggggcaggtttgtctacagattttgagcgttcgaagttgacccct

SEQ ID NO: 540908 - DNA, 83 bp, Homo sapiens
cgccgccgccgccgctgccgctgccgctgccgcacctccgtagctgactcgcctgaactctttgcttccggaatccgggattg

SEQ ID NO: 540909 - DNA, 75 bp, Homo sapiens
aacctgctccagcgatcagagcgttaagatcatcagaaaagcccttactgaggaaaaacgtgtctcaacaaaaac

SEQ ID NO: 540910 - DNA, 80 bp, Homo sapiens
cccccgcctcaggatcgagaccctttcttcttaggagcagaaggtgatttactacctctgcatcttattgaaagatccag

SEQ ID NO: 540911 - DNA, 100 bp, Homo sapiens
gtcgtcttccacttgcacgaaagctttcctaggccaaaaagagacacagtgccaacataaacctacatcgtaaactgttgaccaaagaactcgatgacat

SEQ ID NO: 540912 - DNA, 100 bp, Homo sapiens
cagccgcccgctggccgggagcggagcccctgtgggtctcagcatcagaggagcccaggaggaggaccctcccgatccccagctaatgagactggacaat

SEQ ID NO: 540913 - DNA, 50 bp, Homo sapiens
aattaacaccatcttcatatccaaggtcaaaatgcagatcttcgtgaaaa

SEQ ID NO: 540914 - DNA, 135 bp, Homo sapiens
cagcaagatgtgaaaaaaagaagaagctatggaaactcatctgattccagatatgatgatggaagaggaagtctggctagataatcccaaaatgtggctccgagataatcaagacaaccttaaaagtatggagag

SEQ ID NO: 540915 - DNA, 75 bp, Homo sapiens
gccaccatggccatggatggaatggagttattagaggaagtaacacaaggggatatgagtgcagcagacacattt

SEQ ID NO: 540916 - DNA, 83 bp, Homo sapiens
ccctgggcctgcaggaagcccttccgcggaccgaaaggtgccgtgagcgatgtggagatgcaggaacactatgatgagttttt

SEQ ID NO: 540917 - DNA, 100 bp, Homo sapiens
acctggtgaaggtggaacggggctcccaggacctccactaatcaccagaacaaaatgtgcagtaatgcctgaaaactcaaactttccatatcggcggtat

SEQ ID NO: 540918 - DNA, 82 bp, Homo sapiens
tttcgctcctcggccgcgcaatgggcacccgcgacgacgagtacgactacctctttaaaggaagcactaagtaatatggatg

SEQ ID NO: 540919 - DNA, 98 bp, Homo sapiens
aggttgccaaatgcacagccaagcctagcagctcgggcaaggatggtggaggcgagaacactgaggagatcttcccagacccgtcagattttgaccgc

SEQ ID NO: 540920 - DNA, 50 bp, Homo sapiens
cgcgccctggcgggtccggaccaaggtacggggctgatgttgacgtcaac

SEQ ID NO: 540921 - DNA, 74 bp, Homo sapiens
acggggccaggaagcaattctggaagcgcagcaacagcaagctcccgggcagggggaaactcggccgatatcct

SEQ ID NO: 540922 - DNA, 90 bp, Homo sapiens
aatacaccttggcccgaggctgaagccattgctccacaggttggcaatgcaagacactaagggcgactaccagaaagcgctgctgtacct

SEQ ID NO: 540923 - DNA, 100 bp, Homo sapiens
tccgcagctctggttcctgttgcggccggttcgagaacttgtcttggacaattgcaaatcaaatgatggaaaaattgagggcttaacagctgaatttgtg

SEQ ID NO: 540924 - DNA, 100 bp, Homo sapiens
cgcgcaggaagggcccccaacaccctccgccgcccagtggccccgaggagcctggggagaagcgccccaagtttattgcaaatagaagagtcttccaaac

SEQ ID NO: 540925 - DNA, 98 bp, Homo sapiens
caaggcagacagcggcgccttcctgctgctcttcctgctcgtgctcactgtcaccgagccgctgcggccaggtgctggagaatctggtaaaagcacca

SEQ ID NO: 540926 - DNA, 78 bp, Homo sapiens
gccattctgatttgctgccttatctttctgactctaagtggcattcaaggttaagacatcagaattttatagatactc

SEQ ID NO: 540927 - DNA, 90 bp, Homo sapiens
gcaaagctgtacaagagatcatgcagggggccgtggagcccatgcagatcgacgtggacccccaggaagacccgcagaatgcacctgacg

SEQ ID NO: 540928 - DNA, 85 bp, Homo sapiens
tcttcctagaacctctaggcaagttcaagttctacagaatcttactacaacatatgaggtgagacgagagaagagcggacattta

SEQ ID NO: 540929 - DNA, 73 bp, Homo sapiens
gttgagaacatctctgttgacattcattgtgagctgcggtgcaaccctgggcagtttgcgtgtcgcagcggca

SEQ ID NO: 540930 - DNA, 98 bp, Homo sapiens
tgctggatgctgtgatcgccagcgccggcctcctccgtgcggagaagaagctgcggccgcacctggccaagtcatctggggacctggagaatgatgag

SEQ ID NO: 540931 - DNA, 87 bp, Homo sapiens
ttctcttttgtctgcccctattgtaagtgcagatggaacacaacagtacatgacttcaggctcctatgtgcagaagtcctcaacccc

SEQ ID NO: 540932 - DNA, 74 bp, Homo sapiens
agctggcggagctggagctggagctctcggaggatgtggacgagtgctcactagcagaaaaaacctgtgtgagg

SEQ ID NO: 540933 - DNA, 100 bp, Homo sapiens
caagtacacggagtacaacgagccgcatgagagccggacaaactcagacatcgtggagaaaatcgcgctgcaactcaaagccacgctggagaacatcacc

SEQ ID NO: 540934 - DNA, 96 bp, Homo sapiens
cctggacacagcaatatctctgggctttcacagcctaatagtcccagtgaatattgtttttatgtggatagtgatatggtcaatgaattcaagttg

SEQ ID NO: 540935 - DNA, 75 bp, Homo sapiens
ttggtttaatatctgattgggacaacattcagacccatttccagtcatgagtacaccagaggatcgcttcctggc

SEQ ID NO: 540936 - DNA, 100 bp, Homo sapiens
ctgagggagcagcggaggaaggaggagcagcagactcggacgtggacgcctttttccggacagggcgtctctggccgagcctctttttgtggaaaacgac

SEQ ID NO: 540937 - DNA, 89 bp, Homo sapiens
gaagaaaggatacctaaacattcttctcaaaatagtaattcaggtgtgtggaggtcattgcaaaggaaggacaaaacctgaaagagcta

SEQ ID NO: 540938 - DNA, 100 bp, Homo sapiens
cggaggatgaagtgaacagctgagcagctcgcagagagcagaatgacagggagagagtttttctctcgtttcccagaactctatccttttcttctcaaac

SEQ ID NO: 540939 - DNA, 75 bp, Homo sapiens
cccatacatgtcaaatggatctctttctccacccatcccgagaacagggctatctgatgggttagagtgcctttg

SEQ ID NO: 540940 - DNA, 100 bp, Homo sapiens
ctggacaacagacctctgtttggggagacgtccgccaagttgtggacatcggatacccaaggagacgaagctgaagcaggagaaggaggggaaaattaac

SEQ ID NO: 540941 - DNA, 78 bp, Homo sapiens
cacccaaggcccaaaagcgtcaaactcaccaaaaacaacatctttccagaaagagccatgctgtgacctacaagcaaa

SEQ ID NO: 540942 - DNA, 82 bp, Homo sapiens
gctcagtctctgtcagaggaagatcccttgttgctgctgacacgccgaccgcctgctgcttcagctacacctcccggcagat

SEQ ID NO: 540943 - DNA, 49 bp, Homo sapiens
gcgtccccagccatgtggaacttttggcaccaactggcccgtgtacatg

SEQ ID NO: 540944 - DNA, 109 bp, Homo sapiens
gtcacaggggcctccccaggaggcctgcgggagctgcagcttcgaagcctcacagctcattgaggccatccgaagagccagtaatggagaaaccctagaaaagatcacc

SEQ ID NO: 540945 - DNA, 93 bp, Homo sapiens
tcttctcttctctgcttggaggggatgtggtttccgttaagctggacaacagggtttccaggcctgaggtgcccgccctggccccaggagaat

SEQ ID NO: 540946 - DNA, 83 bp, Homo sapiens
ctacaacttattcctgtccggagacagcctaaggctctttcgacgtgtagcagcagctttgccgggaatggaaagcacacagg

SEQ ID NO: 540947 - DNA, 117 bp, Homo sapiens
tgtgtttctccattctgttggttttatgcatctttatccaatcaagtgcccttggacaaagcctgaaaccagacaaatcttcctattttcaagctgaaagaatctactgttagaaga

SEQ ID NO: 540948 - DNA, 75 bp, Homo sapiens
aatctatatagggatgtgatgttagagaactacagaaacctgatcttccttgttttatcttcaagacactaaaag

SEQ ID NO: 540949 - DNA, 75 bp, Homo sapiens
acaaatggttcccagtttttcatctgcactgccaagactgagtgactctgtttgctggctacacggacaacctgg

SEQ ID NO: 540950 - DNA, 75 bp, Homo sapiens
cactccaactggaccgtcaccaacacccgcttctctgtggatgaagcccaagaagatgaaaggattgttcttgtt

SEQ ID NO: 540951 - DNA, 101 bp, Homo sapiens
caatcctcagacgcctcacttaggacaaatcttatgccttcattcatccggcatggtccaacaattccaagacgaactgatatctgtcttccagattcaag

SEQ ID NO: 540952 - DNA, 76 bp, Homo sapiens
acggcggtggcgcccggagcccgaggaaaagccttgaagcatactgctcagaaattcttcacggtagatgctggag

SEQ ID NO: 540953 - DNA, 74 bp, Homo sapiens
tgtataggttgtcaaaattcacaaggcaaggtgactttgaaagtattatgcagatatgccagcagaagaaagag

SEQ ID NO: 540954 - DNA, 75 bp, Homo sapiens
tctggtgtaatacaagatgctttaaagaagacagcaccagttgcccttgaagcagaaaacagaggtgaaatgaaa

SEQ ID NO: 540955 - DNA, 100 bp, Homo sapiens
caacaggaggagaaaactttacctttcagatatataaggattctggactctacttataatatccctaactgctggattctcctgttgcagcttttcttgg

SEQ ID NO: 540956 - DNA, 141 bp, Homo sapiens
caagaaaaccttatcagcactatttgaaacttttatctcatctggcttggcgcctgaggttctcccattagatcattcctggacccccgagggcctctgagtttgagacgctggctgagatcaaatgataagaattccaat

SEQ ID NO: 540957 - DNA, 90 bp, Homo sapiens
gccgagaagcagtacgaagactcctgccgcgtataccaggcatccagccccgatgagagtcaagggtccagagaaggaggagaagttgag

SEQ ID NO: 540958 - DNA, 100 bp, Homo sapiens
gcctcccctgtcccgaacgcagtgtgtggaaagtaaccctccactgagtgaagaaatgttgcctcctggagagtggatgtgtcaccggtgcactgttcgc

SEQ ID NO: 540959 - DNA, 100 bp, Homo sapiens
aggactgcccatccactgagacataaggcacagagctttggcctgctggatcccaaactctgctacctgctggatggaatcctcttcatctatggtgtca

SEQ ID NO: 540960 - DNA, 89 bp, Homo sapiens
gcgggggcggcgcagttgcgaaactgagtgctggagaatctggtaaaagcaccattgtgaagcagatgaggatcctgcatgttaatggg

SEQ ID NO: 540961 - DNA, 100 bp, Homo sapiens
caagcctatcaagacagaggtgcagggcgaggacggacaggtggtgctcatcaagcaggagaaagaccgacgcgagcccagcattgacctgctgcaggcc

SEQ ID NO: 540962 - DNA, 74 bp, Homo sapiens
cctgacgcggatccggtcgaaatagaaaacagacttccttgccgtccaggaagggatttcgacaccagaccacc

SEQ ID NO: 540963 - DNA, 80 bp, Homo sapiens
caacgcctggctcggagcagcagcctctgagatctcacttccctgctaaccggtgggcggcccgccggggtgcacctctc

SEQ ID NO: 540964 - DNA, 99 bp, Homo sapiens
agagagggggaaccgccgtcccaacatcacaaaaaggtcacattgaagtagtgaaattgcttgtgtcgcatggagctgaagtgacatgcaaggataaaa

SEQ ID NO: 540965 - DNA, 89 bp, Homo sapiens
cttggatgaggtgaaagactatgtggccaaggttttgcgtgtgaagctgtgtggaaatgtgaaatactaccagtcacaccattatagta

SEQ ID NO: 540966 - DNA, 74 bp, Homo sapiens
ctggagcgggcggagctgtgcgagagcctcctcacttgggtgatgtgtccaatctagatcccaacttctcattt

SEQ ID NO: 540967 - DNA, 50 bp, Homo sapiens
caacggcttcatcagcaccttggggctggagcattggatttgctaaagga

SEQ ID NO: 540968 - DNA, 100 bp, Homo sapiens
caaagtggcccaaatccatggcattaataatccagaatggctactctgatctatgttgataaggaaaatggagaaccaggcacccgtgtggttgctaagg

SEQ ID NO: 540969 - DNA, 75 bp, Homo sapiens
ttgtggatggacttgctacctcttgggtgaactctagcaattacaaggatcagtttgacaacttagaaaaacaca

SEQ ID NO: 540970 - DNA, 100 bp, Homo sapiens
cggcggcggttgcgggggggaagtgactgggcggtgccggcgccggagacgatgccgttatgaagaaactgaggttcagagaggttaagagactccactg

SEQ ID NO: 540971 - DNA, 100 bp, Homo sapiens
aaagaaaagaaaacttgaaactaatcctgatattaagccatcaaatgtggaacctatggaaaaggtgggcccatctggggcagggaagagcacaattttg

SEQ ID NO: 540972 - DNA, 100 bp, Homo sapiens
gatggccacttacctgaatgaccacctagagccttggatccaggagaacggcggctggagttttactacccttggatgctgctgttgacatggaaaagat

SEQ ID NO: 540973 - DNA, 50 bp, Homo sapiens
ggaccacaaaccgctgccagaaaaaactgtcagaccttcagcagcctcag

SEQ ID NO: 540974 - DNA, 82 bp, Homo sapiens
ttccagaagataatgctgacatggccagacttgatttcaatcttataagtgggctcgggatgagtttgaaggcctcttcaag

SEQ ID NO: 540975 - DNA, 100 bp, Homo sapiens
gcaaccgcctacgagacactcaaggtgatgaaggattcggctccggaactgaatgtgagtagttctgaaacagaggaggacaaggaagaagctaaaccag

SEQ ID NO: 540976 - DNA, 90 bp, Homo sapiens
tgggaccagtgtgaatttggaagggatcgtgtggcatgaaacagaagaaggctgtgtggttccggtgctggtgccgtggaagtggcaatg

SEQ ID NO: 540977 - DNA, 74 bp, Homo sapiens
gtcatcatgcatgctctcactaagcagttggaggctgtgtctggaccctcagtctctgctgcctcctcctttct

SEQ ID NO: 540978 - DNA, 100 bp, Homo sapiens
ccacatcctcccctgagtccggagctaccaaaaccatcctcctgctctagcctctcggaatttgtcttcttcagtggaaaccccgagaagactgatcagt

SEQ ID NO: 540979 - DNA, 83 bp, Homo sapiens
aagcttctgaaccatccacacatcataaagctttaccagatcggatcaacatcaagaggaagggagcgtggccctccaccctc

SEQ ID NO: 540980 - DNA, 100 bp, Homo sapiens
cagccactaccagcagcctggccctcttcctccttctccagagagaccaatccagccgaactcggggtttgccaaaaatggctacaaacttcctagcaca

SEQ ID NO: 540981 - DNA, 98 bp, Homo sapiens
acgaacccaacctggtgcccggcccgcagagcctggcagagagcaggtgtgtgatacacgtcgtcaggtgactgaccgaggaattcagggcaaacaga

SEQ ID NO: 540982 - DNA, 97 bp, Homo sapiens
atgtggaggggaatagactccatctatccatatgagctcttcacagatggaatcacaaataaacttattggctgttacgtgggaaacaccatggagg

SEQ ID NO: 540983 - DNA, 75 bp, Homo sapiens
gtctcgccgccagtggaaggagccaccgcccccgcccgaccatggccgaggaaaccactcagattgaggatcctc

SEQ ID NO: 540984 - DNA, 75 bp, Homo sapiens
cgcgagattataagaagcttgggttcattaggccacaagaggaagctgaatgaagaggacgccgccagcgagtcc

SEQ ID NO: 540985 - DNA, 100 bp, Homo sapiens
gtcttgaaagatatgaagcttttgcgccaggcatttgatctaacagagcaaagatacgtagctgtgaaaattcaccagttaaataaaaactggagagatg

SEQ ID NO: 540986 - DNA, 95 bp, Homo sapiens
cgccatcgctgcctcggaccccgccaccaaggcagaaggagaagacagcctgaagaagatgcagctgatggagcttgcgattctgaatggcacct

SEQ ID NO: 540987 - DNA, 100 bp, Homo sapiens
ggaggagacgcacgcagctgactttgtcttctccgcacgactgttacagagggcttccgttacaagatgaggtctgtgtatgctcacttccccatcaacg

SEQ ID NO: 540988 - DNA, 100 bp, Homo sapiens
atcttgaaggtgcagtgacttgcatatagtaggtgcttggagctcttgtccctggcaaagcgaaagcgcagtgactctgaggagaaggagccgcctgtga

SEQ ID NO: 540989 - DNA, 88 bp, Homo sapiens
agcgtggcggccgcgctctcttccaggacatcaagcctagaatatattgatctgatggaaacaacccagtacatgaatgagggagaac

SEQ ID NO: 540990 - DNA, 75 bp, Homo sapiens
gcagatgtgcggcccacgctggagaccctgaggaatgctggcatcaagacttttttgtataacgagctctatgtc

SEQ ID NO: 540991 - DNA, 100 bp, Homo sapiens
cgccgcgccacagccgctgcggatcatggatttggagttccatggagtgatgagattttattttcaagataaagctgctggaaactttgcaacaaaatgt

SEQ ID NO: 540992 - DNA, 75 bp, Homo sapiens
gctgaagcagctcccgcgaggaccacccgaaatggaccaattttgacaagatatagtgctgcagcgtgcctgatg

SEQ ID NO: 540993 - DNA, 95 bp, Homo sapiens
gcaggaggaggaggaggggctccggctggtctgtggtgagacttcatcgcctgattcttccaatgaaaattccccggcaactcccccagatgagc

SEQ ID NO: 540994 - DNA, 98 bp, Homo sapiens
tagggaggccgactgagcaggagtcgtccgcttatagtggaggctgctaggagccggtcagaggaacttcatggaggaacacggagtgacccaaaccg

SEQ ID NO: 540995 - DNA, 50 bp, Homo sapiens
atagtcaactgcgtggaagagaagaattgatgaattgcaagtttgtgccc

SEQ ID NO: 540996 - DNA, 88 bp, Homo sapiens
actctgatgtcaatcttgagggctaggtgggtcctacgtgtatgaactcagcgcagtcctcatacacagaggagtgagtgcttattct

SEQ ID NO: 540997 - DNA, 100 bp, Homo sapiens
gagacgctattctcagtgatgcccggatgtgggcgctatctccaactgtctttgcacttctgagtaagaatctgatgattgtgcacagtgacctggctgt

SEQ ID NO: 540998 - DNA, 75 bp, Homo sapiens
gagaatttcagggtgcagtatacagaaacagagccgtatcataattaccgaggattgtcaatgaggcagatcaga

SEQ ID NO: 540999 - DNA, 98 bp, Homo sapiens
gcaccagtagcttttctgagaatacttgctgaaaaggaagttttctggaatggggccttcatcctagaataatcactgaaggatttgaagctgcaaag

SEQ ID NO: 541000 - DNA, 100 bp, Homo sapiens
aatgaatgcaagagaaagaggaagattgatgtataggtgagagagccatgtaatcatgccaacatcctgaccaagcccgatccaagaaccttctggacta

SEQ ID NO: 541001 - DNA, 100 bp, Homo sapiens
gcaaaagaagagaagcagaattatacctagaagtctactaatggacagttagtcacccacctacatgttgagatgaagcacagggtgataaagccaagca

SEQ ID NO: 541002 - DNA, 98 bp, Homo sapiens
tcctgcctcactgccagaagctctttgtgtatgaccttcacgcagtcaagaacgacttccagctggagaatgctggaggagaccttaaggatggccac

SEQ ID NO: 541003 - DNA, 98 bp, Homo sapiens
ctgaagttcacgactactagaaggggaggggagtggaaaggctctcagtgaaaaagactctaaaatagagctcaagcttgagaagagagaaccactaa

SEQ ID NO: 541004 - DNA, 100 bp, Homo sapiens
ctgggcttctctgaggcggcgagagatggtcaggtctggagctcgaccgggccagaattggcagagggggtcgatttgggaggaaaggtgtggctataaa

SEQ ID NO: 541005 - DNA, 100 bp, Homo sapiens
agataaaattttttgaaaatcgggcaaatggccagtcaaagggtggatccaaacttctacagcaaaaacttacttcttttaggaaagacatacttgaaac

SEQ ID NO: 541006 - DNA, 84 bp, Homo sapiens
gaggcaaggagctaaagcagcgtgcgttcagccctgggattttgcaagaacgaggctcaaggatgtgagggacacagtattgac

SEQ ID NO: 541007 - DNA, 74 bp, Homo sapiens
catggaaaagattttgcatctagaggaattgaaaagtcatcaccagtgttatcgccaaggaagccttctcaccc

SEQ ID NO: 541008 - DNA, 75 bp, Homo sapiens
ggctttcttggcctgatgctgaactctcgagggaatagccaggccagaagaaggaaggcctgtggtgagtgggac

SEQ ID NO: 541009 - DNA, 75 bp, Homo sapiens
gctagtcgctgcaacactcctctacagtttgaggaatgggtaggacaagtggaaataagtgccctttctcttatg

SEQ ID NO: 541010 - DNA, 87 bp, Homo sapiens
gggcccggcgccgccgcccgcagggtgaggtgtgcaatatgattagcaagaagtacagtgaattcctgcctagcatgcagagcgcgc

SEQ ID NO: 541011 - DNA, 95 bp, Homo sapiens
ttcatctttcatgcagtgacatgttgataaaaaatgatgaagaacatgagctgcctgtggacatggaaaccatcaacctggacagagatgcagag

SEQ ID NO: 541012 - DNA, 97 bp, Homo sapiens
aatgtacgagattatcctcaggttcctaaatggatggagcctgccatcccagtcttctccttcagtaaggtcctcatcagcatggtgtacctacccg

SEQ ID NO: 541013 - DNA, 100 bp, Homo sapiens
gtgcattagacataaaagttttgactcagccttcccagtcagctgtgagaggatcgaatcatcaatttagttgttggcagcttaacatccttattgattc

SEQ ID NO: 541014 - DNA, 50 bp, Homo sapiens
agatagacagctcaaatgaattggttctcaaaccattggatgtgaaaacc

SEQ ID NO: 541015 - DNA, 51 bp, Homo sapiens
cgggacaccctggaagccaggaaatgggctgggtgtggtcactggcagcgc

SEQ ID NO: 541016 - DNA, 75 bp, Homo sapiens
ttttaaaagatctggaacatcgaaaggaccaagtaacacagctttcacaagagaaaatacaagattttggagggc

SEQ ID NO: 541017 - DNA, 75 bp, Homo sapiens
gtgcccctacgtgcacaacatcacccgcaagtgactttctcattctccctgggtacatcgacttcactgcagacc

SEQ ID NO: 541018 - DNA, 83 bp, Homo sapiens
ggttcctacagagattcatatgagagttatggtggagatgttacagccaaaaatatctggttggcagaaagtgttctggatat

SEQ ID NO: 541019 - DNA, 100 bp, Homo sapiens
tcgaaggggaaggcgcctgaagaggacgaagtatgacgccgtgcccatccagtccagcgtggtgttatgttcctgcccatccccatcaatggtgaggacc

SEQ ID NO: 541020 - DNA, 75 bp, Homo sapiens
ggaagggaaacacacttggagacaaacttcactttaaaatctgaatggatggccaggccatgttatgggatctca

SEQ ID NO: 541021 - DNA, 101 bp, Homo sapiens
ctggaacgccctctttttaaaaaagaactacgttacttttaacccaacaaataataaagaattggtgagcaatagtaaaacacgggcaatatattatgcat

SEQ ID NO: 541022 - DNA, 101 bp, Homo sapiens
gccgtccttctccactttcgccagcccgtgccgcgagcgcggcctgcaggaggttgggcccgaaggcatcctgcagaacggggctgtggacgacagtgtag

SEQ ID NO: 541023 - DNA, 75 bp, Homo sapiens
atttaatattgcttcagcagaggaaccgggtgctgacacctttacggcaaaagttaatattgaagtacagttggc

SEQ ID NO: 541024 - DNA, 75 bp, Homo sapiens
tctgtgtcaaacatccatatcataagtggaattttggagatattcaaagcaatttccagtttatgtactaccaaa

SEQ ID NO: 541025 - DNA, 100 bp, Homo sapiens
ctgcggctggcgtggcagatcagatcaaaggtttggagtggctggtgtccctgtacaacaacaacctgaacggcatcctggccgacgagatgggcctggg

SEQ ID NO: 541026 - DNA, 74 bp, Homo sapiens
ggaatcgtcacccggcggcctctcattctgcagctcatcttctcaaaaacaggatttgctcgaatatttgggta

SEQ ID NO: 541027 - DNA, 101 bp, Homo sapiens
ctgcgggctgagcggcgagtttccgatttaaagctgagctgcgaggaaaatggcggcgggagtctgtggattctagccttgggggtctttcacgatccagc

SEQ ID NO: 541028 - DNA, 82 bp, Homo sapiens
gcctactcgcccgccaccctgcgctgccgccgctctgaggagttaaaggggttctgaaggaacattaaatgactgcaagata

SEQ ID NO: 541029 - DNA, 100 bp, Homo sapiens
ggagcgagcgcgcctggcgggcgaggaggaggcgctgcgtcagtaccagcaggttcagcgatacccaggccacgtgcccaacttcctgagccagacccag

SEQ ID NO: 541030 - DNA, 83 bp, Homo sapiens
agccgcaccatgccgctcctaagcctgcacagccgcggcggcagcagcagtgagaggataaagataaagtttctctaaccaag

SEQ ID NO: 541031 - DNA, 75 bp, Homo sapiens
ggggtcatcagccatgctccagacagtgtggttccagtgccccaccttagaacagtatgccatgagagcgtttgc

SEQ ID NO: 541032 - DNA, 75 bp, Homo sapiens
gtccctgaagagggaagacacgcggaaacagatacttgttacgtcctctcctttgccatcatcatgttgaacacc

SEQ ID NO: 541033 - DNA, 74 bp, Homo sapiens
tttgggaaagccactcgaaaagtatcaagtggggcagctgtattctgtggctgaggccagtaaaaatgaaacgg

SEQ ID NO: 541034 - DNA, 89 bp, Homo sapiens
cacgatccagatccggcaggactggagacacctgggagtcgcagcggtggtttgggatgcggaggagatgttaaagtaacccatcttgc

SEQ ID NO: 541035 - DNA, 101 bp, Homo sapiens
gggacgctccgtggatgaggctctgcggctggtccaggccttccagtacacagacgagcatggggaagggagctcaaccctgttcagtgctctgctcatca

SEQ ID NO: 541036 - DNA, 90 bp, Homo sapiens
catccagtgataacatcatggtccagtgtggcaaaggagcagagaactttgacaagttcttcacacgaggacagcccgtcttaacaccac

SEQ ID NO: 541037 - DNA, 100 bp, Homo sapiens
tctgcatcgacagatagccgtcttcagcttgagccccatcactagggttcatgtaatcaaagaagtttctttgttgtgtgtatctttacagaacacaaca

SEQ ID NO: 541038 - DNA, 98 bp, Homo sapiens
aataccagccactgcagatagagacatatggaccacatgttcctgagcttgagatgctaggaagacttggctttactgtctttcacaagcgcctttta

SEQ ID NO: 541039 - DNA, 98 bp, Homo sapiens
gccggcccggacatggccgccaacatgtacagggtcggagctgctgcggactctggagcgtgagaaccagcgcctggaggctgtcctggcgtggcggc

SEQ ID NO: 541040 - DNA, 83 bp, Homo sapiens
caacaaggagctgggctgcatcaactcgggcgtctctggccgagcctctttttgtggaaaacgacagcagcagcagtggcctg

SEQ ID NO: 541041 - DNA, 75 bp, Homo sapiens
tgtttgtggatcgctgtgatcgtcacttgatatgtgtcacaaagatgtctacacggaactgccagggaatggact

SEQ ID NO: 541042 - DNA, 75 bp, Homo sapiens
gaagagacaggaggcagtagccaaacacccagatggtcctggtgctgcccaggaacccacgtggctcacagatgt

SEQ ID NO: 541043 - DNA, 75 bp, Homo sapiens
agcacaaactccacgaagccaacgcccagatagtgaattcctaagaagaaaataatggattgcatattagttgtt

SEQ ID NO: 541044 - DNA, 95 bp, Homo sapiens
agtaacaacagcgaggaagaagaggacgacgacgacgaggaagaggaggtttctgaggtcttgatagactttctgtaaagaaggaatgatttggt

SEQ ID NO: 541045 - DNA, 50 bp, Homo sapiens
gtctggccaagaatcagaggaagtggtggaactaaagagtatcaatcaaa

SEQ ID NO: 541046 - DNA, 90 bp, Homo sapiens
tcagacacacagccttgcgcacctcctcaccaaatacgctgagcagctgctccaggaatatcactatggagatgaccgccatggccacgg

SEQ ID NO: 541047 - DNA, 82 bp, Homo sapiens
catgggggagtgctgatcaactaaaagagatgactacattgcaattggagctgatgaggaagaattaggatctcaaattgaa

SEQ ID NO: 541048 - DNA, 75 bp, Homo sapiens
cactgccctccgaagtcggggacgcgggctcgaattaaacaaccaccatgtcgagcaaaaaggcaaagaccaaga

SEQ ID NO: 541049 - DNA, 88 bp, Homo sapiens
cagattcgcagtggtcgcttcttctccttgggttacttgattagctgtgtttggaactgctaccgatacatcaatggtaggaactcct

SEQ ID NO: 541050 - DNA, 76 bp, Homo sapiens
aacagaatattggtcaagttgctgaccttgaacttcacgttacagcatggaagctgttgccaagtttgatttcact

SEQ ID NO: 541051 - DNA, 95 bp, Homo sapiens
atcctgattctacccaagtacatatgatttcagctgcaatggcaggaagtgggaaaactcttgcctttgccatcccaatgattcatgcggtgttg

SEQ ID NO: 541052 - DNA, 100 bp, Homo sapiens
gggattgttgcggtgcgctggagccgctggcataaccttgacaacagattgccttgaagatagcctccttacatgctactgggggtgcagtgttcaaaaa

SEQ ID NO: 541053 - DNA, 90 bp, Homo sapiens
tgagtgtcctttacaaatcttcagggaatggccaagtgacaaagccaccttttgtggtgacattggatgaggtagagctgatccactttg

SEQ ID NO: 541054 - DNA, 100 bp, Homo sapiens
gggacggccgcctagagtggttcagccacaaggagttttttgctccactcaagcctgttagaatcaccatggaatacagctccagtgggaaggccactgg

SEQ ID NO: 541055 - DNA, 99 bp, Homo sapiens
ctccagggaaggcactcaaaagtggggggcaggaaagtactatactggcaattgctggagaagattttgcaattgttgcttctgatactcgattgagtg

SEQ ID NO: 541056 - DNA, 73 bp, Homo sapiens
aaaaggaggcaagaatattaaggctctccgtacagacggtttttaatgaccacaacaagcaagcatgcagctt

SEQ ID NO: 541057 - DNA, 80 bp, Homo sapiens
ccgaggagaagtaccaggaggcgttggccaaggggagttggtctctcagtccatgggcaatttcgagtggctacagaaaa

SEQ ID NO: 541058 - DNA, 96 bp, Homo sapiens
tgcagtgctcgactgtgaggatggagtggctgcaaacaaaaaggtgtcatggagaaactccagctgggcccagagattctgcagcgggaaaatcca

SEQ ID NO: 541059 - DNA, 75 bp, Homo sapiens
ccacagcattcctgaaatacatccaggaaagacatggagattctcttaaaaagtacttggggtgcattgaagttc

SEQ ID NO: 541060 - DNA, 100 bp, Homo sapiens
ggagatgtcgaaccccgggacacgcaggaacggctccagcatcaagatccgtctgacagggtctcgactctgaagacagagttcctgccgctcctaagtg

SEQ ID NO: 541061 - DNA, 75 bp, Homo sapiens
aggaacttgcagaaatcacattggaccctcctcccaactgtaggttgtgaagatgagaaaagaagtgaagagaat

SEQ ID NO: 541062 - DNA, 75 bp, Homo sapiens
atcttctgcactgtttacaggcacagagcctgccttctggtacaagatgcctgtggaatgttcggtgaagtgcac

SEQ ID NO: 541063 - DNA, 78 bp, Homo sapiens
tttaggaaaaccacggaagctgaaggtcttggtgttggtgtgcctaccgcatgttgccgctgctgtttctgctgggac

SEQ ID NO: 541064 - DNA, 97 bp, Homo sapiens
aacaaaagaccaaataaaccagctgaacttatagttttcagcattgcaaataacaatctcagctactgggatgcccccctgggaagttcttatatgt

SEQ ID NO: 541065 - DNA, 96 bp, Homo sapiens
ccgggacggccggtcaggctcgccgccgagctgtggacggctgcattcatcgggccgccggccccctgcttaccgacgagtgccggaccctgcaga

SEQ ID NO: 541066 - DNA, 100 bp, Homo sapiens
ggaagatgttcagcgtagagtcgctggagcgggcggagctgtgcgagagcctcctcacttggggtcggcactcttcaccctcccgagccctgcccgtctc

SEQ ID NO: 541067 - DNA, 78 bp, Homo sapiens
agcagaccggtgggccctttgaagtctgaagaatcaacgcgcaaaagggaggaggtggtatgcattgggtcagtggcg

SEQ ID NO: 541068 - DNA, 50 bp, Homo sapiens
aattgggatcgtgtcgctgcggattacctcaacctctcttggaactcaat

SEQ ID NO: 541069 - DNA, 75 bp, Homo sapiens
ctgtgcgtgtggacttctacaatgcagacgagctcaagagcatctgctgcacccaagcctgagccggttcctgtt

SEQ ID NO: 541070 - DNA, 111 bp, Homo sapiens
agcgaggaggcccgggagcgccgagcgtcgccgccgccgccgccatgaacaactcgggcgccgacgagatcgggacacattggcgtgagacctgggagtacgttgtgccaa

SEQ ID NO: 541071 - DNA, 100 bp, Homo sapiens
gaagccgatgtgtgagaagaccaccatcaacaatgagtacaactaccgctgctggaccacaaaccgctgccagaaaatgaacaacgtgggaatgtcgtat

SEQ ID NO: 541072 - DNA, 75 bp, Homo sapiens
agcatttccacctctatggcagcaacgcctccctggcccaggacagtcattttgtttactcattcagccctgttg

SEQ ID NO: 541073 - DNA, 75 bp, Homo sapiens
ccctatccagacggctgcccttcaagtaccaggagggacattgcttgggcctccagactctgtggttgatgtggg

SEQ ID NO: 541074 - DNA, 89 bp, Homo sapiens
gagcgacagcggcgagcagaactacggcgagcgggtcacgcaatatttaaactcacgtatctaagcaatcacgactataaacacctcta

SEQ ID NO: 541075 - DNA, 100 bp, Homo sapiens
ctggggggcaccctggccggactcagcgtggagcacgtgcacagcttcacgccctggatccaggcccacgggggctggaccccaccaacaactgaacgct

SEQ ID NO: 541076 - DNA, 100 bp, Homo sapiens
gaacctgtgtgctcagctcttaacagtgcaatattaggcccgtttcctcctttcaaaagtcaacccttcacagactcataataatatgtatgcctggggg

SEQ ID NO: 541077 - DNA, 100 bp, Homo sapiens
tgggaataaaactccaagaagccaggtgttcaaggttatcaggacaccccatgggagagacttcgatgactctttagaaaaatgtgaagagtatttgagc

SEQ ID NO: 541078 - DNA, 82 bp, Homo sapiens
aaggacacggtctacaccgacttcgacgacttcccaagtaagaagcggaagaggagccgctggaaccaagacacaatggaac

SEQ ID NO: 541079 - DNA, 100 bp, Homo sapiens
ttgagtcgggaaatggccgctgtgtggttgcaacggagataaattcccggaaccgcgattcggcgtgtcaggataagtgcaagaaggctgcttccagctc

SEQ ID NO: 541080 - DNA, 83 bp, Homo sapiens
ggccggcgcggcgatgatgaacaggttccgaaagtggctctacaaacccaagggactttgaacatgtcggggatcgccctcag

SEQ ID NO: 541081 - DNA, 100 bp, Homo sapiens
agccaccattgctaggagtgagcatgagatttctgaaattattgatgggctctctgagcaggagcaagcaagagaaatggtactagagattatccgagaa

SEQ ID NO: 541082 - DNA, 75 bp, Homo sapiens
gtggcagtggaaaatgcgctcgggctggaccagcagggggggccctcagcctcttggccttgaacgggctgttca

SEQ ID NO: 541083 - DNA, 96 bp, Homo sapiens
agtgcaacatctgcaaggtccgcttcaccagctctagaggacaaaatcccagtccttggcacaaactcaggaaatggaagccggagtctgtttttt

SEQ ID NO: 541084 - DNA, 80 bp, Homo sapiens
gcctcggcagccttgcgctgctctaatggtccggacttccgtgttgtaaacaggaacatcgataagtagtgtaaaaactt

SEQ ID NO: 541085 - DNA, 100 bp, Homo sapiens
ctttagagttggaaaaaaaattggatgtggcaattttggagaattacgattaggatgttcaagatccttcagtatttgtaactttccctttggaagaaga

SEQ ID NO: 541086 - DNA, 100 bp, Homo sapiens
gaccaggaccaggaagtaactttagaggaggatctggccagaagcggactcctagaagaggggagcagcaaggatggaatgacagccgtgggccggaggg

SEQ ID NO: 541087 - DNA, 80 bp, Homo sapiens
aacggctctccgcgctctctctgacaggtttaccgacaagactgtgaaactttcgggatggtggtgaaaatgctgattga

SEQ ID NO: 541088 - DNA, 89 bp, Homo sapiens
cgttcaacgacttactggggagagaaagaaaaggaacgggagctgagaggcgacctgggagacccagccagtaccgcccagacggactt

SEQ ID NO: 541089 - DNA, 74 bp, Homo sapiens
cgaaaacaccgctttatcctgctgcgatccccagggaacaagattgcccgtgaggcagaggctgccatctacca

SEQ ID NO: 541090 - DNA, 75 bp, Homo sapiens
gctgagtccaagacgagctcagaaaaccagaagcctgttataaagatgcttcagactgcaaagaatttgttgaaa

SEQ ID NO: 541091 - DNA, 50 bp, Homo sapiens
ctggaatcagaaagcactacgctaaattaacgtcttcaaggacccagttg

SEQ ID NO: 541092 - DNA, 75 bp, Homo sapiens
ggatgcagttggcagtggttgaattctcaagaaacgtgctgggatggcaagttcgtcccactgattcaaatgtca

SEQ ID NO: 541093 - DNA, 50 bp, Homo sapiens
cccagctgggcgagtatctggaggagccctgaccctctattctgcaccct

SEQ ID NO: 541094 - DNA, 101 bp, Homo sapiens
tcaaggaaggctgtgagcaagctgtatgcatccaaagcacacatgaactcagtgctcatggggatgaagaaccagctcgtgccgcagaatggaattcggca

SEQ ID NO: 541095 - DNA, 80 bp, Homo sapiens
aagagaagatccaggcctcagaggaggagaaaggccggagccagccgagatgaaggatttgggggcagagcacttggcag

SEQ ID NO: 541096 - DNA, 50 bp, Homo sapiens
cgaagctgctgcggttcctgagccggagttgcagatctgatctcttctga

SEQ ID NO: 541097 - DNA, 98 bp, Homo sapiens
ctagctttaattgaaggagctggtatcttgttgacaagatttgcctctgcacagtttcccaatgctctggatgagggggatattgccttgttgaaaac

SEQ ID NO: 541098 - DNA, 90 bp, Homo sapiens
gccagaagcgggcggcgcgggggagatggattttttatcaagcagaaatgcatcgaacaacgagaatcaagatcactgagctaaatcccc

SEQ ID NO: 541099 - DNA, 75 bp, Homo sapiens
taagatgtcaggacatcctggaagctgggaaaggatgtgctagtgctgctgatgacagatgtactggtgtttctc

SEQ ID NO: 541100 - DNA, 90 bp, Homo sapiens
cgggtggcaagaaaaaccgacgaatctttacctacactgactctgatagatacaccaatttggaggagacggcaaatggatacatcttgt

SEQ ID NO: 541101 - DNA, 98 bp, Homo sapiens
ccgcgtccgccgattcctcctccttggtcgccgcgtccttggctggcgtttgtaatttagattcgagaagtggtttatcctttgactggaaaagaaaa

SEQ ID NO: 541102 - DNA, 98 bp, Homo sapiens
ttcttcaccgccaggacctccttcttcaggagagcgccccagggcaagccccgctccggccaacaatgtgcaacttgctttggtgtttgctgttttat

SEQ ID NO: 541103 - DNA, 100 bp, Homo sapiens
acgctctatagccaaggaaggcttcgagaagattagcaaaggtgctaatccagtggaaatcaggagaggttgatgtcgagcaacatactttggccaaata

SEQ ID NO: 541104 - DNA, 96 bp, Homo sapiens
atgatagaatgaagaccacaataaaagagacctctacttagctcagcaattcttaccttatttcatctgctgcttgcggctatggattcacactgc

SEQ ID NO: 541105 - DNA, 90 bp, Homo sapiens
gggataaatcccaaacttcttaacccctagaccggtttttagtccattgactatgcagcctaatgcactggagaggggtctcctgaaaac

SEQ ID NO: 541106 - DNA, 50 bp, Homo sapiens
agcctcccgaatagctgggattacagtgcgatgtatgatgtatggctttg

SEQ ID NO: 541107 - DNA, 75 bp, Homo sapiens
aaagtttcattgtgtatgtagaagaccagaagtggatggagagtttattacccagaactctttgtctgggtcagt

SEQ ID NO: 541108 - DNA, 90 bp, Homo sapiens
caaataagctatatactttggttacctatgtacctgttaccactttcaaaagcctccaagactgcagagaatgccaccagtggggaaaca

SEQ ID NO: 541109 - DNA, 100 bp, Homo sapiens
gagacaccaggacagaaaagacagtgttctgctttcatggagttcacagaagagtcgaggagcaccaccaagcgccccaagtccatcgatgacagtgaga

SEQ ID NO: 541110 - DNA, 98 bp, Homo sapiens
agattttcggacaggtttagaaaatggaatcctcctctgcgagtttgaacttgttctggaagctgtgcgtcaccgtaatgaggcttgtaattcttgat

SEQ ID NO: 541111 - DNA, 51 bp, Homo sapiens
aaaaaactggagccagtccttttgccagggacttagtcatgcattgagaaa

SEQ ID NO: 541112 - DNA, 98 bp, Homo sapiens
ccgggagcggcgctggccccaaggcgctgccctgcgcagggttgaaatcacaaagattagacacctttttagataggtgttcttcagcaccactgaca

SEQ ID NO: 541113 - DNA, 96 bp, Homo sapiens
tcaaggataagggtgacagcaacagctcggcgggctggaaggctatttgctttctagaagagaaggccaagcagggtctcctgaaaagcctctctc

SEQ ID NO: 541114 - DNA, 98 bp, Homo sapiens
tgaaggtgcccgcatcccagctctgccaggaagcaaagggtgaagttgaacaaattgctatgatgaaaccaaaaggccagactgaacacgatgagggt

SEQ ID NO: 541115 - DNA, 96 bp, Homo sapiens
caacaaccgtggctcacaagatgaaagagcactaactctcaggagccttctccgcagttggcttcctcggtagcttccacacggagcatgcccgag

SEQ ID NO: 541116 - DNA, 90 bp, Homo sapiens
tggagcagcaggcagtagaatttatgtccaccagtgctgtggcttccaggtctcaaaggcagaaggcaaaacaacgagtggatgagaaac

SEQ ID NO: 541117 - DNA, 100 bp, Homo sapiens
tgtctcccgctccgcagccccgggcacggcggaggcagcggagccctgggccatcgttatttatcagagagtctgatgctgaaagagaacagaacttgcc

SEQ ID NO: 541118 - DNA, 98 bp, Homo sapiens
tggtgaagcatctgatgcacgttccatccggcgctcagctgggcttgagttggagtgcttagtgcagttggtgagagcgggagccacactcaacgtct

SEQ ID NO: 541119 - DNA, 100 bp, Homo sapiens
agtaagcacagaaaatggagacgcacccagagaaagaggctcatcactgtcaggtgaattcacataaaagggcatcagaaaaatacaaagacaacccatc

SEQ ID NO: 541120 - DNA, 75 bp, Homo sapiens
aacttcaccgagtaaagaggagtctgtgattgggttattatacccctgcattgacagacatctaggagaaccaca

SEQ ID NO: 541121 - DNA, 75 bp, Homo sapiens
cggagatccgctcgcgcgccgaaggccccgcagggtggagcccgtctgctcagggttgcaggcccagattctcca

SEQ ID NO: 541122 - DNA, 74 bp, Homo sapiens
gatcagcaatccttggctcactgaggaggtttgggttttctgtagtgatgatgtccatatggccatatctccaa

SEQ ID NO: 541123 - DNA, 100 bp, Homo sapiens
ggtgaatgctgctaaaaacaagactggggctgctcccatcattgatgtggtgcgatcgggctatgacccgcaggctaaggctcccttccagccaaagcca

SEQ ID NO: 541124 - DNA, 74 bp, Homo sapiens
ttagctgtgctcgcgctactctctctttctggcctggaggctatccagcgtgctggggagtcagggaagagcac

SEQ ID NO: 541125 - DNA, 80 bp, Homo sapiens
gtcccgcggccggcgtccggagcatggcggacccccagagctggaactgtggctgcaccatctgtcttcatcttcccgcc

SEQ ID NO: 541126 - DNA, 75 bp, Homo sapiens
aagaagaggacgacgacgacgaggaagaggaggtttctgagctcggcttattccaggggtgtgtttcgtcgagat

SEQ ID NO: 541127 - DNA, 76 bp, Homo sapiens
tctaccataaatcatgcgttttcatcctcagaagcagtgttatagttttgccgctggactcttccctcccttcccc

SEQ ID NO: 541128 - DNA, 80 bp, Homo sapiens
gctcgccagtcttggggacagtgtcagcgcaaatgttctgaaaaagactctgcatgggaatggcctgccttacgatgaca

SEQ ID NO: 541129 - DNA, 100 bp, Homo sapiens
tacatctacatgcattttggggaggaacaaaccctatctgttttatttcaacattgtgaaatgtgccagccccctggttctgctggaattccaatgtccc

SEQ ID NO: 541130 - DNA, 80 bp, Homo sapiens
tgaagtctgtgtcaaacatccatatcataagtggaattttggagatattcaaagcaatagcgtttatggcagcatttagc

SEQ ID NO: 541131 - DNA, 98 bp, Homo sapiens
aggagcggaaggttaatgttcttcagaagaaggaggaggtgcgccagtctgtaactcctgccgagccagtccagtactatttcacgctggctcagcaa

SEQ ID NO: 541132 - DNA, 74 bp, Homo sapiens
gagcccagtgggaggtggagcgggcggagctgcagttcataattggacccttgaagacactcttcagtggttga

SEQ ID NO: 541133 - DNA, 95 bp, Homo sapiens
agcaccacctccagcccctgcgcctcgatggtgatggaatttcctgataatgtgttaaatctcgatggacatcagaataatggtgcacagctaaa

SEQ ID NO: 541134 - DNA, 95 bp, Homo sapiens
cgccagcacgcgcctgcttcccgtctgcgcgagtccacgcagctccccaggacagagcgggatgccaccagcttgtccaaagggaagttccagga

SEQ ID NO: 541135 - DNA, 74 bp, Homo sapiens
aaacattcgtctcggaaaccccgcctcttacagtcacgagactggatacacgtctgtttaactacgcaaaaggt

SEQ ID NO: 541136 - DNA, 101 bp, Homo sapiens
tccagggatctgaaaccactttgcagtcgacatactcggataccagcgctcagcccacctgtgattatggacccatggatgaaggaccagatcttgatcta

SEQ ID NO: 541137 - DNA, 100 bp, Homo sapiens
ttcataagaagttgcatcaggtggtggagacatcccatgaggatctgcccgcttcccaggaaaggtccgagatagccgcaatggctgaaaatggtgataa

SEQ ID NO: 541138 - DNA, 90 bp, Homo sapiens
ggaacatgtacacctcatccctgtacgggtgcctggcctcgcttctgtcccagaaaactaggtgtctgtgttcactccaggctgaagtta

SEQ ID NO: 541139 - DNA, 82 bp, Homo sapiens
ggaaaactgcgcaggggttaagccccgtggaccaaaggcgatctagggcagccctgcagaggtacctgttctactgtaatcg

SEQ ID NO: 541140 - DNA, 82 bp, Homo sapiens
tctgccatatctttgcatccttcaatgacacttttgtccatgtcactgatctttctggcaatgcgcaggaccattgtcaaga

SEQ ID NO: 541141 - DNA, 83 bp, Homo sapiens
ggaggagctgtgcagccgcgaggaggcgcgggaggtgttcgagaacgaccccgagacggttggaagaccacagacatggaagg

SEQ ID NO: 541142 - DNA, 82 bp, Homo sapiens
ggcgagaaagcacggggtgaaactgaccacagtgctcaccacccaccaccactgactggcagaaaacgtccgctcagcagca

SEQ ID NO: 541143 - DNA, 107 bp, Homo sapiens
atctctctcatctcgctcggctgcgggaaatcgggctgaagcgactgagtccgcgatggaggatcgaatcatcaatttagttgttggcagcttaacatccttattga

SEQ ID NO: 541144 - DNA, 101 bp, Homo sapiens
gagtggagacagactgacgcgagcagccaaggtgttggagcagctcacagggcagacccctgtgttttccaaagatgatgaggagtctgatgaggaagctg

SEQ ID NO: 541145 - DNA, 75 bp, Homo sapiens
tcagctaacatggcaacagaataatgttcagaggtggtccacaattagtgaaaatctgtttgcaaccactggtta

SEQ ID NO: 541146 - DNA, 90 bp, Homo sapiens
cgtcgctgctggcacttcaggctctgtgcacgatctgattttctggagagatgtgaagaagactgggtttgtctttggcaccacgctgat

SEQ ID NO: 541147 - DNA, 88 bp, Homo sapiens
gagcaaccagagaaaccacttgaccttgcacatatagtatggctgagagctagcaaggaaaactcaggaccatgatggctcagtttcc

SEQ ID NO: 541148 - DNA, 130 bp, Homo sapiens
ctggtctacggagggatatttctgtaccccgctaacaagaagagccccaatggaaaggtatggaatcgcaggaagcgttaacgtgacgggagatgaggtgaagaaactggatgtgctatccaattccctg

SEQ ID NO: 541149 - DNA, 100 bp, Homo sapiens
aacagaatccaggaataccttcagagcagcgggctcgctcagagcaaatgatggctcagacattcattctgctgtgctctccacaattagaaaactagag

SEQ ID NO: 541150 - DNA, 100 bp, Homo sapiens
gaaatatcttctggaaagctggccagatttgcagatggctctgctgtagtacagatcaccggcgtaatcaacccagcgttggacaaatactttccgtcag

SEQ ID NO: 541151 - DNA, 73 bp, Homo sapiens
ccttcatcgacatcagtgaagaagatcaggaaacattggcaaatttggagcgacagatctatgcttttgaggg

SEQ ID NO: 541152 - DNA, 98 bp, Homo sapiens
gcaccgcccggactcaccatggtcctggaggaagagccggctgcagactcagcatttgggacccaggtcttggcagtgatgagacccccactttggga

SEQ ID NO: 541153 - DNA, 83 bp, Homo sapiens
ctggcaaaactgcgctttctggctgaggagtttgctgatggccgccaaagttggagttcgtatgttgatgacatctgattagc

SEQ ID NO: 541154 - DNA, 90 bp, Homo sapiens
caggaatgggacctcgagtcactgtggttgtggggcgggaactgctggcccaatacaccaaacagtatgaagaaaaaccactctttggcc

SEQ ID NO: 541155 - DNA, 96 bp, Homo sapiens
ctgggggcgagctgagcacctgtagtcaatcacacgcagtgatttaaagggagtgatagtcactctgagtgatgatggtcacttgcagtgttcata

SEQ ID NO: 541156 - DNA, 82 bp, Homo sapiens
gctttgttcagctgcagcatggagagatagataaacgggagacccgtgtacagtatcatctcagttggagttagaagaagcc

SEQ ID NO: 541157 - DNA, 94 bp, Homo sapiens
ttggaaatacaagatcatcatctgtttctagagatgctttcaattcagctgaaagttaatagctgaatgccaacaactaaaggaagaaagacag

SEQ ID NO: 541158 - DNA, 96 bp, Homo sapiens
agaagaatgtggctaccagcgaaggcaaatacgccatgcgagacctagtccacaggcttccaggagggaacaacagcaacaacactgcaagcaagg

SEQ ID NO: 541159 - DNA, 75 bp, Homo sapiens
gttctttgtctctgactgtgtgagggagtgcatccgccccaacccttttccccctcgtctcctgtgagaattccc

SEQ ID NO: 541160 - DNA, 50 bp, Homo sapiens
ggggaaggcgcctgaagaggacgaagccttgttagatgacttggataaag

SEQ ID NO: 541161 - DNA, 76 bp, Homo sapiens
gctgtgagcgcccccatcccggaggtctccgccggctcccggatttgtccaatatgtgcagcgttacctggaggcg

SEQ ID NO: 541162 - DNA, 101 bp, Homo sapiens
aagcggtgcctgagcccgtgcctgtcttcagatcttcacagcacagttcctgggaaggtggagccaccagcctctccttgagacggggttttgccatgttg

SEQ ID NO: 541163 - DNA, 100 bp, Homo sapiens
ttgcagttgtgactgagtgtgctggtggaggggccttcctcgtcatccccctgcaccagatccatcttcggttgtgaatccggcccggaatgcagccacc

SEQ ID NO: 541164 - DNA, 98 bp, Homo sapiens
tggcgccggagctgaccccggaggaggagcagattgtgggattagtgatatgcttttctaaagagtagaaaagtcgaagatgtctagacagaacttag

SEQ ID NO: 541165 - DNA, 82 bp, Homo sapiens
tgcagcacgtggacgctgactcggaagtgcaggtcactatcatatgacaaaggctttgccgcagttcatcttcctccctgtg

SEQ ID NO: 541166 - DNA, 100 bp, Homo sapiens
attgaaaaggctttgagaaattttgagtcctcgagtgaatgggcggatctcatatcttcacttggcaaactcaacaagggagagtggtgaatatcagtag

SEQ ID NO: 541167 - DNA, 100 bp, Homo sapiens
catgttcagcggccgcgtggaggtgctgaccgatgccggaggatctgatcgggaccccacgctagccacccctccggccggccagactctcgcagtgccc

SEQ ID NO: 541168 - DNA, 75 bp, Homo sapiens
ctgttttcctaaaagactgaaatgggggcgaccattcttagtgccggtggtggtgtgcacattgagccccggtat

SEQ ID NO: 541169 - DNA, 100 bp, Homo sapiens
ctaaaacacaaagcaagagaaaaaccttatgatagtaaaagtttgcggacgtatgagactgagagaggaatacgtctaacagtggaagctgatctccaag

SEQ ID NO: 541170 - DNA, 75 bp, Homo sapiens
gtgaacaggatttaattgaggatctcaaacttgcaagaaagccggagcggttgcagggcacacattactcggtgc

SEQ ID NO: 541171 - DNA, 85 bp, Homo sapiens
gggacgacacggtgcaggtggtggatgggatggtgcatccttacaaaggagccggaaaattcaaatccgaaatattccaccccag

SEQ ID NO: 541172 - DNA, 89 bp, Homo sapiens
gtgatgaagaaagtgttagaaacagtagtggagaatcaagatcatcacgaagtatgtatatgagctcctggaaaaggattgtaatttga

SEQ ID NO: 541173 - DNA, 90 bp, Homo sapiens
ctcctttggccagttaggagttcctcatggacctcgaagatgtgtggttccccaggccattgagcgttctaagaagggaggagagtttga

SEQ ID NO: 541174 - DNA, 95 bp, Homo sapiens
ggctggttatcagcattgcagcttgaggcaattacatatgcagcccagactggagcgctgctcagcgctttcgttcagctgtgccacatttccac

SEQ ID NO: 541175 - DNA, 100 bp, Homo sapiens
ctttcttgtcaactgctcacgacagaaggcgtctcatggcgttggaataccggctctcagcggctagatggagtttcactgtgtcagccaggatggtctc

SEQ ID NO: 541176 - DNA, 100 bp, Homo sapiens
gagttgaagggtcggaaacgccctacgtggacaggacacccggcccagcttttaaggtcccgagcagccccgcccaacatggacccagacccccaggcgg

SEQ ID NO: 541177 - DNA, 100 bp, Homo sapiens
gctttcaacatgattgaccagaaccgtgatggcttcattgacaaggaggacctgcacgacatgctggcctcgctgggcatggagtccgctggaattcatg

SEQ ID NO: 541178 - DNA, 100 bp, Homo sapiens
ggaggcggtggagcgcagagcgggcgagcgcggacatggacatcttccagcaacagatctcgagaagacagctggctaaaatccttatttgtccggaaag

SEQ ID NO: 541179 - DNA, 78 bp, Homo sapiens
ctgagtggttgtgtggtcgcgtctcggaaaccggtagcgcttgcagcatgatggacttcagcagaaatctttatgata

SEQ ID NO: 541180 - DNA, 100 bp, Homo sapiens
aaacatgagtcaatatgtattgtggcattcaaatcctagcactctgggagaggtgtggtttcagaaccgaagagccaagttccgcaggaatgagagagcc

SEQ ID NO: 541181 - DNA, 130 bp, Homo sapiens
ccagaacgcagatcagaggtagtcggacctttcccgctggcgcgcagcctcagctagaaaagaagaagccgacgtggggcaggccttcgcgggactggcgggagcggaggaacgctatccggctcaccag

SEQ ID NO: 541182 - DNA, 50 bp, Homo sapiens
gttggccttcgtacccgtcttgattgagtaaaatgtttattggaggcttg

SEQ ID NO: 541183 - DNA, 75 bp, Homo sapiens
cgccctcaccacccctatccagacggctgcccttcaagtaccaatcgaccttcagaagatgcccttggggaagct

SEQ ID NO: 541184 - DNA, 75 bp, Homo sapiens
agggccctccagactcaggcgccccaacaatgatgctgaataatcccctatttgctggaaatcctcagcttcaag

SEQ ID NO: 541185 - DNA, 99 bp, Homo sapiens
gcggaaaatgatccagtcacagtttggaaattttagcattcaggtgccaggaatgcagatgggacagccagtgccagaaacaggcccagctatactcct

SEQ ID NO: 541186 - DNA, 100 bp, Homo sapiens
tgctgttatggtttcattcagaacacctcaaagttcaattttccaaaaagaaaatatttacaccagcagctccagttcataccaataaagaagatcctgc

SEQ ID NO: 541187 - DNA, 101 bp, Homo sapiens
cttggcagccaggagctctgcattgaaggcactgggcacttcactacgcttagcagatgtcctctggaattcccagattcctcttttgatctgtaggacat

SEQ ID NO: 541188 - DNA, 98 bp, Homo sapiens
aaatcataccatatcagatgcctcgcagagcaccaggcccaccgtgaaaggttttgctgttactgctcagtgtagtcacaccttgaataagaaatgga

SEQ ID NO: 541189 - DNA, 75 bp, Homo sapiens
taccctcagcgagagaagtaaccgtcgtcacgctgtggtacagagcacccgaagtcttgctccagtccagctacg

SEQ ID NO: 541190 - DNA, 100 bp, Homo sapiens
aggaatattttggtttacagcatgatgacgactccgtggactctcctgttcaaaccttgtactactcagctgatcacaagctgcttgatgggaacctact

SEQ ID NO: 541191 - DNA, 50 bp, Homo sapiens
ggaagtcattaggaacaatggtgcaagtgtatcctactcagtacatgtat

SEQ ID NO: 541192 - DNA, 75 bp, Homo sapiens
ccctccggctcctaaagagtcctcaaccagtgagggcgctgatcagaaaatgagagtgcctggtgaagaatgtga

SEQ ID NO: 541193 - DNA, 83 bp, Homo sapiens
tctactcatcttttgttgcactttccacacactatattacaacagtttgcagtctcagaagcaattttggaggtggtggaagc

SEQ ID NO: 541194 - DNA, 74 bp, Homo sapiens
atctttattccggctataatgactacaatccaatctatgatatcgaggccatggcccaaaaggaagatatggaa

SEQ ID NO: 541195 - DNA, 97 bp, Homo sapiens
agcttcaaaaatgacaagttcgataaaagtgtgcagaccaagagtggccaaatcaatgaaggtccctgtatatgagaccccagctggatggagattc

SEQ ID NO: 541196 - DNA, 74 bp, Homo sapiens
cgaaatttcttgggtgaaaaatatatccgcagggttcggatgagaccaggtactctgtggatatccccttggac

SEQ ID NO: 541197 - DNA, 82 bp, Homo sapiens
tcgaggttgtttgcaacgaccgtctggggaagaaggtccgcgttaaatgctgaacatatgcagaagaaaaggagaaaacaag

SEQ ID NO: 541198 - DNA, 100 bp, Homo sapiens
gcacgcatcacggcgccttgcgcagcatcttctcccaaatggcgcagtgggacctcaggatgcggttcatgctattattcagccggcagggaaaactgcg

SEQ ID NO: 541199 - DNA, 75 bp, Homo sapiens
tgtttgtggatcgctgtgatcgtcacttggtatgatccgaaggagaacaagtggactcgggtagcttctatgagt

SEQ ID NO: 541200 - DNA, 80 bp, Homo sapiens
cggaaaccggtagcgcttgcagcatggtgtaatggataggtaacagagaagacctcgtcccttcctagtcagggcatcag

SEQ ID NO: 541201 - DNA, 100 bp, Homo sapiens
aagctgggaaacccacaggaggcaaccacactagtttagctcaaaagccaaaagtctctgagaacgactttgaagatctgttgtccaatcaaggcttctc

SEQ ID NO: 541202 - DNA, 82 bp, Homo sapiens
cttcaggaggcccaagacaccacagaagccctccgagcccaggcttctcacggcattcagcagcagcgttgctgtaaccgac

SEQ ID NO: 541203 - DNA, 74 bp, Homo sapiens
gactccttcggcagtccacccaccgccgccgcctcccagcgatgccctcctagctagccgtcacgggatggagg

SEQ ID NO: 541204 - DNA, 100 bp, Homo sapiens
gttttaagaaggttgggatttgctacttcttctgatgtaatagagatgaaaggacgagtggcttgtgagataagcagagatggggttttgctctgttgcc

SEQ ID NO: 541205 - DNA, 146 bp, Homo sapiens
ccagggccctgcagatgtcgccaggaaagtggtgatccaggcaggaccaggctgcactgaagggacagaggtgccttatgcccgctcagaggcccacctcacagagctgctggaggagatatgtgaccggatgaaggagtatgggg

SEQ ID NO: 541206 - DNA, 95 bp, Homo sapiens
ggtgctccccatctgcctggcgttgtgcgcagagctggaaagcatggctgttttccgatgaagttaaattccgtcaagatttaatgaatattgcg

SEQ ID NO: 541207 - DNA, 75 bp, Homo sapiens
tgggcctgcaggtctctgtcgagcagcggacgccggtctctgttccgcaggatgtcatccgtccttggctcagga

SEQ ID NO: 541208 - DNA, 90 bp, Homo sapiens
caggcccgaaggctagacgggatcgactacaacccctggtgtgatccctcacatccacaaatctctgattggaaagaagggacagcagaa

SEQ ID NO: 541209 - DNA, 83 bp, Homo sapiens
gccagatcgagcggagaaatggttgtgcagcctgactctgaagaagctggtggtcttcaaggagctggagaaggagctgatct

SEQ ID NO: 541210 - DNA, 75 bp, Homo sapiens
tcagtggatggaaataaggctaaacttgcaatatgggacaatgaggagcccccagctctgccccctaggactctg

SEQ ID NO: 541211 - DNA, 82 bp, Homo sapiens
ctggctaagctcatcattgttactggtgattacatggatccaacacctgatccccaagattgaagatggaaatgattttggg

SEQ ID NO: 541212 - DNA, 75 bp, Homo sapiens
cttatttatccagaagattgatcatcatatgggttgtgctggagaatctggtaaaagcaccattgtgaagcagat

SEQ ID NO: 541213 - DNA, 50 bp, Homo sapiens
tcgccctcaaggccatgatcaaaactgaagttattgccagtggactgtga

SEQ ID NO: 541214 - DNA, 75 bp, Homo sapiens
ggtgcccgaggaggcagccaagctcgtagcctgccactccgtgcgtctcctctgagcctccggcctccataagac

SEQ ID NO: 541215 - DNA, 97 bp, Homo sapiens
ggtgacgggcgccgaggaggaccgggcccgcttctttctcgagtcggccggctgggacttgcaggtgtctgatgatttgtgagcctcaagtgactac

SEQ ID NO: 541216 - DNA, 88 bp, Homo sapiens
caaagcagtggccgcccgggcggcgggatccactgtccggcagaggtaccgttttgtgtcatgcagttactggaatgtacaaaagcag

SEQ ID NO: 541217 - DNA, 83 bp, Homo sapiens
cttggaatctgactgtgatgaacagtgtcctctacaagcctggtgatgcccacacaccacttacttcgtgcgcaacaacaagg

SEQ ID NO: 541218 - DNA, 75 bp, Homo sapiens
ggacattccaggcagaggcaaggtacatggactatatcgcacaacaggtgctagttttgagaaggcccaacagga

SEQ ID NO: 541219 - DNA, 82 bp, Homo sapiens
gtgttcgagaacgaccccgagacgctggagcagttcaacatgatggagaacgccatcagctccagcagcctgtacagcccgg

SEQ ID NO: 541220 - DNA, 75 bp, Homo sapiens
aaagcagcggatacaacctcaaaagacgtctgtctacattgaattgggtaatgtgaggctacaggagatgatggc

SEQ ID NO: 541221 - DNA, 82 bp, Homo sapiens
ggtccctggtcagtttctgctttggtgtgttccagagaacaagccttcagacatttgctatattgacgctgagctgtcaggg

SEQ ID NO: 541222 - DNA, 75 bp, Homo sapiens
aactgcttctcaggtagcaagtacatggggaggtgcaaacagctgcacagcaagtggcagaggataaatttgttt

SEQ ID NO: 541223 - DNA, 95 bp, Homo sapiens
taaagaaacctgtcaggaatacgagcttctggtgtaaacaggaacatcgataagtagtgtaaaaacttgcacaatgaaatccgaagccaaggatg

SEQ ID NO: 541224 - DNA, 98 bp, Homo sapiens
gaaggggtcctcagagttactggggaggtagaagaggatgatccagtgcctgagatccgtcgagatcactttgaagaagccatgcgctttgcgcgccg

SEQ ID NO: 541225 - DNA, 75 bp, Homo sapiens
cgtccgcttcccgacgctgagggcagccccgtccagggagggcctgaggctatggcaggaggagcaggagaggaa

SEQ ID NO: 541226 - DNA, 75 bp, Homo sapiens
atcccgccaaagatcccagaaggggagcgcgttgacttcgatgtggttcagaatctggggagccttatattccag

SEQ ID NO: 541227 - DNA, 100 bp, Homo sapiens
cacagccacccttggtgatgagcctcggaaagtgctcctgcggctgtatggagcgattttgcagatgcttgcctacatgtagcctgtgttgtacagcaga

SEQ ID NO: 541228 - DNA, 98 bp, Homo sapiens
ccaccgccaccgccaccgccactaccaccgtctgagtctgcagtcccgagctctgcagcgcttcagcgagggtgccctggagtacctagccaacctgg

SEQ ID NO: 541229 - DNA, 80 bp, Homo sapiens
ctgggatcttgctgggtgagatggcagtgtgtgcaaaaaagcgccccccagggagctgccaagatgctgctggactcgga

SEQ ID NO: 541230 - DNA, 76 bp, Homo sapiens
ggctggatctctggtgagacatttttcttccttctgtcacatcacacccaatggatccctccccgcggcggcgatg

SEQ ID NO: 541231 - DNA, 100 bp, Homo sapiens
ccagcagctgcagcagctcaagcgcctggagtccttcttgccttgcgccatggactggcagccagacgagcagggcctgcagcaggtcctgcagctgctc

SEQ ID NO: 541232 - DNA, 100 bp, Homo sapiens
cgctatggaagatgaccagaggactagacctgaagtttcaaagatttctctatgaatcatcatcaagaactctgggagaacttttgaattcataaccaag

SEQ ID NO: 541233 - DNA, 96 bp, Homo sapiens
tcagtctcctcgccgggagcgtccgggagcagctccgaggccgcggcgaaaccaggaagctcttcgtgggcggtcttgactggagcacgacccaag

SEQ ID NO: 541234 - DNA, 87 bp, Homo sapiens
gccgaggccgagtcagggatggcccccggcgggcctggggaaggcgacggaagcttggtgaacggaatagccaggccagaagaagga

SEQ ID NO: 541235 - DNA, 80 bp, Homo sapiens
cctggcactgcgcttcttcaaagatcccaaaaggataatcacttacaatgaagccatggatagtccagatcaatgaagga

SEQ ID NO: 541236 - DNA, 101 bp, Homo sapiens
ctacgcgctacacaagtggagctccttttcctccacctaccttcccgacaccatatgaaggcggagtatggaaagttagagtggacctacctgataaatac

SEQ ID NO: 541237 - DNA, 78 bp, Homo sapiens
gaggtcccaatcccccactctttccgccctaatggaggtctccagtttcggtttacccaaggtccagcctagccccta

SEQ ID NO: 541238 - DNA, 110 bp, Homo sapiens
cgcaaccattgacgccatgtcgggttattcgagtgaccgagaccgcggccgggaccgaggctggcccgagataacttcttccgctgtggtgtgctgtatgaggactccct

SEQ ID NO: 541239 - DNA, 100 bp, Homo sapiens
ctctcgcggcctagctttacccgcccgcctgctcggcgaccagtgatttcctgaaggaaatataatgatctgttcatcgaagtagaagatattgttggcc

SEQ ID NO: 541240 - DNA, 100 bp, Homo sapiens
agaaagtcctcgctcgtcaccagcaagcttgcgggattctggctgtgactcagtcactgacactgagcctgaggacgagaaggttgtttcctactcgaag

SEQ ID NO: 541241 - DNA, 97 bp, Homo sapiens
aatgagtgcgaatgtcaactcctgctaaaagaaatgcttgaacggcttaacaaggcctcaggagtgcaagtagctgatgaagtatgtcgcatttttt

SEQ ID NO: 541242 - DNA, 88 bp, Homo sapiens
cagcccgggctgggctcgcaaggaccatggccaacctggagcgcaccttcatcgccatcaagccggacggcgtgcagcgcggcctggt

SEQ ID NO: 541243 - DNA, 75 bp, Homo sapiens
cagtgtgggaagccaagcagatacaagttttcaaattaaagctttcacagcactgcgcttcctctcagaaccttc

SEQ ID NO: 541244 - DNA, 90 bp, Homo sapiens
gatagcaatgatgatgtgaaaacagaagctgtggctagctccttaataagcatttatagtcagtttttggcagcaatagaatcactaaag

SEQ ID NO: 541245 - DNA, 89 bp, Homo sapiens
agaagaggaagaagaccaaggcccaccatgccccaggcctcagaaaagcacctaggagcctttggtcaaaatgcaatacaaatctatca

SEQ ID NO: 541246 - DNA, 74 bp, Homo sapiens
gcctgcacagccgcggcggcagcagcagtgagagagacacctatggctgccgatgaaggctcagcagagaaaca

SEQ ID NO: 541247 - DNA, 96 bp, Homo sapiens
cggcaaaggaatcgtctaagtctcagaggtcggatccgcagctgcttgcccggttctactatgccgacgaggagctgaaccaggtggccgcggagc

SEQ ID NO: 541248 - DNA, 51 bp, Homo sapiens
cgggtgtctcgtgtgtgaacatcacaggaagaaatgttggctatttggcga

SEQ ID NO: 541249 - DNA, 51 bp, Homo sapiens
gcgggagcgcggttcggggccgcagagacaccattcgcttttcacccaaga

SEQ ID NO: 541250 - DNA, 100 bp, Homo sapiens
gcggtggccgagctgtacacgcaggtaagaacaagagagttggaaagcagttagcctcacagaagatccttcagctgctgcacccacatgtcaagaactg

SEQ ID NO: 541251 - DNA, 75 bp, Homo sapiens
tgctgatcttcgatgagctctcggattccttatgcagagtggccgacttggggccaactcaccctatgcagcaca

SEQ ID NO: 541252 - DNA, 90 bp, Homo sapiens
ccatccggctggacatggagatcgatgggcagaagctgcgagacgccttcacctggaacatgaatgatgatggtggtgctaccccagtac

SEQ ID NO: 541253 - DNA, 95 bp, Homo sapiens
agagctacaatgagcagcgcatcagacagaacgtgcaggcttgcctttcagcagaagacagcctgggtgcccaggctctgcacagggcagctgtc

SEQ ID NO: 541254 - DNA, 109 bp, Homo sapiens
tccgtggaagcgtggccggcagcgtcccggacgaggaggtgctggagaatctggtaaaagcaccattgtgaagcagatgaggatcctgcatgttaatgggtttaatgga

SEQ ID NO: 541255 - DNA, 80 bp, Homo sapiens
ttccttaaaagctgcttccagtgggaatccacattaagaagtacaatagcattcgcgcattttgaaagcgaagcagaagc

SEQ ID NO: 541256 - DNA, 100 bp, Homo sapiens
catctaactaacacggtttttattgacagagctctgatagttgttccttgtgcagaaggctttcagtccagtgtaaagctgttggagcgcgggagcaaag

SEQ ID NO: 541257 - DNA, 75 bp, Homo sapiens
agagggaaatatgtttgctgtttcacctgtatcgactttccaaaaggatgacatctgaactggagagcagcctaa

SEQ ID NO: 541258 - DNA, 74 bp, Homo sapiens
caatttgccatttatttgtaataagcttcccatcgacggtcagtgcgcacgttgtaatcagctgaggccatgtc

SEQ ID NO: 541259 - DNA, 90 bp, Homo sapiens
gtccgagtctccgccgctgcgggcccgctccgacgcggaagtcggacgaggaaggcagccaggagaaaggaggggacgacagccagcaga

SEQ ID NO: 541260 - DNA, 100 bp, Homo sapiens
gagcgctactcagagcagcacaaggaagctgccttcttcaaagagctggattttatggaagaccttgggttatggaacagagaaaagaactctttagaag

SEQ ID NO: 541261 - DNA, 75 bp, Homo sapiens
ccagcctcaggcgtgcgcggacggtgtgcggaacgacaccgtaactatccgcactagaaagttcatgaccaaccg

SEQ ID NO: 541262 - DNA, 101 bp, Homo sapiens
tttcgcttttttacctgccaatcaaactgctacaagacaacaccctgatctggcatggacatgtcgcaatgatgatgtcaaatgcttttgttgtgatggtg

SEQ ID NO: 541263 - DNA, 97 bp, Homo sapiens
tcatttttacgggccttctggagatgcttccgaactgtgggcaaaaatggcggagtcgatagcagcagttggtgacgagatggcactcagaaacggc

SEQ ID NO: 541264 - DNA, 88 bp, Homo sapiens
gtgttgaagaggttgtttatgagtcgcaccaaccggccgcctctgtccctttcccggatgattcttggtgccaccattgagaactcca

SEQ ID NO: 541265 - DNA, 105 bp, Homo sapiens
gaagagcgagccagcgcccggagcaagcggagctcccccaagagccggaaaggtttttcgttggaatatacgttgcacatttatggcgattctgagtgtgagggc

SEQ ID NO: 541266 - DNA, 100 bp, Homo sapiens
ggagctaagtccccagattggaggaggctggctctggtcttcgatgcacaggagtggccgttatggaacgcaggttatgaagacagtatggagtttccag

SEQ ID NO: 541267 - DNA, 82 bp, Homo sapiens
ggctctgcgcggtccccgccagcgccccatcctgagccggaacttagtgatttggcccgtgaccctccagcacaatgttctg

SEQ ID NO: 541268 - DNA, 101 bp, Homo sapiens
ccccccaaggttgccaaatgcacagccaagcctagcagctcgggcaaggatggtggaggcgagaacactgaggaggaaaatctcacctggccattgtccag

SEQ ID NO: 541269 - DNA, 80 bp, Homo sapiens
cttcaatgagtaaacatattcctatctgagtgggacatacttttgaaggatgtgcaatgttcaatcataagtgtgacaaa

SEQ ID NO: 541270 - DNA, 75 bp, Homo sapiens
attctccaatacttacagtaatctcatattaacagggaaatcctcattgacgattcaatttgttgaaggccaatt

SEQ ID NO: 541271 - DNA, 82 bp, Homo sapiens
atttgctcttacgtatttgtgtgacttgactcttcaaacacaaaggcagaagctcctcctggggtagagacagatcttattg

SEQ ID NO: 541272 - DNA, 100 bp, Homo sapiens
ccgacgtcgaccagcagagactggcatggagagtagaaaactgatttctgctacagacattcagtactctggcagtctgctgaactccttgaatgagcaa

SEQ ID NO: 541273 - DNA, 75 bp, Homo sapiens
gtggggcttccggtggctgatcttcaggatcatgcttggagcagttcgatacaagaggctgttttcctagcgtgg

SEQ ID NO: 541274 - DNA, 82 bp, Homo sapiens
tcggcgccagcagcccggaggcccggcccgcgcaggaggcgctcctccttcccaccggaaatctggcattttttaaagtttg

SEQ ID NO: 541275 - DNA, 75 bp, Homo sapiens
aggaaggacagttactactccattcaccagatagaataccctctaccatctgctttggtcagggtgccgctcgag

SEQ ID NO: 541276 - DNA, 75 bp, Homo sapiens
tggagaaaaactggatgttggtagaaaaagcaagagtttgttatatagcagatgaggaagatggagagaatgccc

SEQ ID NO: 541277 - DNA, 75 bp, Homo sapiens
atttaattttagggtcctttatatagaagggagagtaggacatgatccacatcgcggacaccaaggtcgccaggc

SEQ ID NO: 541278 - DNA, 98 bp, Homo sapiens
gagagggaggtggtcgcagggtcccatgaactgggacaggactatgagcatgtcacggcctcccgaggagcccagacagctgcagccacagctccccg

SEQ ID NO: 541279 - DNA, 83 bp, Homo sapiens
cggccaacgacacatttgacattgatccgatggtggttactgacctcctgccccccgaggtctgcagtctcctgaacccagca

SEQ ID NO: 541280 - DNA, 100 bp, Homo sapiens
atcagaagagaatgaaaaaactagatcagcagtacaaagagaggatacggaatgcagcatgcagcagattggaataaatatgatgaccgattgatgaaag

SEQ ID NO: 541281 - DNA, 73 bp, Homo sapiens
gcaggtcctcgcggtgcgcaccgtttgcgacttggcccgccatgttcatagaggataaagcagtagacaccct

SEQ ID NO: 541282 - DNA, 98 bp, Homo sapiens
agaagctggaggtcaacgaggccgagctgctgcggcgccgcaactttaaagtcatgatctaccagattgtaaaccatggctgtgtggatacaagctca

SEQ ID NO: 541283 - DNA, 75 bp, Homo sapiens
ttaccactattaaacttctcaatgaaactagagacatgttggaaagggattttatattggaagacatggatcttg

SEQ ID NO: 541284 - DNA, 83 bp, Homo sapiens
aactttggggcccgcgccgcgcgccggcggcaccatgaagtcagcggaggaagggaagcccgtcagcctgagctacagatgcc

SEQ ID NO: 541285 - DNA, 88 bp, Homo sapiens
tgatgaatcccagggggagatttatagatccattgaacatctagataaaatggttgtttacattcagagctctatcaataagaggaat

SEQ ID NO: 541286 - DNA, 100 bp, Homo sapiens
gcgggtgcagaacgtcactgagtttgatgacagcagcagccgctcttctaaaacattcaaaccaaagaagaatatccctgaaggatctcatcagtatgaa

SEQ ID NO: 541287 - DNA, 100 bp, Homo sapiens
gcccaccagccatcatgtcggaccccgcggtcaacgcgcagctggatgggatcatttcggacttcgaagggccgttgccgtctgcacccagaccctgagc

SEQ ID NO: 541288 - DNA, 100 bp, Homo sapiens
agtgtgtgaagctgaatgatggtcacttcatgcctgtcctgggatttggcacctatgcgcctgcagaggaagacataggccaaggagccagacttcctgt

SEQ ID NO: 541289 - DNA, 94 bp, Homo sapiens
gcgcccgggacgcgcggcggcaccgggaggccgggccgagcgtgccggtggtggtgtgcacattgagccccggtatagacagttcccccagctg

SEQ ID NO: 541290 - DNA, 75 bp, Homo sapiens
tcggcttgtcctggctcttgccctcatcctggttctggaatcctcagttcaagaccattactgggacttccaccc

SEQ ID NO: 541291 - DNA, 100 bp, Homo sapiens
taactctcaagtatacaggaatattgttattagaaaactgtcgctgaaaagcaggagaagagaaatcaggatcgcttgaggaggagagaggagagggaac

SEQ ID NO: 541292 - DNA, 50 bp, Homo sapiens
caacttgctaatggcaggcattttacaagtgctggaattggccggacagg

SEQ ID NO: 541293 - DNA, 83 bp, Homo sapiens
gttactcgcacaaccccagttaagctgcgctccgggagagtaattccctcctggtcccagacagtctaagaggcacagataaa

SEQ ID NO: 541294 - DNA, 75 bp, Homo sapiens
gttctgcaaagactgcaggaaggtactccaaagattcaggtttactcacgtcatccagcagagaatggaaagtca

SEQ ID NO: 541295 - DNA, 98 bp, Homo sapiens
aaaagacttggtcaccgttcacacagatggaaacgaacagctctctgtaatgcgatactcaccaggaaattatcagttcattgcctagcatagtaaat

SEQ ID NO: 541296 - DNA, 98 bp, Homo sapiens
gggcggtggcttcctttccgccactgcccaaactgctgaagcagctcccgcgaggaccacccgcagcagccgctcttctaaaacattcaaaccaaaga

SEQ ID NO: 541297 - DNA, 100 bp, Homo sapiens
ggcgggcggcgacggcggcaaatctaagaaatttgactttggggctgcagggagcccccgcccactggggcggctactgcccaaggtacaagaggtggcc

SEQ ID NO: 541298 - DNA, 90 bp, Homo sapiens
gctactgcagacgacgagctgagcttcaaaaggggggacatcctcaagtggttctatagatggtaataaccaacttgtaatcaaaggaag

SEQ ID NO: 541299 - DNA, 75 bp, Homo sapiens
ccgggatggagaaggaggaggaatcggatagtggccaaagcctccaagaacctcatgtccacgcaaagcttgggg

SEQ ID NO: 541300 - DNA, 75 bp, Homo sapiens
gtcctgaaggagttccaccaggccgggaagcccatcggcgaaggcagcaacctcacccccgcccaccacttccag

SEQ ID NO: 541301 - DNA, 83 bp, Homo sapiens
ggccccggacgaaggtactcgcagcacttggagcgcagaaccggccgcgcccgggctgggttacgacccctacaaccctgagc

SEQ ID NO: 541302 - DNA, 100 bp, Homo sapiens
ggagccatagcttggagtaggataagattgtaaggaaagctggcaatctgacaaatgcttatgtttacgaagtgggccctgggccagggggaatcacaag

SEQ ID NO: 541303 - DNA, 99 bp, Homo sapiens
tcctcaagggtacccctaccaaggatacccacagtacggctggcagggtggacctcaggagcctcctaaaaccacagacattatacaacgtgaaggctg

SEQ ID NO: 541304 - DNA, 75 bp, Homo sapiens
ctccagcaccctcatcgccctggccgacaagcacgcaacaggttcaggagaagtggcacctggtggaggacctgt

SEQ ID NO: 541305 - DNA, 75 bp, Homo sapiens
atgtttggatgttggatctacactttctcaagcactgtgatcttcaaataaaactttagaaactgttcctttgga

SEQ ID NO: 541306 - DNA, 111 bp, Homo sapiens
cgcccgcctctccaagaccatccctggctgctgtaagactttgaccccgacgcaggcttcagtgattgccgcggatcagaagcctgagcactttggctcgagacaattaag

SEQ ID NO: 541307 - DNA, 85 bp, Homo sapiens
gagccgccatcttgtgggagcaaaaccaacgcctggctcggagcagcagcctctgaggagaattcgcacaaccacggggacggtg

SEQ ID NO: 541308 - DNA, 75 bp, Homo sapiens
gagttttcatggattctaatggaatcaggcagttttgtgtccatgtgaacaactattgttgccaatgccaaaggc

SEQ ID NO: 541309 - DNA, 100 bp, Homo sapiens
tttctggagggatgcagagcctttccttaggacaaacaagatatgaaagctttcaaaatccaaagaggagaaaaaatcaaagtggaacaatgtttcgacc

SEQ ID NO: 541310 - DNA, 50 bp, Homo sapiens
atgcctggcagccccgctctctgcaatgcctgaggaaacccagacccaag

SEQ ID NO: 541311 - DNA, 88 bp, Homo sapiens
ggattccaagtaactcttatttgatatggagtctggagaacggttaccatcctcagcagcctcctctactacaccaacttcatcttcg

SEQ ID NO: 541312 - DNA, 100 bp, Homo sapiens
ccgccctgagtcactgcctgcgcagctccggccgcctggctccccatactagtcgccgcaaaaaatcgtggaattgccattccagtggatttggacagcc

SEQ ID NO: 541313 - DNA, 82 bp, Homo sapiens
atggctctgtgcaacggagactccaagactaatagggatgccaaaggaaaaatatgatcctccagatcctcgcagaatttat

SEQ ID NO: 541314 - DNA, 101 bp, Homo sapiens
ttctgttttgcctgaatacatgatttaaacaagagatttccacagaaggtttttcgttggaatatacgttgcacatttatggcgattctgagtgtgagggc

SEQ ID NO: 541315 - DNA, 75 bp, Homo sapiens
caaagcctcctggaccgtccaagaaggcactttccctcatggtattgatattttgaccacagctgactattttgc

SEQ ID NO: 541316 - DNA, 90 bp, Homo sapiens
gtttttgtgcttggctgactaccttgttcccattctagcgcctagaatttttggctccaataaatgtagagacgggggttcaccatgtta

SEQ ID NO: 541317 - DNA, 100 bp, Homo sapiens
gggtactgagaatgagcggagccgccaaaaatatgctgaggaggagttggagcagatggccgccaagaacgagtcatgtttgacaaaattacatctcgaa

SEQ ID NO: 541318 - DNA, 100 bp, Homo sapiens
ggaagattggggccttctgattattttggtgacattcccagtgagggttttccaccttctgggtgtggacaccctggtagtcaccaatgcagcaggaggg

SEQ ID NO: 541319 - DNA, 83 bp, Homo sapiens
cggggttagcggagcaatgcgcaggaataaggaagcgacctgcaaccgacgagctcttcagtatccccatcagccagtttccg

SEQ ID NO: 541320 - DNA, 90 bp, Homo sapiens
gctccaggccgagctggataaactccacaaggaggtgtccactgttcgggcagccaacagcgaggtcccgcagcccccggaagccaatag

SEQ ID NO: 541321 - DNA, 76 bp, Homo sapiens
gcctcgagccgcagcacgagctcaaattccgagcatggagatatggaccaaaaggaacgagacgtgattatgaggg

SEQ ID NO: 541322 - DNA, 87 bp, Homo sapiens
ttacagtcatcaatattatgtacagtttcaacaaaactcaggttgttgccatggagctgaggatgaggaggcacctttagagccagg

SEQ ID NO: 541323 - DNA, 111 bp, Homo sapiens
cacagccggtccaaggcggtgcgctgggggccggggcgcgtcgcagcgtgtccggagcggtgactggaaggggtacacaggcaagaccatcacggacgtcatcaacattgg

SEQ ID NO: 541324 - DNA, 83 bp, Homo sapiens
tgatggattttcaggaattctgtttggtgcacctcgatttggaggaagtagggcagggcccttatctggaaagaagtttggaa

SEQ ID NO: 541325 - DNA, 75 bp, Homo sapiens
gccagccccagcccctggagaggatgcagaattcagagcaagccctgcagacgctcagccccagagccatcccaa

SEQ ID NO: 541326 - DNA, 98 bp, Homo sapiens
gaataaagctgttttggaactgtcaggtacctcaaagcgtcacgagaagagaatgccttctagatgcaaaatcacctccaaaccagaccacttttctt

SEQ ID NO: 541327 - DNA, 96 bp, Homo sapiens
ccttcatattggagactacaatatggatggctatccagacgctctggtcatactaaagaacacatctggaagagacggggtttcgccatgttggcc

SEQ ID NO: 541328 - DNA, 75 bp, Homo sapiens
aacatcaactacgtccctctgaaggtggtaatatttcccagctcagacagccaggcgcaccctccggagctgctg

SEQ ID NO: 541329 - DNA, 90 bp, Homo sapiens
atggactgtgtacagagagcctggtgtggagcaagataagtgggtaattccagaattgattggccataccattgtcactgtattactgct

SEQ ID NO: 541330 - DNA, 80 bp, Homo sapiens
tggagtttatctggagtgaggtggccggttcttggtgggatctgagcagggaaccctactctggaaactgtcagtcccag

SEQ ID NO: 541331 - DNA, 50 bp, Homo sapiens
aatgcatccatgctgtggaaaccagagggtgatattcatgaggatttttg

SEQ ID NO: 541332 - DNA, 73 bp, Homo sapiens
ctggtcgccatcaagaaagtattgcaggacaagagatttaaggctgaccaactgactgaagagcagattgcag

SEQ ID NO: 541333 - DNA, 82 bp, Homo sapiens
cttgccctgtcatcccacctgagaaccatgctcaccgaccctagcccaaatcttgtgacaaaactcacacatgcccaccgtg

SEQ ID NO: 541334 - DNA, 101 bp, Homo sapiens
ctgtctccaaactagattggcagccgttttttgagagcagatgagaccaagaataactgggaagtgtcagctctttctcgggctgcccagaaaggatttaa

SEQ ID NO: 541335 - DNA, 100 bp, Homo sapiens
atcacacaaaagcacacaaagacctcctcctccacaggggagacagaggtttgagcacaaaatgaacataattagggaaaataaggatctggcatgtttc

SEQ ID NO: 541336 - DNA, 76 bp, Homo sapiens
tccgggagcaccggggctccgtcatctgtctggaggtcatctccgcggtgtcgaggctctccctgcacagcatcgc

SEQ ID NO: 541337 - DNA, 97 bp, Homo sapiens
tgcccaggctggtctcgacctcctcgcctcaaatgatcctcctgcatcagtctcccaacgtgctggcattacagagttgaagtattgataacaccaa

SEQ ID NO: 541338 - DNA, 74 bp, Homo sapiens
caacatgagatggtggatgaacccacagcttcagaatggaaagtgcaacttaaaaccaaagagttagcccttca

SEQ ID NO: 541339 - DNA, 101 bp, Homo sapiens
ctttgttattggagaaacatgcagattatatcgcatcctatggctcaaagaaagatgattattgagctggaagaatctctacttgtgctgcctttctctta

SEQ ID NO: 541340 - DNA, 74 bp, Homo sapiens
catccctgcagccttctggtataccatcgtcaccatgacaacactagggtcgggaaagaggttaaagaagacac

SEQ ID NO: 541341 - DNA, 98 bp, Homo sapiens
tggcactgcactgggtaggaaaaagttatttgaaggattgaaggcatttcgaggagtagataataaaattcgactgtttcagccaaacctcaacatgg

SEQ ID NO: 541342 - DNA, 74 bp, Homo sapiens
gttcggggcagcttctccggctggtgggtgggtggggcagcctttcaggcagttaccggtattgtaagaacaag

SEQ ID NO: 541343 - DNA, 100 bp, Homo sapiens
cagagggctttatacagggccgtgatgttggagaactacaggaacctggagtctgtggatcgttcagaaagaggcagagcgggccgaacgggccaaggag

SEQ ID NO: 541344 - DNA, 101 bp, Homo sapiens
caaccttcaaaacaactggaatatttagcaaggattcaaggctttcaggccagagatcctcagcaggagcctatggaagagatagaaaatttgaagaaaca

SEQ ID NO: 541345 - DNA, 74 bp, Homo sapiens
caggaagtggccgtagcggcttgttggataagactttatattcagagcaccaatcaaattaagcaagcctgggg

SEQ ID NO: 541346 - DNA, 100 bp, Homo sapiens
gcgccgggagctattgggacctgcggttgcagaggaaagtggtcgcttatggtcagaggagcagcctgctcaccctctccaggtgggggctgtgtacctg

SEQ ID NO: 541347 - DNA, 76 bp, Homo sapiens
acttggaagctctgcaaagacctacgctccttcatctaatccatggaaaggtgaccaagaatatggcccaggtgac

SEQ ID NO: 541348 - DNA, 100 bp, Homo sapiens
atgtgcttggtggagcagctgcctgggagaatgttgactctactgcagtggctgccaaatgtttggtgatgaaggcagaaatgaatggctcaaaacttgg

SEQ ID NO: 541349 - DNA, 118 bp, Homo sapiens
ccctggtgaccaacttgctgcggtttttgttcctggggctgagtgccctcgatctttaatctcatgaagtacgacagctacagccgcttcttaaagtctgacttgtttttaaaacaca

SEQ ID NO: 541350 - DNA, 96 bp, Homo sapiens
gctgctgcgacgaagagttccctcagcctccggccttgtgtgtccgactcggcagcagtggttcatcatgcctagtggcgtataagaagaccccgc

SEQ ID NO: 541351 - DNA, 83 bp, Homo sapiens
cacgcaaccccagatccatttacactttacagttgttggaagaggagcctttggagttgtttgcaaagctaagtggagagcaa

SEQ ID NO: 541352 - DNA, 100 bp, Homo sapiens
gttggggagaagaggattggaggtgtcagtgttaaaggaacctctacaacgaaggtgaagccacggaagataagccagctgaggtgggtgtcctggttgg

SEQ ID NO: 541353 - DNA, 75 bp, Homo sapiens
cagacatccttcgcttcatttattcagacagttgaaccaactggaaaacgtttcttactagctgttgatgtcagt

SEQ ID NO: 541354 - DNA, 101 bp, Homo sapiens
gatcagtacaaaaattcttcaagaaatctaagatggtggccagcagagatctgcaaccccaggtctgtgccactgaacatccagggccttaaacatgactt

SEQ ID NO: 541355 - DNA, 83 bp, Homo sapiens
gcccgcgctgcccgcactcctggtcctgctcggggctctgttcccaggtctcggcgcggaagatggccggcggcgtggacggc

SEQ ID NO: 541356 - DNA, 100 bp, Homo sapiens
gtggagtttgatgttgttgaaggagaaaagggttactattgaacatgctagggctcggtcacgaggtggaagaggtagaggacgatactctgaccgtttt

SEQ ID NO: 541357 - DNA, 88 bp, Homo sapiens
caagactagtctcttccaaggaagatcttgcagagcccccgaagaaaaagcggtctgtggtgttggacgagatcctggagcagctgga

SEQ ID NO: 541358 - DNA, 99 bp, Homo sapiens
gctgcaccgtgcggctgctggacgacagcgagtacacctgcaccatccaggggctttgttatgcacctaaagccatattggaagctccagaagaaagag

SEQ ID NO: 541359 - DNA, 100 bp, Homo sapiens
ctgatttagaaggaggttcaggctacggtgagccgaagttatgtgtctcggtaccacgtgaaagactcctcacgccacgtcatcctaggcacccagcagt

SEQ ID NO: 541360 - DNA, 82 bp, Homo sapiens
cgattcctcctccttggtcgccgcgtccttggctggcgtgaaggtgctcgggtcttcggggcactgggtcccatcggtccct

SEQ ID NO: 541361 - DNA, 83 bp, Homo sapiens
atcggccgcacgtggaatgacccgtctgtgcagcaggacatcaagttcttgccgttcaagggctgggaagaggctaggcgacg

SEQ ID NO: 541362 - DNA, 95 bp, Homo sapiens
atagactctgaagtaatatctggactttgaaattgtgcaagtgaaagtgtaggaaaacatatgcttgaagcgtgcaacaataatctggaaatggc

SEQ ID NO: 541363 - DNA, 100 bp, Homo sapiens
gaagaaggcggtggtggcgggtggaggttcgagcgctgttctcgctccggagccgctgcacatttcggtgggcaatgggcactccaatgaggcagccttg

SEQ ID NO: 541364 - DNA, 100 bp, Homo sapiens
gtcgcaaggtggccgttactgatcttacttcatccagtctaatagaataatccagaatggctactctgatctatgttgataaggaaaatggagaaccagg

SEQ ID NO: 541365 - DNA, 97 bp, Homo sapiens
aaacagcagatttcccaagagcagcggaaaatgatccagtcacaggtacaccaggggttggaaaaaccacactaggcaaagaacttgcgtcaaaatc

SEQ ID NO: 541366 - DNA, 50 bp, Homo sapiens
acccttactgtgtcaacagcaagatatcaacacttctgtttgcaacactg

SEQ ID NO: 541367 - DNA, 75 bp, Homo sapiens
caacacctgttaaagtccttgctcctggtgaattcggtaaccatagaccaaaagatcttactgtgccgagatcgc

SEQ ID NO: 541368 - DNA, 82 bp, Homo sapiens
gcaggacagcgccttcctcaacgacgcggacatggtcatgagctttgtgaacctggcttgcgcgatctctggcctcttcaac

SEQ ID NO: 541369 - DNA, 101 bp, Homo sapiens
ttaaaggaacctctacaacgaaggtgaagccacggaagataagaaggagaacttatggattgtgatggaaaatcagaatctagtcctgagcgggaagctgt

SEQ ID NO: 541370 - DNA, 74 bp, Homo sapiens
agaaagaagatgttaactttcaggtgaatgaaaactttgccattgatttgatagcagagcagcccgtgagcgag

SEQ ID NO: 541371 - DNA, 75 bp, Homo sapiens
cggcgagcgcgagcggcgcgagaaaacatccacgacagcgatggcagttccagcagcagccaccagagcctcaag

SEQ ID NO: 541372 - DNA, 129 bp, Homo sapiens
gccgcagttctagcttcaccttcacgatgtttcccttggtcaaaagcgcactaaatcgtctccaagaggaattcagaaaagcagctcagcaacaggaagaacaagaagaaaaggaggaagaggatgatg

SEQ ID NO: 541373 - DNA, 100 bp, Homo sapiens
tccaaggcagcggagccccccagctctccctgcagatcggcgatgtggtgcgaatacaggagacgtgtggagggccgttgctccagggagaactgcaaat

SEQ ID NO: 541374 - DNA, 75 bp, Homo sapiens
tacaaaacatcgtgggaatcttgtgtcggatcactactcttggaatcaaagataaatccaaatactgcatatcag

SEQ ID NO: 541375 - DNA, 50 bp, Homo sapiens
cgaaggttcaattatgtggtcaaactgtccgtacctggcggtgaaaatca

SEQ ID NO: 541376 - DNA, 96 bp, Homo sapiens
ttcgtccccgcagaggaccccccgacaccagcatggactgctgcaccaattcagaaggagctggcggacatcactttagaccctccacctaattgc

SEQ ID NO: 541377 - DNA, 100 bp, Homo sapiens
tttactgaggacccactggatgtcaagcattgtgcatagttttcttcgattgttgcaacatcccttgcgaggagcggagagtttaataggcaagaaggaa

SEQ ID NO: 541378 - DNA, 78 bp, Homo sapiens
accatccgcaatgtgcttcgcgagaagatctactccactgcctttgactacttcagagttcctatcagactgagattg

SEQ ID NO: 541379 - DNA, 100 bp, Homo sapiens
gagactctgcgtcaggtcacccagcagagatcagcaatccttggctcactgaggaggtttgtgcactagtgaaattgatgaataagtcaatagaggggac

SEQ ID NO: 541380 - DNA, 90 bp, Homo sapiens
agccaggcctgcgcgggcccgaggccggaggaacccggactccggcgtagcggtacatcaggaacgtctctatcaagaatacaatttcag

SEQ ID NO: 541381 - DNA, 50 bp, Homo sapiens
cgtgtccccaactggccccagtacaaaggcacctgcttgtgccagagcga

SEQ ID NO: 541382 - DNA, 87 bp, Homo sapiens
accatcaaatccgtgtcggagtccttacagccatccgggtgacctgcataggttcctgcggggtctccaacaaggctaatgacacag

SEQ ID NO: 541383 - DNA, 100 bp, Homo sapiens
attattctgcaagacaaagggaagaaataaaattttcccatactgagcatactccaaatgcttcttccagttcatttttcagccatcagttcaagagcca

SEQ ID NO: 541384 - DNA, 90 bp, Homo sapiens
catccctccattcctggcctatggcgagaaaggctatgatgttgccgatgactatatccacaccgcagcctgcttacatagcctggcttt

SEQ ID NO: 541385 - DNA, 74 bp, Homo sapiens
tcgccttcagccaccatggggaatgggatgaacaaggactggttgccataaaggaagcccacgacatagagacc

SEQ ID NO: 541386 - DNA, 100 bp, Homo sapiens
gcaagcacgggaagaagcagctggacccgctcaccatctacggcatccggtgttcagcagactgtacaggatctttttggcagagccccaagtaaagctg

SEQ ID NO: 541387 - DNA, 50 bp, Homo sapiens
ggaagtggatgcctccatttttaagttgcatccaagaattgatgcccgga

SEQ ID NO: 541388 - DNA, 87 bp, Homo sapiens
gaaattgttcagttcttctcagatgatcctaccagacaatatgaaggaccattacatcactatcgaccacagcaggaatcaccatct

SEQ ID NO: 541389 - DNA, 100 bp, Homo sapiens
cgttcacctcggtgtctgcagcaccctccgcttcctctcctaggcgacgagacccagtggctagagtgatcagcagctggactgtgccttggacctaatg

SEQ ID NO: 541390 - DNA, 100 bp, Homo sapiens
ctggaatcgcccaagtccctctactcgcgaggtacaggtttgcagattccgccagcagcacagcaagctctacagatgagtggctctttggcatttggtg

SEQ ID NO: 541391 - DNA, 100 bp, Homo sapiens
aagtgaatgactccaacgaattaggtggtctgactaccagtggctctgcagagggccagtgtcgttattatccttgtggagtaatagaatcaatactgcc

SEQ ID NO: 541392 - DNA, 74 bp, Homo sapiens
gctttacaagaaaaccacctaaatatgaaagattcatcaggccaatggagccagcaccgctctttgaccttgcc

SEQ ID NO: 541393 - DNA, 82 bp, Homo sapiens
aaatcacattggaccctcctcccaactgtaggtgtcagctgtgatgcatgtttaaaaggaaattttcgaggtcgcagatata

SEQ ID NO: 541394 - DNA, 75 bp, Homo sapiens
aaaaatttaaacaagaatccactgttgctactgaaagggttgtggcagcactgcctgaaggtatgagaccagatt

SEQ ID NO: 541395 - DNA, 80 bp, Homo sapiens
ggagatcccaggcggtgacagagtggagccatggctagagatgtgaagttcatttccaatccgccctccatggtggcagc

SEQ ID NO: 541396 - DNA, 75 bp, Homo sapiens
tcattgggcaaaaacttgtgagggcgaaggtcgtattgaatggtgttgtaggaggatttgacagctaaggatatt

SEQ ID NO: 541397 - DNA, 90 bp, Homo sapiens
cacgcagctgactttgtcttctccgcacgactgttacagaggtctccagagccttctctctcctggctccttctcctgaaaaagccgagg

SEQ ID NO: 541398 - DNA, 75 bp, Homo sapiens
cttggcgaaactgaggtctcatggagaagccccggagtattgaggggagcaagaggcaggaaagagcacagactt

SEQ ID NO: 541399 - DNA, 74 bp, Homo sapiens
ctcaacttgctgggccggtgcaactattcgcagtccgagcgcaccatatgaaggcggagtatggaaagttagag

SEQ ID NO: 541400 - DNA, 80 bp, Homo sapiens
aagagctgcttctgtatcttaaggtcaaaatgcagatcttcgtgaaaacccttaccggcaagaccatcacccttgaggtg

SEQ ID NO: 541401 - DNA, 98 bp, Homo sapiens
ggcggtggcatgagggtcggaccccagtaccaggcggtggtgcccgacttcgaccccggtatggacctgtctgccaatcaggacgaggagaccgacca

SEQ ID NO: 541402 - DNA, 100 bp, Homo sapiens
tacagaagatgctgaagctgaggacacacccaggaaaagactcaggacggacaagcacagtcttcggaaggattcagagactgtttttgatattcagaat

SEQ ID NO: 541403 - DNA, 83 bp, Homo sapiens
cggaactggagccgaggcgcaggtggcgctgggacttgaaagaggagattgatattcgactctccagggttcaggatatcaag

SEQ ID NO: 541404 - DNA, 101 bp, Homo sapiens
ggagaacagaataaaaaacagccccgccaagactatcagctgggattcactttaatttggaagaatggctctgctgccatgaaggtgaagattaagtgctg

SEQ ID NO: 541405 - DNA, 100 bp, Homo sapiens
ccctgtggggcaaggtgaacgtggatgaagttggtggtggggcaagtccgtgggcatcatgttgaccgagctggagaaagccttgaactctatcatcgac

SEQ ID NO: 541406 - DNA, 149 bp, Homo sapiens
gttgtgagaggctcagagaaagcagagggtgagatggatgagtccagcattctaagacgaagagggctccagaaaacctcggatcaattctcagctggtggcacaacaagtggcacaacagtatgccaccccaccaccccctaaaaagg

SEQ ID NO: 541407 - DNA, 88 bp, Homo sapiens
ccacttcaaaatcagacctctgtggcagcattttttccagaacacaaaaggtgtcatgtgattctctgagggagcagctgcgtgagtg

SEQ ID NO: 541408 - DNA, 100 bp, Homo sapiens
ggggctgccctcccctgcgcactcccctcgctgcccgggcccggagcgcagcgcggccgcacagggaaacactactatgaagtatcctgtcatgaccaag

SEQ ID NO: 541409 - DNA, 100 bp, Homo sapiens
agggagatcttcttcttttcttaactggtcaagagggtggagagattcaaccagttagcgtgaaagttggagataaagttcttctcccagaatatggagg

SEQ ID NO: 541410 - DNA, 100 bp, Homo sapiens
cgagatttgggagagacgctctgaactgactgccccgcatcaccggagcgtcccagctgcgaggagagcccaatgacgaaagtggagctaacgtggatgc

SEQ ID NO: 541411 - DNA, 49 bp, Homo sapiens
gtgaccccctggagctggtggcgacaggagcctacagcaaacccaccct

SEQ ID NO: 541412 - DNA, 75 bp, Homo sapiens
accttcctggacaccatcgccacccgttttgacggaacacgaggtgtgattgcctatatcagttcttccagctca

SEQ ID NO: 541413 - DNA, 100 bp, Homo sapiens
agcgactctcggtcgtgcagcggcggcgagcgctcgcgagcggctgcgggacgcgaggtttccgggtcagtcatatcatttggatcaaaaaatagaacaa

SEQ ID NO: 541414 - DNA, 96 bp, Homo sapiens
cagacagtgacgattatagcacaatatcaacctgaagaaatgtgtgctatactggccggaaaagagagggatatatggaaaagttgaggttctggt

SEQ ID NO: 541415 - DNA, 50 bp, Homo sapiens
gcgagagggagccgcagctgatgtcaggtgaacttcacggtagaccagat

SEQ ID NO: 541416 - DNA, 101 bp, Homo sapiens
agccatctggcacgccttcaccgcactcgaccaggaccacagcggcaaggtctccaagtcccagctcaaggaatatgatgaaccaatcttgaaacacctgc

SEQ ID NO: 541417 - DNA, 100 bp, Homo sapiens
cgcgcaatggcttaaaggtggtagttgaggagttgctggccaaaggggcctgtgtacttgctgtagatgaaaatggactatgctgagaaggaaaatacca

SEQ ID NO: 541418 - DNA, 75 bp, Homo sapiens
gcttaactcatatatttaacccccctccaaaaatcccctgttttcatagcccaagttggccaagacctggtctcc

SEQ ID NO: 541419 - DNA, 97 bp, Homo sapiens
cagcgccatggagccgggggaggtgaaggaccggatcctggagaacatctcgctgtcggtgaagaagggggagtaaaacttggattgggagatttca

SEQ ID NO: 541420 - DNA, 100 bp, Homo sapiens
cagcatgcctcaccaagtcacatgacaagcagctcctgttccaaagagtgcacttattcctgtaattcccatcaccaaatcaacaggctcccggttccgg

SEQ ID NO: 541421 - DNA, 108 bp, Homo sapiens
aggtggaacagattcagaaggagcaggattaccaaagggtactgggcctaatcgctacgtgcctctttggctatgatgcctatgtcaccttccccgttcggcagccaa

SEQ ID NO: 541422 - DNA, 97 bp, Homo sapiens
attcccggaatcagacggtgccccatagatggccagctttcccccgagggtcaacgagaaagagatcggagaaatacgaatgtgctttaaagcgagc

SEQ ID NO: 541423 - DNA, 100 bp, Homo sapiens
gctcgtgtagccttctctgtggcacgcgctgggcagaaaggctaccatcaccgcactgagatcaacaagaagtgattcgcctttgccagtctcatctcgt

SEQ ID NO: 541424 - DNA, 75 bp, Homo sapiens
cggagcttctcagaagacagagggttttcttttgagacatgggaaagcggaaccaccaaaaggagtgatgatcaa

SEQ ID NO: 541425 - DNA, 123 bp, Homo sapiens
gatcactccaagaagaacatcggcaatgggattatttcctccccactgactggaaaggtgtgtttcagtacattcaagaggtgcgagaaattctgcacaacttgcagaacaggatgcaaaagg

SEQ ID NO: 541426 - DNA, 74 bp, Homo sapiens
tcgatggcctactggggataacattcatgcagaacatcagctgccactgcagagccccgccatggaagacacgc

SEQ ID NO: 541427 - DNA, 90 bp, Homo sapiens
ccttcatgcccaaatcccggaaactccagcgtgtctccagccgtgcccagctcaacattggcaatgtgctccctgtgggcaccatgcctg

SEQ ID NO: 541428 - DNA, 83 bp, Homo sapiens
aaatgagcagaaaggagttggggcttgatgaaggcgtggatagcctgaaggcagccattcagatccaggatgagaagactgat

SEQ ID NO: 541429 - DNA, 107 bp, Homo sapiens
taggccgggccctgccagggagcaagtctgcatcgcagaggccaggggggggccctcagcctcttggccttgaacgggctgttcatcttgattcacaaacacaacct

SEQ ID NO: 541430 - DNA, 115 bp, Homo sapiens
ctggctatgatgatagccaacctgataaaaaagctgctgaagggtatgtgattggcagctgtattaaacacattccaatcgcaggacgagatataacatattttattcagcaact

SEQ ID NO: 541431 - DNA, 100 bp, Homo sapiens
gctagcaggaatgcttactgttgcgtggttcgttattaacaggatgctgaaatttctggaaaagacaatggaaatcaggggcaggaagagaacagtgtgg

SEQ ID NO: 541432 - DNA, 100 bp, Homo sapiens
gagggatcgacaagcaagcagatgccccccagtgatgctgaaggtgacccgctggccttgctgtctctaaccctgatctgatctcctgccttgagcaaat

SEQ ID NO: 541433 - DNA, 118 bp, Homo sapiens
aattatgccctgttggttccaatgctgggattggctgcttttcgctcttatcacgcgatggcatccactgtggaaggaggcgacacagctctgctcccagaattccccagggggcccc

SEQ ID NO: 541434 - DNA, 86 bp, Homo sapiens
agaattgaaccttcaccatataagactttgagaatcactacaagaaaaactccttgtggtgaaggttctaagacgtgggatcgttt

SEQ ID NO: 541435 - DNA, 50 bp, Homo sapiens
cttcttccacatgaaaaggataagttttacagaccactgaacattcggat

SEQ ID NO: 541436 - DNA, 100 bp, Homo sapiens
tttctggaatgtcattatcagacacaatgtttccaacatggctagatccatcagaaactgaagccgtggagaacgctctcggggcctttgccacttcttg

SEQ ID NO: 541437 - DNA, 50 bp, Homo sapiens
aaaactggatccagaactccattgcctgtccatcgtcatgggggctgtgc

SEQ ID NO: 541438 - DNA, 75 bp, Homo sapiens
cttcttgaatagcccagtgaattcatctaaacagtgtgattcttggagcaaatacccggccagacttggatctcc

SEQ ID NO: 541439 - DNA, 74 bp, Homo sapiens
atcgccttttgccacctttccctttatttccggaggagatcctgtcggcctgctgggctttcgacctgcaggag

SEQ ID NO: 541440 - DNA, 96 bp, Homo sapiens
tgtagttcctgagcatgaggctcccagcagtgaggtaaccaaggagcagtgaacagcagctactacagtagtggaagccgtgcatctatgggcgtg

SEQ ID NO: 541441 - DNA, 100 bp, Homo sapiens
caggcaccagacttgggatcagttataaactctagagtggtttctccatgtctgaatgtgctttcctggttgctgtttgtcagtgacactgatgtactgg

SEQ ID NO: 541442 - DNA, 83 bp, Homo sapiens
cggggagcggagccatggcctccggtctttgagagctggatgcaccattggctcctgtttgaaatgagcaggcactccttgga

SEQ ID NO: 541443 - DNA, 100 bp, Homo sapiens
ggaaaattgatgagaatgagaacaatggagtactcaagaagttctgtcctcatcacctgagacagagaagagtccatgagaatcaacattttctgaggac

SEQ ID NO: 541444 - DNA, 75 bp, Homo sapiens
cagccagctggacgagggcaagtgcgcttacatccgagggtttggaaatcccttgtctccaggttgctgggattg

SEQ ID NO: 541445 - DNA, 80 bp, Homo sapiens
atctcatcgccaccatctttgtctttgcagtggtcatctatttccaggatcagtatggaaaatttaataaagttccagag

SEQ ID NO: 541446 - DNA, 74 bp, Homo sapiens
ctgtctggagagaagcagcggatcagcagagatttctccacccaggtgaactcctccctcacctccccgacggg

SEQ ID NO: 541447 - DNA, 90 bp, Homo sapiens
gacattttggtcaataatgctggagtgaataatgagaaaaactgggaaaaaactctgcaaattaatttgcatgttcaaaagaaagctgca

SEQ ID NO: 541448 - DNA, 90 bp, Homo sapiens
aggaggattttgtaatggaagggcatggcaagactccacctcctggtgaagaaagcaaacatggtttgagtccagccaatgacactggag

SEQ ID NO: 541449 - DNA, 50 bp, Homo sapiens
gctgaacattactcttccagaagagacacttctgagaaattcatcaggct

SEQ ID NO: 541450 - DNA, 100 bp, Homo sapiens
gcccccccagtctcggagatctcagaggcaccgactgggaggtgccgtgctactcatatgggcagaagctgtccaaactggccatcctgaggatcgcctg

SEQ ID NO: 541451 - DNA, 50 bp, Homo sapiens
ccaagatcctcgcagtggacagcggagaagaaatgggtgaccgttggtga

SEQ ID NO: 541452 - DNA, 100 bp, Homo sapiens
ggaaaacaaaagctgctacttatggaagatacaaagggtgacttaagagattaaaattaatttggttgctgttggttctgaacaaataatgagttctttt

SEQ ID NO: 541453 - DNA, 75 bp, Homo sapiens
tccattgtctggcaggaggtttttgatgataaagcaaagcccctggatgaaacactgaagaaagcccttacaggt

SEQ ID NO: 541454 - DNA, 87 bp, Homo sapiens
gaaatcacccaggataacccctccagcggcaaagccaggctctccccagctttctgctaagcgagagactagtggagaaaaatccag

SEQ ID NO: 541455 - DNA, 75 bp, Homo sapiens
tcgccgtcagtatttgaggagaaagcatttggttgaattgaccaaagcaatggtgatggagaagcctagtcccct

SEQ ID NO: 541456 - DNA, 75 bp, Homo sapiens
ttttagggtcctttatatagaagggagacccagtcagaacaatggtccaggataacaaggatgggacatactaca

SEQ ID NO: 541457 - DNA, 83 bp, Homo sapiens
ttgcagatcttcaacaagaggacccaggagaaattcgccctcaaagtcttctttgatgtgaggattggagacaaagatgttgg

SEQ ID NO: 541458 - DNA, 74 bp, Homo sapiens
agacaccagctccgaaatcaccaccaagatcaatgagctgagcaatgttcctgttcctgtcatgctaatgccag

SEQ ID NO: 541459 - DNA, 83 bp, Homo sapiens
ctatgtcgttgatcaaggggaagtggatggggatatgagactttctactcggaatatcctgagtgttgcgtggatgtaaaacc

SEQ ID NO: 541460 - DNA, 100 bp, Homo sapiens
tagaacagaaacaccgtaaaatgaatgaactggaaactgagcagagaaatgcactcggtgatggaaagagagccactattctgaagaacacttggccaaa

SEQ ID NO: 541461 - DNA, 76 bp, Homo sapiens
agtatcgtggacagcagagttgctccaacagcaaatattttttcccagactccaaagctgagctctttcccctgcc

SEQ ID NO: 541462 - DNA, 50 bp, Homo sapiens
aaagaactacattactattaagagatcctgaaggagctagacgagtgcta

SEQ ID NO: 541463 - DNA, 100 bp, Homo sapiens
gatgttggagaactatagcaacttggtatcactaggttctggcctataggaacaagacattttcagtaatggaagaaggagcttccaggctggggaagat

SEQ ID NO: 541464 - DNA, 74 bp, Homo sapiens
aggagccgcacccggccggcccggccccagccccatggacctccgagcagcaaacggggattcagcgtccgatc

SEQ ID NO: 541465 - DNA, 75 bp, Homo sapiens
gtcaatgctgaggtccactactccctcctgaaagaaaggatcttgttcgagtagaagccacagtcattgaaaaga

SEQ ID NO: 541466 - DNA, 75 bp, Homo sapiens
tttgatgactggatggcatccaatggaactcaaagatccaaggttttgccatcaaggggggacgatttaccaaag

SEQ ID NO: 541467 - DNA, 80 bp, Homo sapiens
gagcaacctgcactcctccgtgaggtctctctcctcctgggcgagccgttcttcactaccagcctgctgccgtggcacaa

SEQ ID NO: 541468 - DNA, 100 bp, Homo sapiens
cctggcgctgctggctgcgctctgcccggcgagtcgggctctggaggaaaagaaagtatacctgaggtgcaccggaggtgaagtcggtgccacttctgcc

SEQ ID NO: 541469 - DNA, 50 bp, Homo sapiens
gagtacatgagcattacttgggaccgtagcatcctgagacattttgaatt

SEQ ID NO: 541470 - DNA, 74 bp, Homo sapiens
ggatcgctacggaccttaaaatacccgcaacagccccttcgtcccaagcacaattctgctttcccaggaactgc

SEQ ID NO: 541471 - DNA, 96 bp, Homo sapiens
agactagccactttgcattgactggaaacaatggcatttacagaaagagtcaacagcagtggcaacagagttgtggaaagtaaaaatgtagcccta

SEQ ID NO: 541472 - DNA, 75 bp, Homo sapiens
gaatggagaggaaatacacagaaagcaacgtgtatgaaaatgaccaaacctggaccacccaaaaagccgaagacc

SEQ ID NO: 541473 - DNA, 75 bp, Homo sapiens
agatggcggatctggaggagcagttgtctgatgaagagaaggtgtcgtgaaaactacccctaaaagccaaaatgg

SEQ ID NO: 541474 - DNA, 74 bp, Homo sapiens
cagacctggaagaggtagctcagaaatgtggcttgtcttacaaggtgtaattacttcaagcctccaggatggca

SEQ ID NO: 541475 - DNA, 101 bp, Homo sapiens
cctcaggcaaatagtttttcaccttagagccagcaaggccaaaccgcccagtcacccgacttcccacagtctcagcaggttgttctacccgtcctggccaa

SEQ ID NO: 541476 - DNA, 82 bp, Homo sapiens
aaccggtcaggctggacgtgcacgcagcccggcgggaggataaagaccaccacggtatcacctcttctgggctcaagatgga

SEQ ID NO: 541477 - DNA, 88 bp, Homo sapiens
gaggagtccagcgctcgccgacaggggcctgggctgtcccgagccggcttcagggatgacttcttagggggcaggggaggtagtcgcc

SEQ ID NO: 541478 - DNA, 75 bp, Homo sapiens
ctctttcagcctgcatcatcacaatgccaacacatctgatccagcatcttgactctactgtgcctggatgtagct

SEQ ID NO: 541479 - DNA, 100 bp, Homo sapiens
gcagaacccgggagtaggagactcagaatcgaatctcttctccctccccttcttggtacggttcctggagcagcagaacaagatgctggagaccaagtgg

SEQ ID NO: 541480 - DNA, 80 bp, Homo sapiens
ataatgtcgacctgccggagtcgaggattccagggtcgaacactcggcatctgcatctgggaccgacctcctgggctggc

SEQ ID NO: 541481 - DNA, 90 bp, Homo sapiens
gtgcgctccagcccggcaggcccagccggcagccggcggtccatccagcacctgtggaatcctctcaagaggaacagtcattgtgtgaag

SEQ ID NO: 541482 - DNA, 100 bp, Homo sapiens
ctgccttccttgcagaggccatggaggacgaggagagacagaagaagctggaggccggcaaagccaagtcattgaaattatgagactatcattcaaatgg

SEQ ID NO: 541483 - DNA, 140 bp, Homo sapiens
ggggaacgcatgggaatggacttcagactggtggactgttcatcattctgttgaagaaacgcttaacccaaccagcatctcagacatgtcgaaaaagatgttttgatccctaaaataatgagagaaaaggccaaagagag

SEQ ID NO: 541484 - DNA, 80 bp, Homo sapiens
cggcactgctactgcgaagacagctggcagcttcgagagctgtgcccaggagtgaacaaccagccctacctctgtgagag

SEQ ID NO: 541485 - DNA, 82 bp, Homo sapiens
ttgtggatggacttgctacctcttgggtgaactctagcaattacaagatcttcagtttagatcttggaggcatatcaactgt

SEQ ID NO: 541486 - DNA, 90 bp, Homo sapiens
cgcagcaccagcatcaaactgcaggaagcaccttcatccagatccagctccaggtcccacaggggctcttcttccccacgaaaaagatct

SEQ ID NO: 541487 - DNA, 50 bp, Homo sapiens
aatggaaagccagtaggacacgaaggtgaattcggttccctcaaaattat

SEQ ID NO: 541488 - DNA, 100 bp, Homo sapiens
cgatgccgaaggcgcccaagcagcagctgccggagcccgagtggatcggggacggagagaacacgagcccatcagcctcttcagaagaaacttgactcct

SEQ ID NO: 541489 - DNA, 100 bp, Homo sapiens
ctccttgcgtcccgcctccctgggagctccgcacgggtacgaagatgccctggtgctcctgctcacagaggtgttgaatcgaatccagttcagatacaac

SEQ ID NO: 541490 - DNA, 83 bp, Homo sapiens
aaaaacagtggataattttgtggccttagctacaggagagcttatcacacagactttcagccaccacaatcagctggcacaga

SEQ ID NO: 541491 - DNA, 82 bp, Homo sapiens
tgactttgtgaaaagtcatcagaaacctccacagggtttcgtttataatgtcagcccttatatggagtatcatcctggtgga

SEQ ID NO: 541492 - DNA, 75 bp, Homo sapiens
gcgcccttcggccgcctacttcggaaaaatggctacaaacttcctagcacatgagaagatctggttcgacaagtt

SEQ ID NO: 541493 - DNA, 100 bp, Homo sapiens
aagatcggctgcggcaacttcggggagctccgcctagtctgcagatctccaggggagcccaccagcctagtcaacatggcctcggaagacattgccaagc

SEQ ID NO: 541494 - DNA, 82 bp, Homo sapiens
ctggcagccgcggatctcaccgccgctcagggtacactgaggaggggacggctccgtcttcacattgtgcacagatctgagg

SEQ ID NO: 541495 - DNA, 143 bp, Homo sapiens
gagtaattccccgtttccttcaagagttttcatggattctaatggaatcaggcagttttgtgtccatgtgaacaactgcaaatacgccatgcgagacctagtccacaggcttccaggagggaacaacagcaacaacactgcaa

SEQ ID NO: 541496 - DNA, 97 bp, Homo sapiens
atcggcttgaaattaccaactgctttcctttccctcagcacacagaggatgatgctgactttgatgaagaattcagaaggagctagctgaaataacc

SEQ ID NO: 541497 - DNA, 100 bp, Homo sapiens
aactttggtggtagcaggaacatggggggaccatatggtggaggacccatgggccgtggaggctatggaggtggtggcagtggtggtggtggccgaggag

SEQ ID NO: 541498 - DNA, 82 bp, Homo sapiens
ccagaccattgattcccgactgaagagtgaagacatttccacctggacacctgaccatgtgcctgccctgagcagcgaggcc

SEQ ID NO: 541499 - DNA, 104 bp, Homo sapiens
gagtattcagctcttcacagggggtagaacaagtggtactaggattatacattgtaagaggtgacaacgtcaaaaatattttgattctggggattacaacatgg

SEQ ID NO: 541500 - DNA, 90 bp, Homo sapiens
ttacatcctgctgctgataggttcaagctccggctcccaccttgtctttgtcccgtcattgagagatgtgcaccatgagcctgtgtaccc

SEQ ID NO: 541501 - DNA, 90 bp, Homo sapiens
tttgggttgaaaccaaagaaagaatttaaacctgaaatcagcatgagaagattgaattggttaaaggatctcctggacatacatcctgga

SEQ ID NO: 541502 - DNA, 100 bp, Homo sapiens
cctggggccacccctgggctcaccacggtggagatagtgacaatgtctcaccaaggtgtcagttgtacccgaggcgttctcagcagcagcaagtacctgt

SEQ ID NO: 541503 - DNA, 90 bp, Homo sapiens
tttcgatcagagatcggcggagaccctcgaagtgcgcaaacttgacactcaccctgaccgatccatttgaaccacagcgacgtctccccg

SEQ ID NO: 541504 - DNA, 75 bp, Homo sapiens
ctggacttttggagatgaagtgttgtgcaaatcttactggctgcagaatcctactggatgtccacttggatgtcc

SEQ ID NO: 541505 - DNA, 100 bp, Homo sapiens
tgtggaagacacaaagcctgcgaaagtgctcgggaagagggagagcaaacttggctcagcccacttggattagaagaacaagaaagactccacctactat

SEQ ID NO: 541506 - DNA, 130 bp, Homo sapiens
caggtgtgattctttactcagctgagtgtgccacacaggtagccctggacggcattcagtgttttgagctctgcgtgcctcttgctgtgccctacctggacaaacccccaactccgctccacttctaccg

SEQ ID NO: 541507 - DNA, 107 bp, Homo sapiens
acagctgttccttggccatcccaaagctattctgggggcaacagaggaaccagtgttatccaaggagcagcctgcgttccagtatagcagccacgtctcgctgcagg

SEQ ID NO: 541508 - DNA, 98 bp, Homo sapiens
aacaggggagcaaggtgcaagagtccacaaagggacctgatgaagcgaagatcaagggcaggtaagccccctcccggtttacatctggatgtagtcaa

SEQ ID NO: 541509 - DNA, 101 bp, Homo sapiens
gagcaggcttgcaatattaaaaaagctgacttcatgagaccgaggatctcgttcgttgatcgatgctacatattcagcatgttagataatgaggttggtga

SEQ ID NO: 541510 - DNA, 90 bp, Homo sapiens
aggctgcgttgaggatctttgctcttccatccgcctttgatcgtcttcctcttcagccatccagggctggtgaattaccagatctctgtc

SEQ ID NO: 541511 - DNA, 98 bp, Homo sapiens
aagaacctggcttttagctgaactaaggagaaagtcctacaacagtttggcgtgcaacatggggcttgagaaaggttcgcctctacggaccaaacttc

SEQ ID NO: 541512 - DNA, 96 bp, Homo sapiens
tgctccatcccactactctcaagatacgccaatgcgctcaaaggcaaaaagggatctagtgaaaagccatttgatgtatgcggtcagagaagaagt

SEQ ID NO: 541513 - DNA, 98 bp, Homo sapiens
ggacggggcagcggggacgcggggtctcgcggcgcctggcagcagagaccaccagaagggtgatttgtggagctatgatttcttcagtggtgaatttg

SEQ ID NO: 541514 - DNA, 75 bp, Homo sapiens
cgcccgcgccctccgccggccctcagaatgaagagcttcgaaacttgtctttgtctggccatgtgggatttgaca

SEQ ID NO: 541515 - DNA, 83 bp, Homo sapiens
cccgggaccgccaggccaccaccggccgcctcagccatggacgcgtccctggagaagggctggaccccaatggagaacaggtg

SEQ ID NO: 541516 - DNA, 82 bp, Homo sapiens
ctggggttctgagactccctgtcccggaccgcagatcaatgtccgagttaccaccatggatgcagagctggagtttgcaatc

SEQ ID NO: 541517 - DNA, 82 bp, Homo sapiens
taatgaagaatccgaaaaactgagaggcaaacaaagggactcactcaaaatgagacaagtggtctcacgtgtgaaacatggc

SEQ ID NO: 541518 - DNA, 75 bp, Homo sapiens
acttcagcctgggctccgacactgctgtaaatgccgccatggaggattgctgtggaaactgcagcgacagcgagg

SEQ ID NO: 541519 - DNA, 89 bp, Homo sapiens
gtccttctccactttcgccagcccgtgccgcgagcgcggcctgcaggagatccagagacaatggccccgatgggatggagcccgaaggc

SEQ ID NO: 541520 - DNA, 100 bp, Homo sapiens
cacaactcataacagttgatgaaaaattgaaatttaaaagcctgttgattcaagaactttctaaagtatttccggaagacatggctaagtatcgaagcat

SEQ ID NO: 541521 - DNA, 83 bp, Homo sapiens
cggcgagcgcgagcggcgcgagaaagacatggatttgattgacatactttggaggcaagatatagatcttggagtaagtcgag

SEQ ID NO: 541522 - DNA, 50 bp, Homo sapiens
tatcccgcctcatttacagtgggaggtcatcagactagtgctgagtcttg

SEQ ID NO: 541523 - DNA, 98 bp, Homo sapiens
atgaggcaagaagctttgggacatgaacctagagtaaatatgtttccatttggtgttggagcgggccggagagaagtagagtgggctgcgaggagaag

SEQ ID NO: 541524 - DNA, 51 bp, Homo sapiens
tggcaaaccagatatatgacttggataatccgactgtggtagttgaagacc

SEQ ID NO: 541525 - DNA, 82 bp, Homo sapiens
ttggcgtgtccctgcagcgaaggatcctggtgtcgtgaaaactacccctaaaagccaaaatgggaaaggaaaagactcatat

SEQ ID NO: 541526 - DNA, 82 bp, Homo sapiens
tcctccaccaggccaaagacttcggcagtgcagtctttgcaagccacatttggaacttttgagtccatcttgagaagctccc

SEQ ID NO: 541527 - DNA, 80 bp, Homo sapiens
gttgcacatccccacatcaatgcactgccaatggtaagcagaattttgtacagtttctgtacagcattcaaacgttcttc

SEQ ID NO: 541528 - DNA, 100 bp, Homo sapiens
gcaatgagccgacccatcttgtacagcaactggctgtcaaaggtgaaaggtgtagcagtcactcggcctacacccacagcatcgaccttgtgaacccagc

SEQ ID NO: 541529 - DNA, 73 bp, Homo sapiens
gaacattgctgtggattcccagaaattgcatctgatggtctcaagggtcgtgtgtttgaagtgagtcttgctg

SEQ ID NO: 541530 - DNA, 83 bp, Homo sapiens
gtcgcggtgggtcctcgcttgcagttcagcgaccacgctggagcagatccgcagggacatccgagacttccggtctagcgcgg

SEQ ID NO: 541531 - DNA, 82 bp, Homo sapiens
cccacttgttcgcggcctatagaattaaatgtgagggagtctgacgtaagagtttgtgatgagtcatcatgtaaatatggag

SEQ ID NO: 541532 - DNA, 100 bp, Homo sapiens
gccgccctgggccgggccccaccggacgacggtgtgaagggagacctgctgattgacatcggctctggccccactatctatcagctcctctctgcttgtg

SEQ ID NO: 541533 - DNA, 100 bp, Homo sapiens
accgtgaccgagagcgtgaccgagagcgcgaatatcgtcatcgttagaaggtgtggaaacaggaagagaactagaactggaagtaaagcattgaagatgt

SEQ ID NO: 541534 - DNA, 74 bp, Homo sapiens
agcaggctgagcgatacgacgggccgcgatgggcctcttggaacattggtgtgttcatctgcattcgatgtgct

SEQ ID NO: 541535 - DNA, 78 bp, Homo sapiens
ttcaacttccagggcaaggccaagggtgttaaataccacattatttgaaagctgggagatcgttggaccttacccttc

SEQ ID NO: 541536 - DNA, 82 bp, Homo sapiens
ccagcaccgcagatgttgtcaaggtggcctaccaggaggccaggggtgtcgccatgagcacctggtgaatggccggatggac

SEQ ID NO: 541537 - DNA, 75 bp, Homo sapiens
gtgacgaggacgaggaggcagccacggggcccctggcaaccatgtccaagggacctgcagttggtattgatcttg

SEQ ID NO: 541538 - DNA, 101 bp, Homo sapiens
ggtggagccaaggaaacaggatgctgatagtctccagcgggcctggactgtgggctggtgtgtggaactgatcctcctggccaacttcttggcccagacag

SEQ ID NO: 541539 - DNA, 100 bp, Homo sapiens
cgccgggaggaccgagcctaagagggcagccgcctgaaggaacgcgacggcggcgcccgcaggcatcaagcatgatggaaccatgtgtgatacctgccgc

SEQ ID NO: 541540 - DNA, 99 bp, Homo sapiens
gttcaaccaggtggagagtgataagcttcgaatggacagagccatccctgacacccggcatgaccagatggagagcaatacatcatcatctttggagaa

SEQ ID NO: 541541 - DNA, 100 bp, Homo sapiens
ccaccatggaagggctcctgtctccgatgaggacgaagttggcaggatcttgtggccagtggggtagtggagtatattgataccctggaagaagaaacag

SEQ ID NO: 541542 - DNA, 75 bp, Homo sapiens
gtttttattgctctttatcagtctattttgggagaaaaggtaccagaaagttactgtggcccatgtcctaaaaac

SEQ ID NO: 541543 - DNA, 100 bp, Homo sapiens
ggggacccgggcggagttggacacggtgtgcagacacaactacgaggtggcgttccgcgggatcttgcagaggagagggacggatgagcaggccatcatt

SEQ ID NO: 541544 - DNA, 82 bp, Homo sapiens
cagcaagatgcggaggctgcctcggcggagcagaggaaccacacgctgatcatggttgtgaccgagattcccgacgagagag

SEQ ID NO: 541545 - DNA, 89 bp, Homo sapiens
acaagactgtaatcaggatatggaagagatgatgtctgagcaggaaaatccaggatggcaccaagcattatgaaaagcctaatggacca

SEQ ID NO: 541546 - DNA, 76 bp, Homo sapiens
ccggagcgcggagcccggctcccgcaccatggaggaggacgacagctacgccctgctgctgaggccgcgccctccc

SEQ ID NO: 541547 - DNA, 76 bp, Homo sapiens
caaccattggtctgcaggacatcactttagatgatgggtctgaatccagggaaagctattgcagagatcaagaaaa

SEQ ID NO: 541548 - DNA, 90 bp, Homo sapiens
gcgcaggcatagcgatttctcttcgccgacacgaggtgaccatctgcaattacgaagcatctgccaacccagcagaccatagggtccatc

SEQ ID NO: 541549 - DNA, 100 bp, Homo sapiens
tagagaatcaaccttctgaattcaggaggatagaatctccactgaaacatcagttcctggtcacctggcacaccatcgacgccgatgctccagagctcag

SEQ ID NO: 541550 - DNA, 75 bp, Homo sapiens
ttgcattggcagcaccagttatgtccatggtgacatacttaggactgagtaaggcctcaggagtgcaagtagctg

SEQ ID NO: 541551 - DNA, 50 bp, Homo sapiens
tgtaatcccagcactttggtaggctgaggcaggcggatcacaaggtcagg

SEQ ID NO: 541552 - DNA, 100 bp, Homo sapiens
cggaaagatataccctgtatatttaggactcattctgatgaaggaaagagcgtccctgtgcagctgcgtgtccttcagttctttggctctgattccgtgt

SEQ ID NO: 541553 - DNA, 100 bp, Homo sapiens
acagatggccagcttccaagaatcggttggtgagaccagctcgcagagtgtggttgtagctgtggacagaaaaattagacactatgtgtccattatcaga

SEQ ID NO: 541554 - DNA, 83 bp, Homo sapiens
atttgttaaggattccaagtaactcttatttgaaaaaagcttggccagaccacaagcgggaatgcaaatgccttaaaagctgc

SEQ ID NO: 541555 - DNA, 75 bp, Homo sapiens
ctgttccaaagcctcctggaccgtccaagaaatatgggacacagcaggacaggaacggttccagtctctcggtgt

SEQ ID NO: 541556 - DNA, 75 bp, Homo sapiens
tacagccaggtgaggaagtggagatagctgagctcactacagtgaatattacttcagtgtagaaaatttggaacg

SEQ ID NO: 541557 - DNA, 90 bp, Homo sapiens
ttacaacttcccttccagcctatcgagctcaactccttcaccaagatgcctgtgaggagccaccaacatttgaagctatggagctcattg

SEQ ID NO: 541558 - DNA, 75 bp, Homo sapiens
tctcgtgggcagcctcccctcggaactcgggcatcatggcctcagatcctgtttgaccaaactcagagatcaatt

SEQ ID NO: 541559 - DNA, 98 bp, Homo sapiens
gtggcctcgttacctgcaggtattgggagatccacagctaagacgccaggacccactggaagcctagaaatggatgaatttcacccattcatcgaggc

SEQ ID NO: 541560 - DNA, 100 bp, Homo sapiens
gaatagactccatctatccatatgagttcacacaaaagatgttggacaatttctacaattttgcttcatcatttgctgtctctcaggcccagatgacacc

SEQ ID NO: 541561 - DNA, 80 bp, Homo sapiens
ccgaggaaggggctctgggagactccttcatgagctgctgtgaagctccaccatgaggcgaggtggatggaggaagcgag

SEQ ID NO: 541562 - DNA, 96 bp, Homo sapiens
gttgctcttaatggcagagaggaaagtcccttattgattggccaacaatcaacaggtgtcatggagaaactccagctgggcccagagattctgcag

SEQ ID NO: 541563 - DNA, 82 bp, Homo sapiens
gaatcctgcggcagaagccgagttcaacatcctcctggccaccgactcctacaagtaatcaagatgattaccaactggttcg

SEQ ID NO: 541564 - DNA, 75 bp, Homo sapiens
gacgcgagggggacgctgcctggccgcgccattgatctgatgtacggaggcatctactgttttctgtgccaggac

SEQ ID NO: 541565 - DNA, 100 bp, Homo sapiens
cgccctgggccgggccccaccggacgtggatatcaaagtattgcagagtgccttagcagccatccgacatgcccgctggttcgaggaaaatgcttctcag

SEQ ID NO: 541566 - DNA, 100 bp, Homo sapiens
cagagactgatctttgctggcaagcagctggaagatggacgtactttgtctgactacaatattcaaaaggtgctaagtgtggtggctcacacctgtaatc

SEQ ID NO: 541567 - DNA, 75 bp, Homo sapiens
caaacattcgtctcggaaaccccgcctcttacagtcacgaggaagtgggaaaactcttgcctttgccatcccaat

SEQ ID NO: 541568 - DNA, 99 bp, Homo sapiens
atatcagatgacaagatactagaagctgtaacattagatattgataatacagggagtcctctctgatatcaacttgaagaaaggtgaatccgagtgcca

SEQ ID NO: 541569 - DNA, 100 bp, Homo sapiens
caggtggcctgggagtagatattgtcctagatgctggaggaagcagtgtggttcctctccaacatcactgcaggaaatcagcagcaggtacaggcagtaa

SEQ ID NO: 541570 - DNA, 100 bp, Homo sapiens
ttaacttcgcttccgctggcccatagtgatctttgcagtgacccaggttcatctctaacaagtatttagtgaaacgacagagcagagactatgatgtgga

SEQ ID NO: 541571 - DNA, 51 bp, Homo sapiens
tctaaaggaggttttaaacagtataacagtattctaccttgtaaatactgt

SEQ ID NO: 541572 - DNA, 75 bp, Homo sapiens
tgctaatgagatgattgaggcagccaagtgagaaggacgttgaagagtgggctcggagatgacctggtgcaggca

SEQ ID NO: 541573 - DNA, 100 bp, Homo sapiens
caagaaaatccacaagaacgcactttcctcccagagacctgtcggccatggagcctaatgatagtaccagtaccgctgtggaggagcctgacagcttgga

SEQ ID NO: 541574 - DNA, 76 bp, Homo sapiens
aaaaaatatatagatcagaaatttgtattacagggattaatgaaaatcaagttccatcctcagacaagaggtaaag

SEQ ID NO: 541575 - DNA, 90 bp, Homo sapiens
aggagaaggcagcagccacccccaagaaggcctggagctgctgaagactgctattgggaaagctggctacactgataaggtggtcatcgg

SEQ ID NO: 541576 - DNA, 100 bp, Homo sapiens
ttcttcagagggcaatgaaggcacagaaatggaagtaccagcagaaggcttcagggatgacttcttagggggcaggggaggtagtcgcccaggcgaccgg

SEQ ID NO: 541577 - DNA, 100 bp, Homo sapiens
gctcaacccctgtcacctggtcaccatgatgcatactattgggaagaagttacctgcaactacagcaactccagactcatcaaaaacagaaatggacagc

SEQ ID NO: 541578 - DNA, 100 bp, Homo sapiens
ctgaggctctggaacttctgcccagctctccttggtggagtattgctcctggaaaatccaaaaggtgacaataggttggaccttttaaagctgaagagtg

SEQ ID NO: 541579 - DNA, 98 bp, Homo sapiens
ctcagtcactccagctccacgggcagacacctgcacagagaaaacggtccggatgtaccccttccagattcacagcatcgctctctccacctttgcct

SEQ ID NO: 541580 - DNA, 99 bp, Homo sapiens
aaaagtgaaggatgtaatagatcgtggcccttcaatttagaagagattaagatttgttcccgacaaggagttttctggttcagaccgtagacagagagg

SEQ ID NO: 541581 - DNA, 75 bp, Homo sapiens
cagcaagaaagaccatcaagtttaccagccaaagaactgccaactctgaaagataatgatttcattaatgagggc

SEQ ID NO: 541582 - DNA, 98 bp, Homo sapiens
cgggtttgatgctgttgaaggacatctgtctcctctgggtggctactctgtcaccgccagattctggcttcagccttgtcatgaaccacccagcctgt

SEQ ID NO: 541583 - DNA, 100 bp, Homo sapiens
ggactgtgggcatggaatgaaaaatatattcggtgctcttcgaactggtgcttatatggtgtacattttgatgaccaaaggcctgaagcagtcagtttgt

SEQ ID NO: 541584 - DNA, 100 bp, Homo sapiens
aacctcacagaacacagcaaagagtcactcaagggaaaggattaatgccagatggtaccagcagatttacttgcaaaggaaagacaattttgcattacat

SEQ ID NO: 541585 - DNA, 100 bp, Homo sapiens
gacgcagtcagctgcgtgattcccgtgattgcgttacaagctttgtctccttcgacttggagtctttgtccaggacgctgcagaaccttggcctgaaaat

SEQ ID NO: 541586 - DNA, 83 bp, Homo sapiens
gatactgagcttcttcctatttgccatgggtgaccttcagatggcagtgctttcatttgaaaaagatgatgatcataatggac

SEQ ID NO: 541587 - DNA, 82 bp, Homo sapiens
cgagatctagaatcaactgagagagatgcttaaaaatcaccagttactttaatgaggggattcccgaagtcttccgttttct

SEQ ID NO: 541588 - DNA, 100 bp, Homo sapiens
ggactgtgcatctttatgataattggatcaaagatgctgcgcccttctgccaggccctgctggaagagctggagcacttcgagcaatcggacatgcctaa

SEQ ID NO: 541589 - DNA, 100 bp, Homo sapiens
ctgccaggagggtgcctcccgccagtatctgatgaaggtaagaggtgaggacaccagtgatgaattctgaagcaaaagttctggtgcctgggattcctgg

SEQ ID NO: 541590 - DNA, 123 bp, Homo sapiens
acgccgccgggcgcttctagtcggacaaaatgcagccgagaactccgctcgttctgtgcgttctcctgtcccagttgagcaacttgcatcttaaggaagagaaaatcaaaccagataccaatg

SEQ ID NO: 541591 - DNA, 100 bp, Homo sapiens
cccgcacggatgccgaaggtgaaggcgctgcagtgcgccctggcgctggagatcagctcaactggattatggacagaacttggaaatattgagaataatt

SEQ ID NO: 541592 - DNA, 90 bp, Homo sapiens
ggaagaaaaatattccacgcatcacggttgcataccctgtcctgagggcgcggcacggagtgcatgcgggccgctgccatgacgaccgcc

SEQ ID NO: 541593 - DNA, 100 bp, Homo sapiens
gaaggataagtcgaaggggaaggcgcctgaagaggacgaagggcaattgaaggaacagactaaaaatcgtgtcctggaaggaaactacaggtactaccag

SEQ ID NO: 541594 - DNA, 75 bp, Homo sapiens
acatcatcccatcgggagatgctcatcagacaaaacttgccaatggcacttccagtatgattgtgcccaagcaac

SEQ ID NO: 541595 - DNA, 115 bp, Homo sapiens
gcgatggcgcagaaaccccgttgacaaggcactgctttttcatgacggtcatcatcagatttgaaatatttaaagtggatacaaaactatttcagcaatgcagacaattaagtgt

SEQ ID NO: 541596 - DNA, 96 bp, Homo sapiens
gtggccatgctggccaagcagtctaccagattgccaaggaatcatcgaggacgtcatcctgctgggtgcgcctgtggagggagaagccaagcattg

SEQ ID NO: 541597 - DNA, 101 bp, Homo sapiens
gcgcccgggaggaaggaacgaggcaaggagctaaagcagcgtgcgttcagccctggggttaatgttgaagaaggaaaatgcggaagtcgtcatttgacaag

SEQ ID NO: 541598 - DNA, 75 bp, Homo sapiens
ctcgggagccgtggccctgatccagacctgggcagagctccctctttgcccactagcagggcattagctggtgct

SEQ ID NO: 541599 - DNA, 98 bp, Homo sapiens
aggtggccacactggagaggagcctgcaggccaccgagagcgagctccgggccagccaggtagatgatgagctggagatcaaggcctactatgcaggc

SEQ ID NO: 541600 - DNA, 83 bp, Homo sapiens
caggccgctctggaccgtctcaaggtgtttgacggcatcccaccgccctacgacaaggtctatgcctctcagcgaatgagagc

SEQ ID NO: 541601 - DNA, 90 bp, Homo sapiens
tcctggcagcccgcagtgacagctggagtctggctaacttgtcttccactaaagagttggacctgtcagtgaacttggagaaattcccac

SEQ ID NO: 541602 - DNA, 75 bp, Homo sapiens
gagagactgccatgaagcaaggaagagacttccaccttaggatagtgttgcctgaagatttacaactgaagaatg

SEQ ID NO: 541603 - DNA, 96 bp, Homo sapiens
gctgttgccatgaggcgaggctagggaggacctcacttccccggggtgtaataatgttaactgaggggtctaaattatggataataatggaatacc

SEQ ID NO: 541604 - DNA, 100 bp, Homo sapiens
cttgtccaggcgggcctcccgtttctggctccgggctgagcttcctggagaagaggaaggcaaccacagttgtgtgcccaatgcagagacctcctttcca

SEQ ID NO: 541605 - DNA, 100 bp, Homo sapiens
aaggggacagccgtggagacggagggcagcggcagccggcatcctccctgggcgagaggtacggacattgctgcaggagaagaggttgccatcaagcttg

SEQ ID NO: 541606 - DNA, 74 bp, Homo sapiens
gcagaccatgtggcctacgcccagcatcactgtggatctgcttaccaaaagttgccagacattagtggataagt

SEQ ID NO: 541607 - DNA, 90 bp, Homo sapiens
agactttttgatattcagagccttggaagtcaacactgtcagtggcccacaaactctttaacaacttgaaataaatgtgtggacttaatt

SEQ ID NO: 541608 - DNA, 83 bp, Homo sapiens
cccacatctggaatctggaatgaaatcttccaagtccaaggatgtttatcaggaactgttgccgttattacatcagatgggag

SEQ ID NO: 541609 - DNA, 101 bp, Homo sapiens
cgatccagcctgcggagcctgtggggcaggtacctggtctcactgggctgcatcaaacccctatgtgacttgctgactgtaatggattcgaagattgtgca

SEQ ID NO: 541610 - DNA, 75 bp, Homo sapiens
cacagatcggaacggaggcctgtggcgggcgctaatattgacacctgctcagaagaccagaggaccccgttgatg

SEQ ID NO: 541611 - DNA, 83 bp, Homo sapiens
aggggcgagggctacccgctctttgccgtgacaacaccgttcccccagccgggctggtgctcttacagcctgttccaagtgtg

SEQ ID NO: 541612 - DNA, 90 bp, Homo sapiens
agaaggcggaagtggaggtggctgacgagctgctgggcttccccatctttctggtgacgctggtggccctggtggatgtggacaactatg

SEQ ID NO: 541613 - DNA, 90 bp, Homo sapiens
tgggcggccggccgacccttcctgtcgctgacggcgactgcgggaggccagatcagagcctcctaagaaatatccagaagtcaagccatg

SEQ ID NO: 541614 - DNA, 100 bp, Homo sapiens
aacccgggacccacttcactccagtgcctccgacgcctcctgatgaatcaagccagggaggacttcaaccaggacatcggctggtgtgtctccctcatca

SEQ ID NO: 541615 - DNA, 90 bp, Homo sapiens
gtgaagctcctgggactggatgtgccatctctgtgcttggcagaactggtgaagacctattgcagcagctccccagttaaagatctcaga

SEQ ID NO: 541616 - DNA, 48 bp, Homo sapiens
gcttgtatagcaacatcctgtgttgaaccctcggatacgatagaaaat

SEQ ID NO: 541617 - DNA, 111 bp, Homo sapiens
attgggaccaaggtctccgactatattctgcagcataagaaagtggatgaatacacagacactgacctgtacacagcttcctgaaatgactcatgttcaaacacaacgacc

SEQ ID NO: 541618 - DNA, 100 bp, Homo sapiens
gaactctcagtggtcctacctggggatattatcaaatctactactgttcatggcagtgaaacaaagagtcctcttcgtggaaaagaaaaaaatacgctcc

SEQ ID NO: 541619 - DNA, 100 bp, Homo sapiens
tcctggaaaagttccagagccagccttaccgtggcggctttcatgaggaccagtgggagaaggatgaacgtgaagccagagaaaatgtgaagagagagca

SEQ ID NO: 541620 - DNA, 100 bp, Homo sapiens
gccccgggcggacgccgcagagcgccgaggaggctttcctgctggtggcaaccgcctacgagacactcaagtgttccagaacgtgtggcgggggtgttca

SEQ ID NO: 541621 - DNA, 87 bp, Homo sapiens
tccatcaccctaaaaatcatcccagccacccaggaggaagatcgcttaaaggagagcaaggctgggatcatctgtcagctcaatgcg

SEQ ID NO: 541622 - DNA, 75 bp, Homo sapiens
atacactaggggttcatgttaaccaggccaaacaccgcctgtcttggttagatggctctggattaggattctcac

SEQ ID NO: 541623 - DNA, 98 bp, Homo sapiens
ccccagattcctttgaaaagcatattagaagcattttgcaacgtagtgttgccaatccagcatttttgaaactccccatccccaggatgtcaacctca

SEQ ID NO: 541624 - DNA, 75 bp, Homo sapiens
agaatattgaggacatgctggagtgggcaggcaagcaccggaagcaccccggcggccgcggtaatgctggtggtc

SEQ ID NO: 541625 - DNA, 149 bp, Homo sapiens
ctgcccggagcgcagccggcgcgggcgcgggaccgaggcgaaccgggtgcggagccaatacccgcggcagcagcaccagtgccttgctttccatgacatttcccctcaagcaccaacacattttctggtgatacccaagaaacatatat

SEQ ID NO: 541626 - DNA, 100 bp, Homo sapiens
agaatggtcatgctgccgacaccctgacggccacgaacttccgagtgggtgctggagaatctggtaaaagcaccattgtgaagcagatgaggatcctgca

SEQ ID NO: 541627 - DNA, 89 bp, Homo sapiens
caccgccgcagttgccggtacatcggggatttctggctctttcctcttcgccttaaattcgactgtgccctgtccacggtgcctcctgc

SEQ ID NO: 541628 - DNA, 100 bp, Homo sapiens
cgatctggacctggcctggcggaaatctccaaattggacatccagagcagcattcttgttctgtctacgtcttgaattagaaactatcaagctctgtaag

SEQ ID NO: 541629 - DNA, 96 bp, Homo sapiens
tcccagcttctgaagtttgtggagaagtgttctcccattggggctttactgcagatggtgcgtgacgagagccaccagatcctggcgctgtcagaa

SEQ ID NO: 541630 - DNA, 101 bp, Homo sapiens
agccggctccatctcagcttctggtttctaagtccatgtgccaaaggctgccaggaaggaggagaaggaagccaacatccttttggagccatgaatattgt

SEQ ID NO: 541631 - DNA, 51 bp, Homo sapiens
ggcttcctaaagtgctgggattataggatcccaggagggcactcatggtgg

SEQ ID NO: 541632 - DNA, 88 bp, Homo sapiens
ttcgcagtggtcgcttcttctccttgatggcttccttagcggtatccaactggcctaagcccatgccattgattccatgcctgtcttg

SEQ ID NO: 541633 - DNA, 82 bp, Homo sapiens
atttcaagctgccaaggtggagagagggattacagaaaggagaacaccttatttcaggattcagtggtcccaatttaaaggc

SEQ ID NO: 541634 - DNA, 83 bp, Homo sapiens
caaaagagttgattgaaattatctctggtgctgcagctctatacatcgagatatttccaagcagaaggaatgaagttcgaaca

SEQ ID NO: 541635 - DNA, 100 bp, Homo sapiens
cgctgttcgtgctgctgggattcgcgctgctgggcacccacggagcctccggggctgctgaactttgacctggaccggggcgtgtttccagtagtcatcc

SEQ ID NO: 541636 - DNA, 75 bp, Homo sapiens
ctcccaggtagctgggattacagaggcggggtttcaccaagccaagatcgtgccactgcacttcagcctgggtga

SEQ ID NO: 541637 - DNA, 75 bp, Homo sapiens
gaggtctcatctttgaactactgccggagcttctgccaggatattgactgggtacagacagagaagcacgtgttt

SEQ ID NO: 541638 - DNA, 78 bp, Homo sapiens
agatgcacacccttcctgggtgatggaaaatggctttgtaaagaagtttgaacctaaatctggctggatgacttttct

SEQ ID NO: 541639 - DNA, 75 bp, Homo sapiens
tgaaacatatgttggctgcctctgctggagaagtggaaccaacgtccaagaggcccagaagatactcaacaacag

SEQ ID NO: 541640 - DNA, 98 bp, Homo sapiens
cggaatcccgcgcgctgcccacgattcgcttctgagaactctaagaaggagctgatgtggaggagcagctgagacagttcaagatgacgaccacagta

SEQ ID NO: 541641 - DNA, 75 bp, Homo sapiens
caactcctgccagatcattattccacagaaccaagtcaatcgaaagtcagtcaccaggagactaaagtccatcaa

SEQ ID NO: 541642 - DNA, 75 bp, Homo sapiens
gccgtgaagaccttcaatagcgagctggtcaccaggacaaagacacgaccttcgaccttttcagtatcagcaaca

SEQ ID NO: 541643 - DNA, 100 bp, Homo sapiens
tggccgtggctggccacatcttctctgcagagggcccaggtcagcggtcaagactggcctcaatgcttgactcagacacagaaggcgaaggggacattgc

SEQ ID NO: 541644 - DNA, 90 bp, Homo sapiens
taagacctcagatcagacagaggcttcagcaaccaggagggattgactgagatcttaacaacagcagcaacgatacatcagcaaatcctt

SEQ ID NO: 541645 - DNA, 87 bp, Homo sapiens
taatatttaagaaagaagatgttaactttcagaatccacattcatctcaatggaaggatcctgccttaagtcaacttatttgttttt

SEQ ID NO: 541646 - DNA, 87 bp, Homo sapiens
ggaagagtcctgtgccattaaaaacaacaaggaagctttcagtgttactataacaacagtaccaaggtggctgtgaaaaccctgaag

SEQ ID NO: 541647 - DNA, 98 bp, Homo sapiens
tgggacgcgccccgaggaggagcggggcggcgcaggcggttttgcactgattgcaaaaataaagtcctccgagcatacaatatccttattggtgaact

SEQ ID NO: 541648 - DNA, 75 bp, Homo sapiens
ctctgtcgctcttgtgccctagcaccccgagaaccgtcagtttgagccagatgggacccagacatggagctgcgg

SEQ ID NO: 541649 - DNA, 75 bp, Homo sapiens
cgccgccatccagccaccattccaagttgcaggaagaggcagaggaagaggaagaggaagaggacgtggccgtgg

SEQ ID NO: 541650 - DNA, 75 bp, Homo sapiens
atgtcagctgagaatgaagttagaagaaagcgaattccatcagtgtgatccctcacatccacaaatctctgattg

SEQ ID NO: 541651 - DNA, 100 bp, Homo sapiens
gtctctccctgtcctagctctgtaactgtttacagtatcatgaactgatcactaaatatgggaagttggagcctttggcagaagtggacctaagacccca

SEQ ID NO: 541652 - DNA, 90 bp, Homo sapiens
gccaaaatgggaaaggaaaagactcatatcaacattgtcgtcattggacacgtagattcgggctcggatgaggtgcaggttggacagcag

SEQ ID NO: 541653 - DNA, 87 bp, Homo sapiens
catgttttacgcctctactcagaaaatgaccgactgagaatcagttgggatgaatgggttccggagagcagagtactcaaatacgtg

SEQ ID NO: 541654 - DNA, 100 bp, Homo sapiens
aggagaggcccgcggtgaccgaggcctgggccccggattgtagaaggcatgaaacaaaaaatgtggagtattgaaaatattgccttcggttctggtggag

SEQ ID NO: 541655 - DNA, 100 bp, Homo sapiens
tcatatatgagcgtgagcagctggaggcaacttgtccccagtgtcaccagaccttctgtgtgcgctgcaagcgccagggaagaaggagaaagggccaacc

SEQ ID NO: 541656 - DNA, 101 bp, Homo sapiens
acttcatcctggcactcaccgtcctctctgtctgtgccatcgccaccaatggagccgtgcaggggggcggagcctactatggagagaagggaacaggaaaa

SEQ ID NO: 541657 - DNA, 98 bp, Homo sapiens
tttggcagagagccagctgctgccatctcaaggcccagggcaggctgctggtggtctacccttggacccagaggttctttgagtcctttggggatctg

SEQ ID NO: 541658 - DNA, 97 bp, Homo sapiens
gcccctggtggctgcacagtttctctggaatgcactttatcgctaccgaggacacattcagctaacgtattttagcaggtggagtgaggttgaagat

SEQ ID NO: 541659 - DNA, 100 bp, Homo sapiens
cggcgtctgtctctgcggcttctggttctcacttgtcggtctatcatctcatgaagaactgctgggagacagaggcgtcctttcgcccaaccttcgagaa

SEQ ID NO: 541660 - DNA, 50 bp, Homo sapiens
atatgagtcatcgagagctacctgcctggcccctgcctgacttctcacga

SEQ ID NO: 541661 - DNA, 50 bp, Homo sapiens
cggatctcaccgccgctcaggccacccgcgagtcggccttcgttcacgcc

SEQ ID NO: 541662 - DNA, 98 bp, Homo sapiens
caggtgcccaccgcgcactcggagatgcagccgctgccctgtatgatgagattcgtcagtttcgcaaggcctgtggggaggctcatcttaaaactata

SEQ ID NO: 541663 - DNA, 98 bp, Homo sapiens
ccacaaggacccgaagacaggaaagctgaggacttcaccagcgctgtttcattgtactgacaacctcagctggcatcatggaccatgaagaagcaaga

SEQ ID NO: 541664 - DNA, 101 bp, Homo sapiens
aaatcggtgaagagaggttttgaattcacgcttatggtagtggacagccttttgattgattatcaatttaccttcagcttattacaggaagatgatcgcca

SEQ ID NO: 541665 - DNA, 100 bp, Homo sapiens
ctttgccctcagcatctcccttcatgtctgggtcatgcctctgcagtccttgtccctggctgactcgaaactcaagactgaggtcaccatcatcatcaat

SEQ ID NO: 541666 - DNA, 75 bp, Homo sapiens
atctggaacgggtggccgattactgcgagaacaactacatacagacctaactaccataatgaatgctgcatatta

SEQ ID NO: 541667 - DNA, 101 bp, Homo sapiens
tgatatggatcgagtcggtgatcgagaagcactcccacagccgcatcgagtacatgatcaaggcctggcatgcgtgggcagtgatgaacttcgaagctgtg

SEQ ID NO: 541668 - DNA, 74 bp, Homo sapiens
tgtctgttgcagcttgcgtttggggctttcgacatgacaggtcactagaggtcctaggcctacttacaagcctc

SEQ ID NO: 541669 - DNA, 77 bp, Homo sapiens
ggagaacgaacatcttctggacctttgtccaggccctgggaggagcggggacactgaggacctctctccaaattggc

SEQ ID NO: 541670 - DNA, 100 bp, Homo sapiens
gtcaagcgaagccttgaaaaagctgccctgagacggtgtcccgccgaaagataatgagcttcagtccccaagatctgcgaagacgtttgtgggtgatttt

SEQ ID NO: 541671 - DNA, 100 bp, Homo sapiens
ttatttccagggagtacgtcttgataactgccactcaacacctcttcacgtagctgaggttgtttttcaccattcagaacattgcctgaagcaggtccac

SEQ ID NO: 541672 - DNA, 96 bp, Homo sapiens
ctgagctgaaggcacttagtgcccacaaccgcaccaagaagcacgacctgctgaggctctgtggatagcaactggatcgtgggtgccacgctggag

SEQ ID NO: 541673 - DNA, 100 bp, Homo sapiens
cgggaatgctgctggagatagacaactctgagctgctgcacatgttagagtcccccgagtctctccgctccaaggtgcaggtgatggtcctaccagtgtg

SEQ ID NO: 541674 - DNA, 85 bp, Homo sapiens
atggggctgctccccaggacctgagcaggaacctggagttttcaggcttcctggactgggtccccaagaagatgcagcgggtggg

SEQ ID NO: 541675 - DNA, 101 bp, Homo sapiens
gctggcgctggggatccctgctcttcgctctcttcctggctgcgtccctagcattgcagtgtcgagatggctatgaaccctgtgtaaatgaaggaatgtgt

SEQ ID NO: 541676 - DNA, 100 bp, Homo sapiens
aatttccatgtcaacatagtccagagtactcctgattgtgacatcacattcatcccctgggcgatggagcttgtcactgggaaggaatactcagtcggag

SEQ ID NO: 541677 - DNA, 100 bp, Homo sapiens
ctgattgggaagaaactcttagcgcaatgaaagtgaatggcttggaggaaggcgtggagttcctgccagtcaacaacgtcaagaaggtggaaaagcatgg

SEQ ID NO: 541678 - DNA, 100 bp, Homo sapiens
ccggaggctctggatggaagccatggatggccgggaacctgcatttggctttatgtcccgagttgccctacaagcagagaagatgaatcatcacccagaa

SEQ ID NO: 541679 - DNA, 74 bp, Homo sapiens
gtcgaataatacagtggatgtgaggcatgcatgtagggaataccggattcataaagagctggatcatcccagaa

SEQ ID NO: 541680 - DNA, 49 bp, Homo sapiens
ccgagaaccgtcagtttgagccagatgatttcttcagaggccccacagt

SEQ ID NO: 541681 - DNA, 139 bp, Homo sapiens
ggaacacggaggataaagtcagccatgtgagcactgggggtggtgccagtttggagctcctggaagttcctgcaacaactgcagttcaaaatgttctgattaatccttcaatgattgggcccaaaaatattcttattac

SEQ ID NO: 541682 - DNA, 100 bp, Homo sapiens
cgaagcttacattgacagcactgtgtgtgaatatcctgatggaaccaagtctttgaaactgggagactttgggcttgcgactgtggtagaaggcccttta

SEQ ID NO: 541683 - DNA, 50 bp, Homo sapiens
ttggggaagatttgctgacatggggcctgttcttcttgatgaatttgttg

SEQ ID NO: 541684 - DNA, 98 bp, Homo sapiens
tgcaggccgttggggcggctcagaggcagtgactgtcgggcctccagaaaacattgaggtgaccccaggagaaggctccctcatcatcaggttctcct

SEQ ID NO: 541685 - DNA, 100 bp, Homo sapiens
gaccactacggcatggaggacgtcaagaaacgcatcctggataagttgattctgcaaagtgtttgcacaagagcagtcacctaccgacgtgagaagcctg

SEQ ID NO: 541686 - DNA, 96 bp, Homo sapiens
aaattcagtgatgacagagtatgcaagagtcaccttctcaactgttgtcctcatgatgtcctttctggaactcaataccaagtttccaggcccgaa

SEQ ID NO: 541687 - DNA, 90 bp, Homo sapiens
ccccctgtgcgccaccattgcagccaaaggctgaagaaatgtcaacaattgggagttttgaaggattccaggctgtgtctctgaagcaag

SEQ ID NO: 541688 - DNA, 90 bp, Homo sapiens
agaagagctgtcttgccacagacccggtatgtggagctgttcattgtcgtagacaaggaaaggatccaaatcacaggacagtacccaaac

SEQ ID NO: 541689 - DNA, 96 bp, Homo sapiens
tgacctacctcacagcagggatgctggaccaacctggctttcccgactgctccatcgaggcagccatggtgaaggaaacggaggtggagctgtaca

SEQ ID NO: 541690 - DNA, 49 bp, Homo sapiens
gaggagactcctgaccctcagaatggtactgtgagaatagagatgtttc

SEQ ID NO: 541691 - DNA, 100 bp, Homo sapiens
aaaaagcagagcgactcggttaagggaaagcgccgagatgacgggctttctgctgccgcccgcaagcagagtgacgccataagggagaagatgaagaaaa

SEQ ID NO: 541692 - DNA, 75 bp, Homo sapiens
attccaagtaactcttatttggatgaaggtttaaggctcagaaaggtagcacattcggataaacctggatcaacc

SEQ ID NO: 541693 - DNA, 99 bp, Homo sapiens
tattcaccctgtggaaagtgcgaagatagaaccaccagaacacgatgaacctattctgaagcacttgaaagatattaaagtgaagttctcagatgctgg

SEQ ID NO: 541694 - DNA, 74 bp, Homo sapiens
gaatgtggctggaaggatcagttgaaggcacactgtaaaggcctctccttccgatgaaaagagaaaggaagaat

SEQ ID NO: 541695 - DNA, 100 bp, Homo sapiens
gctgggtcctacctgtcagagccccaagacaagttggatggcttgaggactggtactaaaaggaaacgtgactgggaggccattgccagcagaatggagg

SEQ ID NO: 541696 - DNA, 76 bp, Homo sapiens
ggtgaggcaggagaggaggacgaagaggagagcacagagcctgtggagaacaaagtgggtaaaaagggccctaagc

SEQ ID NO: 541697 - DNA, 83 bp, Homo sapiens
cgacaagccgctggcagccgcggatctcaccgccgctcagggctatggtgaactaaacggtaatgctggagaaagagaaatat

SEQ ID NO: 541698 - DNA, 83 bp, Homo sapiens
tggagctggacgtgaggagtgtcacttccgtcaggagaggtcacccgtgtgaacagaaagtgagaggttgtagcacattgcca

SEQ ID NO: 541699 - DNA, 50 bp, Homo sapiens
tttgcttgcagttaggtcaagtggagtgacaaccatgagtggaaaaaact

SEQ ID NO: 541700 - DNA, 60 bp, Homo sapiens
cggcaagtggttcttcctcagctctctcctgcaggtgaagacattcagtgaagcttgcct

SEQ ID NO: 541701 - DNA, 100 bp, Homo sapiens
ccgttacggccatcacggcggccgcagtggcgtcctggagccctcctcagccatcgactacagtgacagcgccatgctccaagctcagcagctgctcctg

SEQ ID NO: 541702 - DNA, 82 bp, Homo sapiens
ccgcgcacttcgtcatgttcttcgcgccctgatgacagtcatgtccctttccagggacctcaaggacgactttcacagtgac

SEQ ID NO: 541703 - DNA, 98 bp, Homo sapiens
agattcgcagtggtcgcttcttctccttggctgtccagaagggaagaaaatggagtttatcaccagcctactggatgctctcaccactgacatggttc

SEQ ID NO: 541704 - DNA, 50 bp, Homo sapiens
cagaggtcccgatgcacaccttgcacccgagtggaaacaaaatgtcagtc

SEQ ID NO: 541705 - DNA, 83 bp, Homo sapiens
ccggaagtgtccgatcggaatcagccctgtccgagagaggaaaaagtcctggatttcgagtcagaacatctggattagaatcc

SEQ ID NO: 541706 - DNA, 87 bp, Homo sapiens
aaacaatggcatttacagaaagagtcaacagcagtggcaacaggtttcaggcacagaactgtatatccaataatagtgaaatggatc

SEQ ID NO: 541707 - DNA, 61 bp, Homo sapiens
actgcatctgcatctgcctcatgtacatgtgctcctctgtgctgcagagggcgctggccgc

SEQ ID NO: 541708 - DNA, 100 bp, Homo sapiens
atctccttagtgaggctcagagatgcctgtaccgtgatgtgacgctggagaacctggcacttatgtcctccctgggttatccaggtacctcaagggaagt

SEQ ID NO: 541709 - DNA, 75 bp, Homo sapiens
agcattcctttccttgaagtcttcgtttttaccttagtctcgggctcccacaggcaagagcacatcctactggac

SEQ ID NO: 541710 - DNA, 85 bp, Homo sapiens
ttgctgcaagtcaagctgccttaggcttataacatcacatttaaaagcatctcagccatcagaagacctggtgccctatgacacg

SEQ ID NO: 541711 - DNA, 90 bp, Homo sapiens
ccagcgctcagcccacctgtgattatgatgcagagcaaagcggcagtccccggacagggatgggctctgaccaggaggacagcaagccca

SEQ ID NO: 541712 - DNA, 100 bp, Homo sapiens
gaacaagactggactcagcagtgactctgacatcattagaagcatgccagaacagactggtgaaaagtaaaccttttcacctacaaaatttcacctgcaa

SEQ ID NO: 541713 - DNA, 100 bp, Homo sapiens
gcgactcagaccctgacagtgacaaaggccagcagagccagccgcagagcagccagcccaactacagcaaggcctgggaagactattacaaaaaacagag

SEQ ID NO: 541714 - DNA, 75 bp, Homo sapiens
gccaactcaaaatctgaagcctgatttgctctttacccaggactctgaagtggtgtcctgtggccatccgggctc

SEQ ID NO: 541715 - DNA, 74 bp, Homo sapiens
attccaagtaactcttatttgttactccacaggatccgctgaacataggatgttgccacaaaatctacctcgtg

SEQ ID NO: 541716 - DNA, 100 bp, Homo sapiens
gtggagcaccaggagactgcctatggaacctactgccagcagagggaggtagaagccatcatggagggcgacgaggaggacagaggctgctgctgctgca

SEQ ID NO: 541717 - DNA, 78 bp, Homo sapiens
tctcagctccaccgcctccgacagctgctggagcaggcagaaggagaagacagcctgaagaagatgcagctgatggag

SEQ ID NO: 541718 - DNA, 100 bp, Homo sapiens
aatctgcccacccctcctgtaacccagcctgtttcacttcttgaacaaaatccagtctcatagcagaggagaatataatgtttacagcaccttccagagc

SEQ ID NO: 541719 - DNA, 82 bp, Homo sapiens
gcttcaagaacaagggccgcgatgtggaaaccatggtgaatccgggcagcagctcgcagccgcccccggtgacggccggctc

SEQ ID NO: 541720 - DNA, 74 bp, Homo sapiens
ggaagctcaagtatatcaagcattcaaattgctcacagctgatcctaagattaaagactccagtaaggaggaag

SEQ ID NO: 541721 - DNA, 83 bp, Homo sapiens
cgtgcagttttgaatcctttatggggcaagattcttgccaagagaattaatgtgcgtattgagcacattaagcactctaagag

SEQ ID NO: 541722 - DNA, 75 bp, Homo sapiens
cggagaggcacggaggagccgctggggctgccgccacggccgcccggaggactttgtgttttatgccccacgtct

SEQ ID NO: 541723 - DNA, 75 bp, Homo sapiens
cttatctggagcagtacatgaccggttacttaatgtctgctcagcgacccttccctctatgatgaagtgcattga

SEQ ID NO: 541724 - DNA, 75 bp, Homo sapiens
agatgacaacatctatcaacagaagatcaaggaaggatttgatgccctggatccctttattcccatcctggtttc

SEQ ID NO: 541725 - DNA, 98 bp, Homo sapiens
tcagccagcaaggtgctggaggccatcttacccctggtgcagaacgatcctcgaattcagcacagcattgatatgaaccatggacaagtatattctgc

SEQ ID NO: 541726 - DNA, 75 bp, Homo sapiens
cggagctgctggtttcattcgaggtttcgggccgtgcctccggagccagcgtggtggccatagacaacaagatcg

SEQ ID NO: 541727 - DNA, 100 bp, Homo sapiens
tctgtgaagctaaactcaatgctgctgtgtgggaagaagatttgtaaagaaaactcttaggaatgaatctgaagtctgctgcagtaaaacacagaaggct

SEQ ID NO: 541728 - DNA, 98 bp, Homo sapiens
aaaattcgtcaagttatccgaaaatataattacgttgctatgttgttcacagggcttagagctcctgccagagggctgttactctttggtccacctgg

SEQ ID NO: 541729 - DNA, 100 bp, Homo sapiens
ccacatatgacagtggacatagaggacaacgcagatatagaacatttcttttatcacagaactcgaatcatttatgacagaaagtttctgttggatcgtc

SEQ ID NO: 541730 - DNA, 97 bp, Homo sapiens
ataaaactgagttctgcagttgaaggtgctggagaatctggtaaaagcaccattgtgaagcagatgaggatcctgcatgttaatgggtttaatggag

SEQ ID NO: 541731 - DNA, 100 bp, Homo sapiens
gcagcgtcgagatgtaccatcctgcctactgggtcgtcttctcggcgacaactgccctgctcttcatcccaggtatgcaggtgccttgagagcttcaggg

SEQ ID NO: 541732 - DNA, 80 bp, Homo sapiens
gcgctactctctctttctggcctggaggctatccagcgcctatgaaaggaggttccctacatgtcctttgattccgatgt

SEQ ID NO: 541733 - DNA, 117 bp, Homo sapiens
cgagaggcggcgccgctcccaagatgtcgcagacggccatgtccgaaacctacgaaatggctgagcaggagcgctttctactgcatcaggagaccctacctgaacagctgctggcgg

SEQ ID NO: 541734 - DNA, 90 bp, Homo sapiens
ggaatgagatcctactactatggaaaattcatgcctgtaggtttaattgcaggtgccagttatgcaaagggtgacctggacatatcttac

SEQ ID NO: 541735 - DNA, 82 bp, Homo sapiens
catcatgtcgtcgcagaaggcgctggtgtcaggcaagccagcagagaggaccctgatgctcccataagacagaaaatgcccc

SEQ ID NO: 541736 - DNA, 82 bp, Homo sapiens
cagagggaactacaacagaggtggaatgcccaacagagggaactacaaccagagtatgtattcccgtgtgccagagtgccag

SEQ ID NO: 541737 - DNA, 100 bp, Homo sapiens
tgcagggagacgcacagccaggacatcctggaacctgggaaaggtgtgctggaattgatgttcgtctgtgtgatgttggtgaggccatccaagaagttat

SEQ ID NO: 541738 - DNA, 100 bp, Homo sapiens
actccccattttaccagtgtgcagaagttctcgaatcattctttgtacagaaattgaaaggcttcaaagctagcagttctgaaacacagacaacatcaag

SEQ ID NO: 541739 - DNA, 100 bp, Homo sapiens
agtctttgctcagatctttcctcagtggagaaaggggaatacagaagaatgtctcccctacaagtgctcaggtgctgctacccccgtatgatgatgccac

SEQ ID NO: 541740 - DNA, 89 bp, Homo sapiens
tgcatgtactgggggattcgcagggaggatgtcgggacaccccggaagctgggaaatgtaatctatgccagcaattatgacaatgttag

SEQ ID NO: 541741 - DNA, 99 bp, Homo sapiens
cttcaagcttaggaccacccaccatgcctatccagattttctaccctagcaaggatggtacgaagattccaatgttcattgtgcataaaaaaggcataa

SEQ ID NO: 541742 - DNA, 100 bp, Homo sapiens
ttgcgctggaccgtcgccttgctcctcgccgcggcggggactgcagaagatgattgaagaatcactgaagattaaaataaaaaaggaattagaaatggaa

SEQ ID NO: 541743 - DNA, 75 bp, Homo sapiens
aggaccttggggacaagctgcgcatgatcgtcatgggacacagaagtgcacgtgccggaaggacatggtcaagat

SEQ ID NO: 541744 - DNA, 75 bp, Homo sapiens
ctctccttctacctgctggggttgcttgtcagtagcgggcaagattcaaggcctcttccagatgtagccctgact

SEQ ID NO: 541745 - DNA, 83 bp, Homo sapiens
ctctgctcttcctcccttcgctcgcaccatgtgagcaggggtgagcgcagccactgcccaacgcaaaccgtgaagaagcttct

SEQ ID NO: 541746 - DNA, 83 bp, Homo sapiens
ggggaccaagctggagatcaaactgtatagagcatgaaatcaagagcctggaagatttacaagatgaatatgacttcaaatgc

SEQ ID NO: 541747 - DNA, 78 bp, Homo sapiens
gttttagatggcagtggccacatactttctcagaaaccttcacatcttggtcaagatggatatggcagtggacgtgga

SEQ ID NO: 541748 - DNA, 75 bp, Homo sapiens
tgaagacatcacatccagtgcacagcatgcaatgatgctacctgttctgacccatcatatccgctaccaccaatg

SEQ ID NO: 541749 - DNA, 73 bp, Homo sapiens
gagctctttatgtactttggaccaaaagctttacgcctgagaatctcttatacacctccaaaaggcccaacgc

SEQ ID NO: 541750 - DNA, 75 bp, Homo sapiens
ctaggcctgctacctgactctgagatgaccaggttccttcctaccatcctccctgaagagcaacctcaagttagt

SEQ ID NO: 541751 - DNA, 80 bp, Homo sapiens
atggcagagttagctaaagaactccctcaagtttcatttgtgaaggtatatttgaaggctcccatgattctgaatggagt

SEQ ID NO: 541752 - DNA, 90 bp, Homo sapiens
ccggggaccaggacagtcgcgaggttcgagtgttgcagagcctgcggggcaagatctcatgtttcgccaagggatgcatgacttgaaagt

SEQ ID NO: 541753 - DNA, 75 bp, Homo sapiens
tgcaagtgtccttcgacgggaggtgcgtatagcagcaaaattcatcattcatgcccctcctggagaatttaatga

SEQ ID NO: 541754 - DNA, 50 bp, Homo sapiens
cctaaagccgggcggactgcgatgccctgtacagacttttggggaactgg

SEQ ID NO: 541755 - DNA, 80 bp, Homo sapiens
ctgaggaggccgagagatgaggccggagcccaccaagttctgggaagttcttgggtgtctctggggagtccctgggccag

SEQ ID NO: 541756 - DNA, 100 bp, Homo sapiens
aggacaccgacatggaacagggactcactggggtacttacagatcatcagtatttggagaggacaccactatgtgccattttgaaacaaaaagctcctca

SEQ ID NO: 541757 - DNA, 98 bp, Homo sapiens
atggctgcacagtcagcgccgaaagttgtgctaaaaagcaccaccaagatgtctctaaatgagcgaagcggaaggtcctggtgacggtcctggaactc

SEQ ID NO: 541758 - DNA, 88 bp, Homo sapiens
tggaacctggatatcgcgcgagtttaaaaagcagaaactcctcctagaactggaccagtatgccccagatgtggccgaactcatccgg

SEQ ID NO: 541759 - DNA, 75 bp, Homo sapiens
ctcatgaatagcaatcacagagactcggagagcatcactgctggccaaatttcgcagtctcctgtgcacagcgga

SEQ ID NO: 541760 - DNA, 50 bp, Homo sapiens
gtcagtcaactttggttttagtaacagcccatgacccatcgagaaactgc

SEQ ID NO: 541761 - DNA, 96 bp, Homo sapiens
ctctcggcctggccaggtccgaaaacttaatctacacctacgataagacacagggctgggtgactccgtatgctccagccccagtatctccagcac

SEQ ID NO: 541762 - DNA, 83 bp, Homo sapiens
tgacctttgtgaccaactccacctacgcagcagacaaggggggggatatgagactttctactcggaatatcctgagtgttgcg

SEQ ID NO: 541763 - DNA, 50 bp, Homo sapiens
gtcgtctgcgaccgctgccttctcggctacagcctccgcttggcgtcccg

SEQ ID NO: 541764 - DNA, 50 bp, Homo sapiens
gatagaaatcatttccatcaataccgggttctttggcatggacacaagtt

SEQ ID NO: 541765 - DNA, 100 bp, Homo sapiens
tacagcgagggcctcggccatccaagggtctcccaggagctcattttgcagctctcaagcttttatagcatgctgtaaacaattgtcaaagttgtttatc

SEQ ID NO: 541766 - DNA, 83 bp, Homo sapiens
acatccaggctggtcagtgtggcaaccagatcggtgccaagtcagagcaccataacatggtgtgggaagtgaagacaaatcag

SEQ ID NO: 541767 - DNA, 138 bp, Homo sapiens
aggtggactggtgcgaggacaactacaccatcgtgcctgctatcgccgagttctacaacacgtggtaagcatccgtggcattcaagacgaagatccccctgacgcccagctcctgaggctggataacatgctgctggc

SEQ ID NO: 541768 - DNA, 71 bp, Homo sapiens
ggctcacagtgcttccaccctggacgaagccacccccaccctcaccaactccctacaccatcatcaccttc

SEQ ID NO: 541769 - DNA, 49 bp, Homo sapiens
ggaggctttggagcggctaaaaacctgctccagcaaaccttcaccaatt

SEQ ID NO: 541770 - DNA, 100 bp, Homo sapiens
accattgaagactcctacctgaaacatacggagattgacaatcaatgggccatcttggacggtggtattaaagataatcaaacattatcaagaagaagga

SEQ ID NO: 541771 - DNA, 75 bp, Homo sapiens
gcgagaagcagcgggggggcaggcgatcgaaggattctaacattttcagagaaccttttggaaagaacaagccta

SEQ ID NO: 541772 - DNA, 75 bp, Homo sapiens
ctcagccagggcaagactaaggagctggtgtcccagaagcttttgttgacaattccagtttccgaacaaaacatt

SEQ ID NO: 541773 - DNA, 50 bp, Homo sapiens
gcctgtctgcctgctgcagtctaaaaatatgtcgtaactgcaagtgtggc

SEQ ID NO: 541774 - DNA, 74 bp, Homo sapiens
tagataaaccacagttacaaggaattccactgattgggcagaaagtggcccatgctctggcagagggactcgga

SEQ ID NO: 541775 - DNA, 88 bp, Homo sapiens
atatctgtcttcggtggactccttcggcagtccacccaccgccgccgcctcccagaggatgccttctccgggacagattggatgttgg

SEQ ID NO: 541776 - DNA, 76 bp, Homo sapiens
agctcgtcaagcagctgtcggccaagctcatcgccaacggtgaaaggtgtagcagtcactcggcctacacccacag

SEQ ID NO: 541777 - DNA, 100 bp, Homo sapiens
ttctctgggaaggtgaacatttgtagcattgatttcccggatctggtaacatggcaaaagatcatcatggcagaacaggatgtggaaaacgatcttttgg

SEQ ID NO: 541778 - DNA, 90 bp, Homo sapiens
ccctcctcaaactgactttgcagccacggagagtttcagaagaggagccccgccgaggcatgagggccgtgctccccccagaggaaggga

SEQ ID NO: 541779 - DNA, 85 bp, Homo sapiens
gaggaggcacccctgaagctctccaaggctcgccagagctaaagacagcggaaatagagcccaaggcagatggcagctggaggga

SEQ ID NO: 541780 - DNA, 100 bp, Homo sapiens
agcctcggggcaggtgcgcggagaggaagtgagagcattccggcccccccaccccaaccccggccgctggccctctgagccctatgagtttgtctctctg

SEQ ID NO: 541781 - DNA, 100 bp, Homo sapiens
atcgagcagaggcctatttgatagaggaaatgtatgatgaagaacccagtgacttgattgtaaaaatttacagagcggaatcatatgctggtctccaaga

SEQ ID NO: 541782 - DNA, 110 bp, Homo sapiens
cataatcggaatgtgatcacagagcctatttacccagaagtagtccatatggatgtctccaatacaacgacagcccagaagaggaagtgcagccagacccagtgccccag

SEQ ID NO: 541783 - DNA, 100 bp, Homo sapiens
cttgaatgtgtcaaaaccaaacaccctcagctccacattgagagcaaaatctacaagatgatgcagggaggagcatcagaagagctaacaattgctggaa

SEQ ID NO: 541784 - DNA, 75 bp, Homo sapiens
cagtcgcctccaggccaagagggatccttcacccgtgtctgcgcccccctcgcgggcccagctgcaactgcactt

SEQ ID NO: 541785 - DNA, 75 bp, Homo sapiens
ggtggggctcacggcgcctgccttggcgctggccggctacatcgaggaaatgggtcctgatgaatatgaagagat

SEQ ID NO: 541786 - DNA, 80 bp, Homo sapiens
ggcctgcagcgggagctggacggcgagcgcgagcggcgcgagaaacgcccgggggctggagaaggccaggcagcagctgc

SEQ ID NO: 541787 - DNA, 90 bp, Homo sapiens
tggagcctggactggcagcaggccctgcagccctgaccctctattctgcaccctgtgagccaccgagactgaaccaaacccaggaagcgg

SEQ ID NO: 541788 - DNA, 100 bp, Homo sapiens
tggcgcctgaggttctcccattaggcagtgaaatcaactgtgcagaccatcactgttggaggagtgagcacatcacagtttaagacaattattcctctgg

SEQ ID NO: 541789 - DNA, 71 bp, Homo sapiens
cgagaggtgcggcgaaggaggcagaggcacttatgcttgtcagggatatgtggtgcctgtcataagctcca

SEQ ID NO: 541790 - DNA, 98 bp, Homo sapiens
cggacgacaacttcgagagtcgcatctccgacacgggctctgcgggcctcatgctcgtcgagttcttcgccccctggcatgatgttgcagcccccctg

SEQ ID NO: 541791 - DNA, 100 bp, Homo sapiens
gctggactgtcaccgcatgcgtcggcggctgccctcccagaggtccctgagcgtgagcagcgtctcctcagtgtccagtgctacgtcgagcagcagctct

SEQ ID NO: 541792 - DNA, 83 bp, Homo sapiens
tcggagccctggaagcagcagctcaccgaggacggggactcggtgagcccatcactttctgtgaggagagttttgtaaagcac

SEQ ID NO: 541793 - DNA, 83 bp, Homo sapiens
tctgggccggaccagctggtgctgcgcggcgcaggcttgggcactgtttaaaggaaagttccgagaaggcatcgacaagccgg

SEQ ID NO: 541794 - DNA, 80 bp, Homo sapiens
cctcttggaaggtgcatctgcagtacaggatatgaagaaattgagggttcttgccatgggttacagctgaagtaaagcac

SEQ ID NO: 541795 - DNA, 100 bp, Homo sapiens
agcaaggtgtcggtgttccacgtgaagctcaccgacagtgccctgagggccttcgagagctaccgcgccagacaggaagctcttcgtgggcggtcttgac

SEQ ID NO: 541796 - DNA, 96 bp, Homo sapiens
ccgcttcctggagttcacgactctgagtgctggttcttgggcacactctatagccatactggacaggaaccaggtgccccgtgtaggcatcgtcgg

SEQ ID NO: 541797 - DNA, 74 bp, Homo sapiens
ggcacccatccttattgctacagatgtagcctcccgtgggctagcgatctgcctgcctggatgtgatgagcagc

SEQ ID NO: 541798 - DNA, 100 bp, Homo sapiens
agaacggatagctccctcctggaaaagctctactgagatgaagaaagaaaaagaatacctgctcagctccagagacacgtaaagggacagagattggggg

SEQ ID NO: 541799 - DNA, 74 bp, Homo sapiens
ggcggcgtgggcatgggcatgtacaacaccgacgagggtgaatcctggttctttcgttggctacctggaaagaa

SEQ ID NO: 541800 - DNA, 100 bp, Homo sapiens
ttttgacagtcgtagatacaaatttttggatgatgatggatccatttctcctattgaggagtcaacgcccccctgcggctaaagctgcgcctcacctacg

SEQ ID NO: 541801 - DNA, 101 bp, Homo sapiens
gacaccctctatgccttcaacagtggcaacgtagagcggttccagactctgaagactgcctggggccagcaggagcaccccttcttcaccttgcacaaaac

SEQ ID NO: 541802 - DNA, 100 bp, Homo sapiens
ctcagctcccaccctcagcccctgccactagtgagatgaccacggattattacagtggtggctactatcctgcacaggacccggccctggtcccccccca

SEQ ID NO: 541803 - DNA, 100 bp, Homo sapiens
ggcaaggtgagcgggaccatctcatcactaagcgggatcttgccctcagtgaaggagatattcacactttgagggatcgtgatctggaactcgctgctcg

SEQ ID NO: 541804 - DNA, 132 bp, Homo sapiens
caaccgcgagaaggcccagcgcttcctgcagaaggccgagaagctctacccactgccctcggcccgcggtgctggagaatctggtaaaagcaccattgtgaagcagatgaggatcctgcatgttaatgggtt

SEQ ID NO: 541805 - DNA, 100 bp, Homo sapiens
gatcgctcagctggagaacgcggctaaagttctgatggtccggtgtctaaaagactatggagaatttgaagttgatgatggcacttcagtcctattaaaa

SEQ ID NO: 541806 - DNA, 100 bp, Homo sapiens
tgaatggcagcaaggtgggcccggacggcacaccctacgttaccgtgctcaagctcaacgggacccaggtggagtctgtacagctcaaagtcaacatagc

SEQ ID NO: 541807 - DNA, 75 bp, Homo sapiens
tcgaggggctttgacttggatgctgcctggccaacatttgccaggggttatggttttgtgaaattcacagatgaa

SEQ ID NO: 541808 - DNA, 83 bp, Homo sapiens
aacgaccaagagggtgttcgactgctagagccgagcgaagcgaaccctaaggactctgcaatatgaataattccctagagaac

SEQ ID NO: 541809 - DNA, 83 bp, Homo sapiens
cttctcccgcgcggggggcgagtaagccagcggcaggaccagcgggcgggggcccacgagttctgggccggagaaggggcgac

SEQ ID NO: 541810 - DNA, 75 bp, Homo sapiens
ggagcagttccgggagacggatgtggccaagaaaatatgaacaagagaactgggcaacccatgatccacatctac

SEQ ID NO: 541811 - DNA, 100 bp, Homo sapiens
ccagcccgtggtccttctccatattcgaggtaggagcaacggtgggaatgccctctgaggaatgcagtgatgtccatcagtcacctctcacccagagcct

SEQ ID NO: 541812 - DNA, 75 bp, Homo sapiens
gtaccagcatcaagatgatttatggtaataagtctcacaccattttgctggtacagcctaccaagaggccagaag

SEQ ID NO: 541813 - DNA, 80 bp, Homo sapiens
gtcagcactgactttcagctatggaatcggccaagtcctgtatctgccatgtctgtggcgtccacctcaacaggctgcat

SEQ ID NO: 541814 - DNA, 75 bp, Homo sapiens
agcttcacaaacggtctcatacaggctatattcccaaagcttggattagcactgctatgaaccttcacatagatg

SEQ ID NO: 541815 - DNA, 101 bp, Homo sapiens
tgcataaaggcagctttgaaacaccacataaagaagatccctaatagtcatttctcaacaattatatagtcaactgatgtaacaatggtactaatattggg

SEQ ID NO: 541816 - DNA, 99 bp, Homo sapiens
cgacgcggctggcaagactgtttgtgttgcgggggccggacttcaaggaagatgtctcaggagccatatcacatctgtcccttggggagatcccagcta

SEQ ID NO: 541817 - DNA, 75 bp, Homo sapiens
gctggaacacacatcagtcacgctggtgtttggaatgctttatcctgcatattattcatacaaagctgtgaaaac

SEQ ID NO: 541818 - DNA, 83 bp, Homo sapiens
cgaggagaagcgagaaaagatgaaacggaccctgcagagtggcatgattccgactggatactctcagtgccagccaaattacc

SEQ ID NO: 541819 - DNA, 75 bp, Homo sapiens
ttcgtgttccaggtgcccaaggagcgcagcgcgcagcccaagattccagaacggaaacagcttgccatcccaaag

SEQ ID NO: 541820 - DNA, 82 bp, Homo sapiens
tttaatttcagtgactgaattaaaaggtgtcaagaagctcagaatgagcactgcagcctgtggtgttgaggctcacagcgat

SEQ ID NO: 541821 - DNA, 51 bp, Homo sapiens
tggcttctttgagactgaaatggcaggtggacccccaaaagtacaagggca

SEQ ID NO: 541822 - DNA, 76 bp, Homo sapiens
atcgaaagcatggcgtcggtggtgttggcgctgaggacccggacagccgagctggctttatgtgctggggcagaag

SEQ ID NO: 541823 - DNA, 82 bp, Homo sapiens
ctggccgcgggagaggtaaacagaacaccaggacatcccagagtctgggaaatgggaaattcaactactgaggaggttacgg

SEQ ID NO: 541824 - DNA, 75 bp, Homo sapiens
gcgacgagcaagaagcagcccaaagtcgaatgattcagacttgcaaggtgttggagagcacaatggctgaacaag

SEQ ID NO: 541825 - DNA, 82 bp, Homo sapiens
gttcgcggcgcgccctcctgctgcctccccggagctcccgggccagtagaaatggatgaaaagaggctgctggatccagggt

SEQ ID NO: 541826 - DNA, 80 bp, Homo sapiens
gaatgctgagaaaacagacagatttgtcatgaagaaactcaatgatcgtgtcatgagacctagatctgttgatcttagta

SEQ ID NO: 541827 - DNA, 74 bp, Homo sapiens
atttatcaccttctgtggaaaggaagctgcacaggaagccgtgaaactgctgaagaaatcaggggagaaacccc

SEQ ID NO: 541828 - DNA, 50 bp, Homo sapiens
ccgggctctgagcgcgccgcggcacagacaatgcagatcttcgtgaagac

SEQ ID NO: 541829 - DNA, 75 bp, Homo sapiens
gctttggcaatgtggaagagattcctgagaatgacagtggatgattcaacagccacacaaagcagcaacattttt

SEQ ID NO: 541830 - DNA, 100 bp, Homo sapiens
aggacgacgcgctcaaccagatcgcgcgggagcagaagatggctgtgccacccacgtatgccgatcttggcaaatctgccagggatgtcttcaccaaggg

SEQ ID NO: 541831 - DNA, 82 bp, Homo sapiens
ggaccctgggccagcctatggagatgcgccaagaagagggagggcgagcttacggtggcccagggccgtgtgaaggacctgg

SEQ ID NO: 541832 - DNA, 101 bp, Homo sapiens
cgagactggagcagagccgctgggcgccggagccgaggcgagcgccgcgcgcaccactggagatgcctacatagaagagtgacagcagctagactaaatgt

SEQ ID NO: 541833 - DNA, 90 bp, Homo sapiens
acccagcttgcagcacagcagggatgattctttagatctcagccctcaaggaacccctgaacagtgcccaagtgttgtctctttgttgtc

SEQ ID NO: 541834 - DNA, 82 bp, Homo sapiens
cgcgtgctgagtggaaagttccgcatcccattttttatgtccacagcatactggagcatagtgaaagagtctattttgaagc

SEQ ID NO: 541835 - DNA, 75 bp, Homo sapiens
gggagatgaccatgaggagcactacgatgcagctatcctgtttactcgggaggtccttcagttgagaccaaagac

SEQ ID NO: 541836 - DNA, 75 bp, Homo sapiens
gctgcagcaggacgacgcggccggcgcggcagacggccacggctcggtggaaacaataggtgatgcctactgtgt

SEQ ID NO: 541837 - DNA, 100 bp, Homo sapiens
cggagttttgccattgccagtgggacgtctgagactttctccttcaagtacttggcagatcactctcttagcagagccaagattttcttcttcactcctc

SEQ ID NO: 541838 - DNA, 100 bp, Homo sapiens
cgaccagggacctgcccgcctgcggctgctccggctgtgaaagttgtgtagatttactgtttgtgagaggagctggaaactgccctgagtgtggtactcc

SEQ ID NO: 541839 - DNA, 51 bp, Homo sapiens
gccatacctgggctatgactggattgcagaatagcactgctgtgcaaatgt

SEQ ID NO: 541840 - DNA, 101 bp, Homo sapiens
gctgacaacgatgctgcctctatgccctgcacccgatgtgctgggtggcgtcctgatcaccgcactcctcatcgtcctcacctaccctgcctggaccttca

SEQ ID NO: 541841 - DNA, 101 bp, Homo sapiens
ccttacggagccgtctaccagatcaacgtcctccgggaccggagtcagaaccctccgcagagtaaaggtggtgatgatgtccagcaactctgtgaagcagg

SEQ ID NO: 541842 - DNA, 88 bp, Homo sapiens
tgcacttcgcattttggcattgacatttaattttagggtcctttatatagaagggagagtaggttgtagcagataccaatataagcgc

SEQ ID NO: 541843 - DNA, 96 bp, Homo sapiens
caggaagataaaagcatcagaaacactgcatgggatcagcaaacagcagctgcagacagtcaaggaccggtttcaggctttcctcaatggggaaac

SEQ ID NO: 541844 - DNA, 91 bp, Homo sapiens
gatgtacagagagctcctggacaacagaggcccccagaatgagaagtgacaacaaggaaaatccacaacaggaaggggctaaaggagcaaa

SEQ ID NO: 541845 - DNA, 82 bp, Homo sapiens
ctccgagcgcaaggacagcgcgaggtccgcgcagcccagcgcagccatggcttgtcaatgaggcagatcagattcaggttcg

SEQ ID NO: 541846 - DNA, 100 bp, Homo sapiens
gagtgacttcgtggggcagacggtggaactgggcgagctgcggctgcgggtgcggcgggtcctggccgaagttcaaatctgaacatcaatgatgtactag

SEQ ID NO: 541847 - DNA, 100 bp, Homo sapiens
tatgcccaactaatatttggaattttcgtatacgtggattccagaggggtgacagcaaaacggctgtggcagaaattctcaggagcagcatgccttgaag

SEQ ID NO: 541848 - DNA, 74 bp, Homo sapiens
gggatgaactgatgaagacaaggccttccagtttggaagatgagaacaagttgagcagtgccaacggccatgaa

SEQ ID NO: 541849 - DNA, 75 bp, Homo sapiens
gattccaagtaactcttatttgattgctcttctagacatcgatatatgtgggccatcgattcccaagataatggg

SEQ ID NO: 541850 - DNA, 100 bp, Homo sapiens
caggacacctgccatcatggagggttatccagcacctggaggatacctgctacctacaattgcagcatgactttcccagggccctgattttcagcacgga

SEQ ID NO: 541851 - DNA, 82 bp, Homo sapiens
ctcgcctcctcgcagcagcgccatggacggcggctccctggaccaggtgctgaaagaggccaagaggattcccgaggagatc

SEQ ID NO: 541852 - DNA, 100 bp, Homo sapiens
caacctccgagaaggtcatgagagtgatgatctaaaatgtccactgaggcacaaagagttgatgacagtccaagcactagtggaggaagttccgatggag

SEQ ID NO: 541853 - DNA, 83 bp, Homo sapiens
ctgtatgattaggccacaatcttcaatgagtaaacatattcctgtactccaaagattcaggtttactcacgtcatccagcaga

SEQ ID NO: 541854 - DNA, 74 bp, Homo sapiens
tgcttctctgtctcatcagtccttagtagcactatcagagtccagaagcactggaaatccatggatcattcaca

SEQ ID NO: 541855 - DNA, 74 bp, Homo sapiens
agctctgatagttgttccttgtgcagaaggtcggattgtttgtgctgaacgaactgtcctcttgcttcagaagc

SEQ ID NO: 541856 - DNA, 90 bp, Homo sapiens
agaaatttgaacaactttccgaatctgcaaaagaagttttcggctttgtgagaaaccttaccatcaaacacgatggccagcaacgttacc

SEQ ID NO: 541857 - DNA, 93 bp, Homo sapiens
cgagcattgtgggcctcatcatcttcctcctgtgcaccctcttcatcaggtgagaagccctaccactgcaactgggacggctgcggctggaag

SEQ ID NO: 541858 - DNA, 49 bp, Homo sapiens
ctttgccatccagttcaaccgcaacagaggtctgcggggtttccgagag

SEQ ID NO: 541859 - DNA, 83 bp, Homo sapiens
ggaatcgcaaggctcttccctgaccattttctactgtccctgcgcgaggttggtactaagaagtgcctttcctgacgtctctg

SEQ ID NO: 541860 - DNA, 50 bp, Homo sapiens
ttcaggctgaaggtttagcgggtgccggtcctggagttgttaattcaccg

SEQ ID NO: 541861 - DNA, 96 bp, Homo sapiens
tccatgatgggatcggagccatgaaaagttgccagacggccagcattgccactgccagtgcatccgcccaggccaggaatcatgtggacgcccagg

SEQ ID NO: 541862 - DNA, 74 bp, Homo sapiens
tgggctgcatgggctctatcaaggaaaacaagtgtctgcttatgtcggtggtgatctttgtgaagtctgtgcag

SEQ ID NO: 541863 - DNA, 83 bp, Homo sapiens
gcagacagaagagccaagcagctatggaggaaaatcagggtggctcctatggacggaaaacagtcttaagaggcaactccgat

SEQ ID NO: 541864 - DNA, 83 bp, Homo sapiens
acagaaaaatgcacaacagagggacaacaaaagcctcctacaagagtcctaccaaaagtttgcctcgaagcataaacacagac

SEQ ID NO: 541865 - DNA, 98 bp, Homo sapiens
ttccaacaagatgtgggcacaaaaactaccattcgcctgatgaactctcaggtaggtcgatttggacaattaacttatgttcgcagttatcagggaga

SEQ ID NO: 541866 - DNA, 83 bp, Homo sapiens
atcgtgatcccggcgacatactacctctggccccgagatcagaatgccgcactgtaatggcgttgactggcgtcagaagctgg

SEQ ID NO: 541867 - DNA, 96 bp, Homo sapiens
ctggagaagctgcatccctttgatgccggaaaatggggcaaagtgatcaatttcctaaaagcccccagagtgtgaaaggccggaatgacacctttt

SEQ ID NO: 541868 - DNA, 75 bp, Homo sapiens
cttcaggcaggtgaaggacagctctgtgaagaggggctacttccagaagctgcacccacctccaccctcacctgt

SEQ ID NO: 541869 - DNA, 105 bp, Homo sapiens
tggatctgtgcttgtgaaaggctccatggtcttgcctccttgcaggtatttctttaaatccagaacaatggagccagctgaaggaacagatttctgacattgatg

SEQ ID NO: 541870 - DNA, 96 bp, Homo sapiens
tctccacatccttactggttgcctaattttatggatgtcttcacgtggtctttaccgtttgttggagaaaaagaatgattcagtggtggctggtgg

SEQ ID NO: 541871 - DNA, 90 bp, Homo sapiens
gaagatcacctactccatcaaggtcatcgaggccaacaacccattccaggctgtgcaggaagacctggaggcagaagccagccttccaga

SEQ ID NO: 541872 - DNA, 83 bp, Homo sapiens
ccggttccccggcccacagtgggggtgtgcaaacccgagagaactgggtgatctgtgaaaatggttcgctattcacttgaccc

SEQ ID NO: 541873 - DNA, 131 bp, Homo sapiens
taaatatacgctttgttggtggactactctcagcctactatctgtctggagaagagttggtagctggcagtgttgtgatggcttttgaagaagtatgcccggacagaatagatctgattcataaaaattac

SEQ ID NO: 541874 - DNA, 90 bp, Homo sapiens
agctgaaggatgcccacaggtcccatcccttcatcaaggagtaccaggccaaggcgggctgcatgctgttcccccacatctccccctgtg

SEQ ID NO: 541875 - DNA, 146 bp, Homo sapiens
agccttcagcagaggcggcagcctggagagtcgaagcagcagctctcgctccagaagcttcactttgtggaatgcagtagccctctgggcctgggatattgtggttgataactgtgccatctgcaggaaccacattatggatcttt

SEQ ID NO: 541876 - DNA, 75 bp, Homo sapiens
gcatcgactggaccaagatcgagcccagcgtcaacttcctcaagtcgcccaaagagatcgagatggtgatcatgg

SEQ ID NO: 541877 - DNA, 100 bp, Homo sapiens
gcaagtcagagatgagctgaagagggccagtgtgtcccaagctgtctttgcaagagtggcattcaaccgcacacagtgttttccaagcagtgaagcactt

SEQ ID NO: 541878 - DNA, 74 bp, Homo sapiens
caggcgctcaccatgttccctggagcaattctgtggtgttcttggtcacacatttatggagtttctgaagggca

SEQ ID NO: 541879 - DNA, 74 bp, Homo sapiens
agcctctctagtagctgggactacagcttgctcacttccgacagagaaaaacaaaaggtgacagttcgcattcg

SEQ ID NO: 541880 - DNA, 75 bp, Homo sapiens
gtccatgaaaatctcaactttatggccattggttggatggcaagcatgtggtgtttggcaaagtgaaagaaggca

SEQ ID NO: 541881 - DNA, 71 bp, Homo sapiens
acgcagctggctggcttcagtggaccaagctcaggccccggggcctccagcggcaccagcggagaccacgg

SEQ ID NO: 541882 - DNA, 95 bp, Homo sapiens
ctgggagcgagcgcagcaaagcgcccagcctgccgcctcgctgtccctgcggcttctgggggatggaagatgctaattctgaaaagagtataaat

SEQ ID NO: 541883 - DNA, 88 bp, Homo sapiens
aagcttccagcggttattactgtcctcctgcacttgtaaccattacaaacaggttgaatgaacagtatgaacatgcctccattcacct

SEQ ID NO: 541884 - DNA, 90 bp, Homo sapiens
gccagagtggcatgtcctcagtgcaatgctgaatacctaatagtttttccaaaattgggagaaataaagtgtagtccttctgaaagcccc

SEQ ID NO: 541885 - DNA, 76 bp, Homo sapiens
ctcggcggagcagaggaaccacacgctgatcatgtgtcgtgtgggagccaatgggagatgggaagaaaatcatttc

SEQ ID NO: 541886 - DNA, 74 bp, Homo sapiens
gaccaccgaggctggagggggagaacacccaggcagagatcctacaagaatccaggatgatgatcccagattgc

SEQ ID NO: 541887 - DNA, 75 bp, Homo sapiens
gaacatttgaagtcacgtaaagaaggatcaccccttctgtgtcattctctgaggaaaacaagttcttctcaagga

SEQ ID NO: 541888 - DNA, 100 bp, Homo sapiens
ctgggaggccggccggtgccagcacctttcggcttctgagacggcggcagcagcggcattcagctctgtcttgaaaagggggccgtacggcacagaagat

SEQ ID NO: 541889 - DNA, 100 bp, Homo sapiens
aatgacagttcacataagaagttcttcgatgtatctaaacttggcaccaagtatgatgacgagttccagttattacagagaaatttcatggacaagtact

SEQ ID NO: 541890 - DNA, 82 bp, Homo sapiens
gaggtacctctccttttccctctccctttccctaagcaaaatgatgcttcaacacccaggccaggtctctgcctcggaagtg

SEQ ID NO: 541891 - DNA, 83 bp, Homo sapiens
gacgctcaagtttgtggcccgcaactacctggaacctgagttgatctctctaatgtattagatcttcatgcctttgatagtct

SEQ ID NO: 541892 - DNA, 100 bp, Homo sapiens
cagaagctactcaaatgcagtcggcttgtcctggctcttgccctcatcctggttctggaatcctcagttcaagaacatcgatatattgaactcttcttga

SEQ ID NO: 541893 - DNA, 75 bp, Homo sapiens
cagctctttcctttccgtctggcggcagccatcagggtcgcggcgagcgcgcctatgacatctactcgcggctgc

SEQ ID NO: 541894 - DNA, 75 bp, Homo sapiens
gtcataccctgactcagatactcactcacagccctgtgctgaaagccattcgttcctggttaactcggaaacaca

SEQ ID NO: 541895 - DNA, 75 bp, Homo sapiens
ggacgaggcggcgccgccgggctgtggaggtggtctttgggaagaagcttcctgcctttgccaccatccccatcc

SEQ ID NO: 541896 - DNA, 100 bp, Homo sapiens
acttttctggtgggcgaacgagtgacattggctgacatcacagttgtctgcaccctgttgtggctctataagcaggtaacccagaatctcccaatgaaag

SEQ ID NO: 541897 - DNA, 100 bp, Homo sapiens
gggccatcgctgccgtctttcacacactgataggtgccaatgttaacagggctacagccaataatgatcatacagtagtgtcgctggcatgtgcaggagg

SEQ ID NO: 541898 - DNA, 50 bp, Homo sapiens
gcctcttataccccggactgcaggttcctctacctggcatgaaatgggta

SEQ ID NO: 541899 - DNA, 100 bp, Homo sapiens
cccctagaccggtttttagtccattgactatgcagcctaatggtacaaacccgtagtgctgatgaaccaatgacaacatttgttgtctgtaatgaatgtg

SEQ ID NO: 541900 - DNA, 80 bp, Homo sapiens
tgggacggagactccctgctgctcatcggatctgctgccgtccagatgaaggttcaggaagatttgactgaagagaaaaa

SEQ ID NO: 541901 - DNA, 74 bp, Homo sapiens
ttcaacccgtgtacgtgcctgtgcctaaagtaaactgtcttgagccccaccctcacctgcctgtgctggcaacc

SEQ ID NO: 541902 - DNA, 75 bp, Homo sapiens
gcagaagccgagttcaacatcctcctggccaccgactcctacaaggagttcaaagaaggacgcagagccagccac

SEQ ID NO: 541903 - DNA, 101 bp, Homo sapiens
gtctgtggagggcggtgctgtcatggctggagtaaggcccctggctcccagaggtgcaccaaacgtcaatgagtggtcattgaagataagaaaggaaatga

SEQ ID NO: 541904 - DNA, 74 bp, Homo sapiens
tggccctgaaggatcagatctggttttaatgaagcttgccaggcctgctgggaacgggacttctaaaaggaact

SEQ ID NO: 541905 - DNA, 75 bp, Homo sapiens
caacacaggcagactgaagcacctacaacaagaaaggggcctcccgaaggaaagaccacctgaaggaccaccaga

SEQ ID NO: 541906 - DNA, 80 bp, Homo sapiens
gccaagccgtgtggggtgcgcctgagcggggaagcccgcaaacaggttgtaaagaagaaagttctaccctttctgtcaaa

SEQ ID NO: 541907 - DNA, 75 bp, Homo sapiens
cccggggctgcactgccaccctgggcaacttcgagtgtgaacatggctacgcctcttcattcccgtccatgccga

SEQ ID NO: 541908 - DNA, 89 bp, Homo sapiens
ctccttcggcagtccacccaccgccgccgcctcccagaagcaaccgtgacaagtggtgcccgaccagggacctgaacgaggaaggtctg

SEQ ID NO: 541909 - DNA, 76 bp, Homo sapiens
cgactatattgagaaggaggtaaaggtatagacacgtgtggccgtttacgctgtaggatcctcattcccactggct

SEQ ID NO: 541910 - DNA, 75 bp, Homo sapiens
atcccctgttggcatcatgtgagagtgaagacagtatttgccagctcattgcaaccatgtccaagggacctgcag

SEQ ID NO: 541911 - DNA, 75 bp, Homo sapiens
cacggcgtacgccctcatggggaaaatctccccggtgactttcaggctctgcctgaggttgtccgaaggatgccg

SEQ ID NO: 541912 - DNA, 100 bp, Homo sapiens
gtttgatgctcgctgggtaacatacttcaacaagccagatatagatgcctgggaattgcgtaaaggtgcagtggcttctatgttttgggttgatgctgaa

SEQ ID NO: 541913 - DNA, 96 bp, Homo sapiens
gccagtcaaatacgacccctcctttcgaggccccatcaagaacagatccatctgtgtgtgctgtggaattcaggatacttgggcattgcctactat

SEQ ID NO: 541914 - DNA, 100 bp, Homo sapiens
gcactaccttatgcgggccaatatcacagccatccgcagagtccggaagacagacaataatcgcattgctagtgccatggtctccatgaactgatttttt

SEQ ID NO: 541915 - DNA, 75 bp, Homo sapiens
gaccacaacaagggccggattctcacccagtttcaccagtgatcattaaagaatgggcagcttacaaaggaaagt

SEQ ID NO: 541916 - DNA, 82 bp, Homo sapiens
gcagactgaatgtctgggatttaagtacggcagctgctattgcttatggcctggataagagggagggggagaagaacatcct

SEQ ID NO: 541917 - DNA, 75 bp, Homo sapiens
ctgccatgatgtacaggcagagatggtttggtgaggattcatcaacctccagtatgatgtctgtgaactttgatg

SEQ ID NO: 541918 - DNA, 101 bp, Homo sapiens
gcggaggccgcgtgtctctacggtcaaacaacgctgaccggttccctgatgtgttacctgcttctgctactgatccaaactgcagaacttctcattcatcc

SEQ ID NO: 541919 - DNA, 50 bp, Homo sapiens
gaagagcgccaggcgccgcgggggctacagatgcacatgttgaatggagc

SEQ ID NO: 541920 - DNA, 76 bp, Homo sapiens
acaaagaagaccacacactgggaaacatcattaaatcgtactgggcctaatcgctacgtgcctctttggctatgat

SEQ ID NO: 541921 - DNA, 100 bp, Homo sapiens
gctgagtacggccttggcatttacatcactggcgtggacccaggctctgaagcagaaggcagcgggctcaaggaaaattcacgaattgtgagagtaagag

SEQ ID NO: 541922 - DNA, 100 bp, Homo sapiens
tgaagaaggaggtggaggaggaggagaaggtgaagacaatgctgactcaaagggaagcgtcagcccccgtagcacctctgttaccacgacttctagtgcc

SEQ ID NO: 541923 - DNA, 82 bp, Homo sapiens
ctatgagagaggaagaatatattttgacaattatcggcgctgtgtcagcaggcctgagctgaagcctgtggacaaggaatca

SEQ ID NO: 541924 - DNA, 80 bp, Homo sapiens
gtggcccgggtcactggccagcaccccgaggctctacagattctcccctgcccctggagaaggaggagcaggtccgactt

SEQ ID NO: 541925 - DNA, 97 bp, Homo sapiens
gaaattgctatccagatgatgatgcacatgctcctacagaagaagggaaaaaagagctgctgttcctaagtaacgcgaacccctcgctgctggagcg

SEQ ID NO: 541926 - DNA, 88 bp, Homo sapiens
tgattccagttcattcctagctcagaaagcaacgttttgagccacaactgtcacaactccagggggcaatggcggcttcctgtgttct

SEQ ID NO: 541927 - DNA, 75 bp, Homo sapiens
gtgacaggggcggcgcggcccggggtgtcagtgtggaggagactgaggtagctacagcaagctgggtagcaggca

SEQ ID NO: 541928 - DNA, 51 bp, Homo sapiens
ctgacgtgcagtccattgctgtagctgacactcctgtggaagaggtccctg

SEQ ID NO: 541929 - DNA, 50 bp, Homo sapiens
ctctccattgtgaccagtggagttgcaggaccagctctgccccctaatta

SEQ ID NO: 541930 - DNA, 88 bp, Homo sapiens
atcgtggatctgaaagtgacaagcattttagaaagggaagaaacccttttttcttggagccagcaataattatcacaattactgatgg

SEQ ID NO: 541931 - DNA, 96 bp, Homo sapiens
gctgagaatgcacttactggctcattcagggtgaaaatcctatttataagagtgccgtaacaactgtggtcaatccgaagtatgagggaaaatgag

SEQ ID NO: 541932 - DNA, 75 bp, Homo sapiens
ttggagctgccgccgccgggactcccgtcccagcagcttaaagaaagtggttattgtacaggtcatgaaccagat

SEQ ID NO: 541933 - DNA, 101 bp, Homo sapiens
cactccccctgaagttcatctaagatcttcattcttcaaaggtccggcgccagctgccagtcgaggaaccgaacccagccaaaaggcttctctttctgctg

SEQ ID NO: 541934 - DNA, 46 bp, Homo sapiens
gctttaaagaatacacttcaatgatgttgcacctgtaaccatcttt

SEQ ID NO: 541935 - DNA, 83 bp, Homo sapiens
gggaacttcaaacagttcaacatcttctgtcatatgctggagtcagccctcactcagcacggggtcactctggtgcccattga

SEQ ID NO: 541936 - DNA, 100 bp, Homo sapiens
cagtttcatgaaggagctcatgcagtggtacaaggaccagaagaaactgcaccggaaatgtgcctaccagctgtgtgactggctacgtgttaatgaaagc

SEQ ID NO: 541937 - DNA, 97 bp, Homo sapiens
tgccctacaggcactgagtatacctgcaaggaggaagaacgtgcaaaacgtgaggagctagagcgaatactggaagagaataaccgaaaaattgcag

SEQ ID NO: 541938 - DNA, 89 bp, Homo sapiens
gatgtgagcaacacgggaccgcctaccaggacatcctcggaaagtatttattctaggccaggctccagtattcctggctcaccaggtca

SEQ ID NO: 541939 - DNA, 74 bp, Homo sapiens
ggtcggcgccgagtgggaggatggcggaaaaaccaaggtgtatgttggtaacctgggaactggcgctggcaaag

SEQ ID NO: 541940 - DNA, 100 bp, Homo sapiens
cttgttcctcaggctcctcttaaagaatctgacccctgagggtgctgggtagagtgaggtcgacaggagcggaaggtcctgtgtgggtgtggagatggcc

SEQ ID NO: 541941 - DNA, 100 bp, Homo sapiens
ccgggacccagggcccgggatcgccgagcccgacctcgggcgccccgccggtcacctccgcgcggacaccaggagcatcagatccatgctgctgctgact

SEQ ID NO: 541942 - DNA, 96 bp, Homo sapiens
gcggcatgagatgaagctgtgacagcctgcctagggtagttaaaagacgagtgaatgctctcaaaaacctgcaagttaaatgtgcacagatagaag

SEQ ID NO: 541943 - DNA, 100 bp, Homo sapiens
ctacatctaccccgagcagttctcctacatgcgggagctcaaacgcacgctggacgccaaggtggtgatctttgtgaagtctgtgcagcggtgcattgcc

SEQ ID NO: 541944 - DNA, 100 bp, Homo sapiens
ttaatgaccacaacaagcaagcatgcagcttactgcttgaaaggtgcacagggaagtcatccctacacatactgtctatgctcttaacattgaaaggatc

SEQ ID NO: 541945 - DNA, 75 bp, Homo sapiens
gtacccaaatgttgaagagctcaggttccagggtcacccccgagaggacaacaggcatctggaagtgctctctcg

SEQ ID NO: 541946 - DNA, 98 bp, Homo sapiens
ccactgttcaccttagcctccatcaccactgacatcatcggttcgggaagaataccggaagtgggcctgcctagttgctggggggagcaagtactcag

SEQ ID NO: 541947 - DNA, 87 bp, Homo sapiens
aagtgcagatagatggccttatacctttgtctggatatggaggaacaagcaatcttattttggaaggcgttaaaaaattatctgaca

SEQ ID NO: 541948 - DNA, 87 bp, Homo sapiens
cggctctgagggcactggcctagttcccgacttgtttctcaggtacatgtccagggccgccgggtccccttccccattgccagcccc

SEQ ID NO: 541949 - DNA, 74 bp, Homo sapiens
ctggattgctgcaaggctgagggacgagaacgagtttgtacaatgacgacagaaacctgcttcgaattagagag

SEQ ID NO: 541950 - DNA, 75 bp, Homo sapiens
ccgccatggaggcttcattctggacgaggctgctcatgatggagcagtccaagaagtcctccctcatggtggccc

SEQ ID NO: 541951 - DNA, 142 bp, Homo sapiens
ggagaaagactttgacttggacatgactgaagaggaggtgcagatggcactttccaaagtggatgcctccggggaggagttagaagccgctcttcacagagatgacgtggagtttatcagtgacctgattgcctgcctgctt

SEQ ID NO: 541952 - DNA, 80 bp, Homo sapiens
gagatgcgtggtccaccatcggtgacctcaccgcctcggttcgccctcagccgccccggcttgggcactgtttaaaggaa

SEQ ID NO: 541953 - DNA, 100 bp, Homo sapiens
tgtactacaagcccaccaagctaaagaggctgcccagaaagcagttaacagtgccaccggtgttccaactgtttaaagcagtacagaccccagaagggag

SEQ ID NO: 541954 - DNA, 82 bp, Homo sapiens
tatggatcagatccaaatcagaatttaaactttgggataatgagctgcagtatgtggaccaacttctgaaagaggatgtgag

SEQ ID NO: 541955 - DNA, 96 bp, Homo sapiens
aaacattcttcctgtggattctgctgtgaaagaggccataaaagaatggctgcagtctgtccaggccaccatgatcctgtcgatcatcttcagcat

SEQ ID NO: 541956 - DNA, 100 bp, Homo sapiens
cggcgctcctttcagaccgctgtttaacgactttggaccgccttccatgggctacgtgcaggtgtgtttccattgtagaaaacctggtcatggaattgca

SEQ ID NO: 541957 - DNA, 98 bp, Homo sapiens
ccggctctcgcaggcccccccgcgccgaccgcgttcctatggacagacgcacagacacctgcagaaaaattggaagctccaccacccaccccaggaca

SEQ ID NO: 541958 - DNA, 100 bp, Homo sapiens
tcagattgtgatgaattgtgctgatattgatattattacagcttcatatgcaccagaaggagatgaaggtgctggagaatctggtaaaagcaccattgtg

SEQ ID NO: 541959 - DNA, 50 bp, Homo sapiens
tatctacaagggggtccgcaagcgatgccctcctagctagccgtcacggg

SEQ ID NO: 541960 - DNA, 83 bp, Homo sapiens
ctgggctaatgctaatgtcagcagacagattgaggacactgtattatacggttactatattcttgcaagtgttggtggcctct

SEQ ID NO: 541961 - DNA, 76 bp, Homo sapiens
cacaggttttggtgaagttgaagaagtactctcatggagacaaggcgccccaagttggagaagaaggatgccaagg

SEQ ID NO: 541962 - DNA, 100 bp, Homo sapiens
ctggccaagtttattgaaaaagcagctgcttctgtgtgatttcttccaaaatacataagtctgggccaacggtcacaaaagttgtcactgttgtgacaac

SEQ ID NO: 541963 - DNA, 74 bp, Homo sapiens
cccgcactctctcgatgagtcggagaagtccctgattcgcctttgccagtctcatctcgtgtctgctttgttaa

SEQ ID NO: 541964 - DNA, 50 bp, Homo sapiens
ttcttcttcgctccctagcttagaagagagaaccatggagtctggcagta

SEQ ID NO: 541965 - DNA, 100 bp, Homo sapiens
acacatcatcatctgctattccaggaggtgtggatattattttgtgaatagcacaatggaagaagctggactttgtgggttaagagagaaagcagatatg

SEQ ID NO: 541966 - DNA, 98 bp, Homo sapiens
agtggaggttcctacagagattcatatgagagttatgccttcaaagaaaaacctcggtatccaccaagtcaggctcaagcagctcttcaagacagtcc

SEQ ID NO: 541967 - DNA, 100 bp, Homo sapiens
aaaccggtttgcaagtccttgtagagaagaagcgcacgctgaaggggtccattgagctctcccgaatcaaatgtgttgagattgtgaaaagtgacatcag

SEQ ID NO: 541968 - DNA, 82 bp, Homo sapiens
gcacctgccagccaggcctcggacgaggaggacgcgcccgccaccgacatctactttggtcccctggaagtgacgctgactc

SEQ ID NO: 541969 - DNA, 75 bp, Homo sapiens
cgggctgtgagcaagaggaagctgcagcccacccgggcagccctcaccctggacagaactgtaccgctctctttt

SEQ ID NO: 541970 - DNA, 101 bp, Homo sapiens
caggccgaagtggctaaccaagaaactaaagaagacttacctgcggaaaacggggaaacgaagactgaggagattggctcaagctacccaggaaagaacgg

SEQ ID NO: 541971 - DNA, 82 bp, Homo sapiens
tcgaagacatggaccagggctacggagattcctggtcgggtggcttccagtggtcttcagtctgtcgtgcaccgatgagaac

SEQ ID NO: 541972 - DNA, 90 bp, Homo sapiens
taaaattgaagtcttctgtgagaggacacccaaaacatgtgagagatgatttacacaatgaagaaagtacatgcactttgggcttctgta

SEQ ID NO: 541973 - DNA, 74 bp, Homo sapiens
tttcgaatgctccacgccctcctgcgatctagaatggttggtcaaagaaaaagtgatgtatgaaaaagaggcaa

SEQ ID NO: 541974 - DNA, 90 bp, Homo sapiens
agccgtccgactggagcagctactatgcagagcccgagcaaaatgatgcttcaacacccaggccaggtctctgcctcggaagtgagtgct

SEQ ID NO: 541975 - DNA, 100 bp, Homo sapiens
tgtccagtcagatgaaattgatttatcagatgtcctttcaggtgagaagcaccagagggacaggacttctagaagttagaataatatgaagtaatcagga

SEQ ID NO: 541976 - DNA, 101 bp, Homo sapiens
caccccgagcttggcgtgtgctaataaatgtgtcttctgttggcggggcccagaagacacctgctttgagtttggtgtttttcctgccatcctgagtttcc

SEQ ID NO: 541977 - DNA, 75 bp, Homo sapiens
cagcctgctgacattgggtataagatcaagacacagccatccgggtcttcgccatccccccatcctttgccagca

SEQ ID NO: 541978 - DNA, 100 bp, Homo sapiens
gaacagcagactctgtccattgcaaagactgctgagaaggaagaatttgaacatcaacagaaagagctggagaaagtttgcaaccccatcatcaccaagc

SEQ ID NO: 541979 - DNA, 101 bp, Homo sapiens
atgaaccttgccctggggttaacactccagtgggatgaacagacaaaccccacaagcactgcatacgagaacggagaccaacctgggctgaagaaagaaga

SEQ ID NO: 541980 - DNA, 83 bp, Homo sapiens
ggggaggagaccatggctgactacctgctgtacaccctcaacaaacaccagcgctttggcatcaagatggtgctcatgtggac

SEQ ID NO: 541981 - DNA, 74 bp, Homo sapiens
tgttctatcttcccatcataaaaaagagcaatttacagcaatgagggatttatacatgaaaaatggacaaggat

SEQ ID NO: 541982 - DNA, 75 bp, Homo sapiens
gtggagccgggcaggagccgcgagccagctgcgcgaaggtgaaaggtgtagcagtcactcggcctacacccacag

SEQ ID NO: 541983 - DNA, 100 bp, Homo sapiens
cgccgacatcatccagctgcctcaaatcgtcgtagtgggaacgcaggtgtgttccggggtggtcatgacatcctggtgcgctcccggctgctgcttttgg

SEQ ID NO: 541984 - DNA, 89 bp, Homo sapiens
agggatcaaagagcaaacagattcagtggcctgcattgaccagtgaatggaggctaagctatgtcaataaggaatttgctgtctgtccc

SEQ ID NO: 541985 - DNA, 75 bp, Homo sapiens
atcgcaagctggatgagcttctaggcaaggaccacacgcaggtggagctgtgccgccagcgtatggccacgcggc

SEQ ID NO: 541986 - DNA, 75 bp, Homo sapiens
gaccatttctcatgaacagaaacacctaggaagggagaactgtaagactttgaccccgacgcaggcttcagtgat

SEQ ID NO: 541987 - DNA, 97 bp, Homo sapiens
aaatggttttcttctggatggcttccctcggactgtgaggcaggcagaaatggaagcatagatgacctgcctacggtcctaaagtgtgcacgcctgg

SEQ ID NO: 541988 - DNA, 98 bp, Homo sapiens
cttatcgggacagcaagctcactcgcctattgcagggccctagtggaatggcatcccaggggtgcccttctgcctccagagctgagacagatgacgaa

SEQ ID NO: 541989 - DNA, 75 bp, Homo sapiens
gcacagcgagccccctttctctagcggcaacatgagtgagaatgaggaagaggaaatttctcagcaagaaggcag

SEQ ID NO: 541990 - DNA, 90 bp, Homo sapiens
aaggattccaagtaactcttatttggatgtgggctctcttgatgagaagatgaagagcttggatgtgaatcaggactcggagctcaagtt

SEQ ID NO: 541991 - DNA, 75 bp, Homo sapiens
gtgtaaacaacgattctttggagaggttggaaagaaccatgactgtattcaggaaggcacatgaactgaagcttc

SEQ ID NO: 541992 - DNA, 100 bp, Homo sapiens
ggagacgccgccgctgcctcccgcgtatcattgcccagtgcctaagatcttttatgttcagctcactgtaggaaataatgaattttttggggaaggaaag

SEQ ID NO: 541993 - DNA, 100 bp, Homo sapiens
cagacatccaaaagactgctgagatagtttatgcagccaccaccagtttgcggcaagcaaatcaggagcttgccatggtggactttgagatgtgtgaata

SEQ ID NO: 541994 - DNA, 82 bp, Homo sapiens
tggaagcggccaccgactactgtcagcagctgtgccagagaaccatggagtctggcagtaccgccgccagtgaggaggcacg

SEQ ID NO: 541995 - DNA, 98 bp, Homo sapiens
cgcacagctcggcgctccttcccgctccctcacacaccggcctcagcccgcaccggcccaggaggctgacgccatcactctggatggaggagccatct

SEQ ID NO: 541996 - DNA, 90 bp, Homo sapiens
accaaccccacatccctcccggctgtagccaagaactattcggttctctacttccaacagaagggtcttttccccccaggtcaaggagcc

SEQ ID NO: 541997 - DNA, 74 bp, Homo sapiens
gcatgcagctgctgctgaccctggccttcaaccccgagccgctggtgctacagaatctcactctgtcgcccagg

SEQ ID NO: 541998 - DNA, 83 bp, Homo sapiens
cccaacaccccactgttgcaagggggatatgagactttctactcggaatatcctgagtgttgcgtggatgtaaaacccatttc

SEQ ID NO: 541999 - DNA, 50 bp, Homo sapiens
ctggaagccggagctagtggaagagccctgtctctgcccctggtggtcat

SEQ ID NO: 542000 - DNA, 100 bp, Homo sapiens
ttaactagagaaattgaagctgaagaaaacaatgatattaacattgaaactgacaacgacagtgatttttctccttacccctcgtgaattcaactcttac

SEQ ID NO: 542001 - DNA, 50 bp, Homo sapiens
agaactttacatcaatgaacatgatgtgtggctgtgacctggcacaaggg

SEQ ID NO: 542002 - DNA, 75 bp, Homo sapiens
tggccctcttcaatttctgacaaaagctcctgaaattcttagttatgatcctataagcatggcaacagatatgtg

SEQ ID NO: 542003 - DNA, 75 bp, Homo sapiens
tcctgcccttcacgctccaggagctagtggaccccctggcccaggtgactcagctattccgggaacatctcttag

SEQ ID NO: 542004 - DNA, 83 bp, Homo sapiens
ggccggagtacgtcgttcccgctgcgctaggggaagcgggcaggccggtctaattgaagccaacggagaactcaaggtcttca

SEQ ID NO: 542005 - DNA, 100 bp, Homo sapiens
cggagaccccgaaaacggaagcgcagggagaaggaagaggtgtttgaaaagttgaatctggtatcaagtgtcactctctccaagtccgcatcggaggctt

SEQ ID NO: 542006 - DNA, 100 bp, Homo sapiens
tactctcctggtccaaggacacctacagccccgacgaacatttctgggtgacactcaacaggattcccgggtatgagtattatagaacaattagaccctg

SEQ ID NO: 542007 - DNA, 82 bp, Homo sapiens
ggcgagagcctcggcgagccctctgcagcggagccccctgcccatttggttttggcaaccaaccagtggttcatcccagccg

SEQ ID NO: 542008 - DNA, 90 bp, Homo sapiens
tgaaaatattgaactgaaatttcagcttgaacaagcaaataaagatttgccaagattaaagagtacagttgtgaatttggctccgcgaag

SEQ ID NO: 542009 - DNA, 98 bp, Homo sapiens
ctcagaacactattttggtgcagactttgctgagggtgacccaggaagaggagttgtacgcatgtcagagaggttgcaggctgttttcaatttgtcag

SEQ ID NO: 542010 - DNA, 90 bp, Homo sapiens
cactgtgcggcacatcgcagacctgtcaccaggagacaaggtgcctggagcccttaggtacctgtgttttgtttgggaactcggaggccc

SEQ ID NO: 542011 - DNA, 95 bp, Homo sapiens
cgcgaacgagcgacggcggaacccgtgggcctgtggactgcagcctcggcggtcagcagtgaagatagtgatccggggagacaggaacacgggca

SEQ ID NO: 542012 - DNA, 99 bp, Homo sapiens
cccggccgaacccgcgatggaataatgcccagcggcccgccaggtcccggctgctgtccccaaggcccagcctcctcaccccgactggcgacccccggg

SEQ ID NO: 542013 - DNA, 75 bp, Homo sapiens
gtgtctaccttgcaccacgttctgcagaggaccatccagtgtgcaaaagacttcccaagtaagaagcggaagagg

SEQ ID NO: 542014 - DNA, 96 bp, Homo sapiens
gtgcaatgctacatgtacgtggacttatatcagaccagtgtggatcttcaagaatcattaatccttttccctggaggaagtgttgacctcagacgc

SEQ ID NO: 542015 - DNA, 75 bp, Homo sapiens
ttgttaaggattccaagtaactcttatttgaggcagcagttggggacagctgtagaattggaaatggccaagatg

SEQ ID NO: 542016 - DNA, 100 bp, Homo sapiens
tgctgagaagaaatttaaggaggtggccgaggcatatgaagtgctgtctgacatccctagatgacactgagctccggctgttgggacggacgcactcggc

SEQ ID NO: 542017 - DNA, 83 bp, Homo sapiens
gaactgggcgagctgcggctgcgggtgcggcgggtcctggccgaagaacaccttccaccatgaccacctcagcaagttcccac

SEQ ID NO: 542018 - DNA, 82 bp, Homo sapiens
ttttaggcactcttgagaaatcaggaaccctaaggactctgcaatatgaataattccctagagaacaccatctcctttgaag

SEQ ID NO: 542019 - DNA, 59 bp, Homo sapiens
atcttcgagttcaaagagaccctcggaaccagcctcccgcgacgatgcccctcaacgtt

SEQ ID NO: 542020 - DNA, 50 bp, Homo sapiens
cctcctgagtacctgggactacagggacccagcctccaacactgccccgc

SEQ ID NO: 542021 - DNA, 101 bp, Homo sapiens
gtcaacttggtggtccccctggaggtgatcaagggagaccatgaatttactgactacatgatacggtccaatgagagtgagaaagatcagtctaaagaaaa

SEQ ID NO: 542022 - DNA, 75 bp, Homo sapiens
aacatgctggctacaactaattactgccaaatctgtcgaaagggagataatgaagaactgcttcttctttgtgat

SEQ ID NO: 542023 - DNA, 95 bp, Homo sapiens
ctggaactcacctacctgcccaccaatgccagcctgtccttcctgcaggtgagaagcgccactgctttgatgtcaactataattcaagttacatg

SEQ ID NO: 542024 - DNA, 83 bp, Homo sapiens
tttggccccaagccgatgcatcacagttcgtgccctcgtgaggctggcatgcaggatggcaggacagcccggccacatgcccc

SEQ ID NO: 542025 - DNA, 100 bp, Homo sapiens
cggccgctgccccagggctgcggggacggaacttgctactaccagcaccatgccctaccaatatccagcactgaccccggagcagaagaaggagctgtct

SEQ ID NO: 542026 - DNA, 74 bp, Homo sapiens
ctgatcactactgacttgttgactgcaaaattcaaaatggggctcaaggtattcgtttcatctacaccagagaa

SEQ ID NO: 542027 - DNA, 83 bp, Homo sapiens
cttcaaagagaaaaggcaacatcctgtcacaggccatgctctggcaaaaacgtaagccgcgtagcagatacgctgccagcaac

SEQ ID NO: 542028 - DNA, 100 bp, Homo sapiens
ggtagtggtcccggaattaagaaaacagagcgacgagcaagaagcagcccaaagtcgaatgattcagacttgcaaggttgctgctgactcagccattcta

SEQ ID NO: 542029 - DNA, 90 bp, Homo sapiens
gggcagtgtggtgtccagccggatccagcatctctccaccatcgactacgtggaggacgctattggtgtcagcaaccagagggaaaccac

SEQ ID NO: 542030 - DNA, 98 bp, Homo sapiens
tgctttcttccccggcagagtttttcgagctcatgaagataaggcatggcagtcagccaacagcaggcatcatcagagaacttggaagaggcttggag

SEQ ID NO: 542031 - DNA, 100 bp, Homo sapiens
aaaataataacattaccatgagagtttggcttggattatctcaacattctgttggctgtgggtgagcgtggaggatgctcagatgcacaccgtcaccatc

SEQ ID NO: 542032 - DNA, 101 bp, Homo sapiens
aatgatggctttgtacggcttagaggacttccctttggatgtagcaaggaagaaattgttcagttcttctcagagattctgaaaagcttcctccttgtaag

SEQ ID NO: 542033 - DNA, 75 bp, Homo sapiens
ggagtctgggccacgccggcgttctgggcacgactacggtctcttgaaaagaaccacatgccctgggaagaacca

SEQ ID NO: 542034 - DNA, 90 bp, Homo sapiens
gaagcgtgcaccggatctacaggacctcccgtggcaggccgggcacaacttctacaacgtggacatgagctacttgaagaggctatgtgg

SEQ ID NO: 542035 - DNA, 102 bp, Homo sapiens
agtgtgtccagagttatgcaacttgacccagggttctccaaaaaatgtggaatcctttgcatctatgctgagacattctcctcttacacagatgggacctgc

SEQ ID NO: 542036 - DNA, 101 bp, Homo sapiens
aagaaccctcttggactggacgatttgggaattcaaaacttgggacaaactgtcagccttggtcgtccttggtggaaggaaccatgaactggcatctcccc

SEQ ID NO: 542037 - DNA, 100 bp, Homo sapiens
gtggagcggccgctgaccccgggcatccgtgtcattctggaccttactcccaactaccggggtgagaactcgtggttctccactcaggttgacactgtgg

SEQ ID NO: 542038 - DNA, 100 bp, Homo sapiens
cgatgcgtcagtagggtgagcacataaaaaatccatgtcttgcacctgtattttagcgtactatgcagatatttggagttcttacaacatggcagacatt

SEQ ID NO: 542039 - DNA, 75 bp, Homo sapiens
aatgggacctcgagtcactgtgagtcttcctaatattctcaccgatgatcgatttaaagttatgtttgagaaccc

SEQ ID NO: 542040 - DNA, 75 bp, Homo sapiens
tgacaatcacattaattcatatgaccatgctcacaagcaggaactgtggctgcaccatctgtcttcatcttcccg

SEQ ID NO: 542041 - DNA, 74 bp, Homo sapiens
gcttcgtggctccacgacttactctctacccttggcagatatgtgtcacaaagatgtctacacggaactgccag

SEQ ID NO: 542042 - DNA, 75 bp, Homo sapiens
gccgggaaaagtggcactgaggctctggaacttctgcccagctctccttgaatggtgaggttctggagaattgat

SEQ ID NO: 542043 - DNA, 144 bp, Homo sapiens
tttctttgtatgtcaagtatcaagtggccatacaccaggatccacccgatgaatgtgggaagactgagtgtcccgagcaagagaagcagtcctggatgcccactttcttgttttggcttcagatttgggcaaagagaaagcaaa

SEQ ID NO: 542044 - DNA, 78 bp, Homo sapiens
ggctgaacactgggaaggaactggtacttggagtctggacatctgaaacttggtacgtcagcctgtcatatgcatcaa

SEQ ID NO: 542045 - DNA, 51 bp, Homo sapiens
caaaaaggagacacttgtgaacttgacattttgctaaaggctgtgggagac

SEQ ID NO: 542046 - DNA, 51 bp, Homo sapiens
tttaagtacaatggtgggcttaattttagacatgcagagcagttctttgaa

SEQ ID NO: 542047 - DNA, 100 bp, Homo sapiens
gcgtctggccaagaatcagaggaagtgggcgcagacggggaagcggagccaacatgccagtggcccggagctgggtttgtcgcaaaacttatgtgacccc

SEQ ID NO: 542048 - DNA, 100 bp, Homo sapiens
aaaatcattcgattcgagagacaagcagaagaattcctcaatgcagtcttttatagaaaagactgtgctaacctgatgaaaaagtgtgtgcagtgtcgag

SEQ ID NO: 542049 - DNA, 82 bp, Homo sapiens
tgggcatctattacattccagttttcatctctgtgaactgcttaagcacagatttctcttcccagaagggagtgaaggggtt

SEQ ID NO: 542050 - DNA, 100 bp, Homo sapiens
ctcccaagtagctgggattgcaggtgtctgcttttggggcagagttttcatcggaggcatgcagagagttaggcttttctagcaacttgctttgcagctc

SEQ ID NO: 542051 - DNA, 75 bp, Homo sapiens
gcccggagcaagcggagctcccccaagagccggaaaggagagtcaagccctacccgtcgagaagctgtgaagaga

SEQ ID NO: 542052 - DNA, 97 bp, Homo sapiens
atcccctggaggcatgccacaaggcatggtcccagccaggacggagataacaccatcttcaagactagacgcttgaagcaaagctgccatcccagaa

SEQ ID NO: 542053 - DNA, 99 bp, Homo sapiens
ctgggctgagcggccggcggcgcgggcccggcggcggcggcagcggggtccgggtccggagcgccacactgatggtgagaccattctaaaaggcctcca

SEQ ID NO: 542054 - DNA, 76 bp, Homo sapiens
aaagaagttatgcttgttggaattggtgacaaaatcagaggcatactttataggttgaaaggattgttgacaaaag

SEQ ID NO: 542055 - DNA, 101 bp, Homo sapiens
ggcaagatccagatcgggatttacgtggagatcaagcgcagcgatggctgaaggtgatgtggccgccctcaaccgacgcatccagctcgttgaggaggagt

SEQ ID NO: 542056 - DNA, 73 bp, Homo sapiens
ctcctgctcgccggcagcggcgggtccgggccccggggggtccagggtttatggctacaaatgatttgatgac

SEQ ID NO: 542057 - DNA, 98 bp, Homo sapiens
cggccccgcccccgccggttcgcgtctctctgctgcggcgcggggaccgctgtgctctcggactcccaggacagctctgatggaataccgtcagcacc

SEQ ID NO: 542058 - DNA, 97 bp, Homo sapiens
gttcagaatctggggagccttatattccaggtgtctttttcagacagtttctacctgtatcacccaaggtacttctactcccgaaggattgacatca

SEQ ID NO: 542059 - DNA, 82 bp, Homo sapiens
ccaatttccagatgccttgttcaacaggtcagcccaaggccaaccccactgtcactctgttcccgccctcctctgaggagct

SEQ ID NO: 542060 - DNA, 98 bp, Homo sapiens
gtcaagagcgtgccctacttcaaggataagggtgacagcaacagctcggcgggctggaagataacagacgagtacctttggaaaggtcacgctctcgc

SEQ ID NO: 542061 - DNA, 83 bp, Homo sapiens
cgctgtgtccccaagctccccgtcctcggggatctaccgaacagaaagggacaaagggacattgtatgagctcaccttcaaag

SEQ ID NO: 542062 - DNA, 100 bp, Homo sapiens
agacgttcaacgacttactggggagagaaagaaaaggaacgggagctgagagagttgctggagaatgtaaccctaatccataaaccagtgtcgttgcaac

SEQ ID NO: 542063 - DNA, 100 bp, Homo sapiens
agctaagaccctgtttggtggctgagcttgttgggtatagagtgactcagatagcatgtggaagatgatgaagaacgagagcttcaaatggatcctgcag

SEQ ID NO: 542064 - DNA, 75 bp, Homo sapiens
tggggccagggaaccctggtcaccgtctcctcaggaaggtggacttttaaatattctccactgaagcaaatgctg

SEQ ID NO: 542065 - DNA, 75 bp, Homo sapiens
gaagcttatatcccaccattgccacgggcattctccatctccttgcaggccccggctgaaaaacgtggacaggag

SEQ ID NO: 542066 - DNA, 83 bp, Homo sapiens
aggcaacaaatggcaactttctgacggagctggagtttgttcagatcatcatcatcgtggtggtgatgatggtgatggtggtg

SEQ ID NO: 542067 - DNA, 99 bp, Homo sapiens
cgttctgcgacttataaaggaccagacaaatcaaattagtggttttggagcttgaaaaatcacatttgagaagaggattggatcctagccataacataa

SEQ ID NO: 542068 - DNA, 100 bp, Homo sapiens
cctgggtttccaaaaacagtgtaacatttgtggctgagcaggtttcccatcatccacccagcttgcttccggcgtcatggctcaaagggccttcccgaat

SEQ ID NO: 542069 - DNA, 141 bp, Homo sapiens
cagctactcaacaccctaactaaaaagcagaagaaacatcttcgagatttcggcgaggagcatcccttctatgacagttacttacacattgggcatgcaaaagctgctcttctgaaccagcactaccaggttaactttaaa

SEQ ID NO: 542070 - DNA, 100 bp, Homo sapiens
agcctctgcccaaagaaagaaggaggtagcaacacaagtcggaatagaatggaacctgtcccctgttggcagagttaccccaaaggaatggaggaatcag

SEQ ID NO: 542071 - DNA, 83 bp, Homo sapiens
gtgccactcgctgctgccgctcggcattgccgtctgcaacgtgcccgcggcgtctgtggaggagacggccgactcgacgctgt

SEQ ID NO: 542072 - DNA, 60 bp, Homo sapiens
cgagaaccgtcagtttgagccagatgggggatatgagactttctactcggaatatcctga

SEQ ID NO: 542073 - DNA, 80 bp, Homo sapiens
caaggacggcgttctggatctcaaagcgtgagatggaagattttcgaggtatagcagaagaatcatttccaagctttctc

SEQ ID NO: 542074 - DNA, 50 bp, Homo sapiens
gtccctcgcctcccggccgagctgacggattctcaaagttggattggtgg

SEQ ID NO: 542075 - DNA, 96 bp, Homo sapiens
gctggagctgggtcagtccgccgctcaccccgcggccgcaccttcccgccttctcagttccagggtctccctccactgctgtagtaacccgggtcc

SEQ ID NO: 542076 - DNA, 124 bp, Homo sapiens
ctctgctgtctcctgcaagaactggctcaagaaatttgcctcgaaaaccaagaaatgggtcctgatgaatatgaagagatggaagaagaggaggaggaggaagaggaggaagacgaggatgatg

SEQ ID NO: 542077 - DNA, 83 bp, Homo sapiens
aataaaagatgggtggattattttctcgatggagggagcttactccacgggaacagcctctagataatctgagttgttgaaaa

SEQ ID NO: 542078 - DNA, 75 bp, Homo sapiens
cggacgtcctcccacgtaccatttagaagctgatcttgcatctttaatggataaaacatttgagagaaagttgcc

SEQ ID NO: 542079 - DNA, 50 bp, Homo sapiens
ccctactacaaaatttttcaacctgggaaaccatctttgtatggcagcct

SEQ ID NO: 542080 - DNA, 90 bp, Homo sapiens
actttacatctgctggggatcatatcataattgatggtctccacgcagaatcaccagatgacttgaattcaattcgtcataatctgtccc

SEQ ID NO: 542081 - DNA, 83 bp, Homo sapiens
attggatgtgaaaatgaagccagaccgagggggatatgagactttctactcggaatatcctgagtgttgcgtggatgtaaaac

SEQ ID NO: 542082 - DNA, 75 bp, Homo sapiens
tacctgaaggactacgagaggaaggttatcttggagaaggcaggtgagaaagatcagtctaaagaaaaggagaag

SEQ ID NO: 542083 - DNA, 100 bp, Homo sapiens
tggaagacgaatgtcttttcagaaacctaaagggactattgagtatactgtccagaggtgtccttctaaagctggtagaggtttcacgagtcatcaggga

SEQ ID NO: 542084 - DNA, 83 bp, Homo sapiens
gccaagctgaccaagaagccaaagaactggctaggcaaataagctttaaggagaagaacccttggttagattgagtcttactg

SEQ ID NO: 542085 - DNA, 75 bp, Homo sapiens
gttaatcctcaatttaagcctgatctaacccctagaaacagacaggggcaagtgtccgagtggtgaatcagctac

SEQ ID NO: 542086 - DNA, 100 bp, Homo sapiens
gttggttggagatttcacacatgaccaggaaggattacggccaggagatacaaccagcactttctgtggtactcctaattacattgctcctgaaatttta

SEQ ID NO: 542087 - DNA, 75 bp, Homo sapiens
tttccaaatgaatttgcaaaacttactgtaggtactgcacaaaaccgaggactatttgaggcaagtgctatgtaa

SEQ ID NO: 542088 - DNA, 75 bp, Homo sapiens
gggatatcgggtggcggctcgggacggaggacgcgctagttgtgccggtccaacaaaagcccttgggtctgtttg

SEQ ID NO: 542089 - DNA, 82 bp, Homo sapiens
atcgtcgcggttctgctgccgatgcagcagcttttttatgagaattacgagcagaacaaaaaggggtacattagagatctcc

SEQ ID NO: 542090 - DNA, 98 bp, Homo sapiens
aatatatggttatacaagcagcatacaggaataccatatctgtatgattatcgggaaatgctgcacaatgccactttctgtctggttcctcgtggtcg

SEQ ID NO: 542091 - DNA, 82 bp, Homo sapiens
cccggcactcaagtggaccctgagattgagctttttgtaaaggcttgctatgggtgttctccaggatcaaagtgtgactgca

SEQ ID NO: 542092 - DNA, 75 bp, Homo sapiens
attgaactcagagaagccggggcaaaagtcaacaactctagcttaattggagtaggctatactcagactctgagg

SEQ ID NO: 542093 - DNA, 100 bp, Homo sapiens
tgggatttttgggtggtgcaaagtgaagccatgtccctggagggagatgaatgggaactgagtaaagaaaatgtacaacctttaaggcaagggcggatca

SEQ ID NO: 542094 - DNA, 50 bp, Homo sapiens
ttgttttcagctaacagtaaccccagcctcgagctgtggcaggttttcga

SEQ ID NO: 542095 - DNA, 102 bp, Homo sapiens
ccggcgttgaattccgggaagtgggagcttcaggctcgctccgtgcggtgccctctggtggtcagaagatgctgtgctgtctcgttaggatgaatggattaa

SEQ ID NO: 542096 - DNA, 75 bp, Homo sapiens
taccacgacaaaaccaccctatgacagacatcacacctccagtgcaatccctgttcctaagagacaaagctccat

SEQ ID NO: 542097 - DNA, 75 bp, Homo sapiens
ctagggaccctgctgaatagctggggctacaggcgtgtgtcactgcgcccagatcatacctggagctgatgctga

SEQ ID NO: 542098 - DNA, 50 bp, Homo sapiens
ttcatgtgtgtgtagtcttagaagaaaatttgctgctacttggagccaca

SEQ ID NO: 542099 - DNA, 100 bp, Homo sapiens
agagtcagaaaagatcaagaagcattttgagcctggggaaccttcagccctggatgcagggccttatcgcggtggccgtgttcctggtcctcgttgcaat

SEQ ID NO: 542100 - DNA, 75 bp, Homo sapiens
gaacagcttgtccacccgccggccggaccaggtatcatgatattagctggtttgacatcaagtcatttgtgagtc

SEQ ID NO: 542101 - DNA, 121 bp, Homo sapiens
gaagattccatggccaggccccactggaggagatgaggaaggctgccgaggatctggaaattgtccggcctctttggcctacccccgttggctccgctgccccaggtcgatgagtcccctg

SEQ ID NO: 542102 - DNA, 75 bp, Homo sapiens
cttggccatcccaaagctattctgggggcaacagaggagaacacaaagttatacctcaatttacttgaaatggaa

SEQ ID NO: 542103 - DNA, 83 bp, Homo sapiens
cgacaagccgctggcagccgcggatctcaccgccgctcaggactccgtgggaaggaggcttgtttaaactacggatgcttttc

SEQ ID NO: 542104 - DNA, 100 bp, Homo sapiens
ataataatagcaaacatcgatggcctactggggataacattcatgcagaacatcaggatgaatttcatcctttcatcgaagcacttctgccccacgtccg

SEQ ID NO: 542105 - DNA, 118 bp, Homo sapiens
cagaaatgtcatcctcaggcacgccagacttacctgtcctactcaccgatttgaagattcaatatactaagaattaaacaaccaccatgtcgagcaaaaaggcaaagaccaagaccac

SEQ ID NO: 542106 - DNA, 99 bp, Homo sapiens
gaggacgctgaggggcggaggcgggagaggcgagctcgcgatgagtggtctcggcaggctcttcgggaaggatttacaaggagcagctcaacaccaggg

SEQ ID NO: 542107 - DNA, 100 bp, Homo sapiens
tctcccggtcccctcccacctcgtctgggctcgcggcgtctccggggaaagccgtggccccgagggcggatccgagatggtaaggttgaagttacaaaag

SEQ ID NO: 542108 - DNA, 83 bp, Homo sapiens
caattgtggactcatacttaggggctacaatgcagtatactggagccctctggcacaaatggaagaagaaagaagggagcaag

SEQ ID NO: 542109 - DNA, 89 bp, Homo sapiens
aacagagatggtttcatcgacaaggaagatttgcatgatatgcttgcttcattggggagagcctggggatgtacaggagatgcctgctc

SEQ ID NO: 542110 - DNA, 100 bp, Homo sapiens
tggaactgtatgcagcagatcaggggaaacagcttgaatcccttgaccttactgatgagaaaaaggaagccaccattcttcagagggcaatgaaggcaca

SEQ ID NO: 542111 - DNA, 75 bp, Homo sapiens
accatccctttcgccttcttcctgcccgagctggttttgtgatgaaggaacctgtacagataaagccaatattct

SEQ ID NO: 542112 - DNA, 92 bp, Homo sapiens
ctggggccagggaaccctggtcaccgtctcctcaggtgaaagaacttgtcctggacaacagtcggtcgaatgaaggcaaactcgaaggcctc

SEQ ID NO: 542113 - DNA, 82 bp, Homo sapiens
cgcgagtcgcatctgctcaacgacgaggacctgacgcaggcttcccagcagcggcttatggaccagtggcagcagcggcggt

SEQ ID NO: 542114 - DNA, 80 bp, Homo sapiens
ggtctctcgcgggcgggagaacggaaaactcccaacttcctgatgatgataattccgaagaaggcttccacactattcat

SEQ ID NO: 542115 - DNA, 90 bp, Homo sapiens
cctgcctccactcactcgcctggagaagtatgctttcagcgagaacaccttcaaccggtcgaagaattccatccactgacgccaacctgc

SEQ ID NO: 542116 - DNA, 90 bp, Homo sapiens
gtaaaattacgaactcactgagctggaagtcattcaacgggaattgaataggttggtcaaagaaaaagtgatgtatgaaaaagaggcaaa

SEQ ID NO: 542117 - DNA, 89 bp, Homo sapiens
gggggagggaaggggacagaagatggccaagaagagaaagccccccagcatcaaggataagaaggctgactgcacaatcacaatggctg

SEQ ID NO: 542118 - DNA, 100 bp, Homo sapiens
tctgagaaggtggacaaagcccagcgctatgccgacttcactctcctctccatcccgtatccagtcaacgaaacggaatattccaatgctctttgtccgg

SEQ ID NO: 542119 - DNA, 100 bp, Homo sapiens
aactacacagaccagtgggagagatggtggaagaacccagagcaagtgatttgtggagctatgatttcttcagtggtgaatttgtggtgtcacctgaacc

SEQ ID NO: 542120 - DNA, 83 bp, Homo sapiens
ctcacaaagcagaaactgcacaaagaatggaatagtgaaggaagcccagcctgagaatctcttatacacctccaaaaggccca

SEQ ID NO: 542121 - DNA, 83 bp, Homo sapiens
ggaagttacgcgaagtccacccagcgtttctgaggtgagaagccctaccactgcaactgggacggctgcggctggaagtttgc

SEQ ID NO: 542122 - DNA, 121 bp, Homo sapiens
ggcgcgatgaccacgctacgggcctttacctgcgacgacctgttccgcttcaacaacatagaaaaggccaaccttgctgttaccctctgcaatgacaaggaggagatcatggcccaggcca

SEQ ID NO: 542123 - DNA, 100 bp, Homo sapiens
agcatccctgcctggactggtcctgagattcctgaatcaggtgtggggatattcagctttgccaggtatggcagtgatttttatagcatgcactataaag

SEQ ID NO: 542124 - DNA, 97 bp, Homo sapiens
ggacagcgcagccggcccagagctcgggtctccggggaccgagtgacagagagtcgagggattgtggatagcctgcagaagttttcctcgctccctg

SEQ ID NO: 542125 - DNA, 82 bp, Homo sapiens
caggaagtatttttattggaagaggatctaggagaaaagcagtcattatggcgaaccttggctgctggatgctggttctctt

SEQ ID NO: 542126 - DNA, 100 bp, Homo sapiens
gaggacttagaggaactgcaggcccgctatcccaatcgctttaagctctggttcactctggatcatcccccaaaagattatttactggcaagatgagcag

SEQ ID NO: 542127 - DNA, 83 bp, Homo sapiens
gcgggatcttcaaccacctcgagcggctgctggacgaaggatattagaaatggctactccccagtcaattttcatctttgcaa

SEQ ID NO: 542128 - DNA, 50 bp, Homo sapiens
agcctgcggagcctgtggggcagggtttcgaaaaaacgatgaaatgaaag

SEQ ID NO: 542129 - DNA, 96 bp, Homo sapiens
acggatttcttatgttcaggatgaaaacagagatcccatcaggagaaggaatcatcggaatccttcaccatggcatccagcccggcccagcgtcgg

SEQ ID NO: 542130 - DNA, 100 bp, Homo sapiens
ggcgtgaaagtcgtgatatcatcgttgaactgagttcattcaaaagtgcctgcagtctgagcctgctcgcagaccaacagccagagaacttctgttccac

SEQ ID NO: 542131 - DNA, 74 bp, Homo sapiens
gtggacgtgctggtgtctgagtggatggggacctgcctgctgtggagcggtgcatgggtgccatgcaagagggg

SEQ ID NO: 542132 - DNA, 88 bp, Homo sapiens
gggcggcaaggacttcgagcagcctctcgccatttcccggatttggactgagcaacaaatttgaatctgaattcccttcttcattaac

SEQ ID NO: 542133 - DNA, 97 bp, Homo sapiens
cggggccttccatccgcttggccccacaggtgccaagtcctgccctgccaacttcttggcagctgccgacgacaaactcagtgggttccagggggac

SEQ ID NO: 542134 - DNA, 100 bp, Homo sapiens
ctccagtctggccgagttcatttccgagcgggtggaggtggtgtccccactgagctcttggaagagagacctaatctgggagcctgcaagtgacaacagc

SEQ ID NO: 542135 - DNA, 100 bp, Homo sapiens
ctcacaggtcccaccctggcccaggaggtcagccagggaatcattaacaagaggcagtgacatggcgcagaaggaggatttgcagttggaagatgataca

SEQ ID NO: 542136 - DNA, 75 bp, Homo sapiens
cgctggggtcccttttgcctcagatactattttgaagagccagctctcccaggcgctgaacggactgtcagacag

SEQ ID NO: 542137 - DNA, 82 bp, Homo sapiens
ggagagaagctgaagcattgcttcaaagcatggggctaactccagaatcccccattggtaacccaggtttttctgcctttta

SEQ ID NO: 542138 - DNA, 50 bp, Homo sapiens
ggaaaacaacttcgagggcagagtacaagtatgagttctgcccgttccac

SEQ ID NO: 542139 - DNA, 83 bp, Homo sapiens
tacccactatttctccatcgatgaggagctggtctatgaaaagcagttgtgaaaaacttcaggacaaaaatgtttcatttaag

SEQ ID NO: 542140 - DNA, 98 bp, Homo sapiens
tgttcagaagacaatggagaaaaaatggaaatactgtgctgtctattacatcatccagatacattttgtcaaggaaatgggcaagttcatgaaacctg

SEQ ID NO: 542141 - DNA, 100 bp, Homo sapiens
cgccgagctggacccggaccggttttgggacggcggacccagccgagaagacgccgctgggggtcccgcgccagtcgggccgtccgggttgctgcggggg

SEQ ID NO: 542142 - DNA, 51 bp, Homo sapiens
ttcctgtagagcctgtggagttatgagggcagaagtgcagttgaccaagca

SEQ ID NO: 542143 - DNA, 100 bp, Homo sapiens
ctccagaccgcgcggccgcccacagcccacccggccaaagcctctgccagacccgaatgattgaagatagtgggaaaagaggaaataccatggcagaaag

SEQ ID NO: 542144 - DNA, 74 bp, Homo sapiens
cgcccgcgccaccatcttcggctgaaggaggctgatccgatagagtaatacctaattatatcaccatgagatgg

SEQ ID NO: 542145 - DNA, 100 bp, Homo sapiens
ggaatccaggaatgctatgatagacgacgagaatatcaattatctgactctaccaaatattggaggacgagtaagtcgtgaattaaattatactcgccag

SEQ ID NO: 542146 - DNA, 100 bp, Homo sapiens
gggagtccagcctgaaataccagactcgctgcatacgagcgtttccaaacaagcagggtgttgaagatgctttttacacactggtaagagaaatacgcca

SEQ ID NO: 542147 - DNA, 85 bp, Homo sapiens
gggaccgtgtgggaggcaggacttacactcttaggaatgagcatgttgattacgtagatgttggtggagcttatgtgggaccaac

SEQ ID NO: 542148 - DNA, 83 bp, Homo sapiens
aaagaacagtgttctacccatggtttacagagcactagaagctccttccattcagatccagtggtgatcatgtgtgcgagcag

SEQ ID NO: 542149 - DNA, 75 bp, Homo sapiens
ccgagcgctactcgcaggaggtcttcgctcagcccacccttcaagccccaggtcacgtcggagactgacaccagg

SEQ ID NO: 542150 - DNA, 110 bp, Homo sapiens
cgggagactcgcgcagcgccatggcccccattggcctcaaagctgttgtcggagagaaaaaaaccgggaagatcctgacggagttcctccagttctatgaagaccagtat

SEQ ID NO: 542151 - DNA, 49 bp, Homo sapiens
ccgcgctgggtcggaagtgagcaggaagctcttcgtgggcggtcttgac

SEQ ID NO: 542152 - DNA, 84 bp, Homo sapiens
cgcgggtccgtgcgcccagcgtcccagggcccaggccgagcagttcaggacctcaaggggctcggctatgagaaggggaagcct

SEQ ID NO: 542153 - DNA, 100 bp, Homo sapiens
cggatcccacacctccggaccgagggacgcggtaaaaacaggccctggacagcacttaaaccacagtgaattggcaattctactaaacctactacaatct

SEQ ID NO: 542154 - DNA, 82 bp, Homo sapiens
gaaggattcaaatgctagcagacacggtggctactctgcctcggggacgaaagcaggtaatactgcattgcatgattgtgca

SEQ ID NO: 542155 - DNA, 75 bp, Homo sapiens
gatgaacaaaaaccagttgcgaaatggtctgaggcagagtgtggttcagtctcttgtggctcagagcataatttg

SEQ ID NO: 542156 - DNA, 75 bp, Homo sapiens
gaaagggttgtagacatggcggccatcagggaactccattctccaactttaaaaatatctacatgtgccccaagt

SEQ ID NO: 542157 - DNA, 100 bp, Homo sapiens
gttggactggtgggaactgggaacactggagacctgatttctaactgacgctaccgtcgcggccgccgttatcaaatgcttgatggaaaatcttgaggaa

SEQ ID NO: 542158 - DNA, 90 bp, Homo sapiens
agcgactgcaggcagaagctgagacggctaaggccccttcacagatgtagtcactacaaatcttaaattgcgaaatccatcggatagaaa

SEQ ID NO: 542159 - DNA, 75 bp, Homo sapiens
cgaggagagacagaagaagctggaggccggcaaagccaaggaagaaggtagataatgactataatgcccttcgag

SEQ ID NO: 542160 - DNA, 97 bp, Homo sapiens
gagaggtacctctccttttccctctccctttccctaaggagacctgagcctgccatactgagtctatggacagttccacagcaatgaatcaatgcag

SEQ ID NO: 542161 - DNA, 83 bp, Homo sapiens
catgaacagaaacacctaggaagggagaactgcttgcaaaccatactgggtacatcaaagttgactggcaacgagtggagaag

SEQ ID NO: 542162 - DNA, 85 bp, Homo sapiens
cagcagatggcggatgccctgcagtacctgcagaaggtctctggagacatcttcagcagccctggcaggtgcccggcccgccccc

SEQ ID NO: 542163 - DNA, 83 bp, Homo sapiens
ctccgacaagacgggcacgctcaccaccaatcagatgtctgtctgccgggtctgtcttgcagccgatgagcaccatggggatc

SEQ ID NO: 542164 - DNA, 100 bp, Homo sapiens
acaaccactcaggaaataaaccagtatgactatgaatatgatgaaaatggtgacagagtcgttttaggaaaaggcacttatgggatagtctacgcaggtc

SEQ ID NO: 542165 - DNA, 75 bp, Homo sapiens
aataaccacttaccccttctcaccgaggaagagcgggagaaagggtggacgccctgcttcatctggcccgccaga

SEQ ID NO: 542166 - DNA, 100 bp, Homo sapiens
tggatgaaggagtaggacttgtgcattcaaacatagcaactgaggaatgggatggtctagtaaggataacctttgttaggaaaaacaagacactctctgc

SEQ ID NO: 542167 - DNA, 75 bp, Homo sapiens
gggcctccctgtccacccaggagctggaggaagcagggacggagctgtgcagggctatgcagaagctcagcctgg

SEQ ID NO: 542168 - DNA, 98 bp, Homo sapiens
ggagcgcgatgtggagcgcttctttaagggctacgggaagatcctggaggtggatctgaagaacgggcctgatcaaccccgtataaccaaagatgtaa

SEQ ID NO: 542169 - DNA, 75 bp, Homo sapiens
acatgaatgaccacggctttgtgtcggagtctagccagtcagaggcgtctgtccggagggaggaatcacccatgg

SEQ ID NO: 542170 - DNA, 80 bp, Homo sapiens
ggaaacttcaatgtgttagctgttagtgccttgcaaatttagtatcaaatgcaccttatgatcgtctaaaactcagcctg

SEQ ID NO: 542171 - DNA, 82 bp, Homo sapiens
ttttaagaaaaggcattgaggaactcaatcaaaccagtattcttttcacacagattgaaggattctcattaagcaaactagg

SEQ ID NO: 542172 - DNA, 75 bp, Homo sapiens
ggaccgcctgctgcactttgggttcaaggcgacagctagcttgtcactttctgcaaaggtttccctcagggagcc

SEQ ID NO: 542173 - DNA, 83 bp, Homo sapiens
ccagatgcctcagtctccctctccctgcagtccaccacagatgccacagcagtactcagaatatctctgaagatgtgattttt

SEQ ID NO: 542174 - DNA, 82 bp, Homo sapiens
ctgtgggcgctgctggcgctctggctgtgctgcgcgacccccgcgcatgtatacgctcaacggcaagaaagtggaagttgcc

SEQ ID NO: 542175 - DNA, 75 bp, Homo sapiens
tgtcgcccgttggccgcgcggcgccgcgctcggcggccgccattgcagatgcgacctaaagtcatgtggcacctc

SEQ ID NO: 542176 - DNA, 101 bp, Homo sapiens
gggcaccgcgcaccgtgagctgggcaaggcagaggaagccaactccaagctgcagcgcgacctcaaggagctcccagaaggcaggattctgaagaccactc

SEQ ID NO: 542177 - DNA, 75 bp, Homo sapiens
tttgatgttcgtgactttggaaagctccataatgggagaagtaaagaacaaagacttaaggaacagcttggcgct

SEQ ID NO: 542178 - DNA, 74 bp, Homo sapiens
acccgtgcgcggctgcgctttcctgtccccaagccgttctagacgcggtgtactaatggtcacttgatgtgcgc

SEQ ID NO: 542179 - DNA, 98 bp, Homo sapiens
ccgggaaggggctgacggccgtgcccgaggggctcagcgccttcacccaagcgctgcagctgagtatgtcccagagaaggtgaagaaagcggaaaaga

SEQ ID NO: 542180 - DNA, 100 bp, Homo sapiens
ggaagaaaaaacttgatttggtgactgcaggaagcaacacgttgctgcttttattctacagataatgatctccagcaccctgccggtggcactactgaga

SEQ ID NO: 542181 - DNA, 100 bp, Homo sapiens
ggtttctttcttaaaggactgatttttagaactccacatttgagacagagggggaagacggtggggcctccccacctgccccgcagaagatgcagttctt

SEQ ID NO: 542182 - DNA, 100 bp, Homo sapiens
acagttggaatcttgggatccaatgttgaaggaaaacaggttttacagaaaacagtctctgctggatgaaccgaatcctaacagtccagccaatagccag

SEQ ID NO: 542183 - DNA, 74 bp, Homo sapiens
caaagagcttgacaaactacttcaaggagaagtttttgcgatatgtggaagctgtgatgctttgggaaactgga

SEQ ID NO: 542184 - DNA, 98 bp, Homo sapiens
taccgcaatgtgatgctggagaactttacacttctggcctctctgggtataaatgaccaaggattgtacagagttgtgggggtgagttcaaaggtcca

SEQ ID NO: 542185 - DNA, 50 bp, Homo sapiens
atcacttctgcagaatccagtgggtttccacttgagcggcacagtgacag

SEQ ID NO: 542186 - DNA, 90 bp, Homo sapiens
ctgtctcaaaaccctcctcatcatctactccttcgtcttctgggacagctttcctgcccgctttggaggagtccactttgtcaaccagcc

SEQ ID NO: 542187 - DNA, 88 bp, Homo sapiens
atagagaatgtgacacggacaaggatagttttggctgatgtgagtatgcatcaacaattgtgtcaggaacttcaaagggacaatgtgg

SEQ ID NO: 542188 - DNA, 75 bp, Homo sapiens
aatgcagttcatcacatcattcatgattttcaggggtatactctagttgaatatgaaacatacaaggaagcccag

SEQ ID NO: 542189 - DNA, 96 bp, Homo sapiens
ctccagcctctctcatcttgggaatctgcgtcagaagtcactcgcagtcccgtcagcccaggcagcacacttctgcttttgttccttcatcaggac

SEQ ID NO: 542190 - DNA, 76 bp, Homo sapiens
aacaatggcatttacagaaagagtcaacagcagtggcaacaggttgcacaccgatgctccagaattgtgagggagc

SEQ ID NO: 542191 - DNA, 74 bp, Homo sapiens
ggctcgggagattcagccgtgaagcaagtgcagatagatggccttgcgaaggcatgcaatccacagtagtgact

SEQ ID NO: 542192 - DNA, 50 bp, Homo sapiens
agtctctgcacctcgcgccccagcagatcacaaaatttgtccaggataga

SEQ ID NO: 542193 - DNA, 100 bp, Homo sapiens
gcgcaggaccggccgcagtgccacttcgacatcgagatcaaccgggagccgggaaaatgcaacatggcagcagcaatggaaacagaacagctgggtgttg

SEQ ID NO: 542194 - DNA, 100 bp, Homo sapiens
ggcctacagcctcctcaacgaatacggcgacgacatgtatgggccagaaaaggtggtgaaggcatttgtgatcctggcctcgcagttcctatcccatgac

SEQ ID NO: 542195 - DNA, 83 bp, Homo sapiens
gagccggagctgggcgcggattcgccgaggcaccgaggcactcagaggagaaaaatggctacaaacttcctagcacatgagaa

SEQ ID NO: 542196 - DNA, 78 bp, Homo sapiens
caagagcagaagccaggcagcctcatcgctgacataggtaggtagccatccaagcttcctgaaggaggttcgagatca

SEQ ID NO: 542197 - DNA, 75 bp, Homo sapiens
ggctaaccagttagtggtgctcaacgtgtacgacatgaaagtgaagtcactgcttttgctgtcttggatcaagac

SEQ ID NO: 542198 - DNA, 101 bp, Homo sapiens
ccgtcactccccagggcggcatcgtcgtctatgggggctactcgaaacagtaagactttgaccccgacgcaggcttcagtgattgccgcggatcagaagcc

SEQ ID NO: 542199 - DNA, 100 bp, Homo sapiens
ccactgtttactacaaatgcttgctctactagtggaaattctaatctttcacagacacagccattggaaaagaagtttgttcgagtttcaggagaagcaa

SEQ ID NO: 542200 - DNA, 100 bp, Homo sapiens
ttggaagaactccgtgcccagatgctcataaggattgtcctctttctacaaaaggctctagaccaagatagaacagcccttcagaaagtgaagaagtctg

SEQ ID NO: 542201 - DNA, 75 bp, Homo sapiens
cgcaaccccagatccatttacactttacatgttctaagaacggaagcatctgggctggatggaatttagcatcaa

SEQ ID NO: 542202 - DNA, 82 bp, Homo sapiens
gagcagtatgccgccctggccacggggactctcttctggatgggggatatgagactttctactcggaatatcctgagtgttg

SEQ ID NO: 542203 - DNA, 100 bp, Homo sapiens
gcgatggcttcagacagcatatttgagtcatttccttcgtacccacagtgcttcatgagagatgcagacaatctctttgaacatgaattgggggctctca

SEQ ID NO: 542204 - DNA, 50 bp, Homo sapiens
tccagaccctgccttctcttctgaaagatggtcatcatgggccagtgcta

SEQ ID NO: 542205 - DNA, 83 bp, Homo sapiens
caggacagtcgcgaggttcgagtgttgcagagcctgcggggcaagatctgaggatcccttttcccccagaaattactcaatgc

SEQ ID NO: 542206 - DNA, 83 bp, Homo sapiens
caccgaatcgctgtcacgccggcaggaaattcgaaatgagtcccatgactatcctcatagagtggccaagtttccagaaaaca

SEQ ID NO: 542207 - DNA, 100 bp, Homo sapiens
agtagatgataaagatgatgatatccttctcaaccttgtgggatgtgaaaactctgttactgaagatacccagaaagcggtactctagaaatgaatgtca

SEQ ID NO: 542208 - DNA, 114 bp, Homo sapiens
gaccctcacggagctgggcgacgagctgaccctgggagacatcgacgaagttaaagtctgacacggctgctgcagctgtgcgccaaatgaatccacatatccgggtgacaagcc

SEQ ID NO: 542209 - DNA, 75 bp, Homo sapiens
atggtttctctcaggttctgagactctaggcaggctggcaggcaacaccttaggtgcttttttaggaccaaagga

SEQ ID NO: 542210 - DNA, 100 bp, Homo sapiens
cgggccttatcctgttggaaacgatcctttttggatctctgctcctatactttccagttgcaggcgccccactggttactgcaacgaccactgcagtgtc

SEQ ID NO: 542211 - DNA, 82 bp, Homo sapiens
atttgctacagcatcccacattaagtcaacgagttttactacccttggatgctgctgttgacatggaaaagattgaggaaca

SEQ ID NO: 542212 - DNA, 51 bp, Homo sapiens
ccctggtatatgcacttttcaggttacattgattacccacctagtacaaca

SEQ ID NO: 542213 - DNA, 95 bp, Homo sapiens
gtatgaagaacagtcacaggacaggagttaacagagcagtttcataaagttgaatctcaactgaataagctaaatcatctcctcactgatattct

SEQ ID NO: 542214 - DNA, 100 bp, Homo sapiens
ctgagcagaggacccggcgggcggcctcgcgggtcagggtgaggtggctttgaccccgggttgcccggccagcacgaccgaggaggtggctggacagctg

SEQ ID NO: 542215 - DNA, 83 bp, Homo sapiens
ctcatctgtagagactgatttgcaacccttccgggaagccatagctctgcatgtttttggtgttgagccagacttgaccaggg

SEQ ID NO: 542216 - DNA, 82 bp, Homo sapiens
tgaaccatgtttggattgaagccgcctctgtattacttaccagatgtgaagttcatttccaatccgccctccatggtggcag

SEQ ID NO: 542217 - DNA, 74 bp, Homo sapiens
ctgccaccaccgctgccaccaccaccctgtgtgatccgccttattatgcagtacttgaaggagaacagtttaca

SEQ ID NO: 542218 - DNA, 83 bp, Homo sapiens
ccagcatcaaccaggaggcgttggtgctcacggccaaggccacgttgttgacctcctgtactggagagacattaagaagactg

SEQ ID NO: 542219 - DNA, 100 bp, Homo sapiens
cagtacgatacttatggtgaagaaggattaaaagatggtcatcagagctcccatggagacattttttcacaacatcccaggaacagcaacagcaacagtg

SEQ ID NO: 542220 - DNA, 90 bp, Homo sapiens
cctggagtaccgagtcttcctcattacgatgagcaatgatgtttctgaggaggagagcgaggaagaggaagaggacagtgatgaggaaga

SEQ ID NO: 542221 - DNA, 100 bp, Homo sapiens
ctgcttcctcctgatgcccctgaacttgtccaggccgttaagaacaccgccatgttcagcaagggcaaatccagacagaacctttgacttggtgttgaaa

SEQ ID NO: 542222 - DNA, 83 bp, Homo sapiens
caagggagttttccggggccctctcagcaagaacgggaacaaaactctggaggatctcctgatgcagtccagcaaagaacttt

SEQ ID NO: 542223 - DNA, 88 bp, Homo sapiens
aataaagagtgaagaagttccagcttttgggagatggagtttcactgtgtcagccaggatggtctcgatctcctgacctcgtgatccg

SEQ ID NO: 542224 - DNA, 83 bp, Homo sapiens
tttgtgaccaactccacctacgcagcagacaaggggacaatgcagatcttcgtgaagactctgactggtaagaccatcaccct

SEQ ID NO: 542225 - DNA, 100 bp, Homo sapiens
ggagccgttcgtaatgcgagaggtgcgggcgcggctggcggccacgcagcgctgataaagcagtttgtgtccgacgtggcctggggggagctggactacc

SEQ ID NO: 542226 - DNA, 75 bp, Homo sapiens
gtgaaggggaagaggcccaccctggagtaaccctcactggagaatccagagccatgtgaagatgtgcttgcttcc

SEQ ID NO: 542227 - DNA, 112 bp, Homo sapiens
ctggagtctgcgaaggccgggacccggttccccggcccacagtgggggtgtgcaaacccgagagaactgggtcttgggcgtctttggtactggcttttttaggggtctgcct

SEQ ID NO: 542228 - DNA, 83 bp, Homo sapiens
tctttgcagactttggttggtggaggctgtggcaatggaacaggcttgagaaacagagttgttagcggttctcgagatgccac

SEQ ID NO: 542229 - DNA, 89 bp, Homo sapiens
gtctccgtgtggcaccgcgagctccgcaaagacagaggctccgtggtgaaggcgcgcgtgctgacctgtgtggaggggatgaacctgcc

SEQ ID NO: 542230 - DNA, 98 bp, Homo sapiens
acggcctgggtgctggcgaagcggaggccggaggaattggattcaagtacgtggctctgggagacctcatcatcctcatcacttttggcccgctggct

SEQ ID NO: 542231 - DNA, 88 bp, Homo sapiens
acagtgcagcatggagctgtttatagtttggaacccagactttgcggtggaaaaggagctcagttcccagaaataaaaatccattcca

SEQ ID NO: 542232 - DNA, 75 bp, Homo sapiens
tggacttggagctgccgccgccgggactcccgtcccagcaggtgtgcaactgaggaacatggctcaagaaactaa

SEQ ID NO: 542233 - DNA, 95 bp, Homo sapiens
ctcagcctggcctgggaccacacgcagaacagccggcagctgagcctggtggcctccgttctcttggcccaggtggcggccaaagccctggagat

SEQ ID NO: 542234 - DNA, 96 bp, Homo sapiens
agaggcagctcttcagcctatgggaaaacgttgtgtgacgtgatcctcatggtccaggaaagaaagatacctgctcatcgtgttgttcttgctgca

SEQ ID NO: 542235 - DNA, 100 bp, Homo sapiens
agacaataagtatgttccctactcggagagcttcagccaagttttagagaatacagattctgttcatcttgctctgaaattaaataattctgaactcatg

SEQ ID NO: 542236 - DNA, 122 bp, Homo sapiens
aatgattataacaaagaaacattcaccttgaagcataaaattgatgaacagatgttcccttgtcgattcattaaaatagaaataaactatcaatcttgcccagactggagaaaggactgcag

SEQ ID NO: 542237 - DNA, 82 bp, Homo sapiens
cctgcccctcgttgatgagagcattcgaagtgacctcagcagggcatccaggaacgtcaaggtcgtgggaaataaaaggcag

SEQ ID NO: 542238 - DNA, 100 bp, Homo sapiens
aaagttatgccttatgttgatatactttttggaaatgagacaggtgtttgtgaaccgaagtttagcaatggaaaagataaagtgttttggttttgatatg

SEQ ID NO: 542239 - DNA, 50 bp, Homo sapiens
ctggcgccgggtcccgcggggaaaaaatgcactcggtgatggaaagagag

SEQ ID NO: 542240 - DNA, 136 bp, Homo sapiens
gagtggatgaacatgtgcttggtgtcgtttttccttgagctgaacgtcttgcaacagtggccgcacgcatagtttggaaattttagcattcaggtgccaggaatgcagatgggacagccagtgccagaaacaggcc

SEQ ID NO: 542241 - DNA, 95 bp, Homo sapiens
tgacctagcaaaagttgatgatcttccccctggcatgttatttgaaagcaattgagacgcaaccgaactttgcagtagcttggagtaatcttggc

SEQ ID NO: 542242 - DNA, 100 bp, Homo sapiens
ccgcctacgaccggaacgggaaccaagcgtttaatgaagacaatctcaaattcatcctcatggactgcatgctgcaagctttcttcctggtggcagatga

SEQ ID NO: 542243 - DNA, 98 bp, Homo sapiens
ctaaatcgaggaataaacatcacaatttatggcaaaactttccgcgttgttgactgtgaccaattcacacaggctaaagaattacctccaaagccatt

SEQ ID NO: 542244 - DNA, 100 bp, Homo sapiens
agggaggagactcctgaccctcagaatgatgggatggaggtggataccacaccaacagttgctggacagtttgaggatgcagatgttgatcactgaaaat

SEQ ID NO: 542245 - DNA, 83 bp, Homo sapiens
aggaacttggttccccctccctcagcttccgccccaaaagtatgccttcaagacagtgtgttggctttctggaaacatgggat

SEQ ID NO: 542246 - DNA, 90 bp, Homo sapiens
tttcaaaagaaacatgttggaagatcaaaggcacagtatttgattttcatcaagcagctgatggtatccaggaacaacagagacaagaac

SEQ ID NO: 542247 - DNA, 100 bp, Homo sapiens
gcaaaagcagctggaggaggctgaggaggagaggacagaggtgcctggggcaacctccaccttgacggttccagcattatgccagtacatacaggcttct

SEQ ID NO: 542248 - DNA, 95 bp, Homo sapiens
agctcgtagcctgccactccgtgcgttttatgaatgaagctatggctacagattccccaagaagacccagtcgttgtactggtggagttgtggtt

SEQ ID NO: 542249 - DNA, 82 bp, Homo sapiens
accagaccaactacctggtggtggctgccatgatgatttccattgtgggggacacggccaacacggtgaaggaaaagttcgg

SEQ ID NO: 542250 - DNA, 100 bp, Homo sapiens
gtgcacccgtctgtggagtcggggggaggccacagccacggacgccgaggccagagaagctggttcattttccagacactgaaagagcagaatggctaaa

SEQ ID NO: 542251 - DNA, 88 bp, Homo sapiens
tgacaagctcaaggcctgcgaggtcacaccgacaaatctgaagcgggtttgccaggggagtgtacccgtctccccagcctgggccacc

SEQ ID NO: 542252 - DNA, 74 bp, Homo sapiens
ctgtgaccacccctgaagaaattgcacagcttgtattggttggtgatggtggtactggaaaaacgaccttcgtg

SEQ ID NO: 542253 - DNA, 89 bp, Homo sapiens
tcccaggaagtagaagaagactacaacccttgtgaagaggacctcttcgtgctaccattactgggacttccacccccaccacgtgcaca

SEQ ID NO: 542254 - DNA, 99 bp, Homo sapiens
gaccagcgtggttcctttcgtgctggcgccgcgacctccggatgacccgggcttcggcccccaccagagactcgagaggtgtgggaaatggaactggat

SEQ ID NO: 542255 - DNA, 88 bp, Homo sapiens
agtatacaccatgagcaaagctcaccctcccgagttgaaaaagaacttgctactaccagcaccatgccctaccaatatccagcactga

SEQ ID NO: 542256 - DNA, 90 bp, Homo sapiens
atgagtgaaaactctataccgtcatcctcgtcgaactgaggtctcagccttggatcaggagattattgaagtagatcctgacactaagga

SEQ ID NO: 542257 - DNA, 75 bp, Homo sapiens
ggagcaggctgccattgtcaaagagaagggaaccgtatacttcaaggttttggaatcattttcaaataaaactcc

SEQ ID NO: 542258 - DNA, 100 bp, Homo sapiens
aaattctgtgattactgcaagtgctggatagcagacaataggcctgaaaaaggaacttctttcaagagctgatttggagttaccctggagaccactttat

SEQ ID NO: 542259 - DNA, 83 bp, Homo sapiens
agagaaggcactcaagtttatggtggataatattaatgcagctgtgatggatttgaaaaaaaagaagatccgcagtctaagtg

SEQ ID NO: 542260 - DNA, 82 bp, Homo sapiens
gctggcgctggggatccctgctcttcgctctcttcctggctgcgtccctagggtctcttgcaacgtgtgagctgcctcttgc

SEQ ID NO: 542261 - DNA, 83 bp, Homo sapiens
cagcgttccggaggtgagggcgccgcgccaggccgggcggcagtttgggagagcccatggtgactgcgtgagtggagcccagc

SEQ ID NO: 542262 - DNA, 100 bp, Homo sapiens
aagtgaccaaaaagtcatctacatttcagtggccgctggatttccagctggacagactcatttgaagacacgattagaagagatcagattggctgtggaa

SEQ ID NO: 542263 - DNA, 97 bp, Homo sapiens
ctgcaggtgctagcgctgctgggggccgcccatgaaagcgcagccatggcggtcacatcgatcagacaacaacatggcaggaccccaggaaggccat

SEQ ID NO: 542264 - DNA, 50 bp, Homo sapiens
gtagaagaccagaagtggatggagaaaatgcaatgctggattctttcaca

SEQ ID NO: 542265 - DNA, 90 bp, Homo sapiens
tttatgactgcaaggtggagcactggggcctggaccagcctcttctgaaacactgggtacctggagtagaacagaaaaattattatgtct

SEQ ID NO: 542266 - DNA, 100 bp, Homo sapiens
ggctgacaggaatcttctggtgtactctttttatgaaaagggctactacaaagttctgggaaagggaaagctcccaaagcagcctgtcatcgtgaaggcc

SEQ ID NO: 542267 - DNA, 97 bp, Homo sapiens
cctagccaatacagggaagtggttacagatttgttcccgacaaggagttttctggttcagaccgtagacagagaggccgagaaggaccagtgcagtt

SEQ ID NO: 542268 - DNA, 75 bp, Homo sapiens
ggcagcgggctttgccagcaaaaccgaaacaggacagagcgggatgccaccagcttgtccaaagggaagttccag

SEQ ID NO: 542269 - DNA, 100 bp, Homo sapiens
gcatgggaaggaggccgagccgggatctcaggtcctcgggggcggcggccacgccaaggacgggtacggaaaaaggaccagatcaatattgaaacaaaga

SEQ ID NO: 542270 - DNA, 50 bp, Homo sapiens
ggagaagccgcccaaagaactgctgctcaagatgaggaggtgcgcggggc

SEQ ID NO: 542271 - DNA, 100 bp, Homo sapiens
caaacttggacagctctctatgttgtcgagatgtccacagaaggaggatttggtggtactagcagcagtgatgcccagcaaagcctacagtcgttctggc

SEQ ID NO: 542272 - DNA, 82 bp, Homo sapiens
cgagtccagcagctgcgcaccatccgcgaatggctggtgtcctggggaccgcatggaaatgcatcgtgattcctgtccattg

SEQ ID NO: 542273 - DNA, 100 bp, Homo sapiens
agttagtggtgctcaacgtgtacgacatgttcgatcctttggtacagaagacagaccgacagatcgtccaataccacctcgagatgaagtctttgaatac

SEQ ID NO: 542274 - DNA, 76 bp, Homo sapiens
tttgtctctgatgagctgagaaacaaagccacccagccaatgaaggcaagaagctaccggatgtttcacgacgaca

SEQ ID NO: 542275 - DNA, 75 bp, Homo sapiens
gagaggctgagctgctccaggacttggggattctgtttcactgaggccatctatccgatttcaaggaagccaagg

SEQ ID NO: 542276 - DNA, 98 bp, Homo sapiens
gaaaacatgacgtctccagccaaattcaaaaaggataaggagatcatagcagagtacgatactcaggtcaaaggccccaggcatggaagagctgatat

SEQ ID NO: 542277 - DNA, 100 bp, Homo sapiens
ttgctccttcgatactcccgatgattccatacggaataagctcattttaattgccagaaacaaagttccttccaggtctccgcggaaaactgaagattcc

SEQ ID NO: 542278 - DNA, 100 bp, Homo sapiens
atttggcacgtgcttcctgatgacaagtgttgacctaaccaatgaagaaacaactgattccaccacttctaaaatcagcccatctgaagatactcagcaa

SEQ ID NO: 542279 - DNA, 80 bp, Homo sapiens
ccgcttcccgacgctgagggcagccccgtccagggcagaatccagagaccacatttgaagtatatgttgaagtggcctat

SEQ ID NO: 542280 - DNA, 75 bp, Homo sapiens
gatgtaaatgtcagtggaaaggagagctaccatcactaagaacattctagtatgccagtagaaaaaaatatcact

SEQ ID NO: 542281 - DNA, 82 bp, Homo sapiens
cggagctcaaccatgaccaagtgcagaaggtgagaagccctaccactgcaactgggacggctgcggctggaagtttgcgcgc

SEQ ID NO: 542282 - DNA, 110 bp, Homo sapiens
ttcagtctctttggctggcctgaaggaccccattctttttctattccagagactataagaaggtctttcacctttacagtgaacaatgtacccagtggacacatcctagt

SEQ ID NO: 542283 - DNA, 83 bp, Homo sapiens
aggaggctttcctgctggtggcaaccgcctacgagacactcaagggaagactaggagagctggagttgcagttaaaacatgga

SEQ ID NO: 542284 - DNA, 50 bp, Homo sapiens
ggagaaaatacggcattgctagtatttaaaagacccaactcagcccatct

SEQ ID NO: 542285 - DNA, 75 bp, Homo sapiens
gctgtgtcacttgtggctgcagaccctgcgggagatgctggagaagctgagtgccgtgagcgatgtggagatgca

SEQ ID NO: 542286 - DNA, 100 bp, Homo sapiens
gtttttcgccgtcatgggcgcctcggccgccatggtcttcagcggagaagtacagcatcggggagcccacagtgccatccaccctggcagaggagtttac

SEQ ID NO: 542287 - DNA, 100 bp, Homo sapiens
ggtagtgaccgggtgaagctgatggagagtctagtggttggagacattgcagagctaagaccaaaccagattcttcaaagtgacgcctcccccaggaagc

SEQ ID NO: 542288 - DNA, 75 bp, Homo sapiens
ccatcctgcacttccgagccgcccggccacccttcgtcatctgcgtgaagctgaataccctctaccatctgcttt

SEQ ID NO: 542289 - DNA, 88 bp, Homo sapiens
gaatcccctgtttgagaaaaggcctaagaattttggcattgccactgaggcggctcccagctgcgttggcgacatggccgacaccccc

SEQ ID NO: 542290 - DNA, 83 bp, Homo sapiens
cgcacagctgctcccttcgccttcgccctttccacctcgcggcagttcgtctattgcgtctgcagacatggatttcaaccagc

SEQ ID NO: 542291 - DNA, 100 bp, Homo sapiens
aacagtacacatccattcatcatggtgtggtggagaggttgaaggctgcattgactcaccaccctgctgccatgtcaaatgggaacatgaacaccatggg

SEQ ID NO: 542292 - DNA, 83 bp, Homo sapiens
attcctccccagcatgtcagcatgaccaagcgcctctactacctctggatgtagctcccagctcctccagcagccgacaggag

SEQ ID NO: 542293 - DNA, 80 bp, Homo sapiens
aagaggcactgctgagggggcgcgaggggaacggaggccagagctgcgttgctgaacctgtttgcatgagttgctcctga

SEQ ID NO: 542294 - DNA, 80 bp, Homo sapiens
tatagctaagactccaggacacccctgaagccgagaaatggattctaacattttcagagaaccttttggaaagaacaagc

SEQ ID NO: 542295 - DNA, 74 bp, Homo sapiens
agaggatacctctgcgatcccgggtcatctccagatgctagggttatggggacaagaatccttcaagaaacagg

SEQ ID NO: 542296 - DNA, 75 bp, Homo sapiens
tgggcaaactaagccgattttccggaaaaaggtggacattgaagtggacctaattcggttttccttttaaaagcc

SEQ ID NO: 542297 - DNA, 98 bp, Homo sapiens
ctgaatgttctggaaatgacttctgaagatttagaaaatgctctaaaagcagtcatcaatgacaaaagttactatgcgagtcagaagaaaacatttga

SEQ ID NO: 542298 - DNA, 75 bp, Homo sapiens
gtggtctgtgaagccacacagtgtccagatacgaggggcatcgtgagagcaattcgagattaccagggccccctg

SEQ ID NO: 542299 - DNA, 98 bp, Homo sapiens
ctagtgtgtcaactcagcgtttctcctctcgtccctgagctgtgacttgtggtccctaggggtgattatctatgtgatgctgtgcggataccctcctt

SEQ ID NO: 542300 - DNA, 80 bp, Homo sapiens
cagggagccaagcgtcctgcccggccatgatatcatcaagttgaatcgaaaggaagggaagaagcagaattttccaagac

SEQ ID NO: 542301 - DNA, 95 bp, Homo sapiens
aagatggcggctgggttcaagctgtcattatttgtatcaaaaacaaagaatttgaaaaggcttcaaaaattttgaaaaaacatatgtccaaggac

SEQ ID NO: 542302 - DNA, 74 bp, Homo sapiens
ccgaacgcggactcgccacccggtgtttaactgctgaagagatcttttcccttcatggcttttcaaatgctacc

SEQ ID NO: 542303 - DNA, 75 bp, Homo sapiens
tgcagtacacacactggaacacacaccagccgcggttaaagcacgaattgggagctctcagcgacatcaccagtc

SEQ ID NO: 542304 - DNA, 100 bp, Homo sapiens
agttatattccatctactgtctttttcttcaatgggcagcatatgaaagtggattatggagattcagttgtggaaattctttttgaacaagataatgaag

SEQ ID NO: 542305 - DNA, 75 bp, Homo sapiens
ttggaaactctttgggaaagccactcgaaaagggaagtgttcgccagttactacatgaaaagataagagatgctt

SEQ ID NO: 542306 - DNA, 74 bp, Homo sapiens
gcctatgagcctcaggagctgaagccctttgtgactgcaatctcgaggtactccaaagattcaggtttactcac

SEQ ID NO: 542307 - DNA, 100 bp, Homo sapiens
tgcgtgggtgcctggagatgaagctggaaaggcctgaggagcgatgcgacaggcatgatggaggtcgagtcctcctactcggacttcatctcctgtgacc

SEQ ID NO: 542308 - DNA, 100 bp, Homo sapiens
agtatttggggtctacctcctgtggtttttgattcaagtcctgttctacctactgccaattggaaagtgggtaattccagaattgattggccataccatt

SEQ ID NO: 542309 - DNA, 100 bp, Homo sapiens
ctccttggtgagaagaccaccacagcggcagatgaggacggggacttggttgccttttccagtgacgaggaattgacaatggccatgtcctacgtgaagg

SEQ ID NO: 542310 - DNA, 96 bp, Homo sapiens
gcagcgcgggatcccagcctcaggcgtgcgcggacggtgtgcggacaaatcttcctattttcaagctgaaagaatctactgttagaagaagataca

SEQ ID NO: 542311 - DNA, 75 bp, Homo sapiens
gtccgagaacgccgcgctgcgcatctccaacagcgacctgagcggcctcctcgctggggaggcagagtcctcgcg

SEQ ID NO: 542312 - DNA, 75 bp, Homo sapiens
tgatcctgcagcgtctgctagtggagcatggggcatccccatcaggagagtcttgctctgttgccaggctagagt

SEQ ID NO: 542313 - DNA, 76 bp, Homo sapiens
ccagcacccgccgtgccgcatgagcatcgcggagcttgacccgtccatcgctgtgagacggggtttcactgtgtta

SEQ ID NO: 542314 - DNA, 76 bp, Homo sapiens
gccacccccataaggcataggccaagaccatacccgccgaatgtagggaagacactgatcaaggtggcagaagctg

SEQ ID NO: 542315 - DNA, 83 bp, Homo sapiens
ccggggacggcgaggccctcatgtaccacacggtacgtcagcctgtcatatgcatcaacaaccatgtattttgttcgatttgt

SEQ ID NO: 542316 - DNA, 88 bp, Homo sapiens
actacagctggagcgcccagaggcgagccctggtggaggaagagctgatttcatgccaatattgggaaccaacctaaatccagaattc

SEQ ID NO: 542317 - DNA, 100 bp, Homo sapiens
tgctgaaagaggctgtggcagataggaccacgtttggcgagctcatccagcccttctttgaaaaggagatggcaggacggggaggtttactgcatcgacg

SEQ ID NO: 542318 - DNA, 80 bp, Homo sapiens
cggctcagcggtctgatgcctggagcaccactgcagccagaaagcgaggaccaagaatcgccttcagccctgtctggtgc

SEQ ID NO: 542319 - DNA, 83 bp, Homo sapiens
cctgggatcctccctgcgccatccttctccactcccggacccctgccccagagaagtcgaggttagagggaactgggaggcac

SEQ ID NO: 542320 - DNA, 82 bp, Homo sapiens
cctgctcctcgctctgggcgtggaaagggctctggcgctacccgagggtggcccagttgaaatccttcccttcctctacctt

SEQ ID NO: 542321 - DNA, 50 bp, Homo sapiens
aaccagcctttggtcatcaccagggaacaggcagaagctgaagggtgtca

SEQ ID NO: 542322 - DNA, 90 bp, Homo sapiens
cagattcgcagtggtcgcttcttctccttggccattcctgtgtttctcactttgcataatgtagctgaagttatcatctgtgggtaccag

SEQ ID NO: 542323 - DNA, 75 bp, Homo sapiens
ccacaggatagcatatgaagttcgtgatattaagaccattgtgatgaatgactgtattatccgaggggatctggc

SEQ ID NO: 542324 - DNA, 87 bp, Homo sapiens
aagcgaaaggctattgttgcagaccggatcctgataacttaagtgactctctcttttccggtgatgaagaaaatgctgggactgagg

SEQ ID NO: 542325 - DNA, 74 bp, Homo sapiens
ggacattgactggggggctcttgaagatgcaaccttaaaatcagtgacaagaaacattccaaacaagcaacagt

SEQ ID NO: 542326 - DNA, 74 bp, Homo sapiens
ggctccgcggcgatggcgctctataacccctaccgccacggttttgcggctagttggctattcaagaaacctcg

SEQ ID NO: 542327 - DNA, 100 bp, Homo sapiens
tgggttactaaacatgcagcagaaaatccagggaaatataacattcttggcacaaatactattatggataagatgatgaatcaggaaacccaggcccaac

SEQ ID NO: 542328 - DNA, 154 bp, Homo sapiens
cgctgctgctactgttgtcaacgccgccgctgctgccgtcgtcgccgtcgccgtcgccgtcgccctcccagaatggtccatccgccatgtggcccctgtggcgcctcgtgtctctgctggccctgagccaggccctgccctttgagcagagagg

SEQ ID NO: 542329 - DNA, 111 bp, Homo sapiens
ggcaacttggcacttagaaccgcagcagggacgtcggtttgctatcgggactcggcgaggacgatggtatacctcaagtttactatttcggcccttgtggtaaatacaatg

SEQ ID NO: 542330 - DNA, 98 bp, Homo sapiens
agaaatgaaacagatgtttgtgcagcgagtaaaggagaaagaagccatattgaaagaagctgagagagaggttatctgtgctacaattgcatttggaa

SEQ ID NO: 542331 - DNA, 101 bp, Homo sapiens
tggaatttcatctacgtcttccacacacttggtactccaaagattcaggtttactcacgtcatccagcagagaatggaaagtcaaatttcctgaattgcta

SEQ ID NO: 542332 - DNA, 98 bp, Homo sapiens
ggcgccgcggactgtcctttcgtggctcactccctttcctctgctgccgctcggtcacgcttgctccattcagcagccctggcatcactaaagggaga

SEQ ID NO: 542333 - DNA, 100 bp, Homo sapiens
gaagaccatctacatctcccacaggaagtgtcacacagcagtcaagtatgtcccaaacgtctggaacctcagaacctgttctggatccacagcaaatcca

SEQ ID NO: 542334 - DNA, 101 bp, Homo sapiens
cggcttcctagtgagtcggcggctgatttagaaggaggttcaggctacggtgagccgaaggttcacagctggagcaaagctgttgtttcacctgaggcagc

SEQ ID NO: 542335 - DNA, 90 bp, Homo sapiens
cgtgcctttgaccttctgccatgattgtgaggcctccccagccacgtgaaactctgtgagtaccagagtgcccactggttccaacagttc

SEQ ID NO: 542336 - DNA, 128 bp, Homo sapiens
ctgcagaaggacaagcaggtctaccgggccacgcaccgcctgctgctgctggatgggcctttgggtccccgaggattagctgaagctacagagatgtgcactcaagagtgcttggttttgggtcactc

SEQ ID NO: 542337 - DNA, 86 bp, Homo sapiens
gttcttgtttgtggatcgctgtgatcgtcacttggtgaaatgacaatggatgctctgttggctcgattgaaacttctgaatccaga

SEQ ID NO: 542338 - DNA, 100 bp, Homo sapiens
ccaaattcgcctccatctgtaccatggtatctcagatgaagacatcatcaacattactcttcctactggagtccccattcttctggaattggatgaaaac

SEQ ID NO: 542339 - DNA, 51 bp, Homo sapiens
tctttgcatccggagagtggacaagaaaccagccatacgtcgtgtgccggc

SEQ ID NO: 542340 - DNA, 83 bp, Homo sapiens
ccggcatcgtctttccgtcctctgaggcgacggccgcggctgcacaggtatgactttatcgagattcgggatggggacagtga

SEQ ID NO: 542341 - DNA, 90 bp, Homo sapiens
cgcatcatgccagggagccaagcgtcctgcccggccagaaccatggagtctggcagtaccgccgccagtgaggaggcacgcagccttcga

SEQ ID NO: 542342 - DNA, 95 bp, Homo sapiens
gcgcggatgggatccagctgttagtcgggtaggcataggctcagtagatgaaggcgtttctgagggcttgcctacacttcaaagcacgtctagca

SEQ ID NO: 542343 - DNA, 100 bp, Homo sapiens
cagcaatccttggctcactgaggaggtttgaacattaaccaggtggtatttgttggaaatttcttgagaattaatacgatcgccatgcggcttttggcat

SEQ ID NO: 542344 - DNA, 100 bp, Homo sapiens
ggaggatggagatgctctgtgccggcagggtccctgcgctgctgctctgcctggagtcgacttcaatgttcctatgaagaacaaccagataacaaacaac

SEQ ID NO: 542345 - DNA, 101 bp, Homo sapiens
aggcaagaccgaattcagaaggatatcgacgtcgtgatccagaagtccagagctgaggactgcctgtttgcagcctcttcagaagaaacttgactccttcc

SEQ ID NO: 542346 - DNA, 82 bp, Homo sapiens
aaaattttccgcaaaggaaggccttatgactacaacggcccacgagaaaaatatgcttttgaaatgacattaacagaaggaa

SEQ ID NO: 542347 - DNA, 98 bp, Homo sapiens
gctgccaagggctacagaagtgtgcatcccaaccttccttctgacaagtcccagggtccctgcaagtcatgaacaaaacgagaaagattatggaacat

SEQ ID NO: 542348 - DNA, 100 bp, Homo sapiens
ggaagctatgcagaataaagctcgagccgaaggacatatggaagacagagatgtcaatgaccccatgcccaaccgaggcggcaatggactagctcctggg

SEQ ID NO: 542349 - DNA, 108 bp, Homo sapiens
gaagaactcaatgcctctcagctccaggccttactaagcattgccctggagcctggtgttaatgttgactttgcaaaatgatccacccactttggaaacaggggtaga

SEQ ID NO: 542350 - DNA, 100 bp, Homo sapiens
ggagattctccggggacccttccgtatctgcctaggcattttgctgtctcctcctaatacgcctctgcccccattacttgtgagctgctgaacaaacaag

SEQ ID NO: 542351 - DNA, 100 bp, Homo sapiens
ggctgtagcattcgtgctatccctgggggttgcagctttgtataaggtgtgtttccattgtagaaaacctggtcatggaattgcagattgccccgccgcc

SEQ ID NO: 542352 - DNA, 50 bp, Homo sapiens
ccttatgcagagtggccgacttggttttgcacactagggaccaagaagcc

SEQ ID NO: 542353 - DNA, 100 bp, Homo sapiens
cactctcccagcctggagcagccggaccagcccagaaggcagcggcggcccaggccagcattcccgcatattaaaggtggaagaaggtccatatcttttt

SEQ ID NO: 542354 - DNA, 100 bp, Homo sapiens
ttgaactgcggtgacaccgagggttggggactcgaacccccgcttcgcagctcaggagcctgaggtccgaaagtttcagagactcctccactctctggga

SEQ ID NO: 542355 - DNA, 96 bp, Homo sapiens
cggtggactccttcggcagtccacccaccgccgccgcctcccagcgtatctggtgcaggccgtgagagcagcgggcaagtgcgatgcggtcttcaa

SEQ ID NO: 542356 - DNA, 74 bp, Homo sapiens
acaggcagtagcagcagcactggaggaggagggcaggtggagttctgcaagtcattcggggacccggccaaacc

SEQ ID NO: 542357 - DNA, 100 bp, Homo sapiens
tggttctccagttaaggttggaaagatggatgctacttcctattctagtacaggtttgcagattccgccagcagcacagcaagctctacagatgagtggc

SEQ ID NO: 542358 - DNA, 100 bp, Homo sapiens
ggactagggtcgccggggaagcggtggagaacatgcagctgaccctgaacctgcagacggagaacaaaggcagcgttgtctcaggcggagagctgacaat

SEQ ID NO: 542359 - DNA, 51 bp, Homo sapiens
gcgctctcttccaggacatcaaggaagccagttgagggaagttctccatga

SEQ ID NO: 542360 - DNA, 96 bp, Homo sapiens
gggaagatggcggaacaggctaccaagtccgtgctgtttgtgtgtctggagttgatctctctaatgtattagatcttcatgcctttgatagtctct

SEQ ID NO: 542361 - DNA, 113 bp, Homo sapiens
cccaggtgtaagcgcagaaagcaggcgaacccgcggcgcaataacgtgaactttgaggcgctgatcatcaccatgtcggtagtcgggggaaccctcctcctgggcattgccat

SEQ ID NO: 542362 - DNA, 82 bp, Homo sapiens
cgtgtctggagcagtggagcccaaagacccctggagacatgggggatatgagactttctactcggaatatcctgagtgttgc

SEQ ID NO: 542363 - DNA, 50 bp, Homo sapiens
agcagcagcggtagctgcccaaggagatacgatgaatggattaaagcaga

SEQ ID NO: 542364 - DNA, 50 bp, Homo sapiens
catacatttggcagaataaatgaaccagacctcctgacagtgagtgagac

SEQ ID NO: 542365 - DNA, 101 bp, Homo sapiens
gccttgggcctcgcgccggctatggccgtgccctggggctgagccctcaggagcatcagatccatgctgctgctgactcggagccccacagcttggcacag

SEQ ID NO: 542366 - DNA, 75 bp, Homo sapiens
cagaagcgcatttcagctcagcggagacagatcaatgagctaatgcacaagctgagtgtggaagccccacccaaa

SEQ ID NO: 542367 - DNA, 100 bp, Homo sapiens
aggaatgaagagaggcggccgggccccgcgctccgccccggcctagggccttgccccgggagcccgcgaggggttccgagtctgaggaagacataacctt

SEQ ID NO: 542368 - DNA, 101 bp, Homo sapiens
cagaagccatgcccctcaggctggaacttgccctgtctcctcgcagatgagactgtcaagaacaagtatgccacatcgaagcatgctaagatcagcactct

SEQ ID NO: 542369 - DNA, 51 bp, Homo sapiens
tatcaagccaaacatgcagaagataacaacgaacttgatgcaagtgatagg

SEQ ID NO: 542370 - DNA, 75 bp, Homo sapiens
gaaaatggaacagatttatccggggctggtgatccagttgatctctctaatgtattagatcttcatgcctttgat

SEQ ID NO: 542371 - DNA, 96 bp, Homo sapiens
ctggttacagctgtttccacgtgcggtgctcgtcgggagtgatcacctaccctacaggtctggaggcggctggtggaaatccaattccccgcggag

SEQ ID NO: 542372 - DNA, 106 bp, Homo sapiens
agacctgccaatttaccagagataattgataacaccctgtaacagctgaattacggtctttggtcaaacaattagagagaggggaagcttcagtggtagatcttaa

SEQ ID NO: 542373 - DNA, 82 bp, Homo sapiens
gtcgtggccggagcggcccgcgcctgggctgccggcacttcgcggcagatccagacatttaatgtggatgcaccatgccaga

SEQ ID NO: 542374 - DNA, 103 bp, Homo sapiens
tgacatttaattttagggtcctttatatagaagggagagtagggtcctgaggacaccgtgagccagccaggcctggccgctgggcctgaccggccccccagcc

SEQ ID NO: 542375 - DNA, 112 bp, Homo sapiens
cagtgactccaggatttctgaagactattgtggaagaagcatccattaaggtatgatctcgtgaaatcttgagagaaactgaatgacgaatgaaactattgttcctgtttca

SEQ ID NO: 542376 - DNA, 50 bp, Homo sapiens
gagatcctgctgacgccggctagggactcagtgacctttgaggatgtggc

SEQ ID NO: 542377 - DNA, 74 bp, Homo sapiens
cgccggcctcctccgtgcggagaagaagctgcggccgcacctggccaaggttaccacattctcatctggagcca

SEQ ID NO: 542378 - DNA, 90 bp, Homo sapiens
cgggagcggcggcagcggcggcgcggaggcggctgaggtgcgagccgcagttggaattgatcacaccttttcagttgtacttcaatcctg

SEQ ID NO: 542379 - DNA, 75 bp, Homo sapiens
agagtaccgacctccctcgaactcctggcagaggttctgtttcaagctgattccagccatttgggattgccgccc

SEQ ID NO: 542380 - DNA, 80 bp, Homo sapiens
gaacgaggacgcggactgcgaaggcaggtgctgtccttattcccagcccagtcaagagctaccggggctggctagtcatg

SEQ ID NO: 542381 - DNA, 75 bp, Homo sapiens
caattttacaagaaaagccatacttgttttctctggggtatgattctaatatgtagactctttgtgaagaaacga

SEQ ID NO: 542382 - DNA, 100 bp, Homo sapiens
actcgatggaccgcggctggcaaatctgactgcagccatgagcagcaatgagtgcttcaagtgtggacgatctggccactgggcccgggaatgtcctact

SEQ ID NO: 542383 - DNA, 100 bp, Homo sapiens
tggctgtgggcttccccatgatgatcctgccatgcaggcaggccctgagcacgctgctgtgtgagcagcagtttgtgatggacgcctctgaccccaccca

SEQ ID NO: 542384 - DNA, 98 bp, Homo sapiens
gaaacaagccagaagaacaaactcttgttcccctttaggggagctctttgaccatggctgtgactctctttccacagaataattgaacccctgacctc

SEQ ID NO: 542385 - DNA, 75 bp, Homo sapiens
ccaattcccttggtcaaagaagtgaccaaaaagtcatctacatttcagtgttggaaaaccttggacagacaattg

SEQ ID NO: 542386 - DNA, 75 bp, Homo sapiens
gtttcaagaaaatggatttaaacatatttccctgtggaggtgttcatgaagtctgtgaagctggagtgggtgcaa

SEQ ID NO: 542387 - DNA, 109 bp, Homo sapiens
agaccctggagcctcagttggaagcagccgatccagcctgcggagcctgtggggcagcctcgtgtgcaagctgaacacaaggaccaccatcctggcagcaacgaacccc

SEQ ID NO: 542388 - DNA, 98 bp, Homo sapiens
tgcctgactaacttccatggcatggatcttacccgtgacaaaatgtgttccatggtcaaaaaatggcagagccaatcttcggacgtggtgattgtctc

SEQ ID NO: 542389 - DNA, 74 bp, Homo sapiens
caacgacgaggacctgacgcaggcaagaactcccctggagcaggaaattttcaacctcctccataagaacaagc

SEQ ID NO: 542390 - DNA, 96 bp, Homo sapiens
gcgcagatgcgggccctgctggaccagctcatgggcacggctcgggacgaaaccgtccatgtttgatgtgagccgggagctgggctccagcgttgc

SEQ ID NO: 542391 - DNA, 98 bp, Homo sapiens
gatgagtgcaatgacaacatcatcttctcagaagcatatagcactttctacattgtgggtttaatattatcaatgcagataccttttgtgggattcca

SEQ ID NO: 542392 - DNA, 51 bp, Homo sapiens
tgccagccggagctctcctgtatgagacggagtctcgctttgtcgcccagg

SEQ ID NO: 542393 - DNA, 100 bp, Homo sapiens
tttccccctgagggattagatcttgtcattcagtggtgtcgaatgctcaagtgcaatgtcaagagctttctggatgccatggacaatattaccaggcaga

SEQ ID NO: 542394 - DNA, 82 bp, Homo sapiens
cagaacccttggttcagactccgtgattctgaagacagctgtcggaaaaggtaacagaagatggaactcgaaatcccaatga

SEQ ID NO: 542395 - DNA, 83 bp, Homo sapiens
ggaaaatttcgatattgaagtgtcaaaatccatagatggaaaagatggctccattcgacttcctaaggccgccaagactccat

SEQ ID NO: 542396 - DNA, 75 bp, Homo sapiens
tgcagacaagacggatgtgatgctgtttatcatctggacttcaagctgcaggcagttctgtttttccaggccttt

SEQ ID NO: 542397 - DNA, 75 bp, Homo sapiens
tcttccttgaagaaatacagcttggtgaagagttactagctcaagttaaacacagtgggaatatcacttttgatg

SEQ ID NO: 542398 - DNA, 100 bp, Homo sapiens
tataggaagatgtagtccaacccacatcagcaggtttctgctttgggacaaccatacatctaattccttaaagtagttttatatgtaaaacttgcaaaga

SEQ ID NO: 542399 - DNA, 74 bp, Homo sapiens
agtgcgcggttggggccactgcgaggccgttttaggagaaggaagccaacatccttttggagccatgaatattg

SEQ ID NO: 542400 - DNA, 82 bp, Homo sapiens
ctgagggccttcgagagctaccgcgccagacagggcaaatccagacagaacctttgacttggtgttgaaagtgaaatgtcat

SEQ ID NO: 542401 - DNA, 117 bp, Homo sapiens
ccgtaattgtgagtttcctgaggcctcaccagccatgcctcctgtacagcctgtggaacttaactctcaggagccttctccgcagttggcttcctcggtagcttccacacggagcat

SEQ ID NO: 542402 - DNA, 74 bp, Homo sapiens
tgcagtcccaccagcccgtggccaggcccgtctccgtggggctttccaggcaaaggccggcgtgtgcagcccca

SEQ ID NO: 542403 - DNA, 90 bp, Homo sapiens
gagatgaaacttctactgaagcagcaacacgccttagctgctgctggtggtgacaatgtcaaataacggcctagacattcaagacaaacc

SEQ ID NO: 542404 - DNA, 74 bp, Homo sapiens
cgagggacctgggactgctcacagccaggctggtgcagtggtgtcatcttggctcagtgcagcctcgacttcct

SEQ ID NO: 542405 - DNA, 76 bp, Homo sapiens
gacctggaatcgcccaagtccctctactcgcgagtgttatagttttgccgctggactcttccctcccttcccccac

SEQ ID NO: 542406 - DNA, 98 bp, Homo sapiens
tcacgggctgtccaggaactgtcggaacagaaccaaaggctattggatcagctcagcagggttattctcgttcaagttaatccaggtgagactttcac

SEQ ID NO: 542407 - DNA, 100 bp, Homo sapiens
gagagaggtacctctccttttccctctccctttccctaagcaaaacaagctatcgatcagggaagatctccagttataatagataacactaatatacaag

SEQ ID NO: 542408 - DNA, 75 bp, Homo sapiens
ctgcctttgggccgtcaggcagttggttgggacccgctccaaccctcggcatcaagcatgatggaaccatgtgtg

SEQ ID NO: 542409 - DNA, 101 bp, Homo sapiens
ggggcaggcacccgggcgccgggcctcccagccgacatgtctctagtggcggaagccttcgtctcccagattgcagattgaaaaggaagatcaggccaacc

SEQ ID NO: 542410 - DNA, 90 bp, Homo sapiens
accagcttgatgtcgactccctccccaacaatggctgcctgtcttcgtcttgatgcctgccagcaggtgaacatgattaaagatgatggg

SEQ ID NO: 542411 - DNA, 76 bp, Homo sapiens
ccatgtgaacccaatcttgatgctttaatacagaaccagcatctatgtcttctcattacactgaagaccttttgcc

SEQ ID NO: 542412 - DNA, 80 bp, Homo sapiens
gcacccgaattgccaaagttttggaaaagcctctcaacattgcctacagccacatctacagctcctacaggaatttcgtg

SEQ ID NO: 542413 - DNA, 98 bp, Homo sapiens
ctgaatgatgaatacttttactactgtgacaacattaacgtgttggctgcaccaattctagaagtaagctctccaagttcagactccattcttgtgca

SEQ ID NO: 542414 - DNA, 75 bp, Homo sapiens
ggaagctgaaaccacagacatgactgagtcctccatgaagagaagatggatgttttgaaagctaccgcagaacaa

SEQ ID NO: 542415 - DNA, 75 bp, Homo sapiens
acacactgaagttcttcagcttctcagccccccaggcaagccaaattagagctgagagttgctgtagcaaaagtg

SEQ ID NO: 542416 - DNA, 100 bp, Homo sapiens
taaaatctccgcaccgcaccctccacctcagggatcgcttacacctgagacgaactacagaacagcacgtaccagaggtggaagtccaagtcaaacgcag

SEQ ID NO: 542417 - DNA, 89 bp, Homo sapiens
gcctctacgaggtggatgtgacccaaggagagtgctacccggtgtactggaaccgtatctcagatgaagacatcatcaacattactctt

SEQ ID NO: 542418 - DNA, 135 bp, Homo sapiens
gtaatcctgacgaaattgaaattacctccgagggaaacaagaaaacatcaaagaggtctagcaaagtcccacagaacaacgagaagcttcaggagagcccgtgcatcttcgcattgacgccaagacaggtggagt

SEQ ID NO: 542419 - DNA, 128 bp, Homo sapiens
ctgttgacaagactgaggatagtttagaaggatgcttggattgtctgcttcaagccctggctcaaaataggaaatctaagttaatttcaaggcattcgaaatggggaaagactattattgcattttgg

SEQ ID NO: 542420 - DNA, 98 bp, Homo sapiens
gaagaccctggaccctacctacatcctgagctacatggccccctggtttagggagggagaagtgccagaaagcccggaagcaaggaaggaaagtgacc

SEQ ID NO: 542421 - DNA, 97 bp, Homo sapiens
aaaggtcactgccatctggagtggatggacacacctggttgctcagacaggtatttataacagcaatgatgtagcagtatcgtttccaaatgtagta

SEQ ID NO: 542422 - DNA, 100 bp, Homo sapiens
ctggagcggatcccacacctccggaccgagggacgcgggttcctgacggagacttcgcccttcatgtggtccaacctgggcattggcctagctatctccc

SEQ ID NO: 542423 - DNA, 50 bp, Homo sapiens
gataacactaagtttagatctcatgagagatatttaagcagctggatccc

SEQ ID NO: 542424 - DNA, 100 bp, Homo sapiens
ggcgggtggaggttcgagcgctgttctcgctccggagccgctgcacatttcggaattacagtttgaaaggctgacccgagagctggaggctgaacggcag

SEQ ID NO: 542425 - DNA, 98 bp, Homo sapiens
gaggagataacgcggccttgggctctgacgcaaacatgcagatctttgtgaagaccctcactggcaaaaccatcacccttgaggtcgagcccagtgac

SEQ ID NO: 542426 - DNA, 83 bp, Homo sapiens
aacggagcttgaagcaaagctgcaggttttaaagccatcactggtgcaagctatatttaacggagatcctgatgaagttcgag

SEQ ID NO: 542427 - DNA, 88 bp, Homo sapiens
ccacacgtgttcaatacacctcccacctgtcctcaggcatatcaaagcattcaacagaaggtgtcaaattgacagctctcaatgacag

SEQ ID NO: 542428 - DNA, 60 bp, Homo sapiens
agttcacggccaacgccttggcactaggggaggagctttatctttatatactgcccttac

SEQ ID NO: 542429 - DNA, 100 bp, Homo sapiens
tttcggatggctttaatggagcagatctgagaaatgtttgtactgaagcagggtttctccaaggacatcaaggtgcccaagagccgctacctgggctaca

SEQ ID NO: 542430 - DNA, 100 bp, Homo sapiens
gcggaggcggataagaaagccgctgaggacaagtgcaagcagggctgaagctgccctcgaggacctggtctccaccattcgagtctgaagattctcagaa

SEQ ID NO: 542431 - DNA, 60 bp, Homo sapiens
atgggctccagtcagccttcactgctgctcatgaactggtaatgcgtcagaatgtgaagc

SEQ ID NO: 542432 - DNA, 72 bp, Homo sapiens
acaagcagcagaaatacatgcaacatggtgactggtgtgatgagggcacaggtcaatgccactgccgccagc

SEQ ID NO: 542433 - DNA, 100 bp, Homo sapiens
tccggacaacggctgcggcgacaattttatggagaactgcacccagccggctgttgtcaccaaggacttctgcatggtcttctattcccgtgatgccaag

SEQ ID NO: 542434 - DNA, 73 bp, Homo sapiens
acgatcaggtggccatgggaaggcagtggctatgacagtgaggactgcgagggtctcctggggacagaggcac

SEQ ID NO: 542435 - DNA, 92 bp, Homo sapiens
gcaaagctgggagagactggaccagaccatgggcctgagcatcaggaccagaggagcgagagcagcaagaaccacacccagcagcaatgtca

SEQ ID NO: 542436 - DNA, 100 bp, Homo sapiens
atgatgtcttggcagatgttgttgaagataaagacaaggtgcctggaatacttattaagaaacgatgcaaatccagggatccgtgataagcaaggataca

SEQ ID NO: 542437 - DNA, 127 bp, Homo sapiens
tgacgtggccgccgtcagagccgccatcttgtgggagcaaaaccaacgcctggctcggagcagcagcctctgaggagaacaaggggtctgtggaaatcatgagaaaggacttgaatgacgcccggga

SEQ ID NO: 542438 - DNA, 75 bp, Homo sapiens
gaagccatgtattgctacctgcgctggatgtgggctctcttgatgagaagatgaagagcttggatgtgaatcagg

SEQ ID NO: 542439 - DNA, 100 bp, Homo sapiens
aaaagatctaaagtcacccggcggccaaaggccagtgactaccaacgtttggaccagaagtgacagctatattgtgcgtgtcaaggctgtggttatgacc

SEQ ID NO: 542440 - DNA, 75 bp, Homo sapiens
gaaagcaacaaccaggagctccgcacgcagtttccacgggctcccttgctcagcagtatgcgcaccctaacgcta

SEQ ID NO: 542441 - DNA, 87 bp, Homo sapiens
gcgccgggccctgtcgcgaacctccggcgcgctgccccgccggaccgtggttggtgttcgaggaagagacattgttgttcttggtgt

SEQ ID NO: 542442 - DNA, 101 bp, Homo sapiens
tgtagatgtcatgaggcgagctggggacatggatttgattgacatactttggaggcaagatatagatcttggagtaagtcgagaagtatttgacttcagtc

SEQ ID NO: 542443 - DNA, 88 bp, Homo sapiens
gctcgctgggagagaggtacctctccttttccctctccctttccctaaggacctcagcagccatgtcgaagccccatagtgaagccgg

SEQ ID NO: 542444 - DNA, 71 bp, Homo sapiens
gagttggcggaagcacttggaactcctttataagtgtcagctgtgagggaggaggtacaggagaactgtgt

SEQ ID NO: 542445 - DNA, 100 bp, Homo sapiens
gccgcggttaaccacgtctcgtccacgacctccctagagaccctgaaatatggcgtctggcctgcttgaaagtttggggcagaagctgtattaaacttgt

SEQ ID NO: 542446 - DNA, 98 bp, Homo sapiens
cagggtaaccgccatgtcgacgcaaaccagccttcagcagtcggctacgaaacagcagcggaagtagccgggtccggaggcgggggcccccggggcga

SEQ ID NO: 542447 - DNA, 100 bp, Homo sapiens
ctctgacatcagctctcctgggaccctccaagagcactagtgtctagaaggcactaagggagcgagaacccgagcagcgccatgagcaacactaccgtcg

SEQ ID NO: 542448 - DNA, 100 bp, Homo sapiens
gttacctccctgaagctgtagggccttgtggaatttgtatgagagcattaagaacgagccatttaagatcccggaggacgacgggaacgacctgacccac

SEQ ID NO: 542449 - DNA, 150 bp, Homo sapiens
ctgtgtttctccattctgttggttttatgcatctttatccaatcaagtgcccttggacaaagcctgaaaccaggtactccaaagattcaggtttactcacgtcatccagcagagaatggaaagtcaaatttcctgaattgctatgtgtct

SEQ ID NO: 542450 - DNA, 100 bp, Homo sapiens
cactgggagtcgagacaaaaagttgcagatctgatctcttctgaacacctcatcgtgtctccatccctgggaatctgaccctagcaactggaccactttg

SEQ ID NO: 542451 - DNA, 90 bp, Homo sapiens
cttggaggatgaaaagaggctggcccaccccttctccttggccgtctttgaggtggagtataatgacatatgaactcaaattgccaccaa

SEQ ID NO: 542452 - DNA, 75 bp, Homo sapiens
cagaggaaaatgcaagaagactgatggagcaggcttgcaatattaaagtatgtcgagagtaccaacgtggcaatt

SEQ ID NO: 542453 - DNA, 100 bp, Homo sapiens
gctccaggagcagttgctggtgctgctgaagtccctagggaaccaccaattcttcccagtgctggaactttgcctgtcacctttcgttgcctggaagaaa

SEQ ID NO: 542454 - DNA, 100 bp, Homo sapiens
aagtgcggacgctgtgcgagaagccccattggatgagaatgacctagaggaagatgtggactcagaaccagccgagatagaaggggaggcagcagaggat

SEQ ID NO: 542455 - DNA, 90 bp, Homo sapiens
atccaatttccattcgcatccaaaatggaatccgagacagaaagaggaccttaggtaaagagaaatgtgtatgaccttacaagtatcccc

SEQ ID NO: 542456 - DNA, 101 bp, Homo sapiens
cgtcagcactcagcgcgggccgaatttaagaagtgcaacatggccaggggctgcctctgctgcttgaagtacatgatgttcctcttcaatttgatattctg

SEQ ID NO: 542457 - DNA, 100 bp, Homo sapiens
gcagcttccaggatcctgagatccggagcagccggggtcggagcggacttaattcagtgcacaaatgagatgaatgtgaacatcccacagttggcagaca

SEQ ID NO: 542458 - DNA, 128 bp, Homo sapiens
agtgagcagtccagaaagcggcttatcgaacagagccgggagttcaagaagaacactccagaggtcagcccaaggccaaccccactgtcactctgttcccgccctcctctgaggagctccaagccaac

SEQ ID NO: 542459 - DNA, 82 bp, Homo sapiens
tctggctctggctgtgcgcgctggcgctgagcctgcagccggccctgccgaattggctgtgaaaggactgaggcagccatct

SEQ ID NO: 542460 - DNA, 82 bp, Homo sapiens
ttctgtgtgatttacctcaactggatagagtactgctcttcccgaagagcaaaggatgtggagaaagtttgggacctcaaga

SEQ ID NO: 542461 - DNA, 82 bp, Homo sapiens
ttttgtctgcccctattgtaagtgcagatggaacacaacagcaatatggtgaaattgaagattgtcagattgatgattcctc

SEQ ID NO: 542462 - DNA, 121 bp, Homo sapiens
gtgcaatcactataagtatatttgtgctgagcatttggccagaggcactgacagttgccagcaccgactgagacagggccttctgtgcaggagtgctaccacagtaatggacagagttatc

SEQ ID NO: 542463 - DNA, 89 bp, Homo sapiens
cttcaagcgctatgccaagaagcgaaatgtgctcattggccattcctacggccagcagaaaactgagcttccggtcacagagaacgtgc

SEQ ID NO: 542464 - DNA, 75 bp, Homo sapiens
tcgtttgccattttcttatggagaactgtccttgttgggcaacctgggctccttgcagctggaggtgcggctgcg

SEQ ID NO: 542465 - DNA, 99 bp, Homo sapiens
aagatttgctttaacttcaaaagtgatgacaagaaagtatggacaccccttcaggaccaacctgataagtcactgatggagtctcgctctgttgcccag

SEQ ID NO: 542466 - DNA, 90 bp, Homo sapiens
ctattctagtgataggattcacagcttgagctcaaataagacggcaccgaaagcgaaggaagctcctgctcctcctaaagccgaagccaa

SEQ ID NO: 542467 - DNA, 100 bp, Homo sapiens
tacattgacagacttttcagtattgtaagaccaagaagacttctctacatggcaatagatggagtggtatttggcaccaatgtgatggtgacagtggcca

SEQ ID NO: 542468 - DNA, 100 bp, Homo sapiens
tctggagctggccaacgtgcaggaggataaggaagcctgtgtgggtaccaacaatcaaagctacatctgtgacacaggacactgctgtggacagtctcag

SEQ ID NO: 542469 - DNA, 82 bp, Homo sapiens
cttcaagaagttgaagtacagaatgaggagatggcagctttttgtcgatccattacaaaagacaagaggagcagcagcggca

SEQ ID NO: 542470 - DNA, 87 bp, Homo sapiens
cgccatccgggagaagctggcctgggccaagggtgcaggagccgtgggcggacagagccagggttctctccctgttagaagtctgcg

SEQ ID NO: 542471 - DNA, 90 bp, Homo sapiens
tgggaaacccacaggaggcaaccacactagtttaggactctgctgggccgctcagccatgcctgagggagcccaaggactgagcctctcc

SEQ ID NO: 542472 - DNA, 100 bp, Homo sapiens
cggtgtgattgaaggtggattaaatgtcactctcaccatccggctacttatgcatggaaaggaagtggttacctggaaggaaaggagctgcagaacttga

SEQ ID NO: 542473 - DNA, 100 bp, Homo sapiens
cccccacatttaccaggatctggagaatcatccatctgttcttaagtatgagaagattaaggtgacatgaaatggcagaagctaaatcccactggggctg

SEQ ID NO: 542474 - DNA, 98 bp, Homo sapiens
gcgacagcctggattataaggatgtcatccccatggctgatgcagcaggcatcatccgctatgcaattgggcacatccgggcaacgtttgatcctgac

SEQ ID NO: 542475 - DNA, 80 bp, Homo sapiens
caagatccgacccatcaaggcttctgtcatcactcagatggacttcagcagaaatctttatgatattggggaacaactgg

SEQ ID NO: 542476 - DNA, 87 bp, Homo sapiens
ggaaggcgggagacgagaagcctgaaaagtcgcagcgagctggagccgccggaggagctgactaaggctttggaacagaaaccagat

SEQ ID NO: 542477 - DNA, 75 bp, Homo sapiens
ccgccaaaccccagctggaactccggccacagccagcatgcaggtccattacatcgtcgcgtctgctcaggtctg

SEQ ID NO: 542478 - DNA, 105 bp, Homo sapiens
caggtggggaaaatggcggtgtctacagtgttctcgacttcgtcgctggatctatctggttcaatagatgacctccccatggggacagaaggagctctgagtcct

SEQ ID NO: 542479 - DNA, 75 bp, Homo sapiens
cgactgggaagcgctactgccggggcaaagtgctgggaaagagaccaatagtggagttctctttagaagatcgaa

SEQ ID NO: 542480 - DNA, 50 bp, Homo sapiens
tgggtgcttcacagagacttgtttggaaattttagcattcaggtgccagg

SEQ ID NO: 542481 - DNA, 50 bp, Homo sapiens
gggtcctttatatagaagggagagtaggagaacaagaacctggttcatgg

SEQ ID NO: 542482 - DNA, 75 bp, Homo sapiens
agaaactacaggctgaaaagcatgacgtaccaaacaggcacgagataaggacatgatccacatcgcggacaccaa

SEQ ID NO: 542483 - DNA, 48 bp, Homo sapiens
tccgcggagccgaggcgtggaggtattctctgaaaccaaatgaccaaa

SEQ ID NO: 542484 - DNA, 76 bp, Homo sapiens
atgttgatcactgaaaatgatttatgcaagtttaagactattatgtggctgtttacttacctggtcatttcttcca

SEQ ID NO: 542485 - DNA, 100 bp, Homo sapiens
tggactctcccccaggttggctcagctcctcaccaccatcccactgcctgttgttggtatggcaggaggaaaatatcgttcgtttttaatccatgtcaag

SEQ ID NO: 542486 - DNA, 75 bp, Homo sapiens
tttagtgcactcttctccttcacagtaaagtggctggaagtggcagtttttgtctttgataaaaaactgattgac

SEQ ID NO: 542487 - DNA, 74 bp, Homo sapiens
agtacaggatatgaagaaattgagggttcttgccatggtgcagcttcaagcttaggaccacccaccatgcctat

SEQ ID NO: 542488 - DNA, 51 bp, Homo sapiens
gcccagcccgggagccgctggagcaggattctcaaagttggattggtggaa

SEQ ID NO: 542489 - DNA, 74 bp, Homo sapiens
ccgggagttcaagaagaacactccagagtactatactggcaattgctggagaagattttgcaattgttgcttct

SEQ ID NO: 542490 - DNA, 74 bp, Homo sapiens
cagacattcaacacctttacatttagcagtgcacgtggtgattgctacccctgggagaatcctggatcttatta

SEQ ID NO: 542491 - DNA, 106 bp, Homo sapiens
atttctctagctattgccttattttttctcatggatgttcttcttcgagtatttgtagaaggctgcgcaaaccatgcaggatgatttactgatggacaaaagcaaa

SEQ ID NO: 542492 - DNA, 98 bp, Homo sapiens
aagaagcatttatatgtcttcaaaagttaatggcagctgtgagggatattcttgaaggaattcaaagtctggctcttgctgattgaattcctttggtg

SEQ ID NO: 542493 - DNA, 80 bp, Homo sapiens
aggcggggtctgggtgttgaggggcgactggagccatggcggagtcggcgcctgctcggctcacaggtgcagtgcggtct

SEQ ID NO: 542494 - DNA, 99 bp, Homo sapiens
aagtggaccaactatctgaagggctaccagcgccgctggttcgtgctgggcaatggtttgctctcttactacagaccaaatgtcaccagtactggccag

SEQ ID NO: 542495 - DNA, 83 bp, Homo sapiens
caccgccaccagtccacggagggcatgaggcctccggtgtggctgtctctgatggtgtcatcaaggtgttcaacgacatgaag

SEQ ID NO: 542496 - DNA, 60 bp, Homo sapiens
tctggatctcttgttggaagagaaaatgagattactcttgtctctgctgctcctgggaaa

SEQ ID NO: 542497 - DNA, 101 bp, Homo sapiens
cacaagacaagggtcctaaaacaggatcagtaaagaaggaaaaagcagtaaagccagaggaagccgctgccatggcccagacactgcagatggagatcccg

SEQ ID NO: 542498 - DNA, 75 bp, Homo sapiens
agcaggagctcctgacttgggaccatggtgattcttcagcaggtgtgtgtggtttcagcgcagcatggctgtggt

SEQ ID NO: 542499 - DNA, 90 bp, Homo sapiens
tgtgaagagacatgagatgattgccaaatccccaggagctcgaggccatgagcagatataccagcccagtgaacccagctgtcttccccc

SEQ ID NO: 542500 - DNA, 75 bp, Homo sapiens
ccccgaggaggaagacgaatcgttaaacatcttaggtcagctacaaagcccaaggtgttatagatgaccttgtct

SEQ ID NO: 542501 - DNA, 101 bp, Homo sapiens
gatggctctgtgcaacggagactccaaggtacagaggtgcagttccatggtacaccataaatcttgacttaccaccctacaaaagatggcatgaattgatg

SEQ ID NO: 542502 - DNA, 118 bp, Homo sapiens
gtttgatgttgagttccggcttgccgcggcctgccgcaatggaaacatctatattctgagaagagtgttttctgcctacattaaagaagtggatgaaaagccagccagcacgccctgg

SEQ ID NO: 542503 - DNA, 83 bp, Homo sapiens
aagatgatgctccaagaacaatagcttgccctcataaagtgtacaagggagaagaagccacattccaaatctcaggcctccag

SEQ ID NO: 542504 - DNA, 75 bp, Homo sapiens
atttcattgagatgatatattgagcccatgcgtagccttttatttgaggagtggtcattcactgtaaccacagga

SEQ ID NO: 542505 - DNA, 87 bp, Homo sapiens
tgcagagaagcaggacctcgggccatggatgctgaagagtttctggcagaaggtttgcggaatgagaacctcagcgctgttgcaagg

SEQ ID NO: 542506 - DNA, 75 bp, Homo sapiens
cctgcacatcttgttttccctaacatcaagaatggagctacagggagctggccgactgcacctggcacatggcgg

SEQ ID NO: 542507 - DNA, 98 bp, Homo sapiens
tttattttgccacaaaaccactggtgacgttgcctgtggccaccttggagaagacactggagacaaatttacatgtattggagaccagaccagaagcc

SEQ ID NO: 542508 - DNA, 99 bp, Homo sapiens
cgagtgtaggcgacaggccgctgacggccggaaggaaaatggtttggttgggatgttccagtaattctgagaaattcagaagagacccagttcagcaca

SEQ ID NO: 542509 - DNA, 100 bp, Homo sapiens
ctgccaaaattatcaacaccaaaaagctttctgctagggagccagaggccaagaagagtaagacggccgcaaagaaaaatgacaaagaggcagcaggaga

SEQ ID NO: 542510 - DNA, 100 bp, Homo sapiens
tgggaagaatgagagaagtcatatgcccggcacagaatgtatcctgtcaggtataatgtcagtgaatggcaagaaagttcttcatatggatcgaaaccct

SEQ ID NO: 542511 - DNA, 98 bp, Homo sapiens
ctttgtgtcatcctccacagctccagggaaggcactcaaaagtggggggcaggaaagcccgaatccgaggtatttgagatcacggacttcaccactgc

SEQ ID NO: 542512 - DNA, 100 bp, Homo sapiens
cgacagccttttactgtgaacaggtctgccatcatggatgttctcgcagaagcaaatggcacctttgccttaaaccttttgaaaacgctgggtaaagaca

SEQ ID NO: 542513 - DNA, 98 bp, Homo sapiens
caggatcgcctcacagtgggggtgtacgagtcggccaagttgatgaatgtatgaatatggacatcgacgtccacctttgtttttcctgaagtcctcat

SEQ ID NO: 542514 - DNA, 98 bp, Homo sapiens
gtggcctaccgccacctggtgggcgtgtgctacacggaggatgaagctaaggagctggctgcggaggtggagcccagtgacaccatcgaaaatgtgaa

SEQ ID NO: 542515 - DNA, 101 bp, Homo sapiens
tctggagcttcacaatcctaaagcaatagcagtagatccaatagcaggggatgacttgtcaagctcgaacatcatatactgaagatgaagttctttggggt

SEQ ID NO: 542516 - DNA, 83 bp, Homo sapiens
accaggccgggaagcccatcggcagtggacgtcagctcagcgaggtcttcatccagctgccctcgcgaaaggagctgcccgag

SEQ ID NO: 542517 - DNA, 95 bp, Homo sapiens
ctggacagaccaacctgtcagtgctgcaaatacttggcatatcgaaattttatgattgacacgtatcgtctaaacccccaagagtatttaactag

SEQ ID NO: 542518 - DNA, 75 bp, Homo sapiens
cacaaaaagacacttatactatgaaagaggcccacgaggactcggagaagctgcgggagatcgtactgcccatgg

SEQ ID NO: 542519 - DNA, 82 bp, Homo sapiens
ttttgtgaaaccaagaaagaagcccaggagctgtcccagaattcagctataaagcagagaatagtgacagtggtacaggaaa

SEQ ID NO: 542520 - DNA, 52 bp, Homo sapiens
gtgaaagtgcagtttttctcttcgaatcttcctacatactatgacaattgct

SEQ ID NO: 542521 - DNA, 100 bp, Homo sapiens
gcttctccctgatgacaagcttaccctcttctgcgaggcaggtaaagtgaggaaacatgcaactgaacaggaaaaaactgaagagggattaggccctaat

SEQ ID NO: 542522 - DNA, 98 bp, Homo sapiens
attccaagtaactcttatttgtgaagcagccgacacgagtcgttgttcataaaacagcttttgaaagttgagagcacacccctggagaaccgactgtg

SEQ ID NO: 542523 - DNA, 100 bp, Homo sapiens
tgatgagctgagaaacaaagccacccagccaatgaaggtgaaaggtgtagcagtcactcggcctacacccacagcatcgaccttgtgaacccagcgacct

SEQ ID NO: 542524 - DNA, 100 bp, Homo sapiens
acaatcaagatgaatatgaccctatggaagcagaagaagctgaggatgaagaagatggtgccatcgcctgcaggattctttattcagctctgacagtggc

SEQ ID NO: 542525 - DNA, 75 bp, Homo sapiens
gcctttgctccagggcatttgtggaactttgagaatcactacaagaaaaactccttgtggtgaaggttctaagac

SEQ ID NO: 542526 - DNA, 97 bp, Homo sapiens
gcagatccttcagcaaaagctgtccttacaggaaacttggatttaactggccagaagcaggtattcaaagcagagaacaatccctgggtgaccccca

SEQ ID NO: 542527 - DNA, 101 bp, Homo sapiens
agcagcagctgcagcagtggcagctgcagtagcggcagcagccccagcctcaaggccagatgagcagcaccagcagtaagagggctccgaccacggcaacc

SEQ ID NO: 542528 - DNA, 75 bp, Homo sapiens
tcacaggaatgacagcatctatgaggaggagcctagtaataaacgggtcaaacccctttcccgagtcacgtcgct

SEQ ID NO: 542529 - DNA, 82 bp, Homo sapiens
gaacccaacctagtgggtgtaatacatcatgaactgcaggaactcccccactggaaaggattctgaaagaaatgaagtcagc

SEQ ID NO: 542530 - DNA, 123 bp, Homo sapiens
gaggagtttctgaggcaggagcatttccaggggaagcgtgggctggaccaggatgtgcgggtgctgaaggtagtcaaggacatggtccggcgaggagagatcatcgacaatgacaccgaggag

SEQ ID NO: 542531 - DNA, 100 bp, Homo sapiens
gggtcatggagtcccgaaccctcctcctgctgttctcgggagccgtggccctgatccagacctgggcaggcaggatgacgcaaaacacggtgattgtgaa

SEQ ID NO: 542532 - DNA, 80 bp, Homo sapiens
ggaatgtctttcctaccatctaaaatacgaaggtttctggctgggtgatctggaacctcttgagcagcagaagcagcaga

SEQ ID NO: 542533 - DNA, 100 bp, Homo sapiens
gggcgccggagccgaggcgagcgccgcgcgcaccactgataaaagcttcgatgatgaagaatcagtggatggaaataggccatcatcagctgcatcagcc

SEQ ID NO: 542534 - DNA, 100 bp, Homo sapiens
taagcttgaaagaaatacaggtcctggcaaggcaatggaaaggtgaagctgtacttcacaaaaacagtagaggagccgtcaaatccagaggctagcagtt

SEQ ID NO: 542535 - DNA, 75 bp, Homo sapiens
ggtcttgcgagatatctggccgcctctgccgcagctggaggtcaaaatgcagatcttcgtgaaaacccttaccgg

SEQ ID NO: 542536 - DNA, 99 bp, Homo sapiens
tgcagattttactttatgtgagaaaatctacaatttcttcgagacactcatataaagaaaggtgctggaccatcgagacaaggtatatgagcagctggc

SEQ ID NO: 542537 - DNA, 100 bp, Homo sapiens
ggagtacatgggctacaccaacaccgacaaccccttcggagacaacaacctgctgggcaccttcatctggaataagataagcatggattcctggttcatt

SEQ ID NO: 542538 - DNA, 119 bp, Homo sapiens
aaaaaagaagcctctcactttcagtccaagctaattacacctcctcctccaccaccctcaccagaaagctgtcaccactgactaaagaagagaaaactgcggcagagcaattcaaattt

SEQ ID NO: 542539 - DNA, 90 bp, Homo sapiens
gatgtgtctggtgaacctgaagcttcaccgagtgcagatacaactatactgtttgtaaaaggagaagtacgaggatgtcgtccaggaaag

SEQ ID NO: 542540 - DNA, 100 bp, Homo sapiens
gttctccagtacaaccttcaaaacaactggaatatttagcaaggattcaaggctttcagacagaaagaatttactttcaggttttcttacctaaagggag

SEQ ID NO: 542541 - DNA, 100 bp, Homo sapiens
gtggactccgatatattgcccttcttcccttagaagaactgctgaaccgactctgagaaatttgaaatatggtcaacttgaagaatatctcaattttgcg

SEQ ID NO: 542542 - DNA, 100 bp, Homo sapiens
aacctacatcccctgatggcggagaacctgaacatcctgaagagggtagaagagaggtctgagcgggagtgcactgctttggatgctcacaaggagctgg

SEQ ID NO: 542543 - DNA, 82 bp, Homo sapiens
ggaaaatctactgcgtggcttgtcaggaactcgactcagacgtggataaagataatcccgagggaatctggaaaaattgcaa

SEQ ID NO: 542544 - DNA, 73 bp, Homo sapiens
tcttcaaccacctcgagcggctgctggacgaaggtatcagcagatgttgcacacaaacttggtataccttgct

SEQ ID NO: 542545 - DNA, 75 bp, Homo sapiens
ccaggtctcagggccgggggtacccgaggagtcagagtcagaagcaaaggtagatggagagactgcatcggacag

SEQ ID NO: 542546 - DNA, 100 bp, Homo sapiens
ttttcattttacctttatgtatttacctacggagtcagattcctgaaaaagtatgccaccacgggctgttccctgaccctgcaccatacggagaaaccag

SEQ ID NO: 542547 - DNA, 142 bp, Homo sapiens
ggcgggcagcggagccaagctgacccggcgagcggagccggggctggagagcggcgaccactgcggatctcggccttcatctcctcgtcctccaggcagcacaagccattgtggaatctccaccaggtgtacagaacggtgc

SEQ ID NO: 542548 - DNA, 82 bp, Homo sapiens
aacaaggctacgataggccttatgaggattcctcacaacattactacgaaggagtgaatgatttgggaggggacttcaaagg

SEQ ID NO: 542549 - DNA, 75 bp, Homo sapiens
atgatgatggaaatgaagtataataccaagaaagccccacttgggaaacactactatgaagtatcctgtcatgac

SEQ ID NO: 542550 - DNA, 48 bp, Homo sapiens
tggatcaagccagatttgtgagcagccggtggacaaccagcaagccat

SEQ ID NO: 542551 - DNA, 75 bp, Homo sapiens
cagaatcccaacgttcaggatattttgggagaacttagagaaaagggtcctgtatggtggaagagtcggggaccc

SEQ ID NO: 542552 - DNA, 100 bp, Homo sapiens
gttgttcgaaacgagcaggtggaaatccgagccgttctctacaattaccggcagaaccaagagctcaaggctcgggtcgttgtggtgcgctgtcttcccg

SEQ ID NO: 542553 - DNA, 83 bp, Homo sapiens
ccagaccctggagcctcagttggaagcagccgatccagcctgcggagcctgtggggcagatccctcatccacctacatcaggc

SEQ ID NO: 542554 - DNA, 90 bp, Homo sapiens
gagctgtacagggctctgaacatgcactacaataaagcaaatgactttgagggtggaataattaatgatagttctgaattaattggtcct

SEQ ID NO: 542555 - DNA, 75 bp, Homo sapiens
tttcctttcttcaatcccatccagacccagggcattgatctggagaacattgtgtactacaaggacgacacccac

SEQ ID NO: 542556 - DNA, 100 bp, Homo sapiens
atcgcaaatacctgaaagattgggcaagagaagaattcagaagaaacaaaagtgccaccgaagagtattgaaatggctgatggcaagtgcaggaagatcc

SEQ ID NO: 542557 - DNA, 125 bp, Homo sapiens
gagacacacaaatctaaaaggcgcgagagaatggatgatagtagtgtttcccacaagaaactggactgcaagattcatcggagaatggtggctcccaggttccatcaagctaagtgacaaataac

SEQ ID NO: 542558 - DNA, 100 bp, Homo sapiens
aattttagggtcctttatatagaagggagaatctctccagcgaacactgaatgagttaaaagagtatcaaaagcagcatgaccactacctgagacagcag

SEQ ID NO: 542559 - DNA, 100 bp, Homo sapiens
gagtgctacttctactccaagttcggctgcaggccaacttcaccatccgggaagatgccaaccccagctcccgacagcgaggactcaagcgcttccaggc

SEQ ID NO: 542560 - DNA, 50 bp, Homo sapiens
ctgactttcagctatggaatcggttattcagcttctcaaggctggaaaag

SEQ ID NO: 542561 - DNA, 100 bp, Homo sapiens
tagacacggcagcgcagtgcagatccgcaggcgcaaggcttcaggcgacccgtactgggcctactctggtgctgcaggaggcttctcacatgctttggga

SEQ ID NO: 542562 - DNA, 98 bp, Homo sapiens
atctgtgggatctgtaatagaaatatggacggggagtccgaggaggagcaggagtccgtggacaccggggaggaggaggaaggcggtgacgagtctga

SEQ ID NO: 542563 - DNA, 100 bp, Homo sapiens
cccagctgtgcggagctaggacgcggaacatcccagaggccagcatcaacatgaggctgaccagtgtgtggcctgtgcccactataaggaccctcccttc

SEQ ID NO: 542564 - DNA, 80 bp, Homo sapiens
ctctgagctgcgcctggacctggttctgccttctggacaatctttccggcttgaagaaaatttgcctacacgttgtggat

SEQ ID NO: 542565 - DNA, 99 bp, Homo sapiens
cccctgtttgccaggcgtgaaaaaatacctcactgtgacctacgcatgtggatctaaaatgtccactgaggcacaaagagttgatgacagtccaagcac

SEQ ID NO: 542566 - DNA, 74 bp, Homo sapiens
tttgaaaaaacggatggaagtaccagactatgaaatggccatcaagccctgtcgtcctatgaccaacaatgctg

SEQ ID NO: 542567 - DNA, 100 bp, Homo sapiens
aagaaacaggaagaagaagaaacgatgcagcaagcgacatgggtaaaatacacatttccagttaagcatcagatttgtcaaggtttgaaactgacatttg

SEQ ID NO: 542568 - DNA, 99 bp, Homo sapiens
tcctccactgccactacagggaagtgcatcacatgtcagcttgttgcagatccttgtgccagcaacccttgtcaccatggcaactgcagcagcagcagc

SEQ ID NO: 542569 - DNA, 80 bp, Homo sapiens
tggagcctcagttggaagcagccgatccagcctgcggagcctgtggggcagcaagattcctaaaaaaggctttgtggagg

SEQ ID NO: 542570 - DNA, 100 bp, Homo sapiens
ctgaggccggacggggcggacggcgacgcagcccgcggcagaagctgggaggcaccattggagacatcgaaggaatgccgtttgtggaggcgtttagaca

SEQ ID NO: 542571 - DNA, 82 bp, Homo sapiens
tgcagcatggagtcgcccgcctcgagccagcccgccagcatgccccagtccaaagttgcaagaatgtagtaactctgatcag

SEQ ID NO: 542572 - DNA, 49 bp, Homo sapiens
gaggcctccccagccacgtggaactgttttagatggagcaggattagat

SEQ ID NO: 542573 - DNA, 73 bp, Homo sapiens
gcgatgcctaccacctagaactggattgtgcggacgggctctacgagtgcattctctgtgcctgctgtagcac

SEQ ID NO: 542574 - DNA, 87 bp, Homo sapiens
ccacgcaccgactatgtcgcctgccaccgagccgggcccacctccccaccaaggaaggccagcactccttgcccgaggacagagatg

SEQ ID NO: 542575 - DNA, 50 bp, Homo sapiens
catgttttggctttggggctaggatatggctcgtggacagcagaaaattc

SEQ ID NO: 542576 - DNA, 100 bp, Homo sapiens
atttgatgaggtggatctgacagatgccagcgtagctgaatccagtaccaaaaacgtcaacaacagttttacgcggttaagaagattgtctaccaaatat

SEQ ID NO: 542577 - DNA, 105 bp, Homo sapiens
cggcccgggcgagcgggtgcgtctgccgcagagtcggcacctgaaggacatggagtattctaccttgtaaatactgttatttgtatatactgtaaatgatgacat

SEQ ID NO: 542578 - DNA, 100 bp, Homo sapiens
tcatcgaggccaacaacccattccaggctgtgcaggaagaatgttgtaccatctttgggtaggcagacttccctgacgacatcagtgatacccaaagctg

SEQ ID NO: 542579 - DNA, 90 bp, Homo sapiens
cgagaagccggtacaggtgccctgcggacacgtaggaattacggaggttgagctggtccggaatccctaagccagtgcgtccaatgacgt

SEQ ID NO: 542580 - DNA, 107 bp, Homo sapiens
tgcccaggccaagccttacgagaacatctctctctgccaggtggattctgaagagccagtctttgaggctgtcatcaactgggtgaagcatgccaagaaagagcggg

SEQ ID NO: 542581 - DNA, 75 bp, Homo sapiens
gacaccaacaagcgcaagagagacgaaggtctctaattaacagaagatggcaaagcccagccacagcagctatgt

SEQ ID NO: 542582 - DNA, 83 bp, Homo sapiens
cctccctgcaactaactccattcttaattgagtgatcagcagctggactgtgccttggacctaatgaggcgcctgcctcccca

SEQ ID NO: 542583 - DNA, 100 bp, Homo sapiens
tggatattgggcttgacagctgcaaggagttactgaaggtatcatgatattagctggtttgacatcaagtcatttgtgagtcatcagatcttctcctgaa

SEQ ID NO: 542584 - DNA, 75 bp, Homo sapiens
tttcggtgctctgggtggaaaaggacagagcagaatgggctgatatagatccggtgccgcagaatgatggcccca

SEQ ID NO: 542585 - DNA, 100 bp, Homo sapiens
cactgtgggcggagatggctgcgacgcgtgcgcaggttcatcatgcctagtggcgtataagaagaccccgccaccggtccctccacgcaccacttcaaag

SEQ ID NO: 542586 - DNA, 89 bp, Homo sapiens
atcagctcctggttcaacgaggccattgacttcataggtatagtcgtctccccctccaccacggcaagtcctgcagagggaaccagctc

SEQ ID NO: 542587 - DNA, 74 bp, Homo sapiens
atcacattcattttaattttgccggaatatttcaagacaccgaaagattactttctatgaagacaaaaattttc

SEQ ID NO: 542588 - DNA, 75 bp, Homo sapiens
acctttcttcccctggatgggaaaacatctcaagtactgccaaatctgtcgaaagggagataatgaagaactgct

SEQ ID NO: 542589 - DNA, 107 bp, Homo sapiens
cctttccaagccaatgcccaagacattataaaccatggactggaggaaacagctgccaaatgcaagggactgggtgccaaggttcatacctttgtggtagactgcag

SEQ ID NO: 542590 - DNA, 75 bp, Homo sapiens
cacagaggaggccagggaagctctagaggcgttttttggccaaggggcatcagaacacaccatgatggctgtgac

SEQ ID NO: 542591 - DNA, 100 bp, Homo sapiens
cttcctgctgcggttcctgcgcgcccgggatttcgatctggacctggcctggcggcatactggagcatagtgaaagagtctattttgaagcttcaaactt

SEQ ID NO: 542592 - DNA, 88 bp, Homo sapiens
ccaagaggaggacagttcgctacacagcaatgcatcgaggccgggtgagagcaaaactttcagcaccacttgctggcatgggaaatgc

SEQ ID NO: 542593 - DNA, 83 bp, Homo sapiens
gctactactacgtggtgcttggaaaggatctatcttgggatcccatggctttctttactgggctctggggccccttcacctgt

SEQ ID NO: 542594 - DNA, 75 bp, Homo sapiens
tcctttatatagaagggagagcagaagtcaattcatctggaaagactatctctgagtcagacttaaaccactctt

SEQ ID NO: 542595 - DNA, 100 bp, Homo sapiens
ctctggagcttcttgggacctgtgaccttcatcattttgagaggtggagaagagcgagtacttgagaaagaagaggaagaagatgatgatgaagatgaag

SEQ ID NO: 542596 - DNA, 76 bp, Homo sapiens
caaagataaatccaaatactgcatatcagaaacaacagactcctgaaacagactactctttgcctttttgctgcag

SEQ ID NO: 542597 - DNA, 100 bp, Homo sapiens
catgacgatcagcttgatggaccaaaatacaaatgcacagtgtctctagacttcatcagagctattgcaaggtggtcactaactgccaagagagaatcca

SEQ ID NO: 542598 - DNA, 99 bp, Homo sapiens
ggcctcgtgcccttcgccttcgtgcgcttcgaggacccccgctgggagtgtccactcgccttccaccagcatggcaacgtcttcacagtaccgccagct

SEQ ID NO: 542599 - DNA, 82 bp, Homo sapiens
gaaaggctcaacgagaacaagctatcagaaatatcctgtattgccatacttggttttagtattgaaacaattcctattgcag

SEQ ID NO: 542600 - DNA, 49 bp, Homo sapiens
cctggtcgagccggaggaagccaccaggactgcaatgtgccgatcttag

SEQ ID NO: 542601 - DNA, 100 bp, Homo sapiens
gagaagaatgagtataaaggatgggttttaactacagacccagtctctgccaagaaatggccagcctcaaacgacaattcacggaactgttatcggatat

SEQ ID NO: 542602 - DNA, 82 bp, Homo sapiens
cttcttcccggggcgccataaacgcccccaatttcccagctgctaaaggaagaggaaggtttttagaacttcagccataaaa

SEQ ID NO: 542603 - DNA, 100 bp, Homo sapiens
ggctcggccgagaccccgccacccgtccctgcccccggctcgccggtcagcggctcgtcgccgttcgccacccaagaagaagctcattcacacagaagac

SEQ ID NO: 542604 - DNA, 100 bp, Homo sapiens
gactacaagcagcagttgaaaaactcctagaagccataagtgaaactagcagtcaggtatcatgatattagctggtttgacatcaagtcatttgtgagtc

SEQ ID NO: 542605 - DNA, 100 bp, Homo sapiens
aagcggcctcccgggaaggagcgccctggcggagaagactcgaacggctcccacagccgggcgttgggggaaaggtgctgcgagagatgtgcaagcaggg

SEQ ID NO: 542606 - DNA, 102 bp, Homo sapiens
tgccgctgccggctccagggagccccgtgtcaagcaagatttgagttttgtcaccggctcccacgtcggagagctgatcatctgggatgccctggactggac

SEQ ID NO: 542607 - DNA, 100 bp, Homo sapiens
cttcagttttgagactcagactgactgtccttgctcctcaagcttgcagacagcctattgtgggacgttgtgatcataatgtctggagaatgccagagtg

SEQ ID NO: 542608 - DNA, 118 bp, Homo sapiens
aaggcaagagtaacagcagcgccgtcccgtccgacagccaggcccgggagaagtgtgtggaggtcattgcaaaggaaggacaaaacctgaaagagctatatttggtgtcctgtaaaat

SEQ ID NO: 542609 - DNA, 101 bp, Homo sapiens
gaacggcacaagaggcgctacagcctctgtgacatctccaaggtggacaggactgtggacgtggtattgctgaaggacctcagcagccatgtcgaagcccc

SEQ ID NO: 542610 - DNA, 101 bp, Homo sapiens
cgtggacaatgtgctctttgcccctattatggagaaaggtgttccctagatttcttgaagaaaatgcacccttggttatgtatggcatcactcaccatctg

SEQ ID NO: 542611 - DNA, 82 bp, Homo sapiens
cggatggtcttgaaacacaaatggtttttggatgaaattctgaaagcagcggtaatgaaatatgggaaaaatcagtggtcta

SEQ ID NO: 542612 - DNA, 75 bp, Homo sapiens
gaatccagggccgacccgggccggaccgaccccaggcggcgagcataccagaaattcctgatgacctgaagcaac

SEQ ID NO: 542613 - DNA, 87 bp, Homo sapiens
aggaaaaatccgcagagaaattcagaacctcaagcttttcaggcatcctcatataattaaacttggacacgtcgatctgacaatgct

SEQ ID NO: 542614 - DNA, 75 bp, Homo sapiens
tgcacctgatagtgcaacacttcaaggtttggtgcacctcgatttggaggaagtagggcagggcccttatctgga

SEQ ID NO: 542615 - DNA, 101 bp, Homo sapiens
cgcgacccctggagggcgagacacgccgccgccgccgccgccgccggcgcggaaggacgaggctgaggcgagaaacgagagcttccttctcctacatctgc

SEQ ID NO: 542616 - DNA, 100 bp, Homo sapiens
gatgagaaacggaaaaataaaggcacttcggagacggtggctcagggagtaaaggaaggccagttgagcaaacagaagtgttcctctgcatttcaaaacc

SEQ ID NO: 542617 - DNA, 90 bp, Homo sapiens
gtccgagcgacttctaggagcctggggttcggcgctatggaggagctcgatggcgagccaacagtcactcctatatataaagcagatctg

SEQ ID NO: 542618 - DNA, 95 bp, Homo sapiens
gaggagattctggggcagtatcaacggagtctccggggttatacattggctcttcaaagacgttcacctcatcagagaaatccctgactcctttg

SEQ ID NO: 542619 - DNA, 100 bp, Homo sapiens
ctgccttcctgttcacggtgaccttcgcttggtgtcctcctggcctcagcaacctgacaattctgtcgtgtcccggatggcactggatctttaaaacgca

SEQ ID NO: 542620 - DNA, 100 bp, Homo sapiens
ggccctaccaactttgcacccatcatcaaccatgtggccaggtttgcagcccaggctgcacatcaggggactgcctcgagatggacagagacgtatgtgc

SEQ ID NO: 542621 - DNA, 75 bp, Homo sapiens
tcagcacctgcttgtttggaagggtcgaagctgctgaagtggtttttcctaatggaaaatcacatacctttccag

SEQ ID NO: 542622 - DNA, 80 bp, Homo sapiens
gctaccagaagtgcctggccatgggcatgaagcgggaagatggagtttcactatgttgcccaggctgatctggaactcct

SEQ ID NO: 542623 - DNA, 100 bp, Homo sapiens
gaaaaaaaaaggagagaagctgaagcattgcttcaaagcatggggctaactccagaatcccccattgtggtattcatgggtagtttgaaatatccagatg

SEQ ID NO: 542624 - DNA, 50 bp, Homo sapiens
ttattattttacacaatccaaagggcactgaccctatcagccagacgaag

SEQ ID NO: 542625 - DNA, 75 bp, Homo sapiens
gagccgcgctgcgcagccgacgcgggaatgaagcgggcgctgggcagttcatagccctgatgaagcaagttactc

SEQ ID NO: 542626 - DNA, 88 bp, Homo sapiens
gccccttccttggcctccccctgtaggttacagagccatcacggtgcggaagctcatgcagggagacaagagacacacagccacagag

SEQ ID NO: 542627 - DNA, 75 bp, Homo sapiens
actgattggaaactctttgggaaagccactcgaaaaggtcactttcatgaattcaaaggcaatttaccagtgatt

SEQ ID NO: 542628 - DNA, 51 bp, Homo sapiens
tatatccgcagggttcggatgagaccaggtgctccatacttgcttgcagtg

SEQ ID NO: 542629 - DNA, 98 bp, Homo sapiens
cacaagctgcaccagcttctaaccgagtgattgcccacagtgagtatcaaaagtccaaaagaatttccatctttctgagcatgcaagatgaaattgag

SEQ ID NO: 542630 - DNA, 100 bp, Homo sapiens
catgataatttccccagagcgtcttgatccttttgcagatgtaacaaatgtggcaattattttggatctatcacctgtcatcataactggcttctgcttg

SEQ ID NO: 542631 - DNA, 85 bp, Homo sapiens
caagttcatccccattttccaaggggacgacagcgtcgttattggggtcacacgacctacaagtagggagcagggaaagaagagt

SEQ ID NO: 542632 - DNA, 98 bp, Homo sapiens
ctgtaaccagcatgaacgacaccctgttctcccactctgttccctcctcaggaagtccttttattaccaggagtgaaactgatgaaagttgtaagaag

SEQ ID NO: 542633 - DNA, 119 bp, Homo sapiens
ctataagaaatatttggcaaaactcaggtctattaatccaccatgtgtgcctttctttggggagtcactacatggttaccgcatctgtatccaggccatcctgcaagacaagcccaaga

SEQ ID NO: 542634 - DNA, 101 bp, Homo sapiens
cgcagaggaccccccgacaccagcatggactgctgcaccgtatgttgagtctaaaaaggacagagtcacagtagtcttcagcacagtgtttaaggatgacg

SEQ ID NO: 542635 - DNA, 82 bp, Homo sapiens
tgttgggatgagagtcggagccgaataccaagctcggatccctgaatttgatccagatgaaggatttgggggcagagcactt

SEQ ID NO: 542636 - DNA, 100 bp, Homo sapiens
cggatttctgctatgatgacagtgtgctggaattgatgttcgtctgtgtgatgttggtgaggccatccaagaagttatggagtcctatgaagttgaaata

SEQ ID NO: 542637 - DNA, 71 bp, Homo sapiens
acctgccaatcccctgctgttaagccttcgatttgaaggatcttctgcaggacaactggtccttatcacag

SEQ ID NO: 542638 - DNA, 100 bp, Homo sapiens
gtgggagtgctggcctgaagcctccatgccccggcagagggacggacacgcggacgtctagcggagttgtaggacagtcccatctggacagcaacattga

SEQ ID NO: 542639 - DNA, 74 bp, Homo sapiens
gaacttggaaatgacattggcatccagattatccactgcagatgaggaagatggagagaatgcccacccatata

SEQ ID NO: 542640 - DNA, 97 bp, Homo sapiens
taagatcttcctgaggacaatggcgcaagatcgtcttcagctgttcatagcgggtgacagtccaaagattgacttggccggcagttcgctatctggc

SEQ ID NO: 542641 - DNA, 98 bp, Homo sapiens
agccatcatcaacaagataaatatgaaggacctggtgtccctagatgacactgagctccggctgttgggacggacgcactcggcctgcgatgctctgc

SEQ ID NO: 542642 - DNA, 76 bp, Homo sapiens
tccatttctcctattgaggagtcaacgagtggtcattcactgtaaccacaggatcccatttggagactggtttgaa

SEQ ID NO: 542643 - DNA, 100 bp, Homo sapiens
ccggcacctggacttggcttccctcaagtctatccgagagtttgcagcaaagatcattgaaggtcctgttttgctgcgttcctactgtctctatgttctc

SEQ ID NO: 542644 - DNA, 82 bp, Homo sapiens
cacggagcaggctcggagcctacggggctggcctcggactggatggggacatgggaaagcggaaccaccaaaaggagtgatg

SEQ ID NO: 542645 - DNA, 75 bp, Homo sapiens
cttaacccagaagtagctgaatgtgttactccattgctgaggagtggtttggacatatttgactcttttcccccc

SEQ ID NO: 542646 - DNA, 82 bp, Homo sapiens
cgctggcagccgcggatctcaccgccgctcaggtgtttgaagatactgtggaggagcgtgtcatcaatgaagaatataaaat

SEQ ID NO: 542647 - DNA, 98 bp, Homo sapiens
gtggggcgctttccgtcggcgtgtgttttggggttgccatcggcccgtagtatgtgaaaaggtgtgaacaaagactcctatctgatcctggagacgct

SEQ ID NO: 542648 - DNA, 74 bp, Homo sapiens
tcagtgcagaggagttctctgacatctctgggtgtccgcaatgttgccagtgtctgtctgcagattggctaccc

SEQ ID NO: 542649 - DNA, 82 bp, Homo sapiens
ccagctccatcaacctcacgctgcacctggtagaacttcatggaggaacacggagtgacccaaaccgaacatatggctacca

SEQ ID NO: 542650 - DNA, 75 bp, Homo sapiens
cctgcagcgggagctggacggcgagcgcgagcggcgcgagaaagaaacagagcaaatgcagcgttacaatcaaag

SEQ ID NO: 542651 - DNA, 100 bp, Homo sapiens
gtcaaatgacagcaaagcactgtgtggctgaataagcggtgcatgtttgcctacaagctgggtctgaatgacttgccccagtcagtcgcctttttcagtg

SEQ ID NO: 542652 - DNA, 75 bp, Homo sapiens
tccagatgctgaaaagagaaggtcaaacagctgaagttacagatgtagagctaaaacgactgaaggatgctttca

SEQ ID NO: 542653 - DNA, 89 bp, Homo sapiens
ccgctgccttgtggaggagttgagaaaaaccaaggattggatttgaggctcctcccctccagggacaggctgcagctccagcgagtggc

SEQ ID NO: 542654 - DNA, 83 bp, Homo sapiens
ccatcacccaccaacaacaccacaataatccacagccaagcactctacacccccaagtgcatatgggtctgtcaaagcctata

SEQ ID NO: 542655 - DNA, 82 bp, Homo sapiens
cagctgacggagatggtgcagaagatggaggagggccaattcctgtccccccagcagcatggcatcgtgtgctgaaccctct

SEQ ID NO: 542656 - DNA, 99 bp, Homo sapiens
caattgataatggtctagcatttccttttaaacatcctgatgaatggagagcatgtgaccaagaatatggcccaggtgaccaaagccctggacaaggcc

SEQ ID NO: 542657 - DNA, 82 bp, Homo sapiens
cacaaaccaagtgggcaaataatggcagttaaaaacattaaccaggtggtatttgttggaaatttcttgagaattaatacga

SEQ ID NO: 542658 - DNA, 100 bp, Homo sapiens
cgattgcactttactgggggatttgcctcagatggagttacaggtgcggcggcagcacatggagcgttgtaccagcttcctggtggatgagctgggcgtg

SEQ ID NO: 542659 - DNA, 87 bp, Homo sapiens
cagcaccatggggaagcgggacaatcgggtgggtttgtggatgcacttagatgtttgcaatgagcactgtggctggcatgccccagt

SEQ ID NO: 542660 - DNA, 101 bp, Homo sapiens
gtggaggcattttggggcagaatacagagatatggaatcaggacaactacacctttgcccaacctgggattcaaatgaaagtgaaaatgttagaagaactc

SEQ ID NO: 542661 - DNA, 100 bp, Homo sapiens
ctggagaagggatggaaatacttcaacaaggtactgaagatttaccccccaaaaaaaattgtcaatgagaaataaagctaactgatatcaaaaagcagag

SEQ ID NO: 542662 - DNA, 100 bp, Homo sapiens
gagaaaggagcttggaaagaagatgctctacagggactttaatatgacaggctgggtcccagggctggtggttgctttgggtctacagctacgtcttacc

SEQ ID NO: 542663 - DNA, 90 bp, Homo sapiens
aaaactcagtgaaaattcatctgaaattaaaaagggaaggataaccccatcacagatgatatcatcaagttgaatcgaaaggaagggaag

SEQ ID NO: 542664 - DNA, 100 bp, Homo sapiens
actggtgatagaccatacaaatgtgcacacccaggctgtgagaaagccttcacacaactctccaatctgcagatggggtcacagtggttataaagagtta

SEQ ID NO: 542665 - DNA, 75 bp, Homo sapiens
atgggggaccacaagatcctcatcgacagagacacctatggctgccgatgaaggctcagcagagaaacaggcagg

SEQ ID NO: 542666 - DNA, 82 bp, Homo sapiens
ggcgtggaccacatagacatttacgcggatgtcggcgaagagttcaaccagtttgtcactcaagccctatcagaaggttggt

SEQ ID NO: 542667 - DNA, 100 bp, Homo sapiens
acacacaggagagctggctgcagtaaaaatcattaaattggagcctggtgttggtaaatcatgcttattgctacagtttacagacaagaggtttcagcca

SEQ ID NO: 542668 - DNA, 75 bp, Homo sapiens
ctactctctctttctggcctggaggctatccagcgctgaccggttccctgatgtgttacctgcttctgctactga

SEQ ID NO: 542669 - DNA, 75 bp, Homo sapiens
cagcctgcggagcctgtggggcaggcggtgcgtctttctacgtgaataggattttgtggctggccagatacactg

SEQ ID NO: 542670 - DNA, 100 bp, Homo sapiens
gccgcgcgctggcgctgctggaagacgaggagcgcgtcgtgcgcctgggggtgcgcgcctgcgacctgcccgcctggttacggcagtcccagtcctactg

SEQ ID NO: 542671 - DNA, 89 bp, Homo sapiens
gaagcgggctggcggcgctgccgctcccgggcggccgcgggcgggtcatcatcagatttgaaatatttaaagtggatacaaaactattt

SEQ ID NO: 542672 - DNA, 82 bp, Homo sapiens
caagcctgtggctgcccagttcctcctgcagaaccacatccctgtgtttagtcccgcacttacagacggctcgctgggcgac

SEQ ID NO: 542673 - DNA, 100 bp, Homo sapiens
tcaagctggccaagcacaaagagcttgctccctacgatgagaactggttctacacgcgagctgcatgctacaagtgaaaactgatgagaaactgaatgtg

SEQ ID NO: 542674 - DNA, 78 bp, Homo sapiens
tttgcctacagcacggcgacaatacccaaagacagagagaccaggatgaatttcatcctttcatcgaagcacttctgc

SEQ ID NO: 542675 - DNA, 99 bp, Homo sapiens
cccactctagaggagctgaaagtagatgagattagtgatgatgaaccaggttatgaccttgatttattttgcatacctaatcattatgctgaggatttg

SEQ ID NO: 542676 - DNA, 100 bp, Homo sapiens
gtgctggtacgtgcttttcctcctgcagcccaccgtctacttggtgtgctcagtgaaggaacggcatgccagtgaaatgagggatttgccaagtcgatat

SEQ ID NO: 542677 - DNA, 100 bp, Homo sapiens
caatggatcccatcacgggagtcggggtggtggcttctcggaaccgagccccgacaggctatgacgtaggtgaatcatttgatgtaaaagacttgactcc

SEQ ID NO: 542678 - DNA, 71 bp, Homo sapiens
gaattctggttgtgtttcaactgctgtattgcagaacagcctcagcctgctacggagagtgaggtaggaga

SEQ ID NO: 542679 - DNA, 98 bp, Homo sapiens
cacccctcacctcgatgcagccagtagcttggatccttgtgggcatgatccataatcggtttcaaggtgaggctgctgggccacagccccgtgcttcg

SEQ ID NO: 542680 - DNA, 75 bp, Homo sapiens
gcgcttggaccccggcttctgggacgcgtcagataacgaaggaggcccaacttcattcaataaggagcctgacgg

SEQ ID NO: 542681 - DNA, 83 bp, Homo sapiens
ctctctgctgcggcgcggggaccgctgtgctctcgagtctcactgtcgcccaggctgcagtgcagtggtgccatcacgcgtca

SEQ ID NO: 542682 - DNA, 100 bp, Homo sapiens
tgccttcaccacagcccatgaattaggtgactctgacatcattagaagcatgccagaacagactggtgaaaagtaaaccttttcacctacaaaatttcac

SEQ ID NO: 542683 - DNA, 88 bp, Homo sapiens
aggaatactcataaagagactgagcctgtgtatgagaggggaagccctcccgggaacacccagcagccgctgcctggcctgccactgg

SEQ ID NO: 542684 - DNA, 100 bp, Homo sapiens
ttttgagctggtggaagtggttggaaatggcacctatggacaagtctataaggaggaggaagccaagaatctggtgagcgaagccatcgcagctggcatc

SEQ ID NO: 542685 - DNA, 100 bp, Homo sapiens
gagctggaatcggcccaccacccatttactgctccccaccccagtgacatacatctcctgtacactgagcccaaaaagctctcacccctccagtgccgac

SEQ ID NO: 542686 - DNA, 100 bp, Homo sapiens
aataaaggactgtttgaagaggcagcaaagctgtatgaccttgccaagaaggttcctgttgtaaaagaagatgatgaaccagaggaagaagatgaagaag

SEQ ID NO: 542687 - DNA, 51 bp, Homo sapiens
ctagtggaggggaaatatttgttgaccagcaagtcaagtccctgtcgtcgg

SEQ ID NO: 542688 - DNA, 75 bp, Homo sapiens
gcgcttcatgtgcaaccttgactgccaggaagagccagattcctgcatcagaaagcccgttttggcctgagtgcg

SEQ ID NO: 542689 - DNA, 82 bp, Homo sapiens
ggactccaaaatggcgtcagttgatgctgtgtgctgtggacccacctggggttcatggagtgggccacggggcccagcccta

SEQ ID NO: 542690 - DNA, 90 bp, Homo sapiens
ctgtacagcagtttcctcatccctgcagctgtgtttgaacagctccattgggtgtgatattcctggctggtatttgtgggtctcactgaa

SEQ ID NO: 542691 - DNA, 50 bp, Homo sapiens
cattgctcatcggatcacccctaaggtaaagaagcagctttgaatctgag

SEQ ID NO: 542692 - DNA, 75 bp, Homo sapiens
acattgccgtcgacggcgagcccttgggccgcgtctcctttgaggtgtcgtgaaaactacccctaaaagccaaaa

SEQ ID NO: 542693 - DNA, 101 bp, Homo sapiens
aggcggtgttggacaggcttacctttgactaccaccagaagctgcagggcaagccacagagccatgagctgtagagacggggttttaccgtgttagccagg

SEQ ID NO: 542694 - DNA, 100 bp, Homo sapiens
actgggcgatctcgaggatttgcttttgtgtattttgagagaatagatgactcaaaggagagcactagacaaactgaatggatttcagttagagaatttc

SEQ ID NO: 542695 - DNA, 98 bp, Homo sapiens
gcccgcccaaggtctctcgcgggcgggagaacggaaaactcccaacttcctgacctcaaaggaagaccttctgcaggctgattttgaaggtgctttaa

SEQ ID NO: 542696 - DNA, 100 bp, Homo sapiens
gaaaatcatttgtgatgggtcagctagtatgcaggctaggcaaactatgcatttgctaaaaagtgaaacatcagtagcaaatggcagtcagtcagaaagt

SEQ ID NO: 542697 - DNA, 75 bp, Homo sapiens
ggaatattgacccttatttatccagaagattgatcatcatatgggttcaatcattccggccaagattccttggtg

SEQ ID NO: 542698 - DNA, 98 bp, Homo sapiens
agagacgccctcctccattctcttaggctccaaccaaggctctgatggagtcccctgtttccacaccagcagtgctgccaatacaccttttggtgcca

SEQ ID NO: 542699 - DNA, 51 bp, Homo sapiens
atccccaacggggaggccaacgtgaagaagagttcatgatcaagtgttgcc

SEQ ID NO: 542700 - DNA, 100 bp, Homo sapiens
caccttcctgaaccgagccgaggattacacccttaccatgccctacgcccactgcaaagctgcgtagagagtgccctctggcccagttgatggacagtga

SEQ ID NO: 542701 - DNA, 82 bp, Homo sapiens
gctcaagtaccagcagcaccaggagtccctctccgcccagttacaagttattcaagcggagaaatgttgctacagcagaaga

SEQ ID NO: 542702 - DNA, 50 bp, Homo sapiens
ttcaccacaagaagggctgccaggggacaagggcctgtccgacacgccct

SEQ ID NO: 542703 - DNA, 75 bp, Homo sapiens
gggtcacttagactaccccaggaacccgcgccgcgagggctccttccctcagccgcggcgagtcctttgcacatg

SEQ ID NO: 542704 - DNA, 89 bp, Homo sapiens
aagacagcatctgagcacagaaaggtgccatgtttcagaacagagtaagacccctggtaaagaagaactgaagatattatacagatacc

SEQ ID NO: 542705 - DNA, 82 bp, Homo sapiens
cgtgtcctgaaggagttccaccaggccgggaagcccatcggggcagttgggtgagaagcagcttccatcttcaacctcggat

SEQ ID NO: 542706 - DNA, 82 bp, Homo sapiens
ggccttaggaaattcgttgatgttctggtggattatggatcagatccaaatcagcattttttactgtctacagaaacttatt

SEQ ID NO: 542707 - DNA, 100 bp, Homo sapiens
ctgcgggtcgccagcggccccgccgagagccggaggcaatggatgaacagagcgtggaggtgtcatggagaaactccagctgggcccagagattctgcag

SEQ ID NO: 542708 - DNA, 100 bp, Homo sapiens
gggaccgcaggaacatccgccccaacatcatcctggtgctgacggacgaccaggatgtggagctgggggcctttacaacaactaaacggacaggcattcc

SEQ ID NO: 542709 - DNA, 75 bp, Homo sapiens
agcgactgacacgcatgtacaacgtgcgcataatgcggctactgcgactactaccggccccggttcttcctcctg

SEQ ID NO: 542710 - DNA, 75 bp, Homo sapiens
agagttagagagagggatggtgaccatcatctgcaaatagcataagcagcagcacatcttcaaatcatagcggcc

SEQ ID NO: 542711 - DNA, 97 bp, Homo sapiens
gtcctggtgcacccccagtgggtgctcacagctgcccattgcctaaagaactacctctacccagatggaaagacccacaacccagacctgactgagc

SEQ ID NO: 542712 - DNA, 48 bp, Homo sapiens
atcatcaccgcggaaatactgagaccagaagatcagctgccatgttac

SEQ ID NO: 542713 - DNA, 90 bp, Homo sapiens
tggaaggtgcgcgagctggtggacaaagcttatgcagaaggggttaaaagataactttgctgatgtccaggtctctgtagttgattgccc

SEQ ID NO: 542714 - DNA, 88 bp, Homo sapiens
atttacaaactggccaagaagggccttactccttcacagatcggttatgatgtgattgctcaagcccaatctgggactgggaaaacgg

SEQ ID NO: 542715 - DNA, 76 bp, Homo sapiens
tgccccggcggggaggacgagaatcggtgtgagacgagttgtactgctgtcacaggaaatggacgctggattacaa

SEQ ID NO: 542716 - DNA, 75 bp, Homo sapiens
ctacaatacctcttgggactgggctcgatttgaggcccagctcatcgcccaggccattggccaggccttcgccgc

SEQ ID NO: 542717 - DNA, 75 bp, Homo sapiens
cggcgccggagacgatgccgttgacatagatctgattgacatcctttggcgacaggatattgatctgggggctgg

SEQ ID NO: 542718 - DNA, 80 bp, Homo sapiens
gattgctggctacagcttcagaagaccgaagcgttcgtatctggaagtcaccttcaggccattcagaggaggaaagagag

SEQ ID NO: 542719 - DNA, 83 bp, Homo sapiens
cgacgcggcaccggcttcgacgccctctgcccgctccagaagcaggtgctcttacagcctgttccaagtgtggcttaatccgt

SEQ ID NO: 542720 - DNA, 97 bp, Homo sapiens
agtatgacaactatgggtccacagctgaggacattgtggagtggctgaagaagtagatgctggctggattggattttggtccatagttggaggctgt

SEQ ID NO: 542721 - DNA, 82 bp, Homo sapiens
ttggactgagtcctgcaggacacagtatacactgcgctgtgacatgaagcggtctctgttggccaaggacttgacaaagacc

SEQ ID NO: 542722 - DNA, 90 bp, Homo sapiens
aagaggaggggaggaggaggaggattcagggaataggagctggggagcccttctgcgccacaggagcctgtgtgaaatgcagcaaagggg

SEQ ID NO: 542723 - DNA, 100 bp, Homo sapiens
gatgctcactccaaagtctcagcagtccacctggaaggccgctgtggtggaaggatgtttgactgcagagatgtggcattcactgtgggcgaaggagaag

SEQ ID NO: 542724 - DNA, 73 bp, Homo sapiens
atcaccgtgacatccgaggtgcctttctccaaaagtgaacagcagagaatttcaaaggaccttgctaatatct

SEQ ID NO: 542725 - DNA, 82 bp, Homo sapiens
ccggcggcggcgcgcagcgtgtcaggcggagagacccgccgccaggtttggaaggcgctttgagtccccgctgctgtggcag

SEQ ID NO: 542726 - DNA, 50 bp, Homo sapiens
tgcaccttatcacccggaacctgcaggtatgtgacgcattcccagactct

SEQ ID NO: 542727 - DNA, 98 bp, Homo sapiens
agaaggtacccaaaccaccggcacagagcaagaataaatactgactttgagtaacggccttgagacggagtctcgctctgtcacccaggctggagtgc

SEQ ID NO: 542728 - DNA, 100 bp, Homo sapiens
atctcgcccatcatcctgaagaagtacgggatccccttcagccgggtggtaatcatgagggactaccagcacgagaatgtggtggagatgtacaacagct

SEQ ID NO: 542729 - DNA, 96 bp, Homo sapiens
tagacctgaatgggcttgaccatctcacaactgctcgcgtgacgaccgcattcgtggcagtttgtgaatagcacaatggaagaagctggactttgt

SEQ ID NO: 542730 - DNA, 75 bp, Homo sapiens
tcccgccaccgccggacttcaatgcccagtccccagctcgccagccttcagaatggagccatctgccaccatcct

SEQ ID NO: 542731 - DNA, 95 bp, Homo sapiens
gaagacaaatatggaaacaaatactatgaagacaacaagcaattttttggatatgggccctcacattttccaaacctgtccatctgctaactatt

SEQ ID NO: 542732 - DNA, 100 bp, Homo sapiens
agaatttcaagatatttgtgagcggtcacgagaagagaatgccttctagatgcaaaatcacctccaaaccagaccacttttcttgacttgcctgttttgg

SEQ ID NO: 542733 - DNA, 100 bp, Homo sapiens
gccgagcggtggcgtcgttgtcgccccctcctcgtcgggaagaatcgtttggtctcctgccgtgcccggggacggcaaaacagaacagaaaggcggagat

SEQ ID NO: 542734 - DNA, 98 bp, Homo sapiens
ctcagcccacaactcttgtcctaccacctcaacactacaacaacaggagtgcaaacttctctacagccgaaaagagggtcaaaggcaagaaaacaaaa

SEQ ID NO: 542735 - DNA, 75 bp, Homo sapiens
acctgcgtggtgcactacaccgctctaagcgaaagacatgaggcctcagcctgaaatgaggttgttttgaggtca

SEQ ID NO: 542736 - DNA, 76 bp, Homo sapiens
tcaatgtaatgaatggatactgccttccagatcctttctttagcagcaaggtacatcaggaacgtctctatcaaga

SEQ ID NO: 542737 - DNA, 100 bp, Homo sapiens
cctttgcacctcgcagctaaaaacggccacatcgacatcatcagtatggaagctccaaaaggaaagataccagattgatcttgatcacctctgcctcccc

SEQ ID NO: 542738 - DNA, 82 bp, Homo sapiens
cgagtaccggacgacgcgcgtcagccgcgagggtggcgttctcaagacaatgcagatcttcgtgaagactctgactggtaag

SEQ ID NO: 542739 - DNA, 75 bp, Homo sapiens
ccatctttgtctcatcttgttgtttatgtaccatctgttcgtggaagtaagagttgtggaaagtaaaaatgtagc

SEQ ID NO: 542740 - DNA, 90 bp, Homo sapiens
ggacgctactccggacgcaaagctgtcatcgtgaaggtggctgggagcccgagccccacacctgccgggcagcaggtgctggacgtcgac

SEQ ID NO: 542741 - DNA, 99 bp, Homo sapiens
ggcgtgaaagtcgtgatatcatcgttgaactatgggcggcccctctacgtgctcaggctggggcagatggacaccaaaggcttggtgagagcgctcggg

SEQ ID NO: 542742 - DNA, 75 bp, Homo sapiens
aactggaggctgagtacgacagcctcaaacaggagctggagcagctcaaagagtctctggctgatgaacttgctc

SEQ ID NO: 542743 - DNA, 100 bp, Homo sapiens
gctgtggctgcgggaaagcctctctcttgcccaaaccacgatgggaatgacccctatggtgtagccgtgggtggaactgtggggcactgcctgtgcacgg

SEQ ID NO: 542744 - DNA, 89 bp, Homo sapiens
ggccacccagccgtctcctgtgaaggccatatttgataaacaggaacttgagggatcgcttacacctgagacgaactacagaacagcac

SEQ ID NO: 542745 - DNA, 100 bp, Homo sapiens
atgatgttcgtccgcaacgattgcaagctgagatctgtatctgtggacctgaatgttgatccctcgcttcagattgacatacctgatgcgctcagtgaga

SEQ ID NO: 542746 - DNA, 98 bp, Homo sapiens
acgcctgtgtcctcattgctccaaactgtgttgtttcagctgtattagggaatggcaaaactctattcagaagaatgcaggacttgcatttattgagc

SEQ ID NO: 542747 - DNA, 83 bp, Homo sapiens
ggccgctgtgtggttgcaacggagataaattcccggaaccgcgattcggcgtgtcagggggaaatttgcagtggtgagaaaat

SEQ ID NO: 542748 - DNA, 75 bp, Homo sapiens
tggggcgcggatgggatccagctgttagtcggcctgaggaagaacttgatcctgaagagagggacaacttcctcc

SEQ ID NO: 542749 - DNA, 75 bp, Homo sapiens
tgccgcaaccggaggagggagctgactgatacactccaagcggtttctctggaaacccccctggtaagtgtggag

SEQ ID NO: 542750 - DNA, 90 bp, Homo sapiens
tcgaccggctgctccccaaactggcccgtggctccctgtcagtgggctggagatataataacagagctggaatctgtagatgatgactgg

SEQ ID NO: 542751 - DNA, 98 bp, Homo sapiens
gggtactggcaattggttttcggctttggcgctcggggtgactcttctcaaatgccttctcatccccacatatgttctaagaacggaagcatctgggc

SEQ ID NO: 542752 - DNA, 85 bp, Homo sapiens
gtcatttgcagagtcaatggttgcaggaaagtttgaagaaagtgaattacatcaaaatcttgatccggtgtttaaagccgtccca

SEQ ID NO: 542753 - DNA, 82 bp, Homo sapiens
cgggagactagcttggccacaggagacaacgttgaggtacagacaggagcgtgaggatcatccccggagaggacgggaggat

SEQ ID NO: 542754 - DNA, 100 bp, Homo sapiens
gaaacagacaaaattaaggaagatatccttaccgatgaagatgaaaaaacaaaaggactgtgggattccattaaaaggagtgtcatgggccggcagacat

SEQ ID NO: 542755 - DNA, 82 bp, Homo sapiens
tgatgacactttggatgaaggagtaggacttgtgcattcaaacatagcaactgagttcttatcaggagaggatcaatggaag

SEQ ID NO: 542756 - DNA, 83 bp, Homo sapiens
gactcaacacccagagatcttgattattccagagaactgtggctgcaccatctgtcttcatcttcccgccatctgatgagcag

SEQ ID NO: 542757 - DNA, 100 bp, Homo sapiens
ggaggttgggccaagggccaggacttcccgtcacaatttcatttgttgatcccggcaccgccagaagaagaaaggagggcgcgggctaatgaccgagaat

SEQ ID NO: 542758 - DNA, 100 bp, Homo sapiens
ccgccttgctgctgctcaaagctgctgccgccccttgggctaaaaggttcgagaacttgtcttggacaattgcaaatcaaatgatggaaaaattgagggc

SEQ ID NO: 542759 - DNA, 75 bp, Homo sapiens
atcaaaccacagcaatcagaatccagtgcttctcgaccaactttggatcgtggctattttgaagagctgatcacc

SEQ ID NO: 542760 - DNA, 75 bp, Homo sapiens
gacacctggaagccgagaaatgatcatcaacacctacacagaggctgtgcagacggtggaccccttcaaggccac

SEQ ID NO: 542761 - DNA, 75 bp, Homo sapiens
gccacggccaagcatactccggaagaaacctgccacagatggcaggaaccgaatattgtatctgacgcatcctgt

SEQ ID NO: 542762 - DNA, 96 bp, Homo sapiens
aggggctgctgcggcgatccgggtcgggctacgagggcagcaccagctggaaggcggccttggaggattgtgaataagtggaatacagctctcatt

SEQ ID NO: 542763 - DNA, 75 bp, Homo sapiens
tgccaagaaacagtgcgacttcaaccaaggcctgaagaagtcagtgatttatagttcactaaaactgcacaaaat

SEQ ID NO: 542764 - DNA, 83 bp, Homo sapiens
ccaaggaaaaactggagagcttcatcaaaaatagtgatagctttgataagaattacatgaatgacagtcttcgaaccaatgtg

SEQ ID NO: 542765 - DNA, 100 bp, Homo sapiens
tttactggagtaggtgttagtaaggcatttgaggagactcatctgacctcccttgacccagtgaaacagtttgctgcctggtttgaggaggctgttcagt

SEQ ID NO: 542766 - DNA, 100 bp, Homo sapiens
gtggaaaggctctcagtgaaaaaggtttaggattgggtgtgtgtgtctcctctctgaatggcactcaaatgtttgctgactcctactctgcgtgactggg

SEQ ID NO: 542767 - DNA, 90 bp, Homo sapiens
gtttgccctctcaggctcctgggatggaaccctgcgcctctgggatctcacaacatgactagacattcactttgcaaataattgttgtga

SEQ ID NO: 542768 - DNA, 75 bp, Homo sapiens
gctgtgctgcgcggcccccgcgcatgagcagtcattatggcgaaccttggctgctggatgctggttctctttgtg

SEQ ID NO: 542769 - DNA, 75 bp, Homo sapiens
ggtgacctcacctatccatctccctcaaggcagcttttgattattgccaagcgcctccccccagaccagctcatc

SEQ ID NO: 542770 - DNA, 75 bp, Homo sapiens
acaagctagaactgcagttgggaaagacagtgattgttataatcaaaatgtatcggcaagcagtgtaaacggagg

SEQ ID NO: 542771 - DNA, 101 bp, Homo sapiens
ggggagaccagcccggccgagccgagggccaccccctggtcctctgccctcgcgccccgctagggccaggactcacaccacccggcaagaactgctcacta

SEQ ID NO: 542772 - DNA, 50 bp, Homo sapiens
tctatgccaaagtggaccggctagagttccagggtcacccccgagaggac

SEQ ID NO: 542773 - DNA, 75 bp, Homo sapiens
caccaacactgcacttaaataagggcacacctagtcaggcagcggaggaggagaaagagatggacctcccggact

SEQ ID NO: 542774 - DNA, 82 bp, Homo sapiens
ctgggattggtcagatagcgagtttgaatggcagggcacacgtgtttcacgttgacaggtttgcttgggacgctagtaacca

SEQ ID NO: 542775 - DNA, 100 bp, Homo sapiens
gcgaggggacggagccggatcaggagccgccgccgccatatcagcccgtgatgctgatgagcgagagaagtggatccatgccttagaagaaacaattctt

SEQ ID NO: 542776 - DNA, 75 bp, Homo sapiens
cgcgctgctcatccccaaggaggacggcgtgatcacggccagcgaggacagggtgacgcagacttacgatgcagg

SEQ ID NO: 542777 - DNA, 110 bp, Homo sapiens
gatgacaaaacttcaagccaaacatcaagcagaatgtgatttgcttgaagatatgagtaagaagacatgttggataacaagaagaggtgtagagtttgcatatatcaact

SEQ ID NO: 542778 - DNA, 80 bp, Homo sapiens
cgcagcaccctgctgtcttcccggtccggcccgctgcccgcggcgccagcaccatggaatgatcaccaagacacacaaag

SEQ ID NO: 542779 - DNA, 90 bp, Homo sapiens
gtccagcgctcgccgacaggggcctgggctgtcccgagccggagttctacggggaagatgctaagaaatcccgggactatggaagaatca

SEQ ID NO: 542780 - DNA, 100 bp, Homo sapiens
caatggcacggaggcctgcgttattaaaggtggaagaaggtccatatctttttctgtgggtgcttcaagtgttgttggaagtggaggcagcagtgacaag

SEQ ID NO: 542781 - DNA, 99 bp, Homo sapiens
ggcaggaattattggaggccaggtttactggagtaggtgttagtaagatttgtgtaagaattgtcatcatgtaatagccagacatgagtatacattcag

SEQ ID NO: 542782 - DNA, 101 bp, Homo sapiens
ccggattggggatgagtatgcggaggacagctctgatgaggaggattttttatcaagcagaaatgcatcgaacaacgagaatcaagatcactgagctaaat

SEQ ID NO: 542783 - DNA, 92 bp, Homo sapiens
cgtggagttcgaggagtgcgtcaaggactccccgcgcttcaggttagcgaccccgagagtacagtggctgtggctttcacaccaaccattcc

SEQ ID NO: 542784 - DNA, 100 bp, Homo sapiens
tggtggcctgggcagcctgctggaccctgccaagaagtcgcccatcgcagcagctcgccctgaccctctattctgcaccctgtgagccaccgagactgaa

SEQ ID NO: 542785 - DNA, 120 bp, Homo sapiens
aggaactgaaacatgaaaacatcgtggccctgtacgacttccagggagtaccctgacttctaccggaagctctacggcctcttggacccctctgtctttcacgtcaagtaccgcgcccgc

SEQ ID NO: 542786 - DNA, 97 bp, Homo sapiens
gagaaaaatgagctttgagatcctcaggggctctgacggggaagactcagcctcagtttgtatctacttgaacaagaatggcagcacaggcccccac

SEQ ID NO: 542787 - DNA, 75 bp, Homo sapiens
gtgcgtgggggaccggctgttggcggcggccctgttctgtcattagctattagttctaatggagaacagtgtttt

SEQ ID NO: 542788 - DNA, 75 bp, Homo sapiens
atgattgtgaggcctccccagccatgtggaactccacttctgccccaccaacgttgggccaaccaaaaggagtca

SEQ ID NO: 542789 - DNA, 85 bp, Homo sapiens
cggtggccggcagtcatctcgcggccgttcagattgtcagaagcttcagttctggtaaaagagaaggtggggactttgtttgctg

SEQ ID NO: 542790 - DNA, 75 bp, Homo sapiens
atctcggtgctgcagacggcgagacctcctgcacagcacccaccaaggctccggatgtgttccccatcatatcag

SEQ ID NO: 542791 - DNA, 75 bp, Homo sapiens
ctcggccgaccagggacctgcccgcctgcggctgctccgggacttcagaaatgggcttgggaaccagctgagttc

SEQ ID NO: 542792 - DNA, 75 bp, Homo sapiens
ggggagccccgggagccgcacggtctcggcgcggaagatggccggcggcgtggacggccccatcgggatcccgtt

SEQ ID NO: 542793 - DNA, 100 bp, Homo sapiens
caaaggcaagagtaacagcagcgccgtcccgtccgacagccaggcccgggagaagttgctgaaaagccaggagtcaaaatgactgagcgctttgactgcc

SEQ ID NO: 542794 - DNA, 50 bp, Homo sapiens
gtagaaaccaaatatggtttgcttcagtcaacgaaacggaatattccaat

SEQ ID NO: 542795 - DNA, 82 bp, Homo sapiens
cagccctccccgcctctgcgtctttgctcccggagcgcttgaaggagctgcggcccagctcaacattggcaatgtgctccct

SEQ ID NO: 542796 - DNA, 95 bp, Homo sapiens
ctgtcaagacaacagtgatgaggaaagctgtgaaagttctcaaggcccaaggcattgctcatgagaacctcattcctctggaaaccctaggtaag

SEQ ID NO: 542797 - DNA, 83 bp, Homo sapiens
cgccgcggtcttcccaggcgtcgcggagagcaggtgagaagccctaccactgcaactgggacggctgcggctggaagtttgcg

SEQ ID NO: 542798 - DNA, 90 bp, Homo sapiens
caccttcagagcgtcacggcgtacgccctcatggggaaaatctccccggtgactttcagatgggcttaggtcacgagcaaggatttggag

SEQ ID NO: 542799 - DNA, 90 bp, Homo sapiens
cgtcaggcagttggttgggacccgctccaaccctcgacagcatgagtatctatgacgatattgatgctgacgtgctgcaaaattaccaag

SEQ ID NO: 542800 - DNA, 102 bp, Homo sapiens
ctgtcagcttgcaagggttggaactgctgattatggaagtccctcggatcagggctctggaggccacgggcatgatgcttcgggtcctggtgggggctgtcc

SEQ ID NO: 542801 - DNA, 73 bp, Homo sapiens
gcaaaagctggaagaagctgaaaaagctgctgatgagagtgagagtgagcagaagtggagaggatgaatcaca

SEQ ID NO: 542802 - DNA, 75 bp, Homo sapiens
tggcaatgacccagacccggacgacccccattgctgagccagcggagctgcttgacattgggacctgtgcaatca

SEQ ID NO: 542803 - DNA, 82 bp, Homo sapiens
gggagtgtcctggacccagctgagcgggcggtcattcgcatcgcagggcgaagctgtgctcaggcccgggctggacgcagag

SEQ ID NO: 542804 - DNA, 100 bp, Homo sapiens
gtgtgggacctgttctggctgctccagccccaggaaggacccaggacacccggaagccggaaatgggtgccgacccccacatcctggcaaaagagcgaga

SEQ ID NO: 542805 - DNA, 100 bp, Homo sapiens
aactgaatgtgagcaactacagccatgtgtctctgcagaatgccacctcccctgtcatggagttttgggaggtggttctcttcccaaagtggaagccaaa

SEQ ID NO: 542806 - DNA, 75 bp, Homo sapiens
gcgacttccgagttgcgatgctgtacttctctttgttttgggcggctcggtgagattgacaagactctggagagt

SEQ ID NO: 542807 - DNA, 101 bp, Homo sapiens
cccgggactagtggaccagctggtgaaggcagacagcgagtggcgacgatgcagtggccattcaccaccgagtagcagtctcacttctccaagccacgtga

SEQ ID NO: 542808 - DNA, 83 bp, Homo sapiens
gctacagcgacacagcctggatctcctccatcctgctggccatgctctacgggacaggtatcacctcttctgggctcaagatg

SEQ ID NO: 542809 - DNA, 82 bp, Homo sapiens
aggccacaaaggagagctccgtggagagaaggatactcatccagatcatcaggatattctgaaagcaatcgtagcattcaaa

SEQ ID NO: 542810 - DNA, 74 bp, Homo sapiens
tgaaggggtcaacattggcttagaggtgaagagcaagactggtatgaaaatgaaagtcttcagaatggaaggaa

SEQ ID NO: 542811 - DNA, 100 bp, Homo sapiens
taaagtttcttagccagtgtgcagcacgagtggccagtagggctgagatgttgggagccatcaatcaggtaagccaagatgggtgcatacaagtacatcc

SEQ ID NO: 542812 - DNA, 90 bp, Homo sapiens
ctgagatcaaatggcacttcattggccacctacagaaacaaaatgtcaacaaattgatggggatcatagacggtatttctatgtaaacga

SEQ ID NO: 542813 - DNA, 74 bp, Homo sapiens
ccgtcatctacctgctcaacccctgtcacctggtcaccatgatgcatagtcaacctatttgatttcttgacaag

SEQ ID NO: 542814 - DNA, 90 bp, Homo sapiens
tcctgcttttgcagaatgacccctgtcttttaccagagctcacggatgattgatatccagaccaggatggctgggcgagcattggagctt

SEQ ID NO: 542815 - DNA, 119 bp, Homo sapiens
gcggggaagctggctgtggagcgaggctgggccatcaacgtggggtcttacaggagaggggaccgtcctgggctggcctggaccatggtgctgctctgggagcctgcaggagcctggct

SEQ ID NO: 542816 - DNA, 100 bp, Homo sapiens
gattaaacatttagaagaaaaacttaaggaagaagaacatcagcgtaagctatttcaagacaaagcttctgagaaatatccagagaagttgtattttgag

SEQ ID NO: 542817 - DNA, 90 bp, Homo sapiens
gcgcgccccgcccggagtccccgccgccgtcatgcagtccccggcggtgctcgtcacctccagcaaattgtggctactaatttgccccct

SEQ ID NO: 542818 - DNA, 98 bp, Homo sapiens
tgaagagcgacaagccgctggcagccgcggatctcaccgccgctcaggaagctgaacatggttatgcctccatgttaccatacaataacaaggacaga

SEQ ID NO: 542819 - DNA, 80 bp, Homo sapiens
ctgctgaggagaggagcgtcaacagcagcaccatggccgttggacataccagatggtcgaagagctccacttcctgctca

SEQ ID NO: 542820 - DNA, 90 bp, Homo sapiens
cgcaccctgcccggcttcctcatcgtggccgagatccctgaggagctctagcagcaagctggcccagctgactctggagcagatcctgga

SEQ ID NO: 542821 - DNA, 100 bp, Homo sapiens
gacccgggctgggctttcctcacccggggtgaggtggctttgaccccgggttgcccggccagcacgaccgaggaggtggctggacagctggaggatgaac

SEQ ID NO: 542822 - DNA, 75 bp, Homo sapiens
gtccatgtcctcttcctggagttcccaacggttgcacagacagcagatggtgtggatgctgacctctggaaagac

SEQ ID NO: 542823 - DNA, 75 bp, Homo sapiens
cttacagacgctgccagcatcgccgccgccaggcttgggcactgtttaaaggaaagttccgagaaggcatcgaca

SEQ ID NO: 542824 - DNA, 88 bp, Homo sapiens
tggagcaatacgtttccattgtgatcccaccttctgggcaaagaatgtagtcaatttagtgagagggtccaagcctggtaagaatgtc

SEQ ID NO: 542825 - DNA, 100 bp, Homo sapiens
ttttctgtggcatcctgaagttaatggttctatgaaacagtgtatcaaagtgtggactgaggcagcagaagaggatgaaacacaaaaccagcatgatgat

SEQ ID NO: 542826 - DNA, 75 bp, Homo sapiens
ctcgcgcgcgaccgccgaatcgctcctgcagcagagctcaccatggatgatgatatcgccgcgctcgtcgtcgac

SEQ ID NO: 542827 - DNA, 90 bp, Homo sapiens
ggactacgtgggcaccttgcgcttcttgcagtcggtgtgggaggtgctgaaccttttctggccatgaaccattataaaatcccaacatat

SEQ ID NO: 542828 - DNA, 96 bp, Homo sapiens
ctgtctccttgagcaaaaaagaaaagttgtttcctccaacattgatgttcctccagcaagtcaaaccggcacgatgtccaggcaccagaaccagaa

SEQ ID NO: 542829 - DNA, 109 bp, Homo sapiens
gaacgacctgtggaaacctgtgatccattctcattaaataaatctctgggtggagataagtaattaacatttcgaaacaggaaatgaaaggatttatatttttaaaagc

SEQ ID NO: 542830 - DNA, 98 bp, Homo sapiens
cagtgctaggcttggcccgcctaaggcactgggtgtacctgctttgcttctctgcagcaggagcagctccatatgtgcaggcatttgactcgctgctt

SEQ ID NO: 542831 - DNA, 100 bp, Homo sapiens
cacccggtgtaccgcggcgagaagccccagctgcactacgcgttccagaaacgccgctggactgcgaggtctccctgtggtcgtcctggggactgtgcgg

SEQ ID NO: 542832 - DNA, 95 bp, Homo sapiens
gaacctgcgcggctactacaaccagagcgaggacgggcccagactcccactacggcaccaaaggcctgcgcaaggtgacacacgagtcgcccacc

SEQ ID NO: 542833 - DNA, 98 bp, Homo sapiens
gatgttgcttcagagtgtgaagtcaaatgcatgccaacattccagttttttaagaagggacaaaaggtatgatctcgtgaaaccttgagagaaactga

SEQ ID NO: 542834 - DNA, 75 bp, Homo sapiens
tgggacagggggatttggaaatgtcatccgatggcacaatcagacttttggaaaagaatttgataaacattttgg

SEQ ID NO: 542835 - DNA, 98 bp, Homo sapiens
gtctttaaaggagtcgtctttaatgagatgaagggagcgttttaatccttcccctctaccaccggatatggctcctgggcagagttatcaaccccaat

SEQ ID NO: 542836 - DNA, 101 bp, Homo sapiens
ctcagcgtcaacgagttcaaagagctggttacccagcagttgccccatctgctcaaggtcttcatcctccaggtccacctttagcaagacctattctcccc

SEQ ID NO: 542837 - DNA, 100 bp, Homo sapiens
acaatcccctcgccggggcaccgtcatgtatgtagcatttcagcaggaacttgatgcaaggcatgacaaatatgagagacttgtgaaacttagtcgggat

SEQ ID NO: 542838 - DNA, 100 bp, Homo sapiens
ggagttgacagcacttttcaaaaacctggaatggatataaatttctctactgttctgcccgtgccatcgggatggcggacatgacgcggggctacctgca

SEQ ID NO: 542839 - DNA, 101 bp, Homo sapiens
ctgtgctgtggatgcccaggagtacgaggtctccagcagatgaagacttccggggcaggcgtcaggaggcacccaaggtggaggaaggcctgcgagaagga

SEQ ID NO: 542840 - DNA, 100 bp, Homo sapiens
cttggccctcaagatctgggtttccattacccctgccatcgtcaggaatgcgataagttgcggcatgatggctaccgcagttctcagtactactctcagg

SEQ ID NO: 542841 - DNA, 75 bp, Homo sapiens
ctgagactccctgtcccggaccgcaggtttggtgcacctcgatttggaggaagtagggcagggcccttatctgga

SEQ ID NO: 542842 - DNA, 75 bp, Homo sapiens
acatctgctctctctgttcaagggaattttgatctaaatagaaaacatccagtacagacctttctgatatccctg

SEQ ID NO: 542843 - DNA, 82 bp, Homo sapiens
gcaccggcaagaccaccttcatcaggaacagattatcagtctggtcaatcagatctgcggcaaagtgtctggtaaaaacggc

SEQ ID NO: 542844 - DNA, 51 bp, Homo sapiens
gcaggagcgattccgtcgccaaacagtgcgaggacgacgggcagacgttct

SEQ ID NO: 542845 - DNA, 95 bp, Homo sapiens
cctggtcctcttccaaatacatcccagaaaggaccggatggaacagtcattcccaataactactgtgacttctgcttggggggctccaacatgaa

SEQ ID NO: 542846 - DNA, 90 bp, Homo sapiens
tggaatggcaagcgcagcaacaacagagagcacgtggccctgggcagtgacggggttcgggtgaccatggagagtgcgctcaccgcccgt

SEQ ID NO: 542847 - DNA, 100 bp, Homo sapiens
ggcttcgatcccttctctgatttgctgtcagccatgaacggatggatgtgatgcctgctagccaaaagggatttttagactctgaggagcagttggagct

SEQ ID NO: 542848 - DNA, 100 bp, Homo sapiens
gtctcgttcctgatcgaacgtggtgatcctctgtcgatgggtcctcagaaagctctggaaaccatcggtgcaaatttacagaagcagtacgagaactggc

SEQ ID NO: 542849 - DNA, 82 bp, Homo sapiens
cgggcggcttcctggcctgggcgctccggtggcggcggaggctaactcaggtgagatggagccgctatagtcctgaattcaa

SEQ ID NO: 542850 - DNA, 82 bp, Homo sapiens
agcgcggaaatctggaaccgggatggcgacgtctacactgagtcggaggcgaaggttgcacactgggccacagaggatccag

SEQ ID NO: 542851 - DNA, 100 bp, Homo sapiens
cttgtgcattcaaacatagcaactgaggaaacagagcaaatgcagcgttacaatcaaagacttattgaggaattgaaaaacagacagactcaagaaagag

SEQ ID NO: 542852 - DNA, 138 bp, Homo sapiens
gagaatcccagcaagaatcacagtgatggccaccggttggcgagctttgcacagaccctacaggaaaccctgaaagaaactgctggagcgaacccgtgccaggcgagagaatcttcagagaaaaatggctgagaggcc

SEQ ID NO: 542853 - DNA, 82 bp, Homo sapiens
aacaggttaatctgttggattctaatgcagttcatcacatcattcatgattttcaggtgtgagttcttgatacgaatgaaag

SEQ ID NO: 542854 - DNA, 75 bp, Homo sapiens
cgggctggaggatgaaagcggtctggtggagctggagctgcgggctctgttcactcggagagcccgccggctgcc

SEQ ID NO: 542855 - DNA, 100 bp, Homo sapiens
aagacacaccggaggcgacggccatggccacagactactggtgcctggatgatctgtaccgggagatggtgagatgctatgtggaaatcgttgagaagct

SEQ ID NO: 542856 - DNA, 100 bp, Homo sapiens
ggaagatgtaaagcaatatttcgagcagtttggcaaggtctattctggataagcaggttttgtgaagacatttattctttcttggacctcagatttacca

SEQ ID NO: 542857 - DNA, 75 bp, Homo sapiens
agccctgcagacagaggtgtgctgacgacctgctacaacagaaacctgatggccaaaagaaaggaagaaaatttt

SEQ ID NO: 542858 - DNA, 100 bp, Homo sapiens
ctgaacctcagaaggctgtagaacaggagaaagatgtagcacttaagcctcaggaacgtgtggagaaacgccagacgcccctgaccaagaagaaacgaga

SEQ ID NO: 542859 - DNA, 100 bp, Homo sapiens
tgacttagaaattcagagagcctatacgcccatcagccctgccaacgcagaaggatactttgaagtgttaattaagacctttgcaggaaacatgaatgct

SEQ ID NO: 542860 - DNA, 90 bp, Homo sapiens
caccactggaacgccaaccggctggacctgttcgagatcagccagccgaccgagatttgtaagactccagggcctcccagccgtgaataa

SEQ ID NO: 542861 - DNA, 105 bp, Homo sapiens
tcaattaccgcctctgccaccgaggaattggccttctctagaagactcttgtgaacaaatagaagctgagggtgaaggacctacagctgtcaccttcatctcttc

SEQ ID NO: 542862 - DNA, 92 bp, Homo sapiens
gcgaaccggccccccacagccactgcagatggttggcaatggctgataaatgacactttgagacatctccatctcatctcaagtcactcccg

SEQ ID NO: 542863 - DNA, 100 bp, Homo sapiens
cgagcgcctcgacctcggtctgagcaaagaagtttgtcatcctgatattggtggcaagatcataatgtgtcctcagtgtgataggctttgtccattctgg

SEQ ID NO: 542864 - DNA, 100 bp, Homo sapiens
ggaagcgagatgtcgaagccgccacccaaaccagtcaaaccaggttatcaatactctggctgaccatcatcatcgtgggactgactttggtggaagtcct

SEQ ID NO: 542865 - DNA, 100 bp, Homo sapiens
gtcccccggacagctatgaaactcaagtcagactaactgcagatggttgctgtactttgccaacaagtgtgacaccatcgccacaacaggctcgggtctg

SEQ ID NO: 542866 - DNA, 76 bp, Homo sapiens
cagagctgaggtacttcgtgaaggaataacatattgacttactgaactgaagcattctgagttgaaaggagcccca

SEQ ID NO: 542867 - DNA, 98 bp, Homo sapiens
ctttggtaactcattagcctcgtggctctgaggcgccaagcccatctttgtgtgcttgcatccaactgtgatgagcctatgtatgtcaagttggtgga

SEQ ID NO: 542868 - DNA, 100 bp, Homo sapiens
agacacgtgtggcccagaaggaactggaggaagcagtgacctccgccttacagcaggagactgaaaaggaccctgatgctcccataagacagaaaatgcc

SEQ ID NO: 542869 - DNA, 82 bp, Homo sapiens
gaactccgtgcccagatgctcataaggattgtcctctttctacaaaagtgttctaagaacggaagcatctgggctggatgga

SEQ ID NO: 542870 - DNA, 98 bp, Homo sapiens
ccacccagtgggggtccttctacagcccagcccagacggccaacaatccctgcagttttcagaagctatctcctgagcagtgtgtaattctctcctgg

SEQ ID NO: 542871 - DNA, 82 bp, Homo sapiens
gtacgacatgatgacagctggccttttttgaaacttgtttctaaaatccagggaaatgaataagcgtctaacagaagaacaa

SEQ ID NO: 542872 - DNA, 100 bp, Homo sapiens
aagaaattctgcaagcacgcttcccgatgccacgttacatcaacacggagcatggaggcagtcaggtgaaaggaaagcaagccaggatggatatttacga

SEQ ID NO: 542873 - DNA, 75 bp, Homo sapiens
cggaaaatagcctttgccatcactgccattaaggtgccttatgcccgctcagaggcccacctcacagagctgctg

SEQ ID NO: 542874 - DNA, 82 bp, Homo sapiens
tccgggaaaactacactggccagaaggaagaggcccagcagaagggactcgctgagccaccccccgccccactccatgttgg

SEQ ID NO: 542875 - DNA, 75 bp, Homo sapiens
ccaaaccagaactttttttttttttttctgttcagtgacatctggtgaatgaaaactttgccattgatttgatag

SEQ ID NO: 542876 - DNA, 96 bp, Homo sapiens
ggagcgggcgctccggtgtttccaccagctcatgaaagacacgactttgaactggaaggaaagtggagaatgaggacatgaataaagaccagatct

SEQ ID NO: 542877 - DNA, 100 bp, Homo sapiens
ctccaccacgagggcaggttcagagaagtaggtttctctggcaccgattcggggcctgcccggacttcgccgcacgctgcagaacctcgcccagcgccca

SEQ ID NO: 542878 - DNA, 111 bp, Homo sapiens
aggacagtgctgctgtgagtttgacgaagtggacatcacctgcagtcagtccagagctgcccactgcaggtggagctggagcaagaataccaagacaaattcaaaagactg

SEQ ID NO: 542879 - DNA, 51 bp, Homo sapiens
cacaggatctgggcttggaaatgcctcagttggccacggacagagcgaagg

SEQ ID NO: 542880 - DNA, 130 bp, Homo sapiens
ttcagcaatttttgcaatgtggatgttgtagagattctgccttacctgccctgcctcacagcaagagaccaggctggactagtgtcccgagagaatgcagagcagctactcatcgccctggagcccgagg

SEQ ID NO: 542881 - DNA, 100 bp, Homo sapiens
atcaggatgattttggtgaaagggcagagttaccagggcaggttatctccatggcagcttctactctggcaaacttggccatctctatcacagggtatga

SEQ ID NO: 542882 - DNA, 98 bp, Homo sapiens
tggccaagcacaaagagcttgctccctacgatgagaactggttctacacgcgagctgttgcagagcttgaagtgaaaaccagagaaaaattagaagct

SEQ ID NO: 542883 - DNA, 100 bp, Homo sapiens
aatctgggccaaaaggaatgaccctagccagactcagggatcaaagagcaaacagattcagtggcctgcattggaaaatcctgccttgcttcgttgggcc

SEQ ID NO: 542884 - DNA, 50 bp, Homo sapiens
aagatctcgtacaagatccttctttgaacctgatgaaatgcctggtctaa

SEQ ID NO: 542885 - DNA, 98 bp, Homo sapiens
cctcacttccccggggtgtaataatgttaactgaggtgattttacaacgagatgctgctctccatagggatgctcatgctgtcagccacacaagtcta

SEQ ID NO: 542886 - DNA, 75 bp, Homo sapiens
ataatgccactcgagactttttgctccccttcctggaagagctgacacttcctccatggcccatctatcgccggc

SEQ ID NO: 542887 - DNA, 73 bp, Homo sapiens
tctaagcaacttacattagaacaggcgggatccacagcaccattgtttactgaccagccagaggaacctgagt

SEQ ID NO: 542888 - DNA, 100 bp, Homo sapiens
tggggttcatcttccataagggctcttacctccgcaatggctggaatgtcatggacttcatcgtggtcctcagtggtttgtggggacattcatggacaat

SEQ ID NO: 542889 - DNA, 90 bp, Homo sapiens
atcatgcagttgttacgtgataatctgacactatggacttcagacatgcagggtgacgatgagacaaaaggacccagtgaaaggaatgac

SEQ ID NO: 542890 - DNA, 75 bp, Homo sapiens
ccgggagcaggaaatgctccaccagttcctctgtgacgagggtgcaggtatctctggggactacatcgatcgcgt

SEQ ID NO: 542891 - DNA, 50 bp, Homo sapiens
tactgaggattctgtggcagtgcccagggccctcagagcacaccttcccc

SEQ ID NO: 542892 - DNA, 106 bp, Homo sapiens
ggactagcgagatggcaaggctgaggacgggaggctgattgagaggcgaaggttttaaaatcaaagatgggaaaatcggagaaaattgcccttccccatggccagc

SEQ ID NO: 542893 - DNA, 80 bp, Homo sapiens
agcagttctcaagagacctagccagctaagcagaaagctttatcctgtggataaacgcagagtgaacgagtttggggagt

SEQ ID NO: 542894 - DNA, 76 bp, Homo sapiens
cgaggcagcctccgcggaggagcagaagatttattcaggagattgagcatgctctgggtcttggcccagccaaaca

SEQ ID NO: 542895 - DNA, 50 bp, Homo sapiens
gccacaacttcattgctgggaaaagcaatcatttggggaagaatctacag

SEQ ID NO: 542896 - DNA, 75 bp, Homo sapiens
gttgagaacatctctgttgacattcattgtggatgtatgttgtgttcacagcgaaggtactcccttcagcctgtc

SEQ ID NO: 542897 - DNA, 75 bp, Homo sapiens
acacgtgcccctacgtgcacaacatcacccgcaaggttcctgacggagacttcgcccttcatgtggtccaacctg

SEQ ID NO: 542898 - DNA, 74 bp, Homo sapiens
tgtattgctgcttctaaagcttgtgcatttactgtcacggttcccaaggacctatatgtggtagagtatggtag

SEQ ID NO: 542899 - DNA, 82 bp, Homo sapiens
gaacaacgtcgtcatcaactataagtcaccaggagactaaagtccatcaaaaacatccagaaaattaccaagtctatgaaaa

SEQ ID NO: 542900 - DNA, 88 bp, Homo sapiens
ttggaagatgcagatgagaaggttcagttggcaaaccagatatatgacttggtacactgaggaggggacggctccgtcttcacattgt

SEQ ID NO: 542901 - DNA, 100 bp, Homo sapiens
gtgacctggaccacggcgcagacgcgggcgagctgcggctcggacgccagcggacacgcgggcgagatcctaagtgtgaacgtgaagtccccagccctgc

SEQ ID NO: 542902 - DNA, 50 bp, Homo sapiens
tgatgccgatattcaacgctttcggtagagctgaagtttcctgcaccagg

SEQ ID NO: 542903 - DNA, 73 bp, Homo sapiens
ggattctcgacctgctaacagaactggaccttttcggcagtagaagaactgtttaacctgatgcagctgttta

SEQ ID NO: 542904 - DNA, 100 bp, Homo sapiens
ggtaaacttgtccagattgaatatgctttggctgctgtagctggaggagccccgtccgtgggaattaaaggagcacccagccccggccctggcccccaac

SEQ ID NO: 542905 - DNA, 90 bp, Homo sapiens
gtcaacacagcctcaagaatggagtctaatggggaaggagggaacctgtatgacaaaatccttcgtcagaaggacaagttgtttgaggaa

SEQ ID NO: 542906 - DNA, 100 bp, Homo sapiens
agcggcataaagcaattgagaattcaggaagccattaatttgctagaaccaatgacaaacgaccccgtgaactacgtgaggcaaggggcactcatagctt

SEQ ID NO: 542907 - DNA, 100 bp, Homo sapiens
ggagcatttcagataaatacctttgatctaagggttcagcctttcaatgtgacacaaggaaagtattctacaggggctgataacatccggaaatactgga

SEQ ID NO: 542908 - DNA, 74 bp, Homo sapiens
aggtcgataagctggaactgatgaaggatgcatctcttcagcccccagagcgactggaacatcggctgaagcat

SEQ ID NO: 542909 - DNA, 100 bp, Homo sapiens
gagttcaaggaggtgctgaagagcgaggagtgctgttgcaaatattctggtgaatgaacacagaatcagcatggctttcctttgctgagaaatcactgat

SEQ ID NO: 542910 - DNA, 96 bp, Homo sapiens
ggggccaatgtgaatgtgaaggacagaaatggaaagacgccccttatgggcgagcattttcgagaagtgatgaagcgaatccagagcctgctggac

SEQ ID NO: 542911 - DNA, 100 bp, Homo sapiens
ggctcgcgagatccgcatgaaggagctggagcggcagcagaaggagacttatgaaaatatgcatcagtttaatactgtcttggaattcatgagatggaag

SEQ ID NO: 542912 - DNA, 100 bp, Homo sapiens
tcttcgacaggaaaaaaatttgctggatattgatgcgccagtcactgtcgtcctcttgagttctggcgccttgactactgggaagatgacttgcggcgcc

SEQ ID NO: 542913 - DNA, 101 bp, Homo sapiens
gaaatagaggctttcaaagataattcgcagtgatgtgaaactggcctcccaagccctgataaatcctgtttgaccaaactcagagatcaattaaggcacag

SEQ ID NO: 542914 - DNA, 83 bp, Homo sapiens
ccgggagtgccgtgcgccgcagcccgggcccaggccccggcagcgcctgggacaagatcgagctgaaggactgcgcggctggc

SEQ ID NO: 542915 - DNA, 50 bp, Homo sapiens
ctcacagctctgcggcccaggcccaagatgggaataactgggaacacaag

SEQ ID NO: 542916 - DNA, 95 bp, Homo sapiens
tgtcaagcgaagccttgaaaaagctgccctgagacggtgtcccgccgaaaggttccatcataatgaatggatccaatatggcaaatacatcaccg

SEQ ID NO: 542917 - DNA, 75 bp, Homo sapiens
cctggaccgtgctggcagctggacggagctccctggctgagtggtactgctggactttgctgcagctggagggga

SEQ ID NO: 542918 - DNA, 99 bp, Homo sapiens
tgctatcttgtggatcttctgagtaacggaggacaattcaccatagttttctttaaggttatcaatactctggctgaccatcatcatcgtgggactgac

SEQ ID NO: 542919 - DNA, 75 bp, Homo sapiens
agatcgaatctgggccaaatagaaagattatttactggcaagatgagcaggattaccatgaaagaaaagtccaga

SEQ ID NO: 542920 - DNA, 75 bp, Homo sapiens
ctgtgagcgcccccatcccggaggtctccgccggctcccgggctgcctgctgtttcccggggagatcatgaaacg

SEQ ID NO: 542921 - DNA, 83 bp, Homo sapiens
tccaggagctcccagtcccaatgaggaaccagcaggcccagctgagagccagcctggaggttacccagcagcaggccacccag

SEQ ID NO: 542922 - DNA, 83 bp, Homo sapiens
gacaaatacaagtgaaaaaaatagactaatggattaacgtccctgtcgtgtgacattttctgaaagaagatgctgatatgcta

SEQ ID NO: 542923 - DNA, 101 bp, Homo sapiens
gtcttctaagtcagagacatcaaaacctggaccttctggattacaggccaaattagcaaatgagggttactaccagggtggaaaatttcagtttgaaactg

SEQ ID NO: 542924 - DNA, 51 bp, Homo sapiens
gctctcgtgaggtctcggtggatgatccaattctggtacagcagttgcgcc

SEQ ID NO: 542925 - DNA, 80 bp, Homo sapiens
atacgaatgaagcaggagcaggagagtgccagaacagataaagcccagtgtaagccagcctcagcctgccaactctaata

SEQ ID NO: 542926 - DNA, 100 bp, Homo sapiens
gacgaggaagttttctactgtaaagtcaccaacgagatcttccgccactacgatgcggaaacatggctcgcgaaggactgcggaccctcgtggttgcaaa

SEQ ID NO: 542927 - DNA, 140 bp, Homo sapiens
ggaagaacggtgggatgggaacgaaaagcaaggacaagaagctgtccgggacagactcggagcaggaggatgccctaaatgagaccagggaatcagagacaaagctgaaggagctcccaggagtgtgcaatgagaccatg

SEQ ID NO: 542928 - DNA, 75 bp, Homo sapiens
ccggttccttgcggtcaagatgctgcaaaacgtgactccccacaataattctccaaggagaagtacatcctggac

SEQ ID NO: 542929 - DNA, 100 bp, Homo sapiens
ccgaccaagaggcagaagtacggggttgcaaagtgtgggatgctgtctcaggagatgaattgatgaccctggctcataaacacattgtcaagactgtgga

SEQ ID NO: 542930 - DNA, 100 bp, Homo sapiens
ttccagcgcagagtgccctacaactacctgcagcgggcctacatcaaggacaaagtggccttggagagtatgcctctgctaggcttcaccattgctccag

SEQ ID NO: 542931 - DNA, 75 bp, Homo sapiens
ggccaagaatcagaggaagtggtattctaccttgtaaatactgttatttgtatatactgtaaatgatgacatcgg

SEQ ID NO: 542932 - DNA, 83 bp, Homo sapiens
gatggaagaacaactgaaaagtgatgaggaactggcaagaaagctaagcattgatattgttcttctgtgtggcagttcagaat

SEQ ID NO: 542933 - DNA, 100 bp, Homo sapiens
ctatctcagtgccactgacatgttgatgtacatccagacaacaacacttactgtctccatgagtttaagtgcttcagtatctctgggcatgctctatatg

SEQ ID NO: 542934 - DNA, 85 bp, Homo sapiens
agccccttcccacaggctctctccgctcgattttgtcaccgttatgtgggaagcgaatccaaaatttaaaagcctgttgattcaa

SEQ ID NO: 542935 - DNA, 80 bp, Homo sapiens
ctttggcttcatgctgaccaggcagctgtggcatatggaaagggaacctattttgctgtcaatgccaattattctgccaa

SEQ ID NO: 542936 - DNA, 75 bp, Homo sapiens
tgatgattagagacatactaatgtacatggctgccaaacgagggattctttcatctggtcggggcagaggaattc

SEQ ID NO: 542937 - DNA, 100 bp, Homo sapiens
gtctgggcagccacggccgggggcgtctttcagagcattacgaaattacagaagacatccccgtgaagactttgaatatgaagactgtgtatgtttctgt

SEQ ID NO: 542938 - DNA, 75 bp, Homo sapiens
gtttaatgtcaccaaacccatccatgcgctgaataggaaggcattactgggtaccggccaagaggctgtttggtg

SEQ ID NO: 542939 - DNA, 98 bp, Homo sapiens
ggatccctgtggaccagcaggatgatgacaaaggcaactgtgaggactaccttatgatttcctgcaaggattactgcaaagtaatatttccatatgag

SEQ ID NO: 542940 - DNA, 100 bp, Homo sapiens
cttaagttgtggtctgacacacactgctgtggttcccctggatttagtgaaatgccgtatgcagatctggcaccactccttctacaatgagctgcgtgta

SEQ ID NO: 542941 - DNA, 75 bp, Homo sapiens
atgctgccttccttgttggatgctacatggccttatttgccacggagacctttgctatgggaattaacatgccag

SEQ ID NO: 542942 - DNA, 82 bp, Homo sapiens
tcaaacgaaaagagaattgtacactgcaggactgcatcaaaacatgtaaacaaggacctcggtaatatggaagaaaacaaaa

SEQ ID NO: 542943 - DNA, 100 bp, Homo sapiens
ctgcccatcgaggagacgctggaggacagcccgcagttggattggatgctgctggcaagacaaccattctgtataaactgaagttaggggagatagtcac

SEQ ID NO: 542944 - DNA, 100 bp, Homo sapiens
caaatgattaagattaacttcaagttgacagccgctcaggaagcaatcttgcatgcgtctggaaatggcacaaccaaggactactgcatgctttataacc

SEQ ID NO: 542945 - DNA, 73 bp, Homo sapiens
gttcatctccttctgcatccttaactgagaatgaggtgaaagaaaagatgttgtcccggttaagagtagtttc

SEQ ID NO: 542946 - DNA, 82 bp, Homo sapiens
catgggcaattgccacacggtggggcccaacgaggcgctggtggtttcaggaactgtggctgcaccatctgtcttcatcttc

SEQ ID NO: 542947 - DNA, 75 bp, Homo sapiens
gaagaagggacacctttcacagctatcagggaaggtactgccaaaattatgacatgataccaaggaaattagaat

SEQ ID NO: 542948 - DNA, 107 bp, Homo sapiens
gagagagcgagctgagtggttgtgtggtcgcgtctcggaaaccggtagcgcttgcagcatggtctcctctgagcctccggcctccataagacccaaaacagatgaca

SEQ ID NO: 542949 - DNA, 100 bp, Homo sapiens
agcgagggacctgggactgctcacagccagctgttccatttcctccaagtcaccggcttacagcaaaagaagtgtttgataatgatggaaaacctcgtgt

SEQ ID NO: 542950 - DNA, 96 bp, Homo sapiens
gtaagggatggcttgagggctgtcaaaaatgctattgatgatggtcttctggggtcaagaacatttgaattgtttagttcttctacatgaattact

SEQ ID NO: 542951 - DNA, 100 bp, Homo sapiens
gggctctgcagcctcatcctacagccccctaggtggtggaggtggatacagcagtcggagaacatctggcagagacaaatacggaccacctgttcgtaca

SEQ ID NO: 542952 - DNA, 75 bp, Homo sapiens
cagaggcagttccacagccccttcatcttccgtgaggaggatcccagccgccagcacctgctgtccccagatgcc

SEQ ID NO: 542953 - DNA, 100 bp, Homo sapiens
ttcatgttgctttttgatggccatggcataaggaactctatcccaggaatacagctttgcattagcctggtgtgcactgctctccggggaaagctgggcg

SEQ ID NO: 542954 - DNA, 75 bp, Homo sapiens
agatgtatctactgtatccatgcactcaggttcaagcgtcctcagtaagccttgttcagtgactgtagccagtga

SEQ ID NO: 542955 - DNA, 73 bp, Homo sapiens
gcctcccaaagtgctagtattacaggtgtgagctctttgaccagaacctgaagctagctctggaggtggcaga

SEQ ID NO: 542956 - DNA, 75 bp, Homo sapiens
acggccgcctccggagcccgacgcggaatccatgggaaagagctatgatgggagagcttatgtcatcactggcat

SEQ ID NO: 542957 - DNA, 73 bp, Homo sapiens
aacatctatcaacagaagatcaaggtggtctgtttttctggggggccaccaacacctcccgtgaatctaccat

SEQ ID NO: 542958 - DNA, 100 bp, Homo sapiens
ctacagggccgagtacgaagtggaccccgagggcctagtgatcctggtaagcactatcctttgtactccctcaacgtggcctccatgtggttgaagctag

SEQ ID NO: 542959 - DNA, 83 bp, Homo sapiens
aagacggcggtagcgcccatcgagcgggtcaagctgctgctgcaggtggatcagtacaagggaaagcgggatttggagtcact

SEQ ID NO: 542960 - DNA, 100 bp, Homo sapiens
cggcgggggacaagtcggcgccccagagcggacgaggttcatgcatgggagatctcagaccagttgttacagatccggcaggatgtggagtcatgctatt

SEQ ID NO: 542961 - DNA, 87 bp, Homo sapiens
cggcgcggcggcgccagcccgcgcggggaccgccaccgagcgagatgagcagcaccagcagtaagagggctccgaccacggcaaccc

SEQ ID NO: 542962 - DNA, 96 bp, Homo sapiens
cacccgtctgtcgcccgaggcggccgccgctgcaccttcaccgcgtacccgggacccgcccgcccgcgggagaaaattatgacgcgaggctctcac

SEQ ID NO: 542963 - DNA, 90 bp, Homo sapiens
cggagcagcgcgtcgtggggcgagcggcagggggggccctcagcctcttggccttgaacgggctgttcatcttgattcacaaacacaacc

SEQ ID NO: 542964 - DNA, 75 bp, Homo sapiens
ttcggcagtccacccaccgccgccgcctcccagaaatctatgacaagttcaagcagagtacacacagcatatata

SEQ ID NO: 542965 - DNA, 88 bp, Homo sapiens
gctacaagaagcgggccgcatgcctgtgtttccgcagcgagagcgaggaggaggatttggagttccatggagtgatgagattttattt

SEQ ID NO: 542966 - DNA, 100 bp, Homo sapiens
tgcttggaaatctaagaacaagaagagaaatactgaaacagagcaacgtgctccaaagtctgttactgattatgattgctcatttagaaagtggatgtgt

SEQ ID NO: 542967 - DNA, 75 bp, Homo sapiens
gctcggcccgcgggggagccccgggagccgcacggggatgtcccactcttgttcaagcattgccaggccctagca

SEQ ID NO: 542968 - DNA, 100 bp, Homo sapiens
gcggagaccctcgaagtgcgcaaacttgacactcaccctgaccgacccaacatgagtgaagtttcctgcaagaaacgggacgactatttggaatggccag

SEQ ID NO: 542969 - DNA, 98 bp, Homo sapiens
gctctgaatcgtgttcctgaatgaaagaagtcaggtcaaaatgcagatcttcgtgaaaacccttaccggcaagaccatcacccttgaggtggagccca

SEQ ID NO: 542970 - DNA, 80 bp, Homo sapiens
agatgatgatcatcttgggagtgatttgcgccatcatcctcatcatcatcataggtagtgggcagcagtcagtgacaggt

SEQ ID NO: 542971 - DNA, 74 bp, Homo sapiens
ggccaccactgcggcgggctctggctgctgatgcaaggaatcccctgggctcccgtccactccactgctgacca

SEQ ID NO: 542972 - DNA, 103 bp, Homo sapiens
ctcacattggccggcaacttgttccaggctttgatgaactaggtggacttctcaaaccaacagtggcctctcagaaccagaaccttcctgttgccaaactccc

SEQ ID NO: 542973 - DNA, 90 bp, Homo sapiens
atccagatggcagccagtcagtggtggaggctttgcttcacctctgggtcatgattgttctgttgacttacacaccagaaatgcaccacg

SEQ ID NO: 542974 - DNA, 82 bp, Homo sapiens
gagacggcggcagcagcggcattcaggcatgaaagaattactgatgtccttgatcaaaaaaattatgtggaagaacttaacc

SEQ ID NO: 542975 - DNA, 97 bp, Homo sapiens
gctccctgggcaccaggcagctaacaggtggggaagctgaggcaggaagccctttagtcacttgccgaaggccacgctgttacccatgggaccggtt

SEQ ID NO: 542976 - DNA, 82 bp, Homo sapiens
caactttctgggcgttcatgatcctggccagcctgctcatcgcctactgcactgagcgggctttggacaccatgaactttga

SEQ ID NO: 542977 - DNA, 100 bp, Homo sapiens
tttgtctaggaatggcctatatttcctcccagatgggacctgtgctgcagaggcatttcatccttcatgaagccattcaggattttgaattgcatatgag

SEQ ID NO: 542978 - DNA, 76 bp, Homo sapiens
gtgtggttgtgcaggatctgccccttccaaagggccagaatggagatgacctgatcagagccatcaagaaactaaa

SEQ ID NO: 542979 - DNA, 50 bp, Homo sapiens
cgggacgaggagccctggggtcccatcggcctgtccatcctcatggagcc

SEQ ID NO: 542980 - DNA, 101 bp, Homo sapiens
gatgggaaaccacgcaggcaaacgagaattaaatgccgagaaggccagtacgaatgatatggaacctagcaaagctgttccactgaatgcatctaagcaag

SEQ ID NO: 542981 - DNA, 82 bp, Homo sapiens
tgatatccagtttgatagtgaaaaaggagtggactttgttctgaattactccaaagcgtcagcccaaggccaaccccactgt

SEQ ID NO: 542982 - DNA, 100 bp, Homo sapiens
ccagcgctcccggccggacgtcaccccccagtggtgctggatatctcttccaaacgcatgatgaaggaggtcttgtcaacagggcaaggcaatacagaag

SEQ ID NO: 542983 - DNA, 101 bp, Homo sapiens
cggggggtgctcatcgcagtcctggacacgggggtcgacccgggggctccgggcatgcaggggtagaaatatttctgtcatggctcattcaaagactagga

SEQ ID NO: 542984 - DNA, 100 bp, Homo sapiens
cccattcaggagcctccaggagcccagacaccagccccccaccatggtgtacatcggtgagctcccgcaggacttcctccgcatcacgcccacacagcag

SEQ ID NO: 542985 - DNA, 100 bp, Homo sapiens
agacaggtggagaaggtggtagacaagttcatcaagcaaagggactaccaccagcagctcctgggcaacgtgctggtctgtgtgctggcccatcactttg

SEQ ID NO: 542986 - DNA, 101 bp, Homo sapiens
ctgaaagctgccgctgaagctgccgccgttgcctccgccgccaagagtgagcgagcggacccgcgatggacaaatttacatgtattggagaccagaccaga

SEQ ID NO: 542987 - DNA, 50 bp, Homo sapiens
tgaaagaaggttgggttcagaagagggtgaagctgtggtctaccaatcta

SEQ ID NO: 542988 - DNA, 80 bp, Homo sapiens
gtcagccagccgcggatggggagcgtgagtggcgaggtttgatctgtggatgaaatgaatcatgattttcaagctcttgc

SEQ ID NO: 542989 - DNA, 75 bp, Homo sapiens
tggagcctcagttggaagcagccgatccagcctgcggagcctgtggggcagattcctggtcgggtggcttccagt

SEQ ID NO: 542990 - DNA, 80 bp, Homo sapiens
cagttggaagcagccgatccagcctgcggagcctgtggggcaggtccagccctgctgggagttttctgccacacagattt

SEQ ID NO: 542991 - DNA, 100 bp, Homo sapiens
gaatgaaggaatcctctccatctggttcgaagtctcagcggtattctggtgcttatggtgcctcaggctacaagaattagttgatcgagtgctggaacgt

SEQ ID NO: 542992 - DNA, 97 bp, Homo sapiens
ccggagtaacttggccaggctggccccgagcggaactggagaaagctgagggtcattcccaaaagcaagttcgtcttggtgaagttcgacacccagt

SEQ ID NO: 542993 - DNA, 100 bp, Homo sapiens
cgaagacaagagagctcattgaaattctccagaatttcagaaacttctgggcatcgctatggaactttttctgctgtgcagtgatgacgcagagtcagat

SEQ ID NO: 542994 - DNA, 100 bp, Homo sapiens
cacgccgcccaggagacccctctgctgcaccacttcatgcacgtgaagaacagtaagcacagcaacaagtacgaaggctggcccgaggcgctggagatgg

SEQ ID NO: 542995 - DNA, 83 bp, Homo sapiens
ccatcaacctgcgtgaggtcaacctgcgcccccagatgtcccaggtccggccgtagcacctccgcgccgtcgccatgtcgcgg

SEQ ID NO: 542996 - DNA, 75 bp, Homo sapiens
tgacatttaattttagggtcctttatatagaagggagagtaggattaatacccctcgaagacaaggaggacttgg

SEQ ID NO: 542997 - DNA, 100 bp, Homo sapiens
tcgatcagctctcgcagtcggagaggcggctaaggaaaggtgccacagcagagacgcgaaggagaggccctagaaccctgctgtattaaagtatgaaaat

SEQ ID NO: 542998 - DNA, 100 bp, Homo sapiens
gcgcagcgacggcgtcgggagagcgcgcctagccggctcgcgagaggttgctcaaagaagtacagtctttaaaacaaccatacctgaagaagaggaggag

SEQ ID NO: 542999 - DNA, 100 bp, Homo sapiens
cgcaggagctgtatgccacggccaccctccagaggccgggcagcctggcagatgctgcagttggagaagaaacttgaacgtgaacttgaggatgatgcac

SEQ ID NO: 543000 - DNA, 83 bp, Homo sapiens
aagacacacctaccaagaagccagtcaagcggccaggctcagctgtcgcaggccctggaggagctgggaggccagaaacaaag

SEQ ID NO: 543001 - DNA, 82 bp, Homo sapiens
aggggaggaggactctggagctgacagcgcgcacttcacccgcagttggttcctgcacttggccatcatccatgaagaaaag

SEQ ID NO: 543002 - DNA, 75 bp, Homo sapiens
cagatggagatgaaggaggacgacgtttcttttctcatggtctcggcgcggaagatggccggcggcgtggacggc

SEQ ID NO: 543003 - DNA, 98 bp, Homo sapiens
tggattcaagctggagtgcaggaagaccacctgcaacccctgccccctgtgtctttctcgagaagcaggtggaaacatgagcattcagtttcttggta

SEQ ID NO: 543004 - DNA, 99 bp, Homo sapiens
tgacatctgtgacagactaaacaggacgtctttaatgaaggagtccccggcgtgcagtggagcctcgctgggggaaatgacagcttggaccatgggcgc

SEQ ID NO: 543005 - DNA, 100 bp, Homo sapiens
ggatcttcgacgggcacgggggagagaaaacctcggatcaattctcagctggtggcacaacaagtggcacaacagtatgccaccccaccaccccctaaaa

SEQ ID NO: 543006 - DNA, 74 bp, Homo sapiens
cacagagaccatattctacggggctttcagcaaatcaaagccaggggcaagattcttgccaagagaattaatgt

SEQ ID NO: 543007 - DNA, 90 bp, Homo sapiens
acagttcgctacacagcaatgcatcgaggtgacgccgcagccgccgggagccgcgagggacggggcaggatgaaccgggccaagcccacc

SEQ ID NO: 543008 - DNA, 74 bp, Homo sapiens
aacaacaattccgatggcaaagccgttgccaagaatccacattcatctcaatggaaggatcctgccttaagtca

SEQ ID NO: 543009 - DNA, 100 bp, Homo sapiens
tccaagacttccttgctgtgaggctcgtgtggaccccagagcatgcacaggctgggagcagccaggggactccatttggtgccactcccctggcacccgc

SEQ ID NO: 543010 - DNA, 90 bp, Homo sapiens
accacgaacttcaaaggggaaagcaaggccaaagacagggagaaggatctgggattggcacaagactctgctaccagcacaaagagccca

SEQ ID NO: 543011 - DNA, 83 bp, Homo sapiens
cgggtggcggctcgggacggaggacgcgctagttttaagctatgaagaaggacatccctcacactctgaaacagatctccttc

SEQ ID NO: 543012 - DNA, 100 bp, Homo sapiens
taacgcctcccggctctcgtcagcctcccgccggccgtctccttaacaccgaacaccgtgaatgaaaactttgccattgatttgatagcagagcagcccg

SEQ ID NO: 543013 - DNA, 51 bp, Homo sapiens
cgtcttcctcttcagccatccagatggagtcatcagaacccactgtgagga

SEQ ID NO: 543014 - DNA, 83 bp, Homo sapiens
ctgagcatttcctcctgacggctgtacttgagcagtcacctggcacaggatgaccagtgtcccagtgaaggaacgagtgaagg

SEQ ID NO: 543015 - DNA, 100 bp, Homo sapiens
agaaattggagaaggacgagatcatcaagttgtatagctgtatcattggcaacatgatttcggtgtcgcacctccttcttttgtagccattaaggcagga

SEQ ID NO: 543016 - DNA, 82 bp, Homo sapiens
ggagggggcggcggcagcgacggcagcggcggcggctggactaaacaggtcacctgcagtgtttcctgaggttataggcggg

SEQ ID NO: 543017 - DNA, 75 bp, Homo sapiens
cgggagccgtccggaggacctgggacaccgcggaagtcgggaaatgctcatgatggagcagtccaagaagtcctc

SEQ ID NO: 543018 - DNA, 104 bp, Homo sapiens
gcggctgaaacagcaagaactgcttcggcaggtgtgagtacttgataagaattaaaggacaggagttcatccgtcaagttcaagccagttaccctcatctactt

SEQ ID NO: 543019 - DNA, 82 bp, Homo sapiens
caggaagataccacaatcagaccctccggtgcaggtgatggtcctaccagtgtgtctgttgaggtcacccgtcctaaagtga

SEQ ID NO: 543020 - DNA, 100 bp, Homo sapiens
gaacagcctgctacagacgttatttttcacgaatcagctacgaaaggcagatataatgcacctgactgactctgtggtgcgtcgccagctctttcttgac

SEQ ID NO: 543021 - DNA, 82 bp, Homo sapiens
gccgccgccaccatgcccaagagaaaggttattcagcttctcaaggctggaaaagcgaaggaagtttcctacaatgcactag

SEQ ID NO: 543022 - DNA, 82 bp, Homo sapiens
tgagtgttgctggaacggttcggataggtttttagaacttcagccataaaaatgggcagaattttccttgatcatatcggtg

SEQ ID NO: 543023 - DNA, 99 bp, Homo sapiens
agttcaagttcattttaaggacagccagaacaagcggatagatatcatacataatctgaaggttaattggactcctgagattaacaaagaacacttgct

SEQ ID NO: 543024 - DNA, 100 bp, Homo sapiens
ctcatgctgctgtcctggctccacgggagaagccgcatcgggcatctggccgacgccctcgttcctgtggctgacatggtgtcctactcttctgtcctca

SEQ ID NO: 543025 - DNA, 100 bp, Homo sapiens
gtcgccgccgcccgcggcgtccccggtttggtgttgcggcgcccaccttcgggaggatcagatttggcagctgatcggaagctctttcgtcttgtctcca

SEQ ID NO: 543026 - DNA, 83 bp, Homo sapiens
caacagatcaaagaaacccctccggccagtgagagcaggcaatccatggaccttgtggaacttgtgtctctttttcccacgct

SEQ ID NO: 543027 - DNA, 87 bp, Homo sapiens
ctctgcctgcgcgctgctcctgctctgctacctgagcatgcaagcggcaagatgtcctacagatgaattatctttaaccaattgtgc

SEQ ID NO: 543028 - DNA, 82 bp, Homo sapiens
ctgtcttcggtggactccttcggcagtccacccaccgccgccgcctcccaggtgtttgaaggcgtctacaacaattccagaa

SEQ ID NO: 543029 - DNA, 100 bp, Homo sapiens
ttgggcaagagaagaattcagaagaaacaaaagtgccaccgaagaggtgagaacaaaatcatggacattggctccctggattatcaagagtttgtagttg

SEQ ID NO: 543030 - DNA, 80 bp, Homo sapiens
cccggaatcgtgtgctgggctggtcccccttgctcttccgccctctctggatgagggaacagaagtggaggaaacaaaag

SEQ ID NO: 543031 - DNA, 98 bp, Homo sapiens
aacaggaacaggaacgtttgctccagataaccacctgcctcaaagataatctgctcaaaagacttccatttcattctccaccccaagaagctttagaa

SEQ ID NO: 543032 - DNA, 90 bp, Homo sapiens
caattgcatgtaattcttaaggagctccgaaaagcaagaaatcaaataacacagttggaatccttggtcccaggtgtgacaccttcagca

SEQ ID NO: 543033 - DNA, 100 bp, Homo sapiens
taagcacacgagctggaggactgggtatcaatctcactgctgcagacacaaattaggtccagagttgaagttcccctaattgcttcctctaccatctggg

SEQ ID NO: 543034 - DNA, 90 bp, Homo sapiens
ccagtttccagcttcaggtgtgaaccagacccccgtggtagacaattatatccagatcgagagacagaagattctgaaagggttcaatga

SEQ ID NO: 543035 - DNA, 75 bp, Homo sapiens
tgcagagcctcttgagtgaagagcttagaagacttgaaaggcacagttggtggatctgaaatctgaactgacaga

SEQ ID NO: 543036 - DNA, 96 bp, Homo sapiens
ttggttacctatgtacctgttaccactttcaaaaggaaagggtgccacactgggaatgcaagctgtccttgcttctgaaccaagactactattgtg

SEQ ID NO: 543037 - DNA, 100 bp, Homo sapiens
accgagacggccattcagcttatggggatcatgtgcgtgctgtcggtctgctggtctccgctcctgtgtcagagatggctttggattccccgttctgtgt

SEQ ID NO: 543038 - DNA, 75 bp, Homo sapiens
gatgtgcgcggagagcaatcgccgggacagctgcaagggcgtgatggtgggcatgggtcagaaggattcctatgt

SEQ ID NO: 543039 - DNA, 100 bp, Homo sapiens
gctgcagggtacagaccacagcagacagtgtgtcagatgaggcagaacttcttgttagggagatcaagtcactctttgtgcatcccttcctggctgagcg

SEQ ID NO: 543040 - DNA, 95 bp, Homo sapiens
taacaatgaccacctggtagagaaataccgcattcttatcacaaagaaactcccatcaagactgaagcagacgttttggcagaaaaccaggttct

SEQ ID NO: 543041 - DNA, 101 bp, Homo sapiens
cacagctggacgtgggatccacacagctcagaacagttggatcttgctcagtctctgtcagaggaagatcccttgaaaccccgagactcttcagttgaagt

SEQ ID NO: 543042 - DNA, 100 bp, Homo sapiens
gcagatgacaaaacttcaagccaaacatcaagcagaatgtgatttgcttgaagatatgagggtgttaaataccacattatttgaaagctgggagatcgtt

SEQ ID NO: 543043 - DNA, 76 bp, Homo sapiens
gcgtctggccaagaatcagaggaagtggatgatcatgacgcagtcctgaggtttaatggggcacccacagccaact

SEQ ID NO: 543044 - DNA, 100 bp, Homo sapiens
ctagctcctgctaccagttacgatggcaaaacagcagtgaccgagatcgtcaacaggtatatgaatggcacctgcccagaaggaaacagctgtaaatttg

SEQ ID NO: 543045 - DNA, 82 bp, Homo sapiens
ggaagaccaagatcatcgagatggaaacttcatggtgttatggtcaacttgccgcacaaccgtgttcaaatctgtcaccaac

SEQ ID NO: 543046 - DNA, 101 bp, Homo sapiens
aacagtgcaagttgatgcgtcttccatttgcaaggaaactcaagagtatacccgaaatgttgttagatattgccttgaagctcttcaagactggtttgatg

SEQ ID NO: 543047 - DNA, 98 bp, Homo sapiens
atgtttaatagaccatacagcagaaaattggaggccgaagctgacaaaattggactactgcttgctgcaaaggaatgccatctccaaccacactgaag

SEQ ID NO: 543048 - DNA, 75 bp, Homo sapiens
cttcagtactcgggcaagaccaccttcgtcaacgtgatcgcgggacacggccaacacggtgaaggaaaagttcgg

SEQ ID NO: 543049 - DNA, 75 bp, Homo sapiens
aagaccattgaagagctccgggacaagagcccacaggcggttttgtgagctgcttccccaggagcagcggagcgt

SEQ ID NO: 543050 - DNA, 83 bp, Homo sapiens
gcctgcacagccgcggcggcagcagcagtgagagacggcgggcgctaacaccaccgacaaggagctagaggttctctccttgc

SEQ ID NO: 543051 - DNA, 75 bp, Homo sapiens
ctcagcctcccgagtggctgggattacaggttgcgacctttccttccccagcaataaactggtctctggagatca

SEQ ID NO: 543052 - DNA, 100 bp, Homo sapiens
aggcggaagcatttttacaaaaacttgttgtttgttggctattttactgaagacaacaaatagagcctcttcgagcaaaagatgtgataataccagcaaa

SEQ ID NO: 543053 - DNA, 74 bp, Homo sapiens
ccgcatcgcaaccaccgccctggccatctaccatgtgctgatgttctaatcatgtcagataaagatgatattga

SEQ ID NO: 543054 - DNA, 80 bp, Homo sapiens
ggcgctgcgccgcaacgccgagcgcaccgacatctgcctgctcaaagagacaagaggagcagcagcggcaccgcccctca

SEQ ID NO: 543055 - DNA, 90 bp, Homo sapiens
cattaacatcaggcacgataaaagccatgttgagtggcccaggtggacacctgtataaatgaggatgttgagagcttgaggaagacggtg

SEQ ID NO: 543056 - DNA, 50 bp, Homo sapiens
aaccccctggcagcagagttcaaggtcctggatgcctcatcccttagttt

SEQ ID NO: 543057 - DNA, 50 bp, Homo sapiens
cccagatgtgcaacaaagtgcgatgatctttgaccatcagtctgtgacct

SEQ ID NO: 543058 - DNA, 83 bp, Homo sapiens
caaaccaccacacggaaattggagtacatgcccttacagtcggcctccctttggctatggaaattttccgagttcaatgccag

SEQ ID NO: 543059 - DNA, 110 bp, Homo sapiens
tcccgagtggctgggattacagtgccaaatctttggagtgttgatggagaagttacagtagctgaacagaagccgggagaaattgctgaagaactcgcaagctcctacga

SEQ ID NO: 543060 - DNA, 101 bp, Homo sapiens
gcaatagggaaagtgaggcagctgcaaggagggcggcgggactgcactcgagtgtccagacctgctcgatgagcggactacagggaggagtgtgaagatta

SEQ ID NO: 543061 - DNA, 50 bp, Homo sapiens
caagaacttgaggagacagcagcaagtttccacgggctcccttgctcagc

SEQ ID NO: 543062 - DNA, 75 bp, Homo sapiens
tcttttttgagaaaggaaggaatatatcctgactgattctgcaggacaaattcgagcatcttaaaatgattcaac

SEQ ID NO: 543063 - DNA, 50 bp, Homo sapiens
cagcacacagaagccgagacggtgatgcaactgtgacaatagctcacaga

SEQ ID NO: 543064 - DNA, 82 bp, Homo sapiens
agaaagaagaaagaagctgatttctaagcaggcaaaatacgaagttatacggaagcgtctcctcattgatggagatggtgct

SEQ ID NO: 543065 - DNA, 98 bp, Homo sapiens
ggaatgtagaagtcttgattgacgttcttaaagaactgtatccggagttactcgtggcttcctataacaacaatgaagatgcccctcatgagcctgat

SEQ ID NO: 543066 - DNA, 100 bp, Homo sapiens
cttgctaagaagtctgaattttaacctgaagggacatgggagctactgcaggctgagaatggatcttggagaatgtctgaaagtccatgacctggcttta

SEQ ID NO: 543067 - DNA, 100 bp, Homo sapiens
atgcagagccccatcagaccaggtgtcatggagaaactccagctgggcccagagattctgcagcgggaaaatccaaggcttatttatgccaggctgagtg

SEQ ID NO: 543068 - DNA, 83 bp, Homo sapiens
tctcattgccacggctgaaccctccttctcaatcttggaacagcacccccttctttaagtgcctccggagccagcgtggtggc

SEQ ID NO: 543069 - DNA, 98 bp, Homo sapiens
ccggcagccccgggacacccccgcaagcgagcaggtcatcatcagatttgaaatatttaaagtggatacaaaactatttcagcaatgcagacaattaa

SEQ ID NO: 543070 - DNA, 100 bp, Homo sapiens
ctgttctaaatatgatagaagacttagttgatcttctgctgattgaagaagagatgttggctttgcagaatgagcgcacagaacgaatacgaagcctgtt

SEQ ID NO: 543071 - DNA, 100 bp, Homo sapiens
tgggaccagcatttccggtccatgaagcagcagtatgagcagaaggaaagatttgaagcactcttcaccatctatgatgaccaggttacttttcagctgt

SEQ ID NO: 543072 - DNA, 100 bp, Homo sapiens
ttcctgaacgtgcagggccggacgctctatgacgtcatcttgtacggacccaacatgagtgaagtttcctgcaagaaacgggacgactatttggaatggc

SEQ ID NO: 543073 - DNA, 75 bp, Homo sapiens
caagaatctcgtgctcaccggtttctcccacatcgacctggggccagtgtcattcaaagatgtggctgtggattt

SEQ ID NO: 543074 - DNA, 73 bp, Homo sapiens
ccccacaaccatcacatccaccatgaaagctaagctgctgaaggcagaggtgatcatgaactaccatgtcggg

SEQ ID NO: 543075 - DNA, 100 bp, Homo sapiens
tttctaactatttcaagatgatatttattcaccaaacaagcgtgcctgccagtgtagagccggtggagcagctgggctcggcgctgaggtttcgccctgg

SEQ ID NO: 543076 - DNA, 51 bp, Homo sapiens
attaaatgccgagaaggccagtacggctccctacacaccttttctcactga

SEQ ID NO: 543077 - DNA, 75 bp, Homo sapiens
gggagaaagtggagtccgagctgagatccatctgcaccacggtgctgatttgggatgatgaaattgttgcagact

SEQ ID NO: 543078 - DNA, 75 bp, Homo sapiens
gtgttctgcgtggggacggccgcctagagtggttcagccacaaggagcactctgaagctctgggactacagcaag

SEQ ID NO: 543079 - DNA, 82 bp, Homo sapiens
gaagaagcagcactctcagcatgcaaagcagtcctccaaaccagtggtagtctcaggactccaagccccctgatccttgatc

SEQ ID NO: 543080 - DNA, 99 bp, Homo sapiens
cgggaacccttgccgctgctgtcctgcgaccccaagcaggtcaaaatgcagatcttcgtgaaaacccttaccggcaagaccatcacccttgaggtggag

SEQ ID NO: 543081 - DNA, 75 bp, Homo sapiens
gaggattggccggctggccaacttcggagggtcatccgcacagaatggcagcgcattaaagagggaattctctgg

SEQ ID NO: 543082 - DNA, 75 bp, Homo sapiens
atctaatcatggaatttctccctggaggacacatgacggaagtgtgtatttttgggccactccacggcaggtccc

SEQ ID NO: 543083 - DNA, 76 bp, Homo sapiens
gcccctgctgctcatctcgctggccttcgcgcaggagatctcgattgagtcaagggtccagagaaggaggagaagt

SEQ ID NO: 543084 - DNA, 100 bp, Homo sapiens
ctcctatgctgtggccagatccactagaaattaacccagaatcttagcctctcagtggcctatcggtacccttactgttggagatctagtaatggtgaat

SEQ ID NO: 543085 - DNA, 100 bp, Homo sapiens
cttatagatcttctgcactgtttacaggcacaggttcactactgtgatagacaaagtggcaaagagtgtgtgacctgtctgacattagcccctgtgcaga

SEQ ID NO: 543086 - DNA, 107 bp, Homo sapiens
tgaagaatgcaatcttaatttgcctgtatgggacccaaggaaatctcctgcaaagaagctgagccatgcaattagtaaatctttggggtgtgtacccacgagagaac

SEQ ID NO: 543087 - DNA, 75 bp, Homo sapiens
caaggaagaagctaaaccagatggagaaaaagatccagattttaatcaactgcaagctttcttcctggtggcaga

SEQ ID NO: 543088 - DNA, 75 bp, Homo sapiens
aaagatggagatgaacctctaacacagtggaaaggaaccgttctggatcagtttccaatgggtcctgggtcagat

SEQ ID NO: 543089 - DNA, 100 bp, Homo sapiens
ctcggcccgcgggggagccccgggagccgcacgaaggtgcttcctggaggggcctgccccactgttcctgtgctgagttccaggacagcctcaacttcag

SEQ ID NO: 543090 - DNA, 75 bp, Homo sapiens
ccgctactttgtaatccggatccaggatggtactgatatgtcttgtcgttcaagacttgcaacactaaacgagaa

SEQ ID NO: 543091 - DNA, 50 bp, Homo sapiens
tgaagcgactgagtccgcgatggaggaagccatcttcgacaagagcacag

SEQ ID NO: 543092 - DNA, 75 bp, Homo sapiens
caagaaatagtatcattattcaacgcatttggaagcaaaagcggcgccaggaaattgaacaaaaacttgaagttc

SEQ ID NO: 543093 - DNA, 96 bp, Homo sapiens
atggaggaacacctctgctttatgctgtacatggaaatcatgtgaaatgtgtaaagatgctcttagcttgcattcacaagagatgggctctgtggt

SEQ ID NO: 543094 - DNA, 96 bp, Homo sapiens
gggagctggacggcgagcgcgagcggcgcgagaaaaagaagctcattcacacagaagacccatttaatgatgaacatcaggagaggcaagaggtgg

SEQ ID NO: 543095 - DNA, 82 bp, Homo sapiens
caggtcaagagcctctgcgagaaggcacctgaatggacagaagaggacctcagccaactgacaagaagtatggttaagttcc

SEQ ID NO: 543096 - DNA, 106 bp, Homo sapiens
gccgagtcctcgccatgccggcccggcggctgctgctgctgctgacgctgctgctgcccggcctcggggttaaaaatgtgtctgcaggcacacaggacgtgccttc

SEQ ID NO: 543097 - DNA, 97 bp, Homo sapiens
gcgggcgcatggaagtgctcaccgacagtgaaggtgctgcttgcaataaactttcaacatttactcagtttagtttcatggtttataattccgaaaa

SEQ ID NO: 543098 - DNA, 74 bp, Homo sapiens
tgcaggatatctatgagactgtcatctctctaggaagaggatcacctagcccgggtagaagaggcaatcacccg

SEQ ID NO: 543099 - DNA, 75 bp, Homo sapiens
ccgaggacacctcggtggagaagctcaaggagcgctgcctcaagcactaagactttgaccccgacgcaggcttca

SEQ ID NO: 543100 - DNA, 100 bp, Homo sapiens
cagaagaactgaagataggcaacaagatgatgagggcgcggcagtatccttggggcactgtgcaggcctgcctagggtagttaaaagacgagtgaatgct

SEQ ID NO: 543101 - DNA, 75 bp, Homo sapiens
tcgacggctacaatgtgcactatggcgcccgctccatcaaacatgaggcatttgatgaagcaattgctgaattgg

SEQ ID NO: 543102 - DNA, 75 bp, Homo sapiens
acaagatggtttacatctcgaacggtttttgatgagaagtactttctggtggaaatggatgacttgcgtcctgag

SEQ ID NO: 543103 - DNA, 75 bp, Homo sapiens
tttacctatctataccacatcagcttcaaaaaatggagtcgggtggtacagttttgagtaccaactggtctgatg

SEQ ID NO: 543104 - DNA, 75 bp, Homo sapiens
ggctcccctctcaggacaacccagatgtgcaacaaagtgcgatggttcttgggtgtctctggggagtccctgggc

SEQ ID NO: 543105 - DNA, 75 bp, Homo sapiens
gcagatagcagagccatccttgggatactaatggaccatactaccaaggaccagtccacctgaaccacacactct

SEQ ID NO: 543106 - DNA, 82 bp, Homo sapiens
aaagagaagattgcaactttgagtcagacctgtaggcctgatagactgattaaaccacagatcctggccaatttggagcaag

SEQ ID NO: 543107 - DNA, 74 bp, Homo sapiens
aatatcatacttggcaaaactttggaaactctcacaggtggaaccgtcccaaaatgtcccttgctcagaagaag

SEQ ID NO: 543108 - DNA, 83 bp, Homo sapiens
cttttcatgagtgttcctgtggtctctgcacctcctttctatttagtggagtttaacttgggtagtcccaagaatgtgggtcc

SEQ ID NO: 543109 - DNA, 100 bp, Homo sapiens
atggcggatctggaggagcagttgtctgatgaagagaagtgtgttgttggtggctgcaatgccagctttgcttctcagggagggctagctcgtcatgtac

SEQ ID NO: 543110 - DNA, 100 bp, Homo sapiens
cagctccttgcctgctgatgacctttgcacagaaaatgccatcatgctgaaacgattcaataggttgcccccaagtttcctggcagtgtgtgatactgag

SEQ ID NO: 543111 - DNA, 98 bp, Homo sapiens
agctctcacaggagagggcgttcaggtagatataatctgtggtgatcacctgttggagcagtatcaaactctaagggaaatccgacgtgcaataggtg

SEQ ID NO: 543112 - DNA, 80 bp, Homo sapiens
acatgttcacgcacgggatccagagcgccgcgcacttcgtcatgttcttcgcgccctgggccggtcactccgcgcaagtt

SEQ ID NO: 543113 - DNA, 122 bp, Homo sapiens
tggatatggtggcagtggggatggctataatggatttggtaatgatgcccctgaaggacgtcgtccctcgggtggagaagggctacaagatggatgcccccgacggctgcccgcccgcagtc

SEQ ID NO: 543114 - DNA, 74 bp, Homo sapiens
gcctgagctgccgcctcctccgccgcccgaaaacccggagtgccccgcacagctgagctgactgctgcccactt

SEQ ID NO: 543115 - DNA, 74 bp, Homo sapiens
tgaggacaaccacctgagcaatactgtgtcaggcccttgaaaggaaaaattctgcaattccatcagagttgaat

SEQ ID NO: 543116 - DNA, 83 bp, Homo sapiens
gtggacggtgtggggcggtcccggccccgcaggtcaccgacgatgagggcgcacctgctgtcctggagcttccgatctctgtt

SEQ ID NO: 543117 - DNA, 102 bp, Homo sapiens
gcggaggcttcgagtgacccgggtgccgaggagcgggaagagttgctgggggagtgcatccgccccaacccttttccccctcgtctcctgtgagaattcccc

SEQ ID NO: 543118 - DNA, 82 bp, Homo sapiens
ctcgccccgccggttcctcaccctcggggagcaacatggacccaacatgagtgaagtttcctgcaagaaacgggacgactat

SEQ ID NO: 543119 - DNA, 96 bp, Homo sapiens
gctacctgcgtccccccaacacgtctctgttcgtcaggaacgtggccgacgacaccaggtagaacgtcatgacatgaataccttaagcctgcccct

SEQ ID NO: 543120 - DNA, 90 bp, Homo sapiens
ggaaatcaaaccgaaaatgtgtatataggtgagaacccgcccggaggaagaaggaaggcgcgggccggggattaggagacggaggcggac

SEQ ID NO: 543121 - DNA, 100 bp, Homo sapiens
cttcgaattctagtcccctccagggacctccaggtgcatggattggtgctgcccctcatgctgcccagcttctactcagagctcttcacgctctacctgc

SEQ ID NO: 543122 - DNA, 74 bp, Homo sapiens
cgacccgcgcaagcgcgagatcttcgaccgctacggggaggaaggtgcgcttcccttcccacttcagctctgac

SEQ ID NO: 543123 - DNA, 100 bp, Homo sapiens
atatccttctcaaccttgtgggatgtgaaaactctgttactgaaggtccgggcccaccagctggtcttgccaccttgcgacgtagtgatcaaagccgttg

SEQ ID NO: 543124 - DNA, 75 bp, Homo sapiens
gcacggtgtggctggcggcctacggactcttcaccctctgcgaggtggtgatctttgtgaagtctgtgcagcggt

SEQ ID NO: 543125 - DNA, 76 bp, Homo sapiens
cctgaagctcaagggactgtgtccaccctcagaggcggggtttcaccatgttgcccagactggtcttgaactcctg

SEQ ID NO: 543126 - DNA, 100 bp, Homo sapiens
taccgcaaccaccgccaccagtccacggagggcatgagatgaaggtcaccgtgtccaaagggggcgaccgggacagtgacgacgacagcgtcctcgaagc

SEQ ID NO: 543127 - DNA, 74 bp, Homo sapiens
ctgattggctgggtggccttcatcatcacctatcccctggccaagtataaggagcgagggacggtcttggctga

SEQ ID NO: 543128 - DNA, 82 bp, Homo sapiens
gtctctcggctcaaggaccgggagtttttcagaagaagtgaagtcaagatgaagaaccatttgcttttctggggagtcctgg

SEQ ID NO: 543129 - DNA, 80 bp, Homo sapiens
gtggcgagagaaggaaaatgcgcgtcccgggcgcgggtagttgtgtgacttcattgagacacattacctgaatgagcagg

SEQ ID NO: 543130 - DNA, 75 bp, Homo sapiens
cagatatcaagaatacttcagtcaccaacgtgccaaatatggtacgaggaacagcaaattcaggaaaaagtggcg

SEQ ID NO: 543131 - DNA, 100 bp, Homo sapiens
cggcgggcccggagcagccgccgccgcagcgcgaacatggacgccgtcaacgccttcaaccaggaggatgagtctgctccagctgacaaacagtgtaaac

SEQ ID NO: 543132 - DNA, 115 bp, Homo sapiens
gctcgaaacatctctggcgttgttctggctgaccactctggtgccttccataacaacctcgatgacttacgagccctcaaggggaagcattttctcctggaccccttgatgccgg

SEQ ID NO: 543133 - DNA, 75 bp, Homo sapiens
aaaccaacctcttcctggaggagattcaggtggtggagattgtgaagaagctggagtctcgccagcggggctggg

SEQ ID NO: 543134 - DNA, 50 bp, Homo sapiens
ccccggcagcgcctgggacaaggttgcacgttttcaaaaaatacctaatg

SEQ ID NO: 543135 - DNA, 51 bp, Homo sapiens
acttcctgttctgatagcgtggaaggtgttgctctcttgccattcgtggat

SEQ ID NO: 543136 - DNA, 126 bp, Homo sapiens
ggcccgggaggccggagccaagccagcgacccaccatggagacccgctacaacctgaagagtccgggttttaaaatcaaagatgggaaaatcggagaaaattgcccttccccatggccagcttgtt

SEQ ID NO: 543137 - DNA, 51 bp, Homo sapiens
ggggatggagtgcctccaaaggttgctgagatgccttcaattaagttgcag

SEQ ID NO: 543138 - DNA, 106 bp, Homo sapiens
tcgtctgcctggactgttgcgggccccgggacctgggctgggaacccgcggtggagcgggacacgaacgtgtgtcaacagcatctccaccctggagcctgtgagcc

SEQ ID NO: 543139 - DNA, 90 bp, Homo sapiens
tgcaacctctgccttccgggttcagaactctctgcagtgtctgagctcctgcagcatgggctgccccagataagcagcaggagccctgaa

SEQ ID NO: 543140 - DNA, 75 bp, Homo sapiens
gcagtatgtcctggccatcatgaacattagtagtgagtcagtcaccctggacctgctgacctacacagacctgga

SEQ ID NO: 543141 - DNA, 51 bp, Homo sapiens
ggaacacctcgccaaagcagagaaatacacaacctccaagagggaaaacat

SEQ ID NO: 543142 - DNA, 101 bp, Homo sapiens
gataaaaatttcagtgaagaagaaagtaaagttggaagttaagggagacaaagttgaaaacaaagtgctggttgcaaaagcttctcatttcagagagatgc

SEQ ID NO: 543143 - DNA, 80 bp, Homo sapiens
cgccgaggcaccgaggcactcagaggagttctgcctcctgggggcattgctggcccccatccgagtgcttctggccttta

SEQ ID NO: 543144 - DNA, 98 bp, Homo sapiens
gcgcgctgtgcgagctcgagtctggcatccccgcagccgagagccagttacagaatgtctgaaggggacagtgtgggagaatccgtccatgggaaacc

SEQ ID NO: 543145 - DNA, 74 bp, Homo sapiens
gctgaactgtccccggcgcggccagccggtggcagagctctcgatgttctgaagtatgaggaagttgacatgga

SEQ ID NO: 543146 - DNA, 100 bp, Homo sapiens
atgagtggaatccatgtttctggacgcggatttttggcctcatactctgttatagataaacaaggttttactgcaatcacagcaaccaaccccatttggc

SEQ ID NO: 543147 - DNA, 90 bp, Homo sapiens
ggcagttttacagtctccgcacaggtgttggaaatcaatagctcttctagcctttgcattgtttaaatataatagtgtcattggactaag

SEQ ID NO: 543148 - DNA, 100 bp, Homo sapiens
ctgtttccaggggctgcagagcatggactgttaaatcttgcacttcttctgagtgaggcgacactaacaggtgaagatctcgggagaccatgactaagaa

SEQ ID NO: 543149 - DNA, 100 bp, Homo sapiens
cgccttaacccaaggaagtgactcaaactgtgagaacttcaggaaccacgtgaatgttgagggggcgacacacaagcaggtggtggacctgattcgagca

SEQ ID NO: 543150 - DNA, 90 bp, Homo sapiens
gtccgcttctcgcccaacagcagcaaccctatcatcgtctcctgtggctgggacaagctggtcaaggacttggagaaccagatgcatata

SEQ ID NO: 543151 - DNA, 100 bp, Homo sapiens
tgagacgcgggagaatgcaggctgcgtgctggtacgtgcttttcctcctgcagcccaccgtctacttggtaatgcaggtggtgaaggagcaggttatgag

SEQ ID NO: 543152 - DNA, 82 bp, Homo sapiens
cacgcaaccccagatccatttacactttacagcccgatgagagaaagggaaagttaaggatgctggagcagaacaatggatt

SEQ ID NO: 543153 - DNA, 75 bp, Homo sapiens
gggaggaacgctcactgtcagcgcctggaaacttgctcacggactggtgattgcagctggaagtgcccatgaccg

SEQ ID NO: 543154 - DNA, 75 bp, Homo sapiens
ctcagctggagaacgcggctaaagttctgatgccagatgaaaactcgctggatttttcctcctgtatgttacggc

SEQ ID NO: 543155 - DNA, 90 bp, Homo sapiens
ctgggtgcgtggggctgcctcgccgcgtctcgccacggcgaaacctaaccaaactgtccctcatcttcagccacatgctggcagaactaa

SEQ ID NO: 543156 - DNA, 100 bp, Homo sapiens
caagctcatccggctggtaaatgcgcagagcgtcacggggttcggacgtcagatgatcgagaaaaccaagcagctggtggagtctaagtacacagtggag

SEQ ID NO: 543157 - DNA, 73 bp, Homo sapiens
ccacatgttgtggagggaccctgtggaagatggcgttcaggaagtggcttatattcactcaaaccagaatgta

SEQ ID NO: 543158 - DNA, 50 bp, Homo sapiens
gaggccagtttgtcccccttcccggcctccggtgtggctgtctctgatgg

SEQ ID NO: 543159 - DNA, 78 bp, Homo sapiens
ctaatatgtagtagaacaactggctatcaaatacttacacttgaaaaggatcagatctccaagacgacatagatccac

SEQ ID NO: 543160 - DNA, 83 bp, Homo sapiens
ctcctcccccgtcctccgttagctaattaaaacatttttcagggacgtagccatccagaggttatgaagacagtatggagttt

SEQ ID NO: 543161 - DNA, 100 bp, Homo sapiens
cgcggcactggctgaagagctctttgagaaagttgtattccctgaatgactataaaccacccatttcgaaagcgaaaatgacccaaattactaaggcagc

SEQ ID NO: 543162 - DNA, 75 bp, Homo sapiens
ggcactgcgactcgagacagcggcccggcaggacagctccaggtgtgatgaatgcagactctgctaccattttgg

SEQ ID NO: 543163 - DNA, 82 bp, Homo sapiens
ttggaagcagccgatccagcctgcggagcctgtggggcaggctccagggagttccacgctgtccagttctctctgccgtgat

SEQ ID NO: 543164 - DNA, 75 bp, Homo sapiens
taatgaaatctctttcatccgagcaggagaaggtgctcttaaacaagatcattcccgagaagtgttggagcaatt

SEQ ID NO: 543165 - DNA, 75 bp, Homo sapiens
ccagtcccttggacagtctgcaccttctcttactgctggcctgcttatgtccctgatgccaaaaatgcacctact

SEQ ID NO: 543166 - DNA, 100 bp, Homo sapiens
tggaaatcagcgcggagttaccccagacccctcagcgtctggcatctcatgttggcagataaattgaacatgactccagaagaagctgaaaggtggattg

SEQ ID NO: 543167 - DNA, 98 bp, Homo sapiens
tgcacacaaagaagagacatgatgtatttgcatccttccctgcttcagccaggtgttgtgtaacggaccaggaacatgtgttcctatctgtgtatctg

SEQ ID NO: 543168 - DNA, 82 bp, Homo sapiens
tagttgcaggaaaacaagctcagggcttccactgattctacattatgcaatgttcatggctcccgctcagatggcatatccc

SEQ ID NO: 543169 - DNA, 100 bp, Homo sapiens
ggcagagtggaccacggggagccccacgaggtcagccctgacaaaggtcagctagccccttgaggacatcagctttggcctcagggtcctaatggcagca

SEQ ID NO: 543170 - DNA, 74 bp, Homo sapiens
cctgcagtacctgcagaaggtctctggagacatcttcagcaggatgactgtcttaggtcattgacgagatttgc

SEQ ID NO: 543171 - DNA, 95 bp, Homo sapiens
agaaaatggaattatctctgaacatacctgtaaatcatggtccacaagaggagaactgtgtttatgaaactgtagttttgcctttggatgaaagg

SEQ ID NO: 543172 - DNA, 74 bp, Homo sapiens
cgcgctgccgagaagctttacctcgctgaccctatgaagcatctgggctgatgggccgtaccctgcaccgtgag

SEQ ID NO: 543173 - DNA, 84 bp, Homo sapiens
acccagatggaccagtttgggcaggcagcaggggtcctcattcacagagtctctggccagccgcagagtgtgaccgcctcctcg

SEQ ID NO: 543174 - DNA, 100 bp, Homo sapiens
tctccctctcacacatcaatgcttatgcctgtctggtgtgtggcaagtactttcaaggaattagaaggtgacgaggagggagaagacgaggatgatgcgg

SEQ ID NO: 543175 - DNA, 100 bp, Homo sapiens
tcgatagagacgttttccggagggattccatcatagtattaaaggtggaagaaggtccatatctttttctgtgggtgcttcaagtgttgttggaagtgga

SEQ ID NO: 543176 - DNA, 138 bp, Homo sapiens
cggccacttcctggtccccgacgcaaccatggctgaagaacaaccgcaggtcgaattgttcgtgaaggtgaaagcccagcctccgtggttcttaatgcctcaggaggactattttcactaaagatggaaacactggag

SEQ ID NO: 543177 - DNA, 82 bp, Homo sapiens
cggctgccggtcgacgaccgccccgcgtcatgcggctcctcggctggtggttattcagcttctcaaggctggaaaagcgaag

SEQ ID NO: 543178 - DNA, 98 bp, Homo sapiens
actgataacggagaatggaactgtatgccagcagcttgttgtacactgccaaatggtgtcacttaccacactggaacatatcaagaccggttaacaaa

SEQ ID NO: 543179 - DNA, 104 bp, Homo sapiens
acttggcaagtctcactagataccttcaatcatcattttgagctcaaaggtagctacagcaagctgggtagcaggcagatccaaaggatatcatgaagtttcca

SEQ ID NO: 543180 - DNA, 97 bp, Homo sapiens
tgttattcttcgcactataggaaaagaagccttttcatatcctcagaaacagaatgtgacagtgatgataacatgggtgccaaaaatacttcaatag

SEQ ID NO: 543181 - DNA, 116 bp, Homo sapiens
gacctctttaggaaagactttgtgcttcacgatccagaggctcggtggatcaatgaaagagctcttggaggaagttggccagaatggcagccgagctcggatctctgttcaagtcc

SEQ ID NO: 543182 - DNA, 100 bp, Homo sapiens
tgatccatgggcgagtctacgatgtcacccgcttcctcaacgaggtagctcgtaagctggtcatcctggagggtgagctggagagggcagaggagcgtgc

SEQ ID NO: 543183 - DNA, 50 bp, Homo sapiens
cccaactgcaaggatggggagaagaggtcagcccaaggccaaccccactg

SEQ ID NO: 543184 - DNA, 100 bp, Homo sapiens
cttttactactgtgccttgcttatgtttgttaggaccaaacctcaaagcatggctaagagtgttcagtagaaatggggatttgaaactggacaacatcct

SEQ ID NO: 543185 - DNA, 97 bp, Homo sapiens
agttagagaaaagggctatgaacgattaaaagaagaactcgcaaaagctcagaggctttgctgcaagataacatcgctgatgctgtagcttgtgcaa

SEQ ID NO: 543186 - DNA, 100 bp, Homo sapiens
tttaaagcttcaaaatcctaagactcagcactgttgcgggaacaccttccaccatgaccacctcagcaagttcccacttaaataaaggcatcaagcaggt

SEQ ID NO: 543187 - DNA, 51 bp, Homo sapiens
aagtcaccaccgtggcctgcgacggtcttctacattaagtccattgagcca

SEQ ID NO: 543188 - DNA, 83 bp, Homo sapiens
ccgaggccaggagccaggggcccagaagtaagactttgaccccgacgcaggcttcagtgattgccgcggatcagaagcctgag

SEQ ID NO: 543189 - DNA, 83 bp, Homo sapiens
caagcagcagatcccaccttcagtcctggctctgacaagccctccagaattcggttccctcaaaattataaaggcaggaaagc

SEQ ID NO: 543190 - DNA, 100 bp, Homo sapiens
gaagccaaatgccacgagacctgtaacgcctccaagggggtttagatgtagattctctggtcattgagcatatccaagtgaacaaagcacctaagatgcg

SEQ ID NO: 543191 - DNA, 100 bp, Homo sapiens
cgagatgtctcgctccgtggccttagctgtgctcgcgctactctctctttctggcctggaggctatccagcgtgaccatggaggctggtggcctcccctt

SEQ ID NO: 543192 - DNA, 83 bp, Homo sapiens
cgcagagaccgtgggaaagagcccagcctatcgaaggtgctcaatgaacaggagccgcgtttgctggcctagacctgaactct

SEQ ID NO: 543193 - DNA, 100 bp, Homo sapiens
gccccacacatttgactcttccagttgaagtgtcattctacagtgtttcagatgacaatgctccctctccttatatgcaactggatgatgctcgcaacaa

SEQ ID NO: 543194 - DNA, 51 bp, Homo sapiens
agaaaagtgaaacaattcaggacactgttcaaaccttgtactactcagctg

SEQ ID NO: 543195 - DNA, 93 bp, Homo sapiens
gaggcaaggagctaaagcagcgtgcgttcagccctggggtgcatggctgcctcctaatcccatagtccagaggaggcatccctaggactgcgg

SEQ ID NO: 543196 - DNA, 75 bp, Homo sapiens
ctggagatgagcacgccctttacctgcgtttcctggatgctcttaaagatctcttccgttccctgctggcagttc

SEQ ID NO: 543197 - DNA, 99 bp, Homo sapiens
cgtggaacgacccgcgcgtgccctctgagggccccaaggatgaccggaaagaagggatgaccgcgtttgtggaaaagagaaaggccaacttcaaagacc

SEQ ID NO: 543198 - DNA, 98 bp, Homo sapiens
ctcatgaaccacttggcaaagacagaactgtaccgctctctttttggccagctccaccctcccgacgaaggccacggggattgacatcgcccacctcc

SEQ ID NO: 543199 - DNA, 98 bp, Homo sapiens
gtctgtgtgagcagaggggagagcggccgccgccgctgccgcttccaccacaggtgtgttccagagaacaagccttcagacatttgctatattgacgc

SEQ ID NO: 543200 - DNA, 75 bp, Homo sapiens
ctatgctgtggaaaagaaagcatactgcgagccctgctacattatcggtcgcttggttatcggacagaatggaat

SEQ ID NO: 543201 - DNA, 75 bp, Homo sapiens
agcagatggacagcctgcgcaccaatcaccagtgcgggaaccaatgcagactggcattaaggctgtggatagctt

SEQ ID NO: 543202 - DNA, 83 bp, Homo sapiens
atcatgtctgcgagccaggattcccggagccttcacgtaaatgggtccagtcatgcctcccagtaagaagccagaaagctcag

SEQ ID NO: 543203 - DNA, 100 bp, Homo sapiens
aattaaatatgatccttgttcaggtggataatattaatgcagctgtgatggatttgaaaaaaaagaagatccgcagtctaagtgaagaggtcaaaatagg

SEQ ID NO: 543204 - DNA, 100 bp, Homo sapiens
ccactgaaaatcgtgccgatgcctggcatactgcataaatggaagcagggtaccgcgtgatctgcaactctttcaccatctgtaatgcggagatgcagga

SEQ ID NO: 543205 - DNA, 87 bp, Homo sapiens
actgatggaaagcattggtgggaatatgtggatcctacagttactctagaattattagatggtcttgtggatgagcagcagaaagtt

SEQ ID NO: 543206 - DNA, 73 bp, Homo sapiens
tgtgtactgtgagaaccagccaatgcttcccattggtggtgtgtaagaagtaccggggattcaccatccccga

SEQ ID NO: 543207 - DNA, 100 bp, Homo sapiens
ctgattgactgggctggcgttaactgtgcggaggcagtccaagtggtaagaagttcagaagcaagcctcagttggcaaggtacctgggaaatactgttga

SEQ ID NO: 543208 - DNA, 51 bp, Homo sapiens
cgaactgagcatcctgggcaaggccaatgagtgccaggagcgccctgttga

SEQ ID NO: 543209 - DNA, 112 bp, Homo sapiens
tcgccgccgcggccgcctggaattgtgggagttgtgtctgccactcggctgccggaggccgaaggtgatttgatgaaggctgctgcaggagagttcgcagatgatccctgct

SEQ ID NO: 543210 - DNA, 100 bp, Homo sapiens
cggatctggacacccagcggtctgacatcgcgacgctgctcaaaacctcgctccggaaaggggacacctgccggcacagtcttcactaccgtagaagacc

SEQ ID NO: 543211 - DNA, 90 bp, Homo sapiens
catcatcctgacagctgtgtactttgccctcagcatctcccttcatgtctgggtcatgggcccaatgtaaaggctgttgctactgctgtg

SEQ ID NO: 543212 - DNA, 83 bp, Homo sapiens
ctcaaggacacggtctacaccgacttcgacggtcctagaccagaaggagcacaggctggatggccgtgtcattgaccctaaaa

SEQ ID NO: 543213 - DNA, 100 bp, Homo sapiens
gatggacacgtgctgtacagcatgagatgctgaggtgctgctggacagtgacggcgagtttctgcccgtaagggactttgtggcacctcaccttgcccag

SEQ ID NO: 543214 - DNA, 82 bp, Homo sapiens
tccacatgagaggattacctttccaagccaatgcccaagacattataaacatatcccagaggcatccttcctggaggaagag

SEQ ID NO: 543215 - DNA, 75 bp, Homo sapiens
tggagttggaatttgtgcaatgtttagccaacccaaattaccttaattgtattccaataactgtaccacctccag

SEQ ID NO: 543216 - DNA, 83 bp, Homo sapiens
acgtgcacgcagcccggcgggaggataaagaccaccacgatgtgaagttcatttccaatccgccctccatggtggcagcgggg

SEQ ID NO: 543217 - DNA, 107 bp, Homo sapiens
tggagccggagctgggcgcggattcgccgaggcaccgaggcactcagaggagagctgccatcagtcatgctcttaaacggggactgcccagagagcctgaagaagga

SEQ ID NO: 543218 - DNA, 82 bp, Homo sapiens
ctatggcatcttctgcctcgtcctgacacccaccagctgctacaggagctgagagaccctaccctcactttccgtctgcttg

SEQ ID NO: 543219 - DNA, 98 bp, Homo sapiens
gcgggtgtcagccctgaccaaccatgaccgagagccggacaatggcaaggaggagcaggaacgggagtaccctgacttctaccggaagctctacggcc

SEQ ID NO: 543220 - DNA, 90 bp, Homo sapiens
gaagaatgccggatattgcggggacctgatggcctgagccgagtgggccggatgtatcccccgcgttctcccaagtctgctgcccctgcc

SEQ ID NO: 543221 - DNA, 74 bp, Homo sapiens
aagcaaagaccagaaagagtgtctcatcttcttcaagataacttgccaaaatgactcagaattcatgattgaag

SEQ ID NO: 543222 - DNA, 100 bp, Homo sapiens
attaatcgaattacagctgctagccaggaacatggactgaagtatccagcgctcattgggaatttagttaaggtaaaagcagctgttaagtatgccctta

SEQ ID NO: 543223 - DNA, 75 bp, Homo sapiens
catctgtgacttcccatgaaacttctgatttcttccctaggcctttacgatatatgagggaaggcaccattggag

SEQ ID NO: 543224 - DNA, 100 bp, Homo sapiens
gctggccacccagctgagaggagaggcgcccccggggacgaaatcttcccaaggctgcagacaccgacggatttgctttgggagccagagtagctgccgc

SEQ ID NO: 543225 - DNA, 100 bp, Homo sapiens
agttatctgaatgccttcagaagaaaaaagaaataattgaacaaatggagatgaaattggatactggcattgataggtggagtctcactctgtcgcccag

SEQ ID NO: 543226 - DNA, 75 bp, Homo sapiens
gaaggaatatatcctgactgattgtgtgatgaatgcagactctgctaccattttggctgtttggatcctcctttg

SEQ ID NO: 543227 - DNA, 89 bp, Homo sapiens
cggggagaagctcttctccggggtcctcatggatctgtccaaaaggggccaaaccagtgctcctgccacctctctggctgccccctaga

SEQ ID NO: 543228 - DNA, 100 bp, Homo sapiens
tctcctggttaatcaagaattctctatttctgctccgtcatccatgccactgggtcgaactggaaaaattagagtgcagagtctgaagattggattaatg

SEQ ID NO: 543229 - DNA, 90 bp, Homo sapiens
agaaaccattacaatagatcgagcctgcagacaagaaacattcgtttatgagatgccaccttttgtggtgacattggatgaggtagagct

SEQ ID NO: 543230 - DNA, 83 bp, Homo sapiens
cgcgaggtccgcgcagcccagcgcagccatgacatggcaaccacagagagagcagcccttttctttcccccttggaggcttcc

SEQ ID NO: 543231 - DNA, 100 bp, Homo sapiens
gaccaccctcatgaacacactcatggacgtccttcgccacaggccaggatgggtggaagtgaaggagcaccacaacaaccctgtgggcactgaatggcgg

SEQ ID NO: 543232 - DNA, 75 bp, Homo sapiens
tattcagacagcaattaacaaagaccagccagctaaccctacagaagtttttccagaaaggaggagtcaaggaag

SEQ ID NO: 543233 - DNA, 76 bp, Homo sapiens
ggacagctgctggtatcaaccgggctcccagccctagaccagctcttagaaagacccaaatgggaccagtagtttg

SEQ ID NO: 543234 - DNA, 90 bp, Homo sapiens
gtttggcaatgacatctcccctgagattggggagaaggtgcggactcttgttcttgcactggtggattactacagcatcccatttcccac

SEQ ID NO: 543235 - DNA, 50 bp, Homo sapiens
ggacagtgtccaggtctttcagagagaatgacctggatgaccctgaaaga

SEQ ID NO: 543236 - DNA, 82 bp, Homo sapiens
tctgagtcaccaacctgaggctgccccggccgcctgcgcacccggcagcaccatgacagggagtggagcttggtttcgggat

SEQ ID NO: 543237 - DNA, 90 bp, Homo sapiens
gccatcgccagcatcgccaacccggactggatcaacaccggggagtctgcggacctgcaaatccaagagacacatctttggaagataaga

SEQ ID NO: 543238 - DNA, 98 bp, Homo sapiens
agagggtgggcttcgcagcgagcccctgtgcagagatggagtttcaccatgttggccagactggttccgaactcctgacctcaagtgatccacccacc

SEQ ID NO: 543239 - DNA, 82 bp, Homo sapiens
gctgccgccgctgcctgccgccatgctcagagtcaagatctccactgaagttggcatcacaaatgttgatctttccaccgtg

SEQ ID NO: 543240 - DNA, 100 bp, Homo sapiens
cagcctgtcgtgatcgacaacaagcatgttgtggagacattttttggatttgatgaggagtctgtggactcagaaacgttgtccgaaacatcctacaaca

SEQ ID NO: 543241 - DNA, 74 bp, Homo sapiens
tttggcctcatactctgttatagataaacaagttgaacagacacggtagaagactcgcccattttggaatgtga

SEQ ID NO: 543242 - DNA, 83 bp, Homo sapiens
cgctttccaagacatatgtcccgcttgcagcccatttcgatgctgcgaaacggagatacaactcgtcaacgaatcaaattcag

SEQ ID NO: 543243 - DNA, 74 bp, Homo sapiens
ctacccccagcaccacctccagcccctgcgcctcggtgctgcagggtgcacagctgatcgccgtggcctcctcg

SEQ ID NO: 543244 - DNA, 148 bp, Homo sapiens
gttcaaagggaccatcatcctgacagctgtgtactttgccctcagcatctcccttcatgtctgggtcatggtaaacggttgtcctccaccccgctggaaatcctgttctttctgaacgggtggtataatgctacctatttcctgctgg

SEQ ID NO: 543245 - DNA, 98 bp, Homo sapiens
cgtggacggtgtggggcggtcccggccccgcagggaaagcaggcaggatgggagagtcgccgatagaaccacctcttccctgcctcctgggcttgggg

SEQ ID NO: 543246 - DNA, 100 bp, Homo sapiens
ctgtattcttggacaagtacactggtgacatgtagctgtattcagagggaagatcagttttcctgccatccaggctgctccctccttcagcaactcattc

SEQ ID NO: 543247 - DNA, 90 bp, Homo sapiens
ggcaggagcagggctggacgggcctgaaggagaccaggggccccaagctcaggagcatctatcggctgcacgccaacatcaacacaggcg

SEQ ID NO: 543248 - DNA, 75 bp, Homo sapiens
cgcagcaacagcaagctcccgggcaggaattgaatgatctggcacgggaccctccagcacagtgttcagcaggtc

SEQ ID NO: 543249 - DNA, 96 bp, Homo sapiens
gggaggagactggagcccggttaggaagaatggagttggcgactcgctaccagactgtcttgctctgtcaccaggctggagtgcagtggggtgatc

SEQ ID NO: 543250 - DNA, 100 bp, Homo sapiens
agccccaccacgagcttcttctcttggagaaatagatgaatcttctgaattaagagttttggatataccaggacagtttccttcagcattcgagtttaat

SEQ ID NO: 543251 - DNA, 82 bp, Homo sapiens
cagaaccccaggctggtgtacggtgacaatctccaatagacttgtgtcttcaccttgctgcattgtgaccagcacctacggc

SEQ ID NO: 543252 - DNA, 82 bp, Homo sapiens
atcaagtcacctgacacatttgtgagaactatttatgcagatgacttcccagaatctacaggagtaaagcgaattgtccaag

SEQ ID NO: 543253 - DNA, 100 bp, Homo sapiens
ctacaacatgacgtttttccctaatctgatgggtcattatgaccagagtattgccgcggtggaaatggaggtgatctgcaactctttcaccatctgtaat

SEQ ID NO: 543254 - DNA, 83 bp, Homo sapiens
aagtgccacagaaagtggtggacaagatgtcatgtggcctgtgttttggaccgtggttcgtacctatgctccttatgtcacat

SEQ ID NO: 543255 - DNA, 83 bp, Homo sapiens
ccggagcgcccgcacccggccccgccgccgcctcaggtaacatttgtcgatcacccattgcagaagcagttttcaggaaactt

SEQ ID NO: 543256 - DNA, 100 bp, Homo sapiens
gaatcgacaccctcaactcagatggatacacccctgagccagacgagatgatgcctattggccagaaggaaagcgtgtggcaatggaggaccgatatcgt

SEQ ID NO: 543257 - DNA, 83 bp, Homo sapiens
ccaatcctggagctgctgttgcagcacttgttccccaaacaagtgctcctacattctggtgattgaattactcagatatgaag

SEQ ID NO: 543258 - DNA, 75 bp, Homo sapiens
gagctggatctcgtctttctatcagtgtactgttacccggacatacctattccttcacaagttctggttcttcag

SEQ ID NO: 543259 - DNA, 100 bp, Homo sapiens
ctacgagctgctggagcgcgtggaggagccggtgctgcagaaccagatccgggagcacgtcatcgccatcgaagggaaatcgtggaacacatggtccagc

SEQ ID NO: 543260 - DNA, 83 bp, Homo sapiens
cttccttctgaaagactcgcttcccaaaactgaaatgagacgagttgtactgctgtcacaggaaatggacgctggattacaag

SEQ ID NO: 543261 - DNA, 100 bp, Homo sapiens
ttcactgcctctggcatggatgagagccagcccctgggcaacaaagtggaaatggagattgtgagcatgttggaaaaaaacgcaacacttctcaaattcg

SEQ ID NO: 543262 - DNA, 75 bp, Homo sapiens
cagaaagatggcgtcctcggagcaggcagagcagccgagccaggagcagtttttgcaagaaaggatcaaagtgaa

SEQ ID NO: 543263 - DNA, 90 bp, Homo sapiens
cggggagcctctcaccctcgttatccacgtgctgctgagcgagcccgaggaggcggcggctctgtatcggggccttagccgccagcccgc

SEQ ID NO: 543264 - DNA, 75 bp, Homo sapiens
agagaactatcttgaaacatttatttccagtccaaattaaacacagtgggaatatcacttttgatgagattgtca

SEQ ID NO: 543265 - DNA, 87 bp, Homo sapiens
gtagtggttcaaacttcactcgacatcagagaattcacacagggaggaatgatcaattggaatcgtctttttcctcctttacgtcag

SEQ ID NO: 543266 - DNA, 50 bp, Homo sapiens
ctggaacagttcaaatcccaaggacagatatggcttttctaaagactgct

SEQ ID NO: 543267 - DNA, 88 bp, Homo sapiens
cctcctgagtagctggaaccatcatatgcaccagcacgcctggctaagttatcaggacaccccatgggagagacttcgatgactcttt

SEQ ID NO: 543268 - DNA, 98 bp, Homo sapiens
gatttccggtgaaggatgggcggagaaagattctgccagaagaagagcttggatttacactgggcaacgtggttggaatgtatctggctcagaactat

SEQ ID NO: 543269 - DNA, 100 bp, Homo sapiens
tcctggtgcatgtgaagttatcaaaaacagggaagcacttggagaatatttagatgggaagaaggagagtgaggaggatcaaagcaagagctacaaacag

SEQ ID NO: 543270 - DNA, 97 bp, Homo sapiens
catcagcaagctccagtgctacgtgtccctggcattttaggtgtcggttgggtagaatgcaggctcaacagtaccagcagcagcgtcgaaaatttgc

SEQ ID NO: 543271 - DNA, 100 bp, Homo sapiens
ccagcgagacaccaaagattgagacggaccactggcctggtcccccctcatttgctgtcgtaggtgaccctgagagtgtggctggggagtatgggcggca

SEQ ID NO: 543272 - DNA, 80 bp, Homo sapiens
ctgagggcctgcaaacaactcgagctggagcctcggccaggaccggcgcgagaggcggtgagaagccctaccactgcaac

SEQ ID NO: 543273 - DNA, 75 bp, Homo sapiens
ttcagaagaaaaagatctgagggaggatgagaagccgatagccaatgggtgttgaaagcagcaggggcctagaag

SEQ ID NO: 543274 - DNA, 100 bp, Homo sapiens
gttggaccccctaagcaagctgccgcagatcgcaggaccgtggagaagacttggaagctcatggacaaagtgatcttgtagaaaatttcagctgtagccc

SEQ ID NO: 543275 - DNA, 101 bp, Homo sapiens
tgacactgatggtgctgagctccccactggctttgtctggggacacccgacctgaccacgttgcctcttgtggtgtaaacttgtaccagttttacggtccc

SEQ ID NO: 543276 - DNA, 75 bp, Homo sapiens
attttgatgtggatgatgccaaagttttattagaaagttcaggagccctggaaaggagaaggaataagacggcag

SEQ ID NO: 543277 - DNA, 100 bp, Homo sapiens
ccgagtgcttccatcaataatgactactttgaagaccttaaaaagtactgtttccacagtactaaggctcgtacgtctgcatcgattatcttacgtgggg

SEQ ID NO: 543278 - DNA, 100 bp, Homo sapiens
ccgaccttgagctccaggagttcgtctcttacgtctgcggaagtgcagctgcctcagttcttagcgcagtgcaccaattccagctggacatcactgtgaa

SEQ ID NO: 543279 - DNA, 100 bp, Homo sapiens
gaagatcggccactacattctgggtgacacgctgggggtcggcaccttcggcaaagtgaaggaaccttctgataacttaagagagattctccaaaatgtg

SEQ ID NO: 543280 - DNA, 78 bp, Homo sapiens
atgtttccagccctgcctcggcggaccaaagggattcctgagctgaaatgcagatgaccacattcaaggaagaacttt

SEQ ID NO: 543281 - DNA, 113 bp, Homo sapiens
ttacactgaagaagtagagtatttcaaccataaagacatcttaattgggcacgaaagaggttttaaaatcaaagatgggaaaatcggagaaaattgcccttccccatggccag

SEQ ID NO: 543282 - DNA, 101 bp, Homo sapiens
gctggtgatggctcagcacatgatcagggatatacagaccttactatcccggatggaggttcgttccaccagtcataaaccagatgaaatctatggcatga

SEQ ID NO: 543283 - DNA, 90 bp, Homo sapiens
gtggaggccgcagcagtcagggacatttctgaagcgagcgtcttcgatggttccagcagcactgatgtgaaggaaaaccgcaatctggac

SEQ ID NO: 543284 - DNA, 101 bp, Homo sapiens
gacctgcaggtcccggaaggtccttagggaggaccccagacaccggagactgggaaatgaccccagttattaaagcttttggcatcttgaagcgagcggcc

SEQ ID NO: 543285 - DNA, 75 bp, Homo sapiens
tttgggatttgagattgacgcggtgaactctgtccagttttcaaaccacacaggccaagtataaggagcgaggga

SEQ ID NO: 543286 - DNA, 96 bp, Homo sapiens
caaaggaaaatgcatcttctaagtttttggcaccatatactactttttccagaattcatacaaagagtttttctggatatgccgcagaaggatccg

SEQ ID NO: 543287 - DNA, 51 bp, Homo sapiens
gtctgagtggatggggacctgcctgctgggctcctcgcacctaccccagca

SEQ ID NO: 543288 - DNA, 83 bp, Homo sapiens
gaaaatctctgccacgtccatcttctttgaatctatgccctacaaggtactaggttttgacaagcttgcatcatgcgtgagta

SEQ ID NO: 543289 - DNA, 100 bp, Homo sapiens
ctaagctgaataaagctgttttggaactgtcaggtacctcaaagcgtagctacagcaagctgggtagcaggcagatccaaaggatatcatgaagtttcca

SEQ ID NO: 543290 - DNA, 100 bp, Homo sapiens
gggaagtgcttggggatggagtgcctccaaaggttgctgaggggatggtttagacaacagtgtagcttcacctggtacaggtgacgatgatgatccggat

SEQ ID NO: 543291 - DNA, 50 bp, Homo sapiens
aggattctgacagggatgttgcgaaggacccagatgatgtggtaccagtt

SEQ ID NO: 543292 - DNA, 88 bp, Homo sapiens
aacaaccttaggcggcagctggagactctgggccaggagaagctgaagctggaggcggagctgatccgagaggacatccagggggctc

SEQ ID NO: 543293 - DNA, 120 bp, Homo sapiens
cttatcagcactatttgaaacttttatctcatctggcttggcgcctgaggttctcccattaggtttttcgttggaatatacgttgcacatttatggcgattctgagtgtgagggcagact

SEQ ID NO: 543294 - DNA, 50 bp, Homo sapiens
ccgcgggcgcccgaggggccgagcgagtctgtaggtatattgttagagcc

SEQ ID NO: 543295 - DNA, 76 bp, Homo sapiens
caaagatgacagattgggccaacatgttccaacactacatccgagcgacattgactacagcaccgtgctcctcggc

SEQ ID NO: 543296 - DNA, 100 bp, Homo sapiens
aaccctacttgcctaaatgaggaatgtctttcctaccatctaaaatacgaaggtttctggctgggagcatttagacagcacccgtggctcagttcattcc

SEQ ID NO: 543297 - DNA, 100 bp, Homo sapiens
aagcgtgtagctctctagagcttccaaataatgtcttattgttacaggtatcgctgtgctgctcggagccagaacacacctgatagctctgcttcgaatc

SEQ ID NO: 543298 - DNA, 97 bp, Homo sapiens
tcccctgccgtggccctctcagcaaacggtcctgcacaacagagttatgcccagccaagtcttcagtatatccaggggcaacagattttcacagctc

SEQ ID NO: 543299 - DNA, 83 bp, Homo sapiens
tgcgccgggagcggagatatgtctgcagatctccaggggagcccaccagcctagtcaacatggcctcggaagacattgccaag

SEQ ID NO: 543300 - DNA, 74 bp, Homo sapiens
gaacggagagcgaccatctttaattttggagaacagaatggctacaaggtaatagcctgcagctggtgttttga

SEQ ID NO: 543301 - DNA, 100 bp, Homo sapiens
gagcaacgggtgcccctgagtgtgcaactgaagcctgaggtctccccaacgcaggacatcagtttgcagaaaaaacttcagcatgtgccaggaacacaac

SEQ ID NO: 543302 - DNA, 100 bp, Homo sapiens
tcataatgagctacaaactaccaatggaggatcttaaagagaccagttagcagatgcttggagagctggaggtgtttcagaaagatggggaacgaaaaat

SEQ ID NO: 543303 - DNA, 76 bp, Homo sapiens
tgttctgcgtggggacggccgcctagagtggttcagccacaaggagagttactgaaagctctcgaaattacggtta

SEQ ID NO: 543304 - DNA, 74 bp, Homo sapiens
catcgtgtgcctgatgatcacgcagctggctggcttcagtggaccaagcatagcggcctgaccacaggggtggc

SEQ ID NO: 543305 - DNA, 74 bp, Homo sapiens
atttcaagcgaggctctgggcagagtggaccacggggagccccacgaggtcgtgcgtctgaagcctacaagaaa

SEQ ID NO: 543306 - DNA, 80 bp, Homo sapiens
agaagctcagcgcagccctgcaggccaagcgcagcctccaccagtagcctctagttcgttagtcaaaacgtgaaaaaaaa

SEQ ID NO: 543307 - DNA, 75 bp, Homo sapiens
cggcgtacgccctcatggggaaaatctccccggtgactttcaggttcacaactacatgatgccacccctcgaccg

SEQ ID NO: 543308 - DNA, 74 bp, Homo sapiens
tggaagaaaaaagaaaagaaactgacaaaaacatttctgaggccctgacaagccaattgacagatgaagagcta

SEQ ID NO: 543309 - DNA, 100 bp, Homo sapiens
tggaactctttcataggagacaaacttatgtattttttaagtcacagaattcttggcatcatggaccgatctaaagaaaactgcatttcaggacctgtta

SEQ ID NO: 543310 - DNA, 73 bp, Homo sapiens
ctgtctccattactttgaacttttgaagacaggaacacagaggacgatcgccccccggacacacccttactct

SEQ ID NO: 543311 - DNA, 75 bp, Homo sapiens
catgccttctgatgtctacaggcgctgacggccacccctccagataacaacgaacttgatgcaagtgataggttt

SEQ ID NO: 543312 - DNA, 75 bp, Homo sapiens
cacctccgagtgcccgccgcccgtcatcaccagggtgcgggctcagggccaccagctccctgtgaaggaggctac

SEQ ID NO: 543313 - DNA, 98 bp, Homo sapiens
ctgagtcaacagactgagcgcgtccaggcctgacagctctgcggctcgggccctgaggtaagaagagttcctgggtcaagtggtcaccttcataaaac

SEQ ID NO: 543314 - DNA, 136 bp, Homo sapiens
cgcttttctacatcgcggtggtctttacctgcttcatcgtgaccaccggcctggtattgggatgacaattcctcctcgcttcaagaagatgaagaagtagagatggaggccatcagctggcaggccagcagtccag

SEQ ID NO: 543315 - DNA, 83 bp, Homo sapiens
ctgaggcggaacaggccgggcaccaaggcgcagacaatgcagatcttcgtgaagactctgactggtaagaccatcaccctcga

SEQ ID NO: 543316 - DNA, 76 bp, Homo sapiens
cgccactgctcagcgtctgcacatccctacaatggctaaaacagcaatggctgggagtgtccactcgccttccacc

SEQ ID NO: 543317 - DNA, 82 bp, Homo sapiens
ttcggcgcgtcgactgcccagagtccgcggccggggcgcgggaggcctcccccagggaagaacttcactatgcctcggtggt

SEQ ID NO: 543318 - DNA, 74 bp, Homo sapiens
tttaattctcagaagccgatcacaagaaatctctaccccaaatttgcgtcaccctgggcatcttcaccttgtcg

SEQ ID NO: 543319 - DNA, 75 bp, Homo sapiens
ggcgacttgcgaggatgagagcgacgaagccaactgtccaggctgcatgatcattgcaatgacccttccctagac

SEQ ID NO: 543320 - DNA, 100 bp, Homo sapiens
attgagaaacaggcacacaagtgtgaggagttgctaaatgctcaggcatctccttggaaacaatgccatctttgaatgtgagagataaacctagtttcag

SEQ ID NO: 543321 - DNA, 75 bp, Homo sapiens
ctagaagtgatcacttaacagttgtgaatgcgtttgaggaaagccatcaccaagtcgggcctccagcacctggcc

SEQ ID NO: 543322 - DNA, 83 bp, Homo sapiens
aggtgatccagcaaggtcggcagagcaaggggcttacgcagaaggacctggccacgtgctgagcttgcaagacctctgctgcc

SEQ ID NO: 543323 - DNA, 98 bp, Homo sapiens
tccactcttcggcgaagctttacgttcatgtaaacagcatgacgtgaggccgtggatgcaggcattaaggtatttaacatgaagtcgctccagattgt

SEQ ID NO: 543324 - DNA, 100 bp, Homo sapiens
cagctccgggagttgctgctgcctccaccagacaccaaaccagatgaagccaaggaggagttcctggatctgcttgatgtgttgctgccccatgcccaga

SEQ ID NO: 543325 - DNA, 83 bp, Homo sapiens
ggagccggagctgggcgcggattcgccgaggcaccgaggcactcagaggagccagagcagctgagttccagataaaaactgtc

SEQ ID NO: 543326 - DNA, 99 bp, Homo sapiens
cttggagccaggcgccggggtctgaggacacattcagctaacgtattttagcaggtggagtgaggttgaagattcctgtgacagcgatgccatagagag

SEQ ID NO: 543327 - DNA, 100 bp, Homo sapiens
ctatgaggagaccaaaataaaactaacagtctatgatgtcaaggataagtctcatgacaccgtttcccaggcagctgcagacttgaaacagttctgtctg

SEQ ID NO: 543328 - DNA, 100 bp, Homo sapiens
aaagcctgcccagacggctcacctgtgcgggatggaacaaaaggacctgaaggagaagaaggagaaggtggaggagaaggcaagccggaaagagcgaaag

SEQ ID NO: 543329 - DNA, 85 bp, Homo sapiens
gcgttctgaagcccgagaggagccacaatggagacgccgccgctgcctcccgctatctccagatgaaatggccactgcttgatgt

SEQ ID NO: 543330 - DNA, 93 bp, Homo sapiens
acagatgattccccaaagtacaattaccatttggactccagtggtagctatgtgactactgtgaagactggccagaggcacagaggatctcag

SEQ ID NO: 543331 - DNA, 74 bp, Homo sapiens
gcatttcagtcactggtttgcagagtccaggctttgaattgtattccatggtgccatctatttgtcctctagaa

SEQ ID NO: 543332 - DNA, 88 bp, Homo sapiens
cactgcagcgattgcgagaatgaggaggacaacagctacaaccggggcattatgatcctggacttgttgtggtgatggtaatcttagc

SEQ ID NO: 543333 - DNA, 129 bp, Homo sapiens
aacagatgcagaatccaaaggcagcgcaaaaaacagccaccgattttgctatgtctctgagctgcgagttggtggctaaaggagttaagagttctgatgtttctccacctttgggacagcatgaaacag

SEQ ID NO: 543334 - DNA, 100 bp, Homo sapiens
cctcagtttaggcagttgtgtcatgccccatcaagacgtggtgatttggaaatacttggttattgcatgatccaatggcttactggccatcttccttggg

SEQ ID NO: 543335 - DNA, 148 bp, Homo sapiens
tggaggagaggaagaagcgcgagacccacgaggcgctggcccggaggctccagaaacgggtcctgctgctcaccaagggcgaagctgtgctcaggcccgggctggacgcagagccagagctgtccccagaggagcagagggtcctgga

SEQ ID NO: 543336 - DNA, 105 bp, Homo sapiens
gctgttgctggtctctggctccctcctcccagggccaggcgccgctcagaacggtgtgcaactgaggaacatggctcaagaaactaatcacagccaagtgcctat

SEQ ID NO: 543337 - DNA, 82 bp, Homo sapiens
gaaacagaaattctggaacacctatatgagatgctgcccccacccccttaggcccgagggatcaggagctatgggaccagag

SEQ ID NO: 543338 - DNA, 106 bp, Homo sapiens
ctggctctgacccatctggaattgcctctagagtggactgtgttgggaagttcttcacttgaaggaggattgcccaagaaactaattttttaaagagaacactgga

SEQ ID NO: 543339 - DNA, 83 bp, Homo sapiens
tgcagggttttgtttatataactcaagttgtttggctaaattcttcagtctcttgttttcagcagccactgtaaagcagtgag

SEQ ID NO: 543340 - DNA, 100 bp, Homo sapiens
acttccagagccggaacgtcatccctgatatccctgaccacttcctgtgtctgtgggagcactgtgaggtaagcctgcccacggcagagattgattgcag

SEQ ID NO: 543341 - DNA, 98 bp, Homo sapiens
cggacacactatcctgatgcttttgtgcgagaagaccttgcccgccgggtgaacctcaccgaggcgagagtgcagttatcaggaactgttgccgttat

SEQ ID NO: 543342 - DNA, 137 bp, Homo sapiens
tgggcaaggccttggtgccttattaccgtcaaatcctccctgtcctgaacatctttaagaatatgaatgtgtttgtcaggttcaactccagccatggtttcccagtggaggtcgattctgacaccagcatcttccag

SEQ ID NO: 543343 - DNA, 90 bp, Homo sapiens
acagatctcagagaaattggccatggaagctttggagcagtgtattttgctttcgccaaggtcttcaacacaacccctgatgacttggac

SEQ ID NO: 543344 - DNA, 75 bp, Homo sapiens
tctatatgggatgcaagaacacaagtctggaaaagtttgaaattccagtaaaaattcgtttgagtcctgaaccgt

SEQ ID NO: 543345 - DNA, 99 bp, Homo sapiens
tgcgaggaactatcttggtgaagcagtgagtcgaaatgcgtctctggaagtggcatttttgcaggctttggaggtactcccagtagcaccaccacctga

SEQ ID NO: 543346 - DNA, 74 bp, Homo sapiens
accagcgtttcacctaccttcccgccaacggccaggtcagagcagcccaccatgggatggggagggggtggagg

SEQ ID NO: 543347 - DNA, 100 bp, Homo sapiens
taaagttatgggactacaacagcagccacaggaaccttgagtgccttagctggaccaattattgtggagccacatgtcacagcagtatggggaaagaatg

SEQ ID NO: 543348 - DNA, 83 bp, Homo sapiens
ggcgaaacccaccagagatgctgcgtgcttctgcccacctcctcgtgtcaaagcaagagtgagccatggagctacgtgtgggg

SEQ ID NO: 543349 - DNA, 77 bp, Homo sapiens
ccaagaagatggacaagcccatgctgaagcaggccggctctggcgtccacgaagtcacctgcaccggtgcccgtgac

SEQ ID NO: 543350 - DNA, 100 bp, Homo sapiens
ctcaggagagagcagccagagtgatgtccaacatcacagtcacatacagagatggccgagtggcacagctggagcaggtatacatccgtggcagcaaaat

SEQ ID NO: 543351 - DNA, 51 bp, Homo sapiens
aaaattgaaaaaatggttgacctcacccagccaatggagatcttcgtggat

SEQ ID NO: 543352 - DNA, 83 bp, Homo sapiens
cccagcttgaaggcctggagagccgcccagcagcacaacacagggaagcttggggagattacctaggaacagtacgatttggg

SEQ ID NO: 543353 - DNA, 123 bp, Homo sapiens
atgagatccagtttgggcacctgcagcgacctacccactacaatacctcttgggactgggctcgatttgagtgggctcgggatgagtttgaaggcctcttcaagcagccagcagaaaatgtca

SEQ ID NO: 543354 - DNA, 85 bp, Homo sapiens
cgctgacaggggggcctggccgcgcagccggtatacccgaaatcttgtggatcaaggaaatggaaaatttaatctgatgattctc

SEQ ID NO: 543355 - DNA, 107 bp, Homo sapiens
aacagatcgtggatctgaaagtgacaagcattttagaaaggtggtggaggtggatacagcagtcggagaacatctggcagagacaaatacggaccacctgttcgtac

SEQ ID NO: 543356 - DNA, 100 bp, Homo sapiens
ggcgcggggaccgctgtgctctcggatgattcaaagccgccttactcctacgcgcagctgatagttcaggcgattacgatggctcccgacaaacagctca

SEQ ID NO: 543357 - DNA, 100 bp, Homo sapiens
caccggacactttgttattggagaaacatgcagattatatcgcatcctatggctcaaagaaagatgattataaggacagaataacgggctcccagattca

SEQ ID NO: 543358 - DNA, 75 bp, Homo sapiens
aggagcggctgctgctgctgctgctgctgctggtggcccctttgcaggttttaaaatcaaagatgggaaaatcgg

SEQ ID NO: 543359 - DNA, 74 bp, Homo sapiens
ccgcgcccggccggacccgggcccgaggtttacccaaggtccagcctagcccctaggcaccatgtcggacagtg

SEQ ID NO: 543360 - DNA, 100 bp, Homo sapiens
cgtgcaggccgtgaatgagaaaaatggagaaaacaagacaagcccattcattcatttgagcatagcaaaagtacttgaggagcccaaggacttttcttgt

SEQ ID NO: 543361 - DNA, 51 bp, Homo sapiens
gtcaaaagagcttctctccagagtagaaagagacggggttttgccatgttg

SEQ ID NO: 543362 - DNA, 90 bp, Homo sapiens
aacagagaggcattctggacaatgaagatgctctccgcagctttccaggaaaaccagtagattcccagacatcgcgaagtgaatctgaaa

SEQ ID NO: 543363 - DNA, 98 bp, Homo sapiens
ctgtgggtggacgtggttggtgattggcaggatcctggtatccgctaacaggtttggtgcacctcgatttggaggaagtagggcagggcccttatctg

SEQ ID NO: 543364 - DNA, 75 bp, Homo sapiens
tctggctgtgcgcgctggcgctgagcctgcagccggccctgccggtgaaaggtgtagcagtcactcggcctacac

SEQ ID NO: 543365 - DNA, 83 bp, Homo sapiens
ggccccccagcatgaagaccccggcggacacagatgatagtatttctgctgcaagtacttctgatgttcaagatcgcctgtca

SEQ ID NO: 543366 - DNA, 110 bp, Homo sapiens
acccagaccctggagcctcagttggaagcagccgatccagcctgcggagcctgtggggcagacacagaatgttcagcttaacaaagaaatgacacttgccagcaaccgga

SEQ ID NO: 543367 - DNA, 100 bp, Homo sapiens
atgtcagaatctggctcggaggaatctcagtagggacaacaggcaggagaattatgggagcgcatttccccagggctagtcaccctgctgtggaatagaa

SEQ ID NO: 543368 - DNA, 89 bp, Homo sapiens
caggggcggcgcggcccggggtgtcagtgtggaggagactgaggtatggatcctggcgggagccagtcaacccctattatgtcaatgcc

SEQ ID NO: 543369 - DNA, 75 bp, Homo sapiens
tggcgccgcgacctccggatgacccgggcttcggcccccaccagagactcgcggacaaggcaaaatctcagcaag

SEQ ID NO: 543370 - DNA, 98 bp, Homo sapiens
acgggttttagaaaaacaagaattacagcagccaacctatgttgccctgagttacataaatagaaattgtgagcatatcagcattaagtaccactgag

SEQ ID NO: 543371 - DNA, 82 bp, Homo sapiens
gagggccagctgacggagatggtgcagaagatggaggagaaatggtggagtcaatgaagaaagtagcagggatggatgtgga

SEQ ID NO: 543372 - DNA, 90 bp, Homo sapiens
cggggtgtgccggggggaaaggggcagcatgatggtctgagatggtaccaaggaaaggcagatgcccccgtggccttggtggttcacatg

SEQ ID NO: 543373 - DNA, 100 bp, Homo sapiens
cctcgagcgatctggacccttcacacaccctgatttcgaaccgagcactgaaatcagaagatttcttggttatacatgctcgtgatgatttaacagctgt

SEQ ID NO: 543374 - DNA, 75 bp, Homo sapiens
cactgctactgcgaagacagctggcaggcctttgcccagtttgatgctgagggtgatgggacagttgatgccgag

SEQ ID NO: 543375 - DNA, 98 bp, Homo sapiens
gcactcaagcagcaggagcagcccgcggcgaccaagatcaggaacctgccctggaggagacctctgaacagatcacaaatgttacgtgagctttttcc

SEQ ID NO: 543376 - DNA, 100 bp, Homo sapiens
acattgtttctctccctctgcccccccttccccacgcaaccccagatccatttacactttacaagagatcgatgtcttattgtgatgagtctcgactgtc

SEQ ID NO: 543377 - DNA, 75 bp, Homo sapiens
catggaaaaagtgacttgagcaggattcaggagcagttccagaaaaatcccgacagttacaatggtgctgtccga

SEQ ID NO: 543378 - DNA, 51 bp, Homo sapiens
gcactgattaccagctcagcaagcaagaggaggaacgacgtagaagagagg

SEQ ID NO: 543379 - DNA, 101 bp, Homo sapiens
agccccggcatcctttctggggagaagcagcgcatcagccgaggcagggaagcccacgaggagataaacatcaccttcaccctgcctacagcgtggagctc

SEQ ID NO: 543380 - DNA, 82 bp, Homo sapiens
ggagcgcggggcgacgctggctgcagggacccggtgacagcgtgagagaattcagaaggagctggcggacatcactttagac

SEQ ID NO: 543381 - DNA, 90 bp, Homo sapiens
gattcgcagtggtcgcttcttctccttgatggagactattttacctttacaagacatgaacccattggagtgtgtggacagatcatccca

SEQ ID NO: 543382 - DNA, 100 bp, Homo sapiens
gtcttcaagagcccacggacaccacctcaacgtttcgccgtgaggaagatgcggaaaaggctgtgattgacttgaataaccgttggtttaatggacagcc

SEQ ID NO: 543383 - DNA, 100 bp, Homo sapiens
gtccgttttactcttttctacacgccgttttgcgtcattccaataagtggaatatccaaggtatctccaagcacccaattcagattactacacctaagaa

SEQ ID NO: 543384 - DNA, 87 bp, Homo sapiens
ggcggtgaagcgtgaggccggcatcgtctttccgtcctctgaggcgacggccgcggctgcacagaatgtgaaagatgttgcagaagt

SEQ ID NO: 543385 - DNA, 84 bp, Homo sapiens
tggagaggtacagaatttagctgtcaaatgctcatgtgctcctcggtgcagaaggccttgtttgaggaggaggaccacgtcaag

SEQ ID NO: 543386 - DNA, 100 bp, Homo sapiens
gggttccctactcccctgctatccccaacaagaggaaagacacacctaccaagaagccagtcaagcggccaggcatctgggtcacaggccccagttccac

SEQ ID NO: 543387 - DNA, 50 bp, Homo sapiens
gtcatatgctaggccactatacagatctgtggatttcttcaatcagatca

SEQ ID NO: 543388 - DNA, 100 bp, Homo sapiens
gggtgctgaccgtgggagccgaccgaggtgaaattgatcttcaaattctctccaaagttcaggctcaatacccaggagtttgtatcaacaatgaagttgt

SEQ ID NO: 543389 - DNA, 88 bp, Homo sapiens
aagccacgtgcagacatctacaaccttcgatctcctgacgagaacccaagacagaccaggatgaggagcattgccggaaagtcaacga

SEQ ID NO: 543390 - DNA, 99 bp, Homo sapiens
ggaagagtactacagattttatacaccaccaaactttgttcttgctcttgttttgccctcaattgtaattctgggcctagctctgctagccccagtggg

SEQ ID NO: 543391 - DNA, 74 bp, Homo sapiens
caggaaatcagcttgtcctcactgtgcagcgtgacaacgcgcctgcaaaagggaacaagagcccttcgcctcca

SEQ ID NO: 543392 - DNA, 89 bp, Homo sapiens
ggccagttttgaaatcgacacacaaagaatagagttgagcctgtgggacacttcggttaccggtattgtaagaacaagccgtacccaaa

SEQ ID NO: 543393 - DNA, 97 bp, Homo sapiens
gggcaagcgctgttcaaacccatgaacttgctgagcgagagcgagaagcggcccttcgtggaggaggcagagcgccttcgcgtgcagcacaagaagg

SEQ ID NO: 543394 - DNA, 100 bp, Homo sapiens
ccgggctgggctacgcgcacgggctcggccgccgcccctgccggatctatcttgggatcccatggctttctttactgggctctggggccccttcacctgt

SEQ ID NO: 543395 - DNA, 83 bp, Homo sapiens
cttgctggtgcatgcgtcgtcggcctctgggcagcaggtatgtgacgcattcccagactcttcagccaactgagcatcagctt

SEQ ID NO: 543396 - DNA, 71 bp, Homo sapiens
agacagaccctcagaaacccagaggagatgtgttcaatgtatttccactacacaaaattttccacctctgg

SEQ ID NO: 543397 - DNA, 83 bp, Homo sapiens
ctgaacttccctggtcgaacagttttttctaatggctattcaagagttgtctgctggttctcagcttgaagaagattctgcag

SEQ ID NO: 543398 - DNA, 50 bp, Homo sapiens
accaccattacagaacaatgaggctggacagtcttgtgaaattgagactc

SEQ ID NO: 543399 - DNA, 100 bp, Homo sapiens
gatgctgatggtgatggagattttgatgtggatgatgccaaagttttattaggtgattttcttccacccccacctccacctctagatgattccagtgccc

SEQ ID NO: 543400 - DNA, 74 bp, Homo sapiens
ccatcaaagtgattccccggaatcgtgtgctgggctggtcccccttggttctccaaatgtcaactgtcaaggag

SEQ ID NO: 543401 - DNA, 51 bp, Homo sapiens
gctcactatttttcctctgggcatgttcgatacaagaggctgttttcctag

SEQ ID NO: 543402 - DNA, 100 bp, Homo sapiens
ttttgatagcccttctggacggcagttactgtatgatgccatcaaacatcagggccaggtcatgaacattttcgtgatactccccgccctgatcatcccc

SEQ ID NO: 543403 - DNA, 82 bp, Homo sapiens
aaggccaaaaatgtgcatactcacagagttagagagagggatggtggtgtcagcttcctctggtgcaaccagcaagtcttcc

SEQ ID NO: 543404 - DNA, 99 bp, Homo sapiens
ggagaagttcacagtcctgtttgagtctcagttcagtgttggcagcaatgagcttgtgttccaggtgaaggtatataacgagttcattctgccttcgga

SEQ ID NO: 543405 - DNA, 90 bp, Homo sapiens
cacaaaccagagaaagctttccagcagtcagttgaacaagacaacttatttgatgactctcaaattgcagacatactgtcaacatctggg

SEQ ID NO: 543406 - DNA, 75 bp, Homo sapiens
gagggcggccacccggagccagcggagggacaggcaacatcgaaaccaaccataacctgccaccgtcgcacaaat

SEQ ID NO: 543407 - DNA, 83 bp, Homo sapiens
gaggtttcagaagacgaggcagacgtggctcctgctgcacatgtatgacagtgacaagagcgccgccctgtgctgggctgccg

SEQ ID NO: 543408 - DNA, 100 bp, Homo sapiens
cagacacaacatctgctgaggtgttcattgaagacctcacctccacccgcgacaacccagtcccctgaaagcactatggatacctcactgaagaaggaga

SEQ ID NO: 543409 - DNA, 75 bp, Homo sapiens
ttggggcttgatgaaggcgtggatagcctgaaggcagccattcagaaaatgatccacagtctatttctcataaac

SEQ ID NO: 543410 - DNA, 98 bp, Homo sapiens
ctggattctaaggcaacacttccttgaagaaacaagcttacagttctcttgcaactagcaagtgaagccttgccaaatgacatgaccttggctcttgc

SEQ ID NO: 543411 - DNA, 97 bp, Homo sapiens
gtgtggtcgcgtctcggaaaccggtagcgcttgcagcatgatctctgttgaggagctggcgcggaatctggtcatcaaggtcaacagggatgctgtc

SEQ ID NO: 543412 - DNA, 101 bp, Homo sapiens
caacaccatgccgtccgccttctctgtcagctctttccccgtcagcatcccagccgtgctcacggttcgagaacttgtcttggacaattgcaaatcaaatg

SEQ ID NO: 543413 - DNA, 82 bp, Homo sapiens
taatttccaaattacaagatgaatttgaaaaccgaactagaaatgttgatgatattgatgatgttaagaagttcaaaccggg

SEQ ID NO: 543414 - DNA, 75 bp, Homo sapiens
acaaaacagcagatttcccaagagcagcggaaaatgatccagtcacaggagcatctttccttgaagaagtacatt

SEQ ID NO: 543415 - DNA, 100 bp, Homo sapiens
ggcacgcgcaggaaacatggcggcggcgggtgttgtgagcgggaagtcaatcctttcccatggtaccgtggcagactgtgctgttgttggcaaggaagat

SEQ ID NO: 543416 - DNA, 75 bp, Homo sapiens
ccggttccccggcccacagtgggggtgtgcaaacccgagagaactggcagtcctgcgttaactgcggccgggagg

SEQ ID NO: 543417 - DNA, 100 bp, Homo sapiens
ggcggcggtgcgtgttgctgcgagtgggacgcgcactggtcggtgccggctcaggagccgggcaggcttatggctatgggccatacggtggtgcgtaccc

SEQ ID NO: 543418 - DNA, 100 bp, Homo sapiens
taccagaggtactacagtttacagtctgactactggaaggctctgtgtgctccgggatggagcaggtgtgcagagggtgagaacccagctctgggaccaa

SEQ ID NO: 543419 - DNA, 100 bp, Homo sapiens
caaagactgtgcaacggtgtttgctctgagcactatgactagctctgtccaggagtcaaattgactttatcagctttaatcgatgggaagaacttcagtg

SEQ ID NO: 543420 - DNA, 130 bp, Homo sapiens
gatggaagattcgatggacatggacatgagccccctgaggccccagaactatcttttcgcccagctcctagtggagacagacaccttcggtagtcaagtccggatcaagggcaaggagacggaattctac

SEQ ID NO: 543421 - DNA, 101 bp, Homo sapiens
cttattaatacggggatctgtgagtcttctggcaaacagtgtttgcctctggttcagctcatacaacagcttcttaggaacgacttagctgaatatcagag

SEQ ID NO: 543422 - DNA, 96 bp, Homo sapiens
cccccggcgccctctggggctccgagcccggcgggaccatgttcaccagcaccggctccagtgggctctaattctgcttggtcagaatcgtgatgg

SEQ ID NO: 543423 - DNA, 75 bp, Homo sapiens
aacgaccttcgtgaaacgtcatttgactggtgaatttgagaagaagtggagccgccaccaaaatgcagattttcg

SEQ ID NO: 543424 - DNA, 89 bp, Homo sapiens
gcgcgctcgctccggcgccggcctcgcctcctcgcagcagcgccatgacttcccaagtaagaagcggaagaggagccgctggaaccaag

SEQ ID NO: 543425 - DNA, 50 bp, Homo sapiens
ttcgcctccatctgtaccatggtgatcagcgagtttgaggcctctcccga

SEQ ID NO: 543426 - DNA, 98 bp, Homo sapiens
aaaagaaacattttgaagaacacaattccatgaatgaactgaaggtcgctgagattacgggtgttgtggaaactgccaaagtttaccaactaggtggc

SEQ ID NO: 543427 - DNA, 78 bp, Homo sapiens
cagcgagatccgggccgtgaacgaaagcagtgacggaggagcttgtaccaccgcctcctgacaaggtgatccgggcgg

SEQ ID NO: 543428 - DNA, 75 bp, Homo sapiens
ccagaagattacctttgactcttgtcccaggtttgttggcatccaaagctgttggggttgatggtgctgaaaaaa

SEQ ID NO: 543429 - DNA, 75 bp, Homo sapiens
ggagggccagaccatcaagctcaacatcgcacaggaaatccaaatctcctcccaaagtgcccattgtgattcagg

SEQ ID NO: 543430 - DNA, 51 bp, Homo sapiens
caaggggcagacccaaaaaactgttgcaggaattgtgccttggatccatcc

SEQ ID NO: 543431 - DNA, 101 bp, Homo sapiens
cctgagacaaccacttctggtggttgccactcacctgaggatgtgatcccaaaacgaaccaacagaccaggcatcagcacaacagaccggggttttccacg

SEQ ID NO: 543432 - DNA, 90 bp, Homo sapiens
gatgcgccgcgccagctcctactcctccctcaactccctcatcgtgccggtggtggtgtgcacattgagccccggtatagacagttcccc

SEQ ID NO: 543433 - DNA, 99 bp, Homo sapiens
ggttctcgtggagagcagaaaacccaagaggaagcgatggacagggcaggtggaaatgcccaagccaagggccaactcagtcacctggaaccctcacaa

SEQ ID NO: 543434 - DNA, 74 bp, Homo sapiens
cgcgatgcccaggccgcgccgccacgagatacttgccagaactaatacagctgatgaaatacctgaccttttct

SEQ ID NO: 543435 - DNA, 51 bp, Homo sapiens
atcaggcagtttcccttcccaagaacactggaactattttggggctgatga

SEQ ID NO: 543436 - DNA, 96 bp, Homo sapiens
tcaaaaggtggtaaactatacctactgtccctcaagagaacacaagaagtgctttaagagacaatgcagatcttcgtgaagactctgactggtaag

SEQ ID NO: 543437 - DNA, 83 bp, Homo sapiens
ggtccgcatcgagaagatgagctcagaggtggtggattcgaatccctacagacatctttccaggaacagcgtgaggaggacag

SEQ ID NO: 543438 - DNA, 82 bp, Homo sapiens
cagaagaatataaacactttcagaggatatatcccagcaaaacaaaccgaggtgtctactatgaaccatcctgtactcagaa

SEQ ID NO: 543439 - DNA, 90 bp, Homo sapiens
ggagtagcgagtcggcaacccggaggtgctggttgccgaggagaacgtggacttccgcatccacgtggagaaccagacgcgggctcggga

SEQ ID NO: 543440 - DNA, 80 bp, Homo sapiens
gtttaatgactttggtgccctcaacatctctcagagacgaaaggtggataatattaatgcagctgtgatggatttgaaaa

SEQ ID NO: 543441 - DNA, 113 bp, Homo sapiens
cacgcctgggcccaggtgtggcgtctctgtccccatctggttttagacaatgcagatcttcgtgaagactctgactggtaagaccatcaccctcgaggttgagcccagtgaca

SEQ ID NO: 543442 - DNA, 74 bp, Homo sapiens
tggactgcagtgctgcagtgccagacttgtgtatgcggatacctgcttcagtaccatcaagttaaaagcagaag

SEQ ID NO: 543443 - DNA, 75 bp, Homo sapiens
aatctgttttggatcaagatgatgtggacacctcaatggaagaatctttgaagcctctgcaggtgtgcgagcagg

SEQ ID NO: 543444 - DNA, 50 bp, Homo sapiens
cccggggccgggcagaattgggctccagagtgcctggtgaagaatgtgat

SEQ ID NO: 543445 - DNA, 99 bp, Homo sapiens
aagttcgcaaacagcacaggccatcaaatgcagaattcacaagatccaatcccttgtccttaaaaggatgaaggtttaaggctcagaaaggtagcacat

SEQ ID NO: 543446 - DNA, 98 bp, Homo sapiens
gacctgtggaccctgatgcaggacagccaggtccgagtggacagtggcatccaaccaggaagtgatattagcatttattatgatcctatgatttcaaa

SEQ ID NO: 543447 - DNA, 83 bp, Homo sapiens
agacggaggtgcccaaggtcagaaggaagcaccacacagaggttcgatacaagaggctgttttcctagcgtggcttgctgcct

SEQ ID NO: 543448 - DNA, 119 bp, Homo sapiens
ttgacatttaattttagggtcctttatatagaagggagagtaggtgggaatggaagtggccccacatctcaaagaaaccctaaataagaacttttttgacttcctccttacgttcaaac

SEQ ID NO: 543449 - DNA, 88 bp, Homo sapiens
tccttaacttcctgcttgcagcgtttgatccatacaaatacttggaacagttggcagctgaggagcacgagaaggagctgagaagccg

SEQ ID NO: 543450 - DNA, 75 bp, Homo sapiens
gttggaagaggacgtcaccgtccctgggacgctcagcggctgcagttgcagtaccatgcaggactagcatctggc

SEQ ID NO: 543451 - DNA, 145 bp, Homo sapiens
ggaagggccacccaggggtcccccacttcccgcttgggcgcccggacggcgaatggagcaggggcgcgcaggcaatgccaccgtagataagttggaggacttcatcaacaacattaacagtgtcttggagtccttgtatattgag

SEQ ID NO: 543452 - DNA, 100 bp, Homo sapiens
aagccgatctctctctcgttcaaggaagcgcaggctgagcatgcacggccccacagggcactgcccccacccccgggtcctgcccaacctggtggccgtg

SEQ ID NO: 543453 - DNA, 100 bp, Homo sapiens
tggctctcaacttattcccttcaattcaagtaacaggaactttatattgctgttggaatatctggagccatccaacatttagctgggatgaaagacagca

SEQ ID NO: 543454 - DNA, 75 bp, Homo sapiens
cggagaccggcgtgggacagccacctggagcgcagctgccaggcacaacgtgtttgattgctctgctatcagata

SEQ ID NO: 543455 - DNA, 75 bp, Homo sapiens
gcacacctggatccaggataacggaggctggccaaaccaaacaggaagcttacttttctctacctagccaatgat

SEQ ID NO: 543456 - DNA, 50 bp, Homo sapiens
ggtgaggcttcccgtcatattccagtcatcaagagttcatataactagag

SEQ ID NO: 543457 - DNA, 98 bp, Homo sapiens
gaggacggcgagaaggcggcgcgcgaggtcaagctgctgctgctcgacaagttggatggcttgaggactggtactaaaaggaaacgtgactgggaggc

SEQ ID NO: 543458 - DNA, 82 bp, Homo sapiens
tgccgctcctaagcctgcacagccgcggcggcagcagcagtgagagccctgccaggagcccggaagtgggtccgcacgagac

SEQ ID NO: 543459 - DNA, 98 bp, Homo sapiens
agctgaaaagtgcctgcaatttgccatttatttgtaataaggccgagtacagatgctgccccaggcggtgtgcctgctgcatgcgctgctggagaagg

SEQ ID NO: 543460 - DNA, 118 bp, Homo sapiens
gccgccgcgtcttcccggtctcctttcccggccgcacagggctgcagaagatgtcaatgttactttcgaagatcaacaaaagataaacaaatttgcacggaatacaagtagaatcaca

SEQ ID NO: 543461 - DNA, 99 bp, Homo sapiens
gttaacacttcctagataacggtttccgttactatggcaatgacggcagggactacaacaacctttcctatgagcaaccatacccgggaaagagtgact

SEQ ID NO: 543462 - DNA, 75 bp, Homo sapiens
caagacctctccccctcggaggcggcgggcggaggcggcgggtgagaagccctaccactgcaactgggacggctg

SEQ ID NO: 543463 - DNA, 100 bp, Homo sapiens
gtcactgagaccatttgcaagaggctcctggattatagcctgcacaaggagaggaccggcagcaatcgatttgccaaggagttcatgatcaagtgttgcc

SEQ ID NO: 543464 - DNA, 83 bp, Homo sapiens
agcatctcataatctatcctggggaattcagctgcctcccagggtgaatacagcaagaggtggaaacatacagaagaagcaag

SEQ ID NO: 543465 - DNA, 71 bp, Homo sapiens
gacagattttggtctgagtaaggagtttgtggctgatgaagatgaaattgattctgcagtaaagatgttgg

SEQ ID NO: 543466 - DNA, 100 bp, Homo sapiens
tgaagccgcctttcgggggctccgcgcccagcgagcgcttggagctgcacgtggacgcaggggaaatgctgtctgtagctgagcacttcctggagcagca

SEQ ID NO: 543467 - DNA, 100 bp, Homo sapiens
tggaaattgtgtgtccatcttggttttgagctctgctctgcctgtgatgtcgagaacactgggagaaatacgaatgtgctttaaagcgagcaagtattaa

SEQ ID NO: 543468 - DNA, 82 bp, Homo sapiens
cggtaggagcctccgtgcggagaccactgttcaaggccacaggtgatgtgtccaatctagatcccaacttctcatttgaagg

SEQ ID NO: 543469 - DNA, 100 bp, Homo sapiens
actgctgaagcagctcccgcgaggaccacccgttggaaaatggatataccttatttgattatgatgttggactgaatgatataattcagctgctagttcg

SEQ ID NO: 543470 - DNA, 60 bp, Homo sapiens
ctaagacgccaggactccctggaagcctagaaatgtgtgcagttcgtgcagccacagaag

SEQ ID NO: 543471 - DNA, 50 bp, Homo sapiens
ggggccctacggccgcccgccaccagacccctgaggagttggatgactct

SEQ ID NO: 543472 - DNA, 100 bp, Homo sapiens
ctaccagccatggctagacctgaaaatttcttccaaggttgatgcatctctctcagaggcactgtttagtacagctgttgaaatgaagataaaacaatca

SEQ ID NO: 543473 - DNA, 75 bp, Homo sapiens
tccctcaccgccaaggtcctgcttcaccgaacagcacctcaggagcagacaactcctaaaagacccgcaagtgct

SEQ ID NO: 543474 - DNA, 75 bp, Homo sapiens
tccagctatatgtcagaatggttttcaagctggacgagccccatctgctttgatatgattgaagaagcatacatg

SEQ ID NO: 543475 - DNA, 100 bp, Homo sapiens
cttacctatttgatgaagatgtcttttgaaaggtgtactgcaaggaacaaaatgtttgtaaattctccttttaccaagatatttggagttcttacaacat

SEQ ID NO: 543476 - DNA, 75 bp, Homo sapiens
gcacaatagatctgaagccttgaagattacaccaccaccttcactgtcagatccacttaaagagctttttcgaca

SEQ ID NO: 543477 - DNA, 156 bp, Homo sapiens
gtccgcgcccggcggcggcgggagcccaggagcctgccccgccctggggacgaagagctgcagctcctcctgtgcgggtggaggcaatgcccagagctgtggcagccaccttgcagccgtgaagcaccagtgggaatgacagtcaagagaaccacg

SEQ ID NO: 543478 - DNA, 87 bp, Homo sapiens
cagatgagtcatctgtcactaggcagcaccggaacagtttcacatgcttacccaggaatgctccttgaaaagataatctcctcagac

SEQ ID NO: 543479 - DNA, 100 bp, Homo sapiens
ggccccaaccttacccttttggtaaggcagcttctgtttttttacaaacaaaatgaagactcaaaacgtttggagccaggtgagaatttcaaggattatc

SEQ ID NO: 543480 - DNA, 100 bp, Homo sapiens
taccagacgatgaaagaacatttcctctagtttctggataatgagcaggcacacagcaccaatgttgttatgaattattcagagatcgagtctaaggttc

SEQ ID NO: 543481 - DNA, 75 bp, Homo sapiens
ttgatgatacttgcacggcgctcggatcgtgcagggtaccaccatcttaaggacagaaaagctacaggactctag

SEQ ID NO: 543482 - DNA, 48 bp, Homo sapiens
ggatactcccatgctgccaaagttgaagctttatatcaaactacatac

SEQ ID NO: 543483 - DNA, 75 bp, Homo sapiens
ccattggatttaaaagacagtcctcgtcagcactgactttcagctatggaatcgtcaccttcaggccattcagag

SEQ ID NO: 543484 - DNA, 96 bp, Homo sapiens
acatcagcggctctttgtatgatgacgttctacctacagcgtcctgtccaccatgccctcagactcagaaagcagcagctccctcagcagtgtggg

SEQ ID NO: 543485 - DNA, 75 bp, Homo sapiens
gcagccgatccagcctgcggagcctgtggggcaggaacaacttgatacagagacaagtacaactcaatcagaaac

SEQ ID NO: 543486 - DNA, 96 bp, Homo sapiens
ccctgcggaacctggaggaggtggagttctgtgtggaaggtggcggtggaaatcgcaaaggcaaaagcaagaaatggcggcagatgctccagttcc

SEQ ID NO: 543487 - DNA, 75 bp, Homo sapiens
ccagacgcggcacagagagggcctgggagcttgctgcagcttcagggatcgactacaagaccaccaccatcctgc

SEQ ID NO: 543488 - DNA, 102 bp, Homo sapiens
tgtatctaaacttggcaccaagtatgggggcagctggcattttatgctatgtgggagcctatgtcttcatcacttatgatgactatgaccacttctttgaag

SEQ ID NO: 543489 - DNA, 80 bp, Homo sapiens
ctcctcagaggatcaggcgtgtgtccagttctgggatacctcagacaatggcagcttttggattgaaatatttgctgaat

SEQ ID NO: 543490 - DNA, 107 bp, Homo sapiens
tcccagccacctctgaagttgccaggcttcccaacattcttgtctgtgcttccatgaggcaggctgaacctgcagatatgcgcccagagatatggatcgcccaagag

SEQ ID NO: 543491 - DNA, 73 bp, Homo sapiens
cccaattcctacttcatggatgtgaaatgcccaggataccggaaaaacacccgtggagccggaggtggcaatt

SEQ ID NO: 543492 - DNA, 87 bp, Homo sapiens
cgtgtcctgcaggtattgggagatccacagctaagacaccgggacctcctggaagccaaaaatgggagtgcatccgccccaaccctt

SEQ ID NO: 543493 - DNA, 100 bp, Homo sapiens
ggaacatgcggcaagaggccattgaccgcttcaatgatatctccggagcatttggataatgtgacagttggaatgcagtgatgtcgactctttgcccacc

SEQ ID NO: 543494 - DNA, 100 bp, Homo sapiens
gttaacacctatgaacagtctggccacctctgtattcagcatagctattcctgttgatggtgatgaagacagttaaaagaagatggatgcacagtgttca

SEQ ID NO: 543495 - DNA, 75 bp, Homo sapiens
tttgagagaccgaaaaagaaggacgtatgctctacaagtgagaaggcaaccaaagtgcaggacatcaaaaacaac

SEQ ID NO: 543496 - DNA, 90 bp, Homo sapiens
ctactaccaggtgaaggagaagttttctggatatgccgcagaaggatccgtgccagaagcaagcctgtgagatacagaaatgtttacaag

SEQ ID NO: 543497 - DNA, 90 bp, Homo sapiens
catttcggtgtagaagtggcagcacggcagagctgcttatcatccagactttccaacagttctgacagctttagaaatagataatgcggt

SEQ ID NO: 543498 - DNA, 100 bp, Homo sapiens
ggaaagtttggctgcgcgggttcccccgaagttcaggaagatgttaccgagtacttcagtgaattccttagtgcaggggaacggagtcttgaattccagg

SEQ ID NO: 543499 - DNA, 90 bp, Homo sapiens
acactctgtgcggagactgggcggccggccgacccttcctgtcgctgacggcgactgcgggaggccagcttatcacacagactttcagcc

SEQ ID NO: 543500 - DNA, 75 bp, Homo sapiens
cctgtttgagaaaaggcctaagaattttggcattgtgaaacgctgcagtattttgatttggtcagtgctacggag

SEQ ID NO: 543501 - DNA, 83 bp, Homo sapiens
gaggagaaggaaggcatggaaagttccagccggttcgagagctaggagggccctcctggacccgggagcggaccctggtggcg

SEQ ID NO: 543502 - DNA, 100 bp, Homo sapiens
agcaagaatggcacggtctgcctcagtccaccctgtaccctgggtcggcttgggaaaccaaaaattacacagagtttaatggcatctgtgaacagcacct

SEQ ID NO: 543503 - DNA, 82 bp, Homo sapiens
caggaatcgtcacccggcggcctctcattctgcagctcatcttctcaaaaacaggtgagaagccctaccactgcaactggga

SEQ ID NO: 543504 - DNA, 98 bp, Homo sapiens
cgatggtgacccggttcctgggcccacgctaccgggagctggtcaagaactggataacaaagctgatgtaattttaaagtacaatgcagatgaagcta

SEQ ID NO: 543505 - DNA, 50 bp, Homo sapiens
ggaggagactcctgaccctcagaatgaaaaacaagagctggatctcagag

SEQ ID NO: 543506 - DNA, 82 bp, Homo sapiens
cggagttcgctgcaagtcggcggaaagtttggctgcgcgggttcccccgaagttcagcattttgaaagcgaagcagaagccg

SEQ ID NO: 543507 - DNA, 51 bp, Homo sapiens
ccacaggagtcatgcccagtgtgtgaagatacgtaggtaacctttccagag

SEQ ID NO: 543508 - DNA, 83 bp, Homo sapiens
ttttgcaaagaatccaggacaaaaaggattaggttcaaatggtgaaagacgatgacccctcctggaagcccacttttatcgtg

SEQ ID NO: 543509 - DNA, 101 bp, Homo sapiens
gaccacggcgcagacgcgggcgagctgcggctcggacgccagcggacacgcgggcgaggtgacttcatggtcatgacgattttcttcaatgtgagcaggcg

SEQ ID NO: 543510 - DNA, 51 bp, Homo sapiens
cctttgaattaattatggctgcctacaggattatgaagcggcacttaagat

SEQ ID NO: 543511 - DNA, 83 bp, Homo sapiens
ggcgaggcagatcctgccccgtggccgcggccgtctccctgcctgctccgcttcagcggactctcgctggtctacctgctctt

SEQ ID NO: 543512 - DNA, 100 bp, Homo sapiens
aaagtggtgatgctacttgaggggaatttctgcaacccatagtcaacgattacatgctgtgcctttggctgcaacaagtatgttgattactcaaggatta

SEQ ID NO: 543513 - DNA, 83 bp, Homo sapiens
cgatggtcttcctgctggggctcatgtttgaggttagctttatacgtctacgaatatttactgcacgtaggagcacagaaatc

SEQ ID NO: 543514 - DNA, 80 bp, Homo sapiens
agctcttactgcgggccgctccgacggcggtccatcctgcttctggctgtggtgttcgacaccttcaatgacattgagaa

SEQ ID NO: 543515 - DNA, 90 bp, Homo sapiens
catgggggtgatgaagacagaccctttccagctgtcgacttgctggagaagatgcttgtattggactcagataagagaattacagcggcc

SEQ ID NO: 543516 - DNA, 98 bp, Homo sapiens
gctcactgtagcctcgaaattctgggccgaaatgatccgcctgcctcagcctccaaagtagctgagactacagagtttcgctcttgttgcccaggctg

SEQ ID NO: 543517 - DNA, 100 bp, Homo sapiens
caaaggtgtcaaaacaaccaactctagtgctgctgacccaagggaatacctctgtttggacaatagtgcaagaaatgctccacctgtaagaacagaaaat

SEQ ID NO: 543518 - DNA, 80 bp, Homo sapiens
cttctggtgtcacctcccagggtgactcaactccaggctcttgtcaggatggtgaagctgttcatcggaaacctgccccg

SEQ ID NO: 543519 - DNA, 74 bp, Homo sapiens
ggggcattattcatttctccagctctgaattttaaatccaagctgggtttcatcaactgggatgccataaacaa

SEQ ID NO: 543520 - DNA, 74 bp, Homo sapiens
agcatgagatccaaaggcagggcaaggaaactggccacaagtcatcttccacgatgttgctgtgctgacggata

SEQ ID NO: 543521 - DNA, 90 bp, Homo sapiens
aggtacccaaaccaccggcacagagcaagaataaatactgactttgagtaacggccttgagggtaccatgatcctgaccaatttgacggc

SEQ ID NO: 543522 - DNA, 83 bp, Homo sapiens
cttggactgagtcctgcaggacacagcacaacgtggaagttcttggaatactttccgatgatgtagagactgataccgtagcc

SEQ ID NO: 543523 - DNA, 75 bp, Homo sapiens
cagaataactgtcaagacaacagtgatgaggaaagctgtgaaagttctcaaggtgtcagcagttgagtctttgga

SEQ ID NO: 543524 - DNA, 75 bp, Homo sapiens
cagaaatcgaaacagatacagagatgtaagcccatacttaattcagtgcacaaatgagatgaatgtgaacatccc

SEQ ID NO: 543525 - DNA, 98 bp, Homo sapiens
agttccacaacttctttcccatcgccgctgtcttcgccagtatctactccatgacggctgtggcctttgatagaataaccaagtgctgggaattggaa

SEQ ID NO: 543526 - DNA, 75 bp, Homo sapiens
attttagacatagctggcaagagtattttcgtggcccctccagccagcgtcaggtgcagaatggcccctctcctg

SEQ ID NO: 543527 - DNA, 75 bp, Homo sapiens
gctgcttccaaagctcattgacttttctgctcagaatgaactaaaattgtcggtggtttctttgaaagaaataca

SEQ ID NO: 543528 - DNA, 82 bp, Homo sapiens
ccaagctcggatccctgaatttgatccaggctcaggccacagggtcaccacatacatcgcccacccatggaggcggccggcc

SEQ ID NO: 543529 - DNA, 80 bp, Homo sapiens
ggaatccatgtttcttccaagaagcagttggactaaatgctcttccttcagaggattatccggggcatctactcaatgaa

SEQ ID NO: 543530 - DNA, 74 bp, Homo sapiens
ttccatcttcattcatgactccagacaggagcgagaacccgagcagcgccatgagcaacactaccgtcgtcccc

SEQ ID NO: 543531 - DNA, 75 bp, Homo sapiens
ccgagagctgggccttcgagcagtttggtgaggattcatcaacctccagtatgatgtctgtgaactttgatgttc

SEQ ID NO: 543532 - DNA, 100 bp, Homo sapiens
acgacgagtacgactacctctttaaaggaatgaatctgaagtctgctgcagtaaaacacagaaggctttaaaatgttttcttgcataaaattcaaaactt

SEQ ID NO: 543533 - DNA, 50 bp, Homo sapiens
cgaaagagcactggactccggaagtgcacagccagagaacaacacatcac

SEQ ID NO: 543534 - DNA, 99 bp, Homo sapiens
gatgccagccacttctggaaatggagtgaatggagtggtcagaacttcaccacacttgaagctgatatttggagttcttacaacatggcagacattgac

SEQ ID NO: 543535 - DNA, 83 bp, Homo sapiens
ctgggaccgtgcgcgtgcgcctgggggcaccgctgccgttccgaggaggtgcttcccaaggaccgtagatgcctctctagagc

SEQ ID NO: 543536 - DNA, 83 bp, Homo sapiens
gcggacagtatgaggcaagcgcagggggacggggaccagcagctgtcgccgccgctctcagttgttgacctcctgtactggag

SEQ ID NO: 543537 - DNA, 89 bp, Homo sapiens
cgcccgctggccgggctggctgcggccgccctgggccgggccccaccggacgattgctgacagaactggaatctcctgcttggtggccc

SEQ ID NO: 543538 - DNA, 104 bp, Homo sapiens
gcgcattgcgggcggtgaacgagcgcgtgcagcaggctgtggcgcggcggccgcgggcccgatgagagaaagggaaagttaaggatgctggagcagaacaatgg

SEQ ID NO: 543539 - DNA, 89 bp, Homo sapiens
tgacaagattattgtctttgctgacaatgtgtttgccctaaaggaatatgccattcgactgaacaaggtggagtgcaatggcacgatct

SEQ ID NO: 543540 - DNA, 82 bp, Homo sapiens
gggctgacctggtcagattgcccctcaggatggaagacattctggatgagttactgggtaacatggtgttggccccactccc

SEQ ID NO: 543541 - DNA, 83 bp, Homo sapiens
aggatccatctgtcttagcaaggctgtcatcacattactatgcgagtcagaagaaaacatttgaaattaatcccagacacccg

SEQ ID NO: 543542 - DNA, 75 bp, Homo sapiens
cggccgcctggctccccatactagtcgccgaatcctcactatggatgggctcattgaggacattaagcatcggcg

SEQ ID NO: 543543 - DNA, 100 bp, Homo sapiens
ctgggacagcttctccgcctggctgcactgcgtgtgtgtggtgggcttcgacctggagctgggccaggccgtggaggttgctgcttttgctcagaggaca

SEQ ID NO: 543544 - DNA, 100 bp, Homo sapiens
gtacaaagccacaataggagctgactttctgaccaaggaggtgatggtggatgacaggctagtcacaatgcaggccgctttgtagttcagaatgtttctg

SEQ ID NO: 543545 - DNA, 87 bp, Homo sapiens
tggtgctaaccttaagaggagctttgatgtccgagagccatgcactgaagtattatttatagatatattccatgaatataatcagac

SEQ ID NO: 543546 - DNA, 101 bp, Homo sapiens
ggagtaggtgcgggtgaagatggcggcagccgaggccgcgaactgcatcatggagactgagcgtgcctaccaaaagcagccgaccatctttcaaaacaaga

SEQ ID NO: 543547 - DNA, 87 bp, Homo sapiens
gtgagataccacccacttctgatacaaagtcagatactgcaacagatgatggtggtgctaccccagtacaggatgaacgggattcag

SEQ ID NO: 543548 - DNA, 100 bp, Homo sapiens
ttcctggggttactgtaaatgggaaggacaggcagagctaaacaaggacatggatttgattgacatactttggaggcaagatatagatcttggagtaagt

SEQ ID NO: 543549 - DNA, 71 bp, Homo sapiens
gagcaggtcctgagcctcgagccgcagcacgagctcaaattccgaggccctcgggaccaaggatcacgtca

SEQ ID NO: 543550 - DNA, 100 bp, Homo sapiens
tgaactcaacttctgaaatttacagaaacaaactacatctcaggcgagaactttcaaaggcttccaaatctgatgctacttctggaatcctcaattcaac

SEQ ID NO: 543551 - DNA, 100 bp, Homo sapiens
caaacagtcaaacttgtgtgctcagttactggcatggcactcccaagattggtatttggtgttggagttccaaatccatatcgattgaggccgttccttg

SEQ ID NO: 543552 - DNA, 75 bp, Homo sapiens
ctggattagaattacttagcagttcttccctgtggaacagtagagacctagtctgccttctttcacaagataatc

SEQ ID NO: 543553 - DNA, 100 bp, Homo sapiens
tcttcacctacgtgtcgctgagccaggaaggcaggtcgctgcctgtgccccagctggtggcatgtcgggccccaggcctgtggtgctgagcgggccttcg

SEQ ID NO: 543554 - DNA, 100 bp, Homo sapiens
gcaataaactggaggagaaaaaaagacttcaagaaaaccttagaagagaagcatttagagagcatcagcaatagaatcaaccctcaaaagcgtattgagt

SEQ ID NO: 543555 - DNA, 98 bp, Homo sapiens
attcatctgtccagcatgactcatccccgggagtgttgagtgctgttacactaccaaactgtcagtgaacccgccgttattaaacgattgattagtgt

SEQ ID NO: 543556 - DNA, 100 bp, Homo sapiens
gctgcccctacagagctctcggcggggggtggaggatgccctcaccgtggtggtggatgacctccgcctgtgctctgtgaagccgtgtgaggacatcgag

SEQ ID NO: 543557 - DNA, 90 bp, Homo sapiens
tgccgccaccagttctgcagcggctgctacaatgccttttacgccaagaatgccagatgagcgtcgctttgctgtcttctccattgctgt

SEQ ID NO: 543558 - DNA, 93 bp, Homo sapiens
ggatttgttaaggattccaagtaactcttatttgaattcaaagaagctttttcactatttgacaaagatggtgatggaactataacaacaaag

SEQ ID NO: 543559 - DNA, 100 bp, Homo sapiens
cccagactcggcttggtcatggctgtgtaatgggggctcagtcactgagcttgtcaaaggtctactcagatgtggccagcggttggatgaagcaatgatc

SEQ ID NO: 543560 - DNA, 75 bp, Homo sapiens
ggagatgtcagcccttcagaaacagtattacaagtacccggaaattaaagaggagctggaggagctggaccgcat

SEQ ID NO: 543561 - DNA, 97 bp, Homo sapiens
gaagcagccgccagttgggatcaaatgtgagcctatggatcaaggtggtttcctagaaacatgattgtttattggcattgatctcacagtctggtga

SEQ ID NO: 543562 - DNA, 78 bp, Homo sapiens
gcagaaccaactcggatattgttgagtttgtgtttaaggagaaactaacaatgaaaacggcctcgttgacggaggaaa

SEQ ID NO: 543563 - DNA, 90 bp, Homo sapiens
tgaactgcacgataaaggaactcaggcgcctcttcttagttgatgatttagttgattctctgaagaccatggcaaaagttataaccaccg

SEQ ID NO: 543564 - DNA, 74 bp, Homo sapiens
gattttttcagggatataaccgactgacctggatagtagttgttcttcaggttcggctttccagtttggcagca

SEQ ID NO: 543565 - DNA, 98 bp, Homo sapiens
atcagtatgaggaaggacacttggaaattgaacaagcgtcacttgacaagcctatagaatcgtggaggtgaagccggtgctgccaagagccatgccca

SEQ ID NO: 543566 - DNA, 100 bp, Homo sapiens
actctgtgcggagactgggcggccggccgacccttcctgtcgctgacggcgactgcgggaggccaggacccgctggggcccagcccctactcatggtgcc

SEQ ID NO: 543567 - DNA, 90 bp, Homo sapiens
gcctatctcaactggatctacaatgtctggaagagctacgaagtgaagagtgtcctcggaaaggaagtggggttgttaaattgttttgtc

SEQ ID NO: 543568 - DNA, 100 bp, Homo sapiens
aaaggactgatttttagaactccacatttgagtcctattttgtaacggattatgatccaaccattgaagattcttacacaaagcagtgtgtgatagatga

SEQ ID NO: 543569 - DNA, 98 bp, Homo sapiens
cactggattgggaaagaccatggcaggctgagtatgagtttatcagctctggtctctacctagtggtgttattgcacttgtgcgaacaaagcttttct

SEQ ID NO: 543570 - DNA, 75 bp, Homo sapiens
agatcttcgagttcaaagagaccctcggaacttacagaatgtctgaaggggacagtgtgggagaatccgtccatg

SEQ ID NO: 543571 - DNA, 114 bp, Homo sapiens
gtgcctcgagcgctcaggatggaggaagactcgatccgcctgcctgcgcacctgcatgggactgagtatgggctgagtgaagctgacatggaggcctcctacgccacagtgaag

SEQ ID NO: 543572 - DNA, 87 bp, Homo sapiens
tggacccacgacggcaggaattattggaggccaggtttactggagtaggtgttagtaagggttccaagcttgaactacccttgtggc

SEQ ID NO: 543573 - DNA, 101 bp, Homo sapiens
ctcttcagataatcagagtggaggaagtacagccagcaagatggcatagaatttgcttttaaagagcctaatccgcaaggggagagccatccacctttaaa

SEQ ID NO: 543574 - DNA, 96 bp, Homo sapiens
gaaaagactgactaaaaagaaccatgcactgtaactctcaagtatacaggaatattgttattagctatgatacttgggtccatagtaatgatgttg

SEQ ID NO: 543575 - DNA, 98 bp, Homo sapiens
aaaaatgtaaagacagagaaaggcatagacggaataactgaagtgaagtgatggactccgatttggagagtagtaagacgtgaaaggaatacacttgt

SEQ ID NO: 543576 - DNA, 98 bp, Homo sapiens
gctgcgcgtggctggggaggcgaggccggacgcacctctgtttgggggtcctcagcatccaccagctgaggaacaaagtatcagaggagcatgatgtt

SEQ ID NO: 543577 - DNA, 90 bp, Homo sapiens
ggaagacttgtaacctggagaagagaatgaaactagtgatcgagaagatggcctccccaaaggacatcatgtgacagactctgagaacga

SEQ ID NO: 543578 - DNA, 85 bp, Homo sapiens
gatgcataggtactttttctgccatgaatttgcattcaggactcagggagtacacacttaccagaatttctacttggataacaga

SEQ ID NO: 543579 - DNA, 82 bp, Homo sapiens
caaccagcatacctgcatccaccgctccaatggacactcccagttgccgggatgacctgctgagtgactacttccgaaaggc

SEQ ID NO: 543580 - DNA, 83 bp, Homo sapiens
aacaagtgtgtgcatctggctgttagaagaattcatgctcatccggcttcctccagattaggccgagcacttgctgagctatt

SEQ ID NO: 543581 - DNA, 100 bp, Homo sapiens
cagagaaagtcctcgctcgtcaccagcaagcttgcgggatttggcgtgtagaaaacaatggtaggatccaagttgaccaaaactcatatggtgaattcta

SEQ ID NO: 543582 - DNA, 83 bp, Homo sapiens
cctgcatgtgtgtgcgcgcgaaggagcggaagaatggcagtgctcaaactcaccgaccagaaaccaaggtgtatgttggtaac

SEQ ID NO: 543583 - DNA, 74 bp, Homo sapiens
cgacaagggtgttcccgaactagagtgggcaatgataccgtctttatccaagttactctgccccatggcccaag

SEQ ID NO: 543584 - DNA, 75 bp, Homo sapiens
ctagagtgacacgttatctgagttctggatggaggtaaaggaatatcacgaacatcgatatattgaactcttctt

SEQ ID NO: 543585 - DNA, 83 bp, Homo sapiens
ctcaaatctcaggaatttgttgaaacggggctttgctatgatactcgggcatgcccaagagaatcgtaaatgcaaaaattgct

SEQ ID NO: 543586 - DNA, 82 bp, Homo sapiens
cttgcctgtgcgcgcgtgcgcggacatggcctcaaacgatgatatcatcaagttgaatcgaaaggaagggaagaagcagaat

SEQ ID NO: 543587 - DNA, 100 bp, Homo sapiens
cttgtttaatgactttggtgccctcaacatctctcagagacgaaagtgagaagcgccaccttcaagtgaacgtcaccaacccagtacagtgcagcctgca

SEQ ID NO: 543588 - DNA, 100 bp, Homo sapiens
actcgatgccaagaggactcagactgtggaacttccgtgccccccaccctcaccaagtgccggtggtggtgtgcacattgagccccggtatagacagttc

SEQ ID NO: 543589 - DNA, 100 bp, Homo sapiens
caagggcttcagcaccgcgcccatggcagagccagaccacccagcctccggctgtgacccccagcctcacacctgcctctggttcccgcctggtcctcca

SEQ ID NO: 543590 - DNA, 50 bp, Homo sapiens
agaaaccaaaaactccattttgctttggaaatgaagtgtctgatgaagag

SEQ ID NO: 543591 - DNA, 100 bp, Homo sapiens
tctagacagacaggcctttctagggccagctcttccgaggctccagcctgcttttccgccgggtgtcatcaggatcatgctttgccctggagtaacctga

SEQ ID NO: 543592 - DNA, 90 bp, Homo sapiens
gccggggggcactgcccgcccgggctctgctgtcaataccagcaaatatgcagaaagctatcggatccaaacctatgctgaatatatggg

SEQ ID NO: 543593 - DNA, 133 bp, Homo sapiens
tgggcgtggggagcggcagcggcggtggcggggacagccggcagcgccgcctcctcgcggctaaagaatatttttctcagcacttgggcgagtatgagaatgtactagcagcacttgaagacctgaatctttc

SEQ ID NO: 543594 - DNA, 82 bp, Homo sapiens
gacaacttctatgtcgttgatcaaggggaagtggatgcgagcccacaccttaaccgtgctcttcatcctcacctgtacgctt

SEQ ID NO: 543595 - DNA, 100 bp, Homo sapiens
aacggcgacctcaagaagcagctccacgaaaggcagccgcggatcgccgcgctcagcgacaaacaaatctgaagacagcatgtacacagccattccccag

SEQ ID NO: 543596 - DNA, 97 bp, Homo sapiens
cgactctacagaacaagacgacctttaagtttcccagagaaaatgagatgctgatgttgaagacgacaccacgggtacaggcatccttcacctgcta

SEQ ID NO: 543597 - DNA, 75 bp, Homo sapiens
ttatgtggctcaaatgattgtgaaatgaaagctcattagcatctacactgaagacgctcctgttcttcacagctt

SEQ ID NO: 543598 - DNA, 117 bp, Homo sapiens
gctgagtaccgcggcgggcgcgagcgaggcgccctagacatcttctccctcccttgcctcagtgaatatggaggtgagaccataccaggacctgcatttaatccagcaagtcatcca

SEQ ID NO: 543599 - DNA, 75 bp, Homo sapiens
aggacatctatgccaacatcttcatcatcaaatgcagccgagagacagagaaggcacagaaaactgaatctgtag

SEQ ID NO: 543600 - DNA, 83 bp, Homo sapiens
catcaagcccgagactttggccaagtaaggggcctggataccaagaagtgactgctcatctaatccataaagctatgttaaca

SEQ ID NO: 543601 - DNA, 73 bp, Homo sapiens
gtggtatcagtggctcctcagggaggcaggtccgaggagctgcaggtgtgactgatgggaatgaagtggccaa

SEQ ID NO: 543602 - DNA, 82 bp, Homo sapiens
ggacaaggtgtcaacaatgtgccgtatacgctcaacggcaagaaagtggaagttgccgtcaaacagatcatcgctggaaaag

SEQ ID NO: 543603 - DNA, 118 bp, Homo sapiens
gagagagcgagctgagtggttgtgtggtcgcgtctcggaaaccggtagcgcttgcagcatgcagcccctgtcaaagggaacaggaagcagtccacggagggtgacgccctagacccac

SEQ ID NO: 543604 - DNA, 80 bp, Homo sapiens
cagcttctcctggagaggcagagcctgtcggaagaggtggaccggctgcggacccagcactgctcagcacgcaggcatgt

SEQ ID NO: 543605 - DNA, 82 bp, Homo sapiens
catcattcacccatactgactagtttcacatctctttgtttttcagaagaagtgaagtcaagatgaagaaccatttgctttt

SEQ ID NO: 543606 - DNA, 90 bp, Homo sapiens
gaatattaatatgaacaagcatcttgtcactggttctgttcaagccaaggtactgaaatggaagccagcagacctgcagaacttggctcc

SEQ ID NO: 543607 - DNA, 100 bp, Homo sapiens
gaccgggctggagccggacgagctgtcggcctgactggctcatggagaaagcctacctaagaatgaagccgggacccggcagaatggctcctgtgaagaa

SEQ ID NO: 543608 - DNA, 75 bp, Homo sapiens
gggagagcctggggacgacttttacatcatcacggagaggtctgcggggtttccgagaggctcgccgggatttct

SEQ ID NO: 543609 - DNA, 75 bp, Homo sapiens
ctgctctgaagatcctgccctgccctggcgtgagtgcatctccatccacgttggccaggctggtgtccagattgg

SEQ ID NO: 543610 - DNA, 51 bp, Homo sapiens
ttgcgagaacaagcacagtcctgccgggagggcctgaggctatggcaggag

SEQ ID NO: 543611 - DNA, 75 bp, Homo sapiens
gaaaagaaagatgcagaggaagaggaaagcgaactgggtgataaaagaaaatgtggctgaagttacccgaagttc

SEQ ID NO: 543612 - DNA, 100 bp, Homo sapiens
gcgccgggacctggaggggacgctggggccgaagcagcatgtgacaccgaccagtgaatgaactcattcttaaacagaagcaaagatttgaggaaaagag

SEQ ID NO: 543613 - DNA, 100 bp, Homo sapiens
ctagtttgactctgacagtcctcccactaagggatttccacaagatcaaattcgattgtggcccatgcaagcaaggagtaatggaacaaaacgaccagca

SEQ ID NO: 543614 - DNA, 100 bp, Homo sapiens
caacctgacgggtaccttctacatgtgcaaagcagggaaaaattgaggaagcagtgaatgcatttaaagaactagtacgcaaataccctcagagtccacg

SEQ ID NO: 543615 - DNA, 75 bp, Homo sapiens
gtggttggaaatggcacctatggacaagtctataagggcgccaatgcttcggcattagagaaagagattggtcca

SEQ ID NO: 543616 - DNA, 96 bp, Homo sapiens
cggtttcctggacccattccgactcagctacacttctggaaaattcagtatggacagtctccgacttaggatttttcaactttaggatggtgtgaa

SEQ ID NO: 543617 - DNA, 100 bp, Homo sapiens
acgtgtactttaccaacgagctgaagcaggaagccagttgagggaagttctccatgaatgtacgtcacaatgatgatgaccgaccaaatccctctggaac

SEQ ID NO: 543618 - DNA, 116 bp, Homo sapiens
ggtgagctggagaacctgaagtagcaaaggcaagaaggcaacgacgttccatctgtggaaggacctaccaaccagattttatttggagagaagcaagcatctttgcctctttggag

SEQ ID NO: 543619 - DNA, 100 bp, Homo sapiens
cgcacgggcgggcggccgggagccatggagcgcggccctggggcccgggggcgcgggccggggtggtttggaagaggacagttgccctttattctggcgg

SEQ ID NO: 543620 - DNA, 75 bp, Homo sapiens
gaggaggtgaaccggctcacggagagcacctaccgggttcctatgcaggggcagtggttgccatgcccctggctg

SEQ ID NO: 543621 - DNA, 101 bp, Homo sapiens
ggaccggtgtctggcggatgcggtcgtgaagataggttaaaaggactactgactcaaactctgcctcttgagttcatggttcaccacttccagcctggtga

SEQ ID NO: 543622 - DNA, 74 bp, Homo sapiens
gtgctcagtacaaactgctagttaccaagctgaagcacttccagctccgcctgaaagtactttactaattatct

SEQ ID NO: 543623 - DNA, 100 bp, Homo sapiens
tctccactttcgccagcccgtgccgcgagcgcggcctgcaggagacagccctcagcgcctttttccaggagaccaacatcccctacagccaccatcacca

SEQ ID NO: 543624 - DNA, 100 bp, Homo sapiens
gggcttccaagctacttggagtagggacaaaatatcttggctcacgtatttaagagcctgaatattccagctgtgttctcatttcacccaagacctttgg

SEQ ID NO: 543625 - DNA, 100 bp, Homo sapiens
gttattgaatatcaagaggaggagttgttgctgcattaatactacattgtcaaagacaaagacgaacatgagacatgcgatatgagttttaaaaggagag

SEQ ID NO: 543626 - DNA, 100 bp, Homo sapiens
ctcttgtcagacttaactaagcagatttcccgagactacggtgtgctgttagaaggttctggtcttgcactaagttcttccccaacggctacgccttcac

SEQ ID NO: 543627 - DNA, 96 bp, Homo sapiens
ggccacctcctccgcggacgccggggagaacccagggcagagcatcaaccccaagttggcgggcctgattgggcggcacgggccccagaacaagca

SEQ ID NO: 543628 - DNA, 88 bp, Homo sapiens
gagccgcagtgggtcccggacaaggagctctccctgtccagccgcctgcagctgaccctgtaccagtacaagacgtgtcccttctgca

SEQ ID NO: 543629 - DNA, 82 bp, Homo sapiens
gagtgcagtcatgggccaccgcaggtttggtgcacctcgatttggaggaagtagggcagggcccttatctggaaagaagttt

SEQ ID NO: 543630 - DNA, 100 bp, Homo sapiens
tgggggacctgtacagcgacctccgggacggacgcaacctgctgaggctcctcgaggtgctctcgggagagatactggtatgccgagcagacagctggag

SEQ ID NO: 543631 - DNA, 146 bp, Homo sapiens
gcagctcctcctggaaaaagcaagctgaagacatcaagaagatcttcgagttcaaagagaccctcggaacgaatgtatcctgtcaggtataatgtcagtgaatggcaagaaagttcttcatatggatcgaaacccttactacggag

SEQ ID NO: 543632 - DNA, 80 bp, Homo sapiens
gctgcggcagagcgtgtctgaggtggtgcgcggctccgtgctcctggtgaagaacgaggtggagaagctcccccgacagc

SEQ ID NO: 543633 - DNA, 74 bp, Homo sapiens
cgaacaccagcttcccaggacagaattctgcagggaaaggtggcccagacagcgtgtatgtcagcttgcaagca

SEQ ID NO: 543634 - DNA, 83 bp, Homo sapiens
cgtgtgtggagacaggggcttttatttcagtcagcccaaggccaaccccactgtcactctgttcccgccctcctctgaggagc

SEQ ID NO: 543635 - DNA, 82 bp, Homo sapiens
gggaagagatgatttctccatcctgaacgtgcagcggaattctgtggccacactgcgaggagatcggttctgggtcggaggc

SEQ ID NO: 543636 - DNA, 126 bp, Homo sapiens
acaaagaaattaatcgattaaggcagaagatacaggcagaacatgctagtcatggagatcgagaggaaataatgaggtcaactttgtagtgtgccaactctttgccttgctagcagccatttggtt

SEQ ID NO: 543637 - DNA, 89 bp, Homo sapiens
ggataactaccgatttgcacatacgaatgttgagtctctggtgaacgagtatgatgataatggagagctctcggactctaacaaggaga

SEQ ID NO: 543638 - DNA, 97 bp, Homo sapiens
ggctctccgccgtccccagccctgcctctccctgggctctgatatcccgcccaggtacccgttccaagccctgccaccgcactacgggaggccctac

SEQ ID NO: 543639 - DNA, 95 bp, Homo sapiens
ctcggctgcgggaaatcgggctgaagcgactgagtccgcgatggagggtgatgctggtttgactggacgcaaaatcattgtggacacttatggcg

SEQ ID NO: 543640 - DNA, 58 bp, Homo sapiens
caaatcttctccctggacctcgtgcatacgggtgtgggccgaagatatgctcatgtgg

SEQ ID NO: 543641 - DNA, 98 bp, Homo sapiens
ttaagctcagcactctctaaaggagcaacagtttacagcccttccagatacagctaccaggtcctaggcctacttacaagcctccagtctcaaattat

SEQ ID NO: 543642 - DNA, 74 bp, Homo sapiens
aacgttcaaccatgctcggtcatctgtggcagtatatcaagatgcaaccttaaaatcagtgacaagaaacattc

SEQ ID NO: 543643 - DNA, 120 bp, Homo sapiens
attgggctgaatgactctgggggagcacggatccaagaaggagtggagtctttggctggctatgcagacatctttctgtgtgctggagaagagaaacgagttggcacacgcacagtgttt

SEQ ID NO: 543644 - DNA, 52 bp, Homo sapiens
ccaggaccaccaaaaataactttggctggcctgaagaataagtagtgaaagc

SEQ ID NO: 543645 - DNA, 101 bp, Homo sapiens
ccattctggcttttgtctctggcatcttcttcatactatcggagccttggctgcccagttgccagtcctaccatggtcggaggtaaccttcctggctccag

SEQ ID NO: 543646 - DNA, 100 bp, Homo sapiens
tttgaagttgatgtggaaattgccaaacaatctgtgactattaagaccatgttggaagccactatcgaaaacgatcggcatcccggggtcgctctggaag

SEQ ID NO: 543647 - DNA, 74 bp, Homo sapiens
tcgacgtagttaaagcccactagcctaaagccgggcggactgcgggcagcccaatggatccaatggtgatgaag

SEQ ID NO: 543648 - DNA, 98 bp, Homo sapiens
aagaagtgccataaactcgtcacaattgaatgtgggcggcattctttgccacagacagatgcaccatcaggaatggaattacagtcatggtatcctgt

SEQ ID NO: 543649 - DNA, 82 bp, Homo sapiens
ggggaccaagctggagatcaaacacttgccttcaaggtgtgcaagtaaggacttatctccagaaaagaacacttatgaaaca

SEQ ID NO: 543650 - DNA, 75 bp, Homo sapiens
gcctttgagcggactcccttttaagcaccctggaggagaagaggttctgctggaacaagctggtgtagatgcaag

SEQ ID NO: 543651 - DNA, 80 bp, Homo sapiens
gaaaagggtcctcctgctcacagtgtgaataacagttggatatgtcaagtgaccagatagctgccaatctgcaagcagtt

SEQ ID NO: 543652 - DNA, 100 bp, Homo sapiens
agacacctgagcagtttatcacacaagacttttgagaatcatcaaccttcttgtgaatgtggaggctgtggacccacgaggtcgaacattattgcatctt

SEQ ID NO: 543653 - DNA, 75 bp, Homo sapiens
gctttttagaattgcacttggaggacaaggaccttttttctatcagtgcttatgtttatgctcagaaaccacaaa

SEQ ID NO: 543654 - DNA, 90 bp, Homo sapiens
ggtgaagctggcggagcaggaggatgggcggattggagaatccatgttgaccaaatgcaccagcacagaagtggaattgaatctgctcta

SEQ ID NO: 543655 - DNA, 75 bp, Homo sapiens
tagaagacctgatcgaaaagatctacttggatatctcaatggtgaagcgtgaaaatggctttgtaaagaagtttg

SEQ ID NO: 543656 - DNA, 100 bp, Homo sapiens
tatgcccaccctccaactttgcgacggaaatgtgtcatcgaaagccagctacatccgatactcccagatctgtgcaaaagcagtgagagatgcactgaag

SEQ ID NO: 543657 - DNA, 50 bp, Homo sapiens
tgcagaacctcggccccaaggacaagaacactctgctccagccaaggtgg

SEQ ID NO: 543658 - DNA, 104 bp, Homo sapiens
tgcccagttcgctagtcaaacctgtgagttcaacatgatagagcagagtggaccaccccatgaacctcgatccaattctggtacagcagttgcgccggacatac

SEQ ID NO: 543659 - DNA, 75 bp, Homo sapiens
tggtgaatatcgaagaaaggagaacggtatacattatggtgccgagtggtaacatgggagtgtttgatccaacag

SEQ ID NO: 543660 - DNA, 75 bp, Homo sapiens
gtttctggtcactccccaggattatgcgcgatactaatggaccatactaccaaggaccagtccacctgaaccaca

SEQ ID NO: 543661 - DNA, 100 bp, Homo sapiens
ttggtctgctggtgggactcaatgttctcgatgccaatctctgcttgaaaggagaagacttggattctcagggttttcagagaaagatgctgatgaggtg

SEQ ID NO: 543662 - DNA, 115 bp, Homo sapiens
ggctgcagagacaggcgttcgaggagatcatcctgcagtcctcccctggtgaagacacaaactgtcaccatctcagataatgccaatgctgtgaaaagtgaaatcccaaccaaag

SEQ ID NO: 543663 - DNA, 71 bp, Homo sapiens
cggcggggggagccggagccgcctgggatgttcagtgctggagaatctggtaaaagcaccattgtgaagca

SEQ ID NO: 543664 - DNA, 82 bp, Homo sapiens
ctccacctgaggcagatcttcctaggagccctggaaacttgacggagagagcattcacagctctgatggagggcaaaatcaa

SEQ ID NO: 543665 - DNA, 90 bp, Homo sapiens
ggtcgggccgggcaatgcctcgcgggcgcaatgaatccgcggcagtgccctgcaggagtcattaaatcaaaacttcatgctgatcatcac

SEQ ID NO: 543666 - DNA, 50 bp, Homo sapiens
gccagatccacgccaaccacgaggtactgtccacaccatccttgccagct

SEQ ID NO: 543667 - DNA, 49 bp, Homo sapiens
ggccgcggcggcgcagggcaaggaaggaatagccaggccagaagaagga

SEQ ID NO: 543668 - DNA, 100 bp, Homo sapiens
caagatttgaccatatctgttttgaggattcattatgaacaaagaagtctcccaggctgaagggtatgtgattggcagctgtattaaacacattccaatc

SEQ ID NO: 543669 - DNA, 100 bp, Homo sapiens
ctccactgccgtcaactcctgttctcctcagagcctgatcataggtatattgaactgttcctgaattcatgtccaaaaggaaaataagactctaggggct

SEQ ID NO: 543670 - DNA, 100 bp, Homo sapiens
ttgtagccataagtggacttgccaagaagcttgagagaagaaaaatttcagaaaaattgtctcaatttgactagaatatcaatgaaccaggaaaactgaa

SEQ ID NO: 543671 - DNA, 50 bp, Homo sapiens
acatcagccacgcatctgaccttgttgttgcagagtgggcaggatcttaa

SEQ ID NO: 543672 - DNA, 75 bp, Homo sapiens
agccccgaagatgcagagttcattgttgccaagctgataccccaatgtccttctttgactttgtggttgatcctc

SEQ ID NO: 543673 - DNA, 90 bp, Homo sapiens
ctggatgagggggaagggcctcaaagccagaaggtattcagaaacgtgaagccagcaattgtttcgcaattcggcattttgaaaacaaat

SEQ ID NO: 543674 - DNA, 83 bp, Homo sapiens
tgtcaccccgactcaacgtgagacgcaccgcccggactcaccatggaacaagatcactcaaggtgaaggataatctactaata

SEQ ID NO: 543675 - DNA, 75 bp, Homo sapiens
gggtgaaggacctgggcagcctcaatggggtcccgggcctcctccgagagtgaattggatgatgaaggcccctgt

SEQ ID NO: 543676 - DNA, 100 bp, Homo sapiens
cagaaacacagtatatttctgagcccagagttcatgatcaagtgttgcccacaccaaatgcttcatccagagtcatagtacatgtggatctggattgctt

SEQ ID NO: 543677 - DNA, 75 bp, Homo sapiens
gctgcctcggcccggacgcgcccgcgcccccgcggctggagggtgacaaagaaccggcgctgcaaactgctgccc

SEQ ID NO: 543678 - DNA, 100 bp, Homo sapiens
aggcctccagcaggacctccgccctcctctccggctttgccatgaggagcccaaggtgggcatcaagaccatcaaggtgtactgccagcgcatgcaggag

SEQ ID NO: 543679 - DNA, 90 bp, Homo sapiens
gtaagacagccaagaaaacaggaagagggttggaggcaaagttccgaatagggatgaggcatacgtggtgcgctacaaggaggagtttga

SEQ ID NO: 543680 - DNA, 100 bp, Homo sapiens
tctatatggtacaggatattgtttcaactgttcaaaacgtcttggaggaaatagcttcttttggagaaaggattaagaaattatagcatttgatgagctg

SEQ ID NO: 543681 - DNA, 97 bp, Homo sapiens
atcgagccggcccagcttctgaagggagatgtcatggggtcgggccccggctcagtggtcccaggcagctcgggtgtcggaacccccagacagttca

SEQ ID NO: 543682 - DNA, 87 bp, Homo sapiens
agccggagtgagaagcaagaaggccctggacacagcaatatctctgggctttcacagttgccttgccaactaatacgacctcatcga

SEQ ID NO: 543683 - DNA, 90 bp, Homo sapiens
ccccaatgactacaccctgtccttctgactgcttttggcttctggatgccctcctccagtacacatcgtatggggtgacaccgcctagcc

SEQ ID NO: 543684 - DNA, 100 bp, Homo sapiens
agaggcggcgccgctcccaagatgtcgcagacggccatgtccgaaacctacggatatcaatgcttacaattgtgaagagcccacagaaaagttacctttt

SEQ ID NO: 543685 - DNA, 82 bp, Homo sapiens
agacgctaaacgtgccctactctgccccgggggagaggaacagattatcagtctggtcaatcagatctgcggcaaagtgtct

SEQ ID NO: 543686 - DNA, 52 bp, Homo sapiens
cccaccagagggcgccactaaactggttccatgccattgcagtgtcaactag

SEQ ID NO: 543687 - DNA, 82 bp, Homo sapiens
ggcagatatcgaggtggatggaaagcaggacctcagcatggccctgccctcagggcaggtctgccacgaccagcagaggctg

SEQ ID NO: 543688 - DNA, 82 bp, Homo sapiens
gaagaccgcgcgcagggcctgcagcgggagctggacggcgagcgcgagcggcgcgagaaaggcacggccgagcagatgagga

SEQ ID NO: 543689 - DNA, 100 bp, Homo sapiens
tgcactccgcacctcggggacattattgcgcgtggaacggctgcttttggaaggaagatgatccctatgatcttgaagatgtttctgcacagaaatgagg

SEQ ID NO: 543690 - DNA, 98 bp, Homo sapiens
tgttgctgcaacatagagctgacattaactgtcagggcaaatccagacagaacctttgacttggtgttgaaagtgaaatgtcatgcctctgaaaatga

SEQ ID NO: 543691 - DNA, 75 bp, Homo sapiens
atgcaatgtcacttacaacattaatcagatactgcatttaaggctgagaatcaggctgaaagccgggcagcagtg

SEQ ID NO: 543692 - DNA, 75 bp, Homo sapiens
caggaggacacgctgcagttggccttcatcgacttgagacaagtgctttacaaggccaagtacggtccaatgtgg

SEQ ID NO: 543693 - DNA, 101 bp, Homo sapiens
ctgctggagagttgaatgccagccaccagccatggtggaatctggtgtgtgaggacaactggaaggtgcccctcaccacctccctgttcttcgtaggcgtg

SEQ ID NO: 543694 - DNA, 100 bp, Homo sapiens
cttgtcgggcgatgtcgcaagcagcttcattgacttcctgcccctaaaatggtgatgatgaatgtcttgaacaaaaaccagctcagcccggtaggaaatg

SEQ ID NO: 543695 - DNA, 75 bp, Homo sapiens
cttggcaaaatcgagcgggccattgaaaaaaccgggaagatcctgacggagttcctccagttctatgaagaccag

SEQ ID NO: 543696 - DNA, 76 bp, Homo sapiens
ggaggagtacgctcgggagccctgcaggagcattggtttgaaaaggccctacgagacaagaagggcttcatcatca

SEQ ID NO: 543697 - DNA, 89 bp, Homo sapiens
aaaagcgcactgacaatccagctaatccagaaccactttgtagatgaatatgatcccaccatagagcctgagaaatgccagtggcctga

SEQ ID NO: 543698 - DNA, 100 bp, Homo sapiens
tcgggaccggcaagatggcggcgcggacagcgttcggtgctgtgtgccggcgcctctggcagcaggcgcggggcgaaggagctgctagaacaatgctgag

SEQ ID NO: 543699 - DNA, 51 bp, Homo sapiens
caagactgggcccattgggaagaaggataatatccctgttcacttttgccg

SEQ ID NO: 543700 - DNA, 88 bp, Homo sapiens
ctttgatgattttaacctggaggatgcagtgaaagaaacttcctcagtaaagcgatctctcaccccgtcactcagggtggcgcaatca

SEQ ID NO: 543701 - DNA, 76 bp, Homo sapiens
aggaccagattgctctggtggagagggggcgtcttcactcgaggacagctgggcctgatagacatcatcttccagt

SEQ ID NO: 543702 - DNA, 49 bp, Homo sapiens
aactcctctctgttaatggagtggagaaaatgctgagaagcttctgcag

SEQ ID NO: 543703 - DNA, 100 bp, Homo sapiens
caggggctgagctggctgggcaagcgcgggccgcggaggaggtctcaggacacgatgaggcgagtggtacgacagagcaagtttcggcatgtatttgggc

SEQ ID NO: 543704 - DNA, 50 bp, Homo sapiens
ccccactcctgggccgtccctgaaggctccactttgaggctctgatgaac

SEQ ID NO: 543705 - DNA, 93 bp, Homo sapiens
ttcagttcagcgcttttgcctgcagttgaggctttatgggccggaagcagctggaaaagactcagaaatcttcacagtgaatgggattctggg

SEQ ID NO: 543706 - DNA, 100 bp, Homo sapiens
actcatcattccagaggagggtaaaaggctgagaagcttaaggtggtaataagctgcagtcaacaggaaataaagcagaagacataaaaggaaccgaatg

SEQ ID NO: 543707 - DNA, 74 bp, Homo sapiens
ctccgacaagcagacggatctcttcgtgctgcgggaaaggtatcaaaaagccattcacagaggtcatccgagcc

SEQ ID NO: 543708 - DNA, 51 bp, Homo sapiens
caccagtctcgactggattacaattggagattcctgtcaacgtccgattct

SEQ ID NO: 543709 - DNA, 98 bp, Homo sapiens
caagcatgtggatgtacatctagttcaactaaagtgaacagagtatctgccaagcccgggcttccgtgatggtctacgatgacaccagtaagaaatgg

SEQ ID NO: 543710 - DNA, 100 bp, Homo sapiens
atgagcaggaatgttttgctacaaatggaggaggaggaggacgacgacgatggggatatcggtacactgaggaggggacggctccgtcttcacattgtgc

SEQ ID NO: 543711 - DNA, 122 bp, Homo sapiens
ctgggggatgacggctccctgctgttcgagtacctgcccagaggggcccactcgctgtcccataacgaaggaggcccaacttcattcaataaggagcctgacggatttatcccagacggtag

SEQ ID NO: 543712 - DNA, 82 bp, Homo sapiens
cttcattgacatcctgctcgacactatcaggattttttatcaagcagaaatgcatcgaacaacgagaatcaagatcactgag

SEQ ID NO: 543713 - DNA, 100 bp, Homo sapiens
aataccaactcacctacaaagattttaccaaaaaccttaggaccaataaatgtgaatgttggaccccaaatgattgatgaagttgctaacattaatgaca

SEQ ID NO: 543714 - DNA, 80 bp, Homo sapiens
gggccgtcggtcgccgccatgacagcgagcgaggcggagatctcttccgttccctgctggcagttcatcagctggatcag

SEQ ID NO: 543715 - DNA, 147 bp, Homo sapiens
tggccaaaatggggattacagagtataacaatcagtgccgagcaattgtgatgagatattctgctgagtggaagtgtaaacaggaacatcgataagtagtgtaaaaacttgcacaatgaaatccgaagccaaggatggagaggagga

SEQ ID NO: 543716 - DNA, 100 bp, Homo sapiens
ggaatggcaattttaggtcctacgtttaccctcgatgctcttgttgaatgtcttgtgattggagttggtaccatgtcagccgtaatcctccaccagggac

SEQ ID NO: 543717 - DNA, 50 bp, Homo sapiens
cctcaccgttctgcccccagaactagacctgatggccaaaagaaaggaag

SEQ ID NO: 543718 - DNA, 100 bp, Homo sapiens
gggagcccggccggagctgggtctggagacgccgtggcagcctgaacggagtgtgcgacggattgggaggtcttcaatgaaatttatccagtatggactt

SEQ ID NO: 543719 - DNA, 75 bp, Homo sapiens
gctgcaagaaggccgtgtgcgaggagtgcctcaaagtctacctgagcgcccagatgcaagtattggcattatgat

SEQ ID NO: 543720 - DNA, 87 bp, Homo sapiens
atcttgatgctttaatacagaaccagcataaattgtatgctgctatgcatgaacctgatggagtggccggagtcagtgcaattagaa

SEQ ID NO: 543721 - DNA, 75 bp, Homo sapiens
cacggaaatgccctgtgactggcagcggaaaaggcgaccaccgcttgtgtgggaaaaaagttgttccatgtagac

SEQ ID NO: 543722 - DNA, 75 bp, Homo sapiens
tgatgagcagattgccacatcattcggaaagccgacaggggtcctactgggcaatagacaccaatccgaaggaag

SEQ ID NO: 543723 - DNA, 100 bp, Homo sapiens
cttttttcagagaccttggcgataaagtcatctcaactcgaactccacctccaccttcaccgttgccatttccaacacaagctatccttcctccagcccc

SEQ ID NO: 543724 - DNA, 75 bp, Homo sapiens
ctgaggcctggtaccagaccaagtgtgccagcctgcaggctgccattgctgatgctgagcagcgtggggagatgg

SEQ ID NO: 543725 - DNA, 90 bp, Homo sapiens
cttctcacttggaaattaatactaactttcttcaaagctgcatcatcacagaaagtcaaaaatgtgttgacagtgggaagtgtttcaagt

SEQ ID NO: 543726 - DNA, 75 bp, Homo sapiens
aaggattccaagtaactcttatttggctatgtatgtcaaaaaggatgttcctttgtggcaaaaacatggacggaa

SEQ ID NO: 543727 - DNA, 100 bp, Homo sapiens
aaagaaagctgcgttaatgtttgcaaatgcagaggaagaatttttctatgagaacctggagctggttgaaaaaggcttcagtaacttgaagaaacaaatt

SEQ ID NO: 543728 - DNA, 82 bp, Homo sapiens
gagagttctgcgcttccaggtctccttccagcatccacacaaggtcaaaatgcagatcttcgtgaaaacccttaccggcaag

SEQ ID NO: 543729 - DNA, 80 bp, Homo sapiens
ggccctgagcacgctgctgtgtgagcagcaggacggcggctccctggaccaggtgctgaaagaggccaagaggattcccg

SEQ ID NO: 543730 - DNA, 83 bp, Homo sapiens
gagcgactcatggagctgccgtaagggggatatgagactttctactcggaatatcctgagtgttgcgtggatgtaaaacccat

SEQ ID NO: 543731 - DNA, 87 bp, Homo sapiens
ggtgtgctgctctacgagatgctggttggcgagggcatcatgctggtctacgacatcaccaacgagaagtccttcgacaacatccgg

SEQ ID NO: 543732 - DNA, 51 bp, Homo sapiens
gtttggtctcctgccgtgcccgggcgagccctgctgagacttactgacaaa

SEQ ID NO: 543733 - DNA, 50 bp, Homo sapiens
ccgagagattggccacaaaaaccccaggcttctcacggcattcagcagca

SEQ ID NO: 543734 - DNA, 82 bp, Homo sapiens
ctcaagtacaactcccggcacgagatgaagatgacgccaacagactcggggagaaggtgatcctgcgggagcaggtgaagga

SEQ ID NO: 543735 - DNA, 80 bp, Homo sapiens
cccacggactacatcaggaacggggtgctctacgtcacggagaagagctgctgctcttcctccagaacctgcccacagcc

SEQ ID NO: 543736 - DNA, 83 bp, Homo sapiens
ttgcagatcgggagcgcaaggtcgccctcaaggccatgatcaaaacatcgggcccgggacacccagacagatgagattgtcgc

SEQ ID NO: 543737 - DNA, 48 bp, Homo sapiens
gaggctgggccatcaacgtgggctccaccaaggacctgatcgagactt

SEQ ID NO: 543738 - DNA, 100 bp, Homo sapiens
actccaaccattaaatggatgaaaaatgaggaggcacttgacacagaaaggtatttattacagtatcaggagccaataccttgtgagcagttggttacag

SEQ ID NO: 543739 - DNA, 82 bp, Homo sapiens
ccgcttcctgaatgctgagacaggggccgatcctgacaaagcacggcaagaacccagtcatggagctgaacgagaagaggcg

SEQ ID NO: 543740 - DNA, 75 bp, Homo sapiens
actgctttaaacttaaagacctctttggacccgaaattgtaagaatccttgttgcctgatgactatgtggttccc

SEQ ID NO: 543741 - DNA, 75 bp, Homo sapiens
aattcccggaaccgcgattcggcgtgtcaggtaccgttttgtgtcatgcagttactggaatgtacaaaagcagct

SEQ ID NO: 543742 - DNA, 76 bp, Homo sapiens
gtggagaatgaggacatgaataaagaccagatcttgctggaaaaagaagctgagtttatagaaggatcatttgaag

SEQ ID NO: 543743 - DNA, 97 bp, Homo sapiens
ccagaaggagcgaactgaagaggttctacacaattggttatccggtgttggctcctgctgcttactatgaccaaactggtgcccttgtagtgaatgc

SEQ ID NO: 543744 - DNA, 83 bp, Homo sapiens
ttatgaccagagtattgccgcggtggaaatggaggttttaaaatcaaagatgggaaaatcggagaaaattgcccttccccatg

SEQ ID NO: 543745 - DNA, 75 bp, Homo sapiens
tccctgtcacagcggcagctcagcgaggaggagcggggccgactccgggcccctgtcccagctggccctgcccca

SEQ ID NO: 543746 - DNA, 90 bp, Homo sapiens
ctgtcccccaggagaaccaagatgattgcagattgagtacccagcacgaggaatcagcagatgagcagaaaggttctgaagcagaggggc

SEQ ID NO: 543747 - DNA, 100 bp, Homo sapiens
aaacaaaattctgaactcaggacttggcaaagtgaagccaccactcgctctcgaatcgcgcggacgctgggcctgcgcaggcctgttcacagcagctgca

SEQ ID NO: 543748 - DNA, 82 bp, Homo sapiens
gcgctatggcacccggctgcaaaaatatttggagtctgggagtgatccttttcatgttggtgtgtgggcagccgccctttca

SEQ ID NO: 543749 - DNA, 98 bp, Homo sapiens
gcaaattcagctttccacagcagcaccctgttcaacaactgcagtggatgattccgcagaaaagccctctggttctgagtttcactcttgttgcccag

SEQ ID NO: 543750 - DNA, 83 bp, Homo sapiens
ttcagaaaaagcatccccgaggaggaagacgaatcgttaaacatcttaggtcaggatggaactccaacctcgaaaacatttga

SEQ ID NO: 543751 - DNA, 104 bp, Homo sapiens
gttggtttgaatctgtctgcagcttctcgagtgtttttaatggatccagtggcttctggcacagcagcttaattgaccggaacctcattgattattttgttccc

SEQ ID NO: 543752 - DNA, 75 bp, Homo sapiens
agtgacgccaagaggagacagcagggcagttctctctcgggttcaaaaggaatggatgtatatggctacctactg

SEQ ID NO: 543753 - DNA, 82 bp, Homo sapiens
cattttggcattgacatttaattttagggtcctttatatagaagggagagattggcctaatgaagaagttcaacctggagag

SEQ ID NO: 543754 - DNA, 130 bp, Homo sapiens
tccaaggtgtagagccatacttcaggaggatcctcagaagttttggacaagcctccccaaatgtggcagctcaggcccagaatcagcagcagacagaaggtgtaaaaactgaagagagtgaacctcttcc

SEQ ID NO: 543755 - DNA, 75 bp, Homo sapiens
aggcatcccagctacgaaggatggaatcttcaatcaatcatatttcacaaggtgtccgcaatgttgccagtgtct

SEQ ID NO: 543756 - DNA, 83 bp, Homo sapiens
acctgagaccagtggtcatcgatgggagcaacgtggccatgagcaaattgtggctactaatttgccccctgaagatcaagatg

SEQ ID NO: 543757 - DNA, 96 bp, Homo sapiens
gccacggagaggagcagcccccggagacagcggcacagaggtgcttctgccagaaaagtgtgatgaagaccacatggggtgtgctggatcctcctg

SEQ ID NO: 543758 - DNA, 95 bp, Homo sapiens
ctgatggcctgtcgagagatagagaatgggcgggactcattaccagagaagctggctgtgcatgagaagaatgtccgcgagtttgatgcctttgt

SEQ ID NO: 543759 - DNA, 100 bp, Homo sapiens
ttccggccacccattgatttgatgcataaaggcagctttgaaacaacagctgaggatgccaaggacttcttcaagaggaagatagattttctaaccaagc

SEQ ID NO: 543760 - DNA, 75 bp, Homo sapiens
gggggagctgaccgaggccacgcccaacagcaggaggccactgtctgcagctcccgtgaagatgtccactccaga

SEQ ID NO: 543761 - DNA, 100 bp, Homo sapiens
attagtttctggaggatctgataatcaagtgattcactgggaaatagaggataatcaggcaaatcctggcattgttacttgccttgaaaatcatcctcac

SEQ ID NO: 543762 - DNA, 75 bp, Homo sapiens
gaactcccaaaatgaggtcaacggctgggcaaatccagacagaacctttgacttggtgttgaaagtgaaatgtca

SEQ ID NO: 543763 - DNA, 113 bp, Homo sapiens
aggttgcgcctcggtggcgccgcgctgctcctgctgctcatcccggtggccgccgcgcaggagcctcccggagctggccaccagcccctcgggttccaagatgcagctactgg

SEQ ID NO: 543764 - DNA, 50 bp, Homo sapiens
agccggcgagtctaaacccaagagcggtcaaaatgcagatcttcgtgaaa

SEQ ID NO: 543765 - DNA, 83 bp, Homo sapiens
gcaacaccaggagaggccgggggcagccgccatcggcagcgccagtgtactaatggtcacttgatgtgcgctggctgttttat

SEQ ID NO: 543766 - DNA, 90 bp, Homo sapiens
catgggcctccttgtggtcctgctcgttggaggctgtgcagcagaaggtcttgggcgtctttggtactggcttttttaggggtctgcctg

SEQ ID NO: 543767 - DNA, 75 bp, Homo sapiens
ggagcagcaccttcaggatgtccggaagagagtgcagggaggcacctcccgaactaacaacttggagaccgggcc

SEQ ID NO: 543768 - DNA, 90 bp, Homo sapiens
gataagaaaaagcgcaaggcaaatacacagatcatgtttcaggcatatggagacaaacagggaccactgcatggaatgttaatcaatact

SEQ ID NO: 543769 - DNA, 51 bp, Homo sapiens
caaagaacctgaagacgacccaaaagggtcaagtctggcaccatctttgac

SEQ ID NO: 543770 - DNA, 96 bp, Homo sapiens
aagtctacgggggcgagaatgtggagcttgggatcaggtgcacttacatttcaatcgaccaagttccaaggacctatgccataatgataagcagac

SEQ ID NO: 543771 - DNA, 90 bp, Homo sapiens
gatccctcagcggctccatgccttgcttatgccaccagaacctatcatcattaatcatgtcatcaggggttatggttttgtgaaattcac

SEQ ID NO: 543772 - DNA, 80 bp, Homo sapiens
cagcagagatgctaagatgaaagggtctccctctgttgtccaaggctggagtgtagtagtgctatcgcagctgactgcag

SEQ ID NO: 543773 - DNA, 100 bp, Homo sapiens
gtccccaaggggtgtttggatgcaagctgaaatcacctttaagaagcccatgcctaccaagatttggtacacacagaggggcagcttcaaaatgaagaaa

SEQ ID NO: 543774 - DNA, 100 bp, Homo sapiens
ccgccgacgactgcagccagcagcgtggaggagcctgaagggtgagcttgtcggccacagactgctacattgtgcatgagatctacaatggggagaatgc

SEQ ID NO: 543775 - DNA, 75 bp, Homo sapiens
ttttctcataatgaatcctctcaggacattgtgtagcctatgcagtctctggtcccagcccaccccatggcccct

SEQ ID NO: 543776 - DNA, 75 bp, Homo sapiens
gtcagtattttggattttcaccattctaatagcagatataatttctacagtagaatttaatcattctggagaatt

SEQ ID NO: 543777 - DNA, 100 bp, Homo sapiens
cgacagcacagacagaatccctgctaccaatggagtctggctctgtcgcccaggctgcaatgcagtggtatgatctaggctcactgcaacctccacctcc

SEQ ID NO: 543778 - DNA, 100 bp, Homo sapiens
gatggctcctttagcagagacacatttcctgaggatatcgtggctaactatatgtcagaaagcatcagcttttctcgatggacccattcatctaatgaaa

SEQ ID NO: 543779 - DNA, 51 bp, Homo sapiens
acatgcaatgagaagactgatcaatctggttcttcccactagtaaaagcag

SEQ ID NO: 543780 - DNA, 137 bp, Homo sapiens
ctgccgccaaggtgttcggtccttccgaggaagctaaggccgcgttggggtgagaccctcacttcatccgacttaattcagtgcacaaatgagatgaatgtgaacatcccacagttggcagacagtttatttgaaag

SEQ ID NO: 543781 - DNA, 100 bp, Homo sapiens
tcctgtccggaaccttcatagccaccgtcggcatagacttcagggttgcaaaagcttctcatttcagagagatgccaggatcctaagtgcctgccaaact

SEQ ID NO: 543782 - DNA, 82 bp, Homo sapiens
gccatgagcggcggcgtgtacgggggaggtctcggcgcggaagatggccggcggcgtggacggccccatcgggatcccgttc

SEQ ID NO: 543783 - DNA, 75 bp, Homo sapiens
atgatggagtacctgttgcaggatgttgacgatgagtatgaggacgaggaccagtgggaggatggagcagaggac

SEQ ID NO: 543784 - DNA, 82 bp, Homo sapiens
ctgtgcttctcgcttcagaacattttctccaaaaaggatgatcctttcaaaaataaagccttgttatttagcaacaacacgc

SEQ ID NO: 543785 - DNA, 90 bp, Homo sapiens
cagtggctgctgtgcagaaaatggaccaggccgagtaccaggccaaggaagcacaagcctatgcagacgacaacagtttgctgttcatgg

SEQ ID NO: 543786 - DNA, 98 bp, Homo sapiens
tcagctacgggaattcagtactctgtaacacccagctaccaggaatcagagatcattgatttcttcctgggggcctctctcaaggatgaggttttgaa

SEQ ID NO: 543787 - DNA, 100 bp, Homo sapiens
cttactggcaccaaccccggcagtatgagcagatggaccacacatccccgacctacatgcttgctaacttaacccacttgcattctgaacaacttctgca

SEQ ID NO: 543788 - DNA, 80 bp, Homo sapiens
atttatggagcatatattatggaacacagtagacagattggaagtcgtcaacaagcgttttgttcgagtgacctttacac

SEQ ID NO: 543789 - DNA, 75 bp, Homo sapiens
atggccgaagacacctattcacacagacgcatgaagagtaccaagcaagaggggagaggtaaagttccacaggag

SEQ ID NO: 543790 - DNA, 98 bp, Homo sapiens
gatgataaagactacaggagaattcggtttgtaggtcgtcagaaagaggaatacaggagtttccagaaaatataaaaaattgtaaagttttgacaatt

SEQ ID NO: 543791 - DNA, 90 bp, Homo sapiens
attccctatttttgctacacaaagtaatgactttgcattgggataccctatagactcacaaggcaatgtcaattggaagacaaggtcgag

SEQ ID NO: 543792 - DNA, 98 bp, Homo sapiens
caaaaagcagctgccaatccagacttacagatgggaaccaacaaatgtgccagccaggcaggtatgacagcttacgggactaggaggcatctttatga

SEQ ID NO: 543793 - DNA, 100 bp, Homo sapiens
agtactattacctgcctctatacttgttgctgagaagtgccttatatttgtccatgaaagacactgaaaaaggaataaaagaactgaatctagagaagga

SEQ ID NO: 543794 - DNA, 75 bp, Homo sapiens
gcgaggtctcgcctagagttggaaaggcagcgtgcttagggtgggatatgagcctcttcctccaacaataggacg

SEQ ID NO: 543795 - DNA, 83 bp, Homo sapiens
caacggacgtggaaatacttctggcagacaatgcagatcttcgtgaagactctgactggtaagaccatcaccctcgaggttga

SEQ ID NO: 543796 - DNA, 73 bp, Homo sapiens
gcagccctggtgtcacctatcagtaaaaggttatcaatactctggctgaccatcatcatcgtgggactgactt

SEQ ID NO: 543797 - DNA, 76 bp, Homo sapiens
aacctcctttacacagtatcagaacgcaagtatatcgcgtcaacacagcgacctgacgggacctggcgcaagcagc

SEQ ID NO: 543798 - DNA, 96 bp, Homo sapiens
gaaaagaacacctgtgaaagaccgattttctgcagaagatgaagctttgagtaacattgccagagagagtgttgcggagataggaacatgggagag

SEQ ID NO: 543799 - DNA, 90 bp, Homo sapiens
cggcctggcactgcgcttcttcaaagtatttgattttcatcaagcagctgatggtatccaggaacaacagagacaagaacaagcaggaaa

SEQ ID NO: 543800 - DNA, 100 bp, Homo sapiens
gaagagaaaatagcaaacgatccagacggcagggagtgcatcaaaggtgtgaacacagttgagggcacatgcagtagatattaatggaaatcaagtggag

SEQ ID NO: 543801 - DNA, 100 bp, Homo sapiens
tcaaatgcagaattcacaagatccaatcccttgtccttaaaaggaactgaaattaccattcacttttttaagtggacatattcatgaattgaggattcat

SEQ ID NO: 543802 - DNA, 75 bp, Homo sapiens
cccggagctgggtgggggtgccccacgctgaaagagaggaccctctttgcaagttcagtgcttaacctgaccgaa

SEQ ID NO: 543803 - DNA, 100 bp, Homo sapiens
ctctgcccttatggaattggacaaagggatattggagaagatattccactagacaaagatttctgaaattgaaatattattcaatcatcctgcaatctag

SEQ ID NO: 543804 - DNA, 75 bp, Homo sapiens
ttgtaccatgatgtgatgctggagaactttgcacttttagcctcactggggcactgtgacctttgaagatgtggc

SEQ ID NO: 543805 - DNA, 90 bp, Homo sapiens
agcaaggtacccaccaggccgattatgtccattgttctcttggagcagctggtcatcatggacggcccagattctgccagaggaaaccgg

SEQ ID NO: 543806 - DNA, 96 bp, Homo sapiens
ctggggaaaataatccagagatttccacagaaggactgggatgatacaccttttccacagggaattgagttggaagaggaagaagcccaagccaag

SEQ ID NO: 543807 - DNA, 75 bp, Homo sapiens
ggaaacatggcggcggcgggtgttgtgagcgggaagacgtaaaattcatcctgatcagaaaaatattaatgccta

SEQ ID NO: 543808 - DNA, 75 bp, Homo sapiens
gtgtacagcatcggcgaggacgggaaggttacatctactacaatactgcagatacagtataacattggtattgct

SEQ ID NO: 543809 - DNA, 96 bp, Homo sapiens
gaccatcatcactttcattgtctcggacgtgcggggcctgggcctcccggtccgcaagcagcccccaggctccgctcttgccagagggacaggagc

SEQ ID NO: 543810 - DNA, 98 bp, Homo sapiens
gggccccagcagcccccgaaggccctatcaggacatggagtatgaaagacgcctgccctcctatacctggtccccgcctgcatcggttttcctgtcct

SEQ ID NO: 543811 - DNA, 100 bp, Homo sapiens
ccaacatcgatgggcggcggaaaatagcctttgccatcactgccattaagtttaactggtacacccgccgagccatgctggctgccatctacaacacaac

SEQ ID NO: 543812 - DNA, 98 bp, Homo sapiens
acatggctgaccacccctaaaagcacctggccccgctacagcaaaccaggagtctatgaactggccacttttcagatgaaacctggtgggccagctct

SEQ ID NO: 543813 - DNA, 75 bp, Homo sapiens
ggaggcagtggctcgccacgggcaggagcatgttgagtgaagtacctggctttcctccgcaagcggatgaacacc

SEQ ID NO: 543814 - DNA, 100 bp, Homo sapiens
agcaaattgagttgaagtctcgaggtgtgaagctgatgcccagcaaagacaacagccagaagacgtctgtgtccgggaccacatacatctttgggaaggg

SEQ ID NO: 543815 - DNA, 100 bp, Homo sapiens
aagaagtgaatccccccaaccagcaccagactggggctcccagaggccatttcataggggttaaagcacgaattgggagctctcagcgacatcaccagtc

SEQ ID NO: 543816 - DNA, 97 bp, Homo sapiens
cccccgcgcctctcttcgcctcgcctcgggacccgcggtccccgctcttgctgaccaagatcactccatggatgaaatgacagctgtggtgaaaatt

SEQ ID NO: 543817 - DNA, 100 bp, Homo sapiens
ccgctgccccggctgcctcctccctgagccatcactggtgcaagctatatttaacggagatcctgatgaagttcgagcactaatatttaagaaagaagat

SEQ ID NO: 543818 - DNA, 75 bp, Homo sapiens
gctgaataaagctgttttggaactgtcaggtacctcaaagcagctggagataagatgggtagactgctacttccc

SEQ ID NO: 543819 - DNA, 76 bp, Homo sapiens
gctcttctcacagaaggaagataaactccacatatttctgctttccatctgatggtcccctggtgtgtgccctgga

SEQ ID NO: 543820 - DNA, 90 bp, Homo sapiens
ctcaggggtacagtaccaaaccaaggttgatggtaccacttaaaatgcaagatgacgattactttgccaccctgagggaactggaagcta

SEQ ID NO: 543821 - DNA, 50 bp, Homo sapiens
gactactgtcagcagctgtgccaggcatgaacaaccgggaggtgctggag

SEQ ID NO: 543822 - DNA, 50 bp, Homo sapiens
tttgtgcagattgccagtctaaaggatggtgattgctcacaccaaagcct

SEQ ID NO: 543823 - DNA, 97 bp, Homo sapiens
tgtatgtttctggaggtcgatcttccagccatgattttttggctccaggatctaggggtgtttattcctgctcctatggctcaagggatgagaagtg

SEQ ID NO: 543824 - DNA, 51 bp, Homo sapiens
catggagtccatcttccacgagaaagataagttctgaacgtcgaaaagaaa

SEQ ID NO: 543825 - DNA, 75 bp, Homo sapiens
gcggtctgccaggagctgcggccccgtccggcccgggctgtttttggctttcacccccaaccagtgaccaaagac

SEQ ID NO: 543826 - DNA, 74 bp, Homo sapiens
cgatgagccccgagtgcgaggagccgccgccccccctcgcagcgtccgtctccaagagagtatgaagagagtgc

SEQ ID NO: 543827 - DNA, 75 bp, Homo sapiens
ccaggctcaagcagtcctaccatgtcagccttcccagtagctgggaccacagaccatcaacgcactgaaggggag

SEQ ID NO: 543828 - DNA, 101 bp, Homo sapiens
ggacccagagctagactacaccctcatgagggtctgcaagcagatgataaagatcattgagcgcttgaagctggtgcccctgaatcaggaaagtgtggaag

SEQ ID NO: 543829 - DNA, 51 bp, Homo sapiens
aagtctgaatttcggcagaatttaggccccctcttctctcctggaggtcag

SEQ ID NO: 543830 - DNA, 100 bp, Homo sapiens
gccatgtccgcaccggcaccatcctgctcggcgtctggtatctgcctcccgcgacgatgcccctcaacgttagcttcaccaacaggaactatgacctcga

SEQ ID NO: 543831 - DNA, 83 bp, Homo sapiens
ccagctatccgggttcatcctacatttttgtgcaagaggaaattcgaaatgagtcccatgactatcctcatagagtggccaag

SEQ ID NO: 543832 - DNA, 90 bp, Homo sapiens
cactggcctcgggatagccatgggcaagctgcaccttgcatgagggacaaagctacacaggttctaaatgagaagaaacttcaagaggtt

SEQ ID NO: 543833 - DNA, 100 bp, Homo sapiens
gtcaatgcaatagaaaagttggtcaaaaacaagctggatccagtttatggaaaaggaaaacttggagaaatccagggacttatcttgggaatgttagata

SEQ ID NO: 543834 - DNA, 49 bp, Homo sapiens
atggacacatctgaggcaaagctagtctgttctctggggaggcagtaag

SEQ ID NO: 543835 - DNA, 98 bp, Homo sapiens
gcaaaatcatctactcagtttggatcctacaagcaagctgaatggaggccagatagtaccatgatagctgtatcatgtggtttattgacaatcattta

SEQ ID NO: 543836 - DNA, 50 bp, Homo sapiens
aaaatatcaggagttaatggaacacatggacttattttgagtcacttgcc

SEQ ID NO: 543837 - DNA, 91 bp, Homo sapiens
ggagactccggcgctcgccatggccgacgaaaagcccaaggtttggtgcacctcgatttggaggaagtagggcagggcccttatctggaaa

SEQ ID NO: 543838 - DNA, 50 bp, Homo sapiens
gcgacggcggctgcctgtggaagatcgtaaagctgaaaattgaaatcatg

SEQ ID NO: 543839 - DNA, 96 bp, Homo sapiens
aaatctggaacgggtggccgattactgcgagaacaactacatacaggccaagtgcaggaacatggagcatgcactgcgggagaaggccaaggcctt

SEQ ID NO: 543840 - DNA, 98 bp, Homo sapiens
ctggcaggatgtctgaaggggttgtcctcacttctgtgcaacttcactaagtccatggaagaaggtagaaaatctggtgtattaactgtgaaaatttt

SEQ ID NO: 543841 - DNA, 50 bp, Homo sapiens
gaagcataattctgtgcctcttcaggaggaacatatgcagcagaaaaaag

SEQ ID NO: 543842 - DNA, 100 bp, Homo sapiens
cgtggacatgcgcacctcacacaggaagaaggtagataatgactataatgcccttcgagaaagactcagcaccttgcctgataaattgtcttataatata

SEQ ID NO: 543843 - DNA, 75 bp, Homo sapiens
tattgaagtgtcaaaatccatagatggaaaagatggaaaatatatgcagatgatgaacattcttaagccaattgc

SEQ ID NO: 543844 - DNA, 51 bp, Homo sapiens
taagaacccagggcagaaaggtttaggctcctgggtagaactgcacttcag

SEQ ID NO: 543845 - DNA, 88 bp, Homo sapiens
tcagtcacacatgccagagattgctcaggaagcaatggaggttagcatggcctcattgaaagaactagatcaaagactctttgaaaat

SEQ ID NO: 543846 - DNA, 74 bp, Homo sapiens
tggttggtgattggcaggatcctggtatccgctaacagacctgcctagagctggaacgttacctccagagcgag

SEQ ID NO: 543847 - DNA, 50 bp, Homo sapiens
gcggaccgcggcagcccagagcagtactatactggcaattgctggagaag

SEQ ID NO: 543848 - DNA, 83 bp, Homo sapiens
ccagcttccagttagtggatatagcacaccatccccagccagcggcggcggcggcgcccgggagccggagccttcgcggcgtc

SEQ ID NO: 543849 - DNA, 90 bp, Homo sapiens
ctgtgccactttgcatcccacgccggaggaggcattaacgagaccgggtaaggccatcgaagacggcaatttggaggaaatggaagagga

SEQ ID NO: 543850 - DNA, 83 bp, Homo sapiens
ttcagcatcatgcagccgccgccgaggaaggtcaaaatgcagatcttcgtgaaaacccttaccggcaagaccatcacccttga

SEQ ID NO: 543851 - DNA, 75 bp, Homo sapiens
tcttcggacagggaacggagttatctgtgaaacccaggattaaagcctgtggtttccacagaagcaccacctatc

SEQ ID NO: 543852 - DNA, 95 bp, Homo sapiens
acctgttgtctccgatccagaggatctgcaagtacccgctcctccttaaggggatcttcaatattcatgttattttctcctttggtcttatatga

SEQ ID NO: 543853 - DNA, 112 bp, Homo sapiens
ggcctttcggggtagccggtacggggacttcagacagatccgggacatcatgcagggtggaaattaaaggtggagcacatgattattacaatgttcttcccaataagagcct

SEQ ID NO: 543854 - DNA, 88 bp, Homo sapiens
agctggagtcgctgtggtcagactctcccgcgcctcctggcccgcaggccggacccccttctaggactggcacagcctccaggttggc

SEQ ID NO: 543855 - DNA, 104 bp, Homo sapiens
agcctcccgagtggctgggactacaggtacggttcctggagcagcagaacaagatgctggagaccaagtggagcctcctgcagcagcagaagacggctcgaagc

SEQ ID NO: 543856 - DNA, 100 bp, Homo sapiens
tgtgagcagctaggggacctcttctccaaggcaggagactttcccagggcagctgaggcttaccagaagcaggcagcaatcagcatctttggcatggttg

SEQ ID NO: 543857 - DNA, 100 bp, Homo sapiens
tttgctgcaccaggtgtcctggagacagagagctgtagtacacatggatgaacgacgagaagaacaaattgtacagttactgaattctgttcaagcgaag

SEQ ID NO: 543858 - DNA, 102 bp, Homo sapiens
tccaattctttcagaattttgcatggaattgacaggcataaagcaggcccaagtatctggtggtgaacgcagacgagggggagccgggcacctgcaaggacc

SEQ ID NO: 543859 - DNA, 100 bp, Homo sapiens
aaaactttgaggatgcagcactggaagaaaatggtttggctgtgataggagtatttttaaagctgagatctgtatctgtggacctgaatgttgatccctc

SEQ ID NO: 543860 - DNA, 74 bp, Homo sapiens
tgcaacccttccgggaagccatagctctgcatggtgtcatggagaaactccagctgggcccagagattctgcag

SEQ ID NO: 543861 - DNA, 87 bp, Homo sapiens
aacttttccaaaattctggaaatgctttgatgacagtagggaaagaaccatttcctaccatttacgtagattcacaaaaagaaaatg

SEQ ID NO: 543862 - DNA, 74 bp, Homo sapiens
ctacgacaccaccgctgatgagatcctgcagcagtgtgatgagcactacaaacaccactggtttcccgaaaagc

SEQ ID NO: 543863 - DNA, 100 bp, Homo sapiens
gttcatctaccacgctttcgtctgtgatgcagatccatccgccctagcaaaatatgttctggctttggtaaagaaagacaaaagtgaaaaagagttaaag

SEQ ID NO: 543864 - DNA, 75 bp, Homo sapiens
aggacatggagtatgaaagacgtgcctccaaagccattacacctgcagaattcaccttcgtccaatatacaccaa

SEQ ID NO: 543865 - DNA, 95 bp, Homo sapiens
agtgggggaggagcgttccttgtcctccctctgcacaagcaggatcctaaggcctttgtagtccttcagccactgtgggccctgcctctgcctgt

SEQ ID NO: 543866 - DNA, 100 bp, Homo sapiens
gcagtctaaacctgtgaccacccctgaagaaattgcacaggcaaatgaagatgtgacacagattgtggagattctccattctggacctagtaaatggaac

SEQ ID NO: 543867 - DNA, 74 bp, Homo sapiens
tgccctggggctgagaggagtcttctggtgcagtcttattttgaaaagggcgcagaagccactaatgtaactgg

SEQ ID NO: 543868 - DNA, 75 bp, Homo sapiens
ctcatctttgacatggacggacttcttctggcttttctgcaattagataaaaaaggaccacaaaaacatcacttt

SEQ ID NO: 543869 - DNA, 49 bp, Homo sapiens
ccggccctccaggttccacaaccgggtggcagagccccctgaggactgg

SEQ ID NO: 543870 - DNA, 100 bp, Homo sapiens
actcggagaagccctcgagcatccccacaggcgaaagggcgtgtggttgcgcctgaggaagatacttttctgtgttttggggttgtacattgccattcca

SEQ ID NO: 543871 - DNA, 78 bp, Homo sapiens
actcagcctccagaaacggtccagaactggattgaattacttagtggtgatgtcatgaggagacgtattgctacccca

SEQ ID NO: 543872 - DNA, 80 bp, Homo sapiens
ggactcccgccgctgctaaatatatccgtaggaatggagagggaccggatctcaggccgccatggcatcagatgaaggca

SEQ ID NO: 543873 - DNA, 83 bp, Homo sapiens
ctccggggacccttccgtatctgcctaggcattttgctgtctcctcctaatacgttaagtgggcagaccaacatccacctcag

SEQ ID NO: 543874 - DNA, 100 bp, Homo sapiens
ctcagcatgaactgcagcaaggacaaaaacctgatttggaacaacctatcttcagcactcgagctcatgtcttccaaattgacccaaacacaaagaagaa

SEQ ID NO: 543875 - DNA, 98 bp, Homo sapiens
cgggttcgccgagccgcaggagagacacgctgggccgaccccagagcggcgctggacagaaggaagaggcccagcagaagggactcgctgagccaccc

SEQ ID NO: 543876 - DNA, 82 bp, Homo sapiens
tttgactactggggccagggaaccctggtcaccgtctcctcagtaatagctcttcaagtctgcaataaaaaatggcctccaa

SEQ ID NO: 543877 - DNA, 99 bp, Homo sapiens
atgcctgggtcccgccgggtctgaagcctgaacagcttcagtatcagacacagcacagcagccatctgaagagcaaagcaagtctcttgaaaaaccgaa

SEQ ID NO: 543878 - DNA, 80 bp, Homo sapiens
gtgcaagtacctgccagagaacgacctgaagttacggcagtcccagtcctactgcacagacacagagtgtcttcaggaat

SEQ ID NO: 543879 - DNA, 100 bp, Homo sapiens
gccttcttcagctccccattctctgagaacagcacttccctgcagtggaaccacaactgccctcaaaagagggtcctgaaccaccagaagaggttcctcc

SEQ ID NO: 543880 - DNA, 75 bp, Homo sapiens
ggttctccatcattgtcaccctggccctcgcggtggctgcctttaggggacttgatctcatcttcatgccaggcc

SEQ ID NO: 543881 - DNA, 75 bp, Homo sapiens
ctccgtttcaaggttaattcgaaagtcttgtggaagatctggaagaaacaggctgatcagttgatgttcgctttg

SEQ ID NO: 543882 - DNA, 96 bp, Homo sapiens
gaagtttgattccagtcatgatagaaatgaaccatttgtctttagtcttggcaaaggtgttgctctcttgccattcgtggatgagcgaaggctacg

SEQ ID NO: 543883 - DNA, 101 bp, Homo sapiens
cagagagagaggtggacagatctgagagatactgagctcgccctcccctacctgcggaagagtcaagggaatgtcatcaacatctccagcctggtgggggc

SEQ ID NO: 543884 - DNA, 96 bp, Homo sapiens
atttggtcaaagactgggatgcttagatcaactttagctcagcaagaggaaatactatgtgaagtatgccggaaaacatttaaacgcaaagattac

SEQ ID NO: 543885 - DNA, 100 bp, Homo sapiens
gtgaatgttcaaagccagagcagctggttgtaacatttgtagcaggttacatagccattggatttaatgtagagacggtgacgtacaaaaaccttaaatt

SEQ ID NO: 543886 - DNA, 82 bp, Homo sapiens
taaaatagcatatgatgtgcagtgtccaaagagagaaataaactatcaatcttgcccagactggagaaaggactgcagcaac

SEQ ID NO: 543887 - DNA, 100 bp, Homo sapiens
tgagagagagcaagcgtttcagcgcctacaattacaggttgttaccccttctacaaaactgacccgttcatcttcccagagtgcccgcatgtctactttt

SEQ ID NO: 543888 - DNA, 100 bp, Homo sapiens
gcttccctggttgcttagctgggtctcggccacggcgtggagagcggcaagcagaagtcaattcatctggaaagactatctctgagtcagacttaaacca

SEQ ID NO: 543889 - DNA, 51 bp, Homo sapiens
gccaagatggtgaagcagatcgagagcaagtacctggagtagaacagaaaa

SEQ ID NO: 543890 - DNA, 100 bp, Homo sapiens
tggatgaacaacctgctgatgagggaggtgcccctgcgttgtaccatccgcctgtgggacacctaccagggaacccgagcgtcatgttagggtgaagcag

SEQ ID NO: 543891 - DNA, 74 bp, Homo sapiens
ctactagataaccagtggttaacagatgacatgcacttggtgataagaaagcagctctctagcaccgtattcaa

SEQ ID NO: 543892 - DNA, 76 bp, Homo sapiens
cctgcctttaacacacctactgggattccttgggcaatggtgaatttgaaaagattgtgttcaattagaccttcag

SEQ ID NO: 543893 - DNA, 100 bp, Homo sapiens
catcctggttctggaatcctcagttcaaggtactccaaagattcaggtttactcacgtcatccagcagagaatggaaagtcaaatttcctgaattgctat

SEQ ID NO: 543894 - DNA, 49 bp, Homo sapiens
atcccactgatgaggatcagcccatgttacttatatcaaattgcacatc

SEQ ID NO: 543895 - DNA, 75 bp, Homo sapiens
cgagaacatccagtttgatgtttactacaagtgtaaaacctgttctgagccaaaaaagataaccagttcctctgc

SEQ ID NO: 543896 - DNA, 80 bp, Homo sapiens
tattgaagcaatgcttgaggctccttacaagaagcccctggatgaaacactgaagaaagcccttacaggtcaccttgagg

SEQ ID NO: 543897 - DNA, 58 bp, Homo sapiens
gagctgcggaggctgcggcccccaggaggaagaaggcacctacgatcaaactctggag

SEQ ID NO: 543898 - DNA, 100 bp, Homo sapiens
cgcggcggtcttcaagctctcagtgtgcctaccgcatgttgccgctgctgtttctgctgggacgtctgactccagttccttctcccctctccagtgacaa

SEQ ID NO: 543899 - DNA, 50 bp, Homo sapiens
ctgggcgtccccaacgggcgcatggtggcggtggaaatcgcaaaggcaaa

SEQ ID NO: 543900 - DNA, 100 bp, Homo sapiens
gttccaggtagacatggaggccgtcggggagacgctgtggtgtgactggggcaggaccatcagacaagccatctatgatgcatttgaccgcttcctccat

SEQ ID NO: 543901 - DNA, 75 bp, Homo sapiens
ctactgtactggctattggaaggaggagattctgaagataaggagccggaagtcggtgcagcccacctcagagga

SEQ ID NO: 543902 - DNA, 82 bp, Homo sapiens
cttggactgagtcctgcaggacacaggatctctgctgtctcttggatcccatctgcctagatggaagaggatcctatccgaa

SEQ ID NO: 543903 - DNA, 133 bp, Homo sapiens
gggtcctgaatcttctgggagctgaggaaccagatatcttgaaaagctgccagaaagtgcggcaccttcccgtctgatgctggcgttgtgcgtatggtgccctgacgtctgtccacgtgggcgcggaagcaaa

SEQ ID NO: 543904 - DNA, 100 bp, Homo sapiens
acgtgccagctgttcaccaccgagctaggtgtggtatctgtgcgctttgaagaagatgaagacaggaacttgtgtctaatagcatatccattgaaagggg

SEQ ID NO: 543905 - DNA, 76 bp, Homo sapiens
ctctaaacggactcatgtactttgtcaggcgccaagcccatctttgtgtgcttgcatccaactgtgatgagcctat

SEQ ID NO: 543906 - DNA, 100 bp, Homo sapiens
agttttctggaagacacaacaggggagcagttcctcacttatcgctatgatgaccagtctttagaagaagtgtgtgacctgctgcacgcggctcctttcc

SEQ ID NO: 543907 - DNA, 100 bp, Homo sapiens
gtgcagctccaagagctgtggcccgggggcctcttctggaccaggaaactctccacggaggaagaaagggaagattttgatactagcattgagagcaaag

SEQ ID NO: 543908 - DNA, 83 bp, Homo sapiens
ccggagcctggcgcagcctccctctattaccaggtactccaaagattcaggtttactcacgtcatccagcagagaatggaaag

SEQ ID NO: 543909 - DNA, 82 bp, Homo sapiens
ggcgcggcagcggagggacggcagtctcgcgcgagacaagaggagcagcagcggcaccgcccctcaccctggagggtcctgt

SEQ ID NO: 543910 - DNA, 100 bp, Homo sapiens
ctcccggtctcggtgtagctgccgtggttgccaggagagctgcgccggcgagaagcggccgagccagcagcagagcacaggaagcttggaaacatgactg

SEQ ID NO: 543911 - DNA, 75 bp, Homo sapiens
gcatcacgtccgcttcccgacgctgagggcagccccgtccagggttctggctccttggcagcaatggctgtattt

SEQ ID NO: 543912 - DNA, 121 bp, Homo sapiens
cgaaccccatcatcgacggccgcaaggccaacgtgaacctggcatatctgggcgccaagccgcggagcctccagacgggccaccagcccctcgggttccaagatgcagctactggagacag

SEQ ID NO: 543913 - DNA, 100 bp, Homo sapiens
ctcaagtccctgatcctgacggccctgcagagagaaacagacttggatcctagcatgactatacattgtgacatggtcattacatatggattagaccaac

SEQ ID NO: 543914 - DNA, 98 bp, Homo sapiens
gagcagcggctggctctgcgctgcgggacggcgcggcgcccggactcacgaggtatttcaggacagccaggagggggcgcacatccgccgcgaaactg

SEQ ID NO: 543915 - DNA, 51 bp, Homo sapiens
ggggataacattcatgcagaacatcagggtgtcaaattgagaaccaggtag

SEQ ID NO: 543916 - DNA, 100 bp, Homo sapiens
aaagcttctggatttcactatggagttcatgcttgtgaaggatgcaagagttatgcccagccaagtcttcagtatatccaggggcaacagattttcacag

SEQ ID NO: 543917 - DNA, 100 bp, Homo sapiens
ggggactctgcctcgtgccgctgagcctggcgcagatcggtggattcaccaatgaacttgaagcatcctcatgacctagtcatattaatgagacaagaag

SEQ ID NO: 543918 - DNA, 50 bp, Homo sapiens
cccaccggaggtttatcacaagtacgctggggaggaggaggaggaaggga

SEQ ID NO: 543919 - DNA, 82 bp, Homo sapiens
actgcttgaatacactgagacccggaatcagttccttgatgagctcatggaggctgacctccagctgtgtgagcaccgaggg

SEQ ID NO: 543920 - DNA, 100 bp, Homo sapiens
tgatgataacatgggtgccaaaaatacttcaataggagaagaatttatatccacagaaggagcccaggcttgtgtgctcgtgttctctaccacagatagg

SEQ ID NO: 543921 - DNA, 80 bp, Homo sapiens
gccgcccgcgcccgggaccgacccctctgctcgcggccgcgcctttgaggaatgttttaaaggaagttgggctactcaca

SEQ ID NO: 543922 - DNA, 74 bp, Homo sapiens
cttgggacagggggatttggaaatgtcatccgatggcacaatcaggcctaaatgtgcacagcatgctcaagcac

SEQ ID NO: 543923 - DNA, 100 bp, Homo sapiens
cagcactgactttcagctatggaatcggttgctaggaagaggctcaatgtttgtgttttcaccagatcagtttcagagactgcttaaaattaatccagac

SEQ ID NO: 543924 - DNA, 104 bp, Homo sapiens
agaggtgccaagggagcttctgtcccgaggaccaggggatgcgaaggaaatacaaacctggtcgatgtgatgatattttgaaatggaagcctcccagtctgaat

SEQ ID NO: 543925 - DNA, 74 bp, Homo sapiens
aggattggagcacagaggctcagaagcaagtccagcataagcagtactataatggatgtagacagcacaatttc

SEQ ID NO: 543926 - DNA, 100 bp, Homo sapiens
gcgcactggagtaccctgttcctggcactgagatctgtatctgtggacctgaatgttgatccctcgcttcagattgacatacctgatgcgctcagtgaga

SEQ ID NO: 543927 - DNA, 90 bp, Homo sapiens
cacaacccctgcactgataacgtctgttacaggtggagccgccaccaaaatgcagattttcgtgaaaacccttacggggaagaccatcac

SEQ ID NO: 543928 - DNA, 98 bp, Homo sapiens
gacaagatggcggacggggagctgaacgtggacagcctcatcacccggctgctggaggcaatcagccatgactgcctttgcactgtccatgctctcag

SEQ ID NO: 543929 - DNA, 100 bp, Homo sapiens
attcacttctcagggaaactgagcatctgggcgattccatctctgaagcaacaaggggaatggggtcaaaatgagcaggaagtcctggctgagcaaggtt

SEQ ID NO: 543930 - DNA, 100 bp, Homo sapiens
attggtcaccgagtgaagtcggcagcctggcatcctcgctacaacctcattgttgtgggccgatacccagatcctaatttcaaaagttgtaccccttatg

SEQ ID NO: 543931 - DNA, 50 bp, Homo sapiens
ccaggtccgcgccaggcgtctcgggggtactccaaagattcaggtttact

SEQ ID NO: 543932 - DNA, 80 bp, Homo sapiens
ggcattgaatgatttatagctaagactccaggacacccctgaagccgagaaatgcggcttctacgctccggcactctgag

SEQ ID NO: 543933 - DNA, 100 bp, Homo sapiens
aaaggaatgggtctgggaccttaacagggagccatgggtgtgggccgaagatatgctcatgtggtgttgaggaaagcagacattgacctcaccaagaggg

SEQ ID NO: 543934 - DNA, 75 bp, Homo sapiens
gcggggcaaactgcttggcacctcttcaataggtgacattcaatgagagctgtggctaaaggaagtggaggggcc

SEQ ID NO: 543935 - DNA, 82 bp, Homo sapiens
tgggcctccagtcaccctcgtcttgcattttcccgcgtgcgtgtgtactccaaagattcaggtttactcacgtcatccagca

SEQ ID NO: 543936 - DNA, 75 bp, Homo sapiens
tctgaatgctgacccagctctgaatgagcttctggtgtactatttaaagtattcacaggcctccactgggctctc

SEQ ID NO: 543937 - DNA, 90 bp, Homo sapiens
gctgggttcgttttattcagcggcagtggtgctttcccgaatctcagaatgccaacttgaaggtgcacattcttgatactgaaagttttg

SEQ ID NO: 543938 - DNA, 83 bp, Homo sapiens
cccagagtgaagccgagctcatcagtgatgaggcccaggccgacctggcgctgcggagctctaacactccaagaaaggctgtg

SEQ ID NO: 543939 - DNA, 74 bp, Homo sapiens
tcctcgccgccgtttctgagaaggcttgcagccaatttactggagcagggatgacgtagcccagtggctcaagt

SEQ ID NO: 543940 - DNA, 75 bp, Homo sapiens
caaacatccatatcataagtggaattttggagatattcaaagcttgaaggatgccaatgatgtaccaatccaatg

SEQ ID NO: 543941 - DNA, 74 bp, Homo sapiens
gctctcgctcctctggccaccgcccctgggaagcccttttggaaagcagccaacagggaagagtgtcgcaccca

SEQ ID NO: 543942 - DNA, 83 bp, Homo sapiens
tggaattttaccttttggttcaatctttattgaaatccatcactggtgcaagctatatttaacggagatcctgatgaagttcg

SEQ ID NO: 543943 - DNA, 100 bp, Homo sapiens
tgatattcatgaactacatagagctcatgcaaatgaacaagcagggatgttagcaccaggtaccagaagagacatctatgatcagaagctaacattacag

SEQ ID NO: 543944 - DNA, 75 bp, Homo sapiens
cgatgcagccagtagcttggatccttgtgggcatgatccataatcggtttcaagctttcttggactccgtactgt

SEQ ID NO: 543945 - DNA, 75 bp, Homo sapiens
aaaagagagagttttaccgtgacaagaagtacgaggaagtgaggttctgcggggagtgtctccagccctgcctgc

SEQ ID NO: 543946 - DNA, 95 bp, Homo sapiens
ccgctctttgccgtgacaacaccgttcccccagccgggctggttttaaaatcaaagatgggaaaatcggagaaaattgcccttccccatggccag

SEQ ID NO: 543947 - DNA, 75 bp, Homo sapiens
tgttggaattggtgacaaaatcagaggcatactttataggaattacatgaatgacagtcttcgaaccaatgtgtt

SEQ ID NO: 543948 - DNA, 100 bp, Homo sapiens
tgtaaatgtgctcactcagcacagctcaagactgcagtgcagatgacgacaacttccttgtgcccatagcggtgggagctgccttggcaggagtacttat

SEQ ID NO: 543949 - DNA, 90 bp, Homo sapiens
gttcttcattgaatggtactcggggaaaaagagtaggataagttctgaacgtcgaaaagaaaagtctcgagatgcagccagatctcggcg

SEQ ID NO: 543950 - DNA, 75 bp, Homo sapiens
acaaacattccccagggcaatgtcacgacttggtcttcccgaggagccagtcagtggcctgattccaccaagaga

SEQ ID NO: 543951 - DNA, 87 bp, Homo sapiens
gaaggatacagttcatgacaatgactttgagccctaccttactggacagtcaaatcagttactgtggaatacacgatcctgcctgcg

SEQ ID NO: 543952 - DNA, 100 bp, Homo sapiens
ctccagctgttgttgctgctggatctttccaattaaagatgtacccctggagactgatgaccttaccacttggctctatcagcggtttgttgaaaaagaa

SEQ ID NO: 543953 - DNA, 83 bp, Homo sapiens
cacagatattcagattcctctggattatgaaacaggtagctacagcaagctgggtagcaggcagatccaaaggatatcatgaa

SEQ ID NO: 543954 - DNA, 98 bp, Homo sapiens
cctcccctgagtccggagctaccaaaaccatcctcctggattcatgcttaacaagtctagcatcatcatcacttaaacaaattcttggagattctttt

SEQ ID NO: 543955 - DNA, 100 bp, Homo sapiens
acagctggtcagaaatgattctctagtaaccagagagcacagagaaatgctggtgaaactggccaaacagaacaccaacaaggccaaagactctttacgg

SEQ ID NO: 543956 - DNA, 100 bp, Homo sapiens
ggcggggggagcggaccctgacaagttccaggggacaaacagggacccttgcagagacctgcattacagagcaaagctgggagaaccgaggactcacccc

SEQ ID NO: 543957 - DNA, 100 bp, Homo sapiens
cagagagcaacgtcaactattacaatcgcttgtacaaaggagagtttaaacagccaaaacagttcattcatattcagcctcagaattctgcaaatgcaga

SEQ ID NO: 543958 - DNA, 100 bp, Homo sapiens
ggcaaaatcttactagcgaaagtagaactggagaagagacaacttcaggagagatttactgatttggaaaagtgtttacaggcattggagtttttacatg

SEQ ID NO: 543959 - DNA, 100 bp, Homo sapiens
gtgacgagcccagaaccactgcctacaaaccaccctctcctgaccctgaagaactgtggtatggtttaggaatgatttattacaagcaagaaaaattcag

SEQ ID NO: 543960 - DNA, 74 bp, Homo sapiens
ccgccgcttgtgctgcagccatgtctgcgctcctcagaccaccggcaggtgaacagcctgatgcagaccgagga

SEQ ID NO: 543961 - DNA, 51 bp, Homo sapiens
agttccatccatgttgctgcaaatggaaaagaagatttttcagatcccctg

SEQ ID NO: 543962 - DNA, 99 bp, Homo sapiens
ccttcgtgaacggggtcctcttctgcaaggtccggctgctggatggaggggattttgtcagcttgtcgtcaaggtttagacgtctgtgccacttgccat

SEQ ID NO: 543963 - DNA, 74 bp, Homo sapiens
ctcgctccgctcgtcccgctcgtcatggcctacccgggatacggaggagggaagaagaagaggacagtgctcca

SEQ ID NO: 543964 - DNA, 112 bp, Homo sapiens
ctttgcgttcgggctgggagcgtgctttccacgacggtgacacgcttccctggattggagacaaattaaatgccttacgaagacataaggaaaagctggaagaaaaaatcat

SEQ ID NO: 543965 - DNA, 100 bp, Homo sapiens
tggacctgtaccaaggcaccgggtccctcgcccaggtccccttggacaaatgggtgtttgtaaaatgtatgaagaacatctgaaaagaatgaatcccaac

SEQ ID NO: 543966 - DNA, 100 bp, Homo sapiens
ctatggacaacgtgacggtccggcagggggagagcgccaccctcagattctgtgtgagctgtgcccgtctggctgagatgaggcaaaaagaaatccccag

SEQ ID NO: 543967 - DNA, 82 bp, Homo sapiens
ctgaggcgggggccgtgccctcggaggcggcgtgggcggcagagagcggggcggcggcagggccgagaactactggtggcgt

SEQ ID NO: 543968 - DNA, 75 bp, Homo sapiens
aacagagaaagaagtgataggagggctctgtagtcctggatcagtgacattcgagcaggaaccgccccttcatgc

SEQ ID NO: 543969 - DNA, 100 bp, Homo sapiens
caccgcggtgctgctggtcacggccaacgtgggctcgctcttcgacgacgtttggtgcacctcgatttggaggaagtagggcagggcccttatctggaaa

SEQ ID NO: 543970 - DNA, 75 bp, Homo sapiens
cattgtccatcgtcagcagcactcaggaggctgattctaggtgtgtgagaaagagaaactgttgtcagagaggaa

SEQ ID NO: 543971 - DNA, 88 bp, Homo sapiens
cgggcagcgtgggtgagcggcgcagcggcggcagcggagagcgagagaggggagcaggagtccaaaactacttacctggaagaccttc

SEQ ID NO: 543972 - DNA, 99 bp, Homo sapiens
tattggcttctgccaccgatccagaaccctgctcctcaccccacaggttttagctaaagaagatactgaggcagctattcaatcaatattatacaaaga

SEQ ID NO: 543973 - DNA, 100 bp, Homo sapiens
ctttattggcttctgccaccgatccagaaccctgctcctcaccccacaggggctaagccagctctaccataaccagagtcagggactcttatcccagctg

SEQ ID NO: 543974 - DNA, 98 bp, Homo sapiens
acaggaacaagacccggacattccaggccacagtcctgggaagtcagatgggattgaaaggttgtggacctggcctattagcagatgccaagatgcgg

SEQ ID NO: 543975 - DNA, 101 bp, Homo sapiens
tagaagccgggattgagcgcatcaagaactggctgggctataccaagaagagagcacccattggcttccatcgggttgtcgaaattttgcacaagaacaat

SEQ ID NO: 543976 - DNA, 90 bp, Homo sapiens
gtagatccagaaacacaggctagactggaagctttactagaagctgcagtaagctggcaccattcatcgccaaacgccgaacccccaaga

SEQ ID NO: 543977 - DNA, 75 bp, Homo sapiens
ccgaaaatggtttcagcacctgtgtcagcctacaacacagcagtcccctcaggatgagcaggaaaagctcttgga

SEQ ID NO: 543978 - DNA, 76 bp, Homo sapiens
ctgccatcggattgcatcaccaactcaacctaattgcgacatctcgaatcagcgatgcacacttggcagacacaat

SEQ ID NO: 543979 - DNA, 100 bp, Homo sapiens
ctgatgtcaatcttgagggctaggtgcttctcagcttcacgggaaagggcctgctgtaccacggaaattgtgaccgcttcagaggcaaggcttgccactt

SEQ ID NO: 543980 - DNA, 100 bp, Homo sapiens
tccccgcttcgagggttacaagctctctcttgagccgctgccttgttaccagctggagcttgacgcaggtatggctgatggcaagcattgtacttttcca

SEQ ID NO: 543981 - DNA, 101 bp, Homo sapiens
cggcttgccacagtccacatgtcccggaagcagcagaggtgagaactcagaagagaaatacagctggctatctactaccagaagggcttcaaagatatagg

SEQ ID NO: 543982 - DNA, 100 bp, Homo sapiens
gggccaggcactcgcaggctgaatcccaggagaggaaatccatttttgaaagattccctcccaggctgtccctcgccgccttgctacagcccccaagact

SEQ ID NO: 543983 - DNA, 50 bp, Homo sapiens
ttagagcggtttaagtcttcagccagggtcacggagactcaccagttggc

SEQ ID NO: 543984 - DNA, 82 bp, Homo sapiens
ccgttctctcaggctcccgttcagcttgatcctctcccagaaaaggttttacagcaaagacccaatgcaaacgctgtccgtt

SEQ ID NO: 543985 - DNA, 100 bp, Homo sapiens
cgtcagtccggtcttgtcttccagacccggaggaccgaagcttccggacgacgaggaaccgcccaacatggcctcggagtctacaaataagaaacctcga

SEQ ID NO: 543986 - DNA, 75 bp, Homo sapiens
tgaagatgcacacaacatacagacccacagagacagcttggatttgctggcctgtagtggtggagacacgcccag

SEQ ID NO: 543987 - DNA, 134 bp, Homo sapiens
ctcgatgtataacgatccccagtttggcacaagctgtgagatcactggctttggaaaagagaattctactgatggagatgactctactgcaaaaatgacaaccagcaagaaagcgggtggtgcccgtttcctcc

SEQ ID NO: 543988 - DNA, 100 bp, Homo sapiens
cccttccgcgaggcttcggccaagctaaccacgctggtggatgccgacgccgaggccttcaccgcctacctgattgtaaaccatggctgtgtggatacaa

SEQ ID NO: 543989 - DNA, 99 bp, Homo sapiens
cggcgaggagcgagcgctgcgaggtggcggcctgagctggagatggagctgaagatgctgaagtctcagtccagctctgccgaacagagcttcctgttc

SEQ ID NO: 543990 - DNA, 82 bp, Homo sapiens
gcacagagagggcctgggagcttgctgcagcttcagaggctgggaggcggcagaatgcagccagaggagggcacaggctggc

SEQ ID NO: 543991 - DNA, 100 bp, Homo sapiens
gtaaagtcgagtatctggtgaagtggaaaggatggcccccaaaatggagaaggaggagacaacccgggagctgctgctgcccaactggcagggtagtggc

SEQ ID NO: 543992 - DNA, 76 bp, Homo sapiens
caatgacctgatcaagcgggcacggctggccaaggagtgggaatagctttgcgaaaaatgggcgcaatggccaagc

SEQ ID NO: 543993 - DNA, 100 bp, Homo sapiens
cttctggaccccctgttcagatgtaccagatgcctccaggatctttgccaccggttcccgtgtcagtggctatgatgacacctcaagttatcactcccca

SEQ ID NO: 543994 - DNA, 97 bp, Homo sapiens
gagacgcctctctgaccacgaaaccccgcggggaaaagtgacccaagacagtttattttcttgaaaaggctccaggcttcggcttggaaaatcccac

SEQ ID NO: 543995 - DNA, 87 bp, Homo sapiens
gaaaaaattcaaagtcgaatatcatgctggtggctctacccagaattcaattaaagtggctcaggcaaactcaaatgctgagaaccc

SEQ ID NO: 543996 - DNA, 97 bp, Homo sapiens
tggagcccgaggtccccgcgcggcccgggcctggcgccctgaggggaagagcggcccggcccgagggatttatttaatggggatgtgttcaaggcaa

SEQ ID NO: 543997 - DNA, 100 bp, Homo sapiens
ttaacaatggcgaaatgcaggcgaaatgtggaaaatttcctagaagcttgcagaaaaattggtgtacctcagaaccaccgggaggaactgggccattcta

SEQ ID NO: 543998 - DNA, 105 bp, Homo sapiens
ggctgccccacttcgacctgagctgggaggccactagcagccagttccggcccgaggacaccgactaccagcagtgtactaatggtcacttgatgtgcgctggct

SEQ ID NO: 543999 - DNA, 82 bp, Homo sapiens
cccgcgtccagcacctacgtcccgctgccgtcgccgccgccaccatgcccaagagaaagcttgccttgcgccatggactggc

SEQ ID NO: 544000 - DNA, 75 bp, Homo sapiens
cccacactggcttttaaggaggacacccggacacctggaagctgggaaatggtcaccttccgcaaccctgtcatt

SEQ ID NO: 544001 - DNA, 100 bp, Homo sapiens
acggatcatcaacgatgaccaatccctttatgctgacgtctacctggaggatggacttatcaaacccaacatgagtgaagtttcctgcaagaaacgggac

SEQ ID NO: 544002 - DNA, 101 bp, Homo sapiens
caaggaagagaagaaggaacggaaacaaagttattttgctcgaggaccttatcatgtccttcactgtatccatggcaatcgggctggtacttggaggattt

SEQ ID NO: 544003 - DNA, 75 bp, Homo sapiens
ttattgaagctgtttatagtagactgaatccacatagagaaagtgatgggtttgcagaaaaaacttcagcatgtg

SEQ ID NO: 544004 - DNA, 101 bp, Homo sapiens
caaccggggcacagccacctttataacaaccgctatgctgggtgtgaaatctaagaatcccctgccaactcttgagggctcaatccagaatgttgaattga

SEQ ID NO: 544005 - DNA, 59 bp, Homo sapiens
cttcggtgccgagcactccggactctacgggcttgcagtcatgtctacagatcttgaag

SEQ ID NO: 544006 - DNA, 82 bp, Homo sapiens
accaccgcactgtcgctgcccgcctgccctgaggagtccccgctgcttggggaataatcctccaggctgagagcagaaagga

SEQ ID NO: 544007 - DNA, 95 bp, Homo sapiens
tgcaattggcagcttataatctgcaagccttgttagatgacttggataaagaactaaacaactacattatgcgatgtagagaatggtatggctgg

SEQ ID NO: 544008 - DNA, 100 bp, Homo sapiens
atacttgacatctaaaatttttggtattgcagatgactgcacttacatttcaatcgaccaagttccaaggacctatgccataatgataagcagacccgcc

SEQ ID NO: 544009 - DNA, 82 bp, Homo sapiens
ctcagagctgggtgccaggctgaaggatcactgaggaaggggaagtgggcaaagcaggccaagatgctgaattatcagggac

SEQ ID NO: 544010 - DNA, 127 bp, Homo sapiens
cggggaggaggcgacctgccgcgtgttcctgcaagcagaaaaggagttaactagtgcaccaggtggcggagcgggtggaggccctggggcagtttgtcatgaagaccagaaggaccctcaaaggcca

SEQ ID NO: 544011 - DNA, 51 bp, Homo sapiens
ataagtggaattttggagatattcaaaggtgatagtagaaaaggctcccaa

SEQ ID NO: 544012 - DNA, 100 bp, Homo sapiens
cttcctcacttatgtgccactattggggctgaaagccttcctgggccttttcttcatagtcaggttctgggggctggtttgactggatgatgcctactct

SEQ ID NO: 544013 - DNA, 100 bp, Homo sapiens
gtcggtgggcggccgcagctgcgaggagctcactgcggtcctaaccccgccgcagctcctcggacgcaggctcttgtcaggatggtgaagctgttcatcg

SEQ ID NO: 544014 - DNA, 125 bp, Homo sapiens
cccgaatctccttggctgacatcgcccagaagctgcagttggatagccccgaagatgcagagttcattgttgccaaggctatcttagcggcacagagacgaggagaagatgtggagacttccaag

SEQ ID NO: 544015 - DNA, 50 bp, Homo sapiens
ccgggctccgggaaaactacactggccagagtccggcagcgtcttctctt

SEQ ID NO: 544016 - DNA, 90 bp, Homo sapiens
aaagcctctagatatctgtgtgaagtacttgtcaggtctccttgaggtctggtttgcctggacagtgctcaacatggaatccatctttga

SEQ ID NO: 544017 - DNA, 75 bp, Homo sapiens
tggaatgtatcagcaccggacagtcatcgctgaccaaaactggatgttggagccagctctagccacaggagagga

SEQ ID NO: 544018 - DNA, 87 bp, Homo sapiens
ttcgtctcttacgtctgcggaagtgcagctgcctcagttcttagcgcaggtctcttaaccttcattaactgtgcctatgtcaaatgg

SEQ ID NO: 544019 - DNA, 74 bp, Homo sapiens
catgtcggaggagaagctgcaggagaaaggcaagagacgctacaacatcaaactgtggaaaaccttcactgact

SEQ ID NO: 544020 - DNA, 100 bp, Homo sapiens
caaggaaacataagttggaggttctggaatctcagctatatgttctcctttcagccaagacctttcaccagtgcaggggatagaagattcattccacaaa

SEQ ID NO: 544021 - DNA, 75 bp, Homo sapiens
gtcaaatttacagtgcacacaaaggcggcttggatgtgaagtctcaggaagcagctcttcgggcagcgcctgaca

SEQ ID NO: 544022 - DNA, 50 bp, Homo sapiens
tctgggagggatggtctacgctattggagctgataggaagatgtcttcag

SEQ ID NO: 544023 - DNA, 93 bp, Homo sapiens
aagaagtccgagacacgcggtgaggcggcgacgggctccgggtttcaaataaaggagaccgagtagtagaatgtcaattagagactcataata

SEQ ID NO: 544024 - DNA, 85 bp, Homo sapiens
cgccagcccgtgccgcgagcgcggcctgcaggaggtcttgaggaccggcccagctcaggctcctggggcagcggcgaccagagca

SEQ ID NO: 544025 - DNA, 75 bp, Homo sapiens
gatctgaatgccagaagagtctacatgcaaagccaagccaatcagggagcagatactgtgagtgcctacatccct

SEQ ID NO: 544026 - DNA, 98 bp, Homo sapiens
ggaactagacacgttggaagtagctgatgaagataacagtgaaatatcagattcagaggatgacagttgcaagtggcacagggtgcttttaaaaggaa

SEQ ID NO: 544027 - DNA, 74 bp, Homo sapiens
tcctcttacaaggaaatcctaccttgcatggattgggttttcagctgaagatttggagcaagaggtggtggtgg

SEQ ID NO: 544028 - DNA, 131 bp, Homo sapiens
ctggagaagaaaatcgagcaggagctgacggccgccaagaagcacggcaccaaaaacaagcgcgacataaccagtgcggtgcaatccaagcgaagaaaatccaagtaaacaagcaggactgcgacttgata

SEQ ID NO: 544029 - DNA, 75 bp, Homo sapiens
cctacgtatcagctccatccaggccaccactgcggcgggctctggatcagggagcagagaaacatgaaggcacag

SEQ ID NO: 544030 - DNA, 74 bp, Homo sapiens
gggggtcttcctcctccgccgttgacagaggctgacccgcggctgattgagtccctctcccagatgctgtccat

SEQ ID NO: 544031 - DNA, 90 bp, Homo sapiens
ccagctccgaaatcaccaccaagatgccatggacaatattaccaggcagaaccaattctacgatacccaagtcatcaaacaagaaaacga

SEQ ID NO: 544032 - DNA, 75 bp, Homo sapiens
gaaatatgctacagatagatgttaaggacatctgcaaatctttcaccaattttcggagcaacatcccctgtcacc

SEQ ID NO: 544033 - DNA, 100 bp, Homo sapiens
cagccatgctgagggcagccggagccaaggccctgagaaagcctactccgccgtggtcatggaggagggaagtccgggcgaggttcctgtgctggtggag

SEQ ID NO: 544034 - DNA, 75 bp, Homo sapiens
acggtaacccgtgtgactttgactggagcaaagactcaggtggactgaaggccgctatgatcgaattggtggaaa

SEQ ID NO: 544035 - DNA, 82 bp, Homo sapiens
cccaaaccatacagaccaaaacctggaaacaagaggcccctttctgcactttacaggaagggaaaaggccgaggcatcagcg

SEQ ID NO: 544036 - DNA, 71 bp, Homo sapiens
atcggcaaagggtttggctatgtgctctttgagtcccagcagaagtgcatcgtgatctttgccctggtgtg

SEQ ID NO: 544037 - DNA, 50 bp, Homo sapiens
tgtgctgaatcctggctgtgtgaccccaacttcggaaccaaaaagaagct

SEQ ID NO: 544038 - DNA, 100 bp, Homo sapiens
ggaaagtctggactggctccccgtgtggatcaggagaagtgggcccagcgttcattcagcctgcggcgagagggctacaccgtgcaggtgaacgtgaacg

SEQ ID NO: 544039 - DNA, 100 bp, Homo sapiens
cctcaaggtctcgcggtttccccgccgcccacccggacgccgacgaaagccagcgagctcctcagcctcaggaccaggaatcaccttcaagcctatgtcg

SEQ ID NO: 544040 - DNA, 85 bp, Homo sapiens
ctggagacacacaggcagacccatactgcatctgcaaacatagagaattctgggcttccacacaactccagtgctaactcaacag

SEQ ID NO: 544041 - DNA, 98 bp, Homo sapiens
tgaggatgaggacctgcagctggccatggcctacagcctgtcagagatggaggcagctgggaagaaacccgcaggacagacgggatattctcctcgtt

SEQ ID NO: 544042 - DNA, 74 bp, Homo sapiens
tgaatatcaagaggaggagttgttggaatcaaggccagaggtgtgaacaaggtgtcagctctgaagggaaggtt

SEQ ID NO: 544043 - DNA, 82 bp, Homo sapiens
gaagacatggaccagggctacggagaacactctgctccagccaaggtggtgagggcagctgttcctaaacagcgcaaaggca

SEQ ID NO: 544044 - DNA, 87 bp, Homo sapiens
tgctgctctacttgaggaacatgacatttttgttccagaggatgatgatgatgatgactaacaggataaaagaatcagagtgtctca

SEQ ID NO: 544045 - DNA, 90 bp, Homo sapiens
gctgcttcatcttccagtgctgataattatggcattagccatcctgttgagacagggtttcccatgttggccagactggtttcaaactcc

SEQ ID NO: 544046 - DNA, 83 bp, Homo sapiens
gagaaacttaaggagtgtgtgttgcgtgacggtgagaagccctaccactgcaactgggacggctgcggctggaagtttgcgcg

SEQ ID NO: 544047 - DNA, 100 bp, Homo sapiens
ctcgtgcctccctgaaccactccactgcctttaaccctcagcctcagagtcagatgcaggtcttactactttgaccgcgatgatgtggctttgaagaact

SEQ ID NO: 544048 - DNA, 96 bp, Homo sapiens
gccattagtactttctggcctaacttttatcagagcaaagactcaggtggactgaaggccgctatgatcgaattggtggaaaggttgaagttcaag

SEQ ID NO: 544049 - DNA, 100 bp, Homo sapiens
aggaaaaatccgcagagaaattcagaacctcaagcttttcaggcatcctcatataattaaactgaccgcagctgaatgcacagctagaaggttggctttc

SEQ ID NO: 544050 - DNA, 100 bp, Homo sapiens
cggtccagaacccggccctcaccgccctcaccacccctatccagacggctgcccttcaagtaccagtatttcagtgtctgtagacaagatggaatcatct

SEQ ID NO: 544051 - DNA, 74 bp, Homo sapiens
cttgttgctgttgtggttcactgtggaagaatgggttgaatggcttgcatctggcttctaaggaaggccatgtg

SEQ ID NO: 544052 - DNA, 75 bp, Homo sapiens
ttccatggaggattcctctgctgtcctcatggaaagcctaaaggacttgcaattgtgaccaaatatattacaaag

SEQ ID NO: 544053 - DNA, 82 bp, Homo sapiens
gaagcggcagctggatgaagttgtgtcagagacatcagactgcgggttcgggctgaatactgccagcatgagactgctctgc

SEQ ID NO: 544054 - DNA, 82 bp, Homo sapiens
tccgggatgctgtactccttgtctttgcaaacaaacaggttaacacagaaatctgcctcctgggccatgccgcttctaaggc

SEQ ID NO: 544055 - DNA, 88 bp, Homo sapiens
ggagtgtcacttccgtcaggagagagctgaagaagcaggtggagagtgccgagctgaagaaccagcggctcaaggaggttttccagac

SEQ ID NO: 544056 - DNA, 90 bp, Homo sapiens
cgcggtgtggtgaactctctgaggaaaaacctgggtgagctatgaacaggccaactgcaagggcgagcagtttgtgtttgagaagggcga

SEQ ID NO: 544057 - DNA, 51 bp, Homo sapiens
cccgcgggaatgtcgacgaggagctgagctgctgaaatgggttgcggattg

SEQ ID NO: 544058 - DNA, 90 bp, Homo sapiens
gccgagaccattccgtatggagagccggttgccaccttccagagaagaggtacgagatgacaagacaaccataaagtgtgaaacctcccc

SEQ ID NO: 544059 - DNA, 100 bp, Homo sapiens
gaagaggtctcacgaggctgtcatcaccgccatgcccaagaataaaggttcaacaatggatggatgattaagattggaaggggacttgattattttaaga

SEQ ID NO: 544060 - DNA, 75 bp, Homo sapiens
tgagagttctctctggagtctcgagcccgggaagtgcgttttggcccagtgcaggatgccgagaacctcctcgtg

SEQ ID NO: 544061 - DNA, 74 bp, Homo sapiens
aaaactgttcggacttccccgttagaactcgcgtttccacttcagagatctggatgccgttttgatgcaatttt

SEQ ID NO: 544062 - DNA, 83 bp, Homo sapiens
cgcaagaccgggcagatctggcccaacgatggcgagggcgccttccatggagacgcagattgtcactgctgttccaagggcac

SEQ ID NO: 544063 - DNA, 96 bp, Homo sapiens
cgcgaactggaggccgcactgcacagccaccaggaccttgaccctgctgttcacagccagggggaccctcagagcagctggcactgcacccaggat

SEQ ID NO: 544064 - DNA, 97 bp, Homo sapiens
aaccaatttacgagatgacataatgaggcttgatgatacaggaagtggacgttgtggtagcaccatgccaaggcctccggcccacagtggatgttct

SEQ ID NO: 544065 - DNA, 100 bp, Homo sapiens
gagcggacgggccatacccaataaccaggtgcttggcaaaatcgagcgggccattgacagccctcagcgcctttttccaggagaccaacatcccctacag

SEQ ID NO: 544066 - DNA, 75 bp, Homo sapiens
ttttgtacaaggaaatcaacgagcccacggacaagaccttgagaaatgggagattaacccttcagaactgacctt

SEQ ID NO: 544067 - DNA, 50 bp, Homo sapiens
gttcaaccaaaatctcttgtacgatggagtctcgctgtcgcccaggctgg

SEQ ID NO: 544068 - DNA, 100 bp, Homo sapiens
ggaagcggccacggcagagcctggtgcctgaagaggagtcggaggacaggctgcgggaggagctgcaggactgaggtacagaggccaggggcccagggca

SEQ ID NO: 544069 - DNA, 74 bp, Homo sapiens
caaatacccctttgaattaattatggctaattggagcgttattcagtatattaatgtcttattgataatggcag

SEQ ID NO: 544070 - DNA, 99 bp, Homo sapiens
acaaaatacaagataatgccgctggaacttaaaactggcaaagaatcaaattctattgaacaccgtagtcagttcttctcaccactaaatccaatacga

SEQ ID NO: 544071 - DNA, 99 bp, Homo sapiens
agagaactctttaagaaagctcaacagggttaatagaagatgaaattgcaaccattcttaaatctacattgaaaggactagaatatttgcactttatga

SEQ ID NO: 544072 - DNA, 74 bp, Homo sapiens
ctgatttacaggtttctgcaaagattgggtttttgaatgctgggcctaaaggagataacatttatgaatggaga

SEQ ID NO: 544073 - DNA, 100 bp, Homo sapiens
tgaagcagccgatcatggcggatggcccccggtgcaagaggcgcaaacaagccaatcccaggaggaaaaacgatgatattggtgcccatatgaatgtagg

SEQ ID NO: 544074 - DNA, 82 bp, Homo sapiens
cacagacctcaatgtctagtggaggtgttccgttattacccatcactggtgcaagctatatttaacggagatcctgatgaag

SEQ ID NO: 544075 - DNA, 100 bp, Homo sapiens
agccaagcatcatgtgcagaatcgcatgaatgttcacaatctcgccactgtatttgggccaaattgctttcaactaatagggatgccaaaggaaaaatat

SEQ ID NO: 544076 - DNA, 100 bp, Homo sapiens
cccatatctgcaaaatgacagatgtctttgaagcttggttccagtgtcagaagcaagcataatcattgctgtgtcctcagcccacagagctgcatctctt

SEQ ID NO: 544077 - DNA, 87 bp, Homo sapiens
tacaccaggcagcccccaaatcccggcccaggatttaagtgccctgtatgctcaaaatttgtatcctcagatgaaatggatttgcat

SEQ ID NO: 544078 - DNA, 97 bp, Homo sapiens
ttacaacaggtgctccagctgaaggtgcgagaagaagtcagaaatctacagttactcacacaagggctgcgtccaaagaggactctgcggctggtgc

SEQ ID NO: 544079 - DNA, 100 bp, Homo sapiens
acaagacctggtgaaggtggaacggggctcccaggacctccactaatcaccagaacaaaatgtgcagtatcaccttttgccatgatagcatttctttcat

SEQ ID NO: 544080 - DNA, 82 bp, Homo sapiens
cacggatcggattcctcagctacgaggaggcgctgaggagaggtcagcagatccggaagctcatcaaagatgggctgatcat

SEQ ID NO: 544081 - DNA, 80 bp, Homo sapiens
ggaagcagccgatccagcctgcggagcctgtggggcagtattaaaggtggaagaaggtccatatctttttctgtgggtgc

SEQ ID NO: 544082 - DNA, 88 bp, Homo sapiens
gcgagccgagtgtgagcggaaaggggcccggcgtctgcctcgagactgaagaccgggtgttaaataccacattatttgaaagctggga

SEQ ID NO: 544083 - DNA, 100 bp, Homo sapiens
tgcaaatctttcaccaatgtaagtctgccttatgttcctccagccaattgcaaagggaaaggatttgaagatgatcgaattgaggctttacttcataaaa

SEQ ID NO: 544084 - DNA, 75 bp, Homo sapiens
tgaacccagaggtcgtggaggtggccgtggaggcagaggtggcatggggttacgggcaggacttgagtggcttcg

SEQ ID NO: 544085 - DNA, 100 bp, Homo sapiens
tgacacggaccttggacagagaagtaatcgctgtttatcaacctacaacacagcagtcccctcaggatgagcaggaaaagctcttggatgaagccataca

SEQ ID NO: 544086 - DNA, 100 bp, Homo sapiens
gaaaaatacttgcaaatacgtttataacatacactactcagacagggactgctgagatgtcctctattcttgaagagcgtattcttggagctgatacctc

SEQ ID NO: 544087 - DNA, 90 bp, Homo sapiens
cacaatatcgggcagaaagataatcacgggttgaagcatttggattgtaattcaaatctcttggaaactatacctcctgaattggctggc

SEQ ID NO: 544088 - DNA, 100 bp, Homo sapiens
gtgctacccctgtgcagcccctgggcgtctcctacatcgacgaccacgtgcggaggaaggactcctcgctctatatagatatggctcgtggacagcagaa

SEQ ID NO: 544089 - DNA, 96 bp, Homo sapiens
cgggcacctgccgcccgatgtccgagagaccctgtgcaaggcctccgagttctacgatgacgcctttgctaagttgctggagtctggggacttgag

SEQ ID NO: 544090 - DNA, 100 bp, Homo sapiens
gacgagtccgccctcgtcccgcgcccccggggctcgcggagccaggagcatcagatccatgctgctgctgactcggagccccacagcttggcacaggctc

SEQ ID NO: 544091 - DNA, 100 bp, Homo sapiens
caagccctacagcagatgctggacaggacatagatctgattgacatcctttggcgacaggatattgatctgggggctgggcgtgaggtttttgactatag

SEQ ID NO: 544092 - DNA, 108 bp, Homo sapiens
gaagagctatggtgaaacaccactgaagcattgccaagaatatgacagatacctagcatctagcaaaataatggcagctgcttaccttgaccccaacttgaatcacac

SEQ ID NO: 544093 - DNA, 96 bp, Homo sapiens
cattgctctttggcgactcttattgaataagaaagccttgagttttgtgaaaaaccggagaagagaaactaaaaggacagtagaaaaggcttttcc

SEQ ID NO: 544094 - DNA, 100 bp, Homo sapiens
gcaggttctgggagacgcacagctaagatgccaggacatcctggaagctgggaaaagggagttgaccacatttggccatttcccagaagggccccacccc

SEQ ID NO: 544095 - DNA, 75 bp, Homo sapiens
cgccccaagcccgggcgccaccgctgccacctccgcgaggagtggaagctggacacactatgtgacttgtatgaa

SEQ ID NO: 544096 - DNA, 75 bp, Homo sapiens
ctctcagcagcttccaagagaaccaatggaatggagaagggggctagagagctgaaggagagccagtttccccaa

SEQ ID NO: 544097 - DNA, 100 bp, Homo sapiens
tgatttacctgggtgagacagcttgagccccatcgtggattccaagacatccctgctgagagagccaaggtcttctcagtacagcatggtggctggggca

SEQ ID NO: 544098 - DNA, 130 bp, Homo sapiens
gcccatggagctcgagaacatcgtagcgaacacggtgctactcaaggcccgggaaggtgagaagccctaccactgcaactgggacggctgcggctggaagtttgcgcgctcagacgagctcacgcgccac

SEQ ID NO: 544099 - DNA, 76 bp, Homo sapiens
ccgtgacatccgaggtgcctttctccaaaaggtatgatgatgtcaaacgtgatgctgatgctacagttacagcccc

SEQ ID NO: 544100 - DNA, 96 bp, Homo sapiens
aagaagggcagcgagcaggagagcgctcatgatggagcagtccaagaagtcctccctcatggtggcccgcagtattctcaacaacaagctcatcag

SEQ ID NO: 544101 - DNA, 74 bp, Homo sapiens
ggcagactggtgacttcacttttgagtgcaactgccttccagggaaacatggtggtccttgtgcacgacagtgg

SEQ ID NO: 544102 - DNA, 75 bp, Homo sapiens
aacagttaatcctcaatttaagcctgatctaacccctagaaacaggaatatgatgaagaatgggctaagaaaatt

SEQ ID NO: 544103 - DNA, 100 bp, Homo sapiens
cccggccttccagcacccgccaacagaattcatacgaggacagtcattttgtttactcattcagccctgttgcaggtcccaataaactcttcataaggtt

SEQ ID NO: 544104 - DNA, 87 bp, Homo sapiens
cggtgggcagtcctagtccgaggtgccaccgtggaaggacagaatgagctctgcgtgcctcttgctgtgccctacctggacaaaccc

SEQ ID NO: 544105 - DNA, 90 bp, Homo sapiens
gagctgaaaccagtgggtagatgtcgttctgaaacgcagaagccaaagatgttgaccaggaagatcaagctgtgggacatcaacgcccac

SEQ ID NO: 544106 - DNA, 99 bp, Homo sapiens
acatctactgggtcagcttcatcctcggcggcggtggccgctagctccaaggaaggatgcagaaggctatcaacaggctgagcaggcttctgaaacctg

SEQ ID NO: 544107 - DNA, 75 bp, Homo sapiens
ggaaggccgaccgactgccgcgactattgggaagaagttacctgcaactacagcaactccagactcatcaaaaac

SEQ ID NO: 544108 - DNA, 100 bp, Homo sapiens
aagtagatagagaagacaagttggatattccaatgttctttggctccatctactctttgaagcttctgcccagcttgcattgtttctaggagaacctgcg

SEQ ID NO: 544109 - DNA, 100 bp, Homo sapiens
gcgccgctaggatgaagctcgtgagtatgaaaagacacagactgtactctcagaactgaagttgaagtttgaaatgactgagcaggaaaagcagtcaatc

SEQ ID NO: 544110 - DNA, 75 bp, Homo sapiens
caggaacccctggaagcctagaaatgtttcgaggcaggcgtagatccaaatcccggacaggtatggaccgtgggg

SEQ ID NO: 544111 - DNA, 76 bp, Homo sapiens
cccagcaagaccacaaatttattcaagtcaattaccatcctttaccagggtaaatgagctggatggtatcccgttg

SEQ ID NO: 544112 - DNA, 90 bp, Homo sapiens
gatgccactgttctcttcccgactccttagttgctttagtcagctaacctcgtcattatttgccaaatagatggggttttgccatgttgc

SEQ ID NO: 544113 - DNA, 75 bp, Homo sapiens
ggcattttgctgtctcctcctaatacgacatggagattaagtagcttgcccaagatcacccagccagtaaagtgg

SEQ ID NO: 544114 - DNA, 83 bp, Homo sapiens
gctagatacgctggatagaacaggtcctccacagcctgtgaatccccctagacctttcaagcatagtgagcggagaagaagat

SEQ ID NO: 544115 - DNA, 51 bp, Homo sapiens
agagtgcccaattccaaatgtacagtcaggatctggtgattttgaagagaa

SEQ ID NO: 544116 - DNA, 83 bp, Homo sapiens
cctgaacagctgcctccagcagctcaattgcggcgccgcttcggggacgtgttcagcctgcagctggcctggacgccggtggt

SEQ ID NO: 544117 - DNA, 100 bp, Homo sapiens
gtgcctttcgcctcccaccatgattctgagacctccccagcaatgtggaactctgcactgggtgttcaacagccatcactccttggagcatctcctacca

SEQ ID NO: 544118 - DNA, 100 bp, Homo sapiens
cccccatctggaagaggattattctctataatcccagttagagacacaatgacataaacatcgctagacgcccaagcagatggcctgcgatgaagtttag

SEQ ID NO: 544119 - DNA, 100 bp, Homo sapiens
aacgagtgcatcgcccagctgaaggatctcctacccgaacatctcaaacttacagcaatgatagtaagaaatgctaaagatacagctcatacaaaagcag

SEQ ID NO: 544120 - DNA, 100 bp, Homo sapiens
taaattgaaaatattggggccatttagtaacttctttgcaaggtttggtgcacctcgatttggaggaagtagggcagggcccttatctggaaagaagttt

SEQ ID NO: 544121 - DNA, 98 bp, Homo sapiens
tggagtgacggtgccaccgcggcgctactatactggcaattgctggagaagattttgcaattgttgcttctgatactcgattgagtgaagggttttca

SEQ ID NO: 544122 - DNA, 100 bp, Homo sapiens
gaaaacaatgaagattatttacaatgctaccctgctttttctggtgtcctgaacctggaagttgtgctttttaaggctcattggtgggcagtattactta

SEQ ID NO: 544123 - DNA, 75 bp, Homo sapiens
aacggttagcggtggcaggggctgactgagagcgtctgcttggaggaaacacaattattactagaaaacctgcat

SEQ ID NO: 544124 - DNA, 75 bp, Homo sapiens
agcgccaagcaggagctgaaggacttcaggactcagcccaaaaccatgtttgcccaagttgaatctgatgatgag

SEQ ID NO: 544125 - DNA, 82 bp, Homo sapiens
gggggcgcagaggcaggcacggtgcccacgagccctggcaaaggccctgggaggagcggggacactgaggacctctctccaa

SEQ ID NO: 544126 - DNA, 82 bp, Homo sapiens
gccctttgaggagcactggaggaagcacaccctgtcctatgtggacgtcagcactgggaagtgcacagccagaggacaacac

SEQ ID NO: 544127 - DNA, 146 bp, Homo sapiens
cgcctccaccatggagcccaccgcaccgtccctcaccgaggaggacctcactgaagtgaagaaggacgtgttacctcattttgaaagtcttgggaaacaggaaaaaattcctaacaaaatgtcagcttttcgaaatcattgtccac

SEQ ID NO: 544128 - DNA, 100 bp, Homo sapiens
tgacagtctcggagctcctggagctcttcctgcagagcccgctggtgacctgggtggtcgtgtgatggtaacagatgctgacaggtcaatactatctcca

SEQ ID NO: 544129 - DNA, 90 bp, Homo sapiens
tccccaggcagtggaaccttcgggctcctgtgcagtagacattgttgcaatcatgatcggcaatctgaaaggcacaaaaattctgcaatc

SEQ ID NO: 544130 - DNA, 100 bp, Homo sapiens
ctgcagagcgcgcagtacctccgtgaccgattagcactgctccaggtccgggctatcctccagcagctaggtctgaatagcacctgcgatgacagtatcc

SEQ ID NO: 544131 - DNA, 74 bp, Homo sapiens
tcgaccattccaaaaaaatcgccctcaaggacgttttgttctgaagactctcatattcagctctgggaaataat

SEQ ID NO: 544132 - DNA, 83 bp, Homo sapiens
ctgcgctctccgcaccgcggcttaaatgatgtattttgtgatcgcagcgatgaaagctgatcttgcatctttaatggataaaa

SEQ ID NO: 544133 - DNA, 83 bp, Homo sapiens
ccgggacccggtgtctgctcctgtcgccttcgcctcctaatccctagccactatggatggatagaatgacagaagatgctctt

SEQ ID NO: 544134 - DNA, 90 bp, Homo sapiens
tcagatcgagaccagcggttccgagcatttccctccatggagcagagtgctcttaaggaatggtttttaatgaccacaacaagcaagcat

SEQ ID NO: 544135 - DNA, 75 bp, Homo sapiens
tttagagctgcggaacaggacgccctctgatatccacatgaagaccatgcccgccgccatgttcaggctcctcac

SEQ ID NO: 544136 - DNA, 97 bp, Homo sapiens
gtgcagggaagcaactgcagagcgtttggcaacatattgactgcatggggattgataggcagcatattcctgatacatatctatgtgaacgttgtca

SEQ ID NO: 544137 - DNA, 90 bp, Homo sapiens
gacacgggtgaatgctgctaaaaacaagactggggctgctcccatcattgatgtggtgcgatcggatcccgaaggcaagccgaagaagac

SEQ ID NO: 544138 - DNA, 98 bp, Homo sapiens
acagtcttacaccagatatatacttgatagactgaggaatgcagtagcatggatagttgatggtgaatttggagcagacgacttctgtttaacttaaa

SEQ ID NO: 544139 - DNA, 98 bp, Homo sapiens
cgaggaagccctcctgctcctcctcatcagcgaatccatgcgcgtgcctgcagacgaggcctacttcatagtcaaagagattctcgctacagaacgaa

SEQ ID NO: 544140 - DNA, 101 bp, Homo sapiens
gccggcttcgctgcgggtttgcactgcccggagcagtctgaatgccagaatggataaccgttttgctacagcatttgtaattgcttgtgtgcttagcctca

SEQ ID NO: 544141 - DNA, 98 bp, Homo sapiens
ttcagaaggagcaggattaccaaaggtcataggttagcttttcaagacacttcctgcatctctgacctgttgcacctctgttatcttggcacctctgt

SEQ ID NO: 544142 - DNA, 100 bp, Homo sapiens
atgagaagcaggcagaagattgcatcacacgcttcccacatcacaaactttgaggttgatcaatctgtgtttgaaattcccgaatcttactatgttcaag

SEQ ID NO: 544143 - DNA, 128 bp, Homo sapiens
cacctaccgagaagctgccacaaaccaggccaagatccacgctgacgcagagcggaaggaggaagaaaacaggcagattttggcgcggcaaaagtcaaactcacagtcggactcccatgatgaggagg

SEQ ID NO: 544144 - DNA, 75 bp, Homo sapiens
gatcctgcgcgcgggggaactagctggagggcaaggcgggaacaccactctggttatggattcctataagtgtat

SEQ ID NO: 544145 - DNA, 73 bp, Homo sapiens
cagatcgggagcgcaaggtcgccctcaaggccatgatcaaaacgcccaggctgaagcccagagggaacatgaa

SEQ ID NO: 544146 - DNA, 99 bp, Homo sapiens
ccggctggctcaccccggggccgggcagaattgggctccagtctattatcctcccagtccacaacgctgaaccgtggctggacgaatgtttgaggtctg

SEQ ID NO: 544147 - DNA, 114 bp, Homo sapiens
ccaatgtgggggatgaaggcgggtttgctcccaacatcctggagaataaagaaggcccagagcaagagaggcatcctcaccctgaagtaccccatcgagcacggcatcgtcacc

SEQ ID NO: 544148 - DNA, 74 bp, Homo sapiens
agatctgggtgcccgtggaccacaggccctcgttgcccagatcggggccttttccgaagtggttttagctgaag

SEQ ID NO: 544149 - DNA, 75 bp, Homo sapiens
cactagaaacatgtgcaacgagttactgccgataatgaaacctcatgatgctgctgcagcttcagcaatggtgtc

SEQ ID NO: 544150 - DNA, 96 bp, Homo sapiens
gcgggtaccgggcgcgggcagagcgcggcggcgcgggtggacccccaaaagtacaagggcatatttaacggattctcagttacacttaaagaggat

SEQ ID NO: 544151 - DNA, 100 bp, Homo sapiens
ctggtgtgtggggccggaggagtcagctgtgtgtccagaacgtgccatggagacgcttaacgcaacgaaggttttgggaacagtaaaatggttcaatgta

SEQ ID NO: 544152 - DNA, 88 bp, Homo sapiens
gaaattatctctggtgctgcagctctgaaatgcttccagactgcacacttttacttagaggacagtacatcccctagagttatatcca

SEQ ID NO: 544153 - DNA, 75 bp, Homo sapiens
gcagccttcagcttttggcagcatgaaagttagcagacatggatttgattgacatactttggaggcaagatatag

SEQ ID NO: 544154 - DNA, 100 bp, Homo sapiens
aataaggtcttgggccccaatggcctgttgaaaggcaagttgaaatattggatgatgacagaattcagatccttcagtcatttactgcagtggaaacaga

SEQ ID NO: 544155 - DNA, 90 bp, Homo sapiens
tcctggatttcctggttctgtgggctccgtggcaatgaattcttctgtgaagaatttgctgacacaatatcttccgcctggtgctgggca

SEQ ID NO: 544156 - DNA, 74 bp, Homo sapiens
tccttactaaccacgaccatcaaatccgtgtcggagtccttacagggtctagacagtttcaaagtgaaacagaa

SEQ ID NO: 544157 - DNA, 50 bp, Homo sapiens
ccgcatcagccacgcccagaagttgtgtggatgtggaagcagccaagcgg

SEQ ID NO: 544158 - DNA, 90 bp, Homo sapiens
atgtggggggtaaaccactcgactttcaaacctctggttgaaagaaatatacccagttcagtcactgcagtagaattccttgtagataag

SEQ ID NO: 544159 - DNA, 90 bp, Homo sapiens
gctgtatgttatcaataatactttaatgtcattatcaggctactgatgcccgaagggcttttccttgctgggatgagcctgctatcaaag

SEQ ID NO: 544160 - DNA, 96 bp, Homo sapiens
cagaaactgaagaaaatgagaagccgcatggatgaaaagctgaccggttccctgatgtgttacctgcttctgctactgatccaaactgcagaactt

SEQ ID NO: 544161 - DNA, 75 bp, Homo sapiens
ctcttagcagcgcgcggagaagaacggggagccaggttttgggatttgagattgacgcggtgaactctgtccagt

SEQ ID NO: 544162 - DNA, 102 bp, Homo sapiens
cccgacgaggagagcatcgactggaccaagatcgagcccagcgtcaacttcctcaagtcgcccaaagtattgactcggagacaaaaagaggccaagaccaag

SEQ ID NO: 544163 - DNA, 100 bp, Homo sapiens
cagcggtcgcgccggcaagagcagcgggagcggcgcggggaagggggcggtgtccgcagagcaggccaggggttatcaccatgcaagctttgtcggaaga

SEQ ID NO: 544164 - DNA, 100 bp, Homo sapiens
atgaattgctgaaagaattagggtccttgccccttcccttatctacttcagaacagccctcagcagggagagcacctatcagcaatccaggaatgagtga

SEQ ID NO: 544165 - DNA, 80 bp, Homo sapiens
cctgatctctctcgctgtgagacatgtctgagactcctgctcagtgtagcattaagattattcaccttaagcgatttcaa

SEQ ID NO: 544166 - DNA, 74 bp, Homo sapiens
ccagggtccctgaagagggaagacacgcggaaacaggagtacttgattcttcagaaaacctccaaagtagatgt

SEQ ID NO: 544167 - DNA, 90 bp, Homo sapiens
ccttccaagctctactgtgacttcagagacactgccaagcagccttagccctagtgtagaggccaaagagtgtggccagatgcaaaataa

SEQ ID NO: 544168 - DNA, 96 bp, Homo sapiens
ccttcagaaaaagcatccccgaggaggaagacgaatcgttaaacatctgaaagggtcaggtgtctcactttgtcgcccaggctggagtacagtggt

SEQ ID NO: 544169 - DNA, 75 bp, Homo sapiens
ggggtcttcctgtggccctcaaacaaaaaatcactgcattacatcagcagatttggaacattgctaccaataaac

SEQ ID NO: 544170 - DNA, 100 bp, Homo sapiens
accattggagctcatcagactgaccgtgtcttacatcagttcagagagatcacccggaagttcaggctgaattctgaaggcaaacttgagcagacggtct

SEQ ID NO: 544171 - DNA, 83 bp, Homo sapiens
ccgaacctgcctggctagccggcgacttgagtgacgagctggttgaactcatggacctgatacttttctcttgagaagcaaac

SEQ ID NO: 544172 - DNA, 82 bp, Homo sapiens
ctgggtgctatgggtgatcattccaagagaagaggatcacctagcccgggtagaagaggcaatcacccgtatgcttgtgtgt

SEQ ID NO: 544173 - DNA, 75 bp, Homo sapiens
ggaaaatgcgctcgggctggaccagcagctgtccccgccctactccggaccgccccaaagactccatgggatgga

SEQ ID NO: 544174 - DNA, 108 bp, Homo sapiens
ccgtgaccgagagcgtgaccgagagcgcgaatatcgtcatcgttagaaggttgatggacggatggctacatggatgtgatggagatggtttactatcgggaccttccg

SEQ ID NO: 544175 - DNA, 75 bp, Homo sapiens
cagcatgggaagcaaaggccatggcagtaatagcgtgtttatctgacacggacacagggaagctgcagctttatg

SEQ ID NO: 544176 - DNA, 100 bp, Homo sapiens
ctcttcccggcgctctcctggctcccttctgccccagctccgtctcggcggcggcgggctcaaactgtccaggttgctgaagttgaaccacagtcacagc

SEQ ID NO: 544177 - DNA, 115 bp, Homo sapiens
agttgccatcagcaatcatgtcaccccaccacccattccgaaatctaaccatggaggcagtgatgcagcttccaaggagaggactgcccctcacaaaagtaataccggattcccc

SEQ ID NO: 544178 - DNA, 100 bp, Homo sapiens
gaagacaccaaagatgggggaggggaaggctacagcatgctggccatagggattggaaccctgatctacgggcactggagcataatgaagtggaaccgtg

SEQ ID NO: 544179 - DNA, 100 bp, Homo sapiens
gaaggaaacacttagaggaagttctggagatgaaggatgcaccagacacctatcactacgtggtcagtgagccactgggacggaacagctataaggagcg

SEQ ID NO: 544180 - DNA, 97 bp, Homo sapiens
cggacccgggcagcacggagagcctgcaggagaagcccatggagatcggaccccccaaaccccccaccgagctggagcctgagccggagatagaggg

SEQ ID NO: 544181 - DNA, 98 bp, Homo sapiens
tgagcggttgcttgggccagaaggttctctggtggaggcgctcttcctggtgtcccgcccagtaggaaacctgtaggaagtgtcagggactctggaaa

SEQ ID NO: 544182 - DNA, 82 bp, Homo sapiens
taagcctgcacagccgcggcggcagcagcagtgagaggatggtggatgtggggggccagcggtcggagcggaggaagtggat

SEQ ID NO: 544183 - DNA, 89 bp, Homo sapiens
cgggaggctcctgggggccggggctccgagggacaatggtgacagatccaggcaccgagctccacgcaatgcccggatgtctgcacctt

SEQ ID NO: 544184 - DNA, 82 bp, Homo sapiens
cggtgacagagtggagccatggctagaggaggactggaatgaaattgaccccattaaaaagaaagaccttcatcacagcaat

SEQ ID NO: 544185 - DNA, 100 bp, Homo sapiens
ggaccagcttcctggatgacgccttcagaaagaacttagagagtgcactgagattcggtaacccccttctggtccaggatcagtacaagttctgctacga

SEQ ID NO: 544186 - DNA, 89 bp, Homo sapiens
gttgagcctgactaccgcctttttgttgtgcacctgctccccaagctccagcagctggtatccggagtgtgatgcagaagtaccttgca

SEQ ID NO: 544187 - DNA, 98 bp, Homo sapiens
gcggcgggactcacggcagaagtgagctggaaggtcttggagcgaagagctcggaccaagcgctcagattctgctgaagtgatccagtctcgagtgaa

SEQ ID NO: 544188 - DNA, 80 bp, Homo sapiens
tccaagtggagtacgcgcaggaggccgtcaagaagggctcgaccgcgtcaccttcaggccattcagaggaggaaagagag

SEQ ID NO: 544189 - DNA, 100 bp, Homo sapiens
ggagctggagcccgcgcagcgccccgcagggcgatggacggccgaaccccgcgcccgcaggacgccccagccagctaatcttccagtaccaacaattgca

SEQ ID NO: 544190 - DNA, 75 bp, Homo sapiens
gttttcgcctgcagctgctcaccgccttttatgtcaccgcgatacgcaggcggccccaggcccccgatcagaatg

SEQ ID NO: 544191 - DNA, 75 bp, Homo sapiens
aatccctggtgccaaaggctttagaaggttatatcacaggaggtggaatttaattctcctccccttgaatatggg

SEQ ID NO: 544192 - DNA, 75 bp, Homo sapiens
cccggagccgccggccgctagcgtcagcgccagccagccaccattggttcaggcaatcttcagcggtgatccaga

SEQ ID NO: 544193 - DNA, 51 bp, Homo sapiens
ctgcggtgtgcaagtccgactggaacaggagcctccatcattgaagctggg

SEQ ID NO: 544194 - DNA, 75 bp, Homo sapiens
gaggaaggaacgaggcaaggagctaaagcagcgtgcgttcagccctgggtgctgctcacggccgtgaactgctac

SEQ ID NO: 544195 - DNA, 75 bp, Homo sapiens
cttcggcagtccacccaccgccgccgcctcccaggactgcctggacagatcctttcgggcacaggtgttcagctg

SEQ ID NO: 544196 - DNA, 50 bp, Homo sapiens
tgtgctcagtgacatcattcagtcgttccccatcaggaagtcctcgcaga

SEQ ID NO: 544197 - DNA, 98 bp, Homo sapiens
tgtgcttgtgaaaggctccatggtcttgcctccttgcaggaggaaggctgaacaaggacctgcgacattttctcaatcagcgattccagaaggggtct

SEQ ID NO: 544198 - DNA, 97 bp, Homo sapiens
ggccgcttctcgcgggccggggccacgctcagcgccgagggcgagatcgtgcagatgaacaagagaactgggcaacccatgatccacatctacctgg

SEQ ID NO: 544199 - DNA, 75 bp, Homo sapiens
aatatggaaacgactcctcggccgagctgagtgagagtgatcagcagctggactgtgccttggacctaatgaggc

SEQ ID NO: 544200 - DNA, 87 bp, Homo sapiens
cttcggagtacctgcgctatgaagacacgcttcttctggaagaccagccaacagacagaacaatggcagcccgagtacttataattg

SEQ ID NO: 544201 - DNA, 90 bp, Homo sapiens
gcaagggggtagacgcttatactccagactccactccacttggctgtgatcaccaaccagccagaaattgctgaggcacttctgggagct

SEQ ID NO: 544202 - DNA, 82 bp, Homo sapiens
cgacaagccgctggcagccgcggatctcaccgccgctcaggctcattgctatggacagtgctatcaccctgtggcagttcct

SEQ ID NO: 544203 - DNA, 75 bp, Homo sapiens
ctcagccgcttttctgccttcaggatcctccgctcccgaggacttgattattcttagaaatgcacttgacctgct

SEQ ID NO: 544204 - DNA, 97 bp, Homo sapiens
cgcggcggggctgaggcggccgcggggcccgagcgcagggagtgcatccgccccaacccttttccccctcgtctcctgtgagaattccccgtcggat

SEQ ID NO: 544205 - DNA, 75 bp, Homo sapiens
gactctgctcctcactcaccgcgtggacacgatcgatacagatgtcatcatgaagaggaaaagaggagggagccc

SEQ ID NO: 544206 - DNA, 80 bp, Homo sapiens
cgggattggaccgacgcagccatgcatgtagagcgcatgaagtacaggacaataaagcttcctacacatatcaccaggag

SEQ ID NO: 544207 - DNA, 97 bp, Homo sapiens
catcctttacgagcacggcctcttgcgctacgccctggatgagatggaaatgaatggggtgctgaaaggaatgctctcagaatggttttcctccggg

SEQ ID NO: 544208 - DNA, 50 bp, Homo sapiens
tggcaatcaggttctcttttggtgcactttacaggtccccgatgaaccaa

SEQ ID NO: 544209 - DNA, 100 bp, Homo sapiens
ttgcttcatgtgtcctggaaactgggctgggtagagatcaacagcagttcaaggtatttgacctgtccaaagacgacttgatacctctataatgtaacag

SEQ ID NO: 544210 - DNA, 97 bp, Homo sapiens
cctttgccccaatcttgtgtgggcactgaagggggactacaggttcgagagtcgggccaaccactggtctgcgatcatcggaggatcccactccaag

SEQ ID NO: 544211 - DNA, 100 bp, Homo sapiens
gctaaaatgatgactaatttggttatggccaaggaccgcttacaacttctagttgattcgatgtcatcagtcccgtggtggagcctgtggagacaacatt

SEQ ID NO: 544212 - DNA, 97 bp, Homo sapiens
ggcaacatcaggtgactgtcccagaagtgaatcgcagaggcggggtttcaccatgttgcccagactggtcttgaactcctgagcttaagcaatccac

SEQ ID NO: 544213 - DNA, 100 bp, Homo sapiens
actaagctaccagagaatcaagctatccaaatgcgattagttgatgtggcctgcaaggaagacaccatggaggagtctgggtggaagttggtgcacggcg

SEQ ID NO: 544214 - DNA, 90 bp, Homo sapiens
gaaatatctcatagctggacagggaatctagtgaccaacaaaacttgggatcacttttggactgtagaagcggccaggaagaaaaccacc

SEQ ID NO: 544215 - DNA, 50 bp, Homo sapiens
atttgacgttggaggagaatcaggtacaggatctcagacatatctccatg

SEQ ID NO: 544216 - DNA, 98 bp, Homo sapiens
gaaggagttgttgtctcggcagcgcccgcggagacgtgaagaggtttcgtttataatgtcagcccttatatggagtatcatcctggtggagaagatga

SEQ ID NO: 544217 - DNA, 85 bp, Homo sapiens
tccccttcccgccgccgccatgaagtggatgttcaaggaggaccactcgctggcagctggtgctttgaatgtaaatgtgaagaag

SEQ ID NO: 544218 - DNA, 100 bp, Homo sapiens
cagttatccccagattaactctccgagtcggtgctggccaagacaagataaggatgccctgcagtggtctcgccatccagctacagtggagggagaggag

SEQ ID NO: 544219 - DNA, 89 bp, Homo sapiens
ctacgaacccctggacgggagagtctgccggcggagaatataaggtgctccatacttgcttgcagtgcctacgtggctctggctttggg

SEQ ID NO: 544220 - DNA, 83 bp, Homo sapiens
cttttcaagacaccaagtgagaggccaaccagggtggtgaaggaggagatctttgatgacaatgccaagcttccctgcttcaa

SEQ ID NO: 544221 - DNA, 87 bp, Homo sapiens
aagatgcagttttttgatgctgaggagctcctggtcgatgaagaggatgatgtttttggtgaagggatcgcttacacctgagacgaa

SEQ ID NO: 544222 - DNA, 98 bp, Homo sapiens
ttggaggaggtatgcctggactgggccagtatggactttctgtcagattttgagatgatgttgcagcgaaaaaagagcatgagtggcaagcgcagacg

SEQ ID NO: 544223 - DNA, 75 bp, Homo sapiens
gaagcatacatgacaaaatgtggccacagcttttgggtgataaaagaaaatgtggctgaagttacccgaagttca

SEQ ID NO: 544224 - DNA, 75 bp, Homo sapiens
tgtccgtaaccttgtggagaagaccccggcgctggtgaacgggaaatgatcttcattggttagcatgtgccttat

SEQ ID NO: 544225 - DNA, 100 bp, Homo sapiens
atctatcagcaggctccgggctgaagattgcttctcttctctcctccaagcggatgtgatgctggtacaacccagagtagaatttattctgtctttcatt

SEQ ID NO: 544226 - DNA, 83 bp, Homo sapiens
gtagctgtgaagatactcaatcgacagaagattcggagccttgatgtgggccaagaccagcttcaagtctccatggtaccaga

SEQ ID NO: 544227 - DNA, 82 bp, Homo sapiens
ccgtcatcaacgggcagtttgtcgaacgatgttggactcatagtcactgccagaaaggatgccggctccaggagcagcagtg

SEQ ID NO: 544228 - DNA, 90 bp, Homo sapiens
acattgtacaggcccccatgtcatcatactttgaaagattaagcaaatttcaagatggagagtctgatgtgaatgctacacagggagaaa

SEQ ID NO: 544229 - DNA, 75 bp, Homo sapiens
catgaaagtacattggggcacatccggccagttattgaacaaacctttcctttttctaaagttccagaagccttc

SEQ ID NO: 544230 - DNA, 75 bp, Homo sapiens
caaaacagttcattcatattcagcacttcctgctatatcctgatcatcactattgcaaatattgcaaatttggcc

SEQ ID NO: 544231 - DNA, 48 bp, Homo sapiens
cctccagaatggtgtcactgcaggacagtcattttgtttactcattca

SEQ ID NO: 544232 - DNA, 75 bp, Homo sapiens
ccagatgactgctctgagctttggctttggaatgtacaaatatgaaaaacagtagctccgtatcgaatacattga

SEQ ID NO: 544233 - DNA, 92 bp, Homo sapiens
ccccagcactgccaccaaagatcggaactccaacaagaccctgccctctaccacctgacatctttccaggaacagcgtgaggaggacagaag

SEQ ID NO: 544234 - DNA, 78 bp, Homo sapiens
cggctacgctgaggctctccgctcaggacttggtggctttcgaggatgtggctgtgaacttcacccaggaggagtggt

SEQ ID NO: 544235 - DNA, 87 bp, Homo sapiens
cacacatcccagccggtgactgcagtgagcccatttcaatggaaaatccttataaagaacctcttaagaaatgtatcttgtgtggaa

SEQ ID NO: 544236 - DNA, 82 bp, Homo sapiens
catgtctgagactcctgctcagtgtagcattaagcatccctccagacactctgctgtttcctgcctaggcgtggctgcagcc

SEQ ID NO: 544237 - DNA, 89 bp, Homo sapiens
ctactgctgcaagttccaccccaacggatccaccttagcatctgcaggatttgaccgactgatatcccaggcagaaggggatgaggagg

SEQ ID NO: 544238 - DNA, 97 bp, Homo sapiens
gaaggattactcgcccccacctgtggactctgaccgcaaacaaggagagcctactgagcagcctgagtgggtacggtggttgaggagagcaatggtt

SEQ ID NO: 544239 - DNA, 82 bp, Homo sapiens
ggagaccaggaaaatggccacagggctcctgagagccaaaaaagagtgcctccggagccagcgtggtggccatagacaacaa

SEQ ID NO: 544240 - DNA, 103 bp, Homo sapiens
ctggctctggctgtgcgcgctggcgctgagcctgcagccggccctgccggttttaaaatcaaagatgggaaaatcggagaaaattgcccttccccatggccag

SEQ ID NO: 544241 - DNA, 50 bp, Homo sapiens
tgcgaagatgcttccctgtgcaagaggaacttagtgatttggcccgtgac

SEQ ID NO: 544242 - DNA, 88 bp, Homo sapiens
gccgggcaccgaggaccagctcaatgacagtgaagctgtggtctaccaatctagacaactcagtggcaagcattgaggcaaaggctaa

SEQ ID NO: 544243 - DNA, 100 bp, Homo sapiens
tggccgagttcctcgagtggggtttccttgttgcagaatgaaagtgtagaaaaaaacaagagcatacaaagtttgcacaatcagatatgtagctttgaaa

SEQ ID NO: 544244 - DNA, 83 bp, Homo sapiens
cggaattgcagacttcaggtcgtggcagagaaaaccagctgagacagggcgccacttactagcggcttctacgctccggcact

SEQ ID NO: 544245 - DNA, 96 bp, Homo sapiens
ccgtcccacggtctgtggctacggatcccaggaccctcttcgcgggcgattcgcgtagcctcaggatgccaggaaagcctgtgctgacgttactct

SEQ ID NO: 544246 - DNA, 82 bp, Homo sapiens
cagtgagcgcgggactacaattcccaaaggacggtagcactcagcgccccgccaacaggttgtgaccgagattcccgacgag

SEQ ID NO: 544247 - DNA, 75 bp, Homo sapiens
aaaaatgcaatgcatttttacctgttagggtggtcgtgtgatggtaacagatgctgacaggtcaatactatctcc

SEQ ID NO: 544248 - DNA, 96 bp, Homo sapiens
ctcctgggccacccctcctttcaggtcaagggcaccgcgtccgtgctgcagcgccggtcccccaatgaggagtacgtggaggtggggcgcctggga

SEQ ID NO: 544249 - DNA, 83 bp, Homo sapiens
gtgccctcaatgagcacatgaccagcttagcttctgtcctaaagatctgactgcagccatgagcagcaatgagtgcttcaagt

SEQ ID NO: 544250 - DNA, 90 bp, Homo sapiens
ctcatctcattgaggagcagattaattttgcagcctgcattgattctaatgaagatggggacttgagtaaatctaccgtgttgagaaact

SEQ ID NO: 544251 - DNA, 87 bp, Homo sapiens
gtaattgctgaacttaaaaagcagtctaaacctgtgaccacccctgaagaaattgcacaggtcttgtggatgagcagcagaaagttc

SEQ ID NO: 544252 - DNA, 80 bp, Homo sapiens
ccgtgggagggagccatgaagcattacgaggtgaaatgacaatggatgctctgttggctcgattgaaacttctgaatcca

SEQ ID NO: 544253 - DNA, 51 bp, Homo sapiens
atgatgtgcagtgtccaaagagagccagcgtcccatgctcggtggccccag

SEQ ID NO: 544254 - DNA, 82 bp, Homo sapiens
ccggcttcggagcgggagtgttcgttgtgccagcgactaaaaagaggtggcagttttcaaagaacgggagcaaaaagagatt

SEQ ID NO: 544255 - DNA, 75 bp, Homo sapiens
gggcctggtacaagggaatgtcacaagcacaatctcgacatggcaggagctgaggcagctgcaggagcagatccg

SEQ ID NO: 544256 - DNA, 89 bp, Homo sapiens
cgtctctctgctgcggcgcggggaccgctgtgctctcggcctccggtgtggctgtctctgatggtgtcatcaaggtgttcaacgacatg

SEQ ID NO: 544257 - DNA, 75 bp, Homo sapiens
caagcacaaactgaccaagcacagagtcaccagtttccatatgtaatgcaaggattcatgacagatgctgcccgc

SEQ ID NO: 544258 - DNA, 75 bp, Homo sapiens
gcggcgccagcgtagagcggcggtttggaggaaagatgagacgatcaatgtccgagttaccaccatggatgcaga

SEQ ID NO: 544259 - DNA, 90 bp, Homo sapiens
cgaaggcagttctgcaagaggagctattctgatcttggtgaatatgaccatctcccagaacaggccttctatatggtgggacccattgaa

SEQ ID NO: 544260 - DNA, 100 bp, Homo sapiens
aggtccatacatgaagtcaccataaggataccatacttgcagagctccttcagatacataaagaacacattgtaggataccatgaacatgattctctttt

SEQ ID NO: 544261 - DNA, 135 bp, Homo sapiens
ggtgagctgagcctgccgccaagatgccggcctattttcagaggccggaaaatgccctcaaacgcgccaacgggttctgatcccactgcattctccgtccttacccaagccatcactggccaggtgggttttgtg

SEQ ID NO: 544262 - DNA, 75 bp, Homo sapiens
tcatgaatccagctagcaaagtaattgcactgaaagaataaaagccgccctcattctaggggagaatataatgtt

SEQ ID NO: 544263 - DNA, 98 bp, Homo sapiens
attccaacgccaccaattccaacctgaggatggcattccctgtggatatgctggaaaattgcagccatgaggaattggaaaattctgctgaagattac

SEQ ID NO: 544264 - DNA, 82 bp, Homo sapiens
tgaaggtcctgaacgagctctactcgtctgagggaaaaggccataccaatgctggagatgcaatatatgaggtggtgagtct

SEQ ID NO: 544265 - DNA, 51 bp, Homo sapiens
gccctaatggaggtctccagtttcggacctcagcagccatgtcgaagcccc

SEQ ID NO: 544266 - DNA, 75 bp, Homo sapiens
cagaacttttattccttccagaagcaggtcgtgatgaagaaaaattaaagtatattaaaaaatatcttcaggctg

SEQ ID NO: 544267 - DNA, 98 bp, Homo sapiens
acgcgtccggctgtggaagagagcggcggccgctcacaacatgcacagcctggcgacggctgcgagcatacctgaagagagatacaagatgaagagca

SEQ ID NO: 544268 - DNA, 100 bp, Homo sapiens
acgactgcggcgcgctgctggacgaagagctctcctccttcttcctcaactatctcgctgacacgcagggcgtctctggccgagcctctttttgtggaaa

SEQ ID NO: 544269 - DNA, 90 bp, Homo sapiens
ggagaatgcaatgagccattctcttctcacatacagagcccccctccatgcgcctgaaggcccgacccagcagccctggcttttccgtgc

SEQ ID NO: 544270 - DNA, 90 bp, Homo sapiens
cgtgatcaatatcaggaaaggccccatcttcccttcacacctgcagtgggagacatttagtgaacgctcttcaagctcacaaactctgac

SEQ ID NO: 544271 - DNA, 75 bp, Homo sapiens
ctttttaataatgtgtgacccttcacctttgatcccctgacctgcattaccttgacgcaaaatcgaatgaagcta

SEQ ID NO: 544272 - DNA, 100 bp, Homo sapiens
tgtaatttcctagaaggaggattgtaatactgcattgcatgattgtgcagaatctggaagtttggacatcatgaagatgcttcttatgtattgtgccaag

SEQ ID NO: 544273 - DNA, 74 bp, Homo sapiens
tgcgctaccggaatgtcatccagcgagtgattagctccagaaggtcctgagcctcggccacatcagcaccgact

SEQ ID NO: 544274 - DNA, 74 bp, Homo sapiens
ccgtcccggcctgcgcagcctgagcacccaccaaggctccggatgtgttccccatcatatcagggtgcagacac

SEQ ID NO: 544275 - DNA, 100 bp, Homo sapiens
ggaacttcgttgcttgcttgcctgtgcgcgcgtgcgcggacatggcctcaaacggtgattgaattactcagatatgaagatcatcatctaggttttgtgt

SEQ ID NO: 544276 - DNA, 75 bp, Homo sapiens
ggatcttccaagtctggaaagttgaaggagaacgacctgctcagaatgagaagaggaaggagaaaaacataaaaa

SEQ ID NO: 544277 - DNA, 97 bp, Homo sapiens
cacctcctgacacaacaccactcaagttaatgttctcctcagaggtggaagaatatcctgataaagagaaagaaatcaaagcctcttcataatacca

SEQ ID NO: 544278 - DNA, 100 bp, Homo sapiens
gagcgcctcgacctcggtctgaggcccgatgagagaaagggaaagttaaggatgctggagcagaacaatggatttctctttctctttcatgcaagggatc

SEQ ID NO: 544279 - DNA, 50 bp, Homo sapiens
ggaccctggtggaggaagaaagcactgtgacttctgccgtgttcaccgtg

SEQ ID NO: 544280 - DNA, 98 bp, Homo sapiens
gagccaccgcccagccgctcgcaggcgccgcacggagttgcgtcccggggacttggggccgcagggaggtgctggagaatctggtaaaagcaccattg

SEQ ID NO: 544281 - DNA, 100 bp, Homo sapiens
gagaccgtgaccgagagcgtgaccgagagcgcgaatatcgtcatcgttagaagaatttgccagttactttctgactacaaagaaaaacagatgctaaaag

SEQ ID NO: 544282 - DNA, 80 bp, Homo sapiens
ttccagtcaccgcttctttggacccaatgctgaaataaggagctgtggcgcggggccttccaggagtctgagctatgagt

SEQ ID NO: 544283 - DNA, 98 bp, Homo sapiens
agcttcttacctgaacgcttgtcttttacactgttacttcagtcaggtggataattactgtaccttcctcatggaaaaagttttatttaaagtgttat

SEQ ID NO: 544284 - DNA, 83 bp, Homo sapiens
cggcggcatcagcggtagcaccagcactagcagcatgttgagccgggcagtgtgcggacaatgcagatcttcgtgaagactct

SEQ ID NO: 544285 - DNA, 90 bp, Homo sapiens
gctgagatcaaccgcatgatccagaggctgagatctgagatcgaccacgtcaagaagcagtacaagccagctgccatgttgtgagcacat

SEQ ID NO: 544286 - DNA, 100 bp, Homo sapiens
cacagagaagcagacgagttcactagacaaggtgaaggaggccatgcagcggattcacgaccgagggaacattggcaagttaattctggatgtagaaaag

SEQ ID NO: 544287 - DNA, 75 bp, Homo sapiens
gctaaccaaaagtctgttctgatggcagatgatcagggctgtattgaagagcagggggttgaggattcagcaaat

SEQ ID NO: 544288 - DNA, 100 bp, Homo sapiens
ggaggatggttctgtggtcgatgtgtctgagtctgtggaatgcaagtctgccgatgaagatgtcattaagatttggatttacagtgtgagataatcagct

SEQ ID NO: 544289 - DNA, 97 bp, Homo sapiens
tgggcaagctccagagcctgccggaaggctccctcggtcgcgagtatctccgtttcctggatgtgaacgggacgtgaccttggacccggacaccgcc

SEQ ID NO: 544290 - DNA, 89 bp, Homo sapiens
ggggaggcctcatcaccatggcttcctacaacaagttccacaataactgttaccgggacagcatcgtggccgagctggaccgagagatg

SEQ ID NO: 544291 - DNA, 100 bp, Homo sapiens
acatcttgcctcaagtttctttcaccgcagtgggctaccataaacacatcaccttgatttttaatcccacgcttagcagtgtctgcaaaaacgaatcttt

SEQ ID NO: 544292 - DNA, 98 bp, Homo sapiens
cggattcctcagctacgaggaggcgctgaggagagactgtttattccatggctccgttccctttcccacaattggcagagttgagggaaaaatacacc

SEQ ID NO: 544293 - DNA, 75 bp, Homo sapiens
caggacctctgtcagagaatgaaacactcatcgcatggaaagtatcgcgagttccaccgtatgtacggggagaag

SEQ ID NO: 544294 - DNA, 97 bp, Homo sapiens
agcaggaagatatcaaactgtatgatatggcagatgtatgggtgaagatccaagatgttctacagttcaactttgtggggaaacttttgggtccacg

SEQ ID NO: 544295 - DNA, 158 bp, Homo sapiens
gtggcttcaccttttggcagtggtttgatggtgtcctggacctcaccaaacgctgtctccggagctactggtctgaccgagttcgaggaagggctgctggacagatgtcctgccccaggaccccatcccgcgctggtggagggtcgcaggagcagcgt

SEQ ID NO: 544296 - DNA, 100 bp, Homo sapiens
caggatcatcagcctcctctttgccagaagatggaaagggaccatggctaaacctcctggatcattagccagaagcagcagcctgtgccgttcacgccgc

SEQ ID NO: 544297 - DNA, 146 bp, Homo sapiens
ctctaagatgatcgacaagaacctgcgggaggacggagagaaggcggcgcgggaggtgaagttgctgctgttggaaactggcgatggaatatgagaggagccctctggaaagaaaaggacagaccctgtgctttcatgaaagtgaa

SEQ ID NO: 544298 - DNA, 97 bp, Homo sapiens
tactgataaatctttacaagcttgtaaaatctcaggcatttgatctaacagagcaaagatacgtagctgtgaaaattcaccagttaaataaaaactg

SEQ ID NO: 544299 - DNA, 100 bp, Homo sapiens
agacccgaggcctccatgacccccgatgccaaacacctgtggctggttcgttccaccagtcataaaccagatgaaatctatggcatgattgaaagactat

SEQ ID NO: 544300 - DNA, 100 bp, Homo sapiens
cgcttccgcaccatcacctccacttacagaatgtctgaaggggacagtgtgggagaatccgtccatgggaaaccttcggtggtgtacagatttttcacaa

SEQ ID NO: 544301 - DNA, 82 bp, Homo sapiens
ctcacctttgtctccccgatctacggggctgacatcagcggctctttgtatgatgacacgagccaaactcaggctgtacctt

SEQ ID NO: 544302 - DNA, 98 bp, Homo sapiens
tccaagaaccaacccccaaattggctgggacagtttggaatcaagaccatgttggagacagaagaaggaatcctactgctggtcagagccatggatcc

SEQ ID NO: 544303 - DNA, 100 bp, Homo sapiens
tgatgagaggatgtggtggtctactctgatgtcaatcttgagggctagacgaacagcctacacctacaaccccgagcctcagatgtacgcccccagcagc

SEQ ID NO: 544304 - DNA, 96 bp, Homo sapiens
ggaatctcgcgagggttggagttttggcgagagtttgtggaagatggcgcctgttgtgacaggcaatgttgagaatgacagaagaccatgtgcttc

SEQ ID NO: 544305 - DNA, 75 bp, Homo sapiens
acagaatatgacggtggctataccagggactctgttctgattaggaacattgaaattgatagtccctatgaaatc

SEQ ID NO: 544306 - DNA, 100 bp, Homo sapiens
ggtcggtgccggctcaggagccggggatcctcctttgtatttggaactggaccctcagcaccatctgccagtccagcatttggtgctaaccagaccccaa

SEQ ID NO: 544307 - DNA, 100 bp, Homo sapiens
ctgcgcatgtatggccgtgagagcagcaagatggtcaagcaggagatgcgctctgtgctgcggaaggcgggctccccgcgcaaggcccgccgcgcgcgcc

SEQ ID NO: 544308 - DNA, 96 bp, Homo sapiens
gttggatatttagaggacattatcatggacggaatcagcaggaattcagcgtgcacagattcagaaagaactttggcgaattcaggatgtcatgga

SEQ ID NO: 544309 - DNA, 100 bp, Homo sapiens
tatgatgctgatggtgatggagattttgatgtggatgatgccaaagttttattaggtgggtttggaggatttgggacaacatctacaactgcaggttctg

SEQ ID NO: 544310 - DNA, 88 bp, Homo sapiens
gctctgcggcgggtgtccctaaactagcagtttagggtgtcagtatggactttctgtcagattttgagatgatgttgcagcgaaaaaa

SEQ ID NO: 544311 - DNA, 90 bp, Homo sapiens
tccatttggggaaatccttcggatggtgaactcattagaactcctgaagtcctcgcccagaaaccttacagcaaagccgttgactgctgg

SEQ ID NO: 544312 - DNA, 100 bp, Homo sapiens
cagcaacatcgctatgcaggtgcggaagctggtgggcactcagcaccctctgcttaccacagccagaggaagctcaccagtgtgggaaggggcttctcat

SEQ ID NO: 544313 - DNA, 103 bp, Homo sapiens
ccgcgtccagcacctacgtcccgctgccgtcgccgccgccaccatgcccaagagaaagggggatatgagactttctactcggaatatcctgagtgttgcgtgg

SEQ ID NO: 544314 - DNA, 100 bp, Homo sapiens
gtgacagtttatcatgaccgtgttcaggcaggaaaacgtggatgattactacgacaccggcgaggaacttggcaggagatgttacagcccagatagctct

SEQ ID NO: 544315 - DNA, 90 bp, Homo sapiens
cagcaagtgcgcggttggggccactgcgaggccgttttaggagctcgaggccatgagcagatataccagcccagtgaacccagctgtctt

SEQ ID NO: 544316 - DNA, 83 bp, Homo sapiens
ggcgtcctcaatgacttccacaagtgcatctataagcaagagtgagccatggagctacgtgtggggaacaagtaccgcctggg

SEQ ID NO: 544317 - DNA, 99 bp, Homo sapiens
agacttggctagtgcaagccttgtttattttcctcaccactgaatctacaggtctgctggagtttgctggaggtccactccagaccctgtttgcctggg

SEQ ID NO: 544318 - DNA, 83 bp, Homo sapiens
ctcgcttgcctacccgccggcccgcgggtctacttcctcaaaggcacccaggcatgtggaatatgctcatagtggcgatgtgc

SEQ ID NO: 544319 - DNA, 82 bp, Homo sapiens
ggggtctgccttgactgttaccggctcaggaaaagccggccacgcagtggcagcctgcttctgcaaagtggtacgatcgaag

SEQ ID NO: 544320 - DNA, 75 bp, Homo sapiens
agcagttgtctgatgaagagaaggcagacctgttatcctaaactaggtgagtcagcttttggtacatgtgatgat

SEQ ID NO: 544321 - DNA, 75 bp, Homo sapiens
ggggatggcgcatcacacaccaaaggagttcatgatcaagtgttgcccacaccaaatgcttcatccagagtcata

SEQ ID NO: 544322 - DNA, 50 bp, Homo sapiens
tgcctacatcagtcccgacgtgctcagcgcatgatgaccgtgaaggcgaa

SEQ ID NO: 544323 - DNA, 83 bp, Homo sapiens
cgaggatgcgtgttcgcgggtgtgtgctgcgttcacaggtgtttctgcggcagctttctatgggaggattctcgtaacagcag

SEQ ID NO: 544324 - DNA, 75 bp, Homo sapiens
gcctgtgcgccctcaacctgctttacaccgttgtgggactggaaaatatcttaaagtgaacagccaggtacatac

SEQ ID NO: 544325 - DNA, 98 bp, Homo sapiens
aaggaaggcaagcctgcctgcttctgcatcgacagatagccgtcttcagcttgagccccatcactagatgctgttgcatgaaaaagcagaagccctgc

SEQ ID NO: 544326 - DNA, 90 bp, Homo sapiens
cccccggaaaacctaaccatgaagacttgaacttaatacagcaagaaagaccatcaagtttaccataccttctccaggcaaattccgttc

SEQ ID NO: 544327 - DNA, 51 bp, Homo sapiens
tggggcacctaacagtggacacttatggaactgaaggctatttacgagcag

SEQ ID NO: 544328 - DNA, 90 bp, Homo sapiens
acacagttccggaaagcacagccagatggaggagatgtataagaaagctcatgctgctatacgagagaatccagtctatgaaaagaagcc

SEQ ID NO: 544329 - DNA, 100 bp, Homo sapiens
cgactggcggagcaccgccttccggcagaagctggtcagtcaaattgccggtggtggtgtgcacattgagccccggtatagacagttcccccagctgacc

SEQ ID NO: 544330 - DNA, 80 bp, Homo sapiens
gttaaagtcttcagagccctgtatacgtttgaacccagaactgtggtgaaaactattggcttgagggaagtttggttctt

SEQ ID NO: 544331 - DNA, 100 bp, Homo sapiens
agagcctcagtttgtgcaggacaccgacatggaacagggactcactgggggttgacctgacagttcaagaaaaggagaaatatcttaatgtgtctcgctg

SEQ ID NO: 544332 - DNA, 100 bp, Homo sapiens
cacgagatgccccctcacatctatgccatcacagacaccgcctacaggagtatgatgcaaggtgtggatgaggtcaccattgtcaacattttgaccaacc

SEQ ID NO: 544333 - DNA, 97 bp, Homo sapiens
caagctcataacagagatccaatcagcagatgtgtacggatgaaaatacagtgaatttaggaggacttttactccaagcactcctggaatattggcc

SEQ ID NO: 544334 - DNA, 95 bp, Homo sapiens
taaatgaggaatgtctttcctaccatctaaaatacgaaggtttctggctgggtttgtaaaagaatggacttggtctgccagagaatgttgaatca

SEQ ID NO: 544335 - DNA, 97 bp, Homo sapiens
gcggcgactacgacggcgttgatatcggtggtaacgacggcctcagcaggcggggaagatgaaagggctaaagaattacctccaaagccattgtcaa

SEQ ID NO: 544336 - DNA, 90 bp, Homo sapiens
aagatgatgaagatgaagatgtagaaggggatgaggacgacgatgaagtcagtgaggagaatgaggaaaatggggagcaggaggctgaca

SEQ ID NO: 544337 - DNA, 75 bp, Homo sapiens
gatcggggtatactggatacactcaagcaactccgaagtcaagcccgcactctgattacctttgctggaatgata

SEQ ID NO: 544338 - DNA, 100 bp, Homo sapiens
acagtggcctgaagaggaagacgcctgcgctaaagaaagtttcctacactactgaggtttaggggcactgtgaagcaaaagccacgcctcagaatcccag

SEQ ID NO: 544339 - DNA, 100 bp, Homo sapiens
caccaccttagcctcttgatcgaggaagggaccctccattttccatatccaggaaaatgtgatgcgccacaggtatcagcgtctggatcgccacttcacg

SEQ ID NO: 544340 - DNA, 101 bp, Homo sapiens
ccgcgacgcccggcccgcagggcagaagggagaattccacaagttggctgatgccaagatatttttgagcgactgcctggcatgtgacagctgtatgactg

SEQ ID NO: 544341 - DNA, 101 bp, Homo sapiens
aggaagttggacaacatcggctgttttagtgctttttatttttccccaattcagcagagaatattttcaagggggaggctgggaggcggcagaatgcagcc

SEQ ID NO: 544342 - DNA, 98 bp, Homo sapiens
atagagaatgagatagccgtcctgagaaagtacggaaaaaggaccagatcaatattgaaacaaagaataaaactgttcgttttataggagaactaact

SEQ ID NO: 544343 - DNA, 90 bp, Homo sapiens
cagctgagcgctgccgccgccgcagcagagaatgtccaagcacacagatgcagcagaagaggtgctattggaaaaaaaaggttgcacggg

SEQ ID NO: 544344 - DNA, 90 bp, Homo sapiens
gctcggcgcagctgttgcggggccatggcggggaccgcgctcaagaggctgatggccgagtacaaacgctgaagggtatgtgattggcag

SEQ ID NO: 544345 - DNA, 100 bp, Homo sapiens
agcgcatggacagccagaccagcctcgatctgcgcgctacatcctgaaggactatgtcagttgggaccctgaagatgtgaacctcgaaggcagcaaagaa

SEQ ID NO: 544346 - DNA, 100 bp, Homo sapiens
gctacagattattgaagactggaattgaacatggagccatgccagaacagggccttcatcctagaataatcactgaaggatttgaagctgcaaaggaaaa

SEQ ID NO: 544347 - DNA, 75 bp, Homo sapiens
tggtgatattgtagaaattgctgatcatccagcccctcttagaacttgaccaaaatagaagtaaattaaagttgt

SEQ ID NO: 544348 - DNA, 82 bp, Homo sapiens
aatgggactcggccagctggacacaggggtaattttatggagtgtcagcccgagagcagcatctctcaccgtttccacaaag

SEQ ID NO: 544349 - DNA, 75 bp, Homo sapiens
aacaagtgtgtgcatctggctgttagaagaattcatgctcatccggtgactgcagtgtactctcaatgaggaaga

SEQ ID NO: 544350 - DNA, 90 bp, Homo sapiens
cccaggcgtctgaacgtggccctgaccagagcaagcacttttcaggattagaagaggctgtgtatagaaacatacaagcttgcaaggagc

SEQ ID NO: 544351 - DNA, 80 bp, Homo sapiens
cggaggtctcatctttgaactactgccggagcttctgccagaacatacatatgatagttgagaaagacacatattctgat

SEQ ID NO: 544352 - DNA, 74 bp, Homo sapiens
gagcagccgccggcgcctaagagcttgagaattacattgtggaaaacatgaagtcggagatggcccagatacag

SEQ ID NO: 544353 - DNA, 97 bp, Homo sapiens
tgatgagagcattcgaagtgacctcagcagggcatccagctccatattcatgctcagcttctacctgacctgttccctgctgctgaccttggtggtg

SEQ ID NO: 544354 - DNA, 90 bp, Homo sapiens
gagagttctgcgcttccaggtctccttccagcatccacacaagggcgggatgtacgtcttccagctgtttgactactactcggccagcgg

SEQ ID NO: 544355 - DNA, 89 bp, Homo sapiens
tcgatctctggaggcacctgttgcaagtgacaggtaagaagcgcaattccacactctacataaccatgttactcattgttccagtcatc

SEQ ID NO: 544356 - DNA, 82 bp, Homo sapiens
cccatcttcggcatgtccttcgcctgccagtcgtgtggacactgccagcggctgcagccgacttggaatgacctgggagaca

SEQ ID NO: 544357 - DNA, 74 bp, Homo sapiens
gcttctccgccatgcaaggctggcgcgtctccatggaggatgaaaactttcggaagagaaagttgcctgtggta

SEQ ID NO: 544358 - DNA, 75 bp, Homo sapiens
ggaagtaggggtgcacctcagcactatcccaagactgctggcaacagggaacagtgttgataaagactgctgaag

SEQ ID NO: 544359 - DNA, 75 bp, Homo sapiens
gctgatcttgaaggtttacacttgtcaacttcctcttcagtcatcagtggggatcggtggctcatttgctgagta

SEQ ID NO: 544360 - DNA, 100 bp, Homo sapiens
agatttggggggaattacctacaaagatgtaagatccggagcggagcagcccccccatgctgtctgcggacgatgcggagtacccgcgggagtaccggac

SEQ ID NO: 544361 - DNA, 90 bp, Homo sapiens
ggcggatattcctgaacgcaagaaaagctccactgtccctagtccaaactgaaatcggtaaaggaggttttacacttttctggaccagac

SEQ ID NO: 544362 - DNA, 100 bp, Homo sapiens
tccatgccgtcctggggcaccggaaaatccgccgccaggcgctgtccccgacacgggaacatacggtccctaatgagcacagagaagaccaagggcttct

SEQ ID NO: 544363 - DNA, 74 bp, Homo sapiens
aattacctaaatgcactctttcgaaagaaaggaacgaatgcaggaatttgggaactgagctgtgcaagtgctga

SEQ ID NO: 544364 - DNA, 75 bp, Homo sapiens
gaatactggaagagaataaccgaaaaattgcagaagcacaagccaaactgtgattcgcctttgccagtctcatct

SEQ ID NO: 544365 - DNA, 97 bp, Homo sapiens
cggagctggtttctgccgacaacctgcttagacgcctggtgactctcatttcgcagcaggccacgctgctggcctccaatgaagcctttaaaaagca

SEQ ID NO: 544366 - DNA, 51 bp, Homo sapiens
gctgtggcatgtcaaccagcttgggagaatgaagttgaagaggtaaaagag

SEQ ID NO: 544367 - DNA, 101 bp, Homo sapiens
acccggtgtaccgcggcgagaagccccagctgcactacgcgagccaggctgcggcccactacaaaggcacgaaacatgccaagaagctcaaagcactggaa

SEQ ID NO: 544368 - DNA, 97 bp, Homo sapiens
ctggaatattgacccttatttatccagaagattgatcatcatatgggttgcgaggattaaatccaccacacagggtgaaatctatctccatgacaac

SEQ ID NO: 544369 - DNA, 75 bp, Homo sapiens
atcacccagtacgagcgggagaaggcgctgcgcaagcacgctgaggagtcttctcacaagactttcaggattaag

SEQ ID NO: 544370 - DNA, 75 bp, Homo sapiens
cttcacctgtgtaagcagagtgctgagccatcactgtttcagattcttcgctgctgctgccttaccgccgagaac

SEQ ID NO: 544371 - DNA, 100 bp, Homo sapiens
ggccccatcttcccttcacacctgatacaggaattttcctgtggtggaggcaagttggtcaatgctgcatgatgagaggccatatttatgtaatttctta

SEQ ID NO: 544372 - DNA, 74 bp, Homo sapiens
agagaatcctcaattacttcagggttatgagagaatttacaatgaaattccggacattaatctggatgtcccac

SEQ ID NO: 544373 - DNA, 100 bp, Homo sapiens
agccatcttgagaatatgtagcaggagaggtccacatgccttctgggaagacagccacacctgagattgtggacaacaaggacggcacggtcactgttag

SEQ ID NO: 544374 - DNA, 48 bp, Homo sapiens
cgtggaacggctgcttttggaaggttaattatagaaaatgccaagtag

SEQ ID NO: 544375 - DNA, 100 bp, Homo sapiens
caggaacgtggccgacgacaccaggttaatttggagtggcccctggagtcagtttcctacaccatccgaggccccacccagcacgagctacagcctccac

SEQ ID NO: 544376 - DNA, 76 bp, Homo sapiens
ctgcctcagcctcccgagtggctgggattacagggggattcccgaagtcttccgttttctgagaatgtgagtgctg

SEQ ID NO: 544377 - DNA, 75 bp, Homo sapiens
gtgatggcatcaaccgctacgactgtgtctgccaacctggcttcacagatcctgaggtgcagaggcaattcccgg

SEQ ID NO: 544378 - DNA, 75 bp, Homo sapiens
tgcctcagccttccgagtagctgggattacagccttcatgtcaagcgcagaagaatctgtgtcagcccgcacaac

SEQ ID NO: 544379 - DNA, 125 bp, Homo sapiens
tcagctgcgccggccgcgaggccacggagagctcgccttggagagcccaggagcaggggagacatggtcacctgcgttgtgcataactttcagagccggccaccctctggccgaaggctctctcc

SEQ ID NO: 544380 - DNA, 100 bp, Homo sapiens
ctggattgtagctgcatatgcccattttgctgtgtgttacagaattcactcgtgaagtaacagacacacagatgccacttgttgctcctgtcattctccc

SEQ ID NO: 544381 - DNA, 112 bp, Homo sapiens
tgagcagtttgtttctctgtatggcacagaagaatatttgtggtttgcaggaaaaatttagatagcacaacagtggcaattcacgatgaagagatctactgcaaatcctgct

SEQ ID NO: 544382 - DNA, 135 bp, Homo sapiens
gctgcggcattttcttctggtcggccgtcaccttctccagctccttcattccccagcaggcgcacatggaggctgtgcacgcagactggaaggagtacctgaacctgctcatctgcgaggagagccacctcaagt

SEQ ID NO: 544383 - DNA, 88 bp, Homo sapiens
caaaatgaagaaatccgtgaaagcaatcaacagctctgggctgggaatttttgagagatatcttcaatctcctgtttttgttgccaag

SEQ ID NO: 544384 - DNA, 83 bp, Homo sapiens
tggaatattggggggctcggctgcagacttggccaaatggacgggactattaaggtgttgacttcaaaatcaaaactgtagag

SEQ ID NO: 544385 - DNA, 80 bp, Homo sapiens
gcccagtacaccttcaagggggacctggaggtggagctgtccttccgcaagatagcctgggctggaagctcttctacgtc

SEQ ID NO: 544386 - DNA, 99 bp, Homo sapiens
tgcttttgtgctgctcacagtcaccgctgtcattgtgggatttggtgctatggagaaatttttggtagaatataagagtgcagtggagaagaaactggc

SEQ ID NO: 544387 - DNA, 100 bp, Homo sapiens
tgtccccagagcctcagtttgtgcaggacaccgacatggaacagggactcactggggaaactatgttccaacttcctgtcaacaatcttggcagtttaag

SEQ ID NO: 544388 - DNA, 82 bp, Homo sapiens
gaaaatatggatctttacatgttgaatccttgcagcactaaaatttgaggctgacccgcggctgattgagtccctctcccag

SEQ ID NO: 544389 - DNA, 50 bp, Homo sapiens
gcgacgatgcttgctggaggatagaaatgcttttatgggaccaacgctgg

SEQ ID NO: 544390 - DNA, 101 bp, Homo sapiens
cgcgaatatcgtcatcgttagaaggaagcagacaatgatccaacaggggaagcagcagctaatacccagcagacacttactttctatgagctagaccttgg

SEQ ID NO: 544391 - DNA, 50 bp, Homo sapiens
ctcaccttgctgagtgacattggaggagacatcacagctttcccagatcg

SEQ ID NO: 544392 - DNA, 101 bp, Homo sapiens
ctggaggaaggaagtgcggagccagcctgagttgggagaagagctccagagagaactttatattgctgttggaatatctggagccatccaacatttagctg

SEQ ID NO: 544393 - DNA, 76 bp, Homo sapiens
cctgctccctctcagcacctgggcggacggcatcagaagttgagagacaactctccatgcaggtccacgccctcag

SEQ ID NO: 544394 - DNA, 100 bp, Homo sapiens
cgcagtggtcgcttcttctccttgaacaacaccgatggacttcaggaacttgcctgtgggggcttaatttattgcttgggagttgtgttcttcaagagtg

SEQ ID NO: 544395 - DNA, 100 bp, Homo sapiens
aggcgcttctgcatctgtgggccgaggtattagaaaactactcggatgctccaatgacaccaaaacagattctgcaggtcatagaggcagaaggactaaa

SEQ ID NO: 544396 - DNA, 75 bp, Homo sapiens
ttggttgggacccgctccaaccctcgataaacatgatgctggcaaacctgtacaagaaggctggtcaggagcgcc

SEQ ID NO: 544397 - DNA, 100 bp, Homo sapiens
gccagggcttcctggcccgaaaggagagcctgttcgttccaccagtcataaaccagatgaaatctatggcatgattgaaagactatctcctggcactcgc

SEQ ID NO: 544398 - DNA, 82 bp, Homo sapiens
ctgcgactccggagacagcccaaatatcctcggaagagcgctcccaggagaaacaaggcatgaaaatcaacatggacaagaa

SEQ ID NO: 544399 - DNA, 100 bp, Homo sapiens
ccccagcgtccgaacgggcagaccccctcgagccgcgaaggagcccgagaagcagccacgatgtgcggtttttcgttggaatatacgttgcacatttatg

SEQ ID NO: 544400 - DNA, 82 bp, Homo sapiens
gcgactggacttacgaggagcagtttaagcagattttgcaagaacgaggctcaaggatgtgagggacacagtattgacagct

SEQ ID NO: 544401 - DNA, 98 bp, Homo sapiens
ggcagtggtctgtatgatgaagcaatacggcatttttcaacaatgcttcaggttcaaaccttgtactactcagctgatcacaagctgcttgatgggaa

SEQ ID NO: 544402 - DNA, 82 bp, Homo sapiens
ccggaaaccaggttcgtggctatcccactcttctctggttccgagatgggaaaaaggactcagaattcatgattgaagaaat

SEQ ID NO: 544403 - DNA, 50 bp, Homo sapiens
cggctcgggacccaactctgcgagccagctaaaccaggtggacaggtgaa

SEQ ID NO: 544404 - DNA, 82 bp, Homo sapiens
ctaagaaggtctgcccaggactcaggtgtcgtgaaaactacccctaaaagccaaaatgggaaaggaaaagactcatatcaac

SEQ ID NO: 544405 - DNA, 98 bp, Homo sapiens
atcgcctgctttgattcattgaaatggccaatccgccatggtatagttgaagattgggacttaatggaaaggtttatggagcaagtgatctttaaata

SEQ ID NO: 544406 - DNA, 74 bp, Homo sapiens
cgggggccacactgcaggcctccgcgctcagtgtggctgacaagattttgaaaaagaaagaataccctctttat

SEQ ID NO: 544407 - DNA, 87 bp, Homo sapiens
gggtaggagatggagaaattccaagttcagattctccagccagattctactgcaactgaaagagcaattgccagactagcagtacat

SEQ ID NO: 544408 - DNA, 96 bp, Homo sapiens
gcggccgtcctccaccgtttcctccaggacagcacctagtcgtggccggaggagtctcagagctgtcagaaaggatgattatgtacttgaagtgag

SEQ ID NO: 544409 - DNA, 82 bp, Homo sapiens
gtccctcaccgcggcatcaagcagtctggggagcagggaggagccctgtgccctgtcccaggatccatgggtaggaacacca

SEQ ID NO: 544410 - DNA, 100 bp, Homo sapiens
ggacacgaggcggcgggctggagacatggaccgcggcgagcaaggccctgccctgggagaagccctgccacacgtcgtgcccacgctgagggcctgtctg

SEQ ID NO: 544411 - DNA, 90 bp, Homo sapiens
agcggcgagcagaactacggcgagcggtcctctttgatacgcaacctacggctctctgagtccttgaaaaagaaccaactctggaacggg

SEQ ID NO: 544412 - DNA, 95 bp, Homo sapiens
cgcaaccattgacgccatgtcgggttattcgagtgaccgagaccgcggccgggaccgaggtactctgtgcaaaaaacctggtgaaaaaggatttt

SEQ ID NO: 544413 - DNA, 100 bp, Homo sapiens
tcgctgtaggcttcctgtgccatgacctccggtcacacagctccttccagggctggtgtgtgacagctctgtgctgctgtgcctcaagaagagatttcac

SEQ ID NO: 544414 - DNA, 96 bp, Homo sapiens
tttctggacacagaagtatttgtgacaggtctcggacagcccgggagacgagccctcggagtccccatacgaaagtgcagacgaaacacaaactga

SEQ ID NO: 544415 - DNA, 75 bp, Homo sapiens
tagagccccgccggagaggctgggcggctgccggtgacagcatctggaatcaagagacccatggcatctgaggtg

SEQ ID NO: 544416 - DNA, 104 bp, Homo sapiens
ggaaatctcagttctaggaaccgtgtcctttcgtcccggagaacggtggggatgggcaggaagggagtgagcccgggtcccacaccatccttcgaaggtctcag

SEQ ID NO: 544417 - DNA, 74 bp, Homo sapiens
tttcaatgctgcgaaagctgccaaaagtgacatgcagatttggatcatacagcagatgtccagtgagtatagcg

SEQ ID NO: 544418 - DNA, 96 bp, Homo sapiens
ccggctaatttgcaatacggaaattttaataggtgtcatggagaaactccagctgggcccagagattctgcagcgggaaaatccaaggcttattta

SEQ ID NO: 544419 - DNA, 75 bp, Homo sapiens
agaacagaagctttatctgtgatagaattgctgcttaaaaaacttgaagcaaaccagtccagctacgggggccca

SEQ ID NO: 544420 - DNA, 105 bp, Homo sapiens
aaagagcttctctccagagtagaaaggtattttgaaggtggcgtctcatctgtctacctctgggatctggatcatggctttgctggagtgatcctcataaagaag

SEQ ID NO: 544421 - DNA, 98 bp, Homo sapiens
caccgttatgtgggaagcgaatccaattccagactccatcatttctcgtggtgttcaggtgctcccacgagacacagcctccctcagcactactcctt

SEQ ID NO: 544422 - DNA, 75 bp, Homo sapiens
gcctccccagccatgtggaactatgtgggaagaatatcctgatgtttatggggtcaggcggtcaaaccgaagcag

SEQ ID NO: 544423 - DNA, 100 bp, Homo sapiens
gaggggtgtttctggccacgtgcttcaacgctctgctgcccgctgtgagggaaaagggctgaagaagatgcagagcagcctgaagctggtggactgtatc

SEQ ID NO: 544424 - DNA, 75 bp, Homo sapiens
cgtgaagatcagcgtttccaggcagacgcttttcgaagattccttccaacagtttcgccgtgaggaagatgcgga

SEQ ID NO: 544425 - DNA, 100 bp, Homo sapiens
tccgggttcgagtaattctcctgcctcagcctcccaagcagctgggtctacagagtctctacaaggaagataacggactgtaaaattctataaagcaaag

SEQ ID NO: 544426 - DNA, 75 bp, Homo sapiens
gcaagatcttatgcggctaggtgcctgggaagtaacagcaagaggtgcaggagaacccggggaggaggcccaggc

SEQ ID NO: 544427 - DNA, 100 bp, Homo sapiens
ctttgtttgaccacctaactgctcgaggcattcaagagccggtgaaacctgaagaaggcagagatatggcaaacaggattggcgcttttgggtacatgga

SEQ ID NO: 544428 - DNA, 83 bp, Homo sapiens
gggccggaactggagccgaggcgcaggtggcgctggatccagagacaatggccccgatgggatggagcccgaaggcgtcatcg

SEQ ID NO: 544429 - DNA, 80 bp, Homo sapiens
ggcccggcgtctgcctcgagactgaagaccgggggatatgagactttctactcggaatatcctgagtgttgcgtggatgt

SEQ ID NO: 544430 - DNA, 75 bp, Homo sapiens
gacaacagcagccctggcccaggttctgaggcccgtggtatcaatggagggacgtgtggtgtgctactgcggaag

SEQ ID NO: 544431 - DNA, 100 bp, Homo sapiens
tgctgcaaattaattcatcattagagaaattagatctgggtgactgtgatctggttggatgtactggaaaagtcataggaattgatcacattaaagagct

SEQ ID NO: 544432 - DNA, 100 bp, Homo sapiens
ctgaaggccagaaagtgcatcctggcgggcgatcacaagcagctgccccccaccacagtctctcacaagctcttgtcaggatggtgaagctgttcatcgg

SEQ ID NO: 544433 - DNA, 75 bp, Homo sapiens
ccgccaccgtcgccggccgcccgcacgtccgtccgcatcctgaggttagcattacacttctcccagtggagccca

SEQ ID NO: 544434 - DNA, 75 bp, Homo sapiens
tgggacggtcatgaggagctgaaggccatcgtatggtatatttaaagttggagttcgttgctaaagatggcagac

SEQ ID NO: 544435 - DNA, 75 bp, Homo sapiens
cctcgaattagcaaaggaaacttttggaaatatattcttccctctctcctgcctttatgaggaaactgatcatca

SEQ ID NO: 544436 - DNA, 74 bp, Homo sapiens
gcggcctgtatcaccagaggagattagacgtagcagattagggcaaagaaaaaggtgattcctgcacctaaacc

SEQ ID NO: 544437 - DNA, 75 bp, Homo sapiens
accagatgacaagcttacattattttgtgaggtgaatcaacggaatgtaccaggtattgacagtgcatacctggc

SEQ ID NO: 544438 - DNA, 75 bp, Homo sapiens
ggataaggaagacttcactatgatgaagagagccatctttgcaacgcaggaccctttaatgaggctgcaagcaaa

SEQ ID NO: 544439 - DNA, 109 bp, Homo sapiens
ggactgataaaatatggaaatgtcgggggcctcatcagaaatgttacacacggagtatcaaactctgctgccaaggtgcaaattgagcatgacccagaattagaaaaag

SEQ ID NO: 544440 - DNA, 90 bp, Homo sapiens
gcggggcgccctccgccacgcagccggccaccgccgagacccagcacatcgccgaccaggaaatcacattctgcctgatgaagatctggc

SEQ ID NO: 544441 - DNA, 98 bp, Homo sapiens
agggcaaccaagagagccccaaagccactggagtctttaccacacgaggaagataccaactagagataaaaataccagaaacatacccatttaatccc

SEQ ID NO: 544442 - DNA, 83 bp, Homo sapiens
ccccgcgtccagctcgcccagctcgcccagcgtccgccgcgcctcggccaaggtttctctccatggaagaggagaagaccaga

SEQ ID NO: 544443 - DNA, 100 bp, Homo sapiens
gggacctgtcccacctggcggccatcgtcatcctgctgctgaagatctggaagacgcgctcctgcgccgttaatggaatttctcagtgacaacaacgaag

SEQ ID NO: 544444 - DNA, 132 bp, Homo sapiens
ctactagtcgcgtgagaacacttgaaaataagaataacttactggaaattgaagtgagagccttcaacgccctgtgtcacagcacccacttgtacgggcggaggctggtgctggagtgggccgactccgagg

SEQ ID NO: 544445 - DNA, 82 bp, Homo sapiens
cgcctgagcccgcccttgatcttcgctgtggcatggcggacgaggggaagtcgtacagcggaggaggcctcggtggtaccag

SEQ ID NO: 544446 - DNA, 80 bp, Homo sapiens
gggatttttgagctggtggaagtggttggaaatggcacctatggacaagtctataagggagtgcatccgccccaaccctt

SEQ ID NO: 544447 - DNA, 83 bp, Homo sapiens
cccagatccatttacactttacattgagaagctgatgtctcctcgacttccaactggaaccttgaacccccacatttctggac

SEQ ID NO: 544448 - DNA, 100 bp, Homo sapiens
ccgtgcgccgcagcccgggcccaggccccggcagcgcctgggacaaggtcctcagaatggttggaatgaccctccagctttgaacagagtacccaaaaag

SEQ ID NO: 544449 - DNA, 75 bp, Homo sapiens
gcgacgtgcgcctcgggagtcggcctgtgagtgaggtcctttggcactgaagaccgtcccacagataggcctgcg

SEQ ID NO: 544450 - DNA, 100 bp, Homo sapiens
ctgtcgccgctgctgggagatgggcctactcgcccgccaccctgcgctgccgccgctctgaggagttaaagtaaccaaaatatccactgaggatgatgga

SEQ ID NO: 544451 - DNA, 100 bp, Homo sapiens
cgaagctggccaaagcctgcccagacggctcacctgtgcgggatggaacaaaagcggccagcctcccaactacgagatgctcaaggaggagcaggaagtg

SEQ ID NO: 544452 - DNA, 83 bp, Homo sapiens
tacaacctctcttacaacaaaatggttttccactccattgttgttagaagccagtattgactcggagacaaaaagaggccaag

SEQ ID NO: 544453 - DNA, 100 bp, Homo sapiens
ccgctacctcatgggggagacgcagctgtgcaccacaaggtttggtgcacctcgatttggaggaagtagggcagggcccttatctggaaagaagtttgga

SEQ ID NO: 544454 - DNA, 76 bp, Homo sapiens
gctcctcacttcctagacaggatgacggccgggaagagtgccgagattgcagcctctgcccggccgccaccccgtc

SEQ ID NO: 544455 - DNA, 99 bp, Homo sapiens
cgggcggcttcctggcctgggcgctccggtggcggcggaggctgaaggtgatgtggccgccctcaaccgacgcatccagctcgttgaggaggagttgga

SEQ ID NO: 544456 - DNA, 75 bp, Homo sapiens
cgagggatcattgaccaaatccaagaggcgtagaggctccggtgttttttgtgccaattgcctgaccacaaagac

SEQ ID NO: 544457 - DNA, 100 bp, Homo sapiens
gtggtatgagagtggataatataatcaactcctctgcctgttgagtcagcagatactggagttatttgaaacatgtcagcagcaaataagtgatttaaag

SEQ ID NO: 544458 - DNA, 82 bp, Homo sapiens
aggactgttttattcttggggactggagatggccagttacttaaggtttactcctggcttgggggcattaggaagcactgga

SEQ ID NO: 544459 - DNA, 75 bp, Homo sapiens
cgcagacaggatccccttccaggaggactggatgaagatgaaggtgtacgaagccatcgacagcagagatggagc

SEQ ID NO: 544460 - DNA, 100 bp, Homo sapiens
ctccagaaaattcagcaaagaagaagcttttaaggctctaaaatccatccagttggccctgattggagtccttcaaatgcagatcttttcccaagccaag

SEQ ID NO: 544461 - DNA, 87 bp, Homo sapiens
aaattgatgtttgtgaatccacctgagttgccagagcagactactaaagctttacctgtgaggtccctttcaatgcagtcgcactcc

SEQ ID NO: 544462 - DNA, 82 bp, Homo sapiens
ttaaatgctgatgaagctgtcactcgaggctgtgcattgcaggcattccttggaggtctaaattgggcatttataggtgttg

SEQ ID NO: 544463 - DNA, 50 bp, Homo sapiens
ccgaaggttcaattatgtggtcaaagcttcagtttcacattcttggtacc

SEQ ID NO: 544464 - DNA, 96 bp, Homo sapiens
ctcagaatcaccagccttcttcagcaccacctttttggggaagatttacctagctgccagactgttggcaagagtagcaagatgctgcagcacatt

SEQ ID NO: 544465 - DNA, 113 bp, Homo sapiens
cgccagcggccgagcgggcggcttcctggcctgggcgctccggtggcggcggagctggagcagatccgcagggacatccgagacttccggtctagcgcggggctggacaaagt

SEQ ID NO: 544466 - DNA, 83 bp, Homo sapiens
gaacagctctttgcatccggagagtggacaagaaagactttttttatgaagacatggagtccttgacgcagatgcttagggcc

SEQ ID NO: 544467 - DNA, 117 bp, Homo sapiens
aaatgtccatgagaaaaagcttggagataaagttgctttttactggcagaggtggaggagacactgaagcgactgcagagccagaagggagtgcagggaatcatcgtcgtgaacaca

SEQ ID NO: 544468 - DNA, 118 bp, Homo sapiens
gacccagaccctggagcctcagttggaagcagccgatccagcctgcggagcctgtggggcagaaggaagaggcccagcagaagggactcgctgagccaccccccgccccactccatgt

SEQ ID NO: 544469 - DNA, 82 bp, Homo sapiens
gtctgtgcagatgtacgcccaagccgccctggatggagactcccagagaggaccaggtaaacttccgtggattcatgcgaac

SEQ ID NO: 544470 - DNA, 96 bp, Homo sapiens
tctatttgaatcctggatgtatttttctcacagtcttcttgcttcctgaaatttcctctgatacagatccacgggttttagaaaaacaagaattac

SEQ ID NO: 544471 - DNA, 75 bp, Homo sapiens
aagtagtagtccctgggatccgtatgtccattaaacttcatcagattgtagaaggcatgaaacaaaaaatgtgga

SEQ ID NO: 544472 - DNA, 75 bp, Homo sapiens
gggattggaactgtgtttgggagcctcatcattggttatgccagggaacccttccaaaacacagaggagccatat

SEQ ID NO: 544473 - DNA, 83 bp, Homo sapiens
ccgaaaactccaccgtagcccttgccaaaggatgggagcaaagtgtttacggcatcgtgtgataaaactgccaaaatgtggga

SEQ ID NO: 544474 - DNA, 75 bp, Homo sapiens
tgtctccttagctgctcacatatggatactttcacagttcagccctactgccaataaagggaaaataagagatgc

SEQ ID NO: 544475 - DNA, 90 bp, Homo sapiens
agttgatgaccagtctttcccatatcagagcatcacttttcctgagttaagcaataaagttcaaaccttgtactactcagctgatcacaa

SEQ ID NO: 544476 - DNA, 154 bp, Homo sapiens
gggcagcgtccctgtgacctggccgatgaggaagtactgagcctgttggaggaactggcccggaaacaggaggacgctgttactgaggcggagacacgggtgatgattggctttctggggagagaggaagtcctgtgattggccagatctctgg

SEQ ID NO: 544477 - DNA, 75 bp, Homo sapiens
gctacgaagaagtgcttcagcgggccaggaagcgcatccaggagactgtcttctgaagattgatgtctatttcct

SEQ ID NO: 544478 - DNA, 83 bp, Homo sapiens
tttaatgactttggtgccctcaacatctctcagagacgaaagcatcctggtggggaagaagttttaagggaacaagctggagg

SEQ ID NO: 544479 - DNA, 97 bp, Homo sapiens
tctttccggatcaatccagatggcagccagtcagtggtggagatacaggtatccccgtttttacaacagatgttcatgcccctgcttcatgcaattt

SEQ ID NO: 544480 - DNA, 83 bp, Homo sapiens
aaaccctaatgctcctatgttaccgccacctaaaaacaaagaggattttgagaagattgcatcatcagagaaaatacacccag

SEQ ID NO: 544481 - DNA, 100 bp, Homo sapiens
ggtggacagcaaaggctttgatgaatacatgaaggagctagtttgacggtgagaacatgtatatgagcatgacagagccgagccaggactatgtgccagc

SEQ ID NO: 544482 - DNA, 82 bp, Homo sapiens
catgaggaggcctggggaccatgggctccaggatcaacttgctaatctggacctgaactctgaaaaacagagtggaggagca

SEQ ID NO: 544483 - DNA, 100 bp, Homo sapiens
caggagggcacagcactgcacctgcagacaagcctgccagccctttctgaggcagatacccaggaactaacccagtgagcatgtttttgaacacattaac

SEQ ID NO: 544484 - DNA, 51 bp, Homo sapiens
ctctctgattctgggccaagataatgattcggaggaacctgagtgcctcag

SEQ ID NO: 544485 - DNA, 82 bp, Homo sapiens
cgggttcagttcgtcatggggctgtttggaaagacccaggagaagccgcccaaagaactggaagaggaggctgcaaaatggg

SEQ ID NO: 544486 - DNA, 90 bp, Homo sapiens
cgcagaaaccccgttgacaaggcactgctttttcatgacggtctcctctgagcctccggcctccataagacccaaaacagatgacacctc

SEQ ID NO: 544487 - DNA, 90 bp, Homo sapiens
tgctccttattttagatcgctgtgatgatgccatcaccccattgctaaaccagtctctgctggatgaaccgaatcctaacagtccagcca

SEQ ID NO: 544488 - DNA, 100 bp, Homo sapiens
ggagaaggcctaaaaaatgtcatttttaccaactgtgtaaaggatgaaaatgtcaagcagatcttcgtgaagactctgactggtaagaccatcaccctcg

SEQ ID NO: 544489 - DNA, 99 bp, Homo sapiens
ggcgaaggtggagcaggtcctgagcctcgagccgcagcacgagctcaaattccgaggcacgtggactccctttaatccagtgactgtcaggtcgatcat

SEQ ID NO: 544490 - DNA, 83 bp, Homo sapiens
ataaaactattttgctgttccaggtgcaggtgatggtcctaccagtgtgtctgttgaggtcacccgtcctaaagtgacctccc

SEQ ID NO: 544491 - DNA, 100 bp, Homo sapiens
agggaaaacccccattcattctggattggtggatctgaagtacaaaatattttccaggacctgaaggagaagaaggagaaggtggaggagaaggcaagcc

SEQ ID NO: 544492 - DNA, 101 bp, Homo sapiens
ctcagaagcaccactggaaactcaggtggcctcagccccgagtccaagaagatcctgacacccgccctcaagaagcgggcccgggctggccgtggggaggc

SEQ ID NO: 544493 - DNA, 95 bp, Homo sapiens
cccgcaaggatggcctttcctaccagaagctgaacatggttatgcctccatgttaccatacaataacaaggacagagatgccttaaaacggagga

SEQ ID NO: 544494 - DNA, 83 bp, Homo sapiens
agagataattgataacaccctgtaacagctgagtgtttcccattaaacactaccaggacaaaatcaggccttacatccagctg

SEQ ID NO: 544495 - DNA, 75 bp, Homo sapiens
ccaggactgcgcccccgggagcgggcgcccagaggaatatcagaagctctttcctgacattcccatagggtattc

SEQ ID NO: 544496 - DNA, 75 bp, Homo sapiens
ggtcgtggtctggctgtggcggaggagcataagaaggaccaagaatcgccttcagccctgtctggtgcatccttg

SEQ ID NO: 544497 - DNA, 83 bp, Homo sapiens
gggtttggagcatatacccaacttttctctggattctttatagctccaagctctacagattcttcaaatatattgagaatagg

SEQ ID NO: 544498 - DNA, 82 bp, Homo sapiens
gaaaagaactgaataagagcatcaaccctgatgaagctgttgcttatggtgcagaggacaagggcgtggatctgggccagaa

SEQ ID NO: 544499 - DNA, 76 bp, Homo sapiens
acctgacagaacttcacaggagaactctcctgcccttttaggagtgcaaaaaggcagagatcctacaagaatccag

SEQ ID NO: 544500 - DNA, 100 bp, Homo sapiens
gagctggggagcccttctgcgccacaggtgtctgcagcagcaccctcaggacagcctgcccacagccagcgtcatcctctgtttccatgatgaggcctgg

SEQ ID NO: 544501 - DNA, 83 bp, Homo sapiens
ctcgagacttaccagagccacaagagacaagaggagcagcagcggcaccgcccctcaccctggagggtcctgtacaatctcat

SEQ ID NO: 544502 - DNA, 100 bp, Homo sapiens
aagaaagttagatttgttggacatgctaaacagagaatacaagaggattatcttagaattttaagatacttcagtagccggatcgagctgggagatgtga

SEQ ID NO: 544503 - DNA, 82 bp, Homo sapiens
atgttttggggattccactctccagtgtaatgattattgacaacagtgagaaggcaaccaaagtgcaggacatcaaaaacaa

SEQ ID NO: 544504 - DNA, 100 bp, Homo sapiens
gcgcccgggacggcggcggacctgtcgcgatgtcagggctgcgcctctctgcagcagatgatcatgacgcagtcctgaggtttaatggggcacccacagc

SEQ ID NO: 544505 - DNA, 83 bp, Homo sapiens
ctgacagcgagatcgcttgtagatctgactgcagccatgagcagcaatgagtgcttcaagtgtggacgatctggccactgggc

SEQ ID NO: 544506 - DNA, 98 bp, Homo sapiens
gaattaaaatttatacttcgcaaaactcagcaattttttgatgaggtgacagagttagtccttgataattgcctgtgtgtcaatggggaaattgaagg

SEQ ID NO: 544507 - DNA, 83 bp, Homo sapiens
aaaagctttacgtctcattcaagaaaccgaagtgatttccagaggatttacactgatatgggccctcacattttccaaacctg

SEQ ID NO: 544508 - DNA, 97 bp, Homo sapiens
ggatcattggtttatgcaggaattaaatcaattgtaaagtcatcgttggattctgaagggagtggtaatggaagtgaagatgcttcaaaggacagtg

SEQ ID NO: 544509 - DNA, 90 bp, Homo sapiens
gggaaatccatagctaagatgccaggaccccctgaaagcctagacatgctttctgtatgagcccaatagccaagggtacaagtactaccg

SEQ ID NO: 544510 - DNA, 75 bp, Homo sapiens
atcaacctgcgtgaggtcaacctgcgcccccagatgtcccagggtgtcgaagtgcagacagactacgtgcccctg

SEQ ID NO: 544511 - DNA, 90 bp, Homo sapiens
cagggaggatgtcgggacaccccggaagctgggaaatgtagagacggggtttcaccgtgttagccaggatggtctcgatctcctgacctc

SEQ ID NO: 544512 - DNA, 101 bp, Homo sapiens
ggaggatgaagagcattcaggaaatgacagtgatgggtcagagccttctgagaagcgcacacggttagaagagattataagcgccatggctatggctagtg

SEQ ID NO: 544513 - DNA, 76 bp, Homo sapiens
ggtgacagagtggagccatggctagagggcggaccccggaggcctgagcggcacctgcccccagccccctgtgggg

SEQ ID NO: 544514 - DNA, 82 bp, Homo sapiens
gcgcggggaccgctgtgctctcgggtcctcactgagcagcgagtcgtcccccgtgtcctctccggccaccaaccacagctcc

SEQ ID NO: 544515 - DNA, 50 bp, Homo sapiens
agagaggccaaagagccagagcaacaggtttggtgcacctcgatttggag

SEQ ID NO: 544516 - DNA, 100 bp, Homo sapiens
gaacggaggtttagctcatggattggcggctccattctagcctctttgaatatcgataacttgatgaccccagaaggagttggccttaccactgccttac

SEQ ID NO: 544517 - DNA, 82 bp, Homo sapiens
cccgggctccgggaaaactacactggccagaagccccatgtgccactcccctgatctgcagcttcggtaggccggtggacct

SEQ ID NO: 544518 - DNA, 50 bp, Homo sapiens
aaaatttcaggtcttaaatctgaagctggataagaaatcatctccatcca

SEQ ID NO: 544519 - DNA, 87 bp, Homo sapiens
cgtggctcccacgctgctattcaaaacttcctgggagaggagttcattacttcggaagtggtacaatttaatgatacaaaataagga

SEQ ID NO: 544520 - DNA, 83 bp, Homo sapiens
ctgagacggtgtcccgccgaaagtgtactaatggtcacttgatgtgcgctggctgttttatccacctactagcagatgcccgg

SEQ ID NO: 544521 - DNA, 90 bp, Homo sapiens
atcagtgtcaggctggttgtcaattttgatatgccttcaagtatggatgagtatgtccatcaggtgttggcagagctgaaagagtacgca

SEQ ID NO: 544522 - DNA, 95 bp, Homo sapiens
ccttgtggagaagaccccggcgctggtgaacggacttatcaaactggtttcaaagcacagagctcaagtaatttacaccagaaataccaagggtg

SEQ ID NO: 544523 - DNA, 90 bp, Homo sapiens
gtagatgataaagatgatgatatccttctcaaccttgtgggatgtgaaaactctgttactgaagctgccactggtgacatgccaacttac

SEQ ID NO: 544524 - DNA, 75 bp, Homo sapiens
tccctggccttctcacctccctgctgggcctcaggccagagattcgcttcaagctcagcttatcaatatgggtgt

SEQ ID NO: 544525 - DNA, 74 bp, Homo sapiens
atggagagaagtctgccactagccttggctgcctggagggtcagacagtgggtgagagctgccaggagctgcgg

SEQ ID NO: 544526 - DNA, 83 bp, Homo sapiens
cctgcccttcgccaaggagatcgtctctctcatcgaggcccaaaccgccaaggctttcgggtcacctccagcagctcccagtt

SEQ ID NO: 544527 - DNA, 90 bp, Homo sapiens
cgcccaccgcgccgcatccatgttcgactccagaacctgggtatcaacccagcaaacattggcttcagtaccctgactatggagtctgac

SEQ ID NO: 544528 - DNA, 75 bp, Homo sapiens
tgcactaagacaaccatgcaacttcgaaagaatcacagcagtgcccagtttgtggtgaaattgcctctacctttg

SEQ ID NO: 544529 - DNA, 100 bp, Homo sapiens
cggagaggtcagtaactaaattggagaaaagcattgatgacttagaaggacaagtaaatttttgtgaaacattgcagatgttagatggatttgggagaat

SEQ ID NO: 544530 - DNA, 98 bp, Homo sapiens
accggcgccatgggccagtgcggcatcacctcctccaagaccgtgctggtctttctcaacctcatcttctggacagattacatcaatgccagtttcat

SEQ ID NO: 544531 - DNA, 100 bp, Homo sapiens
ctttgatctctgctttgggggccgaaggcagttctgcaagaggagctattctgatcttgaatgctgcggaacaaccgcatcagctgcatccacaacgaca

SEQ ID NO: 544532 - DNA, 83 bp, Homo sapiens
gaatatgctgccaaaattatcaacaccaaaaagctttctgctagggataacagtgatggtgaaattgctagtgaatgtgaatg

SEQ ID NO: 544533 - DNA, 101 bp, Homo sapiens
aggccccgcggctagccccttcccacaggctctctccgctcgattttgtcaccgttatgtgggaagcgaatccagtggaattcaagtcaccagtggccaaa

SEQ ID NO: 544534 - DNA, 100 bp, Homo sapiens
tggtgtcagagcaaggagaagctgttgatgggggctccggaggtggcgcccaggctctgagctaccctaggtctgcagactagcgggcattggccagaga

SEQ ID NO: 544535 - DNA, 75 bp, Homo sapiens
aggaaaacaagctcagggcttccactgattctacattatgtcgagcaaaagatgtgataataccagcaaagccac

SEQ ID NO: 544536 - DNA, 82 bp, Homo sapiens
cttggtcgccgcgtccttggctggcgtgcgggagtgggagactcgtctgcaggagacgctgggcccgcactatgtgctgctg

SEQ ID NO: 544537 - DNA, 96 bp, Homo sapiens
aggatatgtgttgctaatacccatctttactggcatcctaaaggggcaattccaaaagtcttcagatttccaaaaggaaggactgcagcagacatt

SEQ ID NO: 544538 - DNA, 80 bp, Homo sapiens
gacactgcaaatgaagctctcgaggctgctaagagactaacattgcagtgtcgagatggctatgaaccctgtgtaaatga

SEQ ID NO: 544539 - DNA, 90 bp, Homo sapiens
tcgggtccccgcaccacctcctgctgccttcccgtcgccgctcccgaagcttttccagacttccattagtttgatgaatctgacttccac

SEQ ID NO: 544540 - DNA, 87 bp, Homo sapiens
cggacatcactttagaccctccacctaattgcagctgtttgatgaagacaatccagtacacaagtctggaaccagatacatgttcac

SEQ ID NO: 544541 - DNA, 75 bp, Homo sapiens
gttctggcagattctggaaactgtacattgaagcagagcgcggagacccacatcaagggcttcacactgaacgat

SEQ ID NO: 544542 - DNA, 100 bp, Homo sapiens
gcgagtcttcggagcgaccccggcagaggaaccagactagcatttctcagtgggttccagtatgcagccgattgatacctgtgtctcctacccaaggaca

SEQ ID NO: 544543 - DNA, 83 bp, Homo sapiens
ctgggcctctgctgcgtcctgctgaccttcggaaaaccaattctgtgtcctcggaggaccacagcccagttgggccccaggcg

SEQ ID NO: 544544 - DNA, 100 bp, Homo sapiens
cagaagaagggaaggcgcgagtgaggaaaggaggtactgtagctccagaagaaaaggaagtcattaaaggacagtatggcaagctcacggacgcgtacgg

SEQ ID NO: 544545 - DNA, 82 bp, Homo sapiens
cgacgccgccgcccccgccgggtgcctaagcaggcccggcgcggccccagaattaacactgaatcctccggaaggaattgta

SEQ ID NO: 544546 - DNA, 83 bp, Homo sapiens
cttgccttgagtcagtgcgccgctctccagcccgcttgaacgagcatgcaagcggcaagatgtcctacagatgaattatcttt

SEQ ID NO: 544547 - DNA, 100 bp, Homo sapiens
gcttttcggactcctgatggcatgcctgtaaagaacttgcagttgaaggagtataacacaggagagctcaaaggatggctactgacatgcagaggaagag

SEQ ID NO: 544548 - DNA, 97 bp, Homo sapiens
gctccgtggccttagctgtgctcgcgctactctctctttctggcctggaggctatccagcattatggtgacaagctgaacatggagctgagtgagaa

SEQ ID NO: 544549 - DNA, 74 bp, Homo sapiens
tggaaaaccagttattgaatatcaagaggaggagttgttggtggttgtctggggtgagtgcgactccactgatg

SEQ ID NO: 544550 - DNA, 83 bp, Homo sapiens
gatcttcccccgtttcacaattagaaggcggctgtctagaggtgagaagccctaccactgcaactgggacggctgcggctgga

SEQ ID NO: 544551 - DNA, 83 bp, Homo sapiens
caaggacagcgcgaggtccgcgcagcccagcgcagccatggaacggcaggagcagctgatgggatatcggaagagagggccga

SEQ ID NO: 544552 - DNA, 100 bp, Homo sapiens
acgtggcggcaggggaggacgaggtggacgtgggcgtggtgggcgcccaaaccgtggcagcaggaccgacaaggtaatcaaatgcaaagcagctgtgcta

SEQ ID NO: 544553 - DNA, 100 bp, Homo sapiens
tcccattttgctcagcgactgtttgatgacgtcccgcaggttggatttggtctagggagtcccagaaagaagtagaaaaagagagagaagcctaccgtcg

SEQ ID NO: 544554 - DNA, 75 bp, Homo sapiens
cgacagcacggaagcagctggataaagaacagtcgagcaaaagatgtgataataccagcaaagccacctgtcagc

SEQ ID NO: 544555 - DNA, 75 bp, Homo sapiens
ccgtggcccttcctcagttattagcaaaagttttcctttggaatatggataaatacaccatgatacggaaactag

SEQ ID NO: 544556 - DNA, 75 bp, Homo sapiens
cagagcgcctgcgaccccagtcggtgctccggggaggtcacctgacgaggagggttccgagtctgaggaagacat

SEQ ID NO: 544557 - DNA, 105 bp, Homo sapiens
agaaaatcgtactggctggatgcgttcctcaagcccagcctcgccaggactaccttaagggactgagtatcattggggaaccagagtgagggtactcgaacagtg

SEQ ID NO: 544558 - DNA, 90 bp, Homo sapiens
catgtcagccttcccagtagctggaactacagacagcaactctggaaagtggcttctaactcggcgcattttcttagtggatgcagtaag

SEQ ID NO: 544559 - DNA, 100 bp, Homo sapiens
cactttcttcagctgagaaaagattttgatcagaaaagggcaacgattcagtttcaccaacctcagagatttaagcttcctgcctgacacagctcacttc

SEQ ID NO: 544560 - DNA, 75 bp, Homo sapiens
cccattcaaccctgtccggtcctggctgaaacatgacagcagtcaagaacatcctgaagagggtagaagagaggt

SEQ ID NO: 544561 - DNA, 98 bp, Homo sapiens
gtctacactgagtcggaggcgaaggtggaagcagggaaaggcctggagatgaggaagctggttctctcggggttcttggccagcgaagagatctacat

SEQ ID NO: 544562 - DNA, 100 bp, Homo sapiens
gatcagaggtagtcggacctttcccgctggcgcgcagcctcagctaggtgagaagatgacagaggaagaagtagagatgctggtggcagggcatgaggac

SEQ ID NO: 544563 - DNA, 100 bp, Homo sapiens
gagtggggaagacctgcgtcctttttcgtttttcggatgatgccttcaatactacctttatttccaccataggcaaaatttggtttctctaatattactg

SEQ ID NO: 544564 - DNA, 75 bp, Homo sapiens
ctaaaaaatgtcatttttaccaactgtgtaaaggatgaaaatgtcaagcagagaagctccatgaagaaattgaca

SEQ ID NO: 544565 - DNA, 90 bp, Homo sapiens
gtggaggccgcctgggggcaggcgggctagaggagcaggagacgcaggtcagaatggaaatgggctgcagaccgggcagctattgtcagc

SEQ ID NO: 544566 - DNA, 134 bp, Homo sapiens
aagtgtatatcaagccacaatttccatcaaaaagtgattaagcagagaatggagaagaaggttgattccagagttcaaagaggccttttcattgtttgaccggaccccgactggagagatgaagatcacctacg

SEQ ID NO: 544567 - DNA, 90 bp, Homo sapiens
ctccagcatgtggtcgtcattcactgcaggatgcacattgcttctgatgcatagatgaggatcagaagtcttcatccagtacagcagact

SEQ ID NO: 544568 - DNA, 100 bp, Homo sapiens
agcggagccggccgtacgcggtgctgcgagggcagaacctggatctttaatctcatgaagtacgacagctacagccgcttcttaaagtctgacttgtttt

SEQ ID NO: 544569 - DNA, 90 bp, Homo sapiens
atgatcgagaggatctggtgtaccaggcgaagctggccgagcaggctgagcgatacgacgggcaccgcgtccgtgctgcagcgccggtcc

SEQ ID NO: 544570 - DNA, 78 bp, Homo sapiens
ctggggcctggaccagcctcttctgaaacactggggtagatgctggctggattggattttggtccatagttggaggct

SEQ ID NO: 544571 - DNA, 90 bp, Homo sapiens
cgacaaccctggcgtccatgagcctgagacggtaaagaacaggtccaagaaaagctcaaagaaagcaaataccagcagcagcagtagcaa

SEQ ID NO: 544572 - DNA, 100 bp, Homo sapiens
ggcgtccgcggcagctgataccagagtcttgctccggccgcggccagcggagccctgggctggggcaggagccgttctggatgacgccccccctggcaca

SEQ ID NO: 544573 - DNA, 100 bp, Homo sapiens
gagcgcccgagcactgtgagttagtggtggacctgtttgtgcgcacagtgctggtctgcctgacatgtgaagctttgttctaagaatatttgtttcatct

SEQ ID NO: 544574 - DNA, 105 bp, Homo sapiens
ggaatttcaacttgccaatgtgcaaagctgcagaaaccacagtggtagaggcaatgaatcgctccctggctaatgtgattcttggaggctatggcaccacttcaa

SEQ ID NO: 544575 - DNA, 100 bp, Homo sapiens
cagagaggcccgcccaccagttcgcccgtccccctgccccgttcacaatgttgtgaccgagattcccgacgagagagactgaggggaagagaggaaggag

SEQ ID NO: 544576 - DNA, 101 bp, Homo sapiens
ggaggagaaacggaatgcaaggagattgcaatctggtaaaataccatgaagattttgaaaaaacaaaggggagaggctttactcccgtcgtggacgatcct

SEQ ID NO: 544577 - DNA, 75 bp, Homo sapiens
tttgagatcgcttcagctcgcatcgaggagagaaaagtctctaagtttgtggagacggtggctcagggagtaaag

SEQ ID NO: 544578 - DNA, 80 bp, Homo sapiens
tggcttgtgaaatcatgcctctgcaaaggttttgggatttgagattgacgcggtgaactctgtccagttttcaaaccaca

SEQ ID NO: 544579 - DNA, 74 bp, Homo sapiens
ctctcctctgcaacctgataggatttggctacccagcctacatctccttctagaacattccctggaacacagca

SEQ ID NO: 544580 - DNA, 100 bp, Homo sapiens
tcagcacgattttcccgagagttcacaggtgtctgcctgtatcccagtgttcaggctggctagacggcggaagaagatcctattttactgtcacttccca

SEQ ID NO: 544581 - DNA, 90 bp, Homo sapiens
agcgggcatgcccattggctgttatctagccttatctatgacagctgtgggccacagtgagatggaagattttcgaggtatagcagaaga

SEQ ID NO: 544582 - DNA, 110 bp, Homo sapiens
gcttaaaaagctgcacgcaagtgttaaacttctggagcttactccacgggaacagcctctagataatctgagttgttgaaaatacgaagcctgttactcgtgaacagtgg

SEQ ID NO: 544583 - DNA, 59 bp, Homo sapiens
ttcctgtggtctctgcacctcctttctgtgtgatgaatgcagactctgctaccattttg

SEQ ID NO: 544584 - DNA, 94 bp, Homo sapiens
gaagtgaggagcccctccgcccggcagctgccccgtctgagaagcccagagccatggctatctcctcttcctcctgcgaactgcccctggtggc

SEQ ID NO: 544585 - DNA, 100 bp, Homo sapiens
atccagagaaagatctctgaccactaaatctgtgtgcaggacgagcctgtggagtgggagacacctgacctttctcaagctgagattgagcagaagatca

SEQ ID NO: 544586 - DNA, 72 bp, Homo sapiens
cgcttggttaaaacctgacacttttaacaggaggaagatgaaggctcgtgctcccccacctcctggaaaggc

SEQ ID NO: 544587 - DNA, 100 bp, Homo sapiens
ttgaaaaacgcttttcacgtcacctggagagatgcacaggtgatgcagaagatggggaagaatatgatgacccttttgctgggcctccagacactatttc

SEQ ID NO: 544588 - DNA, 88 bp, Homo sapiens
aaaagagacccacagatttggatgtagatacgttagccagtttacttaaaatgacagactttttcattgaatgatgaggacacagcag

SEQ ID NO: 544589 - DNA, 75 bp, Homo sapiens
gaggcaccatcgggctgctctatgtgtttggacaggcataatcaccagcaacacccgggacaataatacgggggc

SEQ ID NO: 544590 - DNA, 51 bp, Homo sapiens
tcactccaaacccttgctgtcattcaggttaattggactcctgagattaac

SEQ ID NO: 544591 - DNA, 75 bp, Homo sapiens
tgtgaagaggtcggcggcccctgcgggcgccagtcaggacctcagcagccatgtcgaagccccatagtgaagccg

SEQ ID NO: 544592 - DNA, 87 bp, Homo sapiens
aagttgttcattgtttgtcaccacaaaaaggacagattggagctggagtgagccttccaggaattttggctgccaaatgtggtgcag

SEQ ID NO: 544593 - DNA, 101 bp, Homo sapiens
ctccaacacccgctgctgcccgcccgctgcctgcctgcctggcatctctctctcccgtttaaaggagtacatttggaacgtgtttttggaaaaagcatgtt

SEQ ID NO: 544594 - DNA, 88 bp, Homo sapiens
aaaagcgagcgatcgagcgagcgcgcgcgcgaaaactccgggcagaacatgacctttgacctgccatcagatgccacagtggtgctca

SEQ ID NO: 544595 - DNA, 75 bp, Homo sapiens
ggtgctcatcaagcaggagaaagaccgaccgtgcttcctcaaagactgggaaatgcacgtccacttcaaagtcca

SEQ ID NO: 544596 - DNA, 75 bp, Homo sapiens
ccgggagactggagtcgaaggccgtgagcctttccgctgtgcccattgccattactcctgcaacatatctggctc

SEQ ID NO: 544597 - DNA, 100 bp, Homo sapiens
gtgaaaatgttctatagttttcaggataagctaaacctctacctaatcatggagttcctgcctggaggtgctttactccatgaactgtctaatgacggtg

SEQ ID NO: 544598 - DNA, 82 bp, Homo sapiens
gggcaaagggaccacggtcaccgtctcctcagagttgagaattatggctgcaggaaaatttgcaagccttcccagaaacatg

SEQ ID NO: 544599 - DNA, 100 bp, Homo sapiens
gcaggacgctgcgcacaacatgggcaaccacctgccgctcctgcctgtctgaaggaattcctgcccaaagaatatatcaagcagagaggagctgaaaaga

SEQ ID NO: 544600 - DNA, 88 bp, Homo sapiens
cttcctagctgaacagcgcgaggcggcggcagcgagccgggtcccaccatggccgcgaatgaccgccgggagagcctgcccacctccc

SEQ ID NO: 544601 - DNA, 75 bp, Homo sapiens
ttttgagaaaggaaggaatatatcctgactgattgtcatgatgatgggcagcgcccgagtggcggagctgctgct

SEQ ID NO: 544602 - DNA, 83 bp, Homo sapiens
ggaaaggactgccgggatggcttctatgaggctgagctctgcccggaccgctgcatccacagatatacacctgaagaaattga

SEQ ID NO: 544603 - DNA, 98 bp, Homo sapiens
atccttcaggctctgctcagcgcagcttggcagggagaagccggagacccagggccccctggactacctgcctactcccctcacccttccctagcaaa

SEQ ID NO: 544604 - DNA, 51 bp, Homo sapiens
ttctggaccaggaaactctccacatccttccgctgaggaattgagaaaact

SEQ ID NO: 544605 - DNA, 101 bp, Homo sapiens
ttatgaactgctgctggtgactacaagaggaagaaaccgactgcccaaggatgtagacaggacccgtttagagaatgaattcccagttcctgagcagttca

SEQ ID NO: 544606 - DNA, 98 bp, Homo sapiens
atgagctcctgtttagccactgcagatccctgcatgtcactgagtccaccatgctttacagaagaagacagatttagtctggaagctcttcaaacaat

SEQ ID NO: 544607 - DNA, 89 bp, Homo sapiens
gcggcgcccagcccagcgcctcggccgaacccctccgcagcaggtcttgcagtcacagatgaaattcttcaaggaaagtcagattggtc

SEQ ID NO: 544608 - DNA, 100 bp, Homo sapiens
ccgtcagtccctgctctgtgcgcgcctccatctgggccatggatgggtcctgtatggtggaagagtcggggaccctcgaatcccagcttgaagctaccaa

SEQ ID NO: 544609 - DNA, 75 bp, Homo sapiens
gccagttccattaaattcaggagtcagattccaggggtgagcacagacaggatcgcagggagaggccgtattaat

SEQ ID NO: 544610 - DNA, 75 bp, Homo sapiens
caggcacccgccaccacgcccagggttatgtaccgaaggactctaccgtgtcagcgggaataaaactgaccaaga

SEQ ID NO: 544611 - DNA, 100 bp, Homo sapiens
gggcacgtgtttgcggttcagccctttgatgaccgcagcaggacccttctgcagaggggctgtcggaggaggttcctgtggtgtttgaggagctgccggt

SEQ ID NO: 544612 - DNA, 98 bp, Homo sapiens
gttgattaactggacaaattcaggatggaacaaaattcatctgtattggggctctgtattctgaacttctggctgtcagcagtaaaggagaactttat

SEQ ID NO: 544613 - DNA, 97 bp, Homo sapiens
gttctccatacccgtgacctggggatcgctacggaccttaaaatacccgcaacagccccttcgtcccaagtgtcatggagaaactccagctgggccc

SEQ ID NO: 544614 - DNA, 89 bp, Homo sapiens
gccacctaagtgccctacctgtggtaacttcctaggagggaagtggatcccaaaggtaaaacttccttttcctgtagatcaaatcacag

SEQ ID NO: 544615 - DNA, 100 bp, Homo sapiens
gctcacgcgcttccccggcttgcgcgggcccacgggccagaaggtggtgcgcttcggggacgaggttaacagaaccttctggatatttaacagatggccc

SEQ ID NO: 544616 - DNA, 100 bp, Homo sapiens
gttggcagcaggtctggtgtgctggtgtttggggcacgtccagcctctttggaggattctgaaaccttccttgtatccctcctgagacatctttgctgca

SEQ ID NO: 544617 - DNA, 116 bp, Homo sapiens
agactctgatgcagatgaggaggtggaactgatcctgggggacaatatgtgtcctaaaaatgctagctattatggtaatcgagcagccaccttgatgatgcttggaaggttccggg

SEQ ID NO: 544618 - DNA, 98 bp, Homo sapiens
ggcgtcacctccttctgccccaccctggtcacttccccaccggaggtttatcacaagctggactgtgctgctgccatctcggctcactgcaacctccc

SEQ ID NO: 544619 - DNA, 102 bp, Homo sapiens
attccaacacataaaaattatttatccaacagctcctcccaggaactttatattgctgttggaatatctggagccatccaacatttagctgggatgaaagac

SEQ ID NO: 544620 - DNA, 90 bp, Homo sapiens
gggacgcgagcggcgagccggagcgcggagcccggctcccgcaccatggaggaggacgacagctacggaatactcccccagttgcaagag

SEQ ID NO: 544621 - DNA, 105 bp, Homo sapiens
ctgggcgttgccgctgttccctgcgcggcatggaggggacggccgtggccgtgttcgagagaggagtctgcaatgccgagtggaggaaggaggaaccggagtgtg

SEQ ID NO: 544622 - DNA, 75 bp, Homo sapiens
agcctggccctgttaggggtgccccattgcagaaagccactctggtggtggtcactctggagccttgtgaaggag

SEQ ID NO: 544623 - DNA, 82 bp, Homo sapiens
gccaccgccggggccgctgccgttgaggaggagacggaggagaccgacgttgttagcttgaattcggagtgatttaccactg

SEQ ID NO: 544624 - DNA, 87 bp, Homo sapiens
aaatacatccaggaaagacatggagattctcttaaaaaggaagatgacatttggaagagtcagtgacttggggcaattcatccgaga

SEQ ID NO: 544625 - DNA, 73 bp, Homo sapiens
ggggacaggcatcgtggggatcttggcagcgctgcaggtgctcttaaagttccgtacagataaaggaagagat

SEQ ID NO: 544626 - DNA, 78 bp, Homo sapiens
tgtccccaaggaaggatgagaatagctactgaatgtttgacaagtacatgactatatcaggatttcaaattgaggaaa

SEQ ID NO: 544627 - DNA, 80 bp, Homo sapiens
gtggctctggtagaacacttgcagagggaatctggtcaaacatggaatgggaaaccaaagcccaaaccccggccatccat

SEQ ID NO: 544628 - DNA, 91 bp, Homo sapiens
caactacgactaaagccattttaccttgtacccaagcatgcaaaggaaggaaatggtttccaaggcccagaccgagccataattccagaaa

SEQ ID NO: 544629 - DNA, 101 bp, Homo sapiens
aaattttttcaaacttggaagatattcttcaacttcatagagtcaaattgactttatcagctttaatcgatgggaagaacttcagtgcaggaggtcacaag

SEQ ID NO: 544630 - DNA, 141 bp, Homo sapiens
gcccccagcttctgagagccctggcccgagtcccctcccccgttagaaacagggctttgggatggtcatggaggttctcccatgggcaggtggtctctctggatgagctgcgccccttccaggacccagacctgagctccc

SEQ ID NO: 544631 - DNA, 74 bp, Homo sapiens
aaatgaccagtgggcttgggaaacgctccgagacagttgcactgctgtgatccatcctcatctcctaaagatgc

SEQ ID NO: 544632 - DNA, 100 bp, Homo sapiens
cagcgcagtggaagtcaagagcaagggggacagccgcgccgctgctgcttttccgaagaggtgacttcgaccgagctctccagtggagaccagagtcaca

SEQ ID NO: 544633 - DNA, 88 bp, Homo sapiens
ggcactctgtgcaggtgcagtactacaacaagagtttatgtggccgaggcagacaagtggaattaggccttgctgcaggggacttcat

SEQ ID NO: 544634 - DNA, 87 bp, Homo sapiens
gggcgagaacgtccactgcgggccggcgaaagctggtactggctgtgatcgaacttctcaaccctcagagacttagatcttccacct

SEQ ID NO: 544635 - DNA, 75 bp, Homo sapiens
gtcacggccaacgtgggctcgctcttcgacgacgacgcaatgagcccctgaagaaagagcggcttaagtggaaga

SEQ ID NO: 544636 - DNA, 83 bp, Homo sapiens
gtgaaactgaacttataatcgtcactggattgtactcaggaccccagggaacaatctgcatgaggtggagacagcccaagggc

SEQ ID NO: 544637 - DNA, 80 bp, Homo sapiens
gaccggagtcagaaccctccgcagagtaaagagaccacctgggaacgtcccagcagttctcctgggattccagccagccc

SEQ ID NO: 544638 - DNA, 125 bp, Homo sapiens
gccttttcattttacttcatcctccaaggagttcaatcacttggcgtgacttcactacttttaagcaaaagagtgacaatctccaatagacttgtgtcttcaccttgctgcattgtgaccagcac

SEQ ID NO: 544639 - DNA, 75 bp, Homo sapiens
cccgagctaacccatcaggcggccgggacatggctgggctccctgctgttgttggtctgtctcctggcgagcagg

SEQ ID NO: 544640 - DNA, 75 bp, Homo sapiens
aagtacactgaaattcatcctgagatgagaaaggcctaaagaatgtatttgacgaagcaatattggctgccctgg

SEQ ID NO: 544641 - DNA, 75 bp, Homo sapiens
acgcctcactgaaacccatttgccagctcaaggtaatgcacaggtgacacaaacaaagtttctccccaatgctcc

SEQ ID NO: 544642 - DNA, 98 bp, Homo sapiens
agtgttctgctttcatggagttcacagaagagtcgaggaggaggaggtgcgccagtctgtaactcctgccgagccagtccagtactatttcacgctgg

SEQ ID NO: 544643 - DNA, 90 bp, Homo sapiens
gaacgggaaggtcagcgggaccaagaaggagaactgcccgtacaaatgattcttggggaaagcagtattcatacgcactcttcaaagcta

SEQ ID NO: 544644 - DNA, 100 bp, Homo sapiens
tgtcctgcccgtttctgcggacttgttctgaggccgaggcctcccagaagttcctgccgaatcgtcttcgtcacccccggggtccgaggtagcctccctt

SEQ ID NO: 544645 - DNA, 83 bp, Homo sapiens
cagctccagagcgacgggaaacgaaaggttgtgaccgagattcccgacgagagagactgaggggaagagaggaaggaggggcg

SEQ ID NO: 544646 - DNA, 90 bp, Homo sapiens
atgaaatgactcttagcactttgaaagaaaaaggctacaaagctgctttcattggaatagtcactcaagactgcttgcaactgattgcag

SEQ ID NO: 544647 - DNA, 83 bp, Homo sapiens
ttgtgttgcccgccaccatgagctacacagatgtgaagttcatttccaatccgccctccatggtggcagcggggagcgtggtg

SEQ ID NO: 544648 - DNA, 75 bp, Homo sapiens
gcctgcgcagggtcagccaccagggctacagcactgaggctggctaccggctctctgaccagttccacgacatcc

SEQ ID NO: 544649 - DNA, 82 bp, Homo sapiens
tgcagccgcgaggaggcgcgggaggtgttcgagaacgaccccgagacgatccagacatttaatgtggatgcaccatgccaga

SEQ ID NO: 544650 - DNA, 100 bp, Homo sapiens
cagaggcttcctaacgcagactcgagtgcgaagcgcgcagtcgccgggggtatttgggatctgtagtgagccttatatgaaatatgtatggaatggtgaa

SEQ ID NO: 544651 - DNA, 100 bp, Homo sapiens
agtgcagtcatcacgtttgtggagattggaggctacccacctttctgttctgagacccctcaagagacatataagaaggtgatgaactggaaagaaactt

SEQ ID NO: 544652 - DNA, 96 bp, Homo sapiens
agaaggatatcgacgtcgtgatccagaagtccagagctgaggactgcctgtttgcaggaatactcccccagttgcaagaggcgcaggaccgtggaa

SEQ ID NO: 544653 - DNA, 83 bp, Homo sapiens
cttgtttgtggatcgctgtgatcgtcacttgactatgttaggtcttaatggtgggaggacgcccgagtgctcggcccgtttca

SEQ ID NO: 544654 - DNA, 75 bp, Homo sapiens
ttcatcaacgccgagtacacagaggaggcctatgaagcagaaaaatatggctcaggagactaaccagaccccggg

SEQ ID NO: 544655 - DNA, 122 bp, Homo sapiens
tgcagcttgactttaaatccattcatgttcaagaaccacaggagccttcattacagggtgagaaaatggctagcaacaatcattggtttcagagttcgcaggtccccagctttgcccagatg

SEQ ID NO: 544656 - DNA, 75 bp, Homo sapiens
gaggcagctgcaccgcatgcggcagctggcccagacgggcagcttgggacggtttggagtgagccgtagatcccc

SEQ ID NO: 544657 - DNA, 100 bp, Homo sapiens
cagatattatcagtggaccacaacagacccagaaggtttttcttttcattagaaaccgcacagtgttacagggtcttgattatttacataccaagtgccg

SEQ ID NO: 544658 - DNA, 100 bp, Homo sapiens
cctcgggcgcccgcggcgatgttcaaccgcgccgtgagccggctgagcaggaagcggccgccgtcagacaatgcagatcttcgtgaagactctgactggt

SEQ ID NO: 544659 - DNA, 89 bp, Homo sapiens
gggactaagagagccgaggtcgctccccatccactctcacaaggatccaccttgatgttcagtgaagagtaccagaaaagtctgctaga

SEQ ID NO: 544660 - DNA, 90 bp, Homo sapiens
tccctcagcttccgccccaaaagtataactttgaaaatgcatctcagacatttgatgacctccctgcaagatttggttatagacttccag

SEQ ID NO: 544661 - DNA, 75 bp, Homo sapiens
gtttgcctccttcatcgacaaggtttctagagagtggagcctgcttcctgggccctaggcccctcccacaatgct

SEQ ID NO: 544662 - DNA, 102 bp, Homo sapiens
cacgcagcaggagcaggggacgaagtgtcttgggacaaggtgcgcattcctggtgtgctgcagcgattgggagtgacatactttgtggttgctgtgttggag

SEQ ID NO: 544663 - DNA, 90 bp, Homo sapiens
cagctacttcagttggacatccgtcacctgtggaaccactcaataattgaagaagaatttgtcaggcatttcagaagatggacacaaaga

SEQ ID NO: 544664 - DNA, 100 bp, Homo sapiens
gatgcagccacggaaaccgtgacaactgccatgtcacaagaaaatacctgccagtcaacagaattcaaagaagctttttcactatttgacaaagatggtg

SEQ ID NO: 544665 - DNA, 97 bp, Homo sapiens
cgcccagggctggccgcgctcctgggacgcctgtccgaccgcctcggcaggaaccgggaccgccagcgcaggagccatgtcaaaatctgccgtgaag

SEQ ID NO: 544666 - DNA, 100 bp, Homo sapiens
gtgaggagtcctccaccccatttgctgatgggccattagaaacccaggaggagctgacaagcacaagtgtggaacacatcattgtcaatcctaatgctgc

SEQ ID NO: 544667 - DNA, 100 bp, Homo sapiens
gttaaaaggcggcgccctgaagaagtgcaagagcagaggccttctctagaccttgccaagatggcacagtacaagttgtgcaaagtgaggaagattactg

SEQ ID NO: 544668 - DNA, 75 bp, Homo sapiens
ggaaatttggcttgcaattcatcactttgaaaagctgcaagctttcttcctggtggcagatgacatcatggattc

SEQ ID NO: 544669 - DNA, 83 bp, Homo sapiens
ttcaaatgctagcagacacggtggctactctgcctcggggacgaaagcagtgaagctgtggtctaccaatctagacaactcag

SEQ ID NO: 544670 - DNA, 100 bp, Homo sapiens
gtttcgacagcgaacatgtcgcggcctgtcaggaaaagcaggtgatattctcagtggagaccaggacaaggaacagaaagacccttactttgtggagacc

SEQ ID NO: 544671 - DNA, 89 bp, Homo sapiens
cgcctatctcttcaagtacatcataatcggcgacacagagttcggaatccagcattaagaagaaatttctcaagaggaaaggaaagacc

SEQ ID NO: 544672 - DNA, 74 bp, Homo sapiens
cactgactacggcatgtgtaagatagcctgggctggaagctcttctacgtcacaggctgcctgtttgtggctgt

SEQ ID NO: 544673 - DNA, 98 bp, Homo sapiens
atgctttagaaaaacacgatcagctcttagacaggtattgaaaaccttccctttgaattacagagaaactttcagctcatgagggacctagaccaaag

SEQ ID NO: 544674 - DNA, 50 bp, Homo sapiens
gggggcttctaagctggttaacaggcctcggcttcacaggatggggctgc

SEQ ID NO: 544675 - DNA, 100 bp, Homo sapiens
agaaagacttgaaggcgtatacaggaacaatattgatgatgtagtaagctattccttgagcgagagcgggcagcccagctagcagaaagtaaaacagatg

SEQ ID NO: 544676 - DNA, 75 bp, Homo sapiens
ctctgcaaatatgagagattctgcagaaggtcctgtccctgctatcagtggggcactgaagaaagcaggactgag

SEQ ID NO: 544677 - DNA, 75 bp, Homo sapiens
aaaaattcatccctgaaattactatcagtgatatacttaggccttcatggtgaaacacctcttggagtataccca

SEQ ID NO: 544678 - DNA, 119 bp, Homo sapiens
gtctgtagttactgtggaatcaataagccatggcatctaagaaatttgctgttaaagttgcagagaacacatcttagaagatgaaaaacctgaatctatcagtgacactactgacttgg

SEQ ID NO: 544679 - DNA, 100 bp, Homo sapiens
ctcagggccgggctcagcggctctgactctggaggaggagctgcaggaagcgatccggagggcgcagcctgctcctgcaaccagcacgcccgacgctgcc

SEQ ID NO: 544680 - DNA, 120 bp, Homo sapiens
gtcgacatgagtgatgtggaggaaaacaacttcgagggcagaccaggcgggcaccacggcaggggctgagctaccctcatggaagggagaggaccgtaccggatctacgaccctgggggc

SEQ ID NO: 544681 - DNA, 75 bp, Homo sapiens
aaccgcgactgcccgcaccccctccgcgggggtcccccagagagtactattaatcccgtagatgcaatatatcaa

SEQ ID NO: 544682 - DNA, 100 bp, Homo sapiens
ccttggtaacacttgttacatgaatgccacagttcagtgtattcgttctgtgcctgaactcaaagatgcccttaaaagaaatacaggtatcaggatgaag

SEQ ID NO: 544683 - DNA, 90 bp, Homo sapiens
gtcattttaaactatggacgactccgaggaacattgagattcatgacagatgctgcccgccgagagcaggagtccctaaagaagaagatt

SEQ ID NO: 544684 - DNA, 100 bp, Homo sapiens
cgcttccgacggggcggccgggggctcagagatccaagtgcgcgccctggcgggtccggaccaagagctctgcgtgcctcttgctgtgccctacctggac

SEQ ID NO: 544685 - DNA, 90 bp, Homo sapiens
cgtggaggtcgacgactccgtcgcagactacggacctgtctgggtctcagccgccaaagaccccgtccgtgggtaattccagaattgatt

SEQ ID NO: 544686 - DNA, 100 bp, Homo sapiens
gaaactgaagcgggacgttgagtctattatcctcccagtccacaacgctgaaccgtggctggacgaatgtttgaggtctgttttgcaacaggactttgaa

SEQ ID NO: 544687 - DNA, 100 bp, Homo sapiens
acagctaaggcgccagcccagctgtgtgagggctgccccctgcaaagcctgcacaagctctgtgagaggatagaggtgatcctgagcagctgaagaagga

SEQ ID NO: 544688 - DNA, 82 bp, Homo sapiens
gcgtgctcccctctgagactggagtgagagggtcttctgtgccatctgggattgacagctcagcctgaactctatcttctga

SEQ ID NO: 544689 - DNA, 50 bp, Homo sapiens
tttgcaccatttggaagaatatcgtatgctgaccgggccaagcagatccg

SEQ ID NO: 544690 - DNA, 146 bp, Homo sapiens
ataaaagagaaaagagaagtttgctgctaaaatgaatctgagcaatatggaatattttgtgccacacacaaaaagggggtccctcccttctctctgagcccatgaagacttgcttcactgggggcaatgtgacgcttacatgccag

SEQ ID NO: 544691 - DNA, 100 bp, Homo sapiens
cgatttcttgctggttgaatacctccctctccactcccatcttcagggtgacttcatggtcatgacgattttcttcaatgtgagcaggcggtttggctat

SEQ ID NO: 544692 - DNA, 100 bp, Homo sapiens
aacacccacagactgccaagtgggacaactttctggcttttgaaaggctccttcttcagcgatgaagaacgatacagatacagggaatatgcagaaagag

SEQ ID NO: 544693 - DNA, 150 bp, Homo sapiens
aaaacgtagggaccacatcaaagacagctttcacagtttgcgggactcagtcccatcactccaaggagagaaggatgtgatcttcgtggtggaaagctaaattttaaaaccaccccaatggatgcagacagtgatgttgcattggacatt

SEQ ID NO: 544694 - DNA, 90 bp, Homo sapiens
cctcagtgcgaagaagctgcagccgcacctggccaagggctaatctgtgaggtgagcttatgtaagatcaacagcaaagttctaaagagt

SEQ ID NO: 544695 - DNA, 75 bp, Homo sapiens
gtgactgcttgcgaaccagttcagcagtgcctcagaatagttctgtcccaagaagaactctgaagatgattcagc

SEQ ID NO: 544696 - DNA, 73 bp, Homo sapiens
agtgcaagaagaaattcccacctgtcaaagaggtaggtgatgctctgatgctgctgcctcttatgaattgacg

SEQ ID NO: 544697 - DNA, 83 bp, Homo sapiens
atcaaaggaggagctgccaaacttcagtgtcccttttgatgagaagaataagcctcattctgattcaacagcagagatcaaag

SEQ ID NO: 544698 - DNA, 97 bp, Homo sapiens
aaggtcatgatgttggattctgttgcctgggtaccaccagagggaaagctggggcggtcccagtagggatggcacaatcagcgaggacaccatccga

SEQ ID NO: 544699 - DNA, 50 bp, Homo sapiens
taacatattactggcatcttcaatctggaactggcagccgcggagcgtgc

SEQ ID NO: 544700 - DNA, 75 bp, Homo sapiens
ctggactcggattcgttgcctgagcgcctgctgttactgctgcaagacaaggacaaggaggtggaagagctcctt

SEQ ID NO: 544701 - DNA, 100 bp, Homo sapiens
ggacgggctccgtggctggttcccggcgagctacgtgcagttgctggaggtcaccctgctgattgccttcatctgtgtgcggagctccctgtggaccaac

SEQ ID NO: 544702 - DNA, 95 bp, Homo sapiens
atctgtgataaagttggtcagtctcgcactgggtatactgcaacatccagatggcacagttttgaaacagttacaaccacctccaaggggcccaa

SEQ ID NO: 544703 - DNA, 80 bp, Homo sapiens
cgacagtgccctgagggccttcgagagctaccgcgccagacagttgtgacttctcaccaggagatttggtttgggccaag

SEQ ID NO: 544704 - DNA, 100 bp, Homo sapiens
tggtgcggctcatcttcgagaggtttccaatacttatctacaggaatcgccatgaccccagctctgagggaggcaacagcaaagggtatcagcttttcat

SEQ ID NO: 544705 - DNA, 90 bp, Homo sapiens
ccctgaggagggtccggctgcggccaggtctacttccccagcaggacagcatcattctcctatatcttctagacatcactcatcttcctc

SEQ ID NO: 544706 - DNA, 101 bp, Homo sapiens
cgctggctgcagggacccggtgacagcgtgagaggttcgcagagtgacagcggcatggacatatgccccaggctttcctgctggggtccatccatgagcct

SEQ ID NO: 544707 - DNA, 100 bp, Homo sapiens
cgaagtctactcaacgtttccaagaaaaagcttgtggtgaaggggggcaaaaaaaagaagcaagttctgaagttcactcttgattgcacccaccctgtag

SEQ ID NO: 544708 - DNA, 74 bp, Homo sapiens
gcagtggtcgcttcttctccttgtgctcttaaagttccgtacagataaaggaagagatcccagttctgatacat

SEQ ID NO: 544709 - DNA, 101 bp, Homo sapiens
cttcgccaaactcttcattttctctgtgatctttagacagtgactgagtatggatcatttgaacgaggcaactcaggggaaagaacattcagaaatgtcta

SEQ ID NO: 544710 - DNA, 100 bp, Homo sapiens
tttggcattgacatttaattttagggtcctttatatagaagggagagtagttccatgccattgcagtgtcaactaggcctcagttacttttcagtttgcc

SEQ ID NO: 544711 - DNA, 101 bp, Homo sapiens
ggcggcggcacgacgacggtccctcagcccagccaccatgagcaccaagcagatcacttgcaggcatcatggccgccctcagaccccttgtgaagcccaag

SEQ ID NO: 544712 - DNA, 126 bp, Homo sapiens
gcggcgcgcggcggcggcgctcggcgatggtaggcgtccctggagcggccgccttccagcgatcttaagattgaaagtgatgttcaagaaccaactgaaccagaggatgaccttgacattatgctt

SEQ ID NO: 544713 - DNA, 100 bp, Homo sapiens
ctcaaaatggccacacgcgtacccccgtagcggaaaaacacgcaaacatgcagatctttgtgaagaccctcactggcaaaaccatcacccttgaggtcga

SEQ ID NO: 544714 - DNA, 100 bp, Homo sapiens
caaatgttcagaaagaaggacagggatcacaaacactcagagtggaaaaagtaccatcatttgaaacagctttacttttagaagcccagtcaacaccatt

SEQ ID NO: 544715 - DNA, 88 bp, Homo sapiens
tgagttacaccagaatgtaaatgtgaagaacataatcattgctttaattgatagagtatctttagaagatctgtataatggcaagaca

SEQ ID NO: 544716 - DNA, 101 bp, Homo sapiens
tcaggggccatggcgaagcacgagcagatcctggtcctcgatccgcccacagacctcaaattcaaaggaggcaagtgaggcctatctggttggcctttttg

SEQ ID NO: 544717 - DNA, 73 bp, Homo sapiens
ggaagtgccctggggagaagagagaagacgccggccaggcccctgtgcaggactcaaatggatgctaaaaagc

SEQ ID NO: 544718 - DNA, 100 bp, Homo sapiens
tagaggcggctcctcatgatatcggctacgtcaaacaggccatgttccactatttccagggcttccgttacaagatgaggtctgtgtatgctcacttccc

SEQ ID NO: 544719 - DNA, 75 bp, Homo sapiens
gattgtggtcccgcctcacctggggtatggagaggaaggaagagggaatggccttaagtcttggagataaaatca

SEQ ID NO: 544720 - DNA, 88 bp, Homo sapiens
atccaggtgagactttcacaataagagcagaggatggaacacttcagtgcattcaaggttaatgttgaagaaggaaaatgcggaagtc

SEQ ID NO: 544721 - DNA, 100 bp, Homo sapiens
tggcttaatcagaggtggcttatcaaacttgggaataaaaagtattgtaacagctgaagtgtcttcaatgcctgcttatgatgaggagtctgatgaggaa

SEQ ID NO: 544722 - DNA, 83 bp, Homo sapiens
cgctctccagcccgcttgaacgacagcccacctgaggatattgaccataaggactcatatctcattacaagaagcatcatggc

SEQ ID NO: 544723 - DNA, 75 bp, Homo sapiens
ggcaatggcacaaagttctctcgatcagggcatacatctttcttcgacaaagggacatggatttgattgacatac

SEQ ID NO: 544724 - DNA, 100 bp, Homo sapiens
cctgcttctgccccagaaccggtcgaaaaccgtgtatgagggattcatctcggctcaggtgcaaatgtcaattgtcaagccttggacaaagctacaccct

SEQ ID NO: 544725 - DNA, 100 bp, Homo sapiens
caaaatgtggaagggacccaggctgattcagttctggagagtcttggcttctgggaggaagtcagagggattatctcaggatcagagctgataacgggat

SEQ ID NO: 544726 - DNA, 100 bp, Homo sapiens
agcaggacatcttcatttacagagcaacttgatgaaggtacacccaatagagaggtgtcctcatgacttctcttgtggaccatgtccgtgatcttttttg

SEQ ID NO: 544727 - DNA, 98 bp, Homo sapiens
gcagtagaacactctctccccagaaatccaacttctcaagacaacaagggaggtgtcacagttttccatttagatcaacaacttcaagttcttaccat

SEQ ID NO: 544728 - DNA, 101 bp, Homo sapiens
caggaccggccgcagtgccacttcgacatcgagatcaaccgggagccggggtcatgtaggtacaacagcaaccaagaagatcgatgtctacctccctctgc

SEQ ID NO: 544729 - DNA, 83 bp, Homo sapiens
ccttgctcccatccctgcagcatgaacaagcccaagaagatgaaaggattgttcttgttgacaacaaatgtaagtgtgcccgg

SEQ ID NO: 544730 - DNA, 139 bp, Homo sapiens
tgacggagctggtcatcagcctggagaagctggagaatgacaagagcttccgcggtgtcattctgacctcggcaacatgagtgagaatgaggaagaggaaatttctcagcaagaaggcagtggggactatgaagtcgaa

SEQ ID NO: 544731 - DNA, 90 bp, Homo sapiens
caaagcctgcccagacggctcacctgtgcgggatggaacaaaagggtgacatccagcagctgctctttgtctcggaccaccgggcagctt

SEQ ID NO: 544732 - DNA, 100 bp, Homo sapiens
cgcgctgctgggcacccacggagcctccggggctggttcgagaacttgtcttggacaattgcaaatcaaatgatggaaaaattgagggcttaacagctga

SEQ ID NO: 544733 - DNA, 83 bp, Homo sapiens
ccaggagttcgtctcttacgtctgcggaagtgcagctgcctcagttcttagcgcaggttttcctcctccaccaggcgctccac

SEQ ID NO: 544734 - DNA, 100 bp, Homo sapiens
tacagaagcagtacgagaactggcagccaaggggtaatccaaatctatttctggaaccatgaaaattttgctagtttttgactttgacaatacaatcata

SEQ ID NO: 544735 - DNA, 75 bp, Homo sapiens
tggaagagaataaccgaaaaattgcagaagcacaagccaaactggatggcttctggaaacttacaccagaactgg

SEQ ID NO: 544736 - DNA, 96 bp, Homo sapiens
caaggacatcctgcgcaaggccgtgcagaaggtactccaaagattcaggtttactcacgtcatccagcagagaatggaaagtcaaatttcctgaat

SEQ ID NO: 544737 - DNA, 100 bp, Homo sapiens
caaacaaatccttgaaagaagaagatggagaagaaatagttacctatgatcgtgttagtaaaatggcctttcgccatttaattgagttcacatatacagc

SEQ ID NO: 544738 - DNA, 50 bp, Homo sapiens
ctgtcattcacaaccccctgaaagcatggatcctgagcttgaaaaaaaac

SEQ ID NO: 544739 - DNA, 82 bp, Homo sapiens
gctactctgcctcggggacgaaagcagggtgaaaatcctatttataagagtgccgtaacaactgtggtcaatccgaagtatg

SEQ ID NO: 544740 - DNA, 75 bp, Homo sapiens
cttccaggtcacggaggaggtgaaagagatgcgctctgtgctgcggaaggcgggctccccgcgcaaggcccgccg

SEQ ID NO: 544741 - DNA, 124 bp, Homo sapiens
tgtctctccacagtcttgggctttcactggttaacaatgaaagcaagcaggaagtttcctatattgggataaccaggcttatgccaaattttctggtgcacccttgaaagtcaatgtgatagat

SEQ ID NO: 544742 - DNA, 100 bp, Homo sapiens
cagcgtggggctcagcccttggccgtcgcaaaggagctggcaggaaactactttgcttcgcactttttcatgggaggagagaaattcgacaccccccacc

SEQ ID NO: 544743 - DNA, 98 bp, Homo sapiens
gagatgtgatgttggagaactatagcaatctggttttcttgggaccaggacgcccctacagggccatagatttctcacatcaaggacctgcatttgtt

SEQ ID NO: 544744 - DNA, 75 bp, Homo sapiens
cctaatcccaatgctgaagtaagattgtcttggaaatactaagttggatttggagcaagaggtggtggtggcctt

SEQ ID NO: 544745 - DNA, 99 bp, Homo sapiens
ggcagcagaccgtccaaaccgacacgcgtggtatcctcgcggtgtccggcaagagactaccaagacagacgctatgttgtccgaacagacagcctgaag

SEQ ID NO: 544746 - DNA, 75 bp, Homo sapiens
ggaagatggcgaaggtctcagagctttacgatgtcacttgggaagatgacggagggccgccgatgtcaagtacat

SEQ ID NO: 544747 - DNA, 75 bp, Homo sapiens
atgtgcgcttcccagggatcttgagagtgaagatctcgaaggatttcatagtgtggcaaaggagcagagaacttt

SEQ ID NO: 544748 - DNA, 83 bp, Homo sapiens
gatgagaactggttctacacgcgagctgggcagccccgagaaccacaggtgtacaccctgcccccatcccgggatgagctgac

SEQ ID NO: 544749 - DNA, 83 bp, Homo sapiens
tgatcttttcaatgctgcgaaagctgccaaaagtgacatgcaggggcgccgatgtgtgttgaaagactgctgcaaaattcttg

SEQ ID NO: 544750 - DNA, 96 bp, Homo sapiens
tgagacagaagcagtgaccgtgcccacgccaaggtatcattgcccagtgcctaagatcttttatgttcagctcactgtaggaaataatgaattttt

SEQ ID NO: 544751 - DNA, 74 bp, Homo sapiens
gtatcgaggcggacgacgaccggctcaacaaggcggctgagccagaggccaactgcagaggaactggaacagag

SEQ ID NO: 544752 - DNA, 116 bp, Homo sapiens
ttgagctccaggagttcgtctcttacgtctgcggaagtgcagctgcctcagttcttagcgcaggttcaaatggtgaaagacgatgacccctcctggaagcccacttttatcgtgaa

SEQ ID NO: 544753 - DNA, 73 bp, Homo sapiens
tgggaggtaggagttggcgagtagtagcgaggagacgaagcatctgcaggaagccctaggactgcctgctggg

SEQ ID NO: 544754 - DNA, 100 bp, Homo sapiens
gagtatcccatctatgaggagaccaaaataaaactaacagtctatgatgtcaaggataagtctcatgacaccgattgaatatgatgcatatcgcactgat

SEQ ID NO: 544755 - DNA, 76 bp, Homo sapiens
ctttatccttcgaaggaagcctgtggaggtgccttatgcccgctcagaggcccacctcacagagctgctggaggag

SEQ ID NO: 544756 - DNA, 104 bp, Homo sapiens
ctcgactcggtcctgtttcgacagcgaacatgtcgcggcctgtcagctatggagtgctgctgtgggaactgctcaccggagaagtcccctatcggggcattgat

SEQ ID NO: 544757 - DNA, 101 bp, Homo sapiens
gggatcaaagagcagtgggggttgctgacccagaggagagttctccaaacatgatcgtttactgcaaagtggtcaagaagaatacgtcttatcttatgaac

SEQ ID NO: 544758 - DNA, 101 bp, Homo sapiens
gtggcacctgcgcgaagctggccaaagcctgcccagacggctcacctgtgcgggatggaacaaaagagaacctgtggagtacgtacgcgcacgcgggggcg

SEQ ID NO: 544759 - DNA, 90 bp, Homo sapiens
cgttacctgcaggtattgggagatccacagctaagacgccaggactccctggaagcctagaaatggacaaggagcatccaagatacctga

SEQ ID NO: 544760 - DNA, 90 bp, Homo sapiens
cggccacctctgagaagggagacgacgctgctgggtccgctgagcggggcgacccgaggatatttctttaatgggaaaaatgtacctcaa

SEQ ID NO: 544761 - DNA, 51 bp, Homo sapiens
tcctttatatagaagggagagtagtcaagcccgaccctccagaaggcgtgc

SEQ ID NO: 544762 - DNA, 75 bp, Homo sapiens
cacactgccccggcggggaggacgagaatcggtgtgtgttgaagggctccatgccattgttgtgtcagatagaga

SEQ ID NO: 544763 - DNA, 50 bp, Homo sapiens
ctgaccacagagacgcgtccagactttcttgtctgcacagaaagtcccag

SEQ ID NO: 544764 - DNA, 90 bp, Homo sapiens
ggagaatcgcaaggatatgatatcatggaaccagcagcaaagaagtgctatctggaaagagagacttcattagaggggtggtagactcgg

SEQ ID NO: 544765 - DNA, 100 bp, Homo sapiens
agcaaaagcccactgacgctccaccgaaagtggatgcccgtcaccaagttgggccgcttggtcaaggacatgaagatcaagtccctggaggagatctatc

SEQ ID NO: 544766 - DNA, 73 bp, Homo sapiens
caaaataaaccaactggctttggcagatgtgtactctggcacacccaccaaggtgagacacatggacagtcaa

SEQ ID NO: 544767 - DNA, 100 bp, Homo sapiens
cagcaatcagctggcctggtttgatactgacctgtaaatcatcctttagacatatctgaagagatggattaagaatgctttggattaaggattgtggagc

SEQ ID NO: 544768 - DNA, 100 bp, Homo sapiens
tgggggagagaataaaactccagcgagatccgggccgtgaacgaaagcagtgacggaggagcttgtaccaccggttttgagcaaaattttggactgtgaa

SEQ ID NO: 544769 - DNA, 74 bp, Homo sapiens
tatactggaaagagaattgcattatatattggaaatctaacatgggctggtaatcctggtggacctggacctgg

SEQ ID NO: 544770 - DNA, 100 bp, Homo sapiens
ctcgctctgagctgcgcctggacctggttctgccttctggacaatctttccggtggcttcccacacttctgactcggacgttccttccggtgtcactgag

SEQ ID NO: 544771 - DNA, 97 bp, Homo sapiens
gcaacggcgaagaaacagaaatgaaacttctcaaatgagccaacctgagtcacaagacttgcctaacgatatctcacctctactcccatgaattcac

SEQ ID NO: 544772 - DNA, 93 bp, Homo sapiens
accggggtcacttagactaccccaggaacccgcgccgcgagggctccttccctcagtttggtgccctggttgtcagatgttggaaagcagtag

SEQ ID NO: 544773 - DNA, 100 bp, Homo sapiens
gccgctgctcccggaccgggccgcgcacgccgcctcaggtgctggagaatctggtaaaagcaccattgtgaagcagatgaggatcctgcatgttaatggg

SEQ ID NO: 544774 - DNA, 75 bp, Homo sapiens
gagacttcataatttttctaggaaaggcagcctggcatcctcgctacaacctcattgttgtgggccgatacccag

SEQ ID NO: 544775 - DNA, 100 bp, Homo sapiens
gaccagtacatcagagaaacccaactccatggacactgcaaatacctcacccttcaaagtaccagcatgtcctatgaacatgtacccgcatggacgcagt

SEQ ID NO: 544776 - DNA, 83 bp, Homo sapiens
ccccgagccaggagaacgagctcgaggaggatgcctgggcccatgactcctcctctgagagtggcagcggcaatggctcctcc

SEQ ID NO: 544777 - DNA, 110 bp, Homo sapiens
gcttatttctgcttactcacttgtagatccagagaaagccaaagccacggatgataccatcggggaccttaagaagctgattgcagcccaaactggtacccgttggaaca

SEQ ID NO: 544778 - DNA, 76 bp, Homo sapiens
ggctgttatccactacctgctgcaggctctacacagagaacagagggagctggttgctgtgctgagggagcctgag

SEQ ID NO: 544779 - DNA, 126 bp, Homo sapiens
agcattcctgaaatacatccaggaaagacatggagattctcttaaaaaggtgtggcgatcgatgggaataatcacgaagtcaaagaaagacacattcagctggtcaagaaaagggggaaagtcaag

SEQ ID NO: 544780 - DNA, 100 bp, Homo sapiens
tctcagtagtccgaactctaatatgagcagcatggtagttacaggaggttcagcaacatcagatgaccatgaatttgatccatcagctgacatgctggtt

SEQ ID NO: 544781 - DNA, 83 bp, Homo sapiens
gggacattattgcgcgtggaacggctgcttttggaagccgctgccatggcccagacactgcagatggagatcccgaacttcgg

SEQ ID NO: 544782 - DNA, 83 bp, Homo sapiens
gaatgttcttaacccagaagtagctgaatgtgttactccattgctgaggagtgaccatggcaaaagttataaccaccgtactg

SEQ ID NO: 544783 - DNA, 80 bp, Homo sapiens
gaagagaagccgctcctgatcatgttttatgcccccttctccatcgaggacattcaggaggtgcgaatggggcaccgcac

SEQ ID NO: 544784 - DNA, 99 bp, Homo sapiens
gcaggctgtggaccccctgcgaaggacagtggagaagtacagcatggagtgggaatgtaagacggacttagatattgcatacaaatttggaaaaactgt

SEQ ID NO: 544785 - DNA, 101 bp, Homo sapiens
ttctacagccaggacctgcccccaggagcctctcagggatgtcatccgtgggtctttaagcctcaccaacctttcgtcttccatggctggagtctatgtct

SEQ ID NO: 544786 - DNA, 83 bp, Homo sapiens
ggtgcatttcaggattcattctatttcatcaggtgaaatgacaatggatgctctgttggctcgattgaaacttctgaatccag

SEQ ID NO: 544787 - DNA, 96 bp, Homo sapiens
aggagttgaagtttgtgactttggacttggatgttgtgggtgatggtatgcagtgtcctccttcacctttgctttttgatccttcactaacccttg

SEQ ID NO: 544788 - DNA, 100 bp, Homo sapiens
cgggtgaggtacaggctcagtctgcggccaagactccgtcctgcaagggaagaggaagaacgtctgagaaataaaattcgagctgatcatgagaaggcct

SEQ ID NO: 544789 - DNA, 74 bp, Homo sapiens
tgtaccgtgatgtgacgctggagaacctggcacttatgtcctccctggcaattaccagctctggctgggtcgcc

SEQ ID NO: 544790 - DNA, 100 bp, Homo sapiens
ttcaggtcttaaagaaagagcaggacatctatacccatctggtcaaatctctgcaggaatcagacaggtatcaaggttacattggtgcagccctagtttt

SEQ ID NO: 544791 - DNA, 83 bp, Homo sapiens
cctagactagacgcacatcaggaagacagacaatgcagatcttcgtgaagactctgactggtaagaccatcaccctcgaggtt

SEQ ID NO: 544792 - DNA, 75 bp, Homo sapiens
tctgatcccttgctcccatccctgcagcatgaacaagtttggaccagaaaatccctttaggacacagcaaatggc

SEQ ID NO: 544793 - DNA, 80 bp, Homo sapiens
caacctgggattcaaatgaaagtgaaaatgttagaagaactcgtgagccggattgatgacccctctgccatgaaccagtc

SEQ ID NO: 544794 - DNA, 98 bp, Homo sapiens
caacaacgaggaaatatttccaacatgcgtggattgcaacacctgctcggtataccgtgactttgggaggaacatctgtcactgtgaagtatctgcgc

SEQ ID NO: 544795 - DNA, 100 bp, Homo sapiens
gggaaagctgcttggaagcctatactggaatcgtccagggattaaagggggatcaggagaacgtacaccgtgccgtgagcgatgtggagatgcaggaaca

SEQ ID NO: 544796 - DNA, 75 bp, Homo sapiens
cagccagtactctatatgaacaatccgtctggatcacggatgtaggaagtgttcctgggcttcccgatggactcg

SEQ ID NO: 544797 - DNA, 97 bp, Homo sapiens
aatgtggaaaaccttgagtaaactggcactagaggcaaggcaactacacattgcggagagggctgtgggacagatgatgtctaccatgttctaccca

SEQ ID NO: 544798 - DNA, 100 bp, Homo sapiens
cgatagatggctacaggccgcggaggaggaggaggtggagttgctgcccttccggagtccgccccgtgaggagaatgctggtgccgacaagaaagccgag

SEQ ID NO: 544799 - DNA, 98 bp, Homo sapiens
aggctccgttgcctgctcccggagggagacgcgctgccgaggagaacccagcggataaagcttcaccaagaaggttgcccaggaaacgggcacagaag

SEQ ID NO: 544800 - DNA, 90 bp, Homo sapiens
aggaattctcagcgggttccacaccctcttgactccaaaaccacgtcggatgttttaaggtgtgctaccacccccaactttgatcaggac

SEQ ID NO: 544801 - DNA, 100 bp, Homo sapiens
gcagttattcgtttcttacgggaacaaagtcagatggacacttacacctcggatgaacaagaaagtttggaaggggaagctgaagcctgattaacttcgt

SEQ ID NO: 544802 - DNA, 82 bp, Homo sapiens
attcccttggctgttaatttctcagagattcgggaactggagcctctcctctgtcacagtgacaatccatctcagctcatct

SEQ ID NO: 544803 - DNA, 80 bp, Homo sapiens
gaatctgatgacagccaatcagcaccacagagaccttcagattggtccaaaaagaagaatgagcccctagggaaattgac

SEQ ID NO: 544804 - DNA, 98 bp, Homo sapiens
cctgtctaagaaaaggaggatttggaaattgtgggaaagagaaggtactgtttctaagactctacttacttcaagggatccgaaactatcacagtgga

SEQ ID NO: 544805 - DNA, 100 bp, Homo sapiens
tccagctccgctctcttcggctgccccaatccccggcagctctctcaggctcttcgatacttggcagaatgccgtgcaaacagagaaaagatgaaaggag

SEQ ID NO: 544806 - DNA, 90 bp, Homo sapiens
tgatgtcacccaatggatccattcctcccattcatgtgcctccaggttatatctcacaggctgaccggttccctgatgtgttacctgctt

SEQ ID NO: 544807 - DNA, 83 bp, Homo sapiens
atcatgctggccaagaagatcatcattaaggacggaggcacgggaagatcagttttcctgccatccaggctgctccctccttc

SEQ ID NO: 544808 - DNA, 75 bp, Homo sapiens
ggagcctcagttggaagcagccgatccagcctgcggagcctgtggggcaggttgacaatggtctccaggatggtc

SEQ ID NO: 544809 - DNA, 83 bp, Homo sapiens
agcgcctcggccgaacccctccgcagcaggtcctagaccagaaggagcacaggctggatggccgtgtcattgaccctaaaaag

SEQ ID NO: 544810 - DNA, 90 bp, Homo sapiens
cgaccgcggtaccgcgcgccactaacaggaaacttggatttaactggccagaagcaggtattcaaagcagagaacaatccctgggtgacc

SEQ ID NO: 544811 - DNA, 100 bp, Homo sapiens
ggcagtccgtaacatccacaaactgatggacgatgatgccaatggtgatgtggatgtggaagaaagtgatgagctgcagaagaaagatcagcaactggag

SEQ ID NO: 544812 - DNA, 75 bp, Homo sapiens
tgacgccatgtcgggttattcgagtgaccgagaccgcggccgggaccgaggcaaatgcagccctgaggatttggc

SEQ ID NO: 544813 - DNA, 100 bp, Homo sapiens
cggcgatttgccgccctcagtgaccgagagaagggagctcagtgtctgtttgtccagcttctcagagttgctgtgcagctcggatgtggcataggaaaca

SEQ ID NO: 544814 - DNA, 50 bp, Homo sapiens
ccagggtcggatcaaagaagggagtaccgggcgtcaaagcagaacgcttt

SEQ ID NO: 544815 - DNA, 100 bp, Homo sapiens
caccatcaccttcaatccgctctactggaatgtgatcaggatcctcatgaccagccaaagagaagaagaattaggaagcataaatcaaagaaaaaattta

SEQ ID NO: 544816 - DNA, 100 bp, Homo sapiens
aacagctgaagtgtcttcaatgcctgcttgaaaggggactaccacaggtatctggcagaatttgccacaggaaacgacaggaaggaggctgcggagaaca

SEQ ID NO: 544817 - DNA, 90 bp, Homo sapiens
acacacagtggagacaaacctttcaaggcatgcgaggctgccaagaaaacaaaagcagatgaccgaggaacagatgaaaagacttcagag

SEQ ID NO: 544818 - DNA, 119 bp, Homo sapiens
tgcccagcagagggagaagccccgagtgcaggagaagcagcaccccgtgcccccaccggctcagaaccaaaaccaggtttatttgcaagatgggtttgagggaattaaggataaagtct

SEQ ID NO: 544819 - DNA, 74 bp, Homo sapiens
atttcatccagtgcctcacccctaaccctggaaagcctcggcctccgccccggcccaccacctcgctactgctg

SEQ ID NO: 544820 - DNA, 74 bp, Homo sapiens
acgatgagctcaatcggcactgggcctgtcagagttgttcagtataatatcaatacagaagaattatattccta

SEQ ID NO: 544821 - DNA, 83 bp, Homo sapiens
ctggactcgggagtggtgaaacgcctgtacacgttggatgggaaacaggccttcactattctgtgtgatattttgatgatctt

SEQ ID NO: 544822 - DNA, 100 bp, Homo sapiens
gtatggtgctggtcgagggaactatgatgccttccgaggccagggaggttatcctgggaaacctcgcaacaggcctttgacttcctgttgctgctgcggg

SEQ ID NO: 544823 - DNA, 88 bp, Homo sapiens
ctcgcctcgactccaaatggttgaaaacagatatacaggtcccagtagggatggcacaatcagcgaggacaccatccgagcctctctc

SEQ ID NO: 544824 - DNA, 83 bp, Homo sapiens
ccatggaggaggacgacagctacggctgtctgtccccagaccccagagcacgtccggcaccaccatgactgggctgttgaaga

SEQ ID NO: 544825 - DNA, 89 bp, Homo sapiens
ttccgagcggcggctccggggcagctccggcgggcgctctcaaaggtctatggccctgtgttcactctgtattttggcctgaaacccat

SEQ ID NO: 544826 - DNA, 75 bp, Homo sapiens
cagtttacattaaccttcgacaggagtctgaatatgtttcagctcatcttcatgaatggatagatctgatctttg

SEQ ID NO: 544827 - DNA, 100 bp, Homo sapiens
gacactgagggcatcctgctcatctcacaccctgcatggaatcaggctcctcagccaggacacaggatgcatttttgtagaagcattttgaggatgaatg

SEQ ID NO: 544828 - DNA, 82 bp, Homo sapiens
ggtagcgaaggccgccgaacctgcctggctagccggcgacttgagtgacgatcagagcaccataacatggtgtgggaagtga

SEQ ID NO: 544829 - DNA, 109 bp, Homo sapiens
caagaatctgcaggacttggtccgcggcatccgtaaccacaaggaggacgaggctccctggggaagggaatgcagggttgctggggctgggcccagaagcagcagcacc

SEQ ID NO: 544830 - DNA, 82 bp, Homo sapiens
ttctcatcctcaacctgtctggaaacagctgcaccaaccaggatggctaccgtcatgatgctatggactcctactacgacta

SEQ ID NO: 544831 - DNA, 100 bp, Homo sapiens
gaacagacagaaggatgtaaaggatggaaaatacagccaggtggatctttaactcaagactagcatgaagagttgccttctggcctgccctgagtctcct

SEQ ID NO: 544832 - DNA, 100 bp, Homo sapiens
cgggccgcggcctccgagcgcgcgggatttgcagatctattaatgagatgaagcggttggaagaaatgtcaaatatgtttcagagctctggagtccagca

SEQ ID NO: 544833 - DNA, 100 bp, Homo sapiens
aacccggtcgaccccatctcccatgacctgcttgtgaacctggcccgggacctgcagtgccccaagaaggctacgaggaacaccggcaagagtatcgcca

SEQ ID NO: 544834 - DNA, 83 bp, Homo sapiens
tgggatcccggccaccagcaattgtccgttcctgacggagctgaccagacttttccagaagtgccggacgtcgggcagcgtct

SEQ ID NO: 544835 - DNA, 50 bp, Homo sapiens
atcccagggtggctgaatcacggaatggaaaacgggccttactatacatc

SEQ ID NO: 544836 - DNA, 100 bp, Homo sapiens
taagagatatctgcaatgatgtactgaggatgaagtttttgctgctgcagcagaagtacctagaatacctggaggatggcaaggtcctggaggcacttca

SEQ ID NO: 544837 - DNA, 82 bp, Homo sapiens
ctcacggagctgggcgacgagctgaccctgggagacatcgacggcagggaagttcagcatcattcccaccatcatcaacgtg

SEQ ID NO: 544838 - DNA, 75 bp, Homo sapiens
gaaaaagaagaaatgaagaagaagagggaaatggatgaacttagatctttaggtgaagaacagttttctgtggga

SEQ ID NO: 544839 - DNA, 89 bp, Homo sapiens
ccactcattagagcccaggagtcaagagcagcctctgcttcagcccaaacaggccactgagaatgcaaaggaggaagtgaggcgaattc

SEQ ID NO: 544840 - DNA, 87 bp, Homo sapiens
ggagtttaatgagaggaatatactcatcatcagtctatttagaagagatgaacgacaatctccttgagagctggagcgacctcgacg

SEQ ID NO: 544841 - DNA, 98 bp, Homo sapiens
gcacagacaggcctgggcacagctgcggtgatcgtcatggaccgctcgacttcacagagaatgcagttgtcttgacttcaggtctgtctgttctgttg

SEQ ID NO: 544842 - DNA, 83 bp, Homo sapiens
ggccgcagtcggcaaggagagacgtcgctgaggggcttgcctgaagcgaggggatgaccatgaaagctgtggttctaattcta

SEQ ID NO: 544843 - DNA, 75 bp, Homo sapiens
cgccaggtaatggtagttccagtgggaccaacctgtgatgaatatgcccaaaagacccccggcagtggacagaaa

SEQ ID NO: 544844 - DNA, 100 bp, Homo sapiens
gggacaatggtcaccgtctcttcagggcttctttcgccgaagcatccagaagaacatggtgtacacgtgtcaccgcgacaaaaactgtatcatcaacaag

SEQ ID NO: 544845 - DNA, 75 bp, Homo sapiens
caggcatctgtgggatctgtaatagaaatagagtcccacgaactggctgggtatacagaaatgtccagaggccgg

SEQ ID NO: 544846 - DNA, 100 bp, Homo sapiens
gatctctctcatctcgctcggctgcgggaaatcgggctgaagcgactgagtccgcgatggaggtgaaaggtgtagcagtcactcggcctacacccacagc

SEQ ID NO: 544847 - DNA, 98 bp, Homo sapiens
cttctcttatcaacatcatgattgagccacaagccacacggaaggcccaggtaactcgggaccaaatgaagatgtttatacagcaggaatttaagaaa

SEQ ID NO: 544848 - DNA, 90 bp, Homo sapiens
gttctcagaaaaaggctcagaagataacagaactccggccctttaatagttgggaggctctggaatgggtcttccagatgctatcgcgac

SEQ ID NO: 544849 - DNA, 49 bp, Homo sapiens
ttcccgtggatttccacatcaagatttcaggtatgctgctgaaagtggg

SEQ ID NO: 544850 - DNA, 100 bp, Homo sapiens
actgccctacaggcactgagtatacctgcaaggtatatgctcgtatgtcagaagtcttaggaataacagatgacaaccacgttctagagacgttcatgac

SEQ ID NO: 544851 - DNA, 98 bp, Homo sapiens
gttgatcagcttcgtgatatcaaagagcaaacatcctgggtctcgccgccggccagcgctgtggcgcctcctgaccgtcgtctcctcactccgccttt

SEQ ID NO: 544852 - DNA, 75 bp, Homo sapiens
tctgacccatgagaatgctcagagatgatgtctaccgtagaaaagcctcagaaagacagtatcagagaaggctgg

SEQ ID NO: 544853 - DNA, 100 bp, Homo sapiens
gggggagggggggggcggcggccgaacgatgtgcgagaactgcgcagacctggtggaggtgttaaatgaaaggttatgtaccgaaggactctaccgtgtc

SEQ ID NO: 544854 - DNA, 75 bp, Homo sapiens
gttcataatgaataacacaggagaatggataaggcaaaacggaggctggtgggaacctggataagcagacggccc

SEQ ID NO: 544855 - DNA, 83 bp, Homo sapiens
atgttcctggggttactgtaaatgggaaggacaggcagagctaaacaaggtatgagtgatttcagtgaagaattaaaagggcc

SEQ ID NO: 544856 - DNA, 96 bp, Homo sapiens
atgcagtcaaggccagctgtggatcccggcacacagctgtggtgacacgcagatctctccctcatataacggatgtttcttggcgcttggaatatc

SEQ ID NO: 544857 - DNA, 100 bp, Homo sapiens
ggggcagttcgggccggctgtcctggcgcggaacagatgttgttattgtaaagaatggaagaagaatatgtggaacaggaggttgtttagccagcgcacc

SEQ ID NO: 544858 - DNA, 98 bp, Homo sapiens
cccgccagttgcttgatcaggtggaacagattcagaaggagcaggattaccaaaggcttctgcagaaagccgtcattacacctgattttgaaaaaaac

SEQ ID NO: 544859 - DNA, 90 bp, Homo sapiens
cctcgggcgccgcgaggtcgtgttcccgaacaggttttgctggcacacctggatatctttctccagaagttttacgtaaagatccttatg

SEQ ID NO: 544860 - DNA, 88 bp, Homo sapiens
cgactccgagacctccgaaaagcgtttccgcagacagaagtggggagaagcggagacctcaccatgggacgcccccgacctcgtgcgg

SEQ ID NO: 544861 - DNA, 101 bp, Homo sapiens
ggccgtgcgggacgcgggcgccaggaccggccgaacgcagagtttcaccagtgatcattaaagaatgggcagcttacaaaggaaagtctcctcaaaccccg

SEQ ID NO: 544862 - DNA, 74 bp, Homo sapiens
gcgaggagaactactccgtgacctggtacatcgccgagttctcatcgagagtaaacatgaggttacgatcctgg

SEQ ID NO: 544863 - DNA, 96 bp, Homo sapiens
gagccgcggctccgtgtttctggaaagtgacagcaggtagatgatgagctggagatcaaggcctactatgcaggccacgtgctgggggcagccatg

SEQ ID NO: 544864 - DNA, 75 bp, Homo sapiens
cagacgctccgagaagcttcaggcagcataacacttacaggttcctcaagccaggacctacgcacctgttgtgag

SEQ ID NO: 544865 - DNA, 101 bp, Homo sapiens
gctaggaaatgccaaccatgacggtccttcagttgagaccaaagaccggtgtcaggggattgcacaaatcactcaccgacgtggccctggagcaccatgag

SEQ ID NO: 544866 - DNA, 111 bp, Homo sapiens
ctgctgggagatgggcctactcgcccgccaccctgcgctgccgccgctctgaggagttaaagatcatcaatgctgtggtactgttgattttattgagtgccctggctgatc

SEQ ID NO: 544867 - DNA, 87 bp, Homo sapiens
tcatgaagatggcgccagaacgaagaccctactaggcaagatccagacatttaatgtggatgcaccatgccagaccgtggaagattt

SEQ ID NO: 544868 - DNA, 90 bp, Homo sapiens
acaccatggctgcggcggcccagctctctctgacacaggtctatgctccatcagcaagcactgccgactacaatagggactcgccaggct

SEQ ID NO: 544869 - DNA, 75 bp, Homo sapiens
cgccagtgccatctttctcccataccgggcagagagtagacaacaatcacctgctcctgctcatgatccacgtgt

SEQ ID NO: 544870 - DNA, 99 bp, Homo sapiens
atcagcctgggctacgacgtggagaacgaccggcagcagtgagttcctcctcctaactcaggcttccaggaaggatatcctctgcttctcagacctgaa

SEQ ID NO: 544871 - DNA, 50 bp, Homo sapiens
tgaagctggcggagcaggaggatgggcgcttgtactcccagagtacctca

SEQ ID NO: 544872 - DNA, 100 bp, Homo sapiens
gcaagatgagcactctgcccctttctcctgggaaacaaaggtgctgaacagcattttttttgagcttgaagcggatgagagagagcccacagagtctacc

SEQ ID NO: 544873 - DNA, 100 bp, Homo sapiens
tctggggttggggtggagaagatgacgacctctggaacagctcagaggcgtctgtactactgaaataggacctcagaaaaagacatgacctaagatgaag

SEQ ID NO: 544874 - DNA, 100 bp, Homo sapiens
aagtgcctgctcctggtggattcggtggcatccctgggcgggacccccctttacatggaccggcaaggcgcctgtgtctggcagagctggtgtgagacga

SEQ ID NO: 544875 - DNA, 75 bp, Homo sapiens
cgtctcccctctctggagccgagagaggccggtttcccccaccgtttgacaactattcagccaatgtgatggtgg

SEQ ID NO: 544876 - DNA, 75 bp, Homo sapiens
cccctttgaattaattatggctccccaaactggataccacccacatgtccatcatcagtagaatggataaataaa

SEQ ID NO: 544877 - DNA, 100 bp, Homo sapiens
aggccggacgaggtgaaccaggtcatttaaccgccttcagtctgaacaacccagtcctgccagctccagctccagctccagctccagcttcacaccatcc

SEQ ID NO: 544878 - DNA, 82 bp, Homo sapiens
acctcaacctgttttagcacagatatggcgagcccacaccttaaccgtgctcttcatcctcacctgtacgcttggctatgtg

SEQ ID NO: 544879 - DNA, 82 bp, Homo sapiens
aattctccaacaatggaggccagtggctggtctcagaccatggtgaatccgggcagcagctcgcagccgcccccggtgacgg

SEQ ID NO: 544880 - DNA, 75 bp, Homo sapiens
gccttcccagtagctggaactacaggcagcaagagcaactcaccaccagccttgggcccagaagcatgccctgtc

SEQ ID NO: 544881 - DNA, 75 bp, Homo sapiens
atcgcatcctatggctcaaagaaagatgattataaatgcactcggtgatggaaagagagccactattctgaagaa

SEQ ID NO: 544882 - DNA, 73 bp, Homo sapiens
atagtacggggactggtcttgcaagagccgaagcagatgaccggaaagaagggatgaccgcgtttgtggaaaa

SEQ ID NO: 544883 - DNA, 98 bp, Homo sapiens
ggccttcacccgcgggccgtcagcacctcgttcggttgcagggtgaacctggcgatttgcttgcaggtaagaatgattgatgttggctgatattggag

SEQ ID NO: 544884 - DNA, 75 bp, Homo sapiens
tgacattagtattaataaccacatttcacaagaagattgtgcaatgcctacaccaactaatgttacaattgaatc

SEQ ID NO: 544885 - DNA, 49 bp, Homo sapiens
gacaaatcaaattagtggttttgctggatctaccatgaaagacttgtga

SEQ ID NO: 544886 - DNA, 74 bp, Homo sapiens
tgatcgccccagggatcaggagctagagatgatcgctatggaaaatcctgcagacttgaagaagcagttgtatg

SEQ ID NO: 544887 - DNA, 98 bp, Homo sapiens
gtcacagcgaatgtggaggatagactacagtgccgctgactcggcccagccttctgccatccctgaggcctccaacccagcctccaacccagcctctg

SEQ ID NO: 544888 - DNA, 100 bp, Homo sapiens
ttcgcagtggtcgcttcttctccttggtcccatgatgtgaaaaatggaggtgaacttactcatcccacccatagccccggccagtcctctccccgccccg

SEQ ID NO: 544889 - DNA, 75 bp, Homo sapiens
cgagaaccgtcagtttgagccagatgcgaaggacaaggttgcccttttgataggaaatatgaattaccgggagca

SEQ ID NO: 544890 - DNA, 109 bp, Homo sapiens
cctccttgcccgtgaccgtcgctagaactcagttgtgcgttgcggccagtcgccactgctgtgctggagaatctggtaaaagcaccattgtgaagcagatgaggatcct

SEQ ID NO: 544891 - DNA, 82 bp, Homo sapiens
agctgcagcagcagcagcacagcgacaagacgcaccgaacaagatttgtgatgaaatggagcctggaacaaactcttttcgg

SEQ ID NO: 544892 - DNA, 82 bp, Homo sapiens
atcaaagtgattccccggaatcgtgtgctgggctggtcccccttgtacatggactggacctgcctggagcccagcccagagc

SEQ ID NO: 544893 - DNA, 75 bp, Homo sapiens
tccggctttcccacttcccaagtgaggatgaggatgatgaccttcagtatgccgatcatgattatgaagtaccac

SEQ ID NO: 544894 - DNA, 75 bp, Homo sapiens
aacaagccaggaaaaccccgaaaacgcaagaagcgtatagaagaagtcagagatgccatggaaaatgaaatgaga

SEQ ID NO: 544895 - DNA, 98 bp, Homo sapiens
agttgcgctttcctgcctgcttctagcaaggtctgttgggatggtatatggtgaaaagtggactagaagaaaaatcagactcccatgacatccctcgg

SEQ ID NO: 544896 - DNA, 100 bp, Homo sapiens
gagcttttcatggattatcttacgtagataagacactgcaacactaacccggaaaagagccgatttgaaaaagaagttaaaagttacatttgtaggggaa

SEQ ID NO: 544897 - DNA, 50 bp, Homo sapiens
cacggccagatctgccctccatacttgttgttaaaaaagccttcctggcc

SEQ ID NO: 544898 - DNA, 100 bp, Homo sapiens
gaaatacctgtgatttgctttctcggagcaaaagtaccatccttcctgctgctgcccaggatgtttattaccgggatgagattggcaatgtttctaccag

SEQ ID NO: 544899 - DNA, 100 bp, Homo sapiens
gccctcttcctcctggccagcctcctgggcgcgggcaaactaggcgtggcaactgctggctgcgtgaatgaagttacagagatggagtgcggtcgctctg

SEQ ID NO: 544900 - DNA, 100 bp, Homo sapiens
tgcagcctcaacttcttgtcctcaagtgatcctcccaccttagcctcctaagtagctgggaccacaggattgttcaagtttagaagaatacaacattgcc

SEQ ID NO: 544901 - DNA, 76 bp, Homo sapiens
aaaggattcgttacagccagagattgcaccctcatcacatgtgtggattctgggattctcagagtctggcatgaca

SEQ ID NO: 544902 - DNA, 97 bp, Homo sapiens
aaagaagcttgcagcttacatctgatcctgggcttccccatctggtgcttttcccatggagaacacacaaccaccacgacaagggacccgaggcgga

SEQ ID NO: 544903 - DNA, 81 bp, Homo sapiens
acgcgaattggagaaaaagttcagtgggaagcatgtcgtctttatcgctcagtcaccaggagactaaagtccatcaaaaac

SEQ ID NO: 544904 - DNA, 75 bp, Homo sapiens
agctgcctgcccccggaggtgcccacgcagctgcctggacaaaactgcatgaacttgcccccagacaaggtccag

SEQ ID NO: 544905 - DNA, 88 bp, Homo sapiens
tagacttgtttcttatatgtgatgccattccagcactggactcatggaggctgagcatttattcagatggagcctcactctgttgccc

SEQ ID NO: 544906 - DNA, 98 bp, Homo sapiens
ttgagagatgagcaccagttacacaaggacttctttatccgagcgctggattgcatgagaagaagcccctgaatgtgacagtgatccgcaggggggaa

SEQ ID NO: 544907 - DNA, 83 bp, Homo sapiens
gacacttttcttcagaagctggtcgccgccggcagaggaacaatcctgcaccatgactcaacagccacttcgaggagtgacca

SEQ ID NO: 544908 - DNA, 50 bp, Homo sapiens
atcctcaactgccaaaaggcaatggatatcagttttagagaatgtggcgt

SEQ ID NO: 544909 - DNA, 50 bp, Homo sapiens
caggtcaagagcctctgcgagaagaatatgagttggaagtaaagagggtg

SEQ ID NO: 544910 - DNA, 75 bp, Homo sapiens
tcgccgcgtccttggctggcgtaatcattgatcagcgattcgagaaggtttcctactttgtatttggtgatttca

SEQ ID NO: 544911 - DNA, 105 bp, Homo sapiens
gcggcaagaaaaatgccagccagaagaggcgttcgctgcgcgtgcacattccggaattgtcttagaagaaagaaggcaagccaccattttacccacgtaaatata

SEQ ID NO: 544912 - DNA, 90 bp, Homo sapiens
ccagtggccggctccggaggcttggtgactccagtggcccagacaagttggatggcttgaggactggtactaaaaggaaacgtgactggg

SEQ ID NO: 544913 - DNA, 100 bp, Homo sapiens
aagagaagcacctgcacctcagagtaaagctgctggacaacaccatggaaatatttgacattgaggctgaccggttccctgatgtgttacctgcttctgc

SEQ ID NO: 544914 - DNA, 75 bp, Homo sapiens
cattacttttatttgaaggaacgtatattagagagcttgtcaggaagatcggaggtgccaagtagcagagaaagc

SEQ ID NO: 544915 - DNA, 82 bp, Homo sapiens
caagtgagagccggacgggcactgggcgactctgtgcctcgctgaggttaaacgagaagattcatcaccgctttgatggctg

SEQ ID NO: 544916 - DNA, 75 bp, Homo sapiens
cgcgcgcggccgagactctggcctgcagtcgccgccgccgccgccagtaaataacagatgcgggtgaaagatcca

SEQ ID NO: 544917 - DNA, 100 bp, Homo sapiens
gccgccaccatgcccaaaacgggcaccaatgcctctgctctggaaaaagacattggtccagagcagtttccaatcaatgaacactatttcggattggtca

SEQ ID NO: 544918 - DNA, 100 bp, Homo sapiens
atggaaatcaaggacagcaacaacaggatctgccccatactgatggagaagctgaacagcgagttcctggggaaaaccccagggcaaaacgctcagaaat

SEQ ID NO: 544919 - DNA, 82 bp, Homo sapiens
ggctctaagatctgaatgttgtgaccactaatttggtttggtgcacctcgatttggaggaagtagggcagggcccttatctg

SEQ ID NO: 544920 - DNA, 75 bp, Homo sapiens
ctggcggatgcggtcgtgaagataggtcatcatcagatttgaaatatttaaagtggatacaaaactatttcagca

SEQ ID NO: 544921 - DNA, 100 bp, Homo sapiens
catgcagcccgtgaggaaggtgcagtcggccacacacttcaaaaaggtttcagaaaagggatccctaacatcagaagagtttgctaagcttgtgggaatg

SEQ ID NO: 544922 - DNA, 82 bp, Homo sapiens
cagatggcaagatatggacaactaagtgagaaggaatgtatcctgtcaggtataatgtcagtgaatggcaagaaagttcttc

SEQ ID NO: 544923 - DNA, 73 bp, Homo sapiens
ttgtatttaatttttggaacaatttgatgagctaggaggtgttcattgaggatgtcagcagggagtttgtgga

SEQ ID NO: 544924 - DNA, 83 bp, Homo sapiens
cttgtacagcgccggtcaacatcgcggtcatcaagtactgtttggtgcacctcgatttggaggaagtagggcagggcccttat

SEQ ID NO: 544925 - DNA, 90 bp, Homo sapiens
tgaactacctgagacacggcaagctggtgattaacaaagacctcgcggaggaaggagagtgtgctgggcagacgatgctggacacgatgg

SEQ ID NO: 544926 - DNA, 86 bp, Homo sapiens
tctagaagcctgtcgaaaaatgggggtgcctgagatctgactgcagccatgagcagcaatgagtgcttcaagtgtggacgatctgg

SEQ ID NO: 544927 - DNA, 51 bp, Homo sapiens
ctggaaggcagattcaagcagctgcaagagatcctgaaggagctagacgag

SEQ ID NO: 544928 - DNA, 100 bp, Homo sapiens
ctttacctggtggatgtttatgccatagaaaaatcaactgcttttcccagaacacagagagcagagtgtctaccatcagagggagatctctgccccctgg

SEQ ID NO: 544929 - DNA, 75 bp, Homo sapiens
cccactctgcggagttagcagtcacgacctccagcacaggagagatggagccatctcagtgtgtggaggagctgg

SEQ ID NO: 544930 - DNA, 75 bp, Homo sapiens
caagctgcctggtgcaatttgttccttgacttgtggtggagcagatattggtgatgatgatgatgattttgatga

SEQ ID NO: 544931 - DNA, 50 bp, Homo sapiens
tgaacaagaagttggccaacaagagaaccatggagtctggcagtaccgcc

SEQ ID NO: 544932 - DNA, 90 bp, Homo sapiens
cgcatcagaggacaccacggggcagcatgaccaccacttcttagaccccaactgccacatctgcaaggcactattcctgatcagagaact

SEQ ID NO: 544933 - DNA, 82 bp, Homo sapiens
tacttggaatgaatccttctagagacgtccacggccaaaaggtgtgttttgctgacttcaagcatccctgctacaaaatggc

SEQ ID NO: 544934 - DNA, 90 bp, Homo sapiens
gttccacctcattttagagtatcaagcaggccaggtggtggatgtggaacaggggatcatctgcgagaacatccccatcgtcacgccctc

SEQ ID NO: 544935 - DNA, 76 bp, Homo sapiens
ggtgtagacatccggaaaaagtccaacccactcatactgttttagccataaaatctctgccacagaccattgttcc

SEQ ID NO: 544936 - DNA, 100 bp, Homo sapiens
ttcgggagtccttggaactgtggtccatggtaaagttttacaggacttgaaagaggagattgatattcgactctccagggttcaggatatcaagtatgag

SEQ ID NO: 544937 - DNA, 98 bp, Homo sapiens
aaggacccaagctatgcttaacaaatacagatgcctgctcctagaagatgccatgtgagtcaacccgacaactgtgttcccatggaggctgtggggga

SEQ ID NO: 544938 - DNA, 100 bp, Homo sapiens
caagtactaccggccaactgaagtgggaatgcagagagcaaccaatgtcacctaccaagcccatcatgtcagcaggaacaagagaggtcaggtggtgggg

SEQ ID NO: 544939 - DNA, 82 bp, Homo sapiens
cttcagttcacatactatttatgggagaagacagactgctgctttggacctgttggtaatgatggcctgagctaaacatcta

SEQ ID NO: 544940 - DNA, 100 bp, Homo sapiens
cgcgactcgagggtgacgctcgctccgctcgtcccgctcgtcatggcctacccgggatacggaggagggagctgaagaagcaggtggagagtgccgagct

SEQ ID NO: 544941 - DNA, 100 bp, Homo sapiens
aggctggtgacgcctgagaaggtgaacagccgcgacacggcgggcaggaaatccaccccgctgcacttcgccgcaggccgccatggcatcagatgaaggc

SEQ ID NO: 544942 - DNA, 100 bp, Homo sapiens
ttcacaatccaagttccacaatatattgactactgccacaattccggtacaggtttgcagattccgccagcagcacagcaagctctacagatgagtggct

SEQ ID NO: 544943 - DNA, 90 bp, Homo sapiens
ctggtatcgggatgacacaggaagagctggtgtccaacctggggacgattgccagatcggggtcaaagactcagattgatggacaacttt

SEQ ID NO: 544944 - DNA, 50 bp, Homo sapiens
gtgcctttcagctttaaagagaattgaagttctgtggaagcaaatcattg

SEQ ID NO: 544945 - DNA, 82 bp, Homo sapiens
tcacgaaggcaccgacgtcatcatgctgaccaccaatcagatccgtaagggggtgatcgctgagctgaaggtgcgcagggac

SEQ ID NO: 544946 - DNA, 98 bp, Homo sapiens
cagaaaatgaccgactgagaatcaggtccataacttagtggcaattgaactggcttatatcaacacaaaacatccagactttgctgatgcttgtgggc

SEQ ID NO: 544947 - DNA, 75 bp, Homo sapiens
tgtttcctccatttgctaaaggaatagtgtttgataacaacgaacttgatgcaagtgataggtttgccaaggtca

SEQ ID NO: 544948 - DNA, 100 bp, Homo sapiens
gcccactggatccccagagcctcaggcccaactcggaggaggagatcccccgagacctcacgctggatgccctgctggagatgaatgaggccaaggtgaa

SEQ ID NO: 544949 - DNA, 100 bp, Homo sapiens
gtctgcggaagtgcagctgcctcagttcttagcgcaggctggacggcgctgcacgaggcctgtaaccggggctactacgacgtcgcgaagcagctgctgg

SEQ ID NO: 544950 - DNA, 101 bp, Homo sapiens
tcgcctttcaggaccccacacagggggccgaaggccagagaccaggatttggctacggaggcagagcgtccgactataaatcggctcacaagggattcaag

SEQ ID NO: 544951 - DNA, 51 bp, Homo sapiens
tgacctctgaacaggagtgggacaaggacccaaagcagcagaagatctacg

SEQ ID NO: 544952 - DNA, 96 bp, Homo sapiens
aaagatctctggaagcgattaatgataaaatttcatggagaagaaggccttgactacggaggggttgccagagatggaaaataatgtcctgcaaga

SEQ ID NO: 544953 - DNA, 122 bp, Homo sapiens
gctctgcctccggggacaagaaactagagcaaataaccgttttgaaattccactcatctctgcccagctgctgccctccccaggaggcctccatggcttcacctacctccaccaacccagcg

SEQ ID NO: 544954 - DNA, 101 bp, Homo sapiens
attgaaacattaaatgacagttcacataagaagttcttcgatgtatctaaacttggcaccaagtatgacatggagattaagtagcttgcccaagatcaccc

SEQ ID NO: 544955 - DNA, 89 bp, Homo sapiens
tgcacccgctcagcgagctcctgggcatcccgctggaccagatcctgtttgaccaaactcagagatcaattaaggcacagcttcagaac

SEQ ID NO: 544956 - DNA, 100 bp, Homo sapiens
agggggactggcctggcgtgcactccgcacctcggggacattattgcgcgtggaacggctgcttttggaaggtaaagtgttgagagaggagaaccagtgc

SEQ ID NO: 544957 - DNA, 83 bp, Homo sapiens
gttgaaacgctgcctggaaaggaagtaccaggacttgcacagggttacattccgaaaagcaaatgggagatggacacatctga

SEQ ID NO: 544958 - DNA, 90 bp, Homo sapiens
tttggaggcactggactacttacaaaaatggttaatcactgttctgaagatggtgtttgtaacaccagttatgcttcatacttctgaggt

SEQ ID NO: 544959 - DNA, 100 bp, Homo sapiens
tcctcctttgacagggacatcagtggagccttctcagacccacagttaccattggaatgacatactgcatcctatagttataccatccactctgaaatca

SEQ ID NO: 544960 - DNA, 76 bp, Homo sapiens
cttcaccgaacagcacctcaggagcaggagggacgaagatggtgtgcagatgacagcccagcaggtatttgaagag

SEQ ID NO: 544961 - DNA, 80 bp, Homo sapiens
ggcatgaccccagtgctgcctgcattcgcggggcatgttcccgaggctgtcaccaggattacctcaacctctcttggaac

SEQ ID NO: 544962 - DNA, 82 bp, Homo sapiens
gaaaattgaagactccgaagaaagcagtgatgaaattcttgtgcgtctaacatctgcggacaaaactttcggtttgaagaat

SEQ ID NO: 544963 - DNA, 82 bp, Homo sapiens
acgtgcggatcctgctggtgggagaacccagctgaggtgggtgtcctggttggcaaagaccggtcaagtttttacgtgaatg

SEQ ID NO: 544964 - DNA, 75 bp, Homo sapiens
atgcactccccgcagcagccaggctatcagccccaacaaaatggtgtgaagcttacactctctgctctggtagat

SEQ ID NO: 544965 - DNA, 50 bp, Homo sapiens
cccaaataaaggaagtggaaccacttcagattccatgcaagcatgttttt

SEQ ID NO: 544966 - DNA, 80 bp, Homo sapiens
tggcctccctcaccttggacacctcgcttgggtcagccatgtcatctgagcctcccccaccaccacagccccccacccat

SEQ ID NO: 544967 - DNA, 74 bp, Homo sapiens
cgggagtgtcctggacccagctgagcgggcggtcattcgcatcgcagggtcctgggcccagtctgccctgactc

SEQ ID NO: 544968 - DNA, 97 bp, Homo sapiens
tctggaattggtgggttcttggtctcactgacttcaagaatgaagccgcagaccctcgtggtgtcatggagaaactccagctgggcccagagattct

SEQ ID NO: 544969 - DNA, 100 bp, Homo sapiens
cagcatattttgcgagtactcaacaccaacatcgatgggcggcggaaaatagcctttgccatcactgccattaaggaaaccgtggctgccaggctttctg

SEQ ID NO: 544970 - DNA, 100 bp, Homo sapiens
cccttcctgtttgacaccaagcctctcattgttcaaggctgacccgcggctgattgagtccctctcccagatgctgtccatgggcttctctgatgaaggc

SEQ ID NO: 544971 - DNA, 100 bp, Homo sapiens
gaagcaggactgcgccgcgtcttcctcaaggctgaccccgcactacatctacccaccagccatcgtgcagcccagcgtggtgatcccagccgcccctgtc

SEQ ID NO: 544972 - DNA, 90 bp, Homo sapiens
gaacacttgccatgggcaggaaaccacaggtaaaacttccttttcctgtagatcaaatcacagatcttccaaggaacgatttccagatga

SEQ ID NO: 544973 - DNA, 100 bp, Homo sapiens
gtttctatgatgacaggatggtcctaagtcttcacacatcagggccacagccccaacctcacaggaaacagagcagcggaaagagctcagtgctagaaag

SEQ ID NO: 544974 - DNA, 131 bp, Homo sapiens
cgcgagccgacaccatgcgatccaaggcgagggcgaggaagctagccaaaagtgtgaccatgaagctcatggatgaggtcgccgggatcgtggctgcacgccactgcaagaccaacatcgtcacagcttcc

SEQ ID NO: 544975 - DNA, 75 bp, Homo sapiens
cgagaacgcctccagcggggatgacacagaagttactccacaggatccgctgaacataggatgttgccacaaaat

SEQ ID NO: 544976 - DNA, 99 bp, Homo sapiens
accttctactcatctgccggcagggccagttacagacacaactgaggccccctttcaaggggatcagaggtccctggagtttctgcttcctccagagcc

SEQ ID NO: 544977 - DNA, 98 bp, Homo sapiens
tttgaattcacgcttatggtagtggggctcgtgcaatccgcttcagacaggatggtaacgaagccgtcggaggattcttctctcagattgggcagctg

SEQ ID NO: 544978 - DNA, 75 bp, Homo sapiens
gccaacatgagcttcttgttcacgtttcctgtggcagcctaagagggagtgtcatttcttcaatgggacggagcg

SEQ ID NO: 544979 - DNA, 90 bp, Homo sapiens
gtcgggaacagccatgcaaaggcaggggaggaagccacctcgagtgtatgtggtagaagaccaaagaagagatgagctaggaccatccac

SEQ ID NO: 544980 - DNA, 99 bp, Homo sapiens
tctcccctccactttctcccggggtaggtgacgccgtcctggggctggtctgcatgctgctgctgctggtgctgaagctgatgcgggaccacgtgcctc

SEQ ID NO: 544981 - DNA, 75 bp, Homo sapiens
gaggaactcatctcctgtgccgactgtggcaacagtgattggagctggagtgagccttccaggaattttggctgc

SEQ ID NO: 544982 - DNA, 75 bp, Homo sapiens
gcagccgcgagctcctggaggcggcgggatggaggcggcggccggatttcagatgcatgccaggtttccactgat

SEQ ID NO: 544983 - DNA, 85 bp, Homo sapiens
tggattgctgacggcagccctctcaggttgctatcaagatcatagataagacccagctggatgaagaaaacttgaagaagatttt

SEQ ID NO: 544984 - DNA, 100 bp, Homo sapiens
cctaaatgaggaatgtctttcctaccatctaaaatacgaaggtttctggctggatatgactttgacactcagtatgctttcgttggtgattattctgggc

SEQ ID NO: 544985 - DNA, 100 bp, Homo sapiens
ctcggcaatacttgctatcttaatagtatacttcaggtgtgtgtgtgcaggccacagcagcatgcccttggtgtagtcagtgccgaaaggggtctgttcc

SEQ ID NO: 544986 - DNA, 106 bp, Homo sapiens
gatgaattggcagagcttgacccaggcactagaggaggaagccaagaatctggtgagcgaagccatcgcagctggcatcttcaacgacctgggctccggaagcaac

SEQ ID NO: 544987 - DNA, 76 bp, Homo sapiens
cttagaaccgcagcagggacgtcggtttgctatcgggactcggcgaggacggacccatgccccctttgtgatgaag

SEQ ID NO: 544988 - DNA, 96 bp, Homo sapiens
ttctggcgctgccgcccaccttgtggccctgggctttaccatctttgtggctgtgcttgccaggcctggctccaataaactcatcctgaaagtcgc

SEQ ID NO: 544989 - DNA, 95 bp, Homo sapiens
ggcggatgccctgcagtacctgcagaaggtctctggagacatcttcagcaggtcccaggtgtgacaccttcagcaggtctcagggaagatggcag

SEQ ID NO: 544990 - DNA, 101 bp, Homo sapiens
gagagcccttttgggtcttggcacaagcacatatgtttgtgaagctcaagctgtgctttatcatcgttggggacatctagacttggccaagaaacactatg

SEQ ID NO: 544991 - DNA, 75 bp, Homo sapiens
gagccggccgcgggcgcgaccggaggcagctgctgcagaagaatattttgcctgctggaacctgctgtatctact

SEQ ID NO: 544992 - DNA, 75 bp, Homo sapiens
atgctaggccactatacagatgtgaccatggaggctggtggcctccccttggagctgtggcgcatgatcttagcc

SEQ ID NO: 544993 - DNA, 75 bp, Homo sapiens
gcaagcacctcgggatcccattccttcacagggaccctagccaggttcgatctggggctaatgttctaatttgtg

SEQ ID NO: 544994 - DNA, 100 bp, Homo sapiens
ccaccaccaccacagagtctgtggaagaggtggttcgagaaacctctgtagaggagcaggatgcaaccgacaggctgtggccggacagctgctgcccagc

SEQ ID NO: 544995 - DNA, 75 bp, Homo sapiens
agactcagggatcaaagagcaaacagattcagtggcctgcattgatgctgttccactgccagggactccctcccc

SEQ ID NO: 544996 - DNA, 95 bp, Homo sapiens
tgcggttggtgccattcgctacaaaggtgaaaggtgtagcagtcactcggcctacacccacagcatcgaccttgtgaacccagcgacctgactgc

SEQ ID NO: 544997 - DNA, 91 bp, Homo sapiens
aaggtcatctcggagactagaggctggataccaaatagcagtggaaaccgggtatgcagaagttggctagtcaatacctgaagagagattg

SEQ ID NO: 544998 - DNA, 89 bp, Homo sapiens
gatgtctgacagccctgtgtgacaccaagataagtaacatgcctgaaaacttcatgcctcctgttcccatcacatcaccaatcatgaac

SEQ ID NO: 544999 - DNA, 83 bp, Homo sapiens
gcagcagctgccagacctattaatgccagcatgaaaccagaggccaataatccgttatggagcatgcctttaccccgttggag

SEQ ID NO: 545000 - DNA, 98 bp, Homo sapiens
gacaagtgttttgtacattgggagagatcgttggttcacagggaagtcgcctggaaaaaccaatagttactaaggctcgtacgtctgcatcgattatc

SEQ ID NO: 545001 - DNA, 74 bp, Homo sapiens
gggccttaaaccaggcccttggtagaatcccctactttgaaactagtgctgccaatgggacaaacataagccaa

SEQ ID NO: 545002 - DNA, 101 bp, Homo sapiens
taagagcaaagaacactgttgttgccacagggtatgatctcgtgaaaccttgagagaaactgaatgacgaatgaaactattgttcctgtttcacacagaag

SEQ ID NO: 545003 - DNA, 74 bp, Homo sapiens
cggatcctggagaacatctcgctgtcggtgaagaaggcttatgatcaacatttaaatatgatcttgggagatgt

SEQ ID NO: 545004 - DNA, 100 bp, Homo sapiens
catcaaagacagctttcacagtttgcgggactcagtcccatcactccaaggagagaagagcagtatggtatgaccccatctactatccaacctcatggca

SEQ ID NO: 545005 - DNA, 75 bp, Homo sapiens
tggatgtggatgggggccggagtctctatactcactcgtatgaggtaccagaccccctggttgtggaatacgagg

SEQ ID NO: 545006 - DNA, 100 bp, Homo sapiens
cgccgtcccccattcgcacacccgatgcccgggggtcgctacggacttaaaatctccgcaccgcaccctccacctcaggctggagtgcaatggcacgatc

SEQ ID NO: 545007 - DNA, 75 bp, Homo sapiens
tggactgaaagcaggagcgctggcaaatcaggaaacccaggcccaacggcaggtggatgcaagaagaaatgttcc

SEQ ID NO: 545008 - DNA, 83 bp, Homo sapiens
aaggacaccgattatggattggcaacctggaccccaaaattaccgaatccagaagcagcaaggtctagcaattccaaaatcac

SEQ ID NO: 545009 - DNA, 83 bp, Homo sapiens
cccgcagctgcagccgcctgaccacggcgactggacttacgaggagcagtttaagcagcaagagtgagccatggagctacgtg

SEQ ID NO: 545010 - DNA, 83 bp, Homo sapiens
tccaatacttggtgactggtctattcaagttcaagtgaatgtgaccaagaatatggcccaggtgaccaaagccctggacaagg

SEQ ID NO: 545011 - DNA, 82 bp, Homo sapiens
ttggatccgcgggacaagaaaattcatgcggtgtccctggccagtgtccttccacctgtccacaagcatggggaacatcttc

SEQ ID NO: 545012 - DNA, 51 bp, Homo sapiens
ctgagtagctggaattacaaaatggcctgtccagaagacagccaaatacat

SEQ ID NO: 545013 - DNA, 99 bp, Homo sapiens
agacctcatcttgtattctagtgtgtcagtattgggactatttagtccaaccatgaaaacaggtgtgactgaagaaatatcaaatgtttcctagtaaga

SEQ ID NO: 545014 - DNA, 101 bp, Homo sapiens
cgagcggcggcggtggcggcgaaggccgaggcggcgttggagaccagggccagccctggccacaccccaggctgtgtcaccttcgtcctgaatgaccacag

SEQ ID NO: 545015 - DNA, 82 bp, Homo sapiens
ctcacattgctcctgctgctgctgcaggtacaatgccagggagtactacgaccacctgcccgagctgaagcaggccgtggac

SEQ ID NO: 545016 - DNA, 100 bp, Homo sapiens
agctcactgtccacctgcgatcccacacggattatcctcttgacttgaaccacagtgaaaccttcctgcaaactacaacatttcttcctgaagacttcac

SEQ ID NO: 545017 - DNA, 96 bp, Homo sapiens
tggatacccccagccttcagggacacctgtgaagcccaccgccctaacagaggaagaacttgtcgcttttcctaagcattagtttgttaattttct

SEQ ID NO: 545018 - DNA, 75 bp, Homo sapiens
gacgagtgttcgtgaaagtgaaccccaaggcggaggattgtcagtggcttcgccccgaggagagctgactgccct

SEQ ID NO: 545019 - DNA, 119 bp, Homo sapiens
ctacttcctcacctccttcgtggggctcatcgtgatcccggcgacatactacctctggccccgagatcagaatgccggaagaattcctttggctaccggaagaaaagggaggagaagtt

SEQ ID NO: 545020 - DNA, 97 bp, Homo sapiens
tgaatcgacagtttcttttccggccctgggatgtcacgtgcagattgctgtctgaagctcccttgtttatctactcttgctcaagatctgtgtctcc

SEQ ID NO: 545021 - DNA, 100 bp, Homo sapiens
gggagaggagctgtggataacgggaggtgaatttccatgtcaacatagtcctgccgcctgtcttggttagatggctctggattaggattctcactggaat

SEQ ID NO: 545022 - DNA, 75 bp, Homo sapiens
ttcatggagaagaaggccttgactacggaggggttgccagcaatggctgccatccggaagaaactggtgattgtt

SEQ ID NO: 545023 - DNA, 98 bp, Homo sapiens
tctaacttcgaaaaatcagattgaaagactgacccgtcctggttcctcttacttcaatttgaacccatttgaggctgtggattcccctccaagtggag

SEQ ID NO: 545024 - DNA, 75 bp, Homo sapiens
tcaaaccaccacacggaaattggagggttactttggagcagttggtgcacttcttgggctgccaaatttcagcta

SEQ ID NO: 545025 - DNA, 101 bp, Homo sapiens
ctccagtcggtgttgagcacggcgagcagtctcaggcctttagtgatgatggtgagtaccccggggctggctcctccagtgtcttctcagtcctgagcaac

SEQ ID NO: 545026 - DNA, 98 bp, Homo sapiens
agacccagacgtctgcagaggctcgagatgctgctgtgcagaagattgagactattatcaaagaacagtttgctcttgaaatgaagaataaggaacat

SEQ ID NO: 545027 - DNA, 74 bp, Homo sapiens
tgcgacttataaaggaccagacaaatcaaattagtggttttgtccttcagtgaatctacagacctattttctca

SEQ ID NO: 545028 - DNA, 100 bp, Homo sapiens
cgcggaggagccgcgagcgctgaggaatctccggcctgtgaaactgtgaggggattcggccaagacgtcctcttccctctgcctcccacccaggccactc

SEQ ID NO: 545029 - DNA, 82 bp, Homo sapiens
agggcaagcacgggaagaagcagctggacccgctcaccatctacggcatccggtcttcctgcctgacacagctcacttcaag

SEQ ID NO: 545030 - DNA, 73 bp, Homo sapiens
agctagtatgcaggctaggcaaactgacctatacgaggcaggggaactgaaatggggaacagatgaagcccag

SEQ ID NO: 545031 - DNA, 100 bp, Homo sapiens
ctcctcggcctcggcgtgctgcgcctccgcggctgccctgcgccagaggctgaggggatctggcggtggagcgctaggatcagacgcccccgcgatgacc

SEQ ID NO: 545032 - DNA, 75 bp, Homo sapiens
aagtccatgctaacctactatgagggtcgagcagaggccaaagaagcccaggatgacctggtgaagaccaaggag

SEQ ID NO: 545033 - DNA, 100 bp, Homo sapiens
gggcccctggcagtcgctggaggcccccggaagacaggtgatgactgaaaaagggaaactgtgccactatttgtaccatcattttcaccaaaatctaaaa

SEQ ID NO: 545034 - DNA, 82 bp, Homo sapiens
attcggggtgccagaaggaaagcatagagctggaagtcgagtgtgctactcaactcaggagatttggagacaaactgaactt

SEQ ID NO: 545035 - DNA, 83 bp, Homo sapiens
cttccagctgtcacattctggagcgtatgagatgaggagccttcacgtaaatgggtccagtcatgcctcccagtaagaagcca

SEQ ID NO: 545036 - DNA, 51 bp, Homo sapiens
cagtatcataaaattcctctaaatgcagtccccttcccctgagcccatcta

SEQ ID NO: 545037 - DNA, 100 bp, Homo sapiens
gacagggacgagcactgggtgaaggacctgggcagcctcaatgggccgagagggtgacctctctgggcaaggactggcatcggccctgcctgaagtgcga

SEQ ID NO: 545038 - DNA, 87 bp, Homo sapiens
gtcctgcagcccagcatcaacgaggagatccagactgtcttcaacaagtacatgaaggccctcagggcatcagagtccggcatatga

SEQ ID NO: 545039 - DNA, 83 bp, Homo sapiens
tggggaaggatctaataaccaaatgatcaagtctcggcctctggattatacctttgttcctcgaacttggatctttcctgctg

SEQ ID NO: 545040 - DNA, 75 bp, Homo sapiens
ggagattccacccaaacttgctggtcactgggaggtgctcgcggtgaggatcgatgacctggaccacctcccgga

SEQ ID NO: 545041 - DNA, 75 bp, Homo sapiens
ttaagtgacttttcctggtctcaaagaaactaatctggattcactccctctggttgatacccactcaaaaaggac

SEQ ID NO: 545042 - DNA, 90 bp, Homo sapiens
tgaccttcaatcctactacagaaatcttggcaattgcttcagaaaaaatgaaagaagcagtcagattggcttccgaagatcttctcaagg

SEQ ID NO: 545043 - DNA, 83 bp, Homo sapiens
gggagccgtgctctacctctatccggactatctcaagcaggtgctggacattgatcttcatgctcagatccattttggcaggg

SEQ ID NO: 545044 - DNA, 100 bp, Homo sapiens
gtgtgcattaacctgccgccgcccctcaccagacagatcgctgtcaaaaccctagaccttacacataggaagctcacacctggctccgccaaatccagac

SEQ ID NO: 545045 - DNA, 100 bp, Homo sapiens
ctgcttcttttctccgcgggcgccgaccaggcctggctcgcgcctctcccaggacccgcctggctgcgagatatgtggttggaggcaaagtaaagaagcc

SEQ ID NO: 545046 - DNA, 75 bp, Homo sapiens
tcgccgctggagaggggctcggcgcccggcggggactgcagaggagcaggagcggcttcgcttggagcaggagcg

SEQ ID NO: 545047 - DNA, 82 bp, Homo sapiens
cggcacggctggggagcccggacgaggagttcttccacaaggtacatatttcccgggataagatcaccaggccaggagcgaa

SEQ ID NO: 545048 - DNA, 100 bp, Homo sapiens
cccgggtgctgctggttagtgtgctctgagggagggtccgagccagccgctgttttgccggaggagcccctcaggccgttgtggcagcactgcctgaagg

SEQ ID NO: 545049 - DNA, 75 bp, Homo sapiens
gtccgagccagccgctgttttgccggaggagcccctcaggccacagattacatcaatgccagtttcatggatggc

SEQ ID NO: 545050 - DNA, 75 bp, Homo sapiens
tgcggagcatgtcgaccccggcccggaggaggctcatgcgggatttcaagcgcaagaagatccatcgcagagtcc

SEQ ID NO: 545051 - DNA, 83 bp, Homo sapiens
agacctagtgggcgttgcctttagacccagggaaagaatcatgtgatgtacagctttatataaagagacaatctgaacactcc

SEQ ID NO: 545052 - DNA, 110 bp, Homo sapiens
ctttcgtatcacaaaagcagatgctgctgaattctggagaaagttttttggagacaagatcatggcctataaaatgcttcaagtagtcctgtgctcaacattgcttatcg

SEQ ID NO: 545053 - DNA, 75 bp, Homo sapiens
ggacctctatagagatgtgatgctggagaattacgggaatgtgttctcactggacgctgacagaggcaaaaatct

SEQ ID NO: 545054 - DNA, 98 bp, Homo sapiens
tgcgataacctgcatctctgcaaactcaacttgctgggccggtgcaactattcgcagtccgagcggtcaccagtgaaaagttgtgcagagcccaacat

SEQ ID NO: 545055 - DNA, 100 bp, Homo sapiens
ggaagaatgagagaagtcatatgcccggcacaatgatgatgtgcctgcagatatggttgcagaagaatcaggtcctggtgcacaaaatagtccataccaa

SEQ ID NO: 545056 - DNA, 100 bp, Homo sapiens
gcgacaaactcgtttggaacaattgttagcagagaagcaaagcttcagtttgcttgtgtcatggagaaactccagctgggcccagagattctgcagcggg

SEQ ID NO: 545057 - DNA, 98 bp, Homo sapiens
ggagcgccgcggccgcatctacatccaggcccacatcgacagggacgtcctcattgtcctcggtgaacctgttctctgacccaccccagcccaaccac

SEQ ID NO: 545058 - DNA, 100 bp, Homo sapiens
tacaggctcagtctgcggccaagactccgtcctgcaagatgctggtgggctgcgcggacaggacggtgaagcacttcagcaccgaggatggcatattcca

SEQ ID NO: 545059 - DNA, 80 bp, Homo sapiens
ggctccatggacacagacctgctgtgtgtgcttctgcgccccagtggtgatcatgtgtgcgagcagtgacaccatccgga

SEQ ID NO: 545060 - DNA, 89 bp, Homo sapiens
cactctgagtacggtctcacagacaacgttgaggttcttgcacgcattgcaaatgccacgaggccaactattcatctgtgtgagattgt

SEQ ID NO: 545061 - DNA, 75 bp, Homo sapiens
caacgcctggctcggagcagcagcctctgagttcctccgtgtcacaaagcagtacctgccccacgtggcgcgcct

SEQ ID NO: 545062 - DNA, 97 bp, Homo sapiens
gtcgctccgggacgcggaccgccaggctcccaggccagtgccagtacttgggcttgccagtggcggattacttcaagcagtggattaatctgaaaaa

SEQ ID NO: 545063 - DNA, 99 bp, Homo sapiens
cctcacactccccctgaagttcatctaagatcttcattcttcaaagattttaggtgatgggcaagtcagaaagtcagatggatataactgatatcaaca

SEQ ID NO: 545064 - DNA, 100 bp, Homo sapiens
tactcgtgcctcatggatccaaattaaaggttgttcctactgaaggattggtctccatattaaagaagaggaatgatactgtaggagatcatcctgccca

SEQ ID NO: 545065 - DNA, 75 bp, Homo sapiens
gcatgagcacctcatacggctgcttctggagaagataatgctcggaatatttttcaatgtccattccgctgtgtt

SEQ ID NO: 545066 - DNA, 75 bp, Homo sapiens
atgtgaggaactcaaaaagaagccttccgctgctctggagcctacatgaagcggcggcacagctcagtcagtgac

SEQ ID NO: 545067 - DNA, 97 bp, Homo sapiens
ccaacatccaggctgtactgctccccaagaagactgagagtcaccacaaggccaagggtagtaagcattaataatgtctttcatctttgagtggatc

SEQ ID NO: 545068 - DNA, 74 bp, Homo sapiens
gccttggaaaatgccaacgccgtgtctgaaggtgtggatgaggtcaccattgtcaacattttgaccaaccgcag

SEQ ID NO: 545069 - DNA, 76 bp, Homo sapiens
atggactcatcttcatggaaacgtctgctaagactgcttccaatgtagaagagatgttctcagtgcagctgagtct

SEQ ID NO: 545070 - DNA, 148 bp, Homo sapiens
atggccaagtcgggtggctgcggcgcgggagccggcgtgggcggcggcaacggggcactgacctgggtggttgctgctgactcagccattctagaagttcttcagtccaacattcagcatgtgctggtctatgaaaatcctgctcttc

SEQ ID NO: 545071 - DNA, 97 bp, Homo sapiens
cccccgacagcgccatggcccagattctgccaattcgttttcaggagcatctccagctgctgtcggggccgtgtttggcctcaccacctgcatcagc

SEQ ID NO: 545072 - DNA, 75 bp, Homo sapiens
ctgaacactgaccagctctcagttgcacttctcaaagaaagggctattgcaagacacgaagtccgagaaattgag

SEQ ID NO: 545073 - DNA, 100 bp, Homo sapiens
acaaattaaagcaagaaacccctgcagtacttgaagatttgcataaagccaacattcgcaccgtcatggtcacagcccagtgtgccatcataatgtttga

SEQ ID NO: 545074 - DNA, 100 bp, Homo sapiens
aagtgtggcacacgggggagcgcagatctacccccccatcaacgtgctcccttccctgtcgcggctgatgaagtcagccattggggaaggcatgacaaga

SEQ ID NO: 545075 - DNA, 74 bp, Homo sapiens
ctcctccactgccactacagggaagtgcatcacatgtcaggcagggaacgtggtgacaggagaaatggtagaag

SEQ ID NO: 545076 - DNA, 83 bp, Homo sapiens
cccaagttgtcgacgaccgacagggtggtgaaaggatgctccaggatgaaacgccataggcctgtcagcagcagtgacagttc

SEQ ID NO: 545077 - DNA, 83 bp, Homo sapiens
gggacgaggacgaggagtcggaggagccgcgggcggcgcggcccagctcgttccaggcattctccgacgcccacgtggaggca

SEQ ID NO: 545078 - DNA, 50 bp, Homo sapiens
cgccacaagttgcgctgctcgcgacgagatcagtgtgcgtgtgaccacca

SEQ ID NO: 545079 - DNA, 75 bp, Homo sapiens
ctcgccaagggccccaatgagtggcacacagtctactatcaccgacagccatccagtccaatggatcagatgggc

SEQ ID NO: 545080 - DNA, 82 bp, Homo sapiens
ggctttcaaggatatgctgtattcagctcaggaccaggcaccttctgtggaagggacgcactctctgagatattttcgcctg

SEQ ID NO: 545081 - DNA, 98 bp, Homo sapiens
gaccctcgacctccagtgcagttcccaagaaaacagtgacattgtaagtgacagtccagtgtggcaagaccagatccttgaaaatgaagaagccattg

SEQ ID NO: 545082 - DNA, 95 bp, Homo sapiens
aatcaagatttaacattccaacacataaaaattatttatccaacagctcctcccaggagccttggtcatcatttgatatatacacccggaaaggg

SEQ ID NO: 545083 - DNA, 75 bp, Homo sapiens
gcacctcaaggaatttcttcaattattaagcattacttgaaagaatcagcaaacttagtgctacatcagactgtg

SEQ ID NO: 545084 - DNA, 98 bp, Homo sapiens
aaggatcagttggctttagcaattggtgctaagtgtggtggctcacacctgtaatctcagctacttgggaggctgaggcagaagaatcacttgaggat

SEQ ID NO: 545085 - DNA, 90 bp, Homo sapiens
gaagaaccggaagctctttgaccttctggatgtccttgagttcaaccagagtcccgagggacagagaagctgcctttcaccctgtctggc

SEQ ID NO: 545086 - DNA, 50 bp, Homo sapiens
gcggcgttggaggccaccgtttccagaatcgagagctccagatcatgaga

SEQ ID NO: 545087 - DNA, 100 bp, Homo sapiens
ctgatctataaatgcggtggcatcgacaaaagaaccattgaaaaatttgagaaggaggctgctgagatgggaagaaccagctgctcctggccttgctgaa

SEQ ID NO: 545088 - DNA, 88 bp, Homo sapiens
gatgaagtgcagaggtttttttctggtactctttgagcacatcaaattcttccattgccgctcttctctgtgccctttatccgcactt

SEQ ID NO: 545089 - DNA, 50 bp, Homo sapiens
caaggaatctcaccaatccaaatacttaccacaaagcctgctccacacct

SEQ ID NO: 545090 - DNA, 115 bp, Homo sapiens
gggggctgtgccgggcggagagaactcagcgaggattctgaggtattctgagagaagcctcacaaagtgtattggaattactattgaaaccagaccagattactgcatgaagcga

SEQ ID NO: 545091 - DNA, 78 bp, Homo sapiens
ttgaaagaggaagatgttcaccaggagcattggtttgaaaaggccctacgagacaagaagggcttcatcatcaagcag

SEQ ID NO: 545092 - DNA, 51 bp, Homo sapiens
tttgatcagaatgtcaatgtcaaggtggagattgggaagacagtgaaggca

SEQ ID NO: 545093 - DNA, 100 bp, Homo sapiens
ggttgatgatcgttgtgttgtacagccagaaaccggggaccttaacaatccacctaagaaattcagagatgatatcatcaagttgaatcgaaaggaaggg

SEQ ID NO: 545094 - DNA, 76 bp, Homo sapiens
accaacatgggcattttgtttatgagcaaggtgggtcatgagccgatgccccccacccttgggaccaatgtgctgg

SEQ ID NO: 545095 - DNA, 98 bp, Homo sapiens
ccggacctcttcattgcctaaagagattatttggtagcaattgaagagaaaaacaaagctacatttctacgtgcttatgtgaactggagaaataaaag

SEQ ID NO: 545096 - DNA, 100 bp, Homo sapiens
tgatggcaccgtccgcatctgggaccccagcagcagcagcccggcctgcctctgcaccttccccacagccagcgagagacaagagagacacctccaactt

SEQ ID NO: 545097 - DNA, 100 bp, Homo sapiens
ggccaatcgggctcccacgtcagggtctttgcagtgacctacggctccttcgactacacctcgctgctgtacctctccaactacctggaggacttcggcg

SEQ ID NO: 545098 - DNA, 100 bp, Homo sapiens
ccaacaacaccacaataatccacagccaagagatgctgatgataaacacaagcttataaccaaaacagaggcaaaacaagaatatcttctgaaagactgt

SEQ ID NO: 545099 - DNA, 75 bp, Homo sapiens
tgacattaacagacaagacacttttcagaaagacagtttcagacccaaagtttacgcctatcagacctacacaga

SEQ ID NO: 545100 - DNA, 58 bp, Homo sapiens
gttaaggattccaagtaactcttatttgggtattgtgtcactctgtctgctgtttgaa

SEQ ID NO: 545101 - DNA, 50 bp, Homo sapiens
agaacctgcggcggccggagcggtactccaaagattcaggtttactcacg

SEQ ID NO: 545102 - DNA, 88 bp, Homo sapiens
gctgtcggtgcagcaggagacggaggaccagaactacggcatccagacgaggacagccggctgctgcccctgctggtctgcctgcggt

SEQ ID NO: 545103 - DNA, 98 bp, Homo sapiens
ccatgaggagcagaagtcagtccggctgggacagtatggaaattaccagcagtgaaaaagtacttacattccagtagccagtatctattagcagccat

SEQ ID NO: 545104 - DNA, 82 bp, Homo sapiens
acaagtacaagcggcgggtgccccggacgttggacctctcgaacaaccagctgagcgagatccctgcagagcttgcggactg

SEQ ID NO: 545105 - DNA, 87 bp, Homo sapiens
cagaagaagggcagtgccattgatagggtatggcagatcccagaaaatggactcaccctttccctgactgaacctgtggtgattttg

SEQ ID NO: 545106 - DNA, 75 bp, Homo sapiens
ggattctcgacctgctaacagaactggaccttttcgcaaaatcgtgtggtgggagctatgcagctatattctgta

SEQ ID NO: 545107 - DNA, 97 bp, Homo sapiens
ggagcgcggagaggaggctggaagaggaagatgcctagcacagaccttctgatgttggatgtgtttcacatggtagttgaagtaccacgctggtcta

SEQ ID NO: 545108 - DNA, 74 bp, Homo sapiens
ccggggaagagagatctctcgagattttgccaaggtatgtatattaggttaggctgggaagttttttttaaaaa

SEQ ID NO: 545109 - DNA, 119 bp, Homo sapiens
gggcatttgcgctcgcacctgaggcagtccctgctgtgcacctgggggtacagggatgaactcaagcggcattacaacctgggggagtactggattgaggtggagatggaggatctggc

SEQ ID NO: 545110 - DNA, 74 bp, Homo sapiens
caatcggctgagaatgagaagagagcaagagtcggtcagtggtcacctgggacctccagcaggcgcacctgcag

SEQ ID NO: 545111 - DNA, 100 bp, Homo sapiens
ccgaagaactcccacaatgccacaggaggaggcagcaggaaataatgaagatgtttcattttcaagaccagcagatcttgaccttattcagtcaactccc

SEQ ID NO: 545112 - DNA, 73 bp, Homo sapiens
agaaagaaaaaggcagtgagacagattcagcccaggatcagcctgtgaagaggctgaggggatctggcggtgg

SEQ ID NO: 545113 - DNA, 82 bp, Homo sapiens
cggatgccctgcagtacctgcagaaggtctctggagacatcttcagcaggccggtctaattgaagccaacggagaactcaag

SEQ ID NO: 545114 - DNA, 82 bp, Homo sapiens
gctggagacatggaccgcggcgagcaagcttagcagtgtctgcaaaaacgaatcttttcctacaacctgttaactgactgga

SEQ ID NO: 545115 - DNA, 82 bp, Homo sapiens
agtcagacacggggcaggctgagttcctcttgctcacagagctctgtaaagagctgcctggagttcagcctcagaatccagg

SEQ ID NO: 545116 - DNA, 83 bp, Homo sapiens
agcccgagcgcggtggtgccctcagccccgtcctcttgtcctcctcagcctcgggcgagcctggagctgacggggaggcgggg

SEQ ID NO: 545117 - DNA, 50 bp, Homo sapiens
tccttagaaagctgaaagctgataagaaaataaacagagttgtctttgtt

SEQ ID NO: 545118 - DNA, 50 bp, Homo sapiens
aatgtttactacaatgaagccactgaaatgtacactttgcagtcagcctg

SEQ ID NO: 545119 - DNA, 80 bp, Homo sapiens
tagattggaatattggtgggccagcaatcctcagacgcctcacttaggacaagaagaacttcagatgtcacttttaaaat

SEQ ID NO: 545120 - DNA, 95 bp, Homo sapiens
cgactggcattacaagaagagccagatcattctaaagagtgtcactactccatccagaagggagctgcgtttctgggacttggcaccgacagtgt

SEQ ID NO: 545121 - DNA, 51 bp, Homo sapiens
ctatggaaaagttgccaaattggaaatgattgaagccatccgcgaagcggt

SEQ ID NO: 545122 - DNA, 100 bp, Homo sapiens
gaaaaattacagcacatctcagtgaatttgcaagtgtggagtacgacaaggagttctcccctcgtcagcgacaccacaaagagttcaagttcaacttatc

SEQ ID NO: 545123 - DNA, 100 bp, Homo sapiens
aacaacatcatgcagtggaatgcagttatatttgggttctgacaacaaaggagattgtgacatattgctgggcctaacactaaggtgatgttagttattt

SEQ ID NO: 545124 - DNA, 75 bp, Homo sapiens
gccgctgcctaagctggaaagactatgctgagaaggaaaataccatagcaaaagctctggaagatctgaaggcaa

SEQ ID NO: 545125 - DNA, 73 bp, Homo sapiens
tttaccaaccctggaaccgcagacctctgggcttcctggtgccttatgcccgctcagaggcccacctcacaga

SEQ ID NO: 545126 - DNA, 97 bp, Homo sapiens
acagagacaattcctcaagtggacttggccatgattggttaaccctggggttattagtaaaacgattggagaaaggtggtaaagctgaacatgaaaa

SEQ ID NO: 545127 - DNA, 100 bp, Homo sapiens
cccgaccccgtcccgaccctggccgccccgagcggagcctggagttgatattcactgatggactccaaagaatcattaactcctggtagagaagaaaacc

SEQ ID NO: 545128 - DNA, 91 bp, Homo sapiens
gggtctttcaatggcaacagcaccaataataatccagaagtctgggcaccttctctctcaggaccagagaccaagcccccagcccattctc

SEQ ID NO: 545129 - DNA, 75 bp, Homo sapiens
gccctttttgcaccccagggagctgctgctggtcatttatagcaaatacactgacctggttccaaaggaggttat

SEQ ID NO: 545130 - DNA, 74 bp, Homo sapiens
tgacaaccttgtgctgaacctacaggatgaaagtttcaccagggcgtgatggtgggcatgggtcagaaggattc

SEQ ID NO: 545131 - DNA, 100 bp, Homo sapiens
ctgaagcgactgagtccgcgatggaggtcaataactgggagatggacaaactagagatggaagatgcagtcacatttttgaagactaaaatctattcagt

SEQ ID NO: 545132 - DNA, 74 bp, Homo sapiens
tatggaagcagaagaagctgaggatgaagaagatggaatttgctgattcccttggaattccgtttttggaaacc

SEQ ID NO: 545133 - DNA, 90 bp, Homo sapiens
ggacgccgggacacctggaagccgagaaatgtcaccaggagactaaagtccatcaaaaacatccagaaaattaccaagtctatgaaaatg

SEQ ID NO: 545134 - DNA, 100 bp, Homo sapiens
gcacgaggggccttcgccaccacgcactgggtcgtcacggaggacgggaaaatccagcagcaggtgttacacataatattgcattacttcgagaggtgat

SEQ ID NO: 545135 - DNA, 101 bp, Homo sapiens
caggatctcacagctgcagtctaatagtaacacagaggtggggaagctgaaggatggagcccggtccatgtctcgaaccatccagtccaacttcttcgacg

SEQ ID NO: 545136 - DNA, 107 bp, Homo sapiens
aaacaacatcccttcatcctttcttcatcccaactgggcatcacataggcagcatggtgattcatttgatgcttccagaaaccagagaaatctatgaattagagaaa

SEQ ID NO: 545137 - DNA, 75 bp, Homo sapiens
cccaatcaccgtccttacacggcctctgatttcatagaagattccatcacccagcacaaggtctgtgcccctgaa

SEQ ID NO: 545138 - DNA, 100 bp, Homo sapiens
agtattccaaagaactcggagatgcctggaatacagtaagaagcatgatggccacttcacagtcatccagttggtcggaatgctccgaggcattgcatca

SEQ ID NO: 545139 - DNA, 51 bp, Homo sapiens
gagaaacttctgttccacctcctcctgcagcaaaccagtccagctacgggg

SEQ ID NO: 545140 - DNA, 102 bp, Homo sapiens
gtcagctgtccaacggggaaccagggctggctcggtgggacagggcctcagagattatgtttgagaccttcaacaccccggccatgtacgtggccatccagg

SEQ ID NO: 545141 - DNA, 112 bp, Homo sapiens
aacctcgcacgcccaggaggagcaagtccgatggagaggctaagcagctatgccaagaccaagacgagagccgaggtgcggggcggtggccggaagccttggccgcagaaag

SEQ ID NO: 545142 - DNA, 83 bp, Homo sapiens
cccaagtgcacatggctgaccacccctaaaagcacctggccccgctacagcaaaccagggggatatgagactttctactcgga

SEQ ID NO: 545143 - DNA, 101 bp, Homo sapiens
aggaaggaacgaggcaaggagctaaagcagcgtgcgttcagccctgggccagagactgctgctactttgaaacgtacgatagaggccctgatggacagagg

SEQ ID NO: 545144 - DNA, 83 bp, Homo sapiens
caggactgcgccgcgtcttcctcaaggtgtcccgacccaggctaagcttgagcatggctgagcaggagcccacagccgagcag

SEQ ID NO: 545145 - DNA, 50 bp, Homo sapiens
gtgatggagcccagatccgaatccagtatggaaatttcatcgataagcta

SEQ ID NO: 545146 - DNA, 82 bp, Homo sapiens
tgaagatagatcgccatcatgatgtggtggtacagtgggagctattctgacatgtccactggaagttgtaaaaacacgactg

SEQ ID NO: 545147 - DNA, 95 bp, Homo sapiens
tacctttcctgagtgtagtacggaagggctgtgactcccaaatgagcgtgtcagaaatgtcgtgtagtgaaagtacatcctcatgtcagtctctt

SEQ ID NO: 545148 - DNA, 124 bp, Homo sapiens
agcgttctgagtgtggacgagtagccagtgaagataatgaatgtcgaatgtgactgactagcagcttcattttgaagatgaatctcctccgaaacaacagctgcctctccaaaatgaagaattc

SEQ ID NO: 545149 - DNA, 75 bp, Homo sapiens
actcaggggggaaaacgttttgagcttcaacatggcctcgctgtgatatgaaacttggatttaactggccagaag

SEQ ID NO: 545150 - DNA, 51 bp, Homo sapiens
aagagaggccctttgggacccaactggaagattacagtacctatagccaag

SEQ ID NO: 545151 - DNA, 99 bp, Homo sapiens
cacgaaggtgcgcgccggccgcggcttcagcctggaggagctcagggtgggagatgccatcccagcagtggaggtgtttgaaggggagccagggaacaa

SEQ ID NO: 545152 - DNA, 75 bp, Homo sapiens
aaatgctactgtgcacccaggcctggagttgccattgtgaacacagcaggtgtgagatgtcatcttggaagacag

SEQ ID NO: 545153 - DNA, 82 bp, Homo sapiens
agggtccaccagattctagaagcctggtccgacccccagtggcactaacgtgggatcctcagggcgctctcccagcaaagca

SEQ ID NO: 545154 - DNA, 100 bp, Homo sapiens
gattctttactcagctgagtgtgccacacaggtagccctggacggcattcagtgttttgccctgggcgctgcctatggcacagccaagagcggtaccggc

SEQ ID NO: 545155 - DNA, 75 bp, Homo sapiens
tgataacatgcatgcatatggaacttgctgcatgccagcaccatgatttggtgctatggagaaatttttggtaga

SEQ ID NO: 545156 - DNA, 100 bp, Homo sapiens
gaggatatccgtgttcaagtacgtctcagggtcttcagccgagaggagggcagcccagagccggaaagttctatatgaagggaaagaacggcttattcca

SEQ ID NO: 545157 - DNA, 88 bp, Homo sapiens
ttttagggtcctttatatagaagggagagtaggatcgctacggttcctactgatccgagctctgtgactcaggcttacgatggtgacg

SEQ ID NO: 545158 - DNA, 50 bp, Homo sapiens
tttactggtgttccagccctaaggaaccaccaaactgttttccacagagg

SEQ ID NO: 545159 - DNA, 75 bp, Homo sapiens
agattacgccccctatcctatccgcaaacagtcattgctagaatcgtggatggaagcagattcactgagttcaaa

SEQ ID NO: 545160 - DNA, 75 bp, Homo sapiens
cagtgcctgttacttgggcaccccgagagccgagactgtctgaagctgggcccacctgctgagggagaagtcgtc

SEQ ID NO: 545161 - DNA, 80 bp, Homo sapiens
gctacctgtgaacagtacgcagtgaatgttgtttttagaacttcagccataaaaatgggcagaattttccttgatcatat

SEQ ID NO: 545162 - DNA, 60 bp, Homo sapiens
ttcagaacgatggcagcctgacactgagccaatggagatcttcgtggatgatgagacgaa

SEQ ID NO: 545163 - DNA, 90 bp, Homo sapiens
aaatactgcatatcagaaacaacagattggtgctgaagacatggacggcttccaggcagacacggaggaggaggaagaggaggagggcga

SEQ ID NO: 545164 - DNA, 74 bp, Homo sapiens
cacgaaataaagctcctgggcaaggggacgtctgcagctgagtagtaaacctattgatggcaattttgctgact

SEQ ID NO: 545165 - DNA, 50 bp, Homo sapiens
accgcgttgacgacggctcgcagaagtcgacttcaatgttcctatgaaga

SEQ ID NO: 545166 - DNA, 89 bp, Homo sapiens
atcgcttggttaaaacctgacacttttaacagggagtcgtcgcatggtggatgtcatggacgtgaacacacagaaaggcattgaaatga

SEQ ID NO: 545167 - DNA, 51 bp, Homo sapiens
caaccctcccaagaagttcagagaccttagctggatctccaaaatacaagt

SEQ ID NO: 545168 - DNA, 95 bp, Homo sapiens
gtcggcctgatggcttagaggactctgaggatagcaaacctgattacatcaaccccagagccgtgcagctgggctcccttctcgtccgcggcctc

SEQ ID NO: 545169 - DNA, 50 bp, Homo sapiens
tttcaactgcgccaactgcggtttttccagaaaggaggagtcaaggaagc

SEQ ID NO: 545170 - DNA, 83 bp, Homo sapiens
catccaacgcaatgatgaacaacaatgaccttgactagacgcttgaagcaaagctgccatcccagaagacgacatgctctcag

SEQ ID NO: 545171 - DNA, 50 bp, Homo sapiens
gcttgaacccgggaggcagaggttgcgttcaagcaagtttgctgctgttg

SEQ ID NO: 545172 - DNA, 100 bp, Homo sapiens
caatgtaattcagttgatcattgatgcatacaatagtcatttcctacagtgtaaagaggacaacccggactttgaaggcgtggattgtgcaatctttgaa

SEQ ID NO: 545173 - DNA, 98 bp, Homo sapiens
gttgttccacaatctatgcaagatttgctgggtatgaataatgactttcctccaagagcacattgcctggtaagatgctaaaccaggtggacaggtga

SEQ ID NO: 545174 - DNA, 100 bp, Homo sapiens
ctttattttacatcattcaacatcttgcaaaggccaggatggaattggtagcaaggcagagaagactctgggtgactttgcagcagagtatgccaagtcc

SEQ ID NO: 545175 - DNA, 75 bp, Homo sapiens
attggattcaaagccagactgtcactcaagaaatcgacattcaaggaccatatgatgtggtggttctaccaggag

SEQ ID NO: 545176 - DNA, 95 bp, Homo sapiens
acccgggagagaaacgagctccgcaagcgcctggcctttgctacgcatggcacggcctttgacaagaggccagggtcaagccccaccggaccttc

SEQ ID NO: 545177 - DNA, 100 bp, Homo sapiens
gaaattcgccccgattaaagactgtgttgcattatcagttccatcatgtccccctctatctggagtgggctccagttggcgtcttctccagcacagcccc

SEQ ID NO: 545178 - DNA, 83 bp, Homo sapiens
aaatacagaaggacatgcaaaacttgcagattttggggtagcaggtcaacttacagcaacaagattgacctggctgaaaggag

SEQ ID NO: 545179 - DNA, 100 bp, Homo sapiens
gccttggattagaaattaccactcaggtggataaattagatgcttcagaatcactgagaaaagaagaagaacaagctacagagacacaacccattgttta

SEQ ID NO: 545180 - DNA, 98 bp, Homo sapiens
ctcctcctgttcttactcttcatttaaagagatttcagcaggagaatgaagtttctagattagaagacataatgcagcatttaaaatcaaagaagcgg

SEQ ID NO: 545181 - DNA, 123 bp, Homo sapiens
gcaagaattcagggatcggtctggaaactgtgttccctgcaaccagtgtgggccaggcatggagttgtctaaggaccaagaatcgccttcagccctgtctggtgcatccttggcagaaagtga

SEQ ID NO: 545182 - DNA, 51 bp, Homo sapiens
gttctctaggccttttagaaaacatgattccaaatctatgcaagacggctg

SEQ ID NO: 545183 - DNA, 75 bp, Homo sapiens
gccactacagttcatcaacatcaactacgtccctctgaaggtagagtctgggtatgtctgtgaaggtgatcacaa

SEQ ID NO: 545184 - DNA, 88 bp, Homo sapiens
gactgcgcacttggaatagtagcaggcggcggcggcggaacgccaggcagaggcttcgtgacggagttatcagagacattgagaggca

SEQ ID NO: 545185 - DNA, 82 bp, Homo sapiens
tccaccagcggttccatcctacacttgggacttctccagacaggttatgttacctgcagaggctgccctgaagctccctgtg

SEQ ID NO: 545186 - DNA, 74 bp, Homo sapiens
cggccggtcctgagcgcggcccgggctgtcagaaatctcctttacagacaataggtgaagaacaaacccagaat

SEQ ID NO: 545187 - DNA, 90 bp, Homo sapiens
cacatatgaatatatcttcaacaactgccacgacttatacagccgccagtaccagctggtgccaagctctcctgatgaaatgtgttctgc

SEQ ID NO: 545188 - DNA, 100 bp, Homo sapiens
gaaatctcgaaggggacctcatgtccctgtgggacacaatgcccccaaggccgttaattaaggaaaagttgagccagggcgtgaccctcgtcgtggacag

SEQ ID NO: 545189 - DNA, 75 bp, Homo sapiens
cggatgctcactccaaagtctcagcaggacccagccttgatgcccacttgggaggcagaaagcaccggcacctgg

SEQ ID NO: 545190 - DNA, 87 bp, Homo sapiens
catactatccgtttgttcaggaaccaccagtgacagaactcagaaccgtgctgcatactatcctcctagccaaattgctcaactaag

SEQ ID NO: 545191 - DNA, 100 bp, Homo sapiens
caaaggctattggatcagctcagcaggtttaaggaagaaatctctaaacgttttaaatcacatactgaccaacttgtgttgatatttgctggaaaaattt

SEQ ID NO: 545192 - DNA, 90 bp, Homo sapiens
tctgcagcttttcctggatgattccaaaatgaagaatttcatcacctgcttcaaagatgcagacaatctctttgaacatgaattgggggc

SEQ ID NO: 545193 - DNA, 82 bp, Homo sapiens
tcgcggtgggtcctcgcttgcagttcagcgaccacggaacggcagagtcgaaacaaacaatgagggcgaaccagtttcttac

SEQ ID NO: 545194 - DNA, 75 bp, Homo sapiens
actttcccatccgtgactcctggaatgcaggaggaccaacgacaactttatgcaatggcaaataccctggaagat

SEQ ID NO: 545195 - DNA, 134 bp, Homo sapiens
tgcaggctgtcgaaagcccatttcaagctttgtgctgcctcttgatctacctctttgtccagaacaagttgaaatcatcgcagaaggataaagttcgtcagtttatgatcttcacacaatctagtgaaaaaaca

SEQ ID NO: 545196 - DNA, 100 bp, Homo sapiens
ggaggcgcggaaccatggccgatgggggcgagggcgaagacgagatccagttcctgcgaactgtgctaccaagattgtgccagtggaggctgggccccct

SEQ ID NO: 545197 - DNA, 100 bp, Homo sapiens
aggtctgcgttgctcttgcttttcctcgctggggtgtacggcaatgaatcgctccctggctaatgtgattcttggaggctatggcaccacttcaacagct

SEQ ID NO: 545198 - DNA, 118 bp, Homo sapiens
gccgggtgatgaaaccacttctctacatcccatctcaatcagaattactagattttctctcaaactacgagattgctcatttagaaagtggatgtgtgggataacatgtccaatgtgt

SEQ ID NO: 545199 - DNA, 90 bp, Homo sapiens
cgggacggagcggccggggcctggggctgcctgccgggcggccgggcgcggcgagcccagagtattgggaaagggtcgttgtggtgcata

SEQ ID NO: 545200 - DNA, 96 bp, Homo sapiens
ttggcttcagcttgtgagagtgagagtagaaatgccgccaagaggatgcgtctggagagacagcaggtgtctgatgatttgtgagcctcaagtgac

SEQ ID NO: 545201 - DNA, 101 bp, Homo sapiens
tatgatttcctcataatagaagatgatccttactattttctccagtttaacaaggctatgtcgacaccacccactggaaggtctacgttatagccagaggg

SEQ ID NO: 545202 - DNA, 87 bp, Homo sapiens
ccaccaccacagagtctgtggaagaggtggttcgagatcttaccaatatatttgagtccttcctgcctcagttattggcctatccta

SEQ ID NO: 545203 - DNA, 83 bp, Homo sapiens
ctttcttcgccgtgctggccgcggcccgcctcagcatctggtacagccgagtggacccccaaaagtacaagggcatatttaac

SEQ ID NO: 545204 - DNA, 100 bp, Homo sapiens
gaaaaaagtaaaacttgctgctgatgaagatgatgacgatgatgatgaagaggatgatgatgaagagggtcccttcagtgttgtacgacgatgtatcaac

SEQ ID NO: 545205 - DNA, 75 bp, Homo sapiens
ttcttccagcttctgctgtccttctttgtggagagcaaggatgatgatgacgacatgggagaggatgaagatgag

SEQ ID NO: 545206 - DNA, 100 bp, Homo sapiens
aacgcgaagacggtaacccgtgtgactttgactggaggatgacagcaacaagagtccttcttgaaacccaagattgaaccttccagtgcctggatcttgg

SEQ ID NO: 545207 - DNA, 101 bp, Homo sapiens
cgtggagcggaagaacagcctgaagaagggctccctcgtgaagaacctgaaggacacactaggtgcaatggatgagcttcatagtctggatccaagaaggc

SEQ ID NO: 545208 - DNA, 80 bp, Homo sapiens
cttcggacatagaggccaaccaacctttggagggtggtatttccaacattttggaggaactggttgtccagcctctgttg

SEQ ID NO: 545209 - DNA, 96 bp, Homo sapiens
gaaagacaccgaaagtaaagaagaagaaaacttcagtgaaacaagaatgggatgttcttggtgagattcaggaaattgtgaaaacagggctttggg

SEQ ID NO: 545210 - DNA, 100 bp, Homo sapiens
cagcggtgcacgctgctggtcagccagttccgctcctgtcaggaacttagtgatttggcccgtgaccctccagcacaatgttctgcaggtccagttgggg

SEQ ID NO: 545211 - DNA, 82 bp, Homo sapiens
gactgactggggttctgagactccctgtcccggaccgcagacaatgcagatcttcgtgaagactctgactggtaagaccatc

SEQ ID NO: 545212 - DNA, 82 bp, Homo sapiens
ctgacttacctaggaatgagagggacaggagtatctgaggatggagaactcagcagaaaagcaggtgatattctcagtggag

SEQ ID NO: 545213 - DNA, 90 bp, Homo sapiens
caggaaggccactcacagggcttcaacaagctagctgaggagcatgtgcccacctggcttcagaacactcatgtctacagctggcccaag

SEQ ID NO: 545214 - DNA, 100 bp, Homo sapiens
cgagaattaaatgccgagaaggccagtacggtacacagataagctgtttctctccaagttctttctcctggcgtcaggctgcctttgtggattcatattg

SEQ ID NO: 545215 - DNA, 74 bp, Homo sapiens
tgctccgcagcgacatcaccaagctggaggtggacgccatcgtcaacgccgatgcctgctctgtgcctgtatct

SEQ ID NO: 545216 - DNA, 76 bp, Homo sapiens
agctcttccacatcccccgggttacctccctgaagctgtagggccttgtgggatgcttctggctggcacacctggc

SEQ ID NO: 545217 - DNA, 100 bp, Homo sapiens
gtgcccgaggaggcagccaagctcgtggcctgcctctgcgtgcaggagctctacggtgactttgaagacttggaaacaggggacgtgcacaagggaaaat

SEQ ID NO: 545218 - DNA, 90 bp, Homo sapiens
gaatcgtaggccaggctgatggagagctgaacattactcttccagaagagccttcaaacagtggccgagctgcagaactccttgccaaag

SEQ ID NO: 545219 - DNA, 100 bp, Homo sapiens
gggctttcctcctgcgtcaagtgggagaggctgtagctaccctgaaagatctgggacttggctagtggcaaattaaaactgtcattgactgggcatatta

SEQ ID NO: 545220 - DNA, 75 bp, Homo sapiens
gagaccgtgaagagaaagatgcagcactggaagaagtacgacatctatgagaagcaaaccaaggaggaaaccgac

SEQ ID NO: 545221 - DNA, 103 bp, Homo sapiens
gagttgtgaacgccgcggactccggagccgcacaaaccagggctcgccatgaagccaggacacttgtattagctttaatagaagagaaatggaggagccatag

SEQ ID NO: 545222 - DNA, 75 bp, Homo sapiens
gagcctttggggcaccacagagatgcggactacatgaggaaataattgacttttataacttcatgtccccttgtc

SEQ ID NO: 545223 - DNA, 103 bp, Homo sapiens
acagctggtaaaagtctgtgccccaatggttcgatattcaaagatggacaaccggaaattttctacacattttggaattcagttactcaggcactttcttctc

SEQ ID NO: 545224 - DNA, 113 bp, Homo sapiens
tttctttctggcctcccaagtcaagtttgaagacctcataaaagatttgagaaaactgaagaggcaactagaagaacaagaaactcctttacgagaagatgaagggaggagag

SEQ ID NO: 545225 - DNA, 88 bp, Homo sapiens
ttcatcctcttcctcttcctctcggagctcaccggatttataacgacagaagtggtgaggacgcttgagcggaagttagaagcaaaaa

SEQ ID NO: 545226 - DNA, 50 bp, Homo sapiens
caagatctggatgaagggtgtgatcgctgtattcttcaggacttgtggaa

SEQ ID NO: 545227 - DNA, 74 bp, Homo sapiens
gacgctcctggcgcatctggtggtcgtcatcaccttattctggtcccggacttccaccgctgtcagaaggcaat

SEQ ID NO: 545228 - DNA, 74 bp, Homo sapiens
tgcaaggctggcgcgtctccatggagatccgatcacataggacagtatgcaccttaagatcctgaagaaacggc

SEQ ID NO: 545229 - DNA, 131 bp, Homo sapiens
ctcagactgactgtccttgctcctcaagcttgcagacagcctattgtgggacgttgtgatcatgcgccaagcccatctttgtgtgcttgcatccaactgtgatgagcctatgtatgtcaagttggtggagg

SEQ ID NO: 545230 - DNA, 74 bp, Homo sapiens
cggcgtcgcgcggcgtgccctgcttgtcacaggaccgcagctgaatgcacagctagaaggttggctttcacaag

SEQ ID NO: 545231 - DNA, 75 bp, Homo sapiens
ctgactgagctgctggctaagatcaccaacacagacgtggaagtcctgacggccacgctggatctggaggacgtc

SEQ ID NO: 545232 - DNA, 100 bp, Homo sapiens
ctcctaggtgccggccgggagggcggccgcagcaggtcaaaatgcagatcttcgtgaaaacccttaccggcaagaccatcacccttgaggtggagcccag

SEQ ID NO: 545233 - DNA, 82 bp, Homo sapiens
tcagatcaaggattcggagaaaggtctctacaggtccctcctcgttagtatagtgtacgggtcccaagtttgacgacagaac

SEQ ID NO: 545234 - DNA, 100 bp, Homo sapiens
gatggaatcatcaatatttttgatattgcaactggaaaacttctgcataccctggaagaagaaaaagtcagcactttttgaagtgtctgaggttatacca

SEQ ID NO: 545235 - DNA, 100 bp, Homo sapiens
tgcgaaaagatctgcaaaattttctcaaggtactgggcctaatcgctacgtgcctctttggctatgatgcctatgtcaccttccccgttcggcagccaag

SEQ ID NO: 545236 - DNA, 75 bp, Homo sapiens
cctcccaagtggctgggattacagctccttccaactcctcagaacctccactctatggatctggacctctggatt

SEQ ID NO: 545237 - DNA, 90 bp, Homo sapiens
ctgggatcggcccaaggccagttctccgcagttggaatcgaagcctcttaaaatggcagatgacttggacttcgagacaggagatgcagg

SEQ ID NO: 545238 - DNA, 75 bp, Homo sapiens
ctttcctaccatctaaaatacgaaggtttctggctggacattatacaacgtgaaggctgagatctttcccccttc

SEQ ID NO: 545239 - DNA, 100 bp, Homo sapiens
ctcttctctggaagatcttgtggatgacttgaaagtagggcatccttcacccatctgaagggaggaaatagtggcaggtgacagtctgcatgtgcagttt

SEQ ID NO: 545240 - DNA, 85 bp, Homo sapiens
aataacccagagccctggaacaaactgggtcccaatgatcaatacaagctctcaaaggtctatggccctgtgttcactctgtatt

SEQ ID NO: 545241 - DNA, 78 bp, Homo sapiens
cttccagctgtcacattctggagcgtatgagatgaggctttcagtccagtgtaaagctgttggagcgcgggagcaaag

SEQ ID NO: 545242 - DNA, 100 bp, Homo sapiens
agacaccagccccccaccatggtgccatgcctctgcaactcctcctgttgctgatcctactgggccctggcaacagcttgcagctgtgggacacctgggc

SEQ ID NO: 545243 - DNA, 50 bp, Homo sapiens
gggacaccccggaagctgggaaatggtttttggattcaaagcataaaaac

SEQ ID NO: 545244 - DNA, 82 bp, Homo sapiens
acagctcagggctgctcacagtgaaggcaataccactgctggattggcactgccagtgaaagatgtagaagataaacctgaa

SEQ ID NO: 545245 - DNA, 90 bp, Homo sapiens
tatgagaagcgtatggccacagaagttgctgctgacgctctgggtgaagaatggaagggtgagtggaagccccggcagatcgacaaccca

SEQ ID NO: 545246 - DNA, 51 bp, Homo sapiens
gttcctggtgatattgtagaaattgctggaaacccttttccaaagagaaat

SEQ ID NO: 545247 - DNA, 144 bp, Homo sapiens
cggaggtgcggagagactccttgggggtcgagcacataacggggttcgggtgtctcgtgtgtgaacatcacaggtaaacactacacgtgaagagtggtgaaagggaacattgattactgaagtgccctggagagggaaagcact

SEQ ID NO: 545248 - DNA, 78 bp, Homo sapiens
tcagtcagttggaaggtgtaaatgtggaacgttacaaacagggatggtctcactgtgttgctgatcttgaactcctga

SEQ ID NO: 545249 - DNA, 90 bp, Homo sapiens
ccctgttgactgcgtcgcgatgtgtggcgactgtgtggagaaggaatatcccaaccggacaggggcaagtgtccgagtggtgaatcagct

SEQ ID NO: 545250 - DNA, 51 bp, Homo sapiens
gcaacagaccatcctgtgccatcagcagcctgtggtagctgttcctcttgt

SEQ ID NO: 545251 - DNA, 75 bp, Homo sapiens
tttccggatcaatccagatggcagccagtcagtggtggaggttctggaggacacgtgccggcggcaggacttcaa

SEQ ID NO: 545252 - DNA, 82 bp, Homo sapiens
cgcaccgaggcgagcaggagcagggaacagtacctggagtagaacagaaaaattattatgtctgtgttcccttgggactcat

SEQ ID NO: 545253 - DNA, 97 bp, Homo sapiens
aatcgggctgaagcgactgagtccgcgatggagatgaagggcgccctaatggagatcatccagctcgccagcctcgactcggacccctgggtgctca

SEQ ID NO: 545254 - DNA, 82 bp, Homo sapiens
caggtgtctgtcggtccaagctagaaggtgaactgtcacccctacaactcagcttgcaaccagccctggccaccagtttccc

SEQ ID NO: 545255 - DNA, 100 bp, Homo sapiens
caaaattgccagaaaatctttcctctaaagtcaaactgatacgaaaaccggtgaggtccaaacattgtggtgtgtgcaaccgctgtatagcaaaatttga

SEQ ID NO: 545256 - DNA, 75 bp, Homo sapiens
cagcgctgccggagccgcctgagaaagcgtggatacccatcaacgaagttttgatattggaattcagattggcta

SEQ ID NO: 545257 - DNA, 97 bp, Homo sapiens
tgtggggcaccaagagcagccccggtctctcggacaccattttctgccgctggacgcaagactcaccccacacagaccgcgtttctctccagtgtcg

SEQ ID NO: 545258 - DNA, 93 bp, Homo sapiens
agggagtggagcttggtttcgggatctcggtgctgcagacggcgagacctcctgcacagaaaactttagaaactgttcctttggagaggaaaa

SEQ ID NO: 545259 - DNA, 50 bp, Homo sapiens
acaacatccacgccctgactgcccagggccagctgcgggccgtccagcgg

SEQ ID NO: 545260 - DNA, 60 bp, Homo sapiens
ctggatgaaaactacaaatcccaggagcacttcacggagaatgactatcttcaagactgc

SEQ ID NO: 545261 - DNA, 100 bp, Homo sapiens
cctgaatcttctgggagctgaggaaccagatatcttgaaaagctgccagaaaggtttctaagcatgaattgaggaacagaagaagcagagcagatgatcg

SEQ ID NO: 545262 - DNA, 100 bp, Homo sapiens
ccctgaccctgtcggattcggatgagcccattgcaaggagaagacgcagccgtcagttaacccagtatccactccagttgcacttcccacaccagctctt

SEQ ID NO: 545263 - DNA, 75 bp, Homo sapiens
tccgtggtgtgtagccggcttggcgtgaccctcgcctgatccaggacgtggcccagtggaacatcgggagcctcc

SEQ ID NO: 545264 - DNA, 74 bp, Homo sapiens
tatttagaatgcaggatggagaggtctttctgtggaatttggaacaattctagtttacacatgtgagaagagtt

SEQ ID NO: 545265 - DNA, 87 bp, Homo sapiens
tcgctcccttgatgatcttgaggtgtttccaaactatcatatttatcctccaactgcacctcacgttgcttatatgcaaccgaaagc

SEQ ID NO: 545266 - DNA, 82 bp, Homo sapiens
ggttcgaggacagcacccgccaacctcctggaaggtaatgagtccctggaacgccagatgcgtgaaatggaagagaactttg

SEQ ID NO: 545267 - DNA, 82 bp, Homo sapiens
ctggagacatggaccgcggcgagcaaggaaagtatgcctcagactcctcccttttcagcaatgtttgacagcagtggttaca

SEQ ID NO: 545268 - DNA, 82 bp, Homo sapiens
gagtctccgcgtcccgctcgctgggagagagcaaattgtggctactaatttgccccctgaagatcaagatggctctggggat

SEQ ID NO: 545269 - DNA, 50 bp, Homo sapiens
aggaggcgaattttcagttgatagatttccctcctcactatgtgttggac

SEQ ID NO: 545270 - DNA, 98 bp, Homo sapiens
tcagaacccaacagaagctgaattgcaggatatgatcaatgaagtggatgctgatgctgaagacctaactgcagcatgtctgtatttggagatggggc

SEQ ID NO: 545271 - DNA, 83 bp, Homo sapiens
aactgtttgaggataactgacttaaaatctggatccagacatttaatgtggatgcaccatgccagaccgtggaagatttaacg

SEQ ID NO: 545272 - DNA, 49 bp, Homo sapiens
atctggcgaaagctctacgtgattgcagagggaatggcatacatcgagc

SEQ ID NO: 545273 - DNA, 116 bp, Homo sapiens
gtgggagtctccgcgtcccgctcgctgggagagaggtacctctccttttccctctccctttccctaaggtttggtgcacctcgatttggaggaagtagggcagggcccttatctgg

SEQ ID NO: 545274 - DNA, 146 bp, Homo sapiens
gggagaagaggattggaggtgtcagtgttaaaggaacctctacaacgaaggtgaagccacggaagataagggcgccctgcgtccggcagaggaggcgagcatcccgctcaggtgatgaggaacccctcgcgcacccagcgcagaag

SEQ ID NO: 545275 - DNA, 75 bp, Homo sapiens
agaagactttgggacatttcatgagtcattcaagcaacatttctaagcgccatcatgaccgggtcctataacaac

SEQ ID NO: 545276 - DNA, 87 bp, Homo sapiens
aagatgtgccgccgctgccaacgtcgagcggcgacggctggatatggaatattatcttgtaaaatggaaaggatggccagattctac

SEQ ID NO: 545277 - DNA, 50 bp, Homo sapiens
gccagcccagggatgccctgagccagcattccagctggagatgcgtgacc

SEQ ID NO: 545278 - DNA, 50 bp, Homo sapiens
gggctgtgacgctgctgctggggtcagagtccggcagcgtcttctcttga

SEQ ID NO: 545279 - DNA, 75 bp, Homo sapiens
ggagtctccaccaggactgaccgctgccgcccagcacgtccagcggcaacctttggcactgcatccatgagcatg

SEQ ID NO: 545280 - DNA, 100 bp, Homo sapiens
gtcggcgccgagtgggaggatggcggaaactgcaaaattcaaaatggggctcaaggtattcgtttcatctacaccagagaaggcagaccaagtggcgagg

SEQ ID NO: 545281 - DNA, 90 bp, Homo sapiens
agcccaccgactttgaggatctggaggacggagaggacctgttcaccagcactgtctccaccctagagaacccagtgacttgattgtaaa

SEQ ID NO: 545282 - DNA, 101 bp, Homo sapiens
ggacggtctctgccagtataaatgcagtgacgctcctcagagaaattttgaaattgccttcaagatgtttgatttgaatggagatggagaagtagatatgg

SEQ ID NO: 545283 - DNA, 76 bp, Homo sapiens
ccgcaaggtggagatgctgaaggtgtgcggcgacatccatggacaattctatgacctcaaagagctgttcagagta

SEQ ID NO: 545284 - DNA, 100 bp, Homo sapiens
ccacagacggaacaagcatgcaggtttctgacgtagaagagcttacccctccagagcatctttctgatcttccaccattttcaaggtgtttaataggaat

SEQ ID NO: 545285 - DNA, 80 bp, Homo sapiens
gcccctggagatgattgagccgcgcacgctacagtacaaggatgaagatttgataaagtggaaggcactgtttgaggaag

SEQ ID NO: 545286 - DNA, 98 bp, Homo sapiens
cctgagccacctgaacagatttcctgcccggggccctcatggacggttggatcagggccgaagtgatggcgccaacccgtggcagtcccagagctgga

SEQ ID NO: 545287 - DNA, 100 bp, Homo sapiens
ggaatctcactctgttaaagctggtctgttctaactgagtgatatcagtatcaagataaaagtttggaatgggagaaaaattctcaaagcctgaaagaaa

SEQ ID NO: 545288 - DNA, 90 bp, Homo sapiens
taataaactcaagcagcgagtcatccaggttcaaaccttgtactactcagctgatcacaagctgcttgatgggaacctactagatggaca

SEQ ID NO: 545289 - DNA, 102 bp, Homo sapiens
ggcggcactccagccccagctcggtgtggtggacacaggcctattcatcaacatggctgagagagtctactttgggatgcaggatggctcagtgaacatgag

SEQ ID NO: 545290 - DNA, 82 bp, Homo sapiens
aaagttgaaaacaaagtgctgggtagggctctacttcactgggcctgtgatcgaggacataaggaactagtcacagtgttgc

SEQ ID NO: 545291 - DNA, 100 bp, Homo sapiens
taagctgcactgcatggttgctgctggatgtgttgtgttcctggcttccctctggatgctgacagaaacaaggacaaatttacatgtattggagaccaga

SEQ ID NO: 545292 - DNA, 75 bp, Homo sapiens
aacaaaatgaattaattcgagaaagaagtgaaaagagtgtagaggacttaaacaggcacaatcaaaaccatctca

SEQ ID NO: 545293 - DNA, 76 bp, Homo sapiens
cgcggtgctgcgagggcagaacctggctatatgttctcctttcagccaagacctttcaccagtgcaggggatagaa

SEQ ID NO: 545294 - DNA, 90 bp, Homo sapiens
tggggaccagagatggacggtcactcagcctatggagagctagagccggtgcaggccacgcagaacaagacagggaagtatgtgccgccg

SEQ ID NO: 545295 - DNA, 74 bp, Homo sapiens
atgtttctgtcctaaatagctgacattgcatcttcaagactgtgaattgaatgatctggcacgggaccctccag

SEQ ID NO: 545296 - DNA, 75 bp, Homo sapiens
ggcagtgctcaaactcaccgaccagggattaaagcctgtggtttccacagaagcaccacctatcatatttgccac

SEQ ID NO: 545297 - DNA, 75 bp, Homo sapiens
tctagaagggacaatggacttctggctttggccactttacttcctgccaggccaggacgactggaatgggaccag

SEQ ID NO: 545298 - DNA, 134 bp, Homo sapiens
gaacgctttgagacaacctactttaagaagtttcctggatactatgttacaggagatgggtgttcctgaaaagaaggtacttccaatcaccgtccccaagtcaccagcctttgcattgaagaacagaattcgaa

SEQ ID NO: 545299 - DNA, 100 bp, Homo sapiens
gacgttcagccctgggattctggccgaccctcgccttccttctctgcagcttccccgcagtcactcagcctctgaagaagcttcgggttcagactcaggc

SEQ ID NO: 545300 - DNA, 100 bp, Homo sapiens
ataatgtcgacctgccggagtcgaggattccagggtcgaacactcgcggagcgtgctttggacaccatgaattttgatgttataaagggcaagccagtac

SEQ ID NO: 545301 - DNA, 100 bp, Homo sapiens
tgggcttttagtccctccagacctcggctttagtgctgtctccgcttttctttcaccttcacagaggtagttatgcttgtcctagcttggaaattggatg

SEQ ID NO: 545302 - DNA, 100 bp, Homo sapiens
cttcattcccttattgataacctgtatcctgaagagaagttggactgtgttatagtagtcttcataggagaggtgatctttagacagtgactgagtatgg

SEQ ID NO: 545303 - DNA, 90 bp, Homo sapiens
acagaccaacctgtcagtgctgcaaaccatccttcctgctgctgcccaggatgtttattaccgggatgagattggcaatgtttctaccag

SEQ ID NO: 545304 - DNA, 101 bp, Homo sapiens
agaaattcccacctgtcaaagagaaattcgagctcaactggtagaacaacaaaaatgcctggagcagcaaacggagatgcgagttcagcttctccaggatc

SEQ ID NO: 545305 - DNA, 154 bp, Homo sapiens
gcacatttggccctcatggaggcctcaaaagggcaggaccagcaccctcttctacggaggaaggaacgggcacagcaggccataggaaaaggatacagagtagagtttcatgaacctgaaacttggtggaaatttgatcctgaagaattagaaa

SEQ ID NO: 545306 - DNA, 98 bp, Homo sapiens
ccagattcccatggaagcgccgcgatgttcgccccccggctgctggatttccagaagacgaaatacgcgaggtcagttcaccgggacctggaggccca

SEQ ID NO: 545307 - DNA, 75 bp, Homo sapiens
gcggatcctaataaggggaaaatgtgtcccttttgatgagaagaataagcctcattctgattcaacagcagagat

SEQ ID NO: 545308 - DNA, 82 bp, Homo sapiens
catttgtgtccattgatctcttggagcagctggggatcatggttgctgcttttgctcagaggacatccatgaccctaatggt

SEQ ID NO: 545309 - DNA, 100 bp, Homo sapiens
tctgctagatgttgtggttgaaaataatctagatattgatggctttgattgatatcagtaaatgccattatttagtggatttggacaccatgagagaaac

SEQ ID NO: 545310 - DNA, 100 bp, Homo sapiens
tgtggattggatattctcaaggaaccacacatgtattaagatttgttggaactgataatgggagagaagcaattgaaagtggggctgcatttctcttcat

SEQ ID NO: 545311 - DNA, 88 bp, Homo sapiens
cgtccgccccgcgagcacagagcctcgcctttgccgatccgccgcccgtccacacccgccgccagagctgtaggtaaaacttgcctac

SEQ ID NO: 545312 - DNA, 83 bp, Homo sapiens
agccgcctcttggtttgcgtcctgcactgaaaggaaatgacggattttgtggcacaagaatggctcaactctccaaatagaga

SEQ ID NO: 545313 - DNA, 90 bp, Homo sapiens
ggcttctgtaactggagcgatgattaccagcagcttcgaaccagtgcaatgacgatgccagtcaacggggcccacaaggatgctgacctg

SEQ ID NO: 545314 - DNA, 100 bp, Homo sapiens
cccggccccgcgcggaggggcgggggaggcgccgggaagtcgacggcgccggcggctcctggcccgggtggaacgcatggagcagttccagaaggagaag

SEQ ID NO: 545315 - DNA, 132 bp, Homo sapiens
gggaagcgtctccgttgggtccggccgctctgcgggactctgaggaaaagctcgcaccagacctgcctagagctggaacgttacctccagagcgagccctgctatgtttcagcctcagaaatcaaatttgac

SEQ ID NO: 545316 - DNA, 87 bp, Homo sapiens
atgaggaagtactgagcctgttggaggaactggcccggaaacaggaggacactcggtgaaatacctggagtgctcagctctcaccca

SEQ ID NO: 545317 - DNA, 75 bp, Homo sapiens
aatgtgtttgttatctgcttctatttggaggctggggacctctcaaagggtatgatggctaagcaagaaggcatg

SEQ ID NO: 545318 - DNA, 75 bp, Homo sapiens
tcatcctggttctggaatcctcagttcaagtttaataagcaatcattgacccagacaccagggcgagaaccttct

SEQ ID NO: 545319 - DNA, 60 bp, Homo sapiens
atatgatcaagttctcgtggagtcagacaatgagaatgaggacttgggcccagccagtcc

SEQ ID NO: 545320 - DNA, 134 bp, Homo sapiens
ctagctattgccttattttttctcatggatgttcttcttcgagtatttgtagaagggacagtcattttgtttactcattcagccctgttgcaggtcccaataaactcttcataaggttgacagaagcaccctct

SEQ ID NO: 545321 - DNA, 73 bp, Homo sapiens
cagccttcagcttttggcagcatgaaagttagcatttgtggcagctggagatcacctagtccaccactgtcca

SEQ ID NO: 545322 - DNA, 100 bp, Homo sapiens
gtgggaagacgacatgcctggaattcttctccaacgcgacagacgtcgagatcttggccctgattgcattcatctgcatagagaccatcatggcatgctc

SEQ ID NO: 545323 - DNA, 82 bp, Homo sapiens
ggctagcatggcagcgtggaagagttggacggccctgcggctctgcgccacagcatcaagatggtgctcatgtggaccagtg

SEQ ID NO: 545324 - DNA, 100 bp, Homo sapiens
tgaaggaaagcccccttatgctgatatccatccaatgaggcccaataggggcacaaaacgtccccgggatgatgaagaggaggagcagaagatgcgtcgg

SEQ ID NO: 545325 - DNA, 76 bp, Homo sapiens
cctgtggagttcagctcagcaagagctggccaaaccctccattgcagtcagcccaggcactgccatagagcagaag

SEQ ID NO: 545326 - DNA, 126 bp, Homo sapiens
aggaaactgacggagacgcagatgtggacttgaaagaagctgcagcggaggaaggcgagggaagtgtttgtttatgtcagggctcagtgaggtccagctgaaccatatggatgatcacactctacc

SEQ ID NO: 545327 - DNA, 97 bp, Homo sapiens
gaaaaatcacgggctgtccaggaactgtcggaacagaaccaaaggctattggatcagctcagcaggatcagcgaccgcctcggtggggacgagagcc

SEQ ID NO: 545328 - DNA, 82 bp, Homo sapiens
gagaactacagaaacctggtctccctagggaactctaatgatccaggacaaagaagttaccctggagtatgtatcaagcctg

SEQ ID NO: 545329 - DNA, 82 bp, Homo sapiens
agagcactagaagctccttccattcagatccagagcattagtttggatgaattcaagtcattttgccattttacaacccact

SEQ ID NO: 545330 - DNA, 99 bp, Homo sapiens
ctcctctctatagtcaactccttcaagcatataagtggtcaaacaaggtttgcaatggtctggagcagccaaggaagcagcagcgctctgatctcaatg

SEQ ID NO: 545331 - DNA, 89 bp, Homo sapiens
gggtttcatgggcgtcatgaataacatgcggaaacaggtgtgaatcatggcaatacagtgaaagacagtgatttactgcttttgagggc

SEQ ID NO: 545332 - DNA, 88 bp, Homo sapiens
ggcctcatcccccacaagtatatcacgctgcccgccggcactgagctagcctctccttgctagaagcttacggtcgaaggtctccagc

SEQ ID NO: 545333 - DNA, 75 bp, Homo sapiens
gtggtgcttatgtgcccctgagctgccgaatcattgagcagagctgccaaacggaggcccgaagaaaaagaacct

SEQ ID NO: 545334 - DNA, 100 bp, Homo sapiens
ggaagcagcagctcaccgaggacggggactcgtaccgggaagccagtgttgaagtgatggagataatgtctcgttttgctgtgattgaacgtgccagcat

SEQ ID NO: 545335 - DNA, 82 bp, Homo sapiens
gcgagcggcgcccagcccagcgcctcggccgaacccctccgcagcagtatggtttgaagtggtgaacatggatttttctcgg

SEQ ID NO: 545336 - DNA, 75 bp, Homo sapiens
ctcctgagtagctgggattgcagtctgcagatctccaggggagcccaccagcctagtcaacatggcctcggaaga

SEQ ID NO: 545337 - DNA, 98 bp, Homo sapiens
tttcgggtggggccgcgcaggcaaggacaaggccacagagtcggggtcttcacggccccttcccagctgcctgcctgccctagccagctcccaggtga

SEQ ID NO: 545338 - DNA, 83 bp, Homo sapiens
gtttacagcccttccagatacagctaccagacagtctagcagtgcttccttggagaccctgttagcacttcttcaggcagaag

SEQ ID NO: 545339 - DNA, 100 bp, Homo sapiens
tgatggaaatagcttgtgctgctgctgctgctgctgctgcatgtctaccaggagaggagggaactgcggagcggggacaccacatcatttgaagcattct

SEQ ID NO: 545340 - DNA, 83 bp, Homo sapiens
tccgagaaggactggacacctttctgggactgcagcaccagggtggctacgcctcccggctgctgctgatgcaaggaatcccc

SEQ ID NO: 545341 - DNA, 75 bp, Homo sapiens
gatgggagtcgagtgcatttgctttataagtgaggatggacagcaaatttgggagatggaagccacggtggataa

SEQ ID NO: 545342 - DNA, 100 bp, Homo sapiens
tgtgctccacggcacccattctggccccagctacaccccagatgtggacgagtgctcactagcagaaaaaacctgtgtgaggaaaaacgaaaactgctac

SEQ ID NO: 545343 - DNA, 98 bp, Homo sapiens
ctctccttcggccagtttgcaagccaggggtgcctgggggtctggaggatcagccccatgttcaaagaaaccagcctggacaccaagtctgtgtcaga

SEQ ID NO: 545344 - DNA, 89 bp, Homo sapiens
cgtggacgccgaccgtccgggacgagaaaatgacagatggcgagacctggacaggaaatgccctcttcagattgaccaaccgagcacca

SEQ ID NO: 545345 - DNA, 75 bp, Homo sapiens
atgaaactagccagactggaatttgagtctttggaggcactcaagcagcagccgggtgatttgttgtactttccc

SEQ ID NO: 545346 - DNA, 100 bp, Homo sapiens
agcgagctgagtggttgtgtggtcgcgtctcggaaaccggtagcgcttgcagcatggaagtttactggatttcttaaaagatggagaaggaagagctctg

SEQ ID NO: 545347 - DNA, 108 bp, Homo sapiens
aatatctgtcttcggtggactccttcggcagtccacccaccgccgccgcctcccagagacaagaggagcagcagcggcaccgcccctcaccctggagggtcctgtaca

SEQ ID NO: 545348 - DNA, 75 bp, Homo sapiens
gaccctccaagttagctgacttctgggggaacaacaacgagatcctcagtgtatggaagctccaaaaggaaagat

SEQ ID NO: 545349 - DNA, 98 bp, Homo sapiens
caggcatggacgtttccgggcaagagaccgactggcggagcaccgccttccggcagaagctggtcagtcaaatgtggagctgatcagaataatgttca

SEQ ID NO: 545350 - DNA, 100 bp, Homo sapiens
gtcactggcccttctgcttcaaaaatatgcaagggtcaccagtggaagtaactacaactaatgatcatggcaaacaatatagtgatggaaaatggcatga

SEQ ID NO: 545351 - DNA, 100 bp, Homo sapiens
cacactgctgtttaccttggcgaggcctttcaccaagtccatggcctctcggatgaaggtggacccaagtcagaaggagcgccaaaggccaaatcaaaac

SEQ ID NO: 545352 - DNA, 98 bp, Homo sapiens
agcgcgaacgagcgacggcggaacccgtgggcctgtggactgcagcctcggcggtcagcagagtgtgaacatggctacgcctcttcattcccgtccat

SEQ ID NO: 545353 - DNA, 83 bp, Homo sapiens
ggctgcggagacagagccctccggccagcggggaggtatttaccttgctgtggattgctgactggatggtccatcacttctgg

SEQ ID NO: 545354 - DNA, 100 bp, Homo sapiens
attttcttacctttctctgccttcgaggtgatgtttgcagacagaaaaagtaaactgtcaaggaattcagagcattgggtacttgttatttggaccagtt

SEQ ID NO: 545355 - DNA, 80 bp, Homo sapiens
cccgttcttgcctcaggccagtcgcctccaggccaagagggatccttcacccgtgtctgcttcctgcctgacacagctca

SEQ ID NO: 545356 - DNA, 90 bp, Homo sapiens
cagcatggctcagactgcatgacaggaaggctttgtgatacctgatgaagggggcccacaggaggagcaagaagagtattaacagcctgg

SEQ ID NO: 545357 - DNA, 75 bp, Homo sapiens
agacattcgagaaaaggaagaggcaatcagacagaaaaccagcgaggtgcaggaaccctaaggactctgcaatat

SEQ ID NO: 545358 - DNA, 90 bp, Homo sapiens
tctggtcctactacgcgtacgtggtggagctctgcgtgttcggcagaaccaattgaaagaccaacagcaacagcaagtggtatcgttatg

SEQ ID NO: 545359 - DNA, 97 bp, Homo sapiens
ggggtgtaataatgttaactgaggcagtgctcggaatgtgaccaggcagggagcagtgacatggaagcagatatggccatggaaaccctaccagatg

SEQ ID NO: 545360 - DNA, 74 bp, Homo sapiens
attccaagtaactcttatttgaaataacatctgctttgctgccgagctcagaggagaccccagacccctcccgc

SEQ ID NO: 545361 - DNA, 97 bp, Homo sapiens
gtttgagctcagatatcgggctgaacggtcaaagacattcacaacatggatgatatgccgtagatgatgttcccttctcaatccctgctgcctctga

SEQ ID NO: 545362 - DNA, 51 bp, Homo sapiens
cttaaattgatttcaagtttgaacaagagtctcgctctgttgcccgggctg

SEQ ID NO: 545363 - DNA, 101 bp, Homo sapiens
gaaccccgaccagccccggctcagggtcccccttcctggtggctgtgaaggggtgagcccctccagactccgaataggagatcaagagtttgattcattgc

SEQ ID NO: 545364 - DNA, 100 bp, Homo sapiens
tcccggaggacgagctggagggtaaagaagcagattttagatgaaaagatctactgccctcctgaggcttctgtgctcctggcttcttacgccgtccagg

SEQ ID NO: 545365 - DNA, 73 bp, Homo sapiens
agtctctgtggctccaggacacccaggttggatggcaagcatgttgtgttcggtcacgtcaaagagggcatgg

SEQ ID NO: 545366 - DNA, 74 bp, Homo sapiens
gataataaactagttgagaagcagaacccagctgaaggactgggcaaacttgaagataaatcttttgactccag

SEQ ID NO: 545367 - DNA, 82 bp, Homo sapiens
cggagcgcacccggccggaagccgctgtcggggagccggcggtggggctggacgcagacaatgcagatcttcgtgaagactc

SEQ ID NO: 545368 - DNA, 60 bp, Homo sapiens
ctggcagcatgtatatcttttctcttttgaaacagatggtcaccatgtttagatattagc

SEQ ID NO: 545369 - DNA, 75 bp, Homo sapiens
gaagcctcccgggtggcttacagacgctgccagcatcgccgccgccaggtcctccagcagcctgacctgagtggg

SEQ ID NO: 545370 - DNA, 82 bp, Homo sapiens
ggccttcccatcaccatcacagagagcgatgtgaaagacccctgacaaaagacaatcatcttctgggtacatttgatctgac

SEQ ID NO: 545371 - DNA, 82 bp, Homo sapiens
aggcggccgcggggcccgagcgcagcggctggctgtcggcaattggattcttccagtacagcccgggcgctgccgtggtcat

SEQ ID NO: 545372 - DNA, 101 bp, Homo sapiens
caccatacaggaacagggcagacgttagcgtgagtgatcactctcaatcccggggagaagcagaatttgcccgcatcatgagcattgtggaccccaaccgc

SEQ ID NO: 545373 - DNA, 50 bp, Homo sapiens
caccggctccagtgggctctgtcagcgacatcaaattccaggcacccacc

SEQ ID NO: 545374 - DNA, 75 bp, Homo sapiens
gccgggggagcggggccttccacaccccctccgtgggtgtgtgatgccatggacaatattaccaggcagaaccaa

SEQ ID NO: 545375 - DNA, 90 bp, Homo sapiens
gcggaacagcaggcccgagcccaccgcgccgggccccggacgccgcgcggaaaaggcctgtctcctccctcctacacatttccagctcct

SEQ ID NO: 545376 - DNA, 139 bp, Homo sapiens
cggccgccgggccccggggttgaggcgaggagcccgcgggcggccggtcgggcggggcggcggcgctgacaggattattgcatcgagcttttagtgtcttcttattcaacaccgaaaataagcttctgctacagcaaag

SEQ ID NO: 545377 - DNA, 87 bp, Homo sapiens
tgccgttacggccatcacggcggccgcagtggcgtcctggagccctcctcaggccccgcagggtggagcccgtctgctcagggttgc

SEQ ID NO: 545378 - DNA, 75 bp, Homo sapiens
ctggactcacggctgcttggagcgtccgccatgaggagaaggtggctattatcatggaaaactaatttttcccag

SEQ ID NO: 545379 - DNA, 86 bp, Homo sapiens
ggacaccgggagtgggagagattggactgggagactcagcaggattcctacaggaagcaagtagtaattgatggagaaacctgtct

SEQ ID NO: 545380 - DNA, 75 bp, Homo sapiens
gtcaggaatacgagcttctggcctcccgcgacgatgcccctcaacgttagcttcaccaacaggaactatgacctc

SEQ ID NO: 545381 - DNA, 80 bp, Homo sapiens
ctatgaagcacaatacaaagaagtaaaagtggtggctaatgccccccggacagaccacccagccctgtacagggacctgc

SEQ ID NO: 545382 - DNA, 100 bp, Homo sapiens
ctcagaaacaggctccaggccctgcctgccctgtgcctctgcgtgctggtcctggcctgcattgggggttacgaagtgacagtgctggtgcgggactcct

SEQ ID NO: 545383 - DNA, 82 bp, Homo sapiens
tggaggatttgggggctgtagcccccccagtcagtggagacttaaccaaagaggctgaccaactgactgaagagcagattgc

SEQ ID NO: 545384 - DNA, 136 bp, Homo sapiens
gtccaacagaacgacctagtatttgaatttgctagtaacgtcatggaggatgaacgacagatcagtgtactgttacccggacatacctattccttcacaagttctggttcttcagtgctgcttactattttggtaa

SEQ ID NO: 545385 - DNA, 100 bp, Homo sapiens
cagggttctggacatccaggaagaggagccgagcatctgggccgagaccattccgtatggagagccggaccaaagagaaccctgtacagtaagaaatatg

SEQ ID NO: 545386 - DNA, 83 bp, Homo sapiens
ccaataactcctatgcatgcaaacaagtccctgtgaagcaggaagagtgagggcaggttcactgcagctcagcagcatgtctg

SEQ ID NO: 545387 - DNA, 83 bp, Homo sapiens
cgtcgcctcaaacaggagctgaaatctatgacaagttcaagcagagtacacacagcatatatatgttcttcaacacatcagag

SEQ ID NO: 545388 - DNA, 75 bp, Homo sapiens
cctcgttgaggacttccttagtggtttccaggactcaggtacttctgccctccctttggtctccctgttcttcta

SEQ ID NO: 545389 - DNA, 91 bp, Homo sapiens
gaagaccgcgcgcagggcctgcagcgggagctggacggcgagcgcgagcggcgcgagaaaaacactctgctccagccaaggtggtgagggc

SEQ ID NO: 545390 - DNA, 100 bp, Homo sapiens
ctcttatggtgtcttgtaatcgtttgtgggtggggacaggaaatggtgtcattatctccatcccattgacagaaagtgctggagaatctggtaaaagcac

SEQ ID NO: 545391 - DNA, 82 bp, Homo sapiens
caagctcggatccctgaatttgatccagttggaaagagatgtggctgcaagattattggcaaggtctggaccagggggaagc

SEQ ID NO: 545392 - DNA, 100 bp, Homo sapiens
tgcaacatggggcttgagaaaggaacgtgctggccaaagcgctctatgacaatgtggccgagtccccggatgagctctccttccgcaagggtgacatcat

SEQ ID NO: 545393 - DNA, 48 bp, Homo sapiens
cctccgcgggggtcccccagaggaaccacgtgaatgttgagggggcga

SEQ ID NO: 545394 - DNA, 98 bp, Homo sapiens
gttgtggataagactcctgtcatccgctcagtgatactgaaactgcttttgaagtacagggtgtccgcaatgttgccagtgtctgtctgcagattggc

SEQ ID NO: 545395 - DNA, 82 bp, Homo sapiens
aagttccaacaaaagaatgctgccgcagtttgccattgtcttcaaaactccaaagtataaagatattaatattacaaaacca

SEQ ID NO: 545396 - DNA, 75 bp, Homo sapiens
cccagttccaaagtgtcttaaaggtacatcgagtgaaagcattcctcaaactgccacacaaccagccatttctcc

SEQ ID NO: 545397 - DNA, 74 bp, Homo sapiens
ctgttttagagctggcagcagcatctcagcccaagagaagaaggcaaatacagggctctgaaaatggatttttc

SEQ ID NO: 545398 - DNA, 98 bp, Homo sapiens
gatgagagcattcgaagtgacctcagcagggcatccaggagaataaaggcagccccgttgatgactgaaaatgacaaagcatccacctaacagacgag

SEQ ID NO: 545399 - DNA, 100 bp, Homo sapiens
ccgggatcgagctgagaatagggacggccccaagactccagggattagagctcgatctgcaaggcttcagtggttttgtgacagatgtgttgcaaataat

SEQ ID NO: 545400 - DNA, 82 bp, Homo sapiens
cctcctctatcttcttccagagccccgagaccctggcttcctaccctgccccccaggagggggggtacatggtatggagtag

SEQ ID NO: 545401 - DNA, 100 bp, Homo sapiens
ctactttctggatctgtgcttgtgaaaggctccatggtcttgcctccttgcagttgttcagcacttctggtctcttcagttctgatatgattttaggatt

SEQ ID NO: 545402 - DNA, 74 bp, Homo sapiens
ggccgactgcgccgagctgcacgtcctcgaacgcgaggccaacagccccggtatctggacaggaagacttctcc

SEQ ID NO: 545403 - DNA, 75 bp, Homo sapiens
cctgggaacctccaaactcaattatctggaccctaggatcacagtggcttgggtggttctcttcccaaagtggaa

SEQ ID NO: 545404 - DNA, 98 bp, Homo sapiens
cgggactcacggcagaagtgagctggaaggtcttggagcgaagagctcggaccaagcgctcagtttgcgcgataacaatatctcagaccgaggcatct

SEQ ID NO: 545405 - DNA, 50 bp, Homo sapiens
ggaaggggtcctcagagttactgggcacacagagaccggtgaggaggtgt

SEQ ID NO: 545406 - DNA, 82 bp, Homo sapiens
tgctgacacccatcacccacatctcacagtactaggttttgacaagcttgcatcatgcgtgagtataagctagtcgttcttg

SEQ ID NO: 545407 - DNA, 95 bp, Homo sapiens
gctgcttctggcctctgggcatcgcagccttctacttgtcccatgagacaatgcagatcttcgtgaagactctgactggtaagaccatcaccctc

SEQ ID NO: 545408 - DNA, 75 bp, Homo sapiens
ctgaagtgtcttcaatgcctgcttgtttctgtggatcccttctgaagttctatctgaaaattgcgcttaagtgaa

SEQ ID NO: 545409 - DNA, 126 bp, Homo sapiens
ttttggaagagggagtcaccactggacctccaaggaagccacgtgcagacatctacaaccttcgatctcctgacgaattgttggaccttcagatggaagtagttacattatagattactatggaac

SEQ ID NO: 545410 - DNA, 98 bp, Homo sapiens
aagtgcagctgcctcagttcttagcgcaggcattgaatgccccagaggagcccgaaacctcccaggcttggtgcaggaaggagagcccttcagcgagg

SEQ ID NO: 545411 - DNA, 98 bp, Homo sapiens
ttcatggccaccgtcaccaaggcgcccaagaaggtttgctgtaatggcacaagagtatttgtgcagaaagaaattcttgataaatttacagaggaagt

SEQ ID NO: 545412 - DNA, 90 bp, Homo sapiens
ggtctggagcttgatgaaattgaagccctcaatctagaagagtagaggtccaaaggtgccatatgttcacactgtgagcctgcaagatct

SEQ ID NO: 545413 - DNA, 90 bp, Homo sapiens
catggatgacctagatgaggatgaggagccagccccagctatggcccagggcctgagttccctggcggaagaggcagcgcgtgcgaccga

SEQ ID NO: 545414 - DNA, 101 bp, Homo sapiens
cacgcgcgctctcaagaccgtcaataagaacaatgattgaagctcacgttgatgtcaagactaccgatggttacttgcttcgtctgttctgtgttggtttt

SEQ ID NO: 545415 - DNA, 75 bp, Homo sapiens
tggagcttggtttcgggatctcggtgctgcagacggcgagacctcctgcacaggaaataagatatgtggaacgga

SEQ ID NO: 545416 - DNA, 100 bp, Homo sapiens
caaggagggcggcgggactgcactcgagtgtccagacctgctcgatggctcacagaacatttcctgcctgttgctcacactctgttgtccacagcatacc

SEQ ID NO: 545417 - DNA, 98 bp, Homo sapiens
gaaaccccttcgggttgacctcatcctcgagaacacatccaaagtccctgcccccaaagagtctcgtcagcctatctcggcccctctcttttcatgtc

SEQ ID NO: 545418 - DNA, 110 bp, Homo sapiens
caaggtgttcggtccttccgaggaagctaaggccgcgttggggtgagaccctcacttcatccggatgttgagaaagaactggagatgcagatcagcatgaggcaggagat

SEQ ID NO: 545419 - DNA, 100 bp, Homo sapiens
cgaccggcaactactttggattcacccacagcggggcggcggcggcggcggctgcggcccaatataggcaatgaatcgctccctggctaatgtgattctt

SEQ ID NO: 545420 - DNA, 75 bp, Homo sapiens
ggcatctagtctttccgcttcttgaatttctctctgtaaaggaggctggagcattggatttgctaaaggagctta

SEQ ID NO: 545421 - DNA, 100 bp, Homo sapiens
atgctgatggtgatggagattttgatgtggatgatgccaaagttttattagggtcccagggctggtggttgctttgggtctacagctacgtcttacccgc

SEQ ID NO: 545422 - DNA, 99 bp, Homo sapiens
aggaacctgctttctctcgatgaggataacatccctccagaagatggcatagaatgtcaagctaaccaggcgtccgctacttcagaagagtgtactgtc

SEQ ID NO: 545423 - DNA, 100 bp, Homo sapiens
acgatgtgatcgtgctggggaccggtctcaccctccttcccgaactcacaaatcctgacgagctcctgtcttatctggacccccccgacctgccgagcaa

SEQ ID NO: 545424 - DNA, 90 bp, Homo sapiens
ccacctcgaacagctaatccgccgaagaaaaggtttgaattcctcagcaacatctacagcaaataatagccgttgcgagggggaactccg

SEQ ID NO: 545425 - DNA, 100 bp, Homo sapiens
acacagaactccagcccacctctccaaccccaacctggcctgctgatggccgccagatcccacccttggacccccatgaaaatggaaacaatggaacaat

SEQ ID NO: 545426 - DNA, 50 bp, Homo sapiens
cccacgctgagccagcatactcatgaaagttcaggagccctggaaaggag

SEQ ID NO: 545427 - DNA, 95 bp, Homo sapiens
gaggttcgagtgttgcagagcctgcggggcaagatctgtgattttctatgatagcgactggaaccccactgtggaccagcaggccatggacaggg

SEQ ID NO: 545428 - DNA, 90 bp, Homo sapiens
gagacaggacctttttcaacttgacaaatagaaatatggctacacacacctttctgcaggagagctgcttcgtgatgaaaggaagaaccc

SEQ ID NO: 545429 - DNA, 100 bp, Homo sapiens
ggctgactggggacctgtcccacctggcggccatcgtcatcctgctgctgaagatctggaagacgcgctcctgcgccgcaacacagtcactcctggcggc

SEQ ID NO: 545430 - DNA, 100 bp, Homo sapiens
gggaaagaaagatatagagacaacgactatgtccaattttcatgctcaggagctacagggagctggccgactgcacctggcacatggcggagaagctggg

SEQ ID NO: 545431 - DNA, 89 bp, Homo sapiens
gacaagaagtcgaagcaagacttaccctaagcgaatagcacaaacacagccagctgtgccttgctttccatgacatttcccctcaagca

SEQ ID NO: 545432 - DNA, 71 bp, Homo sapiens
gaatgaccacctagagccttggatccaggagaacggcggctggggtttggaaatcccttgtctccaggttg

SEQ ID NO: 545433 - DNA, 100 bp, Homo sapiens
aggttagacttgtttcttatatgtgatgccattccagcactggactcatggaggctgagcatttattcaggtgagaaaccttttgaatgtaacatttgtg

SEQ ID NO: 545434 - DNA, 101 bp, Homo sapiens
agattctctgtggagaggcctggcagaacgaagaggatgattgtagaaggcatgaaacaaaaaatgtggagtattgaaaatattgccttcggttctggtgg

SEQ ID NO: 545435 - DNA, 83 bp, Homo sapiens
gtctcgggggccgctctgggatcccggccaccagcaattgtccgaggctgacccgcggctgattgagtccctctcccagatgc

SEQ ID NO: 545436 - DNA, 100 bp, Homo sapiens
ctgccctgaaggcctggggcgggaagaaggagaacctgaaggctgcgcaggaggagtatgtcaagcgagccctgaccaagatcactccatggatgaaatg

SEQ ID NO: 545437 - DNA, 87 bp, Homo sapiens
gccccatgggccccgcgggccccgcggcgcagtaccagggcagtgccaaggagctgtcccctgccgccttggagaaaaggcggcgga

SEQ ID NO: 545438 - DNA, 75 bp, Homo sapiens
ttttaaggggccagagcatatgcagtcggaatgactgtgataaatatgtttttcgtatgcaaaaatatcataaaa

SEQ ID NO: 545439 - DNA, 50 bp, Homo sapiens
ggaaaatgccaacgccgtgtctgaaggcttggccttcgtgcctctgcaga

SEQ ID NO: 545440 - DNA, 100 bp, Homo sapiens
gagcagagccgcccagccctgccagctgcgccgggacggagatggtaacctgcacctcaatgtgacggcggaggccttcagcccctcgctcctggctgcc

SEQ ID NO: 545441 - DNA, 82 bp, Homo sapiens
aattaatcaaacttggacagctctctatgctgctgtgttgaaatatgaaaacaatgtcatgaatatcaggcagtttaactgt

SEQ ID NO: 545442 - DNA, 100 bp, Homo sapiens
caccatgcgcatcccggtggagagcgcgcccatgttctccgctaaggtggctgtgacagtgcaagtcaccttcaggccattcagaggaggaaagagaggg

SEQ ID NO: 545443 - DNA, 90 bp, Homo sapiens
cggaccccccggatctgacggggcgggacctggcgccaccttgcaggacatccataaaaattcatcagagagcattttactactgagctg

SEQ ID NO: 545444 - DNA, 89 bp, Homo sapiens
gatggatatgatgactgtggggatttgagtgatgagcaaaactgtgggccggtgcataaacttctcccgagttccatctcagtaaaagg

SEQ ID NO: 545445 - DNA, 123 bp, Homo sapiens
atctgtctatgaaggaggggtgttctttcttgacattaccttttcaccagactatccgtttaaaccccctaagtgctggtcccaaaggcgataacatctatgaatggagatcaaccattctag

SEQ ID NO: 545446 - DNA, 74 bp, Homo sapiens
ccgcttctcccgcttcaacgaagaccgagactttcaggaacctacaagcagcaattggcgcctattatgacttt

SEQ ID NO: 545447 - DNA, 89 bp, Homo sapiens
agctggcgcagcccacgctcatgatcgacttcctcacccgcgcctgcgacctcggtgaccaggcattgatgcacccccaggaaggccac

SEQ ID NO: 545448 - DNA, 100 bp, Homo sapiens
caagtctcaagtcttctctgcagctttaccgggtattcaaaacctttgaccacatggcccgtcaggatgatgagaagagaaggcaggaacttgaagagaa

SEQ ID NO: 545449 - DNA, 100 bp, Homo sapiens
cttcagctcatgcacagttgcaaagagggctacgtgaaagatctgaaagctccctgtgctgtcaggaatctacaggacttggctcgtatttacattcgac

SEQ ID NO: 545450 - DNA, 82 bp, Homo sapiens
cactgtgagaaaattgaaggctccaaatccttagctcagagctggaggatgaaggatcggcaaaagactgttgaagtagaga

SEQ ID NO: 545451 - DNA, 107 bp, Homo sapiens
gctggacccacgtctgtctggtgataccaggggcagagggaccactctgacagggttccgagtctgaggaagacataaccttgtgcctgcctgcccacctctctctc

SEQ ID NO: 545452 - DNA, 90 bp, Homo sapiens
tccacaccaagaatcagccacagacggaacaagcatgcagaaaaatatggtgttatccctaagaaatgcttccctgaatcttatacaaca

SEQ ID NO: 545453 - DNA, 101 bp, Homo sapiens
ttggataaatatatctatggagcacagctcccagatggacgtatcatcaaagttgggggagagagatttgaagcaccagaagctttatttcagcctcactt

SEQ ID NO: 545454 - DNA, 75 bp, Homo sapiens
cgctggttgacccgggcagcggagagaggaggtactgagtttgagggtgcagtcatagctctgttccatttgttg

SEQ ID NO: 545455 - DNA, 100 bp, Homo sapiens
gggtagcacaggcctttcgggagggagagaatacccaggctggcctgctgtctgccttgggctccctgatattgatgatttggctgatggcaacacctca

SEQ ID NO: 545456 - DNA, 75 bp, Homo sapiens
aattacttcgatccttaatggacttcaagtgagaaagatcagtctaaagaaaaggagaagaaagtgaaaaaaaca

SEQ ID NO: 545457 - DNA, 73 bp, Homo sapiens
ggtccagcctggtgaacgcagccaaggcatacgaagacttctgcctggtgtcgaaggtggtgggcagatgccg

SEQ ID NO: 545458 - DNA, 96 bp, Homo sapiens
ccaagcactccaaggcatccctgcccacgggcgaaggcagcatcagccatgaggagcagaagtcagtccggctgggaacctcagaacctgttctgg

SEQ ID NO: 545459 - DNA, 87 bp, Homo sapiens
aggacacccctgaagccgagaaatggaccacggaggggtgatcgtgaacatcactgccaccctggggaaccgggggcaggcgctcca

SEQ ID NO: 545460 - DNA, 83 bp, Homo sapiens
cgaatctccggccgaagagcggcggcggcagcggcggttgaaatcacaaagattagacacctttttagataggtgttcttcag

SEQ ID NO: 545461 - DNA, 100 bp, Homo sapiens
tgacagccgagggcggcctgagcccggcgcaggtgaccggcgcgcgggagcgctacggccccaacgggggggccctcagcctcttggccttgaacgggct

SEQ ID NO: 545462 - DNA, 83 bp, Homo sapiens
aaacaagacagttctgtctgcagaagcccattatggctgtaactggagatgacacagacgcaagatggctgtcctctctaagg

SEQ ID NO: 545463 - DNA, 75 bp, Homo sapiens
aaatgtccatccagttgggagctatgagtcctctgaaatgaacagcatatatatattcttccaacttccatgcag

SEQ ID NO: 545464 - DNA, 100 bp, Homo sapiens
agcctgggccttctggtcaacctggccgtccggggcccccaggccccccacctgcagccccctgtgctgtttgaggcgtgaaactcacctcaggaaatgt

SEQ ID NO: 545465 - DNA, 75 bp, Homo sapiens
gtcttccacttgcacgaaagctttcctaggccaaaaagaggagaagatggtataaactggtccatcagtgacaaa

SEQ ID NO: 545466 - DNA, 80 bp, Homo sapiens
ctcctacttccagaaaaagtgctcctgggactccaggataccagaatgttgtaccatctttgggtaggcagacttccctg

SEQ ID NO: 545467 - DNA, 100 bp, Homo sapiens
caatgagctgaaattccatccaagagatccaaatcttctcctgtcagtaagtaaaggagaaggaagccaacatccttttggagccatgaatattgtccga

SEQ ID NO: 545468 - DNA, 133 bp, Homo sapiens
tgattaaagctggttttgctggtgatcagatccccaaatactgctttccaaactagttatcctacgcggagagccaggtaccaatgggtgcgctgcaatccagacagtaattctgcaaactgccttgaagaaa

SEQ ID NO: 545469 - DNA, 75 bp, Homo sapiens
ctgaagatggtttgaaacagcttcacaagggggatatgagactttctactcggaatatcctgagtgttgcgtgga

SEQ ID NO: 545470 - DNA, 82 bp, Homo sapiens
ggagcagagccgctgggcgccggagccgaggcgagcgccgcgcgcaccactggagtgtggccatctggggccgtgtggtatt

SEQ ID NO: 545471 - DNA, 112 bp, Homo sapiens
acaaaaagaaagctgcgttaatgtttgcaaatgcagaggaagaatttttctatgaggtacgacaacaattccacgatgccaaattcatggcagacattgatctggatccagg

SEQ ID NO: 545472 - DNA, 96 bp, Homo sapiens
cttagcggtagagcaaaattcctgaagacaatttcttcttccaaaatcctcggattctctacttctgcttttggatgctcttccaagagtcacatg

SEQ ID NO: 545473 - DNA, 74 bp, Homo sapiens
tctcacactggccttgatttggcagctaatgagaaggaggaagaaggcacctacgatcaaactctggagttccg

SEQ ID NO: 545474 - DNA, 101 bp, Homo sapiens
actgtgattcatggtatcaagacagtgtctactatattgatacccttggaagaattatgaatttaacagtaatgctggctctgactacacccggataacag

SEQ ID NO: 545475 - DNA, 113 bp, Homo sapiens
cagtaccaagagtcaaatttgagaacaaaaatgaacagtatggaaaaagcccacaaagaaactgtggaacaacttcagaacagctttgctgagccatcaaggtctaatggaag

SEQ ID NO: 545476 - DNA, 90 bp, Homo sapiens
gtcctgggcaccctcatcctgcttcaccgcagtgggaccacctcccagccagagtacacaatgaccaaatcctcagctgtcctcttcatc

SEQ ID NO: 545477 - DNA, 109 bp, Homo sapiens
ggagtttgagccccggaggcagagcggctgccatgtaagactttgaccccgacgcaggcttcagtgattgccgcggatcagaagcctgagcactttggctcgagacaat

SEQ ID NO: 545478 - DNA, 100 bp, Homo sapiens
aacattcaagcaatgatcatcaaagtagcagctttggctggtgtcatagatgaagattatagaggaaatgttggtgttgtactgtttaattttggcaaag

SEQ ID NO: 545479 - DNA, 100 bp, Homo sapiens
cttcatgtcaagtcccttggagcaagtccaacagttgctggaatagtagagaaactccagaaaatcttgccaaacttctgaccaggatgtatttaaaatc

SEQ ID NO: 545480 - DNA, 83 bp, Homo sapiens
accagacctgcaagctctttgacacacagcagttcttgtcagctcgggaaggcaggctgcccggctcttctccgtgcctcatg

SEQ ID NO: 545481 - DNA, 100 bp, Homo sapiens
caaagcactacactacaaagaactggagttccagaaaggccccacccctgccattctagaatctctcatcaggaattggattcaagtacgtggctctggg

SEQ ID NO: 545482 - DNA, 82 bp, Homo sapiens
tagctgtgctcgcgctactctctctttctggcctggaggctatccagcgctcccctggctccagccctaaggtgctctccca

SEQ ID NO: 545483 - DNA, 100 bp, Homo sapiens
gatggtggtggatgcggccaactccaatgggcctttccagcccgtggtccttctccatattcgagcacagccatgacagtgcagatcctgctgaagctgg

SEQ ID NO: 545484 - DNA, 75 bp, Homo sapiens
cgaccttaaccgttccaatggggtagcgctccccccattggacaagtggaagaatgagctgaaagccagtggtgg

SEQ ID NO: 545485 - DNA, 98 bp, Homo sapiens
cctgcacgaatacgcctcgataaacagggccgtgccgcagatgcccaccggaatggagaaggaagaggagtcggcatgtggagaccccaaggcaaaac

SEQ ID NO: 545486 - DNA, 90 bp, Homo sapiens
gttggggccgagcgccgctgccgaagtccgcgcgcagagaggacatgtactcccaggattccatagatctccttgctaactcaggactac

SEQ ID NO: 545487 - DNA, 100 bp, Homo sapiens
ggagaaacaacaactgctacatctgttggaggagccaactagcatggaagtgcaggtattttcttacactgctgacaaagaaatccgaaccgatgacttg

SEQ ID NO: 545488 - DNA, 101 bp, Homo sapiens
taaccacgacgtggtggagcccctctacatcgagggtttaaccaccaaggactctgagagctggcaggtctgagtaaccctggtaacaattctcttcacct

SEQ ID NO: 545489 - DNA, 82 bp, Homo sapiens
cttctgcatccttaactgagaatgagactgcaaaattcaaaatggggctcaaggtattcgtttcatctacaccagagaaggc

SEQ ID NO: 545490 - DNA, 75 bp, Homo sapiens
cctgaaccggcacctgcacacctggatccaggataacggaggctggacagaacaatggcagcccgagtacttata

SEQ ID NO: 545491 - DNA, 83 bp, Homo sapiens
ggacagcagagaataagctggacaccaaatacccgtacgtggaagcatcagttcacagcagtaatgcacactgtacagataag

SEQ ID NO: 545492 - DNA, 116 bp, Homo sapiens
gcctccagcttcaccacccgcacggcgcagtgccggaacactgtggcggccatcgaggagcgtgagtgcatctccatccacgttggccaggctggtgtccagattggcaatgcctg

SEQ ID NO: 545493 - DNA, 101 bp, Homo sapiens
cggggcgtcgcggcccaggtgctgcggcctggggctggagtccgattgccgattcagcccagcaggttatcactgtgaatataagatgcggacaggaagga

SEQ ID NO: 545494 - DNA, 90 bp, Homo sapiens
ctggagagcttcatcaaaaatagtgatagctttgataactcatagaagacccagatgtcaagatcaaactcaagcttcagtctttaatat

SEQ ID NO: 545495 - DNA, 96 bp, Homo sapiens
cgaggcagaggaaccggctcccaggtggtatggtcaggaaaaagactacaatgtactagtcatggatcttctgggacctagcctcgaagacctctt

SEQ ID NO: 545496 - DNA, 100 bp, Homo sapiens
tgatcaccaagcagaatgtccagcgggtcctggaggctgctaacctcttccagagaaatggtcaatgcatggtttgctgagagagttcacaccatccctg

SEQ ID NO: 545497 - DNA, 50 bp, Homo sapiens
tcttcatgatgttctgcatgattgtgtgttgacagctcttctaccacaag

SEQ ID NO: 545498 - DNA, 75 bp, Homo sapiens
tgcatagtttcggtcatctaaaggaggttttaaacagtataacaggtgaaaggtgtagcagtcactcggcctaca

SEQ ID NO: 545499 - DNA, 50 bp, Homo sapiens
aaaaaagcagaggccagggcgccggactctgaagacctactgggtgagca

SEQ ID NO: 545500 - DNA, 87 bp, Homo sapiens
cactctctgatttggggatctctagcctacaggatggcttggccttgcacataaggagtgtcaaagccagccacatcctgatctctg

SEQ ID NO: 545501 - DNA, 90 bp, Homo sapiens
caattttgctaactttgcacatttcaacagtcatgcagaacccctgaacagtgcccaagtgttgtctctttgttgtcagagagttacaac

SEQ ID NO: 545502 - DNA, 90 bp, Homo sapiens
ccctgctggaggagcgcttccggatgcaggttccttcagtcctactccaggccaaataggaggagctgtgaaattatccatctcttaccg

SEQ ID NO: 545503 - DNA, 50 bp, Homo sapiens
tatgacactgaaatctgtaacgaactattatggagctgctaagatgatat

SEQ ID NO: 545504 - DNA, 83 bp, Homo sapiens
acgtgtttcatgaactcagctattcaggtgttcttccagagagcaaagccctgaggactggatttccctgtgcctacttcatg

SEQ ID NO: 545505 - DNA, 74 bp, Homo sapiens
atttgcagcaccatcaacagatgcccctgataaaggatacgttgattagtgacaagagctggggttaggatccg

SEQ ID NO: 545506 - DNA, 50 bp, Homo sapiens
ggagtagctgatcaaaccaaggatgggcacctacaaaggcagcacctaag

SEQ ID NO: 545507 - DNA, 100 bp, Homo sapiens
aaactggccaagaagggccttactccttcacagatcgggtgcatctgagaaagacatcgtgcactctggcttggcatacacaatggagcgttctgccagg

SEQ ID NO: 545508 - DNA, 90 bp, Homo sapiens
gcggcctgggatgcgcttgggctccctgcaatggctgccatccggaagaaactggtgattgttggtgatggagcctgtggaaagacatgc

SEQ ID NO: 545509 - DNA, 51 bp, Homo sapiens
aaattcatcccagaaatctaagaggtgaacagtaattgcttaaccctgcag

SEQ ID NO: 545510 - DNA, 102 bp, Homo sapiens
gtattccatgttaccggctactccatggggtgtgtgggaaataatcaagcgaactgagttgagtccacgctccatgagaatgctgaacaccatccaaagcag

SEQ ID NO: 545511 - DNA, 80 bp, Homo sapiens
taaatttcggtagccatggcacaagaatatagctggctgttgctccaggcccctcggtgggtgttcaaggaggaagaccc

SEQ ID NO: 545512 - DNA, 98 bp, Homo sapiens
gcgacctcaagaagcagctccacgaaaggcagccgcggatcgccgcgctcagcgacaaacaagttctcccagcagagatgtgggtccttccctgggtc

SEQ ID NO: 545513 - DNA, 74 bp, Homo sapiens
ggacaaaagccaagaggaggacagttcgctacacagcaatgcatcgaggagcatctttccttgaagaagtacat

SEQ ID NO: 545514 - DNA, 75 bp, Homo sapiens
tccgccttctctgtcagctctttccccgtcagcatcccagccgtgctcacggaggccccgtgtgggccgcggccc

SEQ ID NO: 545515 - DNA, 82 bp, Homo sapiens
gtgcccatttccctctatgtcagtgtggaggtcatccgtctgggccacagctacttcatcaactgggataagaagatgttct

SEQ ID NO: 545516 - DNA, 75 bp, Homo sapiens
caccttgggatgagggaatacaagtgtcatgtctgtgggaagaattcctttggctaccggaagaaaagggaggag

SEQ ID NO: 545517 - DNA, 75 bp, Homo sapiens
aatgtgagtggaagccatgaggccaaaggcagttgtattgtggtcatgtgcagtctacaaatgctgatgatgttg

SEQ ID NO: 545518 - DNA, 99 bp, Homo sapiens
ggggatagtgtcatcggttcggtaaagtttctgttctctggttatcttgacgaatcagattacaacccatctgagtggagccctggcttctcaggcaga

SEQ ID NO: 545519 - DNA, 90 bp, Homo sapiens
tcacgccgcgcccgcgctcccaggctccggaggctaagaatattgtacacaaagattcttgatgttcttgaggaaatccctaaaaatgca

SEQ ID NO: 545520 - DNA, 90 bp, Homo sapiens
gccagatggacaaggagaccaaagagaacaacctctctgaagaaggtcagcagcacagtggccatggaaaaagaaaaactctacagcata

SEQ ID NO: 545521 - DNA, 100 bp, Homo sapiens
ggctgctgcgggaggcggcggcggtaggaagccggagacagcagggtgacaggggaacatttgcctaaatctttggaaggattttttatctatgaagaag

SEQ ID NO: 545522 - DNA, 50 bp, Homo sapiens
tcatgtggggggtaaaccactcgtcagccataatggcaggtgaagaaatt

SEQ ID NO: 545523 - DNA, 89 bp, Homo sapiens
gatttttagaactccacatttgaggtcagtttaggggctggtgcaaaggatgagttgcacattgttgaagcagaggcaatgaattacga

SEQ ID NO: 545524 - DNA, 109 bp, Homo sapiens
gaaaatacaaatcacacgcataatggatgaaaggaaccgacaggtttattttaggacagtggaacttatagaagagcctataaaagggtctcctggtttgagtttctat

SEQ ID NO: 545525 - DNA, 100 bp, Homo sapiens
gccacctcggcctcttcctgttgcaccaggttcttcgaaaactgaagcagatgttgaacaacaaggtggaggagttactgatggccatggagaaggtaaa

SEQ ID NO: 545526 - DNA, 89 bp, Homo sapiens
ccatgtgccaaaggctgccaggaaggaggttttatgctgggggctcagagagaagtggacagcagattgttggccctcccaggaagaaa

SEQ ID NO: 545527 - DNA, 90 bp, Homo sapiens
accccgtcccgaccctggccgccccgagcggagcctggaggtgcgcgcggagccatggttatcatgtcggagttcagcgcggaccccgcg

SEQ ID NO: 545528 - DNA, 100 bp, Homo sapiens
gctgcaggtgggatcgagctatttgttggagtcttcagccaatgacttgcttgcatcagacatctttgctcctcccgtctcagaaccttcaggccaggcg

SEQ ID NO: 545529 - DNA, 100 bp, Homo sapiens
cagaggactctatacagggacgtgatgctggagaattataggaacctggtctccctgggtgtatggaatgattcggttctcaggcaccacaggccagatg

SEQ ID NO: 545530 - DNA, 98 bp, Homo sapiens
aggccatgaagagtcctgaccacaatggggaggacaacttcgcccgggacttcatgggtttgaacataatctttcatgtagctttggctctcctaaag

SEQ ID NO: 545531 - DNA, 90 bp, Homo sapiens
ggatggccgctctacccaggagccttggagtatgatcagattgagaggatccagaatccagatctctggaatagctaccaggcaaagaaa

SEQ ID NO: 545532 - DNA, 100 bp, Homo sapiens
tgattctctgctagatgttgtggttgaaaataatctagatattgatggctttggccaatggtggcagagtctacatagaactatgcttcgtggtgttctg

SEQ ID NO: 545533 - DNA, 100 bp, Homo sapiens
tttgcaacatttcaggaaaacagagaaagaagtgataggagggctctgtaggatgaagcctgctgggagcgtgaatgacatggccctggatgccttcgac

SEQ ID NO: 545534 - DNA, 101 bp, Homo sapiens
gcgctcccgcggagccggagccgcagaggctcccgggctggactcaggcttctcagacctgcctagagctggaacgttacctccagagcgagccctgctat

SEQ ID NO: 545535 - DNA, 75 bp, Homo sapiens
gaatagccagttaacgtggaagcaaggcagacagcttttaagacagttcaagcaataaatgcgggagtgtttttc

SEQ ID NO: 545536 - DNA, 116 bp, Homo sapiens
aacaggacaatagcagtgattgtggagtatatttattgcagtatgtggaaagcttcttcaagtgtgtcaggaagctgtctgggaagccttcaggactttttgggatcgacttcctg

SEQ ID NO: 545537 - DNA, 74 bp, Homo sapiens
ccacttggtgaatggagatgcagctcagcagatatttcacagttcttgccgagtgcttcactttttcactagaa

SEQ ID NO: 545538 - DNA, 100 bp, Homo sapiens
gcgcttggggatcctctgtacgcccgttcactgccgcggcccatggagcccgccggcccggcccccggccgcctcgggccgctgctctgcctgctgctcg

SEQ ID NO: 545539 - DNA, 100 bp, Homo sapiens
acagacaacactgaaatctcagacggtggcccggaaccggagtggggtcacaaatgtgccccacctcaaccagaatgcctggaacaacctggagaaatat

SEQ ID NO: 545540 - DNA, 100 bp, Homo sapiens
gacgacgacgatggggatatcgactgtgcaggtgcctgtgtactcggagcaggagtaccagctttatctccacgatgatgcttggactaaggcagaaact

SEQ ID NO: 545541 - DNA, 83 bp, Homo sapiens
gcggacgcgtcatcgagtgtgacgtggtgaaaggttgcctgcggacacgctgggcctctgtcctgatgctgctgagctccctg

SEQ ID NO: 545542 - DNA, 90 bp, Homo sapiens
gccacagcagagacgcgaaggagaggccctagaacccccatgactgaagagttgctgaaacaacaaaagctgaattcacatgagaccact

SEQ ID NO: 545543 - DNA, 98 bp, Homo sapiens
gtcggtcgagtgtggcctgtgtggactcgcatcttgcccgaagccgggcggaggagagctcaagctaaggtctcctctgagcctccggcctccataag

SEQ ID NO: 545544 - DNA, 98 bp, Homo sapiens
ctgaggggccgctgtcaagaagcctgggtcctctctggcaagcagcagatagctaaggaaaaccagcagctcatggggcattcagaatgggaccacaa

SEQ ID NO: 545545 - DNA, 75 bp, Homo sapiens
ccggaatatcaagattcatctttttcactaattgtggcattcacagtttgatgaaatcctggaggccagtgatgg

SEQ ID NO: 545546 - DNA, 87 bp, Homo sapiens
tcctgatgccaacagtgtaccagcagggcgttggctatgtgcccatcacaggtggaagttaaacgagctgagcctcgggacagcaag

SEQ ID NO: 545547 - DNA, 100 bp, Homo sapiens
ccagagccagtcgggccaagagaagaggcggtggaggacacgacgcgcttaaagggtgaccaagaatatggcccaggtgaccaaagccctggacaaggcc

SEQ ID NO: 545548 - DNA, 74 bp, Homo sapiens
cggcatctcagacaagctgatggtgcacctggtggagcgagtgcagaggccgttaattaaggaaaagttgagcc

SEQ ID NO: 545549 - DNA, 100 bp, Homo sapiens
gggttgctgcagtctggtcagatccctggcagagaacgcagatcagatttggagcaagaggtggtggtggccttcccccgaagaaatttggtaatcctgg

SEQ ID NO: 545550 - DNA, 100 bp, Homo sapiens
ctccgtgggagccagcgagcctctctccctgatcttacgtgctcaaggttggcgctgcagctctgggattcattcattcatatagctcgtatttattgag

SEQ ID NO: 545551 - DNA, 100 bp, Homo sapiens
tgcagctccaggaagcgagatgtcgaagccgccacccaaaccagtcaaaccaggttaatggaaaaggttccttatggtgtgttgatccggaatataaacc

SEQ ID NO: 545552 - DNA, 100 bp, Homo sapiens
cggctctacgccctggaccagatgattgctagctgtggccgactggtgaatgaacagaaagagcttgctcagaacccagtgacttgattgtaaaaattta

SEQ ID NO: 545553 - DNA, 100 bp, Homo sapiens
tgttcctgcccaaggacatggacggggtggagatggatgagactgaccgagaggtggagtactttaagagggcaattgaaggaacagactaaaaatcgtg

SEQ ID NO: 545554 - DNA, 96 bp, Homo sapiens
aagcaatcctgtttttaggagatacttaaataagattttaattgaagctggaaagcttggacttaaatatggctacacacacctttctgcaggaga

SEQ ID NO: 545555 - DNA, 75 bp, Homo sapiens
atatattattttattccaagaaagatcagggagccttagctgaaaggcagcagctcatcccagaattggtgcgaa

SEQ ID NO: 545556 - DNA, 89 bp, Homo sapiens
acttggtcaaattcaatagctgttacctcgacgagtacatcgcaaggatggttcagaatcaaggtcttgatagtctcttcagagcaaat

SEQ ID NO: 545557 - DNA, 82 bp, Homo sapiens
aaacaagccagtctcgatgagaaacagttggccaagctccacacgaagggacacggccaacacggtgaaggaaaagttcggg

SEQ ID NO: 545558 - DNA, 100 bp, Homo sapiens
acacagataaaagagaaagatagatgccctctctcttcatcttcacttgaaataccggatgattttggaggtctacaggtccaactgctgccactggcag

SEQ ID NO: 545559 - DNA, 74 bp, Homo sapiens
ggggatttccaccatctgtcccaggtactccaaagattcaggtttactcacgtcatccagcagagaatggaaag

SEQ ID NO: 545560 - DNA, 100 bp, Homo sapiens
caagaagtcagtatggtgcggaatttaattcagaaagatagaacctttgctgttcttgcatacaggggaaaaaagttgttccatgtagacatgactggca

SEQ ID NO: 545561 - DNA, 75 bp, Homo sapiens
tccctattgtccacactgagaccaagaccatcacttatgaggctgcccagctttgggacatccggaagaaagcag

SEQ ID NO: 545562 - DNA, 82 bp, Homo sapiens
gtggtttccgttaagctggacaacagtgcagagcagagcgggcggaggaccccgggcgcgggcgcggacggcacgcggggca

SEQ ID NO: 545563 - DNA, 100 bp, Homo sapiens
tggctttggtggatggggtattcttgaaccaggtcatgctccaaatggaagtttggttggcttagtggattatccagatgatgaagaggaagatgaagaa

SEQ ID NO: 545564 - DNA, 73 bp, Homo sapiens
ctggatctgtgcttgtgaaaggctccatggtcttgcctccttgcagtgtatcctactcagtacatgtatctga

SEQ ID NO: 545565 - DNA, 75 bp, Homo sapiens
ccagggaggaagatgtcgtaatgagcgggccatgaagcccccaggaggagaatcgagcaatctttttggaagtcc

SEQ ID NO: 545566 - DNA, 100 bp, Homo sapiens
ggttcttggtgcttggcatgaggatggatggagtggaaccctggcttccccttgagcatcgatgccaaatgccacaaggatttaccccgtgatatccagt

SEQ ID NO: 545567 - DNA, 76 bp, Homo sapiens
ctggagaggttaaagagacccgttcagagtcctacagtggcagtttcaggagacaagtattatctttaaatctaaa

SEQ ID NO: 545568 - DNA, 75 bp, Homo sapiens
gtggtgagcctttttgtcactggattggaacgagttactatgctgtttctgggattgcataatgttcgtcagacc

SEQ ID NO: 545569 - DNA, 75 bp, Homo sapiens
gcgcagaagaaacccgcggcgaccacagccaaagcgggcaacgacaccgtaactatccgcactagaaagttcatg

SEQ ID NO: 545570 - DNA, 101 bp, Homo sapiens
ggataaatcgaaaggagagcccgtcattagcgtgaaaaccacaagcaggtccaaagagagagcctgttcctgaacttcctgggaagtcaaccttcttcggc

SEQ ID NO: 545571 - DNA, 73 bp, Homo sapiens
ctgctaaaaacaagactggggctgctcccatcattgatgtggtgcgatcgctctatgccatcccttggtttct

SEQ ID NO: 545572 - DNA, 75 bp, Homo sapiens
cttccacttcaaggagacaacggccacacactgtgggaggcggggtttcaccatgttgcccagactggtcttgaa

SEQ ID NO: 545573 - DNA, 100 bp, Homo sapiens
ccaagatgtccaaccgagtggtctgccgagaagccagtcacgccgggagctggtacacagcctcaggtagaagatgggacatctagtgtaacagtgttat

SEQ ID NO: 545574 - DNA, 82 bp, Homo sapiens
cttgagcttcagcggaattcgaaatgatgtgcactcccagcaacacccctgccacgccgcccaacttccccgatgcgctggc

SEQ ID NO: 545575 - DNA, 100 bp, Homo sapiens
ctccggtctacagctcccagcgtgagcgacgcagaagacgggtgatttctgcatttccatctgaggcctttttgcaaatgtgtaacttgcctatcaaagt

SEQ ID NO: 545576 - DNA, 83 bp, Homo sapiens
gctgaagcgactgagtccgcgatggaggttttggctacgggcctccacctccaccgccagatcagtttgcccctccgggggtt

SEQ ID NO: 545577 - DNA, 100 bp, Homo sapiens
ggcagctccagagtctggactggaagtccgggaccgcatgtggctcaagatcaccatccctaatgcctttctggtttgaatacatggcccagcacctggt

SEQ ID NO: 545578 - DNA, 100 bp, Homo sapiens
ctgctgcaccagtgctggggcgctcccagtgccaaccccttccagcagccccagtggcccatcctgtcagacggcctgtggacagcgtggccccggcccc

SEQ ID NO: 545579 - DNA, 75 bp, Homo sapiens
aagctcaagtatatcaagcattcaaattgctcacagctgatcctaagactgactttatggcctttcaccaagaac

SEQ ID NO: 545580 - DNA, 100 bp, Homo sapiens
gaaccgatatggcggcgactctgggcagcggggagcgctggacggaagggtctgccaatttccatgtatggaggcaccataataccctctcatcctcagc

SEQ ID NO: 545581 - DNA, 97 bp, Homo sapiens
agacttggggatggaaccgcacagagccgcgggccctttgcagctgcgattttcgccctacgttttcaacggagggctgaccggttccctgatgtgt

SEQ ID NO: 545582 - DNA, 83 bp, Homo sapiens
gcggcactgatttgtccctggggcggcagcgcggacccgcccggagatgagtgtttgggaaatgggaagtaatgacagctggc

SEQ ID NO: 545583 - DNA, 56 bp, Homo sapiens
gatggatcggacgctgcacaagatcaaggtggtccgggactacaatcttcagctgt

SEQ ID NO: 545584 - DNA, 100 bp, Homo sapiens
cggagaccccgcgccggaccctgaggcagcgagaaatgaaggccgaatttataaaggaagcccagccagggaaaaagcagctcctgctcagcgcagcact

SEQ ID NO: 545585 - DNA, 100 bp, Homo sapiens
acaggaaaaaaatttgctggatattgatgcgccagtcactgatatggaatgtgcagatgtcccactattaactccaagcagcaaagaaatgatgtctcaa

SEQ ID NO: 545586 - DNA, 98 bp, Homo sapiens
aagaagtttctaggaaaggccggacaccagctgtcccccgaggcagcctatgatgtgctgagcgtcgccgacatgtacctgctgccaggcctgaagag

SEQ ID NO: 545587 - DNA, 75 bp, Homo sapiens
ctggccaggaagcggagggcgcgcgagggtctctgaaagaagatgaatttggctgagatttgtgataatgcaaag

SEQ ID NO: 545588 - DNA, 137 bp, Homo sapiens
ataaatcttcttattacacaagccacacctcatgttgctcctgtgatgccattagatcgtttcattacaggtgtgatgttagctgttgatgctgtaattgctgaacttaaaaagcagtctaaacctgtgaccacccc

SEQ ID NO: 545589 - DNA, 75 bp, Homo sapiens
gctcaggagctgtgttcagagtcaaaccgttggtcccaggaagacatgctgactttgctggaatgcatgaagaac

SEQ ID NO: 545590 - DNA, 90 bp, Homo sapiens
ggacgttgtctaaatttcggtagccatggcacaagaatatagtatattcagcatgcagctttactttttcaaagattccttcaccataca

SEQ ID NO: 545591 - DNA, 100 bp, Homo sapiens
tttgacagctgcctttctgacttggccgccgtgtccaacaaattccgagacctcttgcagggcactgaaggctttgtggaactacctgagccagaaggga

SEQ ID NO: 545592 - DNA, 75 bp, Homo sapiens
ggcttagccatcttcctggacacctaccccaatgatgagaccactgaggtcagtttaggggctggtgcaaaggat

SEQ ID NO: 545593 - DNA, 90 bp, Homo sapiens
aggtatacaatttccagtgccctcaatttgatgcaaatctgcaaaggaaagcttaaagtatcagtggttgagaagagcttttcggacctg

SEQ ID NO: 545594 - DNA, 76 bp, Homo sapiens
taacagactgcttttacacctacgtgagcggagaattagagtacatacactttgtttgccagtggtaagttcacta

SEQ ID NO: 545595 - DNA, 75 bp, Homo sapiens
cacatcggccctcatgttcctccaccagcatggagtcatctacaggtggagaccacgtagctttgcaaggccaga

SEQ ID NO: 545596 - DNA, 76 bp, Homo sapiens
caacacctgatgaatggtggagagttacgcagttactatgcgagtcagaagaaaacatttgaaattaatcccagac

SEQ ID NO: 545597 - DNA, 51 bp, Homo sapiens
cagcccgagaaaccgcagcactacacaccaagatcactccatggatgaaat

SEQ ID NO: 545598 - DNA, 100 bp, Homo sapiens
gtgaaatggtgctggccattgactccatccatcagcttcattacgtgcacaggttctccagctctatcagatcacccagatcaatcatggcctgatgatg

SEQ ID NO: 545599 - DNA, 100 bp, Homo sapiens
aatgcttctgtataacaagatgacattggcccagatccaaaataacttttcactagagatcaatgggaagcttggctggtccattggtccaaatcatttg

SEQ ID NO: 545600 - DNA, 100 bp, Homo sapiens
cagcccaactcccaccccatccagtggaatgcaccacagccatctcacatttccaagtacattctcaggtggagacctggtgttcatttagaagaaagca

SEQ ID NO: 545601 - DNA, 100 bp, Homo sapiens
cctgaagaagattccactcgtggtatgagagtggataatataatcaactcctctgcctgctgcacagaagagatcacagaaggagtctggaatagaaagg

SEQ ID NO: 545602 - DNA, 96 bp, Homo sapiens
tgagtttgagattgtcaaggccataaaagaaggaaacctgtttgacttcttacgcttgacggaatggcgtggcccccgcgtgctctacttcgggga

SEQ ID NO: 545603 - DNA, 75 bp, Homo sapiens
ggcgctggcagtcagtcggaactacctctcccagcctcgcctcagcaccacactgtaactcgaggcatcaccaaa

SEQ ID NO: 545604 - DNA, 75 bp, Homo sapiens
ccgacctgctctgtgcctgtgaccttgctgaagagaaaagccccagttcataggcggaagggacttgacttgtct

SEQ ID NO: 545605 - DNA, 97 bp, Homo sapiens
aacatcagaacctcaattctgttgatcttcaaaatgctgcagaaatgctcactgcaaaagtgaaaggtgctggagaatctggtaaaagcaccattgt

SEQ ID NO: 545606 - DNA, 100 bp, Homo sapiens
gttatgaacttcacaaattgggcaattgcaagtggcagcagcacagcactactatacagcaagcgactgctatatgttctcctttcagccaagacctttc

SEQ ID NO: 545607 - DNA, 75 bp, Homo sapiens
ttcagtgactttttacttgatccatacaagagacatcatttcagctttccatccatttttatttatggacatact

SEQ ID NO: 545608 - DNA, 89 bp, Homo sapiens
gaaaaggtgaatactccaactaccacagtctataggtggtgactctcaaaaggaaataggatcatggcagcagatgatgacaatggtga

SEQ ID NO: 545609 - DNA, 82 bp, Homo sapiens
atgaagcttctgaaccatccacacatcataaagctttaccaggtgaaagaaaatggcccgaaccaagcagactgctcgtaag

SEQ ID NO: 545610 - DNA, 74 bp, Homo sapiens
tccgctgctgctgctgctcttcccgctgctgctcttctccaggctctgtgattttaggtgatgggcaagtcaga

SEQ ID NO: 545611 - DNA, 82 bp, Homo sapiens
aaaatggcgccctacagcctactggtgactcggctgcaggattatacacatgaattccataaaaccaaagcaaactttatgg

SEQ ID NO: 545612 - DNA, 83 bp, Homo sapiens
gttcggccaagggaccaaggtggaaatcaaacgtagcctttccagtaaatatatgactcagggaaaagcctcagcgaagagga

SEQ ID NO: 545613 - DNA, 96 bp, Homo sapiens
ctgaaggagaaagtggagtctcactggggacggaagctcctgttttcttgtcagccgccagctgagggccattcgcagcttctccaggccacctgc

SEQ ID NO: 545614 - DNA, 80 bp, Homo sapiens
gggacctgctccgggacaacatgctgcggggcacaggaagtgcacggctgtctataacgtgctgccgggtctcaggatgg

SEQ ID NO: 545615 - DNA, 100 bp, Homo sapiens
tcaacatctggaacatgtgatggaaaattatactcagtggctgcaaaaacctcgtcacgtgttcaatatgctaaagaagtatgtccgcgcagaacagaag

SEQ ID NO: 545616 - DNA, 126 bp, Homo sapiens
gcgaatcacttataaatggcgccgaagcaggacccgaagcctaaattccaggagggtgctggagaatctggtaaaagcaccattgtgaagcagatgaggatcctgcatgttaatgggtttaatgga

SEQ ID NO: 545617 - DNA, 82 bp, Homo sapiens
gggggagcgtggagcctccgaggccgagatcatggaagggaagtggttgctgtgtatgttactggtgcttggaactgctatt

SEQ ID NO: 545618 - DNA, 96 bp, Homo sapiens
ttccaactcatgatacacacccttgacccactcgccgaaggttatggaggttttgatgactatggtggctataataattacggctatgggaatgat

SEQ ID NO: 545619 - DNA, 75 bp, Homo sapiens
aggggccgcgccgccaccgtctgaactaggatgtcccgacatgaagacctgcctagagctggaacgttacctcca

SEQ ID NO: 545620 - DNA, 101 bp, Homo sapiens
gtgtctgttgtgtcttgttgcgggcaccgcagtcgccgtgaagatggcgtctaccagccggcacagaccccacaggctcctcggacactgggtccatcacc

SEQ ID NO: 545621 - DNA, 100 bp, Homo sapiens
acacgctcagcgaggaagaggaggacgactttcggctggaagccaaggccacctttgatgccatttctaagacctacagctacctgacccccgacctctg

SEQ ID NO: 545622 - DNA, 110 bp, Homo sapiens
cggggccggcctcgcaaggcgcttcccctttccagagagccagaaagaagaaacctcgacctgtctcccagttggttgcacagcaggttactcagcagtttgtgcctcct

SEQ ID NO: 545623 - DNA, 87 bp, Homo sapiens
tgaggtttctgcttgtaaaaaaaagggctttcatccacacaccaaggagcccaggctgttcagtgtacaccagaggatcgcttcctg

SEQ ID NO: 545624 - DNA, 75 bp, Homo sapiens
aacagcatgacgtgaggccgtggatgcaggcattaagactgcctctgtcaccgggtccctccacccttgtctcct

SEQ ID NO: 545625 - DNA, 90 bp, Homo sapiens
ccagaggagtggaaggctcccccttgactaaagctgaagatgtggacaaggcagtgaaggccgcccgggccgccttccagctgggctcac

SEQ ID NO: 545626 - DNA, 82 bp, Homo sapiens
agtaaccctgagacaaccacttctggtggttgccactcacctgaggattactctaccacctatgaagagaggaatatcaccg

SEQ ID NO: 545627 - DNA, 96 bp, Homo sapiens
ataccagcaaaggcaccgtgacaggccaagtgcaggggccagaagacaaagtcaattccatggcaaactctttgattctacaatagctgatgaggg

SEQ ID NO: 545628 - DNA, 50 bp, Homo sapiens
gggacttcccgtccgcggcgtggaggacacatcatctcagagttggagca

SEQ ID NO: 545629 - DNA, 88 bp, Homo sapiens
cgatcagagatcggcggagaccctcgaagtgcgcaaacttgacactcaccctgaccggccctggattattgtcacagcatgggaatta

SEQ ID NO: 545630 - DNA, 75 bp, Homo sapiens
ctccttctacagtgaagtggctgagcttggcaggtgcattcatccctggagcgcccgtccagcctgtggttttac

SEQ ID NO: 545631 - DNA, 98 bp, Homo sapiens
gtggaatttattgaagatacaggtgctgacagctgcagaagaaattgtacatggtgctgtacagaaggtatttctccactgtgccatctgcagagtga

SEQ ID NO: 545632 - DNA, 87 bp, Homo sapiens
atctagaggaggtacctccaggaaatgtgctagctgatgtagcccagcagttccagtatgctgtgcgggtgattggcagcaacttcg

SEQ ID NO: 545633 - DNA, 100 bp, Homo sapiens
aaaaactcagtgagacacaatttatcattgaataagtgttttaagaaagtggacaaagagaggagtcaggttgaagatgacagcgatgcagagacctatg

SEQ ID NO: 545634 - DNA, 99 bp, Homo sapiens
ctacgtgggcaccttgcgcttcttgcagtcggaaggccgctgcttgtttgtcatcctgctcatggcggtgtactggtgcacggaggccctgccgctctc

SEQ ID NO: 545635 - DNA, 73 bp, Homo sapiens
ttcgctatcgatctcctcattcagggtgtacaactatgagcctttgacacagctcaagaatgtcagagcaaat

SEQ ID NO: 545636 - DNA, 100 bp, Homo sapiens
ctggacatggaggagaaggtccgcttcaaatttgcttgtaaatgcatcacgaagaggcagcccagaatgaagaaagcaagcaggagtgttggctcagtgc

SEQ ID NO: 545637 - DNA, 100 bp, Homo sapiens
ttgctgagccagcggagctgcttggtatgctggtatcctcctgggcatcacaaatacatttgccactattccaggaatggttgggcccgtcattgctaaa

SEQ ID NO: 545638 - DNA, 87 bp, Homo sapiens
ctagtggcggaagccttcgtctcccagattgcaggtgagaagaaatttgtttgtccagaatgttcaaaacgctttatgagaagtgac

SEQ ID NO: 545639 - DNA, 124 bp, Homo sapiens
ccccagaccaaaagaagtagcagaaaccctgtctttcaggattcctgggacacagaggccttcccttcttcttggtggtgttcttgagtaagataatctggactggcccccgtctttgcttccc

SEQ ID NO: 545640 - DNA, 100 bp, Homo sapiens
atccgcgaccgagtctggcagatccagtcttgctcagctctcacaggagagggcgttcaggaaagtaatggaccagtgaaggtgtggggaagcattaaag

SEQ ID NO: 545641 - DNA, 51 bp, Homo sapiens
cagttgatgggcacctcccgggacgcggtcttgcgagtggctggttccctg

SEQ ID NO: 545642 - DNA, 100 bp, Homo sapiens
aagcggaggaaggtgaagtaggaccgaattcctgtgccgaagaggcctgcagtgggagagcaggagttgcatgctgagaatttgaaaaatgaagatgatg

SEQ ID NO: 545643 - DNA, 83 bp, Homo sapiens
ctgaaatccttctctgacgtcagtgtcatccgcgtggccagcggctacttactcatggggtgctttctctgtggtccgcaggt

SEQ ID NO: 545644 - DNA, 75 bp, Homo sapiens
tgccgtccccgctgctgtgcattggatttgggaatggatgatgaaggagatgatgacccagttcctctaccaaat

SEQ ID NO: 545645 - DNA, 100 bp, Homo sapiens
tcgtggccaccaagcagggcaacgctgtgaccctgggagattactaccagggccggaggattaccatcaccggaagaattcttttagttggacccccagg

SEQ ID NO: 545646 - DNA, 98 bp, Homo sapiens
cgccttcccacggagcagcactcttcaccctgcacagccttgttaggctattttggcattctgctggatatatgttcgtaaataccaaagtcggcggg

SEQ ID NO: 545647 - DNA, 100 bp, Homo sapiens
ggcgggaagaaggagaacctgaaggctgcgcaggaggagtatgtcaagcgagccctggtaatcaaatgcaaagcagctgtgctatgggagttaaagaaac

SEQ ID NO: 545648 - DNA, 101 bp, Homo sapiens
aaacaggccatggagggacaggatccggaggcgccagctcaaccgaatgaatctgaagtctgctgcagtaaaacacagaaggctttaaaatgttttcttgc

SEQ ID NO: 545649 - DNA, 95 bp, Homo sapiens
cgggacctcgcagctctacgtgtaccgcctcaaccgcgacgccgagaggctgacccgcggctgattgagtccctctcccagatgctgtccatggg

SEQ ID NO: 545650 - DNA, 99 bp, Homo sapiens
ctagggttctaagtgatgtccaggaaggaggaggaataatatttatggagcatatattatggaacacaaaattatggatccggatgagcaattggaaac

SEQ ID NO: 545651 - DNA, 100 bp, Homo sapiens
gtactcggaaggcgcgggcaggagcctggcgaggatgcaccttcccctgccttggaaagctcctgcccctcctaaagctgaagccaaagcgaaggcttta

SEQ ID NO: 545652 - DNA, 50 bp, Homo sapiens
gttatttgtctcaacaaaagagtaaggaaactgcccacaatgaaaataag

SEQ ID NO: 545653 - DNA, 88 bp, Homo sapiens
ggagcggctgctggaaacgcaagacggtgccgagaagcagctgcgagcaaattgtggctactaatttgccccctgaagatcaagatgg

SEQ ID NO: 545654 - DNA, 75 bp, Homo sapiens
aggaaggaacgaggcaaggagctaaagcagcgtgcgttcagccctgggggtgtcttttatgaataatcaaaagca

SEQ ID NO: 545655 - DNA, 75 bp, Homo sapiens
accggctggctgaggaaatcgcctcccgagaagaagttgaggcgctatgttccttgtggagaagcactggtataa

SEQ ID NO: 545656 - DNA, 75 bp, Homo sapiens
tcgtgcaccggggcggtccgttgccaaagccagcctttagaagaagccacactctctgaattaaaaactgtcctc

SEQ ID NO: 545657 - DNA, 101 bp, Homo sapiens
ccggacccgggcggacgagcacgaacacacggaaacttggatttaactggccagaagcaggtattcaaagcagagaacaatccctgggtgacccccattgc

SEQ ID NO: 545658 - DNA, 90 bp, Homo sapiens
aaaccacatcgtcttccctgtcccaatcggacctggctcggctgcaggagggtcggcagcctgagcaccgggacgtgaccctgcagaagg

SEQ ID NO: 545659 - DNA, 75 bp, Homo sapiens
agggtttttaatgaccacaacaagcaagcatgcagcttactgcttgaaaggtggcatgacattgccaacatgtcc

SEQ ID NO: 545660 - DNA, 49 bp, Homo sapiens
ctttacgcttgtgtgataaaactggggctctccagcagaactatctcct

SEQ ID NO: 545661 - DNA, 90 bp, Homo sapiens
cggagcgcagcacccggcggacaagcggcgggacgccaggacgcggcgagcaagactgaaaaaatgcagaccgccggggcattattcatt

SEQ ID NO: 545662 - DNA, 100 bp, Homo sapiens
cgaggcagctgtactaggactgggaacggaagctggcagggcggagatgctggaccacgccgtcctgcttcaggtgatcaaagaacagcaggtgcagcaa

SEQ ID NO: 545663 - DNA, 51 bp, Homo sapiens
agcaatgagctcccaaagccatccagctgtttggggcaacttcgttaatat

SEQ ID NO: 545664 - DNA, 74 bp, Homo sapiens
tgaagctggcggagcaggaggatgggcggtatcctggatacagccatcgttgatcgggggaggaatgtggtgtc

SEQ ID NO: 545665 - DNA, 100 bp, Homo sapiens
tgcgtcttgagcctccataagaagtggagcggcattgcccccgaatgtccagattatccctgtttttgtgaccaaagaggaagccattagtctccacgag

SEQ ID NO: 545666 - DNA, 98 bp, Homo sapiens
caggacaagtcctgcgcttggggatcctctgtacgcccgttcactgatatggtccggaaaaagaacccccctctgagaaacgttgcaagtgaaggcga

SEQ ID NO: 545667 - DNA, 88 bp, Homo sapiens
atattgtgaccacacagttctccatgagttggacagataccaaagaggtcttctcattcacaggttaaggctacctttccagataatc

SEQ ID NO: 545668 - DNA, 100 bp, Homo sapiens
acaaggagttcatgtgggccctgaaaaacggagacttggatgaggtgaaagactatgtggccaagactatgtcttcagcagtggtgcagttatatgcagc

SEQ ID NO: 545669 - DNA, 74 bp, Homo sapiens
tcacttccctgtactctcatcgctctcggcctccgacacgctgcaagctttcttcctggtggcagatgacatca

SEQ ID NO: 545670 - DNA, 75 bp, Homo sapiens
ggctggacccgagccagcgaccgaagcagaagggctggatcttcaacgtggttccttggttggtggcgattccgg

SEQ ID NO: 545671 - DNA, 100 bp, Homo sapiens
aggaattattggcatcaacttggtggagaatagaaggcaaatggatgacgatgtcgataccaagaagcagaagaccgacgaggatgactagacagcaaaa

SEQ ID NO: 545672 - DNA, 100 bp, Homo sapiens
gcaaacagcacaggccatcaaatgcagaattcacaagatccaatcccttgtccttaaaagatatgaggccccaggattcctggcgaggtcctcctcccct

SEQ ID NO: 545673 - DNA, 102 bp, Homo sapiens
tgcaatcttccaggcaatagctgaagaagaagaggaagtagccaaagagcaactaactgatgctgacaccaaagcgccatcatgaccgggtcctataacaac

SEQ ID NO: 545674 - DNA, 83 bp, Homo sapiens
agggagatcattacatcctcaatggctccaagtgcctccggagccagcgtggtggccatagacaacaagatcgaacaggccat

SEQ ID NO: 545675 - DNA, 82 bp, Homo sapiens
gcctcgcgccggctatggccgtgccctggggctgagccctcaggctgatggacgtctgtgccacatcccgaactgaccggga

SEQ ID NO: 545676 - DNA, 50 bp, Homo sapiens
cgccgtgtggcacgacacaaaaatcagggccctgaaaaaaactctcttcc

SEQ ID NO: 545677 - DNA, 74 bp, Homo sapiens
catgtacagaacatgatcaagggtgttacactgcttctcaataggtttggcatggacaagatctatgaaggcca

SEQ ID NO: 545678 - DNA, 49 bp, Homo sapiens
acgatgtcacccgcttcctcaacgaggcatgtaatgaatttactacaca

SEQ ID NO: 545679 - DNA, 98 bp, Homo sapiens
agttcttggctgcggggtgatggaacaacaactggtcaattcagctccagaacctgggtatcaacccagcaaacattggcttcagtaccctgactatg

SEQ ID NO: 545680 - DNA, 75 bp, Homo sapiens
ctccttttccctctccctttccctaaggtcagggaagtcaaagatgcatccctgagttcttcctagcaggcaagc

SEQ ID NO: 545681 - DNA, 90 bp, Homo sapiens
gatcaacaaggccacgccctacaactacccaggttggaaaagagactgttcaaaccactgaggatcagattttgaagagagatatgccac

SEQ ID NO: 545682 - DNA, 83 bp, Homo sapiens
cttggactgagtcctgcaggacacaggttcactaagaatctttccccagacaaaatcaacctgagcaccctgaaaggggaggg

SEQ ID NO: 545683 - DNA, 50 bp, Homo sapiens
cagggagctcaaagagtgggccagggaaattcaactactgaggaggttac

SEQ ID NO: 545684 - DNA, 75 bp, Homo sapiens
tgagattctgtcgtgtcgtcgctgctggcacttcaggctctgcattggttggatggtacaaaaagcatcaaaaag

SEQ ID NO: 545685 - DNA, 97 bp, Homo sapiens
caggagctggagcagctcaaagagggctgtttaacgacccccaactccccatccatgcactcacgttctcttacgctgggtccatccctctcgctgg

SEQ ID NO: 545686 - DNA, 74 bp, Homo sapiens
gggacccgcctgctgagtggacccgggtgaaagtggagaatgaggacatgaataaagaccagatcttgctggaa

SEQ ID NO: 545687 - DNA, 110 bp, Homo sapiens
gagtaactccacagcatgtgtcttcaagagcttccctaaaaggtaaaatctgtaaaaactgggtcagttttttggacaatgtgctgctgcttatcctatttctatatggt

SEQ ID NO: 545688 - DNA, 100 bp, Homo sapiens
aggaatcatgactcctggagaacggatcaagtgcttattacagggttggattgagattgttggatgtgctgatcgttcctgttatgacctctcctgtcat

SEQ ID NO: 545689 - DNA, 99 bp, Homo sapiens
atgtgccggagcagagggatagcaagtgcaaggtcaaatggacccatgaggagggaaattagccgagctgcaggaaaggctgtgcctgggatcattgat

SEQ ID NO: 545690 - DNA, 75 bp, Homo sapiens
agaagacgtccaatctgagcgtgctgcggacggcgctgcggtacatccaggttcgagaacttgtcttggacaatt

SEQ ID NO: 545691 - DNA, 82 bp, Homo sapiens
gggaaatacagcaatgacctctacgaactccagccccacaggagacaggatccgaagcaaagttgagctgactcgatacctg

SEQ ID NO: 545692 - DNA, 102 bp, Homo sapiens
actgctaagactacctttttcagaaatgcgcagagcaaacatctttcaaaggaggtcttgctggagttgctagaacaatgtgtggatggcttatggaaggca

SEQ ID NO: 545693 - DNA, 83 bp, Homo sapiens
cctggagatgattgagccgcgcacgctacagtacaagagtcttttattcaaaacttcagcgttctctatagtcccttgaaaag

SEQ ID NO: 545694 - DNA, 74 bp, Homo sapiens
aaaatacagatcccaagctaaatcccaagggtaattatgtgctggatcgagatgacctggtggaggcccaaaca

SEQ ID NO: 545695 - DNA, 90 bp, Homo sapiens
ttcatcattttctaatcatcagcatttacatgacagaaatcacctatgtttacagcgacagatgcctgtgaggagccaccaacatttgaa

SEQ ID NO: 545696 - DNA, 100 bp, Homo sapiens
aggtgagggagcgagccagcaagcggaagctgcccttcaccgcgggcgccaatggggagcagaaggactcggacacagtcaccacgttctgcgcttttcc

SEQ ID NO: 545697 - DNA, 50 bp, Homo sapiens
atcgcagaagcctacgctaccaaaggagtataatgtctcaggaaggcgat

SEQ ID NO: 545698 - DNA, 73 bp, Homo sapiens
tcgactccaaatggttgaaaacagatatacagatatttggatttgacctgcattttggaatttatctacactt

SEQ ID NO: 545699 - DNA, 74 bp, Homo sapiens
tggaaggcagacacctggtggaagaggcgtacctgttaaaggaaaaggtgcttctggaagttttgttgtggttc

SEQ ID NO: 545700 - DNA, 99 bp, Homo sapiens
tctccggggccgctggattctgaggaccagcagatggccagtcacgagaacccagcaaattgtggctactaatttgccccctgaagatcaagatggctc

SEQ ID NO: 545701 - DNA, 90 bp, Homo sapiens
gtgcagccgagtcactactgcctgcctgcctgcctgctacgagacggagtttcgtcatgttggccaggcccatttgagatctttgaagat

SEQ ID NO: 545702 - DNA, 98 bp, Homo sapiens
cggggtgaaggcgctcatggacggaagacccctggctctataagctgaattatggcagcccagtcaaggtgtggacactgccagcggctgcagccgac

SEQ ID NO: 545703 - DNA, 100 bp, Homo sapiens
cctaccacaccgtctgggactgcgacttcagcactggcaagatcggctggttcctgggaggccagttaaatgtctctgggtgaggtggctttgaccccgg

SEQ ID NO: 545704 - DNA, 75 bp, Homo sapiens
ggaaccctggtcaccgtctcctcaggtcagaatggcggcagtggagcatcgtcattcttcaggattgccctactg

SEQ ID NO: 545705 - DNA, 117 bp, Homo sapiens
cgagtccccaatgcctacgacaagacagccttggctttggagcctgaaaaggtgatggcaaagcagatggagttcctttgcaaccaagctggctatgagagactgcagcatgccgag

SEQ ID NO: 545706 - DNA, 100 bp, Homo sapiens
acttgatgacttgggttcaggaccagttggatgatgagacgttatttccatcaaaaattgatcctaattatctcatggctaatgaacgcatgaacctcat

SEQ ID NO: 545707 - DNA, 100 bp, Homo sapiens
gcttcattacagccaggaggactcttcggacggggacagagagctgatgaaggatctcgaggacctggaagaagcagaggagccagacatggaggaagac

SEQ ID NO: 545708 - DNA, 100 bp, Homo sapiens
gacagctcccacaggagtcatgcccagtgtgtgaagaccctcaaactgacacaagacctacagagaaaaccctttgccaaatctgctctcagcaagtgga

SEQ ID NO: 545709 - DNA, 132 bp, Homo sapiens
ctgcacacgagtgggactggttccaacgcgaggagctcatcgggcagattagcgacatccgagtgcagaacctgcaagacattcacggcatggtgtaactcccacctccggaaggcggggacacagatcgag

SEQ ID NO: 545710 - DNA, 106 bp, Homo sapiens
aaatgcctagaccctgcccaacagaatttatatagagatgtgatgttggagaactacagaaacctcgtctccctgggctttcagttctgaaatggcaaagaggtcc

SEQ ID NO: 545711 - DNA, 83 bp, Homo sapiens
gcaaaatcgagcgggccattgatgatatcatcaagttgaatcgaaaggaagggaagaagcagaattttccaagactaaataga

SEQ ID NO: 545712 - DNA, 114 bp, Homo sapiens
gagaggcaccgggatcgtgaccgagaccgtgaccgagagcgtgaccgagagcgcgaatatcgtcatcgttagaagccgtgttgaaatccttgtctcctgtagacccagtggaac

SEQ ID NO: 545713 - DNA, 100 bp, Homo sapiens
tgagcgacctgcgagactcacaagaggggaagctgacagagatacctacagacggagtgctgtgccacatgcacgaaggagagagagtgagaagtctcta

SEQ ID NO: 545714 - DNA, 82 bp, Homo sapiens
tcatttgggaaggaataagcctggaagaaaaagatacaacgaactagcacaacgaggagcactacaaacaccactggtttcc

SEQ ID NO: 545715 - DNA, 100 bp, Homo sapiens
gtccgagagtcttaaaatcctgctctggccggattccagactcgtgggggaaaggctgggctgtgtgcaggaaacatgaacttatgcagtatgacttgga

SEQ ID NO: 545716 - DNA, 51 bp, Homo sapiens
ctgggcggaggccgccaagacggtacctaatcatcgagaacttcatcccgc

SEQ ID NO: 545717 - DNA, 50 bp, Homo sapiens
ggctcccagctgcccacctcatagtgagctttctcttaagtgtgccaagc

SEQ ID NO: 545718 - DNA, 101 bp, Homo sapiens
caccaagtgcatcaaatacctgctgttcggatttaacttcatcttctggggatgcttgaagatggaaagaaatttgattcctcccgggacagaaacaagcc

SEQ ID NO: 545719 - DNA, 80 bp, Homo sapiens
aatatcttggctgctgtacatgacgtgcttaatgaaaggagaatagacatttcccccagtacattcagaaaacatggttt

SEQ ID NO: 545720 - DNA, 100 bp, Homo sapiens
ggggaatgggatttctgacgagtatcacgtgatccggcacgccatgaacctggaggccgtgaacacctacgaagatcgatgctatagaagacaaacaagg

SEQ ID NO: 545721 - DNA, 100 bp, Homo sapiens
cacaggacaccgaagaaaccatcacgtacacggcagaaaaggctggcatggttcatttgttggatttcctaggtatgattttcctcacaatgatttgggc

SEQ ID NO: 545722 - DNA, 90 bp, Homo sapiens
aggcagctcgctctgggagcctagaatgcatcagtgcccttgtggcgaatggggctcacgtcgaggtttgctgacatcccgacaggaaag

SEQ ID NO: 545723 - DNA, 75 bp, Homo sapiens
agcgatgtccccatccgccgccgagaggaggcctatgagaatcagacagacagtctagcagtgcttccttggaga

SEQ ID NO: 545724 - DNA, 82 bp, Homo sapiens
ggggccagggaaccctggtcaccgtctcctcagaataccctctaccatctgctttggtcagggtgccgctcgaggatttaaa

SEQ ID NO: 545725 - DNA, 100 bp, Homo sapiens
tcggtgcagggctccaccccgtcgcctcgacaggttgctgaaaagccaggagtcaaaatgactgagcgctttgactgccaccattgcaacgaatctctct

SEQ ID NO: 545726 - DNA, 82 bp, Homo sapiens
ggccttgtggggcagcttcttatgcagccagtccttgtgggtgggtcatgataactgggtacgtggagttctgttccattct

SEQ ID NO: 545727 - DNA, 98 bp, Homo sapiens
gcggctgcacaactgcaggaacaccgtcacgctgctggaggaggtgtccctggccagtgtccttccacctgtccacaagcatggggaacatcttcgcc

SEQ ID NO: 545728 - DNA, 75 bp, Homo sapiens
gtctcagggcctggaggacgggcaaaacgggtgccgtgagcgatgtggagatgcaggaacactatgatgagtttt

SEQ ID NO: 545729 - DNA, 75 bp, Homo sapiens
atcttgtgtgggcactgaagggggactacaggttcgagagccttggatggtatactgtaaattcagcatatggag

SEQ ID NO: 545730 - DNA, 74 bp, Homo sapiens
tggaggggttgttgaccaggcagaggaatctggagctgtcattttagaaggctaaagtaaataatgccagcctg

SEQ ID NO: 545731 - DNA, 98 bp, Homo sapiens
ctgctgcaccgacctcgacgtcttgcctgtgtcccacttgttcgcggcctatagagctcaagcgcccagctctgcccgaggagcccaggctgccccgt

SEQ ID NO: 545732 - DNA, 100 bp, Homo sapiens
ctagaagtcccttctgctaggacaacgaggatttctccagtgatgattctaagttagaatataacgtagatgctgcaaatggcatagttatggaaggata

SEQ ID NO: 545733 - DNA, 50 bp, Homo sapiens
gggttctggagagcggggtgtgggatgggggctccggaggtggcgcccag

SEQ ID NO: 545734 - DNA, 50 bp, Homo sapiens
ggaccatcttgcctggagcaagaaaactacccctgagtgtggtcccacag

SEQ ID NO: 545735 - DNA, 100 bp, Homo sapiens
cgagctgtttctcatctttatactcttccagagctgcggtgcaaccctgggcagtttgcgtgtcgcagcggcaccatccagtgcatccccctcccctggc

SEQ ID NO: 545736 - DNA, 80 bp, Homo sapiens
atatttaagtacaatggtgggcttaattttagatatctagatgatctcaatgaaggggtttatattcagcaaaccttaga

SEQ ID NO: 545737 - DNA, 98 bp, Homo sapiens
gctttttgcagtgttttataccctcggcaatcttgctgcgttagccagcacctgtgagaatatgaacttctcttggaggaatgaatgcaaccagtgta

SEQ ID NO: 545738 - DNA, 88 bp, Homo sapiens
caaaatgtctactgttcacgaaatcctgtgcaagctcagcttggagggtgatgattaacctccatttcagctaatcatgggagagatt

SEQ ID NO: 545739 - DNA, 83 bp, Homo sapiens
aaaatagcctttgccatcactgccattaagatttcaggtatgctgctgaaagtgggaatcctctacattggtgggcagctggt

SEQ ID NO: 545740 - DNA, 50 bp, Homo sapiens
ctgagacggcggcagcagcggcattcagatcccaagcactgcaagtccag

SEQ ID NO: 545741 - DNA, 82 bp, Homo sapiens
cgtaaaggctggcagcctccccgggtgcctccgcgcaagggcaagtattttgtaaccttcccatatccatatatgaatggac

SEQ ID NO: 545742 - DNA, 87 bp, Homo sapiens
accaacagatgaagacagatgcaccaacgagcatcgagagtaaacatgaggttacgatcctgggaggacttaatgaatttgtagtga

SEQ ID NO: 545743 - DNA, 100 bp, Homo sapiens
tcactgcggcctcaaactcctgggctcaagtgatcctcctgcctcagcctcccgagtacctgagattagcccagtggtgaaatagggccttctaaacctg

SEQ ID NO: 545744 - DNA, 100 bp, Homo sapiens
caggttatcatggattcccagcgcgggacagccagtgcaggccaaggccccctgcccatggaggtgtgctgcagacagcagcagcagcagcagcagcagc

SEQ ID NO: 545745 - DNA, 75 bp, Homo sapiens
gtgccatggagacgcttaacgagtcataaacattctaagtgcatacggccatttcttccttatttcaatgtgtca

SEQ ID NO: 545746 - DNA, 75 bp, Homo sapiens
ggaggaagaggaggagggcgactgtatgatcgtggatgtcccggatgctgcggggaactgcagcccggagttaaa

SEQ ID NO: 545747 - DNA, 74 bp, Homo sapiens
taatgatggacaagtacccaggcattaggcagggagatcttgtgcgaaaactcaaagaagataaagcaccccaa

SEQ ID NO: 545748 - DNA, 80 bp, Homo sapiens
attaacctgccgccgcccctcaccagacagatcgctgtcaaaaccctagatcattcctggacccccgagggcctctgagt

SEQ ID NO: 545749 - DNA, 100 bp, Homo sapiens
attggatttcccacccagaatctttaggtaaatgagagttttgccgaattgacaagcccctgtgtcacagtgaggatgagaaactcagcttcgaggcagt

SEQ ID NO: 545750 - DNA, 82 bp, Homo sapiens
cagaatgcctatgaccggcgtcgagaatttcaactggtgtgttccagagaacaagccttcagacatttgctatattgacgct

SEQ ID NO: 545751 - DNA, 90 bp, Homo sapiens
cgcgagatcctaggggaccaggacttcttccagtggagctcttgtccctggcaaagcgaaagcgcagtgactctgaggagaaggagccgc

SEQ ID NO: 545752 - DNA, 97 bp, Homo sapiens
gtgtgcctcatccttctcattgctgtgctcgtttactggaggaagatctgcctgcactgcaagtgtccccaggaggagcacatggtgacagtgatgc

SEQ ID NO: 545753 - DNA, 73 bp, Homo sapiens
aaatggcacttcattggccacctacagaaacaaaatgtcaacaaattgatggattccattggccgtgacatcc

SEQ ID NO: 545754 - DNA, 100 bp, Homo sapiens
taaacctggtagaatgtgactacttcgggatggagtttcaaaatactcagtcctactggctgtcacaagatgaaggtagaggcacattatacaaatacag

SEQ ID NO: 545755 - DNA, 78 bp, Homo sapiens
gaagaggacgaggtcattgacgaggtatgtgagactctgtgaagtagtcgaccacgttttcccgttgctgaaaagaag

SEQ ID NO: 545756 - DNA, 100 bp, Homo sapiens
acagattattattgcaacaaagatttggagcaagaggtggtggtggccttcccccgaagaaatttggtaatcctggggagcgtttgcgtaaaaaaaagtg

SEQ ID NO: 545757 - DNA, 100 bp, Homo sapiens
gcagccaagctcgtagcctgccactccgtgcgcgccctggcaaatccaggagacagctccgcccagcagctggccccaggtgggccgagtggaattccgg

SEQ ID NO: 545758 - DNA, 100 bp, Homo sapiens
gattttgtaatggaagggcatggcaagactccacctcctggtgaagaaagcaaacaatgggaatgatgaacaaccccaatccttatggttcaccatatac

SEQ ID NO: 545759 - DNA, 100 bp, Homo sapiens
atttgaacttctgaattatacaccagcagattatggtgaaatgacaatggatgctctgttggctcgattgaaacttctgaatccagatgaccttagagaa

SEQ ID NO: 545760 - DNA, 82 bp, Homo sapiens
cagatatagccgttggtacaaagggcgtgatggtgggcatgggtcagaaggattcctatgtgggcgacgaggcccagagcaa

SEQ ID NO: 545761 - DNA, 100 bp, Homo sapiens
gaagaaaacaaagatgatgataatgttttcagcagcaatttgccctcagaggtgactctcctattccatctgtttcttcgggatcatcttcacctctttc

SEQ ID NO: 545762 - DNA, 50 bp, Homo sapiens
gcttctttgagactgaaatggcagggtcctccaccagcagcctggcccca

SEQ ID NO: 545763 - DNA, 49 bp, Homo sapiens
gcgagagggagccgcagctgatgtcagtaccccaaggagataactctgg

SEQ ID NO: 545764 - DNA, 101 bp, Homo sapiens
gctggtcagcgggcccgggaccaccctccggtgaagatagtgatccggggagacaggaacacgggcaagacagcgctgtggcaccgcctgcagggccggcc

SEQ ID NO: 545765 - DNA, 98 bp, Homo sapiens
aatacgtcttcagtggttctcgtctcaaactctatttgccaaaggaaacttgccttatcaccttcttgcttgcagtttatatcctggaacctggagat

SEQ ID NO: 545766 - DNA, 98 bp, Homo sapiens
atgaaacaagtaatcttatatggtgtgattctgctgttcagcaggagaaaatttcagagctgcaaaattatcagatgtgggcgctatctccaactgtc

SEQ ID NO: 545767 - DNA, 80 bp, Homo sapiens
cggtcccgcgctgcgcatccccgcggacgccacagcgctgatgatgaagataaactgacctggaaggatcgtttcccagg

SEQ ID NO: 545768 - DNA, 100 bp, Homo sapiens
agctggagagaatccagtttgttggggcttgtaatccccccacagaccctggaagaaagcccctctcacacaggttcatctcagaagaagttgttggcac

SEQ ID NO: 545769 - DNA, 100 bp, Homo sapiens
gagaaagccagttatccacggactggaagatcaaaagaggtttatgatgtctctggagcagcaagtgacagaaattgtgtggttctcagtgatattcaca

SEQ ID NO: 545770 - DNA, 100 bp, Homo sapiens
caggattggccagccacctctctcaactgtatagctatcctctttttaagggctgggagaactcaggaagcctgctcaaatcccagccttctatatggac

SEQ ID NO: 545771 - DNA, 96 bp, Homo sapiens
cggaagctggttttcaggccacaaatgctttcacaggtctgacggtaactgctgtaaaagactcaggagaatggaatttggaggctggggcattag

SEQ ID NO: 545772 - DNA, 75 bp, Homo sapiens
gccatggaagatgcccagaccctgaggaaggccatgaaagggctcggtatatttgcttacttaaactaccatgtt

SEQ ID NO: 545773 - DNA, 74 bp, Homo sapiens
gatctgccatattgccttcggaggatacatgatccataatgagatggcatcaacatcagataaaggtgcccaag

SEQ ID NO: 545774 - DNA, 74 bp, Homo sapiens
gcgaggcagctgtactaggactgggaacggttgatattcactgatggactccaaagaatcattaactcctggta

SEQ ID NO: 545775 - DNA, 82 bp, Homo sapiens
ccgggcgctcgagacttaccagagccacaagggtggcccagttgaaatccttcccttcctctaccttggaagtgcctaccat

SEQ ID NO: 545776 - DNA, 87 bp, Homo sapiens
gaagactaaagaaggctggggcttcatgccctatttgcaagaaagagattcagctggaatatgttctgtctcacacggagatgccag

SEQ ID NO: 545777 - DNA, 90 bp, Homo sapiens
cattctacagcacactcagactcaagatctgcaagttttcctaaaagagagtccatcccgatccggctcttcctggccgggtatgagctc

SEQ ID NO: 545778 - DNA, 88 bp, Homo sapiens
ggcgtctacaagagcgattgctacacatggacagtgatgatgaaattcctatcaggcaaatgaagaggattcttccagttctctagtg

SEQ ID NO: 545779 - DNA, 100 bp, Homo sapiens
ccaagtcctatgagctcatccggaagattgaggcctacatggaagacacgatgaggcgagtggtacgacagagcaagtttcggcatgtatttgggcaagc

SEQ ID NO: 545780 - DNA, 92 bp, Homo sapiens
gccgagaggccgtgcgggacgcgggcgccaggaccggccgaacgcagagctcaccatggatgatgatatcgccgcgctcgtcgtcgacaacg

SEQ ID NO: 545781 - DNA, 74 bp, Homo sapiens
ttttgaagacaatcgtcacttatacaggcatccagcaagatgaggacatctatgaggaaggaaactatgaggag

SEQ ID NO: 545782 - DNA, 111 bp, Homo sapiens
cagcttctgcagaaaaatgttagagctcagttggttgatatgaaacgactggaggatggacagtgattcagaaccgtcaagacggtagtgttgactttggcaggaaatggg

SEQ ID NO: 545783 - DNA, 82 bp, Homo sapiens
attcgatggacatggacatgagccccctgaggccccagaactatcttttcggaaccttttgaggatggctttgcaaatgggg

SEQ ID NO: 545784 - DNA, 90 bp, Homo sapiens
caccacctcccagattacccccacacaaacctgttgccttaggtcacgagaagagaatgccttctagatgcaaaatcacctccaaaccag

SEQ ID NO: 545785 - DNA, 101 bp, Homo sapiens
ctggaacctgaagtatctcatgaaggaaagtgatgaagcattgggcccaacaatgatgagttggaatgcagttgaaaagttatgcgcaaaatctgcaaatg

SEQ ID NO: 545786 - DNA, 75 bp, Homo sapiens
gcatctgctcagactacttctcatgaactcaccattccaaacgatcggctgcatttcaacaaggaaagatacctc

SEQ ID NO: 545787 - DNA, 75 bp, Homo sapiens
ctaacgacaggcgcctccggcccatttacgacatccgggaactgatcgaggtggatgatgtaatggaggatgatt

SEQ ID NO: 545788 - DNA, 100 bp, Homo sapiens
cgcgttacgggcggtacggaggagcaagagtgagccatggagctacgtgtggggaacaagtaccgcctgggacggaagatcgggagcgggtccttcggag

SEQ ID NO: 545789 - DNA, 83 bp, Homo sapiens
aggcggaaaaggacgcaaagttctccggcgaggtggcagtagagaagagcatcacagaagttgctcaggagctgacagagctg

SEQ ID NO: 545790 - DNA, 98 bp, Homo sapiens
gagaataacggctgcacctggagattgacgcagagtgggcggcggtggtggtccaatgatgcatcagcagcctccttctcagcaatacaatatgccac

SEQ ID NO: 545791 - DNA, 88 bp, Homo sapiens
ggactgctggagatggtggagtccgtcaatgctattaactgagtacttggatatgaaaaatactcgtacggcctctgaaccatcagct

SEQ ID NO: 545792 - DNA, 75 bp, Homo sapiens
tccgaaggggacggacgtcctcccacgtaccatttagaaggtgatgtgccttcaggacttttttggtgatgatga

SEQ ID NO: 545793 - DNA, 50 bp, Homo sapiens
gaagccgaaagtgttccagattctcagttggctgctgtgtatggcagggc

SEQ ID NO: 545794 - DNA, 100 bp, Homo sapiens
gctaatttccaatgttccataagcgtggcaagaaaaatgggaagttctcgtttttcagaagaagtgaagtcaagatgaagaaccatttgcttttctgggg

SEQ ID NO: 545795 - DNA, 75 bp, Homo sapiens
cagattggaaaatgttactacaggttgagacggaagctagaaaaaaatgtttctgtgatgacgatgatcttcaag

SEQ ID NO: 545796 - DNA, 98 bp, Homo sapiens
ggaaaggaaccgttctggatcagggttttggccaaattgggcgagggcacaaaataaccacttaccccttctcaccgaggaagagcgggagaaagggt

SEQ ID NO: 545797 - DNA, 50 bp, Homo sapiens
cctccctcaccttggacacctcgcttggttcgtgccctcgtgaggctggc

SEQ ID NO: 545798 - DNA, 87 bp, Homo sapiens
aagctgctgccgccccttgggctaaaagcaatgcagcaagtcttggaaaaccttacggagctgccctcgtctactggagcagaagaa

SEQ ID NO: 545799 - DNA, 88 bp, Homo sapiens
tggagacaattcctggttcagaatttaaacatctttctagtattctaccttgtaaatactgttatttgtatatactgtaaatgatgac

SEQ ID NO: 545800 - DNA, 75 bp, Homo sapiens
gtctgagagagggaagtcgcctctgtgctcgcctccggtgtggctgtctctgatggtgtcatcaaggtgttcaac

SEQ ID NO: 545801 - DNA, 100 bp, Homo sapiens
acccctgcaccatgctgctttgaatggccataactcctggaatgaggccgcccatgggaggccatatgccaatgatgcctgggcccccaatgatgagacc

SEQ ID NO: 545802 - DNA, 100 bp, Homo sapiens
agaaggcttatgaggatggctgcaagactgtcgacctaaagcctgactggggcaagactgttggcaagagtagcaagatgctgcagcacattgactatag

SEQ ID NO: 545803 - DNA, 96 bp, Homo sapiens
ggagcgtctctccgccactgcgcacattttgcagcctgcaccggccaacggtatgttctcctacgtcatgctggccagcagccctctcttctgctc

SEQ ID NO: 545804 - DNA, 78 bp, Homo sapiens
ggtatgagagtggataatataatcaactcctctgcctgtgttgctaacaaccacaagcagaatttgatgacggtggca

SEQ ID NO: 545805 - DNA, 99 bp, Homo sapiens
gatccttgtgggcatgatccataatcggtttcaagtctcgtccctgcagagctcccctgacttctctgcattccccaagctggagcagccagaggagga

SEQ ID NO: 545806 - DNA, 100 bp, Homo sapiens
aagccaaaaatactggacagagaggcctgaaaatgtgacaggatcatgaatgtcaaaggctaaatttattgtgaagaaatcagaagatgaagaagacgcc

SEQ ID NO: 545807 - DNA, 75 bp, Homo sapiens
atcagtgatgggactgagtactggattgtccggaattcatggggtgaaccatggattgactttgaagatgtgatt

SEQ ID NO: 545808 - DNA, 75 bp, Homo sapiens
atgaaaagtctgttaaaaatctttgcgaatctggcaatgggggcaggagctgttggagctttgcagctgacctac

SEQ ID NO: 545809 - DNA, 100 bp, Homo sapiens
atttaaccagcatggctacttcatattttggaaagcagtttttaagacaagtccctctaaatgatatgtttggttattccactgaacttaggtcatgcac

SEQ ID NO: 545810 - DNA, 85 bp, Homo sapiens
atcggggagcgtccggagctagctggatcctctaggcagattgctcgctgtaagcagctcatctgtgaccccagctacgtaaaag

SEQ ID NO: 545811 - DNA, 98 bp, Homo sapiens
atcgtgaaggttgaagtctgggatgtagtagacaaagtgcaagagaagcctgagccagtgccgctggagagccgctcctgcgtcctcatccgccgcga

SEQ ID NO: 545812 - DNA, 82 bp, Homo sapiens
attgacgccatgtcgggttattcgagtgaccgagaccgcggccgggaccgagggcatctgcatctgggaccgacctcctggg

SEQ ID NO: 545813 - DNA, 100 bp, Homo sapiens
ctgatgggaagggaactggaatatctagaggaggtacctccaggaaatgtgctagattgatgaactcccagagggcgctgtgaagcctccagcaaacaag

SEQ ID NO: 545814 - DNA, 90 bp, Homo sapiens
agcagcggcagccccgactctcagcactgtcctttgatgtgggccacagctttcccatcactgggatccagtactccgtgggagccttgt

SEQ ID NO: 545815 - DNA, 90 bp, Homo sapiens
tgaaatctggagtgaagaacgccgccatccagccaccattccaaggaggtgaaacagcagaaatgcctgacatgtatccccctggagagt

SEQ ID NO: 545816 - DNA, 100 bp, Homo sapiens
tggacttttgcttcatgtgtcctggaaactgggctgggtagagatcaacagcagttcaagggtttgtaccagttgctggagccccgaatgattgttcgtt

SEQ ID NO: 545817 - DNA, 82 bp, Homo sapiens
tatctgcgaacacagtagtggaagatgtaaagcaatatttcgagcagtttggcaagaaaccaaggtgtatgttggtaacctg

SEQ ID NO: 545818 - DNA, 74 bp, Homo sapiens
ctgcgcgctgccctagggcccggccgacccgcggcccgatacgtaggtaacctttccagagatgtgacagaagt

SEQ ID NO: 545819 - DNA, 80 bp, Homo sapiens
cgccgttccagccctcgcccgatgcacggggagtgcatccgccccaacccttttccccctcgtctcctgtgagaattccc

SEQ ID NO: 545820 - DNA, 83 bp, Homo sapiens
ctcggctgcagacttggccaaatggacgggactattaagcaaaatgatgcttcaacacccaggccaggtctctgcctcggaag

SEQ ID NO: 545821 - DNA, 74 bp, Homo sapiens
gttgctcttctccgccgcggcactgatccccacagaacccagcgggtgccgcttctccacccgaggcttccacc

SEQ ID NO: 545822 - DNA, 75 bp, Homo sapiens
attctttgtgactcctcgatcttcagttgaggtctgtgctgccaacatagtctcacaagatggtgaacagaatgg

SEQ ID NO: 545823 - DNA, 75 bp, Homo sapiens
gaggaacccacatcccccataggtcactgtgtggccatctaccactttgaaggaatcttttgggtgagttgtgag

SEQ ID NO: 545824 - DNA, 96 bp, Homo sapiens
cacctcctatgagagatacgattgctacaaggtggcagtgctccttttggacttttctctaggtttggcgctaaactcttcttgtgagctcactcc

SEQ ID NO: 545825 - DNA, 80 bp, Homo sapiens
acccacggagcctccggggctggaactgtggctgcaccatctgtcttcatcttcccgccatctgatgagcagttgaaatc

SEQ ID NO: 545826 - DNA, 107 bp, Homo sapiens
tccggactcagccaagttccccaacggctccccgtcgtcctggtgctgcagcggtcaacaccttcatgtccttcatattccccatggtggtcatctcggtcctgaac

SEQ ID NO: 545827 - DNA, 98 bp, Homo sapiens
ggtgggccccagccccacagaccagcccagcattcaggggctaagtgatggatcttgtactccgtgttgcagattactatttttttacaccatacgtg

SEQ ID NO: 545828 - DNA, 100 bp, Homo sapiens
tctacctgtggctctttctgctgggcctgcccttcaccctctacatgctgtggcggggccttcgtgggcccgcgatgccaggaccccaacccgtgcctca

SEQ ID NO: 545829 - DNA, 98 bp, Homo sapiens
tcagctgttgtggaaaagggccccagcgtcctcttgtcaccgacagggcgattgcagtgcgttccgaactgctggaactgtggccgcaaagccagcga

SEQ ID NO: 545830 - DNA, 83 bp, Homo sapiens
ttgcactccttagatacgcacaagccaaaacctttggggcaacttcagagtggacgttggattacccccctttctttgcatgg

SEQ ID NO: 545831 - DNA, 100 bp, Homo sapiens
ggccgaggcgggcggatcacgagagcctttgcactggcgatgccatctgctgcctggatgtcttcctgctggctggtcccgttgcatggtagccttaggt

SEQ ID NO: 545832 - DNA, 76 bp, Homo sapiens
ccgcttctcccgcttcaacgaagaccgagactttcaggtggaatgaatcttacttgttgaatatcttctggttact

SEQ ID NO: 545833 - DNA, 100 bp, Homo sapiens
gggagattcagccgtgaagcaagtgcagatagatggcctttttgcagttaacatgtttcgaacattaccaccttcctccaatcctacgggagcggaattt

SEQ ID NO: 545834 - DNA, 88 bp, Homo sapiens
caaataaccgttttgaaattgtccaggagagcctcagattattttttgtagaagtgaagctgcacatcaaggagtaattacctggaat

SEQ ID NO: 545835 - DNA, 87 bp, Homo sapiens
gcgtgcgattcttccagcagatatgaagacagcgtggacgatgaatttgaattgtccaccgtgtgtcaccggcctgagggtctggag

SEQ ID NO: 545836 - DNA, 74 bp, Homo sapiens
gagcttcttcccagctgtgaacaggagggcctgttccctaattcttgccgaaaaatggctacaaacttcctagc

SEQ ID NO: 545837 - DNA, 51 bp, Homo sapiens
agcagatggccagtcacgagaacccagctacgagttccagggagctctgtc

SEQ ID NO: 545838 - DNA, 90 bp, Homo sapiens
acgaaagtgtcaaggcattacggctcccattgagagctgaaggccacaggcaccgcccacttcttcaacttcctgctcaacacaaccgac

SEQ ID NO: 545839 - DNA, 98 bp, Homo sapiens
gcaggagcatctggagttccgcctgccggttcctatatgatagtggactcttcagatcacgaccctggagaaaaagccagacttcagctgcctacaat

SEQ ID NO: 545840 - DNA, 100 bp, Homo sapiens
acaagccttcaaatttaggagagtacagagccttattttagatctcaactgctagaactgccacctgaggagtcattgccgctgggaccgctgcttggcg

SEQ ID NO: 545841 - DNA, 74 bp, Homo sapiens
gccagctgctatttgatagaccaatgcacgtcaagatgttccgccatggagtcatagttgcagctgactccagg

SEQ ID NO: 545842 - DNA, 80 bp, Homo sapiens
gatgtaaagcctcatcctaggaaggagcaagcccctctgcaagaacaatgagatggtggagctacagagaatacggatga

SEQ ID NO: 545843 - DNA, 96 bp, Homo sapiens
ttaagcattcagacgaagccctgaaaatcctagggggtgttggactcttctttagctttacagagatgccgtgtgaagggaggactcagatgcact

SEQ ID NO: 545844 - DNA, 75 bp, Homo sapiens
cacactgcagaactgggttctggactttgggcgtcccattgccatggccataggaaaaggatacagagtagagtt

SEQ ID NO: 545845 - DNA, 100 bp, Homo sapiens
acgtctggactctagggaccctgctgaatagctggggctacaggcgtgtgtcactgcgcccagagagacaagagagacacctccaacttcgacaaagagt

SEQ ID NO: 545846 - DNA, 82 bp, Homo sapiens
cgtggggctcatcgtgatcccggcgacatactacctctggccccgagatcagaatgccggttattggagtgatgagtaaaga

SEQ ID NO: 545847 - DNA, 101 bp, Homo sapiens
cagcgccttcctcaacgacgcggacatggtcatgagctttgtgaacctggcttccccgggcgctgcctggacaggcctgcctgcgtgctgggacatgtctg

SEQ ID NO: 545848 - DNA, 50 bp, Homo sapiens
ggatctcttacggaaagtaggggagcccaggatgtgcgagttcaagtgct

SEQ ID NO: 545849 - DNA, 90 bp, Homo sapiens
attggatttgccagggcatgtagctctccaggcttgcaagcgattaccagtactatactggcaattgctggagaagattttgcaattgtt

SEQ ID NO: 545850 - DNA, 76 bp, Homo sapiens
tcatgctggggaaggttctgaccagtagagcactcataacagatggtgctggagaatctggtaaaagcaccattgt

SEQ ID NO: 545851 - DNA, 76 bp, Homo sapiens
ctgggttgtcagctgttcctcaaagcttctcgccatctctgagggggatagttcctatgtgaaagatcgctggtgt

SEQ ID NO: 545852 - DNA, 75 bp, Homo sapiens
gatgcccttgtggaacgtgctggggtttgcactggacttgttcgctgatatctaaattaagaagttggttcttga

SEQ ID NO: 545853 - DNA, 102 bp, Homo sapiens
tccccagctctgcagccacatactatccgtttgttcaggaaccaccagtgacagagattacttccttaggatagattgccagaagtggagttactgggtcag

SEQ ID NO: 545854 - DNA, 88 bp, Homo sapiens
attttatgtcttggaatttttggaagaaattaacccagctagccaaactaatatgaatgaccttgagagacgtcgggcagagcgggcc

SEQ ID NO: 545855 - DNA, 138 bp, Homo sapiens
ctctgtgtcaagcctgacgtccacgtctaccgcatccctccgcgggctaccaaccgtggctacagcccaagagttccatggcctccacttcccgccgccaacgccgagaacgtcgctttcgtcgttacttgtctgcag

SEQ ID NO: 545856 - DNA, 74 bp, Homo sapiens
gccgcagtgccacttcgacatcgagatcaaccgggagccgggcggcttcaatgatccatcctaaagaggtgccc

SEQ ID NO: 545857 - DNA, 83 bp, Homo sapiens
gcccctgttgcgatggcgcagaaaccccgttgacaaggcactgctttttcatgacggtgtccctacctgcaccggacgacggg

SEQ ID NO: 545858 - DNA, 100 bp, Homo sapiens
gtcatctcctagcggcctggcgccgaggcggcggtacgcaaggctggagccgcagcgggagcccccggtggctttttctcaagtatattttccagtctgt

SEQ ID NO: 545859 - DNA, 96 bp, Homo sapiens
gaaatcctcattgagggcaagaactttatccccaggatctaaaccagtgctggacaatagatgctcagcactacctggcagcaccatctaaacctg

SEQ ID NO: 545860 - DNA, 97 bp, Homo sapiens
cctaggtcttgtcctgggcaccacggggactcggagacaggctggacaacgttcatggctctcgggtagaacctagtgaaacggccagaatgaattc

SEQ ID NO: 545861 - DNA, 140 bp, Homo sapiens
tgtcgctggagcacaaaagagtctccgcggtggaggtctgcgttgctcttgcttttcctcgctggggtgtacgcagtagccatcctaatggatatgggttggttcctgttttctatttggaactttaaaaaaaattaaag

SEQ ID NO: 545862 - DNA, 50 bp, Homo sapiens
ccgccgctctgaggagttaaagattgtgctacgatgcatttacagagaac

SEQ ID NO: 545863 - DNA, 101 bp, Homo sapiens
agatattatgaatacaaccatgatctcttccaaagaatgccacagaatcaggggaggcatgcttcaggagcagttggacatcatggagacaacttagtaga

SEQ ID NO: 545864 - DNA, 75 bp, Homo sapiens
cgactccttaacaggatctacgataagactggtgtcgttcagtatttctacattgaagactggcaattcgttaat

SEQ ID NO: 545865 - DNA, 83 bp, Homo sapiens
cgccgggacacctggaagccgagaaatggttctgtacagagtaatgagatgtgtgacggctgcaaaccaggtgtttttttctg

SEQ ID NO: 545866 - DNA, 90 bp, Homo sapiens
ggggaaggtgcctcgcaagctcattgtggcaggaaaatattccaaggaatttttcaccaaaaaagacgctctatgggatttactacaagt

SEQ ID NO: 545867 - DNA, 96 bp, Homo sapiens
ttgttctcaccgatcttcttgtgtcaccatgctattatgcatagaaaggacacagcattgttggttttgccatgtactattttacctatgacccgt

SEQ ID NO: 545868 - DNA, 75 bp, Homo sapiens
ggccgctggtgatctccggtagcactcgggccggcggacagtgagggcgcggaggcctcagcggggcaacagtca

SEQ ID NO: 545869 - DNA, 100 bp, Homo sapiens
agttgatgaatcaagaggaatgcacatctgtgaagatgctgtaaaaagattgaaagctcccgaagatccctgttttgcatctcaaaaccgtgtgtacaat

SEQ ID NO: 545870 - DNA, 60 bp, Homo sapiens
gattctctctgaaagtatgaagcaggatttgcagatttacagaatggctgcacattaatg

SEQ ID NO: 545871 - DNA, 88 bp, Homo sapiens
aaccattgaaaaatttgagaaggaggctgctgagcaacttgtagagacagtttcatgtggaggaaatcttttgatgaatattgggccc

SEQ ID NO: 545872 - DNA, 145 bp, Homo sapiens
acacagaccccacccccgccctgcgccagccttcgtccccgcagaggaccccccgacaccagcatggactgctgcaccgtgctggagaatctggtaaaagcaccattgtgaagcagatgaggatcctgcatgttaatgggtttaa

SEQ ID NO: 545873 - DNA, 75 bp, Homo sapiens
ttcggactgcgcaacgctgcgctctgggctgacaggctatggatgaaatgaatggcaaagaaatagaaggggaag

SEQ ID NO: 545874 - DNA, 100 bp, Homo sapiens
atgtgtcagacctgccttggtgtctgtgctgagcataaaggtggagcacagtgaaagaattcaagatgccacctaatataaactggaaagaaataatgaa

SEQ ID NO: 545875 - DNA, 83 bp, Homo sapiens
gcagccaaccatgctcaacttcggtgcctctctccagcagactgcggtgcatggctgcctcctaatcccatagtccagaggag

SEQ ID NO: 545876 - DNA, 90 bp, Homo sapiens
tttctacacaacaaaacattcatggagggggaaggcccacagcctgtcacccacagatcaccaagcagctttctacctggctctgcagct

SEQ ID NO: 545877 - DNA, 74 bp, Homo sapiens
gaagctaaggccgcgttggggtgagaccctcacttcatccggtgcaagcggtcttctctgtcttctttatggcc

SEQ ID NO: 545878 - DNA, 56 bp, Homo sapiens
tcgcggaccatgggcgacaaagggacccggggttccagaaactttagcagttgcag

SEQ ID NO: 545879 - DNA, 100 bp, Homo sapiens
ccagccagccaagtgacgctgacattaaggaccagccagaaaatggctgacgtgatggcagacagggttccccgctgcccggtctgcaccggcgttgtga

SEQ ID NO: 545880 - DNA, 100 bp, Homo sapiens
cccacagccagcccctgcccaggagccagcgcatgacgtatcccagactttactcaaggcaacactggacagtgttgtagaagaatgtgtcagctttgtg

SEQ ID NO: 545881 - DNA, 82 bp, Homo sapiens
ggaaaagctggaagaaaaaatcatggatcaatacaagttctatgatcctcctccaaagaaaatctacctgttactcgtattt

SEQ ID NO: 545882 - DNA, 98 bp, Homo sapiens
caggctggcgctgcgatggtgacgcggactgtgatgaccagtctgatgagcgcaactgcaaatgcctcggctggggtggagcgcctcttgctggggaa

SEQ ID NO: 545883 - DNA, 100 bp, Homo sapiens
cttagcagcgcgcggagaagaacggggagccaggcccacctgccgtttgctgtcattggcagcacagaagaactgaagataggcaacaagatgatgaggg

SEQ ID NO: 545884 - DNA, 100 bp, Homo sapiens
cagacatggacaccaaacatttcctgccgctcggtgtcatggagaaactccagctgggcccagagattctgcagcgggaaaatccaaggcttatttatgc

SEQ ID NO: 545885 - DNA, 75 bp, Homo sapiens
ggagcatcccaggacctaccagaatctgatcttttagagaaatctcgggttgttaaacagccaagaggtgaaaga

SEQ ID NO: 545886 - DNA, 137 bp, Homo sapiens
cggcattccagaacctccagagcccaagcgcaagaagcagtttgatgccggcactgtagctgaaggccacaggcaccgcccacttcttcaacttcctgctcaacacaaccgactaccgaatcttgctcaaggacgag

SEQ ID NO: 545887 - DNA, 100 bp, Homo sapiens
tccatttggggaccagagatggacggtcactcagcctatggagcatgattccacctttccactgatagactcaagttcccagaaccagattagaaaacgc

SEQ ID NO: 545888 - DNA, 90 bp, Homo sapiens
gagtgagatcggttgctggaaaactctccgtctttgctaatggagtcgtgacttcaattcagggaggaatgatcaattggaatcgtcttt

SEQ ID NO: 545889 - DNA, 75 bp, Homo sapiens
tatgtttccacatcggtcagaaaaagatgattcaggagcagttccagaaaaatcccgacagttacaatggtgctg

SEQ ID NO: 545890 - DNA, 50 bp, Homo sapiens
gtgcagggaagcaactgcagagtctattatcctcccagtccacaacgctg

SEQ ID NO: 545891 - DNA, 90 bp, Homo sapiens
catccgtctcaagactgtgaaaccagggtaaagttctttacaaagttcgctggaaaggctatacatcggatgatgatacctgggagcccg

SEQ ID NO: 545892 - DNA, 101 bp, Homo sapiens
agtttggattttcactggacttccacaaggacagccatgggagtgctgttccctcgtcacaccaatgccagtgctcgagacaacaccatcaacctgatcca

SEQ ID NO: 545893 - DNA, 107 bp, Homo sapiens
aaaaagacagtgacgacaaaacaccagatgatgaccctgagcaaggaaaatctgagggaaaagaagatatgcttcttaaacaaggtcagatgtatatggcagactca

SEQ ID NO: 545894 - DNA, 121 bp, Homo sapiens
catctgcgatggacagaataactgtcaagacaacagtgatgaggaaagctgtgaaagttctcaaggagaccaagacacattccaccccagtggggggtcccataccactcatggatctgaa

SEQ ID NO: 545895 - DNA, 50 bp, Homo sapiens
gacgtcaatggaaaagtggttctttggtcgcatcctgagtctcagctggc

SEQ ID NO: 545896 - DNA, 90 bp, Homo sapiens
gccaagtgccatcttcaaaatttcaggtcttaaatctggctttgatgaactaggtggacttctcaaaccaacagtggcctctcagaacca

SEQ ID NO: 545897 - DNA, 80 bp, Homo sapiens
gagtgggagcaccaggatctcgggctcggaacgagactgcacggaacttgtaatagctggcatcgttgagaatgaatgga

SEQ ID NO: 545898 - DNA, 83 bp, Homo sapiens
tgtgctttaagagccctgcagaaaaaaccaagatcactccatggatgaaatgacagctgtggtgaaaattgaaaaaggagttg

SEQ ID NO: 545899 - DNA, 75 bp, Homo sapiens
acttggggaaaacaaggtggacccgggaagagggctttgttcgcgggggtcacagctctcatggctgcagctagc

SEQ ID NO: 545900 - DNA, 96 bp, Homo sapiens
gagagggggaaaagcgagcgatcgagcgagcgcgcgcgcgaaaactccgggcagcaatggctgccatccggaagaaactggtgattgttggtgatg

SEQ ID NO: 545901 - DNA, 100 bp, Homo sapiens
tcgtagcgcagaaagtgaagctgtttcgggccagcgacccgctgctcagcgtcctcatgtggggggtaaaccactcgggaagcacactgagaaagcggaa

SEQ ID NO: 545902 - DNA, 100 bp, Homo sapiens
tctccgtgtggatctggcagtcggtcatccacctgctgcagatggggcaggtgtggagacttaattcagtgcacaaatgagatgaatgtgaacatcccac

SEQ ID NO: 545903 - DNA, 75 bp, Homo sapiens
aaacgaaagcaactggagctcaggtggtcgttctcgttaccggaccacttcttcagccaacaatcccaatctgat

SEQ ID NO: 545904 - DNA, 97 bp, Homo sapiens
tgaagatggcaccctctaccgaataaacaggcaagaggaggaacgacgtagaagagaggaagagatgatgattcgtcaacgtgagatggaagaacaa

SEQ ID NO: 545905 - DNA, 82 bp, Homo sapiens
tctttctgttcaggccagaccctctgggagcttctcagccattttccacagatcagatctggtggctggacccagagctgac

SEQ ID NO: 545906 - DNA, 103 bp, Homo sapiens
cagtgccagagtgtatgcactttactacaaagatggacttctctgtacagttcctgggcttcccgatggactcgagtttttactatgtgagcatcccggtgcc

SEQ ID NO: 545907 - DNA, 100 bp, Homo sapiens
gctacaggcgtgtgtcactgcgcccagatcttaatatgtgtatccacaattatggtatcaactcaatatgaaaaactcaacttaattttgtgcatgattt

SEQ ID NO: 545908 - DNA, 76 bp, Homo sapiens
tgactttaaaatatcaggagttaatggaacaccattgtttgtgctccccaaacctaaagtgatctcctgtctagag

SEQ ID NO: 545909 - DNA, 97 bp, Homo sapiens
agagttcaaggaggccttccagctgtttgaccgaacagagcctcagctcaaaggcatcgtcaccaaactgttctgccgccagggtttctacctccag

SEQ ID NO: 545910 - DNA, 75 bp, Homo sapiens
ttcacaggcaaattcgtgcctccaaggtcctctcctggaagcttgtgcctgacaattaccccccaggtgaccagc

SEQ ID NO: 545911 - DNA, 83 bp, Homo sapiens
cgtgaagctcaccgacagtgccctgagggccttcgagagctaccgcgccagacagccttatgccagcctggaccatcttggag

SEQ ID NO: 545912 - DNA, 100 bp, Homo sapiens
aactgttggctttgcaaaatgacccacctcctggaatgaccttaaatgagaagagtgttcaaaattcaattacacagtcagcgccaacggcaatgtcctg

SEQ ID NO: 545913 - DNA, 74 bp, Homo sapiens
tcactgaacccgggaaagcaactgagtgtggccatctggggccgtgtggtatttgccactcaggagacatgtcc

SEQ ID NO: 545914 - DNA, 100 bp, Homo sapiens
cctgcgagagatcgagagcactgacacggcctgcatcgggcccacgctcaggattctcagctggtagctggtgttgcattcaagaagactttctcttacg

SEQ ID NO: 545915 - DNA, 103 bp, Homo sapiens
cgcccgggaggaaggaacgaggcaaggagctaaagcagcgtgcgttcagccctggggtgatgtgtccaatctagatcccaacttctcatttgaaggcaccaaa

SEQ ID NO: 545916 - DNA, 103 bp, Homo sapiens
gtctcgctctgggtctccaggcccgcgaccgtccgccagtcgtcccgaggagctgcagaggctggagacagagttgggccaacccgctgagcgctggaaggac

SEQ ID NO: 545917 - DNA, 82 bp, Homo sapiens
attgtctgtgtgagcagaggggagagcggccgccgccgctgccgcttccaccacaggaactgtggctgcaccatctgtcttc

SEQ ID NO: 545918 - DNA, 100 bp, Homo sapiens
ccgagggccaccaggccgccgggggcctgctgcgcccggagcaagcaccagaagcaccaggcttttgaagcagagctgcatgccaacgctgaccggatcc

SEQ ID NO: 545919 - DNA, 100 bp, Homo sapiens
cctgtggctttcatcctcaagggctccatgcgaccgctgcacatccaggctgtgagaagacatttatcacagtgagtgccctgttttcccataaccgagc

SEQ ID NO: 545920 - DNA, 75 bp, Homo sapiens
caagaacagcccaatctcctttctgggcaaacgttccaagatcacttaggaaaatggctgttggtatgatcctag

SEQ ID NO: 545921 - DNA, 105 bp, Homo sapiens
ggcgctgggagcaacgggagtgtcctggacccagctgagcgggcggtcattcgcatcgcagattttgcaagaacgaggctcaaggatgtgagggacacagtattg

SEQ ID NO: 545922 - DNA, 50 bp, Homo sapiens
ggctccttcaagcccagcgagcatgccaacttctctttgcctgaaaaatg

SEQ ID NO: 545923 - DNA, 100 bp, Homo sapiens
gacccatggtttccagtgcagcgcggagtgggcgatgccagcgtgccaggacagagcgggatgccaccagcttgtccaaagggaagttccaggagctcct

SEQ ID NO: 545924 - DNA, 50 bp, Homo sapiens
agaggagatgatcttcctgggtatggtaaaataccatgaagattttgaaa

SEQ ID NO: 545925 - DNA, 100 bp, Homo sapiens
cggctcggcggctctgggcctgcggcgggcgctgcgggttggagctcgggacgtgatcgtgggaaagaccacagcaagattctttcattcgtctcctcct

SEQ ID NO: 545926 - DNA, 98 bp, Homo sapiens
agattaaagaatttaccctttagctttacaaagctacagcaattgacagctatgtggctctcagataatcagactgattttgcacgatttagcggaac

SEQ ID NO: 545927 - DNA, 82 bp, Homo sapiens
acatgagtgatgtggaggaaaacaacttcgagggcagaatccctcatccacctacatcaggcaactggagagcaaagtgagg

SEQ ID NO: 545928 - DNA, 75 bp, Homo sapiens
ctacgccggcttcaaccaggaccacggtattatcgggggacccacggggtcattgtggtttacgacgtcaccagt

SEQ ID NO: 545929 - DNA, 80 bp, Homo sapiens
ttctaagtcagagacatcaaaacctggaccttctggattacaggccaaattagcaagaatctctggaagcctgtagaaat

SEQ ID NO: 545930 - DNA, 122 bp, Homo sapiens
tcctggcgcgatgcgtcaagtacactgaaattcatcctgagatgaggtgtgatgaatgcagactctgctaccattttggctgtttggatcctcctttgaaaaagtctcctaaacagacaggc

SEQ ID NO: 545931 - DNA, 114 bp, Homo sapiens
ctcaatatctgtcttcggtggactccttcggcagtccacccaccgccgccgcctcccagaataccctctaccatctgctttggtcagggtgccgctcgaggatttaaaagcaac

SEQ ID NO: 545932 - DNA, 90 bp, Homo sapiens
ggaggttcggttgtcgcccgttggccgcgcggcgccgcgctcggcggccgccattgcaggctctggattactgccacagcaagggaatca

SEQ ID NO: 545933 - DNA, 75 bp, Homo sapiens
acctcagctgggagaaatgttggaaatggtttaaacacattatcagggcttcgtgggacacatatgcaacatgcc

SEQ ID NO: 545934 - DNA, 100 bp, Homo sapiens
atcgacgtcgtgatccagaagtccagagctgaggactgcctgtttgcaggatattcttggtgatcttggaagtgtccgtatcatggaatcaatctctatg

SEQ ID NO: 545935 - DNA, 75 bp, Homo sapiens
tctcaagtatttgaaataaaaatggatgcaagtttaggaaatctatttggaatatgctgaatttcagtatcggag

SEQ ID NO: 545936 - DNA, 100 bp, Homo sapiens
tccatgaagcaagaggaggaggcagagcgcgagagatcccgtccgccccagccgcgtctgggccaggagaaaaggccaaacgtaccaagaaagtcgggat

SEQ ID NO: 545937 - DNA, 100 bp, Homo sapiens
gtgcccggcggggtcgtcacggacccggaagcgctgcaggctcccaacgtggactggttgcggacgctgcgaggtggagttggcatgaacttaacagcag

SEQ ID NO: 545938 - DNA, 75 bp, Homo sapiens
cgggaactgctgacgcttgatgagaaggacccacggcgtctgttcgaagccaagacaatgcaaactccagtgaac

SEQ ID NO: 545939 - DNA, 83 bp, Homo sapiens
tcaagatctggactactgttgaaaaaatttccagtgagcagagagtgaggaagaagatgaaatggaagttgaagaccaggata

SEQ ID NO: 545940 - DNA, 75 bp, Homo sapiens
tgcctgtcagaggagctgttgaatgtttatttgaaatgggctttgaagagaatccaaaggactgcatgacacacc

SEQ ID NO: 545941 - DNA, 100 bp, Homo sapiens
cctgctcacgcacatccaggctgttgccaaccgcaggctcctccctgacatgctgagaaaggatggcaaagatccaaatcagttcacaatttcccgccgt

SEQ ID NO: 545942 - DNA, 100 bp, Homo sapiens
ttcagctccaccatcgtccatgtgggagacaagaagcccccggagtcggctatcatggtgaacttacttcagattgtgcgggaccactgggttcatgttc

SEQ ID NO: 545943 - DNA, 74 bp, Homo sapiens
catgatgatcaggtttttctggatggaaatgaggtgtgttggttttggccctgaggaagaattgacaaatataa

SEQ ID NO: 545944 - DNA, 96 bp, Homo sapiens
cagaccctgaaagcaaccaggaggcagtaaattcttcagctgctcggacagatgaagctccccaaggagctgcagtgctgttccctcgtcacacca

SEQ ID NO: 545945 - DNA, 82 bp, Homo sapiens
ctctgggatcccggccaccagcaattgtccggtatgttcaagatcagtaaatttagaaaaagcttcagagtctttgaaagga

SEQ ID NO: 545946 - DNA, 95 bp, Homo sapiens
gaagtaccaccttaggctctatcgatgcaccgtggcctggcggcgagcccccggtcaccttcctccgcacggaagaggggccggacgccaccttc

SEQ ID NO: 545947 - DNA, 83 bp, Homo sapiens
tgccatggttctcactaaaatgaaagaaaccgctgaggcttatttgggaaagaaggtatgtgcactgcgcgtgaccagccggg

SEQ ID NO: 545948 - DNA, 51 bp, Homo sapiens
cggcccctggctcctgctcctggatgatgaggagtctgatgaggaagctgt

SEQ ID NO: 545949 - DNA, 131 bp, Homo sapiens
ggccaccacaccagagtccgttcagcttcaggacagctgggtgctaaacagcaacgtgccactggagacccgaagatgatgtgtcaaatgtacaaataatgtgtgcctggtgccagaaagtgggaatcaag

SEQ ID NO: 545950 - DNA, 50 bp, Homo sapiens
tgctggattacatcatccgcaacactgctgtgttgcccactgtgcctgag

SEQ ID NO: 545951 - DNA, 100 bp, Homo sapiens
atctccatcacccaccaacaacaccacaataatccacagccaagatgcctgtgaggagccaccaacatttgaagctatggagctcattggtaaaccaaaa

SEQ ID NO: 545952 - DNA, 90 bp, Homo sapiens
atgaaatttatggcattcagaacagcgataggaagaactatgcctctgccaagctttctgagttgctgccagaagaagttgaagcagaag

SEQ ID NO: 545953 - DNA, 75 bp, Homo sapiens
gccatggggacacggcactgcatgctgctgcccgccagggcccagatggttaagacatcagaattttatagatac

SEQ ID NO: 545954 - DNA, 101 bp, Homo sapiens
gtttcaggtggagcagatcggagagaataaataccgggttgggccatgcaggctgctgcctatatcttcattcataggaaatggaaggatgacaagagcca

SEQ ID NO: 545955 - DNA, 100 bp, Homo sapiens
tcggcgaaagcagcggaaaccccaacagttaatctcggactgcgaaggtcccagcgcgtctgagaacggaccgtataatagacgctggccccaaaggaaa

SEQ ID NO: 545956 - DNA, 100 bp, Homo sapiens
tctgagctcaacggaggattgtgcctgagaagaacccacagaggtgaagccaaaaaccttccctcttacccggggccgagcaagatgagggattgctact

SEQ ID NO: 545957 - DNA, 50 bp, Homo sapiens
agcccaacaccttcccccactgccaaacatcatgtcaatggcaacagaac

SEQ ID NO: 545958 - DNA, 90 bp, Homo sapiens
ctctggataaggaccagtacctgcccaggaaactggtgtttggccacgggaaggccaacggggagcccacgtgggcgctgctgctgacag

SEQ ID NO: 545959 - DNA, 75 bp, Homo sapiens
cgccgagatgacgggctttctgctgccgcccgcaagcagaggcagcttcaaaagatggtccatgatattaaaaac

SEQ ID NO: 545960 - DNA, 83 bp, Homo sapiens
ggcctgtcagttatcgggtgtgaccgccgccgcccaggtgagaattatgaagatgatgacctagtaaattctgatgaggttat

SEQ ID NO: 545961 - DNA, 83 bp, Homo sapiens
agaaaatccaaccagctcttcaggagaagcacgccatgaaacagggctggaggacacacctaaacatgtggaatcccaatgcc

SEQ ID NO: 545962 - DNA, 100 bp, Homo sapiens
ggaagcatccacagcaaagtgagcagctaccacggcagcctccacagatcacgtgatggcaggtaactgatcctccgaaacgactgctaagcacaggctc

SEQ ID NO: 545963 - DNA, 75 bp, Homo sapiens
tcgggttattcgagtgaccgagaccgcggccgggaccgaggaaaggacctaagtgtgaaataccccgaagacgtc

SEQ ID NO: 545964 - DNA, 100 bp, Homo sapiens
gatgccccttttaaactccctcttcaaaactcatctcctgggtgactggttactgaagctaaaggagatgtttaactccaagtttggatctattcccaag

SEQ ID NO: 545965 - DNA, 100 bp, Homo sapiens
tgggcctactcgcccgccaccctgcgctgccgccgctctgaggagttaaagcaatgctttctctgaagaaatacttaacggaaggacttctccagttcac

SEQ ID NO: 545966 - DNA, 100 bp, Homo sapiens
aaagtcttaatcgcaagtaacaacaaacttggatcattaccagaagagataggtcagctcaaacagttaatggagctgggaagtcttaagagaagccgac

SEQ ID NO: 545967 - DNA, 100 bp, Homo sapiens
tctatcctgacaaatctgtaaactgcatgctgcttggaggacggaagaacacagatgttcccttggaaggatatttagtaacaccaatacaaagaatatg

SEQ ID NO: 545968 - DNA, 100 bp, Homo sapiens
ggacctgagccgcgaggacacgggctgcaacctgcagcacatcagcgaccgggagaacatagacggttcgatgccttctccatccgtcagtgagggtgtg

SEQ ID NO: 545969 - DNA, 99 bp, Homo sapiens
gactcgcggacgctcacgataaccaaggacgaccgcgaaccaaggtgagaagccctaccactgcaactgggacggctgcggctggaagtttgcgcgctc

SEQ ID NO: 545970 - DNA, 83 bp, Homo sapiens
ggacaagtgtaatgaaattatcaactggcttgataagaatcaggtgcagtctttgcaagccacatttggaacttttgagtcca

SEQ ID NO: 545971 - DNA, 122 bp, Homo sapiens
gaagtggacaagttcaaggccaagttcctgacagcctggaacaacgtcaagtacgtggtgggtacgggcacctcgctggcgctctcctccctcctgtccctgctgctctttgctgggatgca

SEQ ID NO: 545972 - DNA, 98 bp, Homo sapiens
cacaataaaagagacctctacttagctcagcaattcttaccttgaatctctgaaggaagaagatgaatcagatgatgataatatgtaacatttactcc

SEQ ID NO: 545973 - DNA, 100 bp, Homo sapiens
gagacggagctaagagatatctgcaatgatgtactgtgtttgaaagatgtatggtgatcttgaaacctccagacacaagaaaacttctagcaaattcagg

SEQ ID NO: 545974 - DNA, 100 bp, Homo sapiens
acggaacttgccgcgtcgaggactgtcgggctggctgaaggcggtgcaggtcctcatggtgctctccctcattctctgctgtctctccttcatcctgttc

SEQ ID NO: 545975 - DNA, 74 bp, Homo sapiens
caaacccaagttggttggagatgtggattttgaaggtgtgacgtatgcagccaaaggctactttgacgccctgg

SEQ ID NO: 545976 - DNA, 100 bp, Homo sapiens
agggagtaacaccaactggaaaaccttgtatgaggtcaaatccgagaacctgggccaaggcgacaaggtcgtcatacctcagaagaaaggcaagaaggct

SEQ ID NO: 545977 - DNA, 90 bp, Homo sapiens
agcgaccgagggactgggagtcgttagtgaggcgttggagaccagggccagccctggccacaccccaggctgtgtcaccttcgtcctgaa

SEQ ID NO: 545978 - DNA, 82 bp, Homo sapiens
cgcttccgcaccatcacctccacccgaggtgctcggtggagtcatggcagtgccctttgtggaagactgggacttggtgcaa

SEQ ID NO: 545979 - DNA, 90 bp, Homo sapiens
ctacaaccttcgatctcctgacgagattccggagtttgaatccacctttgacaattgtccgaaagacgtttgaatcaacagaaaacccag

SEQ ID NO: 545980 - DNA, 75 bp, Homo sapiens
tgtaaaaaacccagctgaagaccactttagaaactcaattaaaagaaacagtttgtgtgaaggctgtaaggcttg

SEQ ID NO: 545981 - DNA, 100 bp, Homo sapiens
tgaagcttcttcatgttttcctgttatttctgtgcttccacttaaggttttgcaagttgggagctgaaagtgccgacagcattggtgccgtgttaaatag

SEQ ID NO: 545982 - DNA, 95 bp, Homo sapiens
gtagaattggcaaagttattgccagcttcctggctctgtgtgctccgggatggagcaggtgtgcagagggtgagaacccagctctgggaccaagt

SEQ ID NO: 545983 - DNA, 97 bp, Homo sapiens
gaaatcttgactgccatccttgcctcgctcactgcacgccagaacctgaggagagaatggcatgccaggtgttaagtgtgatgcttccataatacat

SEQ ID NO: 545984 - DNA, 99 bp, Homo sapiens
gctctgatgacggcactgttagaatctgggactttcttcgttgccatgaggaaagaattctccgagcatctggaatcaagagacccatggcatctgagg

SEQ ID NO: 545985 - DNA, 100 bp, Homo sapiens
gagagcaacgccagagcccaggtgcccagaggactttcttccagcttctgctgtccttctttgtggagagcaaggtctagatcatccccattgtctgtca

SEQ ID NO: 545986 - DNA, 87 bp, Homo sapiens
ggccgccctgctcccccaatgaaaggccagcttcgaagaaaagctgaaagggagacgtttgcagcctctgaagaacacctgaagcag

SEQ ID NO: 545987 - DNA, 100 bp, Homo sapiens
actcaaagctgtgatcaccctgatgtcaccgaatggccacagcttgtaaaaggtgttaccacaaaaatctggaagatctgggccttgaatttgtatttcc

SEQ ID NO: 545988 - DNA, 50 bp, Homo sapiens
accggatccacgtgcttcatcatttcctggcttacgacacacagctggtc

SEQ ID NO: 545989 - DNA, 82 bp, Homo sapiens
cacctggaagcagtaacatgcaacaattctgtggtgttcttggtcacacatttatggagtttctgaagggcagtggagatta

SEQ ID NO: 545990 - DNA, 90 bp, Homo sapiens
gattctggggcagtatcaacggagtctccgggcatgagaagtttaccattcagcttcagttgtcccaaaaatcttcagaatcagaattat

SEQ ID NO: 545991 - DNA, 100 bp, Homo sapiens
tggagcagttgtatgtgtagaaagtgaaatcagaggagatgtaactatcggtgctggagaatctggtaaaagcaccattgtgaagcagatgaggatcctg

SEQ ID NO: 545992 - DNA, 82 bp, Homo sapiens
cccacggacaccacctcaacggctggtgagattggagagatgaaggatggagtcccagagggagcacaacttcagggaccgg

SEQ ID NO: 545993 - DNA, 100 bp, Homo sapiens
ggagcttgctgcccagattattcagggttaagaccctcgtgttctgctccggcaaacatttctactccctggtgaaacaaagagaatctctgggggccaa

SEQ ID NO: 545994 - DNA, 75 bp, Homo sapiens
gatgaggccagtgagtgatcaagtgtgtgttccatgggaaccggtacaagcagactctatagtgctctcgccaag

SEQ ID NO: 545995 - DNA, 82 bp, Homo sapiens
cagaaattgacagcccaggggggtggcccggtggaaatcctgccctttctgtacctgggcagtgcgtatcacgcttcccgca

SEQ ID NO: 545996 - DNA, 75 bp, Homo sapiens
gtagctttgggcttcaccatctttctgacagcgctgtcccggccaggaaccaggtgtccgcaatgttgccagtgt

SEQ ID NO: 545997 - DNA, 76 bp, Homo sapiens
ggtctcctccagtagacggtacagcgaaggcagagagttcagtgagaaagatcagtctaaagaaaaggagaagaaa

SEQ ID NO: 545998 - DNA, 100 bp, Homo sapiens
ctcagtatgacgcttctgagctaaaagcttccatgaaggtggtgaagcagtattttccaatttgaagattcatttgaaggtggctcctgccacctgctaa

SEQ ID NO: 545999 - DNA, 135 bp, Homo sapiens
gaagccggaagctacctatctggtagggagctcccccagcaccgaagactgcgatgctggatcgccatacctaccctgtggtcctcatcttcctggcctcatagctcctcctctccaagcatgtcttccccgttg

SEQ ID NO: 546000 - DNA, 100 bp, Homo sapiens
tgccaaggaaaaactggagagcttcatcaaaaatagtgatagctttgataagaccgtataatagacgctggccccaaaggaaactactctcgatttatga

SEQ ID NO: 546001 - DNA, 75 bp, Homo sapiens
ggcctgacatatctgagggagaagcacaagatcatgcacagagattgtagaaggcatgaaacaaaaaatgtggag

SEQ ID NO: 546002 - DNA, 75 bp, Homo sapiens
cttattcccttcaattcaagtaacagggcagctgcaatgactctccgcacggtattattgtcattgcaagcacta

SEQ ID NO: 546003 - DNA, 90 bp, Homo sapiens
cgagatcttccgccactacgagtcctgaacgaggctgtgggggccctgatgtaccacaccatcactctcaccagggaggacctggagaag

SEQ ID NO: 546004 - DNA, 100 bp, Homo sapiens
aaccatcaggaacctggattgtgtagcagggagaaggttttaaggtgaaaacgaagaaagaaatccggcatgtggaaaagaagagccactcgtaacagcg

SEQ ID NO: 546005 - DNA, 100 bp, Homo sapiens
gcggaagaactggcccagcggaggttcccgcttctgaagcgtgggaggcggaagagactgcaggtccacagcgtctcatactctacaccagtattgctgt

SEQ ID NO: 546006 - DNA, 82 bp, Homo sapiens
ctggccgctatcatcccagcagtggagttcagcccactactctgaaccagtgtcaacagcatctccaccctggagcctgtga

SEQ ID NO: 546007 - DNA, 129 bp, Homo sapiens
ctggtcgtgttcgtcctcggcggccccggcgccggcaaggggacccagtgcgcccgcatcgtcgaggtaaagagaaatgtgtatgaccttacaagtatccccgttcgccaccaattatgggagggctgg

SEQ ID NO: 546008 - DNA, 82 bp, Homo sapiens
ggagcttctcagaagacagagggttttcttttgagggtcctcagaagtggaatacagagcggaggtcggtcagaatgcctat

SEQ ID NO: 546009 - DNA, 83 bp, Homo sapiens
gttgacactggcagaagctctcaagttcattgatcgtaagagctctctcctcacagactgcaggacaagttcgagcatcttaa

SEQ ID NO: 546010 - DNA, 100 bp, Homo sapiens
cacggtctgggccgccgaatctccggccgaagagcggcggcggcagcggcggtgacagagctgaatgaacctctctccaatgaagatcgaaatctcctct

SEQ ID NO: 546011 - DNA, 83 bp, Homo sapiens
ccgggagtgccgtgcgccgcagcccgggcccaggccccggcagcgcctgggacaagcatatagcactttctacattgtgggtt

SEQ ID NO: 546012 - DNA, 75 bp, Homo sapiens
cagcgaacatgtcgcggcctgtcaggaaacatgccctgaactgtcacagaatgaaaccagcgctcttcagcgtcc

SEQ ID NO: 546013 - DNA, 82 bp, Homo sapiens
tccaggaagcagatcaaggacatggagaagatgttcaagcactcaccatggatgatgatatcgccgcgctcgtcgtcgacaa

SEQ ID NO: 546014 - DNA, 82 bp, Homo sapiens
caactggtcttggtagcggaggcacccgaatgctgcccgggtgaggtcctcgaggccacacgggttaatcgaagaaagagcg

SEQ ID NO: 546015 - DNA, 96 bp, Homo sapiens
gctgcggctgatcatctccatcttcctggtggtcatctccatcagaggcaactgaaagtttcttatcaaaagaaatttggttgccacccccacagt

SEQ ID NO: 546016 - DNA, 83 bp, Homo sapiens
tggggacgcaggcgggtcgtagagagcgatgaagtaggtgttccaggtagcaattcagctgacctattgcgctggaccactgc

SEQ ID NO: 546017 - DNA, 74 bp, Homo sapiens
ccttcagtaccccgacgtgtaccgcgacgagaccgccgcattatccaattggtttgctatttgatcttcttgca

SEQ ID NO: 546018 - DNA, 82 bp, Homo sapiens
gaagatcatcattaaggacggaggcacgctgcggataaccgtctggtccttgtgcacaaaatccgtgtcttacatcaaatac

SEQ ID NO: 546019 - DNA, 58 bp, Homo sapiens
ccgccatgagctggggcacggagctgtggagcactgcagcctgtggtgttgaggctca

SEQ ID NO: 546020 - DNA, 74 bp, Homo sapiens
tgcgccagtacatcagcgtgaagacgcagagggagacagattgagaggatccagaatccagatctctggaatag

SEQ ID NO: 546021 - DNA, 90 bp, Homo sapiens
ggctctctggtgctgctgttacacgattcctctgactacctgctggagggaggtcctggacacctctatctcctcaagaacaaggtggcc

SEQ ID NO: 546022 - DNA, 100 bp, Homo sapiens
cagatgatgaggccttcttgtcagcaaatgcaggtgctatactcagccagtttgagaaagtctctacagaccttgattcgacggaggcgccttgcacgac

SEQ ID NO: 546023 - DNA, 74 bp, Homo sapiens
ccgctgacgacacccctggtggatggcgaggatgagaggtgttggaaatcaatagctcttctagcctttgcatt

SEQ ID NO: 546024 - DNA, 75 bp, Homo sapiens
tggagattccacccaaacttgctggtcactgggagctcattgctatggacagtgctatcaccctgtggcagttcc

SEQ ID NO: 546025 - DNA, 100 bp, Homo sapiens
acctgacgggcctgcgagggttgaagattgtgaagcaatagcctaaggagcaagagcagctctacctgaggtcaggtgtggtgtcctctgccaccttcga

SEQ ID NO: 546026 - DNA, 75 bp, Homo sapiens
gccctgcgggtgggcatgggaagtggctccatctgcattacgcaggaaggttgttaccccttctacaaaactgac

SEQ ID NO: 546027 - DNA, 100 bp, Homo sapiens
tcagcttctgttgtatcatcagattccatttcaacttctgccgacaacttttctcctgatttgagggaagtgcattttcagctgagcacctcaaacttca

SEQ ID NO: 546028 - DNA, 100 bp, Homo sapiens
ttcaggggtcaacaactctgtgtacaccaacgtcctggtccagaacaggccctacatggacgcggtcgtctccctggtcactctcatgttggacacgggc

SEQ ID NO: 546029 - DNA, 100 bp, Homo sapiens
gttgaagtcttgttgaattatgcctacactgctcagcaaaaccccagtcccagctggagaggaagagggtgagctgggagaataccggcaaaagctcctc

SEQ ID NO: 546030 - DNA, 98 bp, Homo sapiens
ctgaattgagtataagaaaagccttcattacaagtactcggcaagttgtcaggatgctattaaactacagctggttgaagcaggcctagtagagtgtc

SEQ ID NO: 546031 - DNA, 75 bp, Homo sapiens
agcacagaggctcagaagcaagtccagccagagactgctgctactttgaaacgtacgatagaggccctgatggac

SEQ ID NO: 546032 - DNA, 75 bp, Homo sapiens
gggtcagtgattcccggaccctggaagagaagagggtggctaatgattaagcactatggagatgaccgccatggc

SEQ ID NO: 546033 - DNA, 84 bp, Homo sapiens
accatttagtgacttgaacaacctaccaagtgatgtgagttcttggagtctctgcggagtccctgggccagatctcacagtgaa

SEQ ID NO: 546034 - DNA, 86 bp, Homo sapiens
tgcagcaggaattgggatcgtgtcgctgcggattggatgtggtcttgatcgtctgcaatgggaaaatgtatctgcgatgatcgagg

SEQ ID NO: 546035 - DNA, 100 bp, Homo sapiens
caaataacgtcgttttggaagcgcccttcctagttggcattgaaggttcactcaaaggcaggtcttgtcaacggaaaggggtccctatccagaccccaag

SEQ ID NO: 546036 - DNA, 75 bp, Homo sapiens
ctccatcctgcgggatgccttgaaccaggccacgagccaggtggagagcaagaaagaccacagcaagattctttc

SEQ ID NO: 546037 - DNA, 50 bp, Homo sapiens
cgttgacaaggcactgctttttcatgacgatgaaggatttgggggcagag

SEQ ID NO: 546038 - DNA, 74 bp, Homo sapiens
acagccaagtgcgggagtccacggcaccgatgaagacgccattattagcgtccttgcctaccgcaacaccgccc

SEQ ID NO: 546039 - DNA, 100 bp, Homo sapiens
catctgaagttcatcgccaggactgtgatggtacaggaagggaacgtggaaagcgcatacaggaccctaaacagagatgtggtctgaagctattaaaatc

SEQ ID NO: 546040 - DNA, 97 bp, Homo sapiens
gatgaagcagctgcagccgcagccgcctccgaagatgggggatttctacgacccggagcacccgacccctgaccatccatttcaaggccaatactca

SEQ ID NO: 546041 - DNA, 98 bp, Homo sapiens
gaggctaccaaggaagatgctgaggccccaggcatcagagatcatgagagcctgtgcaggagacatggcggacgcagcatctccgtgctctgtggtaa

SEQ ID NO: 546042 - DNA, 75 bp, Homo sapiens
ggacggtgtggggcggtcccggccccgcagatgcagaggccaggatgtgggcccagccctgtgccaggaggctgg

SEQ ID NO: 546043 - DNA, 100 bp, Homo sapiens
tgaaaagccaaattaaaaatcaaggattcagtcaaactaagcaggaggtggagcccatgtgcaaggagagcgaccacatccacatcattgcgctggccca

SEQ ID NO: 546044 - DNA, 74 bp, Homo sapiens
tgctttagatgaattctttgatataatggtaattgagctgaaagctgaggatcggagcaagtttctggacgcac

SEQ ID NO: 546045 - DNA, 75 bp, Homo sapiens
cggcgaacagagctcactgatgccagtggaggtcacgaacgagatcacgccggtgctgtcgtactcctacctggc

SEQ ID NO: 546046 - DNA, 83 bp, Homo sapiens
cctcagaatccaggagttcattgaactcatccggcagaataagagactggacgctgtgagttatttctcaaactctgaggctg

SEQ ID NO: 546047 - DNA, 100 bp, Homo sapiens
gatggaagctccccacatcatcgtgggtacccctggccgtgtgtttgatatgcttaaccggagatacctgtgtgatttgaagatattaaagctagaaatt

SEQ ID NO: 546048 - DNA, 51 bp, Homo sapiens
cccaagatgggcatctattacattccaccaatggagatcttcgtggatgat

SEQ ID NO: 546049 - DNA, 90 bp, Homo sapiens
tatggacagacgcacagacacctgcaggtatcattccttggaatgctttccccggaaaaatatgtggctctgccctggagaacatctgca

SEQ ID NO: 546050 - DNA, 74 bp, Homo sapiens
ttggtccccgcgcagccccagctcaacgtgtgcaactgggcggtcatgctcgggttcatgacgctctcgatatt

SEQ ID NO: 546051 - DNA, 104 bp, Homo sapiens
ctgcttcaatgtccgcatcgcaaccaccgccctggccatctaccatgtggtctcctctgagcctccggcctccataagacccaaaacagatgacacctcttccc

SEQ ID NO: 546052 - DNA, 73 bp, Homo sapiens
ttttcaatgctgcgaaagctgccaaaagtgacatgcagatgacctgagaattaatttatggcacttagaaatc

SEQ ID NO: 546053 - DNA, 100 bp, Homo sapiens
catttcctgttccatccgcccagcgaccggcccttcatcccctatggttgaagttcatgagttcgcccagcctcagtgacctgggcaagagagagccggc

SEQ ID NO: 546054 - DNA, 90 bp, Homo sapiens
tatgtagaacacgctaaagaagaaacaaaaaaagctatcaaatatcagagcaaggcaagaaggctctattaccaggttttaaacttcgcc

SEQ ID NO: 546055 - DNA, 82 bp, Homo sapiens
gagccggcgctgagaggggctgcggccggagcgggcggctgagacaaaggcgacgagacccactgctaaggagttattgaag

SEQ ID NO: 546056 - DNA, 89 bp, Homo sapiens
ctcgagggaaaggctgctgcctcctgctctgtcctcatccccggcttaggagctcttgtccctggcaaagcgaaagcgcagtgactctg

SEQ ID NO: 546057 - DNA, 100 bp, Homo sapiens
tgccatgatgcctggtgccccattacaacccgtggaggaagtgcttgaaacctcgtcagcaccacagaaaactgcagctccctgcaggactggagagttc

SEQ ID NO: 546058 - DNA, 50 bp, Homo sapiens
gcaggaagcccttccgcggaccgaaagattacctggctggtgtttgcttg

SEQ ID NO: 546059 - DNA, 75 bp, Homo sapiens
ttggagcaacttaagaagcaacaggaagaggcacaggaaaatgcaacatggcagcagcaatggaaacagaacagc

SEQ ID NO: 546060 - DNA, 75 bp, Homo sapiens
catcacagttgtctgcaccctgttgtggctctataagcagggcaattgaaggaacagactaaaaatcgtgtcctg

SEQ ID NO: 546061 - DNA, 100 bp, Homo sapiens
cagagctccacctctgaagaacctgatgaaaactcatcctctgtaacatcttgtcaggctagtctttggatgggaagtgcccaccagaagtatgtccgac

SEQ ID NO: 546062 - DNA, 100 bp, Homo sapiens
tatgaagaggccttagccatcagccccacccacgtgaagagcatgcagcgactggctgacaaacgggctcatcataatgcactggaacgaaaacgtaggg

SEQ ID NO: 546063 - DNA, 100 bp, Homo sapiens
tggggacttcgctggagagatggcaccggcctgaggtcaaggagaaattgaactaaactctcctttgaagactctcctgagaaccatgtctatgcccaaa

SEQ ID NO: 546064 - DNA, 76 bp, Homo sapiens
actgaggcgtttctgtacatggattatctgcccagcgacttctccgtgtcccttaaagcgtcagggaagaacaaac

SEQ ID NO: 546065 - DNA, 100 bp, Homo sapiens
actgctggctgtgtgtgctgcaaaccgagacaagttcaccccgaagtctgccggattggcagccaccatttgcatgtgatgttgataaacttcattttac

SEQ ID NO: 546066 - DNA, 134 bp, Homo sapiens
ggggccgtcgcttcggagttggggctgagcagtcctcggggagagcgcgccaagaccgctgcagccgctggctgactggagaccatggccaaaatggaggtgaaaacctcacttctggacaatatgattggagt

SEQ ID NO: 546067 - DNA, 109 bp, Homo sapiens
acaggaacttctggatcctgcggctccctccaggtattaagggagatatcccaaaggctcaagaatgggacatggacgcccggcggccaatgccttttcagttcccacc

SEQ ID NO: 546068 - DNA, 74 bp, Homo sapiens
ctacctataagacttcaactcaagatgcagtattgctgacagacagaacgccttggaggctgagtggaggacgg

SEQ ID NO: 546069 - DNA, 110 bp, Homo sapiens
ccgggagcgccgagcgtcgccgccgccgccgccatgaacaactcgggcgccgacgagatcggtaagcccagaggtctccaccccacgggaggaaggctgaggccaagacc

SEQ ID NO: 546070 - DNA, 100 bp, Homo sapiens
cgatggcggagggagataatcgcagcaccaacctgctgggcgtgatggtgggcatgggtcagaaggattcctatgtgggcgacgaggcccagagcaagag

SEQ ID NO: 546071 - DNA, 75 bp, Homo sapiens
atcacctctcagcacgattttcccgagagttcacagccgaacgaccctgtcaccaacatttgccaagcagccgac

SEQ ID NO: 546072 - DNA, 51 bp, Homo sapiens
gacgaccaggtcatcctgctgcgggcagccactgcacccacgtcctttgag

SEQ ID NO: 546073 - DNA, 75 bp, Homo sapiens
agtcgttctgcacgtgcatttccatatggcaatgcatggccggactcccctgcatcttgctgccaataagggcca

SEQ ID NO: 546074 - DNA, 100 bp, Homo sapiens
cagggcatacatctttcttcgacaaaggggtggttctcttcccaaagtggaagccaaattcatcaattatgtgaagaattgcttccggatgactgaccaa

SEQ ID NO: 546075 - DNA, 80 bp, Homo sapiens
cgacaagggcctcgcttggtaccgatcattcaacttcaagtggcacattatcttttaagcctagtcaatcattgattact

SEQ ID NO: 546076 - DNA, 50 bp, Homo sapiens
aacgccaacctcaggcgagatgtaaacaaatccgagctatgctgggccag

SEQ ID NO: 546077 - DNA, 100 bp, Homo sapiens
aaaaccatgtctattaaagaaaggaacgccccatgtgtctggtgggaagatgctcagtgctctggagtccacggtgcctcccagccagcctccacctgtg

SEQ ID NO: 546078 - DNA, 51 bp, Homo sapiens
agttcagacactcagcacagcagggaatccagatcttacataagatggaag

SEQ ID NO: 546079 - DNA, 90 bp, Homo sapiens
ctagtccctcttacttgaagcatgtctttcagagcccggcaccacccatcttgagtatctggtgccaacatcgcctctggtgaggaagtc

SEQ ID NO: 546080 - DNA, 88 bp, Homo sapiens
caggttcgccgggtgtgaggcttcacagcggtccggtgaccaagtcgagttttccaagagataacttcaccaagatgtccagtgatag

SEQ ID NO: 546081 - DNA, 75 bp, Homo sapiens
gcgagagctgcctgcagggctacttcctcctggacgggaagtgcaccaatcccacagaacaacgagaagcttcag

SEQ ID NO: 546082 - DNA, 100 bp, Homo sapiens
ggcctcggtgctcgccgtcctgcggaaccgctggctgtcagacagcttcaaggagacggacctcagcatggccctgccctcagggcaggtctgccacgac

SEQ ID NO: 546083 - DNA, 86 bp, Homo sapiens
ctccttcggcagtccacccaccgccgccgcctcccagcccagctcaacattggcaatgtgctccctgtgggcaccatgcctgaggg

SEQ ID NO: 546084 - DNA, 74 bp, Homo sapiens
caaactttatgtttgggatttagaagtagaagatcctcataaagccaacaaccctggtgaccctgctctttggt

SEQ ID NO: 546085 - DNA, 82 bp, Homo sapiens
ccctcatcgagctcttcgtcaagacaccatccggaagatgaagaacgatttccggaagatggaggatgagatggaccggctg

SEQ ID NO: 546086 - DNA, 100 bp, Homo sapiens
gaatgaccagtgccagcccaatgcagatgactccaggtggatgaagaccacagagaaaggatgggaattccacagtggctccataatcgtgggaattgat

SEQ ID NO: 546087 - DNA, 100 bp, Homo sapiens
cccggttccccggcccacagtgggggtgtgcaaacccgagagaactgggcagaatccagagaccacatttgaagtatatgttgaagtggcctatcccagg

SEQ ID NO: 546088 - DNA, 87 bp, Homo sapiens
tcgcccggctgcgtgcggtccagcggaaggcccgctttgccaagctcaagtcgaggggagctgcagcgggagtcagacttcatggcc

SEQ ID NO: 546089 - DNA, 100 bp, Homo sapiens
cttcggcagtccacccaccgccgccgcctcccaggctcatcggaacctgtcccagctccctaattttgccttctctgttccactggcgtatttcctgctg

SEQ ID NO: 546090 - DNA, 76 bp, Homo sapiens
gcctttgttaccttccgagccacccgaaaacctctagtacagacaaccccaagtactaaggctcgtacgtctgcat

SEQ ID NO: 546091 - DNA, 100 bp, Homo sapiens
gcgacaggactttgggtctgggtgagccttctcgtggcggcggggaccgtccagcccagcgattctcagtcaggtatgcaaccactcatgtattcggttc

SEQ ID NO: 546092 - DNA, 100 bp, Homo sapiens
aagcaccagtacagggataagagatgaagagacaggccaggtcaggctcaccaagcagagcagcccgacggccatggaggctgaagagacgatggaatgc

SEQ ID NO: 546093 - DNA, 98 bp, Homo sapiens
cacaattccatgaatgaactgaagcttagcctgcgacgcttatgattagagccaacaatttgaaatggcctgctcacctgatgcagtcgtctctccgt

SEQ ID NO: 546094 - DNA, 90 bp, Homo sapiens
tgtatgagggattcatctcggctcagattgatgaactcccagagggcgctgtgaagcctccagcaaacaagtatcctatcttcttttttg

SEQ ID NO: 546095 - DNA, 97 bp, Homo sapiens
agcggccaccgactactgtcagcagctgtgccaggtttgcccgacttgctgcaaccacatttatcagtcaggggattcctgtgtacctcttttctga

SEQ ID NO: 546096 - DNA, 48 bp, Homo sapiens
cgggagttacaccgccaccgccaggtctgccatcatggatgttctcgc

SEQ ID NO: 546097 - DNA, 100 bp, Homo sapiens
ggtaactctcatataaatagtaattccatgactcccaatggcaccgaaggaactggataatttctgtaaccccatcatttacaagcccaaaccaaaagca

SEQ ID NO: 546098 - DNA, 82 bp, Homo sapiens
ccccaggggagttctctgtgtctgtgaagttacctgtcctgctgccgattcctggatgacaatcagatcgtcaccagctctg

SEQ ID NO: 546099 - DNA, 98 bp, Homo sapiens
gcagatgtggacttgaaagaagctgcagcggaggaaggcgaggtaggtgatgctctgatgctgctgcctcttatgaattgacgacaggtgcagagaga

SEQ ID NO: 546100 - DNA, 60 bp, Homo sapiens
ccggatcccaggccccgtttgcaagatcccaagcagtattgaagatatatttaatgatga

SEQ ID NO: 546101 - DNA, 75 bp, Homo sapiens
cgaagaggctggactcggattcgttgcctgaggtcagcccaaggccaaccccactgtcactctgttcccgccctc

SEQ ID NO: 546102 - DNA, 100 bp, Homo sapiens
ccgctctccgagctcgatccgctgctcgcacgggagccagctgggtgatgccagaagtgggtggagaactgtaggagagcagacttagaagataaaacac

SEQ ID NO: 546103 - DNA, 83 bp, Homo sapiens
cgacgttccatctgtggaaggacctaccaaccaggctttgatgaactaggtggacttctcaaaccaacagtggcctctcagaa

SEQ ID NO: 546104 - DNA, 100 bp, Homo sapiens
caccaaagcaagttgacatgtggcaaacacgtcttagtacacatttggttctccagcatttggctcaaggccccaagggcacatgtgacaagaaggcgcc

SEQ ID NO: 546105 - DNA, 100 bp, Homo sapiens
gacccaagcgccgcggttaaccacgtctcgtccacgacctccctaggtttgatctgtggatgaaatgaatcatgattttcaagctcttgcattagaatct

SEQ ID NO: 546106 - DNA, 75 bp, Homo sapiens
gtttgaggacgatgtcatacagcgcaaggatgtgggctctcttgatgagaagatgaagagcttggatgtgaatca

SEQ ID NO: 546107 - DNA, 75 bp, Homo sapiens
caactctgtctctctccacaaacggttttcagagctctatgaaagatttcagccccggccacgatgtttgctgtc

SEQ ID NO: 546108 - DNA, 101 bp, Homo sapiens
cctgcaggcgatgtcgccgaaaccgggctgcaggcggggtctgatgctgagtcggctgggccacaagagcttggcccagaaggtgcttcgtgatgccgtgg

SEQ ID NO: 546109 - DNA, 125 bp, Homo sapiens
gcagagtgtaatgctgtccgccaggccctgcaggacctgctttcggagtacatgggcaattactatactggcaattgctggagaagattttgcaattgttgcttctgatactcgattgagtgaag

SEQ ID NO: 546110 - DNA, 100 bp, Homo sapiens
cctggatgagacatttgctacagcatcccacattaagtcaacgggaacctagaaaagttgttcttcatcgtggctcaacgggccttggtttcaacattgt

SEQ ID NO: 546111 - DNA, 88 bp, Homo sapiens
aagcacacccaatggacagcatgcctcaccaagtcacatgacaagcattacagctcttttgaggaagcttaagcagcaatccagggaa

SEQ ID NO: 546112 - DNA, 100 bp, Homo sapiens
tgtgccaggacttactcaacaaattccagtgcctctgtgatgttgcctttgctggcgagcgctgcgaggtggacgtggtgcccaggcaacatgggtgact

SEQ ID NO: 546113 - DNA, 75 bp, Homo sapiens
ggagaacttcttgatttgctgggagacatcaaccttacaggctttcaggagcagtccgcggaggagtgcacgcag

SEQ ID NO: 546114 - DNA, 75 bp, Homo sapiens
atgagcactattttggattagtcaatatcctatgcctgtgactcagaaggaacaggaaaacaaatccaatgcatt

SEQ ID NO: 546115 - DNA, 100 bp, Homo sapiens
cactgctcgacctgagagacccatggcattcctcagggaatactttgagaggttggagaaggtcaaaagaaatagactggcaaccttattttactacacg

SEQ ID NO: 546116 - DNA, 100 bp, Homo sapiens
gatgctgcgagggatggagggcgccgtgctgcccgtgtggagtgcgcacggggaaggcttcatcaccatgacgccccagctcttcatcaactacaagctc

SEQ ID NO: 546117 - DNA, 50 bp, Homo sapiens
aggtcttgtagcagcgcctcctcggactcacaccacccggcaagaactgc

SEQ ID NO: 546118 - DNA, 100 bp, Homo sapiens
tcctctagtttctggataatgagcaggcacacaggtcaattggcatgattttgctttttttgatcctgtaatgtatgagagtttgcggcaactaatcctc

SEQ ID NO: 546119 - DNA, 80 bp, Homo sapiens
accgaagcgggctgtgtgccccttctccacccagagaaactggcagacctttcacttcgtatccaacaaattgaaacaac

SEQ ID NO: 546120 - DNA, 74 bp, Homo sapiens
agaagaggaaaactctaccggtgcaggttgtttacattcagagctctatcaataagaggaatacatattacagt

SEQ ID NO: 546121 - DNA, 100 bp, Homo sapiens
gacagcggggatcgtgagctccggcccgggcgagcgggtgcgtctgccgcagagtcggcacctgaaggacatggagggtggggtatctagcaggatgtct

SEQ ID NO: 546122 - DNA, 75 bp, Homo sapiens
tccactcgcacctgcacctgcaccagcaagatgctatccatgcaggcccagctcatcgcccagtctatcggccag

SEQ ID NO: 546123 - DNA, 73 bp, Homo sapiens
cagggctgcgcctctctgcagcagacgaaagtaggcggtacgaaccctaatggaggcagttttgaggaggtcc

SEQ ID NO: 546124 - DNA, 100 bp, Homo sapiens
gcgggagggctgtgtgatggcctcggagcgcccggagccggagtctctgtagaaacgctggaaaagaatttgaggcagatgggaaggcagcttcaacagc

SEQ ID NO: 546125 - DNA, 90 bp, Homo sapiens
caccaccgccgctgccccggctgcctcctccctgaggcttgggaacaatgggccgaggcattgtcatttcttttgcaagggccaggattc

SEQ ID NO: 546126 - DNA, 75 bp, Homo sapiens
gccgcgtccttggctggcgttcacgccgatgatggagctgaagcccaacgcaggtagcgaccgtgcctgggtctg

SEQ ID NO: 546127 - DNA, 100 bp, Homo sapiens
gctcttccggaagatcaactgcagactgtcctattgcatctcaagccatcccaactgggccagtttgaacttgggagccctcatgtgcatcgaatgctca

SEQ ID NO: 546128 - DNA, 100 bp, Homo sapiens
acttgcggcaaaggatcatggtcatcaaagccaaagctttaccgatttgttacaactcaagcaagggccagcagaaattctcttttgacagatataattg

SEQ ID NO: 546129 - DNA, 100 bp, Homo sapiens
ggccagatgtacatcaaggcctccggcagctatgcagtttctgtgtttgaagaacatacgcaccttcctgaaagtctgccacgataaatttggattaagg

SEQ ID NO: 546130 - DNA, 75 bp, Homo sapiens
gccacttgtccaaggtcacgccgctgtgcctccggagccagcgtggtggccatagacaacaagatcgaacaggcc

SEQ ID NO: 546131 - DNA, 100 bp, Homo sapiens
agaattggaaataacgggagggaggacctggtccagcttcccttcctcaaataaggaaattgacacctggcgtggtgaattcatcattggccgagttatc

SEQ ID NO: 546132 - DNA, 98 bp, Homo sapiens
caagtgtcacgctggccatctcaatggagtttattaccaaggtggagatgtttggggtgacaggccctgggctggagcagagctcacagctgctggag

SEQ ID NO: 546133 - DNA, 121 bp, Homo sapiens
gtctgcgtttctgataaattgaaaccagttttaattcttctgcccgggagacctaaccgccgaatgcgttcggaggtgctggagaatctggtaaaagcaccattgtgaagcagatgaggat

SEQ ID NO: 546134 - DNA, 100 bp, Homo sapiens
agctctgccaggcagaaggcctctctcctgatacagcaggcgctcaccatgttccctggagtctctggcatctctatcccctatgaggcaccacgtaaga

SEQ ID NO: 546135 - DNA, 100 bp, Homo sapiens
tatctcaaaaggtgatctggacaaaggaacaggtatctcagtggagaacatgcagctgaccctgaacctgcagacggagaacaaaggcagcgttgtctca

SEQ ID NO: 546136 - DNA, 75 bp, Homo sapiens
accagttagaacgtaccaagagtagagatgaagcctgctgggagcgtgaatgacatggccctggatgccttcgac

SEQ ID NO: 546137 - DNA, 100 bp, Homo sapiens
gaccccaaagttgcatttcctcgtcgagcgcaacccaaggttctaaatgagaagaaacttcaagaggttgatagtttatggaaagaatttgaaactccag

SEQ ID NO: 546138 - DNA, 82 bp, Homo sapiens
gttatcctttccgaacttcctgcagtgtgctctcctgaaggtcacctttggctcttcagagatgcagggacacacgatgggc

SEQ ID NO: 546139 - DNA, 100 bp, Homo sapiens
ttaagttttgaagatgaacaccaagatgaaagcagcagttttcatcatctaagtgaaagaattcaattcgtcataatctgtccctacacagcaagttcat

SEQ ID NO: 546140 - DNA, 75 bp, Homo sapiens
gtaaaatggcaaccccctacatgaatcattacatgaagcatcagggccttgggaaaactttacaaacaattgctt

SEQ ID NO: 546141 - DNA, 75 bp, Homo sapiens
tcctcccagtgacgggtctggagtgcgtgggggaccggctgttggcgggacacagaatttccaggtgttgtggtg

SEQ ID NO: 546142 - DNA, 51 bp, Homo sapiens
caagagccggcggcatgacgagaacgtcaaggtcgtgggaaataaaaggca

SEQ ID NO: 546143 - DNA, 82 bp, Homo sapiens
cttcaactctgaaccagaaaccctgatagaatatgtaacggtgactccagagggattccggtaccggggccagatcttccca

SEQ ID NO: 546144 - DNA, 75 bp, Homo sapiens
ggaagataaccaatcaaattcttgtagacagtaaaaattggcctacgtcatccagatgctgtagtggaaaccagc

SEQ ID NO: 546145 - DNA, 129 bp, Homo sapiens
caagaaagacttgatggtctggtagaaacaccaacaggatacattgaaagctgttgtagcaaacagtgacgaatctcagcttctgacaccaggaaagatgagtcagcgccaaggaaaagaagcttatcc

SEQ ID NO: 546146 - DNA, 82 bp, Homo sapiens
taaatcttccccaagatgtatggatgggtttgtggagttcttccatgtagaggacctagaaggtggcatcaggaatgtgctg

SEQ ID NO: 546147 - DNA, 100 bp, Homo sapiens
gttgcagcgcagcatttcctccctgctgaggtttgccgccggtgaagatggggctaaagaattacctccaaagccattgtcaagaccacagcagtcatct

SEQ ID NO: 546148 - DNA, 100 bp, Homo sapiens
tttatttctttggagacaaaactatgccaatcagtcgcatcgaatacattcattcaaagaacttcatccaccgggatgtgaagccagacaacttcctcat

SEQ ID NO: 546149 - DNA, 101 bp, Homo sapiens
agaccttactatcccggatggaggatgaggagaacaatccccttgagacagaatatggcctttctgtctacaaggatcaccagaccatcaccatccaggag

SEQ ID NO: 546150 - DNA, 103 bp, Homo sapiens
ctgggctccagagtccctcgggtctcaggtcatggcggtcgcggggcccgcgcccggagctggcgccagctttcctcaaatgaaagagatagcagtgaaccag

SEQ ID NO: 546151 - DNA, 82 bp, Homo sapiens
gagttcgctgccagccccaagaaggagaccctcatccagctgatgcccttcttcgtttcaaatctgaacatcaatgatgtac

SEQ ID NO: 546152 - DNA, 76 bp, Homo sapiens
ccgtggccatcggcagctgcggccacacgtattatcgggggacccacggggtcattgtggtttacgacgtcaccag

SEQ ID NO: 546153 - DNA, 50 bp, Homo sapiens
cctcgctgaggaacgacgccgaggaaggtgctggagaatctggtaaaagc

SEQ ID NO: 546154 - DNA, 88 bp, Homo sapiens
agtggccgtagcggcttgttggataagttcttggacctttccttcaacagcctgactgtggaggccatctgtgatttggggattctgc

SEQ ID NO: 546155 - DNA, 75 bp, Homo sapiens
cccctgccacggatggtggcctcaacctgacctccaccttcctcagtggcctcaacgagaagaatccctaccgag

SEQ ID NO: 546156 - DNA, 74 bp, Homo sapiens
tgcgaaggatccccaacggggaggccaacgtgaagaactcccggagccagtcggcagcggtcaccccgtcatcc

SEQ ID NO: 546157 - DNA, 98 bp, Homo sapiens
cttcatggtgacgtttgcagccctttacagcactcacaaagatgcctgtgaggagccaccaacatttgaagctatggagctcattggtaaaccaaaac

SEQ ID NO: 546158 - DNA, 50 bp, Homo sapiens
tactactgtgacaacattaacgtccttactgagcatccgtggctcccttt

SEQ ID NO: 546159 - DNA, 97 bp, Homo sapiens
tcatcactaagcgggatcttgccctcagtgaaggagatattcacactttgggcatgagccagaaggagagctctaagtctgccatgatgtatattca

SEQ ID NO: 546160 - DNA, 82 bp, Homo sapiens
gatggaactatcttatgcacccaagaagtatgatgcgtttttggcctcagagtctctgatcaagcagattccacgaatcctc

SEQ ID NO: 546161 - DNA, 100 bp, Homo sapiens
tggtgaagctactcaatacgcgccacaacgtccgactgcactcacacgacgtgcgctatgggtcaggagtatctaactatcaagttgaagaagatatagg

SEQ ID NO: 546162 - DNA, 100 bp, Homo sapiens
gaagctgcacaggaagccgtgaaactggttcaaaccttgtactactcagctgatcacaagctgcttgatgggaacctactagatggacaggctgaggtgt

SEQ ID NO: 546163 - DNA, 85 bp, Homo sapiens
gcctctggatgaaacgtcaggaatttactacacagggtggcattgtgtgtcccagagtgccggagcgagtcccagaagagaggcg

SEQ ID NO: 546164 - DNA, 75 bp, Homo sapiens
caactttatcaaatttgatacaggcattgctaccatttatgttcgttataagcaagttcatgctctgagtcctga

SEQ ID NO: 546165 - DNA, 82 bp, Homo sapiens
gcagctgtcgccgccgctctcagctgcggttggatttctcacgatgtccagtgttatctccatgtctgcccctttcttcctg

SEQ ID NO: 546166 - DNA, 75 bp, Homo sapiens
attctgcaagacaaagggaagaaataaaattttcccatactgaaaacctctgtagaggagcaggatgcaaccgac

SEQ ID NO: 546167 - DNA, 100 bp, Homo sapiens
gacagaatcacttatattcctggtacacagattactttccctcccaggccgtacaactctgcttccatgtctccagggctggtgaattaccatatctccg

SEQ ID NO: 546168 - DNA, 82 bp, Homo sapiens
acggggttagcggagcaatgcgcaggaataaggaagcgacctgcaaccgacggtcaaaatgcagatcttcgtgaaaaccctt

SEQ ID NO: 546169 - DNA, 75 bp, Homo sapiens
ctgggatgagcaaggtgtaaaggcaacttggcattaagaacggaatgttttttgggcatgctaaacaactatgtc

SEQ ID NO: 546170 - DNA, 90 bp, Homo sapiens
gaagcgcgcagtcgccgggtgggtctctccccagcgacgatttgggtggatggaggaagccttgtaggagaagtaaatgaagatggggag

SEQ ID NO: 546171 - DNA, 100 bp, Homo sapiens
acaggtcttcccattgtccagccatcgaagcagaaacagtaacagaggatcagtggtcccaaaactcatctctcaggatgaggctgatcgacgcggaaag

SEQ ID NO: 546172 - DNA, 82 bp, Homo sapiens
ctgcgtcctcatcgggcttatgttcgagaccatggtgaatccgggcagcagctcgcagccgcccccggtgacggccggctcc

SEQ ID NO: 546173 - DNA, 80 bp, Homo sapiens
ggggtcggcgccgagtgggaggatggcggaaacctgcctagagctggaacgttacctccagagcgagccctgctatgttt

SEQ ID NO: 546174 - DNA, 74 bp, Homo sapiens
tgccccgccctggggacgaagagctgcagctcctcctgtgcggggtgtcaaattgagaaccaggtagatcccca

SEQ ID NO: 546175 - DNA, 100 bp, Homo sapiens
ccacaatcttcaatgagtaaacatattccttaagactttgaccccgacgcaggcttcagtgattgccgcggatcagaagcctgagcactttggctcgaga

SEQ ID NO: 546176 - DNA, 82 bp, Homo sapiens
ggtgtacaaatacccctttgaattaattatggctagttttgattcatcatggataatctgtcatcagaagaaattcaacaga

SEQ ID NO: 546177 - DNA, 98 bp, Homo sapiens
agtgagcaccttttggcccaatgaatatcagagtacaggggctcaggtccaggtggcaggggatatgctacccaactcaactgagcgggccatcacta

SEQ ID NO: 546178 - DNA, 89 bp, Homo sapiens
ctcactcttctatattgcctttgtcttgaaagatatgaagcttttgcgccaggtccactcagctgttgaagaaatggatggattagatg

SEQ ID NO: 546179 - DNA, 88 bp, Homo sapiens
gtgctgacgaggtttacattctccgatgcaggtgctggagaatctggtaaaagcaccattgtgaagcagatgaggatcctgcatgtta

SEQ ID NO: 546180 - DNA, 83 bp, Homo sapiens
gctaaagcagcgtgcgttcagccctggggtgaggaagaggatggagatgaagatgaggaagctgagtcagctacgggcaagcg

SEQ ID NO: 546181 - DNA, 101 bp, Homo sapiens
ggcgggcggcatcggctgcgagctcctcaagaatctcgtgctcaccggtttctcccacatcgacctgagccccccaagatgaacccagtggtggagccact

SEQ ID NO: 546182 - DNA, 82 bp, Homo sapiens
tgccgctcctaagcctgcacagccgcggcggcagcagcagtgagaggatgcctaaatcaaaggaacttgtttcttcaagctc

SEQ ID NO: 546183 - DNA, 82 bp, Homo sapiens
ccggagggaattcattgagaaatatgacaagtctctccaccaagccattgaggtcctgaggcacgtgaatggccaggatcag

SEQ ID NO: 546184 - DNA, 75 bp, Homo sapiens
tgagttttatgtgatggaattttggccaatggaatggccgttgctccagggagaactgcaaatatcttcatccac

SEQ ID NO: 546185 - DNA, 82 bp, Homo sapiens
ctgactgccccgcatcaccggagcgtcccagctgcgaggaggtttggtgcacctcgatttggaggaagtagggcagggccct

SEQ ID NO: 546186 - DNA, 75 bp, Homo sapiens
cggcccctcagggccacggctttagcggtgtcttttgcggacatccataaaaattcatcagagagcattttacta

SEQ ID NO: 546187 - DNA, 82 bp, Homo sapiens
agatcttgactgcatttttgggaaaagacagagtaagaagactcccgagctctattaccaggttttaaacttcgccatgatc

SEQ ID NO: 546188 - DNA, 51 bp, Homo sapiens
agcttgttcctgaggctgagccggaggtttgggccccatggtatccctgtg

SEQ ID NO: 546189 - DNA, 98 bp, Homo sapiens
tcctcattccctgcgcccccttcctctccggaagcccccaggatggtgagcctacccgttccatcccgggctatcccagttccccactgccagggaac

SEQ ID NO: 546190 - DNA, 100 bp, Homo sapiens
gcagactacggacctgtctgggtctcagccgccaaagaccccgtccggtagcgttatacgcagagcaatgggcgcaggccgtttggcatctctgccctca

SEQ ID NO: 546191 - DNA, 100 bp, Homo sapiens
aagacaggcagctgttttcagataaactaaatgagatcaatgaaaagattgctccaagttttgcagtggaatcggtggccagcatcgaaatgttcagcct

SEQ ID NO: 546192 - DNA, 82 bp, Homo sapiens
gcatacctatggctttattgacctcgactcccatgcgcttactgcagagtgggtctgggcatctgctacgacatgcggtttg

SEQ ID NO: 546193 - DNA, 50 bp, Homo sapiens
ccatgggccgggatcacattctgattgtgcgtatagcagcaaaattcatc

SEQ ID NO: 546194 - DNA, 100 bp, Homo sapiens
gcaagagcccgctctcacttttcagcggcaggcgaagggggctgaggaaaggaggtatcttgcggtaccgagtagatttccagggaatggaataccaagg

SEQ ID NO: 546195 - DNA, 98 bp, Homo sapiens
gaagtcagactcccgaaccattgctccaaatatccgttgaagcagtttcactgttacatgccttgaagtgatgaggaggtttctgttactatatgcta

SEQ ID NO: 546196 - DNA, 50 bp, Homo sapiens
attcaatgtcatccagagcccagagcagaacgtaggcgttcccggtccac

SEQ ID NO: 546197 - DNA, 83 bp, Homo sapiens
tttcacaataagagcagaggatggaacacttcagtgcattcaagtgctgaagctgctgaaagatggcagaagaagtggtggta

SEQ ID NO: 546198 - DNA, 100 bp, Homo sapiens
cttgtatctcaacaccctgagtgcggatttctgctatgatgacagtgtatgggtttcgacagaccatgatgaaattgagaatgtggccaaacaatttggt

SEQ ID NO: 546199 - DNA, 75 bp, Homo sapiens
cgaaatacagaggagtcatcctcacctgttagggcatatcacacctgaaaaattttatgtggaagcttgtgatga

SEQ ID NO: 546200 - DNA, 100 bp, Homo sapiens
caaaaccctcctcatcatctactccttcgtcttctggtgggtgaatttgtaagtgatgtcctgctagttccagaaaagtgccagtttttccacaaagagc

SEQ ID NO: 546201 - DNA, 75 bp, Homo sapiens
attctattcagtaccaccttcagatggaggataagaatggacgagcttactcacatagcatattggtatatcaaa

SEQ ID NO: 546202 - DNA, 101 bp, Homo sapiens
ctgacatcccccgcatcctggtggccggcgggacctggacttcaccatcgacctggacttcaagggccagctgtgcgagctgtcctgctccaccgactacc

SEQ ID NO: 546203 - DNA, 98 bp, Homo sapiens
ggcctgaggggattttcttaatcccaatgttgccctgaaatttatgtccaggattcaaaaagtttaggactgctaagtacttacaactacgattcaac

SEQ ID NO: 546204 - DNA, 96 bp, Homo sapiens
tgcgaggctcggagaaacaggcgccgcgggctccgcgcccggccggacccgggcccgaggcaccgtctgcgtcctgctgtccttccccttcatctt

SEQ ID NO: 546205 - DNA, 75 bp, Homo sapiens
ccacagccagagccatgcaagcgcagttctcttcggacaggattttgaatgtggaaatgacgtggaactgtcttt

SEQ ID NO: 546206 - DNA, 100 bp, Homo sapiens
cagcttgtgaggacacagcagccccatttgttatgggtgctacatgtgtgctttcagagcagtagtgtgaggaagcttggagtgggatggcaggacggcc

SEQ ID NO: 546207 - DNA, 98 bp, Homo sapiens
ccttggacagcagattttggtttaatatctgattgggacaacattcagacccatttccagtcatgattccagatttcggaaggttcacgagtgttgcc

SEQ ID NO: 546208 - DNA, 88 bp, Homo sapiens
taaactgggaacagacaaagaaacactctccttctgccacatttgttttgagctaaatattgagggaattgagtgatctacagcgcga

SEQ ID NO: 546209 - DNA, 114 bp, Homo sapiens
gtcgggggctttcgcccgggtcctcctagaaattccccccgaagaagactcccccacatctggaattctccactttaccaatacttacaggatctgggacacacagactttgaa

SEQ ID NO: 546210 - DNA, 82 bp, Homo sapiens
cgagtgttgcagagcctgcggggcaagatcttacctggagtagaacagaaaaattattatgtctgtgttcccttgggactca

SEQ ID NO: 546211 - DNA, 100 bp, Homo sapiens
ctggatctagaggcataattaggataataaatcctataacaatgcagtgtataaagaatgagctgaaagccagtggtggcgaaatcaaaattcataaaat

SEQ ID NO: 546212 - DNA, 51 bp, Homo sapiens
ctaactggggctacgactctgatgggcaggattttttatcaagcagaaatg

SEQ ID NO: 546213 - DNA, 90 bp, Homo sapiens
agctgcggaacaggacgccctctgatatgaacaggaagcggtgcaggaggttcctagagttgttcagaatcctccaaaaccagtcatgac

SEQ ID NO: 546214 - DNA, 100 bp, Homo sapiens
gcagggtccggaacagagccccaacgatgctcacagaggccacatccacgtcctccgagcctacatcaagacccaagtgaacaaagagctggagcagctc

SEQ ID NO: 546215 - DNA, 83 bp, Homo sapiens
gaggatgcggacgcggaggccgcctggggtagcggcggcgggagtcctggcgctctgcaggctgaccccgcactacatctacc

SEQ ID NO: 546216 - DNA, 100 bp, Homo sapiens
atccgcgacttcctggccatcgttttcttcgcctccataggtgctggagatcagaatttatttacctctgtttatccaacgctctctcagcagcttccaa

SEQ ID NO: 546217 - DNA, 74 bp, Homo sapiens
ctttccactcggctcctgtcgtccgttctctcaggctcccgttcagagtaatcaagtcagaggattatatgact

SEQ ID NO: 546218 - DNA, 98 bp, Homo sapiens
cggcagaatgctcttctggagcagcaagggaatcttggaatcagaccagaccagacgagtgagcctaaaaaaacactggccgatcacctgggaatgat

SEQ ID NO: 546219 - DNA, 101 bp, Homo sapiens
cgccgaccaggcctggctcgcgcctctcccaggacccgcctggctgcgagatatacggtggagcatggcttcccgcaccagcccagcgccctcggctacag

SEQ ID NO: 546220 - DNA, 100 bp, Homo sapiens
ccaggagcccagctcacagccaccggtaccttcttccagactcccaagacagctgggctgcgaccaatggaaacaaaggacattccagtagtgcaccagc

SEQ ID NO: 546221 - DNA, 75 bp, Homo sapiens
caggcatgccccgctacgagctggctttaatcctgaaagccatgcagcgggacaggctgcgggaggagctgcagg

SEQ ID NO: 546222 - DNA, 86 bp, Homo sapiens
caaaggcaagagtaacagcagcgccgtcccgtccgacagccaggcccgggagaaatgggagacctttaactctgaaggacatatgg

SEQ ID NO: 546223 - DNA, 120 bp, Homo sapiens
taagaaggtgggcgttatcttccgactgatccagctggtggtcctggtctacgtcatcggacaatgcagatcttcgtgaagactctgactggtaagaccatcaccctcgaggttgagccc

SEQ ID NO: 546224 - DNA, 75 bp, Homo sapiens
ccaaaccgggattcacgtgccagagttttttagccagacgccaattctccaggcgctgcagcatgtccaagcgag

SEQ ID NO: 546225 - DNA, 76 bp, Homo sapiens
acaagaaagactccacctactatggaggttacctgtgcatgacagatgagtggttctctgagtatgtctacgaagt

SEQ ID NO: 546226 - DNA, 50 bp, Homo sapiens
cataccattaggatcttaccgatttcgacctcatcaggatgcaaaccccg

SEQ ID NO: 546227 - DNA, 75 bp, Homo sapiens
cggcggctcagccccatcatgctgggcttccagctggtctttttaccctttgctgatgataaaaggaagatgccc

SEQ ID NO: 546228 - DNA, 51 bp, Homo sapiens
gctgcctcagttcttagcgcaggtaaatgagctggatggtatcccgttgat

SEQ ID NO: 546229 - DNA, 104 bp, Homo sapiens
cctgaagccggaagctacctatctggtagggagctcccccagcaccgaagactgcgatgggggatatgagactttctactcggaatatcctgagtgttgcgtgg

SEQ ID NO: 546230 - DNA, 100 bp, Homo sapiens
cgccatcgccagcatcgccaacccggactggatcaacaccggggagtctgcggcattaggagaaacactggcagagattcaaagaagccactaaagcaga

SEQ ID NO: 546231 - DNA, 100 bp, Homo sapiens
tggctccagctctgtctacttcacggcctcctcgggagccacgttcacagatgctgagagtgaagggggcattgacttgggcaaggcaaatgagcccaac

SEQ ID NO: 546232 - DNA, 100 bp, Homo sapiens
tggtgatgaacttagcagcagctccactgaacagataagggctttgaagacaagattcccaaaaggagattctctgagatgcaaaatgaaagacgagaac

SEQ ID NO: 546233 - DNA, 76 bp, Homo sapiens
ggacaagttcgtggccaccatgtaccactacctgcagtttgcctactataagtgtcagcagatccggaagctcatc

SEQ ID NO: 546234 - DNA, 100 bp, Homo sapiens
gtcttcctgctggggctcatgtttgaggttcagattttgcttaaactgtggagcaatggtttcagtttagatgatggagaattgagaccttacaatgaac

SEQ ID NO: 546235 - DNA, 100 bp, Homo sapiens
gtctagggcgccatatctcccaagtgaggcatctgaaacacacaccgtggcctccaacactgcttcagtggtggacttgctttgtgaagagacagttcat

SEQ ID NO: 546236 - DNA, 100 bp, Homo sapiens
ccccattttacattttccctcggcagtggaagcttacaaaacgactgggaagtttccaaaatcaatggtgcagtagacattgttgcaatcatgatcggca

SEQ ID NO: 546237 - DNA, 100 bp, Homo sapiens
tggctccccacctcacacattatgcggacttattgcctggacactgctgactacgtgaagccagtgaccttctcagtcgagtattccctggaggaccctg

SEQ ID NO: 546238 - DNA, 100 bp, Homo sapiens
gggctatcgtcgtgacatggcattgtctgatgttacagaagaatctgaaatcatttcggtagagtacagagagatggatgaaagcttggccaacctctca

SEQ ID NO: 546239 - DNA, 101 bp, Homo sapiens
tagctaaatacggaatttttaaagtctttagtatgttgaactggaaatataggacatgcgtttgagatctactgtgagacccagatgatgtggtaccagtt

SEQ ID NO: 546240 - DNA, 73 bp, Homo sapiens
taagtaatgcactgaagagaggagagatcattgcaaagcagggaggaggtgtggaatatcaaacaaatgatta

SEQ ID NO: 546241 - DNA, 75 bp, Homo sapiens
aattgggatgggtccccagtgagctcctggattctgctgattactacaatgcagctagaacgtgaaaaggctctt

SEQ ID NO: 546242 - DNA, 122 bp, Homo sapiens
atcttggtcaccaaggaacagcaccggcaactcaaatctctgcaagagaaagtctccaagaaggagtctcagagaaagatgtcacatctgctaaagcactgtatgaacatttgactgcaaag

SEQ ID NO: 546243 - DNA, 100 bp, Homo sapiens
accaacaactatttattgagggctagaacatctaaatatattgctgtttgggttagcacaaaacctgcagaaagctctttcaaaagttgacatatcattt

SEQ ID NO: 546244 - DNA, 82 bp, Homo sapiens
gggaggatatagcctgcctatatgctgtggaaatgaacggggagcagcagcttgatgcagaacattctagtatgccagtaga

SEQ ID NO: 546245 - DNA, 96 bp, Homo sapiens
cccaagaaggactttgtcttctgcctcagcaattccctgggtgatgccttcctttttcaggtccaaactgctttgcagaaaccgcggtgatccctg

SEQ ID NO: 546246 - DNA, 85 bp, Homo sapiens
agtctcagatcaaggattcggagaaaggtctctacaggtccctcctcgttagtatagtggttaccagccagtcttgtctggtcaa

SEQ ID NO: 546247 - DNA, 142 bp, Homo sapiens
gatttgaaactggacaatgtattactggactctgaaggccacattaaactcactgactacggcatgtgtaagatcaacctctccacttctcctacacctgcacagttaataagccgttcccaggcttccagttctaccagcg

SEQ ID NO: 546248 - DNA, 83 bp, Homo sapiens
aggagagactgactaaagaccgaaatgatacaatgcagatcttcgtgaagactctgactggtaagaccatcaccctcgaggtt

SEQ ID NO: 546249 - DNA, 75 bp, Homo sapiens
cagtgtggacgagatactggtgccatgaaccaaggtgggaaagctcgaattacatctttacaagaggaggtgaag

SEQ ID NO: 546250 - DNA, 99 bp, Homo sapiens
gaacttggttccccctccctcagcttccgccccaaaagagggagacgtggtgggcggtccttcctgtgacacgacccttgagtgacagttctatttgat

SEQ ID NO: 546251 - DNA, 75 bp, Homo sapiens
acgtctccgagtccctcaactctctacgctttgcctccaaggcgccaagcccatctttgtgtgcttgcatccaac

SEQ ID NO: 546252 - DNA, 83 bp, Homo sapiens
gccctctccatttctcctctcagcagaagtccaggttcccatgcagatgtgccaggaggaacagaccagctacatggtggtgc

SEQ ID NO: 546253 - DNA, 88 bp, Homo sapiens
agaagtgatcgctcagctggagaacgcggctaaagttctgatgattttaggtgatgggcaagtcagaaagtcagatggatataactga

SEQ ID NO: 546254 - DNA, 82 bp, Homo sapiens
gaaacacagtcgaaaagaatactgtgaattatgcaagcacagatttgcttttacaccaagaggaagaacgtgcaaaacgtga

SEQ ID NO: 546255 - DNA, 90 bp, Homo sapiens
gatgaacactatgattaccaccaggagattgcaagaagctttgcatcgtccctatggttgtgatgttgaaccccaggcactaaatgaggc

SEQ ID NO: 546256 - DNA, 100 bp, Homo sapiens
gaaaaactcagtgagacacaatttatcattgaataagtgttttaagaaagtggacaaagagaggagtcaggaattcaaccttattgatagaagagaactt

SEQ ID NO: 546257 - DNA, 82 bp, Homo sapiens
tacccctcctactccggcagctcccggcggagagcggcagacggcagcctaggattttttatcaagcagaaatgcatcgaac

SEQ ID NO: 546258 - DNA, 96 bp, Homo sapiens
agaaaagcctaggcatttctgtaacatttggcactactgcagtcttcagttaagcaacaagtagaagctattgaaaaacagtacatttctgcaatt

SEQ ID NO: 546259 - DNA, 95 bp, Homo sapiens
ggtcctctggctgttgttcttttcttttccatgatatcattatatggacagtttaggccttatgccagcctggaccatcttggaggcagtgtagg

SEQ ID NO: 546260 - DNA, 50 bp, Homo sapiens
agtgaggctagatcctgactctggacaactattgtggacgatgaaaggct

SEQ ID NO: 546261 - DNA, 73 bp, Homo sapiens
ccgttaagtcccccaaagatgagatttacctgtgagatgtttcatcccaacaatatgaggccccaggattcct

SEQ ID NO: 546262 - DNA, 82 bp, Homo sapiens
cctgcgcgggctcgagagctcgccccgaacgggggtcttcctcctccgccgttgacagggagcaccccatcggagacaagag

SEQ ID NO: 546263 - DNA, 90 bp, Homo sapiens
ctgatataaaacgatgacattttcaggaaaatcctgaaataagcgggttttgaaaacaaaaaaaagaaggagtggaagagggggccagga

SEQ ID NO: 546264 - DNA, 50 bp, Homo sapiens
ttgggagactatctttggcaacagacaatgcagatcttcgtgaagactct

SEQ ID NO: 546265 - DNA, 100 bp, Homo sapiens
gcggacgcgactcgagggtgacgctcgctccgctcgtcccgctcgtcatggcctacccgggatacggaggagggcagtctctggtcccagcccaccccat

SEQ ID NO: 546266 - DNA, 75 bp, Homo sapiens
gctgaggacaaagtagatggcctccagaaacaaacgggtgagaaggactggcagaaatacgagactgctcggcgg

SEQ ID NO: 546267 - DNA, 97 bp, Homo sapiens
gagagagtcccaagtacgtccacggtcagccttgcgcttaacattggtatcccttccctgacaaagtgttgcaaccaacacgacaggtgctatgaga

SEQ ID NO: 546268 - DNA, 80 bp, Homo sapiens
gctgagaacctttccgttcctgtcattggagggttttcagagaaagatgctgatgaggtgaaaggaatttttgtagatac

SEQ ID NO: 546269 - DNA, 75 bp, Homo sapiens
ctcctaaccttcccttcttgaacccccaggtaaaatcccagaggaatccaaagccctctctttattggctcctgc

SEQ ID NO: 546270 - DNA, 100 bp, Homo sapiens
tgctggacaaggaccctgacctgcctgtcgtcgtggtggccaacaagcaggaaaaggtggacctggactgagggtgtaaaatccctggacacattcgtgg

SEQ ID NO: 546271 - DNA, 83 bp, Homo sapiens
ctcttggaaggtgcatctgcagtacaggatatgaagaaattgagggttcttgccatggtgaaggcagagtatgtgcatctcaa

SEQ ID NO: 546272 - DNA, 90 bp, Homo sapiens
cgcacacgctcggcgctgcgatccgcgcatataacggcgacattgactacagcaccgtgctcctcggcatgctggtgacgcaggacgtgc

SEQ ID NO: 546273 - DNA, 75 bp, Homo sapiens
ctttgcacctcgcagctaaaaacggccacatcgacatcatcagggaaatgtttcaacgtgcgcaagcgttgcggc

SEQ ID NO: 546274 - DNA, 75 bp, Homo sapiens
gctcgctacactactcctgaggatgatgccccttggtgtggccactgcaaggctctggcccctgagtatgccaaa

SEQ ID NO: 546275 - DNA, 82 bp, Homo sapiens
gactacgggagttgggaggacccgggacaccgcacagccgggaaatggctaccggctctctgaccagttccacgacatcctc

SEQ ID NO: 546276 - DNA, 75 bp, Homo sapiens
tagacgctggatttttttcgggtagtggaaaaccaggtgtttcccattaaacactaccaggacaaaatcaggcct

SEQ ID NO: 546277 - DNA, 90 bp, Homo sapiens
cgcgtccaggcctgacagctctgcggctcgggccctgaggcaagaaaattggatgtatattttgaatatgaagaaaaaataatgagcaaa

SEQ ID NO: 546278 - DNA, 101 bp, Homo sapiens
acgtcaacaatgatgtgaaccttcgcattcagaatttgaccatcttggtgagaaacattaagacctactaccagtctctgctggatgaaccgaatcctaac

SEQ ID NO: 546279 - DNA, 100 bp, Homo sapiens
gaacattgaattcagggacctttcctattcggttcctgaaggaccctggtggaggaagaaagagagaactcgatgccaccgcaacggtattggcgaaccg

SEQ ID NO: 546280 - DNA, 83 bp, Homo sapiens
cgccaagcgcttcgccatcgacataggatggataaggtgggggatgccctggaggaagtgctcagcaaagccctgagtcagcg

SEQ ID NO: 546281 - DNA, 97 bp, Homo sapiens
agcagaggggagagcggccgccgccgctgccgcttccaccacagacgcaaacatgcagatctttgtgaagaccctcactggcaaaaccatcaccctt

SEQ ID NO: 546282 - DNA, 49 bp, Homo sapiens
gagggagccatgaagcattacgaggattcacaagacagtgatgatgaaa

SEQ ID NO: 546283 - DNA, 100 bp, Homo sapiens
ttcatcaaagaagattttgaacttcagttgaacaagcaactcatatttgattcaggagccccttgacagagcggaaagtatcgatacccagttgttgtgt

SEQ ID NO: 546284 - DNA, 75 bp, Homo sapiens
gtccttgctggtgcatgcgtcgtcggcctctgggcagcaggacgccaggaaagcatgtgcagatgcaactctctc

SEQ ID NO: 546285 - DNA, 100 bp, Homo sapiens
gcgacctgggcaccagcaggacccgaggccaggagccaggggcccagaagttttccaagagataacttcaccaagatgtccagtgataggcaaaggtccg

SEQ ID NO: 546286 - DNA, 100 bp, Homo sapiens
tggcctgaccctggtgtgcagctcggccccgggccccctggagctggacctgacggaagaagatagtggtgagctggcaaagccaaagattggttttcca

SEQ ID NO: 546287 - DNA, 101 bp, Homo sapiens
ctgatagagaccctagtaacatggatgattgtcttttgaaagtgtggtatcctatgactggttggaagtcttcaattatacctcaggatcatcatgaagta

SEQ ID NO: 546288 - DNA, 100 bp, Homo sapiens
ccacgacggcgccatcaccgagcgcttgatgtgcgcggagagcaatcgccgggacagctgcaagttggtagctggcagtgttgtgatggcttttgaagaa

SEQ ID NO: 546289 - DNA, 74 bp, Homo sapiens
cccgccccgaggttggggctttgaagaatgcagccgggaattgaatgatctggcacgggaccctccagcacagt

SEQ ID NO: 546290 - DNA, 75 bp, Homo sapiens
caattttttttcaagaactgccgtcttctttgcctgcactaatggggatttgtggggccctttgatcctttgtgt

SEQ ID NO: 546291 - DNA, 75 bp, Homo sapiens
cactggaacagaatcaacccagaacggagagctccctcctagaaaaggtctcagctgagtctgctctgatcaccc

SEQ ID NO: 546292 - DNA, 100 bp, Homo sapiens
agaagacctgcacgacgttcatagttgactccacagatccgggggctcggggttgcccgctcccggaatcccggagtctccgcggcccgaaccgagtctg

SEQ ID NO: 546293 - DNA, 83 bp, Homo sapiens
tgtcccagctggattcggtgcgggtctggctgggcaagcactacaagaagtgagtccattcttgcacaccgagaaaatatgcg

SEQ ID NO: 546294 - DNA, 101 bp, Homo sapiens
cagggtgggagacctggaagttttagcctagctgttctcaaggcggattaattagcccaagaaacattatattcatggtgataaaagaaaatgtggctgaa

SEQ ID NO: 546295 - DNA, 75 bp, Homo sapiens
ggtggagtccaacttgcctggaccagcttaatggttctgattcctaagcggctgtacaaggccctctccctgctg

SEQ ID NO: 546296 - DNA, 98 bp, Homo sapiens
tggcctcagcagtggctgccatccggacgttgctggagttcttgaagagagataaagaggaaccgctgctgctggccgaactcaagcccgggcgcccc

SEQ ID NO: 546297 - DNA, 76 bp, Homo sapiens
aggatcttgtgtgctccatagtttatcaaaagattatgagcctcaaacaatttgtgagcatctccagtacttgttt

SEQ ID NO: 546298 - DNA, 127 bp, Homo sapiens
ggagggagagtctgggccgcgcgggagccgcagggcgccctagccttcgcagaaacgatggcggaggaagaagtgtttgaaagatgtatggtgatcttgaaacctccagacacaagaaaacttctag

SEQ ID NO: 546299 - DNA, 112 bp, Homo sapiens
acaatgctctcaagctagctcacaaagacaccaaagtttctattaaaggcagcgaggtcacaggccccacctttgctgatggcgagctcatccccagggaacccggcttttt

SEQ ID NO: 546300 - DNA, 87 bp, Homo sapiens
gtaaagtcgagtatctggtgaagtggaaaggatggcccccaaaacctgcctagagctggaacgttacctccagagcgagccctgcta

SEQ ID NO: 546301 - DNA, 95 bp, Homo sapiens
tgagacggcggcagcagcggcattcaggttctgggttgacaaatatcaagacggaggagatctctgaagtgaagatggatgcagaattccgacat

SEQ ID NO: 546302 - DNA, 83 bp, Homo sapiens
tggattttcagaatggggatacttgaatgtttccaacatggctagatccatcagaaactgaagccgtggagaacgctctcggg

SEQ ID NO: 546303 - DNA, 100 bp, Homo sapiens
gccatttccttgatgcgcaagttcattgcctaccagttcacagacacgaagcggcaccatgtactacagacggctcatccctcccctttgtcagtgtata

SEQ ID NO: 546304 - DNA, 147 bp, Homo sapiens
caccacccatgaggacgtggaggtgggaaggtgtgtccggaggtttgcaggggtgcagtgtgtctggtcttatgaggtacaccaggggttggaaaaaccacactaggcaaagaacttgcgtcaaaatcaggactgaaatacattaat

SEQ ID NO: 546305 - DNA, 100 bp, Homo sapiens
ggtttgagccaggctgccctcctgctgctgcggcagcctggggctcggggactggctagatctggtatgttagagcccaccaaggaaccactgaaaccac

SEQ ID NO: 546306 - DNA, 100 bp, Homo sapiens
ctttctgaagctcatgaagactgtgtaaataatatcagtggatttggcagctaattcactcttaaacaagttaatccatcaatccttagtagaatccagt

SEQ ID NO: 546307 - DNA, 100 bp, Homo sapiens
cagcaacggcggcctccaggcctcaggccccctcaccatcctagaggtcaagatcagctctggctagttcccgatgggtcccggctcggacggtccgatg

SEQ ID NO: 546308 - DNA, 75 bp, Homo sapiens
ggagaaggaaggcatggaaagttccagccggttcgagagctagaaacctccacagctgttgagaaaaaggagaaa

SEQ ID NO: 546309 - DNA, 90 bp, Homo sapiens
cttcttcaggagagcgccccagggcaagccccgctccggccaacaagttgtggcagcactgcctgaaggtatgagaccagattctaatct

SEQ ID NO: 546310 - DNA, 82 bp, Homo sapiens
cagagcctcgcctttgccgatccgccgcccgtccacacccgccgccaggcgtccgagctgggccacagcctgaacgagaacg

SEQ ID NO: 546311 - DNA, 80 bp, Homo sapiens
acctggtaatagaggacttgaagcagaaagcaagtgaatacgagtcagaaggtgctggcccaggccctgactccctgaag

SEQ ID NO: 546312 - DNA, 113 bp, Homo sapiens
tctcctcctcggcgggagccctcgcgacgcgcccggcccggagcccccagcgcagcggccgcgtaagactttgaccccgacgcaggcttcagtgattgccgcggatcagaagc

SEQ ID NO: 546313 - DNA, 90 bp, Homo sapiens
cccttgcagatcgagatttgcgtcctagagtgggaaaaaagcagaggccagggcgccgaaatggtggagtcaatgaagaaagtagcaggg

SEQ ID NO: 546314 - DNA, 75 bp, Homo sapiens
tgaggaagtactgagcctgttggaggaactggcccggaaacaggaggacgacctcagcagccatgtcgaagcccc

SEQ ID NO: 546315 - DNA, 75 bp, Homo sapiens
caggcagggaggagaccggcacccagacaggtggcgaaggcagaggagtggagccttttgccagcttgaccgagg

SEQ ID NO: 546316 - DNA, 99 bp, Homo sapiens
ttgacaaagaggaggagatacaagatattattcttagatccggattcaccattgttcagggacttaccaatttgggattcttccaggagctgaaaactg

SEQ ID NO: 546317 - DNA, 83 bp, Homo sapiens
aagaaccaaccctgccagcacctggaccttggacattcagacttcagaatggtgttggagcgggccggagagaagtagagtgg

SEQ ID NO: 546318 - DNA, 83 bp, Homo sapiens
ggactacaaggtggactgcttgctcagctcagtatcaacacttatgtattggtaaaggttttcaaggtgtcatgaaaagatgg

SEQ ID NO: 546319 - DNA, 98 bp, Homo sapiens
cagccatcgtccgggccatggacactttgggcatcgaatatggtgataaggagagaaagctgagtcatggagctttcagccccagcacatggctcctc

SEQ ID NO: 546320 - DNA, 109 bp, Homo sapiens
tttcagtgaatgaaatgactcttagcactttgaaagaaaaaggctacaaagctgctttcattggaataggtgctggagaatctggtaaaagcaccattgtgaagcagat

SEQ ID NO: 546321 - DNA, 100 bp, Homo sapiens
aaatctctggagtcagaggcctgggcgcagctctggactctgcgtataacagaagatctgcctgcactgcaagtgtccccaggaggagcacatggtgaca

SEQ ID NO: 546322 - DNA, 85 bp, Homo sapiens
aagaagcagaaagttgagcgcattgcatcacatgattttgaccccacagatatggaatgtgcagatgtcccactattaactccaa

SEQ ID NO: 546323 - DNA, 98 bp, Homo sapiens
gctgcagctcctcctgtgcgggtctggagcccccaactcccttgacagtgtacgctggagcaggttccagggtggggctgccctgccgcctgcctgct

SEQ ID NO: 546324 - DNA, 140 bp, Homo sapiens
tggagggtgagcgacctgcgagactcacaagaggggaagctgacagagatacctacagacggagtgctgtgccacgaagtacaagtagtactagtggtagcagtggaagctcaactaaaaatatctgggttagtggactt

SEQ ID NO: 546325 - DNA, 76 bp, Homo sapiens
gttttggggacaccagggcctgaggagcagtttatcctttcccaggttgcactcctggagcaggtgaatgccttgg

SEQ ID NO: 546326 - DNA, 90 bp, Homo sapiens
cagtggttgaattctcaagaaacgtgctgggatggcaaggtattggcaagcttgccagtgtacctgctggtggggctgtagccgtctctg

SEQ ID NO: 546327 - DNA, 100 bp, Homo sapiens
gaggagtttcggctcagtggggaggccttcgactggctgcttggggagattgagtccaagttcaaccaagccattgatgtacagttacccagcacgtgta

SEQ ID NO: 546328 - DNA, 100 bp, Homo sapiens
aacaagcacaggcctgaaggggagcccaagggtgcacagcccctggctacgagaaggccagctggttgggggaacagccccagttctggtcgaagacgca

SEQ ID NO: 546329 - DNA, 82 bp, Homo sapiens
gagcttccgcggtgtcattctgacctcgaccacgtggccgtgaccatccagctcctccttagacgaggcaacatcttcctca

SEQ ID NO: 546330 - DNA, 100 bp, Homo sapiens
gactggtgacttcacttttgagtgcaactgccttccaggtgactgtggggatcatgttgttataatgaacacaagacacattgcattttctggaaacaaa

SEQ ID NO: 546331 - DNA, 75 bp, Homo sapiens
caccatcttctcctgcgacgacttctacatcctgggcagtgggctgaaactgcttggaaactccctgctgaaact

SEQ ID NO: 546332 - DNA, 82 bp, Homo sapiens
cctcgtccgagcccacccgcctttggaggtttggtgcacctcgatttggaggaagtagggcagggcccttatctggaaagaa

SEQ ID NO: 546333 - DNA, 83 bp, Homo sapiens
gttccatctgtggaaggacctaccaaccagactaacgctgctttactcaaccaccctcttcctggccagagaggccttccgca

SEQ ID NO: 546334 - DNA, 90 bp, Homo sapiens
agacgcggtggagccgccggagtctgagaagaaacacagtggagcgaatgtatcgagacacattctcctacaacttttataatagaccca

SEQ ID NO: 546335 - DNA, 83 bp, Homo sapiens
ccggatcctgaggaggcagctgcggtggcagctgctgagttctcggtgaaggctgaaggtgatgtggccgccctcaaccgacg

SEQ ID NO: 546336 - DNA, 74 bp, Homo sapiens
cctcctgagtagctgtgattacagatggccctctacctgacccaagtatgatccgtggcagtgtgccaaaccag

SEQ ID NO: 546337 - DNA, 107 bp, Homo sapiens
cgtggtcctgatgccaacagtgtaccagcagggcgttggctatgtgcccatcacagtgtggacgaatgtggaacctcgctctgtggctgtgttcccttggcactcct

SEQ ID NO: 546338 - DNA, 100 bp, Homo sapiens
ccggcgtcccgggggcgcagggaaggagggcgtccgagtcaacaaccgcttcgagctggtccctgagcgtgagcagcgtctcctcagtgtccagtgctac

SEQ ID NO: 546339 - DNA, 98 bp, Homo sapiens
catctctacacgttgaacgatgtactgtaagattgatgttaaaggcatggtgttcaccccacttcatcagcgtacataagttatctcttcttttggac

SEQ ID NO: 546340 - DNA, 82 bp, Homo sapiens
tggaggcacagctgcagtctgacgagaggggcctctccttccgatgaaaagagaaaggaagaatggactacagccaccaaac

SEQ ID NO: 546341 - DNA, 75 bp, Homo sapiens
gtggcaaacctaaacagtcatattactttgctggatttcaaggtatacactgaatatcctcgaagaaattggtgg

SEQ ID NO: 546342 - DNA, 101 bp, Homo sapiens
gacttgcttgggtaaggacatgaagacagttcctgtcataccttttaaagtcatgatgctatggactcctactacgactacatatgggatgttaccatttt

SEQ ID NO: 546343 - DNA, 99 bp, Homo sapiens
ctttgactccgatgagccatggacgctaggaaatgccaaccatgacggtgtgtgtggtttcagcgcagcatggctgtggtcatccgtttgcaaggtctc

SEQ ID NO: 546344 - DNA, 83 bp, Homo sapiens
gctgctcgacgaccaagaggcgaagagatatcagaaaggtagatttgtcaaaaaacctgttgtcatcatgggatgaagtgata

SEQ ID NO: 546345 - DNA, 116 bp, Homo sapiens
attgacgccatgtcgggttattcgagtgaccgagaccgcggccgggaccgaggcacatgattaagtaccggtacatcccgttcacacatgggaagagaaggtacagaggcaaggag

SEQ ID NO: 546346 - DNA, 51 bp, Homo sapiens
ggaaatggctgccgaaaacaagccggaaggagttgatccctgaattttatt

SEQ ID NO: 546347 - DNA, 50 bp, Homo sapiens
cagaattggagacccgtctggaaaagatggagtctcggtctgtcgcccag

SEQ ID NO: 546348 - DNA, 100 bp, Homo sapiens
ggaagattcgatggacatggacatgagccccctgaggccccagaactatcttttcgattggaaacctccacctgcacaaactggatgaacttgactgcct

SEQ ID NO: 546349 - DNA, 100 bp, Homo sapiens
gtgctggctacatggagccctatgaggcacagaggatcatgacagatttggatgatccagtagtaactgttcatcaaagtataggtgaagctaaagaaca

SEQ ID NO: 546350 - DNA, 100 bp, Homo sapiens
ggaaccgtcgctatgccaagaagtgccaggtggagcggcaggaaggccactcacagggcttcaacaagctagctgagggcccagaatgtgttcagtatct

SEQ ID NO: 546351 - DNA, 77 bp, Homo sapiens
gtctggagtgcgtgggggaccggctgttggcgggagccttcacgtaaatgggtccagtcatgcctcccagtaagaag

SEQ ID NO: 546352 - DNA, 99 bp, Homo sapiens
agaagaactggaacgttgtaaagtgcaggccgactgaaccaagctaactcctccggaagagagtccaaggtgcctggtgcccgaagcgctcagaatctg

SEQ ID NO: 546353 - DNA, 72 bp, Homo sapiens
cgggagcacgggcgccggcatagtacaatgaggcagccagcggatcttggataacgaaggaggcccaacttc

SEQ ID NO: 546354 - DNA, 87 bp, Homo sapiens
ttcaggtttgagtatcttagctctagcacaattacttggactagtttatatgaaatttgtggaaggagtctcgctctgtcgccaggc

SEQ ID NO: 546355 - DNA, 100 bp, Homo sapiens
cggccaccggagccatcagtgcactctccacacaaggagatgcaagtcaggtgattgggcctcttactgaaggacagagaagaaatgtggcagtagtgaa

SEQ ID NO: 546356 - DNA, 100 bp, Homo sapiens
gcaccctgtgctggagagcggcctcctggcatctgccggctgctccgcaccccggggtcccaggaagggcggcccagggtcctcactgagcagcgagtcg

SEQ ID NO: 546357 - DNA, 100 bp, Homo sapiens
cgcgcagcagctgcagcagctcaagcacctggagtccttggaacgtgctcagtcactttcaatgggcaccaggagaaaggttttggttcttggatctggc

SEQ ID NO: 546358 - DNA, 100 bp, Homo sapiens
cgcgaaccgcagtatcatgctggccaagaagatcatcattaaggacggaggcacggattggtagcttatgtcgatcttgatgaaagagcaattgatgctc

SEQ ID NO: 546359 - DNA, 125 bp, Homo sapiens
ttagaatcccaagaaaatcaaatggcatccggggatttctgctcacctggagaagggatggaaatacttcaacaaggtctcttaaccttcattaactgtgcctatgtcaaatggggaaccctggt

SEQ ID NO: 546360 - DNA, 98 bp, Homo sapiens
gccaacattcagcagcgtcagaagttggagtcattcgttgcccagtttgcagccaagaatgtgcagagagacacatcatagataacttttttgtgaag

SEQ ID NO: 546361 - DNA, 97 bp, Homo sapiens
ttagttctggggagcgcctcgtcgacatgagtgatgtggaggaaaacaacttcgagggcagagtaaaatagaactgcacgggaaacccatagaagtt

SEQ ID NO: 546362 - DNA, 100 bp, Homo sapiens
ccaagaaggtgccctctgctgacaagagaacttaaagcagcagtattacacaggatacacagagaatgaagtattggaagtcatgcagcacatggccaag

SEQ ID NO: 546363 - DNA, 100 bp, Homo sapiens
gcagaagctactcaaatgcagtcggcttgtcctggctcttgccctcatcctggttctggaatcctcagttcaagatcaggtatttggatccaatctcgct

SEQ ID NO: 546364 - DNA, 100 bp, Homo sapiens
tgggacagcaggagcgggtccagcttcaggagtactggcggaggggctggacgttccacgccaaaggttcgagaacttgtcttggacaattgcaaatcaa

SEQ ID NO: 546365 - DNA, 74 bp, Homo sapiens
gttcgcaccggaaaatgtagcttcccggttaagttctggacatggcaagacatgtgccactctatcgggcactg

SEQ ID NO: 546366 - DNA, 96 bp, Homo sapiens
tcttagaaaccactgtttctgtctctgtatatgagtctgaggcagaccaactgttgggaaatacaatgaaagtgcctttactttcccgaattctgc

SEQ ID NO: 546367 - DNA, 90 bp, Homo sapiens
aaatgaatgaaagtaaacctggtgactcacagaaccttgaatctacctgttactcgtattttggacaatcttatggagatgaagtcaaac

SEQ ID NO: 546368 - DNA, 100 bp, Homo sapiens
gatgcagtgtggctctggatagcaccttatggacaggtgtgatgaatgcagactctgctaccattttggctgtttggatcctcctttgaaaaagtctcct

SEQ ID NO: 546369 - DNA, 82 bp, Homo sapiens
gtggcttgcttgaggtgtggaaagaccagaagaagatgaaggatttgggggcagagcacttggcaggtcatgaaggggtcca

SEQ ID NO: 546370 - DNA, 102 bp, Homo sapiens
gcaaagaagaagaggagaggagacgggcagaagaagaaaagaggagagttgaaagagaacaggttgaaccctcggatacgatagaaaatgtaaaggccaaga

SEQ ID NO: 546371 - DNA, 76 bp, Homo sapiens
gtgctggggctgcagcggatcaccggtgttacgttatgatgatgaagtgaagcgggtggtggcagagccggtggag

SEQ ID NO: 546372 - DNA, 75 bp, Homo sapiens
gcttccagaacgcctgccgcgacggccgctcggaaatcgtactcgtcctcacaagtgcccagactgcgacatggc

SEQ ID NO: 546373 - DNA, 98 bp, Homo sapiens
agcacatcaggtccacccatctggccgggcagtaccttcttcaagagaaatggagcccttctccaagggctcattgtcatccccaagccaggccagtt

SEQ ID NO: 546374 - DNA, 100 bp, Homo sapiens
ccactccgccatcgatgcatcccagacccccgatgtcgtgttcgcaagcatcctagcagccttctccaaagccacatgtggttcagtacatcggggagat

SEQ ID NO: 546375 - DNA, 100 bp, Homo sapiens
tctggtcgctgtcgagcctgcgagagcagaagggcctcaggagtgcaagtagctgatgaagtatgtcgcattttttatgacatgaaagttcgtaaatgct

SEQ ID NO: 546376 - DNA, 100 bp, Homo sapiens
cctggcggccaccccctcttcctcacttccctgtactctcatcgctctcggcctccgacacgggcttccttcctcggctccaccctgtggatgtaatggc

SEQ ID NO: 546377 - DNA, 75 bp, Homo sapiens
tcatctgagcattgtacctaaaacaaagggtctgcggaagagggagctgctgaaggagctgctaccagtcatcgg

SEQ ID NO: 546378 - DNA, 75 bp, Homo sapiens
ctgcagtgagccctgtttttgccaccacactccagcttgggtgtggatgaggtcaccattgtcaacattttgacc

SEQ ID NO: 546379 - DNA, 82 bp, Homo sapiens
ccaccctgcgctgccgccgctctgaggagttaaaggtgtggacactgccagcggctgcagccgacttggaatgacctgggag

SEQ ID NO: 546380 - DNA, 75 bp, Homo sapiens
tggaatcctaccaggaggtgacggctacagcatgctggccatagggattggaaccctgatctacgggcactggag

SEQ ID NO: 546381 - DNA, 100 bp, Homo sapiens
ggacgcccaggcggacgaggccgtgttagaaagtgaagtcactgcttttgctgtcttggatcaagaccagaaagaaattattgataccaatggagctgga

SEQ ID NO: 546382 - DNA, 82 bp, Homo sapiens
ctgaagctgggaggcaaaggctacaagctgtccccagaggactacacgctcaaggaagctcttcgtgggcggtcttgactgg

SEQ ID NO: 546383 - DNA, 74 bp, Homo sapiens
aaagaggaaagtggactgtccggggccgggctcaggagcagagggaagatttaggattcagatttatatcggaa

SEQ ID NO: 546384 - DNA, 100 bp, Homo sapiens
ccttacccagccaggccttcatttaccgtcccattcgacagcgggtctactcactcttactggaggactgtcaaggtcaaaatgcagatcttcgtgaaaa

SEQ ID NO: 546385 - DNA, 82 bp, Homo sapiens
attgaagctgttgagaaaagaggacctctgcgtgttctgaagataaagttagccctacatttcaagttaaggctatccagga

SEQ ID NO: 546386 - DNA, 99 bp, Homo sapiens
tcagcaaactatgtacaagttacagtcatagcagtacccgagatggaagacgcgacaggtcctggtccgcgccagagcccagcgcgcctcgtcgccatg

SEQ ID NO: 546387 - DNA, 100 bp, Homo sapiens
gcggcttcttcttgttgggggactcccagccttccgcgcgtccggaggaggagaagcggcggcgccgggaagcagaggcctttgaaattgttgttcgcca

SEQ ID NO: 546388 - DNA, 82 bp, Homo sapiens
caagcacatatgtttgtgaagctcaaggacctagatgtgaaggctggtggaggctgtgtaatgaccattggagaaatgctac

SEQ ID NO: 546389 - DNA, 100 bp, Homo sapiens
agaccattgacaaccagcgagtgtatgatgaaaccacagtagaccctaatgatgaagagcctgattttccctacaaagatgacctcctggccttggactc

SEQ ID NO: 546390 - DNA, 98 bp, Homo sapiens
ttgtctgtatccgctgctcttgtgacgttgtggagatggggagcgtcctggggctgtgctccatggcgagctgggtggttaaataaacttggatcggc

SEQ ID NO: 546391 - DNA, 98 bp, Homo sapiens
gagaatcctcccctgccccttggctcaaaggggagtgcatccgccccaacccttttccccctcgtctcctgtgagaattccccgtcggatacgagcag

SEQ ID NO: 546392 - DNA, 101 bp, Homo sapiens
cctgtctcccgctccgcagccccgggcacggcggaggcagcggagccctgggccatcggtgagacatggaatccattaaaattgcattatcagttaagaaa

SEQ ID NO: 546393 - DNA, 83 bp, Homo sapiens
gcaaatgctggagtacctgtccctaacgttcttgatctctgtgaagattcaagggaacgggtatggcaatccccgaaactcac

SEQ ID NO: 546394 - DNA, 86 bp, Homo sapiens
aatgataaagaagaagtcaccgtttctacctggtgtcatggagaaactccagctgggcccagagattctgcagcgggaaaatccaa

SEQ ID NO: 546395 - DNA, 100 bp, Homo sapiens
ttttgatctctcctgcatgggtttccagggaaatgggtttccagatagacttgcgtctacagaacaaacagagagaggccaatgagacttgaaccctgag

SEQ ID NO: 546396 - DNA, 83 bp, Homo sapiens
gtcacagtaaggccaaaaatgtgcatactcacagagttagagagagggatggtgactgtggatattcataaggagaaagtggc

SEQ ID NO: 546397 - DNA, 100 bp, Homo sapiens
tttcttggcccttgttcccccaaatgtctgactctgactctcggactgagaaacgcaagaaactagatgatggccatttaaacaactctttgagctctcc

SEQ ID NO: 546398 - DNA, 75 bp, Homo sapiens
caggaacttttgggaaaaggagcaagtgtgcttgcagtagatgaaaatgctagtgagacctgcaacgacttccac

SEQ ID NO: 546399 - DNA, 75 bp, Homo sapiens
ctgagcctcctcaccattggttttctcttcaagaaacttggccggcagctcagcacctgaactcctggggggacc

SEQ ID NO: 546400 - DNA, 96 bp, Homo sapiens
acacaccagcccagacagctgcaagtcaccatggacgctgaaggttacctgtcctgctgccgattcctggatgacaatcagatcgtcaccagctct

SEQ ID NO: 546401 - DNA, 75 bp, Homo sapiens
tgctattgtatatcacactaaagatttctgacttacacaagagcctagaacagaaagaaagtaaaatccagcagc

SEQ ID NO: 546402 - DNA, 130 bp, Homo sapiens
agcctggagtctgcgaaggccgggacccggttccccggcccacagtgggggtgtgcaaacccgagagaactgggacgtgagcctgcacttcgtgctctggggctgcctgcacgtgtaccagcgcatgatc

SEQ ID NO: 546403 - DNA, 74 bp, Homo sapiens
tgcaagagaaggcactcaagtttatgaaagtgaagtcactgcttttgctgtcttggatcaagaccagaaagaaa

SEQ ID NO: 546404 - DNA, 100 bp, Homo sapiens
accaagcaacaagtgaaattgaggtcacaccttcagtccttcgagcaagaaacttggatttaactggccagaagcaggtattcaaagcagagaacaatcc

SEQ ID NO: 546405 - DNA, 100 bp, Homo sapiens
ctacgcctacgccatccagctgtgcatagatatttcagttgaaggaagaaatagctcttctcctaagatggaatctgtggtttgggaatgtggttgatca

SEQ ID NO: 546406 - DNA, 101 bp, Homo sapiens
catcacggcggccgcagtggcgtcctggagccctcctcaggttgcacgttttcaaaaaatacctaatggtgaaaatgagacaatgattcctgtattgacat

SEQ ID NO: 546407 - DNA, 96 bp, Homo sapiens
cgcgtctcggaaaccggtagcgcttgcagcatgataaagtcagacctaaagccaaaaggaaagaagaaccaagctctatttttcagagacaacgtg

SEQ ID NO: 546408 - DNA, 100 bp, Homo sapiens
cagagctcccaagtgatggaccctcccacagccaggcctacagaaccagatgaggacggggacttggttgccttttccagtgacgaggaattgacaatgg

SEQ ID NO: 546409 - DNA, 74 bp, Homo sapiens
ggggacctgccggcacgcgactccccccgggcccaaaacggccgaagccctgcagcccacgctacagccggaga

SEQ ID NO: 546410 - DNA, 83 bp, Homo sapiens
acttggtgttgaaagtgaaatgtcatgcctctgaaaatgaagaggatgaagcatcttcccaaactgatttaagccaaacgatc

SEQ ID NO: 546411 - DNA, 101 bp, Homo sapiens
atatcgtaagcgcacgtttaaacatctcaagatgagtgtgggtcagagagccaaactgactatatctccagattatgcctatggtgccactgggcacccag

SEQ ID NO: 546412 - DNA, 100 bp, Homo sapiens
ctaagacaggaaggaaagtgaaggcagagtgagcaggctttcttcgagagtcacccagctccttcagctgagcgtaccatccagcagtgttgtgaaaata

SEQ ID NO: 546413 - DNA, 89 bp, Homo sapiens
ggttggtgtgattagcttcgcagtctggaaagctttaggagttcacagttttgtgaatagcacaatggaagaagctggactttgtgggt

SEQ ID NO: 546414 - DNA, 75 bp, Homo sapiens
gccggggctgcggctacacacctagctcctgcccctcctaaagctgaagccaaagcgaaggctttaaaggccaag

SEQ ID NO: 546415 - DNA, 50 bp, Homo sapiens
gaagctcaatattgagatttccgatgagaagtgtttggattgtgagctat

SEQ ID NO: 546416 - DNA, 50 bp, Homo sapiens
ctgaggagaaagcggcgcgcggaggtacttggaaaaatggacaaggattg

SEQ ID NO: 546417 - DNA, 157 bp, Homo sapiens
ctccagatgaggtgatggcaacggccaacttcggcaagatccagatcgggatttacgtggagatcaagcgcagcgatgacatccacgacagcgatggcagttccagcagcagccaccagagcctcaagagcacagccaaatgggcggcatccctgga

SEQ ID NO: 546418 - DNA, 75 bp, Homo sapiens
ctggctgccacttgtgagcctcggaggttcctgatctgtacaccaggtttagaagaagaatgtgaatcctctctt

SEQ ID NO: 546419 - DNA, 50 bp, Homo sapiens
cagcaggcatcatccgctatgcaattgggcagagtgatgactcctcggac

SEQ ID NO: 546420 - DNA, 100 bp, Homo sapiens
ctgagcgtatcatgttaaagatgagcgggtggcagcgacagagccaaaatcagagctggaacctgaggagagaggagaaaatgtccaccttggttctggt

SEQ ID NO: 546421 - DNA, 83 bp, Homo sapiens
caaggggtggagctgggaacattcctcataaagcgagtcgtcaaggagttgcaggttttaaaatcaaagatgggaaaatcgga

SEQ ID NO: 546422 - DNA, 83 bp, Homo sapiens
cgcggggaaccaaggagacgctcctggcactgcaggtttttcgttggaatatacgttgcacatttatggcgattctgagtgtg

SEQ ID NO: 546423 - DNA, 51 bp, Homo sapiens
gttaaagctggtctgttctaactgagtgtcagagatggctttggattcccc

SEQ ID NO: 546424 - DNA, 100 bp, Homo sapiens
ggaagacgacgagtttgaagagttccctgccgaagcttctcaataggtttggcatggacaagatctatgaaggccaagtggaggtgactggtgatgaata

SEQ ID NO: 546425 - DNA, 101 bp, Homo sapiens
ttcgtggcatctatgcttacggttttgagaagccttccgctattcagcagagagctattattccctgtattaaaggtggcagaactggtgaagccattgta

SEQ ID NO: 546426 - DNA, 100 bp, Homo sapiens
atcaaggctgcctataatcaagtaaaaacaatagctcaaggaaacctttccaacacagatgtccaagctgccaagactcagaattcatgattgaagaaat

SEQ ID NO: 546427 - DNA, 83 bp, Homo sapiens
attttgaagtacaccgtggtgacattgtatcattggtacatatctgaagagatggattaagaatgctttggattaaggattgt

SEQ ID NO: 546428 - DNA, 100 bp, Homo sapiens
gtgatgttggagaactacagaaacctggtctccctagttttctggatatgccgcagaaggatccgtgccagaagcaagcctgtgagatacagaaatgttt

SEQ ID NO: 546429 - DNA, 73 bp, Homo sapiens
tggcagtggggatggctataatggatttggtaatgatggaaactatggtccaggaggcagtggaggaagtggg

SEQ ID NO: 546430 - DNA, 97 bp, Homo sapiens
gaatgaattaagatttatgccagttgcaaagaagaatattggctcactatttttcctctgggcatgtattgttgcagcatctggcagtgagactgag

SEQ ID NO: 546431 - DNA, 74 bp, Homo sapiens
gaagttcgtactgggcagaacgcgacgggtctgcggcttagggtcttgaggaccggcccagctcaggctcctgg

SEQ ID NO: 546432 - DNA, 83 bp, Homo sapiens
ggtctgagtggactgtcctgcaggtttggtgcacctcgatttggaggaagtagggcagggcccttatctggaaagaagtttgg

SEQ ID NO: 546433 - DNA, 100 bp, Homo sapiens
gctctaagaatcaagaaaatggaccagtttgttcgttacgaggtaccttaacatggggaatcttcttaaagttttgacatgcacagaccttgagcagggg

SEQ ID NO: 546434 - DNA, 82 bp, Homo sapiens
gtgcaggggaagtacgtgaagaaggagacgtcgcctctgcttcggactggagctctcaaacactgctgtcctgcaccagatg

SEQ ID NO: 546435 - DNA, 98 bp, Homo sapiens
gccgggccatgggcgcccgcgctgcctatatctacatccgaggggaattctacaatgaggcctccaatctgcaggtgtatctgtccctgcttcggatg

SEQ ID NO: 546436 - DNA, 95 bp, Homo sapiens
ggggacccaccctccttttccaggctacgccagtgggtaattccagaattgattggccataccattgtcactgtattactgctcatgtcattgca

SEQ ID NO: 546437 - DNA, 75 bp, Homo sapiens
aaagtccagcacagaccctcgggcctcatcatggccaggaagatcttggcatatacagaagggctgcatggaaaa

SEQ ID NO: 546438 - DNA, 101 bp, Homo sapiens
agggaaaaaggagaaagttaactgaattggtgacacttcgggtctctcacagaggaaggtcaaaatgcagatcttcgtgaaaacccttaccggcaagacca

SEQ ID NO: 546439 - DNA, 82 bp, Homo sapiens
tattgcgcgtggaacggctgcttttggaaggaagttctactacatcaccctgctacgagaccccgtgtcccgctacctgagc

SEQ ID NO: 546440 - DNA, 82 bp, Homo sapiens
cttagctgtgctcgcgctactctctctttctggcctggaggctatccagcattacctaggaacagtacgatttggggttatc

SEQ ID NO: 546441 - DNA, 87 bp, Homo sapiens
aaccaaaggctattggatcagctcagcagggtatgctgttgtgaaatgttctaagtctggagacctctacgtactggcggcagataa

SEQ ID NO: 546442 - DNA, 75 bp, Homo sapiens
accgccctctggccgttgcctcaccgggtttgtggtaaatatgccagctctagaacacatgaatcagattttaca

SEQ ID NO: 546443 - DNA, 74 bp, Homo sapiens
cgcaaacaacttatcagtagtgacttacagtaaggtgttcagctcccgacaggcactgaatggccatgcccgca

SEQ ID NO: 546444 - DNA, 90 bp, Homo sapiens
acctagtcgtggccggaggagtctcagagctgtcagaaaggtagtgggcagcagtcagtgacaggtgtaacctctgtggatgacagcaac

SEQ ID NO: 546445 - DNA, 90 bp, Homo sapiens
ctgttggaggagcgcaggccggccgactcggctcagctgctcagatggaaatcctgtatgaatgtggaagccattagcagagtaattgct

SEQ ID NO: 546446 - DNA, 75 bp, Homo sapiens
cctcgtctcccgctccgccctcccttttccctgagcaacctgcaagcaatcaaggccagtctaccctgcagccct

SEQ ID NO: 546447 - DNA, 50 bp, Homo sapiens
ctgagcctgccacgccgaggacgtggttcaaatctgaacatcaatgatgt

SEQ ID NO: 546448 - DNA, 100 bp, Homo sapiens
gggaaatgcaacaatccaaatggccatgggcacaattataaagcattatcctgtagcgtgggtaaatacgatggtttttgactttaaaggacaattgaga

SEQ ID NO: 546449 - DNA, 106 bp, Homo sapiens
agtagatcacagcaccatacattctcaggttctcaacccattttacattttccagctgttcagtgttatactgtggagcactgatgaatactattactatgctcta

SEQ ID NO: 546450 - DNA, 100 bp, Homo sapiens
ctccaacccagaactggacaatctgcatctacacgggcgacagcttcgtcaccccttgatggggcagcctcttcccctcatcacagactatgctgttcag

SEQ ID NO: 546451 - DNA, 82 bp, Homo sapiens
ctgaaaagtcgtcactctttcaccaagggctacagaactggctacccttatcgataccctgctctgagagagaagtctaaaa

SEQ ID NO: 546452 - DNA, 80 bp, Homo sapiens
cacacaggaagacgtgtcttcagaagatgaagatgaggagatgcctgaggtaactgcaaaaacaatggctcagcatgaag

SEQ ID NO: 546453 - DNA, 82 bp, Homo sapiens
caagaaactcctttccttaaagaaattgaagccaaggaagcttgtgattggctacgggcaactggtttcccccagtatgcac

SEQ ID NO: 546454 - DNA, 100 bp, Homo sapiens
cgcgaatatcgtcatcgttagaaggagggtatacaaggaaaggttaggacttcctccaaagatagtgattggttatcagtcccacgcagacacagctact

SEQ ID NO: 546455 - DNA, 50 bp, Homo sapiens
acatgggtcgggaagcagcatatggccctggccaacgtcaacattgggag

SEQ ID NO: 546456 - DNA, 100 bp, Homo sapiens
gcgggcctgaggcgaaggagcggccgggagcccgccgcgctggtagcgttgggccggtgcacaaacagcgtggtcaagtatgagctgatgcgcccctcca

SEQ ID NO: 546457 - DNA, 83 bp, Homo sapiens
tccagcgtgtctccagccgtgaacatggtccaagacaattcctgggaaagttcagttcttctcaagtgagggttctgacacat

SEQ ID NO: 546458 - DNA, 51 bp, Homo sapiens
actgctcaggaagtaaaatcggggtggcactgaatcaacaagacaagcaac

SEQ ID NO: 546459 - DNA, 75 bp, Homo sapiens
tgaatttgcaaaacttactgtagttcacacaaaagatgttggacaatttctacaattttgcttcatcatttgctg

SEQ ID NO: 546460 - DNA, 96 bp, Homo sapiens
ggaaatgggtcacaacgcagcagatctgatgggcatgtttgagaaacggcgcttccgcaagttcctggtgtttgtggcaaacttcgatgagaatga

SEQ ID NO: 546461 - DNA, 82 bp, Homo sapiens
agcgtcgctggcagccgctgtacttgactgtgtcagggaaaagggaggcaaggtcctggtccactgtgaggctgggatctcc

SEQ ID NO: 546462 - DNA, 95 bp, Homo sapiens
gggcggagacgcacggagcggccgggggctcggccgggccgtcccggcctgcgcagcctgaggcccttctgcgatgttttacctggctgcggctg

SEQ ID NO: 546463 - DNA, 89 bp, Homo sapiens
ctgatagtgctgaggcacctgccagctaagatgcctgaaaacttcatgcctcctgttcccatcacatcaccaatcatgaacccgttggg

SEQ ID NO: 546464 - DNA, 48 bp, Homo sapiens
cggagaagcaggagccctactcggcagatgccggtggccgtgggtccc

SEQ ID NO: 546465 - DNA, 50 bp, Homo sapiens
cgggaagttcttccaaagcaagggaaaggagcctctgcttcacattttga

SEQ ID NO: 546466 - DNA, 75 bp, Homo sapiens
aacccaacagagatctcttctgttctccactgctagaatacacgggtaaaacttctacaggcacggtatatgtta

SEQ ID NO: 546467 - DNA, 75 bp, Homo sapiens
ctcgcctcccggccgagctgacgtgaacacttgtcctgctccttcacctttttcttgcatggagacagcaatgtt

SEQ ID NO: 546468 - DNA, 98 bp, Homo sapiens
gatcctttcatctcagcctcctcagtagctgagactacagaatcatgtcaaccctgccatggacttcacgcagactccacctgggatgttggctctgg

SEQ ID NO: 546469 - DNA, 75 bp, Homo sapiens
gttgtccttaaacaacctacagaatatcatctataacccgaagtaaccaagatccttctgtttgctgcacaagca

SEQ ID NO: 546470 - DNA, 100 bp, Homo sapiens
agaccgtgaccgagagcgtgaccgagagcgcgaatatcgtcatcgttagaagagatcccactggcattgttggtggtaggcctgggcgggggcagcctcc

SEQ ID NO: 546471 - DNA, 98 bp, Homo sapiens
atgtaaccaaatattatggatcctatctgaaggtgtaccttgaaagacttttaacatacgcagagatagatatctgtccggccaactggaagcggatt

SEQ ID NO: 546472 - DNA, 75 bp, Homo sapiens
gcaaaagctggaagaagctgaaaaagctgctgatgagagtgagagctgccgctcagctttgatggaacaacgctt

SEQ ID NO: 546473 - DNA, 100 bp, Homo sapiens
cgcaagaagaccatgaagaccggtttcgacttcaacatcatggtcgttgtgcactcagatccctgtgagaacaacccttgtcttcatggagggacatgta

SEQ ID NO: 546474 - DNA, 83 bp, Homo sapiens
cagcaggctccgggctgaagattgcttctcttctctcctccaaggaagtgggaaaactcttgcctttgccatcccaatgattc

SEQ ID NO: 546475 - DNA, 98 bp, Homo sapiens
cgctgaatgagaagcttttcttgctggcgtgcgacaaggatgaccagctgaactcagaagaaaaaaagaagagaaagcagcgaaggaataggacaacc

SEQ ID NO: 546476 - DNA, 83 bp, Homo sapiens
cttagctgtgctcgcgctactctctctttctggcctggaggctatccagccccgaccctgcccgccctggactggcagctgcc

SEQ ID NO: 546477 - DNA, 83 bp, Homo sapiens
ggtgaattcaggaagactaatcaaagaatagataacaagtgcagttcaaagaagtttggcagagatcacggagctaattcata

SEQ ID NO: 546478 - DNA, 100 bp, Homo sapiens
aaagaaaaatataaatgcatacttccccttgtgacaagtggggatgaggcagaacagattatatttgatcatttttctgatcctaaatttgttgagcagt

SEQ ID NO: 546479 - DNA, 98 bp, Homo sapiens
cctgatgaaagcaaacagaaatttgtgctcaaaacccccaaggtattctctactgccgctgatggtcaaacgcaagtggaaattaaagtgtgtcaggg

SEQ ID NO: 546480 - DNA, 82 bp, Homo sapiens
gagattccggcctggagctcccagggccgaggttgccaggtgacaggaaccttttatgcttgtgccccacctgagtcccagg

SEQ ID NO: 546481 - DNA, 89 bp, Homo sapiens
ggggaccaaggatggcaaaacgacgacagtaaatcaacaggattacctttcccttaataatcttcaaaatgtccacgtgaaggacagga

SEQ ID NO: 546482 - DNA, 82 bp, Homo sapiens
ctgccttctcatcagctacaccaccaacgcctttcccggagagtacatccccaccgtgttttaaaatcaaagatgggaaaat

SEQ ID NO: 546483 - DNA, 90 bp, Homo sapiens
ccttcctcggagaacaagactgcccacctccacaagggcttcctggccctctaccaaaccgtggaggcggggtttcaccatgttgcccag

SEQ ID NO: 546484 - DNA, 100 bp, Homo sapiens
ttcgggctgtcgctcgtctacttcctcagcagcaccttcaagcagcggcccagcccaatccagctttactcccctccctttatattggccccaatcaaag

SEQ ID NO: 546485 - DNA, 90 bp, Homo sapiens
aacatccagtttgatgtttactacaaggtgatgcaggttctgaatgctgatgccattgttgtgaagctgaactcaggcgattacaagacg

SEQ ID NO: 546486 - DNA, 82 bp, Homo sapiens
ctctcgcctcgggtctcgggggccgctctgggatcccggccaccagcaattgtccggctgatcagctgaccgaagaacagat

SEQ ID NO: 546487 - DNA, 75 bp, Homo sapiens
cgccgccgccgccgccgcccggaccccggcgcgctgaatgcagagtcgacttcaatgttcctatgaagaacaacc

SEQ ID NO: 546488 - DNA, 100 bp, Homo sapiens
tccccacccagcactgatgatattataaagtggtgaagctgctgctgcggtacggagggaacccgcagcagagcaacaggaaaggcgagacgccgctgaa

SEQ ID NO: 546489 - DNA, 75 bp, Homo sapiens
ggggctggccgaggaaaagctgctattctcaaggcccaagatttgcttgtaaatgcatcacgaagaggcagccca

SEQ ID NO: 546490 - DNA, 88 bp, Homo sapiens
catagtcaactgcgtggaagagaaggtgctgtacttctttgcagtatacaaggactagcagttaatattgacccaatcttatatacgt

SEQ ID NO: 546491 - DNA, 75 bp, Homo sapiens
atcatcacagttattgacaccgaaaccgttggagagggccaggcactactgcagtcttcagttaagcaacaagta

SEQ ID NO: 546492 - DNA, 96 bp, Homo sapiens
agcaatgctaagaagacgtttggtttaaagaattaaaaggaagaacaacttaagagcttcttcaaagacgagctcatctgcgcctttgtttagaac

SEQ ID NO: 546493 - DNA, 101 bp, Homo sapiens
aagcaggttttaaatcaagatttaacattccaacacataaaaattatttatccaacagctcctcccaggttggccttcattccacgatgtgatcaattctg

SEQ ID NO: 546494 - DNA, 100 bp, Homo sapiens
tcattcccaaattcatcacccacctcttcaagtgcaagccaattagcatggtgggagcagaacagtggggtgccgaggctcaggcagcatgacgacggag

SEQ ID NO: 546495 - DNA, 74 bp, Homo sapiens
cttcaatatcccatttttgcagcttcagtttgatgaaggccggaacaactttgaaggggaggtcaccaaggaga

SEQ ID NO: 546496 - DNA, 75 bp, Homo sapiens
tcttggaagtcctggtccaaagggtgacaagatttgttcccgacaaggagttttctggttcagaccgtagacaga

SEQ ID NO: 546497 - DNA, 100 bp, Homo sapiens
agcagggctctccccagatgggaggacaaacaggattgagaggcccccagcctcttaagcctcgtcacgtgttcaatatgctaaagaagtatgtccgcgc

SEQ ID NO: 546498 - DNA, 82 bp, Homo sapiens
acagatgaagctccccaaggagctgcagggatcatagacggtatttctatgtaaacgaacagtcgggcgagtctcagtggga

SEQ ID NO: 546499 - DNA, 101 bp, Homo sapiens
gagcttgtggaggtggtcggcaatggaacctacggacaggtgtacaagcaagagtgagccatggagctacgtgtggggaacaagtaccgcctgggacggaa

SEQ ID NO: 546500 - DNA, 51 bp, Homo sapiens
gttcttggcaggaatatggaagacaggaagaagctgtttgttttgattctg

SEQ ID NO: 546501 - DNA, 95 bp, Homo sapiens
ttccgaggcagagtttgatacagcatgtgttaccaagctgtttcctaccaggtcacacactgttgcagcgcaggctgtgctgcaggcgctggggt

SEQ ID NO: 546502 - DNA, 75 bp, Homo sapiens
cggaaggagcggcccacggcaaagaacgccaatctgaattgccaacgcaaagcaaagcgagcttccccagtattc

SEQ ID NO: 546503 - DNA, 101 bp, Homo sapiens
tttacaagttaattgaagagtcttgtccacagctggcaaattcagtgcagatcagaaaactacccctgagtgtggtcccacaggatatgtagagaaaatca

SEQ ID NO: 546504 - DNA, 80 bp, Homo sapiens
gattagaccatgaacgagccaaggatatgggccctcacattttccaaacctgtccatctgctaactattttgactgcaga

SEQ ID NO: 546505 - DNA, 73 bp, Homo sapiens
gtccgcttcgaccttcccccacaagagctggctttatgtgctggggcagaagagatccgatagctatgttctg

SEQ ID NO: 546506 - DNA, 96 bp, Homo sapiens
ctgagcggcgactcagcgccccagagcccccttgtgcccatcaagatggaggacaccacccaagggtctccttggcagctgtattctggagtctgg

SEQ ID NO: 546507 - DNA, 51 bp, Homo sapiens
ctgtgactattaagaccatgttggaaggtccagtggtttacgtcttggatc

SEQ ID NO: 546508 - DNA, 73 bp, Homo sapiens
tgctgtagacatttctttgtggtttatctaaaaaccaaaggggcatatgatattttcctgaatgcaaaagagc

SEQ ID NO: 546509 - DNA, 75 bp, Homo sapiens
gggagaggcgcgcgccatggcttctggagccgatgtactaatggtcacttgatgtgcgctggctgttttatccac

SEQ ID NO: 546510 - DNA, 83 bp, Homo sapiens
gtggctgaggctacaccccggagccaggaggggcttgtcaatgaggcagatcagattcaggttcgacgggcagccaatcaatg

SEQ ID NO: 546511 - DNA, 74 bp, Homo sapiens
cacgcagcaaggaagaaacagacccaggtgcagactcaggaaagatcctacaggaatggatcctgatgatattt

SEQ ID NO: 546512 - DNA, 78 bp, Homo sapiens
agaaaggaggctgtgaagaaagtgattgctgctatgaccgtggggaaggatgttagcctccttttagaggactcagaa

SEQ ID NO: 546513 - DNA, 100 bp, Homo sapiens
aaccagtttaacagaggtggtggccatagaggacgtggaggattcaatatgcgtggtggaaatttcagaggaggagcgcttggcgtgggaacagcaggag

SEQ ID NO: 546514 - DNA, 100 bp, Homo sapiens
cccgaggcccctatggcagatttgaaaattcacccttgtagagtcattcctgcctttgagcggactcccttttaagcagggtttccaggcctgaggtgcc

SEQ ID NO: 546515 - DNA, 100 bp, Homo sapiens
ccttgagctccaggagttcgtctcttacgtctgcggaagtgcagctgcctcagttcttagcgcaggtgagcgagtgctgtgctttcatgggcctcttctt

SEQ ID NO: 546516 - DNA, 100 bp, Homo sapiens
agctgcggagaggtccgccaggcgtacggtgccaagggattcagcctggcggacatcccctaccaggagatcgcagagcctgccttctggtacaagatgc

SEQ ID NO: 546517 - DNA, 75 bp, Homo sapiens
ggaagatggcgaaggtctcagagctttacgatgtcacttgggaaggagcaccagcgaaagcagccagtctgagat

SEQ ID NO: 546518 - DNA, 100 bp, Homo sapiens
caacatagtttgtcattcaaagacccgcagcaaccctgagaacaacgtgggccttatcacactggctaagagcacgtgaattgcctctgcttacgttcag

SEQ ID NO: 546519 - DNA, 100 bp, Homo sapiens
gaactgtccttccaacggggtgacctcatccgtattctgagcaaggcctcaaggggaaggtatatcaggaacctttgtcccccaatgcctgcatggatac

SEQ ID NO: 546520 - DNA, 76 bp, Homo sapiens
cagaaactaagactccatattattgagattatagggacttcagtactagtgctaataacatccagattgataaaac

SEQ ID NO: 546521 - DNA, 75 bp, Homo sapiens
gaaattccccccgaagaagactcccccacatctggcagcgtccgtctccaagagagtatgaagagagtgcgtctg

SEQ ID NO: 546522 - DNA, 75 bp, Homo sapiens
atggaggaaatcaagaaggtgctgctgctggtgctgggctgtgctgtccaggtgactgctgaggttggaaagctc

SEQ ID NO: 546523 - DNA, 100 bp, Homo sapiens
ggtcccctggttggaaacttctgcttcagaatggcatcctcagtatgaccacaagcgaatctcaaagttgtcagagcggctgatacagaatataatgaag

SEQ ID NO: 546524 - DNA, 100 bp, Homo sapiens
gttgggccggtgtactttcccggcctgcactgcccaaagtcttggaaacttgctggatatgatgtaccgggagccagcacgatggtcctacacattccag

SEQ ID NO: 546525 - DNA, 75 bp, Homo sapiens
tggataacccttgaggaacacgtcagttactgtcacgatggggcaggtggaccggtatcggttgaagaatgggcg

SEQ ID NO: 546526 - DNA, 75 bp, Homo sapiens
cggagctgggcgacgagctgaccctgggagacatcgacggtttcacagatggcagtgttacattgaacaaaggag

SEQ ID NO: 546527 - DNA, 50 bp, Homo sapiens
tctcgaccacttcgaagaagtcagcaagatctgtggctgctgcattttgg

SEQ ID NO: 546528 - DNA, 75 bp, Homo sapiens
gtgaagagttgtcccagctcggcccgcgggggagccccgggagccgcacggtggggaagaaaacatgacagaaac

SEQ ID NO: 546529 - DNA, 98 bp, Homo sapiens
taggcaggctggcaggcaacaccttagggttctttcagagcacggcttcggccccatcactaccgacatccgggagggacagactttctactatgcgg

SEQ ID NO: 546530 - DNA, 75 bp, Homo sapiens
actgattatcccatgagtctgcacattagatttccaaaggttgatttgtacaaatagcacaagaggacaccaact

SEQ ID NO: 546531 - DNA, 75 bp, Homo sapiens
ccgcagatgcccaccggaatggagaaggaagaggagtcgaaagaatcttcaagagggagacatagggaaaaggaa

SEQ ID NO: 546532 - DNA, 75 bp, Homo sapiens
aaaacatgcaaaaacttcctttgcttgtgctcaggagataatcttggccaacagtacaatagcccacaagaagtt

SEQ ID NO: 546533 - DNA, 100 bp, Homo sapiens
ccaaagacggacattgactccagactctgagatttgcccacctgatgaccttgccagcttgccatcatgcaaagaaaatcctgaagatgttctgagccca

SEQ ID NO: 546534 - DNA, 73 bp, Homo sapiens
cgacttcaacctcctgcaggtctcggagccctcggtctggctcccagccatgaaggctaaggggctggagatc

SEQ ID NO: 546535 - DNA, 100 bp, Homo sapiens
ttaaaccacatggctatctaaagagggtattgcagacaggcttgtcctcttagacctctcagaagggactaaaggagccacgatggaccttgaaatcttc

SEQ ID NO: 546536 - DNA, 82 bp, Homo sapiens
cccgtgccctcgctctgagctgcgcctggacctggttctgccttctggacaatctttccgatagtcgtgcaagcactgcagt

SEQ ID NO: 546537 - DNA, 92 bp, Homo sapiens
gtgttatcatcaacgtggaaaaaataagggcaatgcagttttcatgtgtgtaagatacagggtcttgctatgttgcccaggctggagtgaag

SEQ ID NO: 546538 - DNA, 95 bp, Homo sapiens
cggcttcggagcgggagtgttcgttgtgccagcgactaaaaagagtttgaaggatgacctctaggaagaaagtgttgctgaaggttatcatcctg

SEQ ID NO: 546539 - DNA, 98 bp, Homo sapiens
gatcacagtaaatggacaagaatatcatcttcaacttgtagacacagccgggcaagacatggatttgattgacatactttggaggcaagatatagatc

SEQ ID NO: 546540 - DNA, 90 bp, Homo sapiens
ttgcagaaaatcctcactctgagtacggtctcacagacaacgttgagataaacaacccagacatgcgagtgcagatcctcaaagattacg

SEQ ID NO: 546541 - DNA, 100 bp, Homo sapiens
ttcatatgttttagctacaaacatttatctaaggtcatcgtgatgtcaggtcatgagaccatccgagtgctggaagtcggagtggatgcccaactccctg

SEQ ID NO: 546542 - DNA, 100 bp, Homo sapiens
gtttggcccaggaacagcttatggctggtaatcctggtggacctggacctggtggtcgaggaagaggtagaggtcaaggcaactggaacatgggaccacc

SEQ ID NO: 546543 - DNA, 118 bp, Homo sapiens
gtacaaggaccagaagaaactgcaccggaaatgtgcctaccagttggtattgacaaagcaccaaaatgattttaaaattgagctcaagtatctggaagacgatctccttttgcgcctt

SEQ ID NO: 546544 - DNA, 95 bp, Homo sapiens
gctgtggtgaagctggggcggcaccggatcaccaagacggagtcacccacaaaagctgtatataatgccagacattggaatcatccagattcaga

SEQ ID NO: 546545 - DNA, 75 bp, Homo sapiens
aggactaaaacgcttaatgacagagaagccatttggaaatagcatcagcagatataatggggagcctgagcatat

SEQ ID NO: 546546 - DNA, 100 bp, Homo sapiens
ttaccgattccttgggaaaacaggcagtttccaggttaactaaggtctcagctgtaaaccaaaagtgagaggagacattaagattttcattcttaccggg

SEQ ID NO: 546547 - DNA, 75 bp, Homo sapiens
gagaccgcaccacccgcctctgggccccagacaggaatatttgacaacgtctggagacagtgtctggcttgtcac

SEQ ID NO: 546548 - DNA, 51 bp, Homo sapiens
tgcagtagaagtcggattaaagaactgcaagcacatgttgaccagataact

SEQ ID NO: 546549 - DNA, 82 bp, Homo sapiens
ggggtgtccatcacaaaagccgaggccaagaagcttgagagaagaaaaatttcagaaaaattgtctcaatttgactagaata

SEQ ID NO: 546550 - DNA, 103 bp, Homo sapiens
gcggcggtggacgagctgggcaaagtgctgacgcccacccagttacggctagatgaggctcaagaagcagaatgccaggccttgaggctacagctccagcagg

SEQ ID NO: 546551 - DNA, 99 bp, Homo sapiens
gaccgagctgcggctgctgtggattcgacctcacattactactttgcgcaaatacacatacgggaagcatatactggccaagttggaaaagtattattt

SEQ ID NO: 546552 - DNA, 99 bp, Homo sapiens
acgaagggacctggagcaacgggctgcaggacggctacgggaccgagacctactcggacggaggattaagcatgaaaatattgttgccctggaagacat

SEQ ID NO: 546553 - DNA, 83 bp, Homo sapiens
ctgacaatggctttggtccccagcgcagtgaagtggtgagcctttttgtcactgctacctggaccagccctgccttgagaccg

SEQ ID NO: 546554 - DNA, 75 bp, Homo sapiens
gaggcaagggggagatcactcccgctgcgattcagaaggattcctacaggaagcaagtagtaattgatggagaaa

SEQ ID NO: 546555 - DNA, 100 bp, Homo sapiens
gccatgggcaattgccacacggtggggcccaacgaggcgctggtggtttcaggccagcggaagcctgccacctcctatgtgcggaccaccatcaacaaga

SEQ ID NO: 546556 - DNA, 119 bp, Homo sapiens
aaaaattagcccggtgtgatggtgcatgcttgtaatcgcagctacttcggatcctgaggctgcctggagttgggagaggagcaatacaacacccctgtagccaccaccactgggacagc

SEQ ID NO: 546557 - DNA, 90 bp, Homo sapiens
ggaggaaagtgggtcataaatcctagtggtggactgatttcaaagggacacccactaggcgctacagaattctgcttggtcagaatcgtg

SEQ ID NO: 546558 - DNA, 100 bp, Homo sapiens
ctttctgaggcagggtttaatacagcatgtgttaccaagctgtttcctaccaggtcacacactgttgcagcacaggtgcaggtgggaagcacacctcagg

SEQ ID NO: 546559 - DNA, 100 bp, Homo sapiens
tgctgctcatctacgaggcggaagaatagccaggtctggctgggtcggcacaacctgtttgagcctgaagacacaggccagagggtccctgtcagccaca

SEQ ID NO: 546560 - DNA, 137 bp, Homo sapiens
ctgatccggatcagtataacttttcaagttctgaactgggaggtgactttgagttcatggatgatgccatccaggatctgtgtgccatggaggaccacaactgtgagcagctctgtgtgaatgtgccgggctccttc

SEQ ID NO: 546561 - DNA, 95 bp, Homo sapiens
cagcgtgctgccgctcgaggaggcggtggagggcttcaaggaggagctggagtcgtacccactgggcgccatcgtgcgctgtgacgcggtgatgc

SEQ ID NO: 546562 - DNA, 100 bp, Homo sapiens
tgacgaaattgaaattacctccgagggaaacaagaaaacatcaaagaggtctagcaaagggaaagaatatggcaaagctgatgcaagatgggtttatttt

SEQ ID NO: 546563 - DNA, 75 bp, Homo sapiens
cttcctgcaggagcacaacaccacactgcagacccagaccgccaagctgcagattggctctaccagtgcacctgg

SEQ ID NO: 546564 - DNA, 100 bp, Homo sapiens
gccgccatacgcgctctccctgtttagggtgagaactctgtctcagtcgacgggaagtgcagtgactccacgctactgagcaacttgttagaagagatga

SEQ ID NO: 546565 - DNA, 107 bp, Homo sapiens
tgaagagcgacaagccgctggcagccgcggatctcaccgccgctcagggacatttgtgtactcactgctcaatcgagggaggccttatccagctatactcattctca

SEQ ID NO: 546566 - DNA, 100 bp, Homo sapiens
attcaaaaaatatagcccatttccaaaaacctgcaacaaagagatactttctcagtctgaagatgatgagaaactgaaaaagaggaaggagcgatttggg

SEQ ID NO: 546567 - DNA, 99 bp, Homo sapiens
tgtggctggagacatgagcaagaaaagcctctgggagcagaagggaggctccaagacctcatcaacaattaaggattaaagcaaggagagccaatcatg

SEQ ID NO: 546568 - DNA, 124 bp, Homo sapiens
ccaccatccacgccagccgcaccatgccgctcctaagcctgcacagccgcggcggcagcagcagtgagagattttgcaagaacgaggctcaaggatgtgagggacacagtattgacagctgaag

SEQ ID NO: 546569 - DNA, 100 bp, Homo sapiens
aatatctggagccatccaacatttagctgggatgaaagacagcaaggtcaaaatgcagatcttcgtgaaaacccttaccggcaagaccatcacccttgag

SEQ ID NO: 546570 - DNA, 100 bp, Homo sapiens
cttgcttgggatcctttatcctggtcatcttctatttccaaagaggcaagtgaggcctatctggttggcctttttgaagacaccaacctgtgtgctatcc

SEQ ID NO: 546571 - DNA, 75 bp, Homo sapiens
gtgagccgcaacctttccaagggagtggttgtgtgatcgccatcttagggaacgtcttgctgccctccaaaaaag

SEQ ID NO: 546572 - DNA, 75 bp, Homo sapiens
ttggggaggagtccagggagcccagcacaggaggagctggagttctgtgaaaagctgctacagacctgtttctcc

SEQ ID NO: 546573 - DNA, 115 bp, Homo sapiens
ggactgcttcgcaaggaagcggggcggctgcagcgagtaggcggcggcggaggattctttcttgtggagaagttattcatgtgaagatccttggaattttggctcttattgatga

SEQ ID NO: 546574 - DNA, 100 bp, Homo sapiens
ttagtttcatctctctataaagttatccaggagccacaaagtgagatttacggcaagatatgctaacacttcaaattattcgtattatggaaaatatctg

SEQ ID NO: 546575 - DNA, 100 bp, Homo sapiens
gggccagagcccgccagccctcgcggatcccggctcgcggccagcccgagcggctcggaaagggctattgcaagacacgaagtccgagaaattgagcagc

SEQ ID NO: 546576 - DNA, 100 bp, Homo sapiens
gtctcaggatgttctgagattgcatcaggatattaatgattataaccggagattctcagggcaacccagatctaatgtgaaagatgttgcagaagtgttc

SEQ ID NO: 546577 - DNA, 75 bp, Homo sapiens
tctgggatgtgcactgcctgagcgaaccgggaagcggggaggactgaaaaatgaagattatggaagagattcggg

SEQ ID NO: 546578 - DNA, 100 bp, Homo sapiens
gctcaccatcagtgaatttaagcccacatatcaggaccgagtggccccgccaggtcagcagatccggaagctcatcaaagatgggctgatcatccgcaag

SEQ ID NO: 546579 - DNA, 74 bp, Homo sapiens
tgcttgtcaaacatctacggctgatgggcattcagatttgggagaagtagccccagaaataaaagcatcagaga

SEQ ID NO: 546580 - DNA, 83 bp, Homo sapiens
gcctgtggactgcagcctcggcggtcagcagggcgccctgcgtccggcagaggaggcgagcatcccgctcaggtgatgaggaa

SEQ ID NO: 546581 - DNA, 115 bp, Homo sapiens
aaggtccggggcttgccctggtcttgctcggccgatgaagtgcagaggtttttttctgtgttctaagaacggaagcatctgggctggatggaatttagcatcaagcagagtcccc

SEQ ID NO: 546582 - DNA, 100 bp, Homo sapiens
cttaataggaatgcctacatcatgggcggcgactggcggcgcgatggacctgaccgggctcctgctggacgaagaaggcaccttctccctcgccggcttc

SEQ ID NO: 546583 - DNA, 75 bp, Homo sapiens
ctcagttggaagcagccgatccagcctgcggagcctgtggggcaggattttgtgtggatgagggctcggctacag

SEQ ID NO: 546584 - DNA, 88 bp, Homo sapiens
gaaggactccgggtgaggccggccacgccccgcacggtcatcatcagatttgaaatatttaaagtggatacaaaactatttcagcaat

SEQ ID NO: 546585 - DNA, 89 bp, Homo sapiens
ttggagattctccggggacccttccgtatctgcctaggcattttgctgtctcctcctaatacgctgatgttctaatcatgtcagataaa

SEQ ID NO: 546586 - DNA, 83 bp, Homo sapiens
gcctcagttggaagcagccgatccagcctgcggagcctgtggggcaggtcccagtagggatggcacaatcagcgaggacacca

SEQ ID NO: 546587 - DNA, 90 bp, Homo sapiens
gtgggagtctccgcgtcccgctcgctgggagagaggtacctctccttttccctctccctttccctaaggcccgataaaagtgaaggatgt

SEQ ID NO: 546588 - DNA, 74 bp, Homo sapiens
tagcattcgagagaacaaaattaaacaactacctgctgaaattggtcctgacactaaactaatgcagaatagtg

SEQ ID NO: 546589 - DNA, 100 bp, Homo sapiens
tcatctttacagaggaatagtctacaaaggaagacttgtaacctggagaagaggcagtaccaagaagcaagagagacctatcttgatctggatagtaaag

SEQ ID NO: 546590 - DNA, 50 bp, Homo sapiens
cgccgagctggacccggaccggttttgggagagccggacagggcagcggc

SEQ ID NO: 546591 - DNA, 80 bp, Homo sapiens
cctcatcacggagccctttctgccaaacccatcatcttcgtttcggacagagcaaacagcaacaaggagctgggtgtgga

SEQ ID NO: 546592 - DNA, 99 bp, Homo sapiens
gagctgaggaaccagatatcttgaaaagctgccagaaaggctggtgcttgagttcagcctcctgtcttatgcttttggcaaatttcctaccgttgtttg

SEQ ID NO: 546593 - DNA, 98 bp, Homo sapiens
tttgggatttgagattgacgcggtgaactctgtccagttttcaaaccacacagcaccagtggcagttcgcagcctccaggacttggctcgcatcgcca

SEQ ID NO: 546594 - DNA, 80 bp, Homo sapiens
caccatcaacaatgagtacaactaccgctgctggaccacaaaccgctgccagaaaacgccatcatgaccgggtcctataa

SEQ ID NO: 546595 - DNA, 96 bp, Homo sapiens
ccaaactttgaggacgatagagatcagtgggctttgactgcccagcatgcagtctccattcttaggctggagtgcaatggcgtgatctcagctcac

SEQ ID NO: 546596 - DNA, 75 bp, Homo sapiens
gggagccccgggagccgcacggaccaacttggaggccttgcagaagaagctggaggagctagagcttgatgagca

SEQ ID NO: 546597 - DNA, 100 bp, Homo sapiens
aatcaaagagtttagcagaatgcttcccatatgggacatctctacaccgttcccatccgggaacagggcaacatctacaagcccaacaacaaggccatgg

SEQ ID NO: 546598 - DNA, 75 bp, Homo sapiens
ggatgtcggcgaagccgcgggcgagcgagggcggcactgctcacaggacggctacccatccgcaatggcttctac

SEQ ID NO: 546599 - DNA, 83 bp, Homo sapiens
cgcagaggaggagcgcagcccggcctcgcttgcttggctcaggaacaacagaagagaataaagaaaatgacctcagaccttcc

SEQ ID NO: 546600 - DNA, 74 bp, Homo sapiens
gcggcctctgttagaggaagaagcatccctggggctgcggagaagggtgtgggccgaagatatgctcatgtggt

SEQ ID NO: 546601 - DNA, 75 bp, Homo sapiens
acctatgtgtgtgatcttgaagggaacagacccaacatgagtgaagtttcctgcaagaaacgggacgactatttg

SEQ ID NO: 546602 - DNA, 90 bp, Homo sapiens
cgaacgcggagagcacgccatgaaggcctcgggcacgatgatgatgtgcctgcagatatggttgcagaagaatcaggtcctggtgcacaa

SEQ ID NO: 546603 - DNA, 80 bp, Homo sapiens
gaaaaccaagaagatcaaggaggtcactgtccgaggatctcgaggacctggaagaagcagaggagccagacatggaggaa

SEQ ID NO: 546604 - DNA, 100 bp, Homo sapiens
gttgcccctctgttcttcgagaggacctgggtcaactggaatacaagtttcagtactgtggaatgtctatggtgactgtgataactatgccacactgaag

SEQ ID NO: 546605 - DNA, 75 bp, Homo sapiens
gcagggccaggtgcgcaggggagaaacaaggcgccttggagttcagctgagctcctgtgacggccacgacgggct

SEQ ID NO: 546606 - DNA, 83 bp, Homo sapiens
ctcggcgctgccgtctctggaggagtactggcaacagtgctgctcacggccgtgaactgctacagcgtgaaggccgccacccg

SEQ ID NO: 546607 - DNA, 50 bp, Homo sapiens
ttggagtattaagtctttcccgagttgaagtattgataacaccaaggaac

SEQ ID NO: 546608 - DNA, 83 bp, Homo sapiens
cctcctggcatctgccggctgctccgcaccccggggtcccaggaagggcggcccagccccctccatcccatcggaagaggaag

SEQ ID NO: 546609 - DNA, 100 bp, Homo sapiens
gcagcagggtgagccccacccggagttcagcgcggactcccccagcccaggctattttggcattctgctggatatatgttcgtaaataccaaagtcggcg

SEQ ID NO: 546610 - DNA, 100 bp, Homo sapiens
caggacaccgacatggaacagggactcactggggggaatctaagggaggaaattatcaactgtgcacaaggaaaaaaatagatatgtgaaaggttcacgt

SEQ ID NO: 546611 - DNA, 100 bp, Homo sapiens
gccgtgttccggagccagcagcagggtatatttacttctggcacatgggaagagaaatcagatgaaatttcctttgctgacttcaagttctcagtcactc

SEQ ID NO: 546612 - DNA, 100 bp, Homo sapiens
gagaattatggaaacctggtctcactgggggggacacagcgattgccacgcgccattggaatgtccctggccaaggagctcatattctctgcgcgagtcc

SEQ ID NO: 546613 - DNA, 96 bp, Homo sapiens
tggacaggatggattgccagggcttcctggcccgaaaggagagccttttcctccagcttatggaggcatatctgaggtgaatcaacctgccgaatt

SEQ ID NO: 546614 - DNA, 100 bp, Homo sapiens
caggatctgattatcagtacgtaggcaaggcaaccacacctccaaatcaaggaaggccagattctcctgtctatgctaaccttcaagaactgaaaatatc

SEQ ID NO: 546615 - DNA, 80 bp, Homo sapiens
atttgctggatttaagcactgctgcactttatgaggataaagataaagtttctctaaccaagaccccaaaactggagcgt

SEQ ID NO: 546616 - DNA, 90 bp, Homo sapiens
atgaagattatttacaatgctaccctgctttttctggtgtcctgaacctggaagttgtgctttttaagggtgtactctgtgtgaccgcgc

SEQ ID NO: 546617 - DNA, 51 bp, Homo sapiens
gctccttacacatcccctgataaactaaagattcgattacgtatcctccct

SEQ ID NO: 546618 - DNA, 100 bp, Homo sapiens
ggtgtccagtcagatgaaattgatttatcagatgtcctttcagagtaaagctgctgctaaagctggatcttctaaataccagtggggcattatgaaatcc

SEQ ID NO: 546619 - DNA, 100 bp, Homo sapiens
ccgtgcagttaatcggaggggaacagaccctctttgctgtgacggctgatgggaaggtttgaattttgggaagattttgaagaagaccatgggaagggga

SEQ ID NO: 546620 - DNA, 100 bp, Homo sapiens
tttggtttctttttttgatgcatctctacctggaactttgccggagaatccatatgctacactgaccatgactttggcacagaccaacttctgcaagaaa

SEQ ID NO: 546621 - DNA, 100 bp, Homo sapiens
aacaccctcaagaagctcaggggcctggcccccagcgctgtgcccggcctcagcaatcgaggtagacatcttcgagcctcagggaatcagcatgctggat

SEQ ID NO: 546622 - DNA, 101 bp, Homo sapiens
tcgactcatgttgctggagaaggatgtgaaccctgggggcaaggaggagaccccagggcagaggccagcacctatgaggaccagcacagcagtgaggagga

SEQ ID NO: 546623 - DNA, 98 bp, Homo sapiens
gcagatcctgagacccggacagtggcagtgaaacagatgatgtctttctacctaaagatattgacctagacagtgtggatatggatgagacagagagg

SEQ ID NO: 546624 - DNA, 100 bp, Homo sapiens
ccgcgggagcacactctgtgcggagactgggcggccggccgacccttcctgtcgctgacggcgactgcgggaggccagggagaatgaagttgaagaggta

SEQ ID NO: 546625 - DNA, 51 bp, Homo sapiens
ggagagactttgcaaatgctaactacaaggaacttctagcaatagtaaaac

SEQ ID NO: 546626 - DNA, 82 bp, Homo sapiens
tgacgtttacaaaactacagagcgggtggagcagctggtgttgtacatgaaagcagcacagctgcttgcggcttctctgcat

SEQ ID NO: 546627 - DNA, 74 bp, Homo sapiens
aaagctcaccctcccgagttgaaaaatttgatagagagaatgtacggattccaggaatgctaattattgatact

SEQ ID NO: 546628 - DNA, 100 bp, Homo sapiens
ctggacgtgggatccacacagctcagaacagttggatcttgctcagtctctgtcagaggaagatcccttgacccctttgctgatgcaagtaagggtgatg

SEQ ID NO: 546629 - DNA, 80 bp, Homo sapiens
agattcgcagtggtcgcttcttctccttgctccagaacctgggtatcaacccagcaaacattggcttcagtaccctgact

SEQ ID NO: 546630 - DNA, 100 bp, Homo sapiens
aaccagtggtagaaagcacagaaactgaggggacataatcatcactcagtagatggcccctgagttctgcagcctcgaggaaggcctgccctatctggac

SEQ ID NO: 546631 - DNA, 98 bp, Homo sapiens
caaaaaggacatctttggagccaggaatgtatcctgtcaggtataatgtcagtgaatggcaagaaagttcttcatatggatcgaaacccttactacgg

SEQ ID NO: 546632 - DNA, 100 bp, Homo sapiens
agcagtttgtgcctgctgtagaaaaggtgaccaagaatatggcccaggtgaccaaagccctggacaaggccctgagcaccatggacctgcagaaggtctc

SEQ ID NO: 546633 - DNA, 142 bp, Homo sapiens
cgcgccccgctgcctcgccgccacactttcctgggagcggcggccacggaggcaccatgaagaagtcttactcagatgaggacggggacttggttgccttttccagtgacgaggaattgacaatggccatgtcctacgtgaa

SEQ ID NO: 546634 - DNA, 75 bp, Homo sapiens
cttttgaactagatcgagctgatagagaccctagtaacatgcatgccaatgaagatgtggaaagaatgttactag

SEQ ID NO: 546635 - DNA, 89 bp, Homo sapiens
gagagtgaacagcagaaagaggcttcttggaaacataaccagaatgtactcaagactgatcttctaagttcactggaaatgattttatc

SEQ ID NO: 546636 - DNA, 96 bp, Homo sapiens
tggctgctgcggaggcgttggagcgcggaaatctggaaccgggatggcgacgtctacactgagtcggaggcgaagatatgcacccaatgtccaggg

SEQ ID NO: 546637 - DNA, 75 bp, Homo sapiens
tttcggtccccgccgaagtcaccgtgatcctgttagatatcgaaggccaagcagatagaacttcagttcactatt

SEQ ID NO: 546638 - DNA, 100 bp, Homo sapiens
tgttatccagccaggagaggccctcagcttgtctgcactggcagtgacgatggcacagttaagctctggattaatcgaattacagctgctagccaggaac

SEQ ID NO: 546639 - DNA, 74 bp, Homo sapiens
aacagaggcttcgcatttgtgcagctgtcctctgcaatgccctaccacttatgtcttggatgaagatgaacctc

SEQ ID NO: 546640 - DNA, 100 bp, Homo sapiens
gtcctggactactttggtggaccaaaaatcgtgacaccagaagaatattataatgtcacagttcacgtgtcaggaggggagctgtttgagcgcatcattg

SEQ ID NO: 546641 - DNA, 75 bp, Homo sapiens
agctgaggaaccagatatcttgaaaagctgccagaaaggtagatgatgagctggagatcaaggcctactatgcag

SEQ ID NO: 546642 - DNA, 90 bp, Homo sapiens
gcagatccgtctgaagtgtattcgtaaggagggcttcttcacggtgcctccggaacacagggggaaggagttcgagacacgactgaagga

SEQ ID NO: 546643 - DNA, 100 bp, Homo sapiens
cccggacccgggcggacgagcacgaacacacggaaatggaagttccagtattaccgaaaatctctctaccgatcaccagttcttcactgcctacctttaa

SEQ ID NO: 546644 - DNA, 100 bp, Homo sapiens
ctgagaaaaataccacctttgatacttttaaggcttctctcgtcaaaaatggtgcagaatttacgtctgtagatggacggcagatccgagtagaccaggc

SEQ ID NO: 546645 - DNA, 96 bp, Homo sapiens
gaggagagtccagcaccagtaaatgaaccagaactttttacaagctctattccagaaacaaacttaattcagtgcacaaatgagatgaatgtgaac

SEQ ID NO: 546646 - DNA, 100 bp, Homo sapiens
gtttgctcccaaaggcgcaccaatgaccaacatttgccccccggaggaaagaactggaaccaggagcaggccgggctctcgccatgggtcactgtcgcct

SEQ ID NO: 546647 - DNA, 83 bp, Homo sapiens
aaggaatcgtatcgtatgtccgctatccagaacctccactctttcggtgcagtctttgcaagccacatttggaacttttgagt

SEQ ID NO: 546648 - DNA, 90 bp, Homo sapiens
gcagatggtaatgaggggccaccgagatacctctatggttcatgagcttaatagggattgtcaatgaggcagatcagattccgatttgac

SEQ ID NO: 546649 - DNA, 100 bp, Homo sapiens
atagctgcggagacaccaccccctcctcacgcttcccagactcagtctttgaatttaagaagaggattacctcaggttccttacttcagtctctatggag

SEQ ID NO: 546650 - DNA, 75 bp, Homo sapiens
ttggagatccccgcctatagcagatgctcagccagcattgggcagcccccgcttcctgctcccctacccccttca

SEQ ID NO: 546651 - DNA, 100 bp, Homo sapiens
ggccgaggggcttcataccagctgaagagcgacaagccgctggcagccgcggatctcaccgccgctcaggatccagagacaatggccccgatgggatgga

SEQ ID NO: 546652 - DNA, 75 bp, Homo sapiens
aggggctgactgagagcgtctgcttgttatctgatgatggccgctatgtcttgttatcaataagggaaggatgtg

SEQ ID NO: 546653 - DNA, 100 bp, Homo sapiens
ctcaaaggccggccatgtaagatcgtcgagatgtctacttcgaagactggcaagcacggccacgccaagacagcaccagttgcccttgaagcagaaaaca

SEQ ID NO: 546654 - DNA, 100 bp, Homo sapiens
aagagagaacgcagtggcacagagtagcaggtaaagatgagccttccagctacatttgcacaacatgcaagcagcccttcaacagcgcgtggttcctgct

SEQ ID NO: 546655 - DNA, 83 bp, Homo sapiens
tcaagaggatcttaaagtgtggtctttagtggaaaaaaaggaacttaatgagctgagagagacagaagggggtactgttctca

SEQ ID NO: 546656 - DNA, 100 bp, Homo sapiens
aagaggttggagatgggaccacatcagtaattattcttgattggagctggagtgagccttccaggaattttggctgccaaatgtggtgcagaagtaatac

SEQ ID NO: 546657 - DNA, 98 bp, Homo sapiens
ctctacaccatcgacaccgaaaactccaccgtagcccttgccaaaggacacaggttgaacatcacggcggagaacgactgccggcggctgcactgctc

SEQ ID NO: 546658 - DNA, 89 bp, Homo sapiens
ctgggggcccgagaagcttcctctcaggataggatttttgggccttggtctcatgggaagtggaatcgtctccaacttgctaaaaatgg

SEQ ID NO: 546659 - DNA, 83 bp, Homo sapiens
ctttatgaaccagtgtatcccaatgtgtcccagatgcctgtggccgagggcaagagtgttcagcaaaccgtagagctccttac

SEQ ID NO: 546660 - DNA, 51 bp, Homo sapiens
gtctgggggcaaatacgtagactcggagaggttggaaagaaccatgactgt

SEQ ID NO: 546661 - DNA, 108 bp, Homo sapiens
aacgctgcatccacttgttgtcagataaaaatctgcaaatccgcctgaaggacatggtccggcgaggagagatcatcgacaatgacaccgaggaggagttctacctcc

SEQ ID NO: 546662 - DNA, 90 bp, Homo sapiens
ctctcatcgaggcccaaaccgccaaggtcttgtggatgagcagcagaaagttcggaccatcagtgctttggccattgctgccttggctga

SEQ ID NO: 546663 - DNA, 101 bp, Homo sapiens
ggatccgcaaagtgctgaacaggcacagttggtggatctgaaatctgaactgacagaaacccaagcagagaaagttgttttggagaaagaagtacatgatc

SEQ ID NO: 546664 - DNA, 75 bp, Homo sapiens
caggagaggagcactttgaggacatggcctccgacgaggacattcaggatggctaaaggtgaccccaagaaacca

SEQ ID NO: 546665 - DNA, 90 bp, Homo sapiens
aggcccgcggcgccccgtgctgcagagtcataaacattctaagtgcatacggccatttcttccttatttcaatgtgtcacaacaatttgc

SEQ ID NO: 546666 - DNA, 80 bp, Homo sapiens
ggacctggtgaagctctgtcaacctttttcagaagaagtgaagtcaagatgaagaaccatttgcttttctggggagtcct

SEQ ID NO: 546667 - DNA, 75 bp, Homo sapiens
ttccctgtcccatcgcaaacccaaagatccccgttcctggagattctgattgagatgcaatcaatgccccagtca

SEQ ID NO: 546668 - DNA, 88 bp, Homo sapiens
tgtcttgcagccatccgagatcacgcttctgtctaactatctcagggaggttgtatgagctcatttcgatggaacagaggtggcgact

SEQ ID NO: 546669 - DNA, 100 bp, Homo sapiens
cctggatccatcttttgtgcatgcgtcgcgccttttggcagaagaaattgaccttggctcccaaactatataacaagtacctcccagggacagaaacaag

SEQ ID NO: 546670 - DNA, 50 bp, Homo sapiens
agcttcggaacaagagaccctgcttcctgcctgacacagctcacttcaag

SEQ ID NO: 546671 - DNA, 75 bp, Homo sapiens
tccaggaaagacatggagattctcttaaaaagattctggatgaaattgaagaacataacatcaaaatctatcact

SEQ ID NO: 546672 - DNA, 100 bp, Homo sapiens
ggactgtgcacgaggttggcgacgccgccccgccgggccccagatcaggccaccccccaaggtgaagaactgaagttcagcgctgtcaggattgcgagag

SEQ ID NO: 546673 - DNA, 80 bp, Homo sapiens
cgacgtcttgcctgtgtcccacttgttcgcggcctatagcacatggattaattgatgtatgttgagtttatggagctgcc

SEQ ID NO: 546674 - DNA, 75 bp, Homo sapiens
cgccacgcagccggccaccgccgagacccagcacatcgccgaccagtgatccagttttttgacactgccagggtg

SEQ ID NO: 546675 - DNA, 100 bp, Homo sapiens
tgccttcagccatcagggcagcatccaggtggacagcaaactgactcgggaaagtggtaccgacttccccatccctgctgtcccaccagggacagatcca

SEQ ID NO: 546676 - DNA, 74 bp, Homo sapiens
tgacatttaattttagggtcctttatatagaagggagagtgtgcatcaccttcgaccaggccaacctgaccgtc

SEQ ID NO: 546677 - DNA, 75 bp, Homo sapiens
caggccgccacctgcaaccacactgtggacttctgtttcctgctctcgacaagggctggtggcctgggaatcaat

SEQ ID NO: 546678 - DNA, 90 bp, Homo sapiens
gttcaatctggaaacatcaatgctgccaagcaacagggagctgccaccaccgtgtactgtgctgctgtcccagaactggagggtctggga

SEQ ID NO: 546679 - DNA, 100 bp, Homo sapiens
ctggacccctccttcacgcacgccctgcgcctggtgaaccaagctctactgagatgaagaaagaaaaagaatacctgctcagctccagagacacgtaaag

SEQ ID NO: 546680 - DNA, 87 bp, Homo sapiens
ggctgaggaggggccccagcagcccccgaaggccctatcaggacatggagtatgaaagacggaagcgcctcttggacgcgtgtgacc

SEQ ID NO: 546681 - DNA, 74 bp, Homo sapiens
gctcaatgatggaggctattatgatccagagacagccagcgtttcccccggggcagacagcgccggtggtgttc

SEQ ID NO: 546682 - DNA, 75 bp, Homo sapiens
ccaagaactacaggctttacttttgtggtagaccgtctaagagaagcctcagagtttgaagaccccttagttggt

SEQ ID NO: 546683 - DNA, 96 bp, Homo sapiens
attagtgtctccatcgtcatcagaaactgaaggcaactttgtctatcgcacagacaatgcagatcttcgtgaagactctgactggtaagaccatca

SEQ ID NO: 546684 - DNA, 73 bp, Homo sapiens
gcaaaaacaacagacagccctatgctgtcagtgaattagcaggtcaatgagctgaaggagaaaggcaacaagg

SEQ ID NO: 546685 - DNA, 75 bp, Homo sapiens
cgacggcaccgtcaccgaggcgccgcgcacagtcaagaaggttcgggatgagtatcggcaggactacgatgctgg

SEQ ID NO: 546686 - DNA, 127 bp, Homo sapiens
gccgcgtccccagagagcgccctgagagaacagggtggccgcttggtccagggtgagaatccttttgaaattcaagaccattctcaggatcagcaaatagaaggagatgaggaggatgaagagaaga

SEQ ID NO: 546687 - DNA, 50 bp, Homo sapiens
gcgctcgtctggcggagctggagtgcagaggcaatacatggagatgcagc

SEQ ID NO: 546688 - DNA, 100 bp, Homo sapiens
gtggaagacagcattggtactaatggccaactcaaggtgacaaacagcatgtttggtgcttcaagaaagaagtttgtagagggggtcgacagtgactacc

SEQ ID NO: 546689 - DNA, 90 bp, Homo sapiens
ggcgcctgtccggacccgggcccctctccgctttcggccggcctcgggcaccgggcttctggagatgggaataactgggaacacaagtcc

SEQ ID NO: 546690 - DNA, 75 bp, Homo sapiens
ttggcctgcatgcctgactgccacacacctccagaatcaggtgtctgaaaaaattttctcccaaactggttggct

SEQ ID NO: 546691 - DNA, 75 bp, Homo sapiens
cagcttttcagtgtctgctggaatgtgatggtggcagggcccagccccgaaccagacaagggacccctcaaggag

SEQ ID NO: 546692 - DNA, 100 bp, Homo sapiens
gcagagagaagcggtccgtcgtgtcctttgataaggtcaaggagcctcggaagtcaagagactcagagtcccatagaaaagaaccgaagttatgtcatct

SEQ ID NO: 546693 - DNA, 76 bp, Homo sapiens
tcagtgactgaattaaaaggtgtcaagaagctcagaatgggtaagcttgatgattaccaggaacgaatgaacaaag

SEQ ID NO: 546694 - DNA, 90 bp, Homo sapiens
cgctcctcggccgcgcaatgggcacccgcgacgacgagtacgactacctctttaaagattgccatcacgaaagccaaagtggatttctcc

SEQ ID NO: 546695 - DNA, 100 bp, Homo sapiens
caaggatttatcctcttcatctttctccgatcccagttagcaggaatactttagcctggaaggtaccccaagaagctagtgcagacttattcagtgtttc

SEQ ID NO: 546696 - DNA, 74 bp, Homo sapiens
tcgacccgtacttgaagccctacgccgtggacttccagcgcagacgaaatctcacaaaactgtcccttatcttc

SEQ ID NO: 546697 - DNA, 73 bp, Homo sapiens
attttagggtcctttatatagaagggagagtagccactggacggatgtccaggtgaaggggacgtcgctgccc

SEQ ID NO: 546698 - DNA, 75 bp, Homo sapiens
aaaactgtcccgggtgggaagaggaacagcctatgtgggcttccacggaggcagaagtcaattcatctggaaaga

SEQ ID NO: 546699 - DNA, 75 bp, Homo sapiens
ccgtcattgctaaaagtctgacccctgattgagaaagatcagtctaaagaaaaggagaagaaagtgaaaaaaaca

SEQ ID NO: 546700 - DNA, 85 bp, Homo sapiens
gacttttcaccagcagcaccctcaggtcatagatgtggatgaagttgaggaaacaggagttgattctgaaaaagagttccacgtc

SEQ ID NO: 546701 - DNA, 83 bp, Homo sapiens
gcaagcccctgcacgtcatcaagggcgtgatggtgggcatgggtcagaaggattcctatgtgggcgacgaggcccagagcaag

SEQ ID NO: 546702 - DNA, 98 bp, Homo sapiens
ttcagcttggacattttacccttcagtcggcccaagaaatcaaaataaaggaaacacatttcatatactgcagatgctggctatgagtttgacatctg

SEQ ID NO: 546703 - DNA, 100 bp, Homo sapiens
tttcccttttggagaatgtatttactcctatgttctgccatagtgatgagactcagattgatggacaacttttcttaattaagcaccttttgatacttcg

SEQ ID NO: 546704 - DNA, 100 bp, Homo sapiens
cactggcccgggccggcgcgggagggctgtgtgatggcctcggagcgcccggagccggagacatcacttagtgctcttacccagctgatgaaaaagatgc

SEQ ID NO: 546705 - DNA, 74 bp, Homo sapiens
tcgttgatgagagcattcgaagtgacctcagcagggcatccaggttttcctttggaatatggataaatacacca

SEQ ID NO: 546706 - DNA, 101 bp, Homo sapiens
gagctgtaaaacatgaacggaagagtggattatttggtcactgaggaagagatcaatcttaccagagggccctcaggcaccgaccgtcacgagctaacttc

SEQ ID NO: 546707 - DNA, 87 bp, Homo sapiens
agcgtcaaactcaccaaaaacaacatctttccagaaagagacttaattcagtgcacaaatgagatgaatgtgaacatcccacagttg

SEQ ID NO: 546708 - DNA, 100 bp, Homo sapiens
tgattctgacgtacaacttgaggaagagggaaggaaaggaggtgagctggcctcagctgtccacgcctacacaaaaacaggagacccgtacatgcggtct

SEQ ID NO: 546709 - DNA, 88 bp, Homo sapiens
aatcgggctgaagcgactgagtccgcgatggagacggaaccctctgcacttccaccttattgctgactccattgcggagcagatcctg

SEQ ID NO: 546710 - DNA, 75 bp, Homo sapiens
ttcaactcagtcctgtttgacaacatctgccctacccccatcctgcagaagagttttgccgaattgacaagcccc

SEQ ID NO: 546711 - DNA, 100 bp, Homo sapiens
atttcagtgactgaattaaaaggtgtcaagaagctcagaatgagccacccagagttccctcactgaagatctgagcatgacccgggacgaggcactgccg

SEQ ID NO: 546712 - DNA, 80 bp, Homo sapiens
tggatcagtttctaaacttctctcctaaagaaggtgctcagcagggagaccccctttcccgctatatcttcaggaaggct

SEQ ID NO: 546713 - DNA, 82 bp, Homo sapiens
gaaccgcagtatcatgctggccaagaagatcatcattaaggacggaggcacgggctggtgaattaccatatctccgtcaagt

SEQ ID NO: 546714 - DNA, 82 bp, Homo sapiens
gtccgcaaggccggagaaggccgccgggcccgggcatggtggtctggggcaacgcggaagataatcaccagaatgggagtga

SEQ ID NO: 546715 - DNA, 83 bp, Homo sapiens
tattggtctcctgctcctagaggtggtgcgcgtgggcagggcgcggggacatggggcccgacatggagctgcccagccactcg

SEQ ID NO: 546716 - DNA, 80 bp, Homo sapiens
tttcctgacaaatttggatcctgtgttcctcgatggctggctgtggtgaaattgatcattcaataaacatgcttcctaca

SEQ ID NO: 546717 - DNA, 98 bp, Homo sapiens
aagtcaagaaaatagatgcttctaaatctgttgatgaagccataggaaaaggatacagagtagagtttcatgaacctgaaacttggtggaaatttgat

SEQ ID NO: 546718 - DNA, 100 bp, Homo sapiens
agaaaatagcagccaggaaccaagaaaacttgttgaccgtcctccaatggaaccctcccagtatgtctcagttgtccctaaatatccagacaagatggga

SEQ ID NO: 546719 - DNA, 100 bp, Homo sapiens
gggccctgcgccttgctccttttgtctaccttcttctgatccagacaggagcatctttccttgaagaagtacattattgacattgtggttgaaagtacag

SEQ ID NO: 546720 - DNA, 100 bp, Homo sapiens
agtgagcaccttttggcccaatgaatatcaggttaaagccgagccagccaaaatagaagctttccgagcttcactttccaagctaggggatgtctatgtc

SEQ ID NO: 546721 - DNA, 80 bp, Homo sapiens
ggagcttcgtcagttgaaccgctcgcgaggagggttgctagtggagaagatgtccagctcgccgctgtccaagaaacgtc

SEQ ID NO: 546722 - DNA, 97 bp, Homo sapiens
caacttcagtgggcatcgagatgacggcatggagggtgaaaggtgtagcagtcactcggcctacacccacagcatcgaccttgtgaacccagcgacc

SEQ ID NO: 546723 - DNA, 75 bp, Homo sapiens
ggcagatgtataagaaggcagaggcttccttttggaccgccgaggagcaccagaaatgtcagcagcccaggacac

SEQ ID NO: 546724 - DNA, 100 bp, Homo sapiens
gaggacaagtacagctgccagtattgctcgtttgtttctgctttcaggcacaagcttcacaggctgctcaagaagccgagatcaatgccagaaaagccaa

SEQ ID NO: 546725 - DNA, 100 bp, Homo sapiens
agacctgcgtcctttttcgtttttcggatgatgccttcaatactacctttatttccaccatagtatcagatgtagaaggtggtgatggactgcagctcag

SEQ ID NO: 546726 - DNA, 82 bp, Homo sapiens
cctttctctcgctgccgctgggaccccgtgtcatcgcccaggccgagcacggggaaaggccatacaaatgtcagacctgcga

SEQ ID NO: 546727 - DNA, 90 bp, Homo sapiens
aatttccaccagttggtggcactgctacactgccgcagcctgcacaagagaggtggagaagagcgagtacttgagaaagaagaggaagaa

SEQ ID NO: 546728 - DNA, 100 bp, Homo sapiens
caaccacaataacaggcggagggtcggcgtagatttgggaatggatgatgaaggagatgatgacccagttcctctaccaaatgtgaatgcagcaatatta

SEQ ID NO: 546729 - DNA, 100 bp, Homo sapiens
ggccacccctcctttcaggtcaaggcaatagccctctggaacaagacaattcatgtgagataagaaagaagagcccacaagaccaaggatgtattctcag

SEQ ID NO: 546730 - DNA, 100 bp, Homo sapiens
agccgcaagacattgtttctctccctctgcccccccttccccacgcaaccccagatccatttacactttacagaatcctgaagtgggtaaaactgattga

SEQ ID NO: 546731 - DNA, 73 bp, Homo sapiens
aaagaaacaagcccgctgtcagggagtagtttgtgccatgaaggaggaagataccaactagagataaaaatac

SEQ ID NO: 546732 - DNA, 100 bp, Homo sapiens
ccgcctcctgctagagcggcgaaccgtgggcagtgagatttttacataccgttgctcaaaagagggctgcaagaagaaagagatgctgcagatggtatgt

SEQ ID NO: 546733 - DNA, 90 bp, Homo sapiens
agaaggaggttcaggctacggtgagccgaaggactgaaagcctccttctctctctcactgaccttcacttcgagactggcccctgatcct

SEQ ID NO: 546734 - DNA, 100 bp, Homo sapiens
tgctcgttgtcgccgcggtcctgctgttggccgacggtcgcaaggtcctacggtcaagcatccgggagtttctatgcagcgaagccatgttccacctggg

SEQ ID NO: 546735 - DNA, 100 bp, Homo sapiens
gcaagtgcccaggacccatcggctgatcacacttgctgatcacatctgtgctcggggcccccagttcccgccccagacctcttgatgcagatcaagcagg

SEQ ID NO: 546736 - DNA, 114 bp, Homo sapiens
gcctgagcaaggagcgggtccgtcgcggagccggagggcgggaggaacatgacatcgcggagcctagatattatcctactgaagatgtgcctcgaaagctgttgagccacggca

SEQ ID NO: 546737 - DNA, 100 bp, Homo sapiens
acttgggagaaagtttcatctgtggatggagtattggaagtaacagctagcagtcgccactatgttgacaggctatttgaccctgatccccagaaagttc

SEQ ID NO: 546738 - DNA, 75 bp, Homo sapiens
catctgtgaggctcagtctcccaacacctctgcgccatcatgaccgggtcctataacaacttcttcaggatgttt

SEQ ID NO: 546739 - DNA, 76 bp, Homo sapiens
gtggtggacgagacggaggcgctgcagcgcttcttcgaagatgaaggtcaccgtgtccaaagggggcgaccgggac

SEQ ID NO: 546740 - DNA, 100 bp, Homo sapiens
gcagtggtcgcttcttctccttggaactagcttctaaaaaatccctgcctatgaattattacacagtattctaccatgttcaagaacaactacctagaga

SEQ ID NO: 546741 - DNA, 95 bp, Homo sapiens
attacgaactcaaaagtcaaccgctgaagagcagggaggacatgtatgcccaggactctatagagctactaacaacatctggtatccagtttaaa

SEQ ID NO: 546742 - DNA, 82 bp, Homo sapiens
aagaaaacagcaacacagttacatagtaaaaggaggcctaacatccggtgaaagacagagatcacatttcaactagattctt

SEQ ID NO: 546743 - DNA, 106 bp, Homo sapiens
tagaatctgggactttcttcgttgccatgaggaaagaattctccgagtggttcagcactgagtcatgcttgcttctgctacgcactgatttgttctattccagttt

SEQ ID NO: 546744 - DNA, 86 bp, Homo sapiens
ccaacgcctggctcggagcagcagcctctgagctcaccatggatgatgatatcgccgcgctcgtcgtcgacaacggctccggcatg

SEQ ID NO: 546745 - DNA, 100 bp, Homo sapiens
ccgacctccaggtcaccatcgagggccctggagagaagatgactgaggaggaggtggagaccgttctggcaggacacgaggacagcaacggctgcatcaa

SEQ ID NO: 546746 - DNA, 50 bp, Homo sapiens
aaagcagctaggccaggaccctttctttgctgacgaagaatttgatgaac

SEQ ID NO: 546747 - DNA, 74 bp, Homo sapiens
ggattccaagtaactcttatttgctactacccacagatggcatgatccgaaaacactctcatgtcaagataggg

SEQ ID NO: 546748 - DNA, 83 bp, Homo sapiens
ctcggacggaacgttaggaaggccctggtttacccaaggtccagcctagcccctaggcaccatgtcggacagtgatctaggtg

SEQ ID NO: 546749 - DNA, 100 bp, Homo sapiens
aaagggaggggcttcagcatcgtcacggacactcctgagctacagagactgaagaggactcaggagcaaatcagtaattctgctcccagttttcgagagg

SEQ ID NO: 546750 - DNA, 73 bp, Homo sapiens
gatgctagtgaagcctttgctggactcacaagtctcactaaacttgcatttgcccagtataacatggatcagt

SEQ ID NO: 546751 - DNA, 90 bp, Homo sapiens
ggatgaccaccaccctcgtgtctgccaccatcttcgacttgagcgaagttttatgcaaggtcaaaatgcagatcttcgtgaaaaccctta

SEQ ID NO: 546752 - DNA, 135 bp, Homo sapiens
cggtgcgtgccccgacggggcgcgcgcgaagcgagcgagaaggcacggagtcgccgcggagcgcagggactgctgagatgtcctctattcttgaagagcgtattcttggagctgatacctctgttgatcttgaag

SEQ ID NO: 546753 - DNA, 98 bp, Homo sapiens
ataggtgtatcaagtaatggtgcaaagcctgaagatgatgtaccagagctagaagaatatttcctggtgaatttaacttacgttggacttaccatggc

SEQ ID NO: 546754 - DNA, 76 bp, Homo sapiens
acgacaaaacaccagatgatgaccctgagcaaggaaaatctgagggtctatgttaacaatgaatgggcaaccagtg

SEQ ID NO: 546755 - DNA, 90 bp, Homo sapiens
ctggagcctcagttggaagcagccgatccagcctgcggagcctgtggggcagaaaagtcctccatacattttctccccaattccattcct

SEQ ID NO: 546756 - DNA, 100 bp, Homo sapiens
cgacaagggtgttcccgaactagagtggacaacatctggggaagatgtacgagacttcacaaaggtacttaagaacaagttcaggtcgaagaagtacttt

SEQ ID NO: 546757 - DNA, 71 bp, Homo sapiens
aaaatcgtcttatagttgagaatttatcctcaagagtcagctggcagagagctctggctgcagagcgccga

SEQ ID NO: 546758 - DNA, 82 bp, Homo sapiens
ctgaaaatggggcggaagaaaatacaaatcacacgcataatggatgaaaggaaccgacagctacctggcctatcgaaacttt

SEQ ID NO: 546759 - DNA, 75 bp, Homo sapiens
cctgtgtggcaaacctttcttgagctcagttctttatagctccaagctctacagattcttcaaatatattgagaa

SEQ ID NO: 546760 - DNA, 75 bp, Homo sapiens
aaatagcgcggctgtgcaagtacctgccagagaacgacctgaagcgtggggtagagcagcggctgccatgctctt

SEQ ID NO: 546761 - DNA, 99 bp, Homo sapiens
ccctgggaagcctagaaaaatggttttggcttggtttgaagaaggtgaagaaacaattacagcctttgtagaaccttttgtaattttactcatattagt

SEQ ID NO: 546762 - DNA, 90 bp, Homo sapiens
gtccggcaccgccatccccatttctatggtcctcctcacctatggccgctggcagatgaggaaaatgaggcccaaagaagtgatgccact

SEQ ID NO: 546763 - DNA, 85 bp, Homo sapiens
aaactggtctgccatgccaagttgtaaaggattcagttgcctgtctgaacagtgactaccatgaactctacatgctgtctacttc

SEQ ID NO: 546764 - DNA, 75 bp, Homo sapiens
gcagagtacgatactcaggtcaaaggctccctggcattgggcagtgttacagtgcactcttctgaacctgaagtc

SEQ ID NO: 546765 - DNA, 88 bp, Homo sapiens
ggagctcttacagatggacctgtacgcgctgctaggcattgaggagaaggcagcggacaaagaggctgggctaagcagttccaagctt

SEQ ID NO: 546766 - DNA, 90 bp, Homo sapiens
ggactttcttccagcttctgctgtccttctttgtggagagcaagacaggggcaagtgtccgagtggtgaatcagctacttacagagatgg

SEQ ID NO: 546767 - DNA, 108 bp, Homo sapiens
cagaactgttccttcagccaaagaaacaagccgtggaataggtgtatcaagtaatggtgcaaagcctgaaattgaagaattagggtctgaaggaaaagtagaagaagc

SEQ ID NO: 546768 - DNA, 82 bp, Homo sapiens
cgcgcgcagggcctgcagcgggagctggacggcgagcgcgagcggcgcgagaaagtcttattagtaggtaagaaacagctgc

SEQ ID NO: 546769 - DNA, 82 bp, Homo sapiens
gcagcactgcagaccacagtgccacccagcaccccacccagccccacagaccctcccactggtccatgttgctggtcctggc

SEQ ID NO: 546770 - DNA, 90 bp, Homo sapiens
tgttgagatcgttgatccaggagatgggtataatagactacattttctattctaaacctcagctgaacaccttaggcatcctgggccctc

SEQ ID NO: 546771 - DNA, 75 bp, Homo sapiens
cgacctccgactactttctccttcaagcctctactcttcatggatcttttggatgaaagaacactcgtggcagta

SEQ ID NO: 546772 - DNA, 89 bp, Homo sapiens
cgcagatgttgtcaaggtggcctaccaggaggccaggggtgtcgccatgtaccagtggataacttctccatcagtgaaggaaccatcca

SEQ ID NO: 546773 - DNA, 100 bp, Homo sapiens
agacacgctgggccgaccccagagcggcgctggacagacctaatctgggagcctgcaagtgacaacagcctttgcggtccttagacagcttggcctggag

SEQ ID NO: 546774 - DNA, 118 bp, Homo sapiens
tctctcaggcacgtcctcgacctcagttgccacgtgcacatgctggtgccttccagctcttgaatgtcgtctctcaactagccaaacggaatctgcgactgctggtcctaggccggaa

SEQ ID NO: 546775 - DNA, 75 bp, Homo sapiens
cgttagaactcgcgtttccacttcagagatctgatcctttcccggagttcagttatgggtgtgagaggtttgcaa

SEQ ID NO: 546776 - DNA, 82 bp, Homo sapiens
taaccaatgactgtggaataatatggaagaagatggaaaaaacttgtttaatggtaatggaggggaaagttccagtcgcagc

SEQ ID NO: 546777 - DNA, 74 bp, Homo sapiens
ccagcagaaaccagattggatgttccagctcccagagaaattatcaacgaggacattgccaagaggacgtgtga

SEQ ID NO: 546778 - DNA, 83 bp, Homo sapiens
acaagttcggcggggaagatggcggatgacaaggttggcagtggcaatgacccctggtcagcctggagtgcctccaaatctgg

SEQ ID NO: 546779 - DNA, 75 bp, Homo sapiens
cttacttcaatttgaacccatttgaggtgtggatccggagttgtatgagttaacaacttctaagctggaaatctc

SEQ ID NO: 546780 - DNA, 100 bp, Homo sapiens
gcatggcaaagactggcaaaagcacaaggattctcgctgtgacagagacaacaccgagtatgagaagtaaagaacaagcacctttggagatgagtatgca

SEQ ID NO: 546781 - DNA, 83 bp, Homo sapiens
caatggtctcaatctctggaaaaacttcttgccaaccaaatacctcatgatccagcagactccatttgtgcgccgtcaagtcc

SEQ ID NO: 546782 - DNA, 75 bp, Homo sapiens
cctaatcttgctggtgaagcactggtaccaccagcccctgcagatcaagtcagtagtggcaccagagcatgtgaa

SEQ ID NO: 546783 - DNA, 100 bp, Homo sapiens
cggcgccagcagcccggaggcccggcccgcgcaggaggcgctcctccttcccaccgggagcttctgataattggaggtgttgcagcccgggatcagctct

SEQ ID NO: 546784 - DNA, 50 bp, Homo sapiens
gtcgatctggagcttttcccctccccggcatctcttgggcagtgaacagc

SEQ ID NO: 546785 - DNA, 98 bp, Homo sapiens
gtgatctttgataagaatgattcagattttgaagctaaagttaagcagctgccacacatgcctcatataagtgaatgcttgatgaaaagaagtttaaa

SEQ ID NO: 546786 - DNA, 75 bp, Homo sapiens
ggaagagaacgtctccgagtccctcaactctctacgctttgcctccaagggtttttaatgaccacaacaagcaag

SEQ ID NO: 546787 - DNA, 82 bp, Homo sapiens
actctgtagcctaccatgctgatgatggcaactgagcgggctttggacaccatgaactttgatgtgattaagggaaagccaa

SEQ ID NO: 546788 - DNA, 112 bp, Homo sapiens
agaagcggcacacacgggactccgaagcccagcggctccccgactccttcaagggtaataattctcataggaaataaagcagatttggaggcacagagagatgttacatatg

SEQ ID NO: 546789 - DNA, 100 bp, Homo sapiens
gtctgacgtcatcaggcttgttcaagacacaccggaggcgacggccatggccacagtgggctaccttgagaatggagcgaggagccaaggagaagaacca

SEQ ID NO: 546790 - DNA, 71 bp, Homo sapiens
cggcggcctcgggcgccgcgaggtcgtgttcccgaacagagatgtggtcttgctatgttgcccaagctgat

SEQ ID NO: 546791 - DNA, 100 bp, Homo sapiens
aaggatgtggggcagatgctgatgggcaaactaggtacacatgggcactcacatgtggaatagcacccctgcacgacggggtcggcggctctctgtggat

SEQ ID NO: 546792 - DNA, 101 bp, Homo sapiens
atgtggcgctaccgctcctgggacgtgccacagatcccatcagaggcaccccagacacaggggctagagagctgaaggagagccagtttccccaaaattgg

SEQ ID NO: 546793 - DNA, 75 bp, Homo sapiens
tggggctgctgtttctcttcgccgacggtatcaacatacgtattccttataaccacctcatgagattgatatgat

SEQ ID NO: 546794 - DNA, 98 bp, Homo sapiens
tgacgaggacctagactgtgacaacgaccacgtctccaaaatgagtcgcatcttcaacccccatctgctttgaagacaagattcccaaaaggagattc

SEQ ID NO: 546795 - DNA, 100 bp, Homo sapiens
cagaggctctttgctgctgtcagtatcaccactggtcaagcagggtctcatgattccttcagcttctacattgatgaagcctctccagtaggtcctgagc

SEQ ID NO: 546796 - DNA, 100 bp, Homo sapiens
tgccactatgatgccggatggaactttgggattgattgttctctggggccggactgagaaatgcctgaaggagacgacggaggagatccggcagatgggc

SEQ ID NO: 546797 - DNA, 74 bp, Homo sapiens
cgttgctgcctgaatcagaagggcaccatcttgggctcacggatgattgatatccagaccaggatggctgggcg

SEQ ID NO: 546798 - DNA, 76 bp, Homo sapiens
cgcggctctccaagttctaccagccctacgttctcagcttccttgcttccatggctccagcaccattcgaaacctc

SEQ ID NO: 546799 - DNA, 74 bp, Homo sapiens
ctggctcttgccctcatcctggttctggaatcctcagttcaagtgaagatagtgatccggggagacaggaacac

SEQ ID NO: 546800 - DNA, 100 bp, Homo sapiens
gacaaacacaacctggaggaggaggagccggaggactatgagctgctgcagattctctcagatgaccggactggcaaaactcaaggctcagaaactgcag

SEQ ID NO: 546801 - DNA, 100 bp, Homo sapiens
cacgattcttctaatggatgggaacatgggcctggcacctgtgtttgctctgtttgtaccattttactgctccataccaagagtccaagtggcacaaatt

SEQ ID NO: 546802 - DNA, 90 bp, Homo sapiens
caaatacttcatatttggcttcaatgtcatattttgggcttctagtgaggacgttgccagctccccggagcgccactacacgcccttgcc

SEQ ID NO: 546803 - DNA, 100 bp, Homo sapiens
atttactacctgtcattatgggagaaaaggatgaagatgagctggattcccacaccatggtgaagactagtgtggagagtgtgggcaccatgcgggccac

SEQ ID NO: 546804 - DNA, 100 bp, Homo sapiens
cttctttggttcttgggctgatatggaacataatcctcttcttccaggtgctgcagggtgcacagctgatcgccgtggcctcctcggaccccgcggcggc

SEQ ID NO: 546805 - DNA, 80 bp, Homo sapiens
tctcatctcgctcggctgcgggaaatcgggctgaagcgactgagtccgcgatggaggtcagctggccgccggcacctgtg

SEQ ID NO: 546806 - DNA, 100 bp, Homo sapiens
gccagtgagcgccgcggccgccgcagccatgaccgtggagttcgaggagtgcgtcaaggactccccgcgcttcagcaaacggggattcagcgtccgatcc

SEQ ID NO: 546807 - DNA, 75 bp, Homo sapiens
ctgggagccatctgtgccatcatcgtggtagttattgtaagaatgtatcctgtcaggtataatgtcagtgaatgg

SEQ ID NO: 546808 - DNA, 87 bp, Homo sapiens
cagcgacggtagcagcagcatggccgcgatctatgggggtgtagagggctgctctgttaaaagcgaaaatgaaacaattgcctgcgg

SEQ ID NO: 546809 - DNA, 90 bp, Homo sapiens
gcagacccgaatctttgacccagctccaccaggcagcagaaagatgaccgtcgtgatgtgagtaggtatggagaagataatagaggatat

SEQ ID NO: 546810 - DNA, 98 bp, Homo sapiens
gcagctgtccctgaagatgcctacccatgccgtgtgtgtggtgggagtcgaggcacatgtggacattcacagcaaagcttcgaggcgcaccaggacga

SEQ ID NO: 546811 - DNA, 100 bp, Homo sapiens
agaagaaaaatttacaatcctgtttgaatcccagttcagtgttggtggaaatgagctggtttttcaagtcaagatacatgttataaagccagttttacca

SEQ ID NO: 546812 - DNA, 100 bp, Homo sapiens
tcctataaccacccggtcctgggaatgtacgacgccaaagatgacttccctcttaggaaaacaggagtgtggccatctggggccgtgtggtatttgccac

SEQ ID NO: 546813 - DNA, 98 bp, Homo sapiens
aaagccatattggagtagcgaggaatctgattccaagcaaaaaccagcaaagaacagtctgaacttgatcaagatttggatgatgttgaagaagtaga

SEQ ID NO: 546814 - DNA, 51 bp, Homo sapiens
tggccgaatcttccttcaggatatcaagatctattgcagattggctccgag

SEQ ID NO: 546815 - DNA, 82 bp, Homo sapiens
agagtttggcgagtcagtgactgaagcgcccgtccattccaagatctctggaaacatggctacagaacatgttaatggaaat

SEQ ID NO: 546816 - DNA, 76 bp, Homo sapiens
ccagaaatggctgcaggccaagcgcctcacgccggacctggtgcagttgtgttggtgttgaagaggagaaggctgc

SEQ ID NO: 546817 - DNA, 101 bp, Homo sapiens
cacgactcccgctggctcaatgtttctgaaagaaggaccaaagtaatgccaagaactcccagatgaagaggaccttccttagacctataacagattcacta

SEQ ID NO: 546818 - DNA, 75 bp, Homo sapiens
tcctggagcacctgcagctggcgcctctgcagtgggggatccatatggctttggagacagtcgagattcaaggcg

SEQ ID NO: 546819 - DNA, 83 bp, Homo sapiens
aatgtgtgcagactacatggcatctaccatagggaagggacttcctcgcccgaagagcgcgggcacagcaacgcagatgcggc

SEQ ID NO: 546820 - DNA, 101 bp, Homo sapiens
gggtccacctgccttttgtgggctactcctactcctgcatggccctcagcccctggcaaccactaatctgctttctatctatggatttgcctattctggac

SEQ ID NO: 546821 - DNA, 100 bp, Homo sapiens
gaatccgccatgggctactcagtttacagccactgcagtatcacagccaggtacaggtttgcagattccgccagcagcacagcaagctctacagatgagt

SEQ ID NO: 546822 - DNA, 120 bp, Homo sapiens
cctgttaactacattctgcaggtattggttggaagagaatctgagtacaaacagatattcgggacagtgggggtcccaaaccagtgatggtgtatatccatggtggctcatatatggaag

SEQ ID NO: 546823 - DNA, 83 bp, Homo sapiens
cgacttccttgcagcctcttctccgggtagagttggctttgtgggacacagctgggcaggaagattatgatcgcctgaggccc

SEQ ID NO: 546824 - DNA, 100 bp, Homo sapiens
attgaagcaaattgaaggcacaggaatatccatgtcggcttgtagagagattgcaggtagtggtggtgcacgaagatccgcactacttgacagcgacgag

SEQ ID NO: 546825 - DNA, 96 bp, Homo sapiens
cacagcatgcaatcagtagaagagttgggatctaacccagaaaactgcactaaccaggctgtatctggacaaggccaccttaatatggaatggaaa

SEQ ID NO: 546826 - DNA, 100 bp, Homo sapiens
tttcatcctggtttatagcctggttaatcaacagtcttttcaggactcgggggactatcctctgacagctccaggtctatcctggaagaagttccagggc

SEQ ID NO: 546827 - DNA, 90 bp, Homo sapiens
tgaagatccctgtggtagagagaaaaatcctggatctgtatgctttgagcaaggttgcccccaagtttcctggcagtgtgtgatactgag

SEQ ID NO: 546828 - DNA, 50 bp, Homo sapiens
gccaggcttctggggctgactcaactggacacagcaagaggcaacatttt

SEQ ID NO: 546829 - DNA, 99 bp, Homo sapiens
cgcagaagtctccctcaggatcagaccgtagcccttccggaaacctccatgcctgacatttaccccggtaactgctgggcatttaaaggctcccagggg

SEQ ID NO: 546830 - DNA, 99 bp, Homo sapiens
tgaagatagtgcctttcagccctaccagccctggtattgatgtcaccacagagctggacagctggattgacaagttttgtctggatgctgatgtgtttg

SEQ ID NO: 546831 - DNA, 83 bp, Homo sapiens
ggggacagagtgcagctcctaaacctgctggtgacacgactcagacagaaggtgaaaaggggaccgggaaatcaactcagaaa

SEQ ID NO: 546832 - DNA, 100 bp, Homo sapiens
gggtgggagtgacccgattttccaggtcatgtacgtagaagggactgcagttgtgatgggttttgaagatcccatgctacagacagatgacactcctatt

SEQ ID NO: 546833 - DNA, 83 bp, Homo sapiens
gccgaatggcagcctccagaaagccaccgcgagtaaggttttaaaatcaaagatgggaaaatcggagaaaattgcccttcccc

SEQ ID NO: 546834 - DNA, 90 bp, Homo sapiens
gaccagctccctacactttaatggagactttggggatgaggtgggctatactccttatgtttctcatgtgggattgcagcaacacacagg

SEQ ID NO: 546835 - DNA, 100 bp, Homo sapiens
tgctgaagctgacatcactgagctctgccgggacatgttctccaaaatggccacttacctgactggggaactgacggaatgatgtctatgaatgggctcg

SEQ ID NO: 546836 - DNA, 100 bp, Homo sapiens
gaggctgctgcgacgaagagttccctcagcctccggccttgtgtgtccgactcggcagcagtgttacggctagatgaggctcaagaagcagaatgccagg

SEQ ID NO: 546837 - DNA, 101 bp, Homo sapiens
gagacattacatcaggaagatactgcagagatattctactccatctcattcattgtacagtaactctcaggagccttctccgcagttggcttcctcggtag

SEQ ID NO: 546838 - DNA, 100 bp, Homo sapiens
actatgggattttcagggctttgaatgcatcagaaccatgcacggtgcagtggaggcttgcctcttgcatcagctgagacgccgtgccgctggcttcctg

SEQ ID NO: 546839 - DNA, 74 bp, Homo sapiens
agactggagaggaagcgactgcggttctctatgtagcaggcgctgtactttggccaagccaatctccatttgca

SEQ ID NO: 546840 - DNA, 101 bp, Homo sapiens
acggcggccacctgagtggcgcggcggtgtcaggttcgagaacttgtcttggacaattgcaaatcaaatgatggaaaaattgagggcttaacagctgaatt

SEQ ID NO: 546841 - DNA, 51 bp, Homo sapiens
gccctgccagctgcgccgggacgctcctgacccctgaggattaccagcgat

SEQ ID NO: 546842 - DNA, 82 bp, Homo sapiens
ctcggagcgcagcacccggcggacaagcggcgggacgccaggacgcggcgagcaagacaatgcagatcttcgtgaagactct

SEQ ID NO: 546843 - DNA, 82 bp, Homo sapiens
tgcagaggatcctggaggcctgggaagccaacgaccacacgcagactggaattagtggaatcaaggaatagtttaattcaac

SEQ ID NO: 546844 - DNA, 97 bp, Homo sapiens
aaaaaatttagatataagatgtataagaagtcttaacggccatgaccacaatgtttcttcagtagccatcatgcccaatggagatcatatagtgtct

SEQ ID NO: 546845 - DNA, 90 bp, Homo sapiens
gaagaactggaacacgtagaaagtgcaagcaaagagctttgggcactcccaataatgaagtgtggccagaagtggaatctttacaggact

SEQ ID NO: 546846 - DNA, 100 bp, Homo sapiens
gtcctcaactttgaagagatcgactacaaggagatcgaggtggaagagcctgaagcaggacattctaaatgaaaagactgaattggaagcaacacttaag

SEQ ID NO: 546847 - DNA, 83 bp, Homo sapiens
ggcagctttttgaagaacaggccaaggtgacctgaaacatatcacgaagctgaaaccttggggcctttttgaggttctagtgg

SEQ ID NO: 546848 - DNA, 98 bp, Homo sapiens
acctgggagagtgggcaggtcctgggggaccagacggtctcagacaatgagctccaggttgttgaatgttgggtcacgaagatctcaacctggccaaa

SEQ ID NO: 546849 - DNA, 80 bp, Homo sapiens
atccaggcgaactcggcctatcgctaccctccgaagtccgaatagcctaacatggcagaccagagacagcgctcactgtc

SEQ ID NO: 546850 - DNA, 73 bp, Homo sapiens
cagaaaggagaacaccttatttcagtttcttaaacaattaggtctacatcctaactggcaattcgttgatgta

SEQ ID NO: 546851 - DNA, 100 bp, Homo sapiens
ccacttttgattgcaaagtgctatcaaggaaccacgctctcgtctggtttgatcacaagacgggcaaggtcattcccaaaagcaagttcgtcttggtgaa

SEQ ID NO: 546852 - DNA, 100 bp, Homo sapiens
cagatctgaagacctattttactgataagaaaacacatctttacacactaaacatccctttaaaagtagttggaatgttcccaagtagaggtgagaaaag

SEQ ID NO: 546853 - DNA, 100 bp, Homo sapiens
aaccggcttgttgtcttcaattaaaaaatttattaaaggaagcacacctaaggagaggagttcattacttcggaagtggtacaatttaatgatacaaaat

SEQ ID NO: 546854 - DNA, 100 bp, Homo sapiens
aggaagatccactaaaggaggccatccttccgccttcttctgcaggagtcaggacccagatgatgtggtaccagttggccaaagaagagcctggtgttgg

SEQ ID NO: 546855 - DNA, 98 bp, Homo sapiens
ttccaggtgcttccctgcagatcctgcgcccccaaccaggtcaaagtggcaggtatttgaaataccttaccaagaaataccttaagaagaacaatctt

SEQ ID NO: 546856 - DNA, 83 bp, Homo sapiens
atcatggcggatggccccaggtgtaagcgcagaaagcaggcgaacccgcggcgcaataacggataacgtggaaagggcagatg

SEQ ID NO: 546857 - DNA, 103 bp, Homo sapiens
cggcttcctctccatcctctacagcatcggcagcaagcctctgcaaatctgggacaaaaaggaggtgacaggaggagcccccgcacaggacctaagaatgctg

SEQ ID NO: 546858 - DNA, 100 bp, Homo sapiens
caattgatcccaagttgtcgacgaccgacagggtggtgaaagcagcgtccgtctccaagagagtatgaagagagtgcgtctgtagggcagggaagatggc

SEQ ID NO: 546859 - DNA, 75 bp, Homo sapiens
cacatatggggagttggaattcaagaatgatgaaactgtgagcgagaacccgagcagcgccatgagcaacactac

SEQ ID NO: 546860 - DNA, 75 bp, Homo sapiens
tgcgagagcctcctcacttggtgctcggccttgttctccccatgtgggccatagccctcatttcctttggtgtcg

SEQ ID NO: 546861 - DNA, 90 bp, Homo sapiens
cccctttgaattaattatggctcggcttcatatacagatagctctgatgatgagacatcgcccagggacaagcagcaaaagaactctaag

SEQ ID NO: 546862 - DNA, 98 bp, Homo sapiens
agaccggctgccgcctgctccccggaaaagggcactcgtctccgtgggtgtggcggagcgcgcggtgcatgcctgctatgggatggatgaagaagaga

SEQ ID NO: 546863 - DNA, 90 bp, Homo sapiens
gaatcagagttcattggccaaggagtgccccctttcacagagaaagtttcattgtgcaaatctaacttcatggcctcgctggctgtattc

SEQ ID NO: 546864 - DNA, 76 bp, Homo sapiens
cagaagcttcaccacaaaagcgaaatgggcacaccacagagcctacattcatcagtacacaaaatttggaatcgaa

SEQ ID NO: 546865 - DNA, 100 bp, Homo sapiens
ggacttctcctggcggcgctgcggatccagggggtcggctgccaggtacaggtggctgtgaaaaacaatatcgatgtcttctacttcagctgcctcatcc

SEQ ID NO: 546866 - DNA, 101 bp, Homo sapiens
gtcaactttactgagaattttccacctcctgacacaacaccactcaggtcgacaagtgcccccaatgatttatggtacaacttcattgaactgccctacca

SEQ ID NO: 546867 - DNA, 75 bp, Homo sapiens
ggcatttggctttgcctttctggacacagaagtatttgtgacaggaactctaatgaatcattgattgaccagcac

SEQ ID NO: 546868 - DNA, 75 bp, Homo sapiens
gggccagcctggggcggccggccaggaaccacccgttaaggcctggttgcagtatgcctgaaatttgggatgtag

SEQ ID NO: 546869 - DNA, 75 bp, Homo sapiens
aatcccaacatcgttaactttttggacaggctcgggttatgtatgattttgctgctgaacctggaaataatgaac

SEQ ID NO: 546870 - DNA, 101 bp, Homo sapiens
tttgacctggacctcggctacagactgctggctgtgtgtgctgcaaaccgagacaagttcaccccgaagtctgccggcacgccccaaaggcgagggcctga

SEQ ID NO: 546871 - DNA, 100 bp, Homo sapiens
actccggagcccgctctgcgttttgttttcccctcggcactaggcagcggaggagcccgaccgacccggtggacactcactgacctgtcacaaggttgcc

SEQ ID NO: 546872 - DNA, 75 bp, Homo sapiens
ctgcactgccaagactgagtggggcaccaccacgaggcgatttgtgggccataccaaggatgtgctgagtgtggc

SEQ ID NO: 546873 - DNA, 98 bp, Homo sapiens
ggccgcggcgtggagccgggcaggagccgcgagccagctgcgcgaaggctgctttgaatgctgcatcaagtgtctgggaggagtcccctacgcctccc

SEQ ID NO: 546874 - DNA, 100 bp, Homo sapiens
tttctcattattataggctccctcctgctgtcaggctacatcagcaaaggggaatatgatgaagaatgggctaagaaaattcagagtgaaaagtttcgct

SEQ ID NO: 546875 - DNA, 90 bp, Homo sapiens
ctacaaggatggggtggtgaccatcggctgtgtgggcatggatgagttgatggaggtgtctttctcgcccctggcggccacaggcaagcc

SEQ ID NO: 546876 - DNA, 98 bp, Homo sapiens
caaatccttaaaagagtcttaacgggtgttttgaatgctgtatcaaatgcctggggggcattccctatgcctctctgattgccaccatcctgctctat

SEQ ID NO: 546877 - DNA, 99 bp, Homo sapiens
ggtgattccctgcggtgtgcaagtccgactggaacaggtgctggagaatctggtaaaagcaccattgtgaagcagatgaggatcctgcatgttaatggg

SEQ ID NO: 546878 - DNA, 76 bp, Homo sapiens
tgtgagggggttccgggaagatggtgctgatcaaggaattgacaaattgatggccaggagatcactgccaccgccg

SEQ ID NO: 546879 - DNA, 101 bp, Homo sapiens
ggcggtgtctacagtgttctcgacttcgtcgctggtcgacaaagatgctgaattagtggcccaatggaactattgtactctaagtcaggaaatattaagac

SEQ ID NO: 546880 - DNA, 51 bp, Homo sapiens
gcctttgccgccaccatgcccaaaacgaacttggagcgtgatgcccagaag

SEQ ID NO: 546881 - DNA, 89 bp, Homo sapiens
cacgagggtctcggcctcgcggtgcaggacatggatttgattgacatactttggaggcaagatatagatcttggagtaagtcgagaagt

SEQ ID NO: 546882 - DNA, 98 bp, Homo sapiens
ggggtcggcgctgggctggaggcggcggagcgcgagagcttcgagcggactcagcaaatggttatgagccttagagtttctgaactccaagtactgtt

SEQ ID NO: 546883 - DNA, 74 bp, Homo sapiens
caagcgaagccttgaaaaagctgccctgagacggtgtcccgccgaaaggcactcagaatggtccagcgtttgac

SEQ ID NO: 546884 - DNA, 82 bp, Homo sapiens
tcctgtgtagctgggattacaggttgcctgtggctggagaaaggaatgtgctcatcaccagtgccctcccttacgtcaacaa

SEQ ID NO: 546885 - DNA, 97 bp, Homo sapiens
gaggtgaccagcattcagctggagttccgggagctctcccgtctcacaggggataagaagtttcagagggagacgctgttgcggcagctggagacga

SEQ ID NO: 546886 - DNA, 75 bp, Homo sapiens
ttgccgcccgagggggcttgaaggacgcaaacatgcagatctttgtgaagaccctcactggcaaaaccatcaccc

SEQ ID NO: 546887 - DNA, 100 bp, Homo sapiens
agtgttcgccgccttctggcagcggtacccgaatccctataggaatccatacctgttttgtatgtaagcagagtggggaagatgttaaaaggtgccttct

SEQ ID NO: 546888 - DNA, 102 bp, Homo sapiens
cggtgtgcgaaccgaacagaataacccgcccccagcgggatgtgaaggactccgggtgaggccggccacgccccgcacgaagtccccacgagaagaagaaga

SEQ ID NO: 546889 - DNA, 83 bp, Homo sapiens
gtcgcgtctcggaaaccggtagcgcttgcagcatgattgacgagatgcctgaggctgccgtgaaatcaacagccaacaaatac

SEQ ID NO: 546890 - DNA, 51 bp, Homo sapiens
gacccttctctcccctccactttctcccggtaacggcacagccaacaagat

SEQ ID NO: 546891 - DNA, 88 bp, Homo sapiens
gcctcctgagcagctgggactacaggcccccaggatggagcggccggagcccccacccggcacggctgcggggcaggaggagcaggag

SEQ ID NO: 546892 - DNA, 98 bp, Homo sapiens
cacgctgaggccgaggcggagaaggggcttcctgagcgtcccagtacactgacagagagaagatggcgaattagaagatggtgaaatagacgatgcag

SEQ ID NO: 546893 - DNA, 100 bp, Homo sapiens
tgattctctctcagccagcacagctcaggccagttcgtcggctgccagcaacaatcaccaggtacgcaataactgtttggtattttgatgcagatgagag

SEQ ID NO: 546894 - DNA, 50 bp, Homo sapiens
aatagactctcccatcccaacatccttagagcagtcattatggcgaacct

SEQ ID NO: 546895 - DNA, 100 bp, Homo sapiens
ccctgcttgacgacgagctcatgtctctgggtttcacgcatgtgtgctgcagctcccatttcatcagcaagtttggaagaaccccacatttttcctgcgc

SEQ ID NO: 546896 - DNA, 100 bp, Homo sapiens
agaaaaggcctaagaattttggcattgacaatgcctgtggaagacaagtcagaccccccagaggggtctgaggaagccgcagagccccggatggacacac

SEQ ID NO: 546897 - DNA, 75 bp, Homo sapiens
tagcattcgcctactccgtgaaggtcaccctcgagtcctggctgattcttttcctggcagttccccttatgaggg

SEQ ID NO: 546898 - DNA, 90 bp, Homo sapiens
tgatggggctcttccccagaactacaggggctctggccatcttcgtgatcttaatatttgccagtgatgcctgcaaaaatgtgacattac

SEQ ID NO: 546899 - DNA, 82 bp, Homo sapiens
agactagacgcacatcaggaagacagcggaagccctgaccaggcatggagtatctcacaaagtagacgattcctctgggtca

SEQ ID NO: 546900 - DNA, 98 bp, Homo sapiens
aaggaaggaggaagtaacttgtgaaatgctgagaaaggcttagatcagcctttccacagctgttagcagcatctgccccaatttcagctgaagattca

SEQ ID NO: 546901 - DNA, 100 bp, Homo sapiens
ccttttagtggggacacagactaatcttttggcttatgatgtctacaataattcggatttgttctacagagaggaactttatattgctgttggaatatct

SEQ ID NO: 546902 - DNA, 50 bp, Homo sapiens
gacagggacgtctactacatcaaggtctgcccaagatggaggtgtttcag

SEQ ID NO: 546903 - DNA, 50 bp, Homo sapiens
gacatgttgataaaaaatgatggtactccaaagattcaggtttactcacg

SEQ ID NO: 546904 - DNA, 50 bp, Homo sapiens
cgggtgactggaggtggctccccaggaaacagagcaaatgcagcgttaca

SEQ ID NO: 546905 - DNA, 98 bp, Homo sapiens
acctactggccaccaaccctgactgccaagagaagcttctgagagaggtagacgtttttaaggagaaacacgcccgatgagagaaagggaaagttaag

SEQ ID NO: 546906 - DNA, 75 bp, Homo sapiens
cagaaagtgaacttggcattttagatctaattcaagctaacatttccaatgatcactggccatctttggttcaag

SEQ ID NO: 546907 - DNA, 100 bp, Homo sapiens
aactactttgacctgccaggagctcttctgtgtgccagggtggtggactatttaacaaaagcaatccggctcatccaggcctgcgtggatgtcctttcca

SEQ ID NO: 546908 - DNA, 75 bp, Homo sapiens
tgagctctcctagcaactctgcagtcttccttcaaggcaacagcattattgagaaaagcccttacagaagagtgt

SEQ ID NO: 546909 - DNA, 110 bp, Homo sapiens
ggaaagaacagctggagcctgtgagggccaaagtgacagatattaacctggctgcagagccaaaagtgaaccgaggaaaagcaggtgtgaaacgatctgcagcggagatg

SEQ ID NO: 546910 - DNA, 83 bp, Homo sapiens
gaggagtttcttaagcttccaaggctaaaggttgatgacaacaagaaactaggagaatgggtaggcctttgtaaaattgacag

SEQ ID NO: 546911 - DNA, 100 bp, Homo sapiens
gtcaaggcaaatttgaagctgcagaaacgttagaagaagctgctatgaggtctcgtaaacagcattgggaagctgtccattgaaaaggccttggatttat

SEQ ID NO: 546912 - DNA, 75 bp, Homo sapiens
gccgtcctgcggaaccgctggctgtcagacagcttcaaggagacgctccttggtagctcagctccgccagctgca

SEQ ID NO: 546913 - DNA, 90 bp, Homo sapiens
cagagaatgtccccatcatgtacatctgccatgggatgacgcctcagcgtcttcctccacttgatgaaggtggacccagactccacctgg

SEQ ID NO: 546914 - DNA, 90 bp, Homo sapiens
tgcactgctgtaaaaactcagttactcaaactgaaacgtctcctgcatcaggaagacaactgttagttttgtggcttactgctgctccac

SEQ ID NO: 546915 - DNA, 51 bp, Homo sapiens
ccgagtggtctaaggcgccagactcaaggtggctgtacttttgatgatggt

SEQ ID NO: 546916 - DNA, 98 bp, Homo sapiens
cgttggcggcgctggcggcggtcgagccggcctgcggcagccggtaccagcaggtatatgactgatgggatgttacttcgtgaagctatgaatgatcc

SEQ ID NO: 546917 - DNA, 101 bp, Homo sapiens
aagaaggacaaagagatcatagccgagtatgaaagtcaagtcaaagttaagggaagaaagtcggaggctggctttggctgcgaaaagagaaaaaagaaaag

SEQ ID NO: 546918 - DNA, 90 bp, Homo sapiens
cttgccaggaaaggctctatgagagcagatggagtttcactcttgttgcccaggctggagtgcaatggcgtgacctcggctggctgcaac

SEQ ID NO: 546919 - DNA, 90 bp, Homo sapiens
gccgcggggacggcggcgcggaaggcagcgccggtgctggaggcccccccgcagcaggagcagcaaccatgaagttgaaggacacaaaat

SEQ ID NO: 546920 - DNA, 100 bp, Homo sapiens
cctgtgcccctaaatcgcggtccactgcgcgcgtcagagcaaatttttcagaacataaaacaagaatatagtcgttatcagaggtggagacatttagaag

SEQ ID NO: 546921 - DNA, 100 bp, Homo sapiens
ctcatgtctgcttatgcggtggctcgctgctcagaacaggtgtaaactggagttgctggtgggcagccctgcttcctgcatggaactggagctgtatgga

SEQ ID NO: 546922 - DNA, 96 bp, Homo sapiens
tgacatcagtgacgagagggagagcaagaccatcatgctgcgcggccttcccatcaccatcacagagagcgatgccctgctgcaaaaaagaagtat

SEQ ID NO: 546923 - DNA, 83 bp, Homo sapiens
gatccagcaaggtcggcagagcaaggggcttacgcagaaggacctggccacgctatgtttccagtgtcctctgggtgtttcca

SEQ ID NO: 546924 - DNA, 143 bp, Homo sapiens
gcaatagggaaagtgaggcagctgcaaggagggcggcgggactgcactcgagtgtccagacctgctcgatgcttaagagttggacagtggaggaccttcagaagaggctcttggccctggaccccatgatggagcaggagatt

SEQ ID NO: 546925 - DNA, 100 bp, Homo sapiens
agggcaacagccgccccgctccgcctcggcggggccagccggcgagtctaaacccaagagcgatttcaggtatgctgctgaaagtgggaatcctctacat

SEQ ID NO: 546926 - DNA, 90 bp, Homo sapiens
gcaagatcggcaggcgagattgcctgacccaggcctgctcggccctcacagggaactctgcgaccttcaagtcgtttgaggaccgagttg

SEQ ID NO: 546927 - DNA, 96 bp, Homo sapiens
ctagctcgtaagtggggctataccgtgaagggcattcagaaatacaaagcaaagattgtttttgcagggtaagaaggtggatggctctgtaaatgc

SEQ ID NO: 546928 - DNA, 75 bp, Homo sapiens
ctgaaaacgactgaagagagcaagggatttcctgggacatctggctctggaggatgtgatcttcgtggtggaaag

SEQ ID NO: 546929 - DNA, 98 bp, Homo sapiens
accttgtcaccaatttcctgcccgggatcccagagctacccttcttggagcccacagggctatatgttctcctttcagccaagacctttcaccagtgc

SEQ ID NO: 546930 - DNA, 74 bp, Homo sapiens
ggatggaagggaggagactcctgaccctcagaatgagattacctaagcaaattgaagaacgtaatgaaagacta

SEQ ID NO: 546931 - DNA, 50 bp, Homo sapiens
agcctcccaaatagctgggactacagagacagggtctcactctgttgccc

SEQ ID NO: 546932 - DNA, 116 bp, Homo sapiens
gaggagggtgatcagatctgtttgtaccatatccggaaaagttgtagctttcaaggtacctgcaaggtgtggagttacagtccgagacagtctaaagaaagcactgatgatgagag

SEQ ID NO: 546933 - DNA, 50 bp, Homo sapiens
aatggacaaatccattatgaccatcaaaaagtgaaatggatgagaatcaa

SEQ ID NO: 546934 - DNA, 75 bp, Homo sapiens
acgcggttcctgcggaggaaggtccaggagggacgcctgagacgcaagcaggccaaggtgatccgtgacaagcgc

SEQ ID NO: 546935 - DNA, 100 bp, Homo sapiens
cacctccatgaagtgcatcatggggcaggatggcaccagccttggcataaaccttccactcttgaacaaagcagctgctttttaaaagcggtaattgctt

SEQ ID NO: 546936 - DNA, 76 bp, Homo sapiens
tccctggcaagattcttctgaattgtgctgccttggccaaaagagggcaccaatatcacatcgggcaaagcggtgg

SEQ ID NO: 546937 - DNA, 100 bp, Homo sapiens
gaagagtctaagtggaaagtacttgttcctgagcatgagaaagatgtcttagcactattcctgatcagagaactccagttgcttcaacacacagtatcag

SEQ ID NO: 546938 - DNA, 100 bp, Homo sapiens
tgctttgagaagagcaatgacattgggggcctgtggaaattttcagtatttaccttgctgtggattgctgactggatggtccatcacttctggaggaaag

SEQ ID NO: 546939 - DNA, 75 bp, Homo sapiens
agtggaaatatccaaacaggccctccagaatgagctggagagactgaaagaggcttgcattgatgacaatgttga

SEQ ID NO: 546940 - DNA, 76 bp, Homo sapiens
gataaagatgcagccaaggtcttagcagaagatggtctgtttctgtcgactgtggaccacttatgtgcgatccgtg

SEQ ID NO: 546941 - DNA, 75 bp, Homo sapiens
ataatgctgtcaggaactgtgaccaagataatgctcggaatatttttcaatgtccattccgctgtgttgattgag

SEQ ID NO: 546942 - DNA, 75 bp, Homo sapiens
ttgtggcaatcatcctgaatgaatttagagccaaactgtccaaggctttggcagactcagaattcatgattgaag

SEQ ID NO: 546943 - DNA, 97 bp, Homo sapiens
cgacgcgcccgagaacacgctggcggccattcggcagtttccagcaatggctttactaccggtgttgtttctggttactgtgctgcttccatcttta

SEQ ID NO: 546944 - DNA, 76 bp, Homo sapiens
aggaagaacggtctagccaagatcatgtggatgaagaggctgagcaacagaaaaaggcggccatcatctctgctga

SEQ ID NO: 546945 - DNA, 74 bp, Homo sapiens
ggcggcggcggaggatgagcctgcagagcgcgcagtacctccgaaaaatggctacaaacttcctagcacatgag

SEQ ID NO: 546946 - DNA, 75 bp, Homo sapiens
ctcttccaacaccagtggaagatgatcacatcccaggccccttcacagatgtagtcactacaaatcttaaattgc

SEQ ID NO: 546947 - DNA, 100 bp, Homo sapiens
gcagcaagctctgctctctctatgagaacgactgcatctttgacaagtttgagtgttgctggaacggttcggatagtgaacagagtatctgtcaggcaag

SEQ ID NO: 546948 - DNA, 100 bp, Homo sapiens
tgctcctccatctccagatcggatcacggtgagggaaagatgagcgaggagacggcgacttctgacaacgaagccatgagaccccagatcctgctgctcc

SEQ ID NO: 546949 - DNA, 74 bp, Homo sapiens
cacagttcgaggggccaaggcagaagaaatcttggagaagggtctaaagggtttttaatgaccacaacaagcaa

SEQ ID NO: 546950 - DNA, 100 bp, Homo sapiens
agcccgcccgaccccgtcccgaccctggccgccccgagcggagcctggagatgtccagctcgccgctgtccaagaaacgtcgcgtgtccgggcctgatcc

SEQ ID NO: 546951 - DNA, 83 bp, Homo sapiens
gattcgcagtggtcgcttcttctccttgaatgcctctctgtatggaacataaaatttcaaacactacagacttcaaaagagtt

SEQ ID NO: 546952 - DNA, 98 bp, Homo sapiens
ttggaacaactcaggatcctggtacaaaagacaggatgctgaaaacgccattcaacagatgggtggccagtggcttggtggaagacaaatcagaacta

SEQ ID NO: 546953 - DNA, 100 bp, Homo sapiens
ggggccgccatggggaaagtgaatgtggccaagttgcgttacatgagccgagatgacttcagggtcttgaccgcggaaaaggaccagcgcagcctagaca

SEQ ID NO: 546954 - DNA, 98 bp, Homo sapiens
ccggaggtggcaattcaccgaattcgaatcaccctaacaagccgcaacgtaaaatccttggaaaagggtatgggcggagctgccattgccccacccac

SEQ ID NO: 546955 - DNA, 89 bp, Homo sapiens
tgctacgtggacatgtcaacagtggacgctgacaccgtcactgagctggcccagaacattgatgatggcacctcagatcgcccctacag

SEQ ID NO: 546956 - DNA, 101 bp, Homo sapiens
gcacagtcggctgggcggtgcaatggcgtggtattattcagcacgacttgattttctcccttcaacaaacagaatgtgtccttaaaccggttgaatcttca

SEQ ID NO: 546957 - DNA, 101 bp, Homo sapiens
gcccttcagaacgctggggaggttgggctgaactgcagtgggagaggagaagagatgctggcgtgaagggactgtgccctgtccacggtgcctcctgcatg

SEQ ID NO: 546958 - DNA, 82 bp, Homo sapiens
ctcctccttggtcgccgcgtccttggctggcgtggtggatgtgaacactgaccggaagatcagtgccaaggagatgcagcgc

SEQ ID NO: 546959 - DNA, 82 bp, Homo sapiens
cgagcagtgggaggagcaatgagaggcaatcctgagggccctcctggacccgggagcggaccctggtggcggtgaagcccga

SEQ ID NO: 546960 - DNA, 100 bp, Homo sapiens
caagaagaccattcagatgggatctttccggatcaatccagatggcagccagtcagtggtggaggtctctaattaacagaagatggcaaagcccagccac

SEQ ID NO: 546961 - DNA, 82 bp, Homo sapiens
aggagaaccacttccaagaagatgagcagtttctgggagccgttatgccaaggcttgatgatgaagaacgagagcttcaaat

SEQ ID NO: 546962 - DNA, 100 bp, Homo sapiens
tggagaacttctggagctggccaacgtgcaggagacagttgatattcataaagagaaagttgcaagaagagaaattggtattttgactaccaataaaaac

SEQ ID NO: 546963 - DNA, 98 bp, Homo sapiens
agtgagagagagctattagagattgtgaagaagaatttcgatctccgccctggggtcattgtcagacccagattgatcactatgttggcatcgcccga

SEQ ID NO: 546964 - DNA, 50 bp, Homo sapiens
aaagagccatctgtggtgccaattgaagggtgactatgaccagagcagga

SEQ ID NO: 546965 - DNA, 99 bp, Homo sapiens
ttgtttgagtacgaagggtgcaaagtgggacgcggcacctacggtcacgtctacaaggcgaggcggaaagatggattactgatctctcattacccaact

SEQ ID NO: 546966 - DNA, 100 bp, Homo sapiens
gttttcttatgttttggagtcacacaagctaaagacgggccattttccagacctcatccagtgtgtcccggcatggatatccggaacaacctcactaggt

SEQ ID NO: 546967 - DNA, 133 bp, Homo sapiens
gtttgttcgaccttttgaggaactgtcaaactgctgaaaagtggctgcaccattttacattcctaccatgaaagcaaacaatggactattgactaagctttcagagctgtgggtgttctcagagggaggccag

SEQ ID NO: 546968 - DNA, 100 bp, Homo sapiens
atgcaatgaataacattgtggcaaatttgctcctcaacctaacgagcttgacctcagagatgatgtggtgaaaattacaatcgattggaacaagctccag

SEQ ID NO: 546969 - DNA, 100 bp, Homo sapiens
gagaacgtgcgggaagagaagatcatcgagcatttcaaacggttagcactctacgtatatgaatatctgctccatgtaggagctcagaaatcagctcaaa

SEQ ID NO: 546970 - DNA, 74 bp, Homo sapiens
ttcggttcgggtgcgctgctcaaggacacggtctacaccgacttcgacggcctccggtgtggctgtctctgatg

SEQ ID NO: 546971 - DNA, 51 bp, Homo sapiens
cgcctgttcccggggcagatccaggttcagtcaggatggctaaaggtgacc

SEQ ID NO: 546972 - DNA, 100 bp, Homo sapiens
gttaccttctgcctcagtgccagagtccatgacaattaaagctccaccatgaggcgaggtggatggaggaagcgagctgaaaatgatggctgggaaacat

SEQ ID NO: 546973 - DNA, 50 bp, Homo sapiens
gacagatgcgaggcggcggtcaggtggagattctggacgcaaagacaagg

SEQ ID NO: 546974 - DNA, 100 bp, Homo sapiens
caaaaagcacaggggatgccagaaagtggtacaggtttgcagattccgccagcagcacagcaagctctacagatgagtggctctttggcatttggtgctg

SEQ ID NO: 546975 - DNA, 100 bp, Homo sapiens
gaatgtgatggatagaggcaaggcaagcctgtggttatgagtttaccagcaagctacatcggatgtatacagatatgagtgtcagcgctgatctcaacaa

SEQ ID NO: 546976 - DNA, 75 bp, Homo sapiens
ctggcttcttttctgaagtgttcaagggcactccacagaaggatgttattatcaagtcagatgcaccggacactt

SEQ ID NO: 546977 - DNA, 100 bp, Homo sapiens
caaggaggtgctcaagccatgttttggaaaagagaactcaaggtctggcagggagaaaggagcaagagtattgggaaagggtcgttgtggtgcatagacc

SEQ ID NO: 546978 - DNA, 50 bp, Homo sapiens
gccacgtggagctgctggaggacccacccccacagaggcctgaggagacc

SEQ ID NO: 546979 - DNA, 83 bp, Homo sapiens
aaagaaggtggcagacccggtttgctgatcgccccagggatcaggaggtgattatgggagtgctattgagacactggtaactg

SEQ ID NO: 546980 - DNA, 90 bp, Homo sapiens
aggggatggattttttaccatgaaatatgaggtgtcagcttcctctggtgcaaccagcaagtcttccagtatgaatcccacagaaaccaa

SEQ ID NO: 546981 - DNA, 90 bp, Homo sapiens
ttttgagattggtgctcgtttggaggcactggactacttacaaaaatgggggatctttggatgtatataggaaaatgccagaacatgtcc

SEQ ID NO: 546982 - DNA, 75 bp, Homo sapiens
ggagtggactttgttctgaattactccaaagcgctcctcctcagccatcctggccgtgctcagtcatctgaccag

SEQ ID NO: 546983 - DNA, 96 bp, Homo sapiens
caattggagagaagttgccaacatctggaggctgttctgctttggagttaaaggttcattgtgggatcagaccgtgctatcttcatgcttcgcgat

SEQ ID NO: 546984 - DNA, 96 bp, Homo sapiens
tgaattgggaggggggcagctggagcctcaggcggcagcgcttctagatcgaacggttggaagtaagcagccttgcccaaacatccagtgcagtgg

SEQ ID NO: 546985 - DNA, 100 bp, Homo sapiens
gttttggctctgcgtgagtgtggtctacgagctgtttctcatctttatactcttccaggtctggtgtggcagatgtggatagctggaccctcctgggtgc

SEQ ID NO: 546986 - DNA, 50 bp, Homo sapiens
gaaggccctggagcctacaggccagagctttgctcttgttgcccaggctg

SEQ ID NO: 546987 - DNA, 100 bp, Homo sapiens
gacagccaagaagcagagcctgctcgacaaaggtgtcatcattaacgaaaatttctaccttgaaccgtatctgaaagaggttattcgggaaagaaaagaa

SEQ ID NO: 546988 - DNA, 74 bp, Homo sapiens
attacatcgacaaagagattattccagatttcctgagtggggagtgcatgggagtatatgttgctgcagtacgg

SEQ ID NO: 546989 - DNA, 100 bp, Homo sapiens
tccgtggccttagctgtgctcgcgctactctctctttctggcctggaggctatccagctgagaaggcaaccaaagtgcaggacatcaaaaacaacctgaa

SEQ ID NO: 546990 - DNA, 74 bp, Homo sapiens
cacagtggatgtcgagaacggtgcttctatggcaggatatggctgcattgcgtcagattactgataaagctcgt

SEQ ID NO: 546991 - DNA, 100 bp, Homo sapiens
acaatttagatacttcatcatctgacttcactatattacaggttcgtgctgtaagacctaaagttcttatgagattgtccaaaacaaagaaacatgtcag

SEQ ID NO: 546992 - DNA, 87 bp, Homo sapiens
gccccggagaaccgcggggacagcagccggccagccggggggcactgcccgcccgggctctggcctataccattcaaggacagtatg

SEQ ID NO: 546993 - DNA, 100 bp, Homo sapiens
cggccctgcagctgccttctgccccagggcatccgcttcgatcctgaaattccgcaaacactacgactagagtttgctaaggcaaacacgaagatggcca

SEQ ID NO: 546994 - DNA, 75 bp, Homo sapiens
cggtctgcgtagctccagaggtttaaccataggatagagaaaccaggaataactcaagtcacctgtactggaaat

SEQ ID NO: 546995 - DNA, 100 bp, Homo sapiens
ccaaggagccccactggctgtttgggaccatggagcggtgcttttctgctttgggccaagtagcaaaagctcgattcctgcatgagaccaatgagattgc

SEQ ID NO: 546996 - DNA, 95 bp, Homo sapiens
ctcgaccacctggcagagaagttccggcagaaggcctccatccacgaggcctggactgacgactgcccggttcctgggcctgacctggagatcaa

SEQ ID NO: 546997 - DNA, 90 bp, Homo sapiens
ttgaaagaagctgcagcggaggaaggcgagagctggtgatgctgctggagtggtggtcgggcacggaatgcaccatcttcacggacccgc

SEQ ID NO: 546998 - DNA, 100 bp, Homo sapiens
gcaacctccaccttgacggttccaggttgaaaggattgttgacaaaaggaaaaataaaaaagggaagacagagtatttggttcggtggaaaggctatgac

SEQ ID NO: 546999 - DNA, 107 bp, Homo sapiens
ctgctgctccatatagtactcagaaatcatctgttctacctctttatgaacgggctacattgagagacctcagctgattcgagcaaaagtgccaattgtgaagttca

SEQ ID NO: 547000 - DNA, 75 bp, Homo sapiens
agacaaatcatcaggaatccattatggtgtcattacatgtgaaggctgcaagggcatatcgatgcatttacttca

SEQ ID NO: 547001 - DNA, 101 bp, Homo sapiens
cgcccaggacccccaagccgccgcggacgcaggtgtgatggatgtcagatgtttcctatcaatggatccagattcaaatgcagaaactgtgatgactttga

SEQ ID NO: 547002 - DNA, 75 bp, Homo sapiens
aggcgatgacgagccagagtacgaggctttatcctgtggataaacgcagagtgaacgagtttggggagtcctacg

SEQ ID NO: 547003 - DNA, 100 bp, Homo sapiens
cgggagaccctgcaacgaaatacctccctgggcctcggagacgctgacaggtggagccgccaccaaaatgcagattttcgtgaaaacccttacggggaag

SEQ ID NO: 547004 - DNA, 75 bp, Homo sapiens
aagaggatagtactgctggcagagggctctgtggactgtcccactctggagtttgagtatggagatgcagatggg

SEQ ID NO: 547005 - DNA, 101 bp, Homo sapiens
gcaagtggcatccctagctccagccgcaatgccattaccagttcctacagctccactcgaggcatctcacagatgttaagtggatagacatcacaccagac

SEQ ID NO: 547006 - DNA, 51 bp, Homo sapiens
gacaaactgacggaaaaggagagagaggcgctgtccaagacaccatcggcc

SEQ ID NO: 547007 - DNA, 95 bp, Homo sapiens
gggagatccatagggaagaaggcggaacatccggaggctgggaaatggcatgacagcaagcgctgtggcggctttgatcctcatgacgtcctcca

SEQ ID NO: 547008 - DNA, 82 bp, Homo sapiens
cgcagtacagcggcaagatcaagcactggaaccgcttccgagacctggagcagatccgcagggacatccgagacttccggtc

SEQ ID NO: 547009 - DNA, 75 bp, Homo sapiens
gttgaatcttacaaaagaaagtctggctgatgatttgaaaattgttcaaacttctcatggaacatctggaccctg

SEQ ID NO: 547010 - DNA, 75 bp, Homo sapiens
agcacacatcatggtggagaaagaaagctctgggttcccttcattatcctgtggaagtagcggtagcagttcatc

SEQ ID NO: 547011 - DNA, 73 bp, Homo sapiens
aagaaatccaggaacaactgtgtcagcagctagcccttttcctcaagttaatgctgctgacaataaacagagg

SEQ ID NO: 547012 - DNA, 90 bp, Homo sapiens
gtaaattacagagaacctaagtctgtttgcaaagcacctgaactggttcaaaccttgtactactcagctgatcacaagctgcttgatggg

SEQ ID NO: 547013 - DNA, 82 bp, Homo sapiens
atctggtgtgcaatgtgaagagtccttcaaaaatgccagaaatcaacgccaaggcttattgtgtaacagaacctggagcagg

SEQ ID NO: 547014 - DNA, 75 bp, Homo sapiens
ggccacctggtcttcccctcggccccggccgtctcagatttgggaatggatgatgaaggagatgatgacccagtt

SEQ ID NO: 547015 - DNA, 102 bp, Homo sapiens
ctccccaatatatacgtcttggatagactgttggtgcatgctacaaaaagaggatagcattgaagctgaacttacaagaagagtagacatgatggaactgtg

SEQ ID NO: 547016 - DNA, 90 bp, Homo sapiens
gagatacgccgctctgaatcttgccgccctgcactgccgcttcggtcactacccatcaaagctcctgagtcagtttccactataatcact

SEQ ID NO: 547017 - DNA, 74 bp, Homo sapiens
ggagccagggatgaacgatatcgatcagacacagcccttgacgtagcagtaaaaaccttcccccctgagagaca

SEQ ID NO: 547018 - DNA, 104 bp, Homo sapiens
gcgcggggaagtcatgctcgcttcacggaggcaatagctagccgataacggcaaaagcttctatcatttttgttactcttcagtacaatgtcaccctcccagca

SEQ ID NO: 547019 - DNA, 75 bp, Homo sapiens
agatattggagaaaccacattattaggtttgaagatgccgcatttggattggatgaattccaaattctgcttgct

SEQ ID NO: 547020 - DNA, 51 bp, Homo sapiens
aacttattcccttcaattcaagtaacagctcctacagaagaagggaaaaaa

SEQ ID NO: 547021 - DNA, 155 bp, Homo sapiens
cctgcatggctgcgacccgtcgagcggagcgtcgtggtagctgagacctggtgcccttcgacggcctggctgatccggattcccaggagccatgttgtcagaagtcctactggtgtctgctccggggaaagtcatccttcatggagaacatgccg

SEQ ID NO: 547022 - DNA, 74 bp, Homo sapiens
actggggccagggaaccctggtcaccgtctcctcagggcgtctctggccgagcctctttttgtggaaaacgaca

SEQ ID NO: 547023 - DNA, 100 bp, Homo sapiens
acctcctgcaaaagtggaagcgaagccgaaaaaggcagcagcgaaggccgctggcccaacaggcaaaaatgaagaaaaaattcaggttctaacagacaaa

SEQ ID NO: 547024 - DNA, 88 bp, Homo sapiens
acgacatgtatgggccagaaaagcaccagcagacgtttttgaatcaactgagagaaattacggggattaatgacacccagatactaca

SEQ ID NO: 547025 - DNA, 60 bp, Homo sapiens
cgaggctgctaagagactaagtacaccaggggttggaaaaaccacactaggcaaagaact

SEQ ID NO: 547026 - DNA, 100 bp, Homo sapiens
gagccgtggataatgggaggtgaatttccatgtcaacatagtccaggctgcctctaagaatcaaacttcactcttgggagaaccaccaaaagaaattcgg

SEQ ID NO: 547027 - DNA, 75 bp, Homo sapiens
ttacagagggacttgaagctcagtgagaaaagacgtaaaattcatcctgatcagaaaaatattaatgcctatgtt

SEQ ID NO: 547028 - DNA, 51 bp, Homo sapiens
cagcaggggcgacaacagcatcaggtgaagcggaggctggacctggaaact

SEQ ID NO: 547029 - DNA, 82 bp, Homo sapiens
ccagccctagcgctggccgcgaccccggcggtgaacctgagcaaggtgggcgagtattggtggaacgccatcctggagggag

SEQ ID NO: 547030 - DNA, 51 bp, Homo sapiens
gaaaatcatattatagatggagtaaaggttagaaaatggatttctgactgg

SEQ ID NO: 547031 - DNA, 97 bp, Homo sapiens
aggatgatgacatggatatccgtcagtttgtccacatcaaaaaagctcttgcagccaatgccggaacaggatttgctgttgctgagcctcaaatcgc

SEQ ID NO: 547032 - DNA, 90 bp, Homo sapiens
accttgacaatcctcgagtgacaatagtaacacaccaggttgttgatcattatgaaaatcctagaaacgtggggtcccttgacaagacat

SEQ ID NO: 547033 - DNA, 74 bp, Homo sapiens
gaggcggcgggactggtccctggtgctggagaatctggtaaaagcaccattgtgaagcagatgaggatcctgca

SEQ ID NO: 547034 - DNA, 100 bp, Homo sapiens
caaaggaatgaaatcttgactgccatccttgcctcgctcactgcacgccagaacctgaggagagaatggcatgccaggtagcacaggcggagtgcagcgg

SEQ ID NO: 547035 - DNA, 96 bp, Homo sapiens
ggaccctgccgaggagaacctgaagagctaccggaagctgctcctgtggggtgctggaaacgtgcgtagcaacagtaggccgagtatccaacgttg

SEQ ID NO: 547036 - DNA, 100 bp, Homo sapiens
tttatgaagccaacggacaagctgtatttgtaggcaaaataccaagggatttatatgaggatgagttggtgcccctttttgagaaggccggacccatttg

SEQ ID NO: 547037 - DNA, 75 bp, Homo sapiens
ccatgctggggggtgacctgaacagtgctaacggagcctgccccagccctgttgacccatttacccaatattaaa

SEQ ID NO: 547038 - DNA, 83 bp, Homo sapiens
caatgaatgtaaatgaaatattcatggcaatagaaacattgcagcggcccgtgtggaacataaacagagaactaggcctgcct

SEQ ID NO: 547039 - DNA, 100 bp, Homo sapiens
tgatgaattcaatcaattctttgtgactcctcgatcttcagttgaggtgttgacttcaaaatcaaaactgtagagctaagaggaaagaaaattagattac

SEQ ID NO: 547040 - DNA, 101 bp, Homo sapiens
ggtctcgagaccaaaatcaccttccatacattgactacttacacactggtgctgactgcatttgctccagtgatccacaagctcagaaatacatcgcggaa

SEQ ID NO: 547041 - DNA, 95 bp, Homo sapiens
cggagcctggtaccgtcgaggtcagtcatcgttacccgcagcggcgccattttgcccaaaccggtgaaagtcgtgtacaacgtgggactctgcat

SEQ ID NO: 547042 - DNA, 75 bp, Homo sapiens
aaagttctctcgatcagggcatacatctttcttcgacaaagggaggtatttaactgaaaggaatatctgcttcac

SEQ ID NO: 547043 - DNA, 100 bp, Homo sapiens
cttgaatttggtgtggaagaaataacatcagtagttcaggcaaggaattgttcctcctggtcttacagaaaatgaattgtggagagcaaagtacatctat

SEQ ID NO: 547044 - DNA, 101 bp, Homo sapiens
cagaagcaggaaataggttaatcagaagattgctggatgttatgaaaagaatcttttatggggggctacttaattcagtgcacaaatgagatgaatgtgaa

SEQ ID NO: 547045 - DNA, 78 bp, Homo sapiens
ccatcttcaccgtgtacctgggctcgagcctgcacatgaagccctgggcgctgcctatggcacagccaagagcggtac

SEQ ID NO: 547046 - DNA, 90 bp, Homo sapiens
cccgttttggcattgctgctaagtacatgctggattgtagaacttctctctctagtggaacagatgtgcattcagattaaagaagttgga

SEQ ID NO: 547047 - DNA, 101 bp, Homo sapiens
cgacggtggcgcccctcctcatcatggtacaccaggggttggaaaaaccacactaggcaaagaacttgcgtcaaaatcaggactgaaatacattaatgtgg

SEQ ID NO: 547048 - DNA, 100 bp, Homo sapiens
tgaagaggaaaacgttattcagggagaacggctccaagccaagggccatcgtggtggatcctgttcatgggacctttattgggcttgaggtcacttcagg

SEQ ID NO: 547049 - DNA, 50 bp, Homo sapiens
cggacagagacgtgaagcactgaatatttatcagcaagactgttgaacgc

SEQ ID NO: 547050 - DNA, 100 bp, Homo sapiens
gacaatgcctcttgggaacaaaatacaaatcatggagccgctggggtcccttttgcctcagatactattttgaagatacttttctgctgtgagaatgtaa

SEQ ID NO: 547051 - DNA, 100 bp, Homo sapiens
agcagcttcatgactacgcggagcgggagagcggccacaccatgcgaggaaagaccacagcaagattctttcattcgtctcctcctagcctgggggacca

SEQ ID NO: 547052 - DNA, 108 bp, Homo sapiens
gaagatgctgaagctgaggacacacccaggaaaagactcaggacggacaagcacagtcttcggaaggtgaaaggtgtagcagtcactcggcctacacccacagcatcg

SEQ ID NO: 547053 - DNA, 100 bp, Homo sapiens
acagttccacctcttcttgagagtgtcacatggattgttttaaagcaacctataaacatcagctctcaacaggtctgctgagaacagacccagtccctga

SEQ ID NO: 547054 - DNA, 75 bp, Homo sapiens
caagttccaggcagggaatggctcatggggatatccggtgcagagcattgtagaccaaggagccatggataggag

SEQ ID NO: 547055 - DNA, 74 bp, Homo sapiens
cagagaaatcaccaccttctacaggtcagtatgggaatcctttaaataaatatatcagacattatgaaggatta

SEQ ID NO: 547056 - DNA, 50 bp, Homo sapiens
gggagtattatgaaaagatcccaccgctggagtcgctggccacagtggag

SEQ ID NO: 547057 - DNA, 89 bp, Homo sapiens
tgggcccagtttatggcttccagtggaggcattttggggcagaatacagagatatggaatcagaagctgcacacatacatgtaagagaa

SEQ ID NO: 547058 - DNA, 49 bp, Homo sapiens
cctaaacaaagctctcagcttgatgagcgattattggagccggaattgg

SEQ ID NO: 547059 - DNA, 80 bp, Homo sapiens
acagttacatgtatggagaatggctggtctcctactcccagatgcatccgtgtcacaatgttctgtgattttccaaaaat

SEQ ID NO: 547060 - DNA, 83 bp, Homo sapiens
cgaatgaggccccgcgccgtcggccccaagaacacagatatgtagaactcttcttgaattctacagcaggagcaagcggtggt

SEQ ID NO: 547061 - DNA, 75 bp, Homo sapiens
aaagggtatctgatcaagccaacaacagtgacggaatgcctccatacataaatgcactcggtgatggaaagagag

SEQ ID NO: 547062 - DNA, 101 bp, Homo sapiens
gaatatcagacaatgcgagagagtcagctgcaacaggaagacccaatggatagatacaagatcctgtttgaccaaactcagagatcaattaaggcacagct

SEQ ID NO: 547063 - DNA, 100 bp, Homo sapiens
gcaagcgactggatgacctttgcagcagcatcatcgacggccgcttccgggagcagaagtccagggagctcccagggaagtggtcgacccctccggtggc

SEQ ID NO: 547064 - DNA, 75 bp, Homo sapiens
ctccgccagttaagaggaaaaagggtcgagtgataaaggggtcctataagtttcatgccatcatcactacatttg

SEQ ID NO: 547065 - DNA, 90 bp, Homo sapiens
cagtttcatctggattgctccacctgcgggcacaggctgtgtgaatttcatggattttgctgtaggaatctgtaacaaaatcagtgaaat

SEQ ID NO: 547066 - DNA, 98 bp, Homo sapiens
ctggccgcgcactcgcctcagctgagcctggcaaagaatggccgagtggattctgaggaccggaggagccgccactgcccgtacctggacaccattaa

SEQ ID NO: 547067 - DNA, 71 bp, Homo sapiens
ccgaggccaagtactaccgcaccctggaggacattgagaagccgaacgaccctgtcaccaacatttgccaa

SEQ ID NO: 547068 - DNA, 75 bp, Homo sapiens
aaacggcaacgtgtaatcagaaggcacagattagaggaaggaagaggtacaggtttgcagattccgccagcagca

SEQ ID NO: 547069 - DNA, 100 bp, Homo sapiens
cgcggaggaggaggaggtggagttgctgcccttccggagtccgccccgtgaggagaatgaccgaatccgggataccttgatccatgaaatgtgccatgct

SEQ ID NO: 547070 - DNA, 100 bp, Homo sapiens
ggagagacgtcgctgaggggcttgcctgaagcgaggggaaattccattcttcttctgacagccagacggttagagcttctccagattcatggctcaccca

SEQ ID NO: 547071 - DNA, 75 bp, Homo sapiens
ttgctgcggctggtgcgtcgtcgctctagaaaccgaagctgaaagactggcatcctcctgggggctttattctgg

SEQ ID NO: 547072 - DNA, 116 bp, Homo sapiens
gcgcccacggggacggattggttgttttttcctgtatgaagcggttggcaccactgaagtgaccgaatgagtttcagatgcttcatcaagatgaatcaaataaaagagaaaagatc

SEQ ID NO: 547073 - DNA, 50 bp, Homo sapiens
tggagagttgctacaacccactgaacagatgggtaaggatggcaggggtt

SEQ ID NO: 547074 - DNA, 50 bp, Homo sapiens
cgtggaggcagaggtggcatgggggaacagaaagaacagcttcaaaagat

SEQ ID NO: 547075 - DNA, 107 bp, Homo sapiens
cactgaagaacctgggaatcagaccctgagaccctgagcaagtaacctggatgaggacatcattgcagaagagaacatcgtttcccgaagtgagttcccagagagct

SEQ ID NO: 547076 - DNA, 100 bp, Homo sapiens
cccagcgctgtcctgtgtctggccttccaccccacgcagccctcccacgtcgcagaggcctggaggcgcctccccggggctggtctgtgtcactgcactc

SEQ ID NO: 547077 - DNA, 75 bp, Homo sapiens
accaagctcaagagcctcatccgcctagtcaagcactggtaccaaaatggaggctcctcgggccggggcacagct

SEQ ID NO: 547078 - DNA, 100 bp, Homo sapiens
tttcaatacaataccaatgtggtgtataatacagaaggaaaactcgtggcacgttaccataaggatcttaaatgtatttcggcattgggttgaacatcat

SEQ ID NO: 547079 - DNA, 83 bp, Homo sapiens
gtgggggaccggctgttggcgggatgcagcaccgaggcttcctcctcctcaccctcctcgccctgctggcgctcacctccgcg

SEQ ID NO: 547080 - DNA, 90 bp, Homo sapiens
ggtgtcagagcccctggaggacttggacccctactatgcagacaaaaagtgacaaaggagagcatgcttccagctggagctgagtccaag

SEQ ID NO: 547081 - DNA, 92 bp, Homo sapiens
gggtgctgtggtctgagctagagggtgaagctggcggagcaggaggatgggcggtatgatctcgtgaaatcttgagagaaactgaatgacga

SEQ ID NO: 547082 - DNA, 75 bp, Homo sapiens
cctcaaaccttgcttctaggagataaaaagggactgttgacatttagggatgtggccatagaattctctctggag

SEQ ID NO: 547083 - DNA, 98 bp, Homo sapiens
cgcagtcacctgcctagccgtggaccccaacggcgcattcctgatgtcaggaaggatggagctgaagactatcaacgactttctcttccagagccaga

SEQ ID NO: 547084 - DNA, 75 bp, Homo sapiens
atagaaataaaagatgaactaaagaaaaagaagaatctcaaccgatctggaccttatggattttctgaacccaaa

SEQ ID NO: 547085 - DNA, 83 bp, Homo sapiens
gcgttatcttccgactgatccagctggtggtcctggtctacgtcatcgggaagcggggagaggtggtgagagatgacccctgt

SEQ ID NO: 547086 - DNA, 75 bp, Homo sapiens
cctctccctgcagctcatgtgccctgagaatgctgatgtcacactgagtccccgccagggcctcccgaggatccc

SEQ ID NO: 547087 - DNA, 83 bp, Homo sapiens
cgagaagccccaacagcacggcgtggcctctcagcctcgagcactgttattgggcctggcttgtaatcataacttgaaagggg

SEQ ID NO: 547088 - DNA, 75 bp, Homo sapiens
acctgacacatttgtgagaactatttatgcagaaccaaaaacttttgctagaaaatcagcttttacgagagaaaa

SEQ ID NO: 547089 - DNA, 75 bp, Homo sapiens
tccacattgcacataaagttggtcagcccaaggctgccccctcggtcactctgttcccgccctcctctgaggagc

SEQ ID NO: 547090 - DNA, 97 bp, Homo sapiens
cttttgtgaagcacagcacggtactggagaacacggatgatttctaccactccaaacgccggctgatcttctccaagaggaagccctaatccgccca

SEQ ID NO: 547091 - DNA, 100 bp, Homo sapiens
tacaaaaatcccaggagaaacctaagaaaatgtgctggaaatcatattattcaaacacagttgatgaatgacttactggtaggcattagagtttcaatga

SEQ ID NO: 547092 - DNA, 83 bp, Homo sapiens
gaaccggctccggggccccgataacgggccgcccccacagcaccccgggctggcgtgagattgcaggaggagatgcttcagag

SEQ ID NO: 547093 - DNA, 75 bp, Homo sapiens
cgatgatcgtgtgtcggatgaggagaaggacctggccatgggctccgacgcagagggggagaagatcaaggactc

SEQ ID NO: 547094 - DNA, 50 bp, Homo sapiens
gactgcagcctatggccactttggatggagccctggggctgtcgctggag

SEQ ID NO: 547095 - DNA, 100 bp, Homo sapiens
cacccggacacctggaagctgggaaatgccccaagctgggccggcgcgcggggtcggcggagctgtactgcgcgtccgacatctacgaggcggtgtccgg

SEQ ID NO: 547096 - DNA, 75 bp, Homo sapiens
cacgtcatccgcatcaacaagatgttgtcctgtgctggggctgacaggtgtattgtacgagcattgaaagatcca

SEQ ID NO: 547097 - DNA, 76 bp, Homo sapiens
gcctgcatcgggcccacgctcaggttcgatacaagaggctgttttcctagcgtggcttgctgcctttggtaagaac

SEQ ID NO: 547098 - DNA, 100 bp, Homo sapiens
caaatttccatttccaaataagaggatgccagcccccatcagattgcgggagctgatccggaccatccggacagcccgaacccaagctgaagaacgagaa

SEQ ID NO: 547099 - DNA, 75 bp, Homo sapiens
agagaacatctcaagcctgaaaggacacacagggaagagtccttagccaggatggaggctgttgtgaacttgtac

SEQ ID NO: 547100 - DNA, 90 bp, Homo sapiens
atggagaggtgacgcttgtgaagcaccggcgggacggcaagcagcagagcatcctggccagaacaagccaaggagccaagacgagaggga

SEQ ID NO: 547101 - DNA, 90 bp, Homo sapiens
cttgcttggaattctgcccactctgcggagttagcagtcacgacctccagcacagggttcttttcctatgactccatcaattccagctaa

SEQ ID NO: 547102 - DNA, 100 bp, Homo sapiens
gcagtctcggctcaacgagaagatcctggaagaaccgcaccctctgatgttccagaaactccaggaccaggtgtccctggccagtgtccttccacctgtc

SEQ ID NO: 547103 - DNA, 100 bp, Homo sapiens
ggcagggacgtgttggacacgctgactttgtaggctccgccaagaggcgccgcaggagggaagaactgctaaagctttgaggtcattacaatttacgaat

SEQ ID NO: 547104 - DNA, 74 bp, Homo sapiens
aatagaatacaatttctccataagtagtttcagttatgtcacgcatctgatgaagcgaattcagagaggcccag

SEQ ID NO: 547105 - DNA, 83 bp, Homo sapiens
acagtattacacactgctgaaccaggccccagacatgctgcatagctacaccaaaattgcattgagccaaacttgccaccaag

SEQ ID NO: 547106 - DNA, 75 bp, Homo sapiens
aaagccatcatcttctttgacccagggatgcttgaagatggaaagaaatttgattcctcccgggacagaaacaag

SEQ ID NO: 547107 - DNA, 100 bp, Homo sapiens
gccttcaacaccaccttcatctccaccatcgttttcaccatggagcagctgagctcagcaaacacccgcttcgccttggacctgttcctggcgttgagtg

SEQ ID NO: 547108 - DNA, 90 bp, Homo sapiens
gccgggcgggccgcgggagccgcacgcggcgatatggaagaggagggcaagaagggcaagaagggttggattgagattgttggatgtgct

SEQ ID NO: 547109 - DNA, 82 bp, Homo sapiens
ggaacttgctcgtgccttagacaagaaactcctttccttaaagcttaaagcttttcaagccaggccaagaagctgtgaagta

SEQ ID NO: 547110 - DNA, 98 bp, Homo sapiens
agaagttcaagctctacctgaccatcatcctgctcctgggtgccgtggcatgtcgatttgtccttcactacagagacgtctcccacaacctgctccgg

SEQ ID NO: 547111 - DNA, 100 bp, Homo sapiens
aattcagcagagaatattttcaaggggggaaggtgctcgggtcttcggggcactgggtcccatcggtccctcctcacctgggctcaccctcgggggtctg

SEQ ID NO: 547112 - DNA, 80 bp, Homo sapiens
cgatccagcctgcggagcctgtggggcaggacggcaccctgaggctctgggagtacaggagcggccgccagctgcactgc

SEQ ID NO: 547113 - DNA, 109 bp, Homo sapiens
aggcgagctagccgggagttacaccgccaccgccagacagagtgcaagacgatgacttgcaaaatgtcgcagctggaacgcaacatagagaccatcatcaacaccttcc

SEQ ID NO: 547114 - DNA, 82 bp, Homo sapiens
cgctggaattatgggcgtgagccactgtgcccagttctttatagctccaagctctacagattcttcaaatatattgagaata

SEQ ID NO: 547115 - DNA, 75 bp, Homo sapiens
ggcaacttcgcggtggtcaagcgggccacgcacctcgtcaccaaggccaaggccgcatctacaagtgcttgttta

SEQ ID NO: 547116 - DNA, 75 bp, Homo sapiens
gtttatatacacaggaactttaaatcttgacagatataaagatgaagcgcagctgtataaagaagagcacctgag

SEQ ID NO: 547117 - DNA, 98 bp, Homo sapiens
tgggttggaccgtgtgggacgccggcggcagatgagagcatccaacgctgtgatgcagatccatccgccctagcaaaatatgttctggctttggtaaa

SEQ ID NO: 547118 - DNA, 138 bp, Homo sapiens
tgggcgacctgcagtttgcaatatgactttggaggaattctcggctggagagcagaagaccgaaaggatgcctaaatcaaaggaacttgtttcttcaagctcttctggcagtgattctgacagtgaggttgacaaaaa

SEQ ID NO: 547119 - DNA, 100 bp, Homo sapiens
ggacagtgcagagaggtgatttccaaggttggatgccagtgagatccaggtggacgaaaccatcttcctgctggagtcttacattgagtgcaccatgaag

SEQ ID NO: 547120 - DNA, 95 bp, Homo sapiens
gcagccccgagcactgtggccgaggcccacctgctgacatctacctgccagatcaggcctttgtgacactaaccacaaacgatgcctacgccaaa

SEQ ID NO: 547121 - DNA, 101 bp, Homo sapiens
tccccccaaactgcaataagccgccttccaagttacagaatgtctgaaggggacagtgtgggagaatccgtccatgggaaaccttcggtggtgtacagatt

SEQ ID NO: 547122 - DNA, 82 bp, Homo sapiens
tggggctgtttggaaagacccaggagaagccgcccaaagaactgaaactagatgatggccatttaaacaactctttgagctc

SEQ ID NO: 547123 - DNA, 49 bp, Homo sapiens
gcgctcattgggaatttagttaagatatttgttcagtcgaatcaaggtg

SEQ ID NO: 547124 - DNA, 100 bp, Homo sapiens
atagtatctttaaactacacaaaagtggaacagctttgttcaggtattgctattaaggagtcagcaaaagtgggtgatcaagctcaaaggagggtgatga

SEQ ID NO: 547125 - DNA, 98 bp, Homo sapiens
accctgggcacagcaggcatcggagatatggccgcgtggaaagtgtcaaaattcttcccaagaggggatctgaaggaggagtggctgcctttgtggat

SEQ ID NO: 547126 - DNA, 50 bp, Homo sapiens
tctggatcacggatgtaggaagtgagaaactcttgctactcagttggatc

SEQ ID NO: 547127 - DNA, 100 bp, Homo sapiens
gctttgccaaagtacacatcctgtatgtggggtccatgcctcttaagaactcttttcgaggaactatccgcccccttacccaggaatggaacaacctcca

SEQ ID NO: 547128 - DNA, 75 bp, Homo sapiens
tgtcaactctaccatgtgctagagacagccaacaaaatattcatggttcttgagtgttcaaagcttctttcagac

SEQ ID NO: 547129 - DNA, 128 bp, Homo sapiens
ggcaacacggcggctgctcggctggtcgcttcccgcgcgggtatctgtgcgtttcagcggcgacacggcgttggagaccagggccagccctggccacaccccaggctgtgtcaccttcgtcctgaatg

SEQ ID NO: 547130 - DNA, 92 bp, Homo sapiens
ctgagcccgccgtctacccgtggccgctgccggtctacgggaacgcccttttgcttgtgactggcagggctgcgacaagaagttcgcccgct

SEQ ID NO: 547131 - DNA, 100 bp, Homo sapiens
tttgcacaaaatctgttcccatgcaaaccaatgagggagaagtatcggaagaaagcagttccaagatgatgattattctccaccgtctaagagaccaaag

SEQ ID NO: 547132 - DNA, 100 bp, Homo sapiens
ttatggagacaggagagactgtcagacagttcctgctgctgcccaggtgcatctgagtgaaaggtgtagcagtcactcggcctacacccacagcatcgac

SEQ ID NO: 547133 - DNA, 100 bp, Homo sapiens
ctgtatggataccagcagccccggaccccccgattcaccaacgagccctagcttgctatgggtgttctccaggatcaaagtgtgactgcagtggcataaa

SEQ ID NO: 547134 - DNA, 98 bp, Homo sapiens
gtcgcccaggatgggctgggaatgaagcgatgtagccttttaagtgaaatgacaatggatgctctgttggctcgattgaaacttctgaatccagatga

SEQ ID NO: 547135 - DNA, 100 bp, Homo sapiens
agctgagaggacgatcgtccttataggagaggccgagtctccgagggcaatttcagagtgtgatgagaatagcacgtttaataaccatgctctgtacctg

SEQ ID NO: 547136 - DNA, 83 bp, Homo sapiens
caggaatcatgactcctggagaacggatcaagtgcttattacagatccaagtattttagaacatgctcaagaggtgagcactt

SEQ ID NO: 547137 - DNA, 83 bp, Homo sapiens
ccagtcaattgagtggtgttaaagggttatgtggtccgaatcagtggtgggaacgacaaacaaggtttccccatgaagcaggg

SEQ ID NO: 547138 - DNA, 90 bp, Homo sapiens
cctcctcgaagtcatcccagtgagcaatttacagcaatgagggatttatacatgaaaaatggacaaggatttgcattagtttattccatc

SEQ ID NO: 547139 - DNA, 74 bp, Homo sapiens
gaaatgtacaccctcgagagcggcctgattgggaagaaactcttagcgcaatgctctctatcaatatcagctca

SEQ ID NO: 547140 - DNA, 76 bp, Homo sapiens
ttcacttgtgtgcggaactcctcggaaccatggtgcgtgctctggaggaggccaacgccgacctggaagtgaagat

SEQ ID NO: 547141 - DNA, 100 bp, Homo sapiens
ggcagctacacatcttgaaagagaagctcttcctgtgagagctgccaaacggaggcccgaagaaaaagaacctgaaaaagtaaatccacagatttctgat

SEQ ID NO: 547142 - DNA, 95 bp, Homo sapiens
tgaggatgctgctcatgttttagcggaactggaggtaacgatgcaccatgctctcttacaggaaggttgtgcaggaccagcgttccctgtgcagg

SEQ ID NO: 547143 - DNA, 83 bp, Homo sapiens
tgacccacgcggaggccgtcaaggctactgcagcactggggtgtcagttgttggtccgacccagaacgcttcagttctgctct

SEQ ID NO: 547144 - DNA, 98 bp, Homo sapiens
ctgggacttcccgtccgcggcgtggaggatacactctgtgcagttttagagagagacacactcagtattcgagaaagtcgactttttggagctgttgt

SEQ ID NO: 547145 - DNA, 101 bp, Homo sapiens
cgcttcagaaacggccatcactgaagagcagacccgtttgggttctccacgcattctagactcccgaagaggttattcagcttctcaaggctggaaaagcg

SEQ ID NO: 547146 - DNA, 123 bp, Homo sapiens
cacaatgggacactgagctttgtggaagcatttggcggcataccaccctgcactgtgaggtgttgggctggatcttgatagcagttgttatcatcattcttctgatttttacatctgtcaccc

SEQ ID NO: 547147 - DNA, 75 bp, Homo sapiens
cgaacatggcggcggccaccggatgccatggacaatattaccaggcagaaccaattctacgatacccaagtcatc

SEQ ID NO: 547148 - DNA, 100 bp, Homo sapiens
gttttttatcaaaggagacatggattcactagctttcggtggtggaggttcaaactatgttttaactgatgagcaatcactttggattgaagatactaca

SEQ ID NO: 547149 - DNA, 83 bp, Homo sapiens
acagaatagacctgaagacaaaaatccagaagtacaagcagtctggcattgaagttgatatcgatgtggagcacggagggaaa

SEQ ID NO: 547150 - DNA, 87 bp, Homo sapiens
gaggaggcgcgccgacgtctggaggaggaagaaaagagagccagccgagcaccctccaagcagagatctgggcggaccccggcaaat

SEQ ID NO: 547151 - DNA, 75 bp, Homo sapiens
tgcagatatgagagatagcacagatggaccaaaggttatgcacagaaaccaccatcatgggttcgggtcccatag

SEQ ID NO: 547152 - DNA, 76 bp, Homo sapiens
ggctgatggggccggcgagcagatgagaccgctactcacccggtggtttccagtgacagtgacagtgactcggatc

SEQ ID NO: 547153 - DNA, 100 bp, Homo sapiens
tgagcctcctcctctccttctacctgctggggttgcttgtcagtagcgggcaagaggaatgtttgctgggggattgaaggagatggaacaggaagaggtc

SEQ ID NO: 547154 - DNA, 82 bp, Homo sapiens
gccagatggtgttacctggagcttaaaaagctgcacgcaagtgttaaacttctgtttggtgccctggttgtcagatgttgga

SEQ ID NO: 547155 - DNA, 100 bp, Homo sapiens
gcctgcgaacagtggcagcgcgacctggccagctgccgcgactgggaggagcgccggaacgccgaggcccaggatgaatctggttatagatggacaagag

SEQ ID NO: 547156 - DNA, 83 bp, Homo sapiens
cccagacaagatggacaccgcggaggaagagtgcctggtgaagaatgtgatgggatcactagcatgtctgcggagagcggccc

SEQ ID NO: 547157 - DNA, 88 bp, Homo sapiens
gcttcaaaagctgttgaaattgttacttcaacttctgctgaattctcccagtccttggctacatcagcccacccctgtgacctcagca

SEQ ID NO: 547158 - DNA, 97 bp, Homo sapiens
ccccactccgcgcagcgggttgcctccgctccccatacggcggccccaggttcaagggcagacggggtttttgaggaggattcgcaaattgacatag

SEQ ID NO: 547159 - DNA, 100 bp, Homo sapiens
acggcggacgttcttgttctgtggagaataacggctgcacctggagattgacgcagagtgggcggcggtggtgggaaaagaagatctcccggagcagtgc

SEQ ID NO: 547160 - DNA, 117 bp, Homo sapiens
ggcctgggccggagcaggcgaggtggccggagccgtgtggaccaggaggagcgctacaatgcagatcttcgtgaagactctgactggtaagaccatcaccctcgaggttgagcccag

SEQ ID NO: 547161 - DNA, 74 bp, Homo sapiens
actccctgcagaggctcttcctcatcatctcagccacgaagtacagccggagagtgcgatgacatggatcctgc

SEQ ID NO: 547162 - DNA, 100 bp, Homo sapiens
aaaagatgatgagaaataaggacaaaagccaagaggaggacagttcgctacacagcaatgcatcgagggcgaactttctgaccaagtatacaactaccca

SEQ ID NO: 547163 - DNA, 99 bp, Homo sapiens
ttcttttcttttccatgatatcattatatggacagtttaggctggagctctcaaacactgctgtcctgcaccagatgcggcgggaccaggtgacagaca

SEQ ID NO: 547164 - DNA, 71 bp, Homo sapiens
ggaatatctggagccatccaacatttagctgggatgaaagacagcaagggcaaatgtgagaaacgagtaca

SEQ ID NO: 547165 - DNA, 96 bp, Homo sapiens
tcaccccgccagagcttctcagtgaggatgaggatgatgaccttcagtatgccgatcatgattatgaagtaccacaacaaaaaggactgaagaaac

SEQ ID NO: 547166 - DNA, 75 bp, Homo sapiens
cgctgagaacagcaagcagttttggaagaggagcgctaagctgccggggagtcttgctctgttgccaggctggag

SEQ ID NO: 547167 - DNA, 50 bp, Homo sapiens
acggcccccaaggggcgggcgctgtgtggtggtatctccatcaaggcttc

SEQ ID NO: 547168 - DNA, 100 bp, Homo sapiens
tggagaagttggagagagccagcaccaagatgctggacagattcttctgatgtagagcgactggaaagattcttcgactcagaagatgaagactttgaaa

SEQ ID NO: 547169 - DNA, 90 bp, Homo sapiens
gatcatgtcagagagagagcttggttaacttgggagaaagtttcatctgtggatggagtattgggaacttatagaaatgctggcaatttc

SEQ ID NO: 547170 - DNA, 100 bp, Homo sapiens
cttcttggcgcgaccccaacccagccccagatctggtggaacgagactgcaatggggacacgccaaacctgagtttctacagaaatgagatccgcttcct

SEQ ID NO: 547171 - DNA, 73 bp, Homo sapiens
ttccgcagcgagagcgaggaggagccatggcaatgacaggctcaacaccttgctcatccatgagtaaccacac

SEQ ID NO: 547172 - DNA, 100 bp, Homo sapiens
cgaacttttgacacggctttggaaacgacgtcatgtgttaggatttttagactctgaggagcagttggagctaatccacattatggaaatggaaaccacc

SEQ ID NO: 547173 - DNA, 80 bp, Homo sapiens
gtcctgcaggaacccgaacagttccccctggtgcagggagtggccataacccaacatgagtgaagtttcctgcaagaaac

SEQ ID NO: 547174 - DNA, 100 bp, Homo sapiens
gaaaagataaagtgttttggttttgatatggattatacccttgctgatctttaatctcatgaagtacgacagctacagccgcttcttaaagtctgacttg

SEQ ID NO: 547175 - DNA, 96 bp, Homo sapiens
gcctgaaaaaactaaagcagtagagaattaccttatacagatggcaagatatggacaactaagtgagaagatcctaagtgtgaacgtgaagtcccc

SEQ ID NO: 547176 - DNA, 82 bp, Homo sapiens
ggatgccctgcagtacctgcagaaggtctctggagacatcttcagcaggttcttcccaggagactctgccggccttttcccc

SEQ ID NO: 547177 - DNA, 95 bp, Homo sapiens
ggagtatttgctgggccgggtaccatggacgtgggcgaacttctgagctaccagactgtgaaaggagggttttctgagacaaggatcgagaagcg

SEQ ID NO: 547178 - DNA, 50 bp, Homo sapiens
acagagggtacttcagtattgaagttcgccaagcagcttttcagtctctg

SEQ ID NO: 547179 - DNA, 100 bp, Homo sapiens
tctgcaagatggagccaggaggagagcccacaggtgctaaagagagcagtaccctgatggagtcccttgcagactgctctccagaatgttgagattgccc

SEQ ID NO: 547180 - DNA, 98 bp, Homo sapiens
ggcattttggggcagaatacagagatatggaatcaggttcacgaggacacataccacatgcaacagtgcctacaggagcgagtacaaaactgtgacag

SEQ ID NO: 547181 - DNA, 101 bp, Homo sapiens
atatttgaaacaagagtagcaggtcgcatggtggcagacatgtgccgcgctgctgtaaagaacctccacgattcgtgaaaaagctaagtgacacctcaacc

SEQ ID NO: 547182 - DNA, 75 bp, Homo sapiens
ccgctgggctggccctgcagggaccatggaatccagagctgagctgagcagtccaaagtcctgagcgccgtggag

SEQ ID NO: 547183 - DNA, 100 bp, Homo sapiens
cagagcttcgcagcggcatcatcagaaacaacagcctgtgggaccggctgatcttccacaaagtacagacaggtgcagttcaggagcagatgagatccaa

SEQ ID NO: 547184 - DNA, 74 bp, Homo sapiens
acttagcaaaatgttctttactactaagcaccgttggtatcctcatggacggaaagaccacagcaagattcttt

SEQ ID NO: 547185 - DNA, 50 bp, Homo sapiens
caatgatggcaatgccattcttcgagaggcgtttgcttccagcctctccg

SEQ ID NO: 547186 - DNA, 98 bp, Homo sapiens
gtcatgattgtttatcctaatcccaatgctgaagtaagattgtcttggaaatactaagttgggaagatgaagtcctcagtacattctgaagaagatga

SEQ ID NO: 547187 - DNA, 101 bp, Homo sapiens
tgcttccgtgggctgggcgctgggttcgcggcgcgccctcctgctgcctccccggagctcccgggccagtagtctgcagccaggagagcagggacgtcctg

SEQ ID NO: 547188 - DNA, 82 bp, Homo sapiens
aggacatggacctgtacagcatcaactacctgcactttggggagcctaagtcctgacctgcctgaccagtgcacgcccaacc

SEQ ID NO: 547189 - DNA, 131 bp, Homo sapiens
tatctgtcttcggtggactccttcggcagtccacccaccgccgccgcctcccagtttggtgccctggttgtcagatgttggaaagcagtaggacggaacatactcttcgtggttgtgtatccgttctgggg

SEQ ID NO: 547190 - DNA, 74 bp, Homo sapiens
gccgccgtgagaaaggatttcagatgcagtggtttgtttacggcaagaaacctattggaattcgagacttaatt

SEQ ID NO: 547191 - DNA, 82 bp, Homo sapiens
gccacctaccacagagccatcaaaatcacagtggatgggccccgagaacctcgaagaatactcccccagttgcaagaggcgc

SEQ ID NO: 547192 - DNA, 50 bp, Homo sapiens
ccagggccaccggagctatttgctgccctcaggaggctcagtcacactct

SEQ ID NO: 547193 - DNA, 128 bp, Homo sapiens
ctggagcctcagttggaagcagccgatccagcctgcggagcctgtggggcaggaactgtggctgcaccatctgtcttcatcttcccgccatctgatgagcagttgaaatctggaactgcctctgttgt

SEQ ID NO: 547194 - DNA, 99 bp, Homo sapiens
aactccaatggcccaaaacccacagaagttgtattagatgatgacagagaagatctttttgcaggtgacactgatcccaactcatgactcagaagtgat

SEQ ID NO: 547195 - DNA, 75 bp, Homo sapiens
tgaaatacattaatgtgggtgatttagctcgagaagcatcaaagctaagccagaagatttatcacattttcatca

SEQ ID NO: 547196 - DNA, 100 bp, Homo sapiens
tacagatgtagcctcccgtgggctaggtacaatgactggtggtggaagcaaagtaatgaaaggaagaatgggttcctcacttgttattgaaatctctgaa

SEQ ID NO: 547197 - DNA, 100 bp, Homo sapiens
cagaccttcagcccgtggcccggatgcaggacagacccctcaggaacgtcaaggtcgtgggaaataaaaggcagttctacacagactgcagcaacggttg

SEQ ID NO: 547198 - DNA, 51 bp, Homo sapiens
cgagcacaacaggagctacgaggagttggaagatgagaatgtgcctactgc

SEQ ID NO: 547199 - DNA, 90 bp, Homo sapiens
gcgaaaggaagcaagcagttcagaagagccaaggaataaacatgcaatgaacccaaaaggaccattcctcaagaattttgtatccaaggc

SEQ ID NO: 547200 - DNA, 101 bp, Homo sapiens
gcctcccaaattgctgggattacaggtaaatcgggtccttcctcgctccaacatggtctacaatctctatgagtattcagtgccagaggacatgtaccagg

SEQ ID NO: 547201 - DNA, 98 bp, Homo sapiens
attcgatttggccggccccgcctcacttctaatgagaagcttatgctggcctccatgttccactcagatgcccgagtggtaaaagacatggcaacagg

SEQ ID NO: 547202 - DNA, 76 bp, Homo sapiens
ctggagcggatcccacacctccggaccgagggacgcggtgatttaaagggagtgatagtcactctgagtgatgatg

SEQ ID NO: 547203 - DNA, 83 bp, Homo sapiens
gtgggaacccaggccccgccgaggcggccaggtgaccatggaggaagaagatgagtctcgagggaagacagaggagtcggggg

SEQ ID NO: 547204 - DNA, 93 bp, Homo sapiens
ccggcggctaccggcggcggcgcgcagcgtgtcaggcggagagacccgccgccaggtgagcgagtgctgtgctttcatgggcctcttctttat

SEQ ID NO: 547205 - DNA, 51 bp, Homo sapiens
ttttgtggaagactctgctagaaagacccgatgggactgaggaagacccac

SEQ ID NO: 547206 - DNA, 98 bp, Homo sapiens
ttcagggccagacacgggaattagtggacagtgttggcaatatccttgaagagactaaaagaactcagaacaacactgaacaagccagcagagccatc

SEQ ID NO: 547207 - DNA, 73 bp, Homo sapiens
agcatcaagatgatttatggtaataagttatcaggaactgttgccgttattacatcagatgggagaatgattg

SEQ ID NO: 547208 - DNA, 100 bp, Homo sapiens
ggatgggctgcctccaggtgacagcaatcagctggcctggtttgatactgacctgtaaatcatcctttagggtctcctatggacagaagtgcgggcaagg

SEQ ID NO: 547209 - DNA, 150 bp, Homo sapiens
ctgaaaatgcaggtagacccattcaaaactctgctttaccctctgcatctattacatccaccagtgcagctgcagtttgacacgaatggagatggggagatcaccctggtggagctacagcaggccatgcagagactcctgggggagcgg

SEQ ID NO: 547210 - DNA, 82 bp, Homo sapiens
ccgatccagcctgcggagcctgtggggcagacggaagctcctcagtcttagagagttctgaaggtggatttctcagccacgt

SEQ ID NO: 547211 - DNA, 75 bp, Homo sapiens
gctttgtgatcgaaaccctgaccggatcccataaacactgtcgcttggtgtaaaaattgccaaagcagttgcctg

SEQ ID NO: 547212 - DNA, 100 bp, Homo sapiens
caaaccggaagcagtagaagtaacatttgcagattcttggatgaagtacagtcctactcgggagttaacaaaatgagtgtgcagaacttggcaacggtct

SEQ ID NO: 547213 - DNA, 96 bp, Homo sapiens
gagagtttcgagaagcagccgcgctgcgccttccacactgtgcgctctgtgctgatcctgtatttcctgtatttcctgcactggaatgaagatacc

SEQ ID NO: 547214 - DNA, 100 bp, Homo sapiens
atccaagtcacccccgacgaagatgaccacctgctctcacccacgaaaggcatctgtcccaagcaggagaacattgcagtgaaaatgcctcgtgtaaaag

SEQ ID NO: 547215 - DNA, 145 bp, Homo sapiens
cgagaggaggccgtccagcagatggcggatgccctgcagtacctgcagaaggtctctggagacatcttcagcaggtgaaaggtgtagcagtcactcggcctacacccacagcatcgaccttgtgaacccagcgacctgactgcct

SEQ ID NO: 547216 - DNA, 80 bp, Homo sapiens
ccgcggcggcagcagcagtgagagtcctattttgtaacggattatgatccaaccattgaagattcttacacaaagcagtg

SEQ ID NO: 547217 - DNA, 90 bp, Homo sapiens
aatggaagtgttatgatgcccttcgaaaaatgatcaactattgaccatataggttctccgcatccagaacattctatctgagaagcctac

SEQ ID NO: 547218 - DNA, 82 bp, Homo sapiens
cagctcaagtggccaaggcaagatgccgcttacaaacacgcagatggcaagaagattgatggcaggagggtccttgtggacg

SEQ ID NO: 547219 - DNA, 82 bp, Homo sapiens
ttccactcggctcctgtcgtccgttctctcaggctcccgttcagagtagcacagaagagggaggatgctgtttccaaagaag

SEQ ID NO: 547220 - DNA, 80 bp, Homo sapiens
aatgctgttgtatgcagtgaaagagttgctgaactacaaagaaaggcagaagctcctcctggggtagagacagatcttat

SEQ ID NO: 547221 - DNA, 75 bp, Homo sapiens
agtgagccagatttcacctctgcaaatatgagagattctgcagaaggcccgacaacaagctcaaatacgtcacca

SEQ ID NO: 547222 - DNA, 75 bp, Homo sapiens
cctggggtattctcacagctctgcggcccaggcccaagggccaaggagatctgttgaagaatgccaagaatgaag

SEQ ID NO: 547223 - DNA, 100 bp, Homo sapiens
tgtttccctctcctaaagcctggaatttcagagggcatatagcactttctacattgtgggtttaatattatcaatgcagataccttttgtgggattccag

SEQ ID NO: 547224 - DNA, 100 bp, Homo sapiens
catgaaaaagaagctgcataccctgagccagattgaaacttctattgcaacagttcaggaagagagaagggcacagttacctaagtatcaacgtaatctt

SEQ ID NO: 547225 - DNA, 90 bp, Homo sapiens
cagagttcaaggaggccttccagctgtttgaccgaacaggatatcaagtttccaagccagaggtgatcttcaaattggagcaaggagaag

SEQ ID NO: 547226 - DNA, 100 bp, Homo sapiens
cgacgctatggcgcactggagtaccctgttcctggcatgctcttaaagttccgtacagataaaggaagagatcccagttctgatacatatgaggaagatt

SEQ ID NO: 547227 - DNA, 82 bp, Homo sapiens
ctgctgtaccagtacctgctgtgcctggggatgcccccggccctgtgcattggtgagaagccctaccactgcaactgggacg

SEQ ID NO: 547228 - DNA, 82 bp, Homo sapiens
gaccagcaagcgtggcggcaagatcatcgtgggcgacgccacagagaaagataagatttgtgaccaaatcagtgatgctgtc

SEQ ID NO: 547229 - DNA, 100 bp, Homo sapiens
caaatgcacgcgacaggaaccaggagactccatcctctgccaatggcccttcccgggagggctctaggctgccgcctgctagggaaggccaccctgtgta

SEQ ID NO: 547230 - DNA, 74 bp, Homo sapiens
ttcgcagtggtcgcttcttctccttgatgaagcgccctcagttcagcaagccgccaggaggccaccacaagacc

SEQ ID NO: 547231 - DNA, 100 bp, Homo sapiens
caactcgtacctgagcctcttctacatcggtttctacctcaaggacatggagcgcttgaaagagaatgaggaaaatggggagcaggaggctgacaatgag

SEQ ID NO: 547232 - DNA, 98 bp, Homo sapiens
tgaggggatccgacttgccggcagaacttacgctgcgggaccccgggcactgttgctgctgcgggaggaaacccctcctggagtttccccaaagccat

SEQ ID NO: 547233 - DNA, 82 bp, Homo sapiens
cccatcgaggcttccctggttgcttagctgggtctcggccacggcgtggagagcggcaagctgcctgctgtttcccggggag

SEQ ID NO: 547234 - DNA, 95 bp, Homo sapiens
gggagctcacatttctcatattgctcaacagaatgaagaagcagtacgacgtctcatctgggaaaagaatctaaagtttgtgatgcttcacaacc

SEQ ID NO: 547235 - DNA, 100 bp, Homo sapiens
cagccattcttgaccagaaattaaatggtctcaatgaggaaattgctagagtagcctgcagctgtgaccctgagcatgcggatggctgtgaacagggttc

SEQ ID NO: 547236 - DNA, 90 bp, Homo sapiens
caagcacttgctctggagggaagagcgatgggagagtgtatccctggatatcgggctgaggaagcagtggaaatgttaaagaccttctac

SEQ ID NO: 547237 - DNA, 51 bp, Homo sapiens
tagcgagctggtgactctccttgtcatgaataaactcatcctgaaagtcgc

SEQ ID NO: 547238 - DNA, 80 bp, Homo sapiens
gccgccgctgccgctgccgctgccgcacctccgtagctgactcgacattccattattgttccattgacctttccctcatc

SEQ ID NO: 547239 - DNA, 75 bp, Homo sapiens
cctgtctgacgatagtccaaaaactgaagaagatggtggataagcccacccaggaaaccttctggcgaattccag

SEQ ID NO: 547240 - DNA, 88 bp, Homo sapiens
ttggtggaagaggcccttgcccagcgattccaggttatggtggagaattcagactttaccccctcacaagtaggatgtctctttacct

SEQ ID NO: 547241 - DNA, 100 bp, Homo sapiens
gccgccatgtgaagaaggtcgttgcttccccttcaccttccaccaccatgattgctcctctggacccttcccgctgcccagcgctggggacgccttcctc

SEQ ID NO: 547242 - DNA, 100 bp, Homo sapiens
cctcccgagtggctgggattacaggtcatacttacctggttgcttgcgcatctagtaatgttggatcatattctggatgttttgaataccaagtcccaag

SEQ ID NO: 547243 - DNA, 100 bp, Homo sapiens
cttgtacagcaatctcctcctccactgccactacagggaagtgcatcacatgtcagattggctctaccagtgcacctggacagggaggaatcctggctca

SEQ ID NO: 547244 - DNA, 90 bp, Homo sapiens
ccgggtcccgccctggggccggcgatgtgccaccgaggctgaggatgatggtagattgccaggtactccaaagattcaggtttactcacg

SEQ ID NO: 547245 - DNA, 82 bp, Homo sapiens
atggccgctgtgtggttgcaacggagataaattcccggaaccgcgattcggcgtgtcagcaaattgtggctactaatttgcc

SEQ ID NO: 547246 - DNA, 78 bp, Homo sapiens
tactgtgaattatgcaagcacagatttgcttttacaccaagtgtggaaaatgtaactatccaactggatttggaagca

SEQ ID NO: 547247 - DNA, 101 bp, Homo sapiens
cagttaaccagagccatccttcgggagaggatatgtagcgaggaggaacgcgctaaggcaaagcacctggttatcaatactctggctgaccatcatcatcg

SEQ ID NO: 547248 - DNA, 100 bp, Homo sapiens
aaattcacataatttgaaccagcagcaacgtgaggttttaaatgcacagagagcaggatacaaggcagccatagttcacaatgttgattctgatgacctc

SEQ ID NO: 547249 - DNA, 129 bp, Homo sapiens
tcacattggagtcacaatcaaagaactggatctttatctggcttactttgtccacactccggtcctcctgctcctcccaggagcgccttcaccagctgccctaccagcccacggtggacgagctccact

SEQ ID NO: 547250 - DNA, 100 bp, Homo sapiens
ctccgagccaggccgccgcaaagcagccgtgttgccgcccgctgtgctatgagcagtcagagcgccgtctccacaagagtttacaaatgaaaatggagga

SEQ ID NO: 547251 - DNA, 90 bp, Homo sapiens
gcttaaaggaagtgaaaacagccagccagaggatatgctgcaggctgctagtcattatcgccaaaatagaaactctttgtatagaagaga

SEQ ID NO: 547252 - DNA, 106 bp, Homo sapiens
ggacaccagggtacccggcaaatttctcttcaccagcaaaagggccatgctgcaccttacaaaacggtctccgtccgcgcggccatcccgtccaccatcctccggc

SEQ ID NO: 547253 - DNA, 96 bp, Homo sapiens
cagaagcaaaagccttgatagcatggatttctgtgagctcactcttcttccagaccagctggtcttgcttctggagcatctcttggagcagaagac

SEQ ID NO: 547254 - DNA, 100 bp, Homo sapiens
tacctgcagcagcaggcggcccaggccttggaactgcagaggagcgcccagctcgtggattttttatcaagcagaaatgcatcgaacaacgagaatcaag

SEQ ID NO: 547255 - DNA, 51 bp, Homo sapiens
atgaattacgtctgaaagaaagggcctattccctggtggattccagtcaag

SEQ ID NO: 547256 - DNA, 75 bp, Homo sapiens
gtctggagaaaagtggtgacttattgcgtcatcacgtagacataaccaagaaacttcacccaaatcaagctggcc

SEQ ID NO: 547257 - DNA, 75 bp, Homo sapiens
tgatcgcctaacttctactgacgaagcttggaagttgcagaagcattaaagggcagtatttaaagtcagttggca

SEQ ID NO: 547258 - DNA, 83 bp, Homo sapiens
cctggcggcggcgcccgcagccagcaagatccgagcagttggcagactaaaaagagagcggtctatgagtgaaaatgctgttc

SEQ ID NO: 547259 - DNA, 90 bp, Homo sapiens
gtttgaagccttggtgatatacatggagagtctggccttagcacatgcagatgagaagtccttaggagccatgtggctagaaatcctcct

SEQ ID NO: 547260 - DNA, 76 bp, Homo sapiens
ccagtttttcgtcgagagattcactatggaatcgtttcagaatggcttcggttattgcctttccttggtgtactcg

SEQ ID NO: 547261 - DNA, 89 bp, Homo sapiens
ggcggcggctgcggaggcgcaggcagcaactgaggcagcggcaggctcaggtgcagccgctgtgcctggagaagttccctgtgatccag

SEQ ID NO: 547262 - DNA, 80 bp, Homo sapiens
aatatctgtcttcggtggactccttcggcagtccacccaccgccgccgcctcccagaacccttgctggcctcagaacacc

SEQ ID NO: 547263 - DNA, 90 bp, Homo sapiens
agttgtccatgaccctgaaggtccaggagtacccgaccctcaaggtcgcgtggggcaggcagtggcgctgcgggccaaggccttcggctt

SEQ ID NO: 547264 - DNA, 50 bp, Homo sapiens
tcaccaattttccttggaattggacagtaatccttcccctctaccaccgg

SEQ ID NO: 547265 - DNA, 82 bp, Homo sapiens
ttttgggatttgagattgacgcggtgaactctgtccagttttcaaaccacacaggtgcgcgcggagccatggttatcatgtc

SEQ ID NO: 547266 - DNA, 97 bp, Homo sapiens
aggattgggatgaaagaccaaaaatcccagatccagaagctgtcaagccagatgactgggcaaacctggtggacctgcagaagaagctggaggagct

SEQ ID NO: 547267 - DNA, 100 bp, Homo sapiens
gggcagcgcaccggcaggcggctccagggcccacaacggcagtgtcctacatgtcggtgaaatgtgtggatgcccgtaagaaccatcacaagacaaaatg

SEQ ID NO: 547268 - DNA, 75 bp, Homo sapiens
cgtgctttgcccaaggagatggtctcattaagaacactcgtgaaactgctcaggccatcaagggtatgcatatac

SEQ ID NO: 547269 - DNA, 78 bp, Homo sapiens
ctcttcaggcgcagtgtgcgttcagctgtgtcagctaatggtgttggggatgtcctttgcactgaccctgaactgcca

SEQ ID NO: 547270 - DNA, 83 bp, Homo sapiens
cttcggcagtccacccaccgccgccgcctcccagaggaagatggatggccgagagtacccagacgcacagggctttgctgctg

SEQ ID NO: 547271 - DNA, 82 bp, Homo sapiens
ctcgtgaagctgctgctgtccaagggctctgacatcaacatccgagacaactcgagtaatcctgcctgtgtctgtagatgag

SEQ ID NO: 547272 - DNA, 129 bp, Homo sapiens
agaagaagttcgtgccccaattcctcaaaagcaggaaatactggtggaaccagaaccattatttggtggttcaggccctctgtggttaaagactgtatccatgctgtgctcaaggaggaactggcaaat

SEQ ID NO: 547273 - DNA, 90 bp, Homo sapiens
cagggaatgccacagcatcctccagcacctcaggataaaagaatcagagtgtctcaacccttgacaagaggaccaagtgcctttattcca

SEQ ID NO: 547274 - DNA, 100 bp, Homo sapiens
gcggcgacccctcggcgccgatgtccctgatccctggagcgacgacggccgctgcctaagctggaaagtggtgagagcggctgaggaggctgcgtccaca

SEQ ID NO: 547275 - DNA, 75 bp, Homo sapiens
aagggaccacggtcaccgtctcctcagctgctgatgcaaggaatcccctgggctcccgtccactccactgctgac

SEQ ID NO: 547276 - DNA, 100 bp, Homo sapiens
cccggcgccaggggagccgccacagggcagctgcaatgactctccgcacggtattattgtcattgcaagcactattggcagctgcagagccagatgatcc

SEQ ID NO: 547277 - DNA, 101 bp, Homo sapiens
aatcaggaacatctctttcaatgacaaaaagtttgtcattaaacccatcgacaagaaggcacctgctgcctgctgtttcccggggagatcatgaaacgagg

SEQ ID NO: 547278 - DNA, 103 bp, Homo sapiens
cgtcgcgcccgggaggaaggaacgaggcaaggagctaaagcagcgtgcgttcagccctgggccgcggcgagtcctttgcacatgttggcaacacacgcatccg

SEQ ID NO: 547279 - DNA, 75 bp, Homo sapiens
ctggaggtgttccacccgacgcatgagtggcaggcccttcagccagaaaggaagctgttgaagttattgaagtac

SEQ ID NO: 547280 - DNA, 83 bp, Homo sapiens
catgatggagaattatggaaacctggtctcactggtttgaggaaatgaatgcagagcttgaggagaacaaagagttggctcag

SEQ ID NO: 547281 - DNA, 82 bp, Homo sapiens
ttcttgaactggtgctgtctgggcttcatagcattcgcctactccgtgaagatgtggacgagtgctcactagcagaaaaaac

SEQ ID NO: 547282 - DNA, 100 bp, Homo sapiens
ggaagaatatcctttgaagaattctgtgctagatctaccgcatcgtgtcacagaaacagatcgcagaccgcgctgcccacgacgagtccccggggaacaa

SEQ ID NO: 547283 - DNA, 83 bp, Homo sapiens
ggaaacttctgcgggcgccgggctgaagctccgggcagggctgggaaggaaagacaggtgatttggcttctgcacagttagga

SEQ ID NO: 547284 - DNA, 75 bp, Homo sapiens
ttggaagctctgcaaagacctacgctccttcatctaatccatggaaagggcaagtgtccagagaatggctgggat

SEQ ID NO: 547285 - DNA, 83 bp, Homo sapiens
cgcagaagcaggagctgaagacctcagaccggcaccagatgtacaggtggatcatctgaatctcctgaaacagtttgaacacc

SEQ ID NO: 547286 - DNA, 78 bp, Homo sapiens
ggacatgagcaagcccccgacagctcagccagacttcccctatggtaactaggatttctacctcaaccgcgagaccta

SEQ ID NO: 547287 - DNA, 82 bp, Homo sapiens
gaggtttcattctgttcctctgattgtacagaaagggctgctttggcctagacagcatgatgccttcttctgtagagtgggc

SEQ ID NO: 547288 - DNA, 75 bp, Homo sapiens
ggaggcggcccagttcatacagcgattggaggtggacacaaaggaagaggcagccagacagctacttcagcgtcc

SEQ ID NO: 547289 - DNA, 83 bp, Homo sapiens
aattccccccgaagaagactcccccacatctgggatccctgctgccttggtgatcccgggctgacagccagagagcacagcgg

SEQ ID NO: 547290 - DNA, 75 bp, Homo sapiens
cagactttgagggaagctcactcaggatctgctctccggcaaagtagtaagtgagagactctccaacatgtgcct

SEQ ID NO: 547291 - DNA, 90 bp, Homo sapiens
agttgattcagcggttgcgaagaatggaacgaagcttaagtagctacaggggaaaatattctgagcttcctgtgcttcccagaattccat

SEQ ID NO: 547292 - DNA, 83 bp, Homo sapiens
gctggagaagcacggagttcgggggatggcacagaatgggatgcagcagcttttttatgagaattacgagcagaacaaaaagg

SEQ ID NO: 547293 - DNA, 50 bp, Homo sapiens
tcaactcctggaccactagtctcgggttcatgacgctctcgatattcctg

SEQ ID NO: 547294 - DNA, 75 bp, Homo sapiens
acttcttcagaattagaaaggagctgcttcccaataaggaaacagagtccccagagccaggcagggggatgaacc

SEQ ID NO: 547295 - DNA, 100 bp, Homo sapiens
gcatgcggaaaatactacagagtgtgcacactggctatcattgatccagcgagtaaccagctcataaatcacatcgaacagtttttggatactaatgaaa

SEQ ID NO: 547296 - DNA, 106 bp, Homo sapiens
gatttgttaaggattccaagtaactcttatttggaccagctttgtttaaaggaatcggtgaaatgctgtggtttaaaagaagctccccattgtcaactgctcacca

SEQ ID NO: 547297 - DNA, 100 bp, Homo sapiens
gccattgtgaacagctgtgtgtttgttcatcagactcttcaccagatactgaaacaagaatggcccaaacattggccaacttttatcagtgatattgttg

SEQ ID NO: 547298 - DNA, 100 bp, Homo sapiens
ggctgcgagaccctagaggcctgcggaaccatcactgttgctggaggcacctgacaaatcctagcgaatttttggagcatctccacccaggaacctcgcc

SEQ ID NO: 547299 - DNA, 98 bp, Homo sapiens
ggatggtcggaattaagtgagagagatgccatctacaaagaattctccttccacaattttaatcagattatgtctactttgagaattcctccagcaac

SEQ ID NO: 547300 - DNA, 100 bp, Homo sapiens
ccagtttggaagatgaaggcttttctcaacacgctagaagggtttatgaaattcttcgactactggtaactgacatgagtgatgccgaacaatacagaag

SEQ ID NO: 547301 - DNA, 100 bp, Homo sapiens
ggcccggccctgagcttcccttgcccagcatccctgcctggactggtcctgagattcctgaatcagatcatccaagcctagaaaacatggaacagataga

SEQ ID NO: 547302 - DNA, 74 bp, Homo sapiens
gtgtacaaatacccctttgaattaattatggctgctgtgggtcatcttattgctgcagtcctaaaggaaaatgg

SEQ ID NO: 547303 - DNA, 89 bp, Homo sapiens
ggggattctcgacctgctaacagaactggaccttttcgtgtttgagcaacactgcaccactgactgactactttctcaaagatgagtat

SEQ ID NO: 547304 - DNA, 100 bp, Homo sapiens
cgagcgagcgagcggcgcccagcccagcgcctcggccgaacccctccgcagcagacctgcctagagctggaacgttacctccagagcgagccctgctatg

SEQ ID NO: 547305 - DNA, 75 bp, Homo sapiens
ctttcattgtctcggacgtgcggggcctgggcctcccggtccgcaagcagaacggcctgcagagataatacttct

SEQ ID NO: 547306 - DNA, 73 bp, Homo sapiens
tggaagaaattgacagagctttgggcattcctgaacttgtcaatcagatgagacaaaaggacccagtgaaagg

SEQ ID NO: 547307 - DNA, 75 bp, Homo sapiens
aatttcctgcgctgttccacctcattcaacttcaggagtggagtcaacatatcaatggagcaagtcacagtcgtc

SEQ ID NO: 547308 - DNA, 83 bp, Homo sapiens
cgcaggagaacgagtccctcttcactttcctcggcaagaaatgtgtgggaatttgaagtactgccttgtaattcttaatcagc

SEQ ID NO: 547309 - DNA, 75 bp, Homo sapiens
cttcgatgtgcgagactttggaaagtgcactggtgattgctgcggtgtttgaccgagacataaactgcagaagag

SEQ ID NO: 547310 - DNA, 50 bp, Homo sapiens
aagaggaggaagaaggcgagaagcacagatctattaatgagatgaagcgg

SEQ ID NO: 547311 - DNA, 82 bp, Homo sapiens
cggaggaggaggaggaggcgaggaggagagactgcaccatgactcctgtgaggatgcagcactccctggcaggtcagaccta

SEQ ID NO: 547312 - DNA, 96 bp, Homo sapiens
aacctcttgaggatcgaatcttcactcccgctgtctcagcagtctacagcacgcacccaagaaaacctcatttggctcgctgaaggatgaagaccg

SEQ ID NO: 547313 - DNA, 100 bp, Homo sapiens
gagagaggcagtccagccgcaggggccacccgaacagtctctcctcctcacagaagcctgcggaagtgaccgtggtggcttcaataaatttggtggtaag

SEQ ID NO: 547314 - DNA, 101 bp, Homo sapiens
gaacattactcttccagaagagaattaaacaaccaccatgtcgagcaaaaaggcaaagaccaagaccaccaagaagcgccctcagcgtgcaacatccaatg

SEQ ID NO: 547315 - DNA, 82 bp, Homo sapiens
cgggacgatcatcctggggacctggtacatgctgttaaacgtttaatgaaagaagcggcagaattgaaagatccaacagatc

SEQ ID NO: 547316 - DNA, 100 bp, Homo sapiens
gcgctggttcctgccggacttgcctccttcccgcagcgccgtagagatcgctcccactcaggtcacaggtatggttccgaccggcgtttagccgagctct

SEQ ID NO: 547317 - DNA, 90 bp, Homo sapiens
gctgtcttgtttaccttatgacatcatcaatgcctttgaaaatgtggatgagcatgtagagcgcatgaagtacaggacaataaagcttcc

SEQ ID NO: 547318 - DNA, 83 bp, Homo sapiens
cacggagggacttctgcagagagagtgcgcagaaggattccgggagcacagttccgccgacttcccacatcacaaactttgag

SEQ ID NO: 547319 - DNA, 75 bp, Homo sapiens
gccgcaccactacgtggaacgacccgcgcgtgccctctgagggccccaagggcacttcaggcaaccggggcctcc

SEQ ID NO: 547320 - DNA, 75 bp, Homo sapiens
tttggactaatgggagttgcttttggaatgaatttggaatcttcccttgaagagatctcaggaaacaggctcgac

SEQ ID NO: 547321 - DNA, 100 bp, Homo sapiens
tgaaaatacagccaagatcttggcaaagcttctccctcagtatttagaccaggtggacattgcatctgggatggccattgaagggatgtgctatgcccag

SEQ ID NO: 547322 - DNA, 75 bp, Homo sapiens
cagatcattccacttaccatgatttcgatgatgatgatcctgaggtcctaggcctacttacaagcctccagtctc

SEQ ID NO: 547323 - DNA, 82 bp, Homo sapiens
atcctttccaaacttggtgtcttttctacaaactctgtgcctcaacaaccatttctaagtgacaatgcagatcttcgtgaag

SEQ ID NO: 547324 - DNA, 100 bp, Homo sapiens
gggcagtgtggtgtccagccggatccagcatctctccaccatcgactacgtggaggacgcccaagaagatgaaaggattgttcttgttgacaacaaatgt

SEQ ID NO: 547325 - DNA, 75 bp, Homo sapiens
cggcccccgacggctctgcagttaacgggaccagctctgcggagcctcattgctacgatttcagagtaccctggt

SEQ ID NO: 547326 - DNA, 101 bp, Homo sapiens
ctggctttgccattagcgggggcctttcctgaggacggcgtacggagtgtgggaatttagataatgggctgtgtgcaatgtaaggataaagaagcaacaaa

SEQ ID NO: 547327 - DNA, 75 bp, Homo sapiens
tctgctcgcgtcctgctcctgtaacaaaggcctgtagtggtggagacacgcccagtggatgatcctactgctccc

SEQ ID NO: 547328 - DNA, 76 bp, Homo sapiens
tgggactcagcagccttggtgctcaggtgccagatgcaaagtgcactgacaggcagaactcaccagtcacatcacc

SEQ ID NO: 547329 - DNA, 75 bp, Homo sapiens
cgaacaaggagtaagggaactttgcgatacatgagcccagaacagacatatctgaagagatggattaagaatgct

SEQ ID NO: 547330 - DNA, 74 bp, Homo sapiens
gctagctacacacacgccctcacgcccggcgagcccgcgagatataattggtgattacaactttcctctataaa

SEQ ID NO: 547331 - DNA, 100 bp, Homo sapiens
ggaagatggcgcctgttgtgacaggacatatgtagagtgtgtcggtcagaaggaacacctgagaaaccgctttatcatccttgtgtatgtactggcagta

SEQ ID NO: 547332 - DNA, 74 bp, Homo sapiens
tgcggccgccctgggccgggccccaccggacgggactttgaacatgtcggggatcgccctcagcagactcgccc

SEQ ID NO: 547333 - DNA, 73 bp, Homo sapiens
aaaatcctcacacactacaaacgagtgtgaacatggctacgcctcttcattcccgtccatgccgagcccccga

SEQ ID NO: 547334 - DNA, 83 bp, Homo sapiens
tttggccaatgaaatggagacatattctttaaggctttccttaaagtttcccatgtctcaatggactcctgaatataacgagc

SEQ ID NO: 547335 - DNA, 101 bp, Homo sapiens
agtaacttggccaggctggccccgagcggaactggagaaagctgaggatggactctcgtcctgtcacccaggctggagtgcagcggcgcaatctcggctca

SEQ ID NO: 547336 - DNA, 80 bp, Homo sapiens
gtggaaaaagcagggaggttatgaggcttaataaagaagcattactctactgactggcagagacaggagaggtagatgtc

SEQ ID NO: 547337 - DNA, 76 bp, Homo sapiens
ggagaagaagttgcccagtatgatggggcatacaaggtttacccaaggtccagcctagcccctaggcaccatgtcg

SEQ ID NO: 547338 - DNA, 100 bp, Homo sapiens
ttggtggtaccctaaaattagggcatgattaaggtatactaaatcacatggtttgcttgttcagcaagctttaccaaaagctaaacttaaagaaattgtg

SEQ ID NO: 547339 - DNA, 80 bp, Homo sapiens
gtttccagtatatacatcaagtcactgagtcccaggacatcaaagctctgcagaaagaactcgagcaatttgccaagctc

SEQ ID NO: 547340 - DNA, 100 bp, Homo sapiens
aaacgtgataagaagcacctggatgagacatttgctacagcatcccacattaagtcaacgagccagtcttggtgctctgtgttcacctggttcatctgag

SEQ ID NO: 547341 - DNA, 83 bp, Homo sapiens
atcatcattaaggacggaggcacgggactttgaacatgtcggggatcgccctcagcagactcgcccaggagaggaaagcatgg

SEQ ID NO: 547342 - DNA, 82 bp, Homo sapiens
tgcatctacaccgacaactccatccggcccgaggagctgctgccacacccactcgcccgggtctatggccacggtcggagag

SEQ ID NO: 547343 - DNA, 75 bp, Homo sapiens
ggacgctgccagtttgcacagcagcagacatgcgtcgggatgtccaggaaatttttcgcatgaccccccacgaga

SEQ ID NO: 547344 - DNA, 98 bp, Homo sapiens
gagattatagctctgtatgagaaggacaacacctacttaggcctcggagctgctcctgccggcggctgcctctcttcgccaggaccttctgctcctgc

SEQ ID NO: 547345 - DNA, 80 bp, Homo sapiens
gaccctggagcctcagttggaagcagccgatccagcctgcggagcctgtggggcaggatccaaggagctggttctgctgg

SEQ ID NO: 547346 - DNA, 100 bp, Homo sapiens
gcgctctgggcacagccttggaaagtcaggaccgcgacggcagcagagcacatgaagagctaatgctaggggatccctgccttaaggatttgaaaaaagg

SEQ ID NO: 547347 - DNA, 75 bp, Homo sapiens
gtttgaacaaaaaagtggtgcagtttttgatgaaattgtagagaactttacagatgtagagctaaaacgactgaa

SEQ ID NO: 547348 - DNA, 82 bp, Homo sapiens
atttagtgggggtagccccttccagaccctcaaactgacacaagacctacagagaaaaccctttgccaaatctgctctcagc

SEQ ID NO: 547349 - DNA, 75 bp, Homo sapiens
tgcttcatccgggaagtgcttggggatggagtgcctccaaaggttgctgagctttaccaacagggacgcttatgt

SEQ ID NO: 547350 - DNA, 90 bp, Homo sapiens
tcactgaagtgctggaagactgggaagattcagttaacattgggtggaccggctgcgccatcacctgctccccatgtacagctatgaccc

SEQ ID NO: 547351 - DNA, 98 bp, Homo sapiens
gaagcacctggatgagacatttgctacagcatcccacattaagtcaacgcacaaacgtgcagatatctgatagccctttccgttgcactcaagaggaa

SEQ ID NO: 547352 - DNA, 100 bp, Homo sapiens
agatcaggcctgaccgggataagctccagggaatggcatttactttacaagaacgacaaatgcttggtcttcaaggacttctacctcccaaaatagagac

SEQ ID NO: 547353 - DNA, 100 bp, Homo sapiens
tgaaatccaagaagcactgagtcgcagttatggcaccccagaactggatgaagatgatttagaagcagatttacatgagcccagaggtcatcctgtgcag

SEQ ID NO: 547354 - DNA, 100 bp, Homo sapiens
ggcccaacatgctttggcagggatgcagtaacactttcagctgctcctccctcctacttcagaggattcacattaattgccctcagagagaacagagagg

SEQ ID NO: 547355 - DNA, 83 bp, Homo sapiens
ttttccacagatggtttcaacttctcatcccaatgctgagtgttccagtgtctcgccccatcctcaccctcagggttcccagg

SEQ ID NO: 547356 - DNA, 87 bp, Homo sapiens
caagatatgacaagtcgcctacaggcaacatcagatgctgacctgaaagaacatatggttggaatcatattcagcaggagtaagctg

SEQ ID NO: 547357 - DNA, 97 bp, Homo sapiens
cattgttatgctggaaatgctagaatataatcactatcaggctattcaaggccgaaatgagagctgtgacatatcaaaagaacatacttcagaaact

SEQ ID NO: 547358 - DNA, 82 bp, Homo sapiens
cggccggcttcgctgcgggtttgcactgcccggttggttgaatctggcgatgtggaacccatggatatggagggctgactat

SEQ ID NO: 547359 - DNA, 101 bp, Homo sapiens
gggtgattctgaagagggtctggaggagccttctcaagaacagagagtgctgcagcagctcccagtccagtgctaggaaacattcccccaggagatggcat

SEQ ID NO: 547360 - DNA, 99 bp, Homo sapiens
gagacggttgcttgaacatttgttggagacggtctcgccacattgcccagactggtctgaaagtcttgggctcaagagatcctcccgcttccgccttcc

SEQ ID NO: 547361 - DNA, 100 bp, Homo sapiens
tcattgacagcggagatggagtcacccatgttatcccagtggttcagcagctggacatggagaaccaacgctcatcacctctgtcgttccccagtgttcc

SEQ ID NO: 547362 - DNA, 82 bp, Homo sapiens
gatttcaaaaactcgtgctgctttgggagtttaaattacttcagcaccatcattgcatttgctcagtatgttcaggaagcaa

SEQ ID NO: 547363 - DNA, 100 bp, Homo sapiens
ctcagttgggtggactacggggagcgcgccgagctggatgactcggacgccctggcctagtgtgtccaacctggccaaggacttcattgaccgcctgctg

SEQ ID NO: 547364 - DNA, 82 bp, Homo sapiens
ttggttggtggaggctgtggcaatggaacaggcttgagaaacagagctttctccgcatgtgggactctcggcctcattatga

SEQ ID NO: 547365 - DNA, 80 bp, Homo sapiens
gtccaggcggccttcagcaccatcgtctcacggatacagagatagctttatcctgtggataaacgcagagtgaacgagtt

SEQ ID NO: 547366 - DNA, 100 bp, Homo sapiens
tcatctactaggcaagcatggagttggcaccccaaaagaaagaacagctttgctgagccatcaaggtctaatggaagcatggttcggcattcttcatctc

SEQ ID NO: 547367 - DNA, 75 bp, Homo sapiens
cacggagctgaatctgccgcagctagaaatgctcaagaaccagctggaccaggtctcctctgagcctccggcctc

SEQ ID NO: 547368 - DNA, 100 bp, Homo sapiens
ggcagtcgcattgtctctttttcttggatggttgggagcagatcgattttaccttggataccctgctttgggaacctgtaccgtaagatgggagaaccgg

SEQ ID NO: 547369 - DNA, 83 bp, Homo sapiens
ggccgggagccgggtgagggcgccgagaggctcggtgggcgcgggcggcgaggtcagcccaaggccaaccccactgtcactct

SEQ ID NO: 547370 - DNA, 80 bp, Homo sapiens
atacacgtggcttccagcacacaggcatctacagtgtcatgatccagaaggtcaaaatgcagatcttcgtgaaaaccctt

SEQ ID NO: 547371 - DNA, 107 bp, Homo sapiens
ggctaccatggtctacaagactctcttcgctctttgcatcttaactgcaggagtccaaaactacttacctggaagaccttccaccaccccctgagtatgaattggcc

SEQ ID NO: 547372 - DNA, 75 bp, Homo sapiens
taatattgcgtgaaatatctgaatctacccccgtggaagtaacaatctctgatgaaccagacatattatataagc

SEQ ID NO: 547373 - DNA, 100 bp, Homo sapiens
agcctttgccatcactgccattaaggtgacaaaatatctgaacagaagaggacttaggagagatctgaactccagctgccctacaaactccatctcagct

SEQ ID NO: 547374 - DNA, 90 bp, Homo sapiens
gcgggccctggaaatgtccctggcagaaaccaaaccccaggttccaaggtggcgggaaatgttttttaaagtgaagaaaacagttgggga

SEQ ID NO: 547375 - DNA, 134 bp, Homo sapiens
atccctgtgcagctgatgacaagggccgcacagctctacactttgcctcatgcaatggcaatgaccagattgatcacaagatttctgttgtgaaggatgtggctctgccatgaaggatgtcctgttgcctttaa

SEQ ID NO: 547376 - DNA, 90 bp, Homo sapiens
ggccagcagagggcgaagtttcaagcagacttcacttgctcttgtacatgaggtgaccttgggaaaggtgttgaaagtgatcgtcgtcat

SEQ ID NO: 547377 - DNA, 73 bp, Homo sapiens
ggccatggcaagacttcccgcaacatccactccttggaccacctcaacgggagatacagatgacccaccaaga

SEQ ID NO: 547378 - DNA, 98 bp, Homo sapiens
gagccccagcaccgcccctcctggaagaaggaagaggtcaatgagctgaaggagaaaggcaacaaggccctgagcgtgggtaacatcgatgatgcctt

SEQ ID NO: 547379 - DNA, 83 bp, Homo sapiens
ccgccctgttccccgcgctgcggcctggcggcttccaggcgcactaccgcgcccgatggcaccagcaaggagtgtgtgttcat

SEQ ID NO: 547380 - DNA, 80 bp, Homo sapiens
caccccagccccggccacatgaaggtgcccgtggggcaggaggtggaggggatgaacatcctgggcttggtagtgtttgc

SEQ ID NO: 547381 - DNA, 100 bp, Homo sapiens
gcccatggaaaagattttgcatctagaggaattgaaagcgacattgactacagcaccgtgctcctcggcatgctggtgacgcaggacgtgcagctcgggc

SEQ ID NO: 547382 - DNA, 75 bp, Homo sapiens
ctgaagagggaagacacgcggaaacaggtttgctgactgcgccatattgttgctgacacaactggagactggact

SEQ ID NO: 547383 - DNA, 90 bp, Homo sapiens
ccttcggagcagcagccctgtccggcatctgtcttgagctcccagcaagatcatatctgaagatattagtgagctacaaaagaatcaaac

SEQ ID NO: 547384 - DNA, 100 bp, Homo sapiens
ctgggagatgaccttcacggccactggccagaggtacttcctcaatgtgcagttcgtgcagccacagaaggcagaactctcattttggaaggtttggaaa

SEQ ID NO: 547385 - DNA, 75 bp, Homo sapiens
atcaaaaatgactttactgaagaggaggaagcccaggccaagtcctgtatctgccatgtctgtggcgtccacctc

SEQ ID NO: 547386 - DNA, 90 bp, Homo sapiens
gggactttgtcacagcttggatgactcaccccacacagaccgcgtttctctccagtgtcgacctacacactcactgctcttaccagatga

SEQ ID NO: 547387 - DNA, 100 bp, Homo sapiens
aaagaacttgcagttgaaggagtataacacagattcaggaattgtagggcctcaacctatagactttgtcccaaatgctctccgacatgcagtagatggg

SEQ ID NO: 547388 - DNA, 100 bp, Homo sapiens
ctgttcaaaatgaagaggaagcccagaaagggaaaaactaccagaacggagatgtgtttggcgcaatgtctcaggctgtgcagacaaacggaactcaacc

SEQ ID NO: 547389 - DNA, 98 bp, Homo sapiens
atgccaccactgccctgctccactatcagctgccccagatgccggatgtcgtggtccgatccttcatgggtgaatcctggttctttcgttggctacct

SEQ ID NO: 547390 - DNA, 76 bp, Homo sapiens
ttgccctgtctcctcgcagatgagaaatgatgtgctcacgggtgccctctgaacagtcttctggtacctctctctt

SEQ ID NO: 547391 - DNA, 100 bp, Homo sapiens
aagagatggctgacagtgtcaaaacctttctccaggaccttgccagatattgacttgaagctgaaagaaaagccttagttggccatgctggaagaagagg

SEQ ID NO: 547392 - DNA, 82 bp, Homo sapiens
ggacgcggaactggtgtaccctggtggacgtgcacccagaggaccaggcggcgaatagcctaacatggcagaccagagacag

SEQ ID NO: 547393 - DNA, 100 bp, Homo sapiens
cagattcagaggatgacagttgcaagaaaatgtttataggaggccttagctgggacactacaaagaaagatctgaaggactacttttccaaatttggtga

SEQ ID NO: 547394 - DNA, 100 bp, Homo sapiens
tgaaaagctagaaatgtgggaagatgttgtcatttgttatgaaagagccgggcagcacggaaaggagacactgctattgaaagtggacaacattattggg

SEQ ID NO: 547395 - DNA, 74 bp, Homo sapiens
caaggcactgctttttcatgacgatgtgacaagccgaggcggtgagccgggcaggaggaaggagcctccctcag

SEQ ID NO: 547396 - DNA, 75 bp, Homo sapiens
aaaaatattgcagtgtcctaaatgtgataaaacatttgaccgaataggacaatgaaggccaaacagctctacatt

SEQ ID NO: 547397 - DNA, 75 bp, Homo sapiens
cccaggtgtaagcgcagaaagcaggcgaacccgcggcgcaataacggaaggaagcagccaccctcgccatggcct

SEQ ID NO: 547398 - DNA, 82 bp, Homo sapiens
gaagaataagagatgtgattaatgtattccaccacctccgccagttaagaggaaaaaggtgtgagttcttgatacgaatgaa

SEQ ID NO: 547399 - DNA, 100 bp, Homo sapiens
atgctcttcatcatcagcctgagcctactgatcggcgtagtcaagagttgctacagtgaacggaagaaaacacgaaacttagaagcttacgtggaatggt

SEQ ID NO: 547400 - DNA, 51 bp, Homo sapiens
atcgtcaccagctctggagacaccacgtgtagagacgggctttcaccacgt

SEQ ID NO: 547401 - DNA, 89 bp, Homo sapiens
ctccgccttccagttcggagagaatgtaagtcagctgtcaccagatggtcctttgccacagcttcctttaccgtatattaacagttcag

SEQ ID NO: 547402 - DNA, 75 bp, Homo sapiens
gacttgaagcgctgccagtatgtgaccgagaaggtgacaggccgctgcggctctgtgctggtacgcctcatccct

SEQ ID NO: 547403 - DNA, 50 bp, Homo sapiens
gaaagacagctttgtggaagagacctgatggccaaaagaaaggaagaaaa

SEQ ID NO: 547404 - DNA, 74 bp, Homo sapiens
tcagagctgaggtacttcgtgaagcactcttactacttcttaaattcactgttgccaaatggtggttcagggaa

SEQ ID NO: 547405 - DNA, 51 bp, Homo sapiens
tctatgtactgcgcctggatgtggccagcaagtctggaaaagtttgaaatt

SEQ ID NO: 547406 - DNA, 98 bp, Homo sapiens
cttgccgcacaaaaagctagagagatctgggcacgaaagcttctctctgtcccttggcttctgtgtggtcccagaagatatgcctcctccagtttcaa

SEQ ID NO: 547407 - DNA, 100 bp, Homo sapiens
acgttttggaacctcgtctttttattgacggtgtcttgtgtgaaagatgagagatgttcagttcaaccatctcactcgcttcattggcgcctgcatagac

SEQ ID NO: 547408 - DNA, 75 bp, Homo sapiens
gcttgccctggtcttgctcggccgatgaagtgcagaggtttttttctgggattaatgaaaatcaagttccatcct

SEQ ID NO: 547409 - DNA, 87 bp, Homo sapiens
agaactggttctacacgcgagctgccccctacagaagctaagcagcatggacccggccatgctggagcgcctcctcagcttggaccg

SEQ ID NO: 547410 - DNA, 97 bp, Homo sapiens
ggctgcgggaaatcgggctgaagcgactgagtccgcgatggaggagataatctgaatgctggctggggcagaaaattactaagatcctgtggaagtg

SEQ ID NO: 547411 - DNA, 82 bp, Homo sapiens
agctccagagcgacgggaaacgaaagcttcctgcctgacacagctcacttcaagaagtgcacaatgtcagaacgtggaatta

SEQ ID NO: 547412 - DNA, 49 bp, Homo sapiens
gaggaccctgcggactactgcaaaggtggggtggaagacaacccgtgag

SEQ ID NO: 547413 - DNA, 96 bp, Homo sapiens
tagaccagctccaacaggattccatggtagctgggatgttagggctcagggcaaatttattcggatcaactttgatgtaactggctatatcgttgg

SEQ ID NO: 547414 - DNA, 82 bp, Homo sapiens
catttcttggaattggactgtgggcatggaatgaaaaagtgctgaccttaaggaaagagccaaaatgagttccagtgaagtt

SEQ ID NO: 547415 - DNA, 75 bp, Homo sapiens
ccgccggttcgcgtctctctgctgcggcgcggggaccgctgtgctctcggtcaaaatgcagatcttcgtgaaaac

SEQ ID NO: 547416 - DNA, 98 bp, Homo sapiens
ggagaaaagcgaaggattgtggtcccgcctcacctggggtatggagaggaaggaagaggtgtcatggagaaactccagctgggcccagagattctgca

SEQ ID NO: 547417 - DNA, 90 bp, Homo sapiens
actcttggcgccaccgcctcatgcactgtgtagaaggtggtggtgttgccatggggatgtataatcaagataagtcaattgaagattttg

SEQ ID NO: 547418 - DNA, 76 bp, Homo sapiens
catttcacgaagctaagcacaggacagaaggccatccagtgaagagagagagactgaaatatctctgaaggattct

SEQ ID NO: 547419 - DNA, 100 bp, Homo sapiens
gcaagcccatgtgtgttgagagcttctcagactatccacctttggatttctgcacctaatgaatttgatgtcatgtttaaactggaagtccccagaattc

SEQ ID NO: 547420 - DNA, 83 bp, Homo sapiens
cgagctgtcagagcccggggacggcgaggccctcatgtaccacacgccgccaccggcacggccaggccagcatggtggaccac

SEQ ID NO: 547421 - DNA, 82 bp, Homo sapiens
aagctaaagaaatttctacacctacccattggtctaaacttgatccaaagacaatgaaggtgctactttgaatgataaggat

SEQ ID NO: 547422 - DNA, 75 bp, Homo sapiens
tttctgtgaagtccatcttaagacttcagtgccctgaacggttagagaaattaatgaaggagctccaccaggtgc

SEQ ID NO: 547423 - DNA, 50 bp, Homo sapiens
tggagtgcctccaaaggttgctgagtgatcagggccaaagcggtcagtga

SEQ ID NO: 547424 - DNA, 98 bp, Homo sapiens
cttactgaaggacatgattcagactgtcccggacccagcagctcatatcaagttttaacttctagtcatggcgaatgatcgcaggagagcacagactg

SEQ ID NO: 547425 - DNA, 100 bp, Homo sapiens
cggcagcagcccgacgcaaaccaaggatctggggatcttcgcactatcccaaggtacatgtcccagagcaagcacacggaggcccgggagctcatgtact

SEQ ID NO: 547426 - DNA, 75 bp, Homo sapiens
gtgagatcgtcagcgctgactccatgcagagtggagactgctgcacggactctggaaccatgaacatatttgatc

SEQ ID NO: 547427 - DNA, 100 bp, Homo sapiens
gtggtcagagcgagtctcggagaagatgtggtggcttccgtttgttggtggaggaggtggcaggcctcggcggttcgagaaatggctgctactaccttaa

SEQ ID NO: 547428 - DNA, 96 bp, Homo sapiens
gccacggtgcccagccaccaccagttccttgtagaaaaagaagacatacagccaagaaacatgaaaaacagctcatcatcattgatcattagagaa

SEQ ID NO: 547429 - DNA, 79 bp, Homo sapiens
caaggaggaaattgtgatctgcgatcgagcctcggtcaaggagcaggggaaatgctgtctgtagctgagcacttcctgg

SEQ ID NO: 547430 - DNA, 98 bp, Homo sapiens
gatccggagcagccggggtcggagcggtaccttggccatgtagaagttgatgaatcaagaggaatgcacatctgtgaagatgctgtaaaaagattgaa

SEQ ID NO: 547431 - DNA, 83 bp, Homo sapiens
tgaaggtgaagaagatgaagatgatgatgaaggggaggaaggagagtttcctgctctacgaaacgcactcttttgccttgaag

SEQ ID NO: 547432 - DNA, 100 bp, Homo sapiens
cgggagtcgcggaacagcaggcccgagcccaccgcgccgggccccggacgccgcgcggaaaagagctctcgatgttctgaagtatgaggaagttgacatg

SEQ ID NO: 547433 - DNA, 100 bp, Homo sapiens
ctcccagatgccttccctctctgttttgtctgtgtgcacagaggaatcatcacctccaaatactggtcccacggtgggaagaagagcgctatcctgaagg

SEQ ID NO: 547434 - DNA, 75 bp, Homo sapiens
tccccgcggcgcaggaggcggtggagcgcagagcgggcgagcgcgtgggtaattccagaattgattggccatacc

SEQ ID NO: 547435 - DNA, 82 bp, Homo sapiens
ggccggaggagtcagctgtgtgtccagaacgtgccatggagacgcttaacggtggttgtgggaagagaagtttgcagaactg

SEQ ID NO: 547436 - DNA, 75 bp, Homo sapiens
tctgaaaggtggaatcctactcagaatgtgaggggcttggaagaattctgtggaagagtggacaacagaagactg

SEQ ID NO: 547437 - DNA, 98 bp, Homo sapiens
gggcccaggcccagggaccaggcggaggcgtcgcgggagcctttggggcaccacagagatgcgggtaagaatgattgatgttggctgatattggagtg

SEQ ID NO: 547438 - DNA, 75 bp, Homo sapiens
cggcaggcctggacttccagtgctcagagggcggggagaatctcagtcaccgagacttggagccagaatctgagc

SEQ ID NO: 547439 - DNA, 82 bp, Homo sapiens
cttcgctccggtcctcggatcccgagcgcggggaggcagaccgggtgctttcttctgcgacctggtactcatctacctcatc

SEQ ID NO: 547440 - DNA, 82 bp, Homo sapiens
gtcctcgcttgcagttcagcgaccacgcggatgtgggtggcttcttcaaaaacccagagccagagctgcttgtgcgctggta

SEQ ID NO: 547441 - DNA, 75 bp, Homo sapiens
cttatgccagggaccaggttaccctaacagcaggaaggttgtatggctgatcactgggaaactgcacctcgtcac

SEQ ID NO: 547442 - DNA, 75 bp, Homo sapiens
ctgattgggacaacattcagacccatttccagtcatgagagaatgcagttgaaactaattttgtggatagagaaa

SEQ ID NO: 547443 - DNA, 97 bp, Homo sapiens
atttccaatcagatagacttcatcatctgcctggggggagacgggacgctgctgtacgcttcctcgcttttccaggcgttcaatgtcatcaatggcg

SEQ ID NO: 547444 - DNA, 75 bp, Homo sapiens
ccaagagacaggcagctcaccagggtggacaaatcgccagagatgtgagaaggaagcaccctcactatgtggctc

SEQ ID NO: 547445 - DNA, 100 bp, Homo sapiens
gccacctcaaggcccacctgcgccggcacacgggtgagaagcccttcgcctgcacctggccaggctgcggctggagttggctcgagagcatggaatccga

SEQ ID NO: 547446 - DNA, 87 bp, Homo sapiens
taatgacaagtgtttggacaatctctgtgatcctgacattgatgctgccagtgccatgatgcttttgaatactccccctgagataca

SEQ ID NO: 547447 - DNA, 75 bp, Homo sapiens
tgccttctgattctaactgcaaagtttaaggaatttctggggacctacaataaacttacagagacctgctttttg

SEQ ID NO: 547448 - DNA, 131 bp, Homo sapiens
ccactttgcattgactggaaacaatggcatttacagaaagagtcaacagcagtggcaacaggtaatatgcacgtgtcactagctgaggccctggaggttcggggtggaccacttcaggaggaagaaatatg

SEQ ID NO: 547449 - DNA, 100 bp, Homo sapiens
ggagaatgaactgaaaataaatgctgtgttttcagagagtgaccccatgccacagctggatgtgactgaggccaacaaggagttcatggaacagagtgag

SEQ ID NO: 547450 - DNA, 101 bp, Homo sapiens
tttggaggtgcagatgatatctcttcagggagtgatggagaagacaaaccacctactccaggacagcctgttagtgatgtgcagctgatcaagactggaga

SEQ ID NO: 547451 - DNA, 83 bp, Homo sapiens
tctgcagatccactccttcacagctataccaaacttaaagaataccaagctgctattttacacttgaagagggagcacaaaga

SEQ ID NO: 547452 - DNA, 80 bp, Homo sapiens
tagtgtagtgtgcaagtattttcagcgagggtactgtatttatggagaccgctgcaggttcttctgtgtggcagttcaga

SEQ ID NO: 547453 - DNA, 99 bp, Homo sapiens
ggtggctgatcttcaggatcatgcttggagcaaaattccgggtagatatgcctggctcaggcagtgcattcatccccaccatcaacgccatcacgacca

SEQ ID NO: 547454 - DNA, 98 bp, Homo sapiens
aagagccttccagacctcccgccacccaagatgatatgaaaaacagtagctccgtatcgaatacattgacaaatggatgtgtcatcaatggacatttg

SEQ ID NO: 547455 - DNA, 97 bp, Homo sapiens
cagaggagccagtgcgggaaagaggagatgcttctggccaaacaccagagcaccctagaaggtttaactaaaagaatgctcatgtttgacccagttc

SEQ ID NO: 547456 - DNA, 97 bp, Homo sapiens
acctgctcacacttcagaatagagaagccggagcggttgcagggcacacattactcggtgcagtcggacatctggagcatgggcctgtccctggtgg

SEQ ID NO: 547457 - DNA, 98 bp, Homo sapiens
gggaagcagttagacggctgccgggcggcggctgccgcgcggcacacaatatggttctttggtgtcgctgtccctaacgtcacatactggttgggtga

SEQ ID NO: 547458 - DNA, 90 bp, Homo sapiens
tacggctacccctacaacgcgctcattgggcccaacagggactactttgtgaaagggaagatggaagagttgagtcaggccctggctagt

SEQ ID NO: 547459 - DNA, 100 bp, Homo sapiens
ctggcggcgacgcggttgctgcggggctcgggttcttggggctgttcgcggctgaggagcatcagatccatgctgctgctgactcggagccccacagctt

SEQ ID NO: 547460 - DNA, 82 bp, Homo sapiens
ctcagtttggggcaagtttatacgggcaacaaaaacctgatgttgttgttaaacgacaagaagctttagcagctgctcgact

SEQ ID NO: 547461 - DNA, 90 bp, Homo sapiens
cggaatcccgcgcgctgcccacgattcgcttctgagtgtgttgaagagatcctaggatacctgaaatcctgctttagtcgagaaccaatg

SEQ ID NO: 547462 - DNA, 100 bp, Homo sapiens
aagaaaacagatcttctccagattggcagaaagttgatataggtggacttttttacaggttatcaatactctggctgaccatcatcatcgtgggactgac

SEQ ID NO: 547463 - DNA, 100 bp, Homo sapiens
agtccagcagctgctacacaacaagttcgtggtcatcttgggggactccaatcctgtgccggtatcagaatatctggaacatcaacctgcagttgcggcc

SEQ ID NO: 547464 - DNA, 83 bp, Homo sapiens
ggcggggtcggcgggagccagcgagccacgggagcgagccaggtactccaaagattcaggtttactcacgtcatccagcagag

SEQ ID NO: 547465 - DNA, 50 bp, Homo sapiens
atgtgagtccctgtctgagctcaagatacagcttggatcgagcttcctgc

SEQ ID NO: 547466 - DNA, 100 bp, Homo sapiens
tgcttggtcacaaggacatcgcacagtaaagcttgttccgtggtcccagtgccttcagaacttatttgatgttgaaacccggcatgtgtttatcggtgac

SEQ ID NO: 547467 - DNA, 100 bp, Homo sapiens
gcttcattaagcttaactgagaagtatttctctgtagagggattttatggatccaacaatggacaacaccaagcatatattaaactatctgatgcccatc

SEQ ID NO: 547468 - DNA, 98 bp, Homo sapiens
ccagcccctggatgtgctgaagactcgcctgatgaactccaagggggagtatcagtttgatgaaggccggaacaactttgaaggggaggtcaccaagg

SEQ ID NO: 547469 - DNA, 50 bp, Homo sapiens
gctcatccctaagaagagggtcagactccaggggcctgaagcccctgcag

SEQ ID NO: 547470 - DNA, 75 bp, Homo sapiens
catcaaagcatggatcagacatcacacgatttttgaagtggtttcaagaggtgatgtggaactcatctgtgacta

SEQ ID NO: 547471 - DNA, 82 bp, Homo sapiens
gaggaggaggaggagaaaattcccccagattcgggcaggaggagtatttgaagacttctgagcggaggagtcgcatgtcaga

SEQ ID NO: 547472 - DNA, 98 bp, Homo sapiens
tcttgggacccttgcatggtgtttcaaagggtggtgaagaactaagctcccctcccacccggtcactccgtccagcaagcacgcagacagcaagcccg

SEQ ID NO: 547473 - DNA, 100 bp, Homo sapiens
tccatagtcaccacttcacttcacctctttctggaaaccaggtccaggtgcaggtacagcagtctccgcaacaggtctcggctcagctctccccacaact

SEQ ID NO: 547474 - DNA, 87 bp, Homo sapiens
agactgttactacaacctcgggcgtctggttaatttggagtggcccctggagtcagtttcctacaccatccgaggccccacccagca

SEQ ID NO: 547475 - DNA, 101 bp, Homo sapiens
ctgctctcccagcttattgctgagttgggtatggataaaaaggagccccctggtgaaggccatcttccatgcctgcagagccatgcatgcctcactccctg

SEQ ID NO: 547476 - DNA, 83 bp, Homo sapiens
gccgcagctcctccagcggcacctgcactccgtggaccacaatcacaaccgcaggctcatgatggagcagtccaagaagtcct

SEQ ID NO: 547477 - DNA, 100 bp, Homo sapiens
cgaaagcgttggagaggtgttaccggaacggcggcgacaagggtgttcccgaactagagtggagcatgtaacttctaatgccagcgatagtgaaagtagt

SEQ ID NO: 547478 - DNA, 83 bp, Homo sapiens
caaagaccagccagctaaccctacagaaggggcaagctctgtgtgattgattggaagacatcagagaaaccaaagccttttat

SEQ ID NO: 547479 - DNA, 100 bp, Homo sapiens
ctgtgtccaaccccatcacataggggtttctgttaaggaactcgatttatatttggcatactttgtgcatgcagcaggtccacaaggcgattacaatttc

SEQ ID NO: 547480 - DNA, 83 bp, Homo sapiens
tccagttagtggatatagcacaccatccccagccaatagcctgggctggaagctcttctacgtcacaggctgcctgtttgtgg

SEQ ID NO: 547481 - DNA, 83 bp, Homo sapiens
ccagaatgtgcgtgagccaagcagctgtggggaaacgttgtctggatgtaaacaggaacatcgataagtagtgtaaaaacttg

SEQ ID NO: 547482 - DNA, 88 bp, Homo sapiens
tactgggataattatccaaataaattgcaagcattctatccaaatggtgaaggacttaactaagtacttggatcccagtgggctcggc

SEQ ID NO: 547483 - DNA, 89 bp, Homo sapiens
tcaacttctaccagttcctcggggtgcagcagaatcatgtcaaccctgccatggacttcacgcagactccacctgggatgttggctctg

SEQ ID NO: 547484 - DNA, 98 bp, Homo sapiens
tagaagtctactaatggacagttagtcacccacctacatgttgaggtactactgagcgagtgtgcttgatccagggaacggttgaagcactgaatgca

SEQ ID NO: 547485 - DNA, 75 bp, Homo sapiens
atcccataatcacagaagaaatgccactgttggagattacctaaaaccagatccatggatgatcttctttctgcc

SEQ ID NO: 547486 - DNA, 87 bp, Homo sapiens
cctatgagagatacgattgctacaaggtccccggcaacttccacgtgtccacacacagtgccacagcccagccacagaacccagaca

SEQ ID NO: 547487 - DNA, 51 bp, Homo sapiens
ggagaaactgaaggagctagagcactggccctgaaggaccctgttcataca

SEQ ID NO: 547488 - DNA, 83 bp, Homo sapiens
gggcagccgagaaggtgtccgaggcccgcaaaaccctaccattgaccatgccctgctggacatgcccttcctttgactccctg

SEQ ID NO: 547489 - DNA, 100 bp, Homo sapiens
tggccgcgggcaacctcggagcttatactcctcccagtgacgggtctggagtgcgtgggggaccggctgttggcgggagatggtaacctgcacctcaatg

SEQ ID NO: 547490 - DNA, 74 bp, Homo sapiens
gccggccccaacacggaccttggttcttcattagaagctgtaaccacctgtgaactatgtaaagagaagttgga

SEQ ID NO: 547491 - DNA, 100 bp, Homo sapiens
acctgtctggagcaaggaaaagatccctggaatatgaagggacacagtacggtagtcaaacccccaggatgaaactgattccaagacagcctccccgtgg

SEQ ID NO: 547492 - DNA, 98 bp, Homo sapiens
catgctctttgtcactccccggcggcagcacgaaagtaccataactgggaggtgcagatggggcctcggactctacagacagcccagcctcctgccag

SEQ ID NO: 547493 - DNA, 98 bp, Homo sapiens
tccgcatggtgcgcatggaccgaaggggaggcacttggaaattactgggttcagtggtttatgctcacagcaaggatcgccccaggacattcgacatg

SEQ ID NO: 547494 - DNA, 50 bp, Homo sapiens
ccggcatctgcaaaattcggccgcccaagagctctgaggaacatgaatac

SEQ ID NO: 547495 - DNA, 89 bp, Homo sapiens
acgaccaaacaaacgcaaggactggactccatgccgaaggtatctggaagtcgtgacacgaaaagaggcacagttagatgaagaaggac

SEQ ID NO: 547496 - DNA, 101 bp, Homo sapiens
gtcggaaagcgacaccgaggaattctatgatgcccctgaagatgtgcacctagggggcggctaccccgtgggatggtgagaacaagaccaagattggaaag

SEQ ID NO: 547497 - DNA, 100 bp, Homo sapiens
gtttgagaacattcgaaaggacctggagaattccccacaaacctttcattataatcgcaagggcctggagcagtggtggccccaggttccatcacaggcg

SEQ ID NO: 547498 - DNA, 100 bp, Homo sapiens
ccgggagcttcgacttcagatgcttattattgataactttatacctcgggattatcaggatcagttccatgacaagaccccttatacgattatgtttggt

SEQ ID NO: 547499 - DNA, 50 bp, Homo sapiens
agcgccttcatcctggggctgcgatgcaaccccaaggtccaggtggaggc

SEQ ID NO: 547500 - DNA, 75 bp, Homo sapiens
gccttcgcttcacggcgccgagccgcggtccgagtgtcgtgaaaactacccctaaaagccaaaatgggaaaggaa

SEQ ID NO: 547501 - DNA, 82 bp, Homo sapiens
ttccccacgcaaccccagatccatttacactttacagcctggtactgtggcgctccgtgaaattagacgttatcagaagtcc

SEQ ID NO: 547502 - DNA, 100 bp, Homo sapiens
tgcgaggcccgcggccgccgactgctgcgaggggacaccgtggtgtttaaggatggccagtactggatccgaggccggacctcagtggacatcatcaaga

SEQ ID NO: 547503 - DNA, 100 bp, Homo sapiens
gaggcacggacaacatcaccgtgaggcagggggacacagccatcctcaggctatttagcagacatgacccacaagcagaagaagcattagcaaagaggag

SEQ ID NO: 547504 - DNA, 75 bp, Homo sapiens
aagcaatgtggcaaaacgaaaaagctcaatgcctcagaaattcattgcaaatgtgggtttacgatgaagatgttg

SEQ ID NO: 547505 - DNA, 75 bp, Homo sapiens
gtcctttgtcttcatgattcagctgatgctcttctggagactatcaagaaatccaagtggtaatgggcgaagttt

SEQ ID NO: 547506 - DNA, 75 bp, Homo sapiens
acacgtgcccctacgtgcacaacatcacccgcaaggtgggtgcgggaatttctgaatgatgaaaacaaaggcctg

SEQ ID NO: 547507 - DNA, 82 bp, Homo sapiens
ggagcctcagttggaagcagccgatccagcctgcggagcctgtggggcaggtgtgggcaagagcagtttactgttgcgtttt

SEQ ID NO: 547508 - DNA, 82 bp, Homo sapiens
catctggggaaaaggcaaaaatcccatctaccgcaactctcagttcgagagtaaagggagtgcatccgccccaacccttttc

SEQ ID NO: 547509 - DNA, 78 bp, Homo sapiens
tttggagctggggctactgctggcaacattcctttgattatggaagattcccacaagagtaccacgtcagagacagca

SEQ ID NO: 547510 - DNA, 74 bp, Homo sapiens
aaaaagccctcagtaccagagacagaagcagatggattcgtccttttagatgacttcaaacctgcttctattga

SEQ ID NO: 547511 - DNA, 100 bp, Homo sapiens
gccagtttgccaggagctgctaccaagatcctgttactttacagcttgcctgtgtttgtgatcctggatacattgggaacaggcacggtctcctggtacc

SEQ ID NO: 547512 - DNA, 100 bp, Homo sapiens
agagctatttcccgcaccaatgagaatgacccggttcgtttaccaagcaaaagttgggggtcgctggttcccagccgtctgcgcacacagcaagaagcaa

SEQ ID NO: 547513 - DNA, 83 bp, Homo sapiens
caaaaaaaaagtctgctactactacgacggtttggtgcacctcgatttggaggaagtagggcagggcccttatctggaaagaa

SEQ ID NO: 547514 - DNA, 78 bp, Homo sapiens
cctatatatccttttgcacggccccagatgaataccaggtggatccttttcataccttatttggaattgctggattgt

SEQ ID NO: 547515 - DNA, 82 bp, Homo sapiens
ccagcatgtatcagccgaggtggagctgcggggccctggcatgaaaggtcagcccaaggccaaccccactgtcactctgttc

SEQ ID NO: 547516 - DNA, 90 bp, Homo sapiens
ggccactgcgcagaccagacttcgctcgtactcgtgcgcctcgcttcgtctttccagtgtcagcctgcctttagctaagataattccaat

SEQ ID NO: 547517 - DNA, 100 bp, Homo sapiens
ccggtcaagatgtcacacagctccagtggctcagccagtctgagtcaggtttctccagggaaagaaacagatgccatgcagttgctgaagaggaagccag

SEQ ID NO: 547518 - DNA, 75 bp, Homo sapiens
gcagtgacagtgcagaaccccggcgcggcccttggtctctttaatgtggggaacaagctgctggtaagcctggac

SEQ ID NO: 547519 - DNA, 100 bp, Homo sapiens
aaaaggtgaagccaagaacagcattactgattcccaaatggatgatgttgaagttgtttatacaattgatgcggaaaacgccatgcggtacataaatggg

SEQ ID NO: 547520 - DNA, 82 bp, Homo sapiens
ggctccctgctcagctcctggggctgctaatgctctgggtctctggctctgtgacctcctatgtgctgactcagccaccctc

SEQ ID NO: 547521 - DNA, 75 bp, Homo sapiens
gcgagacggcggcaggacggcggcagagtgtgaacatggctacgcctcttcattcccgtccatgccgagcccccg

SEQ ID NO: 547522 - DNA, 75 bp, Homo sapiens
catcgtctttccgtcctctgaggcgacggccgcggctgcacagatgccacttcaaatgaacaacaagagcttttc

SEQ ID NO: 547523 - DNA, 75 bp, Homo sapiens
gtccaatgtcaccccaggatgatgaagcagaagaggagatcccactggcattgttggtggtaggcctgggcgggg

SEQ ID NO: 547524 - DNA, 71 bp, Homo sapiens
gggatcaggaagtggagaagtcaagaggacactgaagatcacagactgttatcaatactctggctgaccat

SEQ ID NO: 547525 - DNA, 100 bp, Homo sapiens
atgccggcctattttcagaggccggaaaatgccctcaaacgcgccaacgacaatgcagatcttcgtgaagactctgactggtaagaccatcaccctcgag

SEQ ID NO: 547526 - DNA, 98 bp, Homo sapiens
gccgagagcctcattggagtctatcctgaggttaaagtattgcacaatcagctggtccttttccacaatgccattgccgcttactttgctgggaatca

SEQ ID NO: 547527 - DNA, 76 bp, Homo sapiens
ttaaagtcttgtatagcaatatgcttggagaggccataggaaaaggatacagagtagagtttcatgaacctgaaac

SEQ ID NO: 547528 - DNA, 87 bp, Homo sapiens
gggagagggggagtgcgcggcggccgcagctgccacaaaccaggttacgagaagtttctgagaagctgaacaaatataatttaaaca

SEQ ID NO: 547529 - DNA, 83 bp, Homo sapiens
cgccggttccttgcggtcaagatgctgcaaaacgtgactccccacaataagtacagcacgtgggagccagaagagcacatctt

SEQ ID NO: 547530 - DNA, 88 bp, Homo sapiens
gggtggtataaaatggcggatttcgaagagttgaggatttgagagggaagatctgatctcctagaattagagttggtacagaaaccat

SEQ ID NO: 547531 - DNA, 100 bp, Homo sapiens
atccacgccagccgcaccatgccgctcctaagcctgcacagccgcggcggcagcagcagtgagaggaagccatcttcgacaagagcacagggaaggttgt

SEQ ID NO: 547532 - DNA, 90 bp, Homo sapiens
tgtctcggatcgaatccctcacgcgggcgcggatcgaccggagcagagagctggcgagcaaggttatgaagacagtatggagtttccaga

SEQ ID NO: 547533 - DNA, 74 bp, Homo sapiens
gatttatggcagcctcactcccagtagtttctgcatttagtgagataaggaaggtgggagtcaatcattttgac

SEQ ID NO: 547534 - DNA, 75 bp, Homo sapiens
ggaactttctatgatcaggcagttgtcagtaccacttccgctgtcacggtaaagtccgccatcagaagactgaag

SEQ ID NO: 547535 - DNA, 83 bp, Homo sapiens
cgcagcctcttcgagcgccgcggacgcgtcatcgagtgtgacgtggtgaaaggctgatcagctgaccgaagaacagattgctg

SEQ ID NO: 547536 - DNA, 104 bp, Homo sapiens
caagaagtgccaggtggagcggcaggaaggccactcacagggcttcaacaagctagctgagaaacctgctcctccaaagccagagcccaagcctaaaaaggccc

SEQ ID NO: 547537 - DNA, 75 bp, Homo sapiens
cgctttccatggagagtaaaggccggctggaaagtccccaagcgactcaagaacctggagctagctgctgtgaga

SEQ ID NO: 547538 - DNA, 75 bp, Homo sapiens
gcgcctgtcccgggcagcgcagccccggccgcagggggggccctcagcctcttggccttgaacgggctgttcatc

SEQ ID NO: 547539 - DNA, 101 bp, Homo sapiens
ctttgttcacaccaacttgcgcaaaaacaacagacagccctatgctgtcagtgaattagcaggatcaggcaaaaatgatcatgccgaaaaagtggcggaaa

SEQ ID NO: 547540 - DNA, 82 bp, Homo sapiens
tgactacttgacacactggctcgaagcgatccaagcagcggaagttacagcagaaggccttccgcaagaggcagctgaagga

SEQ ID NO: 547541 - DNA, 74 bp, Homo sapiens
aaaacaccgctttatcctgctgcgatccccagggaacaaggagacgttgatccagcagcacgtgtcatttcatt

SEQ ID NO: 547542 - DNA, 100 bp, Homo sapiens
gagctgtggataacgggaggtgaatttccatgtcaacatagtcctggtatcactggacaggccatggctccacggtcccggcgacgaaggcacaagaaac

SEQ ID NO: 547543 - DNA, 90 bp, Homo sapiens
gagcagaaattggaggctcagcatagaacggccggtttgtgggcgatgctgaccttgaaagacagaaattttcagatttgaaactcaacg

SEQ ID NO: 547544 - DNA, 90 bp, Homo sapiens
cccttttcatcaggacgggaaggtcatgtccatcctgttgcatggggatgctgcatttgctggccagggcattgtgtacgagaccttcca

SEQ ID NO: 547545 - DNA, 75 bp, Homo sapiens
ggggaagaaggagacagaaacgaaatatggaatccgaattgataatctttcaagcatcaacaacagcaacttgtg

SEQ ID NO: 547546 - DNA, 49 bp, Homo sapiens
ggggaggcggcggcccagccacgatggttatgatgtgattgctcaagcc

SEQ ID NO: 547547 - DNA, 83 bp, Homo sapiens
tcgtcgccctcgagatgattatcgtaggaggagtcctccacctcgtcgcagataacgaaggaggcccaacttcattcaataag

SEQ ID NO: 547548 - DNA, 100 bp, Homo sapiens
tggagataacttctccatcaccaaggtgctgagacaggtgtgcaaagttctgaccttcagtggatgagaaatgtcatcagaatgatgcccctgataacct

SEQ ID NO: 547549 - DNA, 75 bp, Homo sapiens
ggaataggtgtatcaagtaatggtgcaaagcctgaaactggaaatagcaaaggctatgcatttgtggagtttgag

SEQ ID NO: 547550 - DNA, 50 bp, Homo sapiens
cagacacctcgctggagaccccatgggccaattcctgtccccccagcagc

SEQ ID NO: 547551 - DNA, 114 bp, Homo sapiens
taactgtgcaatgctacatgtacgtggacttatatcagaccagtgtggatcttcaagaatcattgaatcctttgtgcattgaagactttagattcctctctgcggtagacgtgc

SEQ ID NO: 547552 - DNA, 75 bp, Homo sapiens
cttccccgttagaactcgcgtttccacttcagagatctgccctcccaggcccaatacttcaaagcatcctacctc

SEQ ID NO: 547553 - DNA, 75 bp, Homo sapiens
gccgttactgattgagctacgaggaccaagtaatagctcttcaagtctgcaataaaaaatggcctccaacaaaac

SEQ ID NO: 547554 - DNA, 83 bp, Homo sapiens
cgcgaggtggcggtgctgaggcacctggagaccttcgagcaccccaacgtggtcagatgaatggaccaggtagtttgtttgct

SEQ ID NO: 547555 - DNA, 101 bp, Homo sapiens
tttctaaactttatgaagaaggttccaacaaaagactttttaatgttgatcggcatgttggaatggctaaagtaaataatgccagcctgattggactgggt

SEQ ID NO: 547556 - DNA, 103 bp, Homo sapiens
agaaaatggcattggaacagtgggaatcagcaattttgcacaggtacggttcctggagcagcagaacaagatgctggagaccaagtggagcctcctgcagcag

SEQ ID NO: 547557 - DNA, 75 bp, Homo sapiens
cagtaatggtggatgaagttgttcattgtttgtcaccacaaaaaggacaggtcaaagttggaaattgtaatactc

SEQ ID NO: 547558 - DNA, 101 bp, Homo sapiens
aagccatcacctggatgcctacgtgggaagggacctcgaatgtgggaccccagcccctctccagctcgaaatcgtgtcccaccgaggaggccctgatcttg

SEQ ID NO: 547559 - DNA, 75 bp, Homo sapiens
cggggtggtggcttctcggaaccgagccccgacaggctatgacgtaagctccaaacgagaatggaagccgctgga

SEQ ID NO: 547560 - DNA, 90 bp, Homo sapiens
acagaaagagtcaacagcagtggcaacaggggcaccaccacgaggcgatttgtgggccataccaaggatgtgctgagtgtggccttctcc

SEQ ID NO: 547561 - DNA, 76 bp, Homo sapiens
gaaaatggagaactctgtgatgtcacactcaagagctggtggagttgagatctataatggagatcgtaaaataaag

SEQ ID NO: 547562 - DNA, 80 bp, Homo sapiens
taaaaagaactcttaacggccgatgcagctcttccaaagctaaggagtgcctgtgaagaaaacggggtattgccctgagg

SEQ ID NO: 547563 - DNA, 117 bp, Homo sapiens
ttggaggatcacctagtaacacacgctacctctttctgggtgactatgtggacagaggctatttcagtatagagatggactagaggcttttaccagatttcttaaaactgaattcag

SEQ ID NO: 547564 - DNA, 100 bp, Homo sapiens
agacgatgagacagagttgcgaccgcgcggcaggtatccagtagaaaaagcactctccagtgttcatctgtggaactggatggttcctacttgagcatag

SEQ ID NO: 547565 - DNA, 100 bp, Homo sapiens
ggagatttaccccagaagacttaaaaaagatagaatattatctggaagaggagcaagggcctgcagatcatcctacggaaagaacacccggaaatgaaag

SEQ ID NO: 547566 - DNA, 75 bp, Homo sapiens
tacagaagaacaaacagagactgcgaaacgatcctctcaatcaaaataaggaaaggcagcaacaggtggaagctg

SEQ ID NO: 547567 - DNA, 100 bp, Homo sapiens
cacttgtacgcctgtggaacgggggcttttcatccaatttgcacctacattgaaattggacatcatcctgaggaaatttatcagtggtgtggttcctcgt

SEQ ID NO: 547568 - DNA, 100 bp, Homo sapiens
agcaggcacagccccgcaggatcccaagccctgcagactaccgcagccagcgatatttcagcagttgaatcagttgaattcacttcatcaagaaactatc

SEQ ID NO: 547569 - DNA, 51 bp, Homo sapiens
aagctttactggtgttccagccctaagcaattaccagctctggctgggtcg

SEQ ID NO: 547570 - DNA, 119 bp, Homo sapiens
gaccgaggcccccctgaaccccaaggccaacagagagaagatgactcaggggactcgggcaagggtgccgaagatagacaagaggcacacagagacagaccaactggcagccaggcagc

SEQ ID NO: 547571 - DNA, 98 bp, Homo sapiens
ttccggatcatctaccccggccacaggcacgagcacatgccggacagctatactttgaaggaagcagaattgaagatgggaagttcattgggactgtg

SEQ ID NO: 547572 - DNA, 90 bp, Homo sapiens
cggcgcgcggccgggctggcgatggaagatggaaggaaggagcgcagcggtgctggagaatctggtaaaagcaccattgtgaagcagatg

SEQ ID NO: 547573 - DNA, 73 bp, Homo sapiens
tgtgatgggagattcaaagtccagcatggaggaatggaagttggatacactttgtgacttgtacgagacactg

SEQ ID NO: 547574 - DNA, 50 bp, Homo sapiens
cggaccgagcgcctcgacctcggtctgagtggctgtgtggagtggtgtga

SEQ ID NO: 547575 - DNA, 74 bp, Homo sapiens
tgagtccaaagtaccctccttctactaccggcccacgccctccgactgccagggaacgcccttttgcttgtgac

SEQ ID NO: 547576 - DNA, 78 bp, Homo sapiens
cccatcctataagtggagagaggaacacagactctcagcaactcagcagaaataatcatgggccagactgggaagaaa

SEQ ID NO: 547577 - DNA, 100 bp, Homo sapiens
tgcagagcactgcgctgtcagcgatagcccagtggatggccattccaggttggatggcaagcatgtggtgtttggcaaagtgaaagaaggcatgaatatt

SEQ ID NO: 547578 - DNA, 99 bp, Homo sapiens
tggcgagcgcccggattggggatgagtatgcggaggacagctctgatgaggaggatgatcggctgaatgtaacagaggaactaacgtccaacgacaaga

SEQ ID NO: 547579 - DNA, 98 bp, Homo sapiens
gggaggtgaatttccatgtcaacatagtcctgattggtgctgaagacatggacggcttccaggcagacacggaggaggaggaagaggaggagggcgac

SEQ ID NO: 547580 - DNA, 99 bp, Homo sapiens
gtgggattgctagatcacatgggccagccaagtctcgggatggtgaacgtactgtctattgcaacgtacacaagcatgaaccccttgtgctgttttgtg

SEQ ID NO: 547581 - DNA, 80 bp, Homo sapiens
aagatggtgtcaatggcccgaaacacttacagcaattggaacttgcacagatacagcatagagacgctaatctcacagct

SEQ ID NO: 547582 - DNA, 100 bp, Homo sapiens
ccggcaaggtgctgctggacgacacggtgccgctgacagcagccatcgaggcgagccagagcctgcagtcccacacggagcggaaagaatgtcggagcgg

SEQ ID NO: 547583 - DNA, 101 bp, Homo sapiens
cgacgtccctcaaaccttgcttctaggagataaaaaggtgatgttctgcaccctgaacacccacaaagtggacatggacaagctcctggggggccagatcg

SEQ ID NO: 547584 - DNA, 75 bp, Homo sapiens
gattgaactcagagaagccgggggtgtccgcaatgttgccagtgtctgtctgcagattggctacccaactgttgc

SEQ ID NO: 547585 - DNA, 75 bp, Homo sapiens
cggcggcccagctctctctgacacaggcaatactgaacactgcgcagcttgcagaggtctcctggcagccctcat

SEQ ID NO: 547586 - DNA, 95 bp, Homo sapiens
ataaaatattctatgtttaccttcaacttcttgttctggccgaatttgccatgtactgataacgtagcattcgatatggaaaggctcaccagaac

SEQ ID NO: 547587 - DNA, 100 bp, Homo sapiens
ctatttacccagaagtagtccatatggtgcacagatgtattcataaaggaagacattagatccagccattgtggccaccaggctctgtggacccatctca

SEQ ID NO: 547588 - DNA, 76 bp, Homo sapiens
gtcctctaacgccatccgcgaggtcccaatgccatttcggtgagcctgtccccaatgggcagatatgtaatggtgg

SEQ ID NO: 547589 - DNA, 50 bp, Homo sapiens
gggagttcccaattaacaatgaagcagacagatctgagaacaattggcaa

SEQ ID NO: 547590 - DNA, 83 bp, Homo sapiens
tgaacctggcatatctgggcgccaagccgcggagcctccagacgggaaggatgcctgtggccctcggagagcacagtgtcagg

SEQ ID NO: 547591 - DNA, 75 bp, Homo sapiens
tctccaccaccgaccgcgtcatcaaaggaatcatattgacaggtcatgaaaatgagaccaaaagatctctggaag

SEQ ID NO: 547592 - DNA, 76 bp, Homo sapiens
cgagcccctacctccccaacggatcgctctcgcccaccgcccgaaccatggactcaccctgtcacccaggttggac

SEQ ID NO: 547593 - DNA, 80 bp, Homo sapiens
ttcagtccagcaggattcggacagcaagcatgtggatgtacatctagttcaactaaagagcattggggagtcagcaatgt

SEQ ID NO: 547594 - DNA, 90 bp, Homo sapiens
tccgaggagataccagtcggtagaggggagtggacatccgccataacaaggaccgaaaggttcggcgcaaggagcccaagagccaggata

SEQ ID NO: 547595 - DNA, 92 bp, Homo sapiens
ccgcgagcacagagcctcgcctttgccgatccgccgcccgtccacacccgccgccagtgcagagcagagcgggcggaggaccccgggcgcgg

SEQ ID NO: 547596 - DNA, 101 bp, Homo sapiens
aaattatttatccaacagctcctcccagatcttgtagaaaatttcagctgtagcccttggactagaagctgaaataacagaagctgtgtacgatgcattag

SEQ ID NO: 547597 - DNA, 100 bp, Homo sapiens
gcgttatgagatcaagatgaccaaggcggtcctttattatcagttggctgccagccagggccacagcctggctcagtaccgctatgccaggtgcctacta

SEQ ID NO: 547598 - DNA, 100 bp, Homo sapiens
cgcggtgtcattctgacctcgctgtgccctccccgagaggattctgtcctttcgtggacgcttctccctggccggctggctcctctggaccctaaacttg

SEQ ID NO: 547599 - DNA, 100 bp, Homo sapiens
ggagcatccagagatggggccctatgtacaagagtgtctggaggagagctcttcgatttcctggcccagaaggagtcactgagtgaggaggaggccacca

SEQ ID NO: 547600 - DNA, 75 bp, Homo sapiens
caaacttcccatccctgacccaggagtgtctgtccatctcagcgtggaagtggttctgaaagatggaagaattga

SEQ ID NO: 547601 - DNA, 75 bp, Homo sapiens
cccgggacatgcatcgtcccctggactctctcaatgaaagccctgtgtaaggaatgtgtagtagaacgttgtcgc

SEQ ID NO: 547602 - DNA, 101 bp, Homo sapiens
ctaaaacagacccacttaaattcaggagttattctctcaattcaccacttggatcacaggaaacccttttccaaagagaaatgaagaagaaaactgtatgt

SEQ ID NO: 547603 - DNA, 100 bp, Homo sapiens
gtgcctctggcagtgacgaggacgaagtgtccgaggtcatgcgcatcgtggataatgttcgtcctgatcgacagacggttatgttttcagctactttccc

SEQ ID NO: 547604 - DNA, 75 bp, Homo sapiens
cgcctatctcttcaagtacatcataatcggcgacacaggattttctgccgtctcttggcaaaaatggcaaataat

SEQ ID NO: 547605 - DNA, 74 bp, Homo sapiens
cgtgaccgagagcgtgaccgagagcgcgaatatcgtcatcgttagaagaacccagactcccatggttatgacaa

SEQ ID NO: 547606 - DNA, 96 bp, Homo sapiens
tgggtttggaggccgcacctgcagcgagtgccaggaactcttctggggagaccccgacgtggagtgccgagggtatcagcatggaagccatgagtg

SEQ ID NO: 547607 - DNA, 100 bp, Homo sapiens
tcttccctccgtgagcgctggcctgggggaaccaaggccccctgatgttgaggacagagcgggatgccaccagcttgtccaaagggaagttccaggagct

SEQ ID NO: 547608 - DNA, 100 bp, Homo sapiens
tctttgacaagtttgagtgttgctggaacggttcggatagaataccctctaccatctgctttggtcagggtgccgctcgaggatttaaaagcaacaagaa

SEQ ID NO: 547609 - DNA, 101 bp, Homo sapiens
cctccccagtggctggggcatttggtgtattctctaccatctctactgctgttcagagcacaatggatggaatacccatgtcaatgaagaatgaaatgccc

SEQ ID NO: 547610 - DNA, 90 bp, Homo sapiens
aggaggaggaggatgagattcttccaaggaaagactatgagaaatgttgctgaagtgctgctgaaagggccagagatgcaaggatttggg

SEQ ID NO: 547611 - DNA, 82 bp, Homo sapiens
cctcggacccatcgccgcttctagaccctactgcggtctcggatattgccgggctgatcagctgaccgaagaacagattgct

SEQ ID NO: 547612 - DNA, 74 bp, Homo sapiens
agcgctgctggggggatctgggcatgagaccccttctcccaggaggggagtgcctccggagccagcgtggtggc

SEQ ID NO: 547613 - DNA, 76 bp, Homo sapiens
tggacagcactttaatattcctgccatcacaaaagctggacaagcgaagatggcccactgcgtgaccttggttcag

SEQ ID NO: 547614 - DNA, 75 bp, Homo sapiens
ctgaggatgagttcctggtggtgctgcgctgtgtggacagggatgacgttgaatgagcggtttgggatcctgaag

SEQ ID NO: 547615 - DNA, 100 bp, Homo sapiens
agggacccggtgacagcgtgagaggttcgcagagggcatggtctagtggcccagtcaggacgcggaaacactccctggaggttctgacccactccctctc

SEQ ID NO: 547616 - DNA, 83 bp, Homo sapiens
tgcagccacgcgggcgagcggctgtgtggatgtcggcgaagccgcgggcgaggcttgggcactgtttaaaggaaagttccgag

SEQ ID NO: 547617 - DNA, 117 bp, Homo sapiens
tgctaagtgtcacgaaatcttctgctgcccgctgaagcaagtacaccacaaagagaacacagagccggaaggtgtcatggagaaactccagctgggcccagagattctgcagcggga

SEQ ID NO: 547618 - DNA, 95 bp, Homo sapiens
agcacttcagccaaagattcctctaccagtgacctactgatagagaatacttcactcactgtcccaatcctggatgtcctttcaagcctccgact

SEQ ID NO: 547619 - DNA, 100 bp, Homo sapiens
ggtttgtcattgagttggaccttagcccatctactggcattgtggatgaacgtgaagccagagaaaatgtgaagagagagcaagatgaggcctatcgcct

SEQ ID NO: 547620 - DNA, 100 bp, Homo sapiens
tgctcaagaagctcaaggacgagggctgccgggcgttctacctggaaggtcagtcttcactgtttccaatggaagatggattcttggatgatggccgtgg

SEQ ID NO: 547621 - DNA, 75 bp, Homo sapiens
aactgcaagaatacctcggcaaattccgacgtcttgaagacttccgagtagatgctggacgtaaagaaagaagtg

SEQ ID NO: 547622 - DNA, 101 bp, Homo sapiens
ctggctgtgctggccttagtgccccaggatcagggaggactgacttggtcaggtactttcagggcctgggccccccaccgaagttccaggtaacactgaat

SEQ ID NO: 547623 - DNA, 98 bp, Homo sapiens
caagtttcctggcagtgtgtgatactgaggaggcatccgtgtcattctggaccttactcccaactaccggggtgagaactcgtggttctccactcagg

SEQ ID NO: 547624 - DNA, 98 bp, Homo sapiens
taacaacagagatctatcaatgtgtgaaatggcctttccccgggtcaagccagcacctgatgaaacttccttcagtgaggccttgctgaagaggaatc

SEQ ID NO: 547625 - DNA, 98 bp, Homo sapiens
gtcagcgatagcccagtggatggccattccaggctgctctttggcgtaaattgcaatcgattagggatcgtttctcagaatcaagttagaagtgagag

SEQ ID NO: 547626 - DNA, 75 bp, Homo sapiens
cgtctgtgggttacgccatctttaagacactggtgaagacatttgaagtatgtgatcttcctgttcgagctgcaa

SEQ ID NO: 547627 - DNA, 96 bp, Homo sapiens
ctcattccttctccagggagagtcgctgcaggctttcaacagacctcacatctttcttcttatgaaattataactccttggagattaactagagaa

SEQ ID NO: 547628 - DNA, 90 bp, Homo sapiens
gaaccagctgagcgctgccatcccggccacgcgggtggaggtgtccgtgtcctgcagggttcatagtggcgtcatgcacgcagactcctg

SEQ ID NO: 547629 - DNA, 75 bp, Homo sapiens
tgagcacatgaccagcttagcttctgtcctaaagattcgagaaatgatggagtccttcgaaggccctcagcctgc

SEQ ID NO: 547630 - DNA, 98 bp, Homo sapiens
tgggaccgtgcgcgtgcgcctgggggcaccgctgccgttccgagcatgcagccagtaaagatcccagagaagttcgagaagctagagatcataaggaa

SEQ ID NO: 547631 - DNA, 75 bp, Homo sapiens
tccggcgagagactttgtcagctcccgcacagtaacgaaaattgcctaagaattatgacccaaaagttaccccag

SEQ ID NO: 547632 - DNA, 51 bp, Homo sapiens
gaagctcatcctacagttaattcatcttatgtccctgatgccaaaaatgca

SEQ ID NO: 547633 - DNA, 100 bp, Homo sapiens
cggccatgctcgaagccagctctgcagctcagccaatcagtgacatcattggccgaagaacagttgagaattgttgaagaacaaagaaagattcatgagg

SEQ ID NO: 547634 - DNA, 99 bp, Homo sapiens
cctgactgggacgtcgcctccgcagacccctcggaggctgaagcgacgccggaggcagggggaagcgagtagcattatctgatgatgagacaaaggaaa

SEQ ID NO: 547635 - DNA, 90 bp, Homo sapiens
cttcatggacacctttgagcctttccaggatggagtctcgttctgtcgtccaggctggagtgcggtggcgtgatctcagctcactccagc

SEQ ID NO: 547636 - DNA, 75 bp, Homo sapiens
ctcaggctggaacttgccctgtctcctcgcagatgaggtgtaggagctgcacgatctgggaacctcacgtttatg

SEQ ID NO: 547637 - DNA, 100 bp, Homo sapiens
caagaggaaaggaaagatgtgttcgggtttttctagaacacggaggtccattcaactgcaattgaatattggagttgagcagattcgagttgtacataga

SEQ ID NO: 547638 - DNA, 75 bp, Homo sapiens
cttcggcaaagggatggggagagggtcttactctgttacccaggctggagtgcagtagtaccatcgtggctcact

SEQ ID NO: 547639 - DNA, 100 bp, Homo sapiens
tgtccccctggatcttcacacagctgcttccattggccagtatgaagtggtgaaggagtgtgtgcagcggacagacgggatattctcctcgttcatccgg

SEQ ID NO: 547640 - DNA, 100 bp, Homo sapiens
ttgatgttgctctgggaatcctgattgagaaagatgtagcacttaagcctcaggaacgtgtggagaaacgccagacgcccctgaccaagaagaaacgaga

SEQ ID NO: 547641 - DNA, 75 bp, Homo sapiens
accttttctggaggaatcaccttgtggaagccaaattgctcgccagaaacccagagctaattatttagaagaccg

SEQ ID NO: 547642 - DNA, 100 bp, Homo sapiens
ggaagagttcgtgaaagctttctgcccagagctcctggaccaatgcatcttcccaccaccttaaaccactgatgttgaatgtggaggaggtttttatatc

SEQ ID NO: 547643 - DNA, 75 bp, Homo sapiens
tacacactcagttaattaatctggtatcgatatcctgaagcttgtagcagcccaagtgggaagccagtggaaaga

SEQ ID NO: 547644 - DNA, 74 bp, Homo sapiens
cgctttcccctgagcatgcttcccatgatgatctcctccatgctccagctctcaaaggtctatggccctgtgtt

SEQ ID NO: 547645 - DNA, 100 bp, Homo sapiens
ccgtcctccagacctggctgcaggacctgctgcgtcgtgggctggtgcgggctgcccagagcacaggagcctcagggaacccagccagcacagcagcagc

SEQ ID NO: 547646 - DNA, 82 bp, Homo sapiens
aggagaggttcaaccgcgccctgctgcctgtggaggaaccgattgtgtccacagatgaggtcatcttcccactcaccgtttc

SEQ ID NO: 547647 - DNA, 98 bp, Homo sapiens
tgcctacgcgccatggagcatcgcatcgtggggcccgggccgtaccgagctaccaggctggggaagatggtgaaaggaatgggaggtgctatggattt

SEQ ID NO: 547648 - DNA, 82 bp, Homo sapiens
cacttttactctacgcaactgttgctttttcatggaactgtggctgcaccatctgtcttcatcttcccgccatctgatgagc

SEQ ID NO: 547649 - DNA, 83 bp, Homo sapiens
tcgctcagcttcagaccctgggctgcagctgcctaatgaggcaatggcgtccacagaggaaaaagcctatgagatcatgaggg

SEQ ID NO: 547650 - DNA, 83 bp, Homo sapiens
agccgatccagcctgcggagcctgtggggcagtttgccagggtttggatacctgatccagaggaagtctggaagtcagcagag

SEQ ID NO: 547651 - DNA, 100 bp, Homo sapiens
atccccgcggacgccacagcgctattcctaagccagctggagtgaagaaagggtggcagagagcactggctatagtgtgtgacttcaaactctttctgta

SEQ ID NO: 547652 - DNA, 100 bp, Homo sapiens
cactagccattgaagtatttgaagcacatttgggaagccacattttgcagccaacaagtcccaaatttggaaaagctgactcatatgaaaagctggaaaa

SEQ ID NO: 547653 - DNA, 90 bp, Homo sapiens
gctggaccgcaactgtgacacaggagcctttgagctcatctataagcaggattcctcatgtccataacatgttggatgaggctctgcagc

SEQ ID NO: 547654 - DNA, 98 bp, Homo sapiens
ccctgatggaaaacacaaaggatctgatgagctcacagtgcctgcactttaccccagtagccctgaagtgtgggccccgtaccctctgtacccagcgg

SEQ ID NO: 547655 - DNA, 50 bp, Homo sapiens
atcaacttcaccaagagagagatccaggttcaaaccttgtactactcagc

SEQ ID NO: 547656 - DNA, 82 bp, Homo sapiens
aggccagtcgcctccaggccaagagggatccttcacccgtgtctgatgccgacaaaaggatcaaggtggcgaagcccgtggt

SEQ ID NO: 547657 - DNA, 100 bp, Homo sapiens
tactcacagtttgaccactctgacagtgatgaacaccagtgttacttcactcccctttgtggacaccaaggggaagaagaatacggtaagcttcccacac

SEQ ID NO: 547658 - DNA, 100 bp, Homo sapiens
gggccctctcagcaagaacgggaacaaaactctgatattttggtaaaagacctcagtgggattgtagaggggcatcaaatcttaatgaacttcaccagct

SEQ ID NO: 547659 - DNA, 135 bp, Homo sapiens
ccagggtccggcgagcatcacgccgaggcccattttccagacgaccacgacgaggccggggtcacggcgaatgctctcggaagtgctactatattttcatcgtggagaccatctgcgtggcctggttctccctgg

SEQ ID NO: 547660 - DNA, 74 bp, Homo sapiens
gtctacaggagccccacagccactcgggaggttttgggatttgagattgacgcggtgaactctgtccagttttc

SEQ ID NO: 547661 - DNA, 90 bp, Homo sapiens
tgcgtccagtaaacctcttgttcagctggaagtcaaactttcaaaaagttcagttaagattaaaaggagcccaagccccatctcatccta

SEQ ID NO: 547662 - DNA, 74 bp, Homo sapiens
ggaacccttgaaggatgcaggtgatggtgttcgatacttgctcaggttctcaagaagatttcccgctacatcca

SEQ ID NO: 547663 - DNA, 100 bp, Homo sapiens
gaagacagagggttttcttttgagttaaacacagtgggaatatcacttttgatgagattgtcaacattgctcgacagatgcggcaccgatccttagccag

SEQ ID NO: 547664 - DNA, 50 bp, Homo sapiens
aggaagattgtggatcaaataagagccaagatcaaggctcgagatcttcg

SEQ ID NO: 547665 - DNA, 80 bp, Homo sapiens
tggcagagaggaggtcctttttggccccaggtgactcttaactcccaggacagaggtgctgatcatcgggggcggagatg

SEQ ID NO: 547666 - DNA, 100 bp, Homo sapiens
aaggaatgttcaagccctgagtgaagatccaataattttctttcaagatcagaaggagattccagtcctgttcgaaatctgcagtcttttggcactgagg

SEQ ID NO: 547667 - DNA, 100 bp, Homo sapiens
gccttggaggcaactctaaaaccatcatggttgccacaggacgaagccttctcgcaggatcaacccaactccggtgagcgaagagcggtcactctccaag

SEQ ID NO: 547668 - DNA, 74 bp, Homo sapiens
ccgctcaccccgcggccgcaccttcccgccttctcaggagggtgtgaagacagagaatgaccacatcaacctga

SEQ ID NO: 547669 - DNA, 82 bp, Homo sapiens
ctctccccctcggaggcggcgggcggaggcggcgggtgaaaggtgtagcagtcactcggcctacacccacagcatcgacctt

SEQ ID NO: 547670 - DNA, 100 bp, Homo sapiens
tggcaaatgacatgcaggttcttcaaggcagaataattgcagaaaatcttcaaaggcagacagtccagaagacatgcacagctggattaaggagattggc

SEQ ID NO: 547671 - DNA, 97 bp, Homo sapiens
gaacttcatgatcatggagtttcaagcctgagtgtgaagattttggaccctgggcgttttttacacatggggacccaggctcgccaaagcattgctg

SEQ ID NO: 547672 - DNA, 100 bp, Homo sapiens
tgccacagcatcctccagcacctcaggttacaatggccaacattggaataaatggaaatcattctctggaaacctgtgaaacaacactttttgctctccg

SEQ ID NO: 547673 - DNA, 82 bp, Homo sapiens
cggcaaaggcaagagtaacagcagcgccgtcccgtccgacagccaggcccgggagaattggaaaatggatataccttatttg

SEQ ID NO: 547674 - DNA, 100 bp, Homo sapiens
gagtatttgaagtctgtgtcaaacatccatatcataagtggaattttggagatattcaaagccacaatggtgcgcatgaatgtcctggcagatgctctca

SEQ ID NO: 547675 - DNA, 97 bp, Homo sapiens
ctgagatcagacttgacaaagtggttcctttaaagcaatatggtgaaattgaagattgtcagattgatgattcctcacttcatgcagtaattacatt

SEQ ID NO: 547676 - DNA, 75 bp, Homo sapiens
agcaaattcgtcagatcaaagaacaagaggaggactcagccatccccatcacagtccctggccgcctgcctgtgt

SEQ ID NO: 547677 - DNA, 98 bp, Homo sapiens
aaaatcgcttggttaaaacctgacacttttaacaggctggtccacctggcagtgattcatgaggccccagcggtgctgctctgttgcctggctttgct

SEQ ID NO: 547678 - DNA, 101 bp, Homo sapiens
atagatttttccctctaccttaaggatgtgcaggatcttgatggtggcaaggagttagagcagccagcgggtacagaatggattttggaagagggagtcac

SEQ ID NO: 547679 - DNA, 82 bp, Homo sapiens
tctgaggccctggcatcttttaatgtccgcaagcacatcaatgatctttatgaagatctgcgggatggccataacctgatct

SEQ ID NO: 547680 - DNA, 50 bp, Homo sapiens
aggagtgtctggacttgaggctggcagtgattccagcagtctcagcagca

SEQ ID NO: 547681 - DNA, 100 bp, Homo sapiens
tttcacggttcttcacctcctcagtcaacacccttgagcccacctccactcactcccaaagccaccaggaccctaatgtccatgggctattcctcaaaat

SEQ ID NO: 547682 - DNA, 51 bp, Homo sapiens
actcattcaaggttacccagttgtaagagatgctaaaaaccttgtacctat

SEQ ID NO: 547683 - DNA, 75 bp, Homo sapiens
attaatggatgttccagtatttaaagctattcaaccagatcacccccaaattcagaaggagtcccagtatatcaa

SEQ ID NO: 547684 - DNA, 75 bp, Homo sapiens
aaatgtcggcccggacgccattgccgacggtgaacgagcgggacacggaaaatgaaggaaaagctgatgcgatgc

SEQ ID NO: 547685 - DNA, 103 bp, Homo sapiens
aaatgcgcttcctgagggagtgggtggagaggagtggttaatgtgttgctaacaactccactctgggtggtaaacaccagactgaagcttcaaggagcaaaat

SEQ ID NO: 547686 - DNA, 74 bp, Homo sapiens
gagcgaacccgagagcgtggagcgggctgggccagcttctcagatgaccaagatggtgctgcagatggtgctga

SEQ ID NO: 547687 - DNA, 75 bp, Homo sapiens
ggtacatctgaaagccgggaaatggaggctgaaccgtctgagcccagaagtgctgaggtgacgaggaagcccaag

SEQ ID NO: 547688 - DNA, 97 bp, Homo sapiens
ttccccgccaaccgcaaccattgacgccatgtcgggttattcgagtgaccgagaccgcggccgggaccgagggtgtaattacttcaagcctccagga

SEQ ID NO: 547689 - DNA, 51 bp, Homo sapiens
cagcaccccgtcgccggcaagtccatctgaactgtttactgtttgttcatc

SEQ ID NO: 547690 - DNA, 100 bp, Homo sapiens
gagagatgaagggtcatgatagtcctatcaatgccatatgtgttaattccacccacatttttactgcagctgactctgcagatatctcaataacattgag

SEQ ID NO: 547691 - DNA, 100 bp, Homo sapiens
tacaccctcacagtttgctctgctcttccaacaccagtggaagatgatcacatcccaggacaatgaaaagcgaaccccattgcacgccgcagcttacctt

SEQ ID NO: 547692 - DNA, 74 bp, Homo sapiens
acctgcagaaggtctctggagacatcttcagcaggtgtttcccattaaacactaccaggacaaaatcaggcctt

SEQ ID NO: 547693 - DNA, 101 bp, Homo sapiens
ggcccagcagatggagaatagaccctctgtccaggcagcattaaaacttaagcagtcgcaatgtatctgctgagcaaaaagatgaaaacaaagaagcaaag

SEQ ID NO: 547694 - DNA, 90 bp, Homo sapiens
tgattgaggacaagaccatcgagctcatgaatgccgggacattctgcttcctgtcatcaccaaagagctgaaggagctgctggagcagaa

SEQ ID NO: 547695 - DNA, 137 bp, Homo sapiens
aaacattctggtgaagaaaaatggaacttgctgtattgctgacctgggcctggctgttaaatttattagtaactctcaggagccttctccgcagttggcttcctcggtagcttccacacggagcatgcccgagagcc

SEQ ID NO: 547696 - DNA, 100 bp, Homo sapiens
ccagccctcaggaggcgcccggaaaccagcctggacaccaagtctgtgtcagaaggccacctcaagaggaacatcgtggtgaagaccgtggagatgcggg

SEQ ID NO: 547697 - DNA, 75 bp, Homo sapiens
ggtgtcaggatctgaagagctatggtgaaacaccactgaagcattgccaagggatacaactcaccccaggagtat

SEQ ID NO: 547698 - DNA, 100 bp, Homo sapiens
gccggagatgcctgacgcatctgtctgaggagcggtcagtgacgcgatggagcgggcaagggcagctggtggaatttttgaagaaaatggaatctcgagg

SEQ ID NO: 547699 - DNA, 100 bp, Homo sapiens
gctgcacccacgaatctgcccacccctcctgtaacccagcctgtttcacttcttgttgacgaaggatcagagattggtgtattcgggcagactgcttccc

SEQ ID NO: 547700 - DNA, 115 bp, Homo sapiens
tctaacttggcaagatgagcactctgcccctttctcctgggaaacaaagatgatgacgtgaccttagaagatggcagagccacacaatagaaggcgtttgggttcctgaatcact

SEQ ID NO: 547701 - DNA, 100 bp, Homo sapiens
gattcgccatcgtgagttccaggttcacctttccttgccagtgaagatggcgtgcttggcggagtgattgtcctccgttcatgcagatgttctgccgagc

SEQ ID NO: 547702 - DNA, 80 bp, Homo sapiens
gcgggaggcagagggaggaacctggacgccggaagccgggaaatggtggaagttaaacgagctgagcctcgggacagcaa

SEQ ID NO: 547703 - DNA, 98 bp, Homo sapiens
cagattcgcagtggtcgcttcttctccttgagcccccctccatgcgcctgaaggcccgacccagcagccctggcttttccgtgcttacctgcagcgcc

SEQ ID NO: 547704 - DNA, 75 bp, Homo sapiens
gcggaaagcggcggactatgtccgaagcaaggatttccgggactacctcatgagctagacttcgggctccttgag

SEQ ID NO: 547705 - DNA, 100 bp, Homo sapiens
ctgagaatgagtttgtggtgctgaagaagggagtgatatggagctggacttgttagcagcagctgaaacagaaagtgatagtgaaagtaaccacagcaac

SEQ ID NO: 547706 - DNA, 100 bp, Homo sapiens
ggaagtagagggagatgatgtgcctgaatctataatgctggagatgaaagatttccacagagattacaaatgggccactcataagcctcttgcctaaacc

SEQ ID NO: 547707 - DNA, 86 bp, Homo sapiens
ccactggcttctgcagggatgtgcacgggcagaattcagatcaggaaggaggtggaaagaaaaagaagaaaaagaaggacaagaaa

SEQ ID NO: 547708 - DNA, 98 bp, Homo sapiens
taagaccttcaggcctccttattaccatagaaggtgatgaagacgtatacggggaggttcgagaagaggcatctgatgatgacatggaaggggacgag

SEQ ID NO: 547709 - DNA, 82 bp, Homo sapiens
ctactctctctttctggcctggaggctatccagcgtacatgtccagggccgccgggtccccttccccattgccagcccctga

SEQ ID NO: 547710 - DNA, 100 bp, Homo sapiens
gtcacatggagcacagaaatcaatgttagcagatagccagcccatacaagatcgtgttcgaaccagtgtcctaccagaacataaggatcccccgccagaa

SEQ ID NO: 547711 - DNA, 83 bp, Homo sapiens
ccccttctcagaacagaaagcgtctctacaaagtgatccggaacaaccatgtccaagggacctgcagttggtattgatcttgg

SEQ ID NO: 547712 - DNA, 83 bp, Homo sapiens
aggacggagaggacctgttcaccagcactgtctccaccctagagcttccagctgatcttaccaagatgcatctcacagaaaac

SEQ ID NO: 547713 - DNA, 73 bp, Homo sapiens
ggaggagaagctcagcgcagccctgcaggccaagcgcagcctccaccaggacggggaggtttactgcatcgac

SEQ ID NO: 547714 - DNA, 100 bp, Homo sapiens
agttaggtcgtgtttccaaagagaaaaacctactcttgatacacaatctaaaaagaattaggaaggtccttcaggcatcaactgtgaaatctgtgttaga

SEQ ID NO: 547715 - DNA, 103 bp, Homo sapiens
ccggtagaacacagttatgggtcgcaagaagaagaagcagctgaagccgtggtgctgatattgaccagtggaataaggtaattgaacaactaggaacaccatg

SEQ ID NO: 547716 - DNA, 100 bp, Homo sapiens
aagcttgtgcgtcaagtcatgctgcggcatgaagctgaacctggactatctgctggagatgctttgggagtacttggccctgacctgcatctacaccaag

SEQ ID NO: 547717 - DNA, 50 bp, Homo sapiens
ccaacagccagtgatatgctatacatggtgacaaacagcatgtttggtgc

SEQ ID NO: 547718 - DNA, 100 bp, Homo sapiens
tgatcgatttggcattgatgaccaagattacttggatgatgatgctgaagctatccttgctgcagacttcgaaattggtcactttttacgtgagcgtata

SEQ ID NO: 547719 - DNA, 50 bp, Homo sapiens
tggagatatggcgcaactgcggcgcggacctgatgcccagaaccctggac

SEQ ID NO: 547720 - DNA, 90 bp, Homo sapiens
ctgaaattgatagcagtttgaatgacatcacttagtgctcttacccagctgatgaaaaagatgccccatttccgaaaacagattactaag

SEQ ID NO: 547721 - DNA, 50 bp, Homo sapiens
gcagctgctgtccttgtgtccagaaagtttcctacactactgaggtttag

SEQ ID NO: 547722 - DNA, 100 bp, Homo sapiens
cctgcatcccgttcccctctccctgaaaaggcaccaggaaaagagagagggagagaagagttcacagcaggaagatctgctaccaggaagtgtcccagtg

SEQ ID NO: 547723 - DNA, 90 bp, Homo sapiens
gagagccgtaggcaggaccccgggacaccctggaagccaggaaatgaatatgcttttaaggctattaaccagggtggccttacatcagta

SEQ ID NO: 547724 - DNA, 74 bp, Homo sapiens
caatcccccactctttccgccctaatggaggtctccagtttcgccacagcatgttccgaagagatgattggaag

SEQ ID NO: 547725 - DNA, 49 bp, Homo sapiens
gggaaagagagcgccaggtgcttagcagagatgctgcaatttgtcagta

SEQ ID NO: 547726 - DNA, 75 bp, Homo sapiens
tctacaaccttcgatctcctgacgagtaaaggttgtggccagaaagcacgggcagcctgggactcctgttgccat

SEQ ID NO: 547727 - DNA, 99 bp, Homo sapiens
gcttgtcaacaaggcgctgctgaccacctacgggttcgagaacttgtcttggacaattgcaaatcaaatgatggaaaaattgagggcttaacagctgaa

SEQ ID NO: 547728 - DNA, 75 bp, Homo sapiens
cggcggctgcggtcgaagaaggggacgccgacaagatctttgtggagttcacctctgtgtttgactgccagaaag

SEQ ID NO: 547729 - DNA, 100 bp, Homo sapiens
atttcgcttcaccgagtgaccttgagcccagggcgacggtcagcttgttaattcctggctgcaggagctagagttaatgccaaagacagcaaatggttga

SEQ ID NO: 547730 - DNA, 75 bp, Homo sapiens
tcttgtttgtggatcgctgtgatcgtcacttgatggagaaggaggagacaacccgggagctgctgctgcccaact

SEQ ID NO: 547731 - DNA, 82 bp, Homo sapiens
aagcatgcccaccactgccacaaacgccgcaccaggtcttgtagcagcgcctcctcggaatcccagtcagaagttccagcct

SEQ ID NO: 547732 - DNA, 75 bp, Homo sapiens
cccgcgggtctgctctgtgtgccatggacggacctcctgccccccgaggtctgcagtctcctgaacccagcagcc

SEQ ID NO: 547733 - DNA, 90 bp, Homo sapiens
ataagtgtatccaccagactcacagttttgcgggtcctggtacctgggctagcttggttcctttccaagtgtcaaataggacacccatct

SEQ ID NO: 547734 - DNA, 75 bp, Homo sapiens
ccctcaggcaacccaaacgtatggactacctccttttgaaggccggggtcagaaagaaaaaagagggtcccgggg

SEQ ID NO: 547735 - DNA, 83 bp, Homo sapiens
cagcagttggcacacatggttaaggaacaggaggaaaccattcagagcaaacggggattcagcgtccgatcctttggaacagg

SEQ ID NO: 547736 - DNA, 88 bp, Homo sapiens
tggccggcgagcccggtccccgccggcaccatgattgagtttgtgacgggcaccaaaaaaggcaccacgaccaacgccacgtccacca

SEQ ID NO: 547737 - DNA, 100 bp, Homo sapiens
ctaaagaccattgcacttcgtgcccgaaacgccgaatataatcccaagaacagccaccccatcttttctctcaactgggagtgtgtggtcagtttcctgt

SEQ ID NO: 547738 - DNA, 87 bp, Homo sapiens
gaacttcagggtttccaccgttcgttcaaggttaatttggagtggcccctggagtcagtttcctacaccatccgaggccccacccag

SEQ ID NO: 547739 - DNA, 100 bp, Homo sapiens
cagcagccgccgccagagcaggacgaaccgccaatcgcaaggcacctctgagaacttcagaccatgtcgcctgaagaatggacgtatctagtggttcttc

SEQ ID NO: 547740 - DNA, 90 bp, Homo sapiens
cctgagggcggcttcgatgccatcctgcagacagctgtgtgcacgttaagtgggcagaccaacatccacctcagcaaaaacttcttcctg

SEQ ID NO: 547741 - DNA, 96 bp, Homo sapiens
agccagatctccatgaagtcgccacagctgattttggtgaatatggccagcttcccagagggccgcaagcttcttatcattgggaccactagccgc

SEQ ID NO: 547742 - DNA, 82 bp, Homo sapiens
ttgcggctttataagcgggcgctacgccacctcgagtcgtggtgcgtccagaggaattgaatgatctggcacgggaccctcc

SEQ ID NO: 547743 - DNA, 73 bp, Homo sapiens
caagagctcggtgctggagaacttcgtgggccgcaccaaatcagatgaaagccaaggaagggaggaatgtgta

SEQ ID NO: 547744 - DNA, 84 bp, Homo sapiens
gcccgaccccgtcccgaccctggccgccccgagcggagcctggaggtaagagcaaagaggcggaaattaagagaatcaacaagg

SEQ ID NO: 547745 - DNA, 110 bp, Homo sapiens
aaaattttccttgacctttaggtgcttttatattcatctcaaaaacaaaattctgaactcaggacttggcaagcacagtatgaaaacccaccacatatctatgcccttgc

SEQ ID NO: 547746 - DNA, 100 bp, Homo sapiens
gctgcgggtgcgcaaggcgtccaggagtgacctggggctgtggagagcgacccgtggccttgtgtttcagatcaggatcctcatgaccagccaaagagaa

SEQ ID NO: 547747 - DNA, 83 bp, Homo sapiens
aaacaggagagacagagccttggagagaaccgaacaatattttgggagtccaagtgacatggcttctactgcagaaaacatca

SEQ ID NO: 547748 - DNA, 75 bp, Homo sapiens
acgacaccatgcatctcctcggcccctggctcctgctcctggggtttgtaccagttgctggagccccgaatgatt

SEQ ID NO: 547749 - DNA, 50 bp, Homo sapiens
ctacgacctgtcagacatcacccaggctgtatgccaccacgggctgttcc

SEQ ID NO: 547750 - DNA, 75 bp, Homo sapiens
cttgaagcgctgccagtatgtgaccgagaaggtgccagctgctgcccgtgctggtgccattgccccatgtgaagt

SEQ ID NO: 547751 - DNA, 100 bp, Homo sapiens
aggcagcacagatagacggatccaacgagcgacgtgacacaagaggtcccaagggagcaaacctgaaagccagagcctcctgaatacacaaactgccggt

SEQ ID NO: 547752 - DNA, 82 bp, Homo sapiens
agcccactgctgcacttctatggccgtaaaagcctcactttgtcgccaggctggagtgcagtggcgcgatctcggctcacta

SEQ ID NO: 547753 - DNA, 100 bp, Homo sapiens
gagcttttcgtaaagggaagtcatttctactggacttcatgcttagatacatgtataacaaggcgcatattaaatttcctattgactacccctattcacc

SEQ ID NO: 547754 - DNA, 99 bp, Homo sapiens
cagatcgctactaccccgcagttcccggacatgatcctctccgcctctcgaggctgaccccgcactacatctacccaccagccatcgtgcagcccagcg

SEQ ID NO: 547755 - DNA, 87 bp, Homo sapiens
cctgtgaatgtgtttgctctcatgaacatgcaatgagaagactgatcaatctggcccagctgagagccagcctggaggttacccagc

SEQ ID NO: 547756 - DNA, 80 bp, Homo sapiens
ctcgactcttggcgccaccgcctcatgcactgtgtagaatccacattcatctcaatggaaggatcctgccttaagtcaac

SEQ ID NO: 547757 - DNA, 75 bp, Homo sapiens
gactcatggaggctgagcatttattcagcgatcatctcagtccacattggaacgatctgaacagcagatcagggc

SEQ ID NO: 547758 - DNA, 100 bp, Homo sapiens
agaagacactgcgtcaagcaggtgccccgaataacgcgcatattaaatttcctattgactacccctattcaccacctaccttcagattcttgaccaaaat

SEQ ID NO: 547759 - DNA, 100 bp, Homo sapiens
caccttcacggtcaaggcccagcccaggaggatcccactggaagacatccctgaagacgatgacgagtgctcggcctggctgcacaagctctaccaggag

SEQ ID NO: 547760 - DNA, 100 bp, Homo sapiens
caagaatcccaaggttctcccctgtctgcacactttctgcgagagacatggctccttactatgaagccttgtgcaaatccctcgactggcagatagacgt

SEQ ID NO: 547761 - DNA, 139 bp, Homo sapiens
gccatgtcccgctacctgcgtccccccaacacgtctctgttcgtcaggaacgtggccgacgacaccaggtatgtagttttgacgacaaagcatcacgaaggcttcacaaactggccgagtcctgtgtcttggaactgga

SEQ ID NO: 547762 - DNA, 105 bp, Homo sapiens
gctgggcctctcggtgctgctgacggcggccacagtggccggcgtacatgtgaagcagcagtgggaccagcagctgagatctgtatctgtggacctgaatgttga

SEQ ID NO: 547763 - DNA, 83 bp, Homo sapiens
cgcggagccgcgcagccctcggagcacgatcatggaagggaagtggttgctgtgtatgttactggtgcttggaactgctattg

SEQ ID NO: 547764 - DNA, 50 bp, Homo sapiens
gacgtggcaaggacctggagcgctaccggctctctgaccagttccacgac

SEQ ID NO: 547765 - DNA, 49 bp, Homo sapiens
aaagatctcgtacaagatccttctttggtgctgataagactgtgaaagg

SEQ ID NO: 547766 - DNA, 74 bp, Homo sapiens
gagaaattcaaggagagcatggatgctaacaagcccacaaaggtgaaagaactcttttcttctttgggagtcga

SEQ ID NO: 547767 - DNA, 100 bp, Homo sapiens
ggacctcctggtgcgcatcctgctgctggctgcccttgtctccttttgacatcctataccccaaggactcgtccagccctcacagcggcgtgcctgctga

SEQ ID NO: 547768 - DNA, 80 bp, Homo sapiens
ttactggatgcacgtacagaatacattcagccgtcagctataatgatccagccttttatgaagaatgcaaaatggaatac

SEQ ID NO: 547769 - DNA, 83 bp, Homo sapiens
gcgaaggcggcggctcctgccctctcgctttccctctcgcgtctctggctgcaggccgccatggcatcagatgaaggcaaact

SEQ ID NO: 547770 - DNA, 101 bp, Homo sapiens
cgaggagggcacattccttttcacctcagagtcggtcggggaaggccacccagagtgcctggtgaagaatgtgatgggatcactagcatgtctgcggagag

SEQ ID NO: 547771 - DNA, 100 bp, Homo sapiens
gaggcactcatcctgcacgccggcgagtgccagcgattattttcgaaataccagtatttcgactccagggggatgttcatttctatagtattttcagccc

SEQ ID NO: 547772 - DNA, 50 bp, Homo sapiens
ctgggacttcccgtccgcggcgtggagggcgtgtgcacaggcagctccac

SEQ ID NO: 547773 - DNA, 100 bp, Homo sapiens
cgaggaggctttcctgctggtggcaaccgcctacgagacactcaaggtgctgaccttaaggaaagagccaaaatgagttccagtgaagttggtccttttg

SEQ ID NO: 547774 - DNA, 100 bp, Homo sapiens
ctccaaccagaacatgcagtccctgcttcctgccagaccatcacctccctctacaagaccagtttccgggtggacgttcccttcgacctgcctgagatct

SEQ ID NO: 547775 - DNA, 74 bp, Homo sapiens
tggacgagtaatcgcctgctttgattcattgaaagttgcacgttttcaaaaaatacctaatggtgaaaatgaga

SEQ ID NO: 547776 - DNA, 75 bp, Homo sapiens
acaaagaacagctggctagactggaggagaggaaaaggcgacggcggattgacagaagtatgattggagagccca

SEQ ID NO: 547777 - DNA, 92 bp, Homo sapiens
cgacaagccgctggcagccgcggatctcaccgccgctcaggatgtgaagttcatttccaatccgccctccatggtggcagcggggagcgtgg

SEQ ID NO: 547778 - DNA, 82 bp, Homo sapiens
cagggttctggggatgctacagttcatcagggaacgggtatggcaatccccgaaactcaccaggtctgctggtctcacctgg

SEQ ID NO: 547779 - DNA, 100 bp, Homo sapiens
ggctgacctcgctgtacgccgagcacccaggcgactgcctcatcttcaagctgctgcggactctggagcgtgagaaccagcgcctggaggctgtcctggc

SEQ ID NO: 547780 - DNA, 50 bp, Homo sapiens
gaggggattttgtcagcttgtcgtcaaggctactgcagcactggggtgtc

SEQ ID NO: 547781 - DNA, 75 bp, Homo sapiens
agctgagcttcaaaaggggggacatcctcaaggccagctaaataaagacatgacctatgcgcagttgtactcctt

SEQ ID NO: 547782 - DNA, 87 bp, Homo sapiens
tcaagcgattttcctgcctcagcctcccaaatagctgcaattacagcatttaaatcaaacggtattgagatggattgggttatgaaa

SEQ ID NO: 547783 - DNA, 74 bp, Homo sapiens
ttggagaaaaattttaacgtttgaggtcacccaattgacaggtttctcagatcctgtatatgcagaagcttacg

SEQ ID NO: 547784 - DNA, 80 bp, Homo sapiens
atcttcgagttcaaagagaccctcggaactgtactaatggtcacttgatgtgcgctggctgttttatccacctactagca

SEQ ID NO: 547785 - DNA, 98 bp, Homo sapiens
ttgttttttcctgtatgaagcggttggcaccactgaagtgaccgaatgagattcccgacagttaagcaatggggagacatttggctttgctcctgctt

SEQ ID NO: 547786 - DNA, 75 bp, Homo sapiens
gtaagacaggaaaataattaaatattcttaccgaggttgcttttaactttgacagaggaagaattttccaagacg

SEQ ID NO: 547787 - DNA, 90 bp, Homo sapiens
ctggcctgctgctggcccgcaggtcaaaccggcacgatgtccaggcaccagaaccagaacaccatccaggagctgctgcagaactgctcc

SEQ ID NO: 547788 - DNA, 83 bp, Homo sapiens
cgtgaagttccagctggaggacgacggcgagttctacatgatcggctccgagctggcaaaactcaaggctcagaaactgcagg

SEQ ID NO: 547789 - DNA, 83 bp, Homo sapiens
caacagcatcagcatgtcggtggagatcaacggcatcatgtacacagacctcctgccccccgaggtctgcagtctcctgaacc

SEQ ID NO: 547790 - DNA, 138 bp, Homo sapiens
gccgtgatctccagcgccggcctcctcagtgcgaagaagctgcagccgcacctggccaaggaccccaccaacaactgaacgctttggtcaggctgctacaatggaaggaattggggcaattggtggaactcctcctgc

SEQ ID NO: 547791 - DNA, 76 bp, Homo sapiens
atgacctatggatcatttggtggtgtaaaagtgccggtggtggtgtgcacattgagccccggtatagacagttccc

SEQ ID NO: 547792 - DNA, 100 bp, Homo sapiens
cacaacagcaggcagaggggcagtgggcgcggggaagacagcccacctgaggatattgaccataaggactcatatctcattacaagaagcatcatggccg

SEQ ID NO: 547793 - DNA, 101 bp, Homo sapiens
tggaagtcctaggactgatctccaggaccagcactcttctcccagcccttagggtcctgctcggccaaggtgtctgacttccagcaactgctggcctgtgc

SEQ ID NO: 547794 - DNA, 83 bp, Homo sapiens
gctggccaagaagatcatcattaaggacggaggcacgggaaggatggagacgctgaaggataagaccctgcaggagctggagg

SEQ ID NO: 547795 - DNA, 100 bp, Homo sapiens
gaaagagtgcccaattccaaatgtacaggaaatggtgttcacactggccctgaatcaagggaacaccagttttcacatgctggcagaagcaatggccggg

SEQ ID NO: 547796 - DNA, 100 bp, Homo sapiens
gtcatcctcctgcctcagccacccaagaagctgggaccacagtccctcctcctatgtctccatcctccaaatctgtgagcactccaagtgaagctggaag

SEQ ID NO: 547797 - DNA, 83 bp, Homo sapiens
caaggacacggtctacaccgacttcgacggttaaataggattgcgaatcaggtggccattcagcggaagaagcagtttgtgga

SEQ ID NO: 547798 - DNA, 51 bp, Homo sapiens
agctttccctaaggcagccatcaaaaggaactcttccctcctgggtcaccc

SEQ ID NO: 547799 - DNA, 100 bp, Homo sapiens
cagcctcccgccggccgtctccttaacaccgaacaccagccagcagccacccccgcccagccaacacctccccaggcccaagggggacgcggccctgaag

SEQ ID NO: 547800 - DNA, 100 bp, Homo sapiens
ccgtgtccggtcccccaaatctgtcgtccctgcccccaggctctagaggacaaaatcccagtccttggcacaaactcaggaaatggaagccggagtctgt

SEQ ID NO: 547801 - DNA, 75 bp, Homo sapiens
ccgagccccgagcccggcgcctggctgagtacaaaatgatgcttcaacacccaggccaggtctctgcctcggaag

SEQ ID NO: 547802 - DNA, 101 bp, Homo sapiens
gtcgcctggaggaccagtatttcccatggagggcattagatggcttcattatcgcagtgacaacagacggcagcatcatctatgtctctgacagtatcacg

SEQ ID NO: 547803 - DNA, 90 bp, Homo sapiens
gtggccggcagtcatctcgcggccgttcaggtgctggagaatctggtaaaagcaccattgtgaagcagatgaggatcctgcatgttaatg

SEQ ID NO: 547804 - DNA, 80 bp, Homo sapiens
tctgatgaagaagcttctccagaaaaaactacactgtctactgccaagacacacgatagtaaggagcatttagcaatgat

SEQ ID NO: 547805 - DNA, 83 bp, Homo sapiens
gtcctggctcttgccctcatcctggttctggaatcctcagttcaagattcagaccaggatgtagcactcaaacttgcccagga

SEQ ID NO: 547806 - DNA, 100 bp, Homo sapiens
ttctctttgcaagacagtttaaacccaagcaactccattcgagcgtgagaacagggaatcttgaaacctgtttgagactgttatctttaggagcacaagc

SEQ ID NO: 547807 - DNA, 75 bp, Homo sapiens
cctggccgacatcgcggccttcttccgatccggctgctttgactctcccgcgaagacctttccttcactgttcta

SEQ ID NO: 547808 - DNA, 96 bp, Homo sapiens
acagctgcaaggagttactgaagggatttgtcttggctgttactatgacacgggaagcaattgatgaatttcggcgttttcagcgtgacaaggaag

SEQ ID NO: 547809 - DNA, 82 bp, Homo sapiens
ctgagacccggaatcagttccttgatgagctcatggaggcctgttcctgaacttcctgggaagtcaaccttcttcggcacct

SEQ ID NO: 547810 - DNA, 100 bp, Homo sapiens
cggcacggctgcagcctggatgggaagttcaagtttactgcgaagtccacccagcgttccggagcattgcagtgtcgagatggctatgaaccctgtgtaa

SEQ ID NO: 547811 - DNA, 82 bp, Homo sapiens
ttttactgtcaagacatttcttcggcattctgcaacaggcgtctgtagaggcttctggtgaaatcgcattatgcaagactgg

SEQ ID NO: 547812 - DNA, 87 bp, Homo sapiens
agagaacagccctccatcttgcagcccagaagtcatcagtgagttctgcctcagtcagctcccaagtgaggacgcagtcacctttga

SEQ ID NO: 547813 - DNA, 97 bp, Homo sapiens
ccttcagcgaggaagctacacttttcaccaaggaactggtgctgcagcgagaggtttgcctgcaatgagatttcattctctacatttaaaggacatc

SEQ ID NO: 547814 - DNA, 51 bp, Homo sapiens
atccacagtgatgttgatgctagttctggccagatattcgaagcttacaac

SEQ ID NO: 547815 - DNA, 75 bp, Homo sapiens
cagaaatgctggataatttacctgagcatatgagaaattctttcattctccaggaattacatgaatgacagtctt

SEQ ID NO: 547816 - DNA, 83 bp, Homo sapiens
tcagtatcactcgctcccttgatgatcttgagatattaataaggcagcggaaagaagaaatatgaatacggctccatcaagac

SEQ ID NO: 547817 - DNA, 100 bp, Homo sapiens
ccgtgccccagatgcccaccgggatggagaaggaggaggaatcggtgcaagttctctcctgttgccctgagtgcccactcccaggccctctgtatgagtg

SEQ ID NO: 547818 - DNA, 100 bp, Homo sapiens
cgccggcgccgccgcccccgggctcgcggcctgcagaatggagatgtatgcatttcgattcttcatccgcctgtagatgacccacagagtggagaactgc

SEQ ID NO: 547819 - DNA, 75 bp, Homo sapiens
ggaaaacaagaggccccagagggaaaagaagcccaaagttttaaaggtgaaaggtgtagcagtcactcggcctac

SEQ ID NO: 547820 - DNA, 80 bp, Homo sapiens
ggaggttaacagctatctttctacatatctgaagagatggattaagaatgctttggattaaggattgtggagcacatttc

SEQ ID NO: 547821 - DNA, 101 bp, Homo sapiens
gcccagccagcctgaacatctgcagtgtcgtctcgctgtccgcgtctcccaggacgcatgaaggtatggaaaagttgaggccactcgcatattgttagaga

SEQ ID NO: 547822 - DNA, 74 bp, Homo sapiens
tatgttgtgcaagaggtactgtccatcaaacatcttccaccacagcttagagtgtccatagcagctaccatcat

SEQ ID NO: 547823 - DNA, 87 bp, Homo sapiens
tgagtcagtgtgacagtccatatgtaaccaaatattatggatcctatctgaagcatttctggaaaggagtccattatcgctgggcat

SEQ ID NO: 547824 - DNA, 82 bp, Homo sapiens
aaagtcgcacctgcggacgcacacagatctgactgcagccatgagcagcaatgagtgcttcaagtgtggacgatctggccac

SEQ ID NO: 547825 - DNA, 75 bp, Homo sapiens
tgccccggctgcctcctccctgagcatttaaatcaaacggtattgagatggattgggttatgaaacataatggtc

SEQ ID NO: 547826 - DNA, 83 bp, Homo sapiens
ctaccccaggaacccgcgccgcgagggctccttccctcaggttctgtttggattctgcaaagcagactcgtcagaaagttgct

SEQ ID NO: 547827 - DNA, 82 bp, Homo sapiens
gtggagatatggcgcaactgcggcgcgcataatcaccagcaacacccgggacaataatacgggggccacctacccccacctg

SEQ ID NO: 547828 - DNA, 75 bp, Homo sapiens
ccacaatgccacaggaggaggcagcagatattatcactacctatactcccattacctgccagccagcctgaagaa

SEQ ID NO: 547829 - DNA, 82 bp, Homo sapiens
aatgataacgttattaccacgggggtcagaccaggatccacccgaggaagcaaattgtggctactaatttgccccctgaaga

SEQ ID NO: 547830 - DNA, 60 bp, Homo sapiens
ggcggccagagaagagtcaagggcacgagcatcgggtagatctgtctcgtaactgtgtaa

SEQ ID NO: 547831 - DNA, 50 bp, Homo sapiens
tggcaacagagtgcctgacccaggtcagtatgccgagattttgctgtcct

SEQ ID NO: 547832 - DNA, 83 bp, Homo sapiens
agaacactggatagacttcgaacatttaaacagtatcctagaaggaaaacatcaccatggctacagaaattggttctcctcct

SEQ ID NO: 547833 - DNA, 82 bp, Homo sapiens
aaggcagactttttgatattcagagccttggaagtcaacactgtcacacccacatgcaggatctccaggaggtgacccagga

SEQ ID NO: 547834 - DNA, 98 bp, Homo sapiens
aagacagaattgatcgccttgctgtcaaagtcacccagctggattcaacagtggaagaggggcaaattggatcaaggcagttcagatgtgtagcaaac

SEQ ID NO: 547835 - DNA, 88 bp, Homo sapiens
gttaagacagtgtatagcctgcagcccccctctgcgctgagcggcggccagccggcagcctttaaatctacaagacagcagccttccc

SEQ ID NO: 547836 - DNA, 74 bp, Homo sapiens
ggaaccctggtcaccgtctcctcaggaactgcaagcacatgttgaccagataactgaaatggcagcagtaatga

SEQ ID NO: 547837 - DNA, 95 bp, Homo sapiens
ctgaacttagctcgacggggctgaccgctctggcccagggtgttgcccagaagattgttgccacaaggaagaagcagcagctgtccataggaccc

SEQ ID NO: 547838 - DNA, 100 bp, Homo sapiens
ggctaacctggtgcggagccagcctgggtctcagccccgcgtacggcctttcacgagtcttcaagccttcagctgtttgcagacaaggtcccaaagacag

SEQ ID NO: 547839 - DNA, 82 bp, Homo sapiens
agtacctgcagaaggtctctggagacatcttcagcagctcccggagccctgcctgttccctgtccatccaggccagcagctg

SEQ ID NO: 547840 - DNA, 51 bp, Homo sapiens
cctgctctgaagatcctgccctgccctggtgctttactgtcctgtgcgaag

SEQ ID NO: 547841 - DNA, 100 bp, Homo sapiens
cggcggagtgatcgtcaataacaccgagaggccgagacgcatccagagctttcgtgaccggggactgttctgaagcaggcctcgtggatgacgtatccga

SEQ ID NO: 547842 - DNA, 99 bp, Homo sapiens
aagaacatcctctttaacccagttcccaccctcacagtcaggtgctttcatttgcaagatggtgccatttgtccagtctaccgctgttgtgacagaaat

SEQ ID NO: 547843 - DNA, 75 bp, Homo sapiens
tgaaataaaaatggatgcaagtttaggaaatctatttgacagtgggagtagctcaccgttacccaagtatgcttc

SEQ ID NO: 547844 - DNA, 98 bp, Homo sapiens
ggagaccctcacggagctgggcgacgagctgaccctgggagacatcgacggtacaccaggggttggaaaaaccacactaggcaaagaacttgcgtcaa

SEQ ID NO: 547845 - DNA, 101 bp, Homo sapiens
atcactgcagctagtaatttgccttctggattacggagtctcagtggcgtgatcctggttcactgcaacctctgggccccccccaacccactgcgagttca

SEQ ID NO: 547846 - DNA, 98 bp, Homo sapiens
cctggaccagatgattgctagctgtggccgactggtgaatgaacagaaagagcttgctcagctttctaaaaccaatttttccaacaacaacgatttcc

SEQ ID NO: 547847 - DNA, 100 bp, Homo sapiens
gtacacctgtttccaggacaaccaagcattttcatgaaacaaccccaaataaaggaagtggaaccacttcagatatccttggaacagaagatcttattgt

SEQ ID NO: 547848 - DNA, 75 bp, Homo sapiens
gcccaagttaaaggcgaaacccatcagaactgctagtggggtctgtgcagacttttgcagacaaatcaaaacaag

SEQ ID NO: 547849 - DNA, 75 bp, Homo sapiens
ggaggagctgagcgctgatgagacaccatccggaagatgaagaacgatttccggaagatggaggatgagatggac

SEQ ID NO: 547850 - DNA, 98 bp, Homo sapiens
actccggagacagcccaaatatcctcggaagagcgctcccaggagaaacaaagctgctgcccaaagggagcaaggaggaacagcgggattacgtcttc

SEQ ID NO: 547851 - DNA, 90 bp, Homo sapiens
ctcagcctccaaaagtgctggcattacaggaactatcgtgagcataggtgaccctaagaaaaaatatacaagatatgaaaaaattggaca

SEQ ID NO: 547852 - DNA, 100 bp, Homo sapiens
accgcccattcagtctacggctggggccgtcccagttcgcaatgagaaaggcgtgcaatggaattgagttttgccctggtaaatgggaataatatccgag

SEQ ID NO: 547853 - DNA, 75 bp, Homo sapiens
gacggagctggtctgaagctggtagtttcctcacccaccagtccgatctgttgtcaccgaaggtcattacaagaa

SEQ ID NO: 547854 - DNA, 100 bp, Homo sapiens
aagaaatgatgatggaaatgaagtataataccaagaaagccccacttgcaggggaaatgctgtctgtagctgagcacttcctggagcagcagatgcaccc

SEQ ID NO: 547855 - DNA, 100 bp, Homo sapiens
gacctgctaacagaactggaccttttcgattctgaggttgggaccaagaaggaactatctattttaaaccaaaaattttccgaagaagtaaaaaccccag

SEQ ID NO: 547856 - DNA, 82 bp, Homo sapiens
gcttgttgaaacccaaaactagtttgggccccatggtatccctgtgacagtatttcccaaaagggaatataaggataaacca

SEQ ID NO: 547857 - DNA, 98 bp, Homo sapiens
ggcgctaggggaacccgtgcggctggagagaggtaccccaattatgaatttattagtgataactctatttcctggtcagctggactgcacaatcgata

SEQ ID NO: 547858 - DNA, 51 bp, Homo sapiens
cggatttactggaccccagtgtgaaagagatatgaagaagctgaagtccgg

SEQ ID NO: 547859 - DNA, 51 bp, Homo sapiens
aggccatctgaataactttactaagtctccacaaaccggaggactaccccc

SEQ ID NO: 547860 - DNA, 95 bp, Homo sapiens
caaaagcagctgattttgtgaaagcttttattctcggctttcaggtggagagtacaggggctcaggtccaggtggcaggggatatgctacccaac

SEQ ID NO: 547861 - DNA, 100 bp, Homo sapiens
cggtgtaaatgttgagcctttttggcctggcttgtttgcaaaggacgatgccggcggtgatcttctggcagtgggtgaaccagtccttcaatgccttagt

SEQ ID NO: 547862 - DNA, 51 bp, Homo sapiens
tagatggtgacactgcagttgagcatctgctgcacccaagcctgagccggt

SEQ ID NO: 547863 - DNA, 112 bp, Homo sapiens
ccgcgcgcagggcctgcagcgggagctggacggcgagcgcgagcggcgcgagaaaaaaccaaggtgtatgttggtaacctgggaactggcgctggcaaaggagagttagaaa

SEQ ID NO: 547864 - DNA, 75 bp, Homo sapiens
tgaagattccaagttcaggagaactcgaccgccacaagtatatggttatgatgacttgcagatgcttcagacaag

SEQ ID NO: 547865 - DNA, 90 bp, Homo sapiens
ctgttgatggcaggcttggccctgcagccagctacaccctctcggttttctctgctctgccaacactagtggaatatgatcacatcccag

SEQ ID NO: 547866 - DNA, 90 bp, Homo sapiens
gtgagagaaaggctggaagacgagcggccctccaggcactgaagcgtaagaagaggtatgagaagcagctggcgcagatcgacggcacat

SEQ ID NO: 547867 - DNA, 120 bp, Homo sapiens
ctgtcagtcgcgagcgaacgaccaagagggtgttcgactgctagagccgagcgaagcgtgagaagccctaccactgcaactgggacggctgcggctggaagtttgcgcgctcagacgagc

SEQ ID NO: 547868 - DNA, 100 bp, Homo sapiens
accagagaggaaaacacaaaaaacaggataaaatcttatgattatgaggcatgggcaaaacttgatgtggtacggttcctggagcagcagaacaagatgc

SEQ ID NO: 547869 - DNA, 100 bp, Homo sapiens
cacagtatagcttctgacagtggagacactggcattggaacttcctgttctgatagcgtggaaggtctgcaattaaggccttacgtcctggagggatact

SEQ ID NO: 547870 - DNA, 89 bp, Homo sapiens
atttgagactcagtcactcaagctgcaagctttcttcctggtggcagatgacatcatggattcatcccttacccgccggggacagatct

SEQ ID NO: 547871 - DNA, 87 bp, Homo sapiens
tatctcaaaaggtgatctggacaaaggaacaggtatctcaggttgtctgcattcaaaagagcattctattaaagctaccttaatttg

SEQ ID NO: 547872 - DNA, 99 bp, Homo sapiens
ccagtttatggcttccagtggaggcattttggggcagaatacagagatatggaatcagggcaaatgacacagctttgtgaactgatcaacaagagtggg

SEQ ID NO: 547873 - DNA, 100 bp, Homo sapiens
ttgaaaggaggcccctgccgtgtggacccgtaaaataaaatgggttggactccatgaaagaattgcacaaaacaaatcgacagcagcatgagaaacatct

SEQ ID NO: 547874 - DNA, 137 bp, Homo sapiens
gcgaggtggagggtggaacgcgggcgcctgaaggagttgttgtctcggcagcgcccgcggagacgtgaagagattacatgaagcagatgacatttgaagcccaagcctttttagaagctgtgcaattcttccgacag

SEQ ID NO: 547875 - DNA, 80 bp, Homo sapiens
ttgccggctcccctctcaggacaacccagatgtgcaacaaagtgcgatgcggagctggagtttgttcagatcatcatcat

SEQ ID NO: 547876 - DNA, 83 bp, Homo sapiens
gagaaataaggacaaaagccaagaggaggacagttcgctacacagcaatgcatcgagaaccaaaaacttttgctagaaaatca

SEQ ID NO: 547877 - DNA, 100 bp, Homo sapiens
gtctagagatgtgggcatggcagacaaatctgtaggcctgcccatccaggttcgtgacgcaggattgtcttttaaagatgacatgccaaagtcagatgtc

SEQ ID NO: 547878 - DNA, 88 bp, Homo sapiens
aggcaattgatcccaagttgtcgacgaccgacagggtggtgaaagcttccttggaaatcattgactagcatcattgaatattattaca

SEQ ID NO: 547879 - DNA, 83 bp, Homo sapiens
gagaagctccagatggcgtcttccgtgggcaacgtggccgacagcacaggactcctaaatgcaaagtccctggatgtttcttg

SEQ ID NO: 547880 - DNA, 75 bp, Homo sapiens
tcagagctgctgagaaggtttccaggcttaagatctccttcagcgagacagccctggagaccacgtaccaatacc

SEQ ID NO: 547881 - DNA, 74 bp, Homo sapiens
ccgacgtcgaccagcagagactggttacacgcatggggagatactctggaggaagcatttgagcaatgtgcaat

SEQ ID NO: 547882 - DNA, 75 bp, Homo sapiens
ccaagcggctgccgaagatggcggaggtgcaggtatctttcagatgaaggcattgaagcttgcacaagctctcca

SEQ ID NO: 547883 - DNA, 120 bp, Homo sapiens
cttgcatgatggaaacaccatggctgcggcggcccagctctctctgacacagacaatgcagatcttcgtgaagactctgactggtaagaccatcaccctcgaggttgagcccagtgacac

SEQ ID NO: 547884 - DNA, 90 bp, Homo sapiens
atatttgcagccagtactctatatgaacaatccgtctggatcacggatgtaggaagtgatttgaagaacccaagtgattcagcagtgcac

SEQ ID NO: 547885 - DNA, 100 bp, Homo sapiens
cggtgaggtcagcttcacattctcaggaactctccttctttgggtctcctctgagcctccggcctccataagacccaaaacagatgacacctcttcccag

SEQ ID NO: 547886 - DNA, 51 bp, Homo sapiens
ctctgttccaaatgctttgctgcctttctcaaagcaagctgtagaacacgt

SEQ ID NO: 547887 - DNA, 108 bp, Homo sapiens
ctgccacctctacctgtggctgttcctcctgctgctgcccctggccctgcacctgaaagaaatcgaagctctccaagcaaggatgtttgtgctggaagccaaagatca

SEQ ID NO: 547888 - DNA, 80 bp, Homo sapiens
gccgggtcgctgcggccgaggctccgggtagttacttttggtgacgctgtccagttcccacaatgtatcattccttatct

SEQ ID NO: 547889 - DNA, 75 bp, Homo sapiens
ggagtagtcgctggagtccgcgcctccctgggcaggtgacagcagggacatgtctcgggagatgcaggatgtaga

SEQ ID NO: 547890 - DNA, 76 bp, Homo sapiens
ggaggatgtcgggacaccccggaagctgggaaatggaaggaaaagctgatgcgatgctctcagtgccgcgtcgcca

SEQ ID NO: 547891 - DNA, 98 bp, Homo sapiens
agtgacggaggagcttgtaccaccgggacagcacttgtcctagcccgattacctttggataagattaccgaatgtcttagtgaactatgttctgttca

SEQ ID NO: 547892 - DNA, 90 bp, Homo sapiens
tttgtgtacagtgaagctgtagccaggagctgtgactgatgagaattaaaggccatggatgaagatgggcttgaattacaacaagagcca

SEQ ID NO: 547893 - DNA, 99 bp, Homo sapiens
ggaacagattgttcctaaaccagaagaggaggttgcccagaagaaaaagaaacatcttgaggagcagattgctaaagttgatagagaatatgaagaatg

SEQ ID NO: 547894 - DNA, 100 bp, Homo sapiens
gtgagagtctcatttctatgcacagtgtttctcaggaggatggagctagttagctgtctgttgtctgtagcccaggtgcaaattgagcatgacccagaat

SEQ ID NO: 547895 - DNA, 75 bp, Homo sapiens
cattgaacaaacagcagagacgaagtgacctcgatcgcttttggctagagacagactcctagaagtaccccaccc

SEQ ID NO: 547896 - DNA, 100 bp, Homo sapiens
gtcatctccagatgctagggttatggtgtgatccgccttattatgcagtacttgaaggagaacagtttacatcgggcgttagccaccttgcaggaggaga

SEQ ID NO: 547897 - DNA, 90 bp, Homo sapiens
ccgtggcgcggcccggctgacaggtggtcttcaagctgacagagaagctgacggaacagaaggagtggatgaagatataattgtgaccca

SEQ ID NO: 547898 - DNA, 100 bp, Homo sapiens
cacgcttcctctccagagtgatcaagtgtgacccggatgcagcagtctcggccctggctgctctatgcagtgaatattacatgaaggagccgggggaggc

SEQ ID NO: 547899 - DNA, 100 bp, Homo sapiens
gaatatataaatgtgttgtttgtggaactccattgtttaagtgacaaacagcatgtttggtgcttcaagaaagaagtttgtagagggggtcgacagtgac

SEQ ID NO: 547900 - DNA, 100 bp, Homo sapiens
ttcaaaaatttaaacaagaatccactgttgctactgaaagggttacacggtgtgggcacacaacctcattgccattgctcgtcttcggggctctgatctg

SEQ ID NO: 547901 - DNA, 87 bp, Homo sapiens
tcattgtttgtcaccacaaaaaggacaggaaattgatgaagcctgtaagagaataaagcgtgaagttgatgatttgggccctgaagt

SEQ ID NO: 547902 - DNA, 50 bp, Homo sapiens
cagtgagctggggccgaccaccccctatgtagagacggtgtttcaccgtg

SEQ ID NO: 547903 - DNA, 100 bp, Homo sapiens
agagcccacaggtgctaaagagagcagtaccctgatggagtcccttgcaggtgtgctgggcatcaaggtgaagatcatgctgccctgggacccaactggt

SEQ ID NO: 547904 - DNA, 88 bp, Homo sapiens
gatccagataatgaggatgcaacagtgggaacagatgaatcccaggagagcagcatgacagatgcggatgacacacaacttcatgcag

SEQ ID NO: 547905 - DNA, 83 bp, Homo sapiens
ccgatccagcctgcggagcctgtggggcaggatgttttagaagaatgtatgtctcttcccaagctatcttcttattctggatg

SEQ ID NO: 547906 - DNA, 90 bp, Homo sapiens
actactttggtggaccaaaaatcgtgacaccagaagaatattataatgtcacagttcaggtcattattcatgtggttgcccagtgccatg

SEQ ID NO: 547907 - DNA, 50 bp, Homo sapiens
aaagggccccttacacaccagacagagggaatctggaaaaattgcaatca

SEQ ID NO: 547908 - DNA, 51 bp, Homo sapiens
tgatggtgatggtcaagtaaactatgaagttgttgacctcctgtactggag

SEQ ID NO: 547909 - DNA, 101 bp, Homo sapiens
tccccgccgagccgccaccgcaggtcgaggacggtcggactcccgcggcgggaggagcctgttcccctgaggttcttctgtgtggcagttcagaatgatgg

SEQ ID NO: 547910 - DNA, 100 bp, Homo sapiens
agctatgcttggcagcagaaggatttggcaacagactttgtttcttggagtccacttccaattccaaggaccgggcaggcagcattgtcttgaaggtgct

SEQ ID NO: 547911 - DNA, 90 bp, Homo sapiens
aaccaaactcttggagaagctgttaagagggagaaccgaagattacaggaggccagcatgaggttggaacaagagaatgatgaccttgcc

SEQ ID NO: 547912 - DNA, 87 bp, Homo sapiens
aagggctctgacatcaacatccgagacaacgtattgttgcagcatctggcagtgagactgaggatgaggacagcatggacattccct

SEQ ID NO: 547913 - DNA, 100 bp, Homo sapiens
gagctgagtggttgtgtggtcgcgtctcggaaaccggtagcgcttgcagcatgaaccacaatggacactgccagccatagccttgttcttctccagcagc

SEQ ID NO: 547914 - DNA, 100 bp, Homo sapiens
cctgtggctggagaccaacgtctcgggagacctctgctaccttggagaggagaactgccaagtcagatttgcaatgtattgctgtccttgaatattagcc

SEQ ID NO: 547915 - DNA, 74 bp, Homo sapiens
tattgttttgcctgaatttgagaaaacccacctagagcatcagtctctaattaacagaagatggcaaagcccag

SEQ ID NO: 547916 - DNA, 100 bp, Homo sapiens
agggtgaacaacccgttcttgcctcaggccagtcgcctccaggccaagagggatccttcacccgtgtctggtttgaacggtgtccccgggagcatctggg

SEQ ID NO: 547917 - DNA, 75 bp, Homo sapiens
aaacatgatcgtttactgcaaaatatgaatatcgtgtagagatggttcaccagtcctgtaatgatcctacaaaaa

SEQ ID NO: 547918 - DNA, 75 bp, Homo sapiens
ctggactcgccctcctatgtcctgtacaggttcggctttccagtttggcagcagcactacaaatttcaacttcac

SEQ ID NO: 547919 - DNA, 75 bp, Homo sapiens
ctcaaatttctaatttcaccaacaactatttattgagggctaggataagagggtcatcgccttctagctgtggct

SEQ ID NO: 547920 - DNA, 100 bp, Homo sapiens
gcaaaacttatgtgaccccgcggagacccttcgagaaatctcgtctcgaccaagagctgaagctgatcgactttctgctgctgaagtaatgcaatggtct

SEQ ID NO: 547921 - DNA, 98 bp, Homo sapiens
aataacttcattttacgatattctctggagtttggtccacctgatcctgcccaagtgaaagagtttctagccaaagccaaagaagactttttgaaaaa

SEQ ID NO: 547922 - DNA, 76 bp, Homo sapiens
tggcccccctgagcagaggactgtaccttgtggacagccgccacccccagggacagtggcgacaggacagcatgcg

SEQ ID NO: 547923 - DNA, 80 bp, Homo sapiens
gcaaacgaaagcgaagattcaaacaataatgttcccagagaggaagaagctattcagttggatggattaaatgcatcaca

SEQ ID NO: 547924 - DNA, 101 bp, Homo sapiens
tgaccatgtcacaatcaggaagaaacatctccaaagacccatctttagaatttcacggtccctcatggtgtctcactccagcagacagaggattgtgtcgt

SEQ ID NO: 547925 - DNA, 101 bp, Homo sapiens
tttcatttttgtgatgactatgtacacacagctttatcatcgggctgcagttcatggagctcgtttcaaagggcaagatctaaaactggcatggaataaac

SEQ ID NO: 547926 - DNA, 100 bp, Homo sapiens
aagaggattaagcacagcagaaattaatgccgtggaagcaattcatagagctgtggaatttaatcctcatgttccaaaaatcaatgtggtaaaactcatt

SEQ ID NO: 547927 - DNA, 82 bp, Homo sapiens
gctttgtctggacatctgggtgaagttttaataagatggagtcccctgtttccacaccagcagtgctgccaatacacctttt

SEQ ID NO: 547928 - DNA, 100 bp, Homo sapiens
tcctggatctccacaccctttttcctgagacgagttgtactgctgtcacaggaaatggacgctggattacaagcatggcagctcaggcagcagaagttgc

SEQ ID NO: 547929 - DNA, 90 bp, Homo sapiens
ccagaggctcatcaggacttgtaaacagcagacagaagagctatgaccactcaaggcctcactggagcagcttctgcaggtcctacacag

SEQ ID NO: 547930 - DNA, 115 bp, Homo sapiens
ctcacctcgctactcgcttgcctacccgccggcccgcgggtctacttcctcaaaggattttttatcaagcagaaatgcatcgaacaacgagaatcaagatcactgagctaaatcc

SEQ ID NO: 547931 - DNA, 98 bp, Homo sapiens
aaaggtttacaagcaggccacgattgaatctctgaagcacccagaggcctccattcaggctgttttttcagatgcccaaatgcatatttgggcattag

SEQ ID NO: 547932 - DNA, 76 bp, Homo sapiens
aattgttttggcctaggatcatccagggatcacatgcagtggtctaaggaagaagaagcagcagccagaaaaaaag

SEQ ID NO: 547933 - DNA, 101 bp, Homo sapiens
gctggaaaagagggtggaaaaagcagggaggttatgaggcttaataaagaaggtgcctggaatacttattaagaaacgatgcaaatccagggatccgtgat

SEQ ID NO: 547934 - DNA, 98 bp, Homo sapiens
ggccagtgcccatggtggccctttataatgcagaaaatgtggagatatatttttgccatcatggatcagtttggagatatattagaaggtgaagtgga

SEQ ID NO: 547935 - DNA, 74 bp, Homo sapiens
caatcaatgaaacagacacacctgcacagaaccaacttcttcttaaaacagggaagaagacatgaatccaaaga

SEQ ID NO: 547936 - DNA, 98 bp, Homo sapiens
gaacatcactgttaaccctagagctccagagtttcctattttggagaagcagaactggttgattcatcttcattatatccggaaagattatgaagcct

SEQ ID NO: 547937 - DNA, 98 bp, Homo sapiens
cattgttcaagtacccactggaccgtggttttgcaggaaatgtgaatctcaggagagagcagccagagtgctttaccaacagggacgcttatgtcaac

SEQ ID NO: 547938 - DNA, 75 bp, Homo sapiens
ccaagtttgaggagagcactcggaacccctcactcatgaagcagctctgcaacgggccaatagcttccagtctcc

SEQ ID NO: 547939 - DNA, 101 bp, Homo sapiens
cagtttccatatcaaccaaattatggttcaattcccatgaaagtgcagcacatgcaattgtttctgttaatggtactaccattgaaggtcatgttgtgaaa

SEQ ID NO: 547940 - DNA, 83 bp, Homo sapiens
gtcccggtcgagaggcggcgcccgcgccgagcgccagccaggttccttctgatgatgggcgtgcttttctgctgcggagccgg

SEQ ID NO: 547941 - DNA, 100 bp, Homo sapiens
tgtccggcccccgagcacgccggccccgcgcgcgcctcgaggccgagtcaagagcactctgctatttggtcctgaagcagtacacagaagcagtgaagga

SEQ ID NO: 547942 - DNA, 100 bp, Homo sapiens
ggaaaaataggccactacatgaaagactgccctaaaaggaaaagccaaagtggaacaggtgaagttcgatgccacatccatgcatgtcaagcctcaggtg

SEQ ID NO: 547943 - DNA, 82 bp, Homo sapiens
ctcagccaggggcagccggctctggtgctcccagaagaggaatactcccccagttgcaagaggcgcaggaccgtggaagact

SEQ ID NO: 547944 - DNA, 50 bp, Homo sapiens
atcataggattactgatgctggaggaagaggagttgtacgcatgtcagag

SEQ ID NO: 547945 - DNA, 97 bp, Homo sapiens
aagacagttgggtgaagttgcatcctttgggggcagtaacattgagccaagtgtccggagctgcttccaatttgactgcatcgacgtaggctggtgg

SEQ ID NO: 547946 - DNA, 96 bp, Homo sapiens
aagtctgcaatcttaccagggaggccaagcgaccacccaaagaagatattgatgatgttaagaagttcaaaccgggttacctggaagctactctta

SEQ ID NO: 547947 - DNA, 90 bp, Homo sapiens
atgattttgagccatacttaagtagccagacaaatcagcctttctgagaaaagtctacagcattctttctctgcaggttctcttaactac

SEQ ID NO: 547948 - DNA, 130 bp, Homo sapiens
tagtagccacggtgtggcagctgctctgaaccaggacctggacccggacccaaagtgccatgtctttaatccactgaggcggctcccagctgcgttggcgacatggccgacacccccagagatgccgggc

SEQ ID NO: 547949 - DNA, 82 bp, Homo sapiens
cgctggagctgggtcagtccgccgctcaccccgcggccgcaccttcccgccttctcagatcgcaccccctccctccctggcg

SEQ ID NO: 547950 - DNA, 100 bp, Homo sapiens
ccatgacaaccaggcaatgctggatagataccgaattcttatcacaaaggttatcaatactctggctgaccatcatcatcgtgggactgactttggtgga

SEQ ID NO: 547951 - DNA, 121 bp, Homo sapiens
atcgactccatggccaactccttcgtgggcacaaggtcctacatgtcggccttcccttcttcttggtggtgttcttgagtaagataatctggactggcccccgtctttgcttccctgcctg

SEQ ID NO: 547952 - DNA, 81 bp, Homo sapiens
aggaggaagacgaatcgttaaacatcttaggtcagagaggagtctgcaatgccgagtggaggaaggaggaaccggagtgtg

SEQ ID NO: 547953 - DNA, 100 bp, Homo sapiens
aagtgaaagtaatgtcacagcgacatatgatagatggacgatggtgtgactgcaaacttcctaattctaaggttcttgcacgcattgcaaatgccacgag

SEQ ID NO: 547954 - DNA, 83 bp, Homo sapiens
gccggagcctgaggacacttctctgtcgtcacagtttttcgttggaatatacgttgcacatttatggcgattctgagtgtgag

SEQ ID NO: 547955 - DNA, 100 bp, Homo sapiens
gtttcccctatgctgttctcatgatgaacgacccacatttctcaggaggccaattaaccaggtggtactggaggaagaagctgtagaatttcgttgtcaa

SEQ ID NO: 547956 - DNA, 100 bp, Homo sapiens
cgcgacacatccgcacccacacgggcgagaagccctacgagtgcaacatctgcaaggtccgcttcaccaggttttgacctgtagcagagaaccaattctg

SEQ ID NO: 547957 - DNA, 115 bp, Homo sapiens
cgcctcaggggccatggcgaagcacgagcagatcctggtcctcgatccgcccacagacctcaaattcaaaggttcgatacaagaggctgttttcctagcgtggcttgctgccttt

SEQ ID NO: 547958 - DNA, 83 bp, Homo sapiens
aggagctaaagcagcgtgcgttcagccctgggtgggcgacagatgcgaaagaaacgagttccagtgccaagacgggaaatgca

SEQ ID NO: 547959 - DNA, 75 bp, Homo sapiens
acaacaagcaagcatgcagcttactgcttgaaaggccggtgctggtgtgtgctccgagcaacatcgccgtggacc

SEQ ID NO: 547960 - DNA, 101 bp, Homo sapiens
gatcatggcggatggcccccggtgcaagaggcgcaaacaagccaatcccaggaggaaaaacggatctagtgaaaagccatttgatgtatgcggtcagagaa

SEQ ID NO: 547961 - DNA, 90 bp, Homo sapiens
catcatcctgacagctgtgtactttgccctcagcatctcccttcatgtctgggtcatggaccctgatgctcccataagacagaaaatgcc

SEQ ID NO: 547962 - DNA, 75 bp, Homo sapiens
ttaaatgaagccactgattagcaatttaaagatcctctccaaggaggtgttcaaggagtgcttcacattcccaag

SEQ ID NO: 547963 - DNA, 78 bp, Homo sapiens
ttggcttttaatcttggctgtgaccccctggaaatgggagagctcagaattcagaaatggccagagccttgcggggtc

SEQ ID NO: 547964 - DNA, 112 bp, Homo sapiens
ctcgcttgcattcagctcctctgtgtttgccgcctggacacttctgagaaattcatcaggctgtgaagcgcgccgtgatgaatatcgaacagagtttaccacagctttgcag

SEQ ID NO: 547965 - DNA, 88 bp, Homo sapiens
aattcaacctcaaatttctaatttcaccaacaactatttattgagggctaggtgtgtgtccaccgaagcaccatctaccctgtgggcc

SEQ ID NO: 547966 - DNA, 100 bp, Homo sapiens
tgatagactccttccagaataactcaaaggttctgaaagaacagtaccttggctacaggaaaatgttcttgggagatgctgttgatgtgtttgaaacaag

SEQ ID NO: 547967 - DNA, 88 bp, Homo sapiens
gcgcgcggccgcggggctgggcggcggggacagcggggacggcacggcgcgcgcagtttgtttcgacgccggaccgcgtaagagacga

SEQ ID NO: 547968 - DNA, 97 bp, Homo sapiens
cttgcagtagaccagagagaaattcaacatgtctgtctgtatgaaattgtcaccaggagactaaagtccatcaaaaacatccagaaaattaccaagt

SEQ ID NO: 547969 - DNA, 119 bp, Homo sapiens
tataggggaagcgctccgggcctggaatccctacgcgtccctttgggtttagcacgatgagctcaatcggcactggggtgctggagaatctggtaaaagcaccattgtgaagcagatga

SEQ ID NO: 547970 - DNA, 100 bp, Homo sapiens
acacgatggaccctcagctgcggctgctgctggaagtcacctatgaagccatcgtggacggaggtgtaccaggacaacgtgtactctccagattgcagat

SEQ ID NO: 547971 - DNA, 130 bp, Homo sapiens
tccgacctctacaactgggaggtggccatcttcggaccccccaacaccctctacgaaggcggctacttcaagggactttcagttaccttgatgatgtcccatttaagacaggagacaaattcaaaacacc

SEQ ID NO: 547972 - DNA, 100 bp, Homo sapiens
aacagtctaagttaaagcagtcaaacatgctgaccgctcaagagattctacatcagtttggtttcactcagaccgaaacctctgcgccatgagagccaag

SEQ ID NO: 547973 - DNA, 80 bp, Homo sapiens
acgtggatcgttgttttgaaacgaaacctcgacctgtctcccagttggttgcacagcaggttactcagcagtttgtgcct

SEQ ID NO: 547974 - DNA, 50 bp, Homo sapiens
gggaacaacaacgagatcctcagtgcccgagctacactggaaatcctcat

SEQ ID NO: 547975 - DNA, 83 bp, Homo sapiens
tacagatcgggcactttctgtgtctaggtgttggagagcacaatggctgaacaagtccttcctcaggctttgtatttgagcaa

SEQ ID NO: 547976 - DNA, 85 bp, Homo sapiens
ctcccaaagggctgggattacagcctgtcccaagccagatgatttaccattttccacagtggtcccgttaaaaacattctatgag

SEQ ID NO: 547977 - DNA, 99 bp, Homo sapiens
gggatcaagacagaagggttgtaccgcactgtgggcagcaatattcaggttcagaagctgctgaatgccttttttggaactaattctgaagcatcaaat

SEQ ID NO: 547978 - DNA, 80 bp, Homo sapiens
caacccactgctagcaccccagagagtgaggagtggagcagcagccagcctgggtcgttggctgtgggttgcaattacca

SEQ ID NO: 547979 - DNA, 88 bp, Homo sapiens
gatttttggagcttgcttcctcattccgggtgatttgttgtactttcccagaggaaccattcatcaagcggacactcctgcggggctg

SEQ ID NO: 547980 - DNA, 82 bp, Homo sapiens
gttcctgcaagctcagtatcacagggcgtgatggtgggcatgggtcagaaggattcctatgtgggcgacgaggcccagagca

SEQ ID NO: 547981 - DNA, 101 bp, Homo sapiens
cgggcggcaggccaaggaccctgagtgcaagacagagggtaatacctgcctggagaatggatctttcttactgaactttacaggctgtgcagtgtgcagta

SEQ ID NO: 547982 - DNA, 82 bp, Homo sapiens
cttgataaaaagagatgtggggggattctcgacctgctaacagaactggaccttttcggtcagcccaaggccaaccccactg

SEQ ID NO: 547983 - DNA, 87 bp, Homo sapiens
gctcgtggccagcggcgccgccgaagatgccatggacaatattaccaggcagaaccaattctacgatacccaagtcatcaaacaaga

SEQ ID NO: 547984 - DNA, 50 bp, Homo sapiens
agcttatgatgccaatttgtcccatggtggaatatgtgatcaagtgtgac

SEQ ID NO: 547985 - DNA, 75 bp, Homo sapiens
cgcctggctcggagcagcagcctctgagcagtgcctgatttgagatggggtcccaggtctcggtggaatcgggag

SEQ ID NO: 547986 - DNA, 90 bp, Homo sapiens
ctggttctctgggatataaataagagccctatgagtttgtctctctggaatggctgcaaaagtggttggatgaatcaacacctaccaaac

SEQ ID NO: 547987 - DNA, 50 bp, Homo sapiens
aggcgctcaccatgttccctggagcaggataacctagggtctcagtttag

SEQ ID NO: 547988 - DNA, 101 bp, Homo sapiens
ccgatactgggggccacccttcctgcaggccccatcaggtgcagagctgtgggtctggttccaagacactgtcactgagaaggaggcgctcttcaggcaag

SEQ ID NO: 547989 - DNA, 75 bp, Homo sapiens
ctgccctccggctccaagaaggttatctcctcagccaacagagctgtggttgggtgtccgcaatgttgccagtgt

SEQ ID NO: 547990 - DNA, 137 bp, Homo sapiens
ttcttttgggaggggaagttcaggaaacatccaagaaaaatgtccttaaagcaattgagcaggctgatctactgcaggagttggaaaatggtaccacatggcaaaacccagaaccacccgtggatttcagagtaatg

SEQ ID NO: 547991 - DNA, 82 bp, Homo sapiens
caggacagtcgcgaggttcgagtgttgcagagcctgcggggcaagatctagaagatggcgaattagaagatggtgaaataga

SEQ ID NO: 547992 - DNA, 100 bp, Homo sapiens
gctcagaggactctatacagggacgtgatgctggagaattataggaacctggtctccctggaagaggtgtggtggaaaggtcttccagaaccagaggcta

SEQ ID NO: 547993 - DNA, 100 bp, Homo sapiens
gaggatgcagatgttgatcactgaaaatgatttatgcaagtttaaggctcaactcagtttccttataaccctctgactatgcggatgctcagcagtactc

SEQ ID NO: 547994 - DNA, 82 bp, Homo sapiens
agaccctggagcctcagttggaagcagccgatccagcctgcggagcctgtggggcagggctaggggcaaggtaaagcattgt

SEQ ID NO: 547995 - DNA, 82 bp, Homo sapiens
cgggcccgcgtccgctcccgcgcccggtcttgggcgtctttggtactggcttttttaggggtctgcctggggattacccttg

SEQ ID NO: 547996 - DNA, 98 bp, Homo sapiens
gttgggagccacgtgtaccagtgtgtgttgatcttggcttgattcagtctgccttgtaacaggtctatgttaacaatgaatgggcaaccagtgttggg

SEQ ID NO: 547997 - DNA, 100 bp, Homo sapiens
caggatcacagccttctctaaagaagtattcctctccaaagagctgcaggccttcaacagccttattagagacgagttgtactgctgtcacaggaaatgg

SEQ ID NO: 547998 - DNA, 99 bp, Homo sapiens
gggtgcaggaggaggacggcagcaaccgcagcagcagccttcagaggccgggaagttaaacttgtagccaccacctccgctcttcccgtcaccctcgcc

SEQ ID NO: 547999 - DNA, 75 bp, Homo sapiens
ctgacagtggagacactggcattggaacttcctgttctgatagcgtggaagaatttgaaagacatattggctgac

SEQ ID NO: 548000 - DNA, 100 bp, Homo sapiens
ggaaaaacaaaaatgaatgaatcaagagtgatttgttaatataacaacgaacttgatgcaagtgataggtttgccaaggtcagacctctcatcatccgga

SEQ ID NO: 548001 - DNA, 75 bp, Homo sapiens
atccatttcaactacagatactttgaagtagaagaagctgatgcccagtgtgccatcataatgtttgatgtaaca

SEQ ID NO: 548002 - DNA, 84 bp, Homo sapiens
gcgtgtcctgaaggagttccaccaggccgggaagcccatcggggactggtgattgcagctggaagtgcccatgaccgagctggc

SEQ ID NO: 548003 - DNA, 75 bp, Homo sapiens
cgcctggctcggagcagcagcctctgaggagaacatcgagctggcgtttgacgacttggaacccccgacggatga

SEQ ID NO: 548004 - DNA, 100 bp, Homo sapiens
gtcagtgggatgcataatggccgagctgttgactggaagaacattgtttcctggtacagaccacctggaccagctgacccagatcctgaaagtgaccggg

SEQ ID NO: 548005 - DNA, 83 bp, Homo sapiens
cttctgaaccatccacacatcataaagctttaccaggacattcagtcagaagaaggctgctattgaaagagagtatgcacagg

SEQ ID NO: 548006 - DNA, 74 bp, Homo sapiens
ctcgtccccagcggtcccgcccaacgcccgactctctgatgtagcccagcagttccagtatgctgtgcgggtga

SEQ ID NO: 548007 - DNA, 100 bp, Homo sapiens
gtaaaagaaagagacttttttctaaagaatgtccattcaaaagcttggtgaattaaatattggaatggatggccttggtaatgaggtatcagcactcaac

SEQ ID NO: 548008 - DNA, 100 bp, Homo sapiens
ttggaccagacaggcgtgtctaaaaagcataacccctactgtagaactaaatgcactgtgcatgaaacttggaaaaaaaccaatgtataagcctgttgac

SEQ ID NO: 548009 - DNA, 76 bp, Homo sapiens
gcagaatcactattaccgcaacaataggtcatgctttcagaacgaaaaggcacagatgagctctatgctgtgaaga

SEQ ID NO: 548010 - DNA, 75 bp, Homo sapiens
ggaaggtgtgtttcctcgccacaggtgcctttgcagagctgcagacagacatccacgagctgaccaatgacctgg

SEQ ID NO: 548011 - DNA, 85 bp, Homo sapiens
tgcagatagagacatatggaccacatgttcctgagcttgagatgctaggaagacttggatggactcaccctgtcacccaggttgg

SEQ ID NO: 548012 - DNA, 101 bp, Homo sapiens
gttggtgtgattagcttcgcagtctggaaagctttaggagttcacagtggaatgggtactgttcaaaaaggaatgccccacaagtgttaccatggcaaaac

SEQ ID NO: 548013 - DNA, 88 bp, Homo sapiens
gccctaagcacacctggagcaacaacctggcggtgctcgagtgcctgcaggatgtgagggaggtagaaccctggaagaagaggaagag

SEQ ID NO: 548014 - DNA, 75 bp, Homo sapiens
ccgcactcgaccaggaccacagcggcaaggtctccaagtcccagctcaaggcctggcgcaagcgctggtttgtcc

SEQ ID NO: 548015 - DNA, 99 bp, Homo sapiens
gttggagtttttgatgttttaacatttgataacagtcaaaataataatccattggcattaatggcccagtaccagaatgccagaggacttggatctgag

SEQ ID NO: 548016 - DNA, 107 bp, Homo sapiens
caaagaggagccggccgcgcgggccgggaggggacggccgccggagccgcgaggccaagctactgcagcactggggtgtcagttgttggtccgacccagaacgcttc

SEQ ID NO: 548017 - DNA, 130 bp, Homo sapiens
gagacttttttggtgagatcgagggagctgtgatgaacaaattgctaacaatgggctcctttaaaagttcttaaagaacagcccagacacaaacaaatacgagggatggccagagctgctggagatggag

SEQ ID NO: 548018 - DNA, 75 bp, Homo sapiens
ctcctcctccactgccactacagggaagtgcatcacatgtcagatcatgaagactatgatccacaaacagtgagg

SEQ ID NO: 548019 - DNA, 75 bp, Homo sapiens
caggcatggataccaccttctggagattaaagggacttcaaaatgagcgtccctgactacatgcagtgtgctgag

SEQ ID NO: 548020 - DNA, 100 bp, Homo sapiens
ggctgagctggctgggcaagcgcgggccgcggaggaggtctcaggcctccatccctgtgagatcactgccctgagccaatccctacagcccttacggaag

SEQ ID NO: 548021 - DNA, 83 bp, Homo sapiens
atctggcacggtgttcactaccctaataagacctcagcttccctcgggaggggttatggaaacaaaggacatgctttacatcg

SEQ ID NO: 548022 - DNA, 96 bp, Homo sapiens
cttttcttaacctgggaagtggaaccggatatttaagtacaatggtgggcttaattttaggtgaccattgtgaggtagatattttgttctaatttt

SEQ ID NO: 548023 - DNA, 82 bp, Homo sapiens
ctgggagctgcctctgaggaacacgccgcaggtgacttaagagattaaaattaatttggttgctgttggttctgaacaaata

SEQ ID NO: 548024 - DNA, 83 bp, Homo sapiens
gggaacatgacgcaggtgcaggtgtctcttctcgccctggcggggaaggacagagcgggatgccaccagcttgtccaaaggga

SEQ ID NO: 548025 - DNA, 50 bp, Homo sapiens
ctttcattgggaccgaaagcaaaggtcttcatcctccaggtccaccttta

SEQ ID NO: 548026 - DNA, 83 bp, Homo sapiens
acctggacccgcgcgtgttcgtggacggcctgtgccggtttggtgccctggttgtcagatgttggaaagcagtaggacggaac

SEQ ID NO: 548027 - DNA, 122 bp, Homo sapiens
ggagtttcagattttctgcttcttggaaagtctttggacatagcaccaggtgacatgcttgacaaggtggctatggaggcttttacaacagtgatggatatggaggaaattataactcccag

SEQ ID NO: 548028 - DNA, 119 bp, Homo sapiens
cttcactgggcacccggcaagcagaacctgagctcgacctccgctcaattaaggaagtcgatgaggccgaatacatcaagcaatggtaacatctttaaatgaagataatgaaagtgtaa

SEQ ID NO: 548029 - DNA, 83 bp, Homo sapiens
aaagtgaccaagaacgtgagcaagcccaggcacagccgacgccgcgggacttcccaagaaggacaacccgaggcgaggcttgt

SEQ ID NO: 548030 - DNA, 100 bp, Homo sapiens
cctcgacttagaagctaccgagttaccctaagaaagagagaacgaggtgctcaaagtccaactgaagaaatatgtaggagctgtccagatgctgaaaaga

SEQ ID NO: 548031 - DNA, 82 bp, Homo sapiens
ggataagggacccgacactgatctgtatgcaggagctattcttgaagtttgtggatgaaaattgggaaggttccctcaagtc

SEQ ID NO: 548032 - DNA, 95 bp, Homo sapiens
aggagctttagtatttattgtctcattcacaacaaccctgcaaggaggaacgtctgcgggggacagtgctgcccaggatggacaacagcaaacag

SEQ ID NO: 548033 - DNA, 90 bp, Homo sapiens
ccagggggccggagggccagggtctcccggagtttgctaatccagactttacacaacctatctcagaagttgtagatgaagtaattcaga

SEQ ID NO: 548034 - DNA, 87 bp, Homo sapiens
atctcctgctctacctgaagaggctggaacacagcgggtcttgaaaggggactataaaacaccagccaatctgaaaggatattttca

SEQ ID NO: 548035 - DNA, 100 bp, Homo sapiens
actgagaagtgtatatcaagccacaatttccatcaaaaagtgattaagcagagaatggagaagaaggttgattccagggtctcactctgtcgcccaggct

SEQ ID NO: 548036 - DNA, 75 bp, Homo sapiens
gcctaaagaatgcgggaaacccacgtgacatgcggagattccagatccaagtattttagaacatgctcaagaggt

SEQ ID NO: 548037 - DNA, 88 bp, Homo sapiens
tgtattcagctacctcacaggcaaaaggatcagtgaggcctgctctctggcccagcagtcagattcgccatgaagtcagcgtaaataa

SEQ ID NO: 548038 - DNA, 97 bp, Homo sapiens
actgcagcctgcggacgaggccgggacttggccgagcggatcctaataaggggaaaatggataaggaagcctgtgtgggtaccaacaatcaaagcta

SEQ ID NO: 548039 - DNA, 89 bp, Homo sapiens
cgatgataatattctcttcagagattctgcaaatgcgacaagcctcccagcacacagcaagaaggaggccatcagcaaactgggaagag

SEQ ID NO: 548040 - DNA, 75 bp, Homo sapiens
tagatcagcattctctaacttgggcggcgactggcggcgcgatggacctgaccgggctcctgctggacgaagaag

SEQ ID NO: 548041 - DNA, 100 bp, Homo sapiens
cgctgagtggtttttcggatcatgtctggtggctccgcggattataacagtgaatttgctggacacgtcgaccatccacggggactggggctggctcacg

SEQ ID NO: 548042 - DNA, 100 bp, Homo sapiens
caccctgctcagcttcaccatcgtcagcctcatgtacttcgcctttaccagctgctctgttaaaagcgaaaatgaaacaattgcctgcggcaacagttcg

SEQ ID NO: 548043 - DNA, 100 bp, Homo sapiens
gtttcaacaaatgtggggatcgagaagcagcactacctcaacagccaccacccaggacaagagtcgcctgtttcgagtacagttcagtggagagtcaaag

SEQ ID NO: 548044 - DNA, 94 bp, Homo sapiens
acatgcagattatatcgcatcctatggctcaaagaaagatgattatggtgtcaaattgagaaccaggtagatccccaccacctacagtaaaaag

SEQ ID NO: 548045 - DNA, 100 bp, Homo sapiens
ggatgaacagggcagacttctctgtgagctcttcattagggcaccaaagcgaagggttgaaaaataccggccacagaccctgaatgatctcatttctcat

SEQ ID NO: 548046 - DNA, 90 bp, Homo sapiens
aactgctgtcgtctttcaagaaaaggggcccagaagacacctgctttgagtttggtgtttttcctgccatcctgagtttcccacttgatt

SEQ ID NO: 548047 - DNA, 100 bp, Homo sapiens
gtggcgctggtggggggagtcctcatcatcatcgcctcctgcgtcatcaacttaggcggttgatgataattagaagcatgctttccactgaacttcccga

SEQ ID NO: 548048 - DNA, 75 bp, Homo sapiens
catggccaccgaccagaggaaagtcaaggatgaccgagtgggagacagcagcaccagcggtggcagagaccccag

SEQ ID NO: 548049 - DNA, 78 bp, Homo sapiens
gcagtgtgtggggtctcgctggacgttggaggaaagaaggaatatctcattgcaggctctgcagaacattgctgccat

SEQ ID NO: 548050 - DNA, 101 bp, Homo sapiens
atagaatacaatttctccataagtagtttcagaggatgtgaagccactgaaagcttgactcagggaaaagaaatgtgggaccatcacacacatgaaaatgg

SEQ ID NO: 548051 - DNA, 110 bp, Homo sapiens
ctgtgccagaatcttctgatggattattgacggtggagcaggatcttcagcctgttaaacaagaaaacgaaaaaccccttccagaaaacatggatgcatttgaaaaagtg

SEQ ID NO: 548052 - DNA, 82 bp, Homo sapiens
acaaaaccagccgctccgactccagggctcctgtctacgaccagggatccaggtccggcacgatcaagacccaggctacatg

SEQ ID NO: 548053 - DNA, 50 bp, Homo sapiens
tgatggtgcaaatactggcaacaactcaagcatcccaaccttgttaacct

SEQ ID NO: 548054 - DNA, 100 bp, Homo sapiens
cctggtgcgcttccggatcgggggcaagcggaaggtgatgcccaagatggaccagggcgccaatgcttcggcattagagaaagagattggtccagaacag

SEQ ID NO: 548055 - DNA, 74 bp, Homo sapiens
gatccgcccacagacctcaaattcaaaggtgtcgtgaaaactacccctaaaagccaaaatgggaaaggaaaaga

SEQ ID NO: 548056 - DNA, 90 bp, Homo sapiens
ctcccggggccctacggccgcccgccaccagaacttcagtgaagatttcatacattggcctcatgacccagagctccttggagacacatc

SEQ ID NO: 548057 - DNA, 99 bp, Homo sapiens
ggcactcgttgctcaggatcatgcagagttcagctatgttctcaatgggatactcaacttgattccatcaaccaggctgacggagccagtgcagccgga

SEQ ID NO: 548058 - DNA, 100 bp, Homo sapiens
ctccactccgtcccccgcgggtctgctctgtgtgccatggacgggccccttcccagctgcctgcctgccctagccagctcccaggtgaagagactctcgg

SEQ ID NO: 548059 - DNA, 100 bp, Homo sapiens
acagattttgagaagcgagattttcggaagctgtcggaaaaggtaacagaagatggaactcgaaatcccaatgaaaaacctacccagcaaagaagcatag

SEQ ID NO: 548060 - DNA, 90 bp, Homo sapiens
atctgagtatagttacaaggacccagaggaccaaggaaacctctatattgacaaggcgaccagccagctcctgttggagacagattggga

SEQ ID NO: 548061 - DNA, 90 bp, Homo sapiens
tgaacctggtgttttagaggataccttggtcccagagtcatcatgaagggtgtaccagtgatggcaataagaaacaaaatgatatcagaa

SEQ ID NO: 548062 - DNA, 100 bp, Homo sapiens
tggagtccatctgataagaaccggcagccagccactaagagtaattgcccatgacacaggaacatcactggatcagacctgcctagagctggaacgttac

SEQ ID NO: 548063 - DNA, 100 bp, Homo sapiens
ttatagcctcaaactcccaggctcaagcaatcctaccatgtcagccttcccagtagctggaactacaggagcgaatccagccacagacctgagaggcgca

SEQ ID NO: 548064 - DNA, 100 bp, Homo sapiens
aggccagcggctcggcggtgagatcgtcagcgctgactccatgcagttgtcgagatgtccacagaaggaggatttggtggtactagcagcagtgatgccc

SEQ ID NO: 548065 - DNA, 83 bp, Homo sapiens
ccagaacatccactagcctcactaaaggactatgatttaatctccaaagaaccaaagccttttgtatttgagggaaaagtacg

SEQ ID NO: 548066 - DNA, 74 bp, Homo sapiens
ggagcttgacccgtccatcgctgtgcctgcctgctccgcttcagcggactctcgctggtctacctgctcttcct

SEQ ID NO: 548067 - DNA, 75 bp, Homo sapiens
tgccgctgtcgtctttgcttcagccgcagtcgccactggctgcctgaggagccttcacgtaaatgggtccagtca

SEQ ID NO: 548068 - DNA, 100 bp, Homo sapiens
cgcgggatcccagcctcaggcgtgcgcggacggtgtgcgggctcacagaacatttcctgcctgttgctcacactctgttgtccacagcatacccgcaccc

SEQ ID NO: 548069 - DNA, 100 bp, Homo sapiens
gccttcaactggatcattgttcacatggaagagccagctcctgttcgacacagtggagaccatgggaaaagactatttgtcatcagaccttctagattct

SEQ ID NO: 548070 - DNA, 74 bp, Homo sapiens
cagatactgaatgtaaaccctgcaggctactgtggagccgatatcaaggccctgtgcactgaagccgccctgat

SEQ ID NO: 548071 - DNA, 82 bp, Homo sapiens
ggaagcgtttgctgccaccttctgcatcgtagactagacgcttgaagcaaagctgccatcccagaagacgacatgctctcag

SEQ ID NO: 548072 - DNA, 82 bp, Homo sapiens
tctgcgtgagaatagagaccaccgaggaaacccagcgtttgctggcagaaccagttcctggcatcaaagccgaaccagatga

SEQ ID NO: 548073 - DNA, 99 bp, Homo sapiens
acaaaacatccttctaaaccagtatgttttgtgaaagcactttatgattatgagggccagacagatgatgagttatcttttcctgagggagcaataatc

SEQ ID NO: 548074 - DNA, 100 bp, Homo sapiens
cagcttattgacttctcaccttgtgaaagcttaccctcttctccacctgctccccggctgcccgcaccttccgggcctccgcggcgaatttctttttccc

SEQ ID NO: 548075 - DNA, 100 bp, Homo sapiens
gggccccagcagcccccgaaggccctatcaggacatggagtatgaaagacgggacgtccagatcggtgacatcgtcacagtgggcgagtgccggcctctg

SEQ ID NO: 548076 - DNA, 75 bp, Homo sapiens
ccaaatctgtttgctgatgaagattcacctgtgcatgatgacaacggcaacacgacaagaagtccttggcctcta

SEQ ID NO: 548077 - DNA, 90 bp, Homo sapiens
gttgtcttttagaaacactagaaacatatctgcgaaaacacaggtctccaattgagaaacatggcactgtttttcctgcactctacccac

SEQ ID NO: 548078 - DNA, 90 bp, Homo sapiens
gcatactgcacgtgggggatcatgcagaatttgtgaagaatctgctaccaaaatcactagatgtgaatgaactgaaggagtgtctttctg

SEQ ID NO: 548079 - DNA, 88 bp, Homo sapiens
acgtactttgtctgactacaatattcaaaaggttttgatggtacagtccaggtctatgatgccacatcttgggatggaacacggagcc

SEQ ID NO: 548080 - DNA, 83 bp, Homo sapiens
ccgcgcgacgagcaggtggcggcggctgcaggattttttatcaagcagaaatgcatcgaacaacgagaatcaagatcactgag

SEQ ID NO: 548081 - DNA, 96 bp, Homo sapiens
cagcgccgccgtcgccaccgccaccgccaccgccactaccaccgtctgagtctgcagtcccgaggaactatggaggccgcgcccgggacccccccg

SEQ ID NO: 548082 - DNA, 75 bp, Homo sapiens
tgattctggaactgggagaagatggctttaaagaatacacttcaaaacttgtctgtgtgtccagaggaggagtcc

SEQ ID NO: 548083 - DNA, 100 bp, Homo sapiens
ccctcgagaagctccagatggcgtcttccgtgggcaacgtggccgacagcacagacatggatgggtgcaaaaaagagctgccccgcttgcaagagccgga

SEQ ID NO: 548084 - DNA, 71 bp, Homo sapiens
ctctctcagctggtgttcgtgattgggatcaaccagacggaaaacccggaaagaccacagcaagattcttt

SEQ ID NO: 548085 - DNA, 51 bp, Homo sapiens
aggtgctccagagatcttctgttcttcagaaaaggcgacggcggattgaca

SEQ ID NO: 548086 - DNA, 101 bp, Homo sapiens
atcaagatttaacattccaacacataaaaattatttatccaacagctcctcccagaatccagactccaaaatgatgcaaatcaacctgactggatttttga

SEQ ID NO: 548087 - DNA, 82 bp, Homo sapiens
ggcaagagtaacagcagcgccgtcccgtccgacagccaggcccgggagaagaatcccttggcaccatgtcctgtgtgcatta

SEQ ID NO: 548088 - DNA, 75 bp, Homo sapiens
ctgccccgagggtctcctccagtagacggtacagcgaaggcagagagttcaggtcatcaagagagagggcacagg

SEQ ID NO: 548089 - DNA, 82 bp, Homo sapiens
caaaaagcataggcggaccatgataatttccccagagcgtcttgatccttttgcagatgatcctgataacttaagtgactct

SEQ ID NO: 548090 - DNA, 100 bp, Homo sapiens
ctactggacttcatgcttagatacatgtataacaagaactcacgtgctgtgtgtcagactgagctttccctgattcattctacaatccaagacttgctgc

SEQ ID NO: 548091 - DNA, 75 bp, Homo sapiens
caaaaccgtcctgctgcttgctgaccaaatgtacgactggtgctcctggatccccaatgcgcccccaaccatgcg

SEQ ID NO: 548092 - DNA, 100 bp, Homo sapiens
agttgctccaaaacctaagtacaacccatacaaacaacctggaggtgagggaatagccaggccagaagaaggaaggcctgtggtgagtgggacaggaaat

SEQ ID NO: 548093 - DNA, 75 bp, Homo sapiens
agctacagcagctgcgagacagtggcgagaaggtggaacagaggctgaagttgttcaagttggcgtctgagaagc

SEQ ID NO: 548094 - DNA, 50 bp, Homo sapiens
ccgggagttacaccgccaccgccaggaacctgggcaagtctggcctgcgg

SEQ ID NO: 548095 - DNA, 75 bp, Homo sapiens
tggagcgtgtcctgaaggagttccaccaggccgggaagcccatcggggtatttgtggtgcagcagattcccaaca

SEQ ID NO: 548096 - DNA, 107 bp, Homo sapiens
aggggagcaaggtgcaagagtccacaaagggacctgatgaagcgaagatcaaggatgatgactttgagttcactggcagccacctgacagtaaggaatggctactcg

SEQ ID NO: 548097 - DNA, 73 bp, Homo sapiens
gacaccatggatctcttcaggcacactacagaactaaatatgcatatggcttcccagttacgactcttcgatc

SEQ ID NO: 548098 - DNA, 83 bp, Homo sapiens
tcacaatgatcctgaaaggaaccagtacctgtgataaggatgtgtcacatatcctggagcaggaaaacttccacacatcattg

SEQ ID NO: 548099 - DNA, 100 bp, Homo sapiens
tgaaaacccgtatgttgctaaattgcttgagttgttcgaagatgccctgtgtactgtgttgcatctgacagagagacttttccttgaccacccgcataga

SEQ ID NO: 548100 - DNA, 82 bp, Homo sapiens
cctcctcctgctgctcttgggggccctggccctgaccgagacctgggccgaagctccaccatgaggcgaggtggatggagga

SEQ ID NO: 548101 - DNA, 97 bp, Homo sapiens
atttatccgtgtgcagccccaaactggaaagaagatgctaattaaagtgaaggtggtgatggcacttctcaaatactggccaaagactcacagtcca

SEQ ID NO: 548102 - DNA, 97 bp, Homo sapiens
tgctcccatcattgatgtggtgcgatcggagctctgcaggagtctgcaggtcacccggagcaggacggggaggagctgagccggaccctccacctgg

SEQ ID NO: 548103 - DNA, 90 bp, Homo sapiens
ccctgagtcactgcctgcgcagctccggccgcctggctccccatactagtcgccgctctctatcaatatcagctcacatcattgaaaaga

SEQ ID NO: 548104 - DNA, 83 bp, Homo sapiens
cagattcgcagtggtcgcttcttctccttggtgactcgaaaagccctgtttcctggtgactctgagattgaccagctctttcg

SEQ ID NO: 548105 - DNA, 100 bp, Homo sapiens
ccaagctgcgtgattatgcagaactgggctaggattgagatgctgacatcagaaggaacacagcctcaagcagcaaatccttcgtttcctcccagtcctt

SEQ ID NO: 548106 - DNA, 95 bp, Homo sapiens
ggcagacagcggcatacagaatgcctatgaccggcgtcgagaatttcaactgccagacctggtcacctgtctggagcaaaggaaaaagccatgga

SEQ ID NO: 548107 - DNA, 75 bp, Homo sapiens
acacgagttcaacgcccacctggtttgtcgcatgtgctgtatgggtctggtgagctgtaccttctttctggcagt

SEQ ID NO: 548108 - DNA, 96 bp, Homo sapiens
caccacgggcgtcctccggaaggcagatatgagatcctgactccaaactccattcccaagggtttcatggacgggaagcaggcgtgcgtgctcatg

SEQ ID NO: 548109 - DNA, 100 bp, Homo sapiens
ctggccaagatcaaggttcggaattactggacagctgatggcgatgaagtgtcctcttgctagcaccaataaaagatttctaattaacacaattaaaaac

SEQ ID NO: 548110 - DNA, 82 bp, Homo sapiens
cgggactgtgatggccagagagatgacgatcttagaatgatcaagtctcggcctctggattatacctttgttcctcgaactt

SEQ ID NO: 548111 - DNA, 100 bp, Homo sapiens
attaaagacaactgggaagacagacaagtaattgttgaaaaaggccaatgatgaggccaatcagagtgatacaagtgtctccttgtcagaacccaagagc

SEQ ID NO: 548112 - DNA, 76 bp, Homo sapiens
agctccatccgaatgtgtctgccccccaggagtgtttctcaggagctatcagaaactatcctcaccatggtagcca

SEQ ID NO: 548113 - DNA, 51 bp, Homo sapiens
ccgcctggctccccatactagtcgccggatagtggccaaagcctccaagaa

SEQ ID NO: 548114 - DNA, 75 bp, Homo sapiens
gattcgcagtggtcgcttcttctccttgagctctctttacgagaaaaggaagatcctggctggtcagcatgagga

SEQ ID NO: 548115 - DNA, 100 bp, Homo sapiens
cggcgctacactagagcagagtacgagtctgaggcggagggagtaatgttttccttccagcagggtggatggggagcatcgctggctgacaggctggtca

SEQ ID NO: 548116 - DNA, 100 bp, Homo sapiens
tatccccagtggagccggagtgcgggcgcgccccaccaccgccctcaccatgacgttcctgaatatgtttgttgacagcaatcaggatgctcgaagaagg

SEQ ID NO: 548117 - DNA, 76 bp, Homo sapiens
tggaaagatgacggatgaaaagaatgaacactgtccttcaaaacgaatttatccacctatcaatgtgctgccctca

SEQ ID NO: 548118 - DNA, 82 bp, Homo sapiens
agcaagcgcacacagttagaagagattcaacagaaggtaatgcaggttcccagtctaagtgggtgactttccaagatagagg

SEQ ID NO: 548119 - DNA, 98 bp, Homo sapiens
ggaagccacgtgcagacatctacaaccttcgatctcctgacgatgatgtaaattggagtcaaccaggtgaaaagaagttaactgggggatctaactgg

SEQ ID NO: 548120 - DNA, 90 bp, Homo sapiens
gcggcggcggccaggtccctgctgaatcacacgccgccatccgggaggcccagggaagcccctaaagacaatgaagagcgtgtgttcagg

SEQ ID NO: 548121 - DNA, 100 bp, Homo sapiens
ctcagccctggctccagaggatcatggcagctcctatgaggccatatacaaacagttcgacactgaccgatcagggaccatttgcagtagtgaactccca

SEQ ID NO: 548122 - DNA, 74 bp, Homo sapiens
gggaggaaggaacgaggcaaggagctaaagcagcgtgcgttcagccctggggacaactgtcatctgggaagtaa

SEQ ID NO: 548123 - DNA, 98 bp, Homo sapiens
cggaggctgcctcggcggagcagaggaaccacacgctgatcatggtgtcatggagaaactccagctgggcccagagattctgcagcgggaaaatccaa

SEQ ID NO: 548124 - DNA, 99 bp, Homo sapiens
caaaacgcccgtgcggaccacggcctgtcagcacgtgaggaatgtttcttgaacctagaggctcctatatcaagagtatgtggttatgacacaccattt

SEQ ID NO: 548125 - DNA, 100 bp, Homo sapiens
gcgcaccacagcccatccccagaagatcctggtcccctgctttaaccatcgaaaatgagctgctggagccagttctgcttctcggcaaggagcgatttgc

SEQ ID NO: 548126 - DNA, 51 bp, Homo sapiens
tgggccactgatgttttctcctaagaagcgtcgattagcaaggtaaaagta

SEQ ID NO: 548127 - DNA, 83 bp, Homo sapiens
ggcaagggtgtccgacggctggagcgaaagcgtggatacccatcaacgaagttttgatattggaattcagattggctatcagc

SEQ ID NO: 548128 - DNA, 100 bp, Homo sapiens
tggagcattggatttgctaaaggagcttaagaatattcctatgaccctggaattactgcaggcacggatgggcagaagcctttgcaggtatcagaagttc

SEQ ID NO: 548129 - DNA, 101 bp, Homo sapiens
ggtctcggctgagcggcggcggcggcaccaacggcaccaactattcgcggagctggaatgactggcaacccaggaacctagaaagattgtacaatgaatgg

SEQ ID NO: 548130 - DNA, 100 bp, Homo sapiens
gttccccaacggctccccgtcgtcctggtgctgcagcggcatgagccatgagcccaagtccccttcgctagggatgctttccaccgcgaccaggaccacc

SEQ ID NO: 548131 - DNA, 100 bp, Homo sapiens
ctgctcagtcggccaagaagccctgcccaggtcagaagagatcaattctacagaaatttccagtggttctgttgaggctttatggaattcagcatgtcaa

SEQ ID NO: 548132 - DNA, 80 bp, Homo sapiens
agcctcccgccggccgtctccttaacaccgaacaccgtctgcctcagccacctccctgacgctgtcccactgtgtggatg

SEQ ID NO: 548133 - DNA, 83 bp, Homo sapiens
cttacacgcagccattactgcagagatccagaaattggcgtgttagccaaggctttcattgaccaagggaaactcatcccaga

SEQ ID NO: 548134 - DNA, 100 bp, Homo sapiens
cctgcccaccaggaccgccatggggacacggcactgcatgctgctgcccgccagggcccagatgtggatgctgtggggcaccacctccttgaggaccaag

SEQ ID NO: 548135 - DNA, 100 bp, Homo sapiens
ggaattcagtactctgtaacacccagctaccaggaactttatattgctgttggaatatctggagccatccaacatttagctgggatgaaagacagcaagg

SEQ ID NO: 548136 - DNA, 100 bp, Homo sapiens
gttgtctcagtccagaatatcatgaacctgcacttgttgccaagtcttccatcttactagatgtgaaaccttgggatgatgagacagatatggcgaaatt

SEQ ID NO: 548137 - DNA, 78 bp, Homo sapiens
tggcttgtatctcagggttacgctccccaggtcccttgctccagtgccgcaggttcttcaaagctgcacagcattcat

SEQ ID NO: 548138 - DNA, 123 bp, Homo sapiens
tgtccacgccctcatcctcagagtccgtgaacctgggaatgtgctgcctgacgtacaaaagggactccgcagatgtgaggcactgtgtttagtcttgagtcagaggaggaggaataccctgga

SEQ ID NO: 548139 - DNA, 100 bp, Homo sapiens
ggggcaggaggggactagtggcccctcaaaacacgtttctggagaatattgttcggcggtccaatgcctctgcctgtgagtttctggatattgtagagct

SEQ ID NO: 548140 - DNA, 75 bp, Homo sapiens
ccccacgcacacattactccaacattgaggcccctctcctacccagataccgatgttatactgatgtgtttttcc

SEQ ID NO: 548141 - DNA, 100 bp, Homo sapiens
cgggggtggtgctggctcagtacatattcaccttgaagaggaagacggggcggaagaccaagatcatcgagatggccccttcacagatgtagtcactaca

SEQ ID NO: 548142 - DNA, 75 bp, Homo sapiens
taatgagcatgttgacagcatcgatgctagacagacaacagtgtttaagaatgaaagcctcaacgcagaatcaaa

SEQ ID NO: 548143 - DNA, 50 bp, Homo sapiens
ccctgctactgctggattagcgccaggagtttcataatagaagagcagag

SEQ ID NO: 548144 - DNA, 98 bp, Homo sapiens
ggcgggtctggagcccccatcctcctgcggcagatgacttcgaggccctgtgcaatgtgctacgcccccccgcatatagccccccgcgaccaggtggc

SEQ ID NO: 548145 - DNA, 82 bp, Homo sapiens
acaccaagcacatgttcatccactcggatgcagaggccaggatgtgggcccagccctgtgccaggaggctggctggaataaa

SEQ ID NO: 548146 - DNA, 90 bp, Homo sapiens
tccagcctccacatgtacatatgctcgtggtcccaagaagcatctgaagcgggtggcagctccaaagcattggatgctggataaattgac

SEQ ID NO: 548147 - DNA, 75 bp, Homo sapiens
cctgcctcagcctcctgattagctgggattacagtatttagcatttacgtgtggcttaatcagaggtggcttatc

SEQ ID NO: 548148 - DNA, 96 bp, Homo sapiens
aagtacctttatgaaccagtgtatcccaaactgtacagtggaagcctggtgcacggactatgccagcaactgctagcatcgacctctgtagaaagt

SEQ ID NO: 548149 - DNA, 98 bp, Homo sapiens
agcaatcctaccatgtcagccttcccagtagctggaactacagggtttccaaggcaagaccggccctccaggcccccccggcgtggtcggccctcagg

SEQ ID NO: 548150 - DNA, 97 bp, Homo sapiens
atattgtaaagctttatggagcctgcttgaatccagctgtgtttgatgtggacaagaagaaagggttgactctgattgagctctgggaaggcctgac

SEQ ID NO: 548151 - DNA, 100 bp, Homo sapiens
caggaacattgctgtggattcccagctcactgttaatgaagcggctgctcaactctgtgtgaaggataatgccctgctgacaagaagagatgagcttttt

SEQ ID NO: 548152 - DNA, 75 bp, Homo sapiens
taaggattccaagtaactcttatttgcgctaccttgatgaagcagacagagataaggagcgttacatgaaggaac

SEQ ID NO: 548153 - DNA, 73 bp, Homo sapiens
aactcctctccaccagcgccaagagcaaaaagatggcacctttgcagcagggggctacatgccccctctccgg

SEQ ID NO: 548154 - DNA, 97 bp, Homo sapiens
agccctccgggaggcttctctacagaaaattttcgtgctctgagcactggagagaaaggatttggttataagggttcctgctttcacagaattattc

SEQ ID NO: 548155 - DNA, 99 bp, Homo sapiens
tacgctacttttactcagagtttgaaggttgtgaccaaaagaggctccgggagactcatgcatctgtatgccgtgtgcgtggactgcctggaaggggtt

SEQ ID NO: 548156 - DNA, 100 bp, Homo sapiens
ctcaagtacagtgacctgcagaacttagccaagagtctgggtctccgggccaacctgaggggccatgaagcccccaggaggagaatcgagcaatcttttt

SEQ ID NO: 548157 - DNA, 75 bp, Homo sapiens
gagagcatgcgtctgccgcttctgtggtttctgtcggtgtagagaggagagagagtgaacagggagcggggcttt

SEQ ID NO: 548158 - DNA, 96 bp, Homo sapiens
cttgactcccccaaggccgaggtccgcggccaggtgctggcgccgctgcccctccacggagatgatgattattctccaccgtctaagagaccaaag

SEQ ID NO: 548159 - DNA, 96 bp, Homo sapiens
agaataacggctgcacctggagattgacgcagagtgggcggcggtggtgggagagtcccgtattctcagagtaaaagttgtttctggaattgatct

SEQ ID NO: 548160 - DNA, 74 bp, Homo sapiens
gtcctcgcacctaaagtcgcacctgcggacgcacacaggataaacatcacgatgctgctcatgaaatcatcgag

SEQ ID NO: 548161 - DNA, 50 bp, Homo sapiens
aaaatacgaaggtttctggctgggaaaagagcactggttgccattggtac

SEQ ID NO: 548162 - DNA, 96 bp, Homo sapiens
gaaaaagataaaaaagggagtgattgtagttcctgtactctttctacatgctgacgtgcattgacatggattggaaggtgctcacatggcttcgtt

SEQ ID NO: 548163 - DNA, 90 bp, Homo sapiens
catagctgtctggcatgggcctctccaccgtgcctgacctgctgctgccactgaatgcgtcaacctttgaggatgtcacccaggtgtcct

SEQ ID NO: 548164 - DNA, 82 bp, Homo sapiens
agcgaagctgctgcggttcctgagccggaggtgagaagccctaccactgcaactgggacggctgcggctggaagtttgcgcg

SEQ ID NO: 548165 - DNA, 100 bp, Homo sapiens
cctacattctctccctccttctgcaaggctatcatttcacagctgattcctgggagcacatccatttcattggcaagcattcccatggtttggcatggac

SEQ ID NO: 548166 - DNA, 50 bp, Homo sapiens
cggaggagcccgaccgacccgggagttctgggaaatcgttcattcattta

SEQ ID NO: 548167 - DNA, 89 bp, Homo sapiens
ggccacgcctgggctccagcagcatcagaacgatcgccgcggccggaagagttggcgctcggggcggactccttggaactggcttagcg

SEQ ID NO: 548168 - DNA, 82 bp, Homo sapiens
gcgagcgactgcggcgccgagccgggggatatgagactttctactcggaatatcctgagtgttgcgtggatgtaaaacccat

SEQ ID NO: 548169 - DNA, 98 bp, Homo sapiens
gggcacctagagacggatggtcgcacgcatgattgtcggcatctcacaggagctctgtgtgtcgtctgagcagtcgcgagaagatttccctccaggac

SEQ ID NO: 548170 - DNA, 82 bp, Homo sapiens
agttagaatggatccacttaccaaacctatgcagccttgcattgcatcctgaacgagtgttggtagcaacaggacaagttgg

SEQ ID NO: 548171 - DNA, 82 bp, Homo sapiens
cgacaagccgctggcagccgcggatctcaccgccgctcagggaattcatgatttgttcctgtagctgaaacatacattgaat

SEQ ID NO: 548172 - DNA, 100 bp, Homo sapiens
gccagatttcacctctgcaaatatgagagattctgcagaaggctcatctggggacaggtgacccttacacacctggattcccttccttcaatcacactca

SEQ ID NO: 548173 - DNA, 101 bp, Homo sapiens
ggaagatggcggccggcaagagcggcggtagcgcaggggagattacttttctggaagggcctctttattgctgtcaaagatgaggaccctggctcacagtc

SEQ ID NO: 548174 - DNA, 100 bp, Homo sapiens
acacaaactggtcagcgtttccctggagaggaagaggcaaggcaacatgagtgagaatgaggaagaggaaatttctcagcaagaaggcagtggggactat

SEQ ID NO: 548175 - DNA, 100 bp, Homo sapiens
gtttgctctgctcttccaacaccagtggaagatgatcacatcccaggcaaggattcactgaccttagtgtttgtggagaccaaaaagggtgcagattctc

SEQ ID NO: 548176 - DNA, 75 bp, Homo sapiens
ctcgtgctcatctcctactgtcccacggccaccgaagagggtgctgataagactgtgaaaggcccagatggactg

SEQ ID NO: 548177 - DNA, 82 bp, Homo sapiens
ccggagcgggcggctgagacaaaggcgacgtggagaccatcctgggcctcacaggagcgaccatgggaagcctcatctgctt

SEQ ID NO: 548178 - DNA, 99 bp, Homo sapiens
tacaagcggacacgggaatatatccgaagcctgaagatggttccaagtattccctatctagggtcccaggccataaaacaacggagagctgtacttgct

SEQ ID NO: 548179 - DNA, 89 bp, Homo sapiens
gatgctgagagagagcaagcgtttcagcgcctacaattacaggtgtcatggagaaactccagctgggcccagagattctgcagcgggaa

SEQ ID NO: 548180 - DNA, 74 bp, Homo sapiens
aagaaggcaaagtccgcaaagagccagcctgcccatctcagcactagcacagtgcatggtgcaacagagcaggc

SEQ ID NO: 548181 - DNA, 75 bp, Homo sapiens
cagcactctgggcgaaaattggatgtgaaaatgaagccagaccgaggaaccagcagcacaaacactgttggggca

SEQ ID NO: 548182 - DNA, 99 bp, Homo sapiens
acctttgactgcttccatgttggcatctgcccctcctcaagagcaaaagcaaatgttggccaggtgattggtgaaaacactaaacaaccctgagcccag

SEQ ID NO: 548183 - DNA, 75 bp, Homo sapiens
tatgagagttctgagaaggagaaagacacgtacaccaggggttggaaaaaccacactaggcaaagaacttgcgtc

SEQ ID NO: 548184 - DNA, 77 bp, Homo sapiens
ccaggactccaaaatggcgtcagttggtgagtgtccggccccagagattgccctcagtcccaataatcacgaagtgc

SEQ ID NO: 548185 - DNA, 100 bp, Homo sapiens
aaaaccagtgacgttttccacaggcatcaaaatggtacccggaaattaaagaggagctggaggagctggaccgcatcacagagcagacgctctttgacct

SEQ ID NO: 548186 - DNA, 75 bp, Homo sapiens
ggaatccaccggcgcagtttcatctagcgactgtgatgtgaaatttgaaagtaaagaacgaacagcatgtaaagg

SEQ ID NO: 548187 - DNA, 100 bp, Homo sapiens
cgaaagagcactggactccggaagctcttgaggatcttgcttgtccaaacccagaagacagtgcatgaagccaggggacatccgccatgctccaaacaac

SEQ ID NO: 548188 - DNA, 82 bp, Homo sapiens
agcgggagctggacggcgagcgcgagcggcgcgagaaataacctttggaaacatcagaagctactctccattgacctggaca

SEQ ID NO: 548189 - DNA, 50 bp, Homo sapiens
taccagtgcatcaggcctgaccccagtctacatcagcatcagcatctgcg

SEQ ID NO: 548190 - DNA, 90 bp, Homo sapiens
aggaagggcagcttggcagagcctcagctcccctgggacctgtggccgccgcccacagaccatgctcctggggcgcctgacttcccagct

SEQ ID NO: 548191 - DNA, 100 bp, Homo sapiens
gcacctgaaaatgagcaagaaaatcgcccagctcaccaaggctattttggcattctgctggatatatgttcgtaaataccaaagtcggcgggaaagtgaa

SEQ ID NO: 548192 - DNA, 83 bp, Homo sapiens
cggcagccttgcgctgctctaatggtccggacttccgtgtcaaattgtggctactaatttgccccctgaagatcaagatggct

SEQ ID NO: 548193 - DNA, 75 bp, Homo sapiens
gcggcggctgcggcccaatatagggccaattcctgtccccccagcagcatggcatcgtgtgctgaaccctctgag

SEQ ID NO: 548194 - DNA, 100 bp, Homo sapiens
gacctttcccgctggcgcgcagcctcagctagcctgactggctcatggagaaagcctacctaagaatgaagccgggacccggcagaatggctcctgtgaa

SEQ ID NO: 548195 - DNA, 102 bp, Homo sapiens
aactcgagctggagcctcggccaggaccggcgcgagaggcgtaacaaatgtggcaattattttggatctatcacctgtcatcataactggcttctgcttgtc

SEQ ID NO: 548196 - DNA, 100 bp, Homo sapiens
ctcgaagtgcgcaaacttgacactcaccctgaccggatcacctgctgttaccagctaccacccataacaagaccacaagaccaaaaatgtcaattgtgtt

SEQ ID NO: 548197 - DNA, 75 bp, Homo sapiens
taaacttaagtggaaataaactgaaagatatcagcaccttggaacctttgcttcttggacacttaatgattgttg

SEQ ID NO: 548198 - DNA, 90 bp, Homo sapiens
ggggaccacaagatcctcatcgacagttacagaatgtctgaaggggacagtgtgggagaatccgtccatgggaaaccttcggtggtgtac

SEQ ID NO: 548199 - DNA, 82 bp, Homo sapiens
gccggccgtgagctgcggcaggacggctggagataacgaaggaggcccaacttcattcaataaggagcctgacggatttatc

SEQ ID NO: 548200 - DNA, 90 bp, Homo sapiens
ggaaatctttgggatgctcaatgcctcgatgacttacgagccctcaaggggaagcattttctcctggaccccttgatgccggagctgctg

SEQ ID NO: 548201 - DNA, 100 bp, Homo sapiens
ctcccttcatgtctgggtcatggccttgcttgagagaactggttatactctggatgtaaccacaggacagaggaagtatggtggtcctccaccagacagt

SEQ ID NO: 548202 - DNA, 80 bp, Homo sapiens
ccgcctacaggagtatgatgcaaggaaacaaaccatcaggcctcccagaaagtatccgggatctgaaaatcaccaaatca

SEQ ID NO: 548203 - DNA, 100 bp, Homo sapiens
gccgtctcaggagccgcagcgcccgcgggcccgggtgcgggcccggcgccgcaccagcagaacggaagaaatctttcctgttttctgctctgtatgctgc

SEQ ID NO: 548204 - DNA, 90 bp, Homo sapiens
caaagcctgagagatggaaactactatgcatgtaaacaaatgaagcagcgctttgaaaggatatgtgccaggccctctcctgccacacag

SEQ ID NO: 548205 - DNA, 98 bp, Homo sapiens
cgcgccttcgcgcacaagatcaacaggaggaggacgcctttgtccgctgtgtctccgtcctagggaacctggctgaccagctctactacccctgtgag

SEQ ID NO: 548206 - DNA, 101 bp, Homo sapiens
gattttatgggaaaattaagcagatgctccagtttgagaaacctggatctgcgatctgtttgtgtgtaaacaggaacatcgataagtagtgtaaaaacttg

SEQ ID NO: 548207 - DNA, 75 bp, Homo sapiens
cttcaaagacgttctcaaggagaaggcagacctgggttccttgcattgactccatggagagtatatcacctgatt

SEQ ID NO: 548208 - DNA, 74 bp, Homo sapiens
atcgcttgaaccccggaggtggaggctacaggagggacattgcttgggcctccagactctgtggttgatgtggg

SEQ ID NO: 548209 - DNA, 100 bp, Homo sapiens
gaagagtaagaggttctgaatatgatgattttttggacgaattcatggaggcagtttcttccaagtggcctttttgaagatgtaactattagagctgggc

SEQ ID NO: 548210 - DNA, 73 bp, Homo sapiens
agaaaattactaaagaggagtttgccaatgaatttctgcctgaagataaggccaaatatgatgcaatatttga

SEQ ID NO: 548211 - DNA, 90 bp, Homo sapiens
cgctgggaattctccaccttaaagaagggaacactgactatgccaaatggagactacattgaaggttattttagtggagaatggggatct

SEQ ID NO: 548212 - DNA, 115 bp, Homo sapiens
tatccatggcaacctcaaaaggaaggacacagagatgatgcttcagtggctgcagcaggaaaaggtcattgagaaacagcgtgctgttgttgaatttgaggtcaatgaagacgat

SEQ ID NO: 548213 - DNA, 75 bp, Homo sapiens
gcttcctggacagcttgcagaaccattgaccctgctacgggaatggttatgaatctggctgatctcaaaaaatat

SEQ ID NO: 548214 - DNA, 98 bp, Homo sapiens
catatccgagggtgtcctgttacttccaagtcatcaccagaaagtgttccttgcctgtatctccccttggttcaatagctaccagatttttggaagag

SEQ ID NO: 548215 - DNA, 76 bp, Homo sapiens
atgctcatccataaaactgaagatgtgaatactctgatcactgtcgtcttcctgaaagatgagaagtaccattctt

SEQ ID NO: 548216 - DNA, 74 bp, Homo sapiens
agatgataaccaaaaaccacctgtgggtgaagggctaaatagcttagcagtgtctgcaaaaacgaatcttttcc

SEQ ID NO: 548217 - DNA, 98 bp, Homo sapiens
tgttcctgctgcagcagcccctggcgccctcgggcctcacgctgaagtccgaggcccttcgcaactggcaagataggaaccaaggctttagccttctc

SEQ ID NO: 548218 - DNA, 74 bp, Homo sapiens
tatccaaataaattgcaagcattctatccaaatgattcctggagttctgtaaagaaaacggagggtataccggg

SEQ ID NO: 548219 - DNA, 75 bp, Homo sapiens
aaactcaagaagagattagtgctgaagtagcagcaaagaacattactactggatggaaatccattccgagttcct

SEQ ID NO: 548220 - DNA, 90 bp, Homo sapiens
cttggaatcaaagataaatccaaatactgcatatcagaaacaacaggttttgctgttactgctcagtgtagtcacaccttgaataagaaa

SEQ ID NO: 548221 - DNA, 101 bp, Homo sapiens
tggaagcaaaatagcagctggctcagccgacagggatgtgatggacagcaccaccacccagaaatactggattgacatccagttgcgctggggggactatg

SEQ ID NO: 548222 - DNA, 100 bp, Homo sapiens
tgggaggacattgagtcaaaaatccctctaaatatggaggagcctcccgtggaggaaccggtggagctggtctcttgggcagcctgacatctggtccact

SEQ ID NO: 548223 - DNA, 101 bp, Homo sapiens
attggccttaagagaaggacggagccacatactgctgacggcccagaactggcagagagaaggatgaccggaaagaagggatgaccgcgtttgtggaaaag

SEQ ID NO: 548224 - DNA, 83 bp, Homo sapiens
cccagccccgccgccggccctcggtgcgcccggccgcctgcacccccagatgaaggatttgggggcagagcacttggcaggtc

SEQ ID NO: 548225 - DNA, 100 bp, Homo sapiens
caaacaagcttcattgttttcagctaacagtaaccccagatttgtagccaaaccgtgcgccatagccctcaacattcaggccaatggaccacaaattgct

SEQ ID NO: 548226 - DNA, 75 bp, Homo sapiens
ttcatatcattgtcttccacagatgtgtcaccaaaccagatggcctctccagaggagaagtgtcaacaagtcttg

SEQ ID NO: 548227 - DNA, 72 bp, Homo sapiens
ggcagccctctgccttcctggccgctcccaaatataggtactccaaagattcaggtttactcacgtcatcca

SEQ ID NO: 548228 - DNA, 97 bp, Homo sapiens
tggctggagcaattgcactcatcattggctttggtatttcagggaagaggaagaacgtctgagaaataaaattcgagctgatcatgagaaggccttg

SEQ ID NO: 548229 - DNA, 83 bp, Homo sapiens
ctcggcgctgccgtctctggaggagtactggcaacaggttttaaaatcaaagatgggaaaatcggagaaaattgcccttcccc

SEQ ID NO: 548230 - DNA, 59 bp, Homo sapiens
ttctgtctcttgctacccacgtgaaaagctggcgcccatgcggctctacacgctctcca

SEQ ID NO: 548231 - DNA, 83 bp, Homo sapiens
agtgttgtgccagcctacaggaggaaaggccagactcacagaagaacacaccacagccatcagcactggaatgcaaagaccag

SEQ ID NO: 548232 - DNA, 100 bp, Homo sapiens
ggatgtttgcttctgaggaagctggaagctgcagccacaatgtgcctttgcaggggagcctgagagccacagctggatcagctcctttgtggcagtaaag

SEQ ID NO: 548233 - DNA, 90 bp, Homo sapiens
cgggaccgcctgagctttctacaccggtttctccttggaccaagatgactgatggaaaactctccacctctacaaatggcgtagccttca

SEQ ID NO: 548234 - DNA, 118 bp, Homo sapiens
ccgctgccgccgccgcgggagccgctgcccgaactcccggcccgaactccaggtgctggagaatctggtaaaagcaccattgtgaagcagatgaggatcctgcatgttaatgggttta

SEQ ID NO: 548235 - DNA, 139 bp, Homo sapiens
cagccccttccggcagcacaagaccaaagacaagcatgagatcgaccgcatgacgctgacgatgacctccgaggaagaactcttcagcaccaatgaggaaagtcccgctttcgtggagttccttgaatttcttggccag

SEQ ID NO: 548236 - DNA, 49 bp, Homo sapiens
gcaccataggccgaagcacccggccaagctacatcagtgatgtgggacc

SEQ ID NO: 548237 - DNA, 74 bp, Homo sapiens
accgagcgcctcgacctcggtctgagctttctaaaaccaatttttccaacaacaacgatttccgtgctcttctg

SEQ ID NO: 548238 - DNA, 76 bp, Homo sapiens
ctgagagtcaccacaaggccaagggtggtggaggtggatacagcagtcggagaacatctggcagagacaaatacgg

SEQ ID NO: 548239 - DNA, 83 bp, Homo sapiens
ctgtgcccaaccccaacccccacgagtccaagccgacagagcgggatgccaccagcttgtccaaagggaagttccaggagctc

SEQ ID NO: 548240 - DNA, 87 bp, Homo sapiens
catcgtggtggtcggatttcaccacaagaagggctgccaggattctttctactaatccagatacttgttgaagtgctgactagtttc

SEQ ID NO: 548241 - DNA, 73 bp, Homo sapiens
tttttccagagaagagaagctttactggtgttccagccctaagaaactaattctgaagcaagcccttatagtt

SEQ ID NO: 548242 - DNA, 82 bp, Homo sapiens
ttcggcagtccacccaccgccgccgcctcccaggctcccgagccagccgggaggacacttactacagctgctcagaagcacc

SEQ ID NO: 548243 - DNA, 100 bp, Homo sapiens
agtactttgtgctgacagcagcacattgtttcactgtggatgacaaggaacactcaatcaaggtcagcgtagctcctgttcgacacagtggagaccatgg

SEQ ID NO: 548244 - DNA, 49 bp, Homo sapiens
cagtggtcgcttcttctccttggggtctagtggggatgagcgggcaatg

SEQ ID NO: 548245 - DNA, 98 bp, Homo sapiens
cgcgggccgggaggggacggccgccggagccgcgaggccaagcttgccgctgttccgtaacccagtgattccagtcttggctgtggtatgaatcactt

SEQ ID NO: 548246 - DNA, 100 bp, Homo sapiens
gtgtatcgaaagctgggtgtttatgaagttgaagaccagattacagctgtcagcttatgcacagtaagggcactgctccaggctattctccaaacagaag

SEQ ID NO: 548247 - DNA, 82 bp, Homo sapiens
cagaattcggccatgagccgctacatactcatcatggggctcctgtacaaggctgaaggggatgctaagggagataaagcaa

SEQ ID NO: 548248 - DNA, 100 bp, Homo sapiens
cctcacctttctcacgatcccattttatttgcaaaagtggtgcgcataggcaagtcatttatgaaggaggggtctaaattatggataataatggaatacc

SEQ ID NO: 548249 - DNA, 100 bp, Homo sapiens
ctctggtggaaaagactttatggctaaaaggcttaacccaggcatttggagggtttctcatttggcctggaatattaagtgaacttgacgttgatgtaaa

SEQ ID NO: 548250 - DNA, 50 bp, Homo sapiens
cctcccaaagtgctgggatgacagacatggcagggaggtttaatagacat

SEQ ID NO: 548251 - DNA, 82 bp, Homo sapiens
ggccagggaaccctggtcaccgtctcctcagtcccctgcagagagctgtgacctgctgggtgacatccagacctgcatcagg

SEQ ID NO: 548252 - DNA, 51 bp, Homo sapiens
gtcaaggcagtcaagctgcggcgagatagagctaaagttgcagacaagatc

SEQ ID NO: 548253 - DNA, 100 bp, Homo sapiens
ccgcgggggaggcggcggcgccaagcaagtgctctacgtgcctgtcaagaccacggtgccccctgataagtgccgatgtgccgtgggcagcatcctgagt

SEQ ID NO: 548254 - DNA, 100 bp, Homo sapiens
accagcagcaaagaagtgctatctggaaagagagctcggggtgtggttttctctcggttgtgcctatttggccttggaagactatcaaggttcagcaaag

SEQ ID NO: 548255 - DNA, 90 bp, Homo sapiens
cacatataggtggattaactgtctggcaaaggcaggaattgaatgatctggcacgggaccctccagcacagtgttcagcaggtcctgttg

SEQ ID NO: 548256 - DNA, 75 bp, Homo sapiens
atttttgttactcttcagtacaatgtcaccctcccagcaacagaactgataaatttcaaacggaagagagtggca

SEQ ID NO: 548257 - DNA, 74 bp, Homo sapiens
cagaaatagactcatcaaagcttatgaaaaagttggatgtcagttaaggctatttcttttagaagagatgagag

SEQ ID NO: 548258 - DNA, 127 bp, Homo sapiens
gtgagttgttgctcccgcctgagcccagcccccagaaaggattgtgacatatcgttggacccagaattgaggtgctggagaatctggtaaaagcaccattgtgaagcagatgaggatcctgcatgtt

SEQ ID NO: 548259 - DNA, 100 bp, Homo sapiens
tgaaggtgaaacagattggaaattaattgctatcaatgcgaatgatcctgaagcctcaaagtttcatggtagacgttacatccaagaggaaataatccag

SEQ ID NO: 548260 - DNA, 100 bp, Homo sapiens
tatgaatgccgggatgctgtgaacgagtgtgatattactgaatattgtactggagactctggtcaggctgaagggtatgtgattggcagctgtattaaac

SEQ ID NO: 548261 - DNA, 74 bp, Homo sapiens
atcatgagcgatgttaccattgtgaaagaaggttgggttcagaagagggatatcattgacaactgtaagctggt

SEQ ID NO: 548262 - DNA, 100 bp, Homo sapiens
ctcttcctctggcccgaagccttcctttatcgctttcagcagaagatggctgtgccacccacgtatgccgatcttggcaaatctgccagggatgtcttca

SEQ ID NO: 548263 - DNA, 100 bp, Homo sapiens
actggactgcagtcacagtggactcccaaggggcagtaatctatgccagcaattatgacaatgttagcagaccatgcagctcgtcagctgcttgatttca

SEQ ID NO: 548264 - DNA, 80 bp, Homo sapiens
caccatcctgctcggcgtctggtatctggtatgtgaggagcagcgctgtgaggaggaagtcttccccctggccatgaact

SEQ ID NO: 548265 - DNA, 100 bp, Homo sapiens
aaagaaacttcctcctggaggaatacctggcattgacctctcagatcccaaacaactggcagaatttgctagtgagaaagatcagtctaaagaaaaggag

SEQ ID NO: 548266 - DNA, 75 bp, Homo sapiens
ctttcccaagccagggtgtgcggagcttccctgtactgcagccaagatgtccagggtgctgcagaaggacgcgga

SEQ ID NO: 548267 - DNA, 100 bp, Homo sapiens
ttaaaaagcagtctaaacctgtgaccacccctgaagaaattgcacagtttcgccgtgaggaagatgcggaaaaggctgtgattgacttgaataaccgttg

SEQ ID NO: 548268 - DNA, 50 bp, Homo sapiens
cttttggatagtgatgggaaaagagcaaaatatgctgtgaattccatcaa

SEQ ID NO: 548269 - DNA, 100 bp, Homo sapiens
gcgagacgcgcagcgccggcgcccgggagacccaggaggagcccgcagagataattgacgaccttgccaacctagtggagaacacagatgaaaaacttcg

SEQ ID NO: 548270 - DNA, 85 bp, Homo sapiens
tcagggatgagtcatgtggcagtggaaaatgcgctcgggctggaccagcagggctttgttcgcgggggtcacagctctcatggct

SEQ ID NO: 548271 - DNA, 80 bp, Homo sapiens
ggcaggcgagattgcctgacccaggcctgctcggccctcacaggtgtactaatggtcacttgatgtgcgctggctgtttt

SEQ ID NO: 548272 - DNA, 97 bp, Homo sapiens
cctcttctgatttcaggtttgagtatcttagctctagcacaattacttggactagtttatatgaaatttgtggagagtaatgccttctagctttttc

SEQ ID NO: 548273 - DNA, 90 bp, Homo sapiens
gccacagcatcctccagcacctcagatttgttcccgacaaggagttttctggttcagaccgtagacagagaggccgagaaggaccagtgc

SEQ ID NO: 548274 - DNA, 75 bp, Homo sapiens
tgaagagacacagtatggtagccacacccccaggagaaactcccatgtatggaatcccactgtatgatttataaa

SEQ ID NO: 548275 - DNA, 90 bp, Homo sapiens
ggttggcaagtcgaacaaagtcagctttctccaatctttctacatcccagaatgttaagacatcccacctgaaacctgaagcgcatccta

SEQ ID NO: 548276 - DNA, 75 bp, Homo sapiens
ggcggcagcggagagcgagagaggggagcagggacttgccatgaggtgttgaagccttgtttcactgagttggag

SEQ ID NO: 548277 - DNA, 76 bp, Homo sapiens
gacgcgatgttccgccggagcttgaatcgttttttggttaccacagagaagcgcttcctcaaagacagtttgtaca

SEQ ID NO: 548278 - DNA, 82 bp, Homo sapiens
atgccgctcctaagcctgcacagccgcggcggcagcagcagtgagaggaggatacgaagcgttttcggcttcctgcccggag

SEQ ID NO: 548279 - DNA, 80 bp, Homo sapiens
cagcgcctgttcccggggcagatccaggttcaggttttaaaatcaaagatgggaaaatcggagaaaattgcccttcccca

SEQ ID NO: 548280 - DNA, 74 bp, Homo sapiens
ccacggcggagacccccgccctcaactgagatgccttcaattaagttgcagagttctgatggagagatatttga

SEQ ID NO: 548281 - DNA, 96 bp, Homo sapiens
ctggtgcggagccagcctgggtctcagccccgcgtacggcctttcacgagtcttcaagccttcagactggactattcagggattgctcttctaatt

SEQ ID NO: 548282 - DNA, 83 bp, Homo sapiens
ctcaccccgcggccgcaccttcccgccttctcaggaggcaacgcacgggccacaggcatgttcctgcagtatacagtgccggg

SEQ ID NO: 548283 - DNA, 100 bp, Homo sapiens
acagagaacagaagctcagagaagtgaagcaacttgcccagctatgagagacagagccaggatttgaaaccagtagaaaccattgaaggttttcagtgtt

SEQ ID NO: 548284 - DNA, 100 bp, Homo sapiens
tttcagttctttggaattccattcttttccttattcttctgatgtggatccagatgaaacctggattggcatctatacagtcaaggattgctatcctgtc

SEQ ID NO: 548285 - DNA, 75 bp, Homo sapiens
tattacaagactacggagcataggaggaaaattcatcatctggctgccatgatggcggaggagctgaagaaggag

SEQ ID NO: 548286 - DNA, 75 bp, Homo sapiens
gggggcagtgggcatcggggtggcctgcctgcagaagcgccctcgagaagtgtctaaaggagacagttgatagcc

SEQ ID NO: 548287 - DNA, 98 bp, Homo sapiens
cctgatgtgtggacggatcaccaagcgagtgacacgagagctcaaggacagagtggatgtaactgaaattcagatagctttagtgattgtctttgtgt

SEQ ID NO: 548288 - DNA, 75 bp, Homo sapiens
gcttccccggacgggttgagtgctcctgcttagggtcttactgaagtaacacaaagcttaaaaatggaaaatgaa

SEQ ID NO: 548289 - DNA, 82 bp, Homo sapiens
cgccggccgagggtggccctaggggcagcgagcaagacagcaagcaggttgattcttcaccacactgaaaccattaggaaaa

SEQ ID NO: 548290 - DNA, 75 bp, Homo sapiens
cacagaatagacctgaagacaaaaatccagaagtacaagcagtctggtctggtgagctgtaccttctttctggca

SEQ ID NO: 548291 - DNA, 75 bp, Homo sapiens
gatgattataggcgtgatgatagaggtcctggagtacaatgccattggaggcaagtataaccggggtttgacggt

SEQ ID NO: 548292 - DNA, 76 bp, Homo sapiens
gcggacacggcggctcagatcacccagcgcaagtgggagaggaagaatacaagcgattgagtgaagcactagcaga

SEQ ID NO: 548293 - DNA, 50 bp, Homo sapiens
ccggtctctgttccgcaggatgactgttggcaagagtagcaagatgctgc

SEQ ID NO: 548294 - DNA, 100 bp, Homo sapiens
aagcagtaagacataagaggttgtggtgctcttccggatgagaagtgcttagattctggatacattttgaagtgtgtgatccagtcttgggtgacaagtg

SEQ ID NO: 548295 - DNA, 123 bp, Homo sapiens
gtgttcgtgcactctgccgaaggcaacgagttctggagcgccctgcttgagaaggcctatgccaagaccagttgctcttctgtgatgactgcgatcgtggctaccacatgtactgtctcaccc

SEQ ID NO: 548296 - DNA, 98 bp, Homo sapiens
gtggctgagaactgtgtcttcctggagactaggctggcattttgactttgggatcagacctattgtgaccgcctggtgcaggacacgcctttcctgac

SEQ ID NO: 548297 - DNA, 97 bp, Homo sapiens
tttacagagtatggaagacttgcgatggaagaaatctaccagaaaccatttcagacctttgaaactcacaactctacgacacctctacaggaaagaa

SEQ ID NO: 548298 - DNA, 100 bp, Homo sapiens
tctgcaaccccgcagagcgcatccatcaaagctttgcgcaacgccaacctcaggcgagatggagaccaagacacattccaccccagtggggggtcccata

SEQ ID NO: 548299 - DNA, 100 bp, Homo sapiens
cacaactgctcgcgtgacgaccgcattcgtggcaggtccccgcggaagccgcggtgtcggcgccatggcggagctgacggctcttgagagtctcatcgag

SEQ ID NO: 548300 - DNA, 82 bp, Homo sapiens
cagaattcggccatgagccgctacatactcatcatggggctcctgtacaagcctgtcaggattggagctgctttccgagcac

SEQ ID NO: 548301 - DNA, 80 bp, Homo sapiens
aatcctggatggaagatagcttgaacagggctgacaacatttttccttttccggtcagtttaggggctggtgcaaaggat

SEQ ID NO: 548302 - DNA, 82 bp, Homo sapiens
tttaacaggacctacaagctctattcctacaggtttttctatatgagtggagaagacagctgttaccagggaggtcatacaa

SEQ ID NO: 548303 - DNA, 51 bp, Homo sapiens
tttagcctcaggaggcagctatccaagttctctgtggacattgactcggag

SEQ ID NO: 548304 - DNA, 74 bp, Homo sapiens
taattttgtggccttagctacaggagaggacttgccggagcagccttacttgcagcctccactcagcatcttgg

SEQ ID NO: 548305 - DNA, 111 bp, Homo sapiens
tttggataaagaccaagaagtgggattactggattatatgagctgtaggtaaaacttgcctactgatcagttacacaaccaatgcatttcctggagaatatatccctactg

SEQ ID NO: 548306 - DNA, 76 bp, Homo sapiens
atccctacgcgtccctttgggtttagcacgatgagctcaatcggcactggggttcagttccggaaggtgtcttaga

SEQ ID NO: 548307 - DNA, 100 bp, Homo sapiens
ctctgtgtgcccaggatgcgccggcctccaggtggaagggcatcaagcctactgtcacgattctctcgagaggaatttccgaccctgcaggcggctggcg

SEQ ID NO: 548308 - DNA, 75 bp, Homo sapiens
agtcagactcccgaaccattgctccaaatatccgttgaagcagggacatggcttgcagtgtggcaggcataactt

SEQ ID NO: 548309 - DNA, 99 bp, Homo sapiens
cgtgactgacctgcgcgcccgcctcggcccgcacgccaagcacgtggtgggctatggccaccttgagtgtgaacatggctacgcctcttcattcccgtc

SEQ ID NO: 548310 - DNA, 74 bp, Homo sapiens
tctaggccttttagaaaacatgatgaggacggggacttggttgccttttccagtgacgaggaattgacaatggc

SEQ ID NO: 548311 - DNA, 75 bp, Homo sapiens
cgggccctgtgtcttgcaggagtaccagcagttcaggtggggaagctgaggcaggaagccctttagtcacttgcc

SEQ ID NO: 548312 - DNA, 100 bp, Homo sapiens
gctgcggggccgcatccagctgcgggagcagctgccccgctacctcatgggggagacgcagctgtgcaccacaagattctggaacttttcaaagcctgac

SEQ ID NO: 548313 - DNA, 98 bp, Homo sapiens
gaaaaagttaaaatcaccaaggtgtttgattttgctggtgaagaagtaaggcttgagaaggagaaagcagaaattgaacgcatgcgaaacctgactga

SEQ ID NO: 548314 - DNA, 100 bp, Homo sapiens
caacctgaacgtcaccgaggagaagtaccaggaggcgttggccaaggctgttgttggcctactgtacccctgtatcgacagtcacctcggagaaccccac

SEQ ID NO: 548315 - DNA, 74 bp, Homo sapiens
aagtggtgatgcaagaagtttctaggaaaggccggacaccaggattggcagccaccatttgcatgtgatgttga

SEQ ID NO: 548316 - DNA, 100 bp, Homo sapiens
gttcagatgggacttccccgcgtgacagcacagagataacggccagccctgggcgaaggttatgatgtgattgctcaagcccaatctgggactgggaaaa

SEQ ID NO: 548317 - DNA, 83 bp, Homo sapiens
gctattccggcgcctccactccgtcccccgcgggtctgctctgtgtgccatggacgggctgatcagctgaccgaagaacagat

SEQ ID NO: 548318 - DNA, 100 bp, Homo sapiens
cttcagaaaaagcatccccgaggaggaagacgaatcgttaaacatctgaaagggtcaggtatctctcctaaatgtgtgatcaaggaattaccaccaacag

SEQ ID NO: 548319 - DNA, 75 bp, Homo sapiens
gtacggcagcagtctgggaatgccaacacagaaaccttgccatcagggaagccagcagacctgcagaacttggct

SEQ ID NO: 548320 - DNA, 83 bp, Homo sapiens
gttcccgctgcgctaggggaagcgggcagaagctggcagggcggagatgctggaccacgccgtcctgcttcaggtgatcaaag

SEQ ID NO: 548321 - DNA, 75 bp, Homo sapiens
gaaaatttcaaagtaaaggatattattagaattctgccatgcaagtatggaacccttcagatcaaagcttaccaa

SEQ ID NO: 548322 - DNA, 60 bp, Homo sapiens
gaaaattagagtgaatgtagttgcaccaggaactcgaatcatttatgacagaaagtttct

SEQ ID NO: 548323 - DNA, 100 bp, Homo sapiens
gagcacatattcttatcatttaggaaatcaaaatcaccatttgcagtttgcaagcatattttgggccccagttgtgacagcgttgaggaagatatgaatg

SEQ ID NO: 548324 - DNA, 98 bp, Homo sapiens
cggaagatggcggccggcgaaaggagctggtgcctgtgcaagttgttgagtcttccgtgtgtgctaagatcgtgcagctcctggggcagaatgaggtg

SEQ ID NO: 548325 - DNA, 98 bp, Homo sapiens
cccgaacaccgcgccttcggaagcccgttcggcctggaggagccgcagtgggtcccggacaaggagacccgtgcctgtatattccacgctttgcgcac

SEQ ID NO: 548326 - DNA, 116 bp, Homo sapiens
ggcccggggggcccagctcccgtagggagccgtgggcgctcggtgcccgggccgggcaggtcaaaatgcagatcttcgtgaaaacccttaccggcaagaccatcacccttgaggtg

SEQ ID NO: 548327 - DNA, 100 bp, Homo sapiens
attgctcaaaaggcaggaatgatagtcagacgtgttattgctgaaggagacctgggtattgtggagaagcatgaagagctaatgctaggggatccctgcc

SEQ ID NO: 548328 - DNA, 100 bp, Homo sapiens
ggagtcaactcaatgtgctcaaagccctcatgaacggctccgagagcaggttcttcgtgagttcctcgcagggccggtcagagctacacattgagaacct

SEQ ID NO: 548329 - DNA, 89 bp, Homo sapiens
ctgagactctgctgggggagatggaggcgaagacaagagagctcattgatttcaggtatgctgctgaaagtgggaatcctctacattgg

SEQ ID NO: 548330 - DNA, 82 bp, Homo sapiens
gctggacccgctcaccatctacggcatccggtcagacggttgatgatgaagcgccggccgtgtaaatgaagatcgggtgagg

SEQ ID NO: 548331 - DNA, 83 bp, Homo sapiens
cgcgggacctctccgggccatgggctcttgtcaggatggtgaagctgttcatcggaaacctgccccgggaggctacagagcag

SEQ ID NO: 548332 - DNA, 100 bp, Homo sapiens
aacccaaggaaagtttttgaacttatgggaagcattgtcactgagattgcttgtggacggacactcaatcacttgtcggaagtccctcaacccgtatagc

SEQ ID NO: 548333 - DNA, 74 bp, Homo sapiens
tgcaaaaaaggaggccaaagactttgggaggaacaggaagagaagagtgtggcctcctagaaatctagcacgga

SEQ ID NO: 548334 - DNA, 105 bp, Homo sapiens
tctcgctgtgagacatgtctgagactcctgctcagtgtagcattaagggatcgcttacacctgagacgaactacagaacagcacgtaccagaggtggaagtccaa

SEQ ID NO: 548335 - DNA, 74 bp, Homo sapiens
ctaagaaacccattccattggagaacccaaaggaaaagcgaccagggaggagatatcaccaaacatgatggaac

SEQ ID NO: 548336 - DNA, 75 bp, Homo sapiens
ccgcgcaccgcggacgagcaggcccaggccaagactaaggggctgcagagcggggtggacattggcgtcaagtac

SEQ ID NO: 548337 - DNA, 87 bp, Homo sapiens
cggctgcaggatgggggactccaaagtgaaagtggcggtgcggatacgacccatgaaccggcgaggagctccttcccttaacagagc

SEQ ID NO: 548338 - DNA, 75 bp, Homo sapiens
gttgaagccacacaaagaacaaattgcagttgtttgaggtgttctagctgagcgtttaagagcatggactctgga

SEQ ID NO: 548339 - DNA, 85 bp, Homo sapiens
ttctttgtggtttatctaaaaaccaaaggcttcaacggaccacaccaaaatgccatctcaaatggaacacgccatggaaaccatg

SEQ ID NO: 548340 - DNA, 75 bp, Homo sapiens
cagcttcacctggccgggctgcgtcgcttcgatgccgcgcaggcatctctgggaaaggacctggggctggtgagg

SEQ ID NO: 548341 - DNA, 87 bp, Homo sapiens
gcctcctacttagaatatgccttccggaaatgtggtggtcctgctccatgatgtccgtgatgtgagcgtggaggaggagaaggtccg

SEQ ID NO: 548342 - DNA, 75 bp, Homo sapiens
gccgcgagctcctggaggcggcgggatggaggcggcggccggatcttttgccagaaatgagggcatactggcctg

SEQ ID NO: 548343 - DNA, 100 bp, Homo sapiens
aggtgaatttccatgtcaacatagtccagaccaagatcactccatggatgaaatgacagctgtggtgaaaattgaaaaaggagttggtggcaataatggg

SEQ ID NO: 548344 - DNA, 50 bp, Homo sapiens
aggtggagccaccagcctctccctgaatatgacagatacctagcatctag

SEQ ID NO: 548345 - DNA, 100 bp, Homo sapiens
gttcagcttcgaaggcgacttcaagacgcggcccaaggtgtcccttggcggcgcgagcaggaaggaatggcggcgctagatagtaaggcatcagggaaga

SEQ ID NO: 548346 - DNA, 100 bp, Homo sapiens
cccgtttccctctgtgcggcggccggcgggaccataagggcttaactcatatatttaacccccctccaaaaagtcacgagaagagaatgccttctagatg

SEQ ID NO: 548347 - DNA, 71 bp, Homo sapiens
agaaggtgtactcctttctattttaaagagccaagcctcagagagaaatcgctgataaagatgggaacaat

SEQ ID NO: 548348 - DNA, 146 bp, Homo sapiens
agtcgatgctgcgaaaagaaaagctgtggaaaccgaaatgagactccatcggacccagtcataattgacagatatcaaatggatccactataaaagtctttaagaagatagcaaattttacttcaggtaaccaatataatattgtt

SEQ ID NO: 548349 - DNA, 98 bp, Homo sapiens
cccccaaagatgagatttacctgtgagatgtttcatcccaacagcacttcgaggagaaattgcgcctctgaaagagaacgtgagccacgtcaatgacc

SEQ ID NO: 548350 - DNA, 80 bp, Homo sapiens
ttggccaccaagacctgggaacaagtcaaaactacacgcagtacatccctctgtccatatatgacctgcagacgtggatg

SEQ ID NO: 548351 - DNA, 123 bp, Homo sapiens
gtgaaaagatctgctgcaaggaactgatagcttatggttctccattgtgatgaaagcacatggtacaggctgaagactttaagtgacaagtcaagagaagcaaaagtgaaaagcaaacccagg

SEQ ID NO: 548352 - DNA, 82 bp, Homo sapiens
aagtacagggtcatcaagggcaataatggagtgaagaaagtgaagtgttacaacccacagcatcatatgtgataccataatg

SEQ ID NO: 548353 - DNA, 100 bp, Homo sapiens
ttttgcaggctcgtggcggtcggtcagcggggcgttctcccacctgtagcgactcagctatctcacgtgagagggcagtggaactccttaggaaatgtct

SEQ ID NO: 548354 - DNA, 74 bp, Homo sapiens
cggaggcgaccgccatggcgttcctcaaactccgtgaccaggagtatgctgctgctgttccgctttgcgtcctc

SEQ ID NO: 548355 - DNA, 134 bp, Homo sapiens
tcgctccgtggccttagctgtgctcgcgctactctctctttctggcctggaggctatccagcggggatatgagactttctactcggaatatcctgagtgttgcgtggatgtaaaacccatttcacaagagaaga

SEQ ID NO: 548356 - DNA, 75 bp, Homo sapiens
tgcagagccccccggaggaggagcccgaataccaccccgacgcctcagcccaagagacaaggtctcaccatgttg

SEQ ID NO: 548357 - DNA, 73 bp, Homo sapiens
cagaatcgagagggcctgagggccctgcagaaggatctcagcctctctggttcaatgtggcttaattgtggtg

SEQ ID NO: 548358 - DNA, 78 bp, Homo sapiens
cacagaggatgatgctgactttgatgaaggttttgattcccaccatggccatcacccagtttcggttatttaaatttt

SEQ ID NO: 548359 - DNA, 75 bp, Homo sapiens
gctgatggagctcaagaccagggccctgcagctggaagaggagctgttccagagatgacctgatcagagccatca

SEQ ID NO: 548360 - DNA, 87 bp, Homo sapiens
ttatcctggtcatcttctatttccaaagagcaggccgggctctcgccatgggtcactgtcgcctctgccacgggaagttttcctcga

SEQ ID NO: 548361 - DNA, 75 bp, Homo sapiens
gcggctgccgcacaatcccgggttgtccgggtcctgtcaatgtcacttgactggattgttgctgacatcttggcc

SEQ ID NO: 548362 - DNA, 43 bp, Homo sapiens
aagaacactgagaaaatctttgctcctgcaaaacagctggcac

SEQ ID NO: 548363 - DNA, 50 bp, Homo sapiens
ggaggaatttccgtgcctggccccatgatcaggtcgcagccagttccccg

SEQ ID NO: 548364 - DNA, 75 bp, Homo sapiens
tggctcagcccgttcgctggactgcaaaccgagctcccgtctgccttgcagggaaattcaactactgaggaggtt

SEQ ID NO: 548365 - DNA, 88 bp, Homo sapiens
cttatgttatgggctatttgtgtagcagaagagttctaaagttcctgttgcttcagacaatggatgagcaatcacaaggaatgcaagg

SEQ ID NO: 548366 - DNA, 115 bp, Homo sapiens
gcacctgctggggctgcggctccgtggcctgtaccctgtgtggcctcgtggagacacaatgtttgcacgaggactgaagaggaaatgtgttggccacgaggaagacgtggaggga

SEQ ID NO: 548367 - DNA, 91 bp, Homo sapiens
aaaagatctctctacttctcctaagggaaaggtggcccagacagcgtgtatgtcagcttgcaagcatttagccacatccttgatgcaactt

SEQ ID NO: 548368 - DNA, 99 bp, Homo sapiens
gtggacagcaccctggctttcaacacctacgtccacttccaaggcaaaggccaggatggaattggtagcaaggcagagaagactctgggtgactttgca

SEQ ID NO: 548369 - DNA, 75 bp, Homo sapiens
agtcccagtaactcggaatgcggagccgctcgtctcccgtcttttttaaggatgtgatggtggcaggtgggatgg

SEQ ID NO: 548370 - DNA, 83 bp, Homo sapiens
cttcggagtacctgcgctatgaagacacgcttcttctggaagaccagccaacagatcccacccctggggaagcactactccca

SEQ ID NO: 548371 - DNA, 89 bp, Homo sapiens
atgggggccgtcctgaggagcctcctggcctgcagcttctgtgtgctcctgagagggctattgagtggccagacttccccaacaaatgc

SEQ ID NO: 548372 - DNA, 100 bp, Homo sapiens
cggagcccgcgggcctgacacgcggcgggacatgcaggtgctacagaatattttagaaacagaaaatgaatattctaaagaacttcagactgtgctttca

SEQ ID NO: 548373 - DNA, 82 bp, Homo sapiens
gcaagcggaggtgctgggagcgagttggctgctattactataacaagcgcattctgcacaagaccaaggggaaacggttcac

SEQ ID NO: 548374 - DNA, 75 bp, Homo sapiens
gctctgcgcggctttttgagcggtcccgcatcaaggctctggcagtgatgatttactggaggattcagacagtga

SEQ ID NO: 548375 - DNA, 75 bp, Homo sapiens
actcttctgacctccgcgcgacgtacccgccgccgccgttggctggagcttccccgggcgctgcctggacaggcc

SEQ ID NO: 548376 - DNA, 82 bp, Homo sapiens
ccctcagaacactattttggtgcagactttgctgagggtgacccagatatttaagctatggttccggtcccaaacgattccc

SEQ ID NO: 548377 - DNA, 83 bp, Homo sapiens
ggagccgcgcgcctttgtgcgcgcgccgaggtaatcattaccaaatgaggaggaaaggacgatgtcatcgaggctctgcagcg

SEQ ID NO: 548378 - DNA, 48 bp, Homo sapiens
tgaggcctccccagccatgtggagctgctgcccgccacatgattcccg

SEQ ID NO: 548379 - DNA, 75 bp, Homo sapiens
ctggagccgagagaggccggtttcccccaccttaagtgggcagaccaacatccacctcagcaaaaacttcttcct

SEQ ID NO: 548380 - DNA, 100 bp, Homo sapiens
ttcgtcaaagaattcaaatcccagctctttgtggagggcctggtacaagggaatgtcacaagcacactacaaagagccatccaggagcatcctgttgttc

SEQ ID NO: 548381 - DNA, 101 bp, Homo sapiens
cttatcttagagttattcaaggggatggagtagatattaataccttacaagagcctctacggcagacacatgcaggccaacccagaaccaccgaagaagaa

SEQ ID NO: 548382 - DNA, 100 bp, Homo sapiens
gcctcttctgtttccaatggggttgatgataattagaagcatgctttccactgaacttcccgacaacatttgttatgcagaatgtctctgagtgagaact

SEQ ID NO: 548383 - DNA, 50 bp, Homo sapiens
gatgagttgcagcaagtcatacgggaggtttgatctgtggatgaaatgaa

SEQ ID NO: 548384 - DNA, 96 bp, Homo sapiens
ggatgaatggattacaacatggtcaaaccttgcaatgagaggcattataataggaaactcattcaggcaagttcagccctttatgaggaattcccc

SEQ ID NO: 548385 - DNA, 95 bp, Homo sapiens
ccggtatgacccaagcatttctttttctggaatgtcattatcagacacaatgttctttatagctccaagctctacagattcttcaaatatattga

SEQ ID NO: 548386 - DNA, 75 bp, Homo sapiens
gcccatcttgctgcaccaagtggaggcgctagccgcggattctgtttcactgaggccatctatccgatttcaagg

SEQ ID NO: 548387 - DNA, 74 bp, Homo sapiens
cagaagagagcaaggaaaggcttgggtttccaggtcttggcaacctttgaaattccaattccatttgagagagc

SEQ ID NO: 548388 - DNA, 100 bp, Homo sapiens
gaccaggaacccaccagaaggaaccaattccggacacataacaagcagcagtgaggacaccaaagacattcacggcatggtgtaactcccacctccggaa

SEQ ID NO: 548389 - DNA, 101 bp, Homo sapiens
caagcccaaagaggagaaagatgcttctaaggatcttggagaaattcattcaaggcttttggatcacagaccagttattcaaggtgaaactcgttattttg

SEQ ID NO: 548390 - DNA, 75 bp, Homo sapiens
atgtgatgccattccagcactggactcatggaggctgagcatttattcagctccagggttccttgaaaagaaaac

SEQ ID NO: 548391 - DNA, 100 bp, Homo sapiens
ctggggcccgccgccccgcgggggagggcggagctggcgcggcccctagctttctccttctggtgtggggcccgaggatcaactcactatcctgaaggtc

SEQ ID NO: 548392 - DNA, 100 bp, Homo sapiens
ttctggggttccctatgcaaatgccaaaggaattggttatccaggggggacacagcgattgccacgcgccattggaatgtccctggccaaggagctcata

SEQ ID NO: 548393 - DNA, 90 bp, Homo sapiens
gcagtgcatgcacaaatggatgtgaagctccgctcactgatctgcgtggggctcaaatggcggactgtggcggcctcccgcagatctccc

SEQ ID NO: 548394 - DNA, 50 bp, Homo sapiens
cggaaaactgattagaaggcagagccagtcccacagaaccaaggtcctca

SEQ ID NO: 548395 - DNA, 60 bp, Homo sapiens
aagcagggattccagtgccaagcttaagagttggacagtggaggaccttcagaagaggct

SEQ ID NO: 548396 - DNA, 100 bp, Homo sapiens
cgtgctgctcgacgtgctgtgcttactggtcggccactcgctctggtgggaccctcgtgcttgtggggctgggctctgagatgaccaccgtacccctact

SEQ ID NO: 548397 - DNA, 100 bp, Homo sapiens
cctgggcatgaaagccctggccccagagagggagacgctgttgcggcagctggagacgaaccagctggacatggacgccacgctggaggagctgtcggtg

SEQ ID NO: 548398 - DNA, 78 bp, Homo sapiens
gagcctccgtgcggagaccactgttcaaggccacaggttatgaagacagtatggagtttccagaccatagtagacatt

SEQ ID NO: 548399 - DNA, 100 bp, Homo sapiens
aggaaatgaagaaggcatacaagcaagtgaagatcgaccagattgaggtgtccctgttacctgagaatgacagatggaatgaaactagagcccagctgct

SEQ ID NO: 548400 - DNA, 144 bp, Homo sapiens
cttctgtggcctcgttacctgcaggtattgggagatccacagctaagacgccaggacccactggaagcctagaaatgctctctccttcctgcttcctccttgctgtggtggctgggatgcttcttccatgattttttgaatcta

SEQ ID NO: 548401 - DNA, 75 bp, Homo sapiens
gaccagacctgcaagctctttgacacacagcagttcttgtcagtgacgaccgtagcccggaggtcttccgcacac

SEQ ID NO: 548402 - DNA, 101 bp, Homo sapiens
gaagctggccaaagcctgcccagacggctcacctgtgcgggatggaacaaaaggtactgctataaccagaatttggtagaaaaaggatttacttgttgggg

SEQ ID NO: 548403 - DNA, 89 bp, Homo sapiens
gagacgcaataaaccaagcactctagatgccctcaactatgctctccgctgtgtccacagcgttcaagtctcccctcatcaggacgcct

SEQ ID NO: 548404 - DNA, 98 bp, Homo sapiens
cactccttcacagctataccaaacttaaaggtagcaacacaagtcggaatagaatggaacctgtcccctgttggcagagttaccccaaaggaatggag

SEQ ID NO: 548405 - DNA, 96 bp, Homo sapiens
ggcagatatcgaggtggatggaaagcagcagagcatcctggccagaacaagccaaggagccaagacgagagggacacacggacaaacaacagacag

SEQ ID NO: 548406 - DNA, 90 bp, Homo sapiens
ggaaaggctctcagtgaaaaaggtgggaaagcagtgccactctccgcttcacagatgccccctgccaagatgtcagtgatgctgccgtca

SEQ ID NO: 548407 - DNA, 101 bp, Homo sapiens
aagaagcaagttctgaagttcactcttgattgcacccaccctgtagaagatggaatcatggatgctgccaattttatgccccctaaaaagggaggtgatgg

SEQ ID NO: 548408 - DNA, 74 bp, Homo sapiens
cgaggggaacggaggccagagctgcggtgccttcaaatctcttgacaaagatggcactggacaaatccaggtga

SEQ ID NO: 548409 - DNA, 80 bp, Homo sapiens
tctttccgtcctctgaggcgacggccgcggctgcacaggaagctcaggtgacattagaatgtgctataccccagaaattc

SEQ ID NO: 548410 - DNA, 75 bp, Homo sapiens
cctgtgttccctttgccgctcctggagttcactggtacaatggcttggtgaccggcacgagggctaagggcatca

SEQ ID NO: 548411 - DNA, 82 bp, Homo sapiens
ctataccagccaccctgcccccaagaaggaagtcatcatgggccggcctggaacagcacatacccccggcctcatgagtacc

SEQ ID NO: 548412 - DNA, 98 bp, Homo sapiens
gctccggggcagctccggcgggcgagtactgcagtggactgtaaaataacatcgtctacgactggagataaacactttgataaaagtcccactaaaac

SEQ ID NO: 548413 - DNA, 75 bp, Homo sapiens
actgcagccagtgaaaccactgaggccaagactaaggggctgcagagcggggtggacattggcgtcaagtactcg

SEQ ID NO: 548414 - DNA, 75 bp, Homo sapiens
ggccagctctgcgtctgcggtcaccaccaaggcctttttgcaaatgtgtaacttgcctatcaaagtagtttgtag

SEQ ID NO: 548415 - DNA, 82 bp, Homo sapiens
cgggtccgtgcgcccagcgtcccagggcccaggccgagcagacggaatcagtccccaatgcctggaaattcctcattggatt

SEQ ID NO: 548416 - DNA, 100 bp, Homo sapiens
ataccttaggatacaacatagaacctattatgctctatcaggtgtttcaggcctcacctgaagatcatgaaaaatacggtggggatccacagaaccctca

SEQ ID NO: 548417 - DNA, 75 bp, Homo sapiens
ggacaacatcaccgtgaggcagggggacacagccatcctcaggtcttccgaccccgaactccaccggaggcaatt

SEQ ID NO: 548418 - DNA, 90 bp, Homo sapiens
agattatctcgtatcacacctgtattggcctgccaggacagagtgctcagagttttacaggtttggcaaatacgtgtagacctacattta

SEQ ID NO: 548419 - DNA, 80 bp, Homo sapiens
cattcgtcttggtaaacttggtacccaacatgagtgaagtttcctgcaagaaacgggacgactatttggaatggccagag

SEQ ID NO: 548420 - DNA, 100 bp, Homo sapiens
ctcgcttctccagcgctccttgctcgcaaggcgggggaggcggcggcccagccacgatggtgtgatgttagctgttgatgctgtaattgctgaacttaaa

SEQ ID NO: 548421 - DNA, 74 bp, Homo sapiens
ggaacagattcagaaggagcaggattaccaaagggatgaagatttgataaagtggaaggcactgtttgaggaag

SEQ ID NO: 548422 - DNA, 50 bp, Homo sapiens
aaagaattgacaggcttgaagaggagatgttaaagtaacccatcttgcag

SEQ ID NO: 548423 - DNA, 80 bp, Homo sapiens
ggggttcgggtgtctcgtgtgtgaacatcacaggtgattgctggcttcaaccgccttcggcaggaacagcgaggcctggc

SEQ ID NO: 548424 - DNA, 100 bp, Homo sapiens
aagcagtcgtaagaagaggtcccaatcccccactctttccgccctaatggaggtctccagtttcggtcccctgcctgtgcccttcaccaatggggagata

SEQ ID NO: 548425 - DNA, 86 bp, Homo sapiens
gttccgcatggagaagttgaaccagctgtgggagaaggcccagcgagtgagaagccctaccactgcaactgggacggctgcggctg

SEQ ID NO: 548426 - DNA, 50 bp, Homo sapiens
cactcggagatgcagccgctggaaaaaccatatggcatagttgaaaagaa

SEQ ID NO: 548427 - DNA, 100 bp, Homo sapiens
gtgtctatgacctgggaaagaagaagttactccgaaaatgtgagaataaggacatgaagaatgcaaccctctccctgaattctaatgacagtgagccaaa

SEQ ID NO: 548428 - DNA, 101 bp, Homo sapiens
aaaaacagaacaggaggtggtagagggcatggatatctctactcgctccaaagactcagcccacctgcacccaggtgaaataaacagctttattgctcaca

SEQ ID NO: 548429 - DNA, 98 bp, Homo sapiens
tcgtattcccggaatcagacggtgccccatagatggccagctttcccccgagggtcaacgagaaagagatcggtattatccatgcagcagaagagaag

SEQ ID NO: 548430 - DNA, 98 bp, Homo sapiens
ccctctctgtttctccccaaaataaccattctccagatccagttgcgacaaccaccagttaagcgtttgagacttcgtggtgattggtcagatactgg

SEQ ID NO: 548431 - DNA, 100 bp, Homo sapiens
agaatgaagtagctaatgtccagccttcttccaaaagagccaggtttgaagatgccgcatttggattggatgaattccaaattctgcttgcttgcttttt

SEQ ID NO: 548432 - DNA, 96 bp, Homo sapiens
gtcatgagtcgcttcaagtttatcgttctaaggacatatggaattggctatggataattcatatgctttcaatcaacgaagcacatgtaatggaat

SEQ ID NO: 548433 - DNA, 100 bp, Homo sapiens
tgaaaaatcaaaaggagttcatgcttatgaatgctcgacttcagatgctgttccactgccagggactccctccccatatcttcctggaaaacacttgttc

SEQ ID NO: 548434 - DNA, 100 bp, Homo sapiens
ccagcagcaggccaaggctgtgctcaagcatttcaacgtgcgtgtcacccacgcagacatcttcagccgctgccagtgatgtcttggcattgcccatttt

SEQ ID NO: 548435 - DNA, 82 bp, Homo sapiens
tgcctcagcctcccgaggagctggaactacagatcactttgggaagcagtgacatccaacctgtatcaagtcttctaatctg

SEQ ID NO: 548436 - DNA, 100 bp, Homo sapiens
ccaaaccgtggctgctcgataaatcagacagaacagttaatcctcaatttaagcctgatctaacccctagaaacagctccgggaagcagtttgttcgcta

SEQ ID NO: 548437 - DNA, 74 bp, Homo sapiens
cacaattactgatgggagcaagttgactaccaccagtggagtccaggatgagtattcccacgagcattctgctg

SEQ ID NO: 548438 - DNA, 82 bp, Homo sapiens
gtgtaatgaaattatcaactggcttgataagaatcagccaccctgaagggtcccttcccaagcccttagggaccgcagagga

SEQ ID NO: 548439 - DNA, 98 bp, Homo sapiens
aaaaagcagcagagttactgatgagctgtttccgggtctgtgccagcgacacgctaaagaattacctccaaagccattgtcaagaccacagcagtcat

SEQ ID NO: 548440 - DNA, 83 bp, Homo sapiens
ccgggacaacatgctgcggggcacaggtatggcacagtcacaagggtgggtgaaaagatacatcaaggccttttgtaaaggct

SEQ ID NO: 548441 - DNA, 90 bp, Homo sapiens
caacttcaaagacgttctcaaggagaaggcagacctggattacaatactgtgatgagactgttcctgtaacttttgatccacacacagaa

SEQ ID NO: 548442 - DNA, 100 bp, Homo sapiens
gccaacttctgctacagacgactcaaatgttcgcatcttaccacatacagttctttacatggctgattcagaaactttcattagtctggaagagtgtcgt

SEQ ID NO: 548443 - DNA, 100 bp, Homo sapiens
gtccagctgtgccgcaccgaggcgagcaggagcagggaacaggtgctggagaatctggtaaaagcaccattgtgaagcagatgaggatcctgcatgttaa

SEQ ID NO: 548444 - DNA, 94 bp, Homo sapiens
gcccgccgccgagccgtctcctgcagcggcccccgccggggacttgccatgaggtgttgaagccttgtttcactgagttggagagactggacct

SEQ ID NO: 548445 - DNA, 100 bp, Homo sapiens
gccagatgtgggagacacgccaaagctcccaaggtcagtactcctgcatttgtaccaacgaaaactcacgtgctgcttcatcgaatgagtggaaaaggac

SEQ ID NO: 548446 - DNA, 96 bp, Homo sapiens
cgcctggcctacagcagccagacagcgcagcagaaggtgacccagtgggcagaagagagtaaggatggggatgataagaagagacctgtgatcatt

SEQ ID NO: 548447 - DNA, 100 bp, Homo sapiens
acctgccgccgcccctcaccagacagatcgctgtcaaaaccctagccctggaaaggaaaatatctatgaggcaaagcagagaagagctgataaagcgagg

SEQ ID NO: 548448 - DNA, 51 bp, Homo sapiens
agctcggatccctgaatttgatccaggactctggcatctgtgaagatttct

SEQ ID NO: 548449 - DNA, 101 bp, Homo sapiens
ccaagatttatcttcagcctaccccctgaaatcattcacaatccaaatttcacagtcagagacaaccgaggtaaagtcagtgataaatcttttgtttgctg

SEQ ID NO: 548450 - DNA, 100 bp, Homo sapiens
ttcctatgacaaacttctctcagccaagaacaaagactacatgagcatcattcgcatgtggctaggagaatcctcattgacactggagaaccagcaattc

SEQ ID NO: 548451 - DNA, 75 bp, Homo sapiens
tcgctctcggcctcggcctcggcctccgacacgatggcctgatatgaaggagtcacgcctcccgcctcccggagc

SEQ ID NO: 548452 - DNA, 83 bp, Homo sapiens
ttgcagatcttcaacaagaggacccaggagaaattcgccctcaaatttttggctttcacccccaaccagtgaccaaagacttg

SEQ ID NO: 548453 - DNA, 100 bp, Homo sapiens
tcccccggcagggcggagaggagcggccggagtcagcgatggtgcccggcgaggagaaccaactggtcccgaaagagcacccccccaggcagcagcagca

SEQ ID NO: 548454 - DNA, 82 bp, Homo sapiens
agtatcatgctggccaagaagatcatcattaaggacggaggcacgtttaaggaagaaatctctaaacgttttaaatcacata

SEQ ID NO: 548455 - DNA, 75 bp, Homo sapiens
atcgtcgtcaacgcggagcgagggtacagtgaaggtgaaattcgatttaatttaatggccattgtgtctgacaga

SEQ ID NO: 548456 - DNA, 100 bp, Homo sapiens
accgaattcagaaggatatcgacgtcgtgatccagaagtccagagctgaggactgcctgtttgcaggttatgggagaagatatcccagaaaaaataaaag

SEQ ID NO: 548457 - DNA, 100 bp, Homo sapiens
taatatgtatggtgagctgataatggatgcagtcccagacaaatacactcagaagaagccttgtttttactggcaacctgttattaccgctcaggaaagg

SEQ ID NO: 548458 - DNA, 87 bp, Homo sapiens
ccaccaacagtttctgtgtcccacttcatctttaataaggtgaccctccgactggacacccaccctgccatggtcaccgtgctggag

SEQ ID NO: 548459 - DNA, 74 bp, Homo sapiens
ggaggttacgcagcaaaccatccagaaggtgtgagatgcacaatgcgaaacctaggccccagcttttacaccat

SEQ ID NO: 548460 - DNA, 100 bp, Homo sapiens
cattttctactgtccctgcgcgagttacagctcttttgaggaagcttaagcagcaatccagggaaagtgttgaagaaaaacgacctcgattattaaaagc

SEQ ID NO: 548461 - DNA, 101 bp, Homo sapiens
cgaactcttgggcaccaccacccaatcaggacagagcagcatgattccaggtggctcaatggcaagacatctgtatagattctgcttcatccgtgagagag

SEQ ID NO: 548462 - DNA, 75 bp, Homo sapiens
tcccaaagacaattggtcaaaagatgcaaatggagatgttgcagtaaagatcctaaaggttgtcgacccaacccc

SEQ ID NO: 548463 - DNA, 100 bp, Homo sapiens
gtaagaacagaaaatcgtcttatagttgagaatttatcctcaagagtcagctggcaggctggaacctatttgcctcagtcctatctgattcatgagcaca

SEQ ID NO: 548464 - DNA, 111 bp, Homo sapiens
cctgcagtttgcaatatgactttggaggaattctcggctggagagcagaagaccgaaagggggatatgagactttctactcggaatatcctgagtgttgcgtggatgtaaa

SEQ ID NO: 548465 - DNA, 97 bp, Homo sapiens
gaccctgtcggaccggatggcaagaatcagctggggcagaagcgcgtggtcaagcattccaaaatatgcccggtgctatccgcccagctgctcctag

SEQ ID NO: 548466 - DNA, 98 bp, Homo sapiens
gcgctgccgccgctctgaggagttaaagtgtaaacaggaacatcgataagtagtgtaaaaacttgcacaatgaaatccgaagccaaggatggagagga

SEQ ID NO: 548467 - DNA, 100 bp, Homo sapiens
gggaactgctggggaaggcgattggcatcgatctctccatcccttccgaggcccgacttcgaactgataaatttcaaacggaagagagtggcagcattta

SEQ ID NO: 548468 - DNA, 98 bp, Homo sapiens
gtttattccttcagaccagcaggtaattgttgagataagtcgaagagtgactctggaaaaactccctcctgtcctcgtgctgcacctgaaacgattcg

SEQ ID NO: 548469 - DNA, 80 bp, Homo sapiens
gttcataaaagatatcgaggatttagccggaaggtttgttgataagccggggcccttcgtgggaccctgcggtcactgga

SEQ ID NO: 548470 - DNA, 82 bp, Homo sapiens
cgcaacgccgagcgcaccgacatctgcctgctcaaagaccgttggtcccaggaagacatgctgactttgctggaatgcatga

SEQ ID NO: 548471 - DNA, 51 bp, Homo sapiens
gaggccaaggtgggtggatcacttgaggctggtctcgaactcctgacctca

SEQ ID NO: 548472 - DNA, 83 bp, Homo sapiens
tccagctgccgctgtcgtctttgcttcagccgcagtcgccactggctgcctgaggtaacgtgaagcacctggttctcttcctc

SEQ ID NO: 548473 - DNA, 90 bp, Homo sapiens
agtttccatatgtaatgcaaggatcgagctgggagcattagtacccttgattctttagactttgcaagatattcagatgatggtaacagg

SEQ ID NO: 548474 - DNA, 90 bp, Homo sapiens
ggcttccagtcagcaccacgcactgtaagtttcggagcaacatcccctgtcacctggttgatatctcttgcggattaccctgcagtgcca

SEQ ID NO: 548475 - DNA, 87 bp, Homo sapiens
ctcaacagcagagctctgagcagcagcaggcgggaggagccggcaggggaggagcggcggcgcccggacaccttgcagctgtggcag

SEQ ID NO: 548476 - DNA, 100 bp, Homo sapiens
tcctaggagatttccttgtagctgtcaatgagtatcaggaggcaatggaccagtatagtatagcactaagcttccccttctcagaatcctgctcttcctc

SEQ ID NO: 548477 - DNA, 75 bp, Homo sapiens
tactatgctgaacggtgcagcagtgatggatgcagctcttctgttgatagtgcacagccagagaacaacacatca

SEQ ID NO: 548478 - DNA, 105 bp, Homo sapiens
ctgccattcctttcacccaagaaccacaacgagacaaacctgccaacgtccagccttattacctctatggatccaagttgagtcagcagatactggagttatttg

SEQ ID NO: 548479 - DNA, 76 bp, Homo sapiens
caagaggggattgatctgctcctgcaggttctgaaaggtacatcgaagtcttttgacctccatacagtgattatgc

SEQ ID NO: 548480 - DNA, 75 bp, Homo sapiens
ggagacttccttgcttctttggagaatgatatcaaaccagtacgagtggctgctttacagaatctggtgaagata

SEQ ID NO: 548481 - DNA, 83 bp, Homo sapiens
gtgctgtctgggcttcatagcattcgcctactccgtgaagaaagaagatgctgatatgctacaacacggatgaacctggagga

SEQ ID NO: 548482 - DNA, 75 bp, Homo sapiens
aaaagccacccaggccttggtcctagcacccactcgagaattggctcagcagaggcttcggctcaccgagagtga

SEQ ID NO: 548483 - DNA, 101 bp, Homo sapiens
acactcaggcaccctggtgcccagccgggaactccccatcgcgttttgccagcgataatacgcctcagcttcccaactttttggtcgcctagtgatactcc

SEQ ID NO: 548484 - DNA, 75 bp, Homo sapiens
tccacaggaggcctacacgccgccgcttgtgctgcagccatggctcgtggtcccaagaagcatctgaagcgggtg

SEQ ID NO: 548485 - DNA, 75 bp, Homo sapiens
aactgtccacactgctgaaaaatctggaatgtatcctgtcaggtataatgtcagtgaatggcaagaaagttcttc

SEQ ID NO: 548486 - DNA, 75 bp, Homo sapiens
ttttcagaagcggctgcgcacggactgctggagatggtggagtccgtcagcctacagattcctggaggagatgcg

SEQ ID NO: 548487 - DNA, 95 bp, Homo sapiens
cagaagtggtgcacaggtactaccgaccggacctgctttccccagacatggccaacaagggtccttcctatggcatgagccgcgaagtgcagtcc

SEQ ID NO: 548488 - DNA, 83 bp, Homo sapiens
cgcctatctcttcaagtacatcataatcggcgacacagagtcaccatcatgtctcttctcaccaccctctgaatctgcattag

SEQ ID NO: 548489 - DNA, 90 bp, Homo sapiens
tgtcaaggatcttgtgtgctccatagtttatcaaaaggatcccatggtccattattgcctttaccaagtcgttacagaatgggctctcga

SEQ ID NO: 548490 - DNA, 100 bp, Homo sapiens
tctacggcatctggagcaactggtggatctttcaacatatcgttgtttagttttcaagaataaagccatcataagacctcatgccacagaagagataaaa

SEQ ID NO: 548491 - DNA, 74 bp, Homo sapiens
acagggcatggagcagcatgagtacatggaccgtgccaggcagtacagcgcaagacgttcaaagaacactttag

SEQ ID NO: 548492 - DNA, 82 bp, Homo sapiens
gcggcttatcgaacagagccgggagttcaagaagaacactccagaggactatggccccaaagtcaactttcggaaacagaag

SEQ ID NO: 548493 - DNA, 75 bp, Homo sapiens
ctggctcttcggcgtcctcagcggactcatccagtttaaagctgatggaacaggatacttgcaatcttgaagagg

SEQ ID NO: 548494 - DNA, 75 bp, Homo sapiens
tcattgagctcagccgacagggcaaagaggatcccagcatggtgagtgcctacatgtacccagcaggggccactg

SEQ ID NO: 548495 - DNA, 83 bp, Homo sapiens
ccggaagctggtggaacagctacgcatagaagccgggattgagcgcatcaagaccctgtattcagtggatcagctggcaccac

SEQ ID NO: 548496 - DNA, 96 bp, Homo sapiens
agcatgagcccaagacctcccaagtttacttgatcgtacaagttttgaatcaggaaattgaagcgttcagtctgtccgaagacacttcatcggggc

SEQ ID NO: 548497 - DNA, 90 bp, Homo sapiens
gggatggtgccacaggaggctgtgcgggccccgctccgcttcgaatgggtgcatcacctggatcatgaggtcacccctctgctggctcct

SEQ ID NO: 548498 - DNA, 82 bp, Homo sapiens
gccagaacgacctgatgggcacggccgaggacttcgccgaccaggcccgatgagagaaagggaaagttaaggatgctggagc

SEQ ID NO: 548499 - DNA, 51 bp, Homo sapiens
tcactgaggttgcagttggcgtgaagatgagctttgatccaaaccttctcc

SEQ ID NO: 548500 - DNA, 82 bp, Homo sapiens
gaaagtgaaatcagaggagatgtaactatcggtagcctttccagtaaatatatgactcagggaaaagcctcagcgaagagga

SEQ ID NO: 548501 - DNA, 75 bp, Homo sapiens
gcttcgccccgggccccccagcatgaagaccccggcggacacaggcgccatgtcagaaccggctggggatgtccg

SEQ ID NO: 548502 - DNA, 75 bp, Homo sapiens
ggctttgccgcagttcatcttcctccctgtgtactttccatttgccttcctgggatgtgatcttcgtggtggaaa

SEQ ID NO: 548503 - DNA, 74 bp, Homo sapiens
ggggctgaagaagcagttctacaaggcgagccaggatgaagcctgctgggagcgtgaatgacatggccctggat

SEQ ID NO: 548504 - DNA, 90 bp, Homo sapiens
cacagttcctgggaaggtggagccaccagcctctccctgtgaaccagaaccacagattttggattttcaaacccagcagtataaactctt

SEQ ID NO: 548505 - DNA, 100 bp, Homo sapiens
atcgaatgtcacgaatgcttgaagacagagatttattcgtaatgcgactcaaagctgcacggcagtctgtttatgaggtccagctcttctatgaactaac

SEQ ID NO: 548506 - DNA, 83 bp, Homo sapiens
cgacaagccgctggcagccgcggatctcaccgccgctcaggtggtgctcatcggggactcaggcgtgggcaagagcaacctgc

SEQ ID NO: 548507 - DNA, 100 bp, Homo sapiens
cggcggccgaggacggggacagcgacgacgcggaggcagagaagggaacgcccggcccagccccgtgctttacaaggccaagtacggtccaatgtggatg

SEQ ID NO: 548508 - DNA, 109 bp, Homo sapiens
ccttgctgctgctgctactgctgtttccaggggctgcagagcatggactgttaaatcttgcacttcttctgagtgaggattcctgccagctcccaggggctttggttat

SEQ ID NO: 548509 - DNA, 48 bp, Homo sapiens
tatatcaattcctggacacagagagatgctcttagtgatcttgcatta

SEQ ID NO: 548510 - DNA, 90 bp, Homo sapiens
tagcatgggatccaacgacatgatgaatcaccaacaccagcagcagatggcccccagtaccctgagccagcagaaccaccccactcagaa

SEQ ID NO: 548511 - DNA, 100 bp, Homo sapiens
gaagagccacaggattcggcaaagacggacacacagattgccagattatatttggtttctgatgttttgtacaactcttcagccaaagttgctaatgctt

SEQ ID NO: 548512 - DNA, 141 bp, Homo sapiens
tgctccacgcagttactagtgtctgaagatccaaaggaaggaggagctaccaccaaagagtcaggtacaggtttgcagattccgccagcagcacagcaagctctacagatgagtggctctttggcatttggtgctgtggca

SEQ ID NO: 548513 - DNA, 50 bp, Homo sapiens
cacaagagcaccatactttgagggtgagctgtcagggagaaatgtcgaaa

SEQ ID NO: 548514 - DNA, 100 bp, Homo sapiens
cacgactcctgaagacacacctgcccctggctctgctcccccagactctgttggatcagaaggtcaaggtgggagacctacctgatgcagatattaaacc

SEQ ID NO: 548515 - DNA, 83 bp, Homo sapiens
gacagctacaagaaacacctgaagcatcactgtaacaaaatatgtttcgacagcaacaaaagattcttcaacaatctagaatt

SEQ ID NO: 548516 - DNA, 74 bp, Homo sapiens
agcggcagctccagcccggcccggcagcgacatggaagcgtccgtctccaagagagtatgaagagagtgcgtct

SEQ ID NO: 548517 - DNA, 100 bp, Homo sapiens
gaaacatagagaggaactggagcaattgaagctgactactaaggagaataaggttcaaaccttgtactactcagctgatcacaagctgcttgatgggaac

SEQ ID NO: 548518 - DNA, 75 bp, Homo sapiens
cgccagctctcccaccttcagcagcacacccggtggacaagagcaaggaccaagtgtggaaggtcttaatgtacc

SEQ ID NO: 548519 - DNA, 82 bp, Homo sapiens
agcagaaattgaaaagtactgcccagagaattttgtagacatcaagtgcctccggagccagcgtggtggccatagacaacaa

SEQ ID NO: 548520 - DNA, 83 bp, Homo sapiens
ggctgttttagtgctttttatttttccccaattcagcagagaatattttcaaggggggaggccccgtgtgggccgcggcccgg

SEQ ID NO: 548521 - DNA, 75 bp, Homo sapiens
gatccagcctgcggagcctgtggggcaggtcgctctggtgcagtggacagagagtgtgggcctcacgctggtcag

SEQ ID NO: 548522 - DNA, 83 bp, Homo sapiens
ccattaatggaagagattgggttcttggtgcttggcatgaggggagctcaaggtcacaagaagaaatgaaaggaacaatcagc

SEQ ID NO: 548523 - DNA, 80 bp, Homo sapiens
ggagctgaggaaccagatatcttgaaaagctgccagaaagatcagcttgaacgggtctttttacgacttggccatgctga

SEQ ID NO: 548524 - DNA, 83 bp, Homo sapiens
ggagcgtcctggggctgtgctccatggcgagctggggatttgtcttggctgttactatgacacgggaagcaattgatgaattt

SEQ ID NO: 548525 - DNA, 75 bp, Homo sapiens
aaggcaaggagagaatgtatgaagaacagtcacaggacagactgcctgaagttacatttagagactgaaatcact

SEQ ID NO: 548526 - DNA, 73 bp, Homo sapiens
agccacacgtctgtcaccatggaagtcagcacctacacaaatgcctttgccttcactcagttcggagtgctgt

SEQ ID NO: 548527 - DNA, 90 bp, Homo sapiens
caagaggtccaaaggcttctaagcatgcgggagaagaagccttcaggctctacacacagatgatcctctcacttgggattatgtggcaag

SEQ ID NO: 548528 - DNA, 98 bp, Homo sapiens
ccgccgacgaatgttaatgaaacgattagatgtgactgtacagtcctttggatggtctgatagagcaaagcatgaagctatacaattggaaacagaaa

SEQ ID NO: 548529 - DNA, 82 bp, Homo sapiens
tcccgctgtgtgtctcgggcgttcagccgctcgctctccgccttccagaagggtggcccagttgaaatccttcccttcctct

SEQ ID NO: 548530 - DNA, 74 bp, Homo sapiens
tcggggctccacgtcctcgtgaaccagctcagcgagaacctcaagagagtggtaatcaaatgcaaagcagctgt

SEQ ID NO: 548531 - DNA, 75 bp, Homo sapiens
tgtgacctgttcacgcaggggaaacttgaacattcgcaggtgtagagttcggtgctcgaatgataactattgatg

SEQ ID NO: 548532 - DNA, 100 bp, Homo sapiens
cgggagcctagatcctgtgctttactctgaagactcgacacggagttgcagaggaagctagaccatgagatccggatgagggaaggggcctgtaagctgc

SEQ ID NO: 548533 - DNA, 129 bp, Homo sapiens
gaaggtctcacctgaggtgaaccttcgaccttggacttctcagcctccagaatggttccaccccgatgcaggtggtcacgtgcttgacgcgggacagctacctgacgcactgcttcctccagcacctca

SEQ ID NO: 548534 - DNA, 100 bp, Homo sapiens
cagagcttattccctcaagtaccttcagtgcacacaacaggagagaggagaaagaagaaacgctagtaattccacatgacgacagagatgatggtgtgga

SEQ ID NO: 548535 - DNA, 75 bp, Homo sapiens
aacgaatcatccacgcacctgcagctctgctgagagagtgcaagccgtgggggacagagcagaatgggctgatat

SEQ ID NO: 548536 - DNA, 100 bp, Homo sapiens
tcaggctggggtctgcagtgcagcattaatgggccgctgacatgaatatggagtagttttctctagcaaaggccatgtcaaaggacgccctgaatctggc

SEQ ID NO: 548537 - DNA, 58 bp, Homo sapiens
gtggggccgccggcggcccggcttcaggtacaccaggggttggaaaaaccacactagg

SEQ ID NO: 548538 - DNA, 75 bp, Homo sapiens
gagacatcaaaagtgacaatgtacttttgggaatggaaggatctgttaagctcactgactttgggttctgtgccc

SEQ ID NO: 548539 - DNA, 72 bp, Homo sapiens
ggtctctggctccctcctcccagggccaggcgccgctcagaacggtttttcgttggaatatacgttgcacat

SEQ ID NO: 548540 - DNA, 98 bp, Homo sapiens
tttaagcagctatagtcttgtattgatggttttgcactatttacaaaacatatctgaagagatggattaagaatgctttggattaaggattgtggagc

SEQ ID NO: 548541 - DNA, 89 bp, Homo sapiens
cccacgactgcctgggacctggccaagggctccacacaccaagaccaagatggcaccgaaagcgaaggaagctcctgctcctcctaaag

SEQ ID NO: 548542 - DNA, 75 bp, Homo sapiens
gattgaacagagcctgaccaagagggatgagttcgagtttctggaggaactgtggctgcaccatctgtcttcatc

SEQ ID NO: 548543 - DNA, 100 bp, Homo sapiens
tctggaaatgcattttcgaacgcattcagtttctgcagaaaaatgtgggccccctccacctattgacaatggagacattacttcattcctgttgtcagta

SEQ ID NO: 548544 - DNA, 75 bp, Homo sapiens
cacagagttagagagagggatggtgatatgaggccccaggattcctggcgaggtcctcctccccttttccagcag

SEQ ID NO: 548545 - DNA, 75 bp, Homo sapiens
aagaagggcaaggagaaggcggaagcacagcaggacctgttatggaatttgattatgtaatatgcgaagaatgtg

SEQ ID NO: 548546 - DNA, 90 bp, Homo sapiens
cgcggagatctctctcatctcgctcggctgcgggaaatcgggctgaagcgactgagtccgcgatggagcattgcagccgctttcctgccc

SEQ ID NO: 548547 - DNA, 100 bp, Homo sapiens
ccctcatcctggttctggaatcctcagttcaaggaactctaatgaatcattgattgaccagcactattttaccagttggaatgaatgatcagaaatgggc

SEQ ID NO: 548548 - DNA, 50 bp, Homo sapiens
cggagatctcctgccacatccagaacctaaaggcagacccagaagagctt

SEQ ID NO: 548549 - DNA, 129 bp, Homo sapiens
tggagactctgacagacgctgagatggagaagaagatccgcgaccaggacaggaacacgagattcagggcaggatcctgctcctgaccatctgcgctgccggcattggtgggacttttcagtttggcta

SEQ ID NO: 548550 - DNA, 83 bp, Homo sapiens
ggcggattcctcggggcgaggcgctggattgggaatcaagatgggaaaacaaggaattatcaacaaagaaggatatttatgat

SEQ ID NO: 548551 - DNA, 75 bp, Homo sapiens
atggacggtcactcagcctatggagatttgaaagaagccaacactaaaccacaaatatacaacaaggccattttc

SEQ ID NO: 548552 - DNA, 73 bp, Homo sapiens
caggcgttcagccacagcagccaccatatacaggagctcagactcaagcaggccctataaacagggagatgcg

SEQ ID NO: 548553 - DNA, 96 bp, Homo sapiens
ggaagcaaatgagctgatggaagatctgtttgaaactgcacctgaagaactcgtcttgcatttggctgtcaaagtcgccaaccaggcttccctgcc

SEQ ID NO: 548554 - DNA, 75 bp, Homo sapiens
ccagggtcggactcccggggccatggccggaatgcagtaccctcagcagcaggtgtggaatatcaaacaaatgat

SEQ ID NO: 548555 - DNA, 100 bp, Homo sapiens
ctgagaataaagaagaagcagagagaaaattcaagcaagtagcggaggcatatgaagtgctgtcggatggcaatgctcctgacagctgtaaagtggatgg

SEQ ID NO: 548556 - DNA, 82 bp, Homo sapiens
cagaccctggagcctcagttggaagcagccgatccagcctgcggagcctgtggggcagattggccagtctgaagtttacctc

SEQ ID NO: 548557 - DNA, 75 bp, Homo sapiens
cctggtcatacaccagtactaccaaggacagcttttttcctgcaagggcacagatggagccaggttctgcagtgg

SEQ ID NO: 548558 - DNA, 100 bp, Homo sapiens
accaattacggcatcccctccgcctgcttctctcagcctcccacagcagcccaactcctgagaggctggtctcgaactctgggctcaagtgatccacctg

SEQ ID NO: 548559 - DNA, 75 bp, Homo sapiens
agtgcagctgcctcagttcttagcgcaggtttgagtcctgctggccggccctgatgaaggatgctcatggagtgg

SEQ ID NO: 548560 - DNA, 101 bp, Homo sapiens
aagcaagagaaaaagaacattactgtcttgctcactccatcactcgatgagataatatgagatttctacttcggagaggccaagtctaatgaagagaaaaa

SEQ ID NO: 548561 - DNA, 103 bp, Homo sapiens
gcaagagctacccgctgtgcccctactgctacaaccacccacccttccgagacatgaagaaaggtgcagtacagaaggtttctaaaaaattagaaatgcacgt

SEQ ID NO: 548562 - DNA, 101 bp, Homo sapiens
ccgggctccaaggccgtcgccgaccgctacgctgtctactggaacagcagcaaccccagcctatttgatggctttgcagatggactaggagttgctgaagc

SEQ ID NO: 548563 - DNA, 100 bp, Homo sapiens
catgtattcggttcaggaagcattaaatgccagaccatggtggattcgtatggggactgacatttgttactataacctatttgatggctttgcagatgga

SEQ ID NO: 548564 - DNA, 50 bp, Homo sapiens
aatcctctgaaattgcatgcaaaaatgccacccctgttctccgatgtgta

SEQ ID NO: 548565 - DNA, 99 bp, Homo sapiens
cagcggccgcggcgtcttcaagccgtgggaggagcggaccgaccgctccaaggatgaatttcatcctttcatcgaagcacttctgccccacgtccgagc

SEQ ID NO: 548566 - DNA, 75 bp, Homo sapiens
gaattcggtaaccatagaccaaaaggtgaccaagaatatggcccaggtgaccaaagccctggacaaggccctgag

SEQ ID NO: 548567 - DNA, 82 bp, Homo sapiens
tgcagacaccctgtccctcacggacagcagcgttttgcctgagaatacagatcaacccacagaacaaagcggatttccaagg

SEQ ID NO: 548568 - DNA, 74 bp, Homo sapiens
cgagaaccgtcagtttgagccagatgcttggatttacactgggcaacgtggttggaatgtatctggctcagaac

SEQ ID NO: 548569 - DNA, 83 bp, Homo sapiens
agaagataaacgaggggctggaacacctcgccaaagcagagaaataagctggaagtcgagtgtgctactcaactcaggagatt

SEQ ID NO: 548570 - DNA, 143 bp, Homo sapiens
cagcctggattataaggatgtcatccccatggctgatgcagcaggcatcatccgctatgcaattggggtgggtgacatcaccatcctggtgaacaatgccgccgtggtccatgggaagagcctaatggacagtgatgatgatg

SEQ ID NO: 548571 - DNA, 100 bp, Homo sapiens
ccaccatcgactacgtggaggacgttggcttggatgcggctggcaagaccacaatcctgtacaaactgaagttgggggagattgtcaccaccatcccaac

SEQ ID NO: 548572 - DNA, 100 bp, Homo sapiens
cttgatgtggtaggaaaaatccgcagagaaattcagaacctcaagcttttcaggcatcctcatataattaaactgaactgtggctgcaccatctgtcttc

SEQ ID NO: 548573 - DNA, 97 bp, Homo sapiens
ttctactggcagctgccggagacataccagggagacaagatcttggaaggagaccaagccatcctgcagagaataaagaaggctgtgcgggcaatcc

SEQ ID NO: 548574 - DNA, 98 bp, Homo sapiens
ccatctttagttcgtctttcctagagaggaaaagaagcccatctgtgtccagagatcagaatagaagatacgaccaaagggaagaaagagaggaatat

SEQ ID NO: 548575 - DNA, 75 bp, Homo sapiens
taatattacagctggaaatagggcacagatccagccaggtctaaactgcagtaatccatttactcagctggagag

SEQ ID NO: 548576 - DNA, 74 bp, Homo sapiens
agatagaagtcaagttgaaccagcaagcccacccacctttgggttcctgttggacatcgatggagtgcttgtgc

SEQ ID NO: 548577 - DNA, 100 bp, Homo sapiens
ctgggagaagaaccggaagctcaagagcttcaacctgtcagcgctggagaaacatgggcctgtttatgaggatgcctgctataactgcggtagaggtggc

SEQ ID NO: 548578 - DNA, 90 bp, Homo sapiens
gcgccgcagtcggtcgtccgctggacaagcacgagggcgcgctcgagacgctcctgaggtacttcgtactggatttcgaggctggcatcc

SEQ ID NO: 548579 - DNA, 100 bp, Homo sapiens
ggtgattgaggacaagaccatcgagctcatgatcatgtttgagaccttcaacaccccagccatgtacgttgctatccaggctgtgctatccctgtacgcc

SEQ ID NO: 548580 - DNA, 88 bp, Homo sapiens
gaccctgtaacccaaaggaggaaacagctggctaagctcatcattgttactgaacaccttccaccatgaccacctcagcaagttccca

SEQ ID NO: 548581 - DNA, 89 bp, Homo sapiens
tgcccagacaagtccccagggaatgccacagcatcctccagcacctcagtatgccaagtacatggaaaaccatagcattgaaggagtga

SEQ ID NO: 548582 - DNA, 100 bp, Homo sapiens
ggccttcgagaaaatgcaggagaagcggctccctgatggctcggagatcccgctccctcctattctgctcggcaggctgggctccgacccacagaagaag

SEQ ID NO: 548583 - DNA, 100 bp, Homo sapiens
aaacgcctggtgcagagccccaattcctacttcatggatgtgaaatgcccagtggcttccggaagttcctggtccacaacgtcaaggagctggaagtgct

SEQ ID NO: 548584 - DNA, 74 bp, Homo sapiens
cctgggcaacagaatattggtcaagttgctgaccttgaaatgtgccgtttgggggtgctaaagctggtgttaag

SEQ ID NO: 548585 - DNA, 83 bp, Homo sapiens
cttactgaaggcccagatgatggttagcagtttttggcaatcacgtattttcaaagtaaggctggcctctctgcagtcagagg

SEQ ID NO: 548586 - DNA, 100 bp, Homo sapiens
cagcagggctgtggctaccatgttctctcgcgcgggtgtcgctgggctgtcggcctggaccttgcagccgcaatgatgcaatgaacctcattttactttt

SEQ ID NO: 548587 - DNA, 100 bp, Homo sapiens
gggccatgtcggtgggcgagctctacagccagaagacttgcactatctgccagatgctgcttcctaaccagtgcagttatgcatcacaccagagaatcca

SEQ ID NO: 548588 - DNA, 100 bp, Homo sapiens
gatgccccgagcattgtgggcctcatcatcttcctcctgtgcaccctcttcatcagcaaacggggattcagcgtccgatcctttggaacagggactcacg

SEQ ID NO: 548589 - DNA, 90 bp, Homo sapiens
atgctggagaccttgacacttatatcctccctggaacttaaataaacagtcctttgaccttgcaaaagtgctattgaaaagaacagtcca

SEQ ID NO: 548590 - DNA, 101 bp, Homo sapiens
gtccggcttgccccgctatgacgtgctgggggtcatcgacagctgcaaggaggccgtcaccttcaaggccgtcagacaagaaatattcccaagagactcta

SEQ ID NO: 548591 - DNA, 75 bp, Homo sapiens
cggctaatagcccggagacaagcgttgggtatctacagccattggttgctgttcaggtcagctttgctcctaaca

SEQ ID NO: 548592 - DNA, 102 bp, Homo sapiens
agttccaccaggccgggaagcccatcgggagggtgaggacaaaatcttcttaatcaacaagcttcactccatctacgagaggaaggagagggaggagaggag

SEQ ID NO: 548593 - DNA, 75 bp, Homo sapiens
tttatacctttggtaatatcgcatcaattgggagaaggagcttcctgactggaaccagagaatgcatgtctgtcc

SEQ ID NO: 548594 - DNA, 100 bp, Homo sapiens
gccgcatccggcctttggcggagaaaaccggcatctgcaaaattcggccgcccaaggagcttactccacgggaacagcctctagataatctgagttgttg

SEQ ID NO: 548595 - DNA, 100 bp, Homo sapiens
caaccgacaagtgagactgtttgatatgtcaggagtgcgcctggcgcggcttccccggagcagccgacaggtggtcattgggactcccacacttaaacaa

SEQ ID NO: 548596 - DNA, 96 bp, Homo sapiens
cgctctataacccctaccgccacggatgctttcattggatttggaggaaatgtgatcaggcaacaagtcaaggataacgccaaatggtatatcact

SEQ ID NO: 548597 - DNA, 100 bp, Homo sapiens
ctcatccacaatgatttctccagtgctcatcttgttctcgagttttctctgccatgttgctattgcaggacggagcaatgcggtgtgcagagggtgcttg

SEQ ID NO: 548598 - DNA, 100 bp, Homo sapiens
ctctgagcagctccagaaaggaggcagtttccctggtgaaaggatcctacaagaccctcaggctggtagtgcgcaggctgaccaactgactgaagagcag

SEQ ID NO: 548599 - DNA, 83 bp, Homo sapiens
cggtggaggaatttgtggctggctggatctctggggttgtgtccactgtggtccccgactctgcccacaagctgttcatcggg

SEQ ID NO: 548600 - DNA, 99 bp, Homo sapiens
gtggacatctgctgccggaaggggtcccgaagccccctgcaggaactctacaacccaatccagcacgtcagctaactgttcagatgatgcaaaatcctc

SEQ ID NO: 548601 - DNA, 100 bp, Homo sapiens
gcagatggagaatagaccctctgtccaggcagcattaaaacttaagcaggggtattccctcagcggatactacacccatccatttcaaggctatgagcac

SEQ ID NO: 548602 - DNA, 99 bp, Homo sapiens
atctactccatctccctgcgcaaggtgcagctgcaccacggaggcaacaaggggcagcgctggctcggggtacaggtttgcagattccgccagcagcac

SEQ ID NO: 548603 - DNA, 76 bp, Homo sapiens
agcagaagaagctgaggatgaagaagatggctttaatccagtgtgaccagttgaggaaggagctggagaggcaggc

SEQ ID NO: 548604 - DNA, 100 bp, Homo sapiens
cttgggaggtgctgccaccacagatctcacattcttgaaggtggcattgaagagcactaagatcggaagatgagtgagcttgaccagttacggcaggagg

SEQ ID NO: 548605 - DNA, 100 bp, Homo sapiens
aaggggccagtctggagacagtcaagaaaaagcttgtggtgaaggggggcaaaaaaaagaagcaagttctgaagttcactcttgattgcacccaccctgt

SEQ ID NO: 548606 - DNA, 96 bp, Homo sapiens
gctccagcctctgcctcccagaaactcaggggaagctgctcgctgatctggccaggcgcctgggcctccactatgtggtctacagcggcctggaga

SEQ ID NO: 548607 - DNA, 82 bp, Homo sapiens
gccgatccagcctgcggagcctgtggggcaggccgactgcagctcccgcccactccttctggccggctatgaggatggatcg

SEQ ID NO: 548608 - DNA, 100 bp, Homo sapiens
gtcaagaagcgggtggaccactgtcccatcaaatcgcgcaaaggggatgtcctgcacatgcactacacggagacagatcagttggaggaagaaaaagcag

SEQ ID NO: 548609 - DNA, 100 bp, Homo sapiens
ctgccattcttatcatttctaagcaggttcatgccagcccagaacagagaatcagggtactatttttctgcctggaaataaagtttctgagcatccctgc

SEQ ID NO: 548610 - DNA, 88 bp, Homo sapiens
gcatgtgttaccaagctgtttcctaccaggtcacacactgttgcagcacaggtctgcgaggaacagaagtgcgaggaggaggtcttcc

SEQ ID NO: 548611 - DNA, 75 bp, Homo sapiens
atctccatcacccaccaacaacaccacaataatccacagccaagacgtaaaattcatcctgatcagaaaaatatt

SEQ ID NO: 548612 - DNA, 96 bp, Homo sapiens
gttgcacaacaatatcaatttattttataccactgaaccgtgcacttcaaaatggttaagatggaatgatgagaagacagcagctgattacaagat

SEQ ID NO: 548613 - DNA, 100 bp, Homo sapiens
acagtacggctggcagggtggacctcaggagcctcctaaaaccacagcttcaacattgctttatggcatgtgtggtcgtttttcactccattgttgttgt

SEQ ID NO: 548614 - DNA, 75 bp, Homo sapiens
tgcagccgcgagctcctggaggcggcgggatggaggcggcggccgcgccgtgccgtccctgcagtgacaccgagg

SEQ ID NO: 548615 - DNA, 74 bp, Homo sapiens
gacctgctcttcatctccctgctctggatcatcgaactgaatgctcacgctctgctgctgcggggccggccgcc

SEQ ID NO: 548616 - DNA, 90 bp, Homo sapiens
gaaggcaaaggcagcattctttctttccttaggaaaaaagagttggccatggagataagaaccatgcagatgcagacagatcgcctgttt

SEQ ID NO: 548617 - DNA, 100 bp, Homo sapiens
ggatggctgttctccattgtctgtttcaccagatgtcctcaaaacaaacagacagaagaaggaagtggctaatgaaacgggctgtaaaggcagaaaacca

SEQ ID NO: 548618 - DNA, 96 bp, Homo sapiens
gaaaccagccgaacttcagggtttccaccgttcgttcaagtggtgctcatcggggactcaggcgtgggcaagagcaacctgctgtcgcgcttcacc

SEQ ID NO: 548619 - DNA, 96 bp, Homo sapiens
cagaggtgtgctgacgacctgctacaacagaattgctgtttgagaaaggctggcatctcctgtaatgaggtgaagcagttgcgcagagccgcccgc

SEQ ID NO: 548620 - DNA, 100 bp, Homo sapiens
acgccatcaaagaagggaaaaccagctgaggtgtccgtaaagattccagagaagcctgtgaacaaagcaccatgactcctgtgaggatgcagcactccct

SEQ ID NO: 548621 - DNA, 98 bp, Homo sapiens
gacgatctgcacttcgcattttggcattgacatttaattttagggtcctttatatagaagggagagtagttgaaggagaagagccaggcgtgcggagg

SEQ ID NO: 548622 - DNA, 74 bp, Homo sapiens
gtcctttcttataagaagacaatgttgcacttaactgatattcagaatgtgacagagctgaagctttctgataa

SEQ ID NO: 548623 - DNA, 110 bp, Homo sapiens
ttctcatggatgttcttcttcgagtatttgtagaaggatttggagcaagaggtggtggtggccttcccccgaagaaatttggtaatcctggggagcgtttgcgtaaaaaa

SEQ ID NO: 548624 - DNA, 98 bp, Homo sapiens
aacgtcatcattaagttggagcagggagaggagctgtggataacgggaggtgaatttccatgtcaacatagtcctggcagaaaatctatttcaggaac

SEQ ID NO: 548625 - DNA, 75 bp, Homo sapiens
cgctgccagtgtaaatcctatagacgttaatatgagaagaattttctgaaccaacaattattctctttgaaagag

SEQ ID NO: 548626 - DNA, 100 bp, Homo sapiens
cagttggaagcccgggaccgtttaaaaaactgctgtgtcccgtgatcgaggcttccttcaatggcatgtatgcagacctcctgcagctggtgaagggtag

SEQ ID NO: 548627 - DNA, 101 bp, Homo sapiens
atcgggatttacgtggagatcaagcgcagcgatgatagggccagatttgagtgtgtgaatttttgagtgaaacctggaacccaaatgagaagaaatctgca

SEQ ID NO: 548628 - DNA, 90 bp, Homo sapiens
cccccagcttagaggtgcttcaccctgccccaaggctttatttcaggctggagaacttaaatgggggacagatgaagaaaagtttatcac

SEQ ID NO: 548629 - DNA, 100 bp, Homo sapiens
agcgcctagatggctttggtcacggtccagcggtcacctacccccagcaccacctccagcccctgcgcctcgagccatgggaccacaccaccaccaccac

SEQ ID NO: 548630 - DNA, 80 bp, Homo sapiens
caatgcgatgctttgcatcctaaatcaggtggcaaagaaacacagcatgatgtttggaaatataattcttcgatcaacaa

SEQ ID NO: 548631 - DNA, 50 bp, Homo sapiens
aggcagtcccgcggcagcaggatcacagacaccattcgcttttcacccaa

SEQ ID NO: 548632 - DNA, 51 bp, Homo sapiens
gcagagagctattattccctgtattaaagaattcctccacgtactgggaag

SEQ ID NO: 548633 - DNA, 100 bp, Homo sapiens
cggcgtgcacgggccacctccgcacagggcgccacggagagagcaatatactttgctgcttattcaaactgcaaggaaaagttgaatgatgtatttgatc

SEQ ID NO: 548634 - DNA, 75 bp, Homo sapiens
agtttctttccaagatctagacacagctaaattactgagtgcaggtattggatcaggagtcaattttcagttgaa

SEQ ID NO: 548635 - DNA, 100 bp, Homo sapiens
cccatcaggtggtggtggccaagtatgcgcccagcggattctacattgcctccggaggtgctggagaatctggtaaaagcaccattgtgaagcagatgag

SEQ ID NO: 548636 - DNA, 82 bp, Homo sapiens
atcgtcgccacctggatgctggagcagaaaaatatggctcaggagactaaccagaccccggggcccatgctgtgtagcacag

SEQ ID NO: 548637 - DNA, 75 bp, Homo sapiens
tggtttccaaatggattggctgtctgaacctcacccagctcaggtgcctaaaaggccagaggggcttctcaggcc

SEQ ID NO: 548638 - DNA, 74 bp, Homo sapiens
ctgattcggcgcgatttgaggagctgctgctgcaggtactggtgtggcatactcggacagagaagcccaagatg

SEQ ID NO: 548639 - DNA, 80 bp, Homo sapiens
acttaatacagcaagaaagaccatcaagtttaccaaactcccccactggaaaggattctgaaagaaatgaagtcagccct

SEQ ID NO: 548640 - DNA, 82 bp, Homo sapiens
gagttgaaggctgcagtgagccctgtttttgccaccacactccagcttggtccattgaagacttgaacaagtgggccctatt

SEQ ID NO: 548641 - DNA, 98 bp, Homo sapiens
agcgcactctggagggattctggcatcagggaggctttcagccggagaagcgagtttcagctggccctgtgcaccaaggtgccggaactgatcagaac

SEQ ID NO: 548642 - DNA, 75 bp, Homo sapiens
cacctttccctttatttccggagcaggtccttctggcactcctctggtggaccgcccccatcggccacacttgcc

SEQ ID NO: 548643 - DNA, 100 bp, Homo sapiens
taatgctgagctctgtcggtatctttccaaggtcctagaactcaggaagagtgatgtggttttggataagattgatgaactcccagagggcgctgtgaag

SEQ ID NO: 548644 - DNA, 100 bp, Homo sapiens
gctgtttgctggcctgcatgacagggaccagatagaaaatgctgctgaagaacctagagtcttatgtattatacaagatactactaattcaaagacagtg

SEQ ID NO: 548645 - DNA, 135 bp, Homo sapiens
gaaaaatcgtattgccgcccagaagagccgacagaggcagacacagaaggccgacaccctgcacctggccttcaagagtgcactgatgagttcctactggtgctcagggaaaggggatgtgatcgatgactggtg

SEQ ID NO: 548646 - DNA, 99 bp, Homo sapiens
cacttgattacccgttaagtcccccaaagatgagatttacctgtgagatgtttcatcccaacagaaggtgtcttgctgcaggtaactaatgaagaagtg

SEQ ID NO: 548647 - DNA, 51 bp, Homo sapiens
ggcacgcgcagaggaggcttttctctgggttaccactacaacgacctggtg

SEQ ID NO: 548648 - DNA, 82 bp, Homo sapiens
gtggtcaagcgggccacgcacctcgtcaccaaggccaaggtaactaggatttctacctcaaccgcgagacctatgcaaggac

SEQ ID NO: 548649 - DNA, 90 bp, Homo sapiens
gaaaatattgttgccctggaagacatttatgaaagcccaaatcacctgtacttggtcatgcagctggagaaccttgctagtgacatgtat

SEQ ID NO: 548650 - DNA, 96 bp, Homo sapiens
ctggagttgagacagacgactgggatggaccagctgttcaacggttttgtgtatagcatttgaggttcttcagggcttgcagtatatgaacaaaca

SEQ ID NO: 548651 - DNA, 97 bp, Homo sapiens
gttttcccagcacatacaaccatagctttcagtgtttttgaactcttcatatacctggatggtgcctttggtgcaaatgtcaattgtcaagccttgg

SEQ ID NO: 548652 - DNA, 125 bp, Homo sapiens
gaagccctttctcctcggcactgtattctttacctgcttcccaatcccactgatgaggatcagcccatggggcgtggttgctctccagaccctacgaaaattagttgaacttactcagaagccag

SEQ ID NO: 548653 - DNA, 100 bp, Homo sapiens
cgcgaacgagcgacggcggaacccgtgggcctgtggactgcagcctcggcggtcagcagggaaattatcgtttcatgaaactcttacttacacgcagagc

SEQ ID NO: 548654 - DNA, 74 bp, Homo sapiens
ctcactgcggttggtgccattcgctacaaagatggatctgtctgtagaaactctgttcagcttcatgcaggagc

SEQ ID NO: 548655 - DNA, 75 bp, Homo sapiens
cgctgcagcaaatggcaacttgtgcagcacttttctgtagaaggtcagttggaattcagggcattgctatttatt

SEQ ID NO: 548656 - DNA, 98 bp, Homo sapiens
agaagcctggatacaggactcagactcttactggtggaaccgtcccaaaatgtcccttgctcagaagaaggatcgggtagctcaaaagaaggcaagct

SEQ ID NO: 548657 - DNA, 98 bp, Homo sapiens
ctagcaaggaaaactcaggaccatgatggctcagtttcccacagctatgaatgggagaagatgtcaaccggacactagaaggtggaaggaaacctctt

SEQ ID NO: 548658 - DNA, 100 bp, Homo sapiens
gaactcaggcgattacaagacgattcacctgtccagcatccgaccaccgaggctggagggggagaacacccaggagttgtatcccgcattttgtattcac

SEQ ID NO: 548659 - DNA, 100 bp, Homo sapiens
cccaggggcatgttggaaagaactgagagaaagagcaacaaagcggcgagtggtgtgagagggcagcacgcgctgtggtgtttcctgaggttataggcgg

SEQ ID NO: 548660 - DNA, 100 bp, Homo sapiens
cgccctgcgcttcgtgcaccggggcggtccgttgccaaagccaggtcaagctgagcgggaaaaccggccgccgggcagacatcgctttgattgaaggcag

SEQ ID NO: 548661 - DNA, 83 bp, Homo sapiens
ctggagttggtgctgggaaacccggggctaatgttgacaacaggctcgagggcgtctctggccgagcctctttttgtggaaaa

SEQ ID NO: 548662 - DNA, 100 bp, Homo sapiens
cacactgaccctgcgctccaagtccatgacagctgagctcgaggaacttgatgtggacgagtgctcactagcagaaaaaacctgtgtgaggaaaaacgaa

SEQ ID NO: 548663 - DNA, 90 bp, Homo sapiens
gattcgcagtggtcgcttcttctccttgctttcagtgaaaggttacaatgacaagcagccaattttactaaagaagattattgagaaaat

SEQ ID NO: 548664 - DNA, 98 bp, Homo sapiens
agcgattgcgagaatgaggaggacaacagctacaaccgggggaacaagatcaccatgattgctgagcctcttgagaagggcctggcagaggacataga

SEQ ID NO: 548665 - DNA, 80 bp, Homo sapiens
agccatttcggtgtagaagtggcagcacggcaggttatggaaacaaaggacatgctttacatcgtcactgaatttgctaa

SEQ ID NO: 548666 - DNA, 100 bp, Homo sapiens
aaagaaaacttcattataaagaatttcgaagaactcaagacatggctgcccagtgtgtcacaaaggtggcgctgaatgtttcctgtgccaatcttttgga

SEQ ID NO: 548667 - DNA, 100 bp, Homo sapiens
agcgctgaggcgggcgttttcttggatgaattgcttgctttggagatcttctggtgaccccacttctcgctgctcatgccgctgggactggggcggcgga

SEQ ID NO: 548668 - DNA, 75 bp, Homo sapiens
ctttgactcttctactgtctcagaccttagcggaatggccaaagactatgacgggtcttcctagcacatcaggga

SEQ ID NO: 548669 - DNA, 100 bp, Homo sapiens
cggatattcagttgcacatccccacatcaatgcactgccaatgatcaatgaactgagccatgttcaaatccctgttatgttgatgccagatgacttcaaa

SEQ ID NO: 548670 - DNA, 100 bp, Homo sapiens
gaacctgggcggatgtcagaccagagaagagcacagaatgtaccagagagatgttggagtccggggtgacctggtctcagtgaagaaatctttaggccgg

SEQ ID NO: 548671 - DNA, 100 bp, Homo sapiens
atcttgtgcagcagattggggagttcgatatctcaatgcctatactggaatagtgctacttcgatgcagaaaagaattctatcagcttgtgtggtcagct

SEQ ID NO: 548672 - DNA, 83 bp, Homo sapiens
ccaaagtgcagctgactcttcccacgacagccctgcccttcccatgaggcaggctcttcagctccataaaaatacagactcac

SEQ ID NO: 548673 - DNA, 75 bp, Homo sapiens
gtcaagagaataaatacagaatggacccaccttcagcctggcacctgtgtttgctctgtttgtaccattttactg

SEQ ID NO: 548674 - DNA, 75 bp, Homo sapiens
aactgccaagtttcacagccggaatgaaaaagctattttgggaagatgttccgaaccccaagaattgttcctggg

SEQ ID NO: 548675 - DNA, 137 bp, Homo sapiens
ggaatttcagtatctgctacggtaacttcatcagcccgccaagatggcgatgcaagcggccaagagggcgaacgtaacctttatcaaaaggatggagttgggaaaaggaaaactactcaggactggactgaatgcgt

SEQ ID NO: 548676 - DNA, 74 bp, Homo sapiens
cgaaccagagccggaggcgggaggacgggctgccgcagttcgtgccctcgtgaggctggcatgcaggatggcag

SEQ ID NO: 548677 - DNA, 98 bp, Homo sapiens
atgcagtagaagcccttacggcactgaatcactatcagataagagtgccgactgtcggaaaaggtaacagaagatggaactcgaaatcccaatgaaaa

SEQ ID NO: 548678 - DNA, 75 bp, Homo sapiens
agaaggcaggggcccttagagtcttggttgccaaacaggtttcatatggacccatctgggacctttgtacagtgt

SEQ ID NO: 548679 - DNA, 95 bp, Homo sapiens
ggaacatggacatgaagaggaggatccacctggagctgaggaaccggaccccggcagctatgtgaagttcatttccaatccgccctccatggtgg

SEQ ID NO: 548680 - DNA, 105 bp, Homo sapiens
agacccctctgctgcaccacttcatgtttcagagactcctccactctctgggaatgacacggactccctctcctgcgacagtggcagttcggcaactagcactcc

SEQ ID NO: 548681 - DNA, 76 bp, Homo sapiens
tgcgcctgcctctccaggatgtctacaaaattggtggtgctggagaatctggtaaaagcaccattgtgaagcagat

SEQ ID NO: 548682 - DNA, 100 bp, Homo sapiens
ccagacggacattttggatccaagtttgttactgcagtggctacagctcaaaagccaaaagtctctgagaacgactttgaagatctgttgtccaatcaag

SEQ ID NO: 548683 - DNA, 100 bp, Homo sapiens
ggggtgctgaatggcaatggcacaaagttctctcgatcagggcatacatctttcttcgacaaaggaggctgggaggcggcagaatgcagccagaggaggg

SEQ ID NO: 548684 - DNA, 73 bp, Homo sapiens
aaatggcaacataatgaaatcactttctgcccctatgtcaccacagtgggaggcacatccttccaggaacctt

SEQ ID NO: 548685 - DNA, 82 bp, Homo sapiens
gtcgccgcggtcctgctgttgaccatggtgaatccgggcagcagctcgcagccgcccccggtgacggccggctccctctcct

SEQ ID NO: 548686 - DNA, 75 bp, Homo sapiens
ctgtaacctccatttcaaacttgtggttctgctgcagagcagagcgggcggaggaccccgggcgcgggcgcggac

SEQ ID NO: 548687 - DNA, 100 bp, Homo sapiens
gttagccaaaatgaagacctgtgttgatacctataccaaccgtttaagatacgtcggtaacctttccagagatgtgacagaagctctaattctgcaactc

SEQ ID NO: 548688 - DNA, 46 bp, Homo sapiens
aaagaaggagagtccagggatgtggaaggatatggagtaatagtac

SEQ ID NO: 548689 - DNA, 73 bp, Homo sapiens
tcgtctcgcctcccgcgcgccggtagcttcctggacaagatcgacgtgatcaagcaggctgactatgtgccga

SEQ ID NO: 548690 - DNA, 82 bp, Homo sapiens
cttcaccactggagccagccggtttgcctcggcagccaaggagggctgagaaggcaaccaaagtgcaggacatcaaaaacaa

SEQ ID NO: 548691 - DNA, 83 bp, Homo sapiens
tggggctggaaattgcgctggaccgtcgccttgctcctcgccgcggcggggactgcaggaaactccgggacgttttacagcag

SEQ ID NO: 548692 - DNA, 75 bp, Homo sapiens
caggaacacaacctcaccttgatcaggtggacacgcccccactgatattccttctaattgcagcgtgggagagga

SEQ ID NO: 548693 - DNA, 76 bp, Homo sapiens
gcggcggcggcagcgggtcttgggtcctccgagagcagcagcggaatccggtcagtgagtttctacgagcacatca

SEQ ID NO: 548694 - DNA, 100 bp, Homo sapiens
gccagcgtgatcctccgtgacattgcgagagccagagagaacatccagaaatccctggctggagtcacgccgccagcgctgctcctcaggccagctcccc

SEQ ID NO: 548695 - DNA, 83 bp, Homo sapiens
gactgaagcgcccgtccattccaagaaaggaaggcagaggaagccacggccactggaccctggcgagggttccaaggacacag

SEQ ID NO: 548696 - DNA, 100 bp, Homo sapiens
gcccaagtggcacaaatgcagaaactccctctggtgatgatttcagggaaaaagacctcgatgaagttctgcagacccactcagtgtttgtaaatgtttc

SEQ ID NO: 548697 - DNA, 87 bp, Homo sapiens
tggtctccaactagtattatgagaggagtcaatcagaggttgcagatatcaagaaagtcaacaacttcatcagagaacaagacttat

SEQ ID NO: 548698 - DNA, 100 bp, Homo sapiens
tgaaactgaacttataatcgtcactggattgtgtgatgaatgcagactctgctaccattttggctgtttggatcctcctttgaaaaagtctcctaaacag

SEQ ID NO: 548699 - DNA, 82 bp, Homo sapiens
gtggacctcaggagcctcctaaaaccacagacctgcctagagctggaacgttacctccagagcgagccctgctatgtttcag

SEQ ID NO: 548700 - DNA, 80 bp, Homo sapiens
atttttagtggccccaaacggagcttactcacatagcatattggtatatcaaaatgaaatgcaaggaaccaaaaataaca

SEQ ID NO: 548701 - DNA, 83 bp, Homo sapiens
gccggccgagggtggccctaggggcagcgagcaagacagcaagcagaaatcttcccaaggctgcagacaccgacggatttgct

SEQ ID NO: 548702 - DNA, 83 bp, Homo sapiens
cttttcggtctgattctgctgtcttgctaagccgcttacaaacacgcagatggcaagaagattgatggcaggagggtccttgt

SEQ ID NO: 548703 - DNA, 87 bp, Homo sapiens
ccgagtggattcatttttctacatattaggatataaccctgagacaagcgctcaaaactcggtgatcatagttgataagaacggtag

SEQ ID NO: 548704 - DNA, 102 bp, Homo sapiens
gttgtcatatgtactgtgtcagccatcatgtgtgtcagcatgagaggtgagaagccatacaaatgtgaattgtgtgataaaggatttgctcagaaatgtcag

SEQ ID NO: 548705 - DNA, 98 bp, Homo sapiens
ccgcccctggacatggaggagaaggtccgcttcaatgtggacaacagtgagtatatgcggaatggagacttcttacccaccaggctgcaggcccagca

SEQ ID NO: 548706 - DNA, 87 bp, Homo sapiens
agggcaacgtgccccccagaactccctgggcagagccagctcgggtgaggggaattagcagttcacaaagcacattcgcatataagg

SEQ ID NO: 548707 - DNA, 89 bp, Homo sapiens
tcggagcaacgagcgcagcgccggcacagctgggctgacgccctctccaccatccggctccctcacgtcaagtacatctgtccccatgc

SEQ ID NO: 548708 - DNA, 80 bp, Homo sapiens
acacttcttttattttcctgtaatatatctgtatcatcggagtttggagaccctgacacacccaccttctcacctgggct

SEQ ID NO: 548709 - DNA, 100 bp, Homo sapiens
agagagacgtgaaacatgtgaacactcaagtgaagcaaaagccttccatgattactgaatgatttgggaggggacttcaaaggagttggtaaaggctcct

SEQ ID NO: 548710 - DNA, 100 bp, Homo sapiens
tggcctggctggtggccaaagcctttgggacagaaaaaaccgggaagatcctgacggagttcctccagttctatgaagaccagtatggcgtggctctctt

SEQ ID NO: 548711 - DNA, 101 bp, Homo sapiens
ggacagcaccagagagtcttgcctacaataccttctcaattaaatctgacgtctgggaaatggcaagttccaatcctgtgtatatggagatggaaaaagga

SEQ ID NO: 548712 - DNA, 75 bp, Homo sapiens
aattatgctgcagcatattgtactggcctgctgctggcccgcaggggtttagatgtagattctctggtcattgag

SEQ ID NO: 548713 - DNA, 90 bp, Homo sapiens
ctttgaccaccagctcatctactgtaagaaggactctctataagatcctagacagctgcaaacagctgactctggcccagggggcaggtg

SEQ ID NO: 548714 - DNA, 101 bp, Homo sapiens
ggagagaaagaaaaggaacgggagctgagagctacactcataacattgaagctgtcagttgtgatgaagcgctggtagacattaccgaaatccttgcagag

SEQ ID NO: 548715 - DNA, 101 bp, Homo sapiens
ggtgggcagcatggtgggcgtctacaacggcaagaccttcaaccaggtggagatcaagggccctggcccccgctgcgtccgcatcactctgcatcagcact

SEQ ID NO: 548716 - DNA, 100 bp, Homo sapiens
tgccctaaatcacaagaaggtggccaaaatcttactggaagccggagcagatacgaccattgttaacaattggagacctttggcgacttggcctttggcg

SEQ ID NO: 548717 - DNA, 83 bp, Homo sapiens
acaaaaagaaccctcaattgatgaaagaccttattgcaatatgcaagcaacaagaatgcatcagaacatattgtgtatcttct

SEQ ID NO: 548718 - DNA, 80 bp, Homo sapiens
caaagtggggctcatgaaccgcgccgtgcaactgctcatcctggcctacgtcatcgggacactcatgaggaccatgatac

SEQ ID NO: 548719 - DNA, 98 bp, Homo sapiens
cggcgcagccggagtggggccgtgagttacgccccatggtgtccatcctgccagcagactgattcagaatgggaggcttttgcaaagaatggtgaaat

SEQ ID NO: 548720 - DNA, 82 bp, Homo sapiens
cgcacacctggcagcaaaagagatctgccgacaccccaggccatcgagccccaggccatcgtgcagcaggtcccagccccca

SEQ ID NO: 548721 - DNA, 101 bp, Homo sapiens
acttgaggttgccccgatttctgacatcattgcaatcaagtcacctgacacatttgtgagaactatttatgcaggagtcaaattgactttatcagctttaa

SEQ ID NO: 548722 - DNA, 73 bp, Homo sapiens
ttactagttgatgccaatgatgtaattctggagagagtgtctattatcctcccagtccacaacgctgaaccgt

SEQ ID NO: 548723 - DNA, 98 bp, Homo sapiens
tcggctctctaaattgaatcaattgcagaaagcaaggagatggccaccaaggagaagctgcagtgtctgaaagatttccacaaggacatcctgaagcc

SEQ ID NO: 548724 - DNA, 75 bp, Homo sapiens
atggcagggctgcaggcgggcttgctgctccacgtggtggaagaaggtgatgcttccgacgggagccgccttccg

SEQ ID NO: 548725 - DNA, 100 bp, Homo sapiens
gcagctcccagcggctgcccaggcccccgacgctctgcctgctggttagttgaatccatggacatgaaacccacagatatagagggttggcccggtgcag

SEQ ID NO: 548726 - DNA, 100 bp, Homo sapiens
ccagcaccaccaccaccattaaactgtccgccaggattggaatacttaagtcagagtcgcctggcactgccagtgttccgcttagagttcagaactcttg

SEQ ID NO: 548727 - DNA, 82 bp, Homo sapiens
tatcagcaggctccgggctgaagattgcttctcttctctcctccaaggtgtccctggccagtgtccttccacctgtccacaa

SEQ ID NO: 548728 - DNA, 83 bp, Homo sapiens
cccagcggattctacattgcctccggaggatgaccgagtgggagacagcagcaccagcggtggcagagaccccagacatcaag

SEQ ID NO: 548729 - DNA, 100 bp, Homo sapiens
gaaatcggcaactttataattgagtgattcgcctttgccagtctcatctcgtgtctgctttgttaagttccatgatccagactcagcagttgtggcacag

SEQ ID NO: 548730 - DNA, 51 bp, Homo sapiens
cagaggggctgcacctggccttatggatgcctgaggaagtgcaccatggag

SEQ ID NO: 548731 - DNA, 80 bp, Homo sapiens
ggggtcctcagagttactgggaggacactggaggtgaagaaggaagctcttgactctcctaaagctgatcccaaagtgaa

SEQ ID NO: 548732 - DNA, 100 bp, Homo sapiens
atcgctttcagagtggagatttccatgttattaatggagtcctccgtacagcacattcattatttaaaagatcctgataacttaagtgactctctctttt

SEQ ID NO: 548733 - DNA, 75 bp, Homo sapiens
gctcgagtgagcggactgcccaggacttcggaactagacgaggattgtctcaaagcttgccaggagcagattgag

SEQ ID NO: 548734 - DNA, 98 bp, Homo sapiens
ccgggcccgttggcggcgtcactgacgcttcgctccggtcctcggatcccgagcgcggggaggcagaccgttctttccaaatggcaatgcatttgcca

SEQ ID NO: 548735 - DNA, 50 bp, Homo sapiens
tgctgggtgtcttctccctcgccagctggtttgaagaaaacaggtctgaa

SEQ ID NO: 548736 - DNA, 98 bp, Homo sapiens
cagcctcacatggtgtgggccgacatcaagagctgcgagatccaacagcaccagtggcagttcgcagcctccaggacttggctcgcatcgccatccgg

SEQ ID NO: 548737 - DNA, 100 bp, Homo sapiens
ataattttagcacccagtatgttttagatggcagtggccacatactttctcagaaaccttcacatcttggtcaaggtgaggagcaaaagaagggatccac

SEQ ID NO: 548738 - DNA, 82 bp, Homo sapiens
gtcagtgtgcttgcttggagatcaggacgcaaagtgtaaacaggaacatcgataagtagtgtaaaaacttgcacaatgaaat

SEQ ID NO: 548739 - DNA, 74 bp, Homo sapiens
cgtggatcgttgttttgaaacggccgtgcaggcctgcccagctgccagcggtggcccccatagctgcctcctcc

SEQ ID NO: 548740 - DNA, 101 bp, Homo sapiens
gtgtactccctggtgctcatccccaaagccaagccactcactctgctctgggctgtcaaagctcgaaaaacagcagcagaggaaagaaaagaccagagcta

SEQ ID NO: 548741 - DNA, 100 bp, Homo sapiens
cacaatgcccttgaagatctggtgatgaggtttaatgagctccagggttccttgaaaagaaaacaggtagttaacctatctcctgccaacagcaagcgac

SEQ ID NO: 548742 - DNA, 100 bp, Homo sapiens
tcttcattcatgactccagacaggtgagccagccatgagagggtatcttgtggccatattcctgagtgctgtcttcctctattatgtactgcattgcata

SEQ ID NO: 548743 - DNA, 100 bp, Homo sapiens
caatttatcattgaataagtgttttaagaaagtggacaaagagaggagtcagaataagaaagccttgagttttgtgaaaaaccggagaagagaaactaaa

SEQ ID NO: 548744 - DNA, 98 bp, Homo sapiens
cttcgccttccaccatgattccatcctccgttacctgaagaacgatgggaaggtgcatttggtggttttcaacaacctgcagctggcagacggaaggc

SEQ ID NO: 548745 - DNA, 100 bp, Homo sapiens
aaggttccaggaattactagagactccattatgaattattttaggactggccctccaggccctccaggtggtctgagaatagaagacattagagccactt

SEQ ID NO: 548746 - DNA, 100 bp, Homo sapiens
gaacgattaaaagaagaactcgcaaaagctcagaggtgtaaacaggaacatcgataagtagtgtaaaaacttgcacaatgaaatccgaagccaaggatgg

SEQ ID NO: 548747 - DNA, 74 bp, Homo sapiens
gccctgcggagctgcttcgccgctgcggtaatgaggagtacctgatcaatctgatagactctccaggacacgtg

SEQ ID NO: 548748 - DNA, 51 bp, Homo sapiens
tggctctcctgttccagcaattggctgcagtacagcaatggcgatcagaag

SEQ ID NO: 548749 - DNA, 100 bp, Homo sapiens
gctttggataatgacgacagcaacccgaagacagggaaatttaggcccaaccgcttgcttatcctccacggcttcctggacgaaaacgtgcactttttcc

SEQ ID NO: 548750 - DNA, 75 bp, Homo sapiens
aaaaatttattaaaggaagcacacctaagtgtattggaacaacacaaactaacaaaagaacagtgggaagaaaga

SEQ ID NO: 548751 - DNA, 75 bp, Homo sapiens
ggagcttctacagaaggtggagcccctacagaaggtggagcccgggcgggagtcagaaataccatcagaggaggg

SEQ ID NO: 548752 - DNA, 87 bp, Homo sapiens
cgcagcgagctggagccgccggaggttcaatgtggcttaattgtggtggcctacaaagatggatcacctgcccacccacatttcatg

SEQ ID NO: 548753 - DNA, 75 bp, Homo sapiens
ggagtaacttggccaggctggccccgagcggaactggagaaagctgaggggcttttacctttacagtcatcatcc

SEQ ID NO: 548754 - DNA, 100 bp, Homo sapiens
ggaggccctgcctgctcacagcggggcgcccctgcttgtggaggagaatggcgccatccctaaggataaagtggccagtgtgtacgaagccccgggcttt

SEQ ID NO: 548755 - DNA, 100 bp, Homo sapiens
accaaatccaagatggcggccagcaggaggctgatgaagacttgcacacctacccctgtggagcgtgcaccctataagggagaagtcgccacactgaaat

SEQ ID NO: 548756 - DNA, 96 bp, Homo sapiens
tggcgaccactgcttctccgtgggcagcattggcgaccagcgcttcacggaatggcggcgctagatagtaaggcatcagggaagatgggaatgcga

SEQ ID NO: 548757 - DNA, 100 bp, Homo sapiens
gtttgatgtgaatgccattgtcgcccatgttctcttgggaaggggaggagttacagcccggccagttggagttgtagtaccacgagggacgccaactccc

SEQ ID NO: 548758 - DNA, 98 bp, Homo sapiens
ggccatctacctggacatcgatggacgcattcagaagattttgggaaccagtaggacattgacatacatccgagaacattctgtggtggatccagtgg

SEQ ID NO: 548759 - DNA, 100 bp, Homo sapiens
tcaaacagcagtatgatgaactggaggctgagtacgacagcctcaaacaggagctggagcagctcaaagaggaattgaatgatctggcacgggaccctcc

SEQ ID NO: 548760 - DNA, 100 bp, Homo sapiens
atccccaaagtcacagaaataatacctaaatatggcagtataaatggagcaacaaggctgactataagaggggaagagctgtaggtaaaacttgcctact

SEQ ID NO: 548761 - DNA, 100 bp, Homo sapiens
ccaactgctcctgcgccgccgtggactccaacgacagcctctacgggggagactccaagttcctggcagaaaacaacaagctgtgtgagacggtgatggc

SEQ ID NO: 548762 - DNA, 50 bp, Homo sapiens
tgtgatgaaagcacatggtacagaacccttaggagaaatcttgagagtgg

SEQ ID NO: 548763 - DNA, 100 bp, Homo sapiens
agaagcaacaacctctcctcttcgtctccgccatcagctcggcagtcgcgaagcagcaaccatggaacaagatcactcaaggtgaaggataatctactaa

SEQ ID NO: 548764 - DNA, 90 bp, Homo sapiens
ggatctgcatgccgctcaccgtagacgaggagctcttgtccctggcaaagcgaaagcgcagtgactctgaggagaaggagccgcctgtga

SEQ ID NO: 548765 - DNA, 100 bp, Homo sapiens
ccgccaccatgcccaagagaaagccccatggctgggggttatggagtgatgggtgacgatggttctattgattatactgttcacgaagcctggaatgaag

SEQ ID NO: 548766 - DNA, 75 bp, Homo sapiens
cagcgcgtttggctgtgacctgacggagtatctggaaagctcgggacaggatgatcatggaagggaagtggttgc

SEQ ID NO: 548767 - DNA, 100 bp, Homo sapiens
aatgctccttctcctggagacgcaactcaagacgtggacgaatgtcgcgagcgaggcccagccctgtgcgggtcgcagcgctgtgagaactctcccggct

SEQ ID NO: 548768 - DNA, 95 bp, Homo sapiens
ccgagcagttctccccacctgatgtggctccccctcttctggtgaagcttgtggaggccattgaaaggacaggggacatcacccagaagggctat

SEQ ID NO: 548769 - DNA, 100 bp, Homo sapiens
cggctgcctgtgaatgtccgagaactgagcctggatgatcctgaggtggagcaggttcagttggagacgatcataggtggctgctgtgacaaagggaaat

SEQ ID NO: 548770 - DNA, 82 bp, Homo sapiens
aggaaatgaagggtattgccgctgttactgatatacctttagtattcaagtcaaacaacgttgaaatggattgggtgttgaa

SEQ ID NO: 548771 - DNA, 99 bp, Homo sapiens
gcagctgtcttcccaccgtggagacctcatcacggagccctttctgccaaagtgccgtgctactcatatgggcagaagctgtccaaactggccatcctg

SEQ ID NO: 548772 - DNA, 100 bp, Homo sapiens
cggtgcgcgacctgggctggctccgggggtggcgggcgcagctgctgtgacagtttgactttgaaggatcactttcccctgtcattgcgcccaaaaaagc

SEQ ID NO: 548773 - DNA, 98 bp, Homo sapiens
tgatggtttccaccaccaccattactttctctatgtcaagatacctgggaagccggtgataacaatccatattcctcatttggagcaactctggtgag

SEQ ID NO: 548774 - DNA, 98 bp, Homo sapiens
cagaagcgaagtggagagcgccagagtaatggaacaaagaactttgagtctggcaaggcttataagacaacatggggagatggtggagaaaactcacc

SEQ ID NO: 548775 - DNA, 51 bp, Homo sapiens
ctgaccctgggagacatcgacgtgcctccggagccagcgtggtggccatag

SEQ ID NO: 548776 - DNA, 90 bp, Homo sapiens
ttcacccacagcggggcggcggcggcggcggctgcggcccaatatagactggactattcctctttgtatatgtgtaaacccaaaaggagc

SEQ ID NO: 548777 - DNA, 100 bp, Homo sapiens
gaagactttgaacgcactcctcagagtccgactctcccacctgctaaggtatggatcctggcgggagccagtcaacccctattatgtcaatgccggctat

SEQ ID NO: 548778 - DNA, 100 bp, Homo sapiens
aaactgaggcctggagaggttaaagagacccgttcagagtcctacagtggcagttttgacagatcttctagatgccatgcacactcttagggaaaaatat

SEQ ID NO: 548779 - DNA, 74 bp, Homo sapiens
aagcagaagaagaccgaagggaagacttccagtagctccaaggaggttaaggttggtcaaagaaaaagtgatgt

SEQ ID NO: 548780 - DNA, 100 bp, Homo sapiens
attacttgacctatgaaggagctgtcaatctgaattcaataactgatcctgtgttgagagaggtggaagaacaattgccctttttcggcagatgaaaatt

SEQ ID NO: 548781 - DNA, 75 bp, Homo sapiens
ttacacttcgactctcaaagcaataccaggatagctgttgtttcagagaaaggcgccatgtcagaaccggctggg

SEQ ID NO: 548782 - DNA, 74 bp, Homo sapiens
gcttctgaggaaaattcagttgttgtgcctcatggaggtctccgatgatgacctcgacccatcctttactgtct

SEQ ID NO: 548783 - DNA, 100 bp, Homo sapiens
tcaaggcccgcggaacagcggaggacgaagagcgggacccgagccctggaagaaacgctgcacaagtcgaccagcagcagcagcgtgtctccctctttcc

SEQ ID NO: 548784 - DNA, 100 bp, Homo sapiens
gatccatcttagtgaagaattaggatacaggctggtgcagaagtgaatgtgttgaatgacatgggagacacgccgcttcatcgagctgcctttacaggac

SEQ ID NO: 548785 - DNA, 100 bp, Homo sapiens
gaatcttctgggagctgaggaaccagatatcttgaaaagctgccagaaagagcaacaagatatggatttggatatagaatttgatgtacaccttggaata

SEQ ID NO: 548786 - DNA, 101 bp, Homo sapiens
ttctcatgaacagaaacacctaggaagggagaactgaaagtttcctacactactgaggtttaggggcactgtgaagcaaaagccacgcctcagaatcccag

SEQ ID NO: 548787 - DNA, 90 bp, Homo sapiens
ctgattgggacaacattcagacccatttccagtcatgaattttaggtgatgggcaagtcagaaagtcagatggatataactgatatcaac

SEQ ID NO: 548788 - DNA, 98 bp, Homo sapiens
tgaaactccagaagcagaaagtacagtctatgaatgagatagtccagagcaacctctttaaaaagcaaggtgggctggatgacactttgcacacaatt

SEQ ID NO: 548789 - DNA, 95 bp, Homo sapiens
acaacaaggtgttgatgccgccggacggtattgttgcagcatctggcagtgagactgaggatgaggacagcatggacattcccttggacctttct

SEQ ID NO: 548790 - DNA, 75 bp, Homo sapiens
cgcgactgcccgcaccccctccgcgggggtcccccagaggtgtcctcatgacttctcttgtggaccatgtccgtg

SEQ ID NO: 548791 - DNA, 100 bp, Homo sapiens
ttcggttcaggcggaggcatccttaccaaggaatctgcttttcaagtatgccaccaacagtgaagaggcagactcagtgggatcctcctacttgggaaag

SEQ ID NO: 548792 - DNA, 82 bp, Homo sapiens
cccagtccccagacaccaccatccagagaaccgtgcaacaactgcttccagctgccatggtgatgccaccccagcccgtggt

SEQ ID NO: 548793 - DNA, 101 bp, Homo sapiens
gggctcttgggtggtctgtaagccgcggagctaattggagatggtttcacagcacgcagtggcttcgggagcttgggaaagtcgaggtgacggtgtttgac

SEQ ID NO: 548794 - DNA, 101 bp, Homo sapiens
ccacaatagaacactggatcgatcgggggatctaggcgacatggagccattgaagggaacaacacccttgatgtgtccacaggatgaaatgtccgagtcag

SEQ ID NO: 548795 - DNA, 100 bp, Homo sapiens
ggacgggaaagattgcaaggtgaataaagaagtggagcgtgtcctgaaggagttccaccaggccgggaagcccatcgggatgggatcgagcggtccctgg

SEQ ID NO: 548796 - DNA, 82 bp, Homo sapiens
actctccagcaccagcttccagttagtggatatagcacaccatccccagccaaagctccaccatgaggcgaggtggatggag

SEQ ID NO: 548797 - DNA, 80 bp, Homo sapiens
tcgggatctcggtgctgcagacggcgagacctcctgcacagcgtctgcttctgcgctttgcctgggagaggccctggtgg

SEQ ID NO: 548798 - DNA, 100 bp, Homo sapiens
cagaagcaggtgcagatcaagaccctggagggcgagttctcggtcaccatgtggtcctcagaactcctctttcctaaaatggagtcgagtaaaaagatgg

SEQ ID NO: 548799 - DNA, 83 bp, Homo sapiens
gcggcggcggggaggggagaggctctgagaggcgaggccggcaaattgtggctactaatttgccccctgaagatcaagatggc

SEQ ID NO: 548800 - DNA, 98 bp, Homo sapiens
ggcgacagcaacagctctgccggctggaagttaattggccttggtcctcacagctccaaaaagaaacaggatctcgataagctctatgagctgaagtc

SEQ ID NO: 548801 - DNA, 98 bp, Homo sapiens
tcattgtggacaccattgttatggccaatctggctaaagaattacctccaaagccattgtcaagaccacagcagtcatctgcaccagtccagctgaac

SEQ ID NO: 548802 - DNA, 100 bp, Homo sapiens
gctcgttatcatgtggcagaagcactatggtatggctatcctgatccttcttacctgaaacgtgtcaaagaggagctgaaagccaaaggaattgagtaag

SEQ ID NO: 548803 - DNA, 90 bp, Homo sapiens
ccctcccgctcggccccgccagcagcactgtggaggccgtcctcggagtctgctacaccatttttgatttgggcttccgctttgatgtgg

SEQ ID NO: 548804 - DNA, 87 bp, Homo sapiens
cgctggaagggatgtcgtctcagcagtgctcgggcgcagcagcccctgtcaaagggaacaggaagcagtccacggagggtgacgccc

SEQ ID NO: 548805 - DNA, 83 bp, Homo sapiens
ctggattggtgaaactgaatcacaggagatatttccagatttatttaattgcccaactaccactgatgaagatatattggagt

SEQ ID NO: 548806 - DNA, 75 bp, Homo sapiens
tgttgagtcccctgtgtcctcttctggcttcccacatcacaaactttgaggttgatcaatctgtgtttgaaattc

SEQ ID NO: 548807 - DNA, 100 bp, Homo sapiens
tctttgtacagaaattgaaaggcttcaaagctagcaggtgcataaggcaaatccaatacgcaagtaccagggtctggagataaagtcaagtgaccagcct

SEQ ID NO: 548808 - DNA, 98 bp, Homo sapiens
gattctggaactgggagaagatggctttaaagaatacacttcaagttatgaagacagtatggagtttccagaccatagtagacatttgctacagtgtc

SEQ ID NO: 548809 - DNA, 96 bp, Homo sapiens
aaaggatatgaaaagaaaagggcaaagctgcttgcacgttatataccgcttattcaaggttgagttgttacaacaaaagttgagagaaaagttgga

SEQ ID NO: 548810 - DNA, 97 bp, Homo sapiens
aggaggggctccgcagcctgagtcaggaaggggtcgctgtggagatcatggactatgaaggttgggggccgtcccgctcctaaggcaggaagatggt

SEQ ID NO: 548811 - DNA, 75 bp, Homo sapiens
gcgcggggcagcaacagtcgcaggagatgatggagggtgtggaccactacaacgaggtgaagagcgtcaccatct

SEQ ID NO: 548812 - DNA, 50 bp, Homo sapiens
cccacggacaccacctcaacgtgataacctcctaaggagagcagcctgtc

SEQ ID NO: 548813 - DNA, 75 bp, Homo sapiens
cggagcgcggagcccggctcccgcaccatggaggaggacgacagctacgctccagaacctgggtatcaacccagc

SEQ ID NO: 548814 - DNA, 98 bp, Homo sapiens
gccgaccggcgccgggagatcctgggctaccggctctctgaccagttccacgacatcctcattcgaaagtttgacaggcagggacgggggcagattgc

SEQ ID NO: 548815 - DNA, 98 bp, Homo sapiens
agacactggaagtctcactgtctcgaagtgcttgtgatttcacgtatttttgctgaactcgtaaaagagacacttggatggtggattaaccagaacac

SEQ ID NO: 548816 - DNA, 100 bp, Homo sapiens
cggggagctgcgcgaagccggggcggagcacgcgagctatgggtttgctgaactaactccaagctggtgtgcctagcgtccgcgcggctgccggcccaag

SEQ ID NO: 548817 - DNA, 100 bp, Homo sapiens
cagtgacctggggaacctgctcaaagccctgggtcgcttggaagaagccaaggtattgttgcagcatctggcagtgagactgaggatgaggacagcatgg

SEQ ID NO: 548818 - DNA, 100 bp, Homo sapiens
tgaatttagctcttacaatttggattcttaaagtgatgtggttttctccaatcatccaagcctagaaaacatggaacagatagagaaatttcaggaaaag

SEQ ID NO: 548819 - DNA, 75 bp, Homo sapiens
aggcaggtcgctgcctgtgccccagctggtggttgcataccctgtcctgagggcgcggcacggagtgcatgcggg

SEQ ID NO: 548820 - DNA, 100 bp, Homo sapiens
atctgtctgcttgctgtggaaggcaatctttttgaaataaagaaacttcgagaactggaaggctatgataaggctgaaagtcacaacatgaaaaaccaac

SEQ ID NO: 548821 - DNA, 74 bp, Homo sapiens
cacaacaaaaaagatgattgttggatatgcataagaggtctgccacaagagatttagcagcaccagcaatctca

SEQ ID NO: 548822 - DNA, 85 bp, Homo sapiens
gagtggcggacgggctcccgctggccgcctcgatgcaggaggacgaacagatgctgagggttggaaaagcaaaagcagatgtgtg

SEQ ID NO: 548823 - DNA, 75 bp, Homo sapiens
gcgtccgctacagtatgtcaatcgcttgccccagcacagatttgtaagactccagggcctcccagccgtgaataa

SEQ ID NO: 548824 - DNA, 96 bp, Homo sapiens
gcccgggagtacatctacatgcattttggggagattaccaacttcgtaccagctagaagggagaagagatgggggcttgaacacggggcttcctta

SEQ ID NO: 548825 - DNA, 100 bp, Homo sapiens
gactgtcgctgctttctgaggccacaggaaaggggccgtcggtcgccgccatgacagcgagcgaggcggagagttgatctctctaatgtattagatcttc

SEQ ID NO: 548826 - DNA, 96 bp, Homo sapiens
gtgaatttccatgtcaacatagtccaggagcaggccatagaggtgctgacccgctccagcctagaagttgagttggccgccaaggagcgggagatc

SEQ ID NO: 548827 - DNA, 83 bp, Homo sapiens
ttgtcctggctcttgccctcatcctggttctggaatcctcagttcaagcagtacttctggaatagaaattctaaacattagcc

SEQ ID NO: 548828 - DNA, 100 bp, Homo sapiens
caaagattctttgtagcagacactgcaaatgaagctctcgaggctgctaagagactaactaaagtctccagtgaatattgaattgctgaggattttggga

SEQ ID NO: 548829 - DNA, 50 bp, Homo sapiens
gtggctcccaagaagtccgagacacgcgctgcagaagaaagatcagcaac

SEQ ID NO: 548830 - DNA, 50 bp, Homo sapiens
ccctaccccaataatcttaacagctaaaggttatagtgaattctctgaag

SEQ ID NO: 548831 - DNA, 98 bp, Homo sapiens
aacagaaaaatgaagatggaacatggccaaggggtccttctactcctaacgggacgaccctgggacagtctccactggggcagatccagctgaccatc

SEQ ID NO: 548832 - DNA, 97 bp, Homo sapiens
ctaccacggccgagctcttcgagccaatgttttcagttgcaccaagcttagccaccaatgcatcagcagccgcctttaatccctatctgggacctgt

SEQ ID NO: 548833 - DNA, 87 bp, Homo sapiens
gggttggcgcccggcagcacgtgttcctggtttcaggtattgttgcagcatctggcagtgagactgaggatgaggacagcatggaca

SEQ ID NO: 548834 - DNA, 75 bp, Homo sapiens
cctcccgagtagctgcgactacagagcaagatgagacaggccttaggatttgccaaggaagccagagagagccct

SEQ ID NO: 548835 - DNA, 83 bp, Homo sapiens
ccagcagctgaaggaagtttccgtggaagaaagggaagtttggttggcttagtggattatccagatgatgaagaggaagatga

SEQ ID NO: 548836 - DNA, 88 bp, Homo sapiens
caacaaccgtggctcacaagatgaaagagcacgatcagctcagctactatttaataaaacaaaatctgtagaattcacgttttgtaat

SEQ ID NO: 548837 - DNA, 50 bp, Homo sapiens
cgggaagaacctcatcgctgcgacgaaaactaaaagatggcggcaaggca

SEQ ID NO: 548838 - DNA, 50 bp, Homo sapiens
ccaccccctgacctgcctgggtccaaaggagattagcagaggcatttcat

SEQ ID NO: 548839 - DNA, 101 bp, Homo sapiens
caatcatggtgcagaaataccagtccccagtgagggtgtacaaatacccctttgaattaattatggctgtctccaggaaaagttgggctttcaacattcaa

SEQ ID NO: 548840 - DNA, 100 bp, Homo sapiens
ccggagccgagtctgcgcctggggagcgcatcagcgaggaggtggggctgctgcagctccttggggaccccccgccccagcaggtcacccagacggatga

SEQ ID NO: 548841 - DNA, 82 bp, Homo sapiens
ctccaagagcactagtgtctagaaggcactaaggatgaggacggggacttggttgccttttccagtgacgaggaattgacaa

SEQ ID NO: 548842 - DNA, 96 bp, Homo sapiens
cttcaaagtgattaccaggacctgtgcagcataggaaaggagctatcaatgtcacatataccacggttcctggaatgctgagtctgaagaaccaaa

SEQ ID NO: 548843 - DNA, 100 bp, Homo sapiens
aaatcctccaggaggagatcaaggagtacaagacctcctgccccccgaggtctgcagtctcctgaacccagcagccatctacgccaacaacgagatcagc

SEQ ID NO: 548844 - DNA, 82 bp, Homo sapiens
cttgtacccacaggtgaaaaatcttattgggcagaagatttgtagactttgggatcatcctatgagttctaacatcatttcg

SEQ ID NO: 548845 - DNA, 82 bp, Homo sapiens
ctgatgtgaaaaataccacgacaaaaccaccctagtagcccctgaagaagatgaaaggaaaaagaggcgacgagaaagaaat

SEQ ID NO: 548846 - DNA, 74 bp, Homo sapiens
tcgccagcagccgtccggagccagccaacgagcggtatggaacgccgtggactccgggcactgcctgcagacct

SEQ ID NO: 548847 - DNA, 100 bp, Homo sapiens
ctgaattcttacaacctctctacgccaaagaaatccagtcccgaccaggcccaagttgtttgcttcgctgggcagccccagaggtcattgcacatggaaa

SEQ ID NO: 548848 - DNA, 49 bp, Homo sapiens
tttgacgacactgatggtttgttcactgagacttttttgacggagaggg

SEQ ID NO: 548849 - DNA, 75 bp, Homo sapiens
ctggaaaagaaggacgtggtgggaagagcaagagggtggtccgtactgagaagaacagtttgaacaaccgattct

SEQ ID NO: 548850 - DNA, 83 bp, Homo sapiens
cgatcttgggacccaccgctgccctcagctccgagtccagggcgagggcgaagctgtgctcaggcccgggctggacgcagagc

SEQ ID NO: 548851 - DNA, 97 bp, Homo sapiens
gggaaagccgtggccccgagggcggatccgagccaaaagaatgcaatggtgtaaagattccagttgatgccagtaaacctaatccaaatgatgtgga

SEQ ID NO: 548852 - DNA, 82 bp, Homo sapiens
agctggattaggtcctcatgctgctgtggtcattgctggtcatctttgaatgttgtaccatctttgggtaggcagacttccc

SEQ ID NO: 548853 - DNA, 90 bp, Homo sapiens
catgcatgtcttttaacccggaaacaagaagactgtccataggtctagacaatggtacaatctcaacaattgcagcatgactttcccagg

SEQ ID NO: 548854 - DNA, 75 bp, Homo sapiens
gtttgatttctggagtgtccacagtcctgctgcagaaaaatatggctcaggagactaaccagaccccggggccca

SEQ ID NO: 548855 - DNA, 100 bp, Homo sapiens
gatgaagaggatgatgatgaagaatttgtcttcagcgaagcggaagtttgcagattccttaaatgaatttaaatttcagtgcataggagatgcagaaaca

SEQ ID NO: 548856 - DNA, 74 bp, Homo sapiens
ttccagagccaaggaggaagggttgtccggggtcaaagaattgactgtagatccaactgctgctggtgatgttc

SEQ ID NO: 548857 - DNA, 100 bp, Homo sapiens
attacaggtgtgcaccaccacgcccagcaataagagctaactgccatcaagagccatcagtatgtcttcaagctgcatgcccagaaagctggattggttt

SEQ ID NO: 548858 - DNA, 100 bp, Homo sapiens
ggaaaggcacccatccttattgctacagatgtagcctcccgtgggctagctattgacctgaaaagtggttctggaaaagtgtaccaaggccctgcaaaag

SEQ ID NO: 548859 - DNA, 78 bp, Homo sapiens
tcccaatcccccactctttccgccctaatggaggtctccagtttcgtgtttcaaaccggcatggtcggctaccccgag

SEQ ID NO: 548860 - DNA, 98 bp, Homo sapiens
gtggcttcgtcaagtcggacgtggagatcaactactcgctcatcgaggtcattcccaaaagcaagttcgtcttggtgaagttcgacacccagtacccc

SEQ ID NO: 548861 - DNA, 97 bp, Homo sapiens
cgtggttcacccgctgccgggcaccgaggaccagctcaatgacagatcgcaccccctccctccctggcggagcccctgaaggagctgttcaggcagc

SEQ ID NO: 548862 - DNA, 75 bp, Homo sapiens
tggttgcgcgtgtccgacgctggctccgctctatccggctttgctaggggaggccgagtgtactacttcaaccac

SEQ ID NO: 548863 - DNA, 100 bp, Homo sapiens
cactgtgcatcgcccactccagaagtagcatggaaatggagggcatcttcaaccacaaaggtcctgctccgcttcgcagtggaatggaacggatttagaa

SEQ ID NO: 548864 - DNA, 75 bp, Homo sapiens
gccaagaaaggcagcgaggtggagagcgattgcttccaagtatgatcatcaggcagaagaagatcttcgcaattg

SEQ ID NO: 548865 - DNA, 100 bp, Homo sapiens
tcatcaaaaatagtgatagctttgataaagtttgctctccaaagctcggggaattgattccagctctgttaaactccggggtagttctctcttcatggat

SEQ ID NO: 548866 - DNA, 98 bp, Homo sapiens
aattcacccagctgatgttggagatgcctgaggaagtgcaccatggagaggaggaggtggagacttttgcctttcaggcagaaattgcccaactcatg

SEQ ID NO: 548867 - DNA, 85 bp, Homo sapiens
aaaacctgacttttatcatcatattgataatctcaggagaactctatgcagaaggtggaaccgtcccaaaatgtcccttgctcag

SEQ ID NO: 548868 - DNA, 50 bp, Homo sapiens
gggcagcctgagtcccagtgatatggtatagctgcatgctgggaaagaaa

SEQ ID NO: 548869 - DNA, 75 bp, Homo sapiens
aggatatgacaggggtaacacccttccagatgatttttgaggattacatcccagtagaccaagaagagttaagag

SEQ ID NO: 548870 - DNA, 100 bp, Homo sapiens
gtgaaatcccagactgcaaatggaacaagtcgccacctaaggaagtcctcggcaattacgagattctggcatcatccgagttccagcgccttgccactat

SEQ ID NO: 548871 - DNA, 99 bp, Homo sapiens
gtctgtgcggctgcgtggggctcggccgcgcggactgaaggagactgaagacttcccaagtaagaagcggaagaggagccgctggaaccaagacacaat

SEQ ID NO: 548872 - DNA, 73 bp, Homo sapiens
tccatatgtaaccaaatattatggatcctatctgaagaatgaagctcgactgagaattgtaaaaactcttgaa

SEQ ID NO: 548873 - DNA, 97 bp, Homo sapiens
ctagagccttggatccaggagaacggcggctgggttttcctttggaatatggataaatacaccatgatacggaaactagaaggacatcaccatgatg

SEQ ID NO: 548874 - DNA, 75 bp, Homo sapiens
ctggacccacgtctgtctggtgataccaggggcagagggaccactctgacagagggtggcctggaggagatggtg

SEQ ID NO: 548875 - DNA, 75 bp, Homo sapiens
cccttgcaaatttacatacgagaatggcttgtgaaatcatgcctctgcaaagcttcctgcctgacacagctcact

SEQ ID NO: 548876 - DNA, 100 bp, Homo sapiens
ggaaggtactggttttaagtgtagttgccgacgcaatggcagcctttgcagtggaacctcaggggcccgcgttagggctgatgcaaatcgtactgcccct

SEQ ID NO: 548877 - DNA, 90 bp, Homo sapiens
cattgtgagctccgtattctctgaagcctggaaacgaggcactcagttggaagagtccagcaagctgcagaaccttggcctgaaaatgct

SEQ ID NO: 548878 - DNA, 50 bp, Homo sapiens
tcaccctggaagagtcgctggccgaaggtgctggagaatctggtaaaagc

SEQ ID NO: 548879 - DNA, 96 bp, Homo sapiens
gtgcttccaactgcgggacaggaagtggccgtagcggcttgttggataaggaagattgttgatcgaatcgacaatgatggggatggctttgtcact

SEQ ID NO: 548880 - DNA, 88 bp, Homo sapiens
gcggaccgaggcagcggcggcacctgccggccgagacggttgatgatgaagcgccggccgtgtaaatgaagatcgggtgaggagcagg

SEQ ID NO: 548881 - DNA, 76 bp, Homo sapiens
tgcgctccatggacagatcaacgaacctggacattgaggagctcaaggacagcggggattttcagtttgattgaca

SEQ ID NO: 548882 - DNA, 74 bp, Homo sapiens
cgcagtggtcgcttcttctccttggagaattctcaccaaatgttcccaaatccttatcctcagctgtgaaggta

SEQ ID NO: 548883 - DNA, 100 bp, Homo sapiens
gtgtttgttcacaactaagcccagctgagacgatcacttttctgtaggccatttgtccagtaattcgccaaaatgacgaacacaaagggaaagaggagag

SEQ ID NO: 548884 - DNA, 100 bp, Homo sapiens
tttttgagaaaggaaggaatatatcctgactgattgatcagtggtcaattggtcaggacagggactacagaaattaggtccaaatttaccctgtgaagct

SEQ ID NO: 548885 - DNA, 75 bp, Homo sapiens
gtcaagtcctccaacttggcgggaaagtccttctctgttgtcttcaaccaccttactcctccaccgcccgatgaa

SEQ ID NO: 548886 - DNA, 75 bp, Homo sapiens
ggcgcggccacggagaagggcgcgacacgaccgacttccaggagagctttgtcacctccggcgtgttcagcgtca

SEQ ID NO: 548887 - DNA, 95 bp, Homo sapiens
ggagccctcggggcggcggactggctcgcggtgcagagtcctgtgaagataaatcagattagcttggatgaaagtggagagcacatgggtgtgtg

SEQ ID NO: 548888 - DNA, 100 bp, Homo sapiens
ccctcctctcacggcacctcccaccatgaagtaagactttgaccccgacgcaggcttcagtgattgccgcggatcagaagcctgagcactttggctcgag

SEQ ID NO: 548889 - DNA, 100 bp, Homo sapiens
gcacgccgtgtccgagggcaccaaggcggtcaccaagtacaccagctcgaagtaccccaagaagctagtgcagacttattcagtgtttccctaccaggac

SEQ ID NO: 548890 - DNA, 51 bp, Homo sapiens
ggtcatcaatgttactcaggtagaggccttggatggtatactgtaaattca

SEQ ID NO: 548891 - DNA, 75 bp, Homo sapiens
caaaaaccctgtttttttaatagctactacataggcaagtcaccaatctgagatagcagccggccctgcgagaat

SEQ ID NO: 548892 - DNA, 100 bp, Homo sapiens
agggctaccctcactggcctgccagggccaagactaaggggctgcagagcggggtggacattggcgtcaagtactcggagaagcaggagcggaatttcga

SEQ ID NO: 548893 - DNA, 75 bp, Homo sapiens
ttggtccttcgccgtcagtatttgaggagaaagcatttggaaaatgttggggcttttcaggaagcataataagat

SEQ ID NO: 548894 - DNA, 95 bp, Homo sapiens
taacccacccaacctcaccaagaagatgaagaagattgtggatgccgtgatcaagtacaaggacaggaaagtcgtgacaagtgctacctaatcca

SEQ ID NO: 548895 - DNA, 100 bp, Homo sapiens
cgcccacttggcgggccctggctggggatgtgcgagcttcctgcctgacacagctcacttcaagaagtgcacaatgtcagaacgtggaattaagtgggct

SEQ ID NO: 548896 - DNA, 100 bp, Homo sapiens
gttctcatcgtccctgccaactttccaagtctggggatggccaggcacgtgtggttctcaaatataggcattctgatgggaacttgtgtgttaaagtaac

SEQ ID NO: 548897 - DNA, 90 bp, Homo sapiens
agggtccatatcgcggcatccggctcccgcccgtcttcaggagatctattgggaaactgattataaccactcgggcaccatcgatgccca

SEQ ID NO: 548898 - DNA, 74 bp, Homo sapiens
ggaaactgagtatgggatctgatgatgctgcctacacacaagtgatcctgccatgaagcagtttctgctgtact

SEQ ID NO: 548899 - DNA, 85 bp, Homo sapiens
ccaggaggtcagccagggaatcattaacaagaggcagtgacatggcgcagaaggaggctccaccgggggacggctacgtgcaggc

SEQ ID NO: 548900 - DNA, 75 bp, Homo sapiens
tggacctaaaccgctggagggctggaagcttgaccctcaacaccaaccatgggcatatcctggtggattactcca

SEQ ID NO: 548901 - DNA, 100 bp, Homo sapiens
atggagacctcagcactcaagcagcaggagcagcccgcggcgaccaagatcaggaacctgccctggtacattacaggaatatcagaagagaatgaaaaaa

SEQ ID NO: 548902 - DNA, 96 bp, Homo sapiens
atgaaaactacttcaactaaaagccaaccacttgaacaagcatcttgtgtggattctgggattaaagcctagtagtggcggtgccttgaaacctgg

SEQ ID NO: 548903 - DNA, 100 bp, Homo sapiens
ccacccactgtggtctgttgtaccccactgctggggtggtggttccaatgagacagggcacaccaaactccatctgcaaccaaccagtggttcatcccag

SEQ ID NO: 548904 - DNA, 82 bp, Homo sapiens
ccgggagatcccaggcggtgacagagtggagccatggctagaggtctcggcgcggaagatggccggcggcgtggacggcccc

SEQ ID NO: 548905 - DNA, 75 bp, Homo sapiens
cggccctgggaccaaagtggatatcaaacgcatagaatgtcaagctaaccaggcgtccgctacttcagaagagtg

SEQ ID NO: 548906 - DNA, 83 bp, Homo sapiens
caaaagggaagctgaaaccaactcagaatgcttctgagaaggcttctcacggcattcagcagcagcgttgctgtaaccgacaa

SEQ ID NO: 548907 - DNA, 100 bp, Homo sapiens
cagctccggccagctatggcagcactaccactaaaccaatggggttggcgtgcagtggtgtgatctcagctcattgcaacctctgcctcccggactcaag

SEQ ID NO: 548908 - DNA, 74 bp, Homo sapiens
ggattcttcagaaagtgaacttggcattttagatctaattcaagtcagtactcctgcatttgtaccaacgaaaa

SEQ ID NO: 548909 - DNA, 100 bp, Homo sapiens
ccagatgtctacaagagccctgcttcagatacttacatagtttttggggaagccaaggcatgttatttgaaagcaattgagacgcaaccgaactttgcag

SEQ ID NO: 548910 - DNA, 108 bp, Homo sapiens
tgcaagtggccaggctgtgaagcagtgtgcgaagatttccaatcatttctaaaaaaacctcggatcaattctcagctggtggcacaacaagtggcacaacagtatgcc

SEQ ID NO: 548911 - DNA, 102 bp, Homo sapiens
ctctgcctgctgacctggggaggccattggctctatggaaaacactgatctatccatactaatggaaatgtaactggaactgactctgatgataaaatcaag

SEQ ID NO: 548912 - DNA, 76 bp, Homo sapiens
agatctttctcgggtgtttcattcttacagtccatatgatcacaagtgtttgggaaatgggaagtaatgacagctg

SEQ ID NO: 548913 - DNA, 98 bp, Homo sapiens
ctggggaatgcttttttatctcatattagtgcctgtgatggcatctttcatctaacacatcagctgtttcatgtattagccttgcacatgcggcttta

SEQ ID NO: 548914 - DNA, 75 bp, Homo sapiens
catcatggattaacccaaaagatgatctcagagacatgttctgtaagtacttgattctaaagctcgaaaggcctg

SEQ ID NO: 548915 - DNA, 80 bp, Homo sapiens
gggacggctttcatctggtcaagtaccaggtcatcagtacaccatctgatattttcatggtgatggaatatgtctcagga

SEQ ID NO: 548916 - DNA, 116 bp, Homo sapiens
gaagagtctggagtttatctggagtgaggtggccggttcttggtgggatctgagcagatgtgaagttcatttccaatccgccctccatggtggcagcggggagcgtggtggccgca

SEQ ID NO: 548917 - DNA, 100 bp, Homo sapiens
cagacgaagacagtccctggatcaccgacagcacagacagaatccctgctaccaaacgctgcgatgactggggactagacaccatgaggcaaatccaagt

SEQ ID NO: 548918 - DNA, 143 bp, Homo sapiens
ttttcacctcgcgtcgcgcccgggaggaaggaacgaggcaaggagctaaagcagcgtgcgttcagccctgggattttaggtgatgggcaagtcagaaagtcagatggatataactgatatcaacactccaaagccaaagaaga

SEQ ID NO: 548919 - DNA, 51 bp, Homo sapiens
tccggcgtgttcatgcccccgggtttgcagagcagtctctgatgaagaatg

SEQ ID NO: 548920 - DNA, 90 bp, Homo sapiens
aagaagttgagcctgatgaagaagaaaatcattccgcgcacccacgttttcatacggacctgatggaaatggtttctctcttggatgcag

SEQ ID NO: 548921 - DNA, 51 bp, Homo sapiens
gtcatggacatgaagaggtttcagagtccagcctctgatgaagcaggagag

SEQ ID NO: 548922 - DNA, 154 bp, Homo sapiens
caaccacagtgctcttcatagttcaaattcacattcttctaatccaagcaataacccaagcaaaacttcagatgcaggaggaataagtttttttcatctgtaatttggaagccaagtcagtaacaaaatgaaaccagtaaagcatctgttgacc

SEQ ID NO: 548923 - DNA, 123 bp, Homo sapiens
cgtccagcagatggcggatgccctgcagtacctgcagaaggtctctggagacatcttcagcagtgagagatatgagtgagcatgtaacaagatcccaatcctcagaaagaggaaatgaccaag

SEQ ID NO: 548924 - DNA, 50 bp, Homo sapiens
cggaccccgggagcccagacattgtcactgctgttccaagggcacacgca

SEQ ID NO: 548925 - DNA, 50 bp, Homo sapiens
cggcactggctccgccgcccaagatattgatgatgttaagaagttcaaac

SEQ ID NO: 548926 - DNA, 92 bp, Homo sapiens
gagttgcaagtgggagcactggaagtacgggcagttgcagtgttggagctaaaggatcacatgcagtggtctaaggaagaagaagcagcagc

SEQ ID NO: 548927 - DNA, 101 bp, Homo sapiens
cggtctgacatcgcgacgctgctcaaaacctcgctccggaaaggggacacctggcactactgcagtcttcagttaagcaacaagtagaagctattgaaaaa

SEQ ID NO: 548928 - DNA, 75 bp, Homo sapiens
accgcgggcgccaatggggagcagaaggactcggacacagacccaacatgagtgaagtttcctgcaagaaacggg

SEQ ID NO: 548929 - DNA, 90 bp, Homo sapiens
cccgaggaggcagccaagctcgtagcctgccactccgtgcgtgttacacataatattgcattacttcgagaggtgataatcaactcacgc

SEQ ID NO: 548930 - DNA, 83 bp, Homo sapiens
cggaaacctaaaatgtgcagcttccttgagtggcgagatctgaagattgtttacaaaagagagaagaagaaggaggttcctgc

SEQ ID NO: 548931 - DNA, 100 bp, Homo sapiens
gtccacggagtgtatgaccacaaacagccatcaagaggaggaacccgttttcactagacaagacagcaatcgcagtgaaaaggaagccacaccagtggtg

SEQ ID NO: 548932 - DNA, 100 bp, Homo sapiens
aggctccaagtagcctgtataccagcacggccagaactttgctccccagctgtcttatggctatgatgagaaatcaaccggaggaatttccgtgcctggc

SEQ ID NO: 548933 - DNA, 100 bp, Homo sapiens
tcgcctaacttctactgacgaagcttggaagttgcagaagataagccaatggacacgtcagtgttatctgaagaaggaggagagccttttcagaagaaac

SEQ ID NO: 548934 - DNA, 98 bp, Homo sapiens
tcgactacaagaagagggcggagcggagacgggagtattatgaaaagatcgtggaagcagggaaaggcctggagatgaggaagctggttctctcgggg

SEQ ID NO: 548935 - DNA, 100 bp, Homo sapiens
aaataagctggaaaaatctgaggtgaccaagaatatggcccaggtgaccaaagccctggacaaggccctgagcaccatggacctgcagaaggtctcctca

SEQ ID NO: 548936 - DNA, 75 bp, Homo sapiens
ctggattgtagaacttctctctctcacacactcacgggacacagtgggaaagtgctgtctgctaagttcctgctg

SEQ ID NO: 548937 - DNA, 98 bp, Homo sapiens
cgacctcgccatcaaggctatcacctccagcgccaaagtggacattcttacgtatgttacctggaaactaagtggattacccaaacaccgcgtgattg

SEQ ID NO: 548938 - DNA, 98 bp, Homo sapiens
ctgcacatcgtggtggtcggatttcaccacaagaagggctgccagagacggtaaagaacaggtccaagaaaagctcaaagaaagcaaataccagcagc

SEQ ID NO: 548939 - DNA, 103 bp, Homo sapiens
cggaaaacctaaccatgaagacttgaacttaatacagcaagaaagaccatcaagtttaccagtgatctgcaactctttcaccatctgtaatgcggagatgcag

SEQ ID NO: 548940 - DNA, 83 bp, Homo sapiens
gaaggatatcgacgtcgtgatccagaagtccagagctgaggactgcctgtttgcagagctgcctggagttcagcctcagaatc

SEQ ID NO: 548941 - DNA, 98 bp, Homo sapiens
ttgctttaccctcttcttcttctgcaacacggccactgtgtacaagatatgtgcctggatgcagctcacctccgataaactcatcctgaaagtcgctg

SEQ ID NO: 548942 - DNA, 76 bp, Homo sapiens
catcctgcaggcacagttgccgattacagttgtcgccgtgatcctgaaggcgctgacctacgacgagaagcggggt

SEQ ID NO: 548943 - DNA, 98 bp, Homo sapiens
gtcccagggcatataccttctactgtccaagcacagtctcagccccatggggtatatccaccctcaagtgtgggtccacatatagcctcagttacatt

SEQ ID NO: 548944 - DNA, 100 bp, Homo sapiens
cgagatcgccacctaccgcaagctgctggagggcgaggagagccggtcaagtacaaaagagattttgaagaaagcaaagggaggggcttcagcatcgtca

SEQ ID NO: 548945 - DNA, 75 bp, Homo sapiens
aattgataacaccctgtaacagctgatttatatcctggaacctggagatcctcctttgttacagcaaccactaca

SEQ ID NO: 548946 - DNA, 90 bp, Homo sapiens
agaaaacaatttctcctgctctgcagcttctgttcagctcttcttcaagtgacaatttcacttagcaaagtagagcttagtgttggagaa

SEQ ID NO: 548947 - DNA, 100 bp, Homo sapiens
atggacctgcctgggcatagacttccttaaggccaaacaccagagcaccctagaaggtttaactaaaagaatgctcatgtttgacccagttcctgtcaag

SEQ ID NO: 548948 - DNA, 102 bp, Homo sapiens
ggaaagcaaaggagtcagggatggctcttcctcagtggatgattcaacagccacacaaagcagcaacattttttggatgcattgggatagataaatttgggg

SEQ ID NO: 548949 - DNA, 100 bp, Homo sapiens
gccgacgcccatccagctgaacccggcccccgacggctctgcagttaacgggaccagctctgcggagactatcggacaaaacctttctgctgcagcgctt

SEQ ID NO: 548950 - DNA, 82 bp, Homo sapiens
agcaaattaaaaacaggatgaaaaagactgattggctcttcctcaatgcttgtgtggatttggagtcaaaatatggacctga

SEQ ID NO: 548951 - DNA, 90 bp, Homo sapiens
gagaaattttagcacaactccggacacttgttttccagtgtgatcttacccttaaagctggtgtcaaattgagaaccaggtagatcccca

SEQ ID NO: 548952 - DNA, 101 bp, Homo sapiens
gctgactgccggctgcttccctgggctgggcgtcagccgccaccggcagcagcagcaccaccggacggatgtttcgtctgaactcactttctgctttggca

SEQ ID NO: 548953 - DNA, 98 bp, Homo sapiens
ctgcaaaaatggaacaagttccagcacaagtggtctctaattaacagaagatggcaaagcccagccacagcagctatgtccttcagcagctaaacaac

SEQ ID NO: 548954 - DNA, 75 bp, Homo sapiens
ccctcaacttcctcaacaagagcgtggaagagccgacccagaatatggctcaagcctggaagatgacgtggtggg

SEQ ID NO: 548955 - DNA, 100 bp, Homo sapiens
gaggctgcagctagagattgaccaggactgcaagaactgatcccctttgtgaagcctgcgcccattgagcaggagccatcaaagaagcagaagaagcaac

SEQ ID NO: 548956 - DNA, 83 bp, Homo sapiens
cgttctcccaacttgccatcaatgaataatatgccaggtcacgcatgaagggagcaccgtggagaagacagtggcccctacag

SEQ ID NO: 548957 - DNA, 82 bp, Homo sapiens
tgatgatcctgccatgcaggcaggccctgagcacgctgctgtgtgagcagcaggcctccgagagcttccacagcggtggcag

SEQ ID NO: 548958 - DNA, 83 bp, Homo sapiens
agatgaataagtgggttcgttgtatttgtgacatctgtgggtttaatccaacagaagaagggcgagccctgctgagacttact

SEQ ID NO: 548959 - DNA, 50 bp, Homo sapiens
ttagaaacagtagtggagaatcaagaataacaagcctttgtattcatttg

SEQ ID NO: 548960 - DNA, 100 bp, Homo sapiens
caatcatattccgtgaatcatttgctgatgtacttcctgaagcagctgctctagtgaagaacatgcttgccaactcagccagcgtgaggatcctcatcaa

SEQ ID NO: 548961 - DNA, 83 bp, Homo sapiens
actgcttttgtggcatcccataagttttgatttcctccttcttcacccctgaaaccatatccaaagaagcccccaaaccaaaa

SEQ ID NO: 548962 - DNA, 88 bp, Homo sapiens
attgacgccatgtcgggttattcgagtgaccgagaccgcggccgggaccgaggacggcgggcgctaacaccaccgacaaggagctaga

SEQ ID NO: 548963 - DNA, 100 bp, Homo sapiens
tgtagggagcatagctgctacactgaagatgaagcaaggcccaatgacccaggcggtccaggttatgggatcagccaatcaagtcgactgtcgtcttctg

SEQ ID NO: 548964 - DNA, 88 bp, Homo sapiens
accaatttcagcagacagcgccatcatgaatccagctagcaaagtaattgcactgaaaggttgaagaagaggatgaacttgaatctgg

SEQ ID NO: 548965 - DNA, 100 bp, Homo sapiens
gatctctctcatctcgctcggctgcgggaaatcgggctgaagcgactgagtccgcgatggagtattggtaaaggttttcaaggtgtcatgaaaagatggg

SEQ ID NO: 548966 - DNA, 75 bp, Homo sapiens
tagataaactcaacatcgacagcattatccaacggctgctggaagaccctctttcccagctgcccgctcctcagc

SEQ ID NO: 548967 - DNA, 100 bp, Homo sapiens
ctgccaagcagccttagccctagtgtagagctcagtgtggaggctgctggccctgccatctgtaagaagatgtcatacggatccatcgcccgtggaggtg

SEQ ID NO: 548968 - DNA, 75 bp, Homo sapiens
cctaaaatgtcgagatttgtacaaggcgtcttcactcgaggacagctgggcctgatagacatcatcttccagtac

SEQ ID NO: 548969 - DNA, 80 bp, Homo sapiens
atctaaggaccaaagctgacagtttctttacttggtatcatgatattagctggtttgacatcaagtcatttgtgagtcat

SEQ ID NO: 548970 - DNA, 75 bp, Homo sapiens
atcagtcagttgtttgatttcatcgatgatctggcagacctcagctgcctggtagaatagtgacagtggtacagg

SEQ ID NO: 548971 - DNA, 82 bp, Homo sapiens
ggagccactgagatgaggaggcgtcgcgcgcgcctgtagctcgcgggcctcgcaggttagctttatacgtctacgaatattt

SEQ ID NO: 548972 - DNA, 88 bp, Homo sapiens
agatccgagtccgagcccagaggcttccagaagtacaggatcaggtcatccagctgatgaacgcgatcttcagcaagaagaactttga

SEQ ID NO: 548973 - DNA, 90 bp, Homo sapiens
tgggaaatggcggagtatctggcctccatcttcggcaccgagaaagacaaaatagcctaacatggcagaccagagacagcgctcactgtc

SEQ ID NO: 548974 - DNA, 100 bp, Homo sapiens
gctggtaaaaccgcaacagcaaagggaatccaaggagcaataccaagtttccaggcccgaagagcatcccagactattgggactcctctgccctgccaga

SEQ ID NO: 548975 - DNA, 82 bp, Homo sapiens
cagtgtaatgctagaagtcctagaagaaatttggagtgtgcgtgcgcgccgagcggccaccagcttgggctccccacggagg

SEQ ID NO: 548976 - DNA, 89 bp, Homo sapiens
aggatggaagaggtcctatgacaggatcaagacataaccagtgcggtgcaatccaagcgaagaaaatccaagtaaacaagcaggactgc

SEQ ID NO: 548977 - DNA, 82 bp, Homo sapiens
aacggcagcaacagcatcagcatgtcggtggagatcaacggcatcatgtacacaggtgactagcatgcagatacccatgctc

SEQ ID NO: 548978 - DNA, 90 bp, Homo sapiens
tattttttgactgctctgctcctctatgctggacatcaaatttccagttgatcactcctcatgccatccgtgtgcagacccctcctcggc

SEQ ID NO: 548979 - DNA, 75 bp, Homo sapiens
aattgctctacggaatgacttggatcaggtcaagactgatacagttcttatattgtgtagaaagaaagtggaaaa

SEQ ID NO: 548980 - DNA, 50 bp, Homo sapiens
tttgctctttacccaggactctgaaggacacaactcagatgggaagttca

SEQ ID NO: 548981 - DNA, 111 bp, Homo sapiens
gtcaagttcctccactgagctcgctgcgtataaggaggaagcaaacaccattgctaagggctcccagaatggggaccagagatgggaagaacataggagacgttgtacaca

SEQ ID NO: 548982 - DNA, 98 bp, Homo sapiens
tatgccctgctgtagtcacaggagctgtagagaggaccccggtacatctgaaagccgggaaatgggcatccgcttcgatcctgaaattccgcaaacac

SEQ ID NO: 548983 - DNA, 100 bp, Homo sapiens
atttggcagatctgaagggaaagctccagatactaaacccagtgacttgattgtaaaaatttacagagcggaatcatatgctggtctccaagagtttaaa

SEQ ID NO: 548984 - DNA, 50 bp, Homo sapiens
gaggcctccccagccatgtggaactccatttgcaccagacctggattcct

SEQ ID NO: 548985 - DNA, 100 bp, Homo sapiens
gtttgtgttgcgggggccggacttcaagatttcaccaaaagaattgtgagaggaaaaagaaacttacatctaacaggaagagaaaagttttaggaagacc

SEQ ID NO: 548986 - DNA, 75 bp, Homo sapiens
gcatatttgagtcatttccttcgtacccacagtgcttcatgagagacacagcccttgacgtagcagtaaaaacct

SEQ ID NO: 548987 - DNA, 96 bp, Homo sapiens
gcgagatccgctgctgctgaggagaggagcgtcaacagcagcaccatgggttttgacacaagggcgcatatcttcaaagcacctagtacctcctac

SEQ ID NO: 548988 - DNA, 75 bp, Homo sapiens
aacgcattcaggagatcattgaggacctgcccatttcaatggaaaatccttataaagaacctcttaagaaatgta

SEQ ID NO: 548989 - DNA, 75 bp, Homo sapiens
gctggaatgactggcaacccagtgcaccaattccagctggacatcactgtgaaaatgggacgggataaagtccga

SEQ ID NO: 548990 - DNA, 51 bp, Homo sapiens
caccggcttccgcatccaagatgaagagaacgacagattcagctgattcga

SEQ ID NO: 548991 - DNA, 100 bp, Homo sapiens
tcataccacctccgcagacgcccccaaacaaattccacagacacatatccccagcatgcgcagtctctggatggcaccaccagcagctctatccccctgt

SEQ ID NO: 548992 - DNA, 101 bp, Homo sapiens
cttggagttggtgctggtgttcctggacttggagttggtgctggtgttcctggcttcggggcaggaacatcattcatggcagtgattcagtaaaaagtgct

SEQ ID NO: 548993 - DNA, 75 bp, Homo sapiens
gggagacgtgctggacacactggaggcgctgggggagttctgggaaatcgttcattcatttacagatgaacagaa

SEQ ID NO: 548994 - DNA, 49 bp, Homo sapiens
ctgaagagggaagacacgcggaaacaggcgtctacggtgacgtgcagcg

SEQ ID NO: 548995 - DNA, 87 bp, Homo sapiens
tcggtttcagttggagttggaatttgtgcaatgtttagccaacccaaattaccttaattaaaggggccaggggtcaagctttctgca

SEQ ID NO: 548996 - DNA, 50 bp, Homo sapiens
agtgcctgcaggatgtgagggagaaaaaccatgccacatggatcgtttgg

SEQ ID NO: 548997 - DNA, 88 bp, Homo sapiens
cgttgagctcagagaagagcaactcggagttttgggggtgtgctttaagattctagtgttccagaaactccagataatgaaagaaaag

SEQ ID NO: 548998 - DNA, 100 bp, Homo sapiens
gtggtgcttacaagtttgaaaaagattttcgcacaggtggttctcttcccaaagtggaagccaaattcatcaattatgtgaagaattgcttccggatgac

SEQ ID NO: 548999 - DNA, 100 bp, Homo sapiens
ctgccttgagagtgacccaaagatgagatggaccgccagccagctcctcgaccattcgtttgtcaagaaaaagcttgtggtgaaggggggcaaaaaaaag

SEQ ID NO: 549000 - DNA, 90 bp, Homo sapiens
gtgcaacaagtgtctttggttataaattatgatctacctaccaatcgtgaaaactatattcacagggtggacccgaactccccggtgctc

SEQ ID NO: 549001 - DNA, 75 bp, Homo sapiens
aacatcgaatcatggaatcccttgcatggctctcaatgcagagaggtgttcataaagagcaatatcagatggcac

SEQ ID NO: 549002 - DNA, 124 bp, Homo sapiens
tgaagatcaacctggaagcggcagagttaggtgaaatttcagacatacacaccaaattgttgagagtggacccccaaaagtacaagggcatatttaacggattctcagttacacttaaagagga

SEQ ID NO: 549003 - DNA, 75 bp, Homo sapiens
cccatggcatcatagttgtgtatgatgtgacagatcagaattatatccagatcgagagacagaagattctgaaag

SEQ ID NO: 549004 - DNA, 90 bp, Homo sapiens
cggagctaagagatatctgcaatgatgtactgacaatgcagatcttcgtgaagactctgactggtaagaccatcaccctcgaggttgagc

SEQ ID NO: 549005 - DNA, 80 bp, Homo sapiens
ccggcggcccgagcgcgccccaagcccgggcgccaccgctgccacctccgcgaggactcctcctattttgaggacttctc

SEQ ID NO: 549006 - DNA, 80 bp, Homo sapiens
ccaccatcctgggcaactggttggctcgaagacgcgacgtccatttgtcgaaagaacaggagagccgcctaccctctcac

SEQ ID NO: 549007 - DNA, 89 bp, Homo sapiens
tgtcccttggaacaggaggagtaagattgaggtctatgttaacaatgaatgggcaaccagtgttggggaaggagggagctttggagaac

SEQ ID NO: 549008 - DNA, 83 bp, Homo sapiens
agcgagctgtcagagcccggggacggcgaggccctcatgtaccacacggatgaggagaacaatccccttgagacagaatatgg

SEQ ID NO: 549009 - DNA, 75 bp, Homo sapiens
tgattacatgtgaatctgtacagaaactcccatcaagactgaagcagacgttttggcagaaaaccaggttcttga

SEQ ID NO: 549010 - DNA, 83 bp, Homo sapiens
ggcagctcctggcgctgcgggcgtccccacaggtagacatagctgacattgagaatgaagagaaccgctactgtctattcatg

SEQ ID NO: 549011 - DNA, 76 bp, Homo sapiens
cctggctactcacagttgaagcctgattgcaggaatcctgcaatatggcgaacataagagaatattatgagagagc

SEQ ID NO: 549012 - DNA, 100 bp, Homo sapiens
ctgaaattcagagaggggaagtgatttgcctcagcttgtacttgtggaaccatcagagaatctacaatccctgatggagaagaatcagtccctggtagag

SEQ ID NO: 549013 - DNA, 100 bp, Homo sapiens
cgcccccagagagtaccgacgagggggccgaaaccgagagaagctggcagggcggagatgctggaccacgccgtcctgcttcaggtgatcaaagaacagc

SEQ ID NO: 549014 - DNA, 83 bp, Homo sapiens
agccccagccccctgtggctgaggctacaccccggagccaggagggtaaaagaatgtcacatgtcagcatttgtacctgaagt

SEQ ID NO: 549015 - DNA, 100 bp, Homo sapiens
gcgggcgggtggaggcgcgtctccggcacgcaatcaggctatttgtatgctggaaagacgagagaaaccttcaccaagcatgtttggtgagctgctgcag

SEQ ID NO: 549016 - DNA, 88 bp, Homo sapiens
gaggagtgtgggaagcccatcggctgtgactgcaagccaaggccacctttgatgccatttctaagacctacagctacctgacccccga

SEQ ID NO: 549017 - DNA, 90 bp, Homo sapiens
gccacaggccccagccacagtggggctggccttccgggcagggactttgaacatgtcggggatcgccctcagcagactcgcccaggagag

SEQ ID NO: 549018 - DNA, 100 bp, Homo sapiens
gtgaagtagatgataaagatgatgatatccttctcaaccttgtgggatgtgaaaactctgttactgaagttgtctggcgccgggagtgagaccctaaaac

SEQ ID NO: 549019 - DNA, 98 bp, Homo sapiens
cgctggcggcagtcacttgtacagcgccggtcaacatcgcggtcatcaagtactaaccagacttctcctacctggaagccctggctccttaccagccg

SEQ ID NO: 549020 - DNA, 101 bp, Homo sapiens
cgactgcatgttttcccacgaccctctgaccgaagagacgagggagctcttggataagcacatccgggcaacgtttgatcctgacacagggctgttgatgg

SEQ ID NO: 549021 - DNA, 100 bp, Homo sapiens
aacggctcaacccaccgctgccgaaatgaagtataaggtccacattggccaactgtattcaactgacaagctgatcattgagaatcgagacatgcccagg

SEQ ID NO: 549022 - DNA, 80 bp, Homo sapiens
gcagcgcgtcgtggggcgagcggcaggttaaacccatccagagtaatggctgcggccttacccaggaccctgggggagtt

SEQ ID NO: 549023 - DNA, 100 bp, Homo sapiens
agagaatcaaacttacagggttgccaccaggtgttttagctcacttggaaaggctagagacccaagtgagcagatcccgtaaacagtctgaagagctgca

SEQ ID NO: 549024 - DNA, 90 bp, Homo sapiens
ctggcggctgctggtagttccatgctgtctgttcagacttcagcttggtgaccaagttcgggccgccatgacctgtattcggttcttcag

SEQ ID NO: 549025 - DNA, 75 bp, Homo sapiens
aaggattccaagtaactcttatttgtactcaagaaaaatggggttatcccagagccatccaagctaccttatata

SEQ ID NO: 549026 - DNA, 82 bp, Homo sapiens
cagcaggacccgaggccaggagccaggggcccagaagaaatctcctttacagacaataggtgaagaacaaacccagaatccc

SEQ ID NO: 549027 - DNA, 100 bp, Homo sapiens
ctggagcctttattcttggagcaggagcaggtccatttcagactctcgggttcaattctgaggagtggtaaaatttcagccttccctttggccttgggac

SEQ ID NO: 549028 - DNA, 90 bp, Homo sapiens
gcggccgccaccgagcgtgctgagcaaccgcagcctccgcggccgagagtgcagcgaggccaattcctgtccccccagcagcatggcatc

SEQ ID NO: 549029 - DNA, 84 bp, Homo sapiens
aatggacagtacactagctgttcaacaggtagcaatgaatcgagcccaagtttgtttgatatccagttccaagtctggagagag

SEQ ID NO: 549030 - DNA, 101 bp, Homo sapiens
agctctcgaggctgctaagagactaagtaaacgcaaagcactgaagttgaattttgcaaatccacctttcaaatctacagcaaggtttactctgaatccca

SEQ ID NO: 549031 - DNA, 76 bp, Homo sapiens
aacacacctactgggattccttgggcaatggtgaatttgaaaaggttttgcacactagggaccaagaagccctcgg

SEQ ID NO: 549032 - DNA, 87 bp, Homo sapiens
ccggaggaggacaacgactaccaccgcagcgacgagcaggtggtggtgaagtttattaagaaggagaaggtcttggaggattgttgg

SEQ ID NO: 549033 - DNA, 100 bp, Homo sapiens
atttgcagctcattgaaggaaagtctcgctctgtcgtccaggctggagtccaatgctgcgatcttggatcactgcaacctctgcctgctgggtttaagcg

SEQ ID NO: 549034 - DNA, 125 bp, Homo sapiens
tgaaaacatgaaaaggactttaaatgacgttttccaccaccaaggaaacagccacctagccaacggtcaaaatgcagatcttcgtgaaaacccttaccggcaagaccatcacccttgaggtggag

SEQ ID NO: 549035 - DNA, 75 bp, Homo sapiens
catttggctctggaacaactcctaattctaaaaagagtctcatcgtggaaggcaagagggaaaagaaaaaagtag

SEQ ID NO: 549036 - DNA, 96 bp, Homo sapiens
aagaggcgcagcgcttccagtggtagcagcagtaccagctgtctttagccaaagcctgtgcaaatgcaaaccagcttggactggaggtgagagctt

SEQ ID NO: 549037 - DNA, 83 bp, Homo sapiens
gtggacagtcctgatgacacagccctcagcgagagtgccaaccaggccttcctggaaggtgctcgggtcttcggggcactggg

SEQ ID NO: 549038 - DNA, 100 bp, Homo sapiens
agcactcagctctccaatctgggaagcaccgagactctagaagaaatgccctccgggtcacaggataaggctatgcccaccctaatagaattaatgaaag

SEQ ID NO: 549039 - DNA, 75 bp, Homo sapiens
ggagacccttcgaggaacagctgaacgaaccctggccacactctcagtattctaccttgtaaatactgttatttg

SEQ ID NO: 549040 - DNA, 76 bp, Homo sapiens
tggaggagtcccgctcgaagctaggtgtctgcttttggggcagagttttcatcggaggcatgcagagagttaggct

SEQ ID NO: 549041 - DNA, 104 bp, Homo sapiens
gcgttgcgtgccctacttcaaggataagggcgacagcaacagctctgccggctggaaggaatttagataatgggctgtgtgcaatgtaaggataaagaagcaac

SEQ ID NO: 549042 - DNA, 82 bp, Homo sapiens
ggattcccagccatggcagattcctccgggcagcagggtgtacatcggtgagctcccgcaggacttcctccgcatcacgccc

SEQ ID NO: 549043 - DNA, 99 bp, Homo sapiens
agctggagccagtcatcatccctaatgtacacagtcaatggatatgtgaatgggacaatgccaggtgaggaaaatagcagctgaatactatgacaacct

SEQ ID NO: 549044 - DNA, 104 bp, Homo sapiens
agtcgctgctagaaatattttagcctctccaaagcccagaatgcagccccgacccaagtttgtaagggaaatctgcttcgccactgaaggtactctgcacccca

SEQ ID NO: 549045 - DNA, 100 bp, Homo sapiens
cttctaagaagttgggtgcagattttcatgtgatttagccctgcggaattgttttctcacctccgacttaaatgtgaaagtgggagattacggaatagga

SEQ ID NO: 549046 - DNA, 100 bp, Homo sapiens
tcgaggaggtggcgcgatggagggactggaaggcttgacacaactctcatagactttactgacatgaagtgccaacgaggggatctaagcttcattttca

SEQ ID NO: 549047 - DNA, 98 bp, Homo sapiens
ctccgaagatgtggacttgccctgcaccgccccctgggatccgcaggttccctacacggtctcctgggtcaagaacacccatctcggctttctcgcaa

SEQ ID NO: 549048 - DNA, 80 bp, Homo sapiens
gctgccttccacctccagtgctgtctacagagagccagctgatgtccaagggagacgaggataccaaagacgattcagag

SEQ ID NO: 549049 - DNA, 82 bp, Homo sapiens
ttatacagccaggggatattattcggttgaccagaggcaacgctcagtatatcgtcagtggctctgacgatggctccttctt

SEQ ID NO: 549050 - DNA, 83 bp, Homo sapiens
caaatcccaggagcacttcacggtcagcccaaggccaaccccactgtcactctgttcccgccctcctctgaggagctccaagc

SEQ ID NO: 549051 - DNA, 106 bp, Homo sapiens
atcaactcggcgccttgggaaccgctcgagcctaccaggctaatgtaatgcttgaatatgatattgatgaagctcaggcattgttggaaaagaatttatcgactgc

SEQ ID NO: 549052 - DNA, 75 bp, Homo sapiens
aattacatcgcagaacagccctgaggcaagagaagaaaggttggttacatcacttgctgagttgtatgacggcca

SEQ ID NO: 549053 - DNA, 74 bp, Homo sapiens
cctcatcttttatacactcttagtgctgtccagacaaatccgaccgccctgtctgccgacattttgccaaaaag

SEQ ID NO: 549054 - DNA, 80 bp, Homo sapiens
ccgcctgccaccgctgcccgagcccgctctccctgtccagccgcctgcagctgaccctgtaccagtacaagacgtgtccc

SEQ ID NO: 549055 - DNA, 75 bp, Homo sapiens
gttgcggggagctttggagatgcaagacactaagggcgactaccagaaagcgctgctgtacctgtgtggtggaga

SEQ ID NO: 549056 - DNA, 100 bp, Homo sapiens
cagtagaagaaatacgccacatttattctaccggggaagacagtgggatgagttccacccgttcatcgaggccctgctgcctcacgtccgcgccttcgcc

SEQ ID NO: 549057 - DNA, 100 bp, Homo sapiens
gtaatacagcagccaacttcttcgccaaattaaagttttacaagatttaacctgtcatcaagacctgggattttggtgccactgaggcggctcccagctg

SEQ ID NO: 549058 - DNA, 98 bp, Homo sapiens
ggactccctggctgctggagagttgaatgccagccaccagccatgggtcatactccctgtcacaaactccagctgaactaacttggaggaggatcttc

SEQ ID NO: 549059 - DNA, 75 bp, Homo sapiens
gctccagtggccataaaagtattcaaaaaactccaggctggcagcattgctctgctgcaagactccgtgaaatga

SEQ ID NO: 549060 - DNA, 100 bp, Homo sapiens
agtcggtcgtccgctggacaagcacgagggcgcgctcgagacgctcctgaggtgatgcagaagatggggaagaatatgatgacccttttgctgggcctcc

SEQ ID NO: 549061 - DNA, 96 bp, Homo sapiens
ccggcgggtgcagcggaggcggcggcggcggcggcagtgacgtcgccgggtcagataccaggcccaggttccatgatgcccgggcagcacatgcca

SEQ ID NO: 549062 - DNA, 90 bp, Homo sapiens
tcgagaggaagattcttacctctttgatctcgacaataaggccgccatggcatcagatgaaggcaaactttttgttggagggctgagttt

SEQ ID NO: 549063 - DNA, 82 bp, Homo sapiens
cgacatggttctcaacaagatggccaaaggtacaatgactcttcttgcttttcacctaagttgaataagcaccctgtgcact

SEQ ID NO: 549064 - DNA, 83 bp, Homo sapiens
ggggacagccgctgggtgtcggagaccggagctagcggattgcagcggaaaagcaaaggaatatatgcagaacatgtcctgcg

SEQ ID NO: 549065 - DNA, 78 bp, Homo sapiens
ccaaccgcctgttggggttcgggggcggcggcgaagcccggcaggagtggagtcaacatatcaatggagcaagtcaca

SEQ ID NO: 549066 - DNA, 98 bp, Homo sapiens
gcaaggctacaaatgcaggcatgtggacgagtgctcactagcagaaaaaacctgtgtgaggaaaaacgaaaactgctacaatactccagggagctacg

SEQ ID NO: 549067 - DNA, 100 bp, Homo sapiens
tcgagcgcatcgaggatttggcgctgcagaaccagatccgggagcacgtcatctccatcgagggttcagcagctggacatggagaaccaacgctcatcac

SEQ ID NO: 549068 - DNA, 100 bp, Homo sapiens
ctccagtcgtatttttatccaaaagaaggacctggaggaggatgagagcgttactgctgcacacctaaagtcaagggttctccttactatgacaatgtcc

SEQ ID NO: 549069 - DNA, 83 bp, Homo sapiens
gtcggcagagcaaggggcttacgcagaaggacctggccacgctcatggatttacagtcgcactttggcaccgatgacagattc

SEQ ID NO: 549070 - DNA, 51 bp, Homo sapiens
tctccaatgatggaaacaatcaacatgccacagttgaggctattgaggctg

SEQ ID NO: 549071 - DNA, 90 bp, Homo sapiens
atttctcttttgaaaaatgcatccattcagcatcttcaagagatggacagtggacaggtctgagctctttctactcggagctgatgaaag

SEQ ID NO: 549072 - DNA, 98 bp, Homo sapiens
acggctggctgcagctgctggacattgagaccaagcacgtcctgaacagagcgcaggacatcaccctgccccacctgtgcagcgtacttctggctttt

SEQ ID NO: 549073 - DNA, 100 bp, Homo sapiens
gggggcgccgcagtgttcgtgggatggggcagcgggctgcagctggcggccggaatccgcgcgcagcccgggacaacataacgatgcacggatgaacctt

SEQ ID NO: 549074 - DNA, 90 bp, Homo sapiens
cccgattgactggcctgcttggcaaggcaagtagcggcggcgcttcaagattcagtttccattccaatcacctgctgctttaacgtgatc

SEQ ID NO: 549075 - DNA, 100 bp, Homo sapiens
gaccgagagcgtgaccgagagcgcgaatatcgtcatcgttagaagggtcccgggattcttgagctgtgcccagctgacgagcttttgaagatggcacaat

SEQ ID NO: 549076 - DNA, 100 bp, Homo sapiens
ggattccaagtaactcttatttgatgatgctgtgtatctggacaatgagaaagaaagagaagagtatgtcctgaatgacatcggggtaattttttatgga

SEQ ID NO: 549077 - DNA, 76 bp, Homo sapiens
aggagtctcagagctgtcagaaaggaatctctgaaggaagaagatgaatcagatgatgataatatgtaacatttac

SEQ ID NO: 549078 - DNA, 96 bp, Homo sapiens
gactgatcaggccgaggcttctaaaccaacgtattccaccctgcaaaaagcatgtattcatggtcagctctcagcaaggccagtagcagagtggta

SEQ ID NO: 549079 - DNA, 75 bp, Homo sapiens
gggacggcgaggccctcatgtaccacacgcaattctgtggtgttcttggtcacacatttatggagtttctgaagg

SEQ ID NO: 549080 - DNA, 83 bp, Homo sapiens
tggtggtgcctatgtgaaactgctttctaaaacaccagaactcaacctgttgctgaaccaggcagcagagtggaaacttcagg

SEQ ID NO: 549081 - DNA, 90 bp, Homo sapiens
cgggccgctccgacggcggtccatcctggtatctagaagagcagaagacagagaatggaaaagataaggaacagaaacaaacaaataccg

SEQ ID NO: 549082 - DNA, 75 bp, Homo sapiens
ctttgggaagcatgtcaccaacccggccttcaccaaactccctacttcctggctcagctctttatggacacaggt

SEQ ID NO: 549083 - DNA, 50 bp, Homo sapiens
ttcgtggcctgaccaaggacctccaagacaaatggtggcccggagtttgc

SEQ ID NO: 549084 - DNA, 90 bp, Homo sapiens
gcaagactgtcgacctaaagcctgactggggcaaggaggtagaagaggatgatccagtgcctgagatccgtcgagatcactttgaagaag

SEQ ID NO: 549085 - DNA, 75 bp, Homo sapiens
gagctgttcctattcggccatcttggctcctccagaataaacctattttttgagagctcatggtgacacccagca

SEQ ID NO: 549086 - DNA, 95 bp, Homo sapiens
caaaccgcagcccaggagctcctggaagatctccgcactctggagcataatgtgtaagaatgattgatgttggctgatattggagtgctcattca

SEQ ID NO: 549087 - DNA, 101 bp, Homo sapiens
agcgacggtagcagcagcatggccgcgatctatgggggtgtagaggggctctgccgacttccagttctggaacaagatggttaaactcatttttccctgct

SEQ ID NO: 549088 - DNA, 100 bp, Homo sapiens
cgcatcgtattcccggaatcagacggtgccccatagatggccagctttcccccgagggtcaacgagaaagagatcgtacggcaagaagaagctgaaatac

SEQ ID NO: 549089 - DNA, 100 bp, Homo sapiens
cgggcgtctccgccggctactgccgcttcagttctcccggtgtggccacgagtcgggagtgacagtgaggattcacatttgggttatttcaagatgagct

SEQ ID NO: 549090 - DNA, 82 bp, Homo sapiens
gagcctgcaggacggcgcggcagagtccccgtacgcctacagtaacggttgacatcatggacatatgtgagtccatcctgga

SEQ ID NO: 549091 - DNA, 88 bp, Homo sapiens
gatcgccggggaggcagcgcgggatcccagcctcaggcgtgcgcggacggtgtgcgggtgccgtgagcgatgtggagatgcaggaaca

SEQ ID NO: 549092 - DNA, 100 bp, Homo sapiens
cgcgccctgtgcccctgaagaagcgcggatacgatgtcaccaggaaccctcatctcaacaaggctgaagccgacgtagcttctctgaacagacgcatcca

SEQ ID NO: 549093 - DNA, 100 bp, Homo sapiens
gcgtctggagggacggcgccgtcaccctggcgcccgcggccgacgacgcgggagagccgcccccagttgcggcaatacgtttggtttaatattggcagtg

SEQ ID NO: 549094 - DNA, 90 bp, Homo sapiens
accttctaataatgcgagctgcttccgaaggctgaccgagtgcttcctgagccccagtgaaaggtgtagcagtcactcggcctacaccca

SEQ ID NO: 549095 - DNA, 75 bp, Homo sapiens
gcctgggccgcgccgacctggtcatgagcttcgttaacatgggctttatcctgtggataaacgcagagtgaacga

SEQ ID NO: 549096 - DNA, 83 bp, Homo sapiens
gagaccgcggccgggaccgaggattcgagtgagggttgaaaaggatccagaacttggatttagcatatcaggtggtgtcgggg

SEQ ID NO: 549097 - DNA, 101 bp, Homo sapiens
ccactggatcccaagagtgaagctcagcttcagcgtctcccttctctcctggacagaaggccgtgtcctgggacttctctgatggcgagaggctgcggctg

SEQ ID NO: 549098 - DNA, 100 bp, Homo sapiens
aggccagccgggaggacatctacaagcgggttgagcatcctgtcacagaatgcattactggcctggacctagtccaggaaatgatccgtgttgctaaggg

SEQ ID NO: 549099 - DNA, 101 bp, Homo sapiens
gctgcgcacggactgctggagatggtggagtccgtcagtgagacgatgcggatcgcctcctccgagtttgcagatgacccttgctcgtcggtaaagcgcgg

SEQ ID NO: 549100 - DNA, 74 bp, Homo sapiens
ataggacaggctgaggctgagtctcagtgttgccctgttcagtctgaggtgacgagagcagacgtggatgtcca

SEQ ID NO: 549101 - DNA, 75 bp, Homo sapiens
aggtaccaatggagccaactgtggtgggaagggcctgtcccagtcggctttaccctatcgacgcagcgtccccac

SEQ ID NO: 549102 - DNA, 42 bp, Homo sapiens
gactcggcggcggcgtcttttatcctgataacttaagtgact

SEQ ID NO: 549103 - DNA, 76 bp, Homo sapiens
ggtctgcggcttcattcttgaaggatcttctgcatttaaaatagaagaggcatcatgctgaagagggaggggaagg

SEQ ID NO: 549104 - DNA, 97 bp, Homo sapiens
ctgggggtagtagaatgcttgaggcctggaatttaaacctgagccactatctgaagcattcacagctctgatggagggcaaaatcaataagcagctg

SEQ ID NO: 549105 - DNA, 74 bp, Homo sapiens
acaggtggagttgatccggaactccagaactcagcctcctcccaagctccctgtgggtcctagccacaagctct

SEQ ID NO: 549106 - DNA, 75 bp, Homo sapiens
gtaaagtccctctcagaagcctcagtggctgttgacagatttaagaaatgaagctgttgtcatttctggaaggaa

SEQ ID NO: 549107 - DNA, 101 bp, Homo sapiens
cttcacgccggctccgcctcaccagcaagcgcattcccagggcagctgcaatgactctccgcacggtattattgtcattgcaagcactattggcagctgca

SEQ ID NO: 549108 - DNA, 101 bp, Homo sapiens
agtctcgcttctgccgaggtgtccctgctgccaagagcccgtcggcccaacttatggagcaagtggctcagcttaagtccctgagtgacaccgtcgagaag

SEQ ID NO: 549109 - DNA, 100 bp, Homo sapiens
gagctaaagcagcgtgcgttcagccctggggacctggcctgggccgtcagctactacatccggttcttcatcacctacatccctttctacggcatcctgg

SEQ ID NO: 549110 - DNA, 100 bp, Homo sapiens
gacggcgctatgtacgccctcttcctcctggccagcctcctgggcgcgggcctcatgcattgtgcgtcagcagcaatgtttatggtgaaaaatggcaacg

SEQ ID NO: 549111 - DNA, 119 bp, Homo sapiens
cgcccgcagagtccggctgccgcgcatcgtccgcagacgccgccaccgccatgggctcctgagcaagagtgagccatggagctacgtgtggggaacaagtaccgcctgggacggaagat

SEQ ID NO: 549112 - DNA, 106 bp, Homo sapiens
tagaactcagttgtgcgttgcggccagtcgccactgctttgggtggaaagctttggacatgaagggcttggattattattagacattttggaaaaactgattagtg

SEQ ID NO: 549113 - DNA, 73 bp, Homo sapiens
tcactttgtgtcaaaaagaaataactcagctgaagcatcagatttattgccaaaccctgtgcactctgtattg

SEQ ID NO: 549114 - DNA, 50 bp, Homo sapiens
gaactgccaaaggccctgcaaggacaaggacatgaacaagctgagtggag

SEQ ID NO: 549115 - DNA, 75 bp, Homo sapiens
ccccgttgtttttcgattgcaagaggtggagccgccaccaaaatgcagattttcgtgaaaacccttacggggaag

SEQ ID NO: 549116 - DNA, 100 bp, Homo sapiens
tgaaagtgaactttgtcgcttatggactgaaagtttattgcattccaacagctcattttatgttggtaatagttaacctcttctgtgagaagtcagaagg

SEQ ID NO: 549117 - DNA, 75 bp, Homo sapiens
actccaacgattgagagcatttaaagatcttcaaacactccagagtgaaaattcgaacctcaggaaacaggccac

SEQ ID NO: 549118 - DNA, 90 bp, Homo sapiens
cagcaccgtgctctccaccacagagataattgacgaccttgccaacctagtggagaacacagatgaaaaacttcgcaatgaaaccaggcg

SEQ ID NO: 549119 - DNA, 75 bp, Homo sapiens
tgtttatggcagaactcagatgactttgacttttcaaaaggaagtggcagaggatgttgacaatgcgtctctggc

SEQ ID NO: 549120 - DNA, 82 bp, Homo sapiens
ccagatccacgccaaccacgagaccatggtgaatccgggcagcagctcgcagccgcccccggtgacggccggctccctctcc

SEQ ID NO: 549121 - DNA, 103 bp, Homo sapiens
aggactcattattttaacatttgggagaaacacagccagaagatctcagtgaccagctgctggaggtggtcggcttggaaggagccatggagatggggcaaat

SEQ ID NO: 549122 - DNA, 98 bp, Homo sapiens
cgtccatcatagtcaactgcgtggaagagaaggtacagcagggaagaactggaaactcagagaaagaaactgcccttccatctacaaaagctgagttt

SEQ ID NO: 549123 - DNA, 100 bp, Homo sapiens
caggagccgcggagccggcgctgagaggggctgcggccggagcgggcggctgagacaaaggcgacgcattgggaagctgtccattgaaaaggccttggat

SEQ ID NO: 549124 - DNA, 100 bp, Homo sapiens
agaagagagaatatagtaaaaatacgcagtacagtcccagacttggcagtgtcataacaaaacagccaatgattttgtcttcgttagttcctcctctctg

SEQ ID NO: 549125 - DNA, 75 bp, Homo sapiens
cggaggcagaggtggaggcgctttgaaagggttgaaaggaggagcaggaggtactgatggacaaggaggtacctt

SEQ ID NO: 549126 - DNA, 82 bp, Homo sapiens
aaaagtgttcttcagcatcaagcctacaggaacatagaaagagtagcacagaagagggaggatgctgtttccaaagaagtga

SEQ ID NO: 549127 - DNA, 125 bp, Homo sapiens
cagacaccaggggtgtatcgatgccagacacggggagcacccgtcagtgaccccatccacctctctgtatccaatgtcatgcaggagtcagtcgaagtgtggccataataactgcttttctcatg

SEQ ID NO: 549128 - DNA, 96 bp, Homo sapiens
gagaggcatcctccttgaagtatttggctgaggagttttcaatcccatatatcctttcgggctctgatgacttcaacctgtacatgtggagaattc

SEQ ID NO: 549129 - DNA, 75 bp, Homo sapiens
ctgtttatagaagtgtcaagaggctaggtattcctgacagttactccacaggatccgctgaacataggatgttgc

SEQ ID NO: 549130 - DNA, 74 bp, Homo sapiens
cctgtcccagcccctggaaaggggcaggaacgacaaactcaaagtccaggaaaattactcaaacagctttgaaa

SEQ ID NO: 549131 - DNA, 100 bp, Homo sapiens
acagaaaatcggtgaagagaggttttgaattcacgcttatggtagtggaagtgtcattgttgcagcaaaaaagtcagcagtctcaccttccacctttaat

SEQ ID NO: 549132 - DNA, 87 bp, Homo sapiens
ggattccaagtaactcttatttgatctccagtgccatggagcagctgcaggaggccctgaaggtacgcaaggatgatgcccacgccc

SEQ ID NO: 549133 - DNA, 75 bp, Homo sapiens
tggcagctttgcagatagaatatgaagatcgaggtagacatcttcgagcctcagggaatcagcatgctggatgct

SEQ ID NO: 549134 - DNA, 83 bp, Homo sapiens
gtccaaatgaattatgtcagcaacgtatccaagtcagttcatcagttacttcctcccacttaccgagatgtttggctggagtg

SEQ ID NO: 549135 - DNA, 118 bp, Homo sapiens
agcagatgacaaaacttcaagccaaacatcaagcagaatgtgatttgcttgaagatatgagccagtccgagagtcttgatcagatccccaacaatgtggcccatgctacagagggcaa

SEQ ID NO: 549136 - DNA, 76 bp, Homo sapiens
ggagtttgcaatccagccaaatacaactggaaaacagctttttgatcaggaccctgatgctcccataagacagaaa

SEQ ID NO: 549137 - DNA, 89 bp, Homo sapiens
tgctaaaaacaagactggggctgctcccatcattgatgtggtgcgatcgatgtcagtattgaatatggtggtgaggcgtgaccctggca

SEQ ID NO: 549138 - DNA, 98 bp, Homo sapiens
tcgctgcaaaacgggcggcccgcgcggaggctcgcgagatccgcatgaaggagctggagcggcagcagaaggaggttcatctgcagaagccagcggac

SEQ ID NO: 549139 - DNA, 100 bp, Homo sapiens
gacagtgcggctactcttgatcctctccggctgcttggtctacggcacaggcctgtatgaactcaatctcaccaccgatagccctgccaccacgggagcg

SEQ ID NO: 549140 - DNA, 100 bp, Homo sapiens
taccagggaaacttatacaggccgcttttgagaggacaagcccagattccaaaacttatgtcaagtcttaaagaaagtgcagaagagatggtcaaaaaca

SEQ ID NO: 549141 - DNA, 75 bp, Homo sapiens
tgctgtgccagcttctcggggcatcacagccttcattgtggagaaggttggaagtactccatgacacacactcgg

SEQ ID NO: 549142 - DNA, 71 bp, Homo sapiens
gaaaagaaagcatactgcgagccctgctacattttaagggaagaaagtcggaggctggctttggctgcgaa

SEQ ID NO: 549143 - DNA, 101 bp, Homo sapiens
ctgaggatgaggatggagcagctgtggtccacctttgaggcccatctccctcaagcagctaccaagcagtgctggacaatttgctcaacatggcctacggc

SEQ ID NO: 549144 - DNA, 75 bp, Homo sapiens
ccagctggggaaacatggtgagaaacaaacaccaggatctgtgccagttcagaagcaggcgagcctcttccctga

SEQ ID NO: 549145 - DNA, 107 bp, Homo sapiens
caatggtagatggagtgatgattcttcctgtgcttatcatgattgctctcccctcccctagtatggaagtgcttttttaggaccaaaggatatatttccttactcag

SEQ ID NO: 549146 - DNA, 80 bp, Homo sapiens
tctgctaaaaggctccttcagtgagcaaggcatcaacgagtttctcaggctaagtcctatcagccatggaaacaccattg

SEQ ID NO: 549147 - DNA, 100 bp, Homo sapiens
aaatctcaatggcctgtatatctttggagacttcatgagtgggtatatttgcttacttaaactaccatgttcctcgaacgagacgagaaatcctggagac

SEQ ID NO: 549148 - DNA, 90 bp, Homo sapiens
cccgggaccatgtccgcgctggcgggtgtcagttttcaacctttgagcagtgtcaagagtggctgaagagactgaacaacgcaatccgac

SEQ ID NO: 549149 - DNA, 74 bp, Homo sapiens
gcaggactgcgccgcgtcttcctcaagctgaagaaacacttaaattctggaaatagcgactcagtatcatggcc

SEQ ID NO: 549150 - DNA, 100 bp, Homo sapiens
gagtgtgaagtcaaatgcatgccaacattccagttttttaagaagggacaaaaggtggagccgccaccaaaatgcagattttcgtgaaaacccttacggg

SEQ ID NO: 549151 - DNA, 74 bp, Homo sapiens
ttttgcctcccaccgtgattctgaggcctccccaaccatgtgcaattacgagccaaactcaggctgtaccttga

SEQ ID NO: 549152 - DNA, 100 bp, Homo sapiens
cactgggctcccagcagcccaggttcagagccgcagcctacagcaaactcggcaactacgcaggcgcggtgcaggactgtgagcgggccatctgcattga

SEQ ID NO: 549153 - DNA, 100 bp, Homo sapiens
atgagcatctggccaaacaagatgcccaggcagtgacatcagtgtctggcccaggtgagcacctccgaaatgccctgtggcatactggccacacccctga

SEQ ID NO: 549154 - DNA, 100 bp, Homo sapiens
gacctcagaggttgtctgaaggccgaggccaagatggcggtgctgtcagcgagcagctgatgcagctgtacagtgcgcgccagcggcggcggctgaaccg

SEQ ID NO: 549155 - DNA, 100 bp, Homo sapiens
cagaagcagccatggaaaaattaatcaacagagtgggacctaatggtgagagggttctgagcaaggttcaaccagtcaagaacaggccttatctgctcag

SEQ ID NO: 549156 - DNA, 90 bp, Homo sapiens
cagtggagaaagtgctccagatagctacatcgggataggaaattcagaaaaggcagcaatgagcagagaaaatttgtcaaaggatcttta

SEQ ID NO: 549157 - DNA, 78 bp, Homo sapiens
tgcccctggagcacctggtggaagaacaagtggcaggtgaatatgcaggttttgatgagacgcagccaacagctgaat

SEQ ID NO: 549158 - DNA, 51 bp, Homo sapiens
caaagcttttggacattcctgggcaccagagcctggtccgctgttctcagc

SEQ ID NO: 549159 - DNA, 100 bp, Homo sapiens
gaaaacccccattcattctggattggtggatctgaagtacaaaatattttccaggatgtgatggtggcaggtgggatggagagcatgtccaatgttccat

SEQ ID NO: 549160 - DNA, 76 bp, Homo sapiens
agcttgcctatgccgttcgaggcaataaattctctgctggatgaaccgaatcctaacagtccagccaatagccagg

SEQ ID NO: 549161 - DNA, 82 bp, Homo sapiens
cttgttactccctagcagtgtggtaagagcctaatgggaggtgactggatcatgggagcagagttctcttggatggtttagc

SEQ ID NO: 549162 - DNA, 82 bp, Homo sapiens
gtcatcatcagcgccctcaagacctacctggtgtcgggggctgccagaggaacccgaccagaacctgtccagccctgaggag

SEQ ID NO: 549163 - DNA, 50 bp, Homo sapiens
gtttattctcccatagcatgtgttcgatcctttggtacagaagacagacc

SEQ ID NO: 549164 - DNA, 100 bp, Homo sapiens
caaggactctgcgtgcattctccactgccgtctactcggccactccggtcccgacacctagcctgcgcactactgcagtcttcagttaagcaacaagtag

SEQ ID NO: 549165 - DNA, 100 bp, Homo sapiens
ccgtggatctagagctgaagaagtgtatgtggtagaagaccaaagaagagatgagctaggaccatccacctgcctcacagcctgctggacggctctctgt

SEQ ID NO: 549166 - DNA, 98 bp, Homo sapiens
aagcaccacgcggcctacgtgaacaacctgaacgtcaccgaggagaagtaccaggaggcgttggccaaggtttcattgtactgacaacctcagctggc

SEQ ID NO: 549167 - DNA, 100 bp, Homo sapiens
gtacgtctctgaccgagagggaagcgatgccacgggagatggaaccaaggagaaaccatttaaaacaggtctaaaggatgaggatgaagaagtatacaag

SEQ ID NO: 549168 - DNA, 75 bp, Homo sapiens
tatcgaaggacatgaagactaccacatgatggtgaccaagaatatggcccaggtgaccaaagccctggacaaggc

SEQ ID NO: 549169 - DNA, 74 bp, Homo sapiens
gcgcggccggctgccggaaaatatcaacaagtttctttggatggtccggattggagggagcacagatacaggca

SEQ ID NO: 549170 - DNA, 83 bp, Homo sapiens
ctatattttaaaatgcttaaaacatcttaacccattgcactggttccaattaaagaagggctggagtgcagtggcgcaatctc

SEQ ID NO: 549171 - DNA, 100 bp, Homo sapiens
atgtttctggacgcggatttttggcctcatactctgttatagataaacaaggtgactctcctattccatctgtttcttcgggatcatcttcacctctttc

SEQ ID NO: 549172 - DNA, 74 bp, Homo sapiens
aagacagccatgctgctggcactacagaggagggtacaccacccggactacaacaatgagttgacccagtttct

SEQ ID NO: 549173 - DNA, 83 bp, Homo sapiens
gtcaccgccgaatggcagcctccagaaagccaccgcgagtaagactccccatccccaggatgtcaacctcagtccctcaaggc

SEQ ID NO: 549174 - DNA, 100 bp, Homo sapiens
tggtggaggctgtgctctcaggagagctgatcatggatgaacaggatcaacagctggagatggtgtctgggagcatccaggttctgaagcacatgtccgg

SEQ ID NO: 549175 - DNA, 117 bp, Homo sapiens
tgaagctgcagatctgggacacagcggggcaggagcgcttccgcaccatcacctccactgtactaatggtcacttgatgtgcgctggctgttttatccacctactagcagatgcccg

SEQ ID NO: 549176 - DNA, 90 bp, Homo sapiens
gccagagaagaagggcgtgcacctgaacagcgacctgccccaaatgcagcacctgtgttttttgctccactcaagcctgttagaatcacc

SEQ ID NO: 549177 - DNA, 101 bp, Homo sapiens
aggtgaccctgaacctctacgacacggccgggaactgggaacagccaggtgccccaaagcaaatacgcggagctgctggccatcattgaagagctggggaa

SEQ ID NO: 549178 - DNA, 100 bp, Homo sapiens
tgaaaattcacccttgtagagtcattcctgcctttgagcggactcccttttaagagtaatcaagtcagaggattatatgacttttatctgcctagagaag

SEQ ID NO: 549179 - DNA, 120 bp, Homo sapiens
ctgtctagctccgaccggctgaggcggcgcggcagcggagggacggcagtctcgcgcgcgcccggcagaatggcgggaaggtgaggcacaagcggcaggccctgcaagacatggcgcgac

SEQ ID NO: 549180 - DNA, 80 bp, Homo sapiens
tactgtgaccgcggcacccagcggatctgtaggctgtgttttcaacacaacaccccattggatgcaattgctcagttccg

SEQ ID NO: 549181 - DNA, 74 bp, Homo sapiens
ctagactttttggacgatgtgcggcggatgaacaagcggcaggattaacctccatttcagctaatcatgggaga

SEQ ID NO: 549182 - DNA, 100 bp, Homo sapiens
tgccggagacgcaggttagcctgctggacaacggcctgcgtgtggcctccgagcagtcctctcagcccacttgcacggatgaagatttgataaagtggaa

SEQ ID NO: 549183 - DNA, 100 bp, Homo sapiens
attgttattttcccaatttttgctatactcctgttctggggacagtttggtattaaaatatgagcccagaggacctggtcggcccttgtaccaaagaaga

SEQ ID NO: 549184 - DNA, 100 bp, Homo sapiens
aagagattggtccagaacagtttccggtcaatgagcactattttggattagtcaatgaccaaccctgagaaaggaactgattttgtcttcaaatattgga

SEQ ID NO: 549185 - DNA, 100 bp, Homo sapiens
ccccgaaggccctatcaggacatggagtatgaaagacgaggcgagtctggagccgggaaaaccgaaaacaccaagaaggtcattcagtacctggccgtgg

SEQ ID NO: 549186 - DNA, 100 bp, Homo sapiens
cccgggccagagctgggcctgccgagcactgggcagccgtctgagcagggatatctgcattacctccacctcctccacctccaccaccaccagcagctcc

SEQ ID NO: 549187 - DNA, 100 bp, Homo sapiens
gccgccggcggcggcggcgtgagccaccgcgcagcttaagagttggacagtggaggaccttcagaagaggctcttggccctggaccccatgatggagcag

SEQ ID NO: 549188 - DNA, 75 bp, Homo sapiens
tcgtcatgaagaatgtgcttgtcaaacaggataaggaggtagaatttggaggacctgcacccagagttctaagcc

SEQ ID NO: 549189 - DNA, 90 bp, Homo sapiens
agagcttctgtcgccgctctagggttgctgctccaagatagccaaaatgtggaagcactgagaatgcaggcactctactatgtgtgtaga

SEQ ID NO: 549190 - DNA, 50 bp, Homo sapiens
gtctgcttcgtagggaggctggaaaagactgggaaagggtttcttcgggc

SEQ ID NO: 549191 - DNA, 80 bp, Homo sapiens
gcgagtaagccagcggcaggaccagcgggcgggggcccacgagtgtccctggccagtgtccttccacctgtccacaagca

SEQ ID NO: 549192 - DNA, 75 bp, Homo sapiens
tgcgggttagggggccggcgcccgcggttcagagcggttccgccaccccagccgcagatgtttggtgaagagctg

SEQ ID NO: 549193 - DNA, 75 bp, Homo sapiens
agagaggatagaaattgaacagaactatgcgaaacaattgagcatcaacaacagcaacttgtgattggcggtgac

SEQ ID NO: 549194 - DNA, 50 bp, Homo sapiens
tcattctcgatgtcgtgctaaatcagatattggtgctggaaaaggcaaat

SEQ ID NO: 549195 - DNA, 74 bp, Homo sapiens
cagctctgaaaaactcttcaacactgttattgtaaacaaaggcctgatcaaccccgtataaccaaagatgtaat

SEQ ID NO: 549196 - DNA, 99 bp, Homo sapiens
ctggaacttatgctgtagacatttctttgtggtttatctaaaaaccaaaggcctcattgctacgatttcagagtaccctggtaatagctgagcatgcaa

SEQ ID NO: 549197 - DNA, 100 bp, Homo sapiens
tctcagaagagtgagagagagctattagagattgtgaagaagaatttcgatctccgccctggggtcattgtcaggctcctcctcagccatcctggccgtg

SEQ ID NO: 549198 - DNA, 87 bp, Homo sapiens
cactgcacaggctacatcaaggcctggcccccagcagtggatatcaaagtattgcagagtgccttagcagccatccgacatgcccgc

SEQ ID NO: 549199 - DNA, 99 bp, Homo sapiens
ccgtgaccgagagcgtgaccgagagcgcgaatatcgtcatcgttagaaggtaatactgcattgcatgattgtgcagaatctggaagtttggacatcatg

SEQ ID NO: 549200 - DNA, 51 bp, Homo sapiens
aaggattccaagtaactcttatttgcttccaggtggttcacttatttttaa

SEQ ID NO: 549201 - DNA, 102 bp, Homo sapiens
ttcgggtggcctggctcttcctcttctccaagttcattgagctgatggacacatattgtgtccagaattggttccttccggtgggttcttggtctcactgac

SEQ ID NO: 549202 - DNA, 100 bp, Homo sapiens
cggcggtcggctcctgctgcccctgtgccgagaccccgcgcacctggccagagctcaggccccggggcctccagcggcaccagcggagaccacggtgagc

SEQ ID NO: 549203 - DNA, 83 bp, Homo sapiens
caacatcctcctggccaccgactcctacaagacacgatgaggcgagtggtacgacagagcaagtttcggcatgtatttgggca

SEQ ID NO: 549204 - DNA, 74 bp, Homo sapiens
ggcatcccggagagcatgcgtggggagctctggctgctgctgtcaggacccagatgatgtggtaccagttggcc

SEQ ID NO: 549205 - DNA, 115 bp, Homo sapiens
tgaaagatggcggcggcgtctgtctctgcggcttctggttctcacttgtcgacttaattcagtgcacaaatgagatgaatgtgaacatcccacagttggcagacagtttatttga

SEQ ID NO: 549206 - DNA, 108 bp, Homo sapiens
gccgcatcccggacggtacttctgccactgctgctccgtggagatcgtcccgcgcctgccgatcatgatgctgccgccaccgccgccaccacggagcgagaagcccag

SEQ ID NO: 549207 - DNA, 75 bp, Homo sapiens
gttcttagacaccatcatctcccgctgcctgctggacagtgactccaggaatctgaattatccagaacagaaagt

SEQ ID NO: 549208 - DNA, 96 bp, Homo sapiens
ccaagtccttggctgctgagtggtgacagtagcccagcccgccggccaggtcaccaaccaggtgggtgagcggccgccccgccctgtcctccgcca

SEQ ID NO: 549209 - DNA, 100 bp, Homo sapiens
tggacgtgaaggaggaatggcaggacgaagatcttcccaggcgtcacctcctcctgtcgcctggccctcgccatgcagaccccgcgagcgtcccctcccc

SEQ ID NO: 549210 - DNA, 100 bp, Homo sapiens
atgtcgagatcccctgtgtggccaagaagctggtgtgcggagatgaaggacacattcagctaacgtattttagcaggtggagtgaggttgaagattcctg

SEQ ID NO: 549211 - DNA, 75 bp, Homo sapiens
gcaattgagaaacaggcacacaagtgtgaggagttgctaaatgctcaggtactactgagcgagtgtgcttgatcc

SEQ ID NO: 549212 - DNA, 98 bp, Homo sapiens
gcaaagagtaccgtgagaagatagaggcagaactgcaggacatctgcaatgatgttctggtgcagcggaactgctgcctgacgctctgcaacttcagc

SEQ ID NO: 549213 - DNA, 100 bp, Homo sapiens
aaaagagaatccaattacaccttccaaagatatgaccacattctgaagtgggaactcttccagctggctgacctggatacataccagggaatgctaaagt

SEQ ID NO: 549214 - DNA, 100 bp, Homo sapiens
ctgaccctggtgtgcagctcggccccgggccccctggagctggacctgacggtcaggatggctaaaggtgaccccaagaaaccaaagggcaagatgtccg

SEQ ID NO: 549215 - DNA, 100 bp, Homo sapiens
gcgaccagaccggcccccccgagactgtatgaaaacaagggagaggctgacttcgtggaatctttgctgcagctcttcaggtccatcaatgacatgatga

SEQ ID NO: 549216 - DNA, 82 bp, Homo sapiens
gtcactgcctgcgcagctccggccgcctggctccccatactagtcgccggagtacttcttgcaagcagagctgacaagcaac

SEQ ID NO: 549217 - DNA, 101 bp, Homo sapiens
cggcggtggtggcttgtggtgcggcctcaccatacaggaacagggcagacgttagcgtgagtgatcactctcaatcccggaaaattcttgctgctgtattg

SEQ ID NO: 549218 - DNA, 49 bp, Homo sapiens
ttaatatcaaggattttcaaaagtagagatgaggtttcaccgtgttagc

SEQ ID NO: 549219 - DNA, 90 bp, Homo sapiens
cggcggcggcagcgggtcttgggtcctccgagagcagcagcggaatgccatatggcagccgagagaactccctcctctactctgagattc

SEQ ID NO: 549220 - DNA, 100 bp, Homo sapiens
ctggaggtcctctcgggggacagcctggagaagatggagttccggacggcatctatccgcctctttgggcaccttaacaaggtctgccacggagactgtg

SEQ ID NO: 549221 - DNA, 82 bp, Homo sapiens
gcaggaactttcttggctctggggtttccttgtctgtcaaatgaccagacaatgcagatcttcgtgaagactctgactggta

SEQ ID NO: 549222 - DNA, 97 bp, Homo sapiens
gacgaggcccgcagggacatggccggggacacccagtggtccaggtgtctcgtgcctctgctggaccctgactctgggctcctggtcctggcaggaa

SEQ ID NO: 549223 - DNA, 82 bp, Homo sapiens
gctccatggaggacctgcctcggatgacacccctatcttaagaaggtcatgcaattctgtggtgttcttggtcacacattta

SEQ ID NO: 549224 - DNA, 100 bp, Homo sapiens
cgccgcgaaggacagcctttccgcgcgggactccggggcgccacgggggccatgtaagcaggcatcctctggtatcacgattccaaaacccccaaagcca

SEQ ID NO: 549225 - DNA, 90 bp, Homo sapiens
gaaacagtctgccctcctaattaatgggaccctaaagcattaccagggtaattttgggagtgtggagatgtgccggtatgaccctctaca

SEQ ID NO: 549226 - DNA, 75 bp, Homo sapiens
ctctgttattttcttctttcttatcatcagtgtgttagctttccccaatgactaagaaaaatggctttgtcagcc

SEQ ID NO: 549227 - DNA, 100 bp, Homo sapiens
taaggacattgtggcaatcatcctgaatgaatttagagccaaactgtccaaggctttggcagatgcatcatctgcagacatcagaaaagcatatcgtaag

SEQ ID NO: 549228 - DNA, 89 bp, Homo sapiens
accggagactttggggcctaactagggacaaaagtggctctcaatccagcacatgcacattgaagcaagttaaaggatttaatatgaag

SEQ ID NO: 549229 - DNA, 99 bp, Homo sapiens
agaaaatggacctgctgacagagcagatggcctggagattcatgacaaaatcatggaggagttccatctggaatatgacaaattagaagaacggcctca

SEQ ID NO: 549230 - DNA, 100 bp, Homo sapiens
gtggtatatttgaagaaatgaaatatttggaacttatgattgttaatgatcacaaaacgggtcctgtagcatccacagtatcagcgttttctgtcctctc

SEQ ID NO: 549231 - DNA, 98 bp, Homo sapiens
agacaccatttctctacaacgggatcacgctgcctgcctcgtgggatttccgtgggcactcaggagcccgcggttcccttcaaaaagcggctgcaaga

SEQ ID NO: 549232 - DNA, 98 bp, Homo sapiens
ggaagaaaggagccttctgtgctgtcattatttgtatcaaaaacaaagaatttgaaaaggcttcaaaaattttgaaaaaacatatgtccaaggacccc

SEQ ID NO: 549233 - DNA, 94 bp, Homo sapiens
gccatgtccgcaccgggacgatcatcctggggacctggtacatgacaatgcagatcttcgtgaagactctgactggtaagaccatcaccctcga

SEQ ID NO: 549234 - DNA, 74 bp, Homo sapiens
gtttgtccttctgctattgatcctgaaggcaaacctgcagaaaatgatgttaagcttggagctctcaaactgaa

SEQ ID NO: 549235 - DNA, 98 bp, Homo sapiens
ctcaacgtggacgtggtcaagtacgagagtggccctgacggaggggaggaaaagatggcagtgaacgtatactcaacgtcagtgaccagtgataacct

SEQ ID NO: 549236 - DNA, 100 bp, Homo sapiens
ccacccagaaatggaaatggagccacagtatttggtatctcttgctatcgacaaattgaagccaagagcccacccacctttgggttcctgttggacatcg

SEQ ID NO: 549237 - DNA, 100 bp, Homo sapiens
ggatgctttaatcaagattaagaatgaagttgactctactttgaccttccgaagatcatgcagagaaggctacatccacgtgacgcagaccttcagcatt

SEQ ID NO: 549238 - DNA, 73 bp, Homo sapiens
tggagacacggccagatctgccctccaactgcttctcggaggagtgccgctctgtgatccaggaacaagccgc

SEQ ID NO: 549239 - DNA, 134 bp, Homo sapiens
ctggttgatgatcgttgtgttgtacagccagaaaccggggaccttaacaatccacctaagaaattcagaggccaactgccaaatagccatcttgtaccagagattccagagagtggtctttggaatttcccaac

SEQ ID NO: 549240 - DNA, 146 bp, Homo sapiens
ccttttccatcaacaggggcaaatcgaagtagagagcgaaaccatcttcaagttagcagcgtttattttacaggtatgttgagtctaaaaaggacagagtcacagtagtcttcagcacagtgtttaaggatgacgacgatgtggtc

SEQ ID NO: 549241 - DNA, 100 bp, Homo sapiens
agggtctgaagttcacgactactagaaggggaggggagtggaaaggctctcagtgaaaaagtggactcccgaaaaattgaccaggaagggaaaatcccag

SEQ ID NO: 549242 - DNA, 75 bp, Homo sapiens
ccattccagcactggactcatggaggctgagcatttattcaggacttcctccgtcaggcagctggcaggacctga

SEQ ID NO: 549243 - DNA, 51 bp, Homo sapiens
gcttcaaaaggggggacatcctcaagataaagccaccaatccttccaaccg

SEQ ID NO: 549244 - DNA, 95 bp, Homo sapiens
cggatggaaatcctaatgacagtctccaaattcgcctccatctgtaccatgctgggagtgtccactcgccttccaccagcatggcaacgtcttca

SEQ ID NO: 549245 - DNA, 48 bp, Homo sapiens
tacctggaggcaagggagaaaaggatcaataagccgagagctgaggat

SEQ ID NO: 549246 - DNA, 95 bp, Homo sapiens
ataatttgtgacactgtaaatcctgaggtttatagaaaggattcatgactttgtaatggaggacttggatgttgtgggtgatggtatgcagtgtc

SEQ ID NO: 549247 - DNA, 83 bp, Homo sapiens
gaagaaatgtgggcaatatgcaaccaactgctcagtattctggtcctgagggagtctaacaagttagcagaaatggaagaacc

SEQ ID NO: 549248 - DNA, 100 bp, Homo sapiens
atttactgtacggtctcgtgtggctgctgacagtcctcctggaggggatctctggccaaggagtgtacggtaaatgagctggatggtatcccgttgatcc

SEQ ID NO: 549249 - DNA, 100 bp, Homo sapiens
ttcctatctagcctgtattcccaggactcaccgcttaaggctgtgcagatgctgtgggtaaacctcataatggatacactcgcttccctggctctggcaa

SEQ ID NO: 549250 - DNA, 75 bp, Homo sapiens
tgtccacgaggaacaaattgtacatttgcccattctcaggaagagcttgaaaaatgactctgaaggagtttgcca

SEQ ID NO: 549251 - DNA, 83 bp, Homo sapiens
gagatatataaagcatttgtgcattcagatgctgctaaacaaacaatgcagatcttcgtgaagactctgactggtaagaccat

SEQ ID NO: 549252 - DNA, 100 bp, Homo sapiens
tgacaaagagatcagcagttgaaggaatgcctagtaatttggattctgaagttgcctggggaaaggccttacgagcaaaatatggaattagagatgacat

SEQ ID NO: 549253 - DNA, 83 bp, Homo sapiens
gcggtcttcatctcggatatccgcaactcccagctcaacattggcaatgtgctccctgtgggcaccatgcctgagggtacaat

SEQ ID NO: 549254 - DNA, 82 bp, Homo sapiens
tctttttgaaagctgcctgcggcaaaggtccccagtcccaagcggaagttggaagaaccagttctggagttcaggcctcccc

SEQ ID NO: 549255 - DNA, 96 bp, Homo sapiens
agacttagaactactagagaatcttaatcagctcatagccgttgacaaccaacttctgcatgtgaagctgcaaaagaaggagctggtgctgttgat

SEQ ID NO: 549256 - DNA, 85 bp, Homo sapiens
cagttggaagcagccgatccagcctgcggagcctgtggggcaggagcagcccctgggtgcgtccactttctgggcacgtgaggtt

SEQ ID NO: 549257 - DNA, 75 bp, Homo sapiens
cagaaacaaaatgtcaacaaattgatgggccctgaagaggaaagtgaggatgactctcatctcgaaggcagggat

SEQ ID NO: 549258 - DNA, 90 bp, Homo sapiens
attgacttggcaagggcttattgttcctgtggcttctggcacagcagcttaattgaccggaacctcattgattattttgttcccttcctc

SEQ ID NO: 549259 - DNA, 75 bp, Homo sapiens
tccatatcataagtggaattttggagatattcaaaggaatctgcaagcagaatatgaccgtctaaagcagcagca

SEQ ID NO: 549260 - DNA, 100 bp, Homo sapiens
caacaagagcaagtgtcagaactgcttcaagccccgcgagtcgcatctgctcaacgacgaggacctgacgcagtgcaccaattccagctggacatcactg

SEQ ID NO: 549261 - DNA, 124 bp, Homo sapiens
cgagctgcggcagaagggctacgaagaagtgcttcagcgggccaggaagcgcatccaggagttggttatcctaaagaagaacggtttgctgggaggccgactcaacgagtcagtgggctctatc

SEQ ID NO: 549262 - DNA, 75 bp, Homo sapiens
tttgttgattaactggacaaattcagaatccagcaactatcacaagaatactccttagccacttcaattgggata

SEQ ID NO: 549263 - DNA, 75 bp, Homo sapiens
tacttgcagctggacagctagctgatgctttatctcagtttcatgctgccgtagaacctaaaggcagacccagaa

SEQ ID NO: 549264 - DNA, 96 bp, Homo sapiens
tagtggaacttctacccgacacttacatgccatggccttctacgttgtgaaaatggacagtcattttgtttactcattcagccctgttgcaggtcc

SEQ ID NO: 549265 - DNA, 100 bp, Homo sapiens
taactcggctacaacatttggcagagccaagaaatatttttcttcatggccctgatcagcaagtaaaaataggagactttggtctggcctgcacagacat

SEQ ID NO: 549266 - DNA, 98 bp, Homo sapiens
gatgcttcagtacctctgtggtcagaccatttgccaagcttgtgagggtgcggatctgggagatccccgagggcgggctgaagcggaacatgacggag

SEQ ID NO: 549267 - DNA, 90 bp, Homo sapiens
cctgtcagtaatgaagttgacctggatgaactcatccttcaaaccgacgcatactcaggagcagaggaaaactactttggggaagatgac

SEQ ID NO: 549268 - DNA, 100 bp, Homo sapiens
gaaggcgagggcctcccactggcggcgccttttgagccttggggccactccggaggagcctctgttggacttcaaggtgtgggcaataatagtgaaggtg

SEQ ID NO: 549269 - DNA, 82 bp, Homo sapiens
tcaatattggaagcgctttgatttacagcagctgcagcaattctgtggtgttcttggtcacacatttatggagtttctgaag

SEQ ID NO: 549270 - DNA, 83 bp, Homo sapiens
ctggagtgaggtggccggttcttggtgggatctgagcaggttctgggccggagaaggggcgacgttcgggcaccccccgaatg

SEQ ID NO: 549271 - DNA, 90 bp, Homo sapiens
cctggctgtggctgactggggacagaaagtttccttctaccagctgagtggaaaacaggtagagttggctttgtgggacacagctgggca

SEQ ID NO: 549272 - DNA, 90 bp, Homo sapiens
ctctcatttctctttgtgattcttgacggtgactcttctgtatgacaaaattaacacaaagtcttcaccacaaatcaggaatcctccaag

SEQ ID NO: 549273 - DNA, 100 bp, Homo sapiens
acatccatgaccctaatggtctttttgttcaagataaagtgattttttgcctttgttgattaactggacaaattcagagcaagtgcaccggcacctggac

SEQ ID NO: 549274 - DNA, 96 bp, Homo sapiens
tggagaggcctggggcatgcagtgtgccctctgccccctgaaggattcaggattacctgagctggaattggaagcaattgataaccaatttggaca

SEQ ID NO: 549275 - DNA, 100 bp, Homo sapiens
caccaggctcatcctgtccatcgtgtgcctgatgatcacgcagctggctggcttcagtggaccagagatggcagcagaaaaggccaaagcagcagccggg

SEQ ID NO: 549276 - DNA, 100 bp, Homo sapiens
gattacaagaccttacataatatttagtatatgccacactttcttctaggaattatttattcccataaaaaccttagagagatggggtctcactctgttg

SEQ ID NO: 549277 - DNA, 90 bp, Homo sapiens
cgagaaaggaaagaaacaagtttgctctcagcggaatctgctggagcagcaaccactgaggccctctcacctccaaagacacccagcctc

SEQ ID NO: 549278 - DNA, 87 bp, Homo sapiens
ataagtgaaacacggaaactgagtatgggatctgatgatgctgcctacacacaagccacagccacctatattgaggaagatgatgtt

SEQ ID NO: 549279 - DNA, 83 bp, Homo sapiens
ccagcacctacgtcccgctgccgtcgccgccgccaccatgcccaagagaaaggttgacatcatggacatatgtgagtccatcc

SEQ ID NO: 549280 - DNA, 75 bp, Homo sapiens
ctttgctgagcacatcagtgatgaatgcaagaggcgtttctataagaattggtactccccgctggccgagcagtt

SEQ ID NO: 549281 - DNA, 76 bp, Homo sapiens
gggaccatgttgcttccgaacatcctgctcaccggtgctggagaatctggtaaaagcaccattgtgaagcagatga

SEQ ID NO: 549282 - DNA, 74 bp, Homo sapiens
ctggaccacttcctgcccaaccacggctcaggacccagagttcaacaatacagatcagattgacctgtatgatg

SEQ ID NO: 549283 - DNA, 98 bp, Homo sapiens
gctggacgccactttccggggtgcacagcaagtggttcaccttgttggaattgatattttcacgggcaaaaaatatgaagatatttgtccttctactc

SEQ ID NO: 549284 - DNA, 82 bp, Homo sapiens
gaacgcggactcgccacccgggcgcctgtgtctggcagagctggtgtgagacgagacaatcctgccccgccgccgggataat

SEQ ID NO: 549285 - DNA, 90 bp, Homo sapiens
cctcggaaagtgctcctgcggctgtatggagcgattttgcagatggctgtgtggttccgggtgctggtgctgtggaagtggcaatggcag

SEQ ID NO: 549286 - DNA, 75 bp, Homo sapiens
caaggccatgaaggcggcccatgacaacattactatactggcaattgctggagaagattttgcaattgttgcttc

SEQ ID NO: 549287 - DNA, 87 bp, Homo sapiens
gaagttaatgtttacggcgaagtctactcaacgtttccaagtgtgacaagtacaagactggagttattgatgggcctgcatgtaaca

SEQ ID NO: 549288 - DNA, 100 bp, Homo sapiens
gctacgacgacatggcctccgctatgaaggcgacagaaggtggagcacagacagacggccagcagtcacagacacaaagtagtgaaaattcagagagtaa

SEQ ID NO: 549289 - DNA, 82 bp, Homo sapiens
cagaggggcagccggagagcctgggaaaggtctctaattaacagaagatggcaaagcccagccacagcagctatgtccttca

SEQ ID NO: 549290 - DNA, 90 bp, Homo sapiens
gcccacagtgtttgagaactatgtggcagatatcgaggtggatggaaagcagaatgtcacaggtagactaatggttggcctacgttggtg

SEQ ID NO: 549291 - DNA, 75 bp, Homo sapiens
aacatagagaggaactggagcaattgaagctgactactaaggagaataaggttgcagtccatgagctgggaaagg

SEQ ID NO: 549292 - DNA, 74 bp, Homo sapiens
gcctactacgagtgtgacatagttctaggtgctggagttcagcgggagccagaacccagcgggtgccgcttctc

SEQ ID NO: 549293 - DNA, 101 bp, Homo sapiens
cggcggcgcgcggagaagtgcggcggagcggcgcctgcattagcagggtcatgtaggtacaacagcaaccaagaagatcgatgtctacctccctctgcact

SEQ ID NO: 549294 - DNA, 87 bp, Homo sapiens
gactggggcaacagccgcatccagggacccactactggcgtctggacaccagccgggatggctggcatagctggcccattgctcatc

SEQ ID NO: 549295 - DNA, 100 bp, Homo sapiens
cggcatgtggtacgcgaaaaaacaggggcagaagaacaaggaagcggagaggcaagagcaattctgtggtgttcttggtcacacatttatggagtttctg

SEQ ID NO: 549296 - DNA, 75 bp, Homo sapiens
tggaacaccatatggttacagcacagctgcccctgcctatggacatggatttgattgacatactttggaggcaag

SEQ ID NO: 549297 - DNA, 98 bp, Homo sapiens
gtacatcgcctcggtgcagggctccaccccgtcgcctcgacaggtgagaattatgaagatgatgacctagtaaattctgatgaggttatgaagaaacc

SEQ ID NO: 549298 - DNA, 130 bp, Homo sapiens
ccattatcctctgtttctctgctgcaccgacctcgacgtcttgcctgtgtcccacttgttcgcggcctatagcaccagcaacaagtggtgcaggctgtggaacgggccaagcaggtgaccatggcagaac

SEQ ID NO: 549299 - DNA, 100 bp, Homo sapiens
atggccgtcaacacctttgtgaagaaccaaaaacttttgctagaaaatcagcttttacgagagaaaactcatggccttgtagttgagaaccaggagttaa

SEQ ID NO: 549300 - DNA, 83 bp, Homo sapiens
cgacgatcctctagagcactgtgtgtctccccggacgcgagcccgctcccctgatttggtgccctggttgtcagatgttggaa

SEQ ID NO: 549301 - DNA, 100 bp, Homo sapiens
cacaggcctgctgaactgggtgctttatatagggtatcccacgttcatcgatgccctgcgggacctggacgatgccctctccatgtgcttcctgttttcc

SEQ ID NO: 549302 - DNA, 50 bp, Homo sapiens
ccgaggagaaggcgctgaggaggaggaagaggaagaggaggaattagtgg

SEQ ID NO: 549303 - DNA, 98 bp, Homo sapiens
tttgacagcagctgtatatcttctaagattccgctcctcaccaccatcaggtttacccaaggtccagcctagcccctaggcaccatgtcggacagtga

SEQ ID NO: 549304 - DNA, 73 bp, Homo sapiens
ttctcttctggatgaagatgaaccacagcttaagtctctggctgatgaacttgctcttgtggatgttttggaa

SEQ ID NO: 549305 - DNA, 98 bp, Homo sapiens
gaagccccccttcgagctgccagacttcatcaaacgcacaggcatccaggagatgcgagaggccctgcaggagaaggagccccccaaggttgccaaat

SEQ ID NO: 549306 - DNA, 100 bp, Homo sapiens
gaggtgctcatttccctgcatattgcgggcaaccccacctactacgttccgggacaagaataccatggaaatgggtcctgatgaatatgaagagatggaa

SEQ ID NO: 549307 - DNA, 100 bp, Homo sapiens
ctccacctctgattccaccaccgggctttacaggaagtatggtgctggcatctgcttggcttctagagagtcttacaatcgtggaggaaggtgaatggag

SEQ ID NO: 549308 - DNA, 90 bp, Homo sapiens
ctctgaaggactggaagagagctattcgtctgggtgggatcatgctcaggtgcatccactgtggtgtcgtccacctgaccttggccttgc

SEQ ID NO: 549309 - DNA, 75 bp, Homo sapiens
tgagcagaggacgacatgttgcttttcgtggagggacacagcgggtcaggaaagattccgaacaatcacgacagc

SEQ ID NO: 549310 - DNA, 75 bp, Homo sapiens
caggcatcatccgctatgcaattggggggtctgcccacggaccggtacatgtggagcgatgcctcggggctgcag

SEQ ID NO: 549311 - DNA, 98 bp, Homo sapiens
gcgcaaacttgacactcaccctgaccggaaactggtggtgacaaaagagaaagagaagaaagtggggctgtatacgatctatgtgaatcctgccaata

SEQ ID NO: 549312 - DNA, 100 bp, Homo sapiens
caaagcctattcaaaaataaaggtggacaatcacctttttaacaatctgccacacctaccatggggaacacagacttctggaaaacactccgatatctta

SEQ ID NO: 549313 - DNA, 73 bp, Homo sapiens
tcctttatatagaagggagagtagatgctgagtttgtgtgtgaacggacactgaaatattttctaggaattgc

SEQ ID NO: 549314 - DNA, 100 bp, Homo sapiens
cccgtctgagaagtgaggagcccctccgcccggcagctgccccgtctgagaatttaactcggctgctaagcagctgatagaatgggataagcctcctgtg

SEQ ID NO: 549315 - DNA, 76 bp, Homo sapiens
aaagcagcgtgcgttcagccctgggtcattgaaattatgagactatcattcaaatggaagcattatagttcttcgg

SEQ ID NO: 549316 - DNA, 90 bp, Homo sapiens
agtcccacttcaaacattcgtctcggaaaccccgcctcttacagtcacgagcacaacctccaagagggaaaacatttctccagattatcc

SEQ ID NO: 549317 - DNA, 87 bp, Homo sapiens
ccacgtggattctccagacgagagggtcttgctgtctcacccaggctggagtgcagtggcacgatcacagctcactgcagccttgag

SEQ ID NO: 549318 - DNA, 75 bp, Homo sapiens
ctcggcgctccttcccgctccctcacacaccggcctcagcccgcaccgccctcgatttgaactgcccatgggaac

SEQ ID NO: 549319 - DNA, 74 bp, Homo sapiens
aaagctgtacaagagatcatgcagattaaggatacttggcatcaagtttatagaagacattttttaaaaacagc

SEQ ID NO: 549320 - DNA, 50 bp, Homo sapiens
tgtatgagggattcatctcggctcaggaatgtgaattggacccttgctgc

SEQ ID NO: 549321 - DNA, 76 bp, Homo sapiens
gttctccaggagtttggtagagcactgtctgaggcctgtggtcaggaaataactactaagcaaatgctgcccatcg

SEQ ID NO: 549322 - DNA, 73 bp, Homo sapiens
gggatcggtatctgaccaaccaaaatcagattctgaggaagatgaacccacaaagaagaaaactatccttcag

SEQ ID NO: 549323 - DNA, 100 bp, Homo sapiens
aaatgtgaatctcaggagagagcagccagagtggtattgaaaaccttccctttgaattacagagaaactttcagctcatgagggacctagaccaaagaac

SEQ ID NO: 549324 - DNA, 100 bp, Homo sapiens
cattaatactcatcttgtccagaactctgtcaaatgaagaacactttcaagaaccaggtatgccttacactttcttgtacaaagtggaatttcctactgt

SEQ ID NO: 549325 - DNA, 100 bp, Homo sapiens
tactagcatggtgctcaccaaggtgtctgccagcacagtccccactgacgggagcagcagaaatgaggtcaagagcaatctgaatccaaatgcaaaggag

SEQ ID NO: 549326 - DNA, 83 bp, Homo sapiens
taagggcagtcaatggtcagatattgaagagttctgcaatcttgatattcactgatggactccaaagaatcattaactcctgg

SEQ ID NO: 549327 - DNA, 80 bp, Homo sapiens
gagtctattcctggattcaatgtcatccagagcccagagcaggaacttgatgggaaacctgcttctcctactccggttat

SEQ ID NO: 549328 - DNA, 90 bp, Homo sapiens
tgtagcgacccggagagaaaaaggttccgcttcaattcagagtcggaatctccagccaagtcctccgtgctcgtggtgggaatcgtcatc

SEQ ID NO: 549329 - DNA, 86 bp, Homo sapiens
ggcagtggaaaatgcgctcgggctggaccagcaggattttttatcaagcagaaatgcatcgaacaacgagaatcaagatcactgag

SEQ ID NO: 549330 - DNA, 104 bp, Homo sapiens
ggcagccaagctcgtggcctgcctctgcgtgcacctgcctagagctggaacgttacctccagagcgagccctgctatgtttcagcctcagaaatcaaatttgac

SEQ ID NO: 549331 - DNA, 96 bp, Homo sapiens
ctgaggaactgcatgaggctgagcaggagctgctctctgacatgggagaccccaaggtcccgttcaagaagttcttccagttcgcagtcaagatct

SEQ ID NO: 549332 - DNA, 77 bp, Homo sapiens
cctcttcgagcgccgcggacgcgtcatcgagtgtgacgtggtgaaaggtgtccaggatgtggaggtgcacttggagg

SEQ ID NO: 549333 - DNA, 101 bp, Homo sapiens
cttcggtggactccttcggcagtccacccaccgccgccgcctcccaggtaagccaagatgggtgcatacaagtacatccaggagctatggagaaagaagca

SEQ ID NO: 549334 - DNA, 101 bp, Homo sapiens
agaagccttttccgttgccggtgccggcctagcgtcctggaattacttcaatcaatgggttgtatcccctgcagaaaaagctaaatatgatgaaatcttcc

SEQ ID NO: 549335 - DNA, 78 bp, Homo sapiens
agattttgcattggatattcgcatgcctggggttacacctaaacaggtggtattaaagataatcaaacattatcaaga

SEQ ID NO: 549336 - DNA, 50 bp, Homo sapiens
tgctgccgtctcgactcgtggatggtggaggcaatgcccagagctgtggc

SEQ ID NO: 549337 - DNA, 80 bp, Homo sapiens
cctctcttccctggctggacttgcggagtccccgccgaagaacccgaggctttgaacttggcctactccagcatttacgg

SEQ ID NO: 549338 - DNA, 100 bp, Homo sapiens
acatcgtggtgggctgcggtggcttcgtcaagtcggacgtggagatcaactactcgctcatcgaggacctcagcagccatgtcgaagccccatagtgaag

SEQ ID NO: 549339 - DNA, 75 bp, Homo sapiens
cgcggctgcacaactgcaggaacaccgtcacgctgctggaggaggaacatcatttacagcgagcaatttcagcac

SEQ ID NO: 549340 - DNA, 90 bp, Homo sapiens
gagcaattgaaacaggctttacagaggacctaccgagccatgtacgattacagtgcccaggatgaagacgaggtctcctttagagacggc

SEQ ID NO: 549341 - DNA, 75 bp, Homo sapiens
cgggggccgaactggccctggactacctctgcaggcataccatgaagttccctacacaacgtcctttaccttggc

SEQ ID NO: 549342 - DNA, 74 bp, Homo sapiens
atgagacatgcacataatatagctagaacaacagaggcagcagttgcttactgaacgccaaaacttccacatgg

SEQ ID NO: 549343 - DNA, 75 bp, Homo sapiens
ttgcacgagccaagcatatggaaatgtctctaaaagtgtgcaccttcgctctgccaggcgtctctgtgagctctg

SEQ ID NO: 549344 - DNA, 82 bp, Homo sapiens
ggcgccgaacttgggctcgggaagccggcggaccgcgtcctgcgccggagcaggcatcattcttaacaaagaagttaaatat

SEQ ID NO: 549345 - DNA, 100 bp, Homo sapiens
aagggactcaggcagtacgggaagaacttcttcagaattagaaaggagctgcttcccaataaggaaacaggagagtcccgtattctcagagtaaaagttg

SEQ ID NO: 549346 - DNA, 96 bp, Homo sapiens
gccagatggttcttacccaacgtttgatggctcatcaaactgcaatgaggtctcagcatgaaacagcagcagtggtgtgggatgactgccaaaatg

SEQ ID NO: 549347 - DNA, 82 bp, Homo sapiens
ggaggagctgcggttgctcctgcctcgagtgcgggactttattacaactaccacctgctatggtagaagagggtgaggaagt

SEQ ID NO: 549348 - DNA, 96 bp, Homo sapiens
gacgtcgtgatccagaagtccagagctgaggactgcctgtttgcaggtgtacgtgaacggagagtgggtgaccaacatcagcgagggaggcagctt

SEQ ID NO: 549349 - DNA, 105 bp, Homo sapiens
tgcacgagagcaaagggagaaaagacggcggaaattgttaatggaccagttaatagcccacgaagcacaagagagagctcagaaatatgctcagcaagtcttgca

SEQ ID NO: 549350 - DNA, 98 bp, Homo sapiens
gtgctggccgcgggagaggtaaacagaacaccaggacatcccagagtctgggaaatgtggacagaggactgcagaaaatcaacctatcctccttcagg

SEQ ID NO: 549351 - DNA, 83 bp, Homo sapiens
gccggagctgggcgcggattcgccgaggcaccgaggcactcagaggagggcgaccattgacgaggtggagacggacgtggtgg

SEQ ID NO: 549352 - DNA, 100 bp, Homo sapiens
ttatgcaacacttagaaggagaaggcctaaaaaatgtcatttttaccaactgtgtaaaggatgaaaatgtcaagcagcacctggctgagcacgcagacac

SEQ ID NO: 549353 - DNA, 99 bp, Homo sapiens
tacttctgccactgctgctccgtggagatcgtcccgcgcctgccggccaggtcagagcagcccaccatgggatggggagggggtggaggctgcaccccg

SEQ ID NO: 549354 - DNA, 83 bp, Homo sapiens
aacccgaagaagaaaggattcgttacagccagagattgcatcctaatgtcctatgatcacgtggaactcacattcaatgacat

SEQ ID NO: 549355 - DNA, 100 bp, Homo sapiens
gtaatgaagaaaaactaatggctttactgactcctctaaatgtgaattgccatgcaagtgatgggcgaaaggcctctgaggaaacactacattccagtaa

SEQ ID NO: 549356 - DNA, 100 bp, Homo sapiens
aacaagatggaagcaggtttaaaattttacataagaagttacctttttcagggtcgagctgtgcagttttagcgggtacaagatctaccccggacacggg

SEQ ID NO: 549357 - DNA, 88 bp, Homo sapiens
tgcttggtgatgagtatgatgcacctgcagtaggattttaaacaagctgcactgataagccggactaacgggagcctttgtcacgcca

SEQ ID NO: 549358 - DNA, 88 bp, Homo sapiens
attcctggagtgttccgaggcccttatccccttggcattgatcctgttggatggcaagcatgtggtgtttggcaaagtgaaagaaggc

SEQ ID NO: 549359 - DNA, 83 bp, Homo sapiens
aacagctacgcatagaagccgggattgagcgcatcaagcaagagtgagccatggagctacgtgtggggaacaagtaccgcctg

SEQ ID NO: 549360 - DNA, 100 bp, Homo sapiens
ctgggcatctgctacgacatgcggtttgcagagcttgcacaaatctacgcacagagaggattccccagctttccgttgcacaaacagtgaagtgacagtc

SEQ ID NO: 549361 - DNA, 80 bp, Homo sapiens
tcttcgagtatttgtagaaggattatctccctccaaactctaaagaaggaatataaatcctatgaagccaagctccgcct

SEQ ID NO: 549362 - DNA, 80 bp, Homo sapiens
cttcagctgtgactgtagtatgacttccttcagtggaccactctgcaatgaccggagaccaaattttgaggaaggtggac

SEQ ID NO: 549363 - DNA, 82 bp, Homo sapiens
aaccctgaagtgcttgatatcacagaggaaactctgcattctcgcttcctggaggtgtcagttgtacccgaggcgttctcag

SEQ ID NO: 549364 - DNA, 74 bp, Homo sapiens
ttcttctcagagaactggagaagatgttcccgctgcctgtcaccaacgggaagggccggcccgcctccctggcc

SEQ ID NO: 549365 - DNA, 100 bp, Homo sapiens
actgaccaccaggccaacttaacatcagcagatatcctgtctcagatgaagaggaggtcctgcacataggaagcgcccacaaccgaagtgccatgccctt

SEQ ID NO: 549366 - DNA, 83 bp, Homo sapiens
agaagagccatggaaacaggaggaagaattcccaagccaaagctttccagatctattccagaggggagcttcaccacttcatt

SEQ ID NO: 549367 - DNA, 75 bp, Homo sapiens
acgacgagatggtggaggaggcggtggaaggcctccggtgtggctgtctctgatggtgtcatcaaggtgttcaac

SEQ ID NO: 549368 - DNA, 108 bp, Homo sapiens
agctctgctgctgggggccctcgctctgaccaccgtgatgagcccctgtggaggtgaagacattgtgggatggccaggccatgttatgggatctcaacgaaggcaaac

SEQ ID NO: 549369 - DNA, 103 bp, Homo sapiens
ctgggattcgcgctgctgggcacccacggagcctccggggctggtatcacctcttctgggctcaagatggacaacaagaagcgcctggcctacgccatcatcc

SEQ ID NO: 549370 - DNA, 75 bp, Homo sapiens
gggaagcaagagaaaaagaacattactgtcttggtacaccaggggttggaaaaaccacactaggcaaagaacttg

SEQ ID NO: 549371 - DNA, 98 bp, Homo sapiens
gcttttggactccctattgtatttgccagagcacatctgataaatttgcgcctcattttggtaagcggaaaaacaaaagagttcctgttttctcctaa

SEQ ID NO: 549372 - DNA, 75 bp, Homo sapiens
ggggaagaggaggcggaaaaggacgcaaagttctccggcgagagacacctatggctgccgatgaaggctcagcag

SEQ ID NO: 549373 - DNA, 97 bp, Homo sapiens
aacgaaaccacttttgcaagaatcttgcagcagcatggctatgcaaccggcctcatagatactaatggaccatactaccaaggaccagtccacctga

SEQ ID NO: 549374 - DNA, 82 bp, Homo sapiens
actagtgtccacgttgaagcagaaccaggcctgggcggatgatgtggagcggtttcagaaaatgttcagacacccaagtcat

SEQ ID NO: 549375 - DNA, 82 bp, Homo sapiens
gcctgatcctggaagagactcggggccccccagcctccgccaacccaggtgagaagccctaccactgcaactgggacggctg

SEQ ID NO: 549376 - DNA, 90 bp, Homo sapiens
attttatgtgggaggatgttcagcagcgcggcagagtcatgggggctttaaggagttttaagctgagtgtcactgtagaccccaaatacc

SEQ ID NO: 549377 - DNA, 98 bp, Homo sapiens
gacaccgggacctcctggaagccaaaaatggagtgttgaagcctggaaatcccctccccttccccctcccccctttacagtatccccctccctccacc

SEQ ID NO: 549378 - DNA, 83 bp, Homo sapiens
cctcttgatctccgccaccgtcttcaggccaggttttgattcccaccatggccatcacccagtttcggttatttaaattttgt

SEQ ID NO: 549379 - DNA, 50 bp, Homo sapiens
gagggatataatgagtggaactgagccatggtctgaaaaagttcttttct

SEQ ID NO: 549380 - DNA, 97 bp, Homo sapiens
gacgtcatcgagtctgtcaacctcttgggtgcttcaaggatgaccgcatcgtcttctggacttggatgttctccacctacttcatggagaaatgggc

SEQ ID NO: 549381 - DNA, 100 bp, Homo sapiens
agcagattgaattagatctaaaagccacccaggccttggtcctagcacccactcgagaattggctcagcaggagtctcaggagcaggggctgcggcagag

SEQ ID NO: 549382 - DNA, 75 bp, Homo sapiens
tcaccacgcagaacgtcaacaccaagtgcatcaccatccccagattgacttgatgcaaaacatcacaaaggctcc

SEQ ID NO: 549383 - DNA, 140 bp, Homo sapiens
ttttccttgacctttaggtgcttttatattcatctcaaaaacaaaattctgaactcaggacttggcaaatgctgagatgaatcgtcacctgtgtgtttggctttttagacatccatctcttaatggttacctccagtgtc

SEQ ID NO: 549384 - DNA, 100 bp, Homo sapiens
tgcagatatcaggaaggacatcgaccaggtctttcccctgcggatccgccggcttctccgtcccttcttcctgctgcagaactcctctatgatgaagaag

SEQ ID NO: 549385 - DNA, 100 bp, Homo sapiens
tatatacatgaaaatgaatatgttcatggtgatataaaagcagcaaatctacttttgggttacaaaaatccagaccagctgctctgttaaaagcgaaaat

SEQ ID NO: 549386 - DNA, 82 bp, Homo sapiens
caagtatgcgcccagcggattctacattgcctccggaggtaactaggatttctacctcaaccgcgagacctatgcaaggacg

SEQ ID NO: 549387 - DNA, 75 bp, Homo sapiens
ttcacatgctggtggactcacccatcgacccgagcgagggttacacatcattttggaatgactgtatatcatctg

SEQ ID NO: 549388 - DNA, 50 bp, Homo sapiens
ctttcctctgctgccgctcggtcacgcttggatggtgattgctcacacca

SEQ ID NO: 549389 - DNA, 82 bp, Homo sapiens
atggcggcagccgaggccgcgaactgcatcatggagggactttgaacatgtcggggatcgccctcagcagactcgcccagga

SEQ ID NO: 549390 - DNA, 96 bp, Homo sapiens
caagaaagaatccagagaaggactggtggacttggaatgttaagtcatggcccatcacccaaactgcacctggtcacctgtctacattcagattta

SEQ ID NO: 549391 - DNA, 115 bp, Homo sapiens
agacaaacagcccgcccgaccccgtcccgaccctggccgccccgagcggagcctggagcaattctgtggtgttcttggtcacacatttatggagtttctgaagggcagtggagat

SEQ ID NO: 549392 - DNA, 75 bp, Homo sapiens
ggacgatgtgcggcggatgaacaagcggcaggctgcatgttaaatggccaagaggtgaggcttactattcactat

SEQ ID NO: 549393 - DNA, 75 bp, Homo sapiens
tgtggacgttgtctaaatttcggtagccatggcacaagaatatatgttcctctgaacaacagggagaatatctct

SEQ ID NO: 549394 - DNA, 88 bp, Homo sapiens
tcaggatttccgccgaaggcaaggccagctgcccctggtccactccctggagcctaccatgggccccaaggccgggggcaccaggatc

SEQ ID NO: 549395 - DNA, 90 bp, Homo sapiens
attttggaagtgtgccagaattgtcaccaggagactaaagtccatcaaaaacatccagaaaattaccaagtctatgaaaatggtagcggc

SEQ ID NO: 549396 - DNA, 100 bp, Homo sapiens
accactacatcagaactgacatttcagagcactactggctcaatgatgatgaggagtctgatgaggaagctgtgaagaaaaccaacaaatgtgtactagt

SEQ ID NO: 549397 - DNA, 88 bp, Homo sapiens
ccacagaatagacctgaagacaaaaatccagaagtacaagcagtctgacaatgcagatcttcgtgaagactctgactggtaagaccat

SEQ ID NO: 549398 - DNA, 75 bp, Homo sapiens
gccagggtccctgaagagggaagacacgcggaaacagggttccccactgaaggacttggtccagctgtctggcag

SEQ ID NO: 549399 - DNA, 107 bp, Homo sapiens
attccggcgcctccactccgtcccccgcgggtctgctctgtgtgccatggacgggtttacccaaggtccagcctagcccctaggcaccatgtcggacagtgatctag

SEQ ID NO: 549400 - DNA, 100 bp, Homo sapiens
tctgctcagcacagccaaggaacagaattagaagaaaaggaaccctggcctgagagcaaattggtcaggagatgttggaaaaccttagtcatgacagaga

SEQ ID NO: 549401 - DNA, 100 bp, Homo sapiens
gtggcccacttttcctcctgccaggtgcagtagacattgttgcaatcatgatcggcaatctgaaaggcacaaaaattctgcaatctattcaaagaggcat

SEQ ID NO: 549402 - DNA, 83 bp, Homo sapiens
cgcccgggaggaaggaacgaggcaaggagctaaagcagcgtgcgttcagccctggggtgactctcctattccatctgtttctt

SEQ ID NO: 549403 - DNA, 83 bp, Homo sapiens
cgaagctggccgagcaggctgagcgatacgacggagtctgctacaccatttttgatttgggcttccgctttgatgtggcatgg

SEQ ID NO: 549404 - DNA, 82 bp, Homo sapiens
cggggacagccagccctcgctggaccagaccatggccgcggccttcgagtccccagggagacacttaagggaaattaaactg

SEQ ID NO: 549405 - DNA, 50 bp, Homo sapiens
gcaaaagctcaggttaatccagttgatactccagatccctatgtggaact

SEQ ID NO: 549406 - DNA, 100 bp, Homo sapiens
acctcgtcattaattggacacagtgccagagtgtatgcactttactacaaagatggacttctctgtacagccagaagatcagctgccatgttacttgact

SEQ ID NO: 549407 - DNA, 74 bp, Homo sapiens
tgaaagtgcagatcgccgtggccaacgcgcaggagctgctgcagcttcgagagcatgcagaggctctgcgacaa

SEQ ID NO: 549408 - DNA, 50 bp, Homo sapiens
cagtcttcctcttgatccatatgtttcagattcgctcagcttattttgag

SEQ ID NO: 549409 - DNA, 75 bp, Homo sapiens
ccgggcccgggcggctggcctcaccgcccactggttgctgtggttggctgataaatatttgtcgaagaaagaaag

SEQ ID NO: 549410 - DNA, 75 bp, Homo sapiens
gttccctactcggagagcttcagccaagttttagagactgcttccccacaacaaagagaaatgatggatcaggca

SEQ ID NO: 549411 - DNA, 80 bp, Homo sapiens
ccaccatgtcagacgcagccgtagacaccagctccgaaatcaccaccaagcacacttccaccctgggcagcgtgtttggg

SEQ ID NO: 549412 - DNA, 75 bp, Homo sapiens
agtaaggcaggctagtggatcagccagacagcttatgtccctgatgccaaaaatgcacctactctttcctctaac

SEQ ID NO: 549413 - DNA, 74 bp, Homo sapiens
atcatgctggtggctctacccagaattcaattaaagtggctcagtttaaggaagaaatctctaaacgttttaaa

SEQ ID NO: 549414 - DNA, 75 bp, Homo sapiens
gcaaagtgctgcttccaaagctcattgacttttctgctcagattaatactgaggaacacgtggatgcagctgatc

SEQ ID NO: 549415 - DNA, 75 bp, Homo sapiens
ttggaccttccggagcttctcagaagacagagggttttcttttgagtttttggctttcacccccaaccagtgacc

SEQ ID NO: 549416 - DNA, 82 bp, Homo sapiens
ctcatccggcagaataagagactggacgctgtgagtgcagagcagagcgggcggaggaccccgggcgcgggcgcggacggca

SEQ ID NO: 549417 - DNA, 75 bp, Homo sapiens
cggcctgataaagcgcgccgactgggctacaaggccaagcaaggtgagagcacagagccgggataagcagataga

SEQ ID NO: 549418 - DNA, 101 bp, Homo sapiens
ccaaagggagccgccaccgtctggtgtctaaaccgcctcgggtgtggcctgaagtcactgatcctgagaagttcgtgtatgaagatgtggctatcgcagca

SEQ ID NO: 549419 - DNA, 100 bp, Homo sapiens
gcactgtattctttacctgcttcccaatcccactgatgaggatcagcccatggctgagggtaaaaagctgggattggtaggctgggtccagaacactgac

SEQ ID NO: 549420 - DNA, 73 bp, Homo sapiens
aaccttggagtgcagtgaacccgctgctcagctttggagtttaacccttctgccaatccagaggcaagcacaa

SEQ ID NO: 549421 - DNA, 100 bp, Homo sapiens
tttcagcaagttcatcggaagcccatggcatcttttgttaccactcctgttccaccagactttaccagttccagaaagctgagtctgatctggattacat

SEQ ID NO: 549422 - DNA, 90 bp, Homo sapiens
gtctggacactgaaaccaccgtggaagtcgcctggtgtgaactgcagatcatggagctttgtggtgcaacaagacttggttattttggaa

SEQ ID NO: 549423 - DNA, 100 bp, Homo sapiens
tcggcgagcccccgcggcgacagggatctccatccaccaagcgaaggggtcagatgttacagccaatcatagaaggagaaactgcacatttttttgaaga

SEQ ID NO: 549424 - DNA, 95 bp, Homo sapiens
ctgtaccgtgatgtgacgctggagaacctggcacttatgtcctccctggtccacaggtcctggctaccctgggaagagacaagaagtaaatgaag

SEQ ID NO: 549425 - DNA, 98 bp, Homo sapiens
aggcgtgcgcggacggtgtgcgggaagatgaagtcctcagtacattctgaagaagatgattttgttccagagctacatagaaatgtacaccctcgaga

SEQ ID NO: 549426 - DNA, 100 bp, Homo sapiens
gcgactccctcaccgagtacgaagcgggcgtttgcgaagcacaaccagtgtctctgaagaagatgtctcaagtagatattctcgaacagatagaagtggg

SEQ ID NO: 549427 - DNA, 75 bp, Homo sapiens
aaagccctgggcctggataaagccatcctccatagcatagactgctgttatcgccacatcacagaatcgtatcta

SEQ ID NO: 549428 - DNA, 75 bp, Homo sapiens
aaaaattgcaagagagagactattttcgttattacaagaattaaacaaccaccatgtcgagcaaaaaggcaaaga

SEQ ID NO: 549429 - DNA, 97 bp, Homo sapiens
tgtggagcatagagacagggaagtgcctagtcaagtacgcaggccacgtgggctcaggtattgttgcagcatctggcagtgagactgaggatgagga

SEQ ID NO: 549430 - DNA, 125 bp, Homo sapiens
ggttgaaaagatccgatggcagcaccacttcgaccagcttcatcctcagacagattggagacccacagttggtgatctgtatggactgctcggcagacaccatgaccaaccgccttctccaaagg

SEQ ID NO: 549431 - DNA, 75 bp, Homo sapiens
ttccggagagctgtgctgatggaacttgtaatagctggcatcgttgagaatgaatggaaaagaacgtgctccaga

SEQ ID NO: 549432 - DNA, 100 bp, Homo sapiens
ctcagctcatggctctgcttcaggtaatagagggaaagctggctccattcttgggcaaggtcattaaatttgccacctcacacgtgtacagctgcagtct

SEQ ID NO: 549433 - DNA, 50 bp, Homo sapiens
caactatactgtttgtaaaaggagaaggatctgtgccagttcagaagcag

SEQ ID NO: 549434 - DNA, 75 bp, Homo sapiens
ccggatgggagtgacagtgtaatagaaaaacaagcaagaaaccttttaggggaggcgccacctgctgcagaagtt

SEQ ID NO: 549435 - DNA, 95 bp, Homo sapiens
cggacccaaagtgccatgtctttaatgtgaatccagcggaggccctgcagctcccaatggactatgtccagcgggtcaagcggacccactctcag

SEQ ID NO: 549436 - DNA, 100 bp, Homo sapiens
ggcgccgagggacaccgcagtatgaggcagaggactcgggcagccgcaagtagctcctccagcgccagcagccagcccagcagcaagcagcaggccccag

SEQ ID NO: 549437 - DNA, 100 bp, Homo sapiens
cgaatgcataggcctttaatggtgcagacagaggcaacaagattgacctggctgaaaggagagaggtttcccagcagcgagctgaagaattctcagaagc

SEQ ID NO: 549438 - DNA, 78 bp, Homo sapiens
aggcacctggataaccttttgctaacaaaaacagaaattaaccctgcagcatgtgaacagtaatcagtgcctggataa

SEQ ID NO: 549439 - DNA, 75 bp, Homo sapiens
caaatcctgtagccataaatgtctggctaatggcatttacaggaggctttccttaaagtttcccatgtctcaatg

SEQ ID NO: 549440 - DNA, 100 bp, Homo sapiens
gggggtgtcctggtgcacccccagtgggtgctcacagctgcccattgcctaaagaagccgttaattaaggaaaagttgagccagggcgtgaccctcgtcg

SEQ ID NO: 549441 - DNA, 75 bp, Homo sapiens
ggaaatgaagtataataccaagaaagccccacttggggcaatgaaaactattctaggtgatcaacgaaaacagat

SEQ ID NO: 549442 - DNA, 80 bp, Homo sapiens
tgcttcagagacatgagaagattcatactgtgaagcgtgacattcaggaaaacgatgaagaggcagtgcaagtcaaagag

SEQ ID NO: 549443 - DNA, 75 bp, Homo sapiens
gctctggctgtgcgcgctggcgctgagcctgcagccggccctgccggcaagtgaaccggagcaaacgacttccga

SEQ ID NO: 549444 - DNA, 100 bp, Homo sapiens
ttgcatccacaggaggggcaggaaattctttgaaggtaaataccagctgtcccctacagtgaatatgccccaagatgacactgtcattatagaagatgac

SEQ ID NO: 549445 - DNA, 75 bp, Homo sapiens
tttgactcaaagaggaaggatgggaaacatctcacacttcatgaggtcaagtctggcaccatctttgacaacttc

SEQ ID NO: 549446 - DNA, 75 bp, Homo sapiens
cagcctttgtgataactgcgtaggcaacggacagccaagacgtagatccatccaagacttgactgtaactggaac

SEQ ID NO: 549447 - DNA, 83 bp, Homo sapiens
ctccgcctgtgtcttctgcagtgattttaaccaaggcagttggtggaaatgaggctgattttgtgaaaatcgctcaccctgag

SEQ ID NO: 549448 - DNA, 82 bp, Homo sapiens
cgtccgccgccaccacccactccggacacaggaggatttgatgaagatgttaaagcgaaagtggagaaccttctcgggattt

SEQ ID NO: 549449 - DNA, 50 bp, Homo sapiens
atggttcccactgccgggcgaggtgtggatgaggtcaccattgtcaacat

SEQ ID NO: 549450 - DNA, 100 bp, Homo sapiens
gactccgctgaggtggacgtgtacaacccgacgaggaacgaatgggacaagatcccgtccatgaatcagatggaccacacatccccgacctacatgcttg

SEQ ID NO: 549451 - DNA, 96 bp, Homo sapiens
atagctggaaaggatcttacagattggctggtggacagaaggcactgcagcctgaaatggcagagtctggtgctgacgatccgcgagaagatcaat

SEQ ID NO: 549452 - DNA, 101 bp, Homo sapiens
tttgaattcacgcttatggtagtggtttcagaatggcttcggttattgcctttccttggtgtactcgcacttcttggctaccttgcagttcgtccattcct

SEQ ID NO: 549453 - DNA, 90 bp, Homo sapiens
cccaggtgtaagcgcagaaagcaggcgaacccgcggcgcaataacggccatttcataattctgaatcatgtctgataacggagaactgga

SEQ ID NO: 549454 - DNA, 75 bp, Homo sapiens
cgggctcggaacgagactgcacgtcattgaaagaaaatcttgcaaggtgttggacacttactgaagcagagaaga

SEQ ID NO: 549455 - DNA, 100 bp, Homo sapiens
acttccccatctgtaacgaggtgttgagacgagatgatcttccaaaacccaagactactgaagtaattaggaaaggctcaattactgaatacacagcagc

SEQ ID NO: 549456 - DNA, 105 bp, Homo sapiens
gtccgcttctggtggacagattgagcaaagttgtcactcagcccagtccatcagtttctcagcccagtacttctcagagtgaagaaaaagctcctgaattgccca

SEQ ID NO: 549457 - DNA, 100 bp, Homo sapiens
gatcgccaagagatcaaagataaaatcttttgtgaaagtgtataactacaatcacctaatgcccacaaggatgctttcattggatttggaggaaatgtga

SEQ ID NO: 549458 - DNA, 96 bp, Homo sapiens
ccgcgctccaaccgcctcctcctcctcagtaacgcggacaagccatctatgatgcatttgaccgcttcctccataaatacgctaactagttggatt

SEQ ID NO: 549459 - DNA, 83 bp, Homo sapiens
ctgctctccaaggagcatgctcgcagcttgatcagggccaaagcggtcagtgagaaggaagtggactctggaaacgacattta

SEQ ID NO: 549460 - DNA, 75 bp, Homo sapiens
gtccccgaccttgcctgaacaaggattccttcccagcccggttcaaagccatccacttcatccaccagccatggt

SEQ ID NO: 549461 - DNA, 100 bp, Homo sapiens
gtgcgtggggctgcctcgccgcgtctcgccacgctctgcttatgataatgtcaacaaagttcgagtagctatcaagaaaatcagcccctttgagcaccag

SEQ ID NO: 549462 - DNA, 75 bp, Homo sapiens
cctggacgaccacacgcagaccctctttcagtacatcgacgccatcagcaacaagcagggcgagctggagaatta

SEQ ID NO: 549463 - DNA, 80 bp, Homo sapiens
aaccaagggcctccgtctggatttccaaggaagaatttcctctgaagcaccgggaaattcaactactgaggaggttacgg

SEQ ID NO: 549464 - DNA, 74 bp, Homo sapiens
taagaagcctcgtggacgtaacatcttcaaggcatttgttgctatcggggactacaatggccacgtcggtctgg

SEQ ID NO: 549465 - DNA, 99 bp, Homo sapiens
caatgatgggccctcctcctcctgggatgatgccagtgggacctggtctcgtcagcctatctcggcccctctcttttcatgtcctgacaaaaacaaggt

SEQ ID NO: 549466 - DNA, 83 bp, Homo sapiens
ccgtcaaaatccgaaagattcgggccagagacgacaacccgggcctccgagaaacctctgtagaggagcaggatgcaaccgac

SEQ ID NO: 549467 - DNA, 103 bp, Homo sapiens
aatgggatgaaaatctaaaagatgattctcttccttcaaatccaataggaattacatgaatgacagtcttcgaaccaatgtgtttgttcgatttcaaccagag

SEQ ID NO: 549468 - DNA, 88 bp, Homo sapiens
gctggctatcctgcgcctttccactgctctggacctttgtgctgctcctgcaaatggtggaaatgtctccaggcctccagtgaccctg

SEQ ID NO: 549469 - DNA, 75 bp, Homo sapiens
acagcaagtttaaaaatttggaatgcaaattacttcctatgtgttcagagcaacattgttttgttgacacaagca

SEQ ID NO: 549470 - DNA, 89 bp, Homo sapiens
ctgcctacctgtcagccgtgggcaccttcacctgggtctgcacgccctttctggatgatgatgacgacatgggagaggatgaagatgag

SEQ ID NO: 549471 - DNA, 100 bp, Homo sapiens
aaagtgaaaggagttaccaatcagactggacttaagatcatgatcagaagcatcttcctgttcttggaccgcacctatgtgctgcagaactccacgctgc

SEQ ID NO: 549472 - DNA, 101 bp, Homo sapiens
caacgtcgctggagctcgattcacggaggaacccctctcccagatcactgcctactgcaatagttgctgggacaccaaaggcttagaggacagtgtggcca

SEQ ID NO: 549473 - DNA, 112 bp, Homo sapiens
gacgaggaagacgccgaggcctgggccatggaactggcggacgtgggggcggcagccagctcgcagggtggcgacatgtctaagaatgtgagccagtcacagatggcaaaat

SEQ ID NO: 549474 - DNA, 100 bp, Homo sapiens
aagccctgtcccgtggcacagtcagccatggtctgcggctcagatggccactcctacacatccaaggacagaataacgggctcccagattcacaagcccc

SEQ ID NO: 549475 - DNA, 100 bp, Homo sapiens
tggctcacgccttcccccaggacgagctcaaccccatccactgccgcggccgtgggcccgaccgcggggacccgcatcgtgcgagcctccagcgtcttcc

SEQ ID NO: 549476 - DNA, 49 bp, Homo sapiens
ccccaccggaggtttatcacaagaaccacaccttcatcaagcggtccga

SEQ ID NO: 549477 - DNA, 75 bp, Homo sapiens
cttgcagaagacgccgtacgagagatccgtgctcagctcacagagcagatgaaatgcctggaccagcagtgtgag

SEQ ID NO: 549478 - DNA, 90 bp, Homo sapiens
cggcaccatggagtcaccttttagcccgggactctttcacaggctggatgaagattgggtacggtggggattgcagctgctgagcaggga

SEQ ID NO: 549479 - DNA, 75 bp, Homo sapiens
gtataagagagaaaatgaagacaaggttaataaagctgccaaggctatggagttactagtagagaaagcaatcag

SEQ ID NO: 549480 - DNA, 75 bp, Homo sapiens
gcggcccagctgggcgagtatctggaggagaatgctgaccccctgaaggtgtacccgccactgaaggggagcttc

SEQ ID NO: 549481 - DNA, 75 bp, Homo sapiens
ggaagtccgggagagaatacacagagccagtcacaggtagtggcaaaacactcgcttttgtcatccccatcctgg

SEQ ID NO: 549482 - DNA, 97 bp, Homo sapiens
acagctacatccaggagagaatgctgacagtcctgcagataaaccacataatcctatggtaaatgctggagcaattgttgtgacttcactaataaag

SEQ ID NO: 549483 - DNA, 88 bp, Homo sapiens
ctggaaaaaatgacatccagcgacaaggactttaggcgaacagctgcttggagaactacaagtgaagaaaagaaagcattagatcagg

SEQ ID NO: 549484 - DNA, 98 bp, Homo sapiens
ggaggaggaggattcagggaataggagctggggagcccttctgcgccacagtgtcttgggacaaggtgcgcattcctggtgtgctgcagcgattggga

SEQ ID NO: 549485 - DNA, 52 bp, Homo sapiens
agaacagggtggccgcttggtccagatttgctgaaaggtcgtcagttgctcc

SEQ ID NO: 549486 - DNA, 82 bp, Homo sapiens
ccatgtggtttggggagtctgaggccaatgtcagagaaatctttgacaagcatgagtcaagacactgaagttagaagtcggg

SEQ ID NO: 549487 - DNA, 75 bp, Homo sapiens
caagataaagtgattttttgcctttgttgattaactggacaaattcagaaatggagtctccctgtgttgttcagg

SEQ ID NO: 549488 - DNA, 100 bp, Homo sapiens
ggaggaagccctttctcctcggcactgtattctttacctgcttcccaatcccactgatgaggatcagcccatggtttgcctgcaatgagatttcattctc

SEQ ID NO: 549489 - DNA, 50 bp, Homo sapiens
acggaccatcactgaactgggagagaagtgttcaaggagaaacctaaata

SEQ ID NO: 549490 - DNA, 100 bp, Homo sapiens
cttaggcagtgcagtggattactactttattcaagatgacggaagcagatttaaggtctcctctgagcctccggcctccataagacccaaaacagatgac

SEQ ID NO: 549491 - DNA, 74 bp, Homo sapiens
gccgccagagggcagcgagggagcgcgcgggctgcggggccgaaccccgggacccatggatgaaggaccagatc

SEQ ID NO: 549492 - DNA, 74 bp, Homo sapiens
gggaagcggcggcggcaaagggtttgtactacagaaagtgccagttaatttccaaggaagatgttactcatgat

SEQ ID NO: 549493 - DNA, 83 bp, Homo sapiens
ctgactctcggactgagaaacgcaagatacagatccacgggttttagaaaaacaagaattacagcagccaacctatgttgccc

SEQ ID NO: 549494 - DNA, 83 bp, Homo sapiens
gttacagaattagacctttcacatgggaaaaaagatgcttttgttttggagattatttgcatgggtgcaaaagaaaatggttt

SEQ ID NO: 549495 - DNA, 74 bp, Homo sapiens
cttaagagttgtagttactgaccaggtaaagtcagtgataaatcttttgtttgctgcatatactggagatgtgt

SEQ ID NO: 549496 - DNA, 80 bp, Homo sapiens
gaagcgggcggccccggccgcctccgcgagggcaccatggaggtgaatgcaggtctctaattaacagaagatggcaaagc

SEQ ID NO: 549497 - DNA, 83 bp, Homo sapiens
tcaagatattaaagttactgctgttaaaaagcagcgtccgtctccaagagagtatgaagagagtgcgtctgtagggcagggaa

SEQ ID NO: 549498 - DNA, 50 bp, Homo sapiens
cgacatggaacagggactcactggggtcacatcgatcagacaacaacatg

SEQ ID NO: 549499 - DNA, 90 bp, Homo sapiens
caataacaggcggagggtcggcgtaggtggtatggtcaggaaaaagactacaatgtactagtcatggatcttctgggacctagcctcgaa

SEQ ID NO: 549500 - DNA, 100 bp, Homo sapiens
tgtaaatatgcagattatatttctagggacaaacctatcacatttactcagcctgggttactaggtgtctttcagaagctgattgcatccaaagcaaatg

SEQ ID NO: 549501 - DNA, 89 bp, Homo sapiens
tcgctgcagcggccctggcgggtgccctggctaccatggaccatcctgctggtcagcactgcggctggccaaagatgaagaggaagcct

SEQ ID NO: 549502 - DNA, 82 bp, Homo sapiens
aacatcactttgacagcccaatcacgatgaagaggaggcggggagaccctcaccatggatgatgatatcgccgcgctcgtcg

SEQ ID NO: 549503 - DNA, 96 bp, Homo sapiens
tgcgccccaccccggacatgctcagggctgcggccgcccgaagaggagagagcgcgggcctctaggaaggtaacacagcaggatgttaaaaaagag

SEQ ID NO: 549504 - DNA, 100 bp, Homo sapiens
cacgcatcacaagtcgcctgcagccgcccgaagagccaagagtcagtattccggccagcttcacgaagtcagagaggtgcccaaatgtgagtctgcaaaa

SEQ ID NO: 549505 - DNA, 51 bp, Homo sapiens
ttggtgccaacagagttactctgaaagaccacagcaagattctttcattcg

SEQ ID NO: 549506 - DNA, 75 bp, Homo sapiens
cgcctctcccggaccctgcagggttgctgttgaagaaatctggttgcagaacaccacggattgaattggaagaga

SEQ ID NO: 549507 - DNA, 90 bp, Homo sapiens
aaagaaactagtgaaggcgtttaagaaaaggccccagacctaaagcaggaggagcgtctgcaagaactggagagctgttctggactgggt

SEQ ID NO: 549508 - DNA, 83 bp, Homo sapiens
agctcatagtaacttcacctggtaatttcatctgtgccaaagcctccagaggacaagccagaagatgtacatacaagtcatcc

SEQ ID NO: 549509 - DNA, 100 bp, Homo sapiens
gaagagcacgcagagccgcaagctggtggaagcgctgtgcgccgcgggccaccgcgccgaactgctccggttcccggaactcttaaaacgcctagatgac

SEQ ID NO: 549510 - DNA, 100 bp, Homo sapiens
gggtgcgcaaggcgtccaggagtgacctggggctgtggagagcgacccgtggccttgtgtttcagatggccgccaagaacgagtcatgtttgacaaaatt

SEQ ID NO: 549511 - DNA, 100 bp, Homo sapiens
gtcttcccgcgtccgccgattcctcctccttggtcgccgcgtccttggctggcgtagtcatgtgctgttcctggggcttggatgatgtaggggaagcaag

SEQ ID NO: 549512 - DNA, 50 bp, Homo sapiens
gagcgcgaatatcgtcatcgttagaaggttctgccctgatgtttcctgga

SEQ ID NO: 549513 - DNA, 75 bp, Homo sapiens
gacatcttcagattgattgcgttctactgtgtcagtagctccttcgagaactcatagaacggaagaccagctcct

SEQ ID NO: 549514 - DNA, 101 bp, Homo sapiens
gtttggggaagaagatgctgatcaagaagtatctcctgacagagctgaccctgaagctgccttcaaggcggataagaaggcggcacaagaaaagatgatcc

SEQ ID NO: 549515 - DNA, 97 bp, Homo sapiens
cggcggccaatcacagtccactttggacaggacacgttagcgtatgccacagctttgttgaatgaaaaagagcaatcaggaagcagtaatgggtcgg

SEQ ID NO: 549516 - DNA, 100 bp, Homo sapiens
gtaaaagttgcacttaattcaaatgaagaatataacctggaccaagagattttccgcagatttccagtggccccactgatcccttatccactcatcacta

SEQ ID NO: 549517 - DNA, 50 bp, Homo sapiens
agcctgcggagcctgtggggcaggtggaggtttagccgttggaacagttc

SEQ ID NO: 549518 - DNA, 80 bp, Homo sapiens
acctccactccatcctgaaggctaccaactacaatgagtaaaggtgggattctatccaaagcttgtgattatatccagga

SEQ ID NO: 549519 - DNA, 100 bp, Homo sapiens
cagaatacagagatatggaatcagctcaaagcattcagcaaaccagggttccaaggtgaatgtatagattttacagaagaaacttctgatttgacttcac

SEQ ID NO: 549520 - DNA, 95 bp, Homo sapiens
tgtacgcctagaacagtgccctctgcagctgaataacccttttaacgagtattccaaatttgatggcaagttactggggcttccggatgcagatg

SEQ ID NO: 549521 - DNA, 74 bp, Homo sapiens
ggccaaggatgaagcctcacttcagtccctgtgggccttgctcagagcggagaaagcatttgtttgtacaagat

SEQ ID NO: 549522 - DNA, 100 bp, Homo sapiens
gttccacaggatgtgccaccagaacccaagaagattccgataagaaacacggagaatggggtactaagagaaaagcacgaagctgtggatcatagttccc

SEQ ID NO: 549523 - DNA, 115 bp, Homo sapiens
tcgaaggcgaccttccttgctttcagaatttcacccaggttctgacaggtcaaaatgcagatcttcgtgaaaacccttaccggcaagaccatcacccttgaggtggagcccagtg

SEQ ID NO: 549524 - DNA, 82 bp, Homo sapiens
tttaaggtggtggatgaagaggccatggagaagcaggagcattggtttgaaaaggccctacgagacaagaagggcttcatca

SEQ ID NO: 549525 - DNA, 100 bp, Homo sapiens
ttgggacccaccgctgccctcagctccgagtccagggcgagtaagactttgaccccgacgcaggcttcagtgattgccgcggatcagaagcctgagcact

SEQ ID NO: 549526 - DNA, 132 bp, Homo sapiens
acttgttgctgcaagtcaagctgccttaggcttataacatcacatttaaaagcatctcagcctcccaaagtgccgggattataggcatgagccactgcgcctagcctgttgcagctttttaaagcaggaaaa

SEQ ID NO: 549527 - DNA, 82 bp, Homo sapiens
ctcgatcttgggacccaccgctgccctcagctccgagtccagggcgaggctgaaggtgatgtggccgccctcaaccgacgca

SEQ ID NO: 549528 - DNA, 100 bp, Homo sapiens
gaaggttaccaggtgaaaatgtcaaaactaacagaacatcacaggactatgatcagcttccttcatgttcaggtgacatcagttgcaaggggatgaccga

SEQ ID NO: 549529 - DNA, 50 bp, Homo sapiens
gaaacctccctgcccggcaccaggtgatgatgaacagtctacacagatgg

SEQ ID NO: 549530 - DNA, 98 bp, Homo sapiens
agaaaaacggcaacgtgtaatcagaaggcacagattagaggaaggaagagacttgcctaacgatatctcacctctactcccatgaattcacctttgat

SEQ ID NO: 549531 - DNA, 82 bp, Homo sapiens
gtggcccctgcagcggaaccggacccagtccctgagccgcccctacacccacaggtcagtcttcactgtttccaatggaaga

SEQ ID NO: 549532 - DNA, 90 bp, Homo sapiens
cgcggaccggcgtccccggcgcgaagaggctggactcggattcgttgcctgagggtttccaggcctgaggtgcccgccctggccccagga

SEQ ID NO: 549533 - DNA, 82 bp, Homo sapiens
gggattgctggctacagcttcagaagaccgaagcgttcgtatctggaagatcgggcccgggacacccagacagatgagattg

SEQ ID NO: 549534 - DNA, 83 bp, Homo sapiens
gcccagatgacaccaagcccatctgaaatgttcattccggcaaatgtggttctgaaatggtgtgttttatggcccagaacatg

SEQ ID NO: 549535 - DNA, 100 bp, Homo sapiens
tgcaaaacctgtggatacagagggacagaggcctactgtacatggcacatggacaggcgacactaacaggtgaagatctcgggagaccatgactaagaaa

SEQ ID NO: 549536 - DNA, 75 bp, Homo sapiens
agccgacaaggcgttcaagcgaaaacatgaccgctgagcccatgagagcccaaatcttgtgacaaaactcacaca

SEQ ID NO: 549537 - DNA, 60 bp, Homo sapiens
ttggaagtttcctgaggcctccccacccatggagaactatggagtcttactctgtcgccc

SEQ ID NO: 549538 - DNA, 82 bp, Homo sapiens
cacctccacatcgccttttgccacctttccctttatttccggagacagaatgttgctgcgggatgtaaaagctcttaccctc

SEQ ID NO: 549539 - DNA, 97 bp, Homo sapiens
gggtcattcagcagagcgtgcgcacgatgctccagaccttgtatgattacttctggtgggaacgtctgtggctgcctgtgaacttgacctgggccga

SEQ ID NO: 549540 - DNA, 100 bp, Homo sapiens
cttagacttccggaaggactttggcgaggcgtcgagggcgaggcccccagcagtgagactggcacatccctggacagcccctcagcctacccccagggcc

SEQ ID NO: 549541 - DNA, 98 bp, Homo sapiens
ttttaaagagcagactagacttctcaagagaaggatatgagaatttctttgataagctccaacaacatagcatccccgtgttcatattttcggctgga

SEQ ID NO: 549542 - DNA, 96 bp, Homo sapiens
cagttcttacaattctcaaagcatggcccatccgcttacaaacacgcagatggcaagaagattgatggcaggagggtccttgtggacgtggagagg

SEQ ID NO: 549543 - DNA, 82 bp, Homo sapiens
cgccgcctctcgctgttcctggtcctggtggtcctctcctctcttgcaaattgtggctactaatttgccccctgaagatcaa

SEQ ID NO: 549544 - DNA, 101 bp, Homo sapiens
aggaggacttgcagaagtaccacaacagggacacctggttccagctgcagcacgtggacgctgactcggaagtgcaggctgatcagctgaccgaagaacag

SEQ ID NO: 549545 - DNA, 76 bp, Homo sapiens
catccaggcaagtcagtcctctgctcgcatctcagtcttggtcttctagttccagtgtcagatgaggattctgatg

SEQ ID NO: 549546 - DNA, 100 bp, Homo sapiens
tgacatgggttttgaaccccagaaaatgatgcatcctgttgccagcagtaatccagctttctgtgggcctggcaagccttcctgcctcaatgaagatgcc

SEQ ID NO: 549547 - DNA, 75 bp, Homo sapiens
tctccgggagccgtccgtgtcaccgccggaacctggcgcaggtgtcgtgaaaactacccctaaaagccaaaatgg

SEQ ID NO: 549548 - DNA, 75 bp, Homo sapiens
ctgacaagggtccagcctccgatgctgtaggttccatgaggacaggccttgagtctgtcctggtctctggaatca

SEQ ID NO: 549549 - DNA, 100 bp, Homo sapiens
aaggtgaagccaagaacagcattactgattcccaaatggatgatgttgaagttgtttatacaattgccaagcccaacaactctggggaagccccctcgag

SEQ ID NO: 549550 - DNA, 100 bp, Homo sapiens
cagctaggactcatgactactgaggattctgtggcagtgcccagtctgcgctcctcagaccaccggcaggtgaacagcctgatgcagaccgaggagtgcc

SEQ ID NO: 549551 - DNA, 97 bp, Homo sapiens
aatgtttgtgacataaattcagtgcatggcttgtttgccacaggaaccatagaggtcgagtcccagacaccagaagtctgaatttggagaaggctgg

SEQ ID NO: 549552 - DNA, 101 bp, Homo sapiens
ttcaacttcatcttaaagagagaatggctgctttggaagataaggctgggctaagcagttccaagctttccatgtccaaggccctccctctcaccaaagtg

SEQ ID NO: 549553 - DNA, 51 bp, Homo sapiens
cccacagtgggcttcaacatgaggaaggtcaaaatgcagatcttcgtgaaa

SEQ ID NO: 549554 - DNA, 82 bp, Homo sapiens
cctggacctggtcagagcgcggatggccgtaaccccgaaggaaatgtgacagaccatgccaccactgccctgctccactatc

SEQ ID NO: 549555 - DNA, 82 bp, Homo sapiens
agagattcatctttcatgcagtgacatgttgataaaaaatgatggtgactattatatggttaaaaagattttggaggaaaac

SEQ ID NO: 549556 - DNA, 74 bp, Homo sapiens
cttttcaccgcggccatcctgcaggcacagttgccgattacaggccggaaggtggtggtcgtacgctgtgaagg

SEQ ID NO: 549557 - DNA, 101 bp, Homo sapiens
gggataccaagtggtgagaagtagaacatgtcaagatattgacgagtgtgagagtggtattcataactgcctccccgattttatctgtcagaatactctgg

SEQ ID NO: 549558 - DNA, 75 bp, Homo sapiens
caaagaagtgctatctggaaagagagaattttgagactgaagaagtagaactttccttctccaagaatggagaag

SEQ ID NO: 549559 - DNA, 100 bp, Homo sapiens
gtggcggcgatggcttctctttccacctggagcagttaccagatgtatgctactcatggtgggtcctggcttccctaaagataattggaagacttcattg

SEQ ID NO: 549560 - DNA, 83 bp, Homo sapiens
gagtcatcggacgccagaatctgatcttcagtgtctattggatttttccaagagaaagtttgtaaaattccttacactgtaga

SEQ ID NO: 549561 - DNA, 83 bp, Homo sapiens
gaagttttctactgtaaagtcaccaacgagatcttccgccactacgacaccggcagctgctgaaggacagcttcatggtggag

SEQ ID NO: 549562 - DNA, 50 bp, Homo sapiens
ctgggatgtgccttagaggattatggactaaatgtgttaaatgggcttgc

SEQ ID NO: 549563 - DNA, 98 bp, Homo sapiens
ggaaagcatatggacaggtctacgccacatcacttagtactatactggcaattgctggagaagattttgcaattgttgcttctgatactcgattgagt

SEQ ID NO: 549564 - DNA, 75 bp, Homo sapiens
ggccctaggggcagcgagcaagacagcaagcaggtctgactcccagcaccgcttctggaagcccagcgaggtgga

SEQ ID NO: 549565 - DNA, 100 bp, Homo sapiens
ctttctcagtgcaagcttttaataaaggggcaagttgcagtgcccaaggatttgattatggactcggaaatagcaaagaacaaatttctgccagaaccac

SEQ ID NO: 549566 - DNA, 100 bp, Homo sapiens
ttatagagctggaattaggcaaatatggacagagtggcacagaagatctccggactgaacgattacaaaaaacaacagaacgttttagaaatcctgttgt

SEQ ID NO: 549567 - DNA, 75 bp, Homo sapiens
gcatggtgaagctgctggatgaattgtcccccaacacagatcacctctgcagcctgcacagccgggcctttggac

SEQ ID NO: 549568 - DNA, 75 bp, Homo sapiens
ctgggaaaactgtttcagttgcagactttaggcctgaaagaaagggctattgcaagacacgaagtccgagaaatt

SEQ ID NO: 549569 - DNA, 100 bp, Homo sapiens
atcctcactctgagtacggtctcacagacaacgttgagatgtgttcagagcaacattgttttgttgacacaagcatttagaagaaagtttgtgattcctg

SEQ ID NO: 549570 - DNA, 75 bp, Homo sapiens
gaaaaatctctccccaggcttcaacttcagcacgagtacacgagacaggattgagaaaggagagattcaaattgt

SEQ ID NO: 549571 - DNA, 97 bp, Homo sapiens
aaatgaaagccaactacagggaaatggcgaaggagctttctgaaatcatgcatgagcagaacctaaaggcagacccagaagagctttttacaaaact

SEQ ID NO: 549572 - DNA, 100 bp, Homo sapiens
agggttatgtctggaatggaggaagcaacccacagcctcttagcaaatatccggctgtgatcaatgatatttcattctggttgccctctgagaattacgc

SEQ ID NO: 549573 - DNA, 75 bp, Homo sapiens
gggaatggtgcaggcaggcgctgagaaggacgcgcagtccatctctctcagaaaaatggctacaaacttcctagc

SEQ ID NO: 549574 - DNA, 80 bp, Homo sapiens
ctcccaaagtgctgggattgcagatggagatggcgatggagatggagcaactggaaagaagaagaaaaagaagaagaaga

SEQ ID NO: 549575 - DNA, 98 bp, Homo sapiens
cctcgaactaaacaaattcatcccagaaatctaagagatcctggcaaagctctgtagcattttgcatactgattctctggcagaagttttacagtggc

SEQ ID NO: 549576 - DNA, 106 bp, Homo sapiens
tttggaagagggagtcaccactggacctccaaggaagccacgtgcagacatctacaaccttcgatctcctgacgaatatagccagtaccaacgtatgctgagcacg

SEQ ID NO: 549577 - DNA, 82 bp, Homo sapiens
cggcttcaggaggcccaagacaccacagaagccctccgagcccagagccgctcccgaggccccggcgcggcgcgagggcgcg

SEQ ID NO: 549578 - DNA, 98 bp, Homo sapiens
cagggccagtatcggagtttggtggtatgcaagattacaattatgtgtgggccaactgttttgagatcacattagaactgtcttgttgcaagtaccca

SEQ ID NO: 549579 - DNA, 90 bp, Homo sapiens
tcgagtgacctttacaccaggaaaaactcctgttgatggggtgaaatgattattgcagtttcgaggggagatgatgtcacaagatctcga

SEQ ID NO: 549580 - DNA, 95 bp, Homo sapiens
cttgccctggtcaccaacaaacccagagctgcctcagcttatgcagttggagatgtcaaatgcttagatcaagaagctactctagaagtcggagc

SEQ ID NO: 549581 - DNA, 101 bp, Homo sapiens
cagctgcagaaggacaagcaggtctaccgggccacgcaccgcctgctgctgctggagttgcatgctgagaatttgaaaaatgaagatgatgtagacactgg

SEQ ID NO: 549582 - DNA, 82 bp, Homo sapiens
gaagacttgaacttaatacagcaagaaagaccatcaagtttaccacacatgcagatgacaatccaggctctccaggatgaat

SEQ ID NO: 549583 - DNA, 75 bp, Homo sapiens
gaatagtacaacaattatgagccgtcacagcctggtctttaaggaggagaagtacttgaaagaggccatggagtg

SEQ ID NO: 549584 - DNA, 98 bp, Homo sapiens
ctcggatgctgatggggctggacctgctggtgttcgcccacgaccatgaacgctgcgatgactggggactagacaccatgaggcaaatccaagtgttt

SEQ ID NO: 549585 - DNA, 50 bp, Homo sapiens
actacagaaacctggtctccctaggtgctgttccagaattcaaagaagag

SEQ ID NO: 549586 - DNA, 96 bp, Homo sapiens
cagcactggactcatggaggctgagcatttattcagttccctgtattgaacactgatatacaaggaatgaatagaagtcaagaaaaacagacctgg

SEQ ID NO: 549587 - DNA, 50 bp, Homo sapiens
gccaccatcgagcagctgtgcacagcatctggaatcaagagacccatggc

SEQ ID NO: 549588 - DNA, 100 bp, Homo sapiens
tgggttccatgtgatggtggagtaggaggcaggtctccgcgttcataattggacccttgaagacactcttcagtggttgatagagtttgttgaactaccc

SEQ ID NO: 549589 - DNA, 98 bp, Homo sapiens
gtcaaagttttgaagaaacaacaagtcaaattgatgattcattttctaccaagtcttgcagagtttcaggaggcagaccattaaaaatctcaagtgac

SEQ ID NO: 549590 - DNA, 100 bp, Homo sapiens
gaaagacaagcttcttgcaatgggatcggggaactttggcgaaataaaaggcctcggcaagacgcgcaggaagaccagcgcgcgggatgcgtcccccacg

SEQ ID NO: 549591 - DNA, 100 bp, Homo sapiens
tttcatgcagtgacatgttgataaaaaatgatggaagcagaacatcagagagccatgcagagacgtgctatccgtgatgccaaaacacctgacaagatga

SEQ ID NO: 549592 - DNA, 104 bp, Homo sapiens
tggacgagtcttggattcgtgaacagaccacagtggaccacttctggggtaactaggatttctacctcaaccgcgagacctatgcaaggacggtgtggaccaac

SEQ ID NO: 549593 - DNA, 100 bp, Homo sapiens
gtagaacactctctccccagaaatccaacttctcaaggggatcatcgtcttgctcttcttttatctcagtttgtgggtagccagtcagtccgggagctgc

SEQ ID NO: 549594 - DNA, 100 bp, Homo sapiens
caggagttggtggtgaccccgcccagttggcccagaggatctcttctaacatccagaagatcacacagtgttatccaaggattaatgtcgtgcttgctgg

SEQ ID NO: 549595 - DNA, 100 bp, Homo sapiens
ggactggtgcgaggagaactactccgtgacctggtacatcgccgagttctatacagtttatgtaacttgatggaagaaaatggaattactccaaaaagac

SEQ ID NO: 549596 - DNA, 82 bp, Homo sapiens
cctaagccatgcacctctgtgggggcaatgggctgctgacccagacatgccaggtcatgctggccgactggtgtttgggttc

SEQ ID NO: 549597 - DNA, 83 bp, Homo sapiens
atttcagagctgcaaaattatcagagagtgataatgaactctcaagtggaacaggtgatgtgtctaaggattgtcctgagaag

SEQ ID NO: 549598 - DNA, 90 bp, Homo sapiens
ttttccttcctaggagaaatcgaggagctgcggctctaccccccggaagaagtatatcagagaattccctggtagcaatggacttctcag

SEQ ID NO: 549599 - DNA, 75 bp, Homo sapiens
ccgggattcgcggcccggagctcgggaccggttggcagtggcaatgacccctggtcagcctggagtgcctccaaa

SEQ ID NO: 549600 - DNA, 82 bp, Homo sapiens
gtgctgcaccgtgtgcctggacctgcccaaggcctccgtgtaccaggtcttgagtcaccacgtccgaatataattcttgggt

SEQ ID NO: 549601 - DNA, 100 bp, Homo sapiens
gtgtcctgggatcgcgcttctgaaaaagctcacctcacaacgcctcctccggacctaaatcgcgcaccagaatatgatgaagaatgggctaagaaaattc

SEQ ID NO: 549602 - DNA, 88 bp, Homo sapiens
agagtccttcaaaaatgccagaaatcaacgccaagcgggacgaccctgggacagtctccactggggcagatccagctgaccatccggc

SEQ ID NO: 549603 - DNA, 75 bp, Homo sapiens
agtctcagatgagctcatgagtgaaaggtgaggaaaatagcagctgaatactatgacaacctccctcactacaat

SEQ ID NO: 549604 - DNA, 50 bp, Homo sapiens
tgaacctgcaagagaacggcatccaggtaagtggagaaagagttgaaggg

SEQ ID NO: 549605 - DNA, 82 bp, Homo sapiens
agatgtcggagacacggtggaaacgcttatggtgctggagaatctggtaaaagcaccattgtgaagcagatgaggatcctgc

SEQ ID NO: 549606 - DNA, 82 bp, Homo sapiens
tttgatccagaacttgcagcaacaatagagatggatttataaaagctattggtcctgctgatgttattcaaagacagttttc

SEQ ID NO: 549607 - DNA, 99 bp, Homo sapiens
caaatgctccttctcctggagacgcaactcaagggtgaggtggctttgaccccgggttgcccggccagcacgaccgaggaggtggctggacagctggag

SEQ ID NO: 549608 - DNA, 83 bp, Homo sapiens
ctggcggcggcgggtcaggagcagccgcagcgacggcggcgacagcagcatcaagatggtgctcatgtggaccagtggtgacg

SEQ ID NO: 549609 - DNA, 100 bp, Homo sapiens
agccggacttttgaagaatgattcgtgaatccggaatgggtgacagcgtcatcacggcattttattggtgattttacaacgagatgctgctctccatagg

SEQ ID NO: 549610 - DNA, 75 bp, Homo sapiens
ttgcagcatccacattctcttcagatagtaagaaagtatacgcctcttcgggacagtcattttgtttactcattc

SEQ ID NO: 549611 - DNA, 100 bp, Homo sapiens
gtctcacggaccacggcggcgcccgcagctcctcaccggagggagccatggatttgctgcgggagctgaaggccatgcctatcacgctgcacctgctcca

SEQ ID NO: 549612 - DNA, 100 bp, Homo sapiens
cctgacctcctgtgggttcccaaacactaacttgtttccctgggaatttggaggtgggttcgaaaaagcttacggagttcctatgctagtcagcatagtc

SEQ ID NO: 549613 - DNA, 75 bp, Homo sapiens
cagggcagaaatagcgaccatggcgaggcctatatgaacccaatagcaatggcgagatcaaggggtccaatccag

SEQ ID NO: 549614 - DNA, 75 bp, Homo sapiens
aggatgttcagcagcgcggcagagtcatggggaaactctcctccagggtcttcctggatcacaacgccctccccg

SEQ ID NO: 549615 - DNA, 100 bp, Homo sapiens
gagaactggaaggctatgataaggctcatgctgaagattcggttatggaccatcatttccggaagccagcaaatgatataacgtctcagctggagatcaa

SEQ ID NO: 549616 - DNA, 100 bp, Homo sapiens
ctttcttagagcacaggctgctttgtttggatcctacagagatgcactgagatacaaacctatgcccagcctacagagtctgagaaggaaatttataatc

SEQ ID NO: 549617 - DNA, 75 bp, Homo sapiens
ccactggaggagatgaggaaggctgccgaggatctggaaattgcccaacagcgccctggaatcctgctccttcgc

SEQ ID NO: 549618 - DNA, 100 bp, Homo sapiens
gagagattctgccttttgatcctgcagcgcctagaacactgcctgtaacgtggaaggtgttcgatctatagagttttgtcgaatgaatgaatgaagccga

SEQ ID NO: 549619 - DNA, 83 bp, Homo sapiens
cgagaagagccgcagtgagttgggcaggttcttggccaagcaggaattcgaatttagagtttaatttctcagagcattctctc

SEQ ID NO: 549620 - DNA, 74 bp, Homo sapiens
cttctgcaaatacagagactcggattaaaggattaaactgcaaatatctcatgaagctgctgcctgtatcactg

SEQ ID NO: 549621 - DNA, 75 bp, Homo sapiens
cgcgccttcgcccagaagatcagcagaaacgaggatgcagtcaatcagatggccgttactccctttccagtgcca

SEQ ID NO: 549622 - DNA, 90 bp, Homo sapiens
ctcattgccacgcgcccccgacgaccgcccgacgtgcattcccgcaccttctagccaccatggcaacctcatctgaagaagttttgctga

SEQ ID NO: 549623 - DNA, 99 bp, Homo sapiens
tggaatgtgaagagacaggaggcagcagacggacatccaggtgttctttgcagaagatgtgggttcaaacaaaggtgcaatcattggactcatggtggg

SEQ ID NO: 549624 - DNA, 83 bp, Homo sapiens
cttgtccttgctggtgcatgcgtcgtcggcctctgggcagcagattactttctatgaagacaaaaattttcaaggccgtcgct

SEQ ID NO: 549625 - DNA, 51 bp, Homo sapiens
ggctctggtgtttgccatcaagcacgagtacacgagacaggattgagaaag

SEQ ID NO: 549626 - DNA, 75 bp, Homo sapiens
tagaagaggttgaatgactttcagtggccttttcttcacaggctgctctttggcgtaaattgcaatcgattaggg

SEQ ID NO: 549627 - DNA, 90 bp, Homo sapiens
caagcctggaagaactcgtcatgctctttgtagcgtggtgcttctgttgctcacaggaatgtatcctgtcaggtataatgtcagtgaatg

SEQ ID NO: 549628 - DNA, 100 bp, Homo sapiens
cgcccctccgagtacccgggttccaaacccctagccacgacatggaagaatttttgcaacgcgccaaatctaaactgcaccttatgaagctaggcagccc

SEQ ID NO: 549629 - DNA, 74 bp, Homo sapiens
ggccttccagtacacagacgagcatggggaagcacttgcacctcctgcgccgccgccccccatccaaggatatg

SEQ ID NO: 549630 - DNA, 100 bp, Homo sapiens
ggtcttgctatctgaaatattgcacctactatgcaaacaaatgaatgaagcccaaactgccaaggagtttattaaaatcatagagaatgcagaaaatgag

SEQ ID NO: 549631 - DNA, 90 bp, Homo sapiens
cttttaagcaaggaaattgaactaagaaatggagagctcccctcccacccggtcactccgtccagcaagcacgcagacagcaagcccgcg

SEQ ID NO: 549632 - DNA, 100 bp, Homo sapiens
ctgtggatatctccatgctcagctctctggggttgtggacttcctgctgaaggccatcatgcgcaccatgtggttcgccggcggcttccaccgggtggcc

SEQ ID NO: 549633 - DNA, 75 bp, Homo sapiens
gaacacccccccatggaggcgaggtagagttggggtcgcagaacttgaaggtgcacattcttgatactgaaagtt

SEQ ID NO: 549634 - DNA, 100 bp, Homo sapiens
agcctcttcgagcgccgcggacgcgtcatcgagtgtgacgtggtgaaagagctcccagctcctccagcagccgacaggaggcccgtcaagatgcaggcag

SEQ ID NO: 549635 - DNA, 50 bp, Homo sapiens
aatcagccttttcacgctcaagcttatatcaaaggtgggtggatccttag

SEQ ID NO: 549636 - DNA, 82 bp, Homo sapiens
accaaaaccgtgaatggtgtctggaggagtgagagccggcagtgcctggagaagttccctgtgatccagcacttcaagttcg

SEQ ID NO: 549637 - DNA, 50 bp, Homo sapiens
agccatagtacctacagcagcactccagatttttggaagtaccagcacag

SEQ ID NO: 549638 - DNA, 82 bp, Homo sapiens
gcccgcgcctgggctgccggcacttcgcggcaggtgttgacttcaaaatcaaaactgtagagctaagaggaaagaaaattag

SEQ ID NO: 549639 - DNA, 50 bp, Homo sapiens
gtaaatgggaagctatttcctttgcctcatgcatcggaaggaatcaaccg

SEQ ID NO: 549640 - DNA, 137 bp, Homo sapiens
ggaaataccatcgtttcttgggtcgtcatttcccccgcttctatgtcctgtacacaatcttcatgaaagggttgaaaggaggagcaggaggtactgatggacaaggaggtaccttccggtacacctttcatggcgat

SEQ ID NO: 549641 - DNA, 100 bp, Homo sapiens
ggaggagttggaggagcatgtgtcccatgtgctgagggtgtaaatggaggagaggagtctgtaaacctgaatgatgcagatgaaggattttcatcagggg

SEQ ID NO: 549642 - DNA, 90 bp, Homo sapiens
agaagactgatggagcaggcttgcaatattaaagctagacagcaacaagcagaattggcccaacaggaatggcttcaaatgcagcaagct

SEQ ID NO: 549643 - DNA, 74 bp, Homo sapiens
gcaacatgacagaggaccatgtgatgcacctgctccaggtgtggattgaagctgctcttcagatcttctattcc

SEQ ID NO: 549644 - DNA, 100 bp, Homo sapiens
gatagtcctgaaaagatatatgaaagaacaatggccgtccttcagattgaagctgaaaaggctgaattacggccgttaattaaggaaaagttgagccagg

SEQ ID NO: 549645 - DNA, 75 bp, Homo sapiens
ctcccgagtggctgggattacaggtcagcagcacagtggccatggaaaaagaaaaactctacagcatatttccga

SEQ ID NO: 549646 - DNA, 83 bp, Homo sapiens
ggggggtaccacacaacaccccagcaaacctccgggcccccaggcatggctagctcggttttaaaatcaaagatgggaaaatc

SEQ ID NO: 549647 - DNA, 82 bp, Homo sapiens
caggatttcaaaaccgacctgaggtttcagagcgcagccatcggtgcgctgcagtcaggatggctaaaggtgaccccaagaa

SEQ ID NO: 549648 - DNA, 100 bp, Homo sapiens
tgaagctgggaggcaaaggctacaagctgtccccagaggactacacgctcaaggtgttggcagagctgaaagagtacgcaacagaagtggatgtggactt

SEQ ID NO: 549649 - DNA, 82 bp, Homo sapiens
cacacggtggggcccaacgaggcgctggtggtttcagtttggtgccctggttgtcagatgttggaaagcagtaggacggaac

SEQ ID NO: 549650 - DNA, 109 bp, Homo sapiens
cgcggtttgtcgccagaaggaagatggcggatctggaggagcagttgtctgatgaagagaaggtttatgaaggcgagcgtgccatgacaaaggataacaacctgcttgg

SEQ ID NO: 549651 - DNA, 74 bp, Homo sapiens
gatataccagaccctggagtgaactggattccatgtagagacccctggaggagattgatggcaacgctctgctg

SEQ ID NO: 549652 - DNA, 139 bp, Homo sapiens
ctcggctcaccacaacctctgcctcccggattcaagagactctcctgcctcagcctcccaagtggctgggattacggaaccaccgggaggaactgggccattctaacacccgttgctaccatgctggccacccgcctct

SEQ ID NO: 549653 - DNA, 78 bp, Homo sapiens
ggagctgaatctgccgcagctagaaatgctcaagaaccagctggaccagggccgttgctccagggagaactgcaaata

SEQ ID NO: 549654 - DNA, 98 bp, Homo sapiens
gcccctggctctgctcccccagactctgttggatcagaaggtcaaggagggagccatggatttgctgcgggagctgaaggccatgcctatcacgctgc

SEQ ID NO: 549655 - DNA, 50 bp, Homo sapiens
ctcaaacgagagtcagcctttaacggtcatggactgtagcatgccactga

SEQ ID NO: 549656 - DNA, 51 bp, Homo sapiens
cattgactatgcagcctaatggtaaagcttcagcgactgaaggagtgtgga

SEQ ID NO: 549657 - DNA, 83 bp, Homo sapiens
cttcaacaccaccttcatctccaccatcggtcagcccaaggccaaccccactgtcactctgttcccgccctcctctgaggagc

SEQ ID NO: 549658 - DNA, 100 bp, Homo sapiens
ctaaagcgattcttgtataaaaagttaccaagttgtttttcagaggcaccaaataatgtcatctgaaatgttgccagcatttattgaaacttctaatgtt

SEQ ID NO: 549659 - DNA, 100 bp, Homo sapiens
aattagattacagcgatggggacacagaaggggtgagcccctccagactccgaataggagatcaagagtttgattcattgcctgctttactggaattcta

SEQ ID NO: 549660 - DNA, 83 bp, Homo sapiens
catggctgaccacccctaaaagcacctggccccgctacagcaaaccagggaaatcctcattgacgattcaatttgttgaaggc

SEQ ID NO: 549661 - DNA, 100 bp, Homo sapiens
caaaggaaaagaggactggagtggtttgtctgtgatggctggaagttcctctgtaccaggttatcctgaatacatgtctaacaattttccttgcaacgtt

SEQ ID NO: 549662 - DNA, 83 bp, Homo sapiens
gaaacaatcgtggctacaaaaatcaatctcagggctacaaccagtggcagcagggtatttgtcccatcagatgaaaagaagaa

SEQ ID NO: 549663 - DNA, 75 bp, Homo sapiens
cttatgcattagctgaacatctttcagagttgtatccctctctagatgagaccacctatgaaagactagcagagg

SEQ ID NO: 549664 - DNA, 100 bp, Homo sapiens
gttcaggaaggattcctgagattccaggaggaagtactggcgaagtgctccatggtcacagaattttccacactccttgacagaggtgcttaacccttat

SEQ ID NO: 549665 - DNA, 75 bp, Homo sapiens
ccgggattcacgtgccagagttgagaaagatcagtctaaagaaaaggagaagaaagtgaaaaaaacaattccttc

SEQ ID NO: 549666 - DNA, 100 bp, Homo sapiens
gcaagaggtggagtccgttcttgtgggtgctgctgttctgggtgcctgtgcctcaggggatttcgcttctgtacagtatgaagtgtaacagaacagactt

SEQ ID NO: 549667 - DNA, 82 bp, Homo sapiens
cgagctgagtggttgtgtggtcgcgtctcggaaaccggtagcgcttgcagcatgaataactgaagtgaagtgatggactccg

SEQ ID NO: 549668 - DNA, 101 bp, Homo sapiens
gactgcacagtagatggccacctctacctccacagaggcaaagtcagcctcgtgattcgtgtgagggatgacaagatgcctttggcgcaccttgcaatagc

SEQ ID NO: 549669 - DNA, 75 bp, Homo sapiens
gcggaaggccctcaacatcccggagcagctgccacaatgggacatgtgcaactgctgatgcaaggaatcccctgg

SEQ ID NO: 549670 - DNA, 75 bp, Homo sapiens
ttttcaactctgggatcacctgatcatttcatgcagtcattggagaaatcgatgaagaaacagattctgcgcttg

SEQ ID NO: 549671 - DNA, 100 bp, Homo sapiens
tttctccccacccttgccctacttggactcttgattggaatgttctccctgcagcagtcagcccaaaggaagatatccgtggaatacaggagttcttgga

SEQ ID NO: 549672 - DNA, 89 bp, Homo sapiens
ctttcgaatgctccacgccctcctgcgatctagaatgtcactcagcctctgaagaagcttcgggttcagactcaggcagtcagtcggaa

SEQ ID NO: 549673 - DNA, 74 bp, Homo sapiens
ttttattccacgaggaggagtacctggaaattagaagaagaagaggacagtgctccagtgaaagtggaagaaca

SEQ ID NO: 549674 - DNA, 96 bp, Homo sapiens
cagagaacagccctccatcttgcagcccagaaggattttaagcttgactttggcaattcccaaggcaaaacaagtcaaacttggcatggagggata

SEQ ID NO: 549675 - DNA, 98 bp, Homo sapiens
aaagcctttccaactggacagcaccatgtccaccaaagcggagcagtattctcgctgaagtctgttaattctactttttgagtacttatgaataacca

SEQ ID NO: 549676 - DNA, 99 bp, Homo sapiens
ggccgaccagatgacaaagcaattgcagcagaacatcgagtgttggataacttctctgacatagtagaaggtgagaaagatcagtctaaagaaaaggag

SEQ ID NO: 549677 - DNA, 100 bp, Homo sapiens
gaagtaccacaacagggacacctggttccagctgcagcacgtggacgctgactcggaagtgcaggatgctttggagtctgcaatgaagaatggcctgtgg

SEQ ID NO: 549678 - DNA, 75 bp, Homo sapiens
gcaaaatgttggataaatatatctatggagcacaggttaatgactccagagagtaagatcagattcgtccacaaa

SEQ ID NO: 549679 - DNA, 100 bp, Homo sapiens
aaagaaacacttggagagcactgagtttagtaataggtgactgccggaaaaaagggaactttgaatattgtcaagatgttccatttaagcagacctcttc

SEQ ID NO: 549680 - DNA, 100 bp, Homo sapiens
tgctatgaagccagctaccagcccctcgaccccgacaaatgcgacaggttcttcacgtacggtaattttccattagaacagcatctgaaacaaattcacg

SEQ ID NO: 549681 - DNA, 100 bp, Homo sapiens
cggagacgccggctgctcctcccctccccgccgcactctcgagtggaccctgaggagctcttcaccaagctcgaccgcattggcaagggctcgtttgggg

SEQ ID NO: 549682 - DNA, 74 bp, Homo sapiens
cttctgtcagcaggacaatttccctgaactaagcgaggtgcaagaaagcctttgaggtgaaggtgtatgaaagt

SEQ ID NO: 549683 - DNA, 75 bp, Homo sapiens
gggagctgctggccgcggcgtgggcagttcaggggctgggcggctgaggttctgtggacaatcacaatgggaatc

SEQ ID NO: 549684 - DNA, 98 bp, Homo sapiens
agggctcctgcgtggccagcgagacttccacaggcacatcggtggccgcctccttctttgcacggatttttttcccaggaagccatcccgtcagaggg

SEQ ID NO: 549685 - DNA, 89 bp, Homo sapiens
gtggacccagacaccggtgtcatgagcaggaaggaaccgctggaaacactgaagaggttcaagcaattcttctgcctcagcctcccgag

SEQ ID NO: 549686 - DNA, 100 bp, Homo sapiens
gactcaggacggacaagcacagtcttcggaagaccaaactagagtcagaacgaatactagcatcagtggggaagaaacctccccaggaaattggaattaa

SEQ ID NO: 549687 - DNA, 83 bp, Homo sapiens
gcgtgaccgagagcgcgaatatcgtcatcgttagaagctgatcttgcatctttaatggataaaacatttgagagaaagttgcc

SEQ ID NO: 549688 - DNA, 75 bp, Homo sapiens
agagagcttggttaacttgggagaaagtttcatctgtggatggagtattggcgtttactgaagcatttgaaaggg

SEQ ID NO: 549689 - DNA, 100 bp, Homo sapiens
ctgactcctacttcctctgtatagagcaactgttgaactcagctgcctgtagggtaaagttctttacaaagttcgctggaaaggctatacatcggatgat

SEQ ID NO: 549690 - DNA, 75 bp, Homo sapiens
ggggggcaagggttcggccgtgccctccgacagccaggcccgcgagaacactagctgacgcgtctatgggcgcaa

SEQ ID NO: 549691 - DNA, 100 bp, Homo sapiens
ttcttacgacagggagcccagaagagtcactttgtggcatgtatgacagccatcttaaaccagatgggtgaccagcactactccttctacattgagacct

SEQ ID NO: 549692 - DNA, 82 bp, Homo sapiens
cgccgccgccagtccaaggagcaggatgaagttcgacatgggagagacaatgtttcaacaaaagacagccagaagacaatct

SEQ ID NO: 549693 - DNA, 121 bp, Homo sapiens
gagcccggccggagctgggtctggagacgccgtggcagcctgaacggagtgtgcgacggattgggagagatgctgcaatttgtcagtaatcaagtgggagagttccctgacttgttttcag

SEQ ID NO: 549694 - DNA, 100 bp, Homo sapiens
gaaatcctgtcctgaagactgtaagttgctctaggtcgtaaccagcctttgaaaaaggagaaaccaaaatggaaaagcgattatcctatgacagatggac

SEQ ID NO: 549695 - DNA, 80 bp, Homo sapiens
ggctccgggtcttccagagcgtgaagatcaagatcgcccgtggaccgggagcccgtggaccgggagccggtggtgtgcca

SEQ ID NO: 549696 - DNA, 100 bp, Homo sapiens
accgaattcagaaggatatcgacgtcgtgatccagaagtccagagctgaggactgcctgtttgcaggctctccagcagaactatctcctactactctttc

SEQ ID NO: 549697 - DNA, 89 bp, Homo sapiens
ccgggatcctggagcactcggtcatgtacccggtggactcggtgaaggggatcccaacaagccctcaggattcagaagtgttaaagctc

SEQ ID NO: 549698 - DNA, 83 bp, Homo sapiens
caatcctcacagtgagcctttacagtttttcagaagaagtgaagtcaagatgaagaaccatttgcttttctggggagtcctgg

SEQ ID NO: 549699 - DNA, 50 bp, Homo sapiens
ggctgaccagcaccagccctgatccagaaactggcgatggaatatgagag

SEQ ID NO: 549700 - DNA, 75 bp, Homo sapiens
ggaattggctattctttacaactgtacccggacagcgaccgtcaagagtgaccaagaatatggcccaggtgacca

SEQ ID NO: 549701 - DNA, 82 bp, Homo sapiens
ggagcctcagttggaagcagccgatccagcctgcggagcctgtggggcaggtgcgtgggactcatgaactcaccaatcccgg

SEQ ID NO: 549702 - DNA, 96 bp, Homo sapiens
gacgagattattgagttaaagaagcaaacggggattcagcgtccgatcctttggaacagggactcacgtgaagcttccaggaccagctcccgacaa

SEQ ID NO: 549703 - DNA, 97 bp, Homo sapiens
agcagctgccggagcccgagtggatcggggacggagagaacacgagcccatcaggaaattaaggatgcagacactcagggcgtgtgtcttgcacagc

SEQ ID NO: 549704 - DNA, 100 bp, Homo sapiens
ctctctcaagagaagctgcaagagcaacatctttcctcaccccaaggtcaccccagctctgatctttgccatcacagttgctacaatcggctctttccag

SEQ ID NO: 549705 - DNA, 83 bp, Homo sapiens
aactaccgggaagatttacacagatggaaccagaaaagatacgaggctctaggagaggtcaaaatgcagatcttcgtgaaaac

SEQ ID NO: 549706 - DNA, 83 bp, Homo sapiens
attttgaaaatgctgcacatcccttaatagtcatctacatagggtgatttgtggctcccgagtgagggttgaactatcgacag

SEQ ID NO: 549707 - DNA, 100 bp, Homo sapiens
accagctggacctgcccaaggccaacctcctcttcaaagctgtccctttccccccaacacatcgcttgacatctgaagaagtatttgatttggatgggat

SEQ ID NO: 549708 - DNA, 75 bp, Homo sapiens
tcgacgcggacagcgggctggagcctgacgagctggcggacagagctgtgaaccaaccccgctcacggctaacaa

SEQ ID NO: 549709 - DNA, 100 bp, Homo sapiens
gggccggggacctgcatgtgtgtgcgcgcgaaggagcggaagaatggcagtgctcaaactcaccgaccaggaaacttggatttaactggccagaagcagg

SEQ ID NO: 549710 - DNA, 50 bp, Homo sapiens
tcttggatgaattgcttgctttggagtcttccccagctcctcaggagggg

SEQ ID NO: 549711 - DNA, 100 bp, Homo sapiens
tgaagctgatggtgaatgtgtgcggacacactctggaggttcccctgaaggatgctaaggaatacgctgaatccataggtgccatcgtggttgagacaag

SEQ ID NO: 549712 - DNA, 82 bp, Homo sapiens
gataacgggccgcccccacagcaccccgggctggcgtgaggaacagattatcagtctggtcaatcagatctgcggcaaagtg

SEQ ID NO: 549713 - DNA, 83 bp, Homo sapiens
ccacgacaatccagtttcctgctaatttgcagcttcctccagtgcctccggagccagcgtggtggccatagacaacaagatcg

SEQ ID NO: 549714 - DNA, 82 bp, Homo sapiens
cctgctggtggcaaccgcctacgagacactcaagaagccccatgtgccactcccctgatctgcagcttcggtaggccggtgg

SEQ ID NO: 549715 - DNA, 101 bp, Homo sapiens
gccgcctgccctcagccgcccgctggccgggagcggagcccctgtgggtgctggagaatctggtaaaagcaccattgtgaagcagatgaggatcctgcatg

SEQ ID NO: 549716 - DNA, 100 bp, Homo sapiens
ggatttgatcgtcatcggcaggactgggtggacagtggatgccctgaagagaatttgccatctgccttagtaagtcatgtactaaatcctcaacctggag

SEQ ID NO: 549717 - DNA, 101 bp, Homo sapiens
agctggccaacagcaccatcattgcatttacctcggatcatgtcttactactttgaccgcgatgatgtggctttgaagaactttgccaaatactttcttca

SEQ ID NO: 549718 - DNA, 75 bp, Homo sapiens
tttggatgttggatctacactttctcaagcactgtgatcttcaaattgtgctggagaagagaaacgagttggcac

SEQ ID NO: 549719 - DNA, 87 bp, Homo sapiens
ctcttaagaaatgtatcttgtgtggaaagcatgtagattataagaatgtacaggaaaatatatgcagatgatgaacattcttaagcc

SEQ ID NO: 549720 - DNA, 82 bp, Homo sapiens
atctttccaccgaatgccacctggtttataacaaaagtgtaaacaggaacatcgataagtagtgtaaaaacttgcacaatga

SEQ ID NO: 549721 - DNA, 100 bp, Homo sapiens
ggaagcgtttggaacctgctcagagggacctctatagagatgtgatgctggagaattacgggaatgtgttctcactggcatcttctaaagtactaaagag

SEQ ID NO: 549722 - DNA, 85 bp, Homo sapiens
gataaaaaaaaagaggaattccagaagggccaccccgacctccaagggcagcctggcatttatgtttgaatcatctttaagtctg

SEQ ID NO: 549723 - DNA, 83 bp, Homo sapiens
ggaacaatcttttgttggattgaaacagctaatcgtgagaattatgaagatgatgacctagtaaattctgatgaggttatgaa

SEQ ID NO: 549724 - DNA, 97 bp, Homo sapiens
gccgagggctggaggatgcgttccctggggtccgggcaacagcattattgagaaaagcccttacagaagagtgtggccgtaggtcagctattcacag

SEQ ID NO: 549725 - DNA, 82 bp, Homo sapiens
ggaaagcagcagagtttctacaaatgctagaagctatcaaagcccttgaagtcagtcgtgagatggagaataaagaaactct

SEQ ID NO: 549726 - DNA, 83 bp, Homo sapiens
cccagatccatttacactttacacctcccgcgacgatgcccctcaacgttagcttcaccaacaggaactatgacctcgactac

SEQ ID NO: 549727 - DNA, 74 bp, Homo sapiens
ggcccggatgcaggacagacccctcaggcctccccatggccacccatggaccagtcggcattcacttcctccct

SEQ ID NO: 549728 - DNA, 75 bp, Homo sapiens
ctgatcaccgttccagccccaacgtagcaaccctggggctggatggtgagattggaaactttgaagtgggcaagg

SEQ ID NO: 549729 - DNA, 90 bp, Homo sapiens
gacagaatcaccagcactggctgaaggttatcaagactctgattctgccccggctgcagcaggaaggggagcggatccgcagtgtgctgg

SEQ ID NO: 549730 - DNA, 87 bp, Homo sapiens
catataagatctggagacccaatctcagagagtggcaacagtgtgaaaagactgaaaccggaccctgagccagatgacaagaatcaa

SEQ ID NO: 549731 - DNA, 74 bp, Homo sapiens
atttatatagagatgtgatgttggagaactacagaaacctcgtctccctgggactccctggaggaaaagcggaa

SEQ ID NO: 549732 - DNA, 90 bp, Homo sapiens
ctcatcttggccatcactatacacaacgttccagatatcagttttagagaatgtggcgtggagaaattctcaaggaaagagtaaaatgct

SEQ ID NO: 549733 - DNA, 100 bp, Homo sapiens
ggaaaactagctggaagacacccaagtactcttaaagcaatccccgtgggtctttttggagttcctgagctgagtgccccagaaggatttcatattgcac

SEQ ID NO: 549734 - DNA, 100 bp, Homo sapiens
gaagttcacgactactagaaggggaggggagtggaaaggctctcagtgaaaaaggactttgcctcccgggccaaactggcagttcaaaaactagtacaga

SEQ ID NO: 549735 - DNA, 98 bp, Homo sapiens
agggcctggccgtggagctgatggaacgcgtgatgatggagtttgtgagggaaacctgctcccaggagttgaagtgctgggtaggccaggtttcagca

SEQ ID NO: 549736 - DNA, 83 bp, Homo sapiens
cctgggccttgctgccaggaagcttcggccccgcagctcggcttgctgcggtctcaggagggtgaggacaaaatcttcttaat

SEQ ID NO: 549737 - DNA, 129 bp, Homo sapiens
ttcggcaagatccagatcgggatttacgtggagatcaagcgcagcgatggatgatcacggacgtgcagctcgccatcttcgccaacatgctgggcgtgtcgctcttcttgcttgtcgttctctatcact

SEQ ID NO: 549738 - DNA, 100 bp, Homo sapiens
catcttcctgcacacagccaaagtctgcaaagagctccttaataagcatttatagtcagtttttggcagcaatagaatcactaaaggcattctgggatgt

SEQ ID NO: 549739 - DNA, 76 bp, Homo sapiens
tgctccagcctggcttaatttccctactccaccatcatcaacaaaggagtagatcccataatagatcacgttcaag

SEQ ID NO: 549740 - DNA, 99 bp, Homo sapiens
tgaatcctggtcctattgtggagaacgccagatcaagtgtcccaagtgtgataagctgttcttgagaacaaatcacttaaagaagcatctcaattctca

SEQ ID NO: 549741 - DNA, 95 bp, Homo sapiens
gccacctgagtggcgcggcggtgtcagggtctggccctcactgcaggacaggttcagctcactgaaaggggtcccaacagaggtgaagatccaag

SEQ ID NO: 549742 - DNA, 50 bp, Homo sapiens
ctgaccttcacctgtcactgtgcccagggggcagtacccaaaggaaacgc

SEQ ID NO: 549743 - DNA, 100 bp, Homo sapiens
gtggtattggaatggaaaatgcagtgggattggagataacccaggcactgccactgcagagccccgccatggaagacacgccgttggtgatatcgaagca

SEQ ID NO: 549744 - DNA, 90 bp, Homo sapiens
ggtctacagcaaacactggctcttcggcgtcctcagcggactcatccaggatgctgacagacagcaccaagaagtaattgcaatttatcg

SEQ ID NO: 549745 - DNA, 76 bp, Homo sapiens
agacggctcacctgtgcgggatggaacaaaagtcaggacagttcaacgaggacatgatccccaccgtgggtttcaa

SEQ ID NO: 549746 - DNA, 83 bp, Homo sapiens
atcctgccgtccttctccactttcgccagcccgtgccgcgagcgcggcctgcaggagatacagatcacttggattcagtcgag

SEQ ID NO: 549747 - DNA, 79 bp, Homo sapiens
cgcataagagcaaagaatactattgttgccacagggcctgagctgaagcctgtggacaaggaatcagaggtcgtaatga

SEQ ID NO: 549748 - DNA, 75 bp, Homo sapiens
atcttgcactcatgagacctgaattggtaataccccctgtacttgaaagattaaagagtctattgttggggaaat

SEQ ID NO: 549749 - DNA, 83 bp, Homo sapiens
cttagacgctggatttttttcgggtagtggaaaaccagggtatttgaagtataccatacaactgttttgaaaatccagcgtgg

SEQ ID NO: 549750 - DNA, 98 bp, Homo sapiens
tggccgccggtccggcgtgcgccaagttcagatgccactgccgccaggagccctgtaacatcagccatcgtcaaccccaccgtgttcttcaacatcac

SEQ ID NO: 549751 - DNA, 101 bp, Homo sapiens
agaagccaaagcgagggagcattggagaaaatcagttctcctgttaccctaaatgcacgctgcacgaggactacgggcggctgtgggagagccgccagttc

SEQ ID NO: 549752 - DNA, 100 bp, Homo sapiens
aggcctgaaggaattctcagtcaaagaggttgaaaggattgtagacaagaggaagaacaagaaaggaaaatgggagtatcttatccgatggaaaggctac

SEQ ID NO: 549753 - DNA, 75 bp, Homo sapiens
ttgaatcctgtctctgctacttactacttaggactttatcagctcagactccaaggtccgcgcagccacccggga

SEQ ID NO: 549754 - DNA, 100 bp, Homo sapiens
ggcggtcaccaagtacaccagctcgaaggatcgatttgcttagtggtataatacctgaactctgtcagaaatatccagatttaaatttcataattggagg

SEQ ID NO: 549755 - DNA, 100 bp, Homo sapiens
cctacgccgtggacttccagcgcagtatgctcaggcttcagaagaggctcgcctctagtgtcctccgctgtggcaagaagaaggtctggttagaccccaa

SEQ ID NO: 549756 - DNA, 101 bp, Homo sapiens
ctgtgatcgccagcgccggcctcctccgtgcggagaagaagctgcggccgcacctggccaagggttcgggggtgattaaagctggctttgcaggagaccag

SEQ ID NO: 549757 - DNA, 82 bp, Homo sapiens
gcggattcgccgaggcaccgaggcactcagaggagcaatgtgtattcctccatcatatgctgaccttggcaaagctgccaga

SEQ ID NO: 549758 - DNA, 75 bp, Homo sapiens
tccgtgggtgtgtggtgagtgtgggaaagaaccggaggctgaagcaggccaaagaagaagctcaggctgaaattg

SEQ ID NO: 549759 - DNA, 97 bp, Homo sapiens
ccctggagtacaccccgcagcacagccgcgacttcaaggtctcctctgagcctccggcctccataagacccaaaacagatgacacctcttcccagtc

SEQ ID NO: 549760 - DNA, 50 bp, Homo sapiens
cccacccagcactgatgatattataaaccatgctgtgacctacaagcaaa

SEQ ID NO: 549761 - DNA, 98 bp, Homo sapiens
tttgctcacaatgatctcgttgacaaggtccagcctggggacagagtgaatgttacagaggagaaggcagagcccccccaggctatgaatgccctgat

SEQ ID NO: 549762 - DNA, 110 bp, Homo sapiens
ggaaccaaataatgcacgccagctggtagaaattgcagccagggatattgagaaacttctgagcaacagatctaaagccctggtgggctgtttaacgacccccaactccc

SEQ ID NO: 549763 - DNA, 75 bp, Homo sapiens
acagcagttcctgcagcttccttgaggttacgggcaggacttgagtggcttcggacagggcttctcagaccccag

SEQ ID NO: 549764 - DNA, 89 bp, Homo sapiens
tagtgatccacgcgcagttcctcaaagaaggtggagccccctgagctgcccgctgatctgcagcactggatctcctacaacgaggccag

SEQ ID NO: 549765 - DNA, 75 bp, Homo sapiens
ccggagagaggatcaggtgttttcaggttaaccgtcagttctttaggtgctgggaatgtagccgatcgtgttttg

SEQ ID NO: 549766 - DNA, 100 bp, Homo sapiens
ggagcctggcgggcgtgggaacccaggccccgccgaggcggccagggggggccctcagcctcttggccttgaacgggctgttcatcttgattcacaaaca

SEQ ID NO: 549767 - DNA, 96 bp, Homo sapiens
gggatttgagatcctatcttccctgcaaattaccaggttgcatcttcactgataggaatacatgcagcagagaccacactggctgtgcgcagacgc

SEQ ID NO: 549768 - DNA, 100 bp, Homo sapiens
acagcaagaaagaccatcaagtttaccaagaacctcatctacaatcaatttgtcaccaggagaagtggaagaagaggatgatgatgaaaatacgtgtggg

SEQ ID NO: 549769 - DNA, 95 bp, Homo sapiens
gacagaatgctttgacctccaagctgttttaaatctagtagataagccaggtacaggtttgcagattccgccagcagcacagcaagctctacaga

SEQ ID NO: 549770 - DNA, 82 bp, Homo sapiens
taggtcgatggtcggcggcgcccggatgggcagctgaggctacgtgcaggcctgccgcgccctgatgattgctgcctcggtc

SEQ ID NO: 549771 - DNA, 73 bp, Homo sapiens
ggaggagctctttgacttcttgcatgcgagggaccattgcggtgcggaggcagcaaatgttacaggtcctggt

SEQ ID NO: 549772 - DNA, 98 bp, Homo sapiens
agatgtatggctgccgtgttatccagaaagctcttgagtttattccttcagaccagcaggtaattgaattttctacttctggtcatgcttacactgat

SEQ ID NO: 549773 - DNA, 100 bp, Homo sapiens
ttgcccgaagccgggcggaggagagctcaagctaagtgggaaagaagcctaaggaataaagtcatctctctagaccataaaaataaaaaacatatccgag

SEQ ID NO: 549774 - DNA, 50 bp, Homo sapiens
ggtggagctcacgtttattcaacagtccagaggtgtccttctaaagctgg

SEQ ID NO: 549775 - DNA, 75 bp, Homo sapiens
gctggaagcgggcgaggacgtgggtcagagtttcactctgtcacccaggctcgagtgcagtggcgtgttctcggc

SEQ ID NO: 549776 - DNA, 96 bp, Homo sapiens
gaagattttgacagtcgtagatacaaatttttggatgatgatggatccatttctcctattgaggagtcaacgactggggttttaaggggtgtggca

SEQ ID NO: 549777 - DNA, 75 bp, Homo sapiens
tgctggagaaattggaaaagctatttctcaacgcgttacagtgtttctgccacctctgtacaaaagacaatttta

SEQ ID NO: 549778 - DNA, 75 bp, Homo sapiens
agccttgggcctcgcgccggctatggccgtgccctggggctgagccctcagtctgcgctcctcagaccaccggca

SEQ ID NO: 549779 - DNA, 98 bp, Homo sapiens
aaaaatctggcatggagcgttgccgaatccttttggaggctgccaggataataagggaaattgcaagaacctattgatggcttggatgctctggtggt

SEQ ID NO: 549780 - DNA, 48 bp, Homo sapiens
agctagcaaagtaattgcactgaaagctcatcagcatcggatcttcct

SEQ ID NO: 549781 - DNA, 50 bp, Homo sapiens
catcagcgatggcagtttcatagtattgagtcatcttagtgggatttggg

SEQ ID NO: 549782 - DNA, 100 bp, Homo sapiens
gagaaagtcctacaacagtttggcgtgcaacatggggcttgagaaaggctctgagcccagaggaagccgagtcagccctggaggcggcccattatttcac

SEQ ID NO: 549783 - DNA, 50 bp, Homo sapiens
tggacaagcgaggaagtttctttaaggcctcaggagtgcaagtagctgat

SEQ ID NO: 549784 - DNA, 50 bp, Homo sapiens
ccgcggagccgccgaaacctgcaggtcctggacccaagccagaagcctct

SEQ ID NO: 549785 - DNA, 50 bp, Homo sapiens
cgcgccctggcgggtccggaccaaggcaatattggacgttgttgtgaatc

SEQ ID NO: 549786 - DNA, 90 bp, Homo sapiens
ctagagtgggaatgggtggcatggaagccaagttattcgacaacgaagagaagcagatgctgcattattttcagaactccacagaaaact

SEQ ID NO: 549787 - DNA, 100 bp, Homo sapiens
cctggagcgaatcctaccttccaaacagccatgcctgatggagctctggacacagctgtctgcgctgacgaagtggggagcgaggaggacctgtatgatg

SEQ ID NO: 549788 - DNA, 100 bp, Homo sapiens
cgcagcccgggcccaggccccggcagcgcctgggacaagagcgccgccctgtgctgggctgccgggagctcgtcttcaggaacctctccaagatcctccc

SEQ ID NO: 549789 - DNA, 51 bp, Homo sapiens
ggcagtatcaacggagtctccgggacttttgtgaatgatgtaaggattccg

SEQ ID NO: 549790 - DNA, 101 bp, Homo sapiens
ggagaccagacctactgcagccacgcgggcgagcggctgtgtggatgtcggcgaagccgcgggcgagggctttgttcgcgggggtcacagctctcatggct

SEQ ID NO: 549791 - DNA, 100 bp, Homo sapiens
cggaaccgtcgggccgcagccgccggcaatgccgcgaaggaagcttggtgctaacagtggtttgcacatcatcatctttgatgaaattgatgccatctgc

SEQ ID NO: 549792 - DNA, 100 bp, Homo sapiens
cgagaccgtgaccgagagcgtgaccgagagcgcgaatatcgtcatcgttagaagatgttttctggcaaaggccttcctgcatttatgaattctctctcaa

SEQ ID NO: 549793 - DNA, 75 bp, Homo sapiens
ctcttgtgctcagtgacatcattcagaattgagcccctgagtcctgagttggtggcagctgcatctgctgtggca

SEQ ID NO: 549794 - DNA, 50 bp, Homo sapiens
tgcagagcgcgcagtacctccgcctgcaccagcatggactacttttagag

SEQ ID NO: 549795 - DNA, 75 bp, Homo sapiens
acgagaactggagagaactgctggaaggagactggatgatagaattgttttcctttggaatatggataaatacac

SEQ ID NO: 549796 - DNA, 101 bp, Homo sapiens
cgggctttgccatcaataccaaacctgcctagggtagttaaaagacgagtgaatgctctcaaaaacctgcaagttaaatgtgcacagatagaagccaaatt

SEQ ID NO: 549797 - DNA, 75 bp, Homo sapiens
ggcgaggccctcatgtaccacacgaattcagaaggagctggcggacatcactttagaccctccacctaattgcag

SEQ ID NO: 549798 - DNA, 100 bp, Homo sapiens
gcaacaggaacttctgggtcctgcggctgcccccgggcagcaagggggaggcccccaaggtctgggaggggctgaacgtggtgaagacaggccgagtgat

SEQ ID NO: 549799 - DNA, 75 bp, Homo sapiens
aaaacaatagctcaaggaaacctttccaacacagatgtccaagctgccaaacgaggagaagaccttttcatgtgt

SEQ ID NO: 549800 - DNA, 97 bp, Homo sapiens
caaccgcagccaggagaaggagttcgtgcaggcgtacgaggatgtgctggagcggtacaaagatcgtcagtatttaaacagatcacatcatgcgtga

SEQ ID NO: 549801 - DNA, 78 bp, Homo sapiens
cagcagatggagaatagaccctctgtccaggcagcattaaaacttaagcagattgcccccgaggaattagcacttgtt

SEQ ID NO: 549802 - DNA, 74 bp, Homo sapiens
gacgagggagctcttggataagctgtggaggaagatgcagagtcagaagatgaagaggaggaggatgtgaaact

SEQ ID NO: 549803 - DNA, 75 bp, Homo sapiens
ctaacacctgtgagctaatctttgaagactgcaagattcctgctgaccacgttgcctcttgtggtgtaaacttgt

SEQ ID NO: 549804 - DNA, 90 bp, Homo sapiens
gaagaaggggccctgtgaccggagctggtggagttgagatctataatggagatcgtaaaataaaggtttccaacaccctggaaagccggc

SEQ ID NO: 549805 - DNA, 80 bp, Homo sapiens
ggccgtgtagcgtcgccgttactccgaggagataccagtcggtagaggacacgggtcctggaaaacggaagagagaagat

SEQ ID NO: 549806 - DNA, 75 bp, Homo sapiens
gaaggaacgaggcaaggagctaaagcagcgtgcgttcagccctggggaggaattttgttgtcagagaataaaagg

SEQ ID NO: 549807 - DNA, 75 bp, Homo sapiens
aatcaaactgctacaagacaacaccctgatctggcatggacatgtaaaagacctcatgagtgtggaatctgtaaa

SEQ ID NO: 549808 - DNA, 90 bp, Homo sapiens
cgcggacgcggaacccggcgcggcggcggcacgatggtcatggcgtatttcgtcgagaatttttggcaattctgtggtgttcttggtcac

SEQ ID NO: 549809 - DNA, 101 bp, Homo sapiens
tctgtcttcggtggactccttcggcagtccacccaccgccgccgcctcccagatattgaaatggattccaggcgtgtgcctcgagacaagctggcctgcat

SEQ ID NO: 549810 - DNA, 119 bp, Homo sapiens
aaatggcacttcattggccacctacagaaacaaaatgtcaacaaattgatgggccggattcagaagccagccagagcccacaatacagcttcgagtcattacctcagaagatttgttta

SEQ ID NO: 549811 - DNA, 100 bp, Homo sapiens
actacgcaggaaagccccagccacccatcaaatcagagagaaggaatccaccttcttacgctatggcagggaagcgtgacagcaatgacagtgttttttc

SEQ ID NO: 549812 - DNA, 101 bp, Homo sapiens
agacaacctgcagggggactctggccgcggctactacctggagatgctgatcgggacccccccgcagaagactgggccagtgccattcgcgtcgcagctct

SEQ ID NO: 549813 - DNA, 90 bp, Homo sapiens
tacgggaagaacttcttcagaattagaaaggagctgcttcccaataaggaaacaggaagtaagcaatggcatagaaaaaaaaggaaagaa

SEQ ID NO: 549814 - DNA, 82 bp, Homo sapiens
caggtcttgtagcagcgcctcctcggcagatcgggagcggtgccgagaaaaatttccttactagatgacatttcatcgcaat

SEQ ID NO: 549815 - DNA, 75 bp, Homo sapiens
aaaaaaaaaaaaaaaagaaagaaaactacaggcggggacggcttctcggtgatctgtgaaaatggttcgctattc

SEQ ID NO: 549816 - DNA, 100 bp, Homo sapiens
ataggtttcttcgacttcattgtggcctttgggtgaggagaaaggcactggtgaggtggattgatgatgaatcttctggcacacctggagcaactccaga

SEQ ID NO: 549817 - DNA, 100 bp, Homo sapiens
cctgcactctgcgctttgagctactgggctgtgagctgaacgtcgtggcattcctggtggctttccatcagaacaagcagctcatcggtgacagggggct

SEQ ID NO: 549818 - DNA, 100 bp, Homo sapiens
tctgggccacatcttctatgtgctgggaaaccacagggcagcctggcatcctcgctacaacctcattgttgtgggccgatacccagatcctaatttcaaa

SEQ ID NO: 549819 - DNA, 89 bp, Homo sapiens
caagagtgagcgagcggacccgcgatgggagccatgtgttcacatgtcatgtggaccagtatttaactgtggaaaccgcgggtggcatg

SEQ ID NO: 549820 - DNA, 50 bp, Homo sapiens
ggaatcccttgcatggctctcaaaagggatctggtaaaacctaaatatga

SEQ ID NO: 549821 - DNA, 101 bp, Homo sapiens
gcaccccagcgacagcggccccgacatggaggatgacgacagcgtcctcagcacccccaagccgaagctgcggacctgaaggagaagaaggagaaggtgga

SEQ ID NO: 549822 - DNA, 75 bp, Homo sapiens
aacttgtgtctccaaaactcaatcgggcaacagaagagatgaccaagcgagacgtgcctggcttcgccatcgggg

SEQ ID NO: 549823 - DNA, 82 bp, Homo sapiens
caacccgaagccacaggatggaggagggggatcccagcaaagtgtactaatggtcacttgatgtgcgctggctgttttatcc

SEQ ID NO: 549824 - DNA, 50 bp, Homo sapiens
cccatcccgttctctgatttgcagcagagtcaagggtccagagaaggagg

SEQ ID NO: 549825 - DNA, 100 bp, Homo sapiens
agaactacctgcgtatgtggagtagtactatactggcaattgctggagaagattttgcaattgttgcttctgatactcgattgagtgaagggttttcaat

SEQ ID NO: 549826 - DNA, 59 bp, Homo sapiens
gaacacaccatccaggacattgcacccaactatgtcattgttgtctgggtaggaacaaa

SEQ ID NO: 549827 - DNA, 75 bp, Homo sapiens
agcgtcgggattaggtgaaagtgatggaggacgaggagaaggcagtggagatcttgggcaacacggaagctgctc

SEQ ID NO: 549828 - DNA, 75 bp, Homo sapiens
cgaaggcagttctgcaagaggagctattctgatcttggtatggacctgtctgccaatcaggacgaggagaccgac

SEQ ID NO: 549829 - DNA, 99 bp, Homo sapiens
tggtggtgtgcgacaacggcaccgggggaggtggggaagacagggctccagctaccacaggacgggctctgggtatagccgttccagtcagggacagcc

SEQ ID NO: 549830 - DNA, 100 bp, Homo sapiens
cagttattccctctttcagcactgctctttatgggaaacttctgaaactccccacatgctggtttgttggcatccaaagctgttggggttgatggtgctg

SEQ ID NO: 549831 - DNA, 100 bp, Homo sapiens
ggccaccatccggcgcctgaatatgtataggcaaaaggagcgcagtttgcctgagaatacagatcaacccacagaacaaagcggatttccaaggcatctc

SEQ ID NO: 549832 - DNA, 74 bp, Homo sapiens
ggagcggtacctcgcctcggtgcagggctccgccccgtcgcctggaaaggagctatgaagacatgattggtgag

SEQ ID NO: 549833 - DNA, 90 bp, Homo sapiens
tgcagttgtctgccttgggtttcctctgcttactgtggatggccccagaggggtgcgtgctctggaggaggccaacgccgacctggaagt

SEQ ID NO: 549834 - DNA, 100 bp, Homo sapiens
ttcctctgccactttttaccttggggacctcagtgtccccagttgtcctcatccagggtgctattcgagtccagcctgaagggccggctccctctctacc

SEQ ID NO: 549835 - DNA, 90 bp, Homo sapiens
ggcggagtcggggctcctgacgtacaaatggtgatgatcatcaggtcaaggatagtctggagcaattgagatgtcactttacatgggagt

SEQ ID NO: 549836 - DNA, 83 bp, Homo sapiens
cagaacaaggaggaggtggtgatcatggagacagatttggctgaaatgcctgagaaaggagcttcaggatgagttagagaaag

SEQ ID NO: 549837 - DNA, 83 bp, Homo sapiens
acccggacgccgacgaaagccagcgagctcctcagcctcagacttcccaagtaagaagcggaagaggagccgctggaaccaag

SEQ ID NO: 549838 - DNA, 75 bp, Homo sapiens
gggtccgtgcgcccagcgtcccagggcccaggccgagcagggcaaaataacatggcagccagacgaattacacag

SEQ ID NO: 549839 - DNA, 50 bp, Homo sapiens
tgcttggtttggaaaaatttcattagagatggagtgaaggtacctgagcg

SEQ ID NO: 549840 - DNA, 100 bp, Homo sapiens
gccaaaatcggttacagccatgaaaatgtgtcgattactacagcatcccatttcccacacccactactccgctgactgggagggatggtagcctggccag

SEQ ID NO: 549841 - DNA, 80 bp, Homo sapiens
agctgtgctcgcgctactctctctttctggcctggaggctatccagcttgagccccatatgggggttggcaggcagcaga

SEQ ID NO: 549842 - DNA, 75 bp, Homo sapiens
gggaaaagcccgcctcaccactctggattccagcagatgcctgtcttagatgtcaagctgaaaacaaacaagagg

SEQ ID NO: 549843 - DNA, 90 bp, Homo sapiens
attttgagcgagttttacctgataaatttgcgcctcattttggtaagcggaaaaacaaaagagttcctgttttctcctaacgattctgct

SEQ ID NO: 549844 - DNA, 88 bp, Homo sapiens
ctttgcatacaagaatgtgaaatttgttctcaagcacaatttagaagaagaatgtgaatcctctctttgcacatctgcgttaagagcc

SEQ ID NO: 549845 - DNA, 103 bp, Homo sapiens
accacttttgcaagaatcttgcagcagcatggctatgcaaccggcctcataggaggaacaatgtggaaagtccactttgtgacgcctgtgttccagccagagg

SEQ ID NO: 549846 - DNA, 74 bp, Homo sapiens
ttgagtcgaaagaggcgacgaaatgcaggctcggacatcatcatgcagctggacgacgtggttagcagtactgt

SEQ ID NO: 549847 - DNA, 100 bp, Homo sapiens
catgtggatccctatgtttgcaacccctccccagttttcggctttgtgagaaaccttaccatcaaacacgatggccagcaacgttaccaacaagacagat

SEQ ID NO: 549848 - DNA, 83 bp, Homo sapiens
cctggagaagcgaggctgcccgcgcacggcgctggagtactgcaagctcatcctgagatcgcaccccctccctccctggcgga

SEQ ID NO: 549849 - DNA, 88 bp, Homo sapiens
gtcccgctggccctctgtctgcctgtgtccctgaccatggctccctgcagtaccctttaacggacattgccgagaatggctgcgcccc

SEQ ID NO: 549850 - DNA, 97 bp, Homo sapiens
aaagagcctggaaaatggagcagacctggacgaggtggtattaaagataatcaaacattatcaagaagaaggacaaggaactgaagttgttcaagga

SEQ ID NO: 549851 - DNA, 96 bp, Homo sapiens
ctcatcatggccttggcgtggtccctcccatgtggcttcagcaaccaggagggattgactgagatcttaacaacagcagcaacgatacatcagcaa

SEQ ID NO: 549852 - DNA, 100 bp, Homo sapiens
gtattatacctggtctgaaaagaagatggaattgtcaaagcttgaattatgatctagcccttaagtatttccagaaagctgctgaacaaggctgggtgga

SEQ ID NO: 549853 - DNA, 90 bp, Homo sapiens
gcgttgcctatactttgccgacacattccttcgagatgatgaaatgtggcaactgtggtgagatttcggacaagtggcagtacatccggc

SEQ ID NO: 549854 - DNA, 51 bp, Homo sapiens
agccaccggtaccttcttccagacctctcacttgactatgcctctcagcca

SEQ ID NO: 549855 - DNA, 75 bp, Homo sapiens
gccgccgctgcctccatcctgggcaaacctgcggacgtctcggcgcggaagatggccggcggcgtggacggcccc

SEQ ID NO: 549856 - DNA, 95 bp, Homo sapiens
gggctgctgctggagcactcatttgagatcgccgcttacaaacacgcagatggcaagaagattgatggcaggagggtccttgtggacgtggagag

SEQ ID NO: 549857 - DNA, 100 bp, Homo sapiens
atacttcctgcagatgcacccagatggtaccattgatgggaccaaggacgaaaacagcgactacagtgcaaacatctcaagccagttcagatgttgctgt

SEQ ID NO: 549858 - DNA, 135 bp, Homo sapiens
aagtttatgaatataaatacaaaagagaaataagtcagcacaacatcaatcctcatcaaggaaatgctatacttgaaaagcttgtgaaactttgtattgcaatgattgatactggaaaagccttttgtgttgcaa

SEQ ID NO: 549859 - DNA, 75 bp, Homo sapiens
ttttcaagggagctgataaagaacttcttcccaaaatggttttcagataactattatcgtgcagaaatgattgat

SEQ ID NO: 549860 - DNA, 75 bp, Homo sapiens
ggttctatgtaacaacctgcgtgggcaagagtttccacacctatgacgagaagccccgatatccaagcaaaagaa

SEQ ID NO: 549861 - DNA, 100 bp, Homo sapiens
cctcagctgctggggcgaaggccaggacaggtgctgtgtgatgtgttaagagcatattagaaggaatggttttgtctaattttcttcatgagttatggtg

SEQ ID NO: 549862 - DNA, 82 bp, Homo sapiens
ccgacagtgccctgagggccttcgagagctaccgcgccagacagacctcctgccccccgaggtctgcagtctcctgaaccca

SEQ ID NO: 549863 - DNA, 80 bp, Homo sapiens
gccatacccaataaccaggtgcttggcaaaatcgagcgggccattgcccgcggcgccatggctcacgtcggctcccgcaa

SEQ ID NO: 549864 - DNA, 74 bp, Homo sapiens
acatgaccgctgagcccatgaggaatcagtgacattcaaagatgtgtctgtggacttcacccaggaagaatggt

SEQ ID NO: 549865 - DNA, 88 bp, Homo sapiens
taccatggtctacaagactctcttcgctctttgcatcttaactgcagggaaatcctcattgacgattcaatttgttgaaggccaattt

SEQ ID NO: 549866 - DNA, 75 bp, Homo sapiens
agctgatagcagatgcatgagtgagcccagctgagagcagaattagaggagacagcactgattgcagtgacagaa

SEQ ID NO: 549867 - DNA, 100 bp, Homo sapiens
gttggtgcatgaaagtcttctaaccattccaaaatctctttcagggttttggactgataaagcaatggaagccactgaagagctttaagatgaggatggc

SEQ ID NO: 549868 - DNA, 98 bp, Homo sapiens
atgtcatacctggaaagcaagggattgctggctacagcttcagaagaccgaagcgttcgtatctggaagacattcactactttcactgcctaagaatc

SEQ ID NO: 549869 - DNA, 120 bp, Homo sapiens
gagggattcgtggtgaaggtccggggcttgccctggtcttgctcggccgatgaagtgcagaggtttttttctggatctctgctgtctcttggatcccatctgcctagatggaagaggatc

SEQ ID NO: 549870 - DNA, 97 bp, Homo sapiens
gcttccagttagtggatatagcacaccatccccagccactgtgagtaccagagtgcccactggttccaacagttcttctcagaccacagagtgtctt

SEQ ID NO: 549871 - DNA, 50 bp, Homo sapiens
attactgtctcaagtgatacgttcaaatctgaacatcaatgatgtactag

SEQ ID NO: 549872 - DNA, 82 bp, Homo sapiens
ccggatcaatccagatggcagccagtcagtggtggaggcatccattctggacttgcactcaggggccctgtctgtcgggaag

SEQ ID NO: 549873 - DNA, 100 bp, Homo sapiens
cacatgaagaccaatttttacgtctagatttccatgcccatggaaggtccttggatgtggctgtgttgcccaagctattctcagtcgaggacgttttgga

SEQ ID NO: 549874 - DNA, 100 bp, Homo sapiens
ccgggagaagcatgggaaggaggccgagccgggatctcaggtcctcgggggcggcggccacgccaaggacgggcacctgaatggacagaagaggacctca

SEQ ID NO: 549875 - DNA, 96 bp, Homo sapiens
ttcccccacccccgactcgggcttggcgcggcggccagaggaaccccgagggaattgatgctgatttcacatcagaaaagcatcgagcagctgcaa

SEQ ID NO: 549876 - DNA, 88 bp, Homo sapiens
gcgttggagcgcggaaatctggaaccgggatggcgacgtctacactgagtcggaggcgaagtggacatttgggagcaataaaaataag

SEQ ID NO: 549877 - DNA, 82 bp, Homo sapiens
aaaaccagctgagacagggcgccacttactagtaatctatgccagcaattatgacaatgttagcagaccatgcagctcgtca

SEQ ID NO: 549878 - DNA, 75 bp, Homo sapiens
gtaaaaatggctgaatatttagcttcgatattcgggactgagaaggacaaggcccgcccttcatggagagcctgc

SEQ ID NO: 549879 - DNA, 80 bp, Homo sapiens
gtctctctgccgtgaatcattcctgcagatgaaaaagtgtgacttggcagctgccccgtcgcagaatttagtctcaaagg

SEQ ID NO: 549880 - DNA, 88 bp, Homo sapiens
agttctggggagcgcctcgtcgacatgagtgatgtggaggaaaacaacttcgagggcagaccttcgttcagaaaaacctggtctatgg

SEQ ID NO: 549881 - DNA, 89 bp, Homo sapiens
atgcggaaaagcagcggcagccccgactctcagcactggattctcatcccttacagctgactcttccaggcaatttccatagatctgca

SEQ ID NO: 549882 - DNA, 83 bp, Homo sapiens
tcttaaaggcgcccgagtgtaggcgacaggccgctgacggccggaaggaaaatggacctggaaaactgatttgcccaaaggaa

SEQ ID NO: 549883 - DNA, 76 bp, Homo sapiens
gtgttagcgcaaaagttctgaatggcatccgtcctaccggaaacctaggaaaagctcttttggtacaccagaaggc

SEQ ID NO: 549884 - DNA, 98 bp, Homo sapiens
gaatgtcttcctcaaggcctgccatggacaattccaccagaggagttcagcaagagaagggatttaagatagcagaggcagcaggccgtgccgggggg

SEQ ID NO: 549885 - DNA, 100 bp, Homo sapiens
tgctgctgtgtaaggagaagcccacaaccgccctcctggacaaggtggccgacaacctggccatccagcttgctattgtagaaggcatgaaacaaaaaat

SEQ ID NO: 549886 - DNA, 75 bp, Homo sapiens
acaaaagagttgattgaaattatctctggtgctgcagctctacgtgctatgggaagagggcaaggcagccttgga

SEQ ID NO: 549887 - DNA, 80 bp, Homo sapiens
cttgccgatgcttctcaccgaaggtgttcaccagcacactgctctgccagctccattgggtgtgatattcctggctggta

SEQ ID NO: 549888 - DNA, 75 bp, Homo sapiens
aatatgctaaacttttggccaagagaatgaaggaggcagatgagtccttgaactttgaggagcagatactagaag

SEQ ID NO: 549889 - DNA, 75 bp, Homo sapiens
aaggatttcaacatgcctctgacaatctctagtgaattagcttaccgaaaggagatggtgagagctgacctaatt

SEQ ID NO: 549890 - DNA, 50 bp, Homo sapiens
gaatcagttgttggagaaaattaaaggttgcaaagacagttgcacagagg

SEQ ID NO: 549891 - DNA, 75 bp, Homo sapiens
agctctacagcttacctcctgaaggcgctcccactgccctcctagaccctcggagctaccacacgtatggccgca

SEQ ID NO: 549892 - DNA, 75 bp, Homo sapiens
agaacttctacgggggcaatggcatcgtgggagcgcaggagccagatgaccaagatgctccagatgaacatgagt

SEQ ID NO: 549893 - DNA, 82 bp, Homo sapiens
gagcctagaggatgtttcatgggatcccagccacgccgggcataggagggacctccttgctccagggcctcccgagcgcctg

SEQ ID NO: 549894 - DNA, 83 bp, Homo sapiens
tctgcattgctgatcttgtacttggattcagcaaggaaccttccgagacagagccacactctgttggatgttgatcccagctc

SEQ ID NO: 549895 - DNA, 100 bp, Homo sapiens
gagctcagttggctgcaggagcagctagcacagggctgttttgctgcagcttctgaagtgttaaagcacttgaaggaacgatttccgcctaatagtcagc

SEQ ID NO: 549896 - DNA, 100 bp, Homo sapiens
cgagagaggcaccgggatcgtgaccgagaccgtgaccgagagcgtgaccgagagcgcgaatatcgtcatcgttagaagtcgggaaaaactatggatttgt

SEQ ID NO: 549897 - DNA, 74 bp, Homo sapiens
ttggaatgttctccctgcagcagtcagcccaaaggaagagcttgacctcatggacctcgtaggggaagacagaa

SEQ ID NO: 549898 - DNA, 100 bp, Homo sapiens
gtgctcttctgagtgcatttataacctcatacccagtgacttgaaggagcctccccagcctcctaggatctctctaggagctgacactcgaaccttcacg

SEQ ID NO: 549899 - DNA, 75 bp, Homo sapiens
ccaggacctccaggggaacaatgaggcctacgcagagctcatcgtccttgagatgaaatctcaccatgttgccca

SEQ ID NO: 549900 - DNA, 98 bp, Homo sapiens
cagaaaactcaaaaaccatctggtgctgtggattgcaaccttgaatgtgtcatcaatcttacagaagaagtgctgtgggtcaaagtgaatataaacat

SEQ ID NO: 549901 - DNA, 83 bp, Homo sapiens
ggtctgctctgtgtgccatggacggccctcccaggcccaatacttcaaagcatcctacctctgctcaatatatattacttgga

SEQ ID NO: 549902 - DNA, 75 bp, Homo sapiens
cacctcctctgaatgtccacctgtgggtcagtcttgcactcccatcaacataccagtagaggtttgctgcaattt

SEQ ID NO: 549903 - DNA, 100 bp, Homo sapiens
gtagaaagtgagccggccatgaccccatccaaggagggcactctaatcgtccgccaggcttcaagcactttcctgaagcggggattcattatccagacag

SEQ ID NO: 549904 - DNA, 82 bp, Homo sapiens
ctactaaccattccaatgagaaatcaagggtcaaagaattgactgtagatccaactgctgctggtgatgttcgtccaataat

SEQ ID NO: 549905 - DNA, 82 bp, Homo sapiens
aaggaacgaggcaaggagctaaagcagcgtgcgttcagccctggggtcccttcaccgatgttgtcaccaccaacctaaagct

SEQ ID NO: 549906 - DNA, 100 bp, Homo sapiens
taacaccctgtaacagctgagggccttgccttagagatgtctctgaacaatttggaccctgacaagaagggtcaaggagaaatcggatactcttgtgatt

SEQ ID NO: 549907 - DNA, 100 bp, Homo sapiens
gccggccgtgagcctcccgcccaaggagaatgcgctcttcaagcggatcttgggtgcaatatgtgacttctgtgaagcttgggtttgccatggtaggaaa

SEQ ID NO: 549908 - DNA, 98 bp, Homo sapiens
ctggactaattgaagaaaaaagtaaactacttgaaaaatttagccttgttcaaaaagaggtatcctccatgaaatgtgggatccttccaatttctcaa

SEQ ID NO: 549909 - DNA, 98 bp, Homo sapiens
ggaccagaaggagggcagcctgcgggattggtatgacttcgtgtggaaccgcacgcgtggcatacggaagacacagctccgaattgattccttcttta

SEQ ID NO: 549910 - DNA, 96 bp, Homo sapiens
ggggtccatccggctggagaagaaaagcctctcatgctaacgttgcagaccccagagggtgctggagaatctggtaaaagcaccattgtgaagcag

SEQ ID NO: 549911 - DNA, 117 bp, Homo sapiens
actgactcgcacctgcacacacgccagcactgctcgctctttgacgtgtctcatatgctgcagcaatggctgccatccggaagaaactggtgattgttggtgatggagcctgtggaa

SEQ ID NO: 549912 - DNA, 87 bp, Homo sapiens
ttttcctccaggcctttgagagtcctagcagaagatgtgactcagactgcctctgggtggggctggctggcccacagatcctgccac

SEQ ID NO: 549913 - DNA, 90 bp, Homo sapiens
ttcagtggttctcgtctcaaactctatttgccaaaggaaacttgccttatcaccttcttgcttgcagtagtcgtgaaaggtgccaaattg

SEQ ID NO: 549914 - DNA, 50 bp, Homo sapiens
cacctcgccaaagcagagaaatagaaactccgggacgttttacagcagag

SEQ ID NO: 549915 - DNA, 98 bp, Homo sapiens
aggcggcgggggacaagtcggcgccccagagcggacgaggttgttggaggaagagtcttccaagagggctgaactagaaaagtggcacttggagcagc

SEQ ID NO: 549916 - DNA, 90 bp, Homo sapiens
gtggacctctcggctttcctggtcagcagcgacttgactttttaaaactgtggacttaaatgttctgcaaagtcttacacaaaagcccaa

SEQ ID NO: 549917 - DNA, 75 bp, Homo sapiens
cgactgtaagcaatctacgaagaccgaggaaaagctgcggattgacctagaagctgagaaggtgagcactgtagc

SEQ ID NO: 549918 - DNA, 74 bp, Homo sapiens
cctgacctaatgttatcgcggaatgatggtatcactcctccttgcttcaatctctttgccctcttcgatgctca

SEQ ID NO: 549919 - DNA, 96 bp, Homo sapiens
gggagctgataaagaacttcttcccaaaatggaagtgcctagctgccactccatttatatgaggcaagaaggcttcctggctcatcccagcagaac

SEQ ID NO: 549920 - DNA, 100 bp, Homo sapiens
agaaacaacataaagaacttaaatggactgcacccagtcagcttgaagagtttcaaatggaccctaccactgagaaatcaagatggcagtctactatggg

SEQ ID NO: 549921 - DNA, 76 bp, Homo sapiens
caagagagctctgcatcaatgcgccggccatagaaatgagccgtcagactgctacagcattacctaccggtacctc

SEQ ID NO: 549922 - DNA, 50 bp, Homo sapiens
agaagcgactttggtgagactctggacggcctcctctcctactttgggac

SEQ ID NO: 549923 - DNA, 112 bp, Homo sapiens
ggaccctgcccagcagaatttgtatagagatgtgatgttggagaactacagaaacctggtctccctagtcactcaagactgcttgcaactgattgcagacagtgaaacacca

SEQ ID NO: 549924 - DNA, 100 bp, Homo sapiens
gacagcagcagccatggaggacgagatgcccaagactctttgagtggtgattttatgcaatggcttcaagccacagttcttcaccagtgcctcaaggaag

SEQ ID NO: 549925 - DNA, 135 bp, Homo sapiens
atttcatagctcaggctgctgctgagaatgtgtttttcgttgctcacagctatggaggacttgcttttgttgaactgaaaatgacagatggcgagacctggacaggaaatgccctcttcagattgaccaaccgag

SEQ ID NO: 549926 - DNA, 75 bp, Homo sapiens
atgtgaagaaggtcgttgcttccccttcaccttccaccaccatgatttgctacagatgaagcatggcgactatta

SEQ ID NO: 549927 - DNA, 101 bp, Homo sapiens
gccgaagccgcgccagaactgtactctccgagaggtcgttttcccgtccccgagagcaagtggcgtgggtctggcacgagcacattttgagaagcagcctc

SEQ ID NO: 549928 - DNA, 100 bp, Homo sapiens
actgaagaaggccgcctatgacatcgaggtcaacacccgccgagcacaggctgacctggcctatcagcttcagaattcttccatctctatgacaacaagc

SEQ ID NO: 549929 - DNA, 76 bp, Homo sapiens
gcttgggaggtgctgccaccacaggctcgggctcaagttcactacaggtcacaaaacatgatgtcttgttggctac

SEQ ID NO: 549930 - DNA, 98 bp, Homo sapiens
ggaggcagagcggctcagccagcggcagacagaacgggacctgtgtcagggtgttcatttagaagaaagcaacactaatgattcaaacagcttcctga

SEQ ID NO: 549931 - DNA, 97 bp, Homo sapiens
cccaggcactgagtgactgcatactcaaatgaagctcgtgaccgagaacctgaaggaggaaccaatggaaagcgggaaggagaaggcaacctgagtg

SEQ ID NO: 549932 - DNA, 100 bp, Homo sapiens
gggaaatcaccaggtggaagatggatgtagagaaatggcgtgtgaagagctaagcgtgtgtcactgagaaccgaatctctaggccaacctctaaacagag

SEQ ID NO: 549933 - DNA, 87 bp, Homo sapiens
ggaaccgttcccgggccgttgatcttcggccccacacgagagcgcctgctcgctgtgcccccgggttatgacgacccccaataaagg

SEQ ID NO: 549934 - DNA, 78 bp, Homo sapiens
ttgaaaatgagcagctgtcctcatgtctctccagcaggcatacccagagtatcttatcacttaccagatcatgaagcc

SEQ ID NO: 549935 - DNA, 98 bp, Homo sapiens
gatgcctttgccgccgccaagctcctggccctggccctgatcatcctgctgggcttcgtccagatcgggaaggtggacatcctcatcatggatgatga

SEQ ID NO: 549936 - DNA, 100 bp, Homo sapiens
gacctcttcgatgtgcgagactttggaaagtattaaaggtggaagaaggtccatatctttttctgtgggtgcttcaagtgttgttggaagtggaggcagc

SEQ ID NO: 549937 - DNA, 97 bp, Homo sapiens
tggaagttttagcctagctgttctcaaggcggattaattagcccaagaaacattatattcattgctcttaaagttccgtacagataaaggaagagat

SEQ ID NO: 549938 - DNA, 50 bp, Homo sapiens
cagtatatacatcaagtcactgagagcgggcagagaagatgggccagaat

SEQ ID NO: 549939 - DNA, 101 bp, Homo sapiens
tggagcgccctgtaaggtatattcggaaacctatcgattacacagttctggatgatgtgggccatggtgtcaagcagggagaaggttttaaggtgaaaacg

SEQ ID NO: 549940 - DNA, 100 bp, Homo sapiens
cacagactgaccgagtggccctgaggaacctgctccgccgctacaaccagagcgaggctggcgtggtgaccaagatgaagatgcagaggaccattgtcat

SEQ ID NO: 549941 - DNA, 100 bp, Homo sapiens
tcgcttctcttcagggatgagtcatgtggtggtgaaaaatgaccctgaactggaccagcagtactatactggcaattgctggagaagattttgcaattgt

SEQ ID NO: 549942 - DNA, 98 bp, Homo sapiens
gatggtcttgaaacacaaatggtttttggatgagctcaggtttctacaaaaatgtggtgaagattcaaaagcatgttaccttcaaccaagtgaaaggc

SEQ ID NO: 549943 - DNA, 75 bp, Homo sapiens
gtggccgacaacctggccatccagcttgctcttcttcacaaaataattgatggcatttgtggtcgagcttatcct

SEQ ID NO: 549944 - DNA, 100 bp, Homo sapiens
cagaacatctgttatacaaggtattcacacagaccacaatacactgagtgaccaagaatatggcccaggtgaccaaagccctggacaaggccctgagcac

SEQ ID NO: 549945 - DNA, 75 bp, Homo sapiens
gtcagtgcacaaaatggcgccctacagcctactggtgactcggctgcaggaactgatgacgcttgataatgtggc

SEQ ID NO: 549946 - DNA, 90 bp, Homo sapiens
gctgctacaatttctagtcagatttcaggttcagtgacatcagaaaatgtgtccagagattacaagtcttccgtgtgtgctaagatcgtg

SEQ ID NO: 549947 - DNA, 100 bp, Homo sapiens
ttttggggattccactctccagtgtaatgattattgacaacagtccctggctatcttcttcagtgactgctccatccatggtagccccagtcacttttgc

SEQ ID NO: 549948 - DNA, 90 bp, Homo sapiens
agcagttgtctgatgaagagaagggtcaccgggagcaagaagtccaccaagaggaccaaatccatcaacggctccctctacatcttcagg

SEQ ID NO: 549949 - DNA, 98 bp, Homo sapiens
cgcggggacacaggagtcttcctacagtacacacacgcccgcctccacaggtctcctcatttaccacatcccccaggttgaaccacgggaccttgact

SEQ ID NO: 549950 - DNA, 75 bp, Homo sapiens
aacagaaaagaagaggagaatgctaagcagagatttgtacacacagatatgacgaaagacttgaaagaagaacat

SEQ ID NO: 549951 - DNA, 82 bp, Homo sapiens
gagacggcggccttcgaggaggtcatgaaggacctgagcctgacgcgggccgcgcggggagtgtttcaagagccagtgacaa

SEQ ID NO: 549952 - DNA, 74 bp, Homo sapiens
ctgtctcacattggccggcaacttgttccagctgctagtctatggggtccttacaaagacatttggcataaagt

SEQ ID NO: 549953 - DNA, 91 bp, Homo sapiens
tgtgagcagtgttgaacaggacagcttcatcgagccctatgccaccacctcacagctgaggcctcggtattaacaagtaaaggtgacgcgt

SEQ ID NO: 549954 - DNA, 100 bp, Homo sapiens
gaattttatgaggacaatgagtatatttccagcttgcctgctgatgcagacagaacagaagactttgaatatgaggccagacgggtgcagggaacaactg

SEQ ID NO: 549955 - DNA, 50 bp, Homo sapiens
gatacattggagaccattgctcctgattgggactttaaccaggacatctg

SEQ ID NO: 549956 - DNA, 100 bp, Homo sapiens
cgagccggctaaggtttgcgctgccatccgcaaaggctttctcgcttgtcaccttgccatgtggaagaaactggatattaaagccatgacagcaaacagc

SEQ ID NO: 549957 - DNA, 50 bp, Homo sapiens
aaagagcttctctccagagtagaaagatggagtctcactctgtcgcccag

SEQ ID NO: 549958 - DNA, 100 bp, Homo sapiens
tttgactcggtcttgggtgatacggcgtcttgccaccgggcctgtcagttgacctaccccttgcacacctaccctaagagagaaaaggaacagttccgta

SEQ ID NO: 549959 - DNA, 125 bp, Homo sapiens
gggaagcactacaagggtcctgaagtcagttgttgcatcaaatacttcatatttggcttcaatgtcatattttggagagaagaagaaggaggttcctgctgtgccagaaacccttaagaaaaagc

SEQ ID NO: 549960 - DNA, 96 bp, Homo sapiens
ttccggctccgtcgtggaagcaggactgcgccgcgtcttcctcaagaataccctctaccatctgctttggtcagggtgccgctcgaggatttaaaa

SEQ ID NO: 549961 - DNA, 96 bp, Homo sapiens
caaggacaaggaggaaattgtgatctgcgatcgagcctcggtcaaggaggattattacagtggtggctactatcctgcacaggacccggccctggt

SEQ ID NO: 549962 - DNA, 101 bp, Homo sapiens
gaaagcctacaaaagtgtggagaggttccttcaggaggatcaggatccatatcaggaagacaatctgaagagcagagatctccaaaaactaagcatttcaa

SEQ ID NO: 549963 - DNA, 90 bp, Homo sapiens
gtacgccacggggccgctgctcaagttccagatttgatatggatcagaaactttcgaagttggtagaagagctcacaacttcaggagaac

SEQ ID NO: 549964 - DNA, 75 bp, Homo sapiens
agcgttctgggacgtgcacaggcccgtgactccttggtgacggtcgattctagggaagtaacattgatataaatc

SEQ ID NO: 549965 - DNA, 98 bp, Homo sapiens
ggcgagaagaccatctctgtggtcctacagaatgaactctggaagcccagccagggacaatgcaccttcacagagattctgcactaatctgagtgaag

SEQ ID NO: 549966 - DNA, 75 bp, Homo sapiens
cgcaggtggacttcttgcaacaggttaacgtgtatggcgtgtgcgtgccagacggggtttcaccgtgttgcccag

SEQ ID NO: 549967 - DNA, 100 bp, Homo sapiens
tggccttagctgtgctcgcgctactctctctttctggcctggaggctatccagcgaaacttggatttaactggccagaagcaggtattcaaagcagagaa

SEQ ID NO: 549968 - DNA, 83 bp, Homo sapiens
tgcaggcctgctcctccgtttgcaaggtgtggacactgccagcggctgcagccgacttggaatgacctgggagacaaatacaa

SEQ ID NO: 549969 - DNA, 83 bp, Homo sapiens
aggtgagtcgcggtgggtcctcgcttgcagttcagcgaccacgctgtttttggaaggaagaaagatggaaagcggtgcagttc

SEQ ID NO: 549970 - DNA, 82 bp, Homo sapiens
ctcacaactgctcgcgtgacgaccgcattcgtggcagggcatcgagcgcctcaaacgaaagaaccagcccagggagcacatg

SEQ ID NO: 549971 - DNA, 80 bp, Homo sapiens
caactactcgctggccagacatacttccccagcatgagaccagatgtaagctctcctccatccagctcctcaacagcaac

SEQ ID NO: 549972 - DNA, 100 bp, Homo sapiens
ctggagaaggacattatttcggacacatctggtgacttccgcaagctgatggttgccctggcaaaggaacaagcacatcatgattgacttggggactggc

SEQ ID NO: 549973 - DNA, 75 bp, Homo sapiens
atctttgctcctccctgcaactaactccattcttaattgatcgtgaaccttatagaagaaactggacactttcat

SEQ ID NO: 549974 - DNA, 75 bp, Homo sapiens
gtggggaggaagaatgccggtcacagcccaggaggcagcctggcatcctcgctacaacctcattgttgtgggccg

SEQ ID NO: 549975 - DNA, 75 bp, Homo sapiens
gctctggctgtgctgcgcgacccccgcgcatggccccttcccagctgcctgcctgccctagccagctcccaggtg

SEQ ID NO: 549976 - DNA, 100 bp, Homo sapiens
gcccggtactcacccagcaatcattgttgcctgacaaaagtcacagagaaggctcagttcttccttcctatgctggagtgcagtggcgcaatctcggctc

SEQ ID NO: 549977 - DNA, 90 bp, Homo sapiens
gctggtccactcctcccatatgcagcttcactaaaacatgttccaaatcaagtatagatattgagaatgggtttatttctgaatctcagt

SEQ ID NO: 549978 - DNA, 50 bp, Homo sapiens
agactgaacaggatattcagagaagttcttacaagccagctgccatgttg

SEQ ID NO: 549979 - DNA, 82 bp, Homo sapiens
tgaaattataccttcagaaattcagagagacaactgatcaatactgggttccatgtttacatgatgaaactgagaaactggt

SEQ ID NO: 549980 - DNA, 82 bp, Homo sapiens
ctcagctttggaatcttttacttctcacttggacaagaactcaagagcagaatctccggaagccatcttcgacaagagcaca

SEQ ID NO: 549981 - DNA, 96 bp, Homo sapiens
aaagacaaagacccagtgaacaaatccgggggcaaggccaaaaagaagccaaaatgaagtttaatccctttgtgacttccgaccgaagcaagaatc

SEQ ID NO: 549982 - DNA, 76 bp, Homo sapiens
agcagatccacccgtcgaaggatgagaatgccagcggaagcctgccacctcctatgtgcggaccaccatcaacaag

SEQ ID NO: 549983 - DNA, 98 bp, Homo sapiens
ttggagcaagccttgccgatgttgatccaatgcaactagattcttcaatgggatacacaccactgcatgtgggctgccactatggaaatatcaagatt

SEQ ID NO: 549984 - DNA, 83 bp, Homo sapiens
ggagattccctgggcctgcaggaagcccttccgcggaccgaaagatagaagatggtgagatttttgcaagtattaaccagaag

SEQ ID NO: 549985 - DNA, 75 bp, Homo sapiens
cgaggacgctggagcccagcaaggtgattaggaagaagcttgttcgtaaaacgctggacatgatcaagaagattg

SEQ ID NO: 549986 - DNA, 82 bp, Homo sapiens
ctgaggttggacgtggggaatttctcctggggctcagagtattcctgggcactcctccccgccagtgctggcgtaaagacac

SEQ ID NO: 549987 - DNA, 95 bp, Homo sapiens
acgaggatgtgctggagcggtacaaaggtatgcagtggaactgatgaagaccctgatgataaaaacgcaccctttcggcaacggccattttgcaa

SEQ ID NO: 549988 - DNA, 83 bp, Homo sapiens
gttccaaagatgatgaatctgaaaggaaatccggaattatcacagagagctgactaaggctttggaacagaaaccagatgatg

SEQ ID NO: 549989 - DNA, 100 bp, Homo sapiens
gctaacccgacccggattggcgctgaggtggcccgtggggcaggttagcactctacgtatatgaatatctgctccatgtaggagctcagaaatcagctca

SEQ ID NO: 549990 - DNA, 95 bp, Homo sapiens
tgtgcaccggtgtgctcacccgccgcggtggcatctgcaatgaattgcgaaagcccagctacgcagagatttgtcagagaacgagtaaagagcct

SEQ ID NO: 549991 - DNA, 82 bp, Homo sapiens
gaagaaatccaggaacaactgtgtcagcagctagcccttttcctcaagctattgtggacgatgaaaggctctctgcagagga

SEQ ID NO: 549992 - DNA, 83 bp, Homo sapiens
ggggcagggtggtcatatccccctcctctctctctcagtcatgtgaagttcatttccaatccgccctccatggtggcagcggg

SEQ ID NO: 549993 - DNA, 80 bp, Homo sapiens
agtaaatatacgctttgttggtggactactctcagcctactatctgtctggagaagagcaaaacacttactattttggag

SEQ ID NO: 549994 - DNA, 96 bp, Homo sapiens
cacagagttagagagagggatggtgattatggatgattggccagggtatgacttgaatttattcacgtacccacagcactattatggagacttgga

SEQ ID NO: 549995 - DNA, 101 bp, Homo sapiens
ccggagatgtcgctcggccgccttctaccaggagcctgatccgtgccgcccgccgcccggatgggaccaccagagtgctaagctgttgtgaaggcagagca

SEQ ID NO: 549996 - DNA, 82 bp, Homo sapiens
cggaggtgcccaaggtcagaaggaagcaccacacagagaccaaagagaaccctgtacagtaagaaatatggtgtggacctca

SEQ ID NO: 549997 - DNA, 50 bp, Homo sapiens
cagcagcggcgccgtgctcgctccaggaatgtatcctgtcaggtataatg

SEQ ID NO: 549998 - DNA, 90 bp, Homo sapiens
tggggttcctcatctcgtcagtgactttctttactccactggtttcgataatggacaaggtgacgacagttttcaacagtgcacaaagac

SEQ ID NO: 549999 - DNA, 74 bp, Homo sapiens
gaaaagatacttctgcaatcctggacatgaaatggaaattctgaaacagccacacctacaaatgtagacttgcc

SEQ ID NO: 550000 - DNA, 84 bp, Homo sapiens
atcaagaggaagaggcatttggattttctggatatcctcctcttggccaaagtgtttgacccttcccgttttgcaccgggttct

SEQ ID NO: 550001 - DNA, 100 bp, Homo sapiens
ttggcctactcttcttatgtccaccagtatagctctgggaaatttgacaatgcactttacagatgtagagctaaaacgactgaaggatgctttcaagagg

SEQ ID NO: 550002 - DNA, 90 bp, Homo sapiens
gagacatgagatgattgccaaatccccagggaggtggggaagacagggctccagctaccacaggacgggctctgggtatagccgttccag

SEQ ID NO: 550003 - DNA, 75 bp, Homo sapiens
tttcagaaatgcatagttttatccagattgctgacagaactggaatctcctgcttggtggccctttagctccaag

SEQ ID NO: 550004 - DNA, 100 bp, Homo sapiens
gtgtggacgcccatcccggtgctcacgggatgttggaaattactattatggacaaggccacccaatgaagcctcaccgaatccgcatgactcataatttg

SEQ ID NO: 550005 - DNA, 50 bp, Homo sapiens
ggcgctgctcccgggggcgacggagtgcagcagctgccccgagccccgtg

SEQ ID NO: 550006 - DNA, 100 bp, Homo sapiens
agcctcccaagtagctggaattacagggtatgagtattatagaacaattagaccctgtatcttttagcaattacttgaagaaataccataatactatatg

SEQ ID NO: 550007 - DNA, 97 bp, Homo sapiens
tacaggatatgaagaaattgagggttcttgccatgactgcctctttaagctatgtcccatgaaccgctactctgcccaaaagcagttctggaaagcc

SEQ ID NO: 550008 - DNA, 82 bp, Homo sapiens
cccccatcgagaaaaccatctccaaagccaaagggactcggagatcatgcagcagaagcagaaaaaggcaaacgagaagaag

SEQ ID NO: 550009 - DNA, 75 bp, Homo sapiens
cccaagaagtggaccagaggcttcgtccaacgcctgaagggaaaacaggatctccaagaaggagaagcttctctc

SEQ ID NO: 550010 - DNA, 100 bp, Homo sapiens
atactgggattacgagtcacatgtggtggaatggggatgtggaagatgtcaagtttgtgatcaactatgactatccaaacagctcagaggattatgtgca

SEQ ID NO: 550011 - DNA, 75 bp, Homo sapiens
aacatatttcagagcaacctctttcaggctttaatagccatgaagaactgtactcaagtcgcccttatggagccc

SEQ ID NO: 550012 - DNA, 50 bp, Homo sapiens
tagctctccctggggacttaaattttggaattcaactgaaaaaggtgcag

SEQ ID NO: 550013 - DNA, 90 bp, Homo sapiens
aagcagttttggaagaggagcgctaagctgccggggagattcacaatgacatcctttcaagaagtcccattgcagacttccaactttgcc

SEQ ID NO: 550014 - DNA, 96 bp, Homo sapiens
gttcaacctcagcgcttactttgaaagggctgccgacttcattgaccaggctttggctcaaaagaatggcattgctgttgcagaaactttcagcca

SEQ ID NO: 550015 - DNA, 100 bp, Homo sapiens
ctgagaatttgaaaaatgaagatgatgtagacactggactattaggctgaagggtatgtgattggcagctgtattaaacacattccaatcgcaggacgag

SEQ ID NO: 550016 - DNA, 75 bp, Homo sapiens
ggcgtctcatggcgttggaataccggctctcagcggctggggccgtctgccctgcccagagctgtgtcctgatgc

SEQ ID NO: 550017 - DNA, 100 bp, Homo sapiens
ttgcctgcccgacggctctcctctgactgcagcgtcactcaggaaaaagaagatgtccctgtggaaatgtccaatggtgaaccaggttgccactactttg

SEQ ID NO: 550018 - DNA, 75 bp, Homo sapiens
caatgagtctctgcagttgaatctgacaaagatcgaacagttgtgctcagaattggtagggtgcccccctttttc

SEQ ID NO: 550019 - DNA, 96 bp, Homo sapiens
cacgcccctcaccccccgagagccggggcagacgtcaaggccaccaccaaagatggggacacagtgttcacctgcatcatcttcctgcttggtgag

SEQ ID NO: 550020 - DNA, 122 bp, Homo sapiens
gcagacttcaggtcgtggcagagaaaaccagctgagacagggcgccacttactagttgtcgagatgtccacagaaggaggatttggtggtactagcagcagtgatgcccagcaaagcctaca

SEQ ID NO: 550021 - DNA, 83 bp, Homo sapiens
cccggaagcaaggcctctggaaaaccgcggcccctgagttgcaaacaaatgtcagatcccagcggcaacctttggcactgcat

SEQ ID NO: 550022 - DNA, 100 bp, Homo sapiens
ctctgatgagaacatgtcagaatggctgctgaacaggatgtcctcggacgacaggcacctgggctccagctgcggctccttcatcaagactgagccgtcc

SEQ ID NO: 550023 - DNA, 50 bp, Homo sapiens
aagaatcttttatggggggctgaaaacagttcctcctgaggatttcagag

SEQ ID NO: 550024 - DNA, 98 bp, Homo sapiens
gaccgaagatgagcttcctcttaatccacactggtgatagaccatacaaatgtgcacacccaggctgtgagaaagccttcacacaactctccaatctg

SEQ ID NO: 550025 - DNA, 98 bp, Homo sapiens
gaaaggaatgaggagttacagagggccgagaaggacaggatcaggtcctgagggagtctaacaagttagcagaaatggaagaaccacccttgcttcca

SEQ ID NO: 550026 - DNA, 101 bp, Homo sapiens
tgcaataagtgtgtgtccggcttcgaccaccactgcaaatggatcaacaactgcgtgggaagccggaattattggtgccatgtttcagaacagagtaagac

SEQ ID NO: 550027 - DNA, 83 bp, Homo sapiens
ccaagtttggcatcgagaaggaggtgcgcgtgtgtgagccctgctacgagcagctgaacagcgggctgacgcacgaggcacac

SEQ ID NO: 550028 - DNA, 100 bp, Homo sapiens
tagagatggtgaagaagcaggtgcttatgatggacctaggactgctgtggatatcttgacctacgtggcttggaagataagtggttttcccaaaaaccgt

SEQ ID NO: 550029 - DNA, 99 bp, Homo sapiens
tcgaggatttggcgctgcagaaccagatccgggagcacgtcatctccatcgagggggctgtgctcttggatctggaccagcagaccctgcccggagtgg

SEQ ID NO: 550030 - DNA, 51 bp, Homo sapiens
tccggggaggtcacctgacgaggaggagtgagctgagtcgacagaaacttc

SEQ ID NO: 550031 - DNA, 75 bp, Homo sapiens
gaccaattactgggagagctgcagccaggagcaggaggtcaagcagtgttctaagaacggaagcatctgggctgg

SEQ ID NO: 550032 - DNA, 51 bp, Homo sapiens
tgaaactggaggagcaatggtgtatgatcaggatcctcatgaccagccaaa

SEQ ID NO: 550033 - DNA, 110 bp, Homo sapiens
ctacagagtgtcctaccgcacggtgacggtgctggagtggagatgctgccctggcttcaccgggagcaactgtgatgaggataaaagcttcgatgatgaagaatcagtgg

SEQ ID NO: 550034 - DNA, 75 bp, Homo sapiens
attgctggctacagcttcagaagaccgaagcgttcgtatctggaaggccacggcatatgcctccaaggacggggt

SEQ ID NO: 550035 - DNA, 100 bp, Homo sapiens
ccaacaaaatattcatggttcttgagaactctcttgatagagcccaagcagccaagaataaaggcaataaatattttaaagcaggaaaatatgaacaagc

SEQ ID NO: 550036 - DNA, 75 bp, Homo sapiens
gatgtgatgttggagaactatagcaatctggttttcttggctccagtgatccacaagctcagaaatacatcgcgg

SEQ ID NO: 550037 - DNA, 50 bp, Homo sapiens
ccctggagaagcagatggaaaagttggaatcgaagcctcttaaaatggca

SEQ ID NO: 550038 - DNA, 51 bp, Homo sapiens
cggccgctctgcgtcctcaccttcaaagaagctcatagccaaactgaaaag

SEQ ID NO: 550039 - DNA, 83 bp, Homo sapiens
cgcagtggtcgcttcttctccttgatatctcccggggccaattcagcatctctacctggccatcctaacaaggtgatttgtga

SEQ ID NO: 550040 - DNA, 83 bp, Homo sapiens
acacaagacatcatcttgaaggaaggatggctttggccacgtgcgagcgagggtttgcagcaatggaagaaacgcaccagaag

SEQ ID NO: 550041 - DNA, 100 bp, Homo sapiens
atgcacgagccaggaactgcgcagcctcttcgagcgccgcggacgcgtcatcgagtgtgacgtggtgaaaggttgggcccgaaggcatcctgcagaacgg

SEQ ID NO: 550042 - DNA, 100 bp, Homo sapiens
gcagcgaggaatcctggagcacagagaagctcccagctttgaaggtcttgcggtggctggatctccagaactgttctctggaggaccctggtccaaactt

SEQ ID NO: 550043 - DNA, 98 bp, Homo sapiens
ggaagaggcgtcctgttcttcctgggggactggcagcatgattatgatatgagggtggatgatttccttcgtcgcacacaagctgttgtcagtggccg

SEQ ID NO: 550044 - DNA, 75 bp, Homo sapiens
ctgccccgcgctgacaggggggcctggccgcgcagccgatgacgtccggttgtttgccttcgtgcgcttcaccac

SEQ ID NO: 550045 - DNA, 98 bp, Homo sapiens
ctcacccgcgcctgcgacctcgcgtttgcctcagcatggagggcggggccgcggcagccacccccacagcactgccttactacgtggccttctcccag

SEQ ID NO: 550046 - DNA, 116 bp, Homo sapiens
gggcttccccggttctcctgggaaccccatcggccccctgccagcacacacctgagcaggaggtgaagtgaaatctgcaagagtcctgctcgctcaaggcctgcatacaggaaaga

SEQ ID NO: 550047 - DNA, 100 bp, Homo sapiens
tgactttggattgtcaaaaatggagggcaaaggagatgtgatgtccactgcctgtggaactccaggctatgtcgttggaggcatctatactgtgattcag

SEQ ID NO: 550048 - DNA, 114 bp, Homo sapiens
caaaactgttcggacttccccgttagaactcgcgtttccacttcagagatctgttcccaaagagaatattacgtctgattctctcctaaccgcaagcatggcttcagaaagtac

SEQ ID NO: 550049 - DNA, 96 bp, Homo sapiens
gcatggcggtggaggacgaggggctccgggtcttccagagcgtgaagatcaagatcgagatcctgaaggagctagacgagtgctacgagcgcttca

SEQ ID NO: 550050 - DNA, 75 bp, Homo sapiens
tgcaaacctggagccagaaacattaccgtcatattccacccattactaaggtcgtttagtggctagtcttgttgc

SEQ ID NO: 550051 - DNA, 88 bp, Homo sapiens
ggggagctagtggaagttactgccgcgccaccgagtccggaccggagactttggggcctaactagcctgcccactaaggaggaggagt

SEQ ID NO: 550052 - DNA, 100 bp, Homo sapiens
caccgagcagcccccactgccgcagcagacacagcctccagcaaagggtaattatgtgctggatcgagatgacctggtggaggcccaaacacctgagtat

SEQ ID NO: 550053 - DNA, 83 bp, Homo sapiens
acaggattcgttggctgccgtccccgctgctgtgcattggatgaaggatttgggggcagagcacttggcaggtcatgaagggg

SEQ ID NO: 550054 - DNA, 100 bp, Homo sapiens
gcagaatctaccaacttcgccaccctgcggtggattgactacggcaaagtggccactcagagaggtggagaagagcgagtacttgagaaagaagaggaag

SEQ ID NO: 550055 - DNA, 122 bp, Homo sapiens
tgaaggggtctagatgtaaatgtcagtggaaaggagagctaccatcactaagaccatggcaaaagttataaccaccgtactgaagttccctgatgatcagactcagaaaattttggaaagag

SEQ ID NO: 550056 - DNA, 82 bp, Homo sapiens
gtgagggtgccctggcgggtgtgagcccggcgggctggagaaccgggtctcggcgccgcagatgtgtatatctcatgattga

SEQ ID NO: 550057 - DNA, 101 bp, Homo sapiens
gacacggtgtgcagacacaactacgaggtggcgttccgcgggatcttgcagaggagagatttccgttggaagatgcaacggttccggtgacggtagcaagt

SEQ ID NO: 550058 - DNA, 83 bp, Homo sapiens
gcggcctgttgggagctggatcggagcggtttggaacgacaagcccgaggttatgtaccgaaggactctaccgtgtcagcggg

SEQ ID NO: 550059 - DNA, 88 bp, Homo sapiens
ggaaacaacaatgaagaggtaattcacttgaacaactttcactgccatcggggacaagagtcagatgtaatgggaagaggccatgcac

SEQ ID NO: 550060 - DNA, 75 bp, Homo sapiens
gagcctcagttggaagcagccgatccagcctgcggagcctgtggggcaggactctgtctactagtgacgatgtcg

SEQ ID NO: 550061 - DNA, 82 bp, Homo sapiens
gtgaaccaggagtgagtcggagctgccgcgctgcccaggccatggactgtgaggatgggcaacactccagattcagcctcag

SEQ ID NO: 550062 - DNA, 100 bp, Homo sapiens
gagacttggtgtccaacagagtctaggctgggttcattacatgattcatgagccagaaaattgtacaagctggagataaggaccttgatgggcagctaga

SEQ ID NO: 550063 - DNA, 83 bp, Homo sapiens
atcttcgaacttttgacacggctttggaaacgacgtcatgtgttagtggaaggcgggcacagagccatcttcttcaatcggat

SEQ ID NO: 550064 - DNA, 90 bp, Homo sapiens
cttttgtgaaagtgtataactacaatcacctaatgcccacaagggagcagaggaagctgctggaaaagtgtgccatgaccgctctgagct

SEQ ID NO: 550065 - DNA, 98 bp, Homo sapiens
agatcgctactaccccgcagttcccggacatgatcctctccgcctctcgaggtacggactaaggcgaacctcttcccggccgctctggtgcacttggg

SEQ ID NO: 550066 - DNA, 100 bp, Homo sapiens
ccagaaggaagatggcggatctggaggagcagttgtctgatgaagagaagcaggaacgaatgcaggaatttgggaactgagctgtgcaagtgctgaagaa

SEQ ID NO: 550067 - DNA, 75 bp, Homo sapiens
acgtctgcggaagtgcagctgcctcagttcttagcgcaggctgttgaagccaaggaaaaacaagatgaacaagtc

SEQ ID NO: 550068 - DNA, 98 bp, Homo sapiens
gtcaatctgctgtatggtgaatgagaagtttagagaaaacgtgcctgcatgggagatttggagtggtatgagaagtccgaagaaactcacgcctccca

SEQ ID NO: 550069 - DNA, 123 bp, Homo sapiens
cgctgtgtggttgcaacggagataaattcccggaaccgcgattcggcgtgtcaggtgaaagaacttgtcctggacaacagtcggtcgaatgaaggcaaactcgaaggcctcacagatgaattt

SEQ ID NO: 550070 - DNA, 83 bp, Homo sapiens
ccgggagctgggcggccatttaccagggttggggtctgctaggtccccggaatgagttgtttgacgcagccaaataccgagtg

SEQ ID NO: 550071 - DNA, 75 bp, Homo sapiens
tcgcccataaagtggatgagcagtgggcatccccaccatcagatggtgcggggcagagggggactacaacgtcat

SEQ ID NO: 550072 - DNA, 82 bp, Homo sapiens
ggagccggagctgggcgcggattcgccgaggcaccgaggcactcagaggagactgattcttgctattccaaatcctcttcca

SEQ ID NO: 550073 - DNA, 51 bp, Homo sapiens
cgcggggaccgctgtgctctcggaactctccggagtcctttctgtattgtt

SEQ ID NO: 550074 - DNA, 74 bp, Homo sapiens
aacagaagctgaattgcaggatatgatcaatgaagtggatgctgatgttgtgtgaattacgtgcctgagcctga

SEQ ID NO: 550075 - DNA, 137 bp, Homo sapiens
cagcggctgcggtcgggccaaggttccgcgccgggcgtggacggtgtggggcggtcccggccccgcagagctgccatcagtcatgctcttaaacggggactgcccagagagcctgaagaaggaggcggcggcggccg

SEQ ID NO: 550076 - DNA, 100 bp, Homo sapiens
tcgacttctgaaacatccaaacatcggtactccaaagattcaggtttactcacgtcatccagcagagaatggaaagtcaaatttcctgaattgctatgtg

SEQ ID NO: 550077 - DNA, 50 bp, Homo sapiens
ccagttccaaagtgtcttaaaggattcactccttctccagttgcacagcc

SEQ ID NO: 550078 - DNA, 83 bp, Homo sapiens
ctggctctccagagagagaggtggtggtgtacacaatccctgcagtactgaccctgcttgttggacttaaccctgaagtcaca

SEQ ID NO: 550079 - DNA, 50 bp, Homo sapiens
agtagatgacttgcaatttgaaggttgatggaaatcacaatcttctgaca

SEQ ID NO: 550080 - DNA, 102 bp, Homo sapiens
attgcatccacaggaggggcaggaaattctttgaaggttttttgcatgtctgacacccatgactccacctggaccttatggctccacccagaagcaattcag

SEQ ID NO: 550081 - DNA, 75 bp, Homo sapiens
cgagtgaattgttctcagtttctcggtttatgtgctcttccaggatgtcttcatcacattttgccagtcgacaca

SEQ ID NO: 550082 - DNA, 100 bp, Homo sapiens
gtcgctttgagaccaaagacatctcagacattgaaggggccatggcctcccctgctgcccgggaccagtttttacgtcagatggaacagattgtggaagg

SEQ ID NO: 550083 - DNA, 124 bp, Homo sapiens
caagctcttcctgaacgaagtggccaagaaggagaagcagctgcggaaaatgctagaaggtctcggcgcggaagatggccggcggcgtggacggccccatcgggatcccgttccccgaccacag

SEQ ID NO: 550084 - DNA, 82 bp, Homo sapiens
taaggattccaacaacaattccgatggcaaagccgttgccaagccaaaattgcctggaaaagagcagtgagaggagtccggg

SEQ ID NO: 550085 - DNA, 83 bp, Homo sapiens
ggaggttgctaacccagaacactatattaaacatcccctacagaacaggtccaagcatctcattttgaaggcctaatcacaac

SEQ ID NO: 550086 - DNA, 83 bp, Homo sapiens
gcggtcgacatgttccaggtcccggatagcgagggcggccgcgccggctccagtttgtttcgacgccggaccgcgtaagagac

SEQ ID NO: 550087 - DNA, 82 bp, Homo sapiens
ccggagaggagttccgcatggagaagttgaaccagctgtgggagaaggcccagcgactttagccagggccctctgaaggatg

SEQ ID NO: 550088 - DNA, 87 bp, Homo sapiens
gaagatcatcgagcatttcaaacgcaatggctgccatccggaagaaactggtgattgttggtgatggagcctgtggaaagacatgct

SEQ ID NO: 550089 - DNA, 75 bp, Homo sapiens
cggcgccttcggcaaggtttacaagacatcacggctgcagccctggctacgggtgcctgcatcgtaggaatcctc

SEQ ID NO: 550090 - DNA, 100 bp, Homo sapiens
tggaccgagctgcggctgctgtgggtacaagaatattccacagatgtcctttgatgatacagaaagggagccagatcagacctttagtctgaaccgggat

SEQ ID NO: 550091 - DNA, 50 bp, Homo sapiens
agatcaccaatatccgacctagctttggcctagccgcccgtgactctcac

SEQ ID NO: 550092 - DNA, 76 bp, Homo sapiens
ggaagtgactcaaactgtgagaacttcagatacaacccggagtaggcgagaccaagaagtagccggtagagattac

SEQ ID NO: 550093 - DNA, 75 bp, Homo sapiens
agtgtcacatccaagatccgactccctgcacagacattgcctaagatactgagccatatcgccccagcattttgc

SEQ ID NO: 550094 - DNA, 82 bp, Homo sapiens
ttgggagaacttagagaaaaggatgatgccaggaaagaccaaagcagatgctgctgacccagcaccacttcccagccaggag

SEQ ID NO: 550095 - DNA, 100 bp, Homo sapiens
accttcagcaacctctgggaacacaaccaagcaatcatcaagcacctcctcggattggaacatcagttaacatctgaccactgccagcccaccccctccc

SEQ ID NO: 550096 - DNA, 78 bp, Homo sapiens
agggtttgaaacatggcggacgacgtagaccaggcatctaataggattcaggaatcaaagaatcagtgtactcaggtg

SEQ ID NO: 550097 - DNA, 100 bp, Homo sapiens
atatacgctttgttggtggactactctcagcctactatctgtctggagaagaggtcttatatccagatggccaggctcagatgattcaccccaagcctgc

SEQ ID NO: 550098 - DNA, 75 bp, Homo sapiens
gagccgtctgcaaagtgtccccggcaagaagtttgaagaaaacaggtctgaaacaaggtcttacccccagctgct

SEQ ID NO: 550099 - DNA, 96 bp, Homo sapiens
agccacatcacattggagtcacaatcaaagaactggatctttatctggcttactttgtccacactccgggaaggagactctaattttggattcctt

SEQ ID NO: 550100 - DNA, 50 bp, Homo sapiens
cctgcagcatgttttaatgagtgactgttaccggtattgtaagaacaagc

SEQ ID NO: 550101 - DNA, 98 bp, Homo sapiens
gtggcatctagactttggtttacatacaggaaaaactttccagccattgggtcccgggattcttgagctgtgcccagctgacgagcttttgaagatgg

SEQ ID NO: 550102 - DNA, 100 bp, Homo sapiens
gcaagatccagatcgggatttacgtggagatcaagcgcagcgatgtacaaggtgaatatcttaaccagacttgccgcagaattgaacaaatttatgctgg

SEQ ID NO: 550103 - DNA, 75 bp, Homo sapiens
cgggccatgctgacggaccccaagatggcagtgaacgtatactcaacgtcagtgaccagtgataacctaagtcga

SEQ ID NO: 550104 - DNA, 99 bp, Homo sapiens
ctggaacttgccctgtctcctcgcagatgaggaactgcaagcacatgttgaccagataactgaaatggcagcagtaatgaggaaagccattgaaattga

SEQ ID NO: 550105 - DNA, 100 bp, Homo sapiens
tccaatctaaataggcagtttttatttaggccgttaattaaggaaaagttgagccagggcgtgaccctcgtcgtggacagatacgcattttctggtgtgg

SEQ ID NO: 550106 - DNA, 98 bp, Homo sapiens
accctgtaaaagctgtaaaatgataacagagatgagcccatggattccacaatggatgatgctgttgcgggtgactttgcattgataaataaactgga

SEQ ID NO: 550107 - DNA, 51 bp, Homo sapiens
cccagagccacctgctggcatgaggacatgaaagctatgtgaccttctgcc

SEQ ID NO: 550108 - DNA, 100 bp, Homo sapiens
caaaatatgcaaagtgtgaccagtgtggaaacccaaagctcactcccactatctctacggacacatgctctccgccttccgggactagccatggccccca

SEQ ID NO: 550109 - DNA, 75 bp, Homo sapiens
caggggagttctctgtgtctgtgaagtgactctgacatcattagaagcatgccagaacagactggtgaaaagtaa

SEQ ID NO: 550110 - DNA, 82 bp, Homo sapiens
tgagatttctcatcaggcacaccaaccagcaggaccaggattatatgcgtcaggcaggagaagtgacttatgcagatgctca

SEQ ID NO: 550111 - DNA, 88 bp, Homo sapiens
gactttcagctacttgaagatagccatcagccgctacgtgactcttttctccaggtgacaaccaaagccaagcaactgaaggattcag

SEQ ID NO: 550112 - DNA, 82 bp, Homo sapiens
atgatgtgcgatgtgcggaagggcacctccacccgggactttgaacatgtcggggatcgccctcagcagactcgcccaggag

SEQ ID NO: 550113 - DNA, 100 bp, Homo sapiens
aaagagccctggaatgtgaagagacaggaggcagcagacggacatccaggttatgatgtgattgctcaagcccaatctgggactgggaaaacggccacat

SEQ ID NO: 550114 - DNA, 100 bp, Homo sapiens
gattctaaagcatctttaatctgccaggcggagggggctttgctggtctttcttggactattccagagagcgctggccgcgcgccgaacccgagtccggc

SEQ ID NO: 550115 - DNA, 100 bp, Homo sapiens
cgcggcgcagtcttcctgctttggcgttgtctctcagatcctgaggaggatgaaggggctggccctggaggccgagagtgagctggagagacaagacgaa

SEQ ID NO: 550116 - DNA, 75 bp, Homo sapiens
aaacagaacctgtccaggagctggcatgacgtgcaggtctctagcgcgtgagcatctgcctggagtgtaacagca

SEQ ID NO: 550117 - DNA, 75 bp, Homo sapiens
aagttcccaagtagaggagaggaagcggcagagggaggggacggcaaaacagaacagaaaggcggagataaaaag

SEQ ID NO: 550118 - DNA, 75 bp, Homo sapiens
tataagaagaagctgtctatgcaacaaaacggatagaagggacccaagtgctctcaggaattcagtggtttggac

SEQ ID NO: 550119 - DNA, 82 bp, Homo sapiens
agcgggccatctgcattgacccggcctacagcaaggcctacggcaggatggggcttgggcactgtttaaaggaaagttccga

SEQ ID NO: 550120 - DNA, 100 bp, Homo sapiens
cacgtggcacaagcgtgggggcagcctccctgtccggcaccagggtgtccgcaatgttgccagtgtctgtctgcagattggctacccaactgttgcatca

SEQ ID NO: 550121 - DNA, 58 bp, Homo sapiens
aagagtggctcacagctgaacgaatggcaactatgaaaatgatgttagacaaaaagca

SEQ ID NO: 550122 - DNA, 98 bp, Homo sapiens
cgggagcgtgggagcaggggctaccccatgcggtcacgcggggacccccgtaagacgccctgcatgccaatggaggcctgtgtcgccgagagtcgcag

SEQ ID NO: 550123 - DNA, 100 bp, Homo sapiens
cacctcacccacctgctgatgggccttgccagtggccgcattatccttatcctagagcaaaagtactttgactcaggagactacaacatggccaaagcca

SEQ ID NO: 550124 - DNA, 100 bp, Homo sapiens
gcccctcttccagataccatttggctttcggctgtgcaggtgattcgcaaggggtggctcaccatcagcaacattggcatcatgaaaggcggctcgaagg

SEQ ID NO: 550125 - DNA, 100 bp, Homo sapiens
ctgactctctcttttcctgataacatggccagcaagaaagtaattacagtgtttggagcaacagaacacagatatgtagaactcttcttgaattctacag

SEQ ID NO: 550126 - DNA, 100 bp, Homo sapiens
ccggactctgggtgttttgctaccgtgaccgtttagatttgcaaacacaatacctttttatggtaccatggtcaatcttcagcatgtggggagcaacatt

SEQ ID NO: 550127 - DNA, 75 bp, Homo sapiens
cagaatctgagattaaaaaaaacagttctatcattggtgactataagcagggaactgctcgcagaaagaagaagg

SEQ ID NO: 550128 - DNA, 98 bp, Homo sapiens
gaacatcttagcaatgagatgcaagccaaagaggaactggaacagaagtgcaagaaagatatgatccgccaaatgatgattaaaatatttcgctgcat

SEQ ID NO: 550129 - DNA, 135 bp, Homo sapiens
gtcaaaaccaaacaccctcagctccacattgagagcaaaatctacaagatgatgcagggaggagccaaaacaacttcccgacaagtggcagcacgatcttttcgacagtggcttcggcggtggtgccggcgtgga

SEQ ID NO: 550130 - DNA, 90 bp, Homo sapiens
ctggaacaactggtgctgatggctcccttggcgaaggagtctgtttttcaacccaggaagcaaaccagtccagctacgggggcccagcca

SEQ ID NO: 550131 - DNA, 100 bp, Homo sapiens
aggactcaggagcaaatcagtaatgaagttgccttaaagaatagacaagagctgtatgcactacctcctcctccccagttctactcaagccttattgaag

SEQ ID NO: 550132 - DNA, 82 bp, Homo sapiens
gcgaaacgaggaggagataacgcggccttgggctctgaaagaaatgaccgcccggatgtgccactgagagccccgcgggtct

SEQ ID NO: 550133 - DNA, 109 bp, Homo sapiens
cgcgccagaactgtactctccgagaggtcgttttcccgtccccgagagcaaggtgatctgcaactctttcaccatctgtaatgcggagatgcaggaagttggtgttggc

SEQ ID NO: 550134 - DNA, 75 bp, Homo sapiens
ctcggaatgcggagccgctcgtctcccgtcttttttaagatgtagtggaaccaaaggagaggggcaagctcctag

SEQ ID NO: 550135 - DNA, 100 bp, Homo sapiens
cttctcaacatttctgcagactgcctcaacagagtgataggtcaaaatgcagatcttcgtgaaaacccttaccggcaagaccatcacccttgaggtggag

SEQ ID NO: 550136 - DNA, 100 bp, Homo sapiens
tcgtcaaagtggccacttcacttcagagaagtgacaaagggttgtgggagacaagtagccaacagtatcataactggcaacaaaattgtgaatggaaaaa

SEQ ID NO: 550137 - DNA, 74 bp, Homo sapiens
ggggagtgctgatcaactaaaagaggattgacgtgtctcagaatgaccttccttgggaatttatggtcgatcgt

SEQ ID NO: 550138 - DNA, 100 bp, Homo sapiens
gagggcatcatggtcaagacttttgaagatagaatggatgacattattgacgatgtggagagttttgttgctgccgcggagatcctgaaagagagaggcg

SEQ ID NO: 550139 - DNA, 100 bp, Homo sapiens
gccttcaatactacctttatttccaccatagttccaggaaggatgttacctttgacgatgacagtgttaatcctgctgctgctccccacgggtcaggctg

SEQ ID NO: 550140 - DNA, 114 bp, Homo sapiens
ggatgttgagcactacagacctcacagtgccaaatggagctggaagcagtccagtggtcccaggtgctgttcccactgaatccatacaaggaagtacctttgaagagaagatat

SEQ ID NO: 550141 - DNA, 100 bp, Homo sapiens
gagaagatcggggggctgaaatccatcttcatcctaccgctccgccctggtattcatgggtagtttgaaatatccagatgagaatggatttgatgccttc

SEQ ID NO: 550142 - DNA, 100 bp, Homo sapiens
tgcaaaggccaatgttggtgctggcaaaaagttatgggttattgatgaaaagaactggaaacctgggagagtagatcacactgttggttggcccttggac

SEQ ID NO: 550143 - DNA, 99 bp, Homo sapiens
cgggagtgccgtgcgccgcagcccgggcccaggccccggcagcgcctgggacaaggtaacacgtacacagacctctcggccggaatctccagggatgac

SEQ ID NO: 550144 - DNA, 90 bp, Homo sapiens
gcctgaacagctatttaaataccaggaggactgccaggctcgtagtcaagctaagtgtgccaacaggagtatgtctccaaaccttttaaa

SEQ ID NO: 550145 - DNA, 90 bp, Homo sapiens
cttatactcccagcggggaggcgggcagctctgcccggcagaaacctgtcttatacctggactacagacgagtgcccaacagcaaccccc

SEQ ID NO: 550146 - DNA, 87 bp, Homo sapiens
gctccaacaggattccatggtagctgggatgttagggctcaggactgagcagggggaggaacatttaagctgatggaagtggaagtg

SEQ ID NO: 550147 - DNA, 50 bp, Homo sapiens
tggagaatgtggaagatgggacagaaactggcgatggaatatgagaggag

SEQ ID NO: 550148 - DNA, 51 bp, Homo sapiens
aagaaacgaacaacgctgctattataagtgggaaagcagtgccactctccg

SEQ ID NO: 550149 - DNA, 100 bp, Homo sapiens
gtcgaaggcaagacagttggaagggaagtcttgcagcctggtgggaatgaaggttctacagaaagtcaccagaggaaggagttaaagttcctcgtaattt

SEQ ID NO: 550150 - DNA, 83 bp, Homo sapiens
ggcagtacgggaagaacttcttcagaattagaaaggagctgcttcccaataaggaaacaacgcatcttctctccagactgccg

SEQ ID NO: 550151 - DNA, 100 bp, Homo sapiens
aatttctataccatggcccttactgtgagctgcttgtccccatcctgcggccgtcctggggacacagagccctccgtggtgcccggggattggattggag

SEQ ID NO: 550152 - DNA, 74 bp, Homo sapiens
cggaatactctgactcgaatacgactgaaactgttgaggagcccatggaggaagaagaagcagccaaagaagag

SEQ ID NO: 550153 - DNA, 98 bp, Homo sapiens
gtgtgtggccgcctcggacaagagacccagggatgatcatggtgattttactgctgcttgtggctatcgtggttgttgcagtctggccgaccaactga

SEQ ID NO: 550154 - DNA, 80 bp, Homo sapiens
aatccatgatcctcaccgatgtcgggaaggtcactgaacctgatcaaaatggtttcaatcccagaatactatgaaggcaa

SEQ ID NO: 550155 - DNA, 74 bp, Homo sapiens
atggcggccagcaggaggctgatgaagggagaagaaatgggtgaccgttggtgacacatccctacgaatctaca

SEQ ID NO: 550156 - DNA, 88 bp, Homo sapiens
ttgtcaggttgaaaatggaagagtaattgcctgctttgattccctaaagacacagctccgaattgattccttctttagattagcacaa

SEQ ID NO: 550157 - DNA, 50 bp, Homo sapiens
tgagagatgcggccccctcgcagggaaatctggcattttttaaagtttgc

SEQ ID NO: 550158 - DNA, 100 bp, Homo sapiens
atcgggtgtctctggaggtaaaccaggtgaagaatatgtaaagagcctaactgctaaccccgaactcatagatcgtcttgcttgtttgtctgaagaaggg

SEQ ID NO: 550159 - DNA, 73 bp, Homo sapiens
ccgatattcaccaagcgcttcgctacaagtgataagacagaggcaaccacaaagcttcatgacatggtagacc

SEQ ID NO: 550160 - DNA, 82 bp, Homo sapiens
gggaaaggggaaatgagttcaccagaaaccaacaggcagcacaggagggagtcgtcgcatggtggatgtcatggacgtgaac

SEQ ID NO: 550161 - DNA, 82 bp, Homo sapiens
ctgttctccaagaggcccagagacatgctgaaacatcgaagacctgaccctgcagctgctggctgtgcggaggaagagcaga

SEQ ID NO: 550162 - DNA, 75 bp, Homo sapiens
gaggacgatgacacagaacgcttgcccagcaaatgcgaagagcccattcagtcccgctgtgcagtcctccggtac

SEQ ID NO: 550163 - DNA, 50 bp, Homo sapiens
cgggcgggccgtcgcgggagagggagtgcatccgccccaacccttttccc

SEQ ID NO: 550164 - DNA, 75 bp, Homo sapiens
ggttatccagcacctggaggatacctgctacctgttttacacacgctggaaagattgggaatcatggtattctca

SEQ ID NO: 550165 - DNA, 89 bp, Homo sapiens
aggtgaagggccccgtaaattggaaggatgcacaagttccaaggttacgtttcaaatgtctacatattcaactttccccgccggggtgc

SEQ ID NO: 550166 - DNA, 49 bp, Homo sapiens
tcctctagtattctctatgctagaaagcttcatattctccaattcagcc

SEQ ID NO: 550167 - DNA, 87 bp, Homo sapiens
ggagtgtcctggacccagctgagcgggcggtcattcgcatcgcagaacccagcgggtgccgcttctccacccgaggcttccacctcc

SEQ ID NO: 550168 - DNA, 101 bp, Homo sapiens
tcggtgcgcctagcggatcggagctgcgcgcggaaccgtgctgccccgccccgctccacccgtgaggttggccacggacagagcgaaggggagaggatggt

SEQ ID NO: 550169 - DNA, 98 bp, Homo sapiens
caagtgcgcgccctggcgggtccggaccaagcatactggagcatagtgaaagagtctattttgaagcttcaaacttagtgctgctgcagaccaggaac

SEQ ID NO: 550170 - DNA, 100 bp, Homo sapiens
gtcattcattctcgatgtcgtgctaaatcagactgcatcaaaacatgtaaacaaggacctcggtaatatggaagaaaacaaaaagttagaagaaaacaat

SEQ ID NO: 550171 - DNA, 76 bp, Homo sapiens
gggtccctgaagagggaagacacgcggaaacaggttgattcttcaccacactgaaaccattaggaaaaatccttgt

SEQ ID NO: 550172 - DNA, 75 bp, Homo sapiens
atcatggtgcctggctgccaggcagatgtgttcagagcaacattgttttgttgacacaagcatttagaagaaagt

SEQ ID NO: 550173 - DNA, 75 bp, Homo sapiens
atcaacaatcaaagacaatatcaatgacaaactgacggaaaaggagagagaatacgtaggtaacctttccagaga

SEQ ID NO: 550174 - DNA, 75 bp, Homo sapiens
ccgggatttgggtcgcagttcttgtttgtggatcgctgtgatcgtcacttgcccgtggaccgggagcccgtggac

SEQ ID NO: 550175 - DNA, 100 bp, Homo sapiens
ctctattgcgcagctcgctgccgtgcgtttaacccaggcgaggaggaggaggagaaaattcccccagattcgggcagtctagggacaggaagatggttgg

SEQ ID NO: 550176 - DNA, 100 bp, Homo sapiens
gagagagagaaagaggaggggaggaggaggaggattcagggaataggagctggggagcccttctgcgccacaggacaatgaaaagcgaaccccattgcac

SEQ ID NO: 550177 - DNA, 100 bp, Homo sapiens
agaaggaggtgcagcctcccccacgtcaccaagagggtcacgcagcacaatgccagctctgcccctggaccaactccagatcacccacaaggacccgaag

SEQ ID NO: 550178 - DNA, 100 bp, Homo sapiens
gagcacaagatcatggtggggagtacggacgaccccagcgtgttcagcctccctgactccaaggcagtttggtggttatgccaaggaagcagactacgta

SEQ ID NO: 550179 - DNA, 127 bp, Homo sapiens
tgccgctatggatgatcgagaggatctggtgtaccaggcgaagctggccgagcaggctgagcgatacgacgtgtactaatggtcacttgatgtgcgctggctgttttatccacctactagcagatgc

SEQ ID NO: 550180 - DNA, 101 bp, Homo sapiens
ttcctcctgcttcccatcgaagctctagaaatgaatgtttccatctcttcagagatgaaccaggaggagagacttcagcatgcaaaccttcatctgttcgg

SEQ ID NO: 550181 - DNA, 74 bp, Homo sapiens
aaagaagcttctacaaaaagtttttaatgatacctgccgctcagctgatgttctaatcatgtcagataaagatg

SEQ ID NO: 550182 - DNA, 124 bp, Homo sapiens
gctcgctgggagagaggtacctctccttttccctctccctttccctaaggtacaccaggggttggaaaaaccacactaggcaaagaacttgcgtcaaaatcaggactgaaatacattaatgtgg

SEQ ID NO: 550183 - DNA, 75 bp, Homo sapiens
ccacggtagcgcagccgctctgagccctgggcatttccagctcgagagttccttcgaaagaagctgattgggaag

SEQ ID NO: 550184 - DNA, 88 bp, Homo sapiens
tgcgcttccccatggggctggcctgcggcgcctgggcgctctgagttccgatgaagttaaattccgtcaagatttaatgaatattgcg

SEQ ID NO: 550185 - DNA, 83 bp, Homo sapiens
cagagagctcacctaccacaaacagccaggtaaactctcttgatagagcccaagcagccaagaataaaggcaataaatatttt

SEQ ID NO: 550186 - DNA, 100 bp, Homo sapiens
gcggattaaagctaaagacatagttcctggtgatattgtagaaattgctggttgccaatgtggaactatactacagagcaatacagttctacttagaatt

SEQ ID NO: 550187 - DNA, 100 bp, Homo sapiens
ctgtatgactatgaggggcaggagcatgatgagctgagcttcaaggctggatatgtgatggcgtccagtttggagctgggataaggttcctgtagccgac

SEQ ID NO: 550188 - DNA, 80 bp, Homo sapiens
gctgagcacgttcttccaagaaaccaacattcccaacagccaccaccaccaccagatgctttcccaaactcagaagcaaa

SEQ ID NO: 550189 - DNA, 101 bp, Homo sapiens
gaatcccagctgcccctcccagaacactccatgccactggaactcaggagcgcaggtgagcgagtgctgtgctttcatgggcctcttctttatgaagcaaa

SEQ ID NO: 550190 - DNA, 74 bp, Homo sapiens
acagtgttaacaatgcatccacagagaacattcctgatgtagatgaagaaggctacagtattaaaccagaaaca

SEQ ID NO: 550191 - DNA, 97 bp, Homo sapiens
ggaattgtaggtattgaaaggaaactggaagaaaaaagaaaagaaactgacaaaaacatttctgaggtacctagtcgatagtcgctggttcaaacag

SEQ ID NO: 550192 - DNA, 50 bp, Homo sapiens
tgagagcgacgaagccaactgtccaggaatggaagttggatacactttgt

SEQ ID NO: 550193 - DNA, 100 bp, Homo sapiens
tgcacagagacgtgatgctggagaagcagtcatctggttactttagatttctggaatattccttactaatcacataaagtgggttggatgtcaaggaagc

SEQ ID NO: 550194 - DNA, 83 bp, Homo sapiens
ccgcgcgcagggcctgcagcgggagctggacggcgagcgcgagcggcgcgagaaactcctgcttcaggtgcagaaatacagcg

SEQ ID NO: 550195 - DNA, 88 bp, Homo sapiens
tacagcaaaagagtctacataggtggtgcttcccacctttatcctggagaagcgatctttgctggagatgtatgcagatttcatggcg

SEQ ID NO: 550196 - DNA, 100 bp, Homo sapiens
gacaagggtgttcccgaactagagtggctcaaatagctataactgtaccaaagacatggaagaaaccaaaagatcggacccgaaccactgaagagatgtt

SEQ ID NO: 550197 - DNA, 75 bp, Homo sapiens
atatgcaaacatgacctttcaagttcagtggctccacacaacctccaagagggaaaacatttctccagattatcc

SEQ ID NO: 550198 - DNA, 82 bp, Homo sapiens
gggactcctgtctacagagaaaaagaagatatgtatgacgagattattgagttaaagaaggcagtcatggatcaggtaatgc

SEQ ID NO: 550199 - DNA, 75 bp, Homo sapiens
caaattcaagagtgaccagggatgcctctgagaaccagaatgggaatggactgagtgccccaccaggtcccggtg

SEQ ID NO: 550200 - DNA, 83 bp, Homo sapiens
ccgccaactttcacgctgcctcggcggcccggcccggctcgacgccaatgggtgcaccctttgctcccgggctcatccaccat

SEQ ID NO: 550201 - DNA, 96 bp, Homo sapiens
cccggagcccctcctttggtgacccacagctatcccctgaggcccgacccagtattaaaggtggaagaaggtccatatctttttctgtgggtgctt

SEQ ID NO: 550202 - DNA, 75 bp, Homo sapiens
ctgcgctgtgatgcctgcagagctgtggcttaccaggtcagcccaaggctgccccctcggtcactctgttcccgc

SEQ ID NO: 550203 - DNA, 100 bp, Homo sapiens
tgattcagcctctactaaagttgtcatccgtggagcaggaaaccagtcaaatgccctacctagccacgtgaagatcagcgtttccaggcagacgcttttc

SEQ ID NO: 550204 - DNA, 83 bp, Homo sapiens
cttctgagacggcggcagcagcggcattcaggattcctacaggaagcaagtagtaattgatggagaaacctgtctcttggata

SEQ ID NO: 550205 - DNA, 50 bp, Homo sapiens
cagcgaccgggagaacatagacggtactccaaagattcaggtttactcac

SEQ ID NO: 550206 - DNA, 100 bp, Homo sapiens
gggtccggtgcaggtgaggggcgcgcgcctgcccagctttgcagcccccgaacgcggcctcgcacaggcatgggttggaattggagcctatcccccaacc

SEQ ID NO: 550207 - DNA, 100 bp, Homo sapiens
aaccatccattccaggagccagctatctgaggatgagcaattcttaggttttggctcagatgaagaagtcagagtgcgaagtcccacaaggtctccttca

SEQ ID NO: 550208 - DNA, 50 bp, Homo sapiens
cggcgacgcagcccgcggcagaagccctgggcgctgcctatggcacagcc

SEQ ID NO: 550209 - DNA, 90 bp, Homo sapiens
caaattggcgtttgtcatcagaatcagaggtggcctggtttgctttcgaccctggctcggcgcactcggacatcatcctctccaatgaca

SEQ ID NO: 550210 - DNA, 50 bp, Homo sapiens
ctggctctgctgaccttgtgccttgatttctacctggacaaggactggta

SEQ ID NO: 550211 - DNA, 83 bp, Homo sapiens
cagggatttcctaccattaagatttttggatccaacaaaaacagaccagaagattaccaagggctacttctacaagtccgaac

SEQ ID NO: 550212 - DNA, 100 bp, Homo sapiens
cgagacagtgacattttatttacccttcctaacctctccaaaaaaggcctatcatggtcaccatcaagcactggaagtgttggtacagtctttgttagat

SEQ ID NO: 550213 - DNA, 99 bp, Homo sapiens
ctcaatatctgtcttcggtggactccttcggcagtccacccaccgccgccgcctcccagtgtactaatggtcacttgatgtgcgctggctgttttatcc

SEQ ID NO: 550214 - DNA, 93 bp, Homo sapiens
gccagtgtttccgtcagtacgcgaaggatatcggtttcattaagagagaagtggagatcctgatgtttctcagtgccattgtgatgatgaaga

SEQ ID NO: 550215 - DNA, 100 bp, Homo sapiens
ccgcttcctgtccgactgtggtgtctttgctgagggtcacattgagctgcaggttgaatccggggtgcctttagcccaaagagtcgattgatccaattaa

SEQ ID NO: 550216 - DNA, 82 bp, Homo sapiens
gcgaggccacctcacccgcagcggaatggaaaccggttcgacaggtaacaaataggaactgtggctgcaccatctgtcttca

SEQ ID NO: 550217 - DNA, 100 bp, Homo sapiens
ctaactggggctacgactctgatgggcaggtggacccaagtggagagattgtggaactggcgaaaggtgcatgtccctggaaggagcatctctaccacct

SEQ ID NO: 550218 - DNA, 75 bp, Homo sapiens
gaggatttatagatcagaatctcagtccaacaaaagactcacagatgaatgcttctcacccggaaacaaacttgc

SEQ ID NO: 550219 - DNA, 90 bp, Homo sapiens
ttgaggcctggctctgaattacatctgacccccaaagctcagcagctcggggtgtggttttctctcggttgtgcctatttggccttggaa

SEQ ID NO: 550220 - DNA, 83 bp, Homo sapiens
gaggcccatgacccgctagttgaagcactagttacagaagcatggagaaggctagaaaggcgaggattaaatccaccacacag

SEQ ID NO: 550221 - DNA, 97 bp, Homo sapiens
gcggcgggagctggacgcgggaggaggcggcggcggcgccctggaacagctgctgacagagttggatgacttcctcaagattcttgaccaggagaac

SEQ ID NO: 550222 - DNA, 100 bp, Homo sapiens
cagaagtccaacaagagaatataatcaatcctcaagacctaacagctaaaagatacctacttacagataatgtggtgaaattaaaagaatttcaacaaaa

SEQ ID NO: 550223 - DNA, 75 bp, Homo sapiens
cactttccagcagcatcacctgcacagaccagctcctctggtgcaagtgtggtagctattgacaacaaaatcgag

SEQ ID NO: 550224 - DNA, 82 bp, Homo sapiens
gtgaagaacgccgccatccagccaccattccaagggtctccgtctctccaccgggggcttcatccttccagggaggagaaga

SEQ ID NO: 550225 - DNA, 75 bp, Homo sapiens
aagatgtcctcttagtgcttggcagattagtactgtctataagaaggagaaagctcgagtcatcactgaggaaga

SEQ ID NO: 550226 - DNA, 99 bp, Homo sapiens
ggcagcagcgcgggccagagcgcagcgccgagcgcggcccgggcgccatcgagccttggcggcggacgtgcagcactagaaagtttgggatttggctct

SEQ ID NO: 550227 - DNA, 75 bp, Homo sapiens
gtcatggcccggcatcggaatgttcgaggctataactacgatgaaggacatccaggcagaaattgatgcccacaa

SEQ ID NO: 550228 - DNA, 100 bp, Homo sapiens
agtcctatgattatggaggaagtggaggaccctatagcaattgatattcactgatggactccaaagaatcattaactcctggtagagaagaaaaccccag

SEQ ID NO: 550229 - DNA, 82 bp, Homo sapiens
tgaaatttttaagacacgctgcaacaaagcagaaacacagtgctctgtgcctatacagtgtacggataaaacagataaacaa

SEQ ID NO: 550230 - DNA, 102 bp, Homo sapiens
tggaccagcggtatctcagccctggatggtgaatttcagtcagcctcagaggttgacttctacattgataagcctagatattatcctactgaagatgtgcct

SEQ ID NO: 550231 - DNA, 108 bp, Homo sapiens
gggcagcccggccccgctgagcgatcccaccgaagcagcgtgtcctccgtgggagcccgaggcctctaagaaatatgtctccaaagaacttgccaaagagattcgtgt

SEQ ID NO: 550232 - DNA, 98 bp, Homo sapiens
gtcggaagagacattagaggtcatccaaagcagccgtcccctctgcagcctctctgacaagtgagtgggaaaccacccatcaatgatatgttcacaga

SEQ ID NO: 550233 - DNA, 100 bp, Homo sapiens
actcgcctgccagagagtgtggaaagactcacaggcgtgagcatctcccaggtccctgagctgcggaagaaatctcgccgagagtacctggctaagcggg

SEQ ID NO: 550234 - DNA, 74 bp, Homo sapiens
aaatgcatgctccacccattaatatggaaagggacgtccagatcggtgacatcgtcacagtgggcgagtgccgg

SEQ ID NO: 550235 - DNA, 98 bp, Homo sapiens
cgtgcacattctctgttctaagtgccttaagagaggatcgcccaatccacatgcttttccagggcgatgccagtccctccactccagaggagaacgaa

SEQ ID NO: 550236 - DNA, 88 bp, Homo sapiens
actgctggggtggtggttccaatgagacagggcacaccaaactccatctgctccagctcaaggtccctgctgaaggtcggagagcttg

SEQ ID NO: 550237 - DNA, 100 bp, Homo sapiens
gcctcctcctcctcagtaacgcgggtacttcatagacagcagtctcagccagccaaggagagttcccctcccagagaagaagcgcctcccccacctcctc

SEQ ID NO: 550238 - DNA, 60 bp, Homo sapiens
cgcacccacgcccctcaccccccgagagccgttgacgaaggatcagagattggtgtattc

SEQ ID NO: 550239 - DNA, 100 bp, Homo sapiens
gtttttctccagaatcatgtcagattttttttggaatcactgcctgcctttctcaggtgcccagtcccctggaaggcagtgaaggggacggagacactga

SEQ ID NO: 550240 - DNA, 90 bp, Homo sapiens
gcagtgacgagcggccgaagcagctttgcggtcatactactagatattacactggaacttcagaagcaaattatgtctgaattggaaatt

SEQ ID NO: 550241 - DNA, 82 bp, Homo sapiens
acctgtctgggtctcagccgccaaagaccccgtccggtaggtgcaatggatgagcttcatagtctggatccaagaaggcaag

SEQ ID NO: 550242 - DNA, 90 bp, Homo sapiens
tctggaagctgagggcacgtgtttgcggttcagccctttgatgaccgcagcagtttcctctcccctgaggctgcctccccagcacccaac

SEQ ID NO: 550243 - DNA, 75 bp, Homo sapiens
ggaagaagaagacttggaaatggagtccgtgacattgccgagaatggctgcgcccccaccccagaagagcagctg

SEQ ID NO: 550244 - DNA, 88 bp, Homo sapiens
tctttgggggcagcctgcagaggctgcgcactggcctgtgtttgtggaggtgaaagaccttttgacattggtgccgcccctggtgggc

SEQ ID NO: 550245 - DNA, 114 bp, Homo sapiens
gtggtcaagcgggccacgcacctcgtcaccaaggccaagctggagaggacttcacctctgtggtctcagaaatcatgatgtacatccttctggtcttcctcaccttgtggctgc

SEQ ID NO: 550246 - DNA, 76 bp, Homo sapiens
taagaggaaagcgatggaggagctgagcgctgatgaggaatatgacagaactgatggtttttcacacagtcccttt

SEQ ID NO: 550247 - DNA, 98 bp, Homo sapiens
ctgaatgaagaagagggaaggacggttagtcaggtgctggagaatctggtaaaagcaccattgtgaagcagatgaggatcctgcatgttaatgggttt

SEQ ID NO: 550248 - DNA, 51 bp, Homo sapiens
gagctgcacccgctgccccagctcaaaggcaggcagaagtcctgaaggctg

SEQ ID NO: 550249 - DNA, 98 bp, Homo sapiens
cagaaagcagctccataggggaggagagccacgcaggatctcacagctgcagtctaatagtaacacagaggttgagtaccttgtacagcagaatgtaa

SEQ ID NO: 550250 - DNA, 75 bp, Homo sapiens
tttcagcgtaaactgcagcatgatgttctgaagcttgagattttgaacacagcacgaaaacattttggagctggt

SEQ ID NO: 550251 - DNA, 77 bp, Homo sapiens
gtccggagctagctggatcctctaggcagggtgataaaagaaaatgtggctgaagttacccgaagttcagcttgcag

SEQ ID NO: 550252 - DNA, 83 bp, Homo sapiens
tgattgcgttacaagctttgtctccttcgacttggagtctttgtccaggacgccgccgccatgatcctgctggaggtgaacaa

SEQ ID NO: 550253 - DNA, 97 bp, Homo sapiens
tccccgggagtgatgcctcttagtcttctcagctttctacaagttctgattaaagtcagaaatagacacaatgatgtggttcctacaatggcacaag

SEQ ID NO: 550254 - DNA, 74 bp, Homo sapiens
tacaatcacagatccttctgttattgttatggctgattggttaaagtttcagaaacaactctccaagttccatt

SEQ ID NO: 550255 - DNA, 100 bp, Homo sapiens
aggctgcctataatcaagtaaaaacaatagctcaaggaaacctttccaacacagatgtccaagctgccaagtttatttcacagagcagtgtacattcttg

SEQ ID NO: 550256 - DNA, 98 bp, Homo sapiens
gcaggagagggtagttgtgcttccctaggctgtaggttccatgaggacaggccttgagtctgtcctggtctctggaatcacggtgtctagtagaggcc

SEQ ID NO: 550257 - DNA, 82 bp, Homo sapiens
gagaaggccaagaagcagctcctgcatctggcggaggagaagcccgtgctttgaagaagaggagcacttcaaggtgctggtg

SEQ ID NO: 550258 - DNA, 48 bp, Homo sapiens
gcccggactcggacgcgtggtagggtgtatctgccgtacagcaaaagc

SEQ ID NO: 550259 - DNA, 75 bp, Homo sapiens
aagatttaacattccaacacataaaaattatttatccaacagctcctcccagcctgagattcctgaacgcctctg

SEQ ID NO: 550260 - DNA, 88 bp, Homo sapiens
cgcggttagcccgtcagtccctgctctgtgcgcgcctccatctgggccatggatggatgattaaacttcaggaagtatttaaggcatt

SEQ ID NO: 550261 - DNA, 83 bp, Homo sapiens
gccccggaacccgagctggagctgaagcgcaggctgcggggcgcggagtcgggaggtttggtgcacctcgatttggaggaagt

SEQ ID NO: 550262 - DNA, 98 bp, Homo sapiens
gtcatctcgcagaacgccatcaaccagctgtgttggagcgggccggagagaagtagagtgggctgcgaggagaaggaaacaggcctttcggaggctcc

SEQ ID NO: 550263 - DNA, 82 bp, Homo sapiens
ctatgggatgccaccttcagcctctgcagcggagctggagtttgttcagatcatcatcatcgtggtggtgatgatggtgatg

SEQ ID NO: 550264 - DNA, 75 bp, Homo sapiens
gccgttggctccagacaaataaacatggagtccatcttccacgagaaagttcaagaagacgtggaagctgcgggc

SEQ ID NO: 550265 - DNA, 87 bp, Homo sapiens
aagggtccccccggggcctgtaaggggtgcctgcgaggaattaaggaatttgcaagagcaaatgaaggccttacaagagcagctaaa

SEQ ID NO: 550266 - DNA, 83 bp, Homo sapiens
tcagtgctactcaggttccagcaagacctggagcaggtgcagggcccctgggtagacagacacagcttgatttcagagcagac

SEQ ID NO: 550267 - DNA, 100 bp, Homo sapiens
aatgcgggatattggcactgccatccagtttctgcacagccataacattgcccaccgagatgtcaaggagcggaagctgtgtgcctatcctcggctggag

SEQ ID NO: 550268 - DNA, 100 bp, Homo sapiens
actctacagagatgtgatgcaagaaacctttgttaacttggcctctatagaaactgggagtgatttttccatgtttgaagctttgcgagatactatttat

SEQ ID NO: 550269 - DNA, 97 bp, Homo sapiens
gagttcctggtcgttcccacagccattctggcgttcctggtcaatcatgacttcacccctctggaggctccggggaaagggtctagccatgctgcat

SEQ ID NO: 550270 - DNA, 83 bp, Homo sapiens
cctgctgctactgtgtccagcgcagatcctgataacttaagtgactctctcttttccggtgatgaagaaaatgctgggactga

SEQ ID NO: 550271 - DNA, 101 bp, Homo sapiens
atcttccagagaactttcgaagaccacagacagatcaaaatccctcactttaaggaggttatcatcatggctaccaactgcgagaactgtgggcatcggac

SEQ ID NO: 550272 - DNA, 74 bp, Homo sapiens
gagtttgatgttgttgaaggagaaaagggtgcttatttgagaaatgatatatttgaagacgctggaatactctg

SEQ ID NO: 550273 - DNA, 82 bp, Homo sapiens
tattgttcagttacaagagaaactttatgtgcctgtaaaagaatacccagatgtagaaataacacttcaggatatcaatgac

SEQ ID NO: 550274 - DNA, 75 bp, Homo sapiens
ggagaagatcctggacatgaagaccgagggggtacgcatagctgctaaattcatcactcatgcacccccagggga

SEQ ID NO: 550275 - DNA, 100 bp, Homo sapiens
cttttctgctgtctgcttgcagtgttgatggtggtggtgctggtcatcaatgttactcaggtagagacaaggacgagtgctccaaggataacggcggctg

SEQ ID NO: 550276 - DNA, 90 bp, Homo sapiens
ttcccacccgttcgtttttagctcggctgccgaacttcattgcacagttgagactctaaaatagagctcaagcttgagaagagagaacca

SEQ ID NO: 550277 - DNA, 80 bp, Homo sapiens
atcatgaccttccagaattacgggcaagcgctgttcaaacccatgaagaaacatgccctgaactgtcacagaatgaaacc

SEQ ID NO: 550278 - DNA, 100 bp, Homo sapiens
cgctgtttgatattcatagatctccagcaagaagaagccatattagggcttttttccagacttcaagctcccattccaacagtaagagcttcttccacat

SEQ ID NO: 550279 - DNA, 75 bp, Homo sapiens
gtttgatgattctgagcctgttcagaaagtccttagcaacaggctatcagttgagggatttgcagttgataaaat

SEQ ID NO: 550280 - DNA, 75 bp, Homo sapiens
gtttgatcatgcttatggtaactatatggctaaaataaatgaagctgtagaatgcttactgtccctgaaggctca

SEQ ID NO: 550281 - DNA, 100 bp, Homo sapiens
gccgctgtgtgcaaagttcctattgatggtccccccatagcatgcccaagagaatcgtaaatgcaaaaattgcttgccttgacttcagcctgcaaaaaac

SEQ ID NO: 550282 - DNA, 90 bp, Homo sapiens
agaatgatcatgattttcttgaaaaggaccttgtagaacctctttgcagagcattgaatgaaatgtggaaatgtcaaaatctgctccgac

SEQ ID NO: 550283 - DNA, 88 bp, Homo sapiens
ctgatagtaagaaggtggaggaagacttaaaggcagacgaaccatcaagtgaggaaagtgatctagagtttcactcttattgcccagg

SEQ ID NO: 550284 - DNA, 83 bp, Homo sapiens
aagcctacgggatccgctttgacgtgatggtgaacggcaaggaaagattctgaagcttggcggagaggggtgtgtgagtggac

SEQ ID NO: 550285 - DNA, 95 bp, Homo sapiens
agcacctgaccaaaaagatgctgtatgacatggaaaatccacctgctgacgaatactttggaaccaacttcacccttgccgaactgggcatctgt

SEQ ID NO: 550286 - DNA, 117 bp, Homo sapiens
ggatttagtgtccagtgcgaaaaccaaagtggtggtcaccatggagcattctgcaaagcgggctacattgagagacctcagctgattcgagcaaaagtgccaattgtgaagttcagg

SEQ ID NO: 550287 - DNA, 99 bp, Homo sapiens
tgcgggacgatgcctgagcaggagagacagatcacagccagagaaggggccagtcggaaaggaagaaacccttttttcttggagccagcaataattatc

SEQ ID NO: 550288 - DNA, 88 bp, Homo sapiens
ttggcggcataccaccctgcactgtgagtcattgaaattatgagactatcattcaaatggaagcattatagttcttcggaaccattat

SEQ ID NO: 550289 - DNA, 75 bp, Homo sapiens
tcactgcggagaggtgtttggtgcagaaggcgtgccttcagatgctgattcttctgctgccagtaataaaataag

SEQ ID NO: 550290 - DNA, 74 bp, Homo sapiens
ggccccacaacaaaagaggtccagcccctcagagggattgtgtccacctggtcacagtcgaactgttattggaa

SEQ ID NO: 550291 - DNA, 74 bp, Homo sapiens
gccgccgcccggcccgcgatgtcaccattgttcagctgggtggccaaggtactaggttttgacaagcttgcatc

SEQ ID NO: 550292 - DNA, 100 bp, Homo sapiens
aatcagtccttcctttccgacttagtcctcgggaagaagtttcagactacaagaatgcaggctcaacagtaccagcagcagcgtcgaaaatttgcagctg

SEQ ID NO: 550293 - DNA, 73 bp, Homo sapiens
ctccaaatccttagctcagagctggaggatgaaggatcggagtgaagatagtccaagtcctaagagacagcgc

SEQ ID NO: 550294 - DNA, 82 bp, Homo sapiens
gctacggggaagtaatggtatccggccaattgagattcggagttaaaacaggaagtgggaaaactcttgcctttgccatccc

SEQ ID NO: 550295 - DNA, 100 bp, Homo sapiens
caacaatcaaagacaatatcaatgacaaactgacggaaaaggagagagagtcagaagagatcaattctacagaaatttccagtggttctgttgaggcttt

SEQ ID NO: 550296 - DNA, 100 bp, Homo sapiens
cgccgcacagtgccccccgctgtcactgggatacccacccaccatcccagggtctacaacatccacagccggaccgtcacccgctatcctgccaactcta

SEQ ID NO: 550297 - DNA, 88 bp, Homo sapiens
gtacacctgttgtttgaaagctctcagcgggacaatgctgacccaggtctccatcatcaccagttccagtagtgaaaaacagaaccca

SEQ ID NO: 550298 - DNA, 75 bp, Homo sapiens
gctgaacggatggctgagggagccccgcggatcgtttaggaaagccggccaggttgcagtgagagcagatgctgg

SEQ ID NO: 550299 - DNA, 100 bp, Homo sapiens
cttttcctctgtgccacccactttggggagccattagaaaaggtggcctctgtggggaattctagacccacagtatgtccgtggttcagaccctgtatta

SEQ ID NO: 550300 - DNA, 101 bp, Homo sapiens
aggcgctgaaggatggctggaccagctctatgttctatgatgaggatggggatctggctcacgagttctatgaggagacaatcgtcaccaagaacgggcag

SEQ ID NO: 550301 - DNA, 82 bp, Homo sapiens
gacaagccgctggcagccgcggatctcaccgccgctcagggatttcagatgcatgccaggtttccactgattgccagaactc

SEQ ID NO: 550302 - DNA, 74 bp, Homo sapiens
gcacggacgcacgccactttttctctgctgatccagttattttaccaagaaaatggtttgcacgactttgaaca

SEQ ID NO: 550303 - DNA, 100 bp, Homo sapiens
ttcacgtggactccgtgctgcctgtgccacccattgaatttggagtcagtccaaaacttcctgggtctgcaggtccagccggctggcaccctccatgtac

SEQ ID NO: 550304 - DNA, 102 bp, Homo sapiens
aagatggtgcagaagaaaccagccgaacttcagggtttccaccgttcgttcaagcaaaatgatgcttcaacacccaggccaggtctctgcctcggaagtgag

SEQ ID NO: 550305 - DNA, 98 bp, Homo sapiens
ggtgtttatgtctttgtgaaaaatgggataatggatacagtacaatttggaaaagctgggcttcgctgacttgaacctggccgagtttgcgggctcgg

SEQ ID NO: 550306 - DNA, 100 bp, Homo sapiens
gcctcctgagtagctgcgattacagctttgtcagtggaaatgcctgccccagagggatattgcttcagttgacctcattttttaaggaccctggctctgc

SEQ ID NO: 550307 - DNA, 100 bp, Homo sapiens
gcgacacgctgggcgtcggcaccttcggcaaagtgaagaattaactgctgaagtactgatcgagttctgcatttcttcaatgaggaactacaggctgatc

SEQ ID NO: 550308 - DNA, 75 bp, Homo sapiens
ccaaataccagctcgacaaagatggggttgtcctctttaagaaggtgctggaggcgctgctgccgctgaagggcc

SEQ ID NO: 550309 - DNA, 83 bp, Homo sapiens
cacacaatgtcggggatggacctccagatttccttactgtgcctccggagccagcgtggtggccatagacaacaagatcgaac

SEQ ID NO: 550310 - DNA, 75 bp, Homo sapiens
cgccgagctggacccggaccggttttgggatgggtttgtggagttcttccatgtagaggacctagaaggtggcat

SEQ ID NO: 550311 - DNA, 75 bp, Homo sapiens
cctcaaggccatgatcaaaacgaacccaagacagaccaggatgaggagcattgccggaaagtcaacgagtatctg

SEQ ID NO: 550312 - DNA, 76 bp, Homo sapiens
tgtggtggtctactctgatgtcaatcttgagggctaggttcgatacaagaggctgttttcctagcgtggcttgctg

SEQ ID NO: 550313 - DNA, 132 bp, Homo sapiens
ctttggctcggtgggtactgtcgcggaggcttgtcattctgacccggggattcctcacagcgtctggcagaatatcgataacttgatgaccccagaaggagttggccttaccactgccttacgtgttctctg

SEQ ID NO: 550314 - DNA, 101 bp, Homo sapiens
caaatggggcaggaaattgggaatgaattggatgaacaaaatgggctcattgtcatccccaagccaggccagttctccaggtggaactgtagtgtagcgac

SEQ ID NO: 550315 - DNA, 101 bp, Homo sapiens
cgccggggacgaaacaataaagaccggaagctgagtttttatcccaactccgaagtcaagcccgcactctgattacctttgctggaatgataccataccga

SEQ ID NO: 550316 - DNA, 82 bp, Homo sapiens
ttctttagttattttatttattcacttaacattaccaagagagattctccctgagaaacaagcagaattttttgaaccatgg

SEQ ID NO: 550317 - DNA, 98 bp, Homo sapiens
tttgccaaagaaacataagaagaaaaaggagcggaagtcattgccagaagaagatgtagcctggccagacgcaccgggtctgcctcctcatctgcaac

SEQ ID NO: 550318 - DNA, 50 bp, Homo sapiens
ggacgctctggaccagcacctccaacggaccccactgaaaatcggactgt

SEQ ID NO: 550319 - DNA, 82 bp, Homo sapiens
ctgactccggaaagcttcgatcagaagatggctcgttcggaacaccacctggatacggctgcgctgcagaccgggcagagga

SEQ ID NO: 550320 - DNA, 99 bp, Homo sapiens
caggaatctggcacttggctttttacaatgacggaaaggagtcagaagtggtttcctttctcaccactgccattggttaaacccatccagagtaatggc

SEQ ID NO: 550321 - DNA, 50 bp, Homo sapiens
cagacgcctcacttaggacaatactatactggcaattgctggagaagatt

SEQ ID NO: 550322 - DNA, 100 bp, Homo sapiens
gtgggcccgcttcgaggtggagagagcccagtgggaggtggagcgggcggagctgcaggtgtccctggccagtgtccttccacctgtccacaagcatggg

SEQ ID NO: 550323 - DNA, 100 bp, Homo sapiens
ccgcccgggagggccggggccgcgctcagtactatactggcaattgctggagaagattttgcaattgttgcttctgatactcgattgagtgaagggtttt

SEQ ID NO: 550324 - DNA, 100 bp, Homo sapiens
ctcaggactggagtgcctcatgaactgttgaagcccagattaagatgttctacgaggagcatttgcacttggacgatgagatccgctacatcctggatgg

SEQ ID NO: 550325 - DNA, 100 bp, Homo sapiens
gaaaaccctgtgccagggacaggaaagataggagattaaagcaaggagagccaatcatgactggcaaaacacagaccagcaacgtcaccaataagaatga

SEQ ID NO: 550326 - DNA, 51 bp, Homo sapiens
caaatgaagcagcgctttgaaaggatgtacagttacccagcacgtgtacct

SEQ ID NO: 550327 - DNA, 80 bp, Homo sapiens
gagcagaaccccaggactgcgcccccgggagcgggcgcccagagacaatgcagatcttcgtgaagactctgactggtaag

SEQ ID NO: 550328 - DNA, 82 bp, Homo sapiens
aaaggggtgcctgtgattagtgtaaaaacgtccgggtccaaagagagatgttctaagaacggaagcatctgggctggatgga

SEQ ID NO: 550329 - DNA, 100 bp, Homo sapiens
gcgcaaatctatttgggaaaaccaagtagacctccacacctactgctggagtgcaatccaggtcctggtgcttgatggtcgaggccatctcctgggccgc

SEQ ID NO: 550330 - DNA, 82 bp, Homo sapiens
ctccattggatttaaaagacagtcctcgtcagcactgactttcagctatggaatcgcaaattgtggctactaatttgccccc

SEQ ID NO: 550331 - DNA, 100 bp, Homo sapiens
ccttggagaaacacaggaggaggaggatgagattcttccaaggaaagactatgagaacaccaatcagggtcttcaggcctggaagattgaagacattcca

SEQ ID NO: 550332 - DNA, 99 bp, Homo sapiens
cccaccgtttccccctgttgcagggttttgtttatataactcaagttgtttggctaaattcttcagctgtgatgcagatccatccgccctagcaaaata

SEQ ID NO: 550333 - DNA, 107 bp, Homo sapiens
ttctccactgttcctggaggaatccgagaagagcagagcggagggagccccagacacgcaaccatgtccaagggacctgcagttggtattgatcttggcaccaccta

SEQ ID NO: 550334 - DNA, 74 bp, Homo sapiens
cctacgaaagaaagctcatcgagacaagttggatggcttgaggactggtactaaaaggaaacgtgactgggagg

SEQ ID NO: 550335 - DNA, 100 bp, Homo sapiens
gcagcagtgatggtggcagcaacaaggagggaaaaaagagcaggtggaaaaggaaagaacattctagtatgccagtagaaaaaaatatcactttagaaag

SEQ ID NO: 550336 - DNA, 75 bp, Homo sapiens
cacacatccccgaccacttgcggcctgagtatgatctgtggctggactgtagttgcagcaggccccagagagtga

SEQ ID NO: 550337 - DNA, 100 bp, Homo sapiens
ggaagcctggggaaatcccagcagcccgtattcagcaggggtcgggccccggctcagtggtcccaggcagctcgggtgtcggaacccccagacagttcac

SEQ ID NO: 550338 - DNA, 101 bp, Homo sapiens
gttgaggatctttgctcttccatccgcctttgatcgtcttcctcttcagccatccaggtgtttgccgcctggtcctggtcgtgctgagcctgtggccagat

SEQ ID NO: 550339 - DNA, 83 bp, Homo sapiens
cgcgagagggggaaaagcgagcgatcgagcgagcgcgcgcgcgaaaactccgggcagtatctgacgaagcaagtggaacttct

SEQ ID NO: 550340 - DNA, 98 bp, Homo sapiens
ggggcccggtatggaggtgggctagaggccgacgccagccagagagcgatcctgtgcttgatgctggaatacaacatcatcgacaacaacgacaccca

SEQ ID NO: 550341 - DNA, 83 bp, Homo sapiens
agtgccttctcgctgccgcgcgcccaagctcggcggacggcagtgccccaggtcaaaatgcagatcttcgtgaaaacccttac

SEQ ID NO: 550342 - DNA, 100 bp, Homo sapiens
tgctctcagtcatccttacccctaaagaaggagagtccagggatgtgactgtcttctgaagattgatgtctatttccttgagctctttaattttgttgcc

SEQ ID NO: 550343 - DNA, 95 bp, Homo sapiens
gctggactgctcagggtgccagacctcatctaaccaaaatatccactgaggatgatggattggtgcggaacattgatggaataggtgatcaggaa

SEQ ID NO: 550344 - DNA, 51 bp, Homo sapiens
gccagatttctccactgtaaaggttcagctgaatccagaacttggtgttaa

SEQ ID NO: 550345 - DNA, 75 bp, Homo sapiens
ctctcctgatctggcctcatctgttccagggaggtgggattgaattcgggaactggagcctctcctctgtcacag

SEQ ID NO: 550346 - DNA, 96 bp, Homo sapiens
ctggcctggcacaagaagatctacatcttccagggagaggcagctgagatcagaagagaccagctggagtcattatttagaagcaaggtccttgaa

SEQ ID NO: 550347 - DNA, 83 bp, Homo sapiens
cctaacagtacaaaagtccagaggagttttccgtctgatgaaggttggccatttgcaaagtatcttggagcttgtggaagaat

SEQ ID NO: 550348 - DNA, 100 bp, Homo sapiens
cgcccagtttagcgtaaaccgggaagcggatcgcgtggagtgaaagtcaccgcagcgatatccctcctaaatgtacaatcaaggatttgctaccaaaaga

SEQ ID NO: 550349 - DNA, 88 bp, Homo sapiens
cagattatatcgcatcctatggctcaaagaaagatgattatagttcgtaaactcctggttgatgcaattcataatcaactaactgaca

SEQ ID NO: 550350 - DNA, 50 bp, Homo sapiens
tgcaagcatctgggccatcttcaatgaattactgaaccttcaacatgcct

SEQ ID NO: 550351 - DNA, 50 bp, Homo sapiens
ctgaggtggtgcgcggctccgtgctcctgaacccaagcaaacctcacttt

SEQ ID NO: 550352 - DNA, 83 bp, Homo sapiens
gggcgctcgagacttaccagagccacaagattcccctcttcccgcggcctcgccatggcgacccacggacagacttgcgcgcg

SEQ ID NO: 550353 - DNA, 75 bp, Homo sapiens
tcgtctttatgcagaagagggggacatcaaagacgtcagactggatggcgagtcccagtgaggcgatgtgggcag

SEQ ID NO: 550354 - DNA, 75 bp, Homo sapiens
aacctgtggaaatgcagaaaagcttgcagaatatatttgttccatcaccaggagactaaagtccatcaaaaacat

SEQ ID NO: 550355 - DNA, 112 bp, Homo sapiens
tgacctcatggatgaacttcaggatgttcagctcacagagatcaaaccacttctaaatgataaggacgagattgaggagctgcgggccgagatgctggagatgcgggacgtc

SEQ ID NO: 550356 - DNA, 82 bp, Homo sapiens
ctgagacacaaagtcttgatgagtctgctccctctggctcggccatcaccatcgaggctgagccaagagctgatggcagccg

SEQ ID NO: 550357 - DNA, 98 bp, Homo sapiens
cgagtgcagccggtgacccggcgagaggcggcgccgctcccaagatgtcgcagacggccatgtccgaaacctacgaactattactttggcttatgtaa

SEQ ID NO: 550358 - DNA, 75 bp, Homo sapiens
ttttatgaaaaaaacaggagcttaatgcctagcctcgatgacttacgagccctcaaggggaagcattttctcctg

SEQ ID NO: 550359 - DNA, 98 bp, Homo sapiens
ggaaatcgtgcacttgcaggccgggcagtgcggcaaccaaatcggcgccaagggggcggaggaaagcgcaaagggaaaagcaagaagtggaaagaaat

SEQ ID NO: 550360 - DNA, 97 bp, Homo sapiens
gtcacaatcaggaagaaacatctccaaagacccatctttaggtgcgagaagatgtactaaattcattgaataacaactttcttcaaacgctaaatca

SEQ ID NO: 550361 - DNA, 100 bp, Homo sapiens
cattgtttgtcaccacaaaaaggacaggaattatccagactgccttgccactagatgaatggaagacaatgatttgaactaagggccagcaaagaattat

SEQ ID NO: 550362 - DNA, 83 bp, Homo sapiens
agtgggattaaaaagaccactgaggagcaggtgcagcccagctcaacattggcaatgtgctccctgtgggcaccatgcctgag

SEQ ID NO: 550363 - DNA, 75 bp, Homo sapiens
gctcctccgggggacccgcggtccccaccgtgcagcggggcatcatcaagatgtggaagagaaagccaataccca

SEQ ID NO: 550364 - DNA, 90 bp, Homo sapiens
agcactggactcatggaggctgagcatttattcaggtactgaagatttaccccccaaaaaaaattgtcaatgagaaataaagctaactga

SEQ ID NO: 550365 - DNA, 74 bp, Homo sapiens
cattagccagtgtgaagacctccgaaggaccataggaaaatgttggggcttttcaggaagcataataagattcc

SEQ ID NO: 550366 - DNA, 74 bp, Homo sapiens
tcgctgcaacactcctctacagtttgagatcgggcccagcacaggcagcgtcagtgcaaacttcccccaccccg

SEQ ID NO: 550367 - DNA, 83 bp, Homo sapiens
gccgcggaggacggggtgaagatggcggccttctccgcaatggcaccagcatgatatcattgatcattcctcccaaagaccag

SEQ ID NO: 550368 - DNA, 76 bp, Homo sapiens
gagactcctgaccctcagaatgggagaactaatgccgacgtgatgaccgccctgtcccagggctacaggatgcccc

SEQ ID NO: 550369 - DNA, 75 bp, Homo sapiens
gtcaagatggaggagtacgcgcgagagccttggagacgaagtttccgtgcattatgaccccatgattgcgaagct

SEQ ID NO: 550370 - DNA, 82 bp, Homo sapiens
ctccaggtgaagtagatttttattgaaagtggagaatgaggacatgaataaagaccagatcttgctggaaaaagaagctgag

SEQ ID NO: 550371 - DNA, 74 bp, Homo sapiens
gcagtagatgatgatgtagcagaaggacagcggggattttcagtttgattgacaccctgtggcccccagcgata

SEQ ID NO: 550372 - DNA, 101 bp, Homo sapiens
aaggacatggacgagccctcaccagtccccaatgtagaagaggtgacacttcccaaaacagggtgtccgcaatgttgccagtgtctgtctgcagattggct

SEQ ID NO: 550373 - DNA, 90 bp, Homo sapiens
ctttgcatcggaaatcagctctacagttcagattgcaagggagcatggtattaggttttttgagactagtgcaaaagcaaatataaacat

SEQ ID NO: 550374 - DNA, 95 bp, Homo sapiens
gccaaaaatgtgcatactcacagagttagagagagggatggtggaatagccaggccagaagaaggaaggcctgtggtgagtgggacaggaaatga

SEQ ID NO: 550375 - DNA, 74 bp, Homo sapiens
ggagccggagggcgggaggaacatgacatcgcggaggctgttgcttttggaaggggggcctggatctccctcct

SEQ ID NO: 550376 - DNA, 100 bp, Homo sapiens
tacacaggcccccaggacccctggggagagggccccgctgggctggccctgcagggaccatggaatccagagctgaagctctgcgtgcctcttgctgtgc

SEQ ID NO: 550377 - DNA, 75 bp, Homo sapiens
caaagttgacaaaaacttaaattgtggaatgatgtatttccactacacaaaattttccacctctgggatacctta

SEQ ID NO: 550378 - DNA, 75 bp, Homo sapiens
ttgaaatgctaagattcttggataccacagtatcataaaattcctctaaatgcacttagaccatgctcagcctcc

SEQ ID NO: 550379 - DNA, 76 bp, Homo sapiens
ttataaagacagcactctgatcatgcagttacttagggacaatctcactgtgctggagaatctggtaaaagcacca

SEQ ID NO: 550380 - DNA, 101 bp, Homo sapiens
ggcgggcggcatggccgctggcgtggactgcggggacggggttggcgcccggcagcacgtgttcctggtttcagagttcttggagtctctgcggagtccct

SEQ ID NO: 550381 - DNA, 82 bp, Homo sapiens
gcggcgcccccgcagcccgtcacccacctcatctttgacatggacggacttcttctggattccacagtggtgtgtggagtac

SEQ ID NO: 550382 - DNA, 90 bp, Homo sapiens
gacggccatgttcgtgaacggcgcttcccttggtgcacctgtggccgccatgtttgagcgaggtacccagtgatcctgtccatcgaaaac

SEQ ID NO: 550383 - DNA, 100 bp, Homo sapiens
ggtggcgggcccgggctgcggcgtgtgcgcgcccgccagctgctccggagatacgtgtgcccaagcacgtgtgggaagcgggcgtgcaccgagaacaatg

SEQ ID NO: 550384 - DNA, 100 bp, Homo sapiens
aagccaatcccaggaggaaaaacgaatggttgttgagccgaatctccaagatgaaagtgaattcttgtatgctgcacagcctgagttactaaggttcagg

SEQ ID NO: 550385 - DNA, 97 bp, Homo sapiens
cctgtccctgtgttaaagtggctgtttcgggggacccccggagaccctacccaactgatttagagatgagaagtgggttactgggtcagatgaacaa

SEQ ID NO: 550386 - DNA, 100 bp, Homo sapiens
agaatctgaggacatggcacagcgcaggaaagaagcagctgatatgctaaagggagtacctgacaggcttccacaagcggaaggtcgagcgaaagaaggc

SEQ ID NO: 550387 - DNA, 96 bp, Homo sapiens
acatggatcccctgttccagcaaacgcacaacttgaaggatgccaatgatgtaccaatccaatgtgaaatctctcctcttatctcctatgctggag

SEQ ID NO: 550388 - DNA, 90 bp, Homo sapiens
ggtgagactttcacaataagagcagaggatggaacacttcagtgcattcaaggtgaagcaaaaaatttattgccatatcttggaccccac

SEQ ID NO: 550389 - DNA, 84 bp, Homo sapiens
cggaaagtttggctgcgcgggttcccccgaagttcagacaatgcagatcttcgtgaagactctgactggtaagaccatcaccct

SEQ ID NO: 550390 - DNA, 83 bp, Homo sapiens
cggcagcaagaacagagagagaggtggacagatctgagagatactgagtgttatagttttgccgctggactcttccctccctt

SEQ ID NO: 550391 - DNA, 100 bp, Homo sapiens
gccctgtcatcttctaaacagagcagcagcagcagagatgataacatgtttcagccagcagccagcttcgggtgtagcctattctcatccaactacagtt

SEQ ID NO: 550392 - DNA, 99 bp, Homo sapiens
aaagcatatggagatagaatagaaagaatgcttcgcctcagtttgaacattgaccctgatgcaaaggtgggatgcagatcttcgtgaagaccctgactg

SEQ ID NO: 550393 - DNA, 96 bp, Homo sapiens
cctgcccatggcggtggccgagctgtacacgcagtttctctcctgtcacaatggcatgatctcggctcactgcgacctctgcttcctgggttcaag

SEQ ID NO: 550394 - DNA, 75 bp, Homo sapiens
aagttgcatttcctcgtcgagcgcaacccaagctttaccgatttgttacaactcaagcaagggccagcagaaatt

SEQ ID NO: 550395 - DNA, 75 bp, Homo sapiens
gtgatcacaggagatggagatattgatcatgaccagctgactggaaataccggcatgcaggattgatggccttat

SEQ ID NO: 550396 - DNA, 83 bp, Homo sapiens
aggtcatctcgctcggagcttcgctcggaagggtctttgttccctgcagccctcccacggtggtggaggtggatacagcagtc

SEQ ID NO: 550397 - DNA, 100 bp, Homo sapiens
gtggatcaagcctccccaaccccaccatcccaccaaagggggctgctgaccgagagagctcactcagccagggttttggccaaattgggcgagggcacaa

SEQ ID NO: 550398 - DNA, 100 bp, Homo sapiens
tcagcctcctgagtagctgcgattacagctcttgagaaagtctattttacaaagaggaaaacctgtggttgaaggctctttggaaaagaaacccccattt

SEQ ID NO: 550399 - DNA, 76 bp, Homo sapiens
agactggtctctcccaccacacagagccaaagtctacgtgggtgtgaaacaggagatcgccgagatgcggatacct

SEQ ID NO: 550400 - DNA, 76 bp, Homo sapiens
tgggcgacggcgccttcggcaaggtttacaagattcaggtttactcacgtcatccagcagagaatggaaagtcaaa

SEQ ID NO: 550401 - DNA, 90 bp, Homo sapiens
ccgacttgccggcagaacttacgctgcgggaccccgggcactgttgctgctgcgggaggtttcctcttctactaccacgtccacaaccgg

SEQ ID NO: 550402 - DNA, 103 bp, Homo sapiens
agaaaggagactaccagaaggcttatgaggatggctgcaagactgtcgacctaaagcctgactggggcaaggtggacccaagtggagagattgtggaactggc

SEQ ID NO: 550403 - DNA, 75 bp, Homo sapiens
acagcggcctcggcctccccttggattcagacgccgattcgcccagcaaccccaaggtccaggtggaggccatcg

SEQ ID NO: 550404 - DNA, 82 bp, Homo sapiens
cccccttccccacgcaaccccagatccatttacactttacagtaaggggcctggataccaagaagtgactgctcatctaatc

SEQ ID NO: 550405 - DNA, 50 bp, Homo sapiens
ctgaatacgacccggctgcgtggccctagcacaaaacacagatcttaaag

SEQ ID NO: 550406 - DNA, 98 bp, Homo sapiens
aaattcttcagctgctcggacagatgaagctccccaaggagctgcaggtgctcagaattttgatgtcatacgactatcaacttacagaacagcctgca

SEQ ID NO: 550407 - DNA, 96 bp, Homo sapiens
tagaaatcaagagttttcttactgtacctcaggctgcaataggatctgtggctttggacacagcaaggtcacatggagagaaacaattagaagact

SEQ ID NO: 550408 - DNA, 74 bp, Homo sapiens
ggactatgtccgaagcaaggatttccgggactacctcatgaggttacttcctcagaatgttggcctcctgtatg

SEQ ID NO: 550409 - DNA, 100 bp, Homo sapiens
catcatcgggaacctcttccagttggaattgaagaatattcccaagtccttcacccggcttttggcatctaccagaagggatcaagacaatatgcaagct

SEQ ID NO: 550410 - DNA, 80 bp, Homo sapiens
aaaagactggaaaggattctcggaagatggagaaccgtgattaccgggatgcacaggagtttgctgctgatgtacggctt

SEQ ID NO: 550411 - DNA, 105 bp, Homo sapiens
gtaaagtcgagtatctggtgaagtggaaaggatggcccccaaaggggatatgagactttctactcggaatatcctgagtgttgcgtggatgtaaaacccatttca

SEQ ID NO: 550412 - DNA, 96 bp, Homo sapiens
agcagagtacgatactcaggtcaaagatcctgaaacctgcaagtgcccactctccgacccaagtgagaagccggggaaaatccctgtcccccagaa

SEQ ID NO: 550413 - DNA, 89 bp, Homo sapiens
ctggacggctgagctgggcatccgacacgtactgctgcttcctgcctgacacagctcacttcaagaagtgcacaatgtcagaacgtgga

SEQ ID NO: 550414 - DNA, 101 bp, Homo sapiens
tggaggatgaaaagaggctggcccaccccttctccttggccgtctttgaggccataggaaaaggatacagagtagagtttcatgaacctgaaacttggtgg

SEQ ID NO: 550415 - DNA, 90 bp, Homo sapiens
gaaaatgtaaaggccaagatccaggataaggaagctcctatgacttctagaagtacatctacttggagaatacccagcaggaagagacgt

SEQ ID NO: 550416 - DNA, 100 bp, Homo sapiens
agcgtgaccgagagcgcgaatatcgtcatcgttagaagcttctcggacaaactatttagtggaaaaggcttacattttcagccatcagttttagattttg

SEQ ID NO: 550417 - DNA, 100 bp, Homo sapiens
cttatacatggagttgatattacaaccagtgacactgcagatagctttccaatgattagacgaattgattctttctgtgactcatcagttcatttcctgt

SEQ ID NO: 550418 - DNA, 80 bp, Homo sapiens
gtcagagtaggaaataattttcacaaccttcaagaaattcggagctggagtggaccagagaaattgcttgctttagatga

SEQ ID NO: 550419 - DNA, 74 bp, Homo sapiens
tcacagggctactgttttccaatcctcaggtaatattaacggctgctatttgaactattacttttttcttctgg

SEQ ID NO: 550420 - DNA, 100 bp, Homo sapiens
ctccatctggttcgaagtctcagcggtattctggtgcttatggtgcctcagaatggacagcaaattatggatgaacctatgggagaggaggagattaacc

SEQ ID NO: 550421 - DNA, 50 bp, Homo sapiens
gcctagcagtcgggaccgtactgagcttggtgtgtgccttgcctagtttc

SEQ ID NO: 550422 - DNA, 100 bp, Homo sapiens
cccagatgcccaccgggatggagaaggaggaggaatcgacaatgcagatcttcgtgaagactctgactggtaagaccatcaccctcgaggttgagcccag

SEQ ID NO: 550423 - DNA, 98 bp, Homo sapiens
gcaagcaggacatcttgaccatcttcaagcgcctccgctcggtgcccactaacaagggtttggaaatcccttgtctccaggttgctgggattgacttc

SEQ ID NO: 550424 - DNA, 100 bp, Homo sapiens
gcccggctctcgcaggcccccccgcgccgaccgcgttcctatggacagacgcacagacacctgcagtttaaggaagaaatctctaaacgttttaaatcac

SEQ ID NO: 550425 - DNA, 80 bp, Homo sapiens
ggaggcagcagagagcacagactatgcttcttccagaccagctggtcttgcttctggagcatctcttggagcagaagact

SEQ ID NO: 550426 - DNA, 80 bp, Homo sapiens
ttgatccccgtgctccggacaccccgggcctcgccatgaaaattgtacaagctggagataaggaccttgatgggcagcta

SEQ ID NO: 550427 - DNA, 100 bp, Homo sapiens
gcaggatctggggccagctcacctctcacgtccccgtcatcgccaactccaccctctacatcaggtgctggatgtgtctggggcagacatgttggccaag

SEQ ID NO: 550428 - DNA, 74 bp, Homo sapiens
gatctagtgcttctcgaaaaaaaccttcaggcggcccatggacctggtggtgaacttaacccaggagaagatga

SEQ ID NO: 550429 - DNA, 114 bp, Homo sapiens
cacctcgcgtcgcgcccgggaggaaggaacgaggcaaggagctaaagcagcgtgcgttcagccctgggaaaccaatagagccatggcgactccctctgctgccttcgaggccct

SEQ ID NO: 550430 - DNA, 97 bp, Homo sapiens
ttcgtgtaggattagcacttcttcagatgaatcaggcagaactgatgcaacttgacatggaagggatgttacaggttcgtcaaaaaatgttgtatgc

SEQ ID NO: 550431 - DNA, 75 bp, Homo sapiens
tccctatcaaacctttgatcagtactcctcctgtttcatcacagccaaaggtctctaattaacagaagatggcaa

SEQ ID NO: 550432 - DNA, 98 bp, Homo sapiens
tcttgttgctgtaaatgaacttcgtaggaatgctcgggctaaaggaatgtcattttacaagtatggaaggtgtcttgctgcaggtaactaatgaagaa

SEQ ID NO: 550433 - DNA, 75 bp, Homo sapiens
ccttcatgcagtctctcattggcttctttgagactgaaatggcaggagctagggaaatacggagtacttttctac

SEQ ID NO: 550434 - DNA, 125 bp, Homo sapiens
ttttttatcagcgcctcaatctctactcgaagaagaaagagaagaaacgttttctcagggccatcactgtgcatgtccccatgccctcagcaggagtcgtggacatccccattgtggagaaggag

SEQ ID NO: 550435 - DNA, 97 bp, Homo sapiens
ctactgaaagctgccgctgaagctgccgccgttgcctccgccgccaagagtgagcgagcggacccgcgatggggatatgatgatacatacgcagaac

SEQ ID NO: 550436 - DNA, 100 bp, Homo sapiens
gcgtttagagaaaatggcagacgatattgatattgaagcaatgcttgaggctccttacaagaaggaggagatgttaaagtaacccatcttgcaggacgac

SEQ ID NO: 550437 - DNA, 100 bp, Homo sapiens
gccagtcagcacaaaggaggacgtgtgtaaacaggaacatcgataagtagtgtaaaaacttgcacaatgaaatccgaagccaaggatggagaggaggaga

SEQ ID NO: 550438 - DNA, 75 bp, Homo sapiens
gcccctcggcctcggagcaacgagcgcagcgccgagatgaggatgacatcaatgatgtgacttctatggcagggg

SEQ ID NO: 550439 - DNA, 75 bp, Homo sapiens
catgccatcattggtggaagagatccctttggacaaggatgatttggattatgtttgagaccttcaacaccccgg

SEQ ID NO: 550440 - DNA, 99 bp, Homo sapiens
cggaattggaacagctggagcgcattggactgttcagtcatgcggagattaacactgctcagcacgcaggcatgtgaggaagctgggcttaaaggagac

SEQ ID NO: 550441 - DNA, 75 bp, Homo sapiens
tcacctggcacagtcacttcacaagttgtctaccgcctgtccaggaagggtgtgggaggtgctgaaccttttctg

SEQ ID NO: 550442 - DNA, 82 bp, Homo sapiens
aatcagaaaatcaagtaaaggaacccaacagagatctcttctgttctccactgctaggtcgtaatctgaaggagtggctgag

SEQ ID NO: 550443 - DNA, 80 bp, Homo sapiens
ccttggtcgccgcgtccttggctggcgtacctgcctagagctggaacgttacctccagagcgagccctgctatgtttcag

SEQ ID NO: 550444 - DNA, 90 bp, Homo sapiens
ggttggcttgtcagatgaactggctaaactggatgcatttgtagaaggatcaagcttcaggagtctccggaagacatgcctgcagggcag

SEQ ID NO: 550445 - DNA, 50 bp, Homo sapiens
atgcgctcgggctggaccagcaggtactccaaagattcaggtttactcac

SEQ ID NO: 550446 - DNA, 100 bp, Homo sapiens
accatctgttcggaaccccagagcacgagtagtagtcttaagatcagaaattggctttggaaaaatggaaacctacatcaaattggaaaagcttggagag

SEQ ID NO: 550447 - DNA, 74 bp, Homo sapiens
aagtttccaggagaagtaaccctgctctgtggaattgcaagaatctatgaggacttcagggccacaggtgctgc

SEQ ID NO: 550448 - DNA, 98 bp, Homo sapiens
atgttcgcttcaatgtggccaaatctctacaaaagattggaccaattctagataccaaggccccattttgtggctgtgaacaacaagaatgaaattgt

SEQ ID NO: 550449 - DNA, 100 bp, Homo sapiens
ttagctagccaaattgcagcagaacagaacctggataatgatgaaggattgaaaatcgctgctaaacattaccagttattaaagagggtgtacgggagtt

SEQ ID NO: 550450 - DNA, 100 bp, Homo sapiens
attgcagcccaggtggataaggaacatctcttcccagcggctcaggtgtggaaccactttgacagcggttcgtgcccaggccaggccatcggtgtcaaaa

SEQ ID NO: 550451 - DNA, 100 bp, Homo sapiens
gttaaacagacctctgaagagaagcccaaagacagtgaagaactcgagcgaggatgccatgaggaaagctggtgtggcacacagtaaatccagcaaggat

SEQ ID NO: 550452 - DNA, 100 bp, Homo sapiens
tcatgggattctaaacatgaggcaggaatcagagatcattgatttcttcctgggggcctctctcaaggatgaggttttgaagattatgccagtgcagaag

SEQ ID NO: 550453 - DNA, 74 bp, Homo sapiens
cggcaaagttcacgtgactgtggatctcaagtactaccggccaactgaagtggggactcagaagaagatccttg

SEQ ID NO: 550454 - DNA, 82 bp, Homo sapiens
cttccaacaccagtggaagatgatcacatcccaggattacttccttaggatagattgccagaagtggagttactgggtcaga

SEQ ID NO: 550455 - DNA, 88 bp, Homo sapiens
ttataatactgaactatggacctatgaggctaatggaggttggcaggatgctactaccccttcatcagtgacctcccctacagaaggc

SEQ ID NO: 550456 - DNA, 75 bp, Homo sapiens
agacctgccaatttaccagagataattgataacaccctgtaacagctgagatttccagatgtgacttgcactcag

SEQ ID NO: 550457 - DNA, 100 bp, Homo sapiens
ccggagtgcgccggcggtggcgcctgcggacctaactagctccaggttaggccgagctttgcgggaaagcagcggcttcaacggaccacaccaaaatgcc

SEQ ID NO: 550458 - DNA, 75 bp, Homo sapiens
cttggactgagtcctgcaggacacagcaagagctttttaagattctgcatagtattttgttaaatggcgaaaccc

SEQ ID NO: 550459 - DNA, 97 bp, Homo sapiens
gctttgaggatgcggtctactgggaggagagaagtttgctgaggaatgccttcaagcacaaagtgatgaatgactgccttcaagtctcaagaaaaca

SEQ ID NO: 550460 - DNA, 82 bp, Homo sapiens
cccagagactgctgagcccgtccgtccgccgccaccacccactccggacacagctgcctgtggaggaaccgattgtgtccac

SEQ ID NO: 550461 - DNA, 75 bp, Homo sapiens
cgagcccatcaccgccaagaacttcctgggaatgaaaatggttggtgagctgctacgaatgtcgggtgccttttt

SEQ ID NO: 550462 - DNA, 108 bp, Homo sapiens
ttagcaacaaagcttcattagcattcttacaaaagcatttagctggtgctcaagaccgaatcggctgggcttttggcctaggattagaaaggctagccatgatcctct

SEQ ID NO: 550463 - DNA, 83 bp, Homo sapiens
ggactagagagccagcaatgcctccatgaacaatctcacccaattactctgctcagccatcactggtgcaagctatatttaac

SEQ ID NO: 550464 - DNA, 96 bp, Homo sapiens
gaagaaaccagagtcatttttcactcaattcgatgcttgcccaccagaagtatgtccgacaagcctggcagaaggcagacatcaatacaaaatggg

SEQ ID NO: 550465 - DNA, 100 bp, Homo sapiens
ccactgcattttggcatgatttgttatgcagtcgtagataaccagaaaacatcggatttacattttaaggaatctgtctgctattcaggatagagaaatt

SEQ ID NO: 550466 - DNA, 83 bp, Homo sapiens
ccgatacccaatggctctgccccggaagggcctgcatccccaggctcccaatggtcatcatgggccagtgctactacaacgag

SEQ ID NO: 550467 - DNA, 86 bp, Homo sapiens
tcatcctagccatcctgtttggcctcctgctcctaggtctactcatctacatcctctacaagatgccagaccctagaagactgttg

SEQ ID NO: 550468 - DNA, 74 bp, Homo sapiens
gccctggccacggggactctcttctggatggaaaattgggccgatttccacctatgatgcatcatcaccaggca

SEQ ID NO: 550469 - DNA, 83 bp, Homo sapiens
gtccggcttcggagcgggagtgttcgttgtgccagcgactaaaaagagacaaatttacatgtattggagaccagaccagaagc

SEQ ID NO: 550470 - DNA, 101 bp, Homo sapiens
gccggcagccctgcggctacggagacaggacagtatttatgatgaaatggaagagaagtggtcaaaacagaaggcgaaatggaagaaggatgagaagttcg

SEQ ID NO: 550471 - DNA, 83 bp, Homo sapiens
ccgccgccggccctcggtgcgcccggccgcctgcacccccagtgagacggtttaagcggaagcatcttactgccattgactgc

SEQ ID NO: 550472 - DNA, 49 bp, Homo sapiens
cctgatttccattcagaaaacccttcgagagctgtgcccaggagtgaac

SEQ ID NO: 550473 - DNA, 73 bp, Homo sapiens
ttgacatttaattttagggtcctttatatagaagggagagtaggccgagtgatagctactttcacatgttcag

SEQ ID NO: 550474 - DNA, 83 bp, Homo sapiens
ggcgccacaagctcattcactgtgtagatggcgattttgctgacagctgccaagaaaatgcttcactcaacagtcctcatgtg

SEQ ID NO: 550475 - DNA, 75 bp, Homo sapiens
tgaaggcagacagcgagtggcgacgattgtctcaatttaaaatggtgaattactcctatgatgaagatctggaag

SEQ ID NO: 550476 - DNA, 105 bp, Homo sapiens
gcacctcatcccctggatgggggaccacaagatcctcatcgacagacatccacgacagcgatggcagttccagcagcagccaccagagcctcaagagcacagcca

SEQ ID NO: 550477 - DNA, 75 bp, Homo sapiens
ggcgccgggctcttcgtggctcaggcggggggagcggaccctgacaagttccagattggcagattgctactctgg

SEQ ID NO: 550478 - DNA, 110 bp, Homo sapiens
cgggaggaaggaacgaggcaaggagctaaagcagcgtgcgttcagccctggggctgtctgtccccagaccccagagcacgtccggcaccaccatgactgggctgttgaag

SEQ ID NO: 550479 - DNA, 74 bp, Homo sapiens
aatttgcagcaccatcaacagatgcccctgataaaggatacgttgttccttcctgtgtacagcccttctgagga

SEQ ID NO: 550480 - DNA, 76 bp, Homo sapiens
gccgcagaccccttcaagttctagtcatgtgtaatgtgtacaattctggccaacggcggaagctattgctgttcaa

SEQ ID NO: 550481 - DNA, 100 bp, Homo sapiens
tctatagattctgctggtatacagctacatccaggagagaatgctgacagtcctgcaggagtggaagctggacacactatgtgacttgtatgaaaccctg

SEQ ID NO: 550482 - DNA, 90 bp, Homo sapiens
gtccgcccaggcgcagatgcgggccctgctggaccagctcatgggcacggctcgggacgtcggcctggagattctacgccaccaacctct

SEQ ID NO: 550483 - DNA, 145 bp, Homo sapiens
gccccggagcgagagcgagtgcctgagcaacatccgcgagttcctgcgcggctgcggggcttccctgcggctggaggtgctggagaatctggtaaaagcaccattgtgaagcagatgaggatcctgcatgttaatgggtttaatg

SEQ ID NO: 550484 - DNA, 80 bp, Homo sapiens
tgtgggggccgccgggctgcggcaaggttgctccgactgtgtgttccaggagtggtggctctgaggtgtgaccctgccca

SEQ ID NO: 550485 - DNA, 75 bp, Homo sapiens
gcgggccggcgagcgcgtcgccaccatgctgcatcttcctcccgtgaggctggccgagctccacgctgatctgaa

SEQ ID NO: 550486 - DNA, 75 bp, Homo sapiens
caactcccaacttttccggagagctgtgctgatgggccgttgctccagggagaactgcaaatatcttcatccacc

SEQ ID NO: 550487 - DNA, 75 bp, Homo sapiens
ggcagtttggcgacatttctcggccgaagggccatttgcttttgcggagttactgcagccagatgcttagtaaag

SEQ ID NO: 550488 - DNA, 74 bp, Homo sapiens
gtgtgttcttgactccgctgctcgccatggtcacgagaagagaatgccttctagatgcaaaatcacctccaaac

SEQ ID NO: 550489 - DNA, 100 bp, Homo sapiens
ctggtcagagatacttcttaaaaacaaaatgtgcatgtcttcaactgacagcaaggaatgccaaaacttcccccttgtcaagtgacaaaataaccactgg

SEQ ID NO: 550490 - DNA, 75 bp, Homo sapiens
caagcatgctcagaccttcattgctctgtgtgccaccggtgtccggctttgctggcccagcaagcctgataagca

SEQ ID NO: 550491 - DNA, 89 bp, Homo sapiens
gacggaggagcttgtaccaccgctacgagagtacaaggtagtgggtcgctgcctgcccacccccaaatgccacacgccgcccctctacc

SEQ ID NO: 550492 - DNA, 110 bp, Homo sapiens
cagccgccttggctgcttcggcttgttttccaaggtccactgtaacaacatgcacacgctgggagcccgtctgcctggcggggtggaatgtcgcttccggcgtggccctg

SEQ ID NO: 550493 - DNA, 75 bp, Homo sapiens
ccgaaacatcgcctccatctgtaatatggatggaggatgaagctgtcctggacagaggggcttccttcctcaagc

SEQ ID NO: 550494 - DNA, 99 bp, Homo sapiens
cgacgacgaggaagaggaggtttctgagtttgtacaatgacgacagaaacctgcttcgaattagagagaaggaaagacgcaaccaggaagcccaccaag

SEQ ID NO: 550495 - DNA, 90 bp, Homo sapiens
ggaagctgggacacccgggagtcaggaaatgtccctctccaaactagccagccactgagaccttctgacaggacacccccaggatgtcac

SEQ ID NO: 550496 - DNA, 100 bp, Homo sapiens
tagcaaggatgaagaagtcaaggttgcccccaggcggtccttcctgggagagaacacagtgtctcaagaaacttcccagcctcctgatggccaagaggtc

SEQ ID NO: 550497 - DNA, 75 bp, Homo sapiens
ccaacatcttcatcatcaaatgcagccgagagacagagaaggtattggcatactccacacatctgtaccattctt

SEQ ID NO: 550498 - DNA, 58 bp, Homo sapiens
ggcagatttttacaacctattctgaagaaacctgatgaaaacaaaggcgatatgcatt

SEQ ID NO: 550499 - DNA, 100 bp, Homo sapiens
cggaccctaaatacgccgaccttcccggcattggagagataatgcatgtgagaaaacttcatatatgtttctacgaaaggaacttcctgtgcggctggct

SEQ ID NO: 550500 - DNA, 96 bp, Homo sapiens
cgtcatcttcgattagctaataaccaactgcaattcctacctccagacatatctgaagagatggattaagaatgctttggattaaggattgtggag

SEQ ID NO: 550501 - DNA, 101 bp, Homo sapiens
ttcatattcagagtcagggtcaaagtggagacctacaacggggaaatttgcagtggtgagaaaatgtataaagaaagattctgggaaagaatttgctgcaa

SEQ ID NO: 550502 - DNA, 88 bp, Homo sapiens
agggaccaggcggaggcgtcgcgggagcctttggggcaccacagagatgcgggactctgtctactagtgacgatgtcgaagacaggga

SEQ ID NO: 550503 - DNA, 90 bp, Homo sapiens
accccaagacaacaccaccctctgtcttctttcctgtctttgtccggtttgtgaaagcatataaggagataatcttggccaacagtacaa

SEQ ID NO: 550504 - DNA, 100 bp, Homo sapiens
gttttctcaccggctggctgggcacacagacactgtcactggagtggccttcaacccatcagcgccccagtgctgccttaacaatttcaggaaaagacta

SEQ ID NO: 550505 - DNA, 50 bp, Homo sapiens
gcctccccagccatgtggaactgtgaatggaggcattgagaacacattag

SEQ ID NO: 550506 - DNA, 136 bp, Homo sapiens
ccactgattcagccgtgccatgtgcaatgatgttggaacttgctcgtgccttagacaagaaactcctttccttaaaggtggaaagcggtgacacgccaaaggaccctgcggtgatctccaagtccccatccatggc

SEQ ID NO: 550507 - DNA, 75 bp, Homo sapiens
gctagaagtcctgaaacatgaagtcaagatagggctgggtacaggaggaacatatgcagcagaaaaaagaggagg

SEQ ID NO: 550508 - DNA, 51 bp, Homo sapiens
ggccgtggaggcagaggtggcatggggttgtgggctgcacactgcagaaag

SEQ ID NO: 550509 - DNA, 73 bp, Homo sapiens
caccagccttggacttcactgtggagaacgtggagaaggctctcccttccacgtggctctcccaccacctgag

SEQ ID NO: 550510 - DNA, 83 bp, Homo sapiens
ctggcatacagatgccgtgtttgtaaggatccctctgtgacccagctgaccaacgccccgcagggcggcctggcggaattcaa

SEQ ID NO: 550511 - DNA, 100 bp, Homo sapiens
cgccccctccaactctcagccttcatcttcctactgtcactgtctccttcacaaagccatgagggtatgtgcccccaggagagtgtctactgtgagaata

SEQ ID NO: 550512 - DNA, 110 bp, Homo sapiens
ggccacttcctggtccccgacgcaaccatggctgaagaacaaccgcaggtcgaattgttcgtgaaggtcaacagcgacctcatttacattacagctaagaaagatggcac

SEQ ID NO: 550513 - DNA, 100 bp, Homo sapiens
acagcggcaccgccagacggccagaaagttccgccatgagctggggcacggagctgtgggtgaatctggattgggaaagtcgacattaatcaactcatta

SEQ ID NO: 550514 - DNA, 112 bp, Homo sapiens
gccatcagttattcagtctccacaagtccaaacagttcagaataactgaagtgaagtgatggactccgatttggagagtagtaagacgtgaaaggaatacacttgtgtttaa

SEQ ID NO: 550515 - DNA, 75 bp, Homo sapiens
cctcacagcaaccagcaccagatgaaggagcattcctcttgggcacctgaatggacagaagaggacctcagccaa

SEQ ID NO: 550516 - DNA, 96 bp, Homo sapiens
gacatagtcattatgccgaagagaaaggtgacagtggatagtggaaacaggagatcgtggatcctccttcaaaaatggaggatggaaagcccgttt

SEQ ID NO: 550517 - DNA, 83 bp, Homo sapiens
aactggagagagaccagacctgcaagctctttgacacacagcagttcttgtcaggctcaacggcgtgctgatggaagtggaag

SEQ ID NO: 550518 - DNA, 89 bp, Homo sapiens
atggatcagaccttgaaagcattaatggctgcagaggataagggcctgagcccaggctgctatgacacctacaatgcggacatcgactg

SEQ ID NO: 550519 - DNA, 99 bp, Homo sapiens
ttgcaagcaaatccaattctggaatcatttggaaatgcgaagactgtgaaaaatgataactcatctcgttttttcacaaagatgtccaaaactaatggc

SEQ ID NO: 550520 - DNA, 88 bp, Homo sapiens
cagcctggagagaccagagctggagctcagcagacattcgcccaggtgaggacgcttgagcggaagttagaagcaaaaatgatcaagg

SEQ ID NO: 550521 - DNA, 76 bp, Homo sapiens
tcggaggtctcatctttgaactactgccggagcttctgccaggagacagctgttgcaatcccttaagcatgggtgc

SEQ ID NO: 550522 - DNA, 99 bp, Homo sapiens
ctggaccggcacgtcttcattgatctccccacgctgcaggaggctagcgaagcgtacctggtgggtctgttcgaagataccaacctgtgtgccatccac

SEQ ID NO: 550523 - DNA, 100 bp, Homo sapiens
aacagatgaagacagatgcaccaacgagatcctgaggaggatgaaggggctggccctggaggccgagagtgagctggagagacaagacgaagccctggat

SEQ ID NO: 550524 - DNA, 100 bp, Homo sapiens
ctgaggctgctccggccatggcccctcggccccgcgcccgcccaggggtcgctgtcgcctgctgctggctcctcactgctcatgttttttggctagacct

SEQ ID NO: 550525 - DNA, 80 bp, Homo sapiens
tgccgctgctggcggccctgcttcagggacatgagagatggctttagaagaaaaagtttctactcttcccattatgcgag

SEQ ID NO: 550526 - DNA, 90 bp, Homo sapiens
gtgtggatagctacacctgtgaaaatggtaacaaatttggaactggcaactttaaagtctcagttaaactcacaatctgtggagatcacc

SEQ ID NO: 550527 - DNA, 90 bp, Homo sapiens
tcacccatctgaagggaggaaatagtggcaggtgacagtctgcatgtgcagttttcaggcatccgtgtacaagatttgcagagaaatgta

SEQ ID NO: 550528 - DNA, 100 bp, Homo sapiens
cggctaccctggacagcgcatcgccgcccgcccgggtcgccgcgccacagccgctgcggatcatgctttctaaaaccaatttttccaacaacaacgattt

SEQ ID NO: 550529 - DNA, 124 bp, Homo sapiens
gccaccatgtctctgaagcatctcaccaagaagctgctaaaccgggatatccaggggtgaatgtgatgctgaggaagattgctgtggctgcagcgtccaagccagcagtggagatcaaacagga

SEQ ID NO: 550530 - DNA, 98 bp, Homo sapiens
tttgctgagctggttggccctgtgatccctcaagactggtccacggagtgtatgaccacaaacagccatcaagtcaataagcacaagccatggatcga

SEQ ID NO: 550531 - DNA, 98 bp, Homo sapiens
gagctgaaacagaacctgtccaggagctggcatgacgtgcaggtctctagcgcggttatgtaccgaaggactctaccgtgtcagcgggaataaaactg

SEQ ID NO: 550532 - DNA, 100 bp, Homo sapiens
ggtgtccctaaactagcagtttagggtgtcagggaagtactacatggccactatgaccatggtcacattctcaacagcactcaccatccttatcatgaac

SEQ ID NO: 550533 - DNA, 100 bp, Homo sapiens
gagaaactgtggagctttaccaaaaaggcctcgcacattcagttggacagatgtcagtgaagagcttccagccagaagaaaatgaaatcgtgaggatggg

SEQ ID NO: 550534 - DNA, 75 bp, Homo sapiens
ctggagcacctgcagctggcgcctctgcagtggggtcaccgaggaggagcccagctccaaccacacggtcatgat

SEQ ID NO: 550535 - DNA, 83 bp, Homo sapiens
tgcaggatctttttagcccaatattctatattgagcgcattataccaataatcagaaaacattgctgaatcattttgtcttta

SEQ ID NO: 550536 - DNA, 87 bp, Homo sapiens
tttggggaaatccttcggatggtgaactcattagaagtctcctaaaaacccagaacagaagatcattaagagagtgattgctcttga

SEQ ID NO: 550537 - DNA, 100 bp, Homo sapiens
tctcactctgttaaagctggtctgttctaactgaggtgattttacaacgagatgctgctctccatagggatgctcatgctgtcagccacacaagtctaca

SEQ ID NO: 550538 - DNA, 82 bp, Homo sapiens
ccgcaagcatgctcagaccttcattgctctgtgtgccaccgactccatcaagaatgctggaggaagggtgtttgtccactgc

SEQ ID NO: 550539 - DNA, 75 bp, Homo sapiens
cgttggagcagcccatggcatggctggaatttactatatgttaatgcaggaagaagccatggatttaataaatag

SEQ ID NO: 550540 - DNA, 131 bp, Homo sapiens
gttggtttcagcatgtatctgcttgatattggcggtggctttcctggatctgaggatgtgaaacttaaatttgaagagaccccaccaacaactgaacgctttggtcaggctgctacaatggaaggaattgg

SEQ ID NO: 550541 - DNA, 75 bp, Homo sapiens
ggagctccagttcactccgttccagctgtgccatgcggagcctgtagtggtggagacacgcccagtggatgatcc

SEQ ID NO: 550542 - DNA, 101 bp, Homo sapiens
aatttccatcaaaaagtgattaagcagagaatggagaagaaggttgattccagacgaagttatacggaagcgtctcctcattgatggagatggtgctggag

SEQ ID NO: 550543 - DNA, 82 bp, Homo sapiens
gatgacttgccatttcatttacaaaggtgaaaggtgtagcagtcactcggcctacacccacagcatcgaccttgtgaaccca

SEQ ID NO: 550544 - DNA, 90 bp, Homo sapiens
cagatggacagttgcacacactaggagatctcctcaaagaagtttgtccttctgctattgatcctgaagacagggtctcgcactgtcacc

SEQ ID NO: 550545 - DNA, 100 bp, Homo sapiens
gccggggccgggacgccatgtccatggaggaccccttctttgtggtgaaaggtgccggtggtggtgtgcacattgagccccggtatagacagttccccca

SEQ ID NO: 550546 - DNA, 96 bp, Homo sapiens
cgggcgggcctaccaggccctgcactgccctacaggcactgagtatacctgcaagggagtgcctgcagggcaccatccgcaacagccaggaggcgg

SEQ ID NO: 550547 - DNA, 100 bp, Homo sapiens
cacgttgatggctttctaaatccaggttgcctgaaacccaccaactcctacagttgagacgatttgctcatggaacagcaggtctggtgttccttacggc

SEQ ID NO: 550548 - DNA, 78 bp, Homo sapiens
agaacctcagtgcagatggagaaggatttaagtgccctgtatgctcaaaatttgtatcctcagatgaaatggatttgc

SEQ ID NO: 550549 - DNA, 73 bp, Homo sapiens
tctcactctgctggcagatgatccagtacaggggcccgtgctggttgaggacacttgtctgtgcttcaatgcc

SEQ ID NO: 550550 - DNA, 74 bp, Homo sapiens
tcattaagggatccatcctacagaaaatgtgtctttaccatatggaacaattttgaacttctaagatcaagcct

SEQ ID NO: 550551 - DNA, 96 bp, Homo sapiens
gccggttggggtgtgagaggttttctcgctctagattgggtgagatacaattccatggaattttaccactgaaccagtggagggctaattttgtca

SEQ ID NO: 550552 - DNA, 75 bp, Homo sapiens
caaaatctgggctgcgctttaatctgaaagtcaagtctctatttatgaggtggacaagcaagattgtcgcaaatt

SEQ ID NO: 550553 - DNA, 100 bp, Homo sapiens
caagtgatcagggtctcctgcggtgatgagtttaccattgctgccactgatggtgctggagaatctggtaaaagcaccattgtgaagcagatgaggatcc

SEQ ID NO: 550554 - DNA, 73 bp, Homo sapiens
attatatcgcatcctatggctcaaagaaagatgattatccctgcctctttcttgtcgcagtcagtttcatcat

SEQ ID NO: 550555 - DNA, 75 bp, Homo sapiens
acttctaaacctcccaaacctgatcagcccctaaagtgggctcgggatgagtttgaaggcctcttcaagcagcca

SEQ ID NO: 550556 - DNA, 89 bp, Homo sapiens
cgaccgctcgcgtcgcatttggccgcctccctaccgttgttgacctcctgtactggagagacattaagaagactggagtggtgtttggt

SEQ ID NO: 550557 - DNA, 75 bp, Homo sapiens
gcgtgtctaggtgagtcgcggtgggtcctcgcttgcagttcagcgaccacggatggataaggtgggggatgccct

SEQ ID NO: 550558 - DNA, 73 bp, Homo sapiens
ttatcgaacttaccctgaaggccgagcaggctgaattcggtcagaagagaatccatctgaatagccagtttcc

SEQ ID NO: 550559 - DNA, 101 bp, Homo sapiens
caagaacatccccatcatagtcctccccctcagcagcaattccatttccgtgagggcgtttctagatgaagatgacatgagcttggaagaaataaaaaatc

SEQ ID NO: 550560 - DNA, 100 bp, Homo sapiens
cgccggcctccggggagaaacgcggctatgtgactacgtttgtgacctcctcttagaagagtcaaatgttcagccagtatcaacaccagtaacagtgtgt

SEQ ID NO: 550561 - DNA, 100 bp, Homo sapiens
ccaacgccgtctatttctgcaacaggccgcctgatcttcgacaacctaaagaagtccattgcctacaccctgaccagcaatatcccggagatcacgccct

SEQ ID NO: 550562 - DNA, 90 bp, Homo sapiens
cgccgtggcagcctgaacggagtgtgcgacggattgggagggtattacttatgaccatgtcgaattaaatgtatacttgaatggaaaaaa

SEQ ID NO: 550563 - DNA, 50 bp, Homo sapiens
ggagttaaggaacagatccccggaggagtgtggggatgtgccaactgccg

SEQ ID NO: 550564 - DNA, 98 bp, Homo sapiens
tccagcagatggcggatgccctgcagtacctgcagaaggtctctggagacatcttcagcaggtggtgtataaggaggccgagaagagcccacagctgg

SEQ ID NO: 550565 - DNA, 90 bp, Homo sapiens
ctgtttagttttgcagtggctcctgggataagatgctaaagatctggtctacaggtgctgctgatgtagagaaggtggaggaaaagtcag

SEQ ID NO: 550566 - DNA, 100 bp, Homo sapiens
agtgaatacacatttagcctcagtacaacatgtgaaaaatctgttacttgatgaacttcagaagttaccttatcccatatcacacaactggtcctcagcc

SEQ ID NO: 550567 - DNA, 93 bp, Homo sapiens
cgagaccgtcctggcgcgatgcgtcaagtacactgaaattcatcctgagatgaggttgcctgtggctggagaaaggaatgtgctcatcaccag

SEQ ID NO: 550568 - DNA, 90 bp, Homo sapiens
tcctccgtgcggagaagaagctgcggccgcacctggccaagggtgaaattgatgcccatgaagacagcttcaaatctgcagatgaatctg

SEQ ID NO: 550569 - DNA, 78 bp, Homo sapiens
tctggacaaaggaacaggtatctcagtgaaagcaagttgaatacattggtgcagaagcttcatgacttccttgcacac

SEQ ID NO: 550570 - DNA, 144 bp, Homo sapiens
ggagcttacccagcttaaagagctccacattcaggggaaccgcctcaccgttctgcccccagaactagatccagacatttaatgtggatgcaccatgccagaccgtggaagatttaacgaatggggttgtgatggcccaggttc

SEQ ID NO: 550571 - DNA, 74 bp, Homo sapiens
ctgtacagaactgttccgtgagctgatgcaccagaaagctgaaaagcaacagccaactcagtttataaatccag

SEQ ID NO: 550572 - DNA, 80 bp, Homo sapiens
ctccgagccccttcctgagaagatcccaggcatgtcgggccccaggcctgtggtgctgagcgggccttcgggagctggga

SEQ ID NO: 550573 - DNA, 100 bp, Homo sapiens
agagcttctgaaggaccgtgaacctatagagattgaatgcccctcatatggaaaatttgaaatgcagaggggaaacagtagcaaaggagatcagtgaagc

SEQ ID NO: 550574 - DNA, 90 bp, Homo sapiens
ccaggtcacatgtgctgcttaaaattcagggctaagcattttgggtgattttaaactagttgctgggcatattggattttacccatcata

SEQ ID NO: 550575 - DNA, 75 bp, Homo sapiens
aagaaccggcacggcctcgtgcccttcgccttcgtgcgcttcgaggacccccgtgcttcctctggagaggcagct

SEQ ID NO: 550576 - DNA, 98 bp, Homo sapiens
agaatcatatgacatagcaatgagtggccataaaatgcagtaaaaacaaatccagttcccaagaagctgtacaaatgctttcttctgttcgactcaat

SEQ ID NO: 550577 - DNA, 75 bp, Homo sapiens
gagtggttgtgtggtcgcgtctcggaaaccggtagcgcttgcagcatgtcagcctgggcttctgcccaccacagc

SEQ ID NO: 550578 - DNA, 100 bp, Homo sapiens
gcgctgctcatcgtttgcgacgttccctcagcctctgcccaaagaaagaaggagaattggcttggaaacgaaattgaggttatggtcagtactgaggaag

SEQ ID NO: 550579 - DNA, 75 bp, Homo sapiens
aagggttgtagacatggcggccatcaggatataaggtctcactatgttgcccatgctggtttcaaactcctgggc

SEQ ID NO: 550580 - DNA, 99 bp, Homo sapiens
ccatgccagcaaacgtctacactgtacatgctttttattacaagactacggagcataggaggaaaattcatcatctgatctcacattcttgaaggtggc

SEQ ID NO: 550581 - DNA, 50 bp, Homo sapiens
tcatcctcaagtttccgcacaggggttcagctgttgcaaaaataattggt

SEQ ID NO: 550582 - DNA, 75 bp, Homo sapiens
accttcgactttcagataaccccagtaggatatatctgcatcttgaaaggaagataaaacaaaagccttctttgg

SEQ ID NO: 550583 - DNA, 101 bp, Homo sapiens
gcaaccagtctcgatctggcccaatctctcctgcaagtatcccaggaaccttgggtaatgtggaacatgggaaccaatgtcagatgaaattgatgtatgaa

SEQ ID NO: 550584 - DNA, 74 bp, Homo sapiens
tccttctcaaccttgtgggatgtgaaaactctgttactgaagttgtggaagctgatcgaggaagcctaagcagg

SEQ ID NO: 550585 - DNA, 100 bp, Homo sapiens
tcaggtccacccatctggccgggcagtaccttcttcaagagaaatggagcccttctccaagatacagatccacgggttttagaaaaacaagaattacagc

SEQ ID NO: 550586 - DNA, 75 bp, Homo sapiens
ccccagacaagatggacaccgcggaggaagcagtcctgcgttaactgcggccgggaggctatgagcgagtgcacc

SEQ ID NO: 550587 - DNA, 99 bp, Homo sapiens
aagagacccgttcagagtcctacagtggcaggctggactctgtgaagctgagcaggagcagatgcggaagatcctctaccagaaagagtctaattacaa

SEQ ID NO: 550588 - DNA, 120 bp, Homo sapiens
cggcaggcacacgttactcagcccctgcgaacctgtatgtgcgaggactgcctccgggcctgccaggagcagatcgaagccctgctggagtcaagcctgcgccaggcccagcagaacatg

SEQ ID NO: 550589 - DNA, 129 bp, Homo sapiens
tttggaactgtctatctggtttcagacaagaaagccaaacgaggagaggaattgaatccaaatgagactcagaacaatagcacaagctggcctgtcttcaaaagcactgaacaaaaatatctaaccttg

SEQ ID NO: 550590 - DNA, 100 bp, Homo sapiens
ccggcggccgcggcgcccgccctcgcccgcgccccatggggtcacagggtctccctcttttgtccaaggctggagtgtggtagtgctatcacagctgact

SEQ ID NO: 550591 - DNA, 50 bp, Homo sapiens
gctcggaccgcggcagccgttctcagattcgacacctcttagaggctgca

SEQ ID NO: 550592 - DNA, 75 bp, Homo sapiens
tagtcttccgtgtgtcatcagccaagctcggcaagtaaagtggactaaagaggatggacatagaacttccacctc

SEQ ID NO: 550593 - DNA, 98 bp, Homo sapiens
tgcttggcttcaacctgctcttctgggtaaaccccacagcccagtgtacccatgccctgttgaagatgatctactgctcccactgccggggtctcgtg

SEQ ID NO: 550594 - DNA, 100 bp, Homo sapiens
cagttaccaaggttcgactccagctgcaggaggaaatccagttatcaaaattgactcaagaagagagaacctaacagaacaataacaatggaagaaattg

SEQ ID NO: 550595 - DNA, 50 bp, Homo sapiens
cggagaggcggcgagaccgcagtgtaaacaggaacatcgataagtagtgt

SEQ ID NO: 550596 - DNA, 98 bp, Homo sapiens
ttggaaggaaacagttccctgtcttgggaaaaggagaactcctgactgattagcattcacaccagcattaaagggcagtatttaaagtcagttggcaa

SEQ ID NO: 550597 - DNA, 87 bp, Homo sapiens
gcatagaagatgtggactacaatggaaaccttccagctgaaccttcacctagccccaggattacaaggaaaagcaccaggcaaacca

SEQ ID NO: 550598 - DNA, 143 bp, Homo sapiens
gcggcgtgagggctccgggtcgctggcggcgtggacacctgagtcccggggtaggggtctcccgcgagcttagaccatgctcagcctccaagcagccttgtcatcgacaaagaatctgaagtttacaagatgcttcaggagaa

SEQ ID NO: 550599 - DNA, 100 bp, Homo sapiens
ggcgagctcgcgatgagtggtctcggcaggctcttcgggaagggcaaaagtcaacaactctagcttaattggagtaggctatactcagactctgaggcct

SEQ ID NO: 550600 - DNA, 75 bp, Homo sapiens
gggaagaggctttcttggggaagaggaccccaaaggaggctctggggtctacatcacacgcggccagctgatgaa

SEQ ID NO: 550601 - DNA, 100 bp, Homo sapiens
tgcaggagacagagttcttccagaaactaggctatgagaggaaactccagaaaccacaggattaaagcaaggagagccaatcatgactggcaaaacacag

SEQ ID NO: 550602 - DNA, 100 bp, Homo sapiens
acttgtgcccaaagtttgatttctcgcagaccagcagctaccaagggggtgccagctggaaacagtgacacagaggggggccagcctggtcggaaacgac

SEQ ID NO: 550603 - DNA, 100 bp, Homo sapiens
gaatccttggcatatgaagaaagctttcaaagtcatgaacgaattaagaagttggtgccgtaacagtgaagttaaaagatatctagaaggtgaaagagat

SEQ ID NO: 550604 - DNA, 80 bp, Homo sapiens
gcacagccgcggcggcagcagcagtgagaggtgacaccttgtttgtggctggctgcgggaagttctatgaagggactgcg

SEQ ID NO: 550605 - DNA, 97 bp, Homo sapiens
gtgcatttttaccttgtgatgcacctgggattaaccagcgaggatcagtgtctcaatgagatcttggagtcagcagatgcacccttagaagtcactg

SEQ ID NO: 550606 - DNA, 75 bp, Homo sapiens
tcgagagcaccgacaccgcctgtgtggggcccaccctccggatagagattccttctgccatcagatgtctttctg

SEQ ID NO: 550607 - DNA, 75 bp, Homo sapiens
ccgccctaatggaggtctccagtttcgaattttcccactgtaaaaaaccgagcaagtctggataagtgaggctgg

SEQ ID NO: 550608 - DNA, 100 bp, Homo sapiens
cttggagtctttgtccaggacggctttcttcgagagtcacccagctccttcagctgagcgtaccatccagcagtgttgtgaaaatattctgctgaatgct

SEQ ID NO: 550609 - DNA, 98 bp, Homo sapiens
tatcaacagactgaaaatatgttttcagaggcatagaatcttcaggaaaatactggagttcctgagatctcaagcatcctgatgaaaagagattggaa

SEQ ID NO: 550610 - DNA, 95 bp, Homo sapiens
accagtactgctttgaatgtgactgtttccgttgccaaacccaggacaaggcttacagcttcgccatgggctgctggcccaagaatggacttcta

SEQ ID NO: 550611 - DNA, 83 bp, Homo sapiens
ggacatagcagatatgctcctcattgctggggttgacttaaacctgagagataagttgatattcactgatggactccaaagaa

SEQ ID NO: 550612 - DNA, 100 bp, Homo sapiens
gggaaattgcaaccatcctggtggaaaacagtatttcagttattcctttctcagaagctcagccacccaggctactttgggaaagttggtatgaagcatt

SEQ ID NO: 550613 - DNA, 82 bp, Homo sapiens
ctgaaccccaaggccaacagagagaagatgactcagggtcacggagactcaccagttggcagaattaaatgagaagaagaat

SEQ ID NO: 550614 - DNA, 98 bp, Homo sapiens
cctgctgaaaacctacaactgctaccatgagggcaagagcttccagctgagacaccgtgaggcaaaactagatggtggaagacagcaatggagacctg

SEQ ID NO: 550615 - DNA, 83 bp, Homo sapiens
ccaatcttgatgctttaatacagaaccagcatgttttaaaatcaaagatgggaaaatcggagaaaattgcccttccccatggc

SEQ ID NO: 550616 - DNA, 75 bp, Homo sapiens
ctggggctgtgctccatggcgagctgggacccagatgatgtggtaccagttggccaaagaagagcctggtgttgg

SEQ ID NO: 550617 - DNA, 75 bp, Homo sapiens
cgacaagggtgttcccgaactagagtggacggtctggaaaatcccgaagcagaagcccgtattcatctaggcatt

SEQ ID NO: 550618 - DNA, 100 bp, Homo sapiens
cacattcataggaccagcgtgtcccccacatcctcccctgagtccggagctaccaaaaccatcctcctggatggtgattgctcacaccaaagccttggac

SEQ ID NO: 550619 - DNA, 100 bp, Homo sapiens
ggctacgcggccgcggagccgggggcgggggccgggcgcgcacagaccgagcccccaattttgtgagtgtccctgaagcattgtgacaattccattttat

SEQ ID NO: 550620 - DNA, 52 bp, Homo sapiens
aaggagattctcacaagatgataccagaaatttcggagtgcttcagttgggg

SEQ ID NO: 550621 - DNA, 100 bp, Homo sapiens
taaagctgagctgcgaggaaaatggcggcgggagctctaagcgaaagacatgaggcctcagcctgaaatgaggttgttttgaggtcatctgatttctgac

SEQ ID NO: 550622 - DNA, 90 bp, Homo sapiens
tgccatctatgttaatggatacacaggtatcagacttggtgataattctgaattatgaccgtgctgtagaagcttttgcaaaaggcggaa

SEQ ID NO: 550623 - DNA, 83 bp, Homo sapiens
gggaggtgttcgagaacgaccccgagacggtctcctccgggctggggctgagcaagccctcggagtgaccgtgggtgacagcg

SEQ ID NO: 550624 - DNA, 50 bp, Homo sapiens
ccaacctaccacaacccagcagattttgaaccgggagaagtacctgctgc

SEQ ID NO: 550625 - DNA, 101 bp, Homo sapiens
atcaagggcttcacactgaacgatgctgccaacagccgcctcatcataacgcaagttaggcgggattatttgaaaggaaagaccacagcaagattctttca

SEQ ID NO: 550626 - DNA, 100 bp, Homo sapiens
tccaaatggttgaaaacagatatacaggttggcattgtgggaagaaccggagctggaaaaagttccctcatctcagccctttttagattgtcagaacccg

SEQ ID NO: 550627 - DNA, 100 bp, Homo sapiens
cctgtctctccatgttcttccgtcaactctgaggcctccctgctctcagccgactcctccagccaggcttttattgagatggagacaagagaagatgcaa

SEQ ID NO: 550628 - DNA, 100 bp, Homo sapiens
actgaaagactgggctgtagtgaggaaggacctgctgatgaatattacatcatataccgaaatgtttttgataagttgcatttgctggtctggcctttgc

SEQ ID NO: 550629 - DNA, 75 bp, Homo sapiens
tctcagtccaagtttaaagttaagggcatgctgttgaagcgaagtggcaaatcgttgaataaagagtggaaaaag

SEQ ID NO: 550630 - DNA, 75 bp, Homo sapiens
agaaggaaccaagtagagcagggagaagaacagtttctctatactctgacagtctggctcttgctgattgaattc

SEQ ID NO: 550631 - DNA, 95 bp, Homo sapiens
cctgtgacctgcccaaagttgtgtcccgagctgagaacctttccgttcctgtcattggagagacgagttgtactgctgtcacaggaaatggacgc

SEQ ID NO: 550632 - DNA, 126 bp, Homo sapiens
tggctaataacacaacaagtttagggagtccatggccagaaaacttttgggagcattggggagtcagcaatgtccgttgtgttaaatcagctgctgcccatgattaagcctgtaacccagagaacc

SEQ ID NO: 550633 - DNA, 98 bp, Homo sapiens
aggacaagtggcaggctgtgctgcaggactgcatccggcactgcaacaatgtctccaaaaaaagttggtgatgacattgccaaggcaacgggtgactg

SEQ ID NO: 550634 - DNA, 50 bp, Homo sapiens
gctggaacacacatcagtcacagcacgtgcccccggagctgtgggagccc

SEQ ID NO: 550635 - DNA, 96 bp, Homo sapiens
aacaaattcatcccagaaatctaagaggcagaagactgatttttggaaatatgtatttgggagacagtcacgtcctattgaataccttgtgctggt

SEQ ID NO: 550636 - DNA, 83 bp, Homo sapiens
gaaacatggcggcggcgggtgttgtgagcgggaagggctgaaagacacacagaagtcttcatggatatagttgatacatttaa

SEQ ID NO: 550637 - DNA, 82 bp, Homo sapiens
tgcaggaagtggatgagttccacctcattttagagtatcaagcagatctactggaagagacccaaagaaaagatgaagaaat

SEQ ID NO: 550638 - DNA, 83 bp, Homo sapiens
cccagccagtccccacagcataacaggtgatggaagctgttttattgtccagcaagacttagactatgtcactgagctcactg

SEQ ID NO: 550639 - DNA, 80 bp, Homo sapiens
gggcggcgtgcggcctagcgtctcaggcgttcgtggcattcagggatgtggctgtgtacttcacccaggaggagtggagg

SEQ ID NO: 550640 - DNA, 100 bp, Homo sapiens
tggagactatgcaaaacaagtttatcaagagctgcttttgcacattttcctgaactctatgattttgccctctcaaatgtggcagaagtagatactcggg

SEQ ID NO: 550641 - DNA, 75 bp, Homo sapiens
gatatccttctcaaccttgtgggatgtgaaaactctgttactgaagtgtccactggctccgtgacgcaggtgtcc

SEQ ID NO: 550642 - DNA, 98 bp, Homo sapiens
gtcgaaggtttcctttaagatcacgctgacgtcggacccacggctgccgtacaaagtggaatacagaagcagatttacaaatgaagagacagtgtcat

SEQ ID NO: 550643 - DNA, 99 bp, Homo sapiens
cttgattctcttatacgctacttttactcagagtttgaaggttgtgaccaaaagaggctccggtaataatagacgtggatggaatacaactagccagag

SEQ ID NO: 550644 - DNA, 74 bp, Homo sapiens
gtacctctccttttccctctccctttccctaagggttcaggataagtttgaggtgctgaattacacaagcattc

SEQ ID NO: 550645 - DNA, 78 bp, Homo sapiens
caccatccacactgccaccgtcaaggtcgtcatacagcctggaagctccgaccccaggagccagcccatcaacctgaa

SEQ ID NO: 550646 - DNA, 99 bp, Homo sapiens
ctccttctacctgcagtcaaaggtgcgctcgctggaggcccacatgtacccggaaaagctcaaggtgattgcgcagcaggtgcagctgcagcagcagca

SEQ ID NO: 550647 - DNA, 75 bp, Homo sapiens
tgctgtgtatgaagaggcagtgaagactctgccaacagagcaaggtccgtggtcctgtcagtggaagcccggata

SEQ ID NO: 550648 - DNA, 82 bp, Homo sapiens
cccgtcccgaccctggccgccccgagcggagcctggagtgacaacgcgcctgcaaaagggaacaagagcccttcgcctccag

SEQ ID NO: 550649 - DNA, 75 bp, Homo sapiens
aggaggtcgctgagagctgggaagaggcggcagacagcggggtagcacaggcggagtgcagcggaggcccctgcc

SEQ ID NO: 550650 - DNA, 83 bp, Homo sapiens
cgagtcctgagcggccaggacgacgaggagcagggcctgactgcgcaggtctcagcttgactatgaagttcccagggaaaagg

SEQ ID NO: 550651 - DNA, 82 bp, Homo sapiens
aggatccgcccctggacatggaggagaaggtccgcttcaaaaatcttcccaaggctgcagacaccgacggatttgctttggg

SEQ ID NO: 550652 - DNA, 101 bp, Homo sapiens
gcaaaagtggaagcgaagccgaaaaaggcagcagcgaaggctcccactccatgaggtatttcgacaccgccgtgtcccggcccggccgcggagagccccgc

SEQ ID NO: 550653 - DNA, 75 bp, Homo sapiens
cagacatctccaactgtgggaactctttccagcttgtgtctgggattgtggtccatcaggagtctgtgtgtgcca

SEQ ID NO: 550654 - DNA, 98 bp, Homo sapiens
atctgtaccctgaagaacttccctaatgccatcgagcacaccctgcaggatgctggaatatggtatttattccacaaggaaccaactggggaatccag

SEQ ID NO: 550655 - DNA, 97 bp, Homo sapiens
gactgcagcctcgtgcggacgctcgtgcacagatacggcaaagtgcacctggagctgcggctgagcgaggtcatcacagacactggggtcgtctgcc

SEQ ID NO: 550656 - DNA, 100 bp, Homo sapiens
tgcgcttccgacggggcggccgggggctcagagatccaagtgcgcgccctggcgggtccggaccaagatcttcaggaattttactgggataattatccaa

SEQ ID NO: 550657 - DNA, 83 bp, Homo sapiens
ctgtctctgccctcctggcgggcccggcggctctcactatccaggttctgggccggagaaggggcgacgttcgggcacccccc

SEQ ID NO: 550658 - DNA, 127 bp, Homo sapiens
aagagtgagcagaactgtgttgagatgggagcacatttggttgtgttcaacacagaagcagagcagtgactcatcacaacttttcacgctgtaagagaggcacaggagtgcacaagttagagcacca

SEQ ID NO: 550659 - DNA, 100 bp, Homo sapiens
atctgttcaccactcatttgcaacttatatcgccagtccagcagctaaggatattttgtgcagctctgcacgcccacgaccccgtcttcaagagcatcac

SEQ ID NO: 550660 - DNA, 96 bp, Homo sapiens
gtgatggggccctgtgcacccatccaggctgcccagaccaggagagcacaggtcagccggacacatgatggtcgcaatggaagaagagatcgccgc

SEQ ID NO: 550661 - DNA, 100 bp, Homo sapiens
cctggcctccggtcccaacttcgcttctctgctgaccctctctcgtcgccgctgccgccgccgcagctgccaaaatgcagctgctcccaaccccagaacc

SEQ ID NO: 550662 - DNA, 90 bp, Homo sapiens
aggtgaacgggcggcccctggagatgattgagccgcgcacgctacagtacaaggccttggacaagattcgctatgagagcctgacagacc

SEQ ID NO: 550663 - DNA, 98 bp, Homo sapiens
gaagacgccacagacagcagcgcagtaccaccttccagagatggcgagctgaggatcagtgtcctgcctgcctacctgtcctatgatgccccatggcc

SEQ ID NO: 550664 - DNA, 115 bp, Homo sapiens
aaggtaattttgacccagaggagcaatgatgtagccacctcctaaccttcccttcttgaacccccagatgctgcaatgtacaacaactctgaagccctgcccacctctcctatgg

SEQ ID NO: 550665 - DNA, 90 bp, Homo sapiens
ccaaaattcttagcttcttcctttccctcatgcagcccatggatagccagccccagaggtgttggagcgggccggagagaagtagagtgg

SEQ ID NO: 550666 - DNA, 100 bp, Homo sapiens
ctgtgtatgtgacatcagtaaagaaaacaaggaagttattcaagagctgaataattgccagtggtgaagcagcgcttgcagatgtacaactcgcagcacc

SEQ ID NO: 550667 - DNA, 50 bp, Homo sapiens
ccagcagtcgcctagccaaccctgcctttaaatctacaagacagcagcct

SEQ ID NO: 550668 - DNA, 100 bp, Homo sapiens
aaaatcaaaagaaacttttgcccttatcagtaacacctgaggaagttaaaccgaatttaacagagagaattcaggactatgacgtgtctcttgataaagc

SEQ ID NO: 550669 - DNA, 82 bp, Homo sapiens
gcccgcccgaccccgtcccgaccctggccgccccgagcggagcctggagcatcaagatggtgctcatgtggaccagtggtga

SEQ ID NO: 550670 - DNA, 97 bp, Homo sapiens
acatggcccaggaggacgactgggaccgggacctgctgctggacccggcctgggagaagcagcagcgcaaggtcaatgagtggtcattgaagataag

SEQ ID NO: 550671 - DNA, 98 bp, Homo sapiens
caaagtctgtatctttagtaaggatgggaccttgtttgcctggggcaatggagaaaagcgtctactagaaaaatctcagagggtagaagccatcattg

SEQ ID NO: 550672 - DNA, 74 bp, Homo sapiens
ggaaaaaaaccttcgactatgcagagacatgagatggtagccaacccctcaggccctggccaacgtcaacattg

SEQ ID NO: 550673 - DNA, 90 bp, Homo sapiens
tggcctctgattacaaatgtatagggggaacgcctagtttgaaaatattatggctgaaccaagagccagaaatacaggttcggcgcttgg

SEQ ID NO: 550674 - DNA, 75 bp, Homo sapiens
cacgaccaggccgtgcaggcgctgaagcgcgcgggcaaggaggtgccagtcacgaattgcccgaacattacctgc

SEQ ID NO: 550675 - DNA, 100 bp, Homo sapiens
ctgagaaagtcatcgatggcaccccctgtgaccagaacggcacggccatctgtgtgtctgggcagtgcaaggcattgggatcccgtggcagttgcagcac

SEQ ID NO: 550676 - DNA, 50 bp, Homo sapiens
agggggccaaggcttcctccgggcaatttccagtttatgtactaccaaaa

SEQ ID NO: 550677 - DNA, 100 bp, Homo sapiens
tgcccaagaggggacttgatgttaacaaatgtgagattgccagtgggagaactgaagtccaatcagttcagtatggcaaagaaaaggcaaataaagacag

SEQ ID NO: 550678 - DNA, 75 bp, Homo sapiens
ctctacatttgtgaaagtcagtttctgaggaatttcatcagatactggctccaatactacagaatgaatagaaaa

SEQ ID NO: 550679 - DNA, 101 bp, Homo sapiens
ggaactgctgaaatgtaaacaagaagccagaaacttacaggggataaagaaaaagcttgagtctccacccccatctaccaatcccttcctggaagatgagc

SEQ ID NO: 550680 - DNA, 74 bp, Homo sapiens
tcttacgtctgcggaagtgcagctgcctcagttcttagcgcaggacttggatgttgtgggtgatggtatgcagt

SEQ ID NO: 550681 - DNA, 100 bp, Homo sapiens
tagagaccttggctggtcagagggctgtgaagacgcacggtgccaggaccaagtatctggtctggagcccgagatccagaagctgattgcaaggcacaag

SEQ ID NO: 550682 - DNA, 100 bp, Homo sapiens
cttttcctccgaccctgatgctcttcaattcggtgctccgccagccccagcttggcgtcctgagaaatgctgatcactggagattccatcgttagtgctg

SEQ ID NO: 550683 - DNA, 73 bp, Homo sapiens
tccatgccaccgctttcatcatcgtccaggagtttgacataaagagcttctgcaagatcctggggccattatc

SEQ ID NO: 550684 - DNA, 100 bp, Homo sapiens
tttccttcgtccctgacatcatctctgtgcactgataataaccctgcaggtttatcaccagatcttcaatctatggagcagattcggcgaattatgcgac

SEQ ID NO: 550685 - DNA, 100 bp, Homo sapiens
aatggagcaaaatggcggatcatgtgcaggattctttctactaatccagatacttgttgaagtgctgactagtttcttggggaaagatgtcaaggaagag

SEQ ID NO: 550686 - DNA, 96 bp, Homo sapiens
tttgtactgaccaagatgagcaacatctacatccaggagcctcccacgaatgggaaggtggcttcccacacttctgactcggacgttccttccggt

SEQ ID NO: 550687 - DNA, 76 bp, Homo sapiens
gattcatttagagctgcggaacaggacgccctctgatagagaaaaggaacagttccgtaagctctttattggtggc

SEQ ID NO: 550688 - DNA, 88 bp, Homo sapiens
cccacctttgcctcagaaagacctatttcaggttgtttacattcagagctctatcaataagaggaatacatattacagtgaattcgac

SEQ ID NO: 550689 - DNA, 83 bp, Homo sapiens
ggagatcacaccccgacggcagtccatgacggtgaagaagggagaggtgagaagccctaccactgcaactgggacggctgcgg

SEQ ID NO: 550690 - DNA, 80 bp, Homo sapiens
ggccaatgtggccaaggctggcttggtggatgactttgagaagaagcttgttgatggtcactttgataccaagattggac

SEQ ID NO: 550691 - DNA, 74 bp, Homo sapiens
acagctcctaccttggacgggaggaggaggacttcatccaacccagcagccgagaagaggcccagcagctgtgg

SEQ ID NO: 550692 - DNA, 82 bp, Homo sapiens
cctgatgaagttcgagcactaatatttaagaaagaagatgttaactttcagcacatcatgcagcgaattcagaggcttcagg

SEQ ID NO: 550693 - DNA, 101 bp, Homo sapiens
ctttcaaggatatgctgtattcagctcaggaccaggcaccttctgtggaagattgggaaaatgaggtacgttagtgttcgcgattttaaaggcaaagtgct

SEQ ID NO: 550694 - DNA, 75 bp, Homo sapiens
caataatgaatcattagtatcggacacagaaacgcctagaatatcctgcagtggtagagtttgctccattccaga

SEQ ID NO: 550695 - DNA, 96 bp, Homo sapiens
tcttaatcaagataactgtacatggaggcgcctgaacaagaataagctgcaagtccttccagaattgcttttccagagcacgccgaagctcaccag

SEQ ID NO: 550696 - DNA, 100 bp, Homo sapiens
ccaaagaggagctggccaagaaatgcagcatcacagtgtcacagaacaccttccaccatgaccacctcagcaagttcccacttaaataaaggcatcaagc

SEQ ID NO: 550697 - DNA, 76 bp, Homo sapiens
ttcttcaagatggaacaaagactgttgagtatgctccatgtagatcaccaaaccagtccagctacgggggcccagc

SEQ ID NO: 550698 - DNA, 75 bp, Homo sapiens
ctgaaatgtttgacgacactgatggtttgggggatatgagactttctactcggaatatcctgagtgttgcgtgga

SEQ ID NO: 550699 - DNA, 99 bp, Homo sapiens
gcagtgcagccctcagacaacatcagccggaaacacacgtttaagaaacaccatctgattcagatcacaagaagaagaaaaagaaaaaagaagaggatc

SEQ ID NO: 550700 - DNA, 121 bp, Homo sapiens
ccgtgaccgagagcgtgaccgagagcgcgaatatcgtcatcgttagaagactgggagactagacctgaaatgaaagagttggatccaaagaatgacatttcggaagacaagctctccgttg

SEQ ID NO: 550701 - DNA, 51 bp, Homo sapiens
cggcctggaccttgcagccgcaatgagattaaaatggcttccagaggaaag

SEQ ID NO: 550702 - DNA, 83 bp, Homo sapiens
gctcaagggactgtgtccaccctcagacaatgcagatcttcgtgaagactctgactggtaagaccatcaccctcgaggttgag

SEQ ID NO: 550703 - DNA, 75 bp, Homo sapiens
tgtggggggattctcgacctgctaacagaactggaccttttcgcattgatgttgatgggacaatgacagtggact

SEQ ID NO: 550704 - DNA, 114 bp, Homo sapiens
cctgaatgacatctacctccatcaggaccccagatgtctgacagccctgtgtgacaccaagataagtaacggattcatccaaccatcatttctgagtcattccagaaggccctg

SEQ ID NO: 550705 - DNA, 100 bp, Homo sapiens
cagagctgggctggtaaaattgcagtgctgaagacactggacccgaatctctttaaaatggacatagaagactgcaatggccgctcctatgtgtctggta

SEQ ID NO: 550706 - DNA, 98 bp, Homo sapiens
ccagtgcactagccattgaagtatttgaagcacatttgggaagccacattttgcagtttaaggaagaaatctctaaacgttttaaatcacatactgac

SEQ ID NO: 550707 - DNA, 100 bp, Homo sapiens
gctacgaggaggccttcgaggctctggagtcctccacggctacggcatccgggtgtcattgggttgctgcgggaagccggggcctccctgtccacccagg

SEQ ID NO: 550708 - DNA, 93 bp, Homo sapiens
ggcgcagggcggctggcacaaacggcggcgccggggccggaggaaaaagctcgccatgccagtgacggtaacccgcaccaccatcacaaccac

SEQ ID NO: 550709 - DNA, 87 bp, Homo sapiens
gcgagcgccgaggggacaggccgagcgcggggcgccggaggcagccatcgacgagtacaagccccaggatgctaccaccaacccgtc

SEQ ID NO: 550710 - DNA, 90 bp, Homo sapiens
ctcgtggacaagtttgcagatcgggagcgcaaggtcgccctcaaggccatgatcaaaacgagccgggtgtgggctgagccctgcctgatt

SEQ ID NO: 550711 - DNA, 100 bp, Homo sapiens
agctcccaagggctctgtgctgcaggaagcaaaactgtagggtcctgagtttgtgcgcaaacatatcttcaacaagcatgcagagaaaattgaggaagtg

SEQ ID NO: 550712 - DNA, 101 bp, Homo sapiens
ggaggagcagttgtctgatgaagagaagatggactagaggcttttaccagatttcttaaaactgaattcagtgaagaaaatattgaattttggatagcctg

SEQ ID NO: 550713 - DNA, 113 bp, Homo sapiens
acaagagaacctgcaaccgtttccgcctcctgctagagcggcgaaccgtgggcagtgagggttccgagtctgaggaagacataaccttgtgcctgcctgcccacctctctctc

SEQ ID NO: 550714 - DNA, 100 bp, Homo sapiens
ctttggcaagtggacattttactggctcaacatgtagagcgcatgaagtacaggacaataaagcttcctacacatatcaccaggaggatctctttgaaag

SEQ ID NO: 550715 - DNA, 76 bp, Homo sapiens
aaggataagtctcatgacacctctgtgtctgtgtggagtgttgcaggacgagtggaaatgactgtttccaagttca

SEQ ID NO: 550716 - DNA, 82 bp, Homo sapiens
gcaggagaaaattgctgcctttgatagctgtactttcacgaagaaattctttgttacaactgtgattgggttattatacccc

SEQ ID NO: 550717 - DNA, 100 bp, Homo sapiens
aaaagagggtggagagctactcaaaattctacgttagagagactgaaaagacatctaatttcattgctcggcagtccctctgtcgtgaaatcaagcaacg

SEQ ID NO: 550718 - DNA, 96 bp, Homo sapiens
gcggcgagcggacggctgcatttacggggtctcccggagggccagagtcgacccaacatgagtgaagtttcctgcaagaaacgggacgactatttg

SEQ ID NO: 550719 - DNA, 75 bp, Homo sapiens
aacacattctgggatgtggatggaagcatggtgcctcctgaatgatatcaaatggatccactataaaagtcttta

SEQ ID NO: 550720 - DNA, 100 bp, Homo sapiens
gtgaaagagaagggaatgctaagaactgctgggaggatgacactcaccatctgctacctggatatgctgatgaccagtgaggagcgccggaagcagctga

SEQ ID NO: 550721 - DNA, 88 bp, Homo sapiens
tgctcctctatgctggacatcaaatttccaggtaccttgtggtctataatcctttagaacaagaccgaatctcgttggtctcagtcta

SEQ ID NO: 550722 - DNA, 100 bp, Homo sapiens
cgaactgggtgcggggacaggcatcgtggggatcttggcagcgctgcaggtaagacctatggcaacgtgctggtgttggacggtgtcatccagtgcacgg

SEQ ID NO: 550723 - DNA, 101 bp, Homo sapiens
ccagctccccagaaatgaacctgcccacggtgtccgcgctcagggtatccacaagtgaaaatccacaactctgaagagaaactaccaagactcctcctgcc

SEQ ID NO: 550724 - DNA, 75 bp, Homo sapiens
tgcggactggcgctttctgatttcagagactctccgcaacagaaccatctcaagaatggttttagggaagactgt

SEQ ID NO: 550725 - DNA, 95 bp, Homo sapiens
gtcagatgacctgactgttgtagatgcagcttcactaagacgacaggtgattgcagtggtcatggacgtgttcacagacatcgacatcttcagag

SEQ ID NO: 550726 - DNA, 98 bp, Homo sapiens
cctctgctcctgtgccagtggagatagagaatcttccacagagtcctggaacagaccagcatgacaggaaatggtaccttgtggtctataatccttta

SEQ ID NO: 550727 - DNA, 100 bp, Homo sapiens
gagaaaaggactcaggtgaggactggaggaaagtaatggaccagtgaaggtgtggggaagcattaaaggactgactgaaggcctgcatggattccatgtt

SEQ ID NO: 550728 - DNA, 90 bp, Homo sapiens
ggccagatctacgagctagagttgccatttcgctgggatttttgggtggtgcaaagaaccttgtgaaacatcttcctgagcagaagatac

SEQ ID NO: 550729 - DNA, 100 bp, Homo sapiens
gaaaaatccagagaccccctgaagattcgggtcagtgaagatatgaaattaactgactcagagctaggaaagctggcaaataatatccaggaattattat

SEQ ID NO: 550730 - DNA, 112 bp, Homo sapiens
ggaatacacaggatccgattatcagtatgtgggcaaggtgacaaacagcatgtttggtgcttcaagaaagaagtttgtagagggggtcgacagtgactaccatgacgaaaac

SEQ ID NO: 550731 - DNA, 96 bp, Homo sapiens
ccgaaggccctatcaggacatggagtatgaaagacgagtacccaaaggcaagtggaacagctctaatggggttgaagaaaaggagacttgggtgga

SEQ ID NO: 550732 - DNA, 75 bp, Homo sapiens
ggaacaccctggaagccgagaaatgatcccaagacaaaagcgtggttgaaggagcacgtggagcctgtgttcggc

SEQ ID NO: 550733 - DNA, 76 bp, Homo sapiens
ggggtgtgcaaacccgagagaactggaccttgccaccatggaagaaagagtacaaagacgatattatgaaaagctg

SEQ ID NO: 550734 - DNA, 100 bp, Homo sapiens
cttggcgaagccttgggtttctttcttaaaggactgatttttagaactccacatttgagttagcagacttgaagaaagagaagcagaactgaagaaggaa

SEQ ID NO: 550735 - DNA, 104 bp, Homo sapiens
ttcgtattctgtggtgactcatctcgcacgtgacccccctccctcttcaagataacgaaggaggcccaacttcattcaataaggagcctgacggatttatccca

SEQ ID NO: 550736 - DNA, 101 bp, Homo sapiens
aagaagaaagaagacgccacagacagcagcgcagtaccaccttccagagatgtctgtcagtttgtcgtctctgtcaacgggctcaatgtcctgcatgtaga

SEQ ID NO: 550737 - DNA, 100 bp, Homo sapiens
acgcggccaggcgattcggtgaagcgattcctgcaggcgttggttcccctctttgacctgcaggacccagtgctccataaaggataatagtttccagtac

SEQ ID NO: 550738 - DNA, 75 bp, Homo sapiens
gttcgtgtgacaaacagagatatcatttgtcaggaaccactcgttttgactattattttatcactctttgtgaaa

SEQ ID NO: 550739 - DNA, 76 bp, Homo sapiens
aaaagcccccaaaagcagctattcaggagcatctttccttgaagaagtacattattgacattgtggttgaaagtac

SEQ ID NO: 550740 - DNA, 56 bp, Homo sapiens
gaatgtatgaggagaattctcagcctagatggggtctcactgtgttgcccaggctg

SEQ ID NO: 550741 - DNA, 74 bp, Homo sapiens
atagaatggaacccttttgatcaagatgcggtgaacatgattgggaaaatgaggtacgttagtgttcgcgattt

SEQ ID NO: 550742 - DNA, 75 bp, Homo sapiens
ctgggagcctagaatgcatcagtgcccttgtggcgaatggggctcacgtcgaggaactctaatgatccaggacaa

SEQ ID NO: 550743 - DNA, 87 bp, Homo sapiens
cctcggcccgcacgccaagcacgtggtgggctatggccaccttgaccacggtgtgaacacatgaacagaagacgaaaatttcttcta

SEQ ID NO: 550744 - DNA, 90 bp, Homo sapiens
cggagacgtggccggcctagccgaagcctcctctgtggcgctcagcaactgcgatgggctggaccgccgggagagcctgcccacctcccc

SEQ ID NO: 550745 - DNA, 101 bp, Homo sapiens
gcatccctatggagagcagcatctcgttgtaaaatcacctggaagacaaggataggcgtagaggctccggtgttttttgtgccaattgcctgaccacaaag

SEQ ID NO: 550746 - DNA, 99 bp, Homo sapiens
ggaggatccgagtgtgaatttcctgaagaacgttggggagagtgtggcagctgcccttagccctctggatcggagcacagtgctacttggaatgttcag

SEQ ID NO: 550747 - DNA, 97 bp, Homo sapiens
gagtcctgagcggccaggacgacgaggagcagggcctgactgcgcagatgagggttactaccagggtggaaaatttcagtttgaaactgaagttccc

SEQ ID NO: 550748 - DNA, 50 bp, Homo sapiens
cgctacacagcaatgcatcgagtgacactacctgagaagcctgttaaact

SEQ ID NO: 550749 - DNA, 101 bp, Homo sapiens
ggtggtgctggctcagtacatattcaccttgaagaggaagacggggcggaagaccaagatcatcgagatgcggacaaggcaaaatctcagcaagttcggac

SEQ ID NO: 550750 - DNA, 74 bp, Homo sapiens
ggctccctggaggaccgtctccactgccagatacaaactggactctcaggacaaaacgacaccagccaaaccag

SEQ ID NO: 550751 - DNA, 83 bp, Homo sapiens
gcaccgcgcctgctgccgggttgcgctccgtgcacctcttgcgggcacctgaatggacagaagaggacctcagccaactgaca

SEQ ID NO: 550752 - DNA, 50 bp, Homo sapiens
cgcgtgcgcggacatggcctcaaacggccgaatcccgccgccgctcttcc

SEQ ID NO: 550753 - DNA, 87 bp, Homo sapiens
gccgaaccccgcgcccgcaggacgccccagccaggacgatttcctgttcagtgtctccattttaagtgggattctttgcagcatcct

SEQ ID NO: 550754 - DNA, 75 bp, Homo sapiens
cccctgggcccatggcggcgccggcgttgtggcacctatcactctcgagatgagagtacagacagtggactaagc

SEQ ID NO: 550755 - DNA, 96 bp, Homo sapiens
ctttgctcttccatccgcctttgatcgtcttcctcttcagccatccagtgtgtctgaaatgtgatctccaagagcgactgctctgcccatccctac

SEQ ID NO: 550756 - DNA, 100 bp, Homo sapiens
accagcgggccctggccgctcacccgtggaaagtacaggtcctgacagctgtgacaacgcgcctgcaaaagggaacaagagcccttcgcctccagatggc

SEQ ID NO: 550757 - DNA, 109 bp, Homo sapiens
tcctcctggatggctgcaccatcacctgcccctgcctggagtatgaaaaccgaccgaggaaaagcacctccacgttttgatcaacaatgcaggagtgatgatgtgtccg

SEQ ID NO: 550758 - DNA, 98 bp, Homo sapiens
accacccactttgtctccagcagctataacagtggggagaggagaagatttgacttctgaacatcctttgttagaccaatgatgcgagctcagagtca

SEQ ID NO: 550759 - DNA, 95 bp, Homo sapiens
gtttttgaacattttcttgaaaatctggataaatcccgaaaaggagaacttcttaagaagagtgatccccttggaaaggacttccagaactgacc

SEQ ID NO: 550760 - DNA, 59 bp, Homo sapiens
catgttgctcaaaattaaacaaggttgcaagacaacagacagttcagaggcagggacaa

SEQ ID NO: 550761 - DNA, 115 bp, Homo sapiens
cccggggctccctcgcaccaaccccaaatcctgccctcctggcgatgaggcttttctagggcacctctacaatccgggcctcaggcccaggcccaaggccaagtgagagagccca

SEQ ID NO: 550762 - DNA, 83 bp, Homo sapiens
attggatgtgaaaatgaagccagaccgagcaattctgtggtgttcttggtcacacatttatggagtttctgaagggcagtgga

SEQ ID NO: 550763 - DNA, 100 bp, Homo sapiens
ttatcagcaattacaatggcacttcaatatggctcagaaagtgaagaagatgctgctttagctggaatactcccccagttgcaagaggcgcaggaccgtg

SEQ ID NO: 550764 - DNA, 49 bp, Homo sapiens
gatgtatctgacgaaaaaatgagcacactggcatcagtgaacatccagg

SEQ ID NO: 550765 - DNA, 80 bp, Homo sapiens
atggtgctgataaagtttcgtgcacagagttgatctctctaatgtattagatcttcatgcctttgatagtctctctggaa

SEQ ID NO: 550766 - DNA, 101 bp, Homo sapiens
attgaggacaagaccatcgagctcatggttggccttcattccacgatgtgatcaattctgaggcaatcacattcacagatgacttttcctatgggatgcac

SEQ ID NO: 550767 - DNA, 74 bp, Homo sapiens
cgagctagccgggagttacaccgccaccgccagaaacctgctcctccaaagccagagcccaagcctaaaaaggc

SEQ ID NO: 550768 - DNA, 100 bp, Homo sapiens
ccctgaccacttcctgtgtctgtgggagcactgtgaggtgtgggcccatcgctggatggatctgtcagaacacggctttgggctggccctgctcaacgac

SEQ ID NO: 550769 - DNA, 85 bp, Homo sapiens
tggggccagggaaccctggtcaccgtctcctcaggtccgcgggagagctgtggggcttggtgagtgtttcgtggcctctcgggtt

SEQ ID NO: 550770 - DNA, 75 bp, Homo sapiens
ctttccctcagcacacagaggatgatgctgactttgatgaaggtaacgatgggaaaggaactcctgtattcacag

SEQ ID NO: 550771 - DNA, 100 bp, Homo sapiens
gtttcctgctccttgccaaaactggaagaactcctgtgggcctctgctgctcagccatcccccggaagcctcgcccttgtcctggactccggtgcctcct

SEQ ID NO: 550772 - DNA, 82 bp, Homo sapiens
caacatttccgagaaagcttcagacatgcttataagacaactcttagctgttgttgatcattatgaaaatcctagaaacgtg

SEQ ID NO: 550773 - DNA, 88 bp, Homo sapiens
ccagaacctcttgttcctcctgtcccaaaagaccatcctgctctcaactacaacatcgtttcagggaggattccctgggagcacccac

SEQ ID NO: 550774 - DNA, 97 bp, Homo sapiens
atttaatggaaaatcgcttggttaaaacctgacacttttaacaggtatggcctcacaagtcttggtctacccaccatatgtttatcaaactcagtca

SEQ ID NO: 550775 - DNA, 131 bp, Homo sapiens
tcatcgtgctattcctggtctacatcctgcgggtgcctttgaaaatcaacgacaacttgagcacagtctcatttccagttcctccatgacgtggcaagtgaagacaggaatgaaaggaatgtaaagcagct

SEQ ID NO: 550776 - DNA, 87 bp, Homo sapiens
gaacgaccaagagggtgttcgactgctagagccgagcgaagctttgcctgagaatacagatcaacccacagaacaaagcggatttcc

SEQ ID NO: 550777 - DNA, 74 bp, Homo sapiens
agacagtgcttcagaagcaaactctcctgaggagctatccagcccaggtcctggagatgtggctgagctacctg

SEQ ID NO: 550778 - DNA, 73 bp, Homo sapiens
agcccttccttataggcgtcagcgggggaacagctagcggcaaggaacgggaggatgaaattgctactatgga

SEQ ID NO: 550779 - DNA, 99 bp, Homo sapiens
atttcagacagcaaaaggctggaagatgtctttccggcagacattggtctttcccagggaactccgatgaagtgttccaacaaaatgagcgagtgaacc

SEQ ID NO: 550780 - DNA, 100 bp, Homo sapiens
agagcacatggtggcccaggtcttcaggctgcaacaggcccatggtggagagacctccatgagggtgggatgtgtgtgggctgaaattccgagctgcggt

SEQ ID NO: 550781 - DNA, 97 bp, Homo sapiens
tgtcttagatgctcagatggtagtggataggcctgtgacgaaggtgctaccatcgtgagagtaagatgattcaagagagccggtttctcatagaaat

SEQ ID NO: 550782 - DNA, 75 bp, Homo sapiens
tgtatgtgttcatcaaggacaattgcatgcacttacagaggcagctatcaatggtgtaataccacaggaaaatgg

SEQ ID NO: 550783 - DNA, 80 bp, Homo sapiens
ggcttaagatgtcctgcctgaaagggtggcccagttgaaatccttcccttcctctaccttggaagtgcctaccatgcatc

SEQ ID NO: 550784 - DNA, 98 bp, Homo sapiens
gggaaaagcgaggcaaggcaggcggatgttaagacatcccacctgaaacctgaagcgcatcctacaaagtatatttcttcgaatatgggtgatttcct

SEQ ID NO: 550785 - DNA, 100 bp, Homo sapiens
caggagaccgctaacagcctgccagcccctcctcagatgcccctgccggagatccctcagccctggctgtactatactggcaattgctggagaagatttt

SEQ ID NO: 550786 - DNA, 88 bp, Homo sapiens
ggacgcacctctgtttgggggtcctcaggatgttgcttcagagtgtgaagtcaaatgcatgccaacattccagttttttaagaaggga

SEQ ID NO: 550787 - DNA, 75 bp, Homo sapiens
gtgatgtctactgtacccgtcactgcttatccaaaaacctgtttccctccaatcttgtggttgcagctttccgta

SEQ ID NO: 550788 - DNA, 100 bp, Homo sapiens
ccgaggcctcctgcagccatcatgtccgccagcgccgtctacgtgctggacctgaagggcaaggttttcacctcaaatggccccacggtgatcatgccca

SEQ ID NO: 550789 - DNA, 100 bp, Homo sapiens
gacgtctccagccaaattcaaaaaggataaggagatcatagcagagtacgatactcaggtcaaagctgcatcttcctcccgtgaggctggccgagctcca

SEQ ID NO: 550790 - DNA, 99 bp, Homo sapiens
gaagcggcgccgaagtttgcctcggactcgccgggcgctgcggtggctccctgggccgagacctggccgagtgcaagctggtctcctttcccattggca

SEQ ID NO: 550791 - DNA, 83 bp, Homo sapiens
ccgggccgggggacccgcccgccatggccaccaaggtgttggataaatacaaccctccagaccacttcctccctgagtcctac

SEQ ID NO: 550792 - DNA, 74 bp, Homo sapiens
tggagttcttacaacatggcagacattgacaaagacccatctattttggatagtttagatttgaatgaagatga

SEQ ID NO: 550793 - DNA, 100 bp, Homo sapiens
caggatcatcaccaaggtcattttcccaggccccccggacagaccacccagccctgtacagggacctgctgaggaccagccgcgtgcactggattgcgga

SEQ ID NO: 550794 - DNA, 74 bp, Homo sapiens
tcaggatgagataactgaaagggaagcagaaccatactatgcaacggacagccaagacgtagatccatccaaga

SEQ ID NO: 550795 - DNA, 100 bp, Homo sapiens
ctgaaaatgcactcggatgccgccgctgtcaatattgatgatgttaagaagttcaaaccgggttacctggaagctactcttaattggtttagattatata

SEQ ID NO: 550796 - DNA, 90 bp, Homo sapiens
cagaattgcattgacagcttccacagtaggaacaactcaaaaaccatcccaacaagagaatgcaagcattcagagtgattaacaatggca

SEQ ID NO: 550797 - DNA, 120 bp, Homo sapiens
ctgagctcagacctgccaatttaccagagataattgataacaccctgtaacagctgaaccgattattgaccgacctattcgaggtcgtggtggtcttggaagaggtcgagggggccgtgg

SEQ ID NO: 550798 - DNA, 98 bp, Homo sapiens
agctgtgccgcccgcgccccggggcagcagcgcgtcccaggaggagcaggacgaggaggtaatctgtaagtcagatgctccaacaggggatgttcttc

SEQ ID NO: 550799 - DNA, 100 bp, Homo sapiens
cttaacaagtctgattctaaccagtatattggggaactgaaagatcagatagcagagctgaatcatgagatactagagtaaaaggatggtttcttctgga

SEQ ID NO: 550800 - DNA, 100 bp, Homo sapiens
gcccccgagagccgccgacatgaagaaagacgtgcggatcctgctggtgggagaacgtggctgtgaaaaacaatatcgatgtcttctacttcagctgcct

SEQ ID NO: 550801 - DNA, 75 bp, Homo sapiens
gcggcggcggcggcggaggatgagcctgcagagcgcgcagtacctccggctcctcacacatcctcaccccgaccc

SEQ ID NO: 550802 - DNA, 82 bp, Homo sapiens
ccaaagcgcctgaggaccggcaacatggtgcggtcggggaataagagaagatggcgaattagaagatggtgaaatagacgat

SEQ ID NO: 550803 - DNA, 80 bp, Homo sapiens
caagcttaggaccacccaccatgcctatccaggctgaccccgcactacatctacccaccagccatcgtgcagcccagcgt

SEQ ID NO: 550804 - DNA, 98 bp, Homo sapiens
tctttcgtttgcagaacccaaaagccagagtgcctgaacaacggattgagctatatcaggatcccaaaatggctgggcgaaaacttgctctaaaaacc

SEQ ID NO: 550805 - DNA, 100 bp, Homo sapiens
agaggctaaaaataaaggagaagtatttccaacaactgaaggtgaccctggcagcaaccccaacaaacgccagaggcagccccctctcctgggagatcac

SEQ ID NO: 550806 - DNA, 75 bp, Homo sapiens
aaagatatgaaggactgggttgaagccctgaaccaagccagcaagatcaccgtggaggaagccttgactatcaaa

SEQ ID NO: 550807 - DNA, 76 bp, Homo sapiens
tgccagccccaagaaggagaccctcatccagctgatgcccttcttcgttactatactggcaattgctggagaagat

SEQ ID NO: 550808 - DNA, 83 bp, Homo sapiens
tgaaaagggtcctcctgctcacagtgtgaataacaggacttctgcacggacctggccgtctccagtgccaacttcattcccac

SEQ ID NO: 550809 - DNA, 100 bp, Homo sapiens
gcacacagacactgtcactggagtggccttcaacccatcagcgccccagggacaagcagatcttttgaaatatgctaagaatgagacattggagaacctg

SEQ ID NO: 550810 - DNA, 50 bp, Homo sapiens
cctcaccaagaatttggcatttcaagacggtctggaaaatcccgaagcag

SEQ ID NO: 550811 - DNA, 100 bp, Homo sapiens
atagagaaagaaactgcaaaggatgaagaggaagagcctcccagcatgactcagctacttcgagaatatgaagacaaggctggaagacctagcaagccac

SEQ ID NO: 550812 - DNA, 90 bp, Homo sapiens
ccaaagttgcatttcctcgtcgagcgcaacccaaggtggaaaaaacccgccactttttgctgctgcgtgagagacttggtgacagcatcc

SEQ ID NO: 550813 - DNA, 51 bp, Homo sapiens
gttcagtcatgcggagattaagacccatggatgaaggaccagatcttgatc

SEQ ID NO: 550814 - DNA, 90 bp, Homo sapiens
tcgccagcagccgtccggagccagccaacgagcgatattgaaatggattccaggcgtgtgcctcgagacaagctggcctgcatcaccaag

SEQ ID NO: 550815 - DNA, 100 bp, Homo sapiens
gtctctctgctgcggcgcggggaccgctgtgctctcggctgagtcatcactagagagtgggaagggcagcagcagcagagaatccaaaccctaaagctga

SEQ ID NO: 550816 - DNA, 101 bp, Homo sapiens
agaacgttttgcctatccaatgcctttctggttttgcacactagggaccaagaagccctcggggacactgctgagaaaagactgccgaagggaagaccagc

SEQ ID NO: 550817 - DNA, 100 bp, Homo sapiens
atcttgtacttcaagaggaggaatcacgctcggaaacaatggggaaccttctgaccagcctcatgggctcctcagagcaggaggatggggaggagagccc

SEQ ID NO: 550818 - DNA, 83 bp, Homo sapiens
gaaacgtgatagtgtgggatctggcaagaggagtcaaaatacgatcttatttcaatatgatctattccagaggggagcttcac

SEQ ID NO: 550819 - DNA, 75 bp, Homo sapiens
agatcatcgagcatttcaaacggccacaccatgaggccccagccccaccagaggccccgcgctgccctggccccc

SEQ ID NO: 550820 - DNA, 90 bp, Homo sapiens
ggggaagacctgcgtcctttttcgtttttcggatgatgccttcaatactacctttatttccaccatagatcaggatcctcatgaccagcc

SEQ ID NO: 550821 - DNA, 100 bp, Homo sapiens
aaggcggcgatcctgggctgcgggcaaggcgcctccagaggtgaagtccccagtggagcctatggctactcttacatgcccagcggggcctatgtctatc

SEQ ID NO: 550822 - DNA, 126 bp, Homo sapiens
ccgacttgccggcagaacttacgctgcgggaccccgggcactgttgctgctgcgggaggatgcagtgaccagcctttgctttggccggtacgggcgggaggacaacaccctcatcatgaccactcg

SEQ ID NO: 550823 - DNA, 75 bp, Homo sapiens
ttaatgttcacgcggtggaaacagcagcagcggaaggaaagtaatggtccaacagacagttatgcagctatttca

SEQ ID NO: 550824 - DNA, 102 bp, Homo sapiens
ccaaactggtaaatgacgaaggggcttcttccagagccaaggaggaagggttgtccgggtacatgatgttgattgatggcacaaatgaagtttttatgattg

SEQ ID NO: 550825 - DNA, 100 bp, Homo sapiens
tcagctcggccagtgggggctttggatccacagctacctcaagtctgaaggggcgtctcgattacctgagctctctgaaggtgaagggccttgtgctggg

SEQ ID NO: 550826 - DNA, 75 bp, Homo sapiens
cagcctggcttaatttccctactccaccatcatcaacaaagtctcttgcatggcaccaagaatgttaccaattca

SEQ ID NO: 550827 - DNA, 97 bp, Homo sapiens
gcaaagtcttttgtgctcccctcccccatcaaaggaaaggggaaaatgtctcagtcgaaagagacggtctcgccacattgcccagactggtctgaaa

SEQ ID NO: 550828 - DNA, 78 bp, Homo sapiens
aagaaaatggcctggtctttgaggactcagaggaactggcagctcagctgcagtctacaggtgtatccagcagctcca

SEQ ID NO: 550829 - DNA, 100 bp, Homo sapiens
cccgcgtccctcgccatggcgcggctcgcggactacttcgtgctggtggcgttcgggccgcacccgcgcggtgtcatggagaaactccagctgggcccag

SEQ ID NO: 550830 - DNA, 75 bp, Homo sapiens
agctctacagcctcctctccgaccccattcccgagtaagactttgaccccgacgcaggcttcagtgattgccgcg

SEQ ID NO: 550831 - DNA, 97 bp, Homo sapiens
gggtctggagtgcgtgggggaccggctgttggcgggtggccagaatggatttgtggccaggggcatggatgctgctgctgctgctcttcctgctgct

SEQ ID NO: 550832 - DNA, 100 bp, Homo sapiens
aaaagccgtccggaaaatggccgccgccgccgccgccgcgccgagcggaggaggaggaggaggcgaggaggagagactatgagttttgatcatcctgaga

SEQ ID NO: 550833 - DNA, 151 bp, Homo sapiens
gcacatgtgatcttggcctgcaggaacatggcaagggcgagtgaagcagtgtcacgcattttagaagaatggacagatacattgataactccatttgtgggtttaatagaccacaacttccaggcccagccgaatcctgctgaagttaagg

SEQ ID NO: 550834 - DNA, 82 bp, Homo sapiens
catcgagtgtgacgtggtgaaaggggtgagcccctccagactccgaataggagatcaagagtttgattcattgcctgcttta

SEQ ID NO: 550835 - DNA, 100 bp, Homo sapiens
gactggcgaactggaaggccacgcctcctcccgcctgccccctcagccctgtggctgggggcagagctcaggatatcactactttaactggagttccaga

SEQ ID NO: 550836 - DNA, 50 bp, Homo sapiens
gtctggcatggagaccagatggcaaacggaccatggctaaacctcctgga

SEQ ID NO: 550837 - DNA, 50 bp, Homo sapiens
ccacaagtaccacaagcatggcaagtgcgcaggaccattgtcaagatccc

SEQ ID NO: 550838 - DNA, 50 bp, Homo sapiens
gcttggcaaaatcgagcgggccattgactggggcagcacctactccgtgt

SEQ ID NO: 550839 - DNA, 97 bp, Homo sapiens
cccaaccctcgtgcctccctgaaccactccactgcctttaaccctcagcctcagagtcagatgcagggtcttgtccaataagcatgtggctcctgat

SEQ ID NO: 550840 - DNA, 100 bp, Homo sapiens
ccggagctgggcgcggattcgccgaggcaccgaggcactcagaggaggctgatgtttcagacaccgcaggaaatgggcttaatagtgatcgcggcccggc

SEQ ID NO: 550841 - DNA, 75 bp, Homo sapiens
gcctcattggacagcattcgagccaacacaagccatcagccccatgctcagctcccagcaggcagagcgttcaga

SEQ ID NO: 550842 - DNA, 80 bp, Homo sapiens
taccgcatctggctggagccctgcattcgcggcgtgtgcaggaaaaccgtcttcagatacagtccctaagcccaagagag

SEQ ID NO: 550843 - DNA, 110 bp, Homo sapiens
ggttttccagagatgcaaaaatgcaccctactccagcatcgcaccccaagaaaccaggatcaggcagctagagacatgaagaggcttgaagaaaaggacaaggaaagaaa

SEQ ID NO: 550844 - DNA, 98 bp, Homo sapiens
ttgttctcagctacttgggactcctctctcaagagaagctgcaagagcaacatctttcctcaccccaagctgacagtgaagatagtactgtgtccatc

SEQ ID NO: 550845 - DNA, 83 bp, Homo sapiens
gaccaaggtggaaatcaaacatcttagcaaagcaatgtctcaagatggtgcttctcagttccaagaagtcattcggcaagagc

SEQ ID NO: 550846 - DNA, 90 bp, Homo sapiens
cccgggaggggggagcggcgttggaggccaccgtttccaggaacatggaggagacatatttccacctatttctctccataagtataaaag

SEQ ID NO: 550847 - DNA, 100 bp, Homo sapiens
cttctatgaagccagagatggaccgcagggtgtttgtgaaccgaagtttagcaatggaaaagataaagtgttttggttttgatatggattatacccttgc

SEQ ID NO: 550848 - DNA, 75 bp, Homo sapiens
tgaagaagaatttcgatctccgccctggggtcattgtcagaagactggagcgctcagcctgccacggaagactgg

SEQ ID NO: 550849 - DNA, 98 bp, Homo sapiens
ccgcccggggctgctgcttcctggcctctggctgctgctgctggcccggccggcctcgtgcgccccaggagatacaactcgtcaacgaatcaaattca

SEQ ID NO: 550850 - DNA, 76 bp, Homo sapiens
tgaacatcaagatatagatgtagcaatacttactgcactgctaaaagaacggtggcagccgaagttaggaagcaga

SEQ ID NO: 550851 - DNA, 100 bp, Homo sapiens
cagaagaaggacttcggaatgcactacaacaggaaaatcatattatagatggagtaaagaaagcagaagccactggagaaaaacggccaagaggcagacc

SEQ ID NO: 550852 - DNA, 101 bp, Homo sapiens
ctgggaggggaattccagcaccgcagcaaccactccagaaactttccctccttcagattactccaaaggtttcggcggcaaatacggtatcgacaaggaca

SEQ ID NO: 550853 - DNA, 90 bp, Homo sapiens
gttgacaagtggatccaagatggcgtagaaagtaatgacaggttatggccacaccgtgcccttgtcagatggaggtaaggccttctgcat

SEQ ID NO: 550854 - DNA, 100 bp, Homo sapiens
ctttaggcatatgtatgtgtttggagacttcaaagatgtattgtgtgatgaatgcagactctgctaccattttggctgtttggatcctcctttgaaaaag

SEQ ID NO: 550855 - DNA, 101 bp, Homo sapiens
aatgttagagaagaaagacagctttgtggaagagcaattcacagaagctgtgagtccttcagtgctacccccttcagctttgccactggacctgcttaata

SEQ ID NO: 550856 - DNA, 90 bp, Homo sapiens
ttgacactattattgatcatgctagtgttgggtcaactgctatgatgtgtttggagcccagtcaccctttggtggctacaagatgtcggg

SEQ ID NO: 550857 - DNA, 100 bp, Homo sapiens
cctcagatcatcgcccatatccagaagggcttcaactacacggtgtttgactacttgtgtatgcggatacctgcttcagtaccatcaagttaaaagcaga

SEQ ID NO: 550858 - DNA, 101 bp, Homo sapiens
ggctgctccgcaccccggggtcccaggaagggcggcccaggttgctgaaaagccaggagtcaaaatgactgagcgctttgactgccaccattgcaacgaat

SEQ ID NO: 550859 - DNA, 96 bp, Homo sapiens
ggattttcttaatcccaatgttgccctgaaatttatgtccaggattcaaaaagtttaggactgctaagagaggacatgtactcccaggattccata

SEQ ID NO: 550860 - DNA, 75 bp, Homo sapiens
aggtgtctgtgcagctgactgtaaaacccaaagacatcgggcatgtggacttcctggagaaggtgcacaggctgg

SEQ ID NO: 550861 - DNA, 83 bp, Homo sapiens
cagcgccagcggccgagcgggcggcttcctggcctgggcgctccggtggcggcggaggctgctgagaactagccctagacctc

SEQ ID NO: 550862 - DNA, 101 bp, Homo sapiens
gaagtttttccaaacctgtgaaaaagaacttgccaaaatcaacacattttattcaggtggagccgccaccaaaatgcagattttcgtgaaaacccttacgg

SEQ ID NO: 550863 - DNA, 51 bp, Homo sapiens
aaaaattgtataccgcagattcaggcatggaaggaagttcgactgcataag

SEQ ID NO: 550864 - DNA, 90 bp, Homo sapiens
gtttagttcagcgcagcgactcggggacctggagctgacgcctaaactcaacagtgacaattgaggaattccactgtaagctccaagaag

SEQ ID NO: 550865 - DNA, 74 bp, Homo sapiens
aagaattgacccttgaaggaatcaaacagttttatattaatgttgagagagagatcagcaagttgctcggatgg

SEQ ID NO: 550866 - DNA, 83 bp, Homo sapiens
attttaatttcagtgactgaattaaaaggtgtcaagaagctcagaatggagaataaaggcagccccgttgatgactgaaaatg

SEQ ID NO: 550867 - DNA, 96 bp, Homo sapiens
tgagaaccctacttgcctaaatgaggaatgtctttcctaccatctaaaatacgaaggtttctggctgggcagtttcccagctacctcgagacggtg

SEQ ID NO: 550868 - DNA, 80 bp, Homo sapiens
tcacggccgctgccagggtccttagcacagacattttgacgatgagttctggttctccgatgggtccttatcagataagt

SEQ ID NO: 550869 - DNA, 74 bp, Homo sapiens
tgtgattagcttcgcagtctggaaagctttaggagttcacagttgttaaaagatcactgaagttggatggtctg

SEQ ID NO: 550870 - DNA, 100 bp, Homo sapiens
ctttgctactatacggacagcatcactggtcaatggcatgcagctttatggaaaatctcgccgagaagcagtctcctttcttaaagaagtgccaccccct

SEQ ID NO: 550871 - DNA, 100 bp, Homo sapiens
cagagaatgctctgcacccgttgatttgtatcacggactgattcaccgagcccaaccgtactcaactcacatatttctaccccaaatgtgaatgctttaa

SEQ ID NO: 550872 - DNA, 100 bp, Homo sapiens
ttgaacagactagaaattgcaccacagatatatgggttgaggctctgtcggtggtgagcgacgaccagtccctctttgactcagcgtacggagcggcagc

SEQ ID NO: 550873 - DNA, 74 bp, Homo sapiens
cccagtcgggactcgagcctagggaggcgaggttcccgcaccggatagaaacatgattcccgtgacagaattcc

SEQ ID NO: 550874 - DNA, 82 bp, Homo sapiens
gacgggccgagcctgccactggaaatcctcattgacgattcaatttgttgaaggccaatttgtggactcctacgatccaacc

SEQ ID NO: 550875 - DNA, 100 bp, Homo sapiens
ggaaaaagccaaagtgggaccagggtggataatattaatgcagctgtgatggatttgaaaaaaaagaagatccgcagtctaagtgaagaggtcaaaatag

SEQ ID NO: 550876 - DNA, 90 bp, Homo sapiens
ggccgtgtctccggcatcatgtgtgaaaaagcttgtggtgaaggggggcaaaaaaaagaagcaagttctgaagttcactcttgattgcac

SEQ ID NO: 550877 - DNA, 50 bp, Homo sapiens
tctggaagttacttgtggacatgtaccaaatatgccccaacagcggcaag

SEQ ID NO: 550878 - DNA, 100 bp, Homo sapiens
gttggaccttcgagcctagctgctcgcacaggactcggccacctgcccttcctgcaccgactggccagggatttaatgtgcaaaatggcgattataccag

SEQ ID NO: 550879 - DNA, 97 bp, Homo sapiens
ctctccgagaagcccttactaaacaagatccggagttaggtgttggcacgctaccagaacatgacagccaggatgcagggccgattgtccccaagat

SEQ ID NO: 550880 - DNA, 83 bp, Homo sapiens
cggcagctccagagcgacgggaaacgaaagagataatgctatgttggaatacctgaagattgctcaggacctggaaatgtatg

SEQ ID NO: 550881 - DNA, 75 bp, Homo sapiens
ccccgccgctcccgggggccgtgacgccccatctgctttgatatgattgaagaagcatacatgacaaaatgtggc

SEQ ID NO: 550882 - DNA, 135 bp, Homo sapiens
cggctttagtggcagcatgaagcgcaccccgactgccgaggaacgagagcgcgaagctaagtagctgctgctggtggtgacaatgtcaaataacggcctagacattcaagacaaacccccagcccctccgatgag

SEQ ID NO: 550883 - DNA, 88 bp, Homo sapiens
gatgttggcggtccctgtgacctgtggagacacggccagatctgccctccagtgatcccattaagatactaatgccatcactgtctcc

SEQ ID NO: 550884 - DNA, 83 bp, Homo sapiens
aggatgttcatgaagattcaataacagttgcatttgaaaacaagagaaccaggtgcatcagcgcattgcggagctgaggaaag

SEQ ID NO: 550885 - DNA, 75 bp, Homo sapiens
gccgctgctgctggtggcgctactggtgctgtcctggccacccccaggaaccgggaagaaggagaaagggccaac

SEQ ID NO: 550886 - DNA, 88 bp, Homo sapiens
caaccgcggcccctgtaggccaaggcgccaggcaggacgacagcagcagcagcacgtctccttcagattccgggaccccaaatcccag

SEQ ID NO: 550887 - DNA, 98 bp, Homo sapiens
aaaataattaaatattcttaccgagatatttcagcagttgaatcagttgaattcacttcatcaagaaactatcatgaaatgcgtgaaaagtaggaaag

SEQ ID NO: 550888 - DNA, 96 bp, Homo sapiens
ccagacccgtagttcctattgattcatcagattttgcattggatattcgcatgcctggggttacacctaaacagaaccaccaccacctaaaatccc

SEQ ID NO: 550889 - DNA, 83 bp, Homo sapiens
aagatgaaatccgtataccagatgtcgaacctgctgcttttctcgctatgctgaagtggataattactgtaccttcctcatgg

SEQ ID NO: 550890 - DNA, 100 bp, Homo sapiens
ctgtggtctctgcacctcctttctgtaaaagagaacctgctttcatgcaagatgctgctgcactgcaaacgggatgagcttcggaaactgtggattgaag

SEQ ID NO: 550891 - DNA, 92 bp, Homo sapiens
ggggaagtacgtgaagaaggagacgtcgcctctgcttcggagttcaggaacaagtgcatcccactctctcagctaatgaagagtctctctat

SEQ ID NO: 550892 - DNA, 100 bp, Homo sapiens
ggataacaacctgcttggcaagtttgaactcacagcacaccccacccggacgactttgccaatgacgacattgactcttacatgatcgccatggaaacca

SEQ ID NO: 550893 - DNA, 111 bp, Homo sapiens
tatgcattcctgattctaataatgatctcctacattccaagtgtcatggagaaactccagctgggcccagagattctgcagcgggaaaatccaaggcttatttatgccagg

SEQ ID NO: 550894 - DNA, 50 bp, Homo sapiens
ctccctagtagctgagactacagtgtggggtgatcagccccagatttgac

SEQ ID NO: 550895 - DNA, 82 bp, Homo sapiens
aggattcggacagcaagcatgtggatgtacatctagttcaactaaaggagtgcctgtgaagaaaacggggtattgccctgag

SEQ ID NO: 550896 - DNA, 75 bp, Homo sapiens
ggaggagtcccgctcgaagctagagtgttgcggagataggaacatgggagagaaacaatctgggtaacatgaaag

SEQ ID NO: 550897 - DNA, 85 bp, Homo sapiens
acgaagctctctccagaaagacatcctgagaggacttggcagctttctgtatgagcccaatagccaagggtacaagtactaccga

SEQ ID NO: 550898 - DNA, 82 bp, Homo sapiens
agcggaaccggacccagtccctgagccgcccctacacccacagggacaagaatccttcaagaaacaggaaaaaactcctaaa

SEQ ID NO: 550899 - DNA, 50 bp, Homo sapiens
gaaagctgagagagactttgaacatgtgccttatgtggatttggaacacc

SEQ ID NO: 550900 - DNA, 83 bp, Homo sapiens
cgctgatcttccagctcccctcacccaacgtcgtggggatatgagactttctactcggaatatcctgagtgttgcgtggatgt

SEQ ID NO: 550901 - DNA, 100 bp, Homo sapiens
tctccctcccccagagcagcccctgaccccatctgtgaatgaggctgtgactgagcgacaccacaggcaagctgggctttgaggaattcaagtacttgtg

SEQ ID NO: 550902 - DNA, 83 bp, Homo sapiens
agagcatcaaactggtgtccatcgtcaggatggctaaaggtgaccccaagaaaccaaagggcaagatgtccgcttatgccttc

SEQ ID NO: 550903 - DNA, 89 bp, Homo sapiens
tgcatctctacctggaactttgccgatcatatctgaagatattagtgagctacaaaagaatcaaactacatctgtagccaaaattgcac

SEQ ID NO: 550904 - DNA, 97 bp, Homo sapiens
gggcccgcgatgtggcccagtacctgctctcagacagcctcttcgtgtggattaatgatgttttgcagcagttttctacgtctgaaattttttatgt

SEQ ID NO: 550905 - DNA, 100 bp, Homo sapiens
tccaaatctgatgtgatctctcagctggagcaagaagaggacctgtgcagggcagagcaggaggccccccgagaagcaaccgtgacaagtggtgcccgac

SEQ ID NO: 550906 - DNA, 89 bp, Homo sapiens
ggcgagctcgcgatgagtggtctcggcaggctcttcgggaaggctctggatggacaaggaaaaagaggaaagcatgaaagaaaccctgc

SEQ ID NO: 550907 - DNA, 98 bp, Homo sapiens
tggatttttgcatgagacgcttctggacagaaatctcctgcaaagaagctgagccatgcaattagtaaatctttggggtgtgtacccacgagagaacc

SEQ ID NO: 550908 - DNA, 83 bp, Homo sapiens
tggtctcaatctctggaaaaacttcttgccaaccaaaacaatgcagatcttcgtgaagactctgactggtaagaccatcaccc

SEQ ID NO: 550909 - DNA, 146 bp, Homo sapiens
tgccagagaaatcctcccagaaggagctggaggccatgggcttgggcaccccttcagaagcgattgaaattgaatacttggacctcagtcagcctctcgaaccgtattcaccttgttatcctgacccaagatgaaataaaacgtct

SEQ ID NO: 550910 - DNA, 99 bp, Homo sapiens
ggaggagcgggcgagaagctgccgccgaacgacaggacgttggggcggcctggctccctcaggcaggtgacagcagggacatgtctcgggagatgcagg

SEQ ID NO: 550911 - DNA, 83 bp, Homo sapiens
catcattgtcatcgacatgctcatggagaacatctccaccaagggtgtggacactgccagcggctgcagccgacttggaatga

SEQ ID NO: 550912 - DNA, 75 bp, Homo sapiens
acgctaaggatgccatgatggccatgaatgggaaggaaactagcagagttgttcacatcatggattttcaacgag

SEQ ID NO: 550913 - DNA, 88 bp, Homo sapiens
cgccctggagcatcccctaagaggaatcatgatggagaatgcacagctgcccccattcgatatctcaatgcctatactggaatagtgc

SEQ ID NO: 550914 - DNA, 75 bp, Homo sapiens
actttgtcttggtatactacatggcaaaatgggaaagagttgctggagaatgtaaccctaatccataaaccagtg

SEQ ID NO: 550915 - DNA, 100 bp, Homo sapiens
ccggcccctggatgcacagccccggcgctggccactcttcacctccaccatgagcctggacatccagagcctggacatccagtgtgaggagctgagcgac

SEQ ID NO: 550916 - DNA, 48 bp, Homo sapiens
aacagcaagtgcaccaaacttaggccctcgggaccaaggatcacgtca

SEQ ID NO: 550917 - DNA, 83 bp, Homo sapiens
ctcggagggagcccggcggcttcggccactcatctctgcccagctgctgccctccccaggaggcctccatggcttcacctacc

SEQ ID NO: 550918 - DNA, 93 bp, Homo sapiens
gcacagagagggcctgggagcttgctgcagcttcagaacccagcgggtgccgcttctccacccgaggcttccacctccaacgagccatgttcc

SEQ ID NO: 550919 - DNA, 82 bp, Homo sapiens
tgtcaggtacctcaaagcgtaactctgtatgaaaaagctgatatcaaggggcctgaagacaagaagaaacacctccttattg

SEQ ID NO: 550920 - DNA, 82 bp, Homo sapiens
gcaccccgggcgggcggcggctgctagacaagaggagcagcagcggcaccgcccctcaccctggagggtcctgtacaatctc

SEQ ID NO: 550921 - DNA, 75 bp, Homo sapiens
gattggaggactgaagctgctatcgggtctcagcttcttggaagtgaaagaccagctgctgctcatgtaccttat

SEQ ID NO: 550922 - DNA, 100 bp, Homo sapiens
ctgaatgacatctacctccatcaggaccccagatgtctgacagccctgtgtgacaccaagataagtaacgtccacgctgcttttatgagctgtaacactc

SEQ ID NO: 550923 - DNA, 75 bp, Homo sapiens
aagatgattttacatccattattgggaaatgtcaagctgccgggccgcaagtacagccctgggtacaacaccgag

SEQ ID NO: 550924 - DNA, 75 bp, Homo sapiens
cctgaatttctccgcaaatttcctgccggcaaggtctcaaacagcttagatgggaggctgaacgtgatgactggc

SEQ ID NO: 550925 - DNA, 74 bp, Homo sapiens
gaaaggagaggatcccggagccgaggagtcccccgcaatgctccccactttcctgttgatgaacctgctgtccc

SEQ ID NO: 550926 - DNA, 50 bp, Homo sapiens
ctcccaaggtgctgggattacagttggatcctccagatagccactgcctt

SEQ ID NO: 550927 - DNA, 75 bp, Homo sapiens
tgcgcctccggggccggccctgcaggcacagtatgaaaacccaccacatatctatgcccttgcagataatatgta

SEQ ID NO: 550928 - DNA, 100 bp, Homo sapiens
tgcctgtttgattgaagatgtggcatggagagcggtgataaaagaaaatgtggctgaagttacccgaagttcagcttgcagtgtaattcagaagagttaa

SEQ ID NO: 550929 - DNA, 90 bp, Homo sapiens
agcttggcctcggcgtcctcgggctgcctgctgtttcccggggagatcatgaaacgaggtcgccttcccagcagcagtgaggattctgac

SEQ ID NO: 550930 - DNA, 75 bp, Homo sapiens
gaaaaataggctgtgtaaactggaggatgagaacaataggaaactgagtcaagaagagtatgaacggcaagaaag

SEQ ID NO: 550931 - DNA, 75 bp, Homo sapiens
acttctaaagtgtccagtggatttttaatcacatgaggttacctacctgggcaaagtctccaccactggcatgca

SEQ ID NO: 550932 - DNA, 78 bp, Homo sapiens
cgttctaaaggaaggcgtccgttggccttcgtacccgtcttgattgagctgcacaacgtcaccctggcgctggagctg

SEQ ID NO: 550933 - DNA, 98 bp, Homo sapiens
tcaataatgctggagtgaataatgagaaaaactgggaaaaaactctgcaaattaatttggctgcctgctgtttcccggggagatcatgaaacgaggtc

SEQ ID NO: 550934 - DNA, 82 bp, Homo sapiens
aagggaaaagcaaaggagaagagacaggacgcgggaccgtgcagccgacaggacttcattcacctctcagccacccatccct

SEQ ID NO: 550935 - DNA, 75 bp, Homo sapiens
ggcggcgcggaggcggctgaggtgcgagccgggctacaggggaagaattgaaagtgaaggcatacctaccaacag

SEQ ID NO: 550936 - DNA, 139 bp, Homo sapiens
gggaaagctacgggcccggtgcgtccgcggaccagcagcgcgggagagcggactcccctcgccaccgcccgagcccagcactattcctgatcagagaactccagttgcttcaacacacagtatcagtagtgcagccacc

SEQ ID NO: 550937 - DNA, 75 bp, Homo sapiens
attctctcccaggccacaagacatttcctgctcggaaccttgtttactaattattgtcactgctgttccaagggc

SEQ ID NO: 550938 - DNA, 82 bp, Homo sapiens
agacaaatgcgctcagcttcaattggatgataatgaagataattcaaatgatgggacccagccatccaaaaggaggcgaatg

SEQ ID NO: 550939 - DNA, 83 bp, Homo sapiens
gtgctcctgtgcggagtagtggcagatataatttctacagtagaatttaatcattctggagaattactagcaacaggagataa

SEQ ID NO: 550940 - DNA, 74 bp, Homo sapiens
cctacatcagtcccgacgtgctcagcggacttaaagagagatctacttcagagccagcagtcccgccagaagag

SEQ ID NO: 550941 - DNA, 74 bp, Homo sapiens
gggagccgtgaggaatgctactggggccacgtcttctgggaccagggagtggggaaggccagggccagattctg

SEQ ID NO: 550942 - DNA, 100 bp, Homo sapiens
gcctccactaaccagaccaacccctggggcgggccagcggctcctgcgagtacttcagacccctggccatcgtttggtgatggccggtacggcagcaatg

SEQ ID NO: 550943 - DNA, 82 bp, Homo sapiens
ccggcgtcttcgtttgggacgaggagaggatccaggaggaggagttgcagaggtggtgttcccactgatgaagagcaggcga

SEQ ID NO: 550944 - DNA, 75 bp, Homo sapiens
gctcttcttcttcttccagggactcagcacctggcaggcagcctggcatcctcgctacaacctcattgttgtggg

SEQ ID NO: 550945 - DNA, 142 bp, Homo sapiens
attttgaattttttggcagcagaagggcgactgagtactcaacatattgactgtatttgggctgcagcacaggtctcagcttgactatgaagttcccagggaaaaggccttccaaaagagcagcaccggcttttcacctgag

SEQ ID NO: 550946 - DNA, 100 bp, Homo sapiens
ccccccggcaccgcgcctgctgccgggttgcgctccgtgcacctcttgcggttcaacttcctcaattgctttgcctcactcttctatattgcctttgtct

SEQ ID NO: 550947 - DNA, 80 bp, Homo sapiens
aaggtacttcgatgatgaatttaccgcccagtccatcacaatcacaccccctgaccgctacctgcctagagctggaacgt

SEQ ID NO: 550948 - DNA, 100 bp, Homo sapiens
gatataatgattctaaattcatcttcaataagaagggccaaattgaattgactgggaaaagtgtattctggaggtcgaatggtcacatatgaacatctcc

SEQ ID NO: 550949 - DNA, 75 bp, Homo sapiens
accacctcgagcggctgctggacgaaggatgctccaggatgaaacgccataggcctgtcagcagcagtgacagtt

SEQ ID NO: 550950 - DNA, 82 bp, Homo sapiens
ttcaccctggggctccccactgaccccaccaacaactgaacgctttggtcaggctgctacaatggaaggaattggggcaatt

SEQ ID NO: 550951 - DNA, 101 bp, Homo sapiens
cacagtggagtatgtggttagtgtctatgctcagaatccaagcggagagagtcagcctctggttcagactgcagtaaccaatatgattgacaatctgctgt

SEQ ID NO: 550952 - DNA, 75 bp, Homo sapiens
gaagaaatatttttctttaaagcctgaagaaaaggctggaaactgacaaactagctctcccgatgagccccagcc

SEQ ID NO: 550953 - DNA, 83 bp, Homo sapiens
ctgctatatctgtaaagggtatctgatcaagccaacaacagtgacggaatgcctccatacataaagaagcttccggttctgag

SEQ ID NO: 550954 - DNA, 115 bp, Homo sapiens
atgatgaagagcagatggaaacacatgaaagacttcctcaaggactacagtatgcacttaatgtcccttgcctatgttgaaaaatatctactggagaagtccagactcgtttatc

SEQ ID NO: 550955 - DNA, 75 bp, Homo sapiens
attcctgggagcacatccatttcattggcaagttggaaagagatgtggctgcaagattattggcaaggtctggac

SEQ ID NO: 550956 - DNA, 100 bp, Homo sapiens
ctctttgtcggaagcagagcagctgcagcgggagcacgagcagttccaactggccatcgagcttaaagaaagtggttattgtacaggtcatgaaccagat

SEQ ID NO: 550957 - DNA, 95 bp, Homo sapiens
cagcaggactttttgaggggtcagacatccattgggatacaattgagggaaaagaattttgccgttcgcgttcgattgactccgtccccaagatc

SEQ ID NO: 550958 - DNA, 50 bp, Homo sapiens
ggcagctgtactaggactgggaacggaaatcctggctgacattgacttct

SEQ ID NO: 550959 - DNA, 98 bp, Homo sapiens
gtcatcatgagcgatgttaccattgtgaaagaaggttgggttcagaagagggatagcaaagccattgtggatgggaacctgaagctcatcttgggtct

SEQ ID NO: 550960 - DNA, 96 bp, Homo sapiens
gatgggcagcccccaccacccgcccaggccagccccagcagcaacagcagcacagtgtaaacaggaacatcgataagtagtgtaaaaacttgcaca

SEQ ID NO: 550961 - DNA, 86 bp, Homo sapiens
gtggattcagcgcgatgcccaaatccaagcgcgacaagaaagcggagctggagtttgttcagatcatcatcatcgtggtggtgatg

SEQ ID NO: 550962 - DNA, 90 bp, Homo sapiens
aggaagtgggggttatggtgggaggagccgatactgagcttcttcctatttgccatggatatgagaccttggtggggacaattgggaaaa

SEQ ID NO: 550963 - DNA, 75 bp, Homo sapiens
ggataatgattgagccacctgtccagaatgtggaggctgtggacccacgaggtcgaacattattgcatcttgctg

SEQ ID NO: 550964 - DNA, 75 bp, Homo sapiens
cctgttgattctgccattgacactatatctccattgaatcagaaggtccaggggcaagttcatcctactctcgag

SEQ ID NO: 550965 - DNA, 75 bp, Homo sapiens
gccacgtgcatgaaccaaacccacttcgttcaagacaggtgtttaagcgcctcgtgggctgtgcggctatcctgg

SEQ ID NO: 550966 - DNA, 98 bp, Homo sapiens
gccagccgagacctgccgtgggaccccagagattcccagcctggcgcaagcgctggtttgtcctccggcgaggccgcatgagcggcaaccccgatgtc

SEQ ID NO: 550967 - DNA, 98 bp, Homo sapiens
gagtgcagctccccctataagcctcggcctccacagaagaagctcattcacacagaagacccatttaatgatgaacatcaggagaggcaagaggtgga

SEQ ID NO: 550968 - DNA, 101 bp, Homo sapiens
ggaatcccttgcatggctctcatacttcctcgcgtattgctaaaggaggagttgaccacaccaaaatgagtctacatggtgctagtgggggacatgagaga

SEQ ID NO: 550969 - DNA, 100 bp, Homo sapiens
aatatcttgatcgccagcttggctctgggagacctgctgcacatcgtcattgacatccctatcaatgtctacaagacatttgaagacagtgatttgttcc

SEQ ID NO: 550970 - DNA, 98 bp, Homo sapiens
taaatgttctggttttaaaaaatacatatctggttttgtcgttgcagttcgataaggagcagatggtcgcggtcacagaggccaatgaggcgctgaag

SEQ ID NO: 550971 - DNA, 101 bp, Homo sapiens
aagcacaagttcacgaaagcctacaaaagtgtggagaggttccttcaggaggatcaggtgcatgtacatctccggtgtccctgggacagggaagactgcca

SEQ ID NO: 550972 - DNA, 80 bp, Homo sapiens
agttcatctcctccgtcaccagccacatctaccagaaattctgagcggagttattcggagtgtcaagaaggatggggagt

SEQ ID NO: 550973 - DNA, 89 bp, Homo sapiens
accaagccagcaagatcaccagaccaaatgagagggttgacactgtatcagaaaaaccaagggaagaaccagtactaaaagaggaagcc

SEQ ID NO: 550974 - DNA, 100 bp, Homo sapiens
cccagaggcacctgtaccacagtgtgatgctggaaaaccttgagcttgtgacctcacttggtttttctattgggaaagctactgatcggatggatgcttt

SEQ ID NO: 550975 - DNA, 73 bp, Homo sapiens
gaggtggagccttgcccggcgagacgttgagactcaccccacacagaccgcgtttctctccagtgtcgaccta

SEQ ID NO: 550976 - DNA, 82 bp, Homo sapiens
gctggttgtgcgaaccccgggcagcccgggaaatctccaagtcagaaagcgtcagcttttctttcgcaaaaagctgcttcac

SEQ ID NO: 550977 - DNA, 100 bp, Homo sapiens
tgggattccttgggcaatggtgaatttgaaaagggggatcggtggctcatttgctgagtaaatatggagccttcaaagaatcagtagttattaactacac

SEQ ID NO: 550978 - DNA, 98 bp, Homo sapiens
ctggccacttgcttgggatcctttatcctggtcatcttctatttccaaagaaaatggctttgtaaagaagtttgaacctaaatctggctggatgactt

SEQ ID NO: 550979 - DNA, 100 bp, Homo sapiens
aaccttgtgcctgataaacaacaagtgcttcaggaggcatatcgggtgctgaaggcagaacagattatatttgatcatttttctgatcctaaatttgttg

SEQ ID NO: 550980 - DNA, 77 bp, Homo sapiens
ccatgatggaatgcttgacagagatgagtttgcagttgctggagtaaaagggacattgggaagattagttggaattt

SEQ ID NO: 550981 - DNA, 98 bp, Homo sapiens
agcaacggctgcgcaggtgactcggtggcctcaagtgtgttacaggaggttccagtggcatcgggaagtgcattgctatcgagtgctataaacaagga

SEQ ID NO: 550982 - DNA, 100 bp, Homo sapiens
gtgcatcccggccgtctgggcggccgccgcgcttctgctctcagtgtcccggacttcagatcagcttgaacgggtctttttacgacttggccatgctgaa

SEQ ID NO: 550983 - DNA, 75 bp, Homo sapiens
ggccaagccatccattcttgggtcctttggaggaaagtaggttgttgaaagaggaagaactgcgaaaagaggaag

SEQ ID NO: 550984 - DNA, 96 bp, Homo sapiens
ccccgttattgttcctgaggaacatctccaggtatattcaagagcaaatgaccaagagccatgtgggtggtggttggctaaagttcggatgatgaa

SEQ ID NO: 550985 - DNA, 83 bp, Homo sapiens
agaccctggagcctcagttggaagcagccgatccagcctgcggagcctgtggggcaggtgagcatctgcctggagtgtaacag

SEQ ID NO: 550986 - DNA, 101 bp, Homo sapiens
aggcaagcatggagttggcaccccaaaagaaaggactttctgggacaagtgttttgtacattgggagagatcgttggttcacagggaagtcgcctggaaaa

SEQ ID NO: 550987 - DNA, 100 bp, Homo sapiens
ctgacttgctcagcgtcccatgttgatattcactgatggactccaaagaatcattaactcctggtagagaagaaaaccccagcagtgtgcttgctcagga

SEQ ID NO: 550988 - DNA, 50 bp, Homo sapiens
gcggcggccacgccaaggacggcttagaccatgctcagcctccaagcagc

SEQ ID NO: 550989 - DNA, 82 bp, Homo sapiens
actggcgctgcaacaagacgctgcccgtcgccttcaagcaaacggggattcagcgtccgatcctttggaacagggactcacg

SEQ ID NO: 550990 - DNA, 50 bp, Homo sapiens
agcctccccagtagctgagattacagggactggtttggctgaaagacaaa

SEQ ID NO: 550991 - DNA, 90 bp, Homo sapiens
aggggacacccactgtcagagtgaacgacaaagtgtactaatggtcacttgatgtgcgctggctgttttatccacctactagcagatgcc

SEQ ID NO: 550992 - DNA, 75 bp, Homo sapiens
gggagacgcgctgccgaggagaacccagcgggatcactactcttggaatcaaagataaatccaaatactgcatat

SEQ ID NO: 550993 - DNA, 75 bp, Homo sapiens
cggcaggctcaggtgcagccgctgccagctgaggtgggtgtcctggttggcaaagaccggtcaagtttttacgtg

SEQ ID NO: 550994 - DNA, 101 bp, Homo sapiens
caaacttagactaggacatctcaaaaaggttcactactgtgatagacaaagtggcaaagagtgtgtgacctgtctgacattagcccctgtgcagatgactt

SEQ ID NO: 550995 - DNA, 101 bp, Homo sapiens
agtcggtcatccacctgctgcagatggggcaggtgtggagcttaatgcagataccgaaagagaagaaggcgaagagtttgaagataacatggatgttttcg

SEQ ID NO: 550996 - DNA, 89 bp, Homo sapiens
tgcatcatgatgtcaacaaccgtggctcacaagatgaaagagcactgtcaacctaagaaaaagtctacgccactgaagtatgaagttgg

SEQ ID NO: 550997 - DNA, 99 bp, Homo sapiens
acatatgatagatggacgatggtgtgactgcaaacttcctaattctaagagacggtgccgagacctcaaggccaagggaattttatttgtggggagcgg

SEQ ID NO: 550998 - DNA, 82 bp, Homo sapiens
ggctgttaccctgcacagccgtcaccctcaactttcccttcaggtctcctccgggctggggctgagcaagccctcggagtga

SEQ ID NO: 550999 - DNA, 100 bp, Homo sapiens
ggtttgatgaaggtggaggcagcgcggctctcaggaggctactcacagtcgaactacaactccccggggtccggccagaactacagtggccctcccagct

SEQ ID NO: 551000 - DNA, 100 bp, Homo sapiens
caccttcgagtgcatcgaggacctgtctgaagggctgccctgaagggcagacaggtttattgggcaacagctgggaaaatcagcggttggacttggccac

SEQ ID NO: 551001 - DNA, 83 bp, Homo sapiens
gcccacccctcctgtaacccagcctgtttcacttcttggtccattttagcttcctatctcctgaaggaaaagctcaacatctt

SEQ ID NO: 551002 - DNA, 83 bp, Homo sapiens
ctctcatctcgctcggctgcgggaaatcgggctgaagcgactgagtccgcgatggagtttctgtttgagcgtgtggagggcat

SEQ ID NO: 551003 - DNA, 90 bp, Homo sapiens
tctcatagcagttccagataaaaactacatacgcccaggatcttctggtaggaggagctggttttctttcatgtcatacgtttctcatgc

SEQ ID NO: 551004 - DNA, 96 bp, Homo sapiens
ggaagaggagtgcggaacccgcgggaggtgctggagaatctggtaaaagcaccattgtgaagcagatgaggatcctgcatgttaatgggtttaatg

SEQ ID NO: 551005 - DNA, 90 bp, Homo sapiens
tacgtctgcaggtgcaaacaaggctacattctcaactcggatcagacgacttgcagaatggcctggtttgctttcgaccctggctcggcg

SEQ ID NO: 551006 - DNA, 109 bp, Homo sapiens
gccggatggaaatcctaatgacagtctccaaattcgcctccatctgtaccatgcaatgatcgtgcgcttcctgaccaagagattcattggagactatgaaccgaataca

SEQ ID NO: 551007 - DNA, 82 bp, Homo sapiens
tcgcctttgccgatccgccgcccgtccacacccgccgccagtacctggagtagaacagaaaaattattatgtctgtgttccc

SEQ ID NO: 551008 - DNA, 100 bp, Homo sapiens
tatatcacccataatcggaatgtgatcacagagcctatttacccagaagtagtccatatggcccctccagccagcgtcaggtgcagaatggcccctctcc

SEQ ID NO: 551009 - DNA, 75 bp, Homo sapiens
atcggaagggcctgaggaggaggacgattcttggtgccaccattgagaactccaggattgtcctgcagatcgaca

SEQ ID NO: 551010 - DNA, 138 bp, Homo sapiens
ctccatagtgcggcgcgggatgctcctggcgcggcaagtggttcttcctcagctctctcctgcaggaatctgaattagagcctatgaatggtgagataatggacgattctcttaagacctcacttataacagaagagg

SEQ ID NO: 551011 - DNA, 55 bp, Homo sapiens
ctgggcttcgtccagatcgggaaggattatccctggcgctggagccgggccgtcc

SEQ ID NO: 551012 - DNA, 74 bp, Homo sapiens
cgcagttttgttctgctccagctgttcgaaggtgatccaggccgagtgatagctactttcacatgttcaggaga

SEQ ID NO: 551013 - DNA, 82 bp, Homo sapiens
aagaggaggaaggagggacttcttggcttctcccagcatagccccagcaactagaagccatttgtgtcaaggtaacgtctgg

SEQ ID NO: 551014 - DNA, 83 bp, Homo sapiens
agctggaatgcatccaagagaatccctcaacatgctgacgcaaacatgcagatctttgtgaagaccctcactggcaaaaccat

SEQ ID NO: 551015 - DNA, 100 bp, Homo sapiens
tgtggaaataacggagcaacttgctaatggcaggcattttacaagtcttcccatgcacaagatgattaatacagatcttagcagaatcttgaaaagccca

SEQ ID NO: 551016 - DNA, 74 bp, Homo sapiens
gcccacagtgggggtgtgcaaacccgagagaactggactgctgagaaggaagaatttgaacatcaacagaaaga

SEQ ID NO: 551017 - DNA, 100 bp, Homo sapiens
aatccttcagatcatcctcgggccagcacaatattcctcagtaaatctcagacggacgggtgaaaatcctatttataagagtgccgtaacaactgtggtc

SEQ ID NO: 551018 - DNA, 88 bp, Homo sapiens
gaagacacgcttcttctggaagaccagccaacaggtccccgcggaagccgcggtgtcggcgccatggcggagctgacggctcttgaga

SEQ ID NO: 551019 - DNA, 100 bp, Homo sapiens
cgctgcctttgctttaaaacagtattacttgcgatcatatactcctatgaaaggaggaatctccaatgtatggtttgacagatttaaaataaccaatgac

SEQ ID NO: 551020 - DNA, 100 bp, Homo sapiens
cagagatgggatggcaaagagacaaccataaagagaaagctagtgaatgggaaaatggtagcgtttgcagtcctgatgtggctcctgacctacgttggcg

SEQ ID NO: 551021 - DNA, 97 bp, Homo sapiens
gcaggacttggctggacggcgcggccacggagaagggcgcggaatgcttctagtcacaacagacacccttggccatgactttcatgtcttccaaatt

SEQ ID NO: 551022 - DNA, 100 bp, Homo sapiens
ggaaaatgctttggcagggcaagaaagaagggaaacttgtcaaaactggagaaaataattggtctctgcctgaactggtacatgctgtggtcctcctggc

SEQ ID NO: 551023 - DNA, 100 bp, Homo sapiens
tataacactccatctaccagtcaaagttggttacaaaggcatatgctgacacacagtggagacaaacctttcaaggcaccacactgtaactcgaggcatc

SEQ ID NO: 551024 - DNA, 46 bp, Homo sapiens
catagcaaaactcatggctgaagcatttgaagatgagaagaaggct

SEQ ID NO: 551025 - DNA, 75 bp, Homo sapiens
atactacattcgcttaaattttgcagagaaaggactccctggaggaaaagcggaagcggcagcggtctgaacgcc

SEQ ID NO: 551026 - DNA, 106 bp, Homo sapiens
agaatatttaatggaaaatcgcttggttaaaacctgacacttttaacagggtgaagttgaacaaattgctatgatgaaaccaaaaggccagactgaacacgatgag

SEQ ID NO: 551027 - DNA, 71 bp, Homo sapiens
ccaaccgcgactgcccgcaccccctccgcgggggtcccccagagatgccatggacaatattaccaggcaga

SEQ ID NO: 551028 - DNA, 108 bp, Homo sapiens
ctttggcggctcggaggagcggctgctgctgctgctgctgctgctggtggcccctttgcagaattaaacaaccaccatgtcgagcaaaaaggcaaagaccaagaccac

SEQ ID NO: 551029 - DNA, 75 bp, Homo sapiens
aaatgaaagaaatctaactttcagttcttcctgttcaaaacaggagagggtctcttcccaggggtaattgatttg

SEQ ID NO: 551030 - DNA, 74 bp, Homo sapiens
ttttcaaaactggatatggccaggatgctatagcattgtcagtctgtccagaccaaaacgaagaagacgttagc

SEQ ID NO: 551031 - DNA, 125 bp, Homo sapiens
ggaaaaacagccaccttcagtatctcagtcctccagtgtttggatattcagctggctggaggcgtgatcctgggtgtggccctgtggctccgccatgacccgcagaccaccaacctcctgtatct

SEQ ID NO: 551032 - DNA, 117 bp, Homo sapiens
ctgcctcggcggagcagaggaaccacacgctgatcatggaaaccacccctactcctaatcccccgactacagaagaggagaaaacggaatctaatcaggaggttgctaacccagaac

SEQ ID NO: 551033 - DNA, 100 bp, Homo sapiens
gccctttctcctcggcactgtattctttacctgcttcccaatcccactgatgaggatcagcccatgatatgtgctgattagaaggctcacttgtgcagtg

SEQ ID NO: 551034 - DNA, 95 bp, Homo sapiens
gccgccgccagggtctgcagggcctgggccgccgctgctacctgcagcgccgtgtggcacgacacaaaaatcagatcgggcccgggacacccaga

SEQ ID NO: 551035 - DNA, 75 bp, Homo sapiens
tgactgaaaacatcctggaatcaaatagtgttacggcaacaagcaatggcaccagcatgatatcattgatcattc

SEQ ID NO: 551036 - DNA, 75 bp, Homo sapiens
gaagaacgcttagaaagagatcacatctttcgacttgaaaaagctggcagtgatggtgaaagcataggaaactgc

SEQ ID NO: 551037 - DNA, 50 bp, Homo sapiens
ggcaaaccagatatatgacttggtgtagagaggagagagagtgaacaggg

SEQ ID NO: 551038 - DNA, 88 bp, Homo sapiens
cgtctgcattgctccggactcagccaagttccccaacggctccccgtcgtcctggtgctgcagcggacctcagcagccatgtcgaagc

SEQ ID NO: 551039 - DNA, 100 bp, Homo sapiens
gggagattcagccgtgaagcaagtgcagatagatggccttgtgcttgtgaatgacttcttcttggtggcttgtcttgaggatttcattgaaaatgcccgt

SEQ ID NO: 551040 - DNA, 50 bp, Homo sapiens
ttcaactctgttcacctgcttgcaggtggcatctccacagaaagcgactg

SEQ ID NO: 551041 - DNA, 75 bp, Homo sapiens
gtggggccaaacgcatcatgaaatcctactatgttgacagacatgatgaaagggaatgtaacaaatgtcctccct

SEQ ID NO: 551042 - DNA, 90 bp, Homo sapiens
ccaacctagtagaagccacattcaaacagggaaatcctcattgacgattcaatttgttgaaggccaatttgtggactcctacgatccaac

SEQ ID NO: 551043 - DNA, 100 bp, Homo sapiens
taccggggtcagacctccccacatactcccaatgaaaagttctatggtgtcactgtcttcaaagccctcaaggtatttaacagactcccgacaaaaagca

SEQ ID NO: 551044 - DNA, 82 bp, Homo sapiens
ggacattttcaccggcgccgcggtggtccactattcctgatcagagaactccagttgcttcaacacacagtatcagtagtgc

SEQ ID NO: 551045 - DNA, 96 bp, Homo sapiens
tcgcccgcactgtgactggactgttagagggatccgtggagaggaggccaggacacctggaagccgggaaatggactcctacccaaggttcctgaa

SEQ ID NO: 551046 - DNA, 98 bp, Homo sapiens
cagttctccatgcccactgtgccaccaccagaagagctgcttgactgtgagaccctcattgaccagtatttaagtgagtctgccaaaaaagaggtggt

SEQ ID NO: 551047 - DNA, 106 bp, Homo sapiens
ggcaaggtgatccagcaaggtcggcagagcaaggggcttacgcagaaggacctggccacgtccagggccaaggcttgtgttcaatcgtgtgaatggccggcgggcc

SEQ ID NO: 551048 - DNA, 83 bp, Homo sapiens
gagacttttctcagatgttggatatttgcttggaaaaacgtgtgggtacgaccttgcaaatgcagccctgaggatttggctac

SEQ ID NO: 551049 - DNA, 96 bp, Homo sapiens
ggaatgacaaacaaccagctcttcaggcacattgcaagcaacccgtgccttgatggtggttggcatcctcctgggagtgatagcaatctttgtggc

SEQ ID NO: 551050 - DNA, 100 bp, Homo sapiens
cctacaacaagcacattaacatcagcttccacaggtggagataagtaattaacatttcgaaacaggaaatgaaaggatttatatttttaaaagctatagg

SEQ ID NO: 551051 - DNA, 73 bp, Homo sapiens
gatcatggtggccaaacccacaggaatatgaagccatctacctagcaaaattaacaatacagatgatgtcacc

SEQ ID NO: 551052 - DNA, 75 bp, Homo sapiens
tgctactaaaaagagaggtgcctttatctgatgatgatgaaagttacacagcatttaaatcaaacggtattgaga

SEQ ID NO: 551053 - DNA, 82 bp, Homo sapiens
tatgaggcgggaaaggagcacggcctgaagccggtggtgggcgaagtgtacgatcaagggcatgacgtccttgatgaaggcc

SEQ ID NO: 551054 - DNA, 99 bp, Homo sapiens
tccgatgatgaggaagaggaggaggaggatgaggaagcagaatccctgtaaccattcatccaggtgttgagaagatatgtagcagccgagcacccatct

SEQ ID NO: 551055 - DNA, 75 bp, Homo sapiens
aagacctaaaactgatggctactaaaaagcagagcatttctgaatgtgagcatttgatccgccatatgttggtgt

SEQ ID NO: 551056 - DNA, 82 bp, Homo sapiens
cgccagccctcggcgcccattcagtccgcgcaggcagggaaagcaggcaggatgggagagtcgccgatagaaccacctcttc

SEQ ID NO: 551057 - DNA, 100 bp, Homo sapiens
gccagggagttgaaggctgcagtgagccctgtttttgccaccacactccagcttgggtattgttgcagcatctggcagtgagactgaggatgaggacagc

SEQ ID NO: 551058 - DNA, 82 bp, Homo sapiens
atcccctgtgtggccaagaagctggtgtgcggagatgaagggaaccctactctggaaactgtcagtcccagggcactgggga

SEQ ID NO: 551059 - DNA, 98 bp, Homo sapiens
tctcgctgtgagacatgtctgagactcctgctcagtgtagcattaagaccagcatgttttggaaatttgatcttcactcatcatcccacatagacaca

SEQ ID NO: 551060 - DNA, 73 bp, Homo sapiens
ttgtctaccgcctgtccaggaagggattctagtataattgacttctatcctgaagattttgctattgatttga

SEQ ID NO: 551061 - DNA, 98 bp, Homo sapiens
agttgcactgtaaaaaacccagctgaagaccactttagaaactcaattaagtctgtgcagacttttgcagacaaatcaaaacaagaagctctgaagaa

SEQ ID NO: 551062 - DNA, 82 bp, Homo sapiens
ggtgcccacgcagctgcctggacaagtttccacttcaagcgtgacccttttgcctgtgggatgagctccagcatggggtgag

SEQ ID NO: 551063 - DNA, 83 bp, Homo sapiens
ctcgtggcctgcctctgcgtgccgagcagctgatgcagctgtacagtgcgcgccagcggcggcggctgaaccggggcctgcgg

SEQ ID NO: 551064 - DNA, 99 bp, Homo sapiens
caggatgaagacaaagtgtgtgaaagcatgcttgagagttcaaaccggcttgatgaagaacacaggctaattgccaggtatgcggcaaggctggcagca

SEQ ID NO: 551065 - DNA, 74 bp, Homo sapiens
cagacctggagggcaacaccaagtcacgtgtccgcctgttggtcctcgtccagggccaaggcttgtgttcaatc

SEQ ID NO: 551066 - DNA, 100 bp, Homo sapiens
atcatcatgaaagagaccgtggatgctgaaggacccttgaacatctgtgaagaaatgactattctgcatggaggcttcttgctggccgagcagctgttcc

SEQ ID NO: 551067 - DNA, 75 bp, Homo sapiens
atccccacatcaatgcactgccaatgtggtgtgtggttgactctgtttctcgccatgtcttctcacaagactttc

SEQ ID NO: 551068 - DNA, 75 bp, Homo sapiens
caacgacgttccatctgtggaaggacctaccaaccaggatcaactcactatcctgaaggtccattctcccaagaa

SEQ ID NO: 551069 - DNA, 75 bp, Homo sapiens
cggattccagactcgtgggggaaaggctgaattgtggtggttttggactccatgattaaggtgttcacattcaca

SEQ ID NO: 551070 - DNA, 83 bp, Homo sapiens
caggaattctcctgccaccgcgtggtgcttgccgcagccagcaactatttcaggttgaaccatgattccggtgacagagctcc

SEQ ID NO: 551071 - DNA, 80 bp, Homo sapiens
gccgagcgggcggcttcctggcctgggcgctccggtggcggcggagcgcccggcagaatggcgggaaggtgaggcacaag

SEQ ID NO: 551072 - DNA, 48 bp, Homo sapiens
actacagctctcagccttgcgaagatgttaagacatcccacctgaaac

SEQ ID NO: 551073 - DNA, 80 bp, Homo sapiens
cgggcttctcccaccccctcacgcagagtgcagtcatgggccaccgcagcatctgctccctgcagggccgtgccgctgtc

SEQ ID NO: 551074 - DNA, 88 bp, Homo sapiens
tttggacaagaacgcagacctttgttgtacccgaggattaataaagaatctttacttcctgtagcaaaggacgtgtcttactcagggg

SEQ ID NO: 551075 - DNA, 82 bp, Homo sapiens
tgcgtgccctacttcaaggataagggcgacagcaacagctctgccggctggaagcctcttcagaagaaacttgactccttcc

SEQ ID NO: 551076 - DNA, 50 bp, Homo sapiens
ctctaagtacactcgtcttgaatagtagagacggagtttcaccatcttgg

SEQ ID NO: 551077 - DNA, 125 bp, Homo sapiens
atcggggtcatgcagagtcaaaacagcagcgcgggcaaccggggaccccggccactggagcaggtcacctgttacaagctcagccagacgtccaggatcccaccccttgcaaaagaccaggccgt

SEQ ID NO: 551078 - DNA, 82 bp, Homo sapiens
gctgtgctcgcgctactctctctttctggcctggaggctatccagcatggctcgttcggaacaccacctggatacggctgcg

SEQ ID NO: 551079 - DNA, 100 bp, Homo sapiens
tgagcacttggtggcgtctgatgctgaactggatgctaaacttgagacatggcccatgaacatggacatgagcatggacatcataaaatggaacttccag

SEQ ID NO: 551080 - DNA, 90 bp, Homo sapiens
ggcgactgaggcacagagtgaaggggaggtgccagcccgcgaatccggccggagatctttaatctcatgaagtacgacagctacagccgc

SEQ ID NO: 551081 - DNA, 82 bp, Homo sapiens
ctggaactgggagaagatggctttaaagaatacacttcaatttttcagaagaagtgaagtcaagatgaagaaccatttgctt

SEQ ID NO: 551082 - DNA, 50 bp, Homo sapiens
cgaggctgttgctgttgatctgtggctcacttatgtctgtaaagatggga

SEQ ID NO: 551083 - DNA, 75 bp, Homo sapiens
gacagtgcagggaagcaactgcagaggtgtttggcaatcaactcattcctcccaatgcacaagtgaagaaggcca

SEQ ID NO: 551084 - DNA, 101 bp, Homo sapiens
ctcggagattggctgcctcatccgcttctatgcagatcgagctgggagcattagtacccttgattctttagactttgcaagatattcagatgatggtaaca

SEQ ID NO: 551085 - DNA, 98 bp, Homo sapiens
agcaacccaagacgttcaccgtgaggatcgtcaccatggacgccgagatggagttcaattgcgagattctgatagttggtggtggtgttgctgggctt

SEQ ID NO: 551086 - DNA, 100 bp, Homo sapiens
gccgtgttcgtggtcaccttcgacccccgctcggagtgttgcggagataggaacatgggagagaaacaatctgggtaacatgaaagtgatgctggttgct

SEQ ID NO: 551087 - DNA, 100 bp, Homo sapiens
tctgcagctcatcttctcaaaaacagtctctgctggatgaaccgaatcctaacagtccagccaatagccaggcagcacagctttatcaggaaaacaaacg

SEQ ID NO: 551088 - DNA, 100 bp, Homo sapiens
ctgcatcctacagagccatggatgttggcaagtctttacaatggcagtgtgtgtgtttggaatcatgaaacacaggaaacggaggtggagctgtacaacg

SEQ ID NO: 551089 - DNA, 48 bp, Homo sapiens
ggcgctcaccatgttccctggaggattaccgagaggatgggatggatc

SEQ ID NO: 551090 - DNA, 51 bp, Homo sapiens
ccccgcggagggaagaaaaccaagatcactttgggaagcagtgacatccaa

SEQ ID NO: 551091 - DNA, 50 bp, Homo sapiens
aatactgaactatggacctatgagcattgtcttcagtgttaagaaatgtg

SEQ ID NO: 551092 - DNA, 114 bp, Homo sapiens
gacaatggtgatgatgctccacagaatgctaagaaagctaggcttctaccagaaggggaggagacgttggaatcaggtgtctgcttttggggcagagttttcatcggaggcatg

SEQ ID NO: 551093 - DNA, 100 bp, Homo sapiens
catggctcattatagcctcaaactcccaggctcaagcaatcctaccatgtcagccttcccagtagctggaactacaggcctccccatggccacccatgga

SEQ ID NO: 551094 - DNA, 90 bp, Homo sapiens
gagaaacaccagacactggaagtctcactgtctcgatctacgcctgcaagctctcagaccgggaacatccactctacctgcgtttggtag

SEQ ID NO: 551095 - DNA, 100 bp, Homo sapiens
gctggctgcagggacccggtgacagcgtgagaggttcgcagaacggaagtgaaaatgtgacaggattggacctttcagatttcccagcattagcagaccg

SEQ ID NO: 551096 - DNA, 96 bp, Homo sapiens
gatcacccctgggtttcatctgccactgccccaaggtggaacggcacatgtgtgatggggacattgttatcttcaaccggcagccaactctgcaca

SEQ ID NO: 551097 - DNA, 83 bp, Homo sapiens
ccagcacctacgtcccgctgccgtcgccgccgccaccatgcccaagagaaagctcattgctatggacagtgctatcaccctgt

SEQ ID NO: 551098 - DNA, 76 bp, Homo sapiens
attctaatgagatttacagttgatcagacccagacaccaagcttaaaggactcagaattcatgattgaagaaatgc

SEQ ID NO: 551099 - DNA, 75 bp, Homo sapiens
agcagacttgtttacagaaaagaaatcaggacctttgatatttaggaaaactatgtttaactctacagatatcaa

SEQ ID NO: 551100 - DNA, 100 bp, Homo sapiens
gcctctcagcttcggagaatggagtcttccatcaatcatatctcacagggatgctgccttgggtctggaaactgttagaggaaaccccaagaggtgcagg

SEQ ID NO: 551101 - DNA, 75 bp, Homo sapiens
cagatatagaacatttcttttatcacacctttctgagaaaagtctacagcattctttctctgcaggttctcttaa

SEQ ID NO: 551102 - DNA, 100 bp, Homo sapiens
gaagaaaagacaaaggtagaaaggatggtggaggactacctggcaagtggttatcagctcgatgtgctgggtgcagtgctgaaggctctgacttcagctg

SEQ ID NO: 551103 - DNA, 75 bp, Homo sapiens
aaacggcgagagtgggcgagaacgtccactgcgggccggcgaaagctggttggatccatgccgtctacacccctg

SEQ ID NO: 551104 - DNA, 75 bp, Homo sapiens
cgctgtgagacatgtctgagactcctgctcagtgtagcattaagacaaatttacatgtattggagaccagaccag

SEQ ID NO: 551105 - DNA, 96 bp, Homo sapiens
agaaatgcagagctttgtgagataccacccacttctgatacaaagtcagatactgcaacagatcgagttttggttcgggttagagacttgacaata

SEQ ID NO: 551106 - DNA, 51 bp, Homo sapiens
gcgacggaaatgtgtcatcgaaagccaggtgagaattatgaagatgatgac

SEQ ID NO: 551107 - DNA, 80 bp, Homo sapiens
cctacaccttgcatcatgccagctttgtcaacgggatctgggagtgacactgatttgaacatggaattcaatccttcaga

SEQ ID NO: 551108 - DNA, 100 bp, Homo sapiens
caggctgcagaagttggtggcaaaagagcaaaccagtccagctacgggggcccagccagccagcagctgagtgggggttacggaggcggctacggtggcc

SEQ ID NO: 551109 - DNA, 83 bp, Homo sapiens
caactattttcgtcatctttggaacaaagcactcaaggccaaattatacaagaaaaagagataccagatctgaaagcctagaa

SEQ ID NO: 551110 - DNA, 90 bp, Homo sapiens
gtgtctgggaaagaggaagcaaatataataatggcagcacagagctacattcgaggaagacagtgacccgcccattcatgaaagtctcag

SEQ ID NO: 551111 - DNA, 90 bp, Homo sapiens
ttgccctgagcctcagctccacgtccgatgatgaacctccctcctctgtcagtcatggagcaaaaggagggcatcctggctgtttcaccc

SEQ ID NO: 551112 - DNA, 100 bp, Homo sapiens
cgggaagcaagaggcaaagagaatcggttgagtacaggggctcaggtccaggtggcaggggatatgctacccaactcaactgagcgggccatcactattg

SEQ ID NO: 551113 - DNA, 142 bp, Homo sapiens
agaagaggtgttggagtgttgactttaatttgatggatcctaaactcttggcttcaggttctgatgatgcaaaagatttaggtcgatctcgagaactacagtatgtatacgtggataacaacattcacctgaaaggcttgcc

SEQ ID NO: 551114 - DNA, 100 bp, Homo sapiens
ggactacccgatttttcgcttctcttcagggatgagtcatgtggtggtgaaaaatgaccctgaactggaccagcagagagcttggagataattctggtgg

SEQ ID NO: 551115 - DNA, 90 bp, Homo sapiens
cctggagggcaagtttgtgcagctcaagaacaactcggacaagatgacttcgaggccctgtgcaatgtgctacgcccccccgcatatagc

SEQ ID NO: 551116 - DNA, 87 bp, Homo sapiens
gagcaggctgatctactgcaggaggtcttgagagctgatgacaataacatgggcaatggctgctctcagaagctggcgactgctaac

SEQ ID NO: 551117 - DNA, 95 bp, Homo sapiens
tgaacataggtggagtaatgggaaatttaggtccaggtggttatttgctttccaaagtcgaagaaaaagttggctccccagaacgtccactctca

SEQ ID NO: 551118 - DNA, 90 bp, Homo sapiens
cgaggccacggagagctcgccttggagagcccaggagcaggggagacatggaattgaatgatctggcacgggaccctccagcacagtgtt

SEQ ID NO: 551119 - DNA, 90 bp, Homo sapiens
gtattgggagatccacagctaagacgccaggactccctggaagcctagaaatggagttggaattgtacaaagaggaacttcagacaaaac

SEQ ID NO: 551120 - DNA, 100 bp, Homo sapiens
ttctataaccacccggtgcactttgtcttccatgacaccaagttggatgccatgctggaggagttcaagaagggcttgaaggtccccaccaccattactc

SEQ ID NO: 551121 - DNA, 100 bp, Homo sapiens
ctgtgcaatgctacatgtacgtggacttatatcagaccagtgtggatcttcaagaatcattgtgaattcacataaaagggcatcagaaaaatacaaagac

SEQ ID NO: 551122 - DNA, 76 bp, Homo sapiens
attagtgcctgtgatggcatctttcatctaacaccttcagtatcagacacagcacagcagccatctgaagagcaaa

SEQ ID NO: 551123 - DNA, 97 bp, Homo sapiens
caaaagttaaatctactacagggacaagtttcagagctgccactcagaccattaaaaatctcaagtgacgactttgggaaactctggttatccttcg

SEQ ID NO: 551124 - DNA, 100 bp, Homo sapiens
cggcgagaggaggccgtccagcagatggcggatgccctgcagtacctgcagaaggtctctggagacatcttcagcagggaccagtccaacgtcaggcgga

SEQ ID NO: 551125 - DNA, 100 bp, Homo sapiens
ggatcccaacattgttggcagtgagcattacgatgttgcccgtggggtgcaaaagatcctgcagaacttcctccgttgccaaaataacaagaccaactac

SEQ ID NO: 551126 - DNA, 100 bp, Homo sapiens
tgtctcttccccaagatcaataacttcgactccactatcgggaaaggaatcggtattttttgctgaaccacccttcaagacagatccagttgagtatgtg

SEQ ID NO: 551127 - DNA, 98 bp, Homo sapiens
aaaacaagagtccctctaaagcagctcaaaagggtggttctcttcccaaagtggaagccaaattcatcaattatgtgaagaattgcttccggatgact

SEQ ID NO: 551128 - DNA, 101 bp, Homo sapiens
actgcatcaacaagtatgggtctccgtacaccaaaaactcaggcttcgccacctgcgtgcaaagtgctggagaatctggtaaaagcaccattgtgaagcag

SEQ ID NO: 551129 - DNA, 100 bp, Homo sapiens
tggcatgtttctacacaacaaaacattcatggagggggaacttctcggtgaactactactagatagacacaacttcacaattatgacaaaatacatcagt

SEQ ID NO: 551130 - DNA, 75 bp, Homo sapiens
gggggatgaaaatgagcgtgcaagtgacactccagatgtcaacatatattatactctggatggcagcaaacctga

SEQ ID NO: 551131 - DNA, 83 bp, Homo sapiens
cccaaccccaaaagagccaaactcagctcgcccggtttctcggcgaatgacagcacagatgagtttgatgcctacatcattgt

SEQ ID NO: 551132 - DNA, 100 bp, Homo sapiens
cggcgcattcggcaggcagaggagcagatagaacacctgcagcgcaagctgggtgccaccaagcagtctgaagttgcagccggagtgaagaagagcggac

SEQ ID NO: 551133 - DNA, 100 bp, Homo sapiens
accacgaaagaggaatcgatgctcagcttttagttgcacttcctaaagggagccatggacaactgtttggcggccgcagcgctgaatggggtggaccgac

SEQ ID NO: 551134 - DNA, 83 bp, Homo sapiens
tgaacatcatcgacatggccctgagtgaatacccagaaaatttcatggcgaactttctgaccaagtatacaactacccagagg

SEQ ID NO: 551135 - DNA, 50 bp, Homo sapiens
aaaaaatgttggaagccattgggcctaaccatatgcctatgcagggacct

SEQ ID NO: 551136 - DNA, 100 bp, Homo sapiens
accatggtcctaagcgtcttcataggaaaaattcctcaaccactgaagaagaagcttgatgcttggctgtcagaagacatgaattacgcacggttcatca

SEQ ID NO: 551137 - DNA, 75 bp, Homo sapiens
atatttggaaccttcgggcaaacaggattccacagtgtcctctggaaaatggtcttgagagctgatgacaataac

SEQ ID NO: 551138 - DNA, 82 bp, Homo sapiens
atcatgtctgcgagccaggattcccgagatgcagaggatgctatttatggaagaaatggttatgattatggccagtgtcggc

SEQ ID NO: 551139 - DNA, 75 bp, Homo sapiens
cagcctgcggagcctgtggggcaggaagaagaagtctctccacagttgtttactttccacgaagctgtttcacaa

SEQ ID NO: 551140 - DNA, 75 bp, Homo sapiens
aaaacgcctgtgttccaccgttcaccatcgaggtgaagggaatctaagggaggaaattatcaactgtgcacaagg

SEQ ID NO: 551141 - DNA, 101 bp, Homo sapiens
gagccgccgcccgtctaccccgacttggcggaggtggtgggctaccagtcaggtcaattcagtgaagatatgatacccacagtgggcttcaacatgaggaa

SEQ ID NO: 551142 - DNA, 97 bp, Homo sapiens
ggcgccggctccatggcgaccgggctcggggagccggtctatggactttccgaagacgaggttcgatacaagaggctgttttcctagcgtggcttgc

SEQ ID NO: 551143 - DNA, 75 bp, Homo sapiens
cctgcgttcagtagccccgctctcccctgtcccgaaggatttaccgaggagcattatggatcctgggagaatact

SEQ ID NO: 551144 - DNA, 100 bp, Homo sapiens
gttggaatccttgctgtgctgaatcctggctgtgtgaccccaaaaatcttcccaaggctgcagacaccgacggatttgctttgggagccagagtagctgc

SEQ ID NO: 551145 - DNA, 98 bp, Homo sapiens
gggatctcaggtcctcgggggcggcggccacgccaaggacgggcagtatttggcagtcgtattcagagataaacccctggagctatgggatgttagga

SEQ ID NO: 551146 - DNA, 130 bp, Homo sapiens
ggacctcatggatgggctgcctccaggtgacagcaatcagctggcctggtttgatactgacctgtaaatcatcctttagaataactgaagtgaagtgatggactccgatttggagagtagtaagacgtga

SEQ ID NO: 551147 - DNA, 50 bp, Homo sapiens
tggagatatggcgcaactgcggcgcattgaagataaaactttccaagtcc

SEQ ID NO: 551148 - DNA, 75 bp, Homo sapiens
cagaagaatattatcccttctcagaggtcgcaatggaagaagagatcgccgcgctggtcattgacaatggctccg

SEQ ID NO: 551149 - DNA, 97 bp, Homo sapiens
gaaaacaggaagagggttggaggcaaagttccgaatagggatgaggcatacgtggaccctgatgcttggtgtgacctgagtaaatttgacctccctg

SEQ ID NO: 551150 - DNA, 52 bp, Homo sapiens
aatatcccgcctcatttacagtgggaggaatactctgaagatagtaactccg

SEQ ID NO: 551151 - DNA, 83 bp, Homo sapiens
caaatttattcaagtcaattaccatcctttaccagggccaagaataaaatctttatgaactaacaagatgaattaaagatgga

SEQ ID NO: 551152 - DNA, 82 bp, Homo sapiens
cctcttgatctccgccaccgtcttcaggccaggagcaggccgggctctcgccatgggtcactgtcgcctctgccacgggaag

SEQ ID NO: 551153 - DNA, 75 bp, Homo sapiens
gagaacggaaaactcccaacttcctgatatgaggccccaggattcctggcgaggtcctcctccccttttccagca

SEQ ID NO: 551154 - DNA, 50 bp, Homo sapiens
gccatccctgacacccggcatgaccacaaagtacccacgtttgttcgaat

SEQ ID NO: 551155 - DNA, 101 bp, Homo sapiens
atgatcagaaaacagctctggaaaatgacagccttcatttctctgaacatactgccttatgggacagatcaaataaaccgagaaaactggtgtacaataga

SEQ ID NO: 551156 - DNA, 90 bp, Homo sapiens
tgcgattcttccagcagatatgaagatctcttacctcagctagaagctccgagttctcttactcccagcagtgaactcagcagcccaggc

SEQ ID NO: 551157 - DNA, 101 bp, Homo sapiens
cttcaggacacgcaggccgcagcgagggcccgggccctggggatcccagggccaattcctgtccccccagcagcatggcatcgtgtgctgaaccctctgag

SEQ ID NO: 551158 - DNA, 76 bp, Homo sapiens
acgcaagtccatgtacacgcgagattataagaagcttgggttcattaaagtgctgttctctctggggggatcattc

SEQ ID NO: 551159 - DNA, 100 bp, Homo sapiens
tcagccctggacctggcagatccttcagcaaaagctgtccttacaggtgctatggtctttagaattgggtcactggatttctgaggagccgttcgaactg

SEQ ID NO: 551160 - DNA, 82 bp, Homo sapiens
gcccgtgccgcgtctccgcgttcccagcccgggtccccgcgttcacagccccagcgcagaacatggtccaagacaattcctg

SEQ ID NO: 551161 - DNA, 100 bp, Homo sapiens
ctcttccaccggcagggcttctcctatgactacgtctttgactggaacatgctgaaattcggccgttgctccagggagaactgcaaatatcttcatccac

SEQ ID NO: 551162 - DNA, 100 bp, Homo sapiens
gttactcagtcaaagggagtcattggctatggagtctaaatggtgtttggctgaacagagcgcgtctggaacctttaagggtctattccattcatcaggg

SEQ ID NO: 551163 - DNA, 100 bp, Homo sapiens
gaggaggaagcctgcagccttaagctttgtcaccgaaaagacctggatttggcaaaagtaggataccttgactccaacactaacagctgtgctgatagac

SEQ ID NO: 551164 - DNA, 100 bp, Homo sapiens
gacatgtgttcttttgacaacgaacagctcttcaccatgaaatggatagatgaggaagacatcgctattgcggttccgaggcagtgggaagagatgcggc

SEQ ID NO: 551165 - DNA, 100 bp, Homo sapiens
agggtgccgcggccctgcgcagctgccccatgtgccagaaggagttcgcccccaggtctcaccaacggctttgggggtgcgaggagcgagcaggagccgg

SEQ ID NO: 551166 - DNA, 109 bp, Homo sapiens
atgtgcaggatcttgatggtggcaaggagtactccaaagattcaggtttactcacgtcatccagcagagaatggaaagtcaaatttcctgaattgctatgtgtctgggt

SEQ ID NO: 551167 - DNA, 98 bp, Homo sapiens
cagagtgaaggatctatactgttgcaggagccaaagaacagaatcctgcactgggaaagagactcctcagacccctgcacaattgagagaaaagcccg

SEQ ID NO: 551168 - DNA, 50 bp, Homo sapiens
ggacgcctgctccaagaattggttttaagatacagtttatgtaacttgat

SEQ ID NO: 551169 - DNA, 97 bp, Homo sapiens
ttgaaatgttccttagaaaggagcagcagggctggtgaattaccatatctccgtcaagtgcagtaaccagttcaagttggaagtgtgtcttttgaaa

SEQ ID NO: 551170 - DNA, 100 bp, Homo sapiens
aagttgacatccccagtccacctccgaggcgctgtgctcaccaggtgagaagccctaccactgcaactgggacggctgcggctggaagtttgcgcgctca

SEQ ID NO: 551171 - DNA, 98 bp, Homo sapiens
gggtccgagaggccgccaggcagccaggctaaagtgatgtccaatgaagagaaaaaatttcagcaacatattcaggcccaacagaagaaagaactgaa

SEQ ID NO: 551172 - DNA, 83 bp, Homo sapiens
tgtcccagctgcagctgtggctgcagtttgaggctctgaacaaggtcaaaatgcagatcttcgtgaaaacccttaccggcaag

SEQ ID NO: 551173 - DNA, 100 bp, Homo sapiens
tgcttcaagccccgcgagtcgcatctgctcaacgacgaggacctgacgcagctaagaagaaatttcctgacttgtttgtcttcttggaagattcctcctc

SEQ ID NO: 551174 - DNA, 83 bp, Homo sapiens
gtctcggctcagctaatggaaatggagaccttgattctgcttttggaaaagaagaagagagtccaactcaaagatatgggaga

SEQ ID NO: 551175 - DNA, 84 bp, Homo sapiens
tttgactgagagaaacccactgaagacgtctgcgtgagaatagagaccaccgagggggatatgagactttctactcggaatatc

SEQ ID NO: 551176 - DNA, 82 bp, Homo sapiens
actgagcctgttggaggaactggcccggaaacaggaggacgatgaccgagtgggagacagcagcaccagcggtggcagagac

SEQ ID NO: 551177 - DNA, 100 bp, Homo sapiens
ctgcgcagcatcaaccagggcctggaccgcctgcgcagggtcagccaccagggctacagcactgaggctgatcctgtgcattcacctaaagcgctttcgg

SEQ ID NO: 551178 - DNA, 82 bp, Homo sapiens
gcctcgcctcgggacccgcggtccccgctcttgctgaacccagtgacttgattgtaaaaatttacagagcggaatcatatgc

SEQ ID NO: 551179 - DNA, 90 bp, Homo sapiens
aaattatcaacaccaaaaagctttctgctagggtcactcaagactgcttgcaactgattgcagacagtgaaacaccaactatacaaaaag

SEQ ID NO: 551180 - DNA, 75 bp, Homo sapiens
ctactgtgtcatcaggtcaagcaacacctacatcacctattaaaaaggatctcaaagatttcatgagacaagctg

SEQ ID NO: 551181 - DNA, 100 bp, Homo sapiens
gctgggaggcacagatctggctgccagctgggcctgaggcctccctttgtccgtccttcctgttcttcctcaccaggatatgggccctcacattttccaa

SEQ ID NO: 551182 - DNA, 100 bp, Homo sapiens
gaagaaaccattacaatagatcgagcctgcagacaagaaacattcgtttatgagatgtgcttttttaggaccaaaggatatatttccttactcagaaaat

SEQ ID NO: 551183 - DNA, 75 bp, Homo sapiens
cttcacccgggctccgctcttgccttctccacacttgtttgcacctggctgcagtggaagaaagaaagatcaagt

SEQ ID NO: 551184 - DNA, 98 bp, Homo sapiens
ttcgattccgtgttcctgcgcatcaaacaacagctgttgcttatttcgaagatggacgatgtgtttcacatggtagttgaagtaccacgctggtctaa

SEQ ID NO: 551185 - DNA, 82 bp, Homo sapiens
cgagggccctggctgaacttcaccttttggctttcttggcctgatgctgaactctcgagggatctttcgaagatggtttggc

SEQ ID NO: 551186 - DNA, 100 bp, Homo sapiens
caaatggatgagcaagacctaaatgagcctcttgccaaagtgtcccttttaaaagcgctccattagcttccgcagtgagagccgccctgacatcctcgcc

SEQ ID NO: 551187 - DNA, 50 bp, Homo sapiens
tcaatcagagcgtcctgtgcggattgaaagaaggtggcaagaggaagaag

SEQ ID NO: 551188 - DNA, 90 bp, Homo sapiens
agattgctgtaaaaaatttcaggattggtactacaaggagcatctttccttgaagaagtacattattgacattgtggttgaaagtacagc

SEQ ID NO: 551189 - DNA, 98 bp, Homo sapiens
tgcctctcaataccttgggcccagtcatgaagatggaacctctgaataacctccaggtgaagactgatgagaagagtctgtgggtgaagacattgaaa

SEQ ID NO: 551190 - DNA, 46 bp, Homo sapiens
cctcagggaaggggcagcacagtgctgggactctggtgcccccaac

SEQ ID NO: 551191 - DNA, 100 bp, Homo sapiens
tgaaggcagagcatgattaaaggagaatgggccctacctagaaaaagcaggtgggtaaattgaggcccaaggagaggaatggacttgctgtggacattcc

SEQ ID NO: 551192 - DNA, 82 bp, Homo sapiens
agctgccctgagacggtgtcccgccgaaagatcttcttcagcagtatcgttctgctgtgtgcaaactagacagtgtgaataa

SEQ ID NO: 551193 - DNA, 74 bp, Homo sapiens
agctcgcgccggatgcggagcgcggtgctgccggtggagcttcagatgggaatgatgaacaaccccaatcctta

SEQ ID NO: 551194 - DNA, 97 bp, Homo sapiens
tcgtcgacatgagtgatgtggaggaaaacaacttcgagggcagaaattaaacaaccaccatgtcgagcaaaaaggcaaagaccaagaccaccaagaa

SEQ ID NO: 551195 - DNA, 83 bp, Homo sapiens
tggcgctgcaacaagaccctgcccatcgctttcaagctataccaaatggttttggtaccagtccactaactccctctgctagg

SEQ ID NO: 551196 - DNA, 100 bp, Homo sapiens
ggagatcatttgggagatccaagagattcagtatcactcgctcccttgatgatcttgaggttcatctgcgttgctctaaatgggactgtttcattatttt

SEQ ID NO: 551197 - DNA, 100 bp, Homo sapiens
gtgtattcccttaaaaagacggacagcccatcgtgtgaactatagagtttgtggacagatttatattgggctcattgtcatccccaagccaggccagttc

SEQ ID NO: 551198 - DNA, 95 bp, Homo sapiens
caagaacagtcttggtccaaccaggtgtcttcagtgccctgggtttgcctgtgacccaatgcccactgggactgaatgccaaaggactcccttta

SEQ ID NO: 551199 - DNA, 98 bp, Homo sapiens
cgaactatgtggaggagatgtactgtgcttggctggaaaaccccaaaagtgtacataagcaccacacactggaagcagacgctgttcatgatggacga

SEQ ID NO: 551200 - DNA, 82 bp, Homo sapiens
atcaaaaatagtgatagctttgataagtgtggacactgccagcggctgcagccgacttggaatgacctgggagacaaataca

SEQ ID NO: 551201 - DNA, 124 bp, Homo sapiens
ctcctccgagagaccgccgaggtgcgggctgtgagagggggagcgtggagcctccgaggccgagacgagatgatgcctattggccagaaggaaagcgtgtggcaatggaggaccgatatcgtgc

SEQ ID NO: 551202 - DNA, 100 bp, Homo sapiens
cgggaccccagggcagcgaagcaggttaatgatgaaatggcaggtaattcacacttttggacagagcgcaccgcccccgtggaatcaccctacagaagag

SEQ ID NO: 551203 - DNA, 100 bp, Homo sapiens
ggggccctcccccagcagtatcctgcatcgggagaaaacaagtccaaggatgaatcccagtccctgttacgggtgagtgatttcacgtggagccatgatg

SEQ ID NO: 551204 - DNA, 100 bp, Homo sapiens
ggatcctctgctgcatagtttcggtcatctaaaggaggttttaaacagtataacagtcaacgttggtgaggactgtccagtattcgatggcctgtttgag

SEQ ID NO: 551205 - DNA, 101 bp, Homo sapiens
ggcagcccagcgggacccagggagaaacaggggggcgagaagagaaacaggtctggctctgggagaggagtggacagcagctggttgagatacatccccat

SEQ ID NO: 551206 - DNA, 75 bp, Homo sapiens
tcctggtgctggccccacccaagatggtatcggtgatgagctacagtgccaaatttgcttcctgtttctatggcc

SEQ ID NO: 551207 - DNA, 76 bp, Homo sapiens
agaagaactggccaagaaacactgtggggagctgagatctgtatctgtggacctgaatgttgatccctcgcttcag

SEQ ID NO: 551208 - DNA, 101 bp, Homo sapiens
tgaatactcgccgcttttctacatcgcggtggtctttacctgcttcatcgtgaccaccggcctggtattgggatggaatcacactgtcagagtacttccgt

SEQ ID NO: 551209 - DNA, 98 bp, Homo sapiens
ggaggcggaggtccaagcggaaaggtgaagatgcaatgaccggggacacagacaaatatcttgggccacaggaccttaaggaattgggtgatgattcc

SEQ ID NO: 551210 - DNA, 75 bp, Homo sapiens
tggcgtaccctgagcgccggaggctggcaggcatgggcaagaaggacgaccccaagctgatgcaggagtggttca

SEQ ID NO: 551211 - DNA, 75 bp, Homo sapiens
ggattataggcgtgagccaccgtgcctggctgaagccacccgtgggaaactgttacaacagctgcaatgcagaaa

SEQ ID NO: 551212 - DNA, 97 bp, Homo sapiens
cggcgcttggctggtggggcccgcggcgggattttcccgggcggcgagagcgggcttcccacggcacgacatggagacctgtggttgcgaggctccc

SEQ ID NO: 551213 - DNA, 100 bp, Homo sapiens
gacccagctcttccaggactttgagccagtccagaccctgctgctgtcttcaaagaaggtaaaacatggctaaaagcttacggagtaagtggaaaagaaa

SEQ ID NO: 551214 - DNA, 100 bp, Homo sapiens
gtgcccacaaccgcaccaagaagcacgacctgctgagggaggcacctcccgaactaacaacttggagaccgggccctccacacggctgttccaggtccag

SEQ ID NO: 551215 - DNA, 100 bp, Homo sapiens
ttggctgtcaagagagtccctattcagctggatattgcgtgatcacctatatacttggagttggagacaggcacctggataaccttttgctaacaaaaac

SEQ ID NO: 551216 - DNA, 99 bp, Homo sapiens
ataatgatcgagacagtcaagatagcaagaaggtagaaatcatcatagttggctggggaacagaccagggaattggtggatttggagaagagccgggaa

SEQ ID NO: 551217 - DNA, 90 bp, Homo sapiens
gcgtgggggaccggctgttggcgggagggtcaggtgggagctggaagttgctcacaattgaccaggacctcatggtggcacagttttcca

SEQ ID NO: 551218 - DNA, 100 bp, Homo sapiens
agcggcagcagccccagcctcaaggccagagctccagagattatattggggttgccattttgtgaagccatagacatgtggtcattgggatgtgtgattg

SEQ ID NO: 551219 - DNA, 87 bp, Homo sapiens
agcaccgagtccgaggtctacgacgacggcaccaacaccttcttctgcccatggcgaattgtggatgattgcggtggagccttcact

SEQ ID NO: 551220 - DNA, 106 bp, Homo sapiens
gcagccaaaatcgggaacttggagatggtcagcctgctgctgagcacaggacaggtggacgtcaacgcccaggtgtgggcccatcgctggatggatctgtcagaac

SEQ ID NO: 551221 - DNA, 90 bp, Homo sapiens
gtgagcgcctcgcctggatgtgagtttcagccaggtgtcttctctttagggatggtgaggttggaaaaaggctcctgtaaccctcctcca

SEQ ID NO: 551222 - DNA, 88 bp, Homo sapiens
caaaactacattgaagaccttcagaatggtcctatcagaaagtacactggagaaccaaatgatgcccttcgacattttaataaagctc

SEQ ID NO: 551223 - DNA, 100 bp, Homo sapiens
gatattaccgattaaagactgccggcttcacagacgacgtgggagcttttcataagtcaggtggggaccaaggcatactgaacacattttttagcagctg

SEQ ID NO: 551224 - DNA, 100 bp, Homo sapiens
gtgctacttctactccaagttcgatttcttccagggcaagcacttctttctttacggggagttccctggggacgagcggcggaaactcatccgatacgtc

SEQ ID NO: 551225 - DNA, 50 bp, Homo sapiens
gcggcgaggaaggcgtctcccgggtgggcaccatgtccttgaagcttcag

SEQ ID NO: 551226 - DNA, 138 bp, Homo sapiens
gagaaacttctccggaccgtgaaccgaaccgtcatttccatgggacgagattctgaactcattgtcatggaatatcagcctggaggggacttgctgtcacttttgaatagatatgaggaccagttagatgaaaacctg

SEQ ID NO: 551227 - DNA, 90 bp, Homo sapiens
tcccaatcccactgatgaggatcagcccatgtcatcagtgagttctgcctcagtcagctcccaagtgaggacgcagtcacctttgaagac

SEQ ID NO: 551228 - DNA, 100 bp, Homo sapiens
ctgagctatttttgaaagaacatgaccaccttcgaaaaactttcacgatggccgtaaagcacagcagcacatcgagacttgctggaagcagcttgaatct

SEQ ID NO: 551229 - DNA, 75 bp, Homo sapiens
actgcctcccccaccaccgcctcatctgtatcctaatacacaggaccctgatgctcccataagacagaaaatgcc

SEQ ID NO: 551230 - DNA, 99 bp, Homo sapiens
gtccgggtaaatggctgggctaccctattcctccgaaccagcatccccaccatcaacatggagaacaagaccacgtggtacgacaggacagaaaccgcg

SEQ ID NO: 551231 - DNA, 100 bp, Homo sapiens
gtttgttggtggaggaggtggcaggcctcggcggatgcttggatattaattcatctgtgaaaggggctcgttttgtcagattctgtgatgcattcaatat

SEQ ID NO: 551232 - DNA, 75 bp, Homo sapiens
atgcatctggtctctttttggagctacagtggacaggcatttgtgacagtgtactaatggtcacttgatgtgcgc

SEQ ID NO: 551233 - DNA, 100 bp, Homo sapiens
aatggatggacttatttttcagcctactggagagtacgagacccaatctagtgcagaagccaaatttgtgaagcagctagaccaatgtgaaatgattctt

SEQ ID NO: 551234 - DNA, 100 bp, Homo sapiens
ggaagtcacccagcccccaaggattctgggggaggcctcaggtgctggagaatctggtaaaagcaccattgtgaagcagatgaggatcctgcatgttaat

SEQ ID NO: 551235 - DNA, 90 bp, Homo sapiens
ccgacaccgagcccgcccgacccgggctcccacctgctcctccagcgcaccagggccggccaaggattgcgaaaaggaccaattccagtg

SEQ ID NO: 551236 - DNA, 75 bp, Homo sapiens
gcctggaagtgcacggtgtgcttcgaggacaggcgaagtggtgaacacccatggccccgtggagcctgacaagga

SEQ ID NO: 551237 - DNA, 108 bp, Homo sapiens
cggctgccgccaaggtgttcggtccttccgaggaagctaaggccgcgttggggtgagaccctcacttcatccggtgaatgcttgagatgcatgttctggaataacctt

SEQ ID NO: 551238 - DNA, 75 bp, Homo sapiens
gccacggtctgcccacccaacgcgaagacggtaacccgtgtgactttgactgggagtttgagaaactctctgatt

SEQ ID NO: 551239 - DNA, 75 bp, Homo sapiens
gtcgttttggaagcgcccttcctagttggcattgaaggttcactcaaaggcaggcctcttcttaggaattccctg

SEQ ID NO: 551240 - DNA, 82 bp, Homo sapiens
gacgaagtggacaagttcaaggccaagttcctgacagcctggaacaacgtcaagtacggccacagagctacaggatgaagta

SEQ ID NO: 551241 - DNA, 90 bp, Homo sapiens
acagcttccacagcttccaccaaagggaacgttggatagaaaaatccttattggagaagccctcagagctcatgtcacattcatcctctt

SEQ ID NO: 551242 - DNA, 100 bp, Homo sapiens
gagcactctcccagcctggagcagccggaccagcccagaaggcagcggcggcccaggccagcattcccgcagaatactcccccagttgcaagaggcgcag

SEQ ID NO: 551243 - DNA, 118 bp, Homo sapiens
actttgaggccaataccaccgtcggccgcatccgtttccacgactttctgggagactcgaactgtggaaggtgcatcagtgaagaaatggaccaatgtgtataatcatggaatctcct

SEQ ID NO: 551244 - DNA, 98 bp, Homo sapiens
cactttacaactgtgtaactgtcttcatctttacagaggaatagtctacaaaggaagacttgtaacctggagaagagaactcaagacatggctgccca

SEQ ID NO: 551245 - DNA, 75 bp, Homo sapiens
ggccaggtttactggagtaggtgttagtaagggtgcggaggcagcaaatgttacaggtcctggtggtgttccagt

SEQ ID NO: 551246 - DNA, 100 bp, Homo sapiens
cacttctccgagccagcgagccagcgagccgccgacccgccgagcaaaatgatctcctaagaagattgtctaaatcccagaatacagtcttctgtggacg

SEQ ID NO: 551247 - DNA, 75 bp, Homo sapiens
atgtcatgatggagaattatggaaacctggtctcactggaaaacccatatagacagctgccttgtaactgtcatg

SEQ ID NO: 551248 - DNA, 60 bp, Homo sapiens
ctcagcctcccgagtggctgggattacagggaatttaatagcaagcctggctcattctag

SEQ ID NO: 551249 - DNA, 100 bp, Homo sapiens
aaatcaagcttggaatgatcatcaaacagctatggtgatgattagagacatactaatgtacatggctgcctgctgtttcccggggagatcatgaaacgag

SEQ ID NO: 551250 - DNA, 111 bp, Homo sapiens
ctggctatgagcctgagaacagcgtggcatgcaaggaaattgtccgagccatgacacatgtgataaaccaaggcatggcgatgtactggggcacctcgagatggagtgcta

SEQ ID NO: 551251 - DNA, 100 bp, Homo sapiens
ctcggctgcgctcgctcgggtggcgacttcctccccgcgccccctccccctcgccatgaaggtgaggcggaaccaaccctcctggccatgggaggggccg

SEQ ID NO: 551252 - DNA, 122 bp, Homo sapiens
gcggagtctgagggagatggaagttgagcaagagcagcggcgcagaaaggtggaggccgggaggacgaagatgaaggatttgggggcagagcacttggcaggtcatgaaggggtccaacttc

SEQ ID NO: 551253 - DNA, 96 bp, Homo sapiens
gcaaataaccgttttgaaattgtttggggcaagatggaaagacactgctaattacgaatattgacatggagccatgcacggtagacccccagctaa

SEQ ID NO: 551254 - DNA, 100 bp, Homo sapiens
gctaaagtgggttgaattgccatggctgctggaagaagtctcaaaaagctcccgactagatcagcttgaacgggtctttttacgacttggccatgctgaa

SEQ ID NO: 551255 - DNA, 50 bp, Homo sapiens
ggttgccagccacctggggattagagacggggtttcaccttgttagccag

SEQ ID NO: 551256 - DNA, 100 bp, Homo sapiens
tctgaagcgccacttctcagaaacacagaggtacggttcctggagcagcagaacaagatgctggagaccaagtggagcctcctgcagcagcagaagacgg

SEQ ID NO: 551257 - DNA, 90 bp, Homo sapiens
caagtgcgcggttggggccactgcgaggccgttttagaacactcgtgaaactgctcaggccatcaagggtatgcatatacgaaaagccac

SEQ ID NO: 551258 - DNA, 82 bp, Homo sapiens
cgggcccgggctgcggcgtgtgcgcgcccgccagctgctccggagatacggtttggtgcacctcgatttggaggaagtaggg

SEQ ID NO: 551259 - DNA, 100 bp, Homo sapiens
agaagcagaattatacctagaagtctactaatggacagttagtcacccacctacatgttgagggtcctaaaaaggtggggacgctgtggcgagaagccgg

SEQ ID NO: 551260 - DNA, 100 bp, Homo sapiens
cgggagacttgagaagaaaggccatggaaggcaccatcgatggatcactgataaatcctacagtggttatttccagaaagaagagaatggcaaagtatga

SEQ ID NO: 551261 - DNA, 75 bp, Homo sapiens
tctttctctggaactgaaccagaggttcacaaaacaagtgtagtaggcaaccacgagacagacaacatgaaccag

SEQ ID NO: 551262 - DNA, 50 bp, Homo sapiens
tcctgaaagctgtcacccacaagctcaaccaccggaattatctcttggag

SEQ ID NO: 551263 - DNA, 75 bp, Homo sapiens
atgagcgttccagcttctccatatatcagctacttcagtgggctgctatctggctccatcagaatgaacagcagc

SEQ ID NO: 551264 - DNA, 98 bp, Homo sapiens
ggggctgtgccgggcggagagaactcagcgaggattctgaggagatctcagccctgctgagctgatgatgctgactataggagatgttattaaacaac

SEQ ID NO: 551265 - DNA, 100 bp, Homo sapiens
tcacactgcagcaggcggacgtggtcctggttctgcagcaggaggatggaaaaccagtgttctctggacatgaaaagcaaactgaatacaagtaaacaag

SEQ ID NO: 551266 - DNA, 95 bp, Homo sapiens
atggatgttcttcttcgagtatttgtagaagggctttgatgacagtagggaaagaaccatttcctaccatttacgtagattcacaaaaagaaaat

SEQ ID NO: 551267 - DNA, 100 bp, Homo sapiens
tccaccagcaaccatgagtggttccatgatgggaagtgacatggagtccaacctataccttctcagggaggcaaactagaaatagctggcactgtggttg

SEQ ID NO: 551268 - DNA, 107 bp, Homo sapiens
gagggaggctactgagaagcccggcgacggaggaacgcaggtctgctgccagatgaataatacggcagctagtccaatgtctactgcaacttcaagtagtggaagga

SEQ ID NO: 551269 - DNA, 95 bp, Homo sapiens
tcgagaggaagattcttacctctttgatctcgacaataagactcggtgaaatacctggagtgctcagctctcacccagagaggcctgaaaaccgt

SEQ ID NO: 551270 - DNA, 101 bp, Homo sapiens
gccctggacggcattcagtgttttgggtgtccgcaatgttgccagtgtctgtctgcagattggctacccaactgttgcatcagtaccccattctatcatca

SEQ ID NO: 551271 - DNA, 96 bp, Homo sapiens
ccgttacagacgtggctactatggaaggcgccgtggccctccccggaataggctgacccgcggctgattgagtccctctcccagatgctgtccatg

SEQ ID NO: 551272 - DNA, 100 bp, Homo sapiens
cccgggcggcgctcgtacttctggccactgggcgagcgtctggcaggtttattcttcagtccaaggaagcaattcacagtcagctgttagagaagcagaa

SEQ ID NO: 551273 - DNA, 96 bp, Homo sapiens
tctgaacaaatgcctcctgaggatttctgtgcctggaaaatatctgttaacagactgcttttacacctacgtaggagcattgcttttcgtggtgaa

SEQ ID NO: 551274 - DNA, 51 bp, Homo sapiens
caaaaagaaggagacttcagaaaggagcataccataaagtctccaaaggat

SEQ ID NO: 551275 - DNA, 50 bp, Homo sapiens
tgaatgctgatgactctctggagtatgcaaatcctgcatttgaaacaaca

SEQ ID NO: 551276 - DNA, 82 bp, Homo sapiens
gcttggacggcgggaaccggctccggagcgagaacgcgcgtcaaaatgcagatcttcgtgaaaacccttaccggcaagacca

SEQ ID NO: 551277 - DNA, 82 bp, Homo sapiens
gaaagaattagctgggaccatggatggagaaggtacaggtttgcagattccgccagcagcacagcaagctctacagatgagt

SEQ ID NO: 551278 - DNA, 101 bp, Homo sapiens
ggcctcttcggctgcggaccctgccattccggaggaggtagtaaacctattgatggcaattttgctgactgtggaagtgactcatccaaactccatgccag

SEQ ID NO: 551279 - DNA, 98 bp, Homo sapiens
gacagctttttatcctccgttgcagacatggttcaaagaaatctctttccttgtggagactcaatggtttgcattattgatgatcgagaagatgtctg

SEQ ID NO: 551280 - DNA, 75 bp, Homo sapiens
aaaagttaaaacaattgctgcacgaaacactgaaattttggcagaacgtactcaggaaaagtggggatttccaat

SEQ ID NO: 551281 - DNA, 82 bp, Homo sapiens
agatcagtacacaaaggctgctgctgccgccagaggaaggactgctctgcacgcaccttactatgacgacacctaccccagt

SEQ ID NO: 551282 - DNA, 50 bp, Homo sapiens
cgcagtggtcgcttcttctccttggctgaaaacataatgtttctggagtt

SEQ ID NO: 551283 - DNA, 100 bp, Homo sapiens
accggatcctggagaacatctcgctgtcggtgaagaagttgcggcgccgcttcggggacgtgttcagcctgcagctggcctggacgccggtggtcgtgct

SEQ ID NO: 551284 - DNA, 86 bp, Homo sapiens
ggataacaagttttgtgcagattgccagtctaaaggtcaaaatgcagatcttcgtgaaaacccttaccggcaagaccatcaccctt

SEQ ID NO: 551285 - DNA, 82 bp, Homo sapiens
ggcccgcgggtctacttcctcaaagcagcctcccgcgacgatgcccctcaacgttagcttcaccaacaggaactatgacctc

SEQ ID NO: 551286 - DNA, 75 bp, Homo sapiens
ggctcccaagaagtccgagacacgcggtgaggcggcgacgggctccggaattcagaaggagctggcggacatcac

SEQ ID NO: 551287 - DNA, 98 bp, Homo sapiens
cggttgcggcggcctgggctgctgactgcgcacttggaatagtagcaggcggcggcggcggaacgccaggcagggatcgcttacacctgagacgaact

SEQ ID NO: 551288 - DNA, 135 bp, Homo sapiens
gccaccttccccaaagctatggacaacgtgacggtccggcagggggagagcgccaccctcagcacgaaagcaagagattatcaaagtcactgaacaactgatcgaagctatcaacaatggggactttgaagccta

SEQ ID NO: 551289 - DNA, 50 bp, Homo sapiens
aatggcacctatggacaagtctataaggggatcatggaagctgataaaga

SEQ ID NO: 551290 - DNA, 82 bp, Homo sapiens
accagtctgggggcgctggcggcctgcgcagccacctcaagatggcccactgcgtgaccttggttcagctgtccatttcctg

SEQ ID NO: 551291 - DNA, 75 bp, Homo sapiens
cccccctcccgcccggaaagctgcccagccaccagcaaccccccaggggggacacagcgattgccacgcgccatt

SEQ ID NO: 551292 - DNA, 90 bp, Homo sapiens
gccggatgagttgcttttaggcttgctggcccgcggggctgtccaggcacgcgaggcccctcagctgtctccgttatgaggtacagcgcc

SEQ ID NO: 551293 - DNA, 100 bp, Homo sapiens
gtcttctccctcgccagctggctatttcttttagaagagatgagagagagaaagtatgatgggtatgctcgagtgatacagaaatcatggaggaaattcg

SEQ ID NO: 551294 - DNA, 80 bp, Homo sapiens
gtgaactggattccatgtagagacccctggagattcagaatggacagtttagaagaacctcagaaaaaagtctttaaggc

SEQ ID NO: 551295 - DNA, 80 bp, Homo sapiens
accacgtctccaaaatgagtcgcatcttcaacccccatctaattaaacaaccaccatgtcgagcaaaaaggcaaagacca

SEQ ID NO: 551296 - DNA, 100 bp, Homo sapiens
gaagagcatgaccttgttgacgatgacatcaccactggcctgtatccggtgtccgaggcgaactcagtaagatgatgttaagaggaaacctgaagcaagt

SEQ ID NO: 551297 - DNA, 96 bp, Homo sapiens
caccccctccgtgggtgtgtggaaccatcactgttgctggaggcacctgacaaatcctagcgaatttttggagcatctccacccaggaacctcgcc

SEQ ID NO: 551298 - DNA, 80 bp, Homo sapiens
cggaatctgtctcctgatcatcattcaggcatgttatttgaaagcaattgagacgcaaccgaactttgcagtagcttgga

SEQ ID NO: 551299 - DNA, 50 bp, Homo sapiens
ttgtcagcaaactactttcaggagaaaggtgctctgtgctcacgcttcag

SEQ ID NO: 551300 - DNA, 100 bp, Homo sapiens
taactttcaatttgcaaattaaaatgagaatggttgccttttcttcattatcaagagatggtgagttgtcctcctggcaccatgccggtggaaaggatgc

SEQ ID NO: 551301 - DNA, 100 bp, Homo sapiens
cagtgaatcccaactgttatgccaaaggtccttttggaataaatcatgggattgagcttcattcagatgtggtggaatatgccaaggaaaaactggagag

SEQ ID NO: 551302 - DNA, 75 bp, Homo sapiens
gagcagaatggctggcaccacctcagatcatcgaaggtaacatgaaggcccactttattatggatgatccagcag

SEQ ID NO: 551303 - DNA, 100 bp, Homo sapiens
gctgatccaggagtggttcaccctggtcaacaagaagaacgctctcatccggaggcaggaccagctgcagctgctggtacagcatcccctaaagagtttt

SEQ ID NO: 551304 - DNA, 115 bp, Homo sapiens
tggagagccgggagtcgctgggtgcgtggggctgcctcgccgcgtctcgccacgttggaggcatctgtccacccatgtggttccagacacgttcatgtggccaccatgaccccgt

SEQ ID NO: 551305 - DNA, 83 bp, Homo sapiens
ccaagagcccaggaccgtccaggcgtagcaagtcccctgcctccaccagctcagctgtcggaaaaggtaacagaagatggaac

SEQ ID NO: 551306 - DNA, 100 bp, Homo sapiens
gctgtccactgcacagttcgaggggccaaggcagaagaaatcttggagaagggtctaaaggaagctcttcgtgggcggtcttgactggagcacgacccaa

SEQ ID NO: 551307 - DNA, 75 bp, Homo sapiens
agtatccaatagggatattgtagaaactgtctttaacctggacagtcattttgtttactcattcagccctgttgc

SEQ ID NO: 551308 - DNA, 101 bp, Homo sapiens
ttggattgtgagctatttcagaactgttctcaggactcattattttaacatttgggagaaacacagccagaagatttcaacactacacttgcacaatgtct

SEQ ID NO: 551309 - DNA, 85 bp, Homo sapiens
agcctggaaggtgcgtgtggggctgggtctcggagtgggagacgtggagtgcaggatcccatgacagattctgttgtcacgtctc

SEQ ID NO: 551310 - DNA, 75 bp, Homo sapiens
cctgttgccagctcctgcgccctccggactaacctcaaaaaccagggtactgcgttcaacagatcctgatcgctt

SEQ ID NO: 551311 - DNA, 90 bp, Homo sapiens
ggcacttggagtccggacatctgaaacttgcgacatggtatgcttaagcaacaggatctaagtattgccatggtggtgacatcacgcgaa

SEQ ID NO: 551312 - DNA, 83 bp, Homo sapiens
gtgaaactagcagcattatgcagaaactgaagaaaatgagaagccgcatggatgaaaaaaaataattctgaggtaggggcctc

SEQ ID NO: 551313 - DNA, 100 bp, Homo sapiens
acctagcaacaaaaagaaagctgcgttaatgtttgcaaatgcagaggaagaatttttctatgaggaaagaccacagcaagattctttcattcgtctcctc

SEQ ID NO: 551314 - DNA, 89 bp, Homo sapiens
atggtgaacatgccaggagagcaatgcaaaagactctgtccttggaagcacctgccagaattaagaacaaggctccctcccctgactgg

SEQ ID NO: 551315 - DNA, 100 bp, Homo sapiens
cacagccgcaccagctccccgacacccccttcctctgcagctcaacgggacccaggtggagtctgtacagctcaaagtcaacatagcccgaaaacagccc

SEQ ID NO: 551316 - DNA, 140 bp, Homo sapiens
caatttcacctttgaattcagccagtggtcacagctggatgtttgcgacatcccagagagcttccagaatggagctaacacccattatggagattaaccacttttcatcaggtttttaacttaagtcgtgaggaatacaa

SEQ ID NO: 551317 - DNA, 95 bp, Homo sapiens
cggccaatgtgggatcgatgtttcaatattggaagcgctttgatttacagcagctgcagagatgggggtcttgctctgtcactccagctagagca

SEQ ID NO: 551318 - DNA, 75 bp, Homo sapiens
ttctccgacagcagcacacccgcatacccagatggaagtagcaaagaaaagagaagagcagcaattgcccaggcc

SEQ ID NO: 551319 - DNA, 75 bp, Homo sapiens
cacgccttggccatcgctgaaaagtctcaggtggggtggaagacaacccgtgagtattacaccttcatgtgggtt

SEQ ID NO: 551320 - DNA, 83 bp, Homo sapiens
atgcaatggtctcaatctctggaaaaacttcttgccaaccaaaacatggcccatgaacatggacatgagcatggacatcataa

SEQ ID NO: 551321 - DNA, 51 bp, Homo sapiens
cacctgagccgcgtctaccccgagcgtccgaaattacgactttgcatggag

SEQ ID NO: 551322 - DNA, 83 bp, Homo sapiens
ctggagcagttgtatgtgtagaaagtgaaatcagaggagatgtaactatcgccctggtacctgacagtgtaaagaaggagctc

SEQ ID NO: 551323 - DNA, 75 bp, Homo sapiens
ttccatcttcattcatgactccagacagtctccagagaatacagagggcaaagatggatccaaagtaactaaaca

SEQ ID NO: 551324 - DNA, 75 bp, Homo sapiens
ctggacgtgtaaaaagaactcttaacggccgatgcagctcttccaaagctaaggaggagcgagctgggctggagg

SEQ ID NO: 551325 - DNA, 100 bp, Homo sapiens
ggatagcaagtgcaaggtcaaatggacccatgaggaggtgctggagaatctggtaaaagcaccattgtgaagcagatgaggatcctgcatgttaatgggt

SEQ ID NO: 551326 - DNA, 90 bp, Homo sapiens
aaaacaggatcagtaaagaaggaaaaagcagtaaagccagaggaagaaaacctggaatcagattactttggcaagcttgaatctaaatta

SEQ ID NO: 551327 - DNA, 96 bp, Homo sapiens
tgatggagaaaattaagagttatgtgaattatgtgctaagtgaaaaatcatcaacctttctaatgaagaacaatatgatgcgtttgtgaagtttac

SEQ ID NO: 551328 - DNA, 100 bp, Homo sapiens
ccggctgattggattcgttactgctttgcaacgcgcacctaactccagaggatctctgggaaagtttagaaaatgctagtggtaaacctatagcagctgt

SEQ ID NO: 551329 - DNA, 97 bp, Homo sapiens
cagatatcaaactttacaaaggatatgctgatggagggcacggaggaagtggaaggtatgattatcgggaaatgctgcacaatgccactttctgtct

SEQ ID NO: 551330 - DNA, 75 bp, Homo sapiens
ctgacagctgaggaagtctgcatccacattgcacataaagttgacccctctgccatgaaccagtccatcccagtg

SEQ ID NO: 551331 - DNA, 75 bp, Homo sapiens
tacttcaagaggaggaatcacgctcggaaacaatgggtccccgttctccgtgtcctgctgtccgctgacctgaag

SEQ ID NO: 551332 - DNA, 74 bp, Homo sapiens
gttgtggctgctctactacgcgcagcctcccgcgacgatgcccctcaacgttagcttcaccaacaggaactatg

SEQ ID NO: 551333 - DNA, 100 bp, Homo sapiens
cagtaaaattctccagaagagatttatggcagcctcactcccagtagtttctgcatttagtgagataagcatcctggtggggaagaagttttaagggaac

SEQ ID NO: 551334 - DNA, 50 bp, Homo sapiens
ttctcgaatacctagaatgggaataagctttccgatttgttggcacccat

SEQ ID NO: 551335 - DNA, 75 bp, Homo sapiens
acccaacagagatctcttctgttctccactgctaggagatgtaatcagtgtagagaaaaccgtgaagagatgcct

SEQ ID NO: 551336 - DNA, 116 bp, Homo sapiens
gagagcagaagccatagagagcagcctcgaggtggagaagaaggacaagcttgcgcaagagtgagccatggagctacgtgtggggaacaagtaccgcctgggacggaagatcggga

SEQ ID NO: 551337 - DNA, 111 bp, Homo sapiens
aagcttcaccgagtgcagatacaactatactgtttgtaaaaggagaaggcatgcccaagagaatcgtaaatgcaaaaattgcttgccttgacttcagcctgcaaaaaacaa

SEQ ID NO: 551338 - DNA, 97 bp, Homo sapiens
tccctcttcaagaagaaaaccgtggatggtggcaatttgtaccatacggatgtctcactctttggagaacctaccgaatttgagtatttgcgaaaag

SEQ ID NO: 551339 - DNA, 90 bp, Homo sapiens
ttcctgcctgcttctagcaagttctgactaataagaagacgaccttctttggtggcaattctatctctatgattgattacctcatctggc

SEQ ID NO: 551340 - DNA, 75 bp, Homo sapiens
cagatgtggctccttgaccttggacttcttagttcccatgatgatgtcagccaggaagatgttcccctcgtaata

SEQ ID NO: 551341 - DNA, 100 bp, Homo sapiens
cttccacctgctgaggaccaccgctcagccatgggctaccagaggcaggagcctgtcatcccgccgcaggcctttttgcaaatgtgtaacttgcctatca

SEQ ID NO: 551342 - DNA, 98 bp, Homo sapiens
aatgaactacagccgcaagaaccaggactcggaagcagaaaaggttgttgaaagtccagatttttccaaggatgaggactacttaggaaaggttggaa

SEQ ID NO: 551343 - DNA, 100 bp, Homo sapiens
cgcggacgtggcttggcgtgtggggcgtgaggaccatgcaagcccgaggcttcggctcggatcaggtcaaaggttccgttacagttactatgatgaatcc

SEQ ID NO: 551344 - DNA, 100 bp, Homo sapiens
cctcaaggactcggagcgcatgcagctgctgctgaccctggccttcaaccccgagccgctggtgctacagtccgtggtggatgactggattgaatcatat

SEQ ID NO: 551345 - DNA, 99 bp, Homo sapiens
gctccagaaatggggttgtgatataaagacagggatatgagtgaagaaaacacagagccaccctggaaaggttgggagccacgtgtaccagtgtgtgtt

SEQ ID NO: 551346 - DNA, 100 bp, Homo sapiens
ggctgttgccatgaggcgaggctagggaggacctcacttccccggggtgtaataatgttaactgagactctatcaagaagaatatctaatccgtaccttg

SEQ ID NO: 551347 - DNA, 100 bp, Homo sapiens
cagagaactcggcgccgccaaacagcccagctcgcgcttcagcgtcccggcgccgtcgcgccactcctccgagatacaagtgatgccttcaaatttgagc

SEQ ID NO: 551348 - DNA, 75 bp, Homo sapiens
aactttactgagaattttccacctcctgacacaacaccactcactttggagtttaacccttctgccaatccagag

SEQ ID NO: 551349 - DNA, 98 bp, Homo sapiens
gctcatgctgtacgctgagagggctgaggcacgccggcccgcgatgctcccagcccggtgagacctgcctgaatggcgggaagtgtgaagcggccaat

SEQ ID NO: 551350 - DNA, 99 bp, Homo sapiens
ctcaagtatcggctagtgggctcccaggaggaattggcatcatggggtcatgagtatgtcagatcatgctgtcacctgaagcaaggaacacagcatggg

SEQ ID NO: 551351 - DNA, 100 bp, Homo sapiens
gtcaatggaggcacctgtcggcagactggtgacttcacttttgagtgcaactgccttccagggagagataatgcatgtgagaaaacttcatatatgtttc

SEQ ID NO: 551352 - DNA, 74 bp, Homo sapiens
ggcgaggtggccggagccgtgtggaccaggaggagcgctgcttctctacagtttagcctttaatgccaggtttc

SEQ ID NO: 551353 - DNA, 83 bp, Homo sapiens
ggccactgcgcagaccagacttcgctcgtactcgtgcgcctcgcttcgcgatgccctcctagctagccgtcacgggatggagg

SEQ ID NO: 551354 - DNA, 82 bp, Homo sapiens
gtcagaatatgattctgagcatgaaaattccgagcctgttactaacattcgaaggaatgactgcatggacggaagaagaatg

SEQ ID NO: 551355 - DNA, 75 bp, Homo sapiens
cagcaccacagtccttctgcagtccctcgtccagccacccccaggtgaggcaggcgactaatcagattgtgatga

SEQ ID NO: 551356 - DNA, 95 bp, Homo sapiens
cgtcgctgctggcacttcaggctctggcccctagcagtcttcttgatgctttggaacaacatttagcttccttggaaggaaagaaaatcaaagat

SEQ ID NO: 551357 - DNA, 82 bp, Homo sapiens
gagaccatgttccgagcggcggctccggggcagctccggcgggcgatatggctcgtggacagcagaaaattcagtctcagca

SEQ ID NO: 551358 - DNA, 74 bp, Homo sapiens
gctgtccatgggcaccatgatctgtggctgggataagagaggccctgctggtggatgattacgtggcctctgag

SEQ ID NO: 551359 - DNA, 100 bp, Homo sapiens
cagagactggcaggcctcggcctaaagacaaggcgcctctgtcgaagagccttctgctggtccccagtgccctctccctcctgctcgccctcctcctgcc

SEQ ID NO: 551360 - DNA, 96 bp, Homo sapiens
ccaggtgatctttaagtcagacttttccaatgaagagcgttttacggggtttgctgcatactatgttgccacaggcgggatgtagctcattttggg

SEQ ID NO: 551361 - DNA, 82 bp, Homo sapiens
caagatcggcaggcgagattgcctgacccaggcctgctcggccctcacaggatcccagatgcagtgactggttactacctga

SEQ ID NO: 551362 - DNA, 101 bp, Homo sapiens
agttcgtcagcggccgcgagacggccaaggactggaagcgcagcatccgccacaaagggggggccctcagcctcttggccttgaacgggctgttcatcttg

SEQ ID NO: 551363 - DNA, 96 bp, Homo sapiens
aacttctttggcaagtggacattttactggctcaagtaccagctggaggatgagtctgcgcatttggatgaaatgccactaatgatgtctgaagaa

SEQ ID NO: 551364 - DNA, 100 bp, Homo sapiens
attgcgagaatgaggaggacaacagctacaaccgggggtttctgggtggagcggacccctgtgcacgaggcagcccagcggggtgagagcctgcagctgc

SEQ ID NO: 551365 - DNA, 96 bp, Homo sapiens
gggccgtcaggcggggatacagcctggaaggtgcgtgtggggctgggtctcggagtgggagacgtggagtgcaggatgaagtgaagctgccggcca

SEQ ID NO: 551366 - DNA, 100 bp, Homo sapiens
cgggcgggggctggcccggggttccaggacgccaagagtgccgaggatgaggctccttccagacacttgggaaagcaccagccccgctcagcacaggtgg

SEQ ID NO: 551367 - DNA, 100 bp, Homo sapiens
aagaatggcagtgctcaaactcaccgaccagactggtgatgtacatcgagagagacagcagaaagaccactccaggcaaggagcagcaaagtggcaatga

SEQ ID NO: 551368 - DNA, 90 bp, Homo sapiens
gcctgacagaggaagatggacagctgggaattgctgaattagaactgcagaggttcctctacagcaagtgttgggtggtgaattcctcaa

SEQ ID NO: 551369 - DNA, 100 bp, Homo sapiens
cttatgaacgccttgttgcccagttccccagttctggcagattctggaaactgtacattgaagcagaggcttctggctgtgatgggtcggagattcctga

SEQ ID NO: 551370 - DNA, 101 bp, Homo sapiens
acccgccggggagaggcacccgagacccacggagaccgcattgaagatggatacgtgacaatcccagggaccgctgcactgacttcatttccttagacaag

SEQ ID NO: 551371 - DNA, 90 bp, Homo sapiens
tgaccatctgcctacctcccgttaatggaaccgcgactcacaggttctcccatgggcaggtggtctctctggatgagctgcgccccttcc

SEQ ID NO: 551372 - DNA, 82 bp, Homo sapiens
gcgaaggcggcggctcctgccctctcgctttccctctcgcgtctctggctgcagctcctgtccaaatatgacccccagaagg

SEQ ID NO: 551373 - DNA, 100 bp, Homo sapiens
tggaaggaggagattctgaagataaggaggctactccttcctgtagagcagaaattgtattttgcacgaacatgcagttattgaagattaggatcaagga

SEQ ID NO: 551374 - DNA, 87 bp, Homo sapiens
ctcctaggcgacgagacccagtggctagtacctccctgcacttggctattcaaaacgggtccatctgatgaatcctatggttccagg

SEQ ID NO: 551375 - DNA, 101 bp, Homo sapiens
gaaatatcagttctgttgtggaagggttctcatgtatcagccatcttctgtaagggtgcccagtgtgacttcggttgatcctgctgctattccgccttcat

SEQ ID NO: 551376 - DNA, 98 bp, Homo sapiens
tagcagaggacgcggccaggcgattcggtgaagcgattcctgcaggcgttggttcccctctttgacctgagaacattacgtggtagaggtcaagcttc

SEQ ID NO: 551377 - DNA, 110 bp, Homo sapiens
tgggaaaggacaaaaaaattcctggaaaaagaagtccaagaagcaaaaaagggactgctaagaagataccaccagatatttggagttcttacaacatggcagacattgac

SEQ ID NO: 551378 - DNA, 100 bp, Homo sapiens
cgaggaacaccaccatgccccggggcttcacctggctgcgctggcttccgaggcaatcgggcagcatcagtcttcagccactaagctgagaagatctggg

SEQ ID NO: 551379 - DNA, 95 bp, Homo sapiens
agctacattgctgattgtgccttccgggggctttccagtttaaagactttgaacaagcacatcatgattgacttggggactggcaacaacaacaa

SEQ ID NO: 551380 - DNA, 82 bp, Homo sapiens
cgccgtggccaacgcgcaggagctgctgcaggattttttatcaagcagaaatgcatcgaacaacgagaatcaagatcactga

SEQ ID NO: 551381 - DNA, 83 bp, Homo sapiens
ggagccggcgcccccggcgcggcctggtggagttgacagaagagatcctgaagctgctgatggaactggtcttccgcctggtg

SEQ ID NO: 551382 - DNA, 100 bp, Homo sapiens
aaactcttggcatttggctttgcctttctggacacagaagtatttgtgacagccacagacccctttgcttctgtttttgggaatgaatcatttggaggtg

SEQ ID NO: 551383 - DNA, 73 bp, Homo sapiens
ttccccggcccacagtgggggtgtgcaaacccgagagaactgggatctatggatgaagtgttggcctccttaa

SEQ ID NO: 551384 - DNA, 75 bp, Homo sapiens
agatctttcagcacctgatggcctatcaccaggtgtctgacttccagcaactgctggcctgtgccagggtgcaag

SEQ ID NO: 551385 - DNA, 82 bp, Homo sapiens
gggctggactacgtggcggcgctggaagggatgtcgtctcagcagtgctcgggcgcaggttgtgaccgagattcccgacgag

SEQ ID NO: 551386 - DNA, 75 bp, Homo sapiens
acaaattgcctccttatgtctccaacatggaccgcctgggggactcggaactgactggacctacagagacatctg

SEQ ID NO: 551387 - DNA, 75 bp, Homo sapiens
ccggagcacggggtggtgtgtgggggaagccgcccccggcagcaggagtctgatgacttttcacagtaccaactc

SEQ ID NO: 551388 - DNA, 74 bp, Homo sapiens
caagttgtcgacgaccgacagggtggtgaaaggatcagattttattaagacctctactggaaaagaaacagtaa

SEQ ID NO: 551389 - DNA, 122 bp, Homo sapiens
cttcccacaggctctctccgctcgattttgtcaccgttatgtgggaagcgaatccaatggccacagagagatagaggcatcccgactcttcagtatcagacccagagagaccttgaagactg

SEQ ID NO: 551390 - DNA, 90 bp, Homo sapiens
tcaacggcagaagcttcaccacaaaagcgaaatgggcacaccacagggctgctggctcgtgtcacgttcaccaccagaccccacatcagg

SEQ ID NO: 551391 - DNA, 83 bp, Homo sapiens
gagcaagaatggaagatcaagctgcaagtgcttgagcggagaacagccttgggagtcatctttgccagcagtctcttccttct

SEQ ID NO: 551392 - DNA, 98 bp, Homo sapiens
tcctcagctacgaggaggcgctgaggagagatctgactgcagccatgagcagcaatgagtgcttcaagtgtggacgatctggccactgggcccgggaa

SEQ ID NO: 551393 - DNA, 138 bp, Homo sapiens
cttagagccaggcaccatggacagcgtgcggtctgggccttttgggcagcttttccggcctgacaacttcatctttgctgtcaccactgactaaagaagagaaaactgcggcagagcaattcaaatttcacatgccag

SEQ ID NO: 551394 - DNA, 98 bp, Homo sapiens
atggtcaccctgcacggctacattgagatggatgtttccaaggattgtcttcagtcatggccttgggattaaagtgcttccgcatggtccaccctacc

SEQ ID NO: 551395 - DNA, 75 bp, Homo sapiens
ccgccgctgccccggctgcctcctccctgagattactctcgtggctttggtggccggtacggggtggagaaggat

SEQ ID NO: 551396 - DNA, 75 bp, Homo sapiens
gtcagcaccaggagcagcgaggcactcatcctgcacgccggcgagtgccagcggagctctttgttcaatgcctag

SEQ ID NO: 551397 - DNA, 100 bp, Homo sapiens
gttcagcagccctgcaggagtggacggcaatgatttttttcccaggaagccatcccgtcagaggggttcaagtgatgaaagttggcaaactgcagctaca

SEQ ID NO: 551398 - DNA, 100 bp, Homo sapiens
ctccctgcggggaagaacgtgctactgctggggagaactaatgccgacgtgatgaccgccctgtcccagggctacaggatgccccgtgtggagaactgcc

SEQ ID NO: 551399 - DNA, 100 bp, Homo sapiens
ttgcgatgcatgcaagtcggaggaaacgctagtgcacagcccctgtcaaagggaacaggaagcagtccacggagggtgacgccctagacccacctgcatc

SEQ ID NO: 551400 - DNA, 83 bp, Homo sapiens
attttgtgatcgcagcgatgaaaggaatagctattcagtcagacagaaccacttatcacgttttgcagtatctcctgaggaag

SEQ ID NO: 551401 - DNA, 100 bp, Homo sapiens
aaaccaccttttacccttggttggagtgcacatatggcaatagatgtctctgagttgacgggatttcctgaaatgttggggggacgtgtgaaaactttgc

SEQ ID NO: 551402 - DNA, 90 bp, Homo sapiens
aggcagaagacctatctgcatttgagccctcaaaagatccgagaggccttcaaggtgtttgaccgtgacggcaatggcttcatctccaag

SEQ ID NO: 551403 - DNA, 73 bp, Homo sapiens
gctgccagtctcctatgtcccctattatctcccctgcccagagatcttgcaaaatcctgacagatgactttgc

SEQ ID NO: 551404 - DNA, 98 bp, Homo sapiens
cggtaacaccgttcacagagctagccggacgtcctccgactcaagatgagctcacagtgcctgcactttaccccagtagccctgaagtgtgggccccg

SEQ ID NO: 551405 - DNA, 99 bp, Homo sapiens
agtcgcgcggccgggagcacgggcgccggcatagtacaatgaggcagccagcggatcttgggcccgccatgttcatagaggataaagcagtagacaccc

SEQ ID NO: 551406 - DNA, 90 bp, Homo sapiens
tgaggcagagatccactgtttacagaagaggcttcaagctgttagtgagtccacggttccgccaagtcgggaacatgccctgtgtgccgc

SEQ ID NO: 551407 - DNA, 75 bp, Homo sapiens
cgaatctctcaggctgcatcaggatgaatgatgacccaagtatggaagtttgcaacacaactacagacaggaaac

SEQ ID NO: 551408 - DNA, 74 bp, Homo sapiens
tgagcacatcagtgatgaatgcaagaggcgtttctataagaattgccagtggtggcggcgccagtgggtggagg

SEQ ID NO: 551409 - DNA, 90 bp, Homo sapiens
cacgacctccgcctgcggcctcctcgcaaaacaaggaggaatttggctacaatgcagagacacagaaactactatgcaagaatggggaaa

SEQ ID NO: 551410 - DNA, 98 bp, Homo sapiens
attttgctgatatggaaaggcatcgcatcttgtttagatatgctggtcctgaagatgatgctgccattaccttggcagacctgttatcctaaactagg

SEQ ID NO: 551411 - DNA, 100 bp, Homo sapiens
tacaaaaccatgaaaatgagtctgtatataaggcttcattaagcttaactgagaagtatttctctgtagagacagagaaagagctggacccagatgggct

SEQ ID NO: 551412 - DNA, 107 bp, Homo sapiens
atacatcttccctgactctcctgggggcacctcctatgagagatacgattgctacaaggtcccagcatttgagggtgatgatggattctgtgtgtttgagagcaacg

SEQ ID NO: 551413 - DNA, 100 bp, Homo sapiens
cctcagcctcccgagtggctgggactacagacatggaggcaagtcccactgctctcttcagcgaggccaggtcccccggccgcgagaagcacggtgcttc

SEQ ID NO: 551414 - DNA, 82 bp, Homo sapiens
atcgggctgaagcgactgagtccgcgatggagcactgcaagaagctgaagctcgttttcgtgaaattaagcttcagagggaa

SEQ ID NO: 551415 - DNA, 100 bp, Homo sapiens
atggctctgtgcaacggagactccaagagttacactgttagaccttatgatagccaagataacgagtgatgagccactcaccaaggatgacatccctgtg

SEQ ID NO: 551416 - DNA, 95 bp, Homo sapiens
attaaagttactgctgttaaaaagacctgcctagagctggaacgttacctccagagcgagccctgctatgtttcagcctcagaaatcaaatttga

SEQ ID NO: 551417 - DNA, 74 bp, Homo sapiens
gagcgaggcagctgtactaggactgggaacggggcagctggtggaatttttgaagaaaatggaatctcgaggcc

SEQ ID NO: 551418 - DNA, 100 bp, Homo sapiens
gagtgtatccagtattttacatctttggctcttagtgaaagcagtcagagtctagctgctcagaaggccataggaaaaggatacagagtagagtttcatg

SEQ ID NO: 551419 - DNA, 51 bp, Homo sapiens
gtgaagtgctccgccgcccttgcctccagatccggagttaggtgttggcac

SEQ ID NO: 551420 - DNA, 118 bp, Homo sapiens
ccaggcctcttatatgccgctttggataccagatggatgaaagcaaccaatgtgtgggatctgccagagcatcttttggagatcgaaaggtagaactttccagttcatcccagcacgg

SEQ ID NO: 551421 - DNA, 50 bp, Homo sapiens
cacaggtctgggagggatccctgtagcagatgagcccattattgaagagc

SEQ ID NO: 551422 - DNA, 51 bp, Homo sapiens
ccgggccaagtaccagaaactgctggagcgcctgccaacggtaccgctgtc

SEQ ID NO: 551423 - DNA, 50 bp, Homo sapiens
gccgatggcatcgtctcaaagtatggagagtcggcttgactacactgtgt

SEQ ID NO: 551424 - DNA, 75 bp, Homo sapiens
tcatctacaatttttagtggagttgccatctatgttaatggatacacagacaggatttcaccatgttgcccaggc

SEQ ID NO: 551425 - DNA, 100 bp, Homo sapiens
ccagacctggcacccagagcacttcttctgctctcactgcggagaggtgtttggtgcagaagaaagacccaaatgggaccagtagtttgccaactggaag

SEQ ID NO: 551426 - DNA, 50 bp, Homo sapiens
accaagtgtgagtctgataatagcaactgagtcagtgctgattctctcaa

SEQ ID NO: 551427 - DNA, 51 bp, Homo sapiens
gtttccggaacaacagaaagagtgctgtccccggcataggtccatctctgc

SEQ ID NO: 551428 - DNA, 88 bp, Homo sapiens
ctgaacaaagaaatcaagaaaactgcgaataaaattcgagccaagttaaaggtctgcgctcctcagaccaccggcaggtgaacagcct

SEQ ID NO: 551429 - DNA, 80 bp, Homo sapiens
cccaggcgactgcctcatcttcaagagctagagccggtgcaggccacgcagaacaagacagggaagtatgtgccgccgag

SEQ ID NO: 551430 - DNA, 83 bp, Homo sapiens
cgcaacaagatcccctatgagagtcccatcttcagcagagcttccccgggcgctgcctggacaggcctgcctgcgtgctggga

SEQ ID NO: 551431 - DNA, 83 bp, Homo sapiens
tagaaaccaatgaattccaacaacttcaaagtaaaatcagtttaatttcagaaaagggagtgcatccgccccaacccttttcc

SEQ ID NO: 551432 - DNA, 90 bp, Homo sapiens
ttcaagtgcatgatgtgcgatgtgcggaagggcacctccacccgtgccggtggtggtgtgcacattgagccccggtatagacagttcccc

SEQ ID NO: 551433 - DNA, 83 bp, Homo sapiens
aagcttcggcacaagggcccaactggaattccacttacgggtgctggagaatctggtaaaagcaccattgtgaagcagatgag

SEQ ID NO: 551434 - DNA, 99 bp, Homo sapiens
gtcgggaaatggccgctgtgtggttgcaacggagataaattcccggaaccgcgattcggcgtgtcagtaagactttgaccccgacgcaggcttcagtga

SEQ ID NO: 551435 - DNA, 74 bp, Homo sapiens
cgctactgcgagaacaagtttaacgacaagcacatcaccactctgcaggttatgtgaaattacctccagagaaa

SEQ ID NO: 551436 - DNA, 50 bp, Homo sapiens
ctgtcgaggctgcaacaaaaagctcgggttcatgacgctctcgatattcc

SEQ ID NO: 551437 - DNA, 51 bp, Homo sapiens
tttcacctggcccaatactacagccaaagccttggctggacagtcagtacg

SEQ ID NO: 551438 - DNA, 98 bp, Homo sapiens
gacactggagagatcattgatacaggatctgattatgaagatcaggaagatgagaatgtgcctactgctcctgatcctccaagtcaacatttacgtgg

SEQ ID NO: 551439 - DNA, 80 bp, Homo sapiens
gaagaacttgacctcaataaagggatcagtttcattcacggatgtgactgtggactttacccaggaggaatgggaacaac

SEQ ID NO: 551440 - DNA, 97 bp, Homo sapiens
ctcgctgtggttggactgagtctctgtattgcgggtgtcaagctagggatgcggtccattcccattgccactgcttgcaccatttaccataagttct

SEQ ID NO: 551441 - DNA, 50 bp, Homo sapiens
gcctttgattggaagcgagacagattctgaagactactttgaggtcaaca

SEQ ID NO: 551442 - DNA, 90 bp, Homo sapiens
acactgctgtttaccttggcgaggcctttcaccaagtccatggtccggaccctatttgtcagtggccttcctctggatatcaaacctcgg

SEQ ID NO: 551443 - DNA, 90 bp, Homo sapiens
cggcggcagcgacagcagcagcagcagccagtattcgggaaaggcagacagagagctattgcttaccttttcccaagtggtttgtttgag

SEQ ID NO: 551444 - DNA, 74 bp, Homo sapiens
tacaaagaatatgataaaatcttacttcaggaacaaagctacgtttttccaggctagagatgggaatgactata

SEQ ID NO: 551445 - DNA, 97 bp, Homo sapiens
acttggaaggactaaagatgatatcatcatttgtgaaattggagatgttttcaaggccaaaaacctaattgagcaggaggctggagctgagacgtgg

SEQ ID NO: 551446 - DNA, 90 bp, Homo sapiens
gtggatgaaaattgggaaggttccctcaagtccaaggtttctggcatttgaagtcaaagagtattcagcgttggatgaattacaaaagga

SEQ ID NO: 551447 - DNA, 90 bp, Homo sapiens
gagctctccaggccaggtgccgcgcggcctccacctctgcgagatttaccgcattgtttctcagaagcaaatgtcagacagacgcgaaaa

SEQ ID NO: 551448 - DNA, 97 bp, Homo sapiens
gtaatctcattccatcttcattcatgactccagacaggccaagaataaggagacgggtgctttggctgcggccaaagtcattgaaaccaagagtgag

SEQ ID NO: 551449 - DNA, 100 bp, Homo sapiens
tacttcttgggactttcttggccatcccctgaagaatcataattcacttattccaaggaaagatacagacagatttgaccagttttgggccatcaatcgg

SEQ ID NO: 551450 - DNA, 82 bp, Homo sapiens
gtggccttagctgtgctcgcgctactctctctttctggcctggaggctatccagcgatcaacggccaccccgggaagtccac

SEQ ID NO: 551451 - DNA, 50 bp, Homo sapiens
cgacgggccgagcctgccactatataattggtgattacaactttcctcta

SEQ ID NO: 551452 - DNA, 75 bp, Homo sapiens
catgtttggattgaagccgcctctgtattacttaccagataacggcaaaagcttctatcatttttgttactcttc

SEQ ID NO: 551453 - DNA, 100 bp, Homo sapiens
gaagagaaagacaaggatgaccaggaatgggaaagccccaggatggatggtcacaataccactttgtagcctcgtcttcaaccatcgagagggaccggca

SEQ ID NO: 551454 - DNA, 101 bp, Homo sapiens
cgccgaagaagcatcgttaaagtctctcttcaccctgccgtcatgtctaagtcagagagctgcctggattgacaagtgccgccccaacctgctcatcacag

SEQ ID NO: 551455 - DNA, 129 bp, Homo sapiens
cacgttattgaagacatcaagggaaaatggggtgaggaagattttgaagacaatcgtcacttatacagaacccattaaaagagccagtaaatcctgtggaaaatggccttcagtgatcttacatcgagg

SEQ ID NO: 551456 - DNA, 96 bp, Homo sapiens
gctggacgcgggaggaggcggcggcggcggcaaggggagagccagttgcgcagagccctgcaaccagcagtccagggagaagtggtgaatgtcatg

SEQ ID NO: 551457 - DNA, 75 bp, Homo sapiens
atgatcttttcaatgctgcgaaagctgccaaaagtgacatgcagtctttccagtgtcagcctgcctttagctaag

SEQ ID NO: 551458 - DNA, 100 bp, Homo sapiens
aggatgcgggtccggatagggctgacgctgctgctgtgtgcggtgctgctgagcttggcctcggcgtcctcgggtttctgcctcaatgctcaagcagttt

SEQ ID NO: 551459 - DNA, 74 bp, Homo sapiens
tatggtgaaacaccactgaagcattgccaagagaccatcatgcagacatcagagactgggtcggacacaggctc

SEQ ID NO: 551460 - DNA, 100 bp, Homo sapiens
gtggtgaccatcgaaaggagcaagagcaagatcaccgtgacatccgaggtgcctttctccaaaagaatgtccctcttccagtggaaagcccaaccatgca

SEQ ID NO: 551461 - DNA, 76 bp, Homo sapiens
gaaaagattgcccacgaattgggtcgatctgtgacagatgaatgttttaaaggaagttgggctactcacaagttac

SEQ ID NO: 551462 - DNA, 74 bp, Homo sapiens
aattggagaacttcttgagtcgaaagaggcgacgaaatgcaggatccatgttctcacaagctatgaagaaatgg

SEQ ID NO: 551463 - DNA, 75 bp, Homo sapiens
tgtgacgggatcgctttctcccatcgaaccttctagttgcttattgcaggtacttggaaaaatggacaaggattg

SEQ ID NO: 551464 - DNA, 136 bp, Homo sapiens
ttaggggccagcagatgcaggaaaatttcgatattgaagtgtcaaaatccatagatggaaaagatggtttggtgcacctcgatttggaggaagtagggcagggcccttatctggaaagaagtttggaaaccctggg

SEQ ID NO: 551465 - DNA, 99 bp, Homo sapiens
tctccttcttggatccacggcagccatcatacaacgtcaagtctgtctgttccagggagcgaggcagtgggcggcgactggcggcgcgatggacctgac

SEQ ID NO: 551466 - DNA, 139 bp, Homo sapiens
ggggaacaccaccactctcattagtgagaatggtcatgctgccgacaccctgacggccacgaacttccgagtgggtttttagaacttcagccataaaaatgggcagaattttccttgatcatatcggtggtacccgtct

SEQ ID NO: 551467 - DNA, 101 bp, Homo sapiens
ctctgatgtcatttatcctgccaggatcagcctccgggaggcagcaggtatattgtgatgggccacatctaccataagagacggcagctccctacagctct

SEQ ID NO: 551468 - DNA, 120 bp, Homo sapiens
cgaggggctcagttgggtggactacggggagcgcgccgagctggatgactcggacggagtttgctataaaatgggagttctggttgtactcactgttctgtggctgttctcctcagtaaa

SEQ ID NO: 551469 - DNA, 100 bp, Homo sapiens
tggggatggatgccctggttgctgaagaggaggcggaagccaagggggagctgagctttgaacaggaccagctggtggctgggggccagctgggcgagct

SEQ ID NO: 551470 - DNA, 83 bp, Homo sapiens
tgctgatgtgaaaaataccacgacaaaaccaccctagttctgaagcaaaaacacctggatgattgcctgcgacatgtatctgt

SEQ ID NO: 551471 - DNA, 100 bp, Homo sapiens
cacggcccggcgcgtggctcgggctcgggcggagctggagacgtgtggagctgttcgaggactcgcgggtgtgcagttccatgccattgcagtgtcaact

SEQ ID NO: 551472 - DNA, 75 bp, Homo sapiens
caaccatgagtggttccatgatgggaagtgacatggtctatgctccatcagcaagcactgccgactacaataggg

SEQ ID NO: 551473 - DNA, 100 bp, Homo sapiens
gccctgctgtagtcacaggagctgtagagaggaccccggtacatctgaaagccgggaaatgtctatcaggtgtttgaaagtgtggctaagaagtatgatg

SEQ ID NO: 551474 - DNA, 100 bp, Homo sapiens
cacggtgtgcaaggggagtcgtggcgtcgtctgcgaccgctgccttctcggcttttaatctagacaacgagcaaccagattatgatatggattcagaaga

SEQ ID NO: 551475 - DNA, 95 bp, Homo sapiens
cgacgcggacatggtcatgagctttgtgaacctggggggatatgagactttctactcggaatatcctgagtgttgcgtggatgtaaaacccattt

SEQ ID NO: 551476 - DNA, 100 bp, Homo sapiens
aatgtgactgactagcagcttcattttgaagacggtgcagcctggtgagaccatccaatcccaaataaaatgcaccccaataaaaactggacccaagaaa

SEQ ID NO: 551477 - DNA, 90 bp, Homo sapiens
gtgctcactgtcaccgagccgctgcggccaggtgtccaacacgctctcttgggctctgtatgagctctcccggcaccccgaagtccagac

SEQ ID NO: 551478 - DNA, 115 bp, Homo sapiens
gacaacctgtgccccaaggtgcaacagtgggacagccaggtcaccatgggccacctcttccagaagctgggccagatattcgaagcttacaacatggcagctttgtggaaattac

SEQ ID NO: 551479 - DNA, 75 bp, Homo sapiens
cgacagtgccctgagggccttcgagagctaccgcgccagacaggtgcgcgcggagccatggttatcatgtcggag

SEQ ID NO: 551480 - DNA, 100 bp, Homo sapiens
cggaggaagcggcgcgagcgccccgccatcgtcccgtgccggtggtggtgtgcacattgagccccggtatagacagttcccccagctgaccagatcccag

SEQ ID NO: 551481 - DNA, 97 bp, Homo sapiens
agacagcattggtactaatggccaactcaagtttgtgaagaaatatgggaacctttttagcttggagcttggtgacatatctgcagttcttattact

SEQ ID NO: 551482 - DNA, 83 bp, Homo sapiens
ctctgctgcggcgcggggaccgctgtgctctcgtgagcagcggttccatcgcagtgaacgccgactcttcggtgcagttgttg

SEQ ID NO: 551483 - DNA, 90 bp, Homo sapiens
gtgatattgaccatgatggaatgcttgacagagatgagtttgcagttctctggtagctgaagaacatctcacagtggacgccagggtcta

SEQ ID NO: 551484 - DNA, 75 bp, Homo sapiens
atggccggaggctcgccgacgaccttgatgccatggacaatattaccaggcagaaccaattctacgatacccaag

SEQ ID NO: 551485 - DNA, 75 bp, Homo sapiens
ctcggctctggggccgccgccgcgggccggagccgagcagccgtcggcagggtttggacatatttgactcttttc

SEQ ID NO: 551486 - DNA, 85 bp, Homo sapiens
cctggagcctcagttggaagcagccgatccagcctgcggagcctgtggggcagaagctccaccatgaggcgaggtggatggagga

SEQ ID NO: 551487 - DNA, 98 bp, Homo sapiens
catccgagagcccggactggagatggactcaccctgtcacccaggttggactgcactggcctcaacctcctgagttcaagtgatcgtcccacctcagc

SEQ ID NO: 551488 - DNA, 75 bp, Homo sapiens
agacgctgtttcagagcgtttgggtcctctgaggccccttgaccagatgaagtaaccaagactgaggacagagag

SEQ ID NO: 551489 - DNA, 96 bp, Homo sapiens
tccggatataaaacttcaaaaattaccattttatgatttactggatgaactgataaaacccaccagtctaggtgaaggtctcccacaggtgtatta

SEQ ID NO: 551490 - DNA, 100 bp, Homo sapiens
tctgctctccacagggctccccgccccacccggcctgataaagcgcgccgactgggctacaaggccaagcaaggtgcctgtcaaaggtcgaggcctttcc

SEQ ID NO: 551491 - DNA, 115 bp, Homo sapiens
caatatctgtcttcggtggactccttcggcagtccacccaccgccgccgcctcccagcttcctgggtctgcaggtccagccggctggcaccctccatgtacccaggggagattcc

SEQ ID NO: 551492 - DNA, 75 bp, Homo sapiens
atgctagaattacctggaacttcatcatcatctacttcacaggaattgccattttctcagaccagtatccttcag

SEQ ID NO: 551493 - DNA, 100 bp, Homo sapiens
caggattcatgctctacatccccatagaggaggatttgacagctaaggatattgaagaaattattgatgagctcaaggctggcaaaatcccaaaaccagg

SEQ ID NO: 551494 - DNA, 98 bp, Homo sapiens
gaatttgtgcaatgtttagccaacccaaattaccttaattgtgctttggctctagcagacaggaagaaattctggcccagctggaagtagaaagaggg

SEQ ID NO: 551495 - DNA, 90 bp, Homo sapiens
gcggcgcggtcggtcggcgcctgttctcgggctgtttggcggctgctcaagatgaggaggtgcgcggggccggggcggagcagtcgcgtt

SEQ ID NO: 551496 - DNA, 74 bp, Homo sapiens
caagaatgagaagcgctttaagtgtgaccagtgtgattacgcttgtagacaggaagacctggaagcgctcatag

SEQ ID NO: 551497 - DNA, 100 bp, Homo sapiens
ctgctgtcgcccagcgccgccccgtcgtcgtctgccttcgcttcacggcgccgagccgcggtccgagttgcttataaaaagggagtcaaacatctttctg

SEQ ID NO: 551498 - DNA, 96 bp, Homo sapiens
gcagttcagaagagccaaggaataaacatgcaatgaacccaaaaggacaaatgaatggcctttggaaagcttttgtgaagaactttgcaatgacct

SEQ ID NO: 551499 - DNA, 97 bp, Homo sapiens
tggagcagagccgctgggcgccggagccgaggcgagcgccgcgcgcaccactggaaaatgtttataggaggccttagctgggacactacaaagaaag

SEQ ID NO: 551500 - DNA, 100 bp, Homo sapiens
ggaagagggcggcgacggtggtggtgactgagcggagcccggtgacaggatggtttgctctggaattagtcacagaaaagggccatacatttgccgaaga

SEQ ID NO: 551501 - DNA, 83 bp, Homo sapiens
cgggaacaccttcatggcccctttatagctgacaatgcagatcttcgtgaagactctgactggtaagaccatcaccctcgagg

SEQ ID NO: 551502 - DNA, 90 bp, Homo sapiens
gaacgaggacgcggactgcgaaggcagatgggctatctgaagaggaacggggacgggagcctgctctacagcgtggtcaacacggccgag

SEQ ID NO: 551503 - DNA, 75 bp, Homo sapiens
gtctgcgagccaggattcccggcctccctccctgacatggagagtaacctgtctggcctggtgcctgctgccggg

SEQ ID NO: 551504 - DNA, 50 bp, Homo sapiens
aagataagggacctgttagatggaatgttccagcgactggacaagctgag

SEQ ID NO: 551505 - DNA, 75 bp, Homo sapiens
gtccaggtacagattctgaaaaggaaattatggaagtggaaattacaatgattttggaaattataaccagcaacc

SEQ ID NO: 551506 - DNA, 60 bp, Homo sapiens
gattcttccaaggaaccagtgcgaagaaagagacaagcagtgccctgacccatgctggag

SEQ ID NO: 551507 - DNA, 97 bp, Homo sapiens
agctctgctcaaagccagacggttttgctgttactgctcagtgtagtcacaccttgaataagaaatggaaaaccttgggatgttgataaagctaata

SEQ ID NO: 551508 - DNA, 75 bp, Homo sapiens
cctgcgaccgccctgcgcttcgtgcaccggggcggtccgttgccaaagccagagcctgtgtggtgcccctatctc

SEQ ID NO: 551509 - DNA, 96 bp, Homo sapiens
atgatagaatgaagaccacaataaaagagacctctacttagctcagcaattcttaccttgatggggagggacgcgcggcactgccctcgagaactg

SEQ ID NO: 551510 - DNA, 100 bp, Homo sapiens
atattatgtagaatacttgggtgacatctgcctgagagatctccaagaattacagcgtgctcactgtgccatctgcacagaccgaatatggggacttgga

SEQ ID NO: 551511 - DNA, 100 bp, Homo sapiens
ccccccgccctgttcgagctgtgcgggcgggcggtgagcgcccatatgggggttctggagagcggggtgtggggcatttgaccaagccgtgaccaaggac

SEQ ID NO: 551512 - DNA, 100 bp, Homo sapiens
ccagcaggccacaaaggaggggatacttgatcctgataaacgcctatcataatgcaaattatcagtagttaatcaataagaaggtgttatttgagcaaag

SEQ ID NO: 551513 - DNA, 100 bp, Homo sapiens
tttttttaggagagttagagaagtgccttgaagatccagaaaaactaggatccctttttgttaaacacagacgtctcagagaggctgtgcagctgctgga

SEQ ID NO: 551514 - DNA, 75 bp, Homo sapiens
gcgtgtctaggtgagtcgcggtgggtcctcgcttgcagttcagcgaccacgcctcccgcgacgatgcccctcaac

SEQ ID NO: 551515 - DNA, 90 bp, Homo sapiens
aacaattcctactgcatcgtgggcatagcgtacaatgccaaaataggaggcatttatgtttgaatcatctttaagtctggcggtcacaaa

SEQ ID NO: 551516 - DNA, 100 bp, Homo sapiens
gatcaaggggaaaactcctgaggagattcgcaagaccttcaatatcaaaaatgactttactgaagaggaggaagcccagctccactcgcgccggacacag

SEQ ID NO: 551517 - DNA, 75 bp, Homo sapiens
ctcggggctccagtggagagttcttacgacgaagttatacggaagcgtctcctcattgatggagatggtgctgga

SEQ ID NO: 551518 - DNA, 75 bp, Homo sapiens
gaagccttgcggcagtacagcccaggcttccgaggcaatccggcagtgtcagtctacagccgctaagctgagaag

SEQ ID NO: 551519 - DNA, 74 bp, Homo sapiens
aaaaatagtgatagctttgataatcagatgctgattttgactccatttcaaggtcaaggccatggtgctcaact

SEQ ID NO: 551520 - DNA, 90 bp, Homo sapiens
ggaaaacatgggtcgatttggatctgggatgaacatgggcaggataaatgagccctatgagtttgtctctctggaatggctgcaaaagtg

SEQ ID NO: 551521 - DNA, 98 bp, Homo sapiens
gtgcgtctgaagcctacaagaaagaccacagcaccgggaagtccagtcagcggcagatggtgttcggggtggtcaccgccattgacttgctgaacttc

SEQ ID NO: 551522 - DNA, 75 bp, Homo sapiens
gtgatgagatattctgctgagtggaagggttggttctggacattacacagcatacgcaactcacgaaggccgctg

SEQ ID NO: 551523 - DNA, 83 bp, Homo sapiens
cggcagccgaggccgcgaactgcatcatggaggctagcttgtcactttctgcaaaggtttccctcagggagcctcctgctgcc

SEQ ID NO: 551524 - DNA, 100 bp, Homo sapiens
gggaactgtgtctgtctcctggtcctaagctcagcacttcctgtcttctctcgaaccctggtgctccaggaaagtacctgattgacaagatctacatcca

SEQ ID NO: 551525 - DNA, 92 bp, Homo sapiens
aaaaagccgtacaaaaaataagcaaaagcgtcccaggaggagacatgggggacaaaggacagaaaggcagtgtgggtcgtcatggaaaaatt

SEQ ID NO: 551526 - DNA, 100 bp, Homo sapiens
cgcgaacgcacaggatgaccaccaccctcgtgtctgccaccatcttcgacttgagcgaagttttatgcaaggtcatggaaaatggaagatttgcaaaata

SEQ ID NO: 551527 - DNA, 100 bp, Homo sapiens
gataaatctgaatggaagagtgagaataactgaagtgaagtgatggactccgatttggagagtagtaagacgtgaaaggaatacacttgtgtttaagcac

SEQ ID NO: 551528 - DNA, 75 bp, Homo sapiens
ccgagccgggatctcaggtcctcgggggcggcggccacgccaaggacgggttacactcctggcacaccttacaaa

SEQ ID NO: 551529 - DNA, 83 bp, Homo sapiens
ctatgttctgctggagcattctgtgaagaaggcagtacattttgggttaccgatgtcccagctagtggaatgtatttcatgac

SEQ ID NO: 551530 - DNA, 49 bp, Homo sapiens
ttttactactgtgacaacattaacggtactgtgagaatagagatgtttc

SEQ ID NO: 551531 - DNA, 90 bp, Homo sapiens
agcctttcacttattcatctgtccagcatgactcatccccgggagtgttgactccaaagacaacaggccctccctctgccctcccgtctg

SEQ ID NO: 551532 - DNA, 102 bp, Homo sapiens
aattgctgatagacatgggggcctcaaacgtggagatcaactcctctctgttaatggagtgtatgagtttaaagccaagaacatcaagaagaagaaagtgag

SEQ ID NO: 551533 - DNA, 98 bp, Homo sapiens
gcgggacatccagcgccaggacctcagtgccattgcccgaaccctgcaggaatgggtgtgattgctgccatgagagatggttttggtttcatcaagtg

SEQ ID NO: 551534 - DNA, 95 bp, Homo sapiens
tgctgagctggttggccctgtgatccctcaagactggtccacggagtgtatgaccacaaacagccatcaagctggcaaactgatacaactcagaa

SEQ ID NO: 551535 - DNA, 75 bp, Homo sapiens
cgcttcctgctctgtctctacttggtgggcttcttgtgttctaagaacggaagcatctgggctggatggaattta

SEQ ID NO: 551536 - DNA, 98 bp, Homo sapiens
gcgtggggggccgccaccggccgccgccgccgccgcccaggcgcagcatcaagatggtgctcatgtggaccagtggtgacgccttcaagacggcctac

SEQ ID NO: 551537 - DNA, 75 bp, Homo sapiens
cgtcgccgccgccgccgccgccgcagcttgggaggtgctgccaccacaggttatgattcatccagatccagagag

SEQ ID NO: 551538 - DNA, 101 bp, Homo sapiens
tgccaaaccaaactggagctggtgcagcaggaattgggatcgtgtcgctgcgattcttcgctgctgctgccttaccgccgagaaccaccacccgccaggcg

SEQ ID NO: 551539 - DNA, 82 bp, Homo sapiens
tgattccctgcggtgtgcaagtccgactggaacaggagaatggggtactaagagaaaagcacgaagctgtggatcatagttc

SEQ ID NO: 551540 - DNA, 75 bp, Homo sapiens
agactggaaaacaggttttacaggaaagagcatctacggtgagcgcttccccgatgagaacttcaaactgaagca

SEQ ID NO: 551541 - DNA, 49 bp, Homo sapiens
aacagacaagcaggttgtcttgctctcctgccacagctcctcaccccct

SEQ ID NO: 551542 - DNA, 100 bp, Homo sapiens
cgaccggcaactactttggattcacccacagcggggcggcggcggcggcggctgcggcccaatataggttcctatatgatagtggactcttcagatcacg

SEQ ID NO: 551543 - DNA, 85 bp, Homo sapiens
tgctgaagcagagcaatggaagcattgttgtcgtctcctctctggctgacctccgggagagcctggaggagatccttcccaagct

SEQ ID NO: 551544 - DNA, 101 bp, Homo sapiens
cgcggcgggacgggacgtgcggcccagcgagttggtcggtcccggggtcacccgctacgggaagcaggcctcgccacagtttaatgacagaatggcgtttt

SEQ ID NO: 551545 - DNA, 90 bp, Homo sapiens
aacagcttcgctcgatacgactttgaagacgatgaagaaacaccacccagctatgcagaagtggtaacagaggaacaaaggcggaacaat

SEQ ID NO: 551546 - DNA, 75 bp, Homo sapiens
atataaacatcgaaaaggcgttcctcacgttagctgaagatatccttcgaaaggggagtacgccgagggcgtcag

SEQ ID NO: 551547 - DNA, 75 bp, Homo sapiens
cagcatatttgagtcatttccttcgtacccacagtgcttcatgagaggccatcgaagacggcaatttggaggaaa

SEQ ID NO: 551548 - DNA, 75 bp, Homo sapiens
ctcgggcgacggccatcttcatccggaatatattattcgagtgcaaagaggaatttctgtggaaaacagctggca

SEQ ID NO: 551549 - DNA, 100 bp, Homo sapiens
catatttgctgctagagagtttaaagcccgagtggattcatttttctacatattaggatataaccctgagacaaggctattttcaaaatgatcactcccg

SEQ ID NO: 551550 - DNA, 100 bp, Homo sapiens
cctctatgtctcagatgcattccataaggcatttcttgaggccgccctccccactgttaccaacatgaagctgctcgcagcaactgtgctactcctcacc

SEQ ID NO: 551551 - DNA, 145 bp, Homo sapiens
ccgggacccaggaccatgtctctgtctcgctcagaggagatgcaccggctcacggaaaatgtctataaggtatgagggtgctggttgatgctcgagagaagcttcatattccctggggagacaactcaaaccaacaacatggaga

SEQ ID NO: 551552 - DNA, 74 bp, Homo sapiens
gtgaagcaagtgcagatagatggccttcctaactatgggacagctttacgagaaggaaaaagatgaagatggat

SEQ ID NO: 551553 - DNA, 75 bp, Homo sapiens
cagacgaagacagtccctggatcaccgacagcacagacagaatccctgctaccaccctgtatgatgagattcgtc

SEQ ID NO: 551554 - DNA, 100 bp, Homo sapiens
gagtctgtgtaaagaaatctactcaagaacggtttgcgctgaaaattcttcttgatcgtccaaaagctagaaatgaggcaatgccaccgtagataagttg

SEQ ID NO: 551555 - DNA, 100 bp, Homo sapiens
cccagctattgctgcagcatttgccaaggagacatccctcttagaaaaatggagtgctggcatacattgggaattttcgcctgcttgcagagctttccag

SEQ ID NO: 551556 - DNA, 82 bp, Homo sapiens
tgctctgaggaccgatgactcggaaagcgctcagaagaacgcttcgcccgttggtgctatgattttttatcaagcagaaatg

SEQ ID NO: 551557 - DNA, 75 bp, Homo sapiens
gccccggaggcagagcggctgccatgttgtaggacagtcccatctggacagcaacattgagaatcaagagattgt

SEQ ID NO: 551558 - DNA, 100 bp, Homo sapiens
ggtcagtgtggcaaccagatcggtgccaaggccataggaaaaggatacagagtagagtttcatgaacctgaaacttggtggaaatttgatcctgaagaat

SEQ ID NO: 551559 - DNA, 100 bp, Homo sapiens
tctgctgattcacaattatggagactgttacctggagtagaacagaaaaattattatgtctgtgttcccttgggactcattggaaattgtacagtgacat

SEQ ID NO: 551560 - DNA, 100 bp, Homo sapiens
ggccaaccatcccgtctccagcccgggcttacgccccgccgacaggcgaagctggtccgttacatttgtaagcagaggcagtgcaagctgagcgtggctc

SEQ ID NO: 551561 - DNA, 90 bp, Homo sapiens
acccaaattgtagctgacgaagcattttgcaacgcagttcggagttattatgaggcatggaagaggagatggttcgtgttacgcagtggc

SEQ ID NO: 551562 - DNA, 75 bp, Homo sapiens
caaacggagtcttcaagaacatatgagtattcacacagatgcacgaaggagagagagtgagaagtctctagaaaa

SEQ ID NO: 551563 - DNA, 50 bp, Homo sapiens
gccgtccataggggtgaatggggcacagtgatgcggtccatgacctcctt

SEQ ID NO: 551564 - DNA, 82 bp, Homo sapiens
gcgaggtccgcgcagcccagcgcagccatgagggtgtgaagacagagaatgaccacatcaacctgaaggtggccgggcagga

SEQ ID NO: 551565 - DNA, 50 bp, Homo sapiens
aggactcaccaatctggttcggctatttggagtccaggaatgagactaag

SEQ ID NO: 551566 - DNA, 83 bp, Homo sapiens
agccacatactatccgtttgttcaggaaccaccagtgacagagatcagtgaatgcttgtgaaaagacctcatttatgtttctg

SEQ ID NO: 551567 - DNA, 82 bp, Homo sapiens
tgcagcgggagctggacggcgagcgcgagcggcgcgagaaagtccagctgggagctccccgacctccaggagggcaagatcc

SEQ ID NO: 551568 - DNA, 98 bp, Homo sapiens
ctcagacggcaggcacaggaggacgggtcaccccatcaccggaatgtctacagtggcatgaacggtgaaaggtgtagcagtcactcggcctacaccca

SEQ ID NO: 551569 - DNA, 75 bp, Homo sapiens
agcacaccaagacatacatacacagcttcaagatgtcaaggtcatgaatgtccataaaatgctaggcattcctat

SEQ ID NO: 551570 - DNA, 51 bp, Homo sapiens
tctcatgccacggccaaattcagtagcagggacagtatggaaattaccagc

SEQ ID NO: 551571 - DNA, 140 bp, Homo sapiens
ctggacctgcgatggggacaatgactgcggagactacagtgatgagacacacgccaactgcaccaaccaggggatgtgtttggccaaatgggagagtggttacaacacacgagctacaaactacaatgctggagacagaa

SEQ ID NO: 551572 - DNA, 100 bp, Homo sapiens
atcacttaaaggagtggacattgctagcaatgagctcccaaagccatccagctctcggtgcaaagcgttcctgcagaattgcttccacgtaaagggacct

SEQ ID NO: 551573 - DNA, 74 bp, Homo sapiens
gactttcccgccgagggcccggaccccgaatatgacgggtactttttgacatcacacaagaagatgttttgttt

SEQ ID NO: 551574 - DNA, 98 bp, Homo sapiens
gatgtgatgttggagaactatagcaatctggttttcttggatattaataaggcagcggaaagaagaaatatgaatacggctccatcaagacccagccc

SEQ ID NO: 551575 - DNA, 100 bp, Homo sapiens
ctgagtcactgcctgcgcagctccggccgcctggctccccatactagtcgccggtccctatcactgttcagtccatcgtcattcagtctctaaataaaac

SEQ ID NO: 551576 - DNA, 50 bp, Homo sapiens
tgctcctcgatatcagtctatgagaaggtccttgctggtgcagacgaagc

SEQ ID NO: 551577 - DNA, 98 bp, Homo sapiens
tcgccgctgctgggagatgggcctactcgcccgccaccctgcgctgccgccgctctgaggagttaaagggagttctgggaaatcgttcattcatttac

SEQ ID NO: 551578 - DNA, 51 bp, Homo sapiens
ccctggcctcttgggatgcaaaggttggagtgctggagtgcagtagcatga

SEQ ID NO: 551579 - DNA, 50 bp, Homo sapiens
aacattccaaaggaaaaatttcaggcctctctatccggagcgtgtgctgg

SEQ ID NO: 551580 - DNA, 100 bp, Homo sapiens
agaaaaataaatttagaacagtgtgaagaaattgaagccctcagcatggctttttacagcagcccggaaattctgagggcggcttacagggagaacacag

SEQ ID NO: 551581 - DNA, 100 bp, Homo sapiens
ctgcaaatgaagttgatggaattacactgtgatacgactgactgaatcctttgtgcattgaagactttagattcctctctgcggtagacgtgcacttata

SEQ ID NO: 551582 - DNA, 82 bp, Homo sapiens
ctcttctccgccgcggcactgatccccacaggttactagtattggaatctactgctccatcaggagacctcacccgcccaca

SEQ ID NO: 551583 - DNA, 115 bp, Homo sapiens
cagagattttttagtctaaatgatgggcagtcatggtcccagaaacgtcactatcaagaagccgattatgtttcgaggggaagtacgtttaaatgtggaagagaaaaaaacaaga

SEQ ID NO: 551584 - DNA, 100 bp, Homo sapiens
aaagaagcgtactttcatggttttcacaaacaaatatcccaggagaagtgatcatggagaccaaggagaacaggaatagctattcagtcagacagaacca

SEQ ID NO: 551585 - DNA, 100 bp, Homo sapiens
ccgggaccctcgcgcgcgaccgccgaatcgctcctgcagcagaggtgagaagccctaccactgcaactgggacggctgcggctggaagtttgcgcgctca

SEQ ID NO: 551586 - DNA, 90 bp, Homo sapiens
aagtgcagtatgagctacatgtttgagtacccggagtatcaggtcacgagaagagaatgccttctagatgcaaaatcacctccaaaccag

SEQ ID NO: 551587 - DNA, 76 bp, Homo sapiens
aactccaatgggcctttccagcccgtggtccttctccatattcgaggttcacgcaaagaatctgctccacaagttt

SEQ ID NO: 551588 - DNA, 140 bp, Homo sapiens
ccttactgtttgtgagccaccaaaaccacagtgttctttgcctcaagacccagctattgttcaggtattcctggagtggagagccactctttttgacctgccctacatcagaagtcaccgagctcccagcctgcagccag

SEQ ID NO: 551589 - DNA, 97 bp, Homo sapiens
ccgcggcgctccgggcccgggcggctggcctcaccgcccactggaaaccaatagagccatggcgactccctctgctgccttcgaggcccttatgaat

SEQ ID NO: 551590 - DNA, 83 bp, Homo sapiens
gaaagacaaagacccagtgaacaaatccgggggcaaggccaaaaagaaggactccagtgggggtgactcatgtgcttctgagg

SEQ ID NO: 551591 - DNA, 75 bp, Homo sapiens
aaattgcggcccctctttctcaacccagagcaaattgagacgtccgggcttattgtgtaacagaacctggagcag

SEQ ID NO: 551592 - DNA, 100 bp, Homo sapiens
acccttcctgagggccgagcaacagtgtagtggcgtattccacatagcaaacaggttgaaatcacaaagattagacacctttttagataggtgttcttca

SEQ ID NO: 551593 - DNA, 74 bp, Homo sapiens
agaaaccccgatcacaaagatacgaatctcttaagggggataagcacattgaagaagtgcggaagaacaaagaa

SEQ ID NO: 551594 - DNA, 76 bp, Homo sapiens
cagctggtgaaggcagacagcgagtggcgacgatacctagaggatcaagacataatgggagcatttttagacaagc

SEQ ID NO: 551595 - DNA, 100 bp, Homo sapiens
gcctgggaaagaaatgaaagtctttccaatgcagtcctcgagccgctgtgaagcagtcctcaagcggcagttatggcagtccataaaggctcgggcacag

SEQ ID NO: 551596 - DNA, 123 bp, Homo sapiens
tccggctcctgctcctggcttccagcctcggacccggcgcggtgtcgctccgagcggccatccgaaaaccaggtgctggagaatctggtaaaagcaccattgtgaagcagatgaggatcctgc

SEQ ID NO: 551597 - DNA, 100 bp, Homo sapiens
ctgttgttgcagagttattttctgagtcagtttcagcaatggtgaactagacccctggtcaggaggtggagtaactaaggatatcacagacactctggtt

SEQ ID NO: 551598 - DNA, 100 bp, Homo sapiens
ggcggtggctgagagtgaggaagccacagacccctttgcttctgtttttgggaatgaatcatttggaggtggatttgctgacttcagcacattgtcaaag

SEQ ID NO: 551599 - DNA, 100 bp, Homo sapiens
aagatgtcagactaatgttatgggacactgcaggtcaggaggaatttgatgcaattacaaaggcctactatcgagaatgtgacagtgatgataacatggg

SEQ ID NO: 551600 - DNA, 100 bp, Homo sapiens
aaagacacttatcttgcccaagagctggtgaaggcattggagtctttcagcaatcttctaaacaaagtctgtttgattcatgtaagatgtctcatggtgg

SEQ ID NO: 551601 - DNA, 97 bp, Homo sapiens
gccttatctttctgaactgcaccctcaactggcccatcgaagcctttcctgcccctgaggaagtcaattacactgtggccatcctgctctacctgac

SEQ ID NO: 551602 - DNA, 85 bp, Homo sapiens
ccccagttctacgagctgctgatcaaagtcaaggcctggccgacaacaccgttattgctaaagtaaataatgttgtgtgggacct

SEQ ID NO: 551603 - DNA, 83 bp, Homo sapiens
gccatcatcggcatagcccgggagatgcagccagtttacaggtcagtatcattgacagtgttcaacaggaaacagatgatctt

SEQ ID NO: 551604 - DNA, 74 bp, Homo sapiens
gtggtgaaactggggaaaagtgcaatgcagactctttttgatcagaacaatgctgcaaaaaaagaagagtcaga

SEQ ID NO: 551605 - DNA, 100 bp, Homo sapiens
agatgcccagatgcaaaagtgatgaaacagtccatttgtcataaagtaagatgcagctgtggcatgtcaaccagcttggatgaaaactttcggaagagaa

SEQ ID NO: 551606 - DNA, 96 bp, Homo sapiens
gcatgcacttacggatttactggaccccagtgtgaaagagtgctcatcttcaaactctatcagcgggcaaagcatgtgtacagcgaggctgcgcga

SEQ ID NO: 551607 - DNA, 100 bp, Homo sapiens
ctttattatgttcggttcacggagtggctacatgaagttctgaaggatgttcagccccgggtcactccacttgggaagctgccaaagaatgtcgacgtcg

SEQ ID NO: 551608 - DNA, 128 bp, Homo sapiens
cactttcgagtgcaacatctgcttggacacagccaaggatgccgtcatcagcctgtgtggccacctcttctggactccagaccccatcctcccaactccacccactttagtctccatggagacccaag

SEQ ID NO: 551609 - DNA, 90 bp, Homo sapiens
atgaacaaaaaccagttgcgaaatggtctgaggcagagtgtggttcagactctgtctactagtgacgatgtcgaagacagggaaaatgaa

SEQ ID NO: 551610 - DNA, 75 bp, Homo sapiens
gtactgcgccgactgcgaggccaaagggggatatgagactttctactcggaatatcctgagtgttgcgtggatgt

SEQ ID NO: 551611 - DNA, 101 bp, Homo sapiens
gccctggaatcacttttgagattggtgctcgtttggaggcactggactacttacaaaaatgggccaaggagatctgttgaagaatgccaagaatgaagcta

SEQ ID NO: 551612 - DNA, 101 bp, Homo sapiens
gccccaacagaagctcgccaagcataatatgtatgccaaagcagcagccttctcgacagccttttactgtgaacaggccaagaagcttgagagaagaaaaa

SEQ ID NO: 551613 - DNA, 88 bp, Homo sapiens
agaatggcccttgtggataagcacaaagtcaagagacagcgattggacagaatttgtgaagcgtgagtgcatctccatccacgttggc

SEQ ID NO: 551614 - DNA, 90 bp, Homo sapiens
acgatgctggtggtgaagccttggtctcctgtggaatgatggaagccttattgaagcaatacgtttggtttaatattggcagtgtggaca

SEQ ID NO: 551615 - DNA, 100 bp, Homo sapiens
ctcgtgtctcatcctgttttgagcttcctgtaccgctggatatatgatggggagcttgaggacacttaccacgaattgcagaatgaagaagagtctggag

SEQ ID NO: 551616 - DNA, 100 bp, Homo sapiens
gagcgggcgaggtggcggcggcggcggagcgggagcgggtaccgggcgcgggcagagcgcggcggcgcgggaagaggatcacctagcccgggtagaagag

SEQ ID NO: 551617 - DNA, 118 bp, Homo sapiens
tggaagtccaagtcaaacgcagaaggactgcctcactgagcaaccaagaaaaattcttgctgctgtattgagaacagattgagaaaacaagggcagaagcagggagaccagtcaggag

SEQ ID NO: 551618 - DNA, 100 bp, Homo sapiens
atatctggtggagaagatcattcgaacgcgaatctatgagtccaagtactggaaagaggagtgctttggacttacaggctcatcggaacctgtcccagct

SEQ ID NO: 551619 - DNA, 75 bp, Homo sapiens
cttgaatttgcccaaaggaatgaagagcaccagaaatggcaaatgtgtggtgttctggacttggtgcctctttct

SEQ ID NO: 551620 - DNA, 100 bp, Homo sapiens
gggagacgagaagcctgaaaagtcgcagcgagctggagccgccggaggcacagttggcgggcagctcccaggtctccatgagtacggcgccgtcgggggc

SEQ ID NO: 551621 - DNA, 74 bp, Homo sapiens
gaagccacagctgctgcggcacatggaacagcatgtctccttcaaggagtatgctgctgctgttccgctttgcg

SEQ ID NO: 551622 - DNA, 51 bp, Homo sapiens
ccagggcaagccccgctccggccaacaaacgctaatgaactgaagacgatc

SEQ ID NO: 551623 - DNA, 83 bp, Homo sapiens
gcagaagtggctgaaagtcatccttttagctgtcacaggatgccaaagaagagtgaatggcccacaaagagcctggtagcaca

SEQ ID NO: 551624 - DNA, 50 bp, Homo sapiens
gccattcggagctacatccagtgaataagcctcttccttggttgtgccac

SEQ ID NO: 551625 - DNA, 100 bp, Homo sapiens
tcgctccggaaaggggacacctgtcttgattcccttttggccagcagtttttaggtctgtcagtactgcactgcaagaatggcagattttgggatctctg

SEQ ID NO: 551626 - DNA, 100 bp, Homo sapiens
agaactacaggggctctggccatcttcgtgtgtcttctgggactctcctactcattgcttgcctgtgcattgtggccaatggtggcatttgtagttcctg

SEQ ID NO: 551627 - DNA, 82 bp, Homo sapiens
gaagatcgagagcctaactttgcaaccattggtctgcaggacatcactttagatgatgggacatggatgaagctggaaacca

SEQ ID NO: 551628 - DNA, 80 bp, Homo sapiens
gcagtggtcgcttcttctccttgggatggagcctatagaggtgcctcttgaggaaaatagtgaacggactcagattcgcc

SEQ ID NO: 551629 - DNA, 99 bp, Homo sapiens
cccctgcttcaggggacacccactgtcagagtgaacgacaaagagttttatggacgaggagccccctacaatgccttgacggggaaggactccactaga

SEQ ID NO: 551630 - DNA, 75 bp, Homo sapiens
ctttaatacagaaccagcatcttttgtgtggtcctctgagccccagtgagagtttcctgaggtacctcacccttc

SEQ ID NO: 551631 - DNA, 75 bp, Homo sapiens
ctgaactggaagccccgggtcgctttcgatggggatatgagactttctactcggaatatcctgagtgttgcgtgg

SEQ ID NO: 551632 - DNA, 83 bp, Homo sapiens
gggccccagccccacagaccagcccagcattcagctgtaggtggctccctcccaccccaacgatttcagagagaaacaagtcg

SEQ ID NO: 551633 - DNA, 90 bp, Homo sapiens
gaacatccgaagacaatgttctccaaagataagtcggcatgtgcgtcaacaaatgaagagaaggcaaaaaatgctaagttaaaacagaag

SEQ ID NO: 551634 - DNA, 75 bp, Homo sapiens
gccgagccgggatctcaggtcctcgggggcggcggccacgccaaggacggatgcttgtgaccacaccagaaaaat

SEQ ID NO: 551635 - DNA, 75 bp, Homo sapiens
attcgccgtgcccgagaatagctccgtccagcaggttcgtgacaataaaaaattaagagtaaatgctgttattgc

SEQ ID NO: 551636 - DNA, 98 bp, Homo sapiens
tcctacctattaaaaggaccatacgagtcctagatgtcaataaccagtccttcagagaacaagaggaacttacaatgtctcagaaaaatggtgggaat

SEQ ID NO: 551637 - DNA, 100 bp, Homo sapiens
gatcggtgggtttatctcaaggcctgagtagccggtaacaaacgagggttcccgggattggaccgacgcagccatgtgcacagccagagaacaacacatc

SEQ ID NO: 551638 - DNA, 100 bp, Homo sapiens
cttggtcccgtcagccggaccccacctggacggctggggccacttgtggtcgccgggaggttaaagaattgcccacccttaaggatatggactttctcaa

SEQ ID NO: 551639 - DNA, 96 bp, Homo sapiens
taagaaggcgctgaagggcaaggaaagcagcatagagaatgagatagccgtcctgagaaacctggatgtgtaaatacaactgaagtggacattaag

SEQ ID NO: 551640 - DNA, 98 bp, Homo sapiens
ttgagctccaggagttcgtctcttacgtctgcggaagtgcagctgcctcagttcttagcgcagcttggatttacactgggcaacgtggttggaatgta

SEQ ID NO: 551641 - DNA, 100 bp, Homo sapiens
ctggaacaatggataacttcttcaccgaggtcgccttcgtcagacgtcagaatgattccttgcagagccgcgctgacctttgcccgatgtctgatccgga

SEQ ID NO: 551642 - DNA, 95 bp, Homo sapiens
gatgaacattctgccgaagagaacaagacgtgtgaagactcaggtcctctggatgtcagcatggcagccacaaacctggagaaccagctgcacag

SEQ ID NO: 551643 - DNA, 100 bp, Homo sapiens
ccaggacgagaggatgcggagcccgcagaacctccacagtcaagaggacgattgtctaaagccccaggaaaaatggtggaaaattcaccgtcgccattgc

SEQ ID NO: 551644 - DNA, 75 bp, Homo sapiens
aagcaatcatcaagcacctcctcggtgctggagaatctggtaaaagcaccattgtgaagcagatgaggatcctgc

SEQ ID NO: 551645 - DNA, 83 bp, Homo sapiens
tgatgcttcctacttcctttccgtgcataagaagccgaatggcctggtactgtggcgctccgtgaaattagacgttatcagaa

SEQ ID NO: 551646 - DNA, 82 bp, Homo sapiens
ctcctggccaccgactcctacaagggtggcccagttgaaatccttcccttcctctaccttggaagtgcctaccatgcatcca

SEQ ID NO: 551647 - DNA, 110 bp, Homo sapiens
aaggaggcagaggcacttatgcttgtcaggttatacattggctcttcaaagacgttcacctcatcagagaaatccctgactcctttgcagtggtgtagacatgtcctaga

SEQ ID NO: 551648 - DNA, 100 bp, Homo sapiens
cgaggtctatgagaacaagacggacgtcatcctgatcttggaactggcttcttcgctggaatgaggaagaggaggaagccaaggaagacagagactgtgg

SEQ ID NO: 551649 - DNA, 90 bp, Homo sapiens
atcaataccttctattccaacaaggagattttccttcgggagttgatctctaatgcttctgatctaacaggcctcacctcttccattccg

SEQ ID NO: 551650 - DNA, 74 bp, Homo sapiens
tgcccatggcggtggccgagctgtacacgcaggtgactctcctattccatctgtttcttcgggatcatcttcac

SEQ ID NO: 551651 - DNA, 98 bp, Homo sapiens
aaagatggcggcagggaccagcagttactgggaaggtctcaagattctgccctccaagaaagtcttgccatgattggataggacccccagataaatat

SEQ ID NO: 551652 - DNA, 100 bp, Homo sapiens
tgacatgatctcactggaccgcagcgtcaatgacttacgccaagaagatattacagagaggcttgaacacgctttggaaaaggcagctcctctccttcgt

SEQ ID NO: 551653 - DNA, 74 bp, Homo sapiens
gcaaaaccaacgcctggctcggagcagcagcctctgagttgtgagagccacaggaaaagcaagaaggagaagaa

SEQ ID NO: 551654 - DNA, 75 bp, Homo sapiens
actcccagtgtgtcactgggctggtgttctccccacacagaaagaagattggcccatgcacaagctggaatgttc

SEQ ID NO: 551655 - DNA, 83 bp, Homo sapiens
aaaaattacctctttatcttgcatgaacatcttaattttcagggtctgggcagtggccctgaactctctacctcaaagatttc

SEQ ID NO: 551656 - DNA, 73 bp, Homo sapiens
agatggaacatggccaaggggtccttctactcctaacactgaaagagaacagctcagaggttgtacagccttt

SEQ ID NO: 551657 - DNA, 75 bp, Homo sapiens
taccgagatgcggttttcctcgcagaacgcctttatgcagaagaacattactactggatggaaatccattccgag

SEQ ID NO: 551658 - DNA, 83 bp, Homo sapiens
gagaaccttgtgctccaggctgccccataataaagctgtaggtaaaacttgcctactgatcagttacacaaccaatgcatttc

SEQ ID NO: 551659 - DNA, 51 bp, Homo sapiens
accagcccaagctacaaaagtggtgacaggatctcactctgtcacccaggc

SEQ ID NO: 551660 - DNA, 90 bp, Homo sapiens
ggaagaggaccggaggctctggatggaagccatggatggccgggaacctcacaaagacattagcaggctgctggtttcatggacctgtac

SEQ ID NO: 551661 - DNA, 101 bp, Homo sapiens
tcccttgcatgatggaaacaccatggctgcggcggcccagctctctctgacacagggtcaatgcaaccaacttcatggaggcaggagccccagttatgtgg

SEQ ID NO: 551662 - DNA, 119 bp, Homo sapiens
gacactttcgcaacatcaagggagttttccggggccctctcagcaagaacgggaacaaaactctgctataaggaagaccagatggatgagaaactaatggaacctctgaaatatgctga

SEQ ID NO: 551663 - DNA, 83 bp, Homo sapiens
ccgggatcggttgccttgagcctgaacatccagtcatggataaaaatgagctggttcagaaggccaaactggccgagcaggct

SEQ ID NO: 551664 - DNA, 100 bp, Homo sapiens
agacatctcctgagctctgaccagatgatggaaagaccacagcaagattctttcattcgtctcctcctagcctgggggaccaggctcgaactgaccctgg

SEQ ID NO: 551665 - DNA, 75 bp, Homo sapiens
gattccaagtaactcttatttgatcctgcactggatggatcagcggacaacacacagaccggtaatctgggtcaa

SEQ ID NO: 551666 - DNA, 102 bp, Homo sapiens
gatttgttaaggattccaagtaactcttatttgttccagaaagctgagtctgatctggattacattcaatacaggctggaatatgaaatcaagactaatcat

SEQ ID NO: 551667 - DNA, 75 bp, Homo sapiens
tatcctctgcatatagaacagtgcctggcacataataggtgctgagttagcatggcctcattgaaagaactagat

SEQ ID NO: 551668 - DNA, 83 bp, Homo sapiens
ctgcctctgtcactcctggtgaccagcattcaagtattctaccttgtaaatactgttatttgtatatactgtaaatgatgaca

SEQ ID NO: 551669 - DNA, 100 bp, Homo sapiens
aacaatagcaactcccccagcagagtctcactgtgttgcccaggctgaagcagcctcaaactcctgggctcaagccttccttctgcctcaggctcccaag

SEQ ID NO: 551670 - DNA, 100 bp, Homo sapiens
tctgccagggacgaccccagccacccagaagccaagggcgaggctggagcccgcttcctcatggccaatggccaatgtacatggtggactatgccggcct

SEQ ID NO: 551671 - DNA, 74 bp, Homo sapiens
tgtctatcttcataaattccttatgtcacttctggttcgttccaccagtcataaaccagatgaaatctatggca

SEQ ID NO: 551672 - DNA, 83 bp, Homo sapiens
ctggatggaggggattttgtcagcttgtcgtcaaggccgagacgcatccagagctttcgtgaccggggactgttctgaagcag

SEQ ID NO: 551673 - DNA, 50 bp, Homo sapiens
gcataggtcatcgattcaaaagatctgatggtgtcttgctctgttgccag

SEQ ID NO: 551674 - DNA, 71 bp, Homo sapiens
gatgaggtcggagtgattcccagtaaacgcagaaataacattccagctaattttaccaggagtggaaataa

SEQ ID NO: 551675 - DNA, 100 bp, Homo sapiens
cgctgagtacttgcagccctcggccaaacggccagacgccgacgtcgaccagcagagactggggcagtctgcagcaaaacgacaaggaaaatttaaaaag

SEQ ID NO: 551676 - DNA, 98 bp, Homo sapiens
agaacaagaagtcttaccctcaggtcaaagattcagtggtcccaatttaaaggctattttattttcaaactggagaaagtgatggatgatttcagaac

SEQ ID NO: 551677 - DNA, 75 bp, Homo sapiens
ccatgagcgtcccggccttcatcgacatcagtgaagaagatcaggtgctggagatcagaatttatttacctctgt

SEQ ID NO: 551678 - DNA, 99 bp, Homo sapiens
gaggcgcgggaggtgttcgagaacgaccccgagacggtctataacttgacccaggagttcttccggcacgataaaccagtcaatgctgaaagtcaaaat

SEQ ID NO: 551679 - DNA, 99 bp, Homo sapiens
cggacattctgactgcactctatgtcctgggccatggcctgcgggtcacagtctccctgaaggagctgcagagacaatgcctgtggaagacaagtcaga

SEQ ID NO: 551680 - DNA, 80 bp, Homo sapiens
agccaagttccccaacggctccccgtcgtcctggtgctgcagcgactatccccataaatacggtcctcaggggggctgtg

SEQ ID NO: 551681 - DNA, 115 bp, Homo sapiens
tgcgcagcggccatggcttcctcaattatctgccaggagcactgccagatctcgggccagggtgacccagagaagacagctaaagtggaatgtggggacttctacaacactgggg

SEQ ID NO: 551682 - DNA, 75 bp, Homo sapiens
ctgcacccacgaatctgcccacccctcctgtaacccagcctgtttcacttcttgcttcaaaagcagtggactgtc

SEQ ID NO: 551683 - DNA, 83 bp, Homo sapiens
gccgccgctgcctgccgccatgggttacacatcattttggaatgactgtatatcatctggattacgtggctgtatgttaattg

SEQ ID NO: 551684 - DNA, 100 bp, Homo sapiens
attgacatagacaagacaaaagtacaaaatattcaccctgtggaaagtgcgaagatagaaccaccaggtgtcagtgtggaggcagttgatccagtgttcc

SEQ ID NO: 551685 - DNA, 75 bp, Homo sapiens
ccgtggaataggtgtatcaagtaatggtgcaaagcctgaaatgccatggacaatattaccaggcagaaccaattc

SEQ ID NO: 551686 - DNA, 100 bp, Homo sapiens
tgctcattttggttctcagtttctacgagctggtgtcaggtgaccctggcagcaaccccaacaaacgccagaggcagccccctctcctgggagatcaccc

SEQ ID NO: 551687 - DNA, 76 bp, Homo sapiens
cgggcgtcgtcaccatggcagcatccgctggaggcccagccagagactgctgctactttgaaacgtacgatagagg

SEQ ID NO: 551688 - DNA, 75 bp, Homo sapiens
gcggctctgaggttgctcgcgcgcccccgccggactgcgcccggggcacggccaactgtgtggtgttcagctgcc

SEQ ID NO: 551689 - DNA, 83 bp, Homo sapiens
atcatgtcgcgttacgggcggtacggaggagcaacttgagttggtggaaccaagtggctggattcatgttcccttaactgaca

SEQ ID NO: 551690 - DNA, 98 bp, Homo sapiens
tcagtgttaaaggaacctctacaacgaaggtgaagccacggaagataagcattttgaaagcgaagcagaagccgtagaatcagcggcgagcctgttga

SEQ ID NO: 551691 - DNA, 90 bp, Homo sapiens
ggcggcagcggtggcggctgcgctggcgcggcttttggcggcctttctgctcctcgcggcccagcccgagcgggaagaagttccgcagca

SEQ ID NO: 551692 - DNA, 90 bp, Homo sapiens
ggtctttggcttctcgactcggtcctgtttcgacagcgaacatgtcgcggcctgtcaggcatttggctttatgtcccgagttgccctaca

SEQ ID NO: 551693 - DNA, 75 bp, Homo sapiens
gttaagaatgagaaggtcatgtgtggctacatcagtgaagataccaggctgctgcacaggttctggaacctctgg

SEQ ID NO: 551694 - DNA, 75 bp, Homo sapiens
caacttttcgttcagtgggacttgcttcacggttgtacgtggacactataaaggtcagcaaattggcaaagtagt

SEQ ID NO: 551695 - DNA, 103 bp, Homo sapiens
tcaacctgaaagtggaggctgcgaaaatagacttcattgttgggaacccatgggatgataagctgattttcaaacttttatctgggctttctaaaccagtgag

SEQ ID NO: 551696 - DNA, 100 bp, Homo sapiens
agatgaacctctaacacagtggaaaggaaccgttctggatcaggagcatctttccttgaagaagtacattattgacattgtggttgaaagtacagctcca

SEQ ID NO: 551697 - DNA, 74 bp, Homo sapiens
cgcctctctgtgtctgctgatctcgagtctcgcatctgtgtgagggctgtgctgaagtttgctgctgccactgg

SEQ ID NO: 551698 - DNA, 82 bp, Homo sapiens
ggactggcccccttgagcctgtcccaagccctggtgccaggtgtccatccccgtgctgagagatggagtttccccgtgttag

SEQ ID NO: 551699 - DNA, 76 bp, Homo sapiens
gagaatgagaacatcaccgtggtgaagggcatccggggagaagatgtcaaccggacactagaaggtggaaggaaac

SEQ ID NO: 551700 - DNA, 100 bp, Homo sapiens
gccacaggaagtctgtgtggctgtatggttcactggtgggaggctgagccggtggaaaagacaccgggaagagactcagaggcgaccataatgtcgttac

SEQ ID NO: 551701 - DNA, 50 bp, Homo sapiens
gagttttgggggtgtgctttaaccttcgagatctgcggtctggggtctgg

SEQ ID NO: 551702 - DNA, 101 bp, Homo sapiens
ccaggtccggtgttggggtgtccgagttgccgccggagaggagtggcctcgcccgcttgggcaagttaaagtcttcagagccctgtatacgtttgaaccca

SEQ ID NO: 551703 - DNA, 75 bp, Homo sapiens
cgacgagctgaccctgggagacatcgacggtgttgacttcaaaatcaaaactgtagagctaagaggaaagaaaat

SEQ ID NO: 551704 - DNA, 75 bp, Homo sapiens
ggtctgcacgaaataaagctcctgggcaaggggacgtctgcagctgagagataccccggctctgacaggatcatg

SEQ ID NO: 551705 - DNA, 107 bp, Homo sapiens
tatgtgatgccattccagcactggactcatggaggctgagcatttattcaggtactaggttttgacaagcttgcatcatgcgtgagtataagctagtcgttcttggc

SEQ ID NO: 551706 - DNA, 98 bp, Homo sapiens
aggctttggagcggctaaaaacctcctaatcacacggatgctacagagagatcccaagagaagggcttctttagaagagattgaaaatcatccttggc

SEQ ID NO: 551707 - DNA, 51 bp, Homo sapiens
ctaaaccagtgctggacaatagatgctcaaagcagcgctatgcaaacaagc

SEQ ID NO: 551708 - DNA, 75 bp, Homo sapiens
aagaatactggaaagttgctatgttttggtgatgatgaacagtctacacagatggctgcaagttgggaagatgat

SEQ ID NO: 551709 - DNA, 100 bp, Homo sapiens
cccaaggatgtgaccgagctgatgagaaccacaagcatgagaacatgaggataaatacactttggggaaaaagaaaacagacagaggcagcagagaagga

SEQ ID NO: 551710 - DNA, 97 bp, Homo sapiens
aattattccatgcaagatctgtggagacaaatcatcaggaatccattatggtgtcattacatgtgaaggctgcaagctagagacatgacctaacacc

SEQ ID NO: 551711 - DNA, 90 bp, Homo sapiens
agagccagcaatgcctccatgaacaatctcacccaattactctgctcagtgaaactggaacgccaagctgaagaagaacgaatacggaag

SEQ ID NO: 551712 - DNA, 97 bp, Homo sapiens
tgctcttctgcctcttgatctccgccaccgtcttcaggccaggtgtcatggagaaactccagctgggcccagagattctgcagcgggaaaatccaag

SEQ ID NO: 551713 - DNA, 100 bp, Homo sapiens
cacgactcttggtgagcgaggagctctccgagaagcaatgaggctctttggtgtaacgggaaactgcgctgcctgtagtaagctcatccctgcctttgag

SEQ ID NO: 551714 - DNA, 51 bp, Homo sapiens
tcagaccagggacagacttgccaaattgaaattttattgtcaagatatccg

SEQ ID NO: 551715 - DNA, 74 bp, Homo sapiens
agtgttctaaccaacaaggaagaactatatcatcatgtacatagaaaaatccaaaggattctgcaaaaaagcta

SEQ ID NO: 551716 - DNA, 98 bp, Homo sapiens
aaaacacgagtggaaaagattgaatgtaacaagaggcataaaacagttctcactgaactacaggcttctaaccctcctttatgtgactcagagaaagg

SEQ ID NO: 551717 - DNA, 100 bp, Homo sapiens
gttggaggattcattgaggaagaaaaagaagacttgcttcagcatttctcagtggcagggcccagccccgaaccagacaagggacccctcaaggagcttc

SEQ ID NO: 551718 - DNA, 100 bp, Homo sapiens
aggaggaggtgcgggtactgacacttcccctgcaagcccaccacgccatggagaagatggaagagtttgtgtacaagttaagtgggcagaccaacatcca

SEQ ID NO: 551719 - DNA, 100 bp, Homo sapiens
agcagcgcagaccctgagctgggagagagggcaagattttgggaaccagtaggacattgacatacatccgagaacattctgtggtggatccagtggaaaa

SEQ ID NO: 551720 - DNA, 100 bp, Homo sapiens
ctgcttccgtcaggaggtgggctcccatggccgtgacacccgtggcatcttccgagtccatcagtttgagaaggctcaggcagctgtccaaggacctgtt

SEQ ID NO: 551721 - DNA, 87 bp, Homo sapiens
tacatgtttgcaaaatggatggtcagcacaaccaatttgcattaagtcatctttgcccttgggatttccatgacctttatcaatatc

SEQ ID NO: 551722 - DNA, 50 bp, Homo sapiens
tggtggtctggggcaacgcggaagccacatgaaatgaagatcacctctgc

SEQ ID NO: 551723 - DNA, 83 bp, Homo sapiens
gaggccagatgcagatctgaagacctattttactgataagaaaacacatctttacacactaactttggacatcagacagtgca

SEQ ID NO: 551724 - DNA, 100 bp, Homo sapiens
tttgcttcactgcttggaagtgtgagtgcgcgaagatgcgaaaggtggttttgatcaccggggctagcagaaatggctattcctacaaagtggcagtcgc

SEQ ID NO: 551725 - DNA, 100 bp, Homo sapiens
gtgacaactcaagagcaatcagtaccatctgccttgttagatgacttggataaagaactaaacaactacattatgcgatgtagagaatggtatggctggc

SEQ ID NO: 551726 - DNA, 75 bp, Homo sapiens
ctgcatccttaactgagaatgaggatacagttgatatattagttggatggcatatagatcatactcagaaacctt

SEQ ID NO: 551727 - DNA, 74 bp, Homo sapiens
caagttcacctgcagccccaaggccagccagcaaaaaggtgaaaggtgtagcagtcactcggcctacacccaca

SEQ ID NO: 551728 - DNA, 75 bp, Homo sapiens
cctgctgctcaagatccctaaggagtatgacctgttcagacttggttccttcaacctagagaaagttgaaaaccc

SEQ ID NO: 551729 - DNA, 103 bp, Homo sapiens
gtgtggggccggaggagtcagctgtgtgtccagaacgtgccatggagacgcttaacggtgacttaagagattaaaattaatttggttgctgttggttctgaac

SEQ ID NO: 551730 - DNA, 90 bp, Homo sapiens
gccagaatcctttagcagtgggtcccaggacgtgcaccagaaaagagggagtgcatccgccccaacccttttccccctcgtctcctgtga

SEQ ID NO: 551731 - DNA, 100 bp, Homo sapiens
tgtggtctatgcccacagcaaggaaactgctgcctctgttgaggtcggtgctgcgcttccgcctcgggggcctagcctgtcagactgccttggtcttcca

SEQ ID NO: 551732 - DNA, 100 bp, Homo sapiens
gccggcccagactccactccccagctgtgaaagggacatggatttgattgacatactttggaggcaagatatagatcttggagtaagtcgagaagtattt

SEQ ID NO: 551733 - DNA, 100 bp, Homo sapiens
aatacttatcagtatcttatatgttagcttgacctatgcagatcttattccagataagcatggattcctggttcattcttgttctgctcggcagtggtct

SEQ ID NO: 551734 - DNA, 100 bp, Homo sapiens
ttcacggggctggctgctctgtgtctcttccaaggcaagaggcgcagatgttccagagattcctggagatcttactcttaagacgtgtggcagtacagcc

SEQ ID NO: 551735 - DNA, 82 bp, Homo sapiens
gcaagagtttgttatatagcaccatccaacatattctttacaatggatgatgtggtcaaggttggagactttgggttagtga

SEQ ID NO: 551736 - DNA, 100 bp, Homo sapiens
tctttctctcaggctttcctacaactcatgcccagcagcagcaagcagggtcttgctctgttgcctgggctggagtgcagtgccacgatcttggctccct

SEQ ID NO: 551737 - DNA, 87 bp, Homo sapiens
ggactgaaggccccgcaggtgaatggagagtagcagccggggcccagatttagctttggagtcaaacccttctgaccatccaagggc

SEQ ID NO: 551738 - DNA, 75 bp, Homo sapiens
actgtggatgattatcgattacggtttcataaacagaccttgagttccatcatgatgcctcatccagcaagtgca

SEQ ID NO: 551739 - DNA, 76 bp, Homo sapiens
gccaaagccaagctcaccaaactgaagatgccttctcagtcagttgagagaactcaatttcctgtatctactgagt

SEQ ID NO: 551740 - DNA, 83 bp, Homo sapiens
gcagagtgctgatgtgaaaaataccacgacaaaaccaccctagtggatgaaaatactaggaaaagtttatttaagttacgttc

SEQ ID NO: 551741 - DNA, 96 bp, Homo sapiens
aacttgatattgaaaaaaccaaattgctttatacagcaggaattcctcctgatcagcagagactgatctttgctggcaagcagctggaagatggac

SEQ ID NO: 551742 - DNA, 75 bp, Homo sapiens
gcggagcggggcagccagcagcggaggcgcggcgcgcagcacacccggggagccttcacgtaaatgggtccagtc

SEQ ID NO: 551743 - DNA, 82 bp, Homo sapiens
ttccacgggcgagattactgcatagcagaggtgagaagccctaccactgcaactgggacggctgcggctggaagtttgcgcg

SEQ ID NO: 551744 - DNA, 75 bp, Homo sapiens
cctggttgagggtctccagggttctttggggcccgagggccgttgctccagggagaactgcaaatatcttcatcc

SEQ ID NO: 551745 - DNA, 100 bp, Homo sapiens
acatgagtgatgtggaggaaaacaacttcgagggcagagactcacaccacccggcaagaactgctcactacggctccctgccccagaagtcacacggccg

SEQ ID NO: 551746 - DNA, 100 bp, Homo sapiens
gaggcggcggacgggccggagggaggatgttaaagccccgcgaagtccaaggcttgcgagaaggtcatttccgtgggtcaaacggtcatcacgaagcatc

SEQ ID NO: 551747 - DNA, 75 bp, Homo sapiens
ttgctaaaggagcttaagaatattcctatgaccctggaattactgcagcttttctgcaattagataaaaaaggac

SEQ ID NO: 551748 - DNA, 78 bp, Homo sapiens
tttccatcacgagtgccgccagcatgtctgacaaactgccctacaaagtcgcggccctccaggcactgaagcgtaaga

SEQ ID NO: 551749 - DNA, 98 bp, Homo sapiens
ggttcttggcctcgctgacttgaagaatgaagccgcagaccctggcggtttcagcacagccagtcccacaggagcccagcagaaaagattacgagacc

SEQ ID NO: 551750 - DNA, 100 bp, Homo sapiens
agggaaagagagcgccaggtgcttagcaggttgaaatcacaaagattagacacctttttagataggtgttcttcagcaccactgacaacacggttctgac

SEQ ID NO: 551751 - DNA, 100 bp, Homo sapiens
caggtcctacgatgaggccatcctgcacctcgtagtggcagtttcagagactcctccactctctgggaatgacacggactccctctcctgcgacagtggc

SEQ ID NO: 551752 - DNA, 75 bp, Homo sapiens
ctactctctctttctggcctggaggctatccagctgagcaggggtgagcgcagccactgcccaacgcaaaccgtg

SEQ ID NO: 551753 - DNA, 50 bp, Homo sapiens
ggataatgaagatggccctcagcacacgtatcctagaaggaaaacatcac

SEQ ID NO: 551754 - DNA, 75 bp, Homo sapiens
ccgctgtcagggagtagtttgtgccatgaaggttcaatggataatacagttcgattatgggatgctatcaaagcc

SEQ ID NO: 551755 - DNA, 50 bp, Homo sapiens
cgacaggcctacactctattcaaacagcacttggttaatgaatggttaag

SEQ ID NO: 551756 - DNA, 90 bp, Homo sapiens
gtgctgggaggagactggagcccggttaggaagaatggagttggcgactcgctaccaggtggaatgaggtaccatctactgtctccagag

SEQ ID NO: 551757 - DNA, 100 bp, Homo sapiens
tgctgtcctacgaaagcctggtccacgccgtggccggagccgtggtgcggcggcagcacatggagcgttgtaccagcttcctggtggatgagctgggcgt

SEQ ID NO: 551758 - DNA, 75 bp, Homo sapiens
aaacaccaacaggatacattgaaagtatttgattttcatcaagcagctgatggtatccaggaacaacagagacaa

SEQ ID NO: 551759 - DNA, 98 bp, Homo sapiens
aaaacaaccacactgcttcgatcctggacaggatgcaggcagatagtacaggggctcaggtccaggtggcaggggatatgctacccaactcaactgag

SEQ ID NO: 551760 - DNA, 82 bp, Homo sapiens
ctggcgctggcagagctgggcaggagaggcctgttgctgccgtctcgactcgtggatgggaacggcaggagcagctgatggg

SEQ ID NO: 551761 - DNA, 82 bp, Homo sapiens
ttcatcaaaaatagtgatagctttgataaagaggaatatggtcatgtgactaggaatcctgcagatcttcagcaaacccatg

SEQ ID NO: 551762 - DNA, 75 bp, Homo sapiens
ggcagagggcacctgagcggctggagagcctgttggagaaacacaaagaggctccgtatgtggatgtgatctgtt

SEQ ID NO: 551763 - DNA, 75 bp, Homo sapiens
cagttcgctacacagcaatgcatcgaggtgagccgttctccaaccctttggcccccgatggccacgatgtggatg

SEQ ID NO: 551764 - DNA, 73 bp, Homo sapiens
tgggaagaggaattcaccttttaagtgggcagaccaacatccacctcagcaaaaacttcttcctgacgaatcg

SEQ ID NO: 551765 - DNA, 100 bp, Homo sapiens
gtgtaatctcattccatcttcattcatgactccagacagggatggtgaacttcagtgaagtgtctgggtaccctgtgctgcagcactggaaggtccggtc

SEQ ID NO: 551766 - DNA, 88 bp, Homo sapiens
tgcggaggagctccaggcccgtcggcgcggagggataaacacacttgttacctatgatatggttccagagcccaaaatcattgatgct

SEQ ID NO: 551767 - DNA, 109 bp, Homo sapiens
ctgctcttctgcggcgcctacctctacaaacagggctttgccatccccggctccagcttcctgatcgtcagtatttaaacagatcacatcatgcgtgagtacaagctag

SEQ ID NO: 551768 - DNA, 100 bp, Homo sapiens
aagaattacggcagtcggccaaacgcaccctacatgctacaagtgaaaactgatgagaaactgaatgtgtctgatgagaatacagcaagttgccctttga

SEQ ID NO: 551769 - DNA, 97 bp, Homo sapiens
tctgggactccgagcattctgacttgaccgaagctgttgttcggaatctagcaacacatctttatcttcctgggacttgttcgctgatatctaaatt

SEQ ID NO: 551770 - DNA, 75 bp, Homo sapiens
tgtggatacagagggacagaggcctactgtacatggcacatggatttaagtgccctgtatgctcaaaatttgtat

SEQ ID NO: 551771 - DNA, 95 bp, Homo sapiens
ctcccccggcgccctctggggctccgagcccggcgggaccatgttcaccagcaccggctccagtgggctctgatgcagaagaagctgtcagaatt

SEQ ID NO: 551772 - DNA, 101 bp, Homo sapiens
ccgaggcggcttttggtctccagcttttccccctgcattttcaccggggcaggattcttagatggcagtggcagcaccatgatgcaaaccaagaccttctc

SEQ ID NO: 551773 - DNA, 98 bp, Homo sapiens
gtgcatacctgtgtgaaagcaaccttccacgcacgtgtggttctcaaatataggcattctgatgggaacttgtgtgttaaagtaacagatgatttagt

SEQ ID NO: 551774 - DNA, 134 bp, Homo sapiens
gagcagtccagaaagcggcttatcgaacagagccgggagttcaagaagaacactccagagggtctgggcagtggccctgaactctctacctcaaagatttcttctctggacacttcgatgcggcaatgaccagc

SEQ ID NO: 551775 - DNA, 109 bp, Homo sapiens
accatggagaccctcacggagctgggcgacgagctgaccctgggagacatcgacgatgcggcattccaaaagaactcactgtcctgattgggatagcagagaaagctgg

SEQ ID NO: 551776 - DNA, 51 bp, Homo sapiens
ctggaatctggatgagcagctcaagcaggttgaatcatgtagctgctggtc

SEQ ID NO: 551777 - DNA, 101 bp, Homo sapiens
ctggggaaaaggcaaaaatcccatctaccgcaactctcagttcgagagtaaagcctccttttagaggactcagaagaagaagaaggtgacttatgtagaat

SEQ ID NO: 551778 - DNA, 75 bp, Homo sapiens
gaagaggaagcccagaaagggaaaaactaccagaacggagatgtgtttggcggcaccatactggacatacctttt

SEQ ID NO: 551779 - DNA, 73 bp, Homo sapiens
cggagtgtgcgacggattgggagagacggagtttcgtcatgttggccaggcccatttgagatctttgaagata

SEQ ID NO: 551780 - DNA, 100 bp, Homo sapiens
aaccgtcccaaaatatggcaaagaaacctattctgagcctcacagaatgaggttcctgcggcacccctggaagaactggcctacagacggtcgcttcgcg

SEQ ID NO: 551781 - DNA, 75 bp, Homo sapiens
agacgaggcaaagcacccagctttcttcactcttccgaggtcctgctgtactagccaccaaagcagctgctggta

SEQ ID NO: 551782 - DNA, 80 bp, Homo sapiens
gcatccgtttccacgactttctgggagactcaaaattgtacaagctggagataaggaccttgatgggcagctagactttg

SEQ ID NO: 551783 - DNA, 75 bp, Homo sapiens
ccggccctgctctgttctgcccggaggagccgcccggaatatccccggctcggctgtgctggtgtttgacatcca

SEQ ID NO: 551784 - DNA, 99 bp, Homo sapiens
gatgtgtatagagcagatgctaaagaaattccaaggatattccagatcaccggcgtaatcaacccagcgttggacaaatactttccgtcagactctgga

SEQ ID NO: 551785 - DNA, 75 bp, Homo sapiens
ccagtgttcaccatcctggccccggaaggagctcgcccgtcagcgaggagtcctggagcgcacagagaagatggt

SEQ ID NO: 551786 - DNA, 98 bp, Homo sapiens
ctcggattttgacagccaacaacccacacgcaccccagaacattgtcaggtacagcttcaaagtgaaagaacttgtcctggacaacagtcggtcgaat

SEQ ID NO: 551787 - DNA, 74 bp, Homo sapiens
tgctggggtgtctctgagcaccctggaggagaaaatggcctacacgatccacgagatcccggtcttcatcgcca

SEQ ID NO: 551788 - DNA, 76 bp, Homo sapiens
acaaattgatgcacaaaataagctggaaaaatctgagttactggctgaccaacaaagttcctatcaaaagacccag

SEQ ID NO: 551789 - DNA, 75 bp, Homo sapiens
gcctggtccccacagcccacaggatggaccaaagggggcagtttctacagcagtataatcactacaaatccaatg

SEQ ID NO: 551790 - DNA, 96 bp, Homo sapiens
cgaaggcggctttagtggcagcatgaagcgcaccccgactgccgaggaacgagagcgcgaagctaagccaaaagaatgcaatggtgtaaagattcc

SEQ ID NO: 551791 - DNA, 51 bp, Homo sapiens
cactgtggtcctccaggccttcgagaatatgccttctgcatcctgtgatac

SEQ ID NO: 551792 - DNA, 100 bp, Homo sapiens
gccgcggacaccatgcagtcggatgatttactaaaagatgtaactgaactgcagatccttggtgaaatatctttcaacaaatctctatatgagggactga

SEQ ID NO: 551793 - DNA, 49 bp, Homo sapiens
cacacagccacgatttgcaaagcttcctggagaagagcccattggaaga

SEQ ID NO: 551794 - DNA, 98 bp, Homo sapiens
ccaccctggagcagaaggtggagggtagggataagtttcgacgtagattaaatatggcgactgaaaacaaagcaagagacaaagtgcttgcgcatccc

SEQ ID NO: 551795 - DNA, 50 bp, Homo sapiens
cggtgagcctctccgtcactgaaagctgtatgtgatggcttctgtgtttg

SEQ ID NO: 551796 - DNA, 90 bp, Homo sapiens
cgggggtgagcgccgggctccgtggggaggaagcgggggccaccaaggagaccaagacacattccaccccagtggggggtcccataccac

SEQ ID NO: 551797 - DNA, 98 bp, Homo sapiens
ttccatcctcccccttactcacacatcagtctatcagtgttcggctccagcctgtgaagaagttaactggctgtctcctggttcggacatctatgtga

SEQ ID NO: 551798 - DNA, 100 bp, Homo sapiens
tttgttcccaatgacatgcaagttggacagacgggaaaaatagtagcaccacttggttctacagccattgggatccagacatcagagggtgtgtgcctag

SEQ ID NO: 551799 - DNA, 75 bp, Homo sapiens
caacctccacgcctgggaaatgaagccctatgcagtcatgattacaccaccaccttcactgtcagatccacttaa

SEQ ID NO: 551800 - DNA, 100 bp, Homo sapiens
acaccagaagatggagaggattgaccagagcgttgcaggtggcgagctgtttgacttcttagctgaaaaggaatctttaactgaagaggaagcaactgaa

SEQ ID NO: 551801 - DNA, 50 bp, Homo sapiens
aatcgacagcctcaaccttcataaacaggacaaagcagttccaattccag

SEQ ID NO: 551802 - DNA, 99 bp, Homo sapiens
ggaggaagccctttctcctcggcactgtattctttacctgcttcccaatcccactgatgaggatcagcccatgggtgaggacgcttgagcggaagttag

SEQ ID NO: 551803 - DNA, 101 bp, Homo sapiens
agtcatccctgtgtatgtaggagtgaatataaaaggacttcatctcctcaacatggaaactaaggctgctgagcttcgtgcttatctgaaatctaaaggag

SEQ ID NO: 551804 - DNA, 75 bp, Homo sapiens
ccaaagctcattgacttttctgctcaggtactccaaagattcaggtttactcacgtcatccagcagagaatggaa

SEQ ID NO: 551805 - DNA, 90 bp, Homo sapiens
aatgatcctaactactttatgactctcaaagatgaagacttttgtaaacgtgtatctttggctactgtggataaaacagttgaaactcca

SEQ ID NO: 551806 - DNA, 100 bp, Homo sapiens
gcgctgggctggaggcggcggagcgcgagagcttcgagcggactcaggagtctgcactatggaaacaacctgtcaatccagctcaaggcacacatagccc

SEQ ID NO: 551807 - DNA, 90 bp, Homo sapiens
gtcggcgctgggcacggtagcaggcgccgccgtgctgctcaagcctgaccgccgctgcctacagagtcacactcaatcctccgggcacct

SEQ ID NO: 551808 - DNA, 75 bp, Homo sapiens
agtgccagagtgtatgcactttactacaaagatggacttctctgtacaggaacaagcacatcatgattgacttgg

SEQ ID NO: 551809 - DNA, 75 bp, Homo sapiens
cctgtgatgtaaatgactgtgtccagcaagttgtggaacttctacaggaacggtatcagatgtagaaggtggtga

SEQ ID NO: 551810 - DNA, 100 bp, Homo sapiens
ttcatttcattgctactaactacctcatcttcagtcaaaagcctgaatttcaggatctttcagtttcaccagtgatcattaaagaatgggcagcttacaa

SEQ ID NO: 551811 - DNA, 51 bp, Homo sapiens
tgctgggcacccacggagcctccggggctgacacgatgaggcgagtggtac

SEQ ID NO: 551812 - DNA, 75 bp, Homo sapiens
ctggagacctgatttctaactgacgctaccgtcgcggccgccggtgaactaccgaggccaggtggtgagcctgat

SEQ ID NO: 551813 - DNA, 100 bp, Homo sapiens
cgcaatgatgagaggatgtggtggtctactctgatgtcaatcttgagggctagaggtccagttccggccgtaccgcacagacgacttcatcacgcgcctg

SEQ ID NO: 551814 - DNA, 83 bp, Homo sapiens
gccctgagggccttcgagagctaccgcgccagacagcacatggattaattgatgtatgttgagtttatggagctgccttttgg

SEQ ID NO: 551815 - DNA, 90 bp, Homo sapiens
ctgcagcccagacactgagagccgctttcatcaaggagccctctggcacaaatggaagaagaaagaagggagcaagtagctaaaattaag

SEQ ID NO: 551816 - DNA, 100 bp, Homo sapiens
tagggtcctttatatagaagggagagtaggtggcacaagaatggctcaactctccaaatagagagaatttctatcagttgcaagtacgaaaatttcctgc

SEQ ID NO: 551817 - DNA, 75 bp, Homo sapiens
cctgcgagggttgaagattgtgaagcaatagcctaaggtcattcaacatttattcaaccaaaaatactaagtcag

SEQ ID NO: 551818 - DNA, 88 bp, Homo sapiens
aatacgtttagcttcaaaaatgacaagttcgataaaagtgtgcagaccaaggcatcaagcatgatggaaccatgtgtgatacctgccg

SEQ ID NO: 551819 - DNA, 109 bp, Homo sapiens
ctcgagcgatgcacctcctttccaactgggcaaaccccgcttccagcaggtccaggacctacagctggaacgggagatggcactggccaccaaccggagcctggcagag

SEQ ID NO: 551820 - DNA, 83 bp, Homo sapiens
gaaaaagcatccccgaggaggaagacgaatcgttaaacatctgaaagggtcagaaatggtggagtcaatgaagaaagtagcag

SEQ ID NO: 551821 - DNA, 75 bp, Homo sapiens
ggaaaatcctttcttgaggcaagagattgctcgctgtaagcagctcatctgtgaccccagctacgtaaaagatcg

SEQ ID NO: 551822 - DNA, 74 bp, Homo sapiens
cagtggtcgcttcttctccttgcttatcacacagactttcagccaccacaatcagctggcacagaagacccggc

SEQ ID NO: 551823 - DNA, 80 bp, Homo sapiens
tgcggcgcggggaccgctgtgctctcggttcctcatgagagtgctggactcctacggggatgactaccgggccagccagt

SEQ ID NO: 551824 - DNA, 50 bp, Homo sapiens
ccaaatggacgggactattaagggagtgcatccgccccaacccttttccc

SEQ ID NO: 551825 - DNA, 102 bp, Homo sapiens
acactcggtatgtcctcagtcttctgctgcatgacagctatgactacgacctgcaggaacagtttctccttggaccaagatgactgatggaaaactctccac

SEQ ID NO: 551826 - DNA, 107 bp, Homo sapiens
agaacaaagtgggaaagggaagcttagcccgccgctgccgcctccgagcagcccgccagtgccggtggtggtgtgcacattgagccccggtatagacagttccccca

SEQ ID NO: 551827 - DNA, 75 bp, Homo sapiens
tcaaggcaactcgtttcaggcaaagagagctcgacttaacaagattactgttcattcggctcctaaagaagtagc

SEQ ID NO: 551828 - DNA, 100 bp, Homo sapiens
ggaaagagtgaatgctcctgcccagcaggttgccgtgtcattctttgtaatgaaaaggcaggggaatgtttgaagaccccaccagacctgggaagcagca

SEQ ID NO: 551829 - DNA, 74 bp, Homo sapiens
ctaaccagttagtggtgctcaacgtgtacgacatgagatgtgaactttgtccccataaggatggagctttaaaa

SEQ ID NO: 551830 - DNA, 100 bp, Homo sapiens
acgacacggcccgcgagcgcgccaagctgcagatcgagctgggcaagtgcaaggcggaacacgaccagctgctcctcaaaatggtagtcgaagaagaaca

SEQ ID NO: 551831 - DNA, 83 bp, Homo sapiens
ccgcgaaatgatgggatagcgttgcaaatccttaaaagagtcttaacgagagaactcgatgccaccgcaacggtattggcgaa

SEQ ID NO: 551832 - DNA, 75 bp, Homo sapiens
aggactgttggcagctttctggtatgtcacaaatagatcccaagacaaaagcgtggttgaaggagcacgtggagc

SEQ ID NO: 551833 - DNA, 83 bp, Homo sapiens
aatacccctttgaattaattatggctgatcttaagattgaaagtgatgttcaagaaccaactgaaccagaggatgaccttgac

SEQ ID NO: 551834 - DNA, 109 bp, Homo sapiens
aacttttatctcatctggcttggcgcctgaggttctcccattagatcgtcagtatttaaacagatcacatcatgcgtgagtacaagctagtggtccttggttcaggagg

SEQ ID NO: 551835 - DNA, 100 bp, Homo sapiens
ggagcttctgggagccaccgtctgaaggggacggcaaaacagaacagaaaggcggagataaaaagaggggtgttaaaagaccacgagaagatcatggccg

SEQ ID NO: 551836 - DNA, 100 bp, Homo sapiens
cccagcctgggggcagctgccaccccgatcatcatgagccggagtcccacaggaattcctggttgtttcatgaaagggccgtatattcaaagtgacctcc

SEQ ID NO: 551837 - DNA, 75 bp, Homo sapiens
tctcctggagacgcaactcaagcaggaggatgattctggagaaggagaggatgatgcggaggttcagcaagaatg

SEQ ID NO: 551838 - DNA, 101 bp, Homo sapiens
agagggggcaccggaggtgacaacaataacaagactgtccttcggacaagttttaggaatgtttacccttgcggaagttgcatcacttaatgacattcagc

SEQ ID NO: 551839 - DNA, 99 bp, Homo sapiens
ggggccggggccgggcggcaccgcggtgcgcaagcgcaaccgtcggtgggtcggggatcggtcgcctgagaggcagctcctttgggacccagatcatcg

SEQ ID NO: 551840 - DNA, 100 bp, Homo sapiens
cctcctgagtagctggactacagagatccgtgctcagctcacagagcagatgaaatgcctggaccagcagtgtgagcttcgggtgcaactgttgcaggac

SEQ ID NO: 551841 - DNA, 100 bp, Homo sapiens
caagccggttcagaggatcccccagtacaggctgttgctgacagaattctccactttaccaatacttacaggatctgggacacacagactttgaaatatg

SEQ ID NO: 551842 - DNA, 88 bp, Homo sapiens
cctctaccgtcaccgaagacttcagcgaggattccgagctccaggattgggaggaccaggtccgctgcgacatccgccagttcctgtc

SEQ ID NO: 551843 - DNA, 75 bp, Homo sapiens
tccgttgcctgctcccggagggagacgcgctgccgaggagaacccagcgggtgcacattaaagatccaaagtcat

SEQ ID NO: 551844 - DNA, 100 bp, Homo sapiens
atttttggatgatgatggatccatttctcctattgaggagtcaacttctcctgtgcctcctgttggctctctttgcatctggcctcatccaccgagtctg

SEQ ID NO: 551845 - DNA, 101 bp, Homo sapiens
ttcatgttgggtttagaaacgcatgaccgaaaatcagaagacaaacttgccaaagctacaagagacagggctcttagacctggagatcctggattctgtgc

SEQ ID NO: 551846 - DNA, 90 bp, Homo sapiens
cgacgacgacgaggaagaggaggtttctgagcttcttaatgaagaggataactcagaatcatcggctatagagcagccacctacttcaaa

SEQ ID NO: 551847 - DNA, 98 bp, Homo sapiens
gcaagtccaagaggaggaggaggcggaggtccaagcggaaaggtatttataacagcaatgatgtagcagtatcgtttccaaatgtagtatctggctcg

SEQ ID NO: 551848 - DNA, 75 bp, Homo sapiens
gaagctgtgggatgaagtgctttcacatcttgtggaaggaccagactttgaagaatatcctgaacatagaacgaa

SEQ ID NO: 551849 - DNA, 82 bp, Homo sapiens
gtcagagtgccggaccccagcacacagaagccgagacgaggctgggaggcggcagaatgcagccagaggagggcacaggctg

SEQ ID NO: 551850 - DNA, 99 bp, Homo sapiens
tatgctatgaagattctgaagaaagaagtcattattgcaaagaaaaaagcttggccagaccacaagcgggaatgcaaatgccttaaaagctgcaaaccc

SEQ ID NO: 551851 - DNA, 100 bp, Homo sapiens
gtgcctctagtgaaaagaacaagaagtcttaccctcaggtcaaattcacaaagatgtccaaaactaatggcttatcagaagatttgatatggcactgtaa

SEQ ID NO: 551852 - DNA, 100 bp, Homo sapiens
ctgctggcttggtggatggtcacgatgtagttatagctcttttgaaacagatggtcaccatgtttagatattagcagtcccgtatgtgcatgtctgcatt

SEQ ID NO: 551853 - DNA, 76 bp, Homo sapiens
cttggttaaagtcattgaggactttccagcaaagggtatatttacttctggcacatgggaagagaaatcagatgaa

SEQ ID NO: 551854 - DNA, 82 bp, Homo sapiens
cgacgcaaaccaaggatctggggatcttcgcactatcccaaggtaactaggatttctacctcaaccgcgagacctatgcaag

SEQ ID NO: 551855 - DNA, 101 bp, Homo sapiens
agggaaggctttattggcagaaggtgtcattttaagacgagtaggcgaagcaaggactgtggaagatgcaatgctgatgtttgataaaactaccaacaggc

SEQ ID NO: 551856 - DNA, 88 bp, Homo sapiens
gtgacggagagcatttgggtacaaagtgagaatttacagagatcatcctcttcagaaacagaaaccacccctactcctaatcccccga

SEQ ID NO: 551857 - DNA, 75 bp, Homo sapiens
cccagctcccgtagggagccgtgggcgctcggtgcccgggccgggcaggcttgcttccggcgtcatggctcaaag

SEQ ID NO: 551858 - DNA, 100 bp, Homo sapiens
gtgctggcggcgacgcggttgctgcggggctcgggttcttggggctgttcgcggctgagaaaaatggctacaaacttcctagcacatgagaagatctggt

SEQ ID NO: 551859 - DNA, 100 bp, Homo sapiens
tgtctaaaccctcccctgcctgacattcccaatggtgaatggctgtgtccccgatgcacaagcaatatactttgctgcttattcaaactgcaaggaaaag

SEQ ID NO: 551860 - DNA, 100 bp, Homo sapiens
acaagcccaccaagctaaagaggctgcccagaaagcagttaacagtgccaccggtgttccaactgtttaaagagtcgtaagaaagcagtgggagttgaag

SEQ ID NO: 551861 - DNA, 75 bp, Homo sapiens
aacagactgcaacaaccacaaacaaaaagcctggccagttggactaaatgctcttccttcagaggattatccggg

SEQ ID NO: 551862 - DNA, 102 bp, Homo sapiens
ccgccgccagagcgatgttcccgcagagccggcacccgatccctccctggtgccacagcagctgagtgcgcatcaaatctgaagaaaatctacacagtacag

SEQ ID NO: 551863 - DNA, 75 bp, Homo sapiens
atcatcaagaaacaaatcttgaagcacctctccaggaccttttttctatcagtgcttatgtttatgctcagaaac

SEQ ID NO: 551864 - DNA, 75 bp, Homo sapiens
ccattgactatgcagcctaatgcccgaccattttgttcaggaccctgcagtgctgagagagaaggcagaagccag

SEQ ID NO: 551865 - DNA, 97 bp, Homo sapiens
ggtcaaaagcgcactaaatcgtctccaagtttttgaatcagagccgacaggcacttgaattgaaaatggaaaaccctactgctggtggtgctgcggt

SEQ ID NO: 551866 - DNA, 100 bp, Homo sapiens
aggcctccagcaagatctccgatgactcttgtgaagcagcaggcgccaagtgatgaaggttatatacaggcatgtagaggacttatgatcgctgctgtca

SEQ ID NO: 551867 - DNA, 90 bp, Homo sapiens
atcccttgcatttggctgcaaagaaatctgcttggaagaaggggttacgctgtttggccgggactcacagaaaacactggacttccccgg

SEQ ID NO: 551868 - DNA, 75 bp, Homo sapiens
ctggtcgatgaagaggatgatgtttttggtgaagcacacgtcacatggagatgggcgtcaagaagttacctctcg

SEQ ID NO: 551869 - DNA, 75 bp, Homo sapiens
ggacacacagcatggagaaatccttcgcaatgtcaccatcctacgagggaaagaatatggcaaagctgatgcaag

SEQ ID NO: 551870 - DNA, 82 bp, Homo sapiens
aacccgataccatcggacaggatttctccgcctcagcccaacggggagccctgggcgctgcctatggcacagccaagagcgg

SEQ ID NO: 551871 - DNA, 51 bp, Homo sapiens
gcaaagagtgccaaggccactggccacgtgctgtacgccgacatcaagatg

SEQ ID NO: 551872 - DNA, 100 bp, Homo sapiens
agatttccacagaaggactgggatgatacaccttttccacagggaattgagttgatgctgcacaacaaacatgtcatggtccgtgtgggaggaggctggg

SEQ ID NO: 551873 - DNA, 50 bp, Homo sapiens
acccgtgtacgtgcctgtgcctaaaatcaatattgacttccgcactcgag

SEQ ID NO: 551874 - DNA, 83 bp, Homo sapiens
atccagctcaagtggaagagacccccagagaatgtttggggattctcagcagttgcggctggtccgtattctgcgcagcaccg

SEQ ID NO: 551875 - DNA, 100 bp, Homo sapiens
cgcgcagcagcaaaggatgagcggaaccttggaaaaggaatgtatcctgtcaggtataatgtcagtgaatggcaagaaagttcttcatatggatcgaaac

SEQ ID NO: 551876 - DNA, 82 bp, Homo sapiens
aaagaatatgatccagatgatcatctgatagaagagggaattcacaattgaaactgaagggaaaacatttcagttaacaaaa

SEQ ID NO: 551877 - DNA, 100 bp, Homo sapiens
ctgaaggcaggcggggcttctccgtgtccgtggagagtgcctgctccaactacgccaccactgtgcaagtgaaagagtgctcatgtgactatcacggatc

SEQ ID NO: 551878 - DNA, 100 bp, Homo sapiens
gcacggaccaattcgggaacaaatactactacatcccgcagtacaagaactggagaggttgctgctgactcagccattctagaagttcttcagtccaaca

SEQ ID NO: 551879 - DNA, 75 bp, Homo sapiens
aacaatgaggcctacgcagagctcatcgtccttgaaagaaatgaccgcccggatgtgccactgagagccccgcgg

SEQ ID NO: 551880 - DNA, 90 bp, Homo sapiens
gcctgtcggagctgcctggagcagttattagaggaagtaacacaaggggatatgagtgcagcagacacatttctgtccgatctgccaagg

SEQ ID NO: 551881 - DNA, 101 bp, Homo sapiens
ctcaagtgatcctttcatctcagcctcctcagtagctgagactacagatgggcttaggtcacgagcaaggatttggagccccttgtttaaaatgcaaagaa

SEQ ID NO: 551882 - DNA, 82 bp, Homo sapiens
tgcgcagaatggtggccacctggatgctggagcctcagccctgaccctgtggaagcatttcgcgatggacagactcacaacc

SEQ ID NO: 551883 - DNA, 97 bp, Homo sapiens
ccgggccggccgcccagacgctgcccgcgggcccggccacggcggagccaagattcccaggactccggctctctctgcttctgtttccggtggctgc

SEQ ID NO: 551884 - DNA, 80 bp, Homo sapiens
agcactttgaggacatggcctccgacgaggacatgtgcctctgagcctcggaacatgatctacatgagccgcttgggtat

SEQ ID NO: 551885 - DNA, 98 bp, Homo sapiens
gaggaggacaggggcggggggcgggaggcttgccaccttcagcccccccgcgaacgcccaagctttcagaaggagttctcactcgaagataaagaaca

SEQ ID NO: 551886 - DNA, 91 bp, Homo sapiens
acgcaaaccaaggatctggggatcttcgcactatcccaagatctctggaaacatggctacagaacatgttaatggaaatggtactgaagag

SEQ ID NO: 551887 - DNA, 75 bp, Homo sapiens
ttgaggctgcggtcatggagggagcaggagctggatccggcttccggaaggtacatgtcccagagcaagcacacg

SEQ ID NO: 551888 - DNA, 83 bp, Homo sapiens
cgtggccttagctgtgctcgcgctactctctctttctggcctggaggctatccagctgcctgagattgtgagggagacccagg

SEQ ID NO: 551889 - DNA, 98 bp, Homo sapiens
ggtggagtgtctgcggcttctcaacgagatcatcgccgactttgacgaggttgactatagtcaatggggccaatggagccaagtgtatggaaacccac

SEQ ID NO: 551890 - DNA, 100 bp, Homo sapiens
gctggaccagctcatgggcacggctcgggacgctaaaagatggcggcaaggcagcccaggcaaatgtaagaataggcgatgtggttctcagcattgatgg

SEQ ID NO: 551891 - DNA, 100 bp, Homo sapiens
ctcagaccgagatctcaatcgcgctgaaaatggcctcagcaggtattatacctgaagaaccttagccctcgggtgactgaaagagatcttgtgtcattgt

SEQ ID NO: 551892 - DNA, 50 bp, Homo sapiens
gggtgacactcaacaggattcccgatttacagccagttacttactcagaa

SEQ ID NO: 551893 - DNA, 75 bp, Homo sapiens
gcccctgctaacgggaatgctgaaccctaaggactctgcaatatgaataattccctagagaacaccatctccttt

SEQ ID NO: 551894 - DNA, 76 bp, Homo sapiens
ccttgaaactgaatggaagaataactatcctcgcctgcgggaacttgaccggacttcacagagaatgcagttgtct

SEQ ID NO: 551895 - DNA, 83 bp, Homo sapiens
gcgaggcctcccgggctccgggaaaactacactggccagcaatgatcgtgcgcttcctgaccaagagattcattggagactat

SEQ ID NO: 551896 - DNA, 89 bp, Homo sapiens
ccagttccccggcagcgggacccggcgaagacgcgaccgcggcgcgagtcaccatgtttcactgttacatgccttgaagtgatgaggag

SEQ ID NO: 551897 - DNA, 83 bp, Homo sapiens
ctgggcttgtccttgctggtgcatgcgtcgtcggcctctgggcagcagttttcggctttgtgagaaaccttaccatcaaacac

SEQ ID NO: 551898 - DNA, 55 bp, Homo sapiens
gccttcgagagctaccgcgccagacaggacctggcaatgcccagacatctgtgtc

SEQ ID NO: 551899 - DNA, 98 bp, Homo sapiens
agaacagagcaacaagagcacaaagaaaaaaagaagaaatgaacagaataagaacattagttggtccgacactggttcagaatttgccatcgtcagtg

SEQ ID NO: 551900 - DNA, 87 bp, Homo sapiens
aatcagccttttcacgctcaagaagatggcagtgaacgtatactcaacgtcagtgaccagtgataacctaagtcgacatgacatgct

SEQ ID NO: 551901 - DNA, 90 bp, Homo sapiens
ggcttccccgacgcagcccagcggcacggagaaaggagcttgaagaaatccgcaaatgtgggatgaaaaacttccgtaacatccaggttg

SEQ ID NO: 551902 - DNA, 100 bp, Homo sapiens
agggccaaccagacatctacaaagcattcctggagattttgcacacatatcaggtacggttcctggagcagcagaacaagatgctggagaccaagtggag

SEQ ID NO: 551903 - DNA, 100 bp, Homo sapiens
ccaagatgcccgagtgctacttctactccaagttcggctgccccccggattatgttcctccagagatcttccatttccacacgcgctcggatgtgcggct

SEQ ID NO: 551904 - DNA, 111 bp, Homo sapiens
ttttccgaaagaccaaggcagctccctgcatctattggctcccactgactgacagccagacccaacatgagtgaagtttcctgcaagaaacgggacgactatttggaatgg

SEQ ID NO: 551905 - DNA, 100 bp, Homo sapiens
agccccgctaccggactacatgtcggaggagaagctgcaggagaaagctatccagtcagttcgctgctattcccatgggtcacaggagacagatgaggag

SEQ ID NO: 551906 - DNA, 97 bp, Homo sapiens
gctggtggtctgcatcaccaccggatcaacttcgacaaataatctgtctcgtaactgtgtaatcaaggaactagcaccacaacaggaaggtaaccca

SEQ ID NO: 551907 - DNA, 74 bp, Homo sapiens
ttggagcgaagagctcggaccaagcgctcagatactagagtaaaaggatggtttcttctggacaattatatacc

SEQ ID NO: 551908 - DNA, 75 bp, Homo sapiens
cgacctgaacctggaggcttccgaggcaatgttagcgatgctactaagctaaggccaaaggcggagttctgtttt

SEQ ID NO: 551909 - DNA, 90 bp, Homo sapiens
agacatggaccagggctacggaggctgttactgaggcggagacacgggtgatgattggctttctggggagagaggaagtcctgtgattgg

SEQ ID NO: 551910 - DNA, 75 bp, Homo sapiens
tgatccagagaacatgctggctacaactaattcacaaactcgcagaaccccaagtctttcgagtctcaattccca

SEQ ID NO: 551911 - DNA, 79 bp, Homo sapiens
agcacgagcagatcctggtcctcgatccgcccacagacctcaaattcaaagggatggagcctatagaggtgcctcttga

SEQ ID NO: 551912 - DNA, 88 bp, Homo sapiens
tgggcagaggcgaagggctggtgggcgatgggcccgtggacatgcgcacctcacacaggaagaggagatcccagaactggagattgac

SEQ ID NO: 551913 - DNA, 48 bp, Homo sapiens
aaaaaggttaaccgtggctccaccagttgtctgttttgatgccaagat

SEQ ID NO: 551914 - DNA, 75 bp, Homo sapiens
gcaaatcactctctttactgagggtggttctcttcccaaagtggaagccaaattcatcaattatgtgaagaattg

SEQ ID NO: 551915 - DNA, 75 bp, Homo sapiens
ctcgcatggtggccagggcacgtcactgcaggccagggatgatggcgccacttcctcagtttcggcactcaagcg

SEQ ID NO: 551916 - DNA, 90 bp, Homo sapiens
cattccgctgtgttgattgaggacgttcccttcacggagaaagattttgagtctcggtccagctcgacttccagctcaggctccagcacc

SEQ ID NO: 551917 - DNA, 100 bp, Homo sapiens
ttccctgggatctatacaaccatcaacgctcaccagtggtctgagacggtccagccaattatggaagcacttagagatttaatccagagactgacttcac

SEQ ID NO: 551918 - DNA, 50 bp, Homo sapiens
tgtcttaatatgttgattcagtccttagaggctttcgagctacccttgga

SEQ ID NO: 551919 - DNA, 82 bp, Homo sapiens
gatcaatccagatggcagccagtcagtggtggagtggaatgcagtagccctctgggcctgggatattgtggttgataactgt

SEQ ID NO: 551920 - DNA, 75 bp, Homo sapiens
agagccttgaggcagaggcagctggaccgagctgcggctgctgtgggtaacagagattcaaaggtaccttcagaa

SEQ ID NO: 551921 - DNA, 100 bp, Homo sapiens
ccctgacggactcatctttggaacaggaaccatggactctcagatcaagatctgggacttgaagcagcccctgtcaaagggaacaggaagcagtccacgg

SEQ ID NO: 551922 - DNA, 82 bp, Homo sapiens
cattgctgagccagcggagctgcttggtgttagtaaaatggcctttcgccatttaattgagttcacatatacagcaaaatta

SEQ ID NO: 551923 - DNA, 88 bp, Homo sapiens
ggagggcagccactccccgctggacagcgccgacgtccgggtgcacgtgccacgcacgaccccctcgaggacggtgccagactcggag

SEQ ID NO: 551924 - DNA, 100 bp, Homo sapiens
gagattttgccagagaaaggacgagcagcaagtcagggagcttaagaagtctctattatctgggggaatgtatcagaatttgtgagacggcagttaaccc

SEQ ID NO: 551925 - DNA, 123 bp, Homo sapiens
gtgcgcccgcagcctggcagaagaggctctgcgcacggacatcctgtgcaacctgcccagctacaaggccaaggtgatgctgtggagtcttcaaaaagcccgaccactctggattacaaattt

SEQ ID NO: 551926 - DNA, 50 bp, Homo sapiens
cctcccgagtggctgggactacaggacacttgtttaacaagacatctgcc

SEQ ID NO: 551927 - DNA, 100 bp, Homo sapiens
ataaatggaagcagggtaccgcgtccctgactatggctccccagagcctgccttcatctaggatggctcctctgggcatgctgcttgggctgctgatggc

SEQ ID NO: 551928 - DNA, 75 bp, Homo sapiens
gtcgccctgaggaacatcaacttaattgtccagaaaaggaatttgctcgccctgatacatcgaatgatagagttt

SEQ ID NO: 551929 - DNA, 96 bp, Homo sapiens
aagcagcccctcagatgttacaacaacaggtctcctctgagcctccggcctccataagacccaaaacagatgacacctcttcccagtcccccgcgc

SEQ ID NO: 551930 - DNA, 83 bp, Homo sapiens
attaatgtattccaccacctccgccagttaagaggaaaaaggcagacaagtttcagatgtatgtcacatattgcaaaaataag

SEQ ID NO: 551931 - DNA, 75 bp, Homo sapiens
gccaatttatcagaggactgcagcctatggccactttggtggagccgccaccaaaatgcagattttcgtgaaaac

SEQ ID NO: 551932 - DNA, 74 bp, Homo sapiens
atcatgtctgcgagccaggattcccgtgtctgcgagattaatctctcatggccgctgcacaagaacctggcttt

SEQ ID NO: 551933 - DNA, 75 bp, Homo sapiens
cttgaaaaagctgccctgagacggtgtcccgccgaaaggaaattgacaatggcccttcagctatgctaggtctat

SEQ ID NO: 551934 - DNA, 85 bp, Homo sapiens
aagaggcactgctgagggggcgcgaggggaacggaggccagagctgcggagtctactcttcatcttgtgttgagacttcgtggtg

SEQ ID NO: 551935 - DNA, 98 bp, Homo sapiens
caatgagtacaactaccgctgctggaccacaaaccgctgccagaaaagattgatcggaagatgtcaagtactcacaccagctacaaactggatgaggc

SEQ ID NO: 551936 - DNA, 73 bp, Homo sapiens
ggtcctcgatccgcccacagacctcaaattcaaagagtccctgtgagacggtttcacagaaggatgtgtattt

SEQ ID NO: 551937 - DNA, 99 bp, Homo sapiens
tgctctgggacctgcaggtcccggaaggtccttagggaggaccccagacaccggagactgggaaatgaattcctagaggacctgtgcaacaacctcttg

SEQ ID NO: 551938 - DNA, 74 bp, Homo sapiens
tcagaggacagtcgagctgaagacaattttaacttggaaaaggaaaggaaacagattcattgtctgtctgagga

SEQ ID NO: 551939 - DNA, 74 bp, Homo sapiens
gccagaaacattaccgtcatattccacccattactaagctatgtttccagtgtcctctgggtgtttccaagagc

SEQ ID NO: 551940 - DNA, 97 bp, Homo sapiens
caaagtcatcggccactggaccaatcagcttcatctaaaaactatgtcttcagcagtggtgcagttatatgcagcagatcggaactgtatgtggtca

SEQ ID NO: 551941 - DNA, 100 bp, Homo sapiens
agctgaatcttgacaagaccatagagagttgcaaagcacaattagacaccaatgggaatcccaatggggaagtcgatgctggtgcttctcaccttcttgg

SEQ ID NO: 551942 - DNA, 89 bp, Homo sapiens
ctgccggacatggtggtgtcccacctttttgggaaggtaaatgaagaaggcagtgaagcagctgcaagtaccgctgttgtgattgctgg

SEQ ID NO: 551943 - DNA, 83 bp, Homo sapiens
cctttgcaccctgcttggagacggacttgcttccggtgatattatacccaacttctaatagctccaaatcagctgaattacac

SEQ ID NO: 551944 - DNA, 75 bp, Homo sapiens
aaaaatgtgagactttttcttggacgaattcaggtgaccaagaatatggcccaggtgaccaaagccctggacaag

SEQ ID NO: 551945 - DNA, 99 bp, Homo sapiens
gctttctttcatcttcagcactggaaacgaatagaaggtgctcttaatctgttacagtgtacatgggaaggcagttatggaggttttgatgactatggt

SEQ ID NO: 551946 - DNA, 90 bp, Homo sapiens
cgacctcgtgaagatccgcttcgccggatacttttgtggaactctatgggaacaatgcagcagccgagagccgaaagggccaggaacgct

SEQ ID NO: 551947 - DNA, 50 bp, Homo sapiens
cggcgctgcgatccgcgcatataacggaatcagagatcattgatttcttc

SEQ ID NO: 551948 - DNA, 100 bp, Homo sapiens
tgcaaaaggaatcgtgctggaaaaagtcagcgtcaccctttacaccagaaagctggcgggcactatggggaaaaaacaaaacaagaagaaagtggaggag

SEQ ID NO: 551949 - DNA, 100 bp, Homo sapiens
cccaagcagcagcaggactcagaggcgagagtggccccagccgggccagaagcaggctgtgtggttccggtgctggtgccgtggaagtggcaatggcaga

SEQ ID NO: 551950 - DNA, 82 bp, Homo sapiens
cagatgcagactacagctctggagtttaggcaacggattatcttacggccatttatgccagtgttcttcctggagagttgat

SEQ ID NO: 551951 - DNA, 100 bp, Homo sapiens
gtagccttctctgtggcacgcgctgggcagaaaggctaccatcaccgcactgagatcaacaagaagggccaagtgatccagttctaagtgtcatctttta

SEQ ID NO: 551952 - DNA, 74 bp, Homo sapiens
agtgacccgggtgccgaggagcgggaagagttgctgggcttcgagagcatgcagaggctctgcgacaagtacaa

SEQ ID NO: 551953 - DNA, 82 bp, Homo sapiens
ctaaagatcctaggattgctgcaggtcagcagtctccactggaaaaaaagatcttgggggatatgagactttctactcggaa

SEQ ID NO: 551954 - DNA, 75 bp, Homo sapiens
gtagcagctggaaccatgacaggcatgttgtataaatgtacagtttggaaattttagcattcaggtgccaggaat

SEQ ID NO: 551955 - DNA, 97 bp, Homo sapiens
gcacaattctatctcttgggcaatcttcacggggctggctgctctgtgtctcttccaagatttcagcaacgtccctgatatcacaacaggtctgaaa

SEQ ID NO: 551956 - DNA, 101 bp, Homo sapiens
ttcacggtgaccttcgcttggtgtcctcctggcctcagcaacctgacaattctgtcgtgtcccggacactttgccaccatcaccttgaccttcatcgacaa

SEQ ID NO: 551957 - DNA, 74 bp, Homo sapiens
tcgtgcacttgcaggccgggcagtgcggcaaccaaatcggcgccaagctgccactgcagagccccgccatggaa

SEQ ID NO: 551958 - DNA, 75 bp, Homo sapiens
tgctggaggcagcgccatatcctggaggtgaaggtcgcgtggggcaggcagtggcgctgcgggccaaggccttcg

SEQ ID NO: 551959 - DNA, 75 bp, Homo sapiens
aagtttgaagattggctttgtaacaagattgaggaacagttgactttggaaaagttgcatgagtggactaaacct

SEQ ID NO: 551960 - DNA, 76 bp, Homo sapiens
gcccaggcggccttcgagaaaatgcaggagaagcggctgagcttccaacgcaaggtgggcatcctgtactgccggg

SEQ ID NO: 551961 - DNA, 75 bp, Homo sapiens
atctggctgttagaagaattcatgctcatccgggccttagaaaatttacgtgtatacctgtgtgagaaaatcata

SEQ ID NO: 551962 - DNA, 75 bp, Homo sapiens
gtcctccatgcgcagtcatgagtcgcttcaagtttatcggtcccagacaagccaatgaagagcatcaagtatatg

SEQ ID NO: 551963 - DNA, 101 bp, Homo sapiens
aagaaaacaggaatgtggtggatgggccatacgctggagtcatgacagcttatggaagaagcattgcatgcatttattcagccagagattctggatggccc

SEQ ID NO: 551964 - DNA, 74 bp, Homo sapiens
tcaactacaccagccagcccgaccagcttcctcttccaggccttcttgttcttgccttgtggcaatagctttgg

SEQ ID NO: 551965 - DNA, 75 bp, Homo sapiens
gcccaggccgcgccgccacgaggaatttaaactttgggataatgagctgcagtatgtggaccaacttctgaaaga

SEQ ID NO: 551966 - DNA, 83 bp, Homo sapiens
acagcaccggcaagaccaccttcatcagggttggttctggacattacacagcatacgcaactcacgaaggccgctggttccac

SEQ ID NO: 551967 - DNA, 82 bp, Homo sapiens
gtgaagccaagcaacagtttccttttcattcaggcccagaggcagagctacacaaccatggaatccaaattaattcctgttc

SEQ ID NO: 551968 - DNA, 100 bp, Homo sapiens
gcctcacaactccatcagatctgcccttagagatttgtttgattccatggataaaacttcttccagtattccacctattattctactgcagtttttgcac

SEQ ID NO: 551969 - DNA, 83 bp, Homo sapiens
ggcgcctcggccgccatggtcttcagcgccatcccaggcctcaggacctgagttctccgacgcccacatgacatggctgaact

SEQ ID NO: 551970 - DNA, 100 bp, Homo sapiens
ccagaatttcctgcgctgttccacctcattcaacttcaggcagcaaagcacctgctctgagtggccatggggaagcgatacttctgtgactactgcgacc

SEQ ID NO: 551971 - DNA, 101 bp, Homo sapiens
gcctctcagcttcggagaatggagtcttccatcaatcatatctcacaggttgcaaaagcttctcatttcagagagatgccaggatcctaagtgcctgccaa

SEQ ID NO: 551972 - DNA, 75 bp, Homo sapiens
cccctgtccaggctgaagaagactctgctggccactgccccaacccaggcatttcactgggcgcagtgcggacag

SEQ ID NO: 551973 - DNA, 100 bp, Homo sapiens
cccaggacggcggctaggccgtagtgcagcctctccggagtcctcagacgcccctgtcctggcaagagctagaaggtgagcgtgccagttcctgtgcaca

SEQ ID NO: 551974 - DNA, 80 bp, Homo sapiens
cttagaggacttccctttggatgtagcaaggaagaaattgttcagttcttctcaggaaactttaccctcccagaggtagc

SEQ ID NO: 551975 - DNA, 100 bp, Homo sapiens
ctttccccaaggaccagcttgacgaggcctggactgcatttcctacctagtgaagaaggggacagccactgagtccagcagagagatcccaatgtccaca

SEQ ID NO: 551976 - DNA, 75 bp, Homo sapiens
atgggtgatgtcaaagagaactatcttgaaacatttatttccagtccaaagctgatcagctgaccgaagaacaga

SEQ ID NO: 551977 - DNA, 100 bp, Homo sapiens
cagcactgtctccaccctagagaccaaacctggaccacccaaaaagccgaagaccccttcaagaccatcagccttagcatattgctatcactgcgcgcaa

SEQ ID NO: 551978 - DNA, 97 bp, Homo sapiens
tgattgtgaggcctccccagccacgtgaaactgtcctcttcctgatggatgggaacaagccatgactcaggatggagaaatttactatataaaccat

SEQ ID NO: 551979 - DNA, 74 bp, Homo sapiens
caatatttcgttccaagtaccacggctatccttatagctattgacctgaaaagtggttctggaaaagtgtacca

SEQ ID NO: 551980 - DNA, 75 bp, Homo sapiens
gaaaccgccaagtcctcccatgtcaggccggggaacactgggatgttatacatccaggctctaccagggcctttc

SEQ ID NO: 551981 - DNA, 101 bp, Homo sapiens
aagcggccccggtgctgtggtgcgacctccaaaggcaccagaagacttttctcaaaactggaaggcgctgcaagagttcgcccattgagccgagagatcac

SEQ ID NO: 551982 - DNA, 98 bp, Homo sapiens
gacgccgtcagtcctttcagcttcagcctgctcaagaactgcagcattgcagccgccaagacggacgccaggaaagcatgtgcagatgcaactctctc

SEQ ID NO: 551983 - DNA, 100 bp, Homo sapiens
atgggcccgtgggcatatttagtcattcatttttgatcaggagaaagaagacagccatcatttgaaagggccgttgctccagggagaactgcaaatatct

SEQ ID NO: 551984 - DNA, 100 bp, Homo sapiens
gataaaaatacaaagattatttgccagggtttcactggcaaacagttaagatcccagatgcagcttttattcaggcagcccgcagaaaacgtgaattggc

SEQ ID NO: 551985 - DNA, 87 bp, Homo sapiens
ggaaaccggtagcgcttgcagcatgacaacacaggcagttctacataccggccaccccctcggacccgggaggtgctgatcaacggg

SEQ ID NO: 551986 - DNA, 75 bp, Homo sapiens
cgtggggctggatgggaatcgtagtcttcctaggagttgtttgtcctggttgtggtcaagactggatgatgtaac

SEQ ID NO: 551987 - DNA, 73 bp, Homo sapiens
gcgaggcagctgtactaggactgggaacggagtcctgtgaagataaatcagattagcttggatgaaagtggag

SEQ ID NO: 551988 - DNA, 100 bp, Homo sapiens
tacctcttttttgctctccctcgagaagctccagatggcgtcttccgtgggcaacgtggccgacagcacagatgatgctgaataatcccctatttgctgg

SEQ ID NO: 551989 - DNA, 74 bp, Homo sapiens
ttcaggagagcctagatgagctcatacagggacattagtcatgagtgccgagtgtgcggggtcacagaagtggg

SEQ ID NO: 551990 - DNA, 75 bp, Homo sapiens
tcttacctgcccgatcctacttgtcctcccagattcagccgagagacacacaagattgcagtattttatgttgct

SEQ ID NO: 551991 - DNA, 75 bp, Homo sapiens
ttttcacatctaagaagaattggaaggttcagcatgttggcagataaattgaacatgactccagaagaagctgaa

SEQ ID NO: 551992 - DNA, 87 bp, Homo sapiens
ggcgcgtcagaacaggcgctgcggctgatcatctccatcttcctgggcatcgttggcttcacagtatgactgatgatcctccaacaa

SEQ ID NO: 551993 - DNA, 82 bp, Homo sapiens
cgttggtgctcacggccaaggccacgcaattctgtggtgttcttggtcacacatttatggagtttctgaagggcagtggaga

SEQ ID NO: 551994 - DNA, 96 bp, Homo sapiens
gggttcagcgtagactctggaccaggagaggcccgcggtgaccgaggcctgggccccggagtgtgaacatggctacgcctcttcattcccgtccat

SEQ ID NO: 551995 - DNA, 96 bp, Homo sapiens
ggactacccctttgccaggttcaataagctccagcagtacccgcggctacgggaggagatggagcgcatcgtgaccacccacatccgggagcgcga

SEQ ID NO: 551996 - DNA, 100 bp, Homo sapiens
aaactcgtgtccatcaaaatccagatgctggatgacacccaggaggcatttgaagttccagcctcattgctacgatttcagagtaccctggtaatagctg

SEQ ID NO: 551997 - DNA, 82 bp, Homo sapiens
catgcggctcctcggctggtgcaaaatgatgcttcaacacccaggccaggtctctgcctcggaagtgagtgcttctgccatc

SEQ ID NO: 551998 - DNA, 73 bp, Homo sapiens
gggagagtgacccagcctaccagcaataccaggatgccgctgtacctcccacaaggattaccccttccatgaa

SEQ ID NO: 551999 - DNA, 101 bp, Homo sapiens
cttctgctaacatccccgagcactggcactacatcagcttcggcctgagtgatctctatggtgacaacagagtccatgaccgtttccctggggagatggta

SEQ ID NO: 552000 - DNA, 98 bp, Homo sapiens
atggactttgttgtcccggtcccagaccaccctcctccaccgtcgcctcccactgcaaaaaggcctgggttccctcgacccaggaccccctgttccca

SEQ ID NO: 552001 - DNA, 83 bp, Homo sapiens
ccttggtttcaacactatcggaatgggaaaagcttcactctgaccatcactgtcttcacaaacccaccgcaagtcgccaccta

SEQ ID NO: 552002 - DNA, 90 bp, Homo sapiens
cgctgcgatgcctgtataacccagggactggcgcactcacagctttccagaaactagaaaaactgcttttggaattatctctacagtgaa

SEQ ID NO: 552003 - DNA, 100 bp, Homo sapiens
ctgtatcaactgatggaaagcattggtgggaatatgtggatcctacagttactctagaattattagatgctcttcagtaggttacctgcaacatccagga

SEQ ID NO: 552004 - DNA, 75 bp, Homo sapiens
cctcctcgccagcagccgtccggagccagccaacgagcgatgcctgctctgtgcctgtatctgagatcatcgccg

SEQ ID NO: 552005 - DNA, 82 bp, Homo sapiens
tgaaggacccggagccgaaacaccgtttccaacatggctagatccatcagaaactgaagccgtggagaacgctctcggggcc

SEQ ID NO: 552006 - DNA, 100 bp, Homo sapiens
ccaaaaccatggaggaggctagcaagcgaagctaccagttctgggatacgcagcccgtccccaagctggggactgctgagatgtcctctattcttgaaga

SEQ ID NO: 552007 - DNA, 51 bp, Homo sapiens
cgacagggccgattccggagtggtttcctccagcttatggaggcatatctg

SEQ ID NO: 552008 - DNA, 74 bp, Homo sapiens
gagctgtggctgccagaagatagcgaacaagagaagctgaatttggacgacagccagtgggaggacatccacgt

SEQ ID NO: 552009 - DNA, 95 bp, Homo sapiens
gctcagcggctatgaccaggtgctccacgaagacgaaaccacgaaatgagccgtcagactgctacagcattacctaccggtacctcgaagtgtcc

SEQ ID NO: 552010 - DNA, 99 bp, Homo sapiens
ctcaggctctgtcctcaggctggtggatgcggtcctgggggctgagatccggaatggcatggccatcattaggccctcgggaccaaggatcacgtcatg

SEQ ID NO: 552011 - DNA, 100 bp, Homo sapiens
cacccgaagaagagaccatccatatttccagggagtctgaagatacagtattgctcgtcctcaaagagatctaccaaacccagggtatcttccttgatca

SEQ ID NO: 552012 - DNA, 50 bp, Homo sapiens
actctggtctaaaaagggtccagaagaaatgcactcggtgatggaaagag

SEQ ID NO: 552013 - DNA, 98 bp, Homo sapiens
cacaaccaattcatagaatagactcccctggatttaagccagcctctcaacaggaactgttgaaaaaatgtcatcaatgtgtcgaaaccattgtgaag

SEQ ID NO: 552014 - DNA, 82 bp, Homo sapiens
tgcccaacgtgaaccagatcgggagtggcaccatggacctgcccttccagatataacacgtgggaaccggaggagaacatcc

SEQ ID NO: 552015 - DNA, 90 bp, Homo sapiens
gaggcgatttcctattacagcaagactgacgacaacagtggagacttggacccaggagtcttgctgacagctcaaactatcacatctgag

SEQ ID NO: 552016 - DNA, 96 bp, Homo sapiens
tgtaccaggcgaagctggccgagcaggctgagcgatacgacggtagtgggcagcagtcagtgacaggtgtaacctctgtggatgacagcaacagtt

SEQ ID NO: 552017 - DNA, 51 bp, Homo sapiens
gctgaggaacccgccgcgccgctgaacaaaaggttcatcctcagttttctc

SEQ ID NO: 552018 - DNA, 90 bp, Homo sapiens
ctaattttgacacagaaattcctttcctgctagaactttcagaatctcaggcgggtgagactcaaatccagtacctcaagcaagtccagc

SEQ ID NO: 552019 - DNA, 75 bp, Homo sapiens
gtggcatctcagaataagtttggacagttttgtacagtaggaatcatccgtccttggctcaggatttggagagct

SEQ ID NO: 552020 - DNA, 75 bp, Homo sapiens
catccatgtggagggctcccgccaggctctgaccctgcagggccgttgctccagggagaactgcaaatatcttca

SEQ ID NO: 552021 - DNA, 90 bp, Homo sapiens
atacttcaagaaaaatataaaaatcactggtatccagaaaaaccatcgaaaggacaggcctacagatgaaattgaaatggccaatgagca

SEQ ID NO: 552022 - DNA, 90 bp, Homo sapiens
aaccagaccccatggcctgctcagcctcagcgtggacatttgggagcaataaaaataagaagaaaggaaaagccagaaaaatagagaaga

SEQ ID NO: 552023 - DNA, 90 bp, Homo sapiens
tgcgcggagagcaatcgccgggacagctgcaaggttcctaaaagtaaagctttagaggccaccaaattggcaattgaagctggcttccgc

SEQ ID NO: 552024 - DNA, 100 bp, Homo sapiens
gaccctggagggcgagttctcggtcaccatgtggtcctcagatcaaatgatgccgtttggaaaaatttcccagcagttgtgtggcgtaaagaaactccca

SEQ ID NO: 552025 - DNA, 82 bp, Homo sapiens
ctaaatgcagattccagaaaaattacagcacatctcagtgaatttgcaagtgacacattccttaacccagcgcagggctgtc

SEQ ID NO: 552026 - DNA, 48 bp, Homo sapiens
aacttcaccacacttgaagctggacgtggtgggtcctctggtgcgaaa

SEQ ID NO: 552027 - DNA, 100 bp, Homo sapiens
gtgagatgaatctctaatcggtggccgccagacacccgcggcgaaggcggctcgggctcgggctccggttttgaagtacaggaagaaggttatctggcaa

SEQ ID NO: 552028 - DNA, 83 bp, Homo sapiens
ataagggcgacagcaacagctctgccggctggaaggtcccagccgtcggttcaagcgagtggtggagaccatccaggcacagc

SEQ ID NO: 552029 - DNA, 74 bp, Homo sapiens
tgtagaattctatgctccatgctgagacaggaggtggtggcctgcatgcgcagggacacgaccctggagacggc

SEQ ID NO: 552030 - DNA, 75 bp, Homo sapiens
gggggcggggagcagctggtggaccagctcatccgcgacctggatcttgtgctgtgaagacatttcccaagtgct

SEQ ID NO: 552031 - DNA, 46 bp, Homo sapiens
aggtggagccaccagcctctccttgccctccagaatacccatcata

SEQ ID NO: 552032 - DNA, 75 bp, Homo sapiens
caagaagctgcgaccaccccctgccaggggtccccgaggcctgcagggacctcatggaccccctggccgagtggg

SEQ ID NO: 552033 - DNA, 73 bp, Homo sapiens
gacccggtgtgtggcgcgcccagagccccgcgtttcagccctagggaagggtcgtcatgtcaaaacgggccag

SEQ ID NO: 552034 - DNA, 76 bp, Homo sapiens
gggagctgtgccagggcctgggccagcctggctctgtgctgcgggtgctctgatccagaatataagaagtttttag

SEQ ID NO: 552035 - DNA, 100 bp, Homo sapiens
agcgagggaggagccccccgacccagagatcctgaaggagctagacgagtgctacgagcgcttcagtcgcgagacagacggggcgcagaagcggcggatg

SEQ ID NO: 552036 - DNA, 121 bp, Homo sapiens
ggaagagcctcagaatttaatcaaacaaaattgtgagctttttgagcagcttggagagtacaaattccagaatgcgtttctcattaaccttgtgaagcaaaagccacaaataacagaggaa

SEQ ID NO: 552037 - DNA, 88 bp, Homo sapiens
gccgggggaccacagtgctggacaggtgacagagctgaatgaacctctctccaatgaagatcgaaatctcctctctgtggcctacaag

SEQ ID NO: 552038 - DNA, 88 bp, Homo sapiens
tgtacatcacccccatggaggccctggcagagcaggggacggactccgcctgctgttcccgcgctgagctacaggactcccgagtgtg

SEQ ID NO: 552039 - DNA, 89 bp, Homo sapiens
cgaaggaggcgggagcggagacctcgctgcgctcatggcgtcgcccggttgacgaaggatcagagattggtgtattcgggcagactgct

SEQ ID NO: 552040 - DNA, 97 bp, Homo sapiens
ggcggcggccacgccaaggacggactgtcttctgaagattgatgtctatttccttgagctctttaattttgttgccaatttggataaacatggcaca

SEQ ID NO: 552041 - DNA, 85 bp, Homo sapiens
ttagttcagcgcagcgactcggggacctggagctgacgcctatttgaaggatgacctctaggaagaaagtgttgctgaaggttat

SEQ ID NO: 552042 - DNA, 75 bp, Homo sapiens
atcgcatcctatggctcaaagaaagatgattatgagaattctcaccaaatgttcccaaatccttatcctcagctg

SEQ ID NO: 552043 - DNA, 90 bp, Homo sapiens
cagagatgcctgtaccgtgatgtgacgctggagaacctggcacttatgtcctccctggagtgtgaacatggctacgcctcttcattcccg

SEQ ID NO: 552044 - DNA, 101 bp, Homo sapiens
cccgacacgtcgtcttacatcaagataatcagcaactgctgtgatgagatgctgcctttaatgctgctgcatgtggtcaaacctccactcccagtctaccc

SEQ ID NO: 552045 - DNA, 88 bp, Homo sapiens
agatcctggtcctcgatccgcccacagacctcaaattcaaaggagttggtccaggtagcaatgatgagacccttttatctgctgttgc

SEQ ID NO: 552046 - DNA, 90 bp, Homo sapiens
tgccagtaatgaagatcacaaaatcgcttatgacccttctttgtcttcgcacgctgtcattttagaaaatgaagaacttcccaaactgtt

SEQ ID NO: 552047 - DNA, 100 bp, Homo sapiens
gcctgagttacgatgtattgagcgcgtcgtatgcggccagcactaagtattttcatctcagcctagtgacgatgaatcaagtagtgatgaaaccagtaat

SEQ ID NO: 552048 - DNA, 100 bp, Homo sapiens
aacagactagccactttgcattgactggaaacaatggcatttacagaaagagtcaacagcagtggcaacagacaacagaaaccagtggtaggactctgcc

SEQ ID NO: 552049 - DNA, 80 bp, Homo sapiens
cggaagcgtctttgctcaaggatcccagttttctctggatgacgtgcctgagcggtgcatccccgttcctgggcgagacc

SEQ ID NO: 552050 - DNA, 90 bp, Homo sapiens
gtagctttgggcttcaccatctttctgacagcgctgtcccggccaggaaccagcagcgccctttcagcagagaggcagcagagaaacttc

SEQ ID NO: 552051 - DNA, 100 bp, Homo sapiens
tgctgctgcacgaatcgccgcagcccccagccttgcgcgtcgtcgctacctcctcggacaggtcctccaaaagctggggaaagctgatgagacaaaagac

SEQ ID NO: 552052 - DNA, 100 bp, Homo sapiens
cctttacctgggacgtgaatgaagaggcgaagatgatgactttgaccagtttgataagcctggcgcggaacggtcgtggagaagaagagctgctgatgag

SEQ ID NO: 552053 - DNA, 75 bp, Homo sapiens
cacctacccatatgcatattacatggagtccggacccaggaagaagctggtttaaaaagtcaacattaggttata

SEQ ID NO: 552054 - DNA, 100 bp, Homo sapiens
tggcccaaccagtcccagcgctgtcgtgctcctctactcgcttggaactgcagttggctttttgctaccaccagttttagtacccaacacacagaatgac

SEQ ID NO: 552055 - DNA, 100 bp, Homo sapiens
gatgcttcagctcatcttaggctgtgctgtgaactgtgaacagaagcaagaacaagttgaaatcatcgcagaaggataaagttcgtcagtttatgatctt

SEQ ID NO: 552056 - DNA, 90 bp, Homo sapiens
ccgagagcgtgaccgagagcgcgaatatcgtcatcgttagaaggttacacggtgtgggcacacaacctcattgccattgctcgtcttcgg

SEQ ID NO: 552057 - DNA, 89 bp, Homo sapiens
aggaggccctgagtgagctggccactgcaccattaaaaatctcaagtgacgactttgggaaactctggttatccttcgcaaatgatgtg

SEQ ID NO: 552058 - DNA, 100 bp, Homo sapiens
gcggcggcggcaccaacggcaccaactattcgcggagctggaatgactggcaacccaggtcttctctgttggttgaaatgtctatgattttatctgcctc

SEQ ID NO: 552059 - DNA, 51 bp, Homo sapiens
tgttgaactcagctgcctgtaggccccttcacagatgtagtcactacaaat

SEQ ID NO: 552060 - DNA, 82 bp, Homo sapiens
ccgcccttcgccttcgttgagttcgaggacccgcgggtttccaggcctgaggtgcccgccctggccccaggagaatgaacca

SEQ ID NO: 552061 - DNA, 100 bp, Homo sapiens
aggccatcctggataacccggtggtgcagctgggcctgaccaacccgaaaacattgctagtttctgtgtttgaagaacatacgcaccttcctgaaagtct

SEQ ID NO: 552062 - DNA, 100 bp, Homo sapiens
ggctttgccattagcgggggcctttcctgaggacggcgtacggagtgtggaaatgcactcggtgatggaaagagagccactattctgaagaacacttggc

SEQ ID NO: 552063 - DNA, 74 bp, Homo sapiens
gcagccatgatctccttaacggacacgcagagcgagcgacggaggcgccggtgccaggtggcattcagctacct

SEQ ID NO: 552064 - DNA, 83 bp, Homo sapiens
ttcctgtacagcctgcagaactggaacccgagcgtcatgttagggtgaagcagaggacctcagtgctgaacatgctaaggagg

SEQ ID NO: 552065 - DNA, 75 bp, Homo sapiens
taaggattccaagtaactcttatttggaatccaaggcattgtagaggcgtatcggtcttgtcttcctcagataaa

SEQ ID NO: 552066 - DNA, 100 bp, Homo sapiens
tgacacttacaagatggacagggatgataattgggcctccaagaattgagaggatccagaatccagatctctggaatagctaccaggcaaagaaaaaaac

SEQ ID NO: 552067 - DNA, 100 bp, Homo sapiens
gcaaccattgacgccatgtcgggttattcgagtgaccgagaccgcggccgggaccgagggctgaaggtgatgtggccgccctcaaccgacgcatccagct

SEQ ID NO: 552068 - DNA, 100 bp, Homo sapiens
tctcatttgggatcagcgatatttcctgagctgctgagtcactcagaaatccttcaaacatgattaattatgaagatgaaacactagagtcatataagaa

SEQ ID NO: 552069 - DNA, 75 bp, Homo sapiens
cggcgagcgagctcctgaggtacggcgtcgggattctggaacttttcaaagcctgactctcttcttgaaacagtg

SEQ ID NO: 552070 - DNA, 100 bp, Homo sapiens
atggaggacgaggagagacagaagaagctggaggccggcaaagccaagcctcgaagcggaggatccctgtgtcccagccgggcatggccgacccccacca

SEQ ID NO: 552071 - DNA, 96 bp, Homo sapiens
cggcggaacccgtgggcctgtggactgcagcctcggcggtcagcagagacacctatggctgccgatgaaggctcagcagagaaacaggcaggagag

SEQ ID NO: 552072 - DNA, 75 bp, Homo sapiens
accccaacaccccactgttgcaagcttcaagtctggatagtcagaagtttgtgacagtgccctccagtaatgaag

SEQ ID NO: 552073 - DNA, 83 bp, Homo sapiens
cttaggcccagctgtcttggagcaaaacatctgttgtggggtggtgttcccactgatgaagagcaggcgactgggttggagag

SEQ ID NO: 552074 - DNA, 75 bp, Homo sapiens
tagacgaagcctttgaagaattaagagcttacgagaggccccagaaacattcaactctccattatgacacgggcc

SEQ ID NO: 552075 - DNA, 75 bp, Homo sapiens
cgcgggcgagcggagcgcaacactcgcttggttggggagatcggcgcttggccgcagaagatggctgtgccaccc

SEQ ID NO: 552076 - DNA, 100 bp, Homo sapiens
cgacgagtttgaagagttccctgccgaagcttaacaaacaacagttgcagttactgaaagaacggttccaggccttcctcaatggggaaacccaaattgt

SEQ ID NO: 552077 - DNA, 50 bp, Homo sapiens
tcgtagttctcaggcacggaatgcgttacatccttactattcaaagtgcc

SEQ ID NO: 552078 - DNA, 100 bp, Homo sapiens
cctgtgcaggtttccacctgcggccaccgtttctgcgatacctgcctgcaggagttcctcagaattcagaaggagctggcggacatcactttagaccctc

SEQ ID NO: 552079 - DNA, 97 bp, Homo sapiens
ttagcccgccgctgccgcctccgagcagcccgccagagtgtgaacatggctacgcctcttcattcccgtccatgccgagcccccgactgcagcattc

SEQ ID NO: 552080 - DNA, 100 bp, Homo sapiens
tagagctggcagcagcatctcagcccaagagaagggtctgcggaagagggagctgctgaaggagctgctaccagtcatcgggcagaacctccgattccag

SEQ ID NO: 552081 - DNA, 101 bp, Homo sapiens
agtcgtgcaggatctgaaggagtaataatttttcaccatgcatcggaaaaaggtggataaccgaatccggattctcattgagaatggagtagctgagcggc

SEQ ID NO: 552082 - DNA, 100 bp, Homo sapiens
tgggtctgatctggaccattattttgcatttccagtgcttagatgagtacgaagatgatgaagcagggcagaaagagcggaaacgagaagatgcaattac

SEQ ID NO: 552083 - DNA, 87 bp, Homo sapiens
gccgcacctgcagcgagtgccaggaactcttctggggagaccccgacgtggagtgccgagccacaacaagttgttcagaagaagcct

SEQ ID NO: 552084 - DNA, 102 bp, Homo sapiens
gtgggttcagtgtatcgacggataacagagttcacatattcaaacctgtatctgtgcaggcaatgtggaccctgatgcttggtgtgacctgagtaaatttga

SEQ ID NO: 552085 - DNA, 82 bp, Homo sapiens
tgaagacgctaggctggacgaagcagaaaggcgggtgtcactggggacgttctgaggcccgagacagtgatggagctgagga

SEQ ID NO: 552086 - DNA, 100 bp, Homo sapiens
cgccccgccgcgccgcgctccaaccgcctcctcctcctcagtaacgcggaaaaccatgataaattctggacaaaatacagaaaacccacaactctctgaa

SEQ ID NO: 552087 - DNA, 100 bp, Homo sapiens
ctttggataatgacgacagcaacccgaagacagggaaatttaggtttgttgataagccggggcccttcgtgggaccctgcggtcactggatcaggccctc

SEQ ID NO: 552088 - DNA, 100 bp, Homo sapiens
agggaggagaccggcacccagacaggtggcgaaggcagaggaacaatgcagatcttcgtgaagactctgactggtaagaccatcaccctcgaggttgagc

SEQ ID NO: 552089 - DNA, 51 bp, Homo sapiens
ctgtgcgccctcaacctgctttacaccgaaaaccagtagattcccagacat

SEQ ID NO: 552090 - DNA, 101 bp, Homo sapiens
gcagaatgtgaggtttgtctttggaaccacaccagaagacatcctcaggaacaaaggctgctccagctgtacttctactcccgaaggattgacatcaccct

SEQ ID NO: 552091 - DNA, 90 bp, Homo sapiens
gtgtagcagcattggttttccaaaaaatgtgagactttttcttggacgaattcagggttcatagtggcgtcatgcacgcagactcctgca

SEQ ID NO: 552092 - DNA, 74 bp, Homo sapiens
ctctgcaaaccaaacaaaggcgaccctcgaaaggccaccccagcagacatgtttgccaaggcctttcgggtcaa

SEQ ID NO: 552093 - DNA, 89 bp, Homo sapiens
tgggagcagaggaagccttgaggacctactcacagataggaattgaaggcctcccagaagttcctgccgaatcgtcttcgtcacccccg

SEQ ID NO: 552094 - DNA, 50 bp, Homo sapiens
ttttactactgtgacaacattaacggacagtcattttgtttactcattca

SEQ ID NO: 552095 - DNA, 50 bp, Homo sapiens
catgcccatggtggtactgtgaaagcaataatgacgatgaggacctgaca

SEQ ID NO: 552096 - DNA, 75 bp, Homo sapiens
atttaaagctgagctgcgaggaaaatggcggcgggagtgcagagcagagcgggcggaggaccccgggcgcgggcg

SEQ ID NO: 552097 - DNA, 90 bp, Homo sapiens
tgcgcttgcccctgtatgcggccatcaagtcagaatttcgctaaggagtttgtgatcagtgatcggaaggagctggaggaagatttcatc

SEQ ID NO: 552098 - DNA, 83 bp, Homo sapiens
ctgagaaggcccagcagatgtacgctgccaccaagggcctccgctggctttatcctgtggataaacgcagagtgaacgagttt

SEQ ID NO: 552099 - DNA, 100 bp, Homo sapiens
tggccgccgcgatgtcagctcagtgctgtgcgggccaggcatacaagaattaaattctgaataagtctgcaggtaggatggacagttattttaaagcagc

SEQ ID NO: 552100 - DNA, 101 bp, Homo sapiens
cacgtgcagacatctacaaccttcgatctcctgacgagtgaatatgaccatctcccagaacaggccttctatatggtgggacccattgaagaagctgtggc

SEQ ID NO: 552101 - DNA, 100 bp, Homo sapiens
tgtttctgtccaggcaagggtgtgtgctgaatgactcaaggattttttggaggcaaactatgcaagaggcaccagacttcctctttctggtgaaggacca

SEQ ID NO: 552102 - DNA, 88 bp, Homo sapiens
cgctgggtaatgaggatttgactgtgaaggaagccctcctatgacactgaaacagatcctagtgagggattgatgaatgttctaaaga

SEQ ID NO: 552103 - DNA, 100 bp, Homo sapiens
gccgtggtcatcttcaacgtgggctccaacaccaacgagaccatcaccatgccccacgcggggaaaacaaagtgcatgatgaagtcttcagactgtgtca

SEQ ID NO: 552104 - DNA, 82 bp, Homo sapiens
tggccaacgcagacaccatgaaggtgctgggagtgcagcggcctctcctacagaacagctttgctgagccatcaaggtctaa

SEQ ID NO: 552105 - DNA, 100 bp, Homo sapiens
gagaagagctatggacacagagaatttttccaagttacagctacctaggtgaccctgagagtgtggctggggagtatgggcggcactccctctacaaaat

SEQ ID NO: 552106 - DNA, 51 bp, Homo sapiens
aggcttgggacaacttggattctgactcgctgattcttgagaagagtcaaa

SEQ ID NO: 552107 - DNA, 100 bp, Homo sapiens
cctgcagatcaccgggggcgccctggaggagtccctgaagatctatgctcctctgtacttgagtaaccagagagcacagagaaatgctggtgaaactggc

SEQ ID NO: 552108 - DNA, 98 bp, Homo sapiens
cacagagaagcaaagatccaaattcccaggtatcgagaaccttccctgcgaacttcagaggaacttccagctgatgcgagagctggaccagaggacgg

SEQ ID NO: 552109 - DNA, 75 bp, Homo sapiens
acaaggcaaagcgaaattggtcattctcgctaacaactgcccagctttgagagatctgcagcgaataaccctgcc

SEQ ID NO: 552110 - DNA, 75 bp, Homo sapiens
ccaaattcaaaaaggataaggagatcatagcagagtacgatactcaggtcaaagttttttaggtggtggcggcag

SEQ ID NO: 552111 - DNA, 100 bp, Homo sapiens
tcaacgtgtactacaatgaggctgctggaagtggagagactgattttggacctcagctcaagaacctcaataagaagctcttcacggtggtcgcctggga

SEQ ID NO: 552112 - DNA, 117 bp, Homo sapiens
tgagaaaggacaatatatatctccatttcatgatattccaatttatgcagataagcatcagaagagctaacaattgctggaatgacctttacaacttttgatcttggtgggcacgag

SEQ ID NO: 552113 - DNA, 100 bp, Homo sapiens
cagaaggtgatttttctggtgatcgaggacttccggggtaatgacagtgatgaaatgcaggggacctggtttgccaataggattatcctgctgccatcat

SEQ ID NO: 552114 - DNA, 96 bp, Homo sapiens
atgtgtggtcttctcttcgactacccagtggtgtcatggagaaactccagctgggcccagagattctgcagcgggaaaatccaaggcttatttatg

SEQ ID NO: 552115 - DNA, 100 bp, Homo sapiens
gccttgagtggaacatgggttatatttggaaccttcgggcaaacaggattccacagtgtcctctggaaaatggctcaaagtctaactccccaggactata

SEQ ID NO: 552116 - DNA, 100 bp, Homo sapiens
cagccagcctggaccagactgtgcgcgtttgggatatttctgggtgaaggccatgccgcctcctgggaaagttccccgaaaggagaatctgtggctacag

SEQ ID NO: 552117 - DNA, 80 bp, Homo sapiens
ggatgcagtggaggccatcaggggccttgataacacagagtttcaaggaatacaaacagaagcttgcacgagtaacccag

SEQ ID NO: 552118 - DNA, 96 bp, Homo sapiens
cagctcccagaggatcaccagcgtgggtaatcattaccaaatgaggaggaaaggacgatgtcatcgaggctctgcagcgaggcatccttcttcccc

SEQ ID NO: 552119 - DNA, 83 bp, Homo sapiens
tcgggacttccagacactggaaaactggatgctgcagacactgaacgaggagccagtggtcagtcttcactgtttccaatgga

SEQ ID NO: 552120 - DNA, 97 bp, Homo sapiens
cgaagacttgaaggtagacaaagtaattcaggtacatcaggaacgtctctatcaagaatacaatttcagcaaggctgagggccatctgaaacagatg

SEQ ID NO: 552121 - DNA, 126 bp, Homo sapiens
tacagtttaagaattatcagcagctttttgattatatgaattctcagtccaagtttaaagttaagctgggctcaaaatgcagagaactcaaagatattcatttcggccagtgttacaagatctcag

SEQ ID NO: 552122 - DNA, 100 bp, Homo sapiens
cacctggaaatgtgaacaacactattgtcgtgccgcttttggaggatgggagaggccatggcaaaggtcacagggattatggacccagaacagatgctgg

SEQ ID NO: 552123 - DNA, 90 bp, Homo sapiens
aaacgcggcgcggccggctgccggaaaataaactcatcctgaaagtcgctgttgttctcctgctgagcaagaatggaggccccactggtg

SEQ ID NO: 552124 - DNA, 101 bp, Homo sapiens
caagtacccactggaccgtggttttgcaggaaatgtgaatctcaggagagagcagccagagtggctgttcggctcttgaatcccagcgatgaaaccaggaa

SEQ ID NO: 552125 - DNA, 75 bp, Homo sapiens
tggttccatcatggcgtcaatgcagcttttctgggagaagaggctacaaggacttagtgcatcagatgtaacaga

SEQ ID NO: 552126 - DNA, 139 bp, Homo sapiens
ttgcacatccttcgaaaagctgccaagttgaaaatggacgagtaatcgcctgctttgattcattgaaagaagttggtgaaccatctaaagaagagaaggctgtggccaagtatcttcgattcaactgtccaacaaagtc

SEQ ID NO: 552127 - DNA, 100 bp, Homo sapiens
ccctagcagccggccttcgggtcgggcgtctccgccggctactgccgcttcagttctcccggtgtggccacgagtcgggaggtgctaatgatgctggata

SEQ ID NO: 552128 - DNA, 100 bp, Homo sapiens
ctcgtcagcactgactttcagctatggaatcgggtaacgccatcctctgaaaatcctaatggtgctacttctagtgtcagccaaggaaaaccctctttaa

SEQ ID NO: 552129 - DNA, 98 bp, Homo sapiens
aaacaacagaagaactgagctatttttgaaagaacatgaccaccttcgaaaagatcatgatgcagccgtccttttggatttctttttaataatgtgtg

SEQ ID NO: 552130 - DNA, 96 bp, Homo sapiens
aacagctcccgctctcgattctacagtggttttaacagcaggccccggggtcgcgtctacagagaactgatagaaattggatgtgaggataaaacc

SEQ ID NO: 552131 - DNA, 100 bp, Homo sapiens
tagccgacctcaaattgtcttaaaaacgtgtcattccagattttcaaggaaagctcatgatggagcagtccaagaagtcctccctcatggtggcccgcag

SEQ ID NO: 552132 - DNA, 80 bp, Homo sapiens
gctccgtgcagaagctggtgacggatgaggacgtgttccccacaaaatacggcttgggcactgtttaaaggaaagttccg

SEQ ID NO: 552133 - DNA, 100 bp, Homo sapiens
aaagaccctgctcctctgttctccgcagcctgatggtccggtggcagccttcaaggtcgccacgccgtattccctgtatgtctgtcccgaggggcagaac

SEQ ID NO: 552134 - DNA, 110 bp, Homo sapiens
ggaagtactgagcctgttggaggaactggcccggaaacaggaggacgtcgccgccctggagaggcaggtgtttgacttcctgggctaccagtgggcgcccatcctggcca

SEQ ID NO: 552135 - DNA, 73 bp, Homo sapiens
tggaacgccctctttttaaaaaagcctgggttactaggtgtctttcagaagctgattgcatccaaagcaaatg

SEQ ID NO: 552136 - DNA, 124 bp, Homo sapiens
gccgctccgagtggaggcgactgggggctgaagagcgcgccgccctctcgtcccactttccagacaagttggatggcttgaggactggtactaaaaggaaacgtgactgggaggccattgccag

SEQ ID NO: 552137 - DNA, 75 bp, Homo sapiens
gttaatcctcaatttaagcctgatctaacccctagaaacaggtggaatatgtgatcaagtgtgacatgtcagctc

SEQ ID NO: 552138 - DNA, 75 bp, Homo sapiens
acatgtgggtactgcattcctaccggtgtgacagacccccccaagacacatatgacccaccaccccatctctgac

SEQ ID NO: 552139 - DNA, 100 bp, Homo sapiens
gcggggagggcatgttccgtggcctcgcccaggccgacgggttgcactccaggacttgcagacgaactccaagattggggcactcctgccttactttgtt

SEQ ID NO: 552140 - DNA, 100 bp, Homo sapiens
tgggaacatgctaaatacaaatggtatcttaagtttgtggggacattcatggacaattctttgatttgatgaagctctttgaagtcgggggatctcctgc

SEQ ID NO: 552141 - DNA, 83 bp, Homo sapiens
actgcagcccctgcgtcgccgggaccctcgcgcgcgaccgccgaatcgctcctgcagcagagaataccgtagcagtaggcagg

SEQ ID NO: 552142 - DNA, 75 bp, Homo sapiens
cccagctgagcgggcggtcattcgcatcgcaggtctcggcgcggaagatggccggcggcgtggacggccccatcg

SEQ ID NO: 552143 - DNA, 111 bp, Homo sapiens
ccggacggtacttctgccactgctgctccgtggagatcgtcccgcgcctgccgctcctgtccaaatatgacccccagaaggaggcagagctccgcacctggatcgagggac

SEQ ID NO: 552144 - DNA, 100 bp, Homo sapiens
ttttgatttattagagatgcttgcatcatttaaaccaccctcaggaaaagtggcagtggatgatagtgaggtatgaaataatgtactcttgctggagaac

SEQ ID NO: 552145 - DNA, 95 bp, Homo sapiens
atgagacagcagccaaacccccaggttctgcacttttaaaagaaaagcaaaggcatcgattacataagttcttgtgtctcagagttggaaaacca

SEQ ID NO: 552146 - DNA, 82 bp, Homo sapiens
gacgaggtgtcggcgcgggagcagcacttccacagccaagtgcgggagtccacggtgttttggggaacgagtttagtatatt

SEQ ID NO: 552147 - DNA, 83 bp, Homo sapiens
ctaggtcagccatccattatcaatcacatacggatactcttgtgggaccgagatagccgaacccacaatacattatatgcacc

SEQ ID NO: 552148 - DNA, 75 bp, Homo sapiens
ctgtatgagaaggacaacacctacttaggaaggtgtcttgctgcaggtaactaatgaagaagtggtcaaccacag

SEQ ID NO: 552149 - DNA, 100 bp, Homo sapiens
gatgtctggtggggcggagcagacacagactatgcagatgggaggtccttatgtcgtcagaagatcgagaagctcaggaggatgaattgctggccctggc

SEQ ID NO: 552150 - DNA, 83 bp, Homo sapiens
caggatagacaccaaggcaggacccccagagggagtgcatccgccccaacccttttccccctcgtctcctgtgagaattcccc

SEQ ID NO: 552151 - DNA, 83 bp, Homo sapiens
ctggcatcccacagcctcctcttccagaatgcctttgcgcagttatctccagaagaagaagagaaaaggagaatccgaaggga

SEQ ID NO: 552152 - DNA, 90 bp, Homo sapiens
ggaacaacggtttcgctctttggaaaatacggataccccatgtttccccatcactcgaggagtctgggcagagactggactacaccgtgg

SEQ ID NO: 552153 - DNA, 75 bp, Homo sapiens
gccgaagcccaaaaagctgaaggtggaggcgccgcaagcgctgaggttctaagctggtctatgtccatcaccttc

SEQ ID NO: 552154 - DNA, 83 bp, Homo sapiens
cagtgacatgcccatgcgagtacctgaggaagacctggaggcagaagccagccttccagaaaagaaaggaaatactctgtctc

SEQ ID NO: 552155 - DNA, 100 bp, Homo sapiens
tctaaccctcctttatgtgactcagagaaaggagacctcattccaagttccaggattaattctggaaacccagcgtttgctggcagaaccagttcctggc

SEQ ID NO: 552156 - DNA, 113 bp, Homo sapiens
aagctatatactttggttacctatgtacctgttaccactttcaaaaactctgggacatctggagaaagctgtagtcttggaattaactttgaaacacttaaaagctttaaccg

SEQ ID NO: 552157 - DNA, 98 bp, Homo sapiens
ggggccttgtgtcctaccatggtatttgctaacgtttagagagtgcttccccttgccgagcactggggggcgacgcttcagagactgacaacctctgg

SEQ ID NO: 552158 - DNA, 49 bp, Homo sapiens
taaaaatcaccagttactttaatgagggataaaaacattcagatggcag

SEQ ID NO: 552159 - DNA, 51 bp, Homo sapiens
agatgcccatattcagcaaatgtccacagatcctggtccctacaaataagc

SEQ ID NO: 552160 - DNA, 90 bp, Homo sapiens
gaggcggcggagcgcgagagcttcgagcggactcagaactgccattggatgtccagaatcccctgtagttgataatgttgggaataagct

SEQ ID NO: 552161 - DNA, 100 bp, Homo sapiens
cagagtcaaagaagaaaccgtgctcagaaactagccagattgaagctcctacagaagaagggaaaaaagagctgctgttcctaagtaacgcgaacccctc

SEQ ID NO: 552162 - DNA, 100 bp, Homo sapiens
gcggctcagatcacccagcgcaagtgggagcccagccgaggcactgaccgcctggatctacctgtcactactcgctctgtccatcgaaactttgaggacc

SEQ ID NO: 552163 - DNA, 102 bp, Homo sapiens
atgccagaaagaggatttggccagagcgttttgttttcattgtactgacaacctcagctggcatcatggaccatgaagaagcaagacgaaaacacacaggag

SEQ ID NO: 552164 - DNA, 100 bp, Homo sapiens
atggcaattttttgtggaacagaattggagcagctgagatctgtatctgtggacctgaatgttgatccctcgcttcagattgacatacctgatgcgctca

SEQ ID NO: 552165 - DNA, 80 bp, Homo sapiens
ggctctggaacaacacggtgttcatcttttctacagggacttgccatgaggtgttgaagccttgtttcactgagttggag

SEQ ID NO: 552166 - DNA, 90 bp, Homo sapiens
agaaaaagagcaggaagtcattacatggtctcagctgagtctgctctgatcacccaacaagacctagctccccagcagagagcggcccca

SEQ ID NO: 552167 - DNA, 90 bp, Homo sapiens
gtggggctgaatccgcccgggctacgctcctccatcacgtgaaatgagccgtcagactgctacagcattacctaccggtacctcgaagtg

SEQ ID NO: 552168 - DNA, 76 bp, Homo sapiens
acataccaagaatgatatattgcattcacgcactgaggttggtcaaagaaaaagtgatgtatgaaaaagaggcaaa

SEQ ID NO: 552169 - DNA, 51 bp, Homo sapiens
acggaacttgccgcgtcgaggactgtcggcctagtggaggccagtataaga

SEQ ID NO: 552170 - DNA, 75 bp, Homo sapiens
cagggccgtgccgcagatgcccaccggaatggagaaggaagaggagtcgatgaaattgtgctccaagtgttttcc

SEQ ID NO: 552171 - DNA, 100 bp, Homo sapiens
gattttgtaatggaagggcatggcaagactccacctcctggtgaagaaagcaaacagttttgcgtgtgaagctgtgtggaaatgtgaaatactaccagtc

SEQ ID NO: 552172 - DNA, 75 bp, Homo sapiens
cctgcttcagtctgtgagcaccagggagcaggaaagccaagtgggtcatgataactgggtacgtggagttctgtt

SEQ ID NO: 552173 - DNA, 75 bp, Homo sapiens
cacttttggaccaaaggcctgtgtgctgcagaacccccagaccatcattgtggacgaatgtggaacctcgctctg

SEQ ID NO: 552174 - DNA, 88 bp, Homo sapiens
aggtgtgtgctgaagatggatcaccactgcccacggatgataccatcggggaccttaagaagctgattgcagcccaaactggtacccg

SEQ ID NO: 552175 - DNA, 50 bp, Homo sapiens
ctccccagccatgtggaactgtaacgatgactcggacatagacatccagg

SEQ ID NO: 552176 - DNA, 82 bp, Homo sapiens
gctgaattggatgaaagataaagcccttaaggacaaggaagtatttgaaaaggagcagtccatctgtgctgcagaggaacag

SEQ ID NO: 552177 - DNA, 90 bp, Homo sapiens
gggattgggaaaatctcttcaggaacccttaggagaaatcttgagagtggacagcaattgtgaagatcgccagagagttctgtgtttcat

SEQ ID NO: 552178 - DNA, 100 bp, Homo sapiens
atcacataaactgctccacagattatttagaggtgtgatgaatgcagactctgctaccattttggctgtttggatcctcctttgaaaaagtctcctaaac

SEQ ID NO: 552179 - DNA, 75 bp, Homo sapiens
ggaatattttgtgccacacacaaaaagggcaagaagactatgaccggctgcggcccctgtcctaccagaacaccc

SEQ ID NO: 552180 - DNA, 82 bp, Homo sapiens
cgacagctgctcctggctacatagctccagtatcaacaacctgcaggctgagttaaacaagatttttgccctgcggaagcaa

SEQ ID NO: 552181 - DNA, 100 bp, Homo sapiens
agtgttcaccatcctggccccggaagctacgagttccagggagctctgtcctggtgaccgtgcccgggttatgacgactaatcccaaaccgaataaggca

SEQ ID NO: 552182 - DNA, 83 bp, Homo sapiens
cctgtttggcttcaacattgtcttctggtcgccctggcagcatacaagtggctggtttgctacctgctccgagagacttatca

SEQ ID NO: 552183 - DNA, 97 bp, Homo sapiens
agagcgccagcatgaacttgggggtcagcatgctgaggatcctcttcctcctggatgtgtcttgctgaatcagggctctcttatccctgccatcgac

SEQ ID NO: 552184 - DNA, 75 bp, Homo sapiens
tccagttggaattgaagaatattcccaagtccttcacccggggtcccgggattcttgagctgtgcccagctgacg

SEQ ID NO: 552185 - DNA, 82 bp, Homo sapiens
ccagagctgcatcattccttggggcaaaatgtggacaaggagaaagcttcttgctatctacctccaccatgatgaaagtgtg

SEQ ID NO: 552186 - DNA, 75 bp, Homo sapiens
cctgcacaccaagggcgcccttcccctggatacggtcactttctacaagtttctggcccccaaagacaaaccaag

SEQ ID NO: 552187 - DNA, 101 bp, Homo sapiens
ggggaggcagcgcgggatcccagcctcaggcgtgcgcggacggtgtgcggaaacctccacagctgttgagaaaaaggagaaacctcttccaagacttaata

SEQ ID NO: 552188 - DNA, 100 bp, Homo sapiens
agcccggcggcagcagctggaggaggatcgcactgctcatcttggccatcactatacacaacgttccagaaccactcacgaattcttgtttggtgccctt

SEQ ID NO: 552189 - DNA, 100 bp, Homo sapiens
agtgctatgttactgcaatggcatgaaaagtggatccggattggtgccaatgtctccaacttcacttttgctcctagcacgattatatttcacctgggac

SEQ ID NO: 552190 - DNA, 76 bp, Homo sapiens
ctgagaagtatgtctgatccagaccaggactttgacaaagaggagagaagatgactgaggaggaggtggagaccgt

SEQ ID NO: 552191 - DNA, 98 bp, Homo sapiens
tacctgcccaaaggaggaagacactgacgctggataaaacaagccttagaagaagggatgactcaaacatcatctgtaccccaagagactagaactca

SEQ ID NO: 552192 - DNA, 50 bp, Homo sapiens
aggaaccacacgctgatcatgattggctctaccagtgcacctggacaggg

SEQ ID NO: 552193 - DNA, 82 bp, Homo sapiens
catacagatgtccgcccctaccactgcacttactgtaacttctcctttaagactaaagggtttttaagtaccggtgaccagg

SEQ ID NO: 552194 - DNA, 83 bp, Homo sapiens
tgtctgactctgactctcggactgagaaacgcaagatgagcgggatcgtgtgcagaagaaaaccttcaccaagtgggtcaaca

SEQ ID NO: 552195 - DNA, 101 bp, Homo sapiens
gaaacaatcacatgaagactaaagcatctgtcagaaaagtggatctccttacgtagcagccaaaataaatgaagcaaaagacttgctagaaacaaccacca

SEQ ID NO: 552196 - DNA, 51 bp, Homo sapiens
ggaggagtctttgacagttgaggaacgtccttgtgaagacctttatctgag

SEQ ID NO: 552197 - DNA, 99 bp, Homo sapiens
gttctgagattgaaacccagacagaggggagcacagagaaagagaatgatgaagagaaaggcccggagactggtctagctggtgaaagaggagaacaag

SEQ ID NO: 552198 - DNA, 75 bp, Homo sapiens
ggaatctggattgtcacctttgctgcaaaaaattacggccattctcatctcagatgatgatgaacagagaacctt

SEQ ID NO: 552199 - DNA, 95 bp, Homo sapiens
agattagcaaaggtgctaatccagtggaaatcaggagagatctgactgcagccatgagcagcaatgagtgcttcaagtgtggacgatctggccac

SEQ ID NO: 552200 - DNA, 101 bp, Homo sapiens
gggcagaatcccagctgcccctcccagaacactccatgccactggaactcaggagcgcaggcccgatgagagaaagggaaagttaaggatgctggagcaga

SEQ ID NO: 552201 - DNA, 82 bp, Homo sapiens
agagcgacgagcaagaagcagcccaaagtcgaatgattcagacttgcaagctttaccaacagggacgcttatgtcaactggg

SEQ ID NO: 552202 - DNA, 80 bp, Homo sapiens
aaccccagcgactcttttatgggcgtctctggccgagcctctttttgtggaaaacgacagcagcagcagtggcctggaag

SEQ ID NO: 552203 - DNA, 100 bp, Homo sapiens
cgagaagcctgaaaagtcgcagcgagctggagccgccggaggttctctttgtaaagaatccttttctggtcaagtttcttcttcatcactcatgccactt

SEQ ID NO: 552204 - DNA, 75 bp, Homo sapiens
ggcgacgagctgaccctgggagacatcgacggtattaatctctggagaagacacatccacagttagcactttctt

SEQ ID NO: 552205 - DNA, 99 bp, Homo sapiens
aaagtgaagctgtttcgggccagcgacccgctgctcagcgtcctcatgtggggggtaaaccactcgatgtttgagacggaggcagatgagaagagggag

SEQ ID NO: 552206 - DNA, 82 bp, Homo sapiens
actgattagcaatttaaagatcctctccaaggtcagtaggcatccagcgctggggcagctgcttcaggacatcgccgaggac

SEQ ID NO: 552207 - DNA, 90 bp, Homo sapiens
gggcaagctccagagcctgccggaaggctccctcggtcgcgagtatctccgtttcctggatgtgaacctggtattccctctcgagtggtt

SEQ ID NO: 552208 - DNA, 74 bp, Homo sapiens
aagaaacagttctctcaatacataaagaacagcgtaactccagacatgaggttggaaagaaccatgactgtatt

SEQ ID NO: 552209 - DNA, 99 bp, Homo sapiens
aagaagaagaagaagtctggaggcttccagtccatgggtccacgccaccctggagctgtttgccctgatggtggtagtgtttgaactctgcatgaagtt

SEQ ID NO: 552210 - DNA, 90 bp, Homo sapiens
atgttacagctgctcatgaaccacttggcaaaaatccacattcatctcaatggaaggatcctgccttaagtcaacttatttgtttttgcc

SEQ ID NO: 552211 - DNA, 82 bp, Homo sapiens
cacagcaccccgggctggcgtgagggagtgcatccgccccaacccttttccccctcgtctcctgtgagaattccccgtcgga

SEQ ID NO: 552212 - DNA, 122 bp, Homo sapiens
cctcagtcacctgcccgcgcgagggaggaagagaactactcctttttacctttggttcacaacatcatcaaatgggacagagcagaatgggctgatatagatccggtgccgcagaatgatgg

SEQ ID NO: 552213 - DNA, 50 bp, Homo sapiens
gagaaagcaccccaacttatgcgctttgaacttcaagattcaggaagctc

SEQ ID NO: 552214 - DNA, 74 bp, Homo sapiens
caagtacttcgtggaagggcgctgcacctgggattacggggcgctgaaagacatcgtgatcaacgcaaacccgg

SEQ ID NO: 552215 - DNA, 121 bp, Homo sapiens
agggcctggggaatgcttttttatctcatattagtgcctgtgatggcatctttcatctaacacaatctttagaacacgatgttcttgatgataatacagagcagacagatgacaaaatacc

SEQ ID NO: 552216 - DNA, 126 bp, Homo sapiens
ttctctatgccttggacagagacccaacagcttatgcattagctgaacatctttcagagttgtatcctgccctacttgttttgctccaagacagcctgctagcaacagccagttctcccaaattct

SEQ ID NO: 552217 - DNA, 75 bp, Homo sapiens
cgcgtccggcttggatatcttcggggacctgaagaagatgaacaagcgccagactatatcatcatgtacatagaa

SEQ ID NO: 552218 - DNA, 100 bp, Homo sapiens
aataccgcaggagggcggtcttccccggctcgccaactcggctgctctgggggattcgtgcgcggacctatacgaggcaggggaactgaaatggggaaca

SEQ ID NO: 552219 - DNA, 100 bp, Homo sapiens
gagcactgacctggccaaggcctcatcctgacttttttgtataacgagctctatgtctacaataccagaaaggacacctggaccaaagttgacatcccca

SEQ ID NO: 552220 - DNA, 74 bp, Homo sapiens
aagtggctgagtacctgaccccggtcctcaagagagcatcagtgatgtcacgtttggagcaggggtcagttaca

SEQ ID NO: 552221 - DNA, 100 bp, Homo sapiens
cctccggttggggctgctgtttctcttcgccgacgcccattccagatgatgggatttattggcaggccaaccttgacagattccaccaacacttccgtga

SEQ ID NO: 552222 - DNA, 100 bp, Homo sapiens
agatctcagagaaggaggaggtgaccacgcgcgaggtgctggagaatctggtaaaagcaccattgtgaagcagatgaggatcctgcatgttaatgggttt

SEQ ID NO: 552223 - DNA, 75 bp, Homo sapiens
ccagagcccattatccctgtcactcagccccggtgacatcactcaaaaaggatatgaaaagaaaagggcaaagct

SEQ ID NO: 552224 - DNA, 75 bp, Homo sapiens
gaggcaacactggccaagaagaggaaaggattacggtgggatcatggcagggctgggctccgatccctggtggaa

SEQ ID NO: 552225 - DNA, 98 bp, Homo sapiens
cgaacccctttatctctggaatccactcggtccccgactcagagactcctgccctccacccccaaggtctggagcccccaactcccttgacagtgtac

SEQ ID NO: 552226 - DNA, 75 bp, Homo sapiens
gcgttggggtgagaccctcacttcatccggattacatcccagtagaccaagaagagttaagagattatgtcaaag

SEQ ID NO: 552227 - DNA, 83 bp, Homo sapiens
gggtgaggaagatctgtccatcaaggtccaagcatctcattttgaaggcctaatcacaaccatagttgggtatatacttttag

SEQ ID NO: 552228 - DNA, 80 bp, Homo sapiens
gaattaaaaaaactcatcgaggaggtgaaggttctggatgaagcaacattaaagagctggaagtcgagtgtgctactcaa

SEQ ID NO: 552229 - DNA, 100 bp, Homo sapiens
gccctgggtgaagtgctccgccgcccttgcctccagagctcccagctcctccagcagccgacaggaggcccgtcaagatgcaggcaggcattgccacccc

SEQ ID NO: 552230 - DNA, 96 bp, Homo sapiens
cactgtcaaggatgacaaggaaagtgtccctatctctgataccatcatcccaggcagcaattctgcatttcttcgagtggtaagatgtcgatcctt

SEQ ID NO: 552231 - DNA, 98 bp, Homo sapiens
ctacctggatgaaaactacaaatcccaggagcacttcacgcgctgtgcttcgccgtgagccgctcgctgctgctgacgtgcctggtgccggccgcgct

SEQ ID NO: 552232 - DNA, 100 bp, Homo sapiens
gcgacccggcggctgtggaggccacgctcagctcgccaggcggcgcaggttctgggaggtgatcagtgatgaacatggcatcgaccccaccggcacctac

SEQ ID NO: 552233 - DNA, 78 bp, Homo sapiens
gacaggagttcatctacccggagaagcaggagccctactcggcaggcgcctgtgtctggcagagctggtgtgagacga

SEQ ID NO: 552234 - DNA, 50 bp, Homo sapiens
cgctcacagagagctgggctacaggtggcagagagcctccagctggtgac

SEQ ID NO: 552235 - DNA, 90 bp, Homo sapiens
gtggccggcagtcatctcgcggccgttcagcagttccaagagcctctgagttcctgccttttttcatctctgaatccccaccattggcct

SEQ ID NO: 552236 - DNA, 83 bp, Homo sapiens
tgacaatggctttggtccccagcgcagtgaagtggtgagcctttttgtcactggtgtgctgatgtatcgggactaccccctgg

SEQ ID NO: 552237 - DNA, 48 bp, Homo sapiens
tgagatggtggccaaacccccaggtgctggagaatctggtaaaagcac

SEQ ID NO: 552238 - DNA, 75 bp, Homo sapiens
ctggaagcagcagctcaccgaggacggggactcatctgacagacatccctgaatcttggtgtttggacataggag

SEQ ID NO: 552239 - DNA, 49 bp, Homo sapiens
cgcaagttaggcgggattatttgaaagtgtaaacaggaacatcgataag

SEQ ID NO: 552240 - DNA, 90 bp, Homo sapiens
ggggggagcgcggggcgacgctggctgcagggacccggtgacagcgtgagaggttcgcagaggcagatgattctggaccagatgaagcct

SEQ ID NO: 552241 - DNA, 100 bp, Homo sapiens
gagcatgatcggcatgtccaccaaggcaggctaagtcctatcagccatggaaacaccattgctctcttcttccggtcactgttgccaaactataccatgg

SEQ ID NO: 552242 - DNA, 100 bp, Homo sapiens
attactaaaagttgatccttcgggagtttcattaccagcagctccaacaccgccgacattagtagcagatgaaactgttgattgcactgccaacactaac

SEQ ID NO: 552243 - DNA, 75 bp, Homo sapiens
gccccatctatgagttcaagatcacatggtggttatacattggctcttcaaagacgttcacctcatcagagaaat

SEQ ID NO: 552244 - DNA, 82 bp, Homo sapiens
tgccactggtcaccctccccaaagggcacgctatcatcactaactacttgttgaactatttccctggtcttgaccttgaaag

SEQ ID NO: 552245 - DNA, 82 bp, Homo sapiens
gccacttgcttgggatcctttatcctggtcatcttctatttccaaattgattatggaagattcccacaagagtaccacgtca

SEQ ID NO: 552246 - DNA, 124 bp, Homo sapiens
ttctattcactaaaaccatgtgtctgaactgaagaagcttgggctcacttccacaaatgtgatctgcaactctttcaccatctgtaatgcggagatgcaggaagttggtgttggcctatatccc

SEQ ID NO: 552247 - DNA, 51 bp, Homo sapiens
tcgggttccccatctcatgctgctggttatattctgggcactaaatgaagg

SEQ ID NO: 552248 - DNA, 100 bp, Homo sapiens
aatgctcctatgttaccgccacctaaaaacaaagaggattttgagaaggaagctgtgctgaatggtttggtggccactgaggtgttgatgtggttttatg

SEQ ID NO: 552249 - DNA, 80 bp, Homo sapiens
cgagatgaagatagctatgtaattaacggcaaaaaatggtggagcagtgtgaatgatttgggaggggacttcaaaggagt

SEQ ID NO: 552250 - DNA, 80 bp, Homo sapiens
caaatgcggggacctggtgttcgccaagatgaagggctacccacactggccggcccgggagaaccaggtgcatcagcgca

SEQ ID NO: 552251 - DNA, 93 bp, Homo sapiens
ttcttcttcttcagcgagattcctgagccgttctatccctttatataagtttggagagacagtttctattgttttttggacagacacttggag

SEQ ID NO: 552252 - DNA, 96 bp, Homo sapiens
cgatggtaggcgtccctggagcggccgccttccagcgctcattggtgggcagtattacttatgggaattgctctgatcatgctaatggctggattt

SEQ ID NO: 552253 - DNA, 80 bp, Homo sapiens
ggtccacaaagacgagtgcgccttctccttcgacacgccgggtgtccgcaatgttgccagtgtctgtctgcagattggct

SEQ ID NO: 552254 - DNA, 75 bp, Homo sapiens
cgtcgccgccgccgccgccatgaacaactcgggcgccgacgagatcggacccgcggcccccacgtgcgcactccg

SEQ ID NO: 552255 - DNA, 82 bp, Homo sapiens
gggtgaagctggagatatttcggatgagcagcaccagcagtaagagggctccgaccacggcaacccagaggctgaagcagga

SEQ ID NO: 552256 - DNA, 90 bp, Homo sapiens
ctgcatctctgcctggaatgaccagcccgctcagagcgataccaccacatggactcggaggatgaggaagaagtgagtgaggatggctgc

SEQ ID NO: 552257 - DNA, 97 bp, Homo sapiens
tgggacacctctcggagccactaatgaaccgcctggaagacaagatctgtcctgcgatgcggccgctgccaccaccatcctgggaggggaccggcgg

SEQ ID NO: 552258 - DNA, 100 bp, Homo sapiens
cctgtactgcgatgtgatgctggagaactttgcacatgtaacatccctgggactcatggggaccttgtaagtggcctctatcagcatatcctgctatccc

SEQ ID NO: 552259 - DNA, 101 bp, Homo sapiens
ccaagagcagcctcacatggtgtgggccgacatcaagagctgcgagatccaacaggtatcactggacaggccatggctccacggtcccggcgacgaaggca

SEQ ID NO: 552260 - DNA, 75 bp, Homo sapiens
acattaccgtcatattccacccattactaagagcatcgtaaccctgcagagaggatcactgaatcaagtgcagag

SEQ ID NO: 552261 - DNA, 99 bp, Homo sapiens
aggcgaaggagcggccgggagcccgccgcgctggtagcgggctccaaacgaatcctgcggtcccatgagattgtgctgccccccagtggacaagtggag

SEQ ID NO: 552262 - DNA, 75 bp, Homo sapiens
gggagccgccacttcgaggactgggaagactatgaccgtctgaggcctttatcttacccaatgaccgatgtcttc

SEQ ID NO: 552263 - DNA, 101 bp, Homo sapiens
ctctgggcgactgtgctggcgctgggggcgctggcgggcgttggcgtaggaggtttttcgttggaatatacgttgcacatttatggcgattctgagtgtga

SEQ ID NO: 552264 - DNA, 95 bp, Homo sapiens
ccccacccacgtgaagagcatgcagcgactggtcacttacttcagcctctggtactacaacaagcaaaatcagcgccggtgggtagatttggaaa

SEQ ID NO: 552265 - DNA, 96 bp, Homo sapiens
agtcgctcccgccgggcgagcatggggcgcctggcctcgaggccgctgctgctggcgctcctgtcgttgggagagtagttatcttgatggaattag

SEQ ID NO: 552266 - DNA, 100 bp, Homo sapiens
tctcttgtttatcgagggttttgggctggtggtctcggcagaatgtaattgaccggaaaccataccctgatgatgaaaatttagtggaagtgaagtttgc

SEQ ID NO: 552267 - DNA, 82 bp, Homo sapiens
ccgaggctgaggatgatggtagattgccaggtatcgagaaccttccctgcgaacttcagaggaacttccagctgatgcgaga

SEQ ID NO: 552268 - DNA, 82 bp, Homo sapiens
cggtgactttcacttccagccagctgtgaagaaggacatggatttgattgacatactttggaggcaagatatagatcttgga

SEQ ID NO: 552269 - DNA, 82 bp, Homo sapiens
cccgaccctggccgccccgagcggagcctggaggaggccactgtctgcagctcccgtgaagatgtccactccagacccaccc

SEQ ID NO: 552270 - DNA, 98 bp, Homo sapiens
ctgggataattatccaaataaattgcaagcattctatccaaatgtgtaaacaggaacatcgataagtagtgtaaaaacttgcacaatgaaatccgaag

SEQ ID NO: 552271 - DNA, 83 bp, Homo sapiens
atctgtcttcggtggactccttcggcagtccacccaccgccgccgcctcccaggcatgaagaccccgtttggaaaggcagctg

SEQ ID NO: 552272 - DNA, 100 bp, Homo sapiens
ttccttctgtacttctcgagcttctcagtcagtcctgcctcatcccagccatgtcatcttatctacgaaatgattcagatggagtctcactgtgtcaccc

SEQ ID NO: 552273 - DNA, 116 bp, Homo sapiens
tcttagtgaaagcagtcagagtctagctgctcagaaggatctagtgaaaagccatttgatgtatgcggtcagagaagaagtggaggtcctcaaagagcaaatcaaagaactaatag

SEQ ID NO: 552274 - DNA, 100 bp, Homo sapiens
gaaaagttttgggtgatggggacaacaagccaaagagaagggaatttggctggtgccgacaagaaagccgaggctggggctgggtcagcaaccgaattcc

SEQ ID NO: 552275 - DNA, 100 bp, Homo sapiens
acgtgtgctttttcaagggagctgataaagaacttcttcccaaaatgggccaaaggtgtccaaactatacagacccacagaatctaacaacagatgtctc

SEQ ID NO: 552276 - DNA, 100 bp, Homo sapiens
cgggcagtgtgtgcctacctgtggggacggcttctaccaagatcgccattcctgtgcaggtgtcatggagaaactccagctgggcccagagattctgcag

SEQ ID NO: 552277 - DNA, 96 bp, Homo sapiens
ggaacctctaccatgacacatgcttcacctgtgcagcttgcaatattgatgatgttaagaagttcaaaccgggttacctggaagctactcttaatt

SEQ ID NO: 552278 - DNA, 100 bp, Homo sapiens
ctcatttactgacatccaaggaggacccaaaggagcagaagcttctgttaaggattctcagaagaatggctcagaagtgacaaaagagaattatcaggat

SEQ ID NO: 552279 - DNA, 75 bp, Homo sapiens
ccggcaccgcgcctgctgccgggttgcgctccgtgcacctcttgcgggttatgagaagacagatgatgtttcaga

SEQ ID NO: 552280 - DNA, 90 bp, Homo sapiens
cgacgtcgtgtcgagttcccaaaaagctccgcaggggctgtagggagaacattctagtatgccagtagaaaaaaatatcactttagaaag

SEQ ID NO: 552281 - DNA, 100 bp, Homo sapiens
catacatcttccatcctgagaatgcatcatggctccgatcttcatcttgaagaagagtgacattgggtgactgctgcttggaaaactgtccacacttgct

SEQ ID NO: 552282 - DNA, 112 bp, Homo sapiens
agtcagacacggggcaggctgagttcctcttgctcacagagctctgtaaaggccgccatggcatcagatgaaggcaaactttttgttggagggctgagttttgacaccaatg

SEQ ID NO: 552283 - DNA, 100 bp, Homo sapiens
gagagcgcgaatatcgtcatcgttagaaggagctcagtctgaatattcttggagaaagatgctgagtggcattgcagccttcctacttgggctaatcttc

SEQ ID NO: 552284 - DNA, 51 bp, Homo sapiens
ttgtggcggggacctcaaacaggttaaagaattgcccacccttaaggatat

SEQ ID NO: 552285 - DNA, 83 bp, Homo sapiens
gattggcttcgggctgagctagcagtgagcaccttttggcccaatgaatatcagaaatggcgaaaagtcttttgaagacagcc

SEQ ID NO: 552286 - DNA, 75 bp, Homo sapiens
cagccgctgttttgccggaggagcccctcaggccggtgttttgaatgctgtatcaaatgcctggggggcattccc

SEQ ID NO: 552287 - DNA, 82 bp, Homo sapiens
tggtatccggccaattgagattcggagttaaaacaggtgagcgtgtaggagccttcactatggtctgcaaagatgcggatga

SEQ ID NO: 552288 - DNA, 98 bp, Homo sapiens
ctgagctagagactgccggtgccttcatgggcaggactaggccgaaaactccccagatgcttcctgaaacttggagagtggcagctgaatctacaggg

SEQ ID NO: 552289 - DNA, 90 bp, Homo sapiens
gtgattccagtgcctatagaggtacctcttaccagaaagggtgtccgcaatgttgccagtgtctgtctgcagattggctacccaactgtt

SEQ ID NO: 552290 - DNA, 96 bp, Homo sapiens
cgagtggacaaaatggcgaagatcgccaagactcacgaagacccggcgacaggaggcatgaggggcccccggccgaaatgacagtgctggcgccag

SEQ ID NO: 552291 - DNA, 75 bp, Homo sapiens
agcccctgagcacatcagcaaagaggagaacatttgcctgcactgggcggcgttctccggctgcgtggacatagc

SEQ ID NO: 552292 - DNA, 82 bp, Homo sapiens
cagcactttgcaagcccagcttactcaggcacaggcagaacaacctgcacaggtaattctgaattgctcagctctgcagagt

SEQ ID NO: 552293 - DNA, 97 bp, Homo sapiens
tttctggttccgtgttcatcaaggaatccatgtttcttccaagaagcagactttgaatcctcctcttccaccaccccctctcctggctgccactgtc

SEQ ID NO: 552294 - DNA, 132 bp, Homo sapiens
gctcggcggcgggcggcagcatgtcggtggcggggctgaagaagcagttctacaaggcgagccaggtttttcgttggaatatacgttgcacatttatggcgattctgagtgtgagggcagacttctgccagg

SEQ ID NO: 552295 - DNA, 106 bp, Homo sapiens
caatatctgtcttcggtggactccttcggcagtccacccaccgccgccgcctcccagtttgctggcctagacctgaactcttcagataatcagagtggaggaagta

SEQ ID NO: 552296 - DNA, 75 bp, Homo sapiens
gggaagaaagagaatattgttcagttgattatgccagccagatgcagttggattggatgctgctggcaagacaac

SEQ ID NO: 552297 - DNA, 100 bp, Homo sapiens
aatcagtccacggatgatatcaacagacgggagactgaacttgagcctcccctggtgaagacacaaactgtcaccatctcagataatgccaatgctgtga

SEQ ID NO: 552298 - DNA, 83 bp, Homo sapiens
taggtcgatggtcggcggcgcccggatgggcagctgagttaaaagaagatggatgcacagtgttcagccaaggtcaatgcaag

SEQ ID NO: 552299 - DNA, 83 bp, Homo sapiens
cttgcagctgcttagacgctggatttttttcgggtagtggaaaaccagattgtcactgctgttccaagggcacacgcagaggg

SEQ ID NO: 552300 - DNA, 51 bp, Homo sapiens
cggctcttcgtgcccaaccacagaactgataaatttcaaacggaagagagt

SEQ ID NO: 552301 - DNA, 101 bp, Homo sapiens
atcttagctatggatgaaggacagtatgatgggaaagttgatatttggtcacttggcatcacttgtattgaattggaccaatctgaccttcgttggctgcg

SEQ ID NO: 552302 - DNA, 75 bp, Homo sapiens
ctgtttccacgtgcggtgctcgtcgggagtgatcacctaccctacagtttatcacagttcagtgaagagaacatg

SEQ ID NO: 552303 - DNA, 82 bp, Homo sapiens
atcactgcaatatctggcaagccgggtgacaagctgggatagatgggcagcagaagatcatgtgcttcgtgataccgatgaa

SEQ ID NO: 552304 - DNA, 87 bp, Homo sapiens
agtggggaagctgctaacccgacccggattggcgctgaggtggcccgtggggcagataacggaggagatgatggatcaggcaaatga

SEQ ID NO: 552305 - DNA, 101 bp, Homo sapiens
cgggccgtggctctagcaggctccactaactggggctacgactctgatgggcagcgtccgtctccaagagagtatgaagagagtgcgtctgtagggcaggg

SEQ ID NO: 552306 - DNA, 119 bp, Homo sapiens
atgattttgaagttattggaagataaaaatggagaggtacagaatttagctgtcaaatggactttgcagatattttggtgcagccaacgttggaggagaacaaaggaacttcagatggg

SEQ ID NO: 552307 - DNA, 98 bp, Homo sapiens
cactgagaacaagagtcttatctggattggatcctgggaattgagaagcttcagcaggaagccaaattggcagagaatgcttgtaccctggctgacct

SEQ ID NO: 552308 - DNA, 50 bp, Homo sapiens
cgcgaatatcgtcatcgttagaaggatttctctgcctcttccaaactttt

SEQ ID NO: 552309 - DNA, 82 bp, Homo sapiens
tttaatatgctggatgagctgctgaagcccaccgaattagctgctcagatggaagataaaaagccctttatcctgtcttcca

SEQ ID NO: 552310 - DNA, 98 bp, Homo sapiens
ccaccggggccccccatgatgccaccacccttcggaagggcgacctgatcggctgtgagctgccccggcgggagcaggtggtaaaggccaatgccgac

SEQ ID NO: 552311 - DNA, 107 bp, Homo sapiens
ggaggacgaggggctccgggtcttccagagcgtgaagatcaagatcggagcgcagctcagctgggctggaactgccctcctggaactcccccagcctacaacctagg

SEQ ID NO: 552312 - DNA, 83 bp, Homo sapiens
gcgcgcagggcctgcagcgggagctggacggcgagcgcgagcggcgcgagaaagctctgaagagcggccattcctcagattcg

SEQ ID NO: 552313 - DNA, 105 bp, Homo sapiens
aggaaggaagctgtttccatatgacccttatgaacgagctcgccaaaagatgttattggagctattttgtaaggaaaagggtggaaagcaagtcctggaagaatc

SEQ ID NO: 552314 - DNA, 80 bp, Homo sapiens
aaatgggtggagtacagatctctgcagttacaggaacatcgtctgcttcatggaagaatatgattcacatgaaaattctt

SEQ ID NO: 552315 - DNA, 99 bp, Homo sapiens
ttggaacttagtgttatgccaaaagatgaagacattctccaagtgatggtgagaacaagaccaagattggaaagccagcttcagaggagggaattacag

SEQ ID NO: 552316 - DNA, 90 bp, Homo sapiens
caaactctaaaccatctgaattggctcaatgatgagctgagatctgtatctgtggacctgaatgttgatccctcgcttcagattgacata

SEQ ID NO: 552317 - DNA, 120 bp, Homo sapiens
aaaaactcagtgagacacaatttatcattgaataagtgttttaagaaagtggacaaagagaggagtcaggtgtacaagggagaagaagccacattccaaatctcaggcctccagaccaac

SEQ ID NO: 552318 - DNA, 75 bp, Homo sapiens
ttttatacttgcttttgcttcagcgttctgtggttgtcaacagggccgcgatgggcctcttggaacattggtgtg

SEQ ID NO: 552319 - DNA, 82 bp, Homo sapiens
gggctggagcctgacgagctggcggaatagcctaacatggcagaccagagacagcgctcactgtctacctctggggagtcat

SEQ ID NO: 552320 - DNA, 74 bp, Homo sapiens
ctagttcctctccagctcagccgcgtagaaactggcagacctttcacttcgtatccaacaaattgaaacaactc

SEQ ID NO: 552321 - DNA, 50 bp, Homo sapiens
gcgtggtgcttctgttgctcacaggttggacgtgataagtatgagcctgc

SEQ ID NO: 552322 - DNA, 100 bp, Homo sapiens
gggacgggctgcaggcgggggtgctgcagaggacacgaggcggcgggctggagacatggaccgcggcgagcaaggttaatgaggaaacagggaaccgacg

SEQ ID NO: 552323 - DNA, 80 bp, Homo sapiens
tgtctgacaacgtggatcgttgttttgaaacgaggaaagagggttttcattcccttctgaatgttaggagggaaggcatt

SEQ ID NO: 552324 - DNA, 100 bp, Homo sapiens
gcctggactctgctcagagagatttgtatagagatgtgatgttggagaactatagcaacttggtatcactagtgctgggcctaaaggagataacatttat

SEQ ID NO: 552325 - DNA, 100 bp, Homo sapiens
tgtggacaaagcagtacctgaaacagaagatgtgcagggtcgagtctatgctgtcttgtcaaagagagaaggtcgggtacttcaagaagaaatgaaagaa

SEQ ID NO: 552326 - DNA, 74 bp, Homo sapiens
atgaagacatcccagaagtgtctgatatggtggtgaaggcgatcacagatctatagcatgatgctgcgattatc

SEQ ID NO: 552327 - DNA, 100 bp, Homo sapiens
ctggccctcgggctgcgggagccgggctaggacgccgagcggtgactccccgccgctcccgggggccgtgacggacaatgaaggccaaacagctctacat

SEQ ID NO: 552328 - DNA, 88 bp, Homo sapiens
tgaaagcaaacagaaatttgtgctcaaaacccccaaggtactctgtggatatccccttggacaaaactgtcgtcaataaggatgtctt

SEQ ID NO: 552329 - DNA, 100 bp, Homo sapiens
ctttggagaacttctggagctggccaacgtgcaggagactgttggtagagaaaatctttgctcagtatcttgtcccccacaacctggaaacagaagagag

SEQ ID NO: 552330 - DNA, 82 bp, Homo sapiens
tctctccaacagggtctggagtatcagccaggagcccgatcctgtccagaggcttcagataacgaaggaggcccaacttcat

SEQ ID NO: 552331 - DNA, 98 bp, Homo sapiens
aactgccggccgggccgctggcccgtggacgcctgggaggtggccaaggccataggaaaaggatacagagtagagtttcatgaacctgaaacttggtg

SEQ ID NO: 552332 - DNA, 114 bp, Homo sapiens
ctcaatatctgtcttcggtggactccttcggcagtccacccaccgccgccgcctcccaggaggatacgaagcgttttcggcttcctgcccggagctgtgcagcaaacagtcgac

SEQ ID NO: 552333 - DNA, 75 bp, Homo sapiens
gcgggcgcgccccaccaccgccctcaccatgcctatcaagactcttccacctgctacttctaccgagccatctgt

SEQ ID NO: 552334 - DNA, 75 bp, Homo sapiens
actactgccggagcttctgccaggaaacattggcaaatttggagcgacagatctatgcttttgagggaagctacc

SEQ ID NO: 552335 - DNA, 80 bp, Homo sapiens
gcggcgggccgaggagccgggcgcaatggagcggaagagagaggtggagaagagcgagtacttgagaaagaagaggaaga

SEQ ID NO: 552336 - DNA, 83 bp, Homo sapiens
ctgaaattcatcctgagatgagattggcggcagtaagcacacaatgaatgatcacctgcatgtcggcagccacgctcacggac

SEQ ID NO: 552337 - DNA, 100 bp, Homo sapiens
aggggcaggagcttctgggagccaccgtctgaagagtgcctggaagagctgggatgtctggttgagtcctatggcatgaatgtttgccaaccaaccccag

SEQ ID NO: 552338 - DNA, 141 bp, Homo sapiens
agatcatgtcagagagagagcttggttaacttgggagaaagtttcatctgtggatggagtattgccagatgacgtgtactactgtggaataaagtacatcaaagatgatgtcatcttaaatgagccctctgcagatgcccc

SEQ ID NO: 552339 - DNA, 95 bp, Homo sapiens
ggacctgcacaggccggagagagccgtaggcaggaccccgggacaccctggaagccaggaaatgagatagggtttcatcatgttggctcggctgg

SEQ ID NO: 552340 - DNA, 83 bp, Homo sapiens
acatttctccacctcatttgaagaacgagcttcgtagcccacggagctgagcatttggccatccagtgtcattggtctcagag

SEQ ID NO: 552341 - DNA, 74 bp, Homo sapiens
ttgccaattgttacatacgaaactgtaagaatgattgatgttggctgatattggagtgctcattcacatgaagt

SEQ ID NO: 552342 - DNA, 98 bp, Homo sapiens
cgaagcctggatgaaatagatctctcggctctgagggaagttggtgaaccatctaaagaagagaaggctgtggccaagtatcttcgattcaactgtcc

SEQ ID NO: 552343 - DNA, 100 bp, Homo sapiens
tcgggggacacgcaggatgagccccgcgaccactggcacattcttgctgacagtccctgactccacctcttctgccacaaacgtcagcatggtggtatca

SEQ ID NO: 552344 - DNA, 82 bp, Homo sapiens
ggcgagcggtggtttggacgccggcggagacgcgggcgagttctgggaagtcatcagtgatgagcatggcatcgaccccagc

SEQ ID NO: 552345 - DNA, 100 bp, Homo sapiens
tccaggacatgtgtgcaaccattggcgtggatccgctggcctaaggaggccccaaccctgagcacaacagcaacctggccaatatcttagaggtgtgtcg

SEQ ID NO: 552346 - DNA, 87 bp, Homo sapiens
agagggcagccattgaacgggagtatgggcaggtgaagaatatcgaggagcaccggcagcgtagtctggactctgtgcaggagctga

SEQ ID NO: 552347 - DNA, 100 bp, Homo sapiens
caccaccacgcccagcagtcagctgcagcctctcccaacctgactgcttcacagatggaaggattacaagaggacagtattttatgtctacccgctgctt

SEQ ID NO: 552348 - DNA, 95 bp, Homo sapiens
cacagataaaagagaaagatagatgccctctctcttcatcttcacttgaaataccggatgattttggaggaatcatctgctgcagtttgctttag

SEQ ID NO: 552349 - DNA, 100 bp, Homo sapiens
ctctcattctcagtttgcaacaggggtactttcattgaattccgaaatgggatgttaaacgtgtcccctattggaagaagctgcagccaagaagaacgca

SEQ ID NO: 552350 - DNA, 98 bp, Homo sapiens
agctgagggacaacaacaccaggaaactgacctcggggttgcggcgaccttttggagtggctgattttcagctgaactctcatctctcaacactggca

SEQ ID NO: 552351 - DNA, 100 bp, Homo sapiens
atggaatccaagggggccagttcctgccgtctgctcttctgcctcttgatctccgccaccgtcttcaggccaggatcagctcagctactatttaataaaa

SEQ ID NO: 552352 - DNA, 75 bp, Homo sapiens
tccctcaagagtaactacaactcagattccaaatgaaaatgtttgagagcgctgactctacagccacaagatctg

SEQ ID NO: 552353 - DNA, 50 bp, Homo sapiens
ctgcatcaatggcatttgaagataaagagagtttcgctcttgttgcccag

SEQ ID NO: 552354 - DNA, 83 bp, Homo sapiens
gctggacgcctataatgcgagaccattgacctcatcaacaacctgctgcaggtgaagatgcgcaaacgctacagcgtggacaa

SEQ ID NO: 552355 - DNA, 75 bp, Homo sapiens
gagacatgtctgagactcctgctcagtgtagcattaagaaattggaatgggattaacaggatttggagtgttttt

SEQ ID NO: 552356 - DNA, 100 bp, Homo sapiens
ctaattcctgatatttttggtatcacaaatgaatccaaccagccacagatactattaggagggtgaattttaccgggaaggccgagatgggaggaccgtt

SEQ ID NO: 552357 - DNA, 80 bp, Homo sapiens
agtatctcacctccctaaactggttaatagtggcatggaagatccatttgagcccccctccatgcgcctgaaggcccgac

SEQ ID NO: 552358 - DNA, 50 bp, Homo sapiens
ttccagtcccctgaggtgatggcaggagaagatggtataaactggtccat

SEQ ID NO: 552359 - DNA, 75 bp, Homo sapiens
atggaaagcaagcttcttggtacattcacaaatacgtacaggaaaacatttaaagttgatgatatgttatcaaaa

SEQ ID NO: 552360 - DNA, 100 bp, Homo sapiens
aatgtcaaaccagaccaatgggtgaagaggggtctggttgctgcttacagtggtgacagtgacaatgaggaggagctggtggagagacttgagagtgagg

SEQ ID NO: 552361 - DNA, 100 bp, Homo sapiens
ggacgtctccccaagacccagtggcaaccgggggctaagtgatggatcttgtactccgtgttgcagattactatttttttacaccatacgtgtatccagc

SEQ ID NO: 552362 - DNA, 98 bp, Homo sapiens
gagcatggagacggcggagaaggagtgcggcgccctgggcgggctcttccaggccatagtcaacgacatgaagatcacttttctccagagaatgcaaa

SEQ ID NO: 552363 - DNA, 100 bp, Homo sapiens
actggaggactgggaggatgaattcgacctggagaacgcagtgctcttcgaagtggcctgggaggtggctaacaaggtatttgattttcatcaagcagct

SEQ ID NO: 552364 - DNA, 75 bp, Homo sapiens
ttttttctaatggctattcaagaaccagcttcttgcaaaaggactgttctttgtggaggagaagatcaagctgtg

SEQ ID NO: 552365 - DNA, 82 bp, Homo sapiens
gcgaggaggcgcgggaggtgttcgagaacgaccccgagacgacgaagttatacggaagcgtctcctcattgatggagatggt

SEQ ID NO: 552366 - DNA, 75 bp, Homo sapiens
ctcctgggtagctgggactacagacagaccatggattcttacagtgcaccagagtcaactcctagtgcatcctca

SEQ ID NO: 552367 - DNA, 83 bp, Homo sapiens
ctgtcttcggtggactccttcggcagtccacccaccgccgccgcctcccaggatcgacgagaacgtgctaggagcccagctgg

SEQ ID NO: 552368 - DNA, 100 bp, Homo sapiens
gggggagcgcggggcgacgctggctgcagggacccggtgacagcgtgagaggttcgcagacggatactctgttttcaaggaagctgaatgggaaatacag

SEQ ID NO: 552369 - DNA, 131 bp, Homo sapiens
tgggacaggtatgcatgcccctggagagaagggaaatttagcagctgtctacactgtgggacacaacttgatcaagtgttctggacttggtgcctctttctgttatatgctttcctatttagttgggagac

SEQ ID NO: 552370 - DNA, 75 bp, Homo sapiens
ttaaaacttatgctatctgcggggccattcgtaggatggtgctgtatttctctgaatccctcgtgcccacggcaa

SEQ ID NO: 552371 - DNA, 100 bp, Homo sapiens
gagccttggaaggagcccgaatcactgatggaattggacagtgcatggagatggttcagcaggacaaggaattgcagaatgtttgcagactatctctgac

SEQ ID NO: 552372 - DNA, 50 bp, Homo sapiens
caaggctacgagaggacgattgcagtgctggagaatctggtaaaagcacc

SEQ ID NO: 552373 - DNA, 75 bp, Homo sapiens
cgagtaatcgcctgctttgattcattgaaaaattcaagccaggaagaagcagcaatctgtcttctggattaaaac

SEQ ID NO: 552374 - DNA, 75 bp, Homo sapiens
gcaaggccaaagacagggagaagttccagaagaaggcttcttattgggatgtgtgtttgcaattgcggattatcc

SEQ ID NO: 552375 - DNA, 100 bp, Homo sapiens
attgtttgtcaccacaaaaaggacagtttggaagaactgaagtaattgataatactttaaatcctgattttgtaagaaagtttattctggactacttttt

SEQ ID NO: 552376 - DNA, 100 bp, Homo sapiens
ctcagagggacttatacaaggatgtgatggtccagaattatgagaacctggtctctgtaggatatgaacgagactgccaaacaagaagatattttggaat

SEQ ID NO: 552377 - DNA, 50 bp, Homo sapiens
gtgagggttctggttcccgccggcgaggcacctgaatggacagaagagga

SEQ ID NO: 552378 - DNA, 83 bp, Homo sapiens
gctgcctggcccaggcgcacacggaagtgttcaaaagaatgctgaaccgggagctgacacacctctcagagatgagccgatca

SEQ ID NO: 552379 - DNA, 98 bp, Homo sapiens
agaagatccagctttgttgaaaagcgaagccgttagtcccttaatacaaagggtgctggagaatctggtaaaagcaccattgtgaagcagatgaggat

SEQ ID NO: 552380 - DNA, 75 bp, Homo sapiens
ttggcctccatggtgtcagagcaaggagaagctgttggtccctggtgctgaaccgcctgcgtccagttgccagcg

SEQ ID NO: 552381 - DNA, 75 bp, Homo sapiens
gaaacaatggcatttacagaaagagtcaacagcagtggcaacaggggctatcaacagcaggacgcccatgaattc

SEQ ID NO: 552382 - DNA, 100 bp, Homo sapiens
aattagacccgtttcctatagatgagaaaccatacaagctgtgtgccggtggtggtgtgcacattgagccccggtatagacagttcccccagctgaccag

SEQ ID NO: 552383 - DNA, 83 bp, Homo sapiens
cagagagctattattccctgtattaaagttatcttcaggcagagtgagaagctgcagcaatgtctgattttgtggaaagcgag

SEQ ID NO: 552384 - DNA, 80 bp, Homo sapiens
agagcagcggaaaatgatccagtcacagacattccattattgttccattgacctttccctcatcactgagtcctttggag

SEQ ID NO: 552385 - DNA, 98 bp, Homo sapiens
ctacagatgcccctggtgtgactacagggatttgtcttggctgttactatgacacgggaagcaattgatgaatttcggcgttttcagcgtgacaagga

SEQ ID NO: 552386 - DNA, 83 bp, Homo sapiens
cattattacatgaagtatcatgtttctgagttgatccctgaattttattatctccctgagatgtttgtcaacttcaataatta

SEQ ID NO: 552387 - DNA, 100 bp, Homo sapiens
gagcccccgaatgctgcacccagccacccagcagagcccgttcatggttgatctccacgagcagtgtgccgggctcctgatgaccctcaagggacttccc

SEQ ID NO: 552388 - DNA, 101 bp, Homo sapiens
ggcggatctcatatcttcacttggcaaactcaacaaggttcctgattatgtcactgtaataaagcaaccaatggacctttcatctgtaatcagtaaaattg

SEQ ID NO: 552389 - DNA, 50 bp, Homo sapiens
ccttcctgtgcagtcctgttggaatttgcgcattctacattctaaagggg

SEQ ID NO: 552390 - DNA, 73 bp, Homo sapiens
ggcgcctagcgacgcccaacacctgtccaaacatcaagtaagggagaattgactacgcttatacatcagcttc

SEQ ID NO: 552391 - DNA, 50 bp, Homo sapiens
cctttaatgccaacccagatgagtcttcccaagggattgttgaagaaact

SEQ ID NO: 552392 - DNA, 88 bp, Homo sapiens
tacaatgagaacatcacttggaccaaatgcttttcatgcaacacccaacacttataagcggaagaacacagaaacagctctagacaac

SEQ ID NO: 552393 - DNA, 75 bp, Homo sapiens
gatgactatgagaactcaacacctccctacaaggaccttcctcccaagccaggaattgactttaaaattaggacc

SEQ ID NO: 552394 - DNA, 100 bp, Homo sapiens
aaggcacagggagaagggataaccctacacccagaccccaggatgctataaaatcaccacggtctttagccatgcacaaacggtagttttgtgtgttggc

SEQ ID NO: 552395 - DNA, 100 bp, Homo sapiens
tggaccatgctctcgcacatcagttatttcctgcagatgctctttcagaacaaaggcttctcccacctgcccagtgggctgtacccatcctacctccacc

SEQ ID NO: 552396 - DNA, 100 bp, Homo sapiens
ctggccagctgactgcacttcttttttgagaaaggaaggaatatatcctgactgattatggtcagtaggacagaaggtaacattgatgactcgctcattg

SEQ ID NO: 552397 - DNA, 98 bp, Homo sapiens
agaaggtgatcgaactgggtgcggggacaggcatcgtggggatcttggcagcgctgcagggtgtgggctaagctggtggccccggctttagactggac

SEQ ID NO: 552398 - DNA, 74 bp, Homo sapiens
acgagacccgggcctggcagcctgtcacagtacttctggctgctggtcctgtcccgggggctggtgggcatcgg

SEQ ID NO: 552399 - DNA, 100 bp, Homo sapiens
aaaagagtctccgcggtggaggtctgcgttgctcttgcttttcctcgctggggtgtacggtgtacacttaaagcgttctgggaatatgaatcccttctgc

SEQ ID NO: 552400 - DNA, 83 bp, Homo sapiens
catacaccggctgttcgaggccttgactgtaggtcgcgtggggcaggcagtggcgctgcgggccaaggccttcggcttcaacg

SEQ ID NO: 552401 - DNA, 50 bp, Homo sapiens
aaagcagcgtgcgttcagccctgggggagaagaaatgggtgaccgttggt

SEQ ID NO: 552402 - DNA, 100 bp, Homo sapiens
gcggaagtgcagctgcctcagttcttagcgcaggtaatatgcacgtgtcactagctgaggccctggaggttcggggtggaccacttcaggaggaagaaat

SEQ ID NO: 552403 - DNA, 88 bp, Homo sapiens
ggttccccggcccacagtgggggtgtgcaaacccgagagaactgggtgtgagcctcagcagcgatttcattgctggcttttgtggtga

SEQ ID NO: 552404 - DNA, 100 bp, Homo sapiens
acccgcttcagcacaaggaatgtcatcaagtctcaaatatctatcagtgtagaagagtgggaagacaccaaagactccaaagaacaagggcaccaccgca

SEQ ID NO: 552405 - DNA, 125 bp, Homo sapiens
acatcctctgccgggagctgggcttcacagaggccacaggctggacccacagtgccaaatatggccctggaacaggggctggctgtgggcaatggactctcctcctatgagcagaatgacaactc

SEQ ID NO: 552406 - DNA, 97 bp, Homo sapiens
tgaacaagacaacttatttgatggagatgcagaaggctgaagaaagcaaagtccctgaggactcactggaggaatgtgccatcacttgttcaaatag

SEQ ID NO: 552407 - DNA, 100 bp, Homo sapiens
atgtgtctctccaaagacaagacgctccaggatcttgtctacgatctctccacctcagggtctggctcaggtacaagttgcttaaccaagaagaaggtga

SEQ ID NO: 552408 - DNA, 100 bp, Homo sapiens
catatatccaacactgcaaagcatttttatggacaacgaccacaggaatctggaattttattaaacatggtgctggagaatctggtaaaagcaccattgt

SEQ ID NO: 552409 - DNA, 75 bp, Homo sapiens
ggagacaacagcagtgagcaaggctaccaggccaagcaggtccgccggtggaggcgccagggcgtacaggtgcag

SEQ ID NO: 552410 - DNA, 80 bp, Homo sapiens
gcagtgctgagcacgcagggctctttctggtgatggcaaatgtagaccctaccattaagaagatagtggtgagctggcaa

SEQ ID NO: 552411 - DNA, 75 bp, Homo sapiens
ttgactttggggaagctgccagggcagctggagtgagacagctctacgtacagattgactttgcagccatgtagt

SEQ ID NO: 552412 - DNA, 88 bp, Homo sapiens
tccagaacagtttccggtcaatgagcactattttggattagtcaattgcagttttgaagactgtaagaagacctttaagaaacatcag

SEQ ID NO: 552413 - DNA, 76 bp, Homo sapiens
tggagaaaagtggtgctctcctagaaagtgggacttatgaagtggactgcccctgatggtgattattcataaatcc

SEQ ID NO: 552414 - DNA, 100 bp, Homo sapiens
tccagagcatcatttgcaggaaggatgcaccccactccgagggcgacatgcacagcgcatcagcgaggaggtggggctgctgcagctccttggggacccc

SEQ ID NO: 552415 - DNA, 80 bp, Homo sapiens
acaatggcatttacagaaagagtcaacagcagtggcaacagatgaagtggtgaagagagcctgcgattgaagattttttc

SEQ ID NO: 552416 - DNA, 101 bp, Homo sapiens
gcgggacagccaggaggaagggcagcttggcagagcctcagcaatggctgccatccggaagaaactggtgattgttggtgatggagcctgtggaaagacat

SEQ ID NO: 552417 - DNA, 88 bp, Homo sapiens
ttgctgagccagcggagctgcttggacttgatgacacgtaccttcgctgcattgagctgcacagccacacccttattcagctggagag

SEQ ID NO: 552418 - DNA, 97 bp, Homo sapiens
ccagaaggctagaagaatcagacgtgctccaggaggccagaaggaaataccatcccggcggcgcaggcgcagaggagagcgagctgcaggcctacat

SEQ ID NO: 552419 - DNA, 82 bp, Homo sapiens
cgccgaagaagcatcgttaaagtctctcttcaccctgccgtcatgtctaagtcagaggaccctgctgccgaagctgattccc

SEQ ID NO: 552420 - DNA, 74 bp, Homo sapiens
gagaactaccctcccaacacggaggtcaacctcactctgatctgtcctcctccgcctcctcctctctgcatgcg

SEQ ID NO: 552421 - DNA, 87 bp, Homo sapiens
ggatgcaaagaattatcatgcctggcagcatcgacaatgggttattcagatgttctcagtgcagctgagtcttggtgagcagacatg

SEQ ID NO: 552422 - DNA, 101 bp, Homo sapiens
gcccgtgcctgtcttcagatcttcacagcacagttcctgggaaggtggagccaccagcctctccctgtttcattcattggctcccatgtactatcgaggct

SEQ ID NO: 552423 - DNA, 96 bp, Homo sapiens
gctggactgctgcccacattgctgcttccaaaggttttaagcaattgcttgttcagagctcttggtgatcaattggagggacactcacgaaatcat

SEQ ID NO: 552424 - DNA, 98 bp, Homo sapiens
aagccggaggactgtgctgtgcctctctcgcccacattttccccaagcactctcaggaacctggcaacagtgctgcttttgacacaaaaacggggtta

SEQ ID NO: 552425 - DNA, 100 bp, Homo sapiens
cccctcgaggatttcgcggtggattcagaggaggtcgtgggggccgggagtttgcggattttgaatataggaatcctcactatggatgggctcattgagg

SEQ ID NO: 552426 - DNA, 83 bp, Homo sapiens
cctgaccatggctccctgcagtaccctttaacggaatatcagaagctctttcctgacattcccatagggtattctgggcatga

SEQ ID NO: 552427 - DNA, 101 bp, Homo sapiens
gttaaattcattgactacggaaactatgaagaggtgctactgagcaatatcaagcccattcaaacagaggcatggaacttaaagcagcagtattacacagg

SEQ ID NO: 552428 - DNA, 74 bp, Homo sapiens
aaatccgtgtcggagtccttacagggtaatacctgcctggagaatggatctttcttactgaactttacaggctg

SEQ ID NO: 552429 - DNA, 75 bp, Homo sapiens
gtcaagtcctccaacttggcgggaaagtccttctctgctttcttgatcatggatggtgaagatataccagatttt

SEQ ID NO: 552430 - DNA, 75 bp, Homo sapiens
gagggttcgcagaaaggtggggcagagctcatctgacgtggcatcagtatcaaatcatgggtggataagatgcaa

SEQ ID NO: 552431 - DNA, 90 bp, Homo sapiens
gaccagcagatgaatggacaccttgaagcagaggagcagcaggaccaggacaccatatctcagaagacggtagagattgcatctcctgca

SEQ ID NO: 552432 - DNA, 100 bp, Homo sapiens
gcagagcagctgcagcgggagcacgagcagttccaactggccatcgaggttggaagcgaagtggaagcactgaacctccaggtgacatctctgtttaagg

SEQ ID NO: 552433 - DNA, 100 bp, Homo sapiens
gagcgaggaggaagaggacgaggacgacgaggaggaggaggaggaggaaaaagggaagtgggaatgtccttggcatcattgtgacgtgtgtggcaaacct

SEQ ID NO: 552434 - DNA, 100 bp, Homo sapiens
cttttcttcaatgataagagctgtcagttttctgtggatgaaggatacagttgatatattagttggatggcatatagatcatactcagaaaccttcgctc

SEQ ID NO: 552435 - DNA, 83 bp, Homo sapiens
tcctcatcatctcagccacgaagtacagccggagactgtgtcagggaaaagggaggcaaggtcctggtccactgtgaggctgg

SEQ ID NO: 552436 - DNA, 76 bp, Homo sapiens
gggagccagtgggtgaaagctcatgaactcaaggagcacaacggacacatcacagtaccaagggaagaacacctac

SEQ ID NO: 552437 - DNA, 82 bp, Homo sapiens
aacgattcaacccgggggagctcaggtttgggccccatggtatccctgtgacagtatttcccaaaagggaatataaggataa

SEQ ID NO: 552438 - DNA, 51 bp, Homo sapiens
aagtgggaaacattgaaatcaagcttggagaacagccatctctggaagaag

SEQ ID NO: 552439 - DNA, 141 bp, Homo sapiens
tccaacatcccattcagcagggtgaaccacagcaagttcatggtcacggagaaggcagcctacataggggagtacatcaagacctggcggccacgctacttcctcctcaagaatgatggcaccttcattggctacaaggag

SEQ ID NO: 552440 - DNA, 51 bp, Homo sapiens
gcaagaggccccagcccgtgaaaagtgagttcagtgatgttgagatgggag

SEQ ID NO: 552441 - DNA, 100 bp, Homo sapiens
tcctccgtgcggagaagaagctgcggccgcacctggccaaggtgaacctgatgcagcacatgaagctcagcacctcacgagacttcaagatcaaaggaaa

SEQ ID NO: 552442 - DNA, 105 bp, Homo sapiens
agttcatcagccaccgattcccagaagatcatgatcccaccattggcatagaatgtcaagctaaccaggcgtccgctacttcagaagagtgtactgtcgcatggg

SEQ ID NO: 552443 - DNA, 82 bp, Homo sapiens
ctttccactcggctcctgtcgtccgttctctcaggctcccgttcagactgaaatcgccaagagattgaatacgatttgtgca

SEQ ID NO: 552444 - DNA, 100 bp, Homo sapiens
tgaaaccagactggggaatgaccgccccatccggagagagtccagcaagctaaaagtacagaaggtggagccctggaacagcgtgcgtgtgacattcaac

SEQ ID NO: 552445 - DNA, 87 bp, Homo sapiens
ccgccgtggaggtggcgcctgccggagcttcctacaatccatcctttgaagaccaccagccggagcggttgcagggcacacattact

SEQ ID NO: 552446 - DNA, 100 bp, Homo sapiens
aggcggtggccctgctggaggagctctgggtagaaaattatggcatgccgtttagcagaactgaagatgggaagatttatcagcgtgcatttggcggaca

SEQ ID NO: 552447 - DNA, 82 bp, Homo sapiens
gccaacatggcggcggaacgcggcgcggggcagcaacagtcgcaggagatgatggaggctgaagaaacacttaaattctgga

SEQ ID NO: 552448 - DNA, 75 bp, Homo sapiens
aaatggagcccttcaccaatgtcaagtccatcatctccagaaccagctagtcttcctgcagaagatattagtgca

SEQ ID NO: 552449 - DNA, 73 bp, Homo sapiens
ctcaagcggaggcgcgcggaacagtcgccgaggcgattcccgcccaggagggtttgcatttgtgtatgaagct

SEQ ID NO: 552450 - DNA, 100 bp, Homo sapiens
gcaaccactattttcttcctgcccctcgttgatgagagcattcgaagtgacctcagcagggcatccaggggtcttgctcctcagaacaaaccagaattgc

SEQ ID NO: 552451 - DNA, 75 bp, Homo sapiens
agagaccttagaaaggatcaggactggcggttgcagtaccatgcaggactagcatctggccttttaaatcagcag

SEQ ID NO: 552452 - DNA, 100 bp, Homo sapiens
acagccatgcaaaggcaggggaggaagccacctcgaggctattttggcattctgctggatatatgttcgtaaataccaaagtcggcgggaaagtgaagtt

SEQ ID NO: 552453 - DNA, 100 bp, Homo sapiens
ggcactgtttgccgtgccaccctgagtgtcagccccagaatggctcagtgacctgttttggaccgccaggacgtctgaagaaagttcagggcattggctg

SEQ ID NO: 552454 - DNA, 96 bp, Homo sapiens
gggggccgccaccggccgccgccgccgccgcccaggcgcagacactggctctgagaccccgactgcccgacggctctacactgccagcgggcctcc

SEQ ID NO: 552455 - DNA, 100 bp, Homo sapiens
cagcgcctgtaatgtttggcgagtctgttccacaggcgcatgggccacgtttccagtgcttggtggccatgtggggctgacgtgcgaaaccttagagccg

SEQ ID NO: 552456 - DNA, 83 bp, Homo sapiens
ccgcggccccggcgagcagccgccgcccgccgcacccatgagatcggcttcagctccccaggaatatgattgaaaacagcatg

SEQ ID NO: 552457 - DNA, 51 bp, Homo sapiens
gaggagccttctcaagaacagaggataagttctgaacgtcgaaaagaaaag

SEQ ID NO: 552458 - DNA, 98 bp, Homo sapiens
tgcagcccatcctccgcttccttcagctcctgtgtgaaaaccacaaccgagacctgcaggcttcccaggtggcttcccctcttcccctgggggctgat

SEQ ID NO: 552459 - DNA, 82 bp, Homo sapiens
atatctgtcttcggtggactccttcggcagtccacccaccgccgccgcctcccagcattggggctttccagctctcacagaa

SEQ ID NO: 552460 - DNA, 100 bp, Homo sapiens
tgcgtgttgtccacccaagatggagttcctcctggggaacccgttcagcacaccagtggggcagtgcctcgttcctgcggatggtggatgcctgtgccag

SEQ ID NO: 552461 - DNA, 83 bp, Homo sapiens
gggccctgctggaccagctcatgggcacggctcgggacggttttaaaatcaaagatgggaaaatcggagaaaattgcccttcc

SEQ ID NO: 552462 - DNA, 80 bp, Homo sapiens
tcaacgacgcggacatggtcatgagctttgtgaacctggggcgaccattgacgaggtggagacggacgtggtggagattg

SEQ ID NO: 552463 - DNA, 98 bp, Homo sapiens
ggttgcctgcagcggcccggacccgagagactggatacacgtctgtttaactacgcaaaaggtaatgctggcatggcttactgggaccctaagtgtgg

SEQ ID NO: 552464 - DNA, 98 bp, Homo sapiens
tcgcccagcggccgcgacgctatggcgcactggagtaccctgttcctggcagaccttcttcagattcgatcgtatgtgtacgcagaagagccaaatat

SEQ ID NO: 552465 - DNA, 98 bp, Homo sapiens
gtcagtacgcgaaggatatcggtttcattaagttcctcacgtacctgttttcacgagaaaacagcatctgggatgagaagtatgacgcggtggacatg

SEQ ID NO: 552466 - DNA, 100 bp, Homo sapiens
caaaagaagcagctgaggaacccccacaagaccttcgacccctctctgaagccaggttcaggagaagtggcacctggtggaggacctgtcgcgactgctg

SEQ ID NO: 552467 - DNA, 90 bp, Homo sapiens
gggccagggaaccctggtcaccgtctcctcaggattttttatcaagcagaaatgcatcgaacaacgagaatcaagatcactgagctaaat

SEQ ID NO: 552468 - DNA, 131 bp, Homo sapiens
ctcgctggtctacctgctcttcctgctgctgctgccctggttccccggccccacccgatgcggcctccaagggggggccctcagcctcttggccttgaacgggctgttcatcttgattcacaaacacaacc

SEQ ID NO: 552469 - DNA, 75 bp, Homo sapiens
cggccatggtttgcaggaaacaaggtcggatccgcacaagacggcaaagctctgggagtgccaccaacgtcgcct

SEQ ID NO: 552470 - DNA, 73 bp, Homo sapiens
cctcttcgcttgcagatacccccgagatcggttgagaacttgttgcttagtaaccaagggaccattaagctgt

SEQ ID NO: 552471 - DNA, 101 bp, Homo sapiens
ggcagagtgcggcgcagcgcagctcctgagtagcctctagttcgttagtcaaaacgtgaaaaaaaagacctgctttgccctgggaaatagtaaccctgcca

SEQ ID NO: 552472 - DNA, 50 bp, Homo sapiens
aaactgaatcacaggagatatttccaggtgaatgaggcggaggaagagcg

SEQ ID NO: 552473 - DNA, 75 bp, Homo sapiens
atcagagaaaacaagcaaatgctgccttccttgttggatgctacatggacctctttgtttttagacatgaattgg

SEQ ID NO: 552474 - DNA, 88 bp, Homo sapiens
cacatcgtggtggtcggatttcaccacaagaagggctgccagagctgtaggtaaaacttgcctactgatcagttacacaaccaatgca

SEQ ID NO: 552475 - DNA, 100 bp, Homo sapiens
tttagtttaatgtttgatggctgctttgaagaaatcaagttcagtactccttccctggcagttaatagtatcatatctatcgtttttggtactcgaagaa

SEQ ID NO: 552476 - DNA, 74 bp, Homo sapiens
gccggccgtctccttaacaccgaacacctgagacggtttaagcggaagcatcttactgccattgactgccagca

SEQ ID NO: 552477 - DNA, 97 bp, Homo sapiens
gaggaagaagatgatgaccgaccccccaagaaaccccgccatggaggcttcattctggacgaggctggagacactgtcggacattcgggaaggtgcg

SEQ ID NO: 552478 - DNA, 73 bp, Homo sapiens
cggagcttgtacagcagctaagatgtgggcgctatctccaactgtctttgcacttctgagtaagaatctgatg

SEQ ID NO: 552479 - DNA, 100 bp, Homo sapiens
ctgtgagttggacccagaccaagaagtggtgaggacaaggcctgaaggtcaatgagctgaaggagaaaggcaacaaggccctgagcgtgggtaacatcga

SEQ ID NO: 552480 - DNA, 88 bp, Homo sapiens
agctatatactttggttacctatgtacctgttaccactttcaaaaagaagtatatcagagaattccctggtagcaatggacttctcag

SEQ ID NO: 552481 - DNA, 75 bp, Homo sapiens
ttttgtgctgaccttgctgaccaagacaggagccccacaccaagatttaacggatgaagagtcccggaaaaattg

SEQ ID NO: 552482 - DNA, 100 bp, Homo sapiens
ttaaaagcagcgaacctcgagaccaacgtggaggagctgtgggtggaaggaacatcatttacagcgagcaatttcagcacagcaagtgtttagagaaaaa

SEQ ID NO: 552483 - DNA, 100 bp, Homo sapiens
ccggtggcagatgacacctgtttggagaagctcctggactggtttaaaacggtcactgaaggaggtatggacctgtctgccaatcaggacgaggagaccg

SEQ ID NO: 552484 - DNA, 74 bp, Homo sapiens
caccgccgcccgcgccctcaccagataccggggagaccacgacgctgcctcctgggcgccatgagttcctgttc

SEQ ID NO: 552485 - DNA, 100 bp, Homo sapiens
tggaagagaataaccgaaaaattgcagaagcacaagccaaactggtatgagaaagtgccagtcatcttggttgggaacaaagtggacctggaaagtgaga

SEQ ID NO: 552486 - DNA, 80 bp, Homo sapiens
gataatttccccagagcgtcttgatccttttgcagatggaggagatgttaaagtaacccatcttgcaggacgacattgaa

SEQ ID NO: 552487 - DNA, 100 bp, Homo sapiens
tgggaccccccttactacagtggtgtgattcgtgcagaaagttcacacaaaagatgttggacaatttctacaattttgcttcatcatttgctgtctctca

SEQ ID NO: 552488 - DNA, 100 bp, Homo sapiens
cttcgatgatcgtgtgtcggatgaggagaagcgctaagggctatgacctggagttaagtatggcgctggggacatactacccacctccccgcctcaggca

SEQ ID NO: 552489 - DNA, 90 bp, Homo sapiens
gaactaccctgagaatgggtggactcccggagaggattcctaccgagagtggatacagccgaacgcacggccggcgacgcagagcgggcg

SEQ ID NO: 552490 - DNA, 75 bp, Homo sapiens
ccatgtgtctgaactgaagaagcttgggctcacttccacaaatattttaggtgatgggcaagtcagaaagtcaga

SEQ ID NO: 552491 - DNA, 83 bp, Homo sapiens
cctggaggagaatcaagagctccgagaaagtcctacctccatctccgtgggccccagcaccagccgacggcccgcagcctccc

SEQ ID NO: 552492 - DNA, 50 bp, Homo sapiens
gcaagtggacattttactggctcaagctgaccccgcactacatctaccca

SEQ ID NO: 552493 - DNA, 82 bp, Homo sapiens
cgcttctttcggttctacctgggagaatccaccgccatccgccaccatgagacaagaggagcagcagcggcaccgcccctca

SEQ ID NO: 552494 - DNA, 100 bp, Homo sapiens
ctcgtgagtgcatggggtataagggaccattgcaatttagagatgtggccatagaattctctctggaggagtggcattgcctggacactgcacagcggaa

SEQ ID NO: 552495 - DNA, 95 bp, Homo sapiens
ctcggagaggtgctcggattctcgtagctgtgccggatgatggatgccaaccagcgctgggatgtgcctgaggcggtggagtggatgtccaagct

SEQ ID NO: 552496 - DNA, 100 bp, Homo sapiens
cattgtgcgggtggaggagaatttcgttatcctgttctctgacctcaccatgcatgaggaaatgaaggccgaatttataaaggaagcccagccagggaaa

SEQ ID NO: 552497 - DNA, 82 bp, Homo sapiens
gacagcggcacagaggagggagaaaatgcttggacagaagagatgagtactatttccactaaggcctagaattgcctactgt

SEQ ID NO: 552498 - DNA, 73 bp, Homo sapiens
acccggttccccggcccacagtgggggtgtgcaaacccgagagaactggattagtgatgatgaaccaggttat

SEQ ID NO: 552499 - DNA, 100 bp, Homo sapiens
actgatgtagatgatagatttgagaccctggaacctgaagtatctcatgaaggatataagtatccagtatatggtgtccagtggcatccagagaaagcac

SEQ ID NO: 552500 - DNA, 101 bp, Homo sapiens
gaagcgaccaaagcgcctgaggaccggcaacatggtgcggtcggggaataaggttaccccacagcctatccagcagctgcccctgcctacaatcccagcct

SEQ ID NO: 552501 - DNA, 80 bp, Homo sapiens
aggggacttaaaatttcccctgaagatatttcagcattccaaaccagatggcatggtgctgatgtgaaatgtgtagactg

SEQ ID NO: 552502 - DNA, 100 bp, Homo sapiens
aagaagatcatcattaaggacggaggcacggggcctcatccacatgctcacccacttggccgaggctctgcaccaggcccggctgctggccctcctggtc

SEQ ID NO: 552503 - DNA, 100 bp, Homo sapiens
aatttctaatctcattcctggactttcctgcaggcagcggaggaggagaaagagatggacctcccggactcggcctcgagggtcttctgcggccgcatcc

SEQ ID NO: 552504 - DNA, 88 bp, Homo sapiens
gacgaactacgaacccctggacgggagagtctgccggcggagaatataagactcagattgatggacaacttttcttaattaagcacct

SEQ ID NO: 552505 - DNA, 76 bp, Homo sapiens
atttaaacaagagatttccacagaaggcacctgcggaactcgagtcatgcaggagcttttgtgatcgtgacggaag

SEQ ID NO: 552506 - DNA, 82 bp, Homo sapiens
gcagttggcacacatggttaaggaacaggaggaaaccattcagaggtttgttgataagccggggcccttcgtgggaccctgc

SEQ ID NO: 552507 - DNA, 100 bp, Homo sapiens
atatgaaatgcttgttggtgagaaaaggcgacggcggattgacagaagtatgattggagagcccacaaactttgtgcatacagctcatgttggatcagga

SEQ ID NO: 552508 - DNA, 83 bp, Homo sapiens
attgagaacaatatagatttgcaggctgatcccaaagaactaatcaagatggtcaccaggcatgtgactcgacatgagcacga

SEQ ID NO: 552509 - DNA, 99 bp, Homo sapiens
agtttctgcaggaaaagatctctctacttctcctaaggctcttaaagactctgaccaagtagcacagagtgatggggaggagagccctgctgctgaaga

SEQ ID NO: 552510 - DNA, 76 bp, Homo sapiens
aagtcgggctggccccgacagaacgaaaagaagccctccgaggcatttggctttatgtcccgagttgccctacaag

SEQ ID NO: 552511 - DNA, 83 bp, Homo sapiens
aatcccggaaactccagcgtgtctccagccgtgaacctaaaggcagacccagaagagctttttacaaaactagagaaaattgg

SEQ ID NO: 552512 - DNA, 75 bp, Homo sapiens
gtgaccatctcaagcatccggcctatttcagaaagcctgaagcaggacattctaaatgaaaagactgaattggaa

SEQ ID NO: 552513 - DNA, 99 bp, Homo sapiens
cgcaggtgggggccggcggggtccgtggccagggatccatcagtgagccaggcctgggccttctctcctggtggaccagcaactagccctggggctgga

SEQ ID NO: 552514 - DNA, 100 bp, Homo sapiens
caatccaagccgactgatgactggagaggatggctactatttcaccaatctggtcacggtctagatcacattctcgatccagaggaaggcgatactctcg

SEQ ID NO: 552515 - DNA, 82 bp, Homo sapiens
cttcgaacttttgacacggctttggaaacgacgtcatgtgttaggccaagaagcttgagagaagaaaaatttcagaaaaatt

SEQ ID NO: 552516 - DNA, 75 bp, Homo sapiens
cctacaggcccaaagacacccaaccacaggccagatactgggttacaaagagttccagggtcacccccgagagga

SEQ ID NO: 552517 - DNA, 105 bp, Homo sapiens
acttcctcctggaggaatacctggcattgacctctcagatcccaaacaactggcagaatttgctagccaaaattgcctggaaaagagcagtgagaggagtccggg

SEQ ID NO: 552518 - DNA, 101 bp, Homo sapiens
acaaaatataaacagagaaatggctggtctcacaaagatctattaagattgtcacatcttaaaccttccagtgaagatgatggtggtgctaccccagtaca

SEQ ID NO: 552519 - DNA, 100 bp, Homo sapiens
ggaagtagtagttgttgagcagagggaaagggataggagaaggatgtggactgcagtgctgcagtgccaggacagtctccgtaagaaggatgacaggatt

SEQ ID NO: 552520 - DNA, 96 bp, Homo sapiens
agtcgagagtagccttcgttaaccttaattgaaactggtacagaatttcagagtgggatatcagatctttagtgtgaagatacatctacattaaac

SEQ ID NO: 552521 - DNA, 90 bp, Homo sapiens
cgggtgcgtctgccgcagagtcggcacctgaaggacatggagattttgacggtgtctggaccgccggaaggagggacgcgagtgaccatc

SEQ ID NO: 552522 - DNA, 100 bp, Homo sapiens
agaagcagcgcctgttcccggggcagatccaggttcaggtattttgaaggtggcgtctcatctgtctacctctgggatctggatcatggctttgctggag

SEQ ID NO: 552523 - DNA, 75 bp, Homo sapiens
gcggcagacggcgacagtggcggcggcgccatggcagggcttgcaggactccagcgaaattacagggaattcgtg

SEQ ID NO: 552524 - DNA, 98 bp, Homo sapiens
cgcctatcagtacacaataaggtgtactaatggtcacttgatgtgcgctggctgttttatccacctactagcagatgcccggctgaaggaggagcagg

SEQ ID NO: 552525 - DNA, 75 bp, Homo sapiens
cgtccagcctaggttccacccttttctgggaacgtccttgaatgggcaagagggcacatgaagtacggcgtcctc

SEQ ID NO: 552526 - DNA, 75 bp, Homo sapiens
aggagcgatttgccatcgtgctggaaggaaaatcacctcggcagtgtttgaaggaaggatactgcaactctttga

SEQ ID NO: 552527 - DNA, 75 bp, Homo sapiens
ccaaccagctccgcgagctgcccgaggctcttctgaaaatggattgccaagagttagtcgcacgtctcatccaag

SEQ ID NO: 552528 - DNA, 100 bp, Homo sapiens
aaacgtcagcaaccaaaggcaccggccttgatgaggcaatggaatggcaaagaaaaatccctttggttccagaaaatctcctgaaaaagaggaaggctta

SEQ ID NO: 552529 - DNA, 100 bp, Homo sapiens
gtaacaccgagaagaggcagcggcggtggcgccaagacgattggtgccaaacagggcagaacgcaactcagctctggggagtatgcgaccagtggttgga

SEQ ID NO: 552530 - DNA, 97 bp, Homo sapiens
tacacttgcggctgtagctcagatcttgcaaagtcctcaaggccagcagatggagtggtttaataattataaaagatctcttgctacttatatgagg

SEQ ID NO: 552531 - DNA, 76 bp, Homo sapiens
tcatacgggaagagagagtaagagatgctgggctcttgcactgtttggtggaaatggtgagacaggatttgagcaa

SEQ ID NO: 552532 - DNA, 75 bp, Homo sapiens
ggaaccatggagggtgtagagcttctgcttcagtttacccaacctcagcaaacatcgtttgctttggagaggaac

SEQ ID NO: 552533 - DNA, 74 bp, Homo sapiens
acggcagcaaccgcagcagcagccttcaggaatgggtaccacagaccatgtcatcgtcctggcgtccacgaacc

SEQ ID NO: 552534 - DNA, 75 bp, Homo sapiens
tcagtatctcaggcggcaccctgtccccgaggaggggaccatgacacaggctgggttacgacccctacaaccctg

SEQ ID NO: 552535 - DNA, 82 bp, Homo sapiens
gggaagacgcggggaagaggaggcggaaaaggacgcaaagttctccggcgaggtatgtgaggagcagcgctgtgaggaggaa

SEQ ID NO: 552536 - DNA, 100 bp, Homo sapiens
ccacgagatcatggggcccaagaaaaagcacctggactgttggcgtgcagtggtgtgatctcagctcattgcaacctctgcctcccggactcaagcaatc

SEQ ID NO: 552537 - DNA, 50 bp, Homo sapiens
ccggcaccacccatcttgagtatctgctgggtacattgctcaaaagatag

SEQ ID NO: 552538 - DNA, 49 bp, Homo sapiens
cggcctgtgtggtggactgtggcacgggactgattttgcacgatttagc

SEQ ID NO: 552539 - DNA, 75 bp, Homo sapiens
gtcacagcaactcctttgcaagatgccccggagccaaaaacctgtatatcatctccgtgaaggggatcaagggac

SEQ ID NO: 552540 - DNA, 100 bp, Homo sapiens
ctggacaaaggaacaggtatctcagcccctctgaaatcaaagagatcttgcatctggctggactcaatgagctggaggtgattcccttggtgcagacatt

SEQ ID NO: 552541 - DNA, 97 bp, Homo sapiens
cctagtaaacggggctgctggtgggccgcgtcgaagacatggaccagggctacggaggcctttccgttccgaacgtccacggcgccctggcccccct

SEQ ID NO: 552542 - DNA, 74 bp, Homo sapiens
aagcctgtctggaagttacttgtggacatggtggtggagacactgccacttgctgtgccaaatggaacacggag

SEQ ID NO: 552543 - DNA, 87 bp, Homo sapiens
gagcttgtccaaagtgcaacattcatttcaatcttttggatcctttgaaaaatcacatgaagttgccagtagtcatcagagtaccaa

SEQ ID NO: 552544 - DNA, 100 bp, Homo sapiens
ctggcggctgctggtagttccatgctgtctgttcagacttcagcttggtatgccatggacaatattaccaggcagaaccaattctacgatacccaagtca

SEQ ID NO: 552545 - DNA, 100 bp, Homo sapiens
tggttacagctgtttccacgtgcggtgctcgtcgggagtgatcacctaccctacaggtacctggaagaggtgggctacacagacaccatcctcgacatgc

SEQ ID NO: 552546 - DNA, 95 bp, Homo sapiens
gagtccctcccctccccacggctgcgtgtatctgactgcagccatgagcagcaatgagtgcttcaagtgtggacgatctggccactgggcccggg

SEQ ID NO: 552547 - DNA, 82 bp, Homo sapiens
ggatttaaaagacagtcctcgtcagcactgactttcagctatggaatcgatctgctcactttagcactctggcaattaaaca

SEQ ID NO: 552548 - DNA, 78 bp, Homo sapiens
aaacctcaagatgtggatttaccttatcccctcaacaacttttcagtggcaaaatttggtgttcacttggcagaactg

SEQ ID NO: 552549 - DNA, 51 bp, Homo sapiens
cttgtggcgaatggggctcacgtcgagaaaaccagtagattcccagacatc

SEQ ID NO: 552550 - DNA, 142 bp, Homo sapiens
agaaagtgagattaatgaaagaagtcatggaacactatgctgatcaagatgatctggttgtcatgtttactgaatggtggatatcatccagtgaaaattggagacctcttcaatggccggtatcatgttattagaaagcttg

SEQ ID NO: 552551 - DNA, 100 bp, Homo sapiens
cattacggacattaagagctttaagacctctaagagccttatcccggtttgaaggcatgaggcaatttggaggaagctctggatcacagttgcctcaaat

SEQ ID NO: 552552 - DNA, 100 bp, Homo sapiens
cttcgcctccttcaccgccgcagaccccttcaagttctagtcatgattcaccaggacacgagactcacccaacatgtgcctctgctcaaaaagaccctgg

SEQ ID NO: 552553 - DNA, 78 bp, Homo sapiens
gggggccagcgacgccggccaccaacgagagtccacctgaaggagatgtgcaacatgctgggcctgggggacatgaac

SEQ ID NO: 552554 - DNA, 75 bp, Homo sapiens
tgacagcctcaagggcttcagcaccgcgcccatggcagagccagaccctatcatggtgaacttacttcagattgt

SEQ ID NO: 552555 - DNA, 100 bp, Homo sapiens
gtcatgcatttttctaaatgggcagtttccagtggcagcagtacagcattactttatagcaaacgactgaataatcatgggccagactgggaagaaatct

SEQ ID NO: 552556 - DNA, 71 bp, Homo sapiens
cacctatggacaagtctataaggagttcaaagaaggacgcagagccagccacacagccccacaggtcctct

SEQ ID NO: 552557 - DNA, 83 bp, Homo sapiens
gggcaatgacatctacgtgacggggggatatgagactttctactcggaatatcctgagtgttgcgtggatgtaaaacccattt

SEQ ID NO: 552558 - DNA, 100 bp, Homo sapiens
gcctttctcccagatcctaatgatggcagcctgtatacgcttggaagcaagaataatgaaggcctgacgtcttctcacaagactttcaggattaagcgat

SEQ ID NO: 552559 - DNA, 100 bp, Homo sapiens
ctgcactgtgacctacactagtcgcgggagccacgcagaggacgccggaacaccctggaagccgagaaatggtttctagaccaactggggagattcccgt

SEQ ID NO: 552560 - DNA, 75 bp, Homo sapiens
caattacaagatctggaggaatgcagttaacaagcacaagccctggctggagcccacctaccacggcatagtcac

SEQ ID NO: 552561 - DNA, 100 bp, Homo sapiens
caaagctgctgccgccccttgggctaaaagatgatagtatttctgctgcaagtacttctgatgttcaagatcgcctgtcagctcttgagtcacgagttca

SEQ ID NO: 552562 - DNA, 100 bp, Homo sapiens
tgtggctctggatagcaccttatggacaggatgcagcaccgaggcttcctcctcctcaccctcctcgccctgctggcgctcacctccgcggtcgccaaaa

SEQ ID NO: 552563 - DNA, 127 bp, Homo sapiens
cggggagcggccctaccgctgctctgcctgccccaaggggttccgcgactccaccggcctgctgcaccaccagtccctggtacgtgagcccctttcccggcgccggcagctgctccgggagaacttt

SEQ ID NO: 552564 - DNA, 80 bp, Homo sapiens
ggaggtggcttatgaaagtgtgatgttcgcgtatttcttgacaggtggatgaaaatactaggaaaagtttatttaagtta

SEQ ID NO: 552565 - DNA, 130 bp, Homo sapiens
gagaagacgatctgcacttcgcattttggcattgacatttaattttagggtcctttatatagaagggagagtaggtgacgcatccaaagaagacattgacactgctatgaaattaggagccggttacccc

SEQ ID NO: 552566 - DNA, 100 bp, Homo sapiens
gcgaggtagagttggggtcgcaggtgtctggagtagatttgcagaatgcctcacacagcgaagcagttgaggccattaagaatgcaggaaaccctgtggt

SEQ ID NO: 552567 - DNA, 80 bp, Homo sapiens
accgtgatggcttcattgacaaggaggacctgcacgacatgctggcctcgctgggatcactactcttggaatcaaagata

SEQ ID NO: 552568 - DNA, 90 bp, Homo sapiens
tctccggctgcaccctgaccgatgggaccctggttgaagatgaaatccactgaggagggaagtccagcaccctgtgtgccagtccagaac

SEQ ID NO: 552569 - DNA, 100 bp, Homo sapiens
ctggaacaggagttccgatcgacccggtaccaagaaggggagtgcccgcggcaggtcttcagaggagcagctgagccgcgcctaccgcctgctgatagca

SEQ ID NO: 552570 - DNA, 49 bp, Homo sapiens
gtacatgtttgctacaaaggtggtggggctaagtgatggatcttgtact

SEQ ID NO: 552571 - DNA, 78 bp, Homo sapiens
cgattcctcctccttggtcgccgcgtccttggctggcgtaaggaaggggagttcaccctgcacggccgggccatcctg

SEQ ID NO: 552572 - DNA, 82 bp, Homo sapiens
acgaggcagctgtcccatgctctgctgagcacggtgggcttttttccagacttcaagctcccattccaacagtaagagcttc

SEQ ID NO: 552573 - DNA, 100 bp, Homo sapiens
caaggccggagaaggccgccgggcccgggcatggtggtctggggcaacgcggaaggtgagaattatgaagatgatgacctagtaaattctgatgaggtta

SEQ ID NO: 552574 - DNA, 125 bp, Homo sapiens
caaaaacgggatcgctttggaaacatctttaccctgttcattgggccagagctattcctacttgtacggactttgaagtgattcagtttcctctacggatgagagactggctcaagaatatcctc

SEQ ID NO: 552575 - DNA, 100 bp, Homo sapiens
atgtctgcgagccaggattcccgaaataaggatctggcatgtcaacacaaacataggaagttgaggcagtcaaagggaaataactgctaccctgactctg

SEQ ID NO: 552576 - DNA, 101 bp, Homo sapiens
tcttggatttggctacacacttatagatcttctgcactgtttacaggcacaggttggcagtggcaatgacccctggtcagcctggagtgcctccaaatctg

SEQ ID NO: 552577 - DNA, 50 bp, Homo sapiens
taaaaacatgcagttcagtaacacacctgagtggtggacatgacaacaga

SEQ ID NO: 552578 - DNA, 50 bp, Homo sapiens
cttggcttctgaggcatctgacaaggaggaccatgacatcatggaagccg

SEQ ID NO: 552579 - DNA, 90 bp, Homo sapiens
gaccggtggatcctgtccttcatgcagtctctcattggcttctttgagactgaaatggcaggccgttaattaaggaaaagttgagccagg

SEQ ID NO: 552580 - DNA, 100 bp, Homo sapiens
gatctctctcgctgtgagacatgtctgagactcctgctcagtgtagcattaagaggcggagagacttcctccaaatggtcctggatgcccgacattctgc

SEQ ID NO: 552581 - DNA, 82 bp, Homo sapiens
cgcaggacagcgccttcctcaacgacgcggacatggtcatgagctttgtgaacctgggtgcccgtggttgacacgagctgtg

SEQ ID NO: 552582 - DNA, 100 bp, Homo sapiens
gagaatccagatgaggcttgtgctgtgtcccaggtgctgggtaggccaggtttcagcatcgcagacaagaagcgcaggacaggctgcattggggccaaac

SEQ ID NO: 552583 - DNA, 51 bp, Homo sapiens
acactgtccggatcttccctccctggacttcgcaggtgagcagtaacggaa

SEQ ID NO: 552584 - DNA, 100 bp, Homo sapiens
cagacaatgcgagagagtcagctgcaacaggaagacccaatggatagatacaaggaactttatattgctgttggaatatctggagccatccaacatttag

SEQ ID NO: 552585 - DNA, 73 bp, Homo sapiens
ggagacagagtaatcacttacttggaccacagcacacaggtcatcacactgaaacggtgttcaaccgggtttt

SEQ ID NO: 552586 - DNA, 88 bp, Homo sapiens
agaagctgctgcccagaacgtgtactgcttgagaacagaatacattgctgattatctcatgcagaagtggtccaaaggcaaagttcgg

SEQ ID NO: 552587 - DNA, 101 bp, Homo sapiens
aaagaaaccatgtgctgaaatgtttgacgacactgatggtttgactcagcccacctgcacccaggtgaaataaacagctttattgctcacacgaagcctgt

SEQ ID NO: 552588 - DNA, 83 bp, Homo sapiens
ccgctgagcttggcgcacgggccgaccagcagaaaggacccaggagcgataacagtaaatcaaataagatatttgtcggtgga

SEQ ID NO: 552589 - DNA, 78 bp, Homo sapiens
cactgcactgaatgggaagatttactttcgaagctataagttcattccgacaggaccaccccagtagcatgggtgttt

SEQ ID NO: 552590 - DNA, 90 bp, Homo sapiens
aaccagatccgggagcacgtcatcgccatcgaaggtagctacagcaagctgggtagcaggcagatccaaaggatatcatgaagtttccag

SEQ ID NO: 552591 - DNA, 90 bp, Homo sapiens
cctcgagagccgagatgagcatctgcacgagatggcactggagcaaatcacggcagtcactacggtagatatagttgtaggtactccggg

SEQ ID NO: 552592 - DNA, 100 bp, Homo sapiens
gttaaggattccaagtaactcttatttggcgtcgaccagaagattatgatattcataacagcagaaagaaaccaaggattgactatccccctgagtttca

SEQ ID NO: 552593 - DNA, 51 bp, Homo sapiens
cgcttggttaaaacctgacacttttaacagaaaaagcttgtggtgaagggg

SEQ ID NO: 552594 - DNA, 82 bp, Homo sapiens
tccggagcaagcgggcgagggcagcgccctaagcagggaagagcatggaggaaatcaagaaggtgctgctgctggtgctggg

SEQ ID NO: 552595 - DNA, 75 bp, Homo sapiens
caagtacattagagccgaggttcatgaaaataaacagagttgtctttgttggaaactttttacgtgtcaataccc

SEQ ID NO: 552596 - DNA, 100 bp, Homo sapiens
tggggcgccgaggcgtgcacatgctcgcccagccacccccaggacgccttctgcaactccgacatcggggatgagctgaccaagatggaggacgaggatg

SEQ ID NO: 552597 - DNA, 74 bp, Homo sapiens
ctgaaatgaaagcttgggatataaggactggcaagtgccctctggtggtcagaagatgctgtgctgtctcgtta

SEQ ID NO: 552598 - DNA, 91 bp, Homo sapiens
gggcctcgcgccggctatggccgtgccctggggctgagccctcagattttgcaagaacgaggctcaaggatgtgagggacacagtattgac

SEQ ID NO: 552599 - DNA, 90 bp, Homo sapiens
caagtatgtatatgaatgatggctatgcaccacctgatatcaccaactattaccccggaagctttcgagaagctgggattccctgcagca

SEQ ID NO: 552600 - DNA, 100 bp, Homo sapiens
cctgccttctgtgatcactgcggggagatgctcttcggcctagtgcgccagggcctcaagtgcgatggccatggatgctccccactccaaagcagccctg

SEQ ID NO: 552601 - DNA, 95 bp, Homo sapiens
gcgcccgccccgctctgggaggaccgcgagtggagcggtgcatgggtgccatgcaagaggggatgcagatggtgaagctgcgtggcggctccaag

SEQ ID NO: 552602 - DNA, 90 bp, Homo sapiens
ggcgcgggcactgctttccactcggctcctgtcgtccgttctctcaggctcccgttcaggaactgtggaaggtgcatcagtgaagaaatg

SEQ ID NO: 552603 - DNA, 100 bp, Homo sapiens
gttccactggacgctcatcagagggaagatctttttcctcaattggttggaaaagagactgttcaaaccactgaggatcagattttgaagagagatatgc

SEQ ID NO: 552604 - DNA, 82 bp, Homo sapiens
tgcgctgcattctgcgggacgaaccctgctccgcgcgaggtccgggttgactctgccaccatcccccggcaggacgaagttc

SEQ ID NO: 552605 - DNA, 96 bp, Homo sapiens
caaacaggaacagacggacttcgcctacgactcagatgcagacaatctctttgaacatgaattgggggctctcaatatggctgcattactacgaaa

SEQ ID NO: 552606 - DNA, 87 bp, Homo sapiens
ctgggacgcacagagaccgtgaagattccaagttcaggagaactcgaccgaacaagttgaaatcatcgcagaaggataaagttcgtc

SEQ ID NO: 552607 - DNA, 82 bp, Homo sapiens
gtgggtcctcgcttgcagttcagcgaccacggtgctggagaatctggtaaaagcaccattgtgaagcagatgaggatcctgc

SEQ ID NO: 552608 - DNA, 75 bp, Homo sapiens
gcctcaggcgtgcgcggacggtgtgcggagatttccgcatattttgcaactggctcctcaatgacataccatttt

SEQ ID NO: 552609 - DNA, 83 bp, Homo sapiens
acgcaaccatggctgaagaacaaccgcaggtcgaattgttcgtgaagacaatgcagatcttcgtgaagactctgactggtaag

SEQ ID NO: 552610 - DNA, 100 bp, Homo sapiens
gtgcagacaactaagcgaggggatcctcatgagttaagaaacatatttctacagatctgttacctaaagcaataaaaaatggccagaggatcagtgtccg

SEQ ID NO: 552611 - DNA, 100 bp, Homo sapiens
ctcctaatggtcaaggacctcaaggccccaagggagatccaggtactatttttctgcctggaaataaagtttctgagcatccctgcaatgaagagaaccc

SEQ ID NO: 552612 - DNA, 100 bp, Homo sapiens
gtcctcaatgtggacgccctgagctcccattaggagccgctggctgcggcagcaggggactagcgtgagagagattaaaccggtcaagctcctcagagtg

SEQ ID NO: 552613 - DNA, 82 bp, Homo sapiens
gcagcccagctcaacgtcgtcgcaccagattaaatcggatttctttgaactattatctaatcatcacttggacagtcagtct

SEQ ID NO: 552614 - DNA, 83 bp, Homo sapiens
catagagaccaacatccgtgtggccttagagaagagtttcttggaggtgttcactgttggcagaatttgtgccagccgtacca

SEQ ID NO: 552615 - DNA, 100 bp, Homo sapiens
cagggtcggttccgccgcgcagcgcccaggcccagctcgtccagagtctgcggacagcgcacgtccagccgcttacaaacacgcagatggcaagaagatt

SEQ ID NO: 552616 - DNA, 100 bp, Homo sapiens
tgtggcaggcagaagaaggggaactcctgctgcccactcagtcaggacagttcaacgaggacatgatccccaccgtgggtttcaacatgcgcaaaatcac

SEQ ID NO: 552617 - DNA, 99 bp, Homo sapiens
ctgggtgcagcttctctagctggccttgctgttggttcagtctgcagccctggatgagatgtttcagcagaccgaagatattgtttatcgctatcataa

SEQ ID NO: 552618 - DNA, 100 bp, Homo sapiens
aaaaagggaaaagcgtgcactaacaccaagtttgaacgccatgaccctgtggatgggagaattactgagaggcagtttggtggcatgctacttgcctaca

SEQ ID NO: 552619 - DNA, 75 bp, Homo sapiens
agagcttggaggcggcccgcggaataatcatgggccagactgggaagaaatctgagaagggaccagtttgttggc

SEQ ID NO: 552620 - DNA, 90 bp, Homo sapiens
ctctcggcttgaccgcattcttcctcccagagtgcctggtgaagaatgtgatgggatcactagcatgtctgcggagagcggccctgggac

SEQ ID NO: 552621 - DNA, 98 bp, Homo sapiens
gagaaaaagcttggagataaagttgctttttactgatggactttctggccgagaccagccagtggagctgctgaatcctgcccgcgtgaaccacatgc

SEQ ID NO: 552622 - DNA, 76 bp, Homo sapiens
ggaggaacgcgctaaggcaaagcacctgtgcagagtggacctccagcaaactccagcagacctgcagcagaggggc

SEQ ID NO: 552623 - DNA, 50 bp, Homo sapiens
ctgaactgcagcttctgacgcaggcatgggtagcaagaaactaaaacgag

SEQ ID NO: 552624 - DNA, 98 bp, Homo sapiens
gacacagggcagcccgcagaggacagcgaccacgtaagactttgaccccgacgcaggcttcagtgattgccgcggatcagaagcctgagcactttggc

SEQ ID NO: 552625 - DNA, 89 bp, Homo sapiens
tcgacctgctaacagaactggaccttttcgttttccagttctcaagatgaggaggagattgatatggatactgttcatgatagccaggc

SEQ ID NO: 552626 - DNA, 106 bp, Homo sapiens
gctgaagagcgacaagccgctggcagccgcggatctcaccgccgctcagggcggctatgagaggttttcctccgagtacccagaattctgttctaaaaccaaggcc

SEQ ID NO: 552627 - DNA, 98 bp, Homo sapiens
ctcccgagtagctggggctacagcctcagagagttgtgatcacatgccctcaggacttccctcattgctccattccactacgggttgggctgcccctc

SEQ ID NO: 552628 - DNA, 83 bp, Homo sapiens
gttgtcgtggccggagcggcccgcgcctgggctgccggcacttcgcggcaggtcacagggattatggacccagaacagatgct

SEQ ID NO: 552629 - DNA, 83 bp, Homo sapiens
tggagggcgatggctcagattcgccggttgatgataattagaagcatgctttccactgaacttcccgacaacatttgttatgc

SEQ ID NO: 552630 - DNA, 75 bp, Homo sapiens
caggcgctggcgtccggcctgagtggtctttgggaagaagcttcctgcctttgccaccatccccatccaccagct

SEQ ID NO: 552631 - DNA, 75 bp, Homo sapiens
tgaagagcgacaagccgctggcagccgcggatctcaccgccgctcaggacgcaaacatgcagatctttgtgaaga

SEQ ID NO: 552632 - DNA, 100 bp, Homo sapiens
ttactttaaagatactggaggagatggtcaagaatcgctctataagatctgcaaggaataatgtatttgtggccttggacatgaggcagtcagtcctctg

SEQ ID NO: 552633 - DNA, 98 bp, Homo sapiens
ggccagggccggttctgcaccatcttcaggtcctactccaggggcgctcaggtatggatcctggcgggagccagtcaacccctattatgtcaatgccg

SEQ ID NO: 552634 - DNA, 50 bp, Homo sapiens
agaccttagaaaggatcaggactggcggagtaaccagagagcacagagaa

SEQ ID NO: 552635 - DNA, 71 bp, Homo sapiens
tctttgacaagtgatgagaagctgtcggagcttcccaagaagggtcccagcaccatggaggacccgaaccc

SEQ ID NO: 552636 - DNA, 100 bp, Homo sapiens
ttgtctgcgctggcgtcgcctccaggacgagatgcaatgctcccccgaggagatgcaggtgttaagaacaccttccaccatgaccacctcagcaagttcc

SEQ ID NO: 552637 - DNA, 82 bp, Homo sapiens
cagctgttagtcgggtaggcataggccagaagcggactcctagaagaggggagcagcaaggatggaatgacagccgtgggcc

SEQ ID NO: 552638 - DNA, 100 bp, Homo sapiens
ggcatgtaaggtgcgcggagggactgcaccttctccatcaggtgcagaaggaatctccgtatgttatgatgaagaaaaatcatgaaatgcttgaaggcaa

SEQ ID NO: 552639 - DNA, 100 bp, Homo sapiens
tttccttcttccttcccctcctcgccgccaccgcccaggaccgccggccgggggacgagctcggagcagcagccagggacagaagccctcgaggttctgg

SEQ ID NO: 552640 - DNA, 100 bp, Homo sapiens
tgtcccacacggtcgcaggcggcggcagcggggaccattcccaccaggtccgggtgaaagcctactaccgcggggatcccaacggcttcaatgactggac

SEQ ID NO: 552641 - DNA, 75 bp, Homo sapiens
tagggccttgccccgggagcccgcgaggatgccatggacaatattaccaggcagaaccaattctacgatacccaa

SEQ ID NO: 552642 - DNA, 97 bp, Homo sapiens
ccatcctgctggtcagcactgcggctgctcccattgctatcacatgttttaccagaggcttggacatcaggaaagagaaagcagatgtcctctgccc

SEQ ID NO: 552643 - DNA, 80 bp, Homo sapiens
gcggtggccgcactgggaccccggaatcccgcgcgctgcccacgattcgcttctgaggaatgttccggagaatcacagca

SEQ ID NO: 552644 - DNA, 75 bp, Homo sapiens
gcttcgaaatcgcctgctacaaaaacaaggtcgtcggctggcggagcggcgtatgtatcggcaagcagtgtaaac

SEQ ID NO: 552645 - DNA, 51 bp, Homo sapiens
ccggcggcagcacgaaagtaccatgattaatcactcctgaagatcggaaat

SEQ ID NO: 552646 - DNA, 82 bp, Homo sapiens
cgccaggcaacgccgccggggacacagggcagcccgcagaggacagcgaccacgactgcaaaattcaaaatggggctcaagg

SEQ ID NO: 552647 - DNA, 90 bp, Homo sapiens
ggatccagtgttcaccatcctggccccggaaggtgctaaagagattgatatcgcagcgaccctggagcacttgagggaccagagacccgg

SEQ ID NO: 552648 - DNA, 100 bp, Homo sapiens
gacggcgtcaccaacctaccccggctgcaggagctgctactgtgcaacaacccacggatgataccatcggggaccttaagaagctgattgcagcccaaac

SEQ ID NO: 552649 - DNA, 82 bp, Homo sapiens
agccggagctcgagccgcagcgggtacatgtcccagagcaagcacacggaggcccgggagctcatgtactcgggagccctgc

SEQ ID NO: 552650 - DNA, 99 bp, Homo sapiens
caacacttctccgagccagcgagccagcgagccgccgacccgccgagcaaaatggaatggccaacctgctgacgggccccaaacggaacctgatggccc

SEQ ID NO: 552651 - DNA, 100 bp, Homo sapiens
agcagattacttccatcagtattgagccaggagttgaggtggaaggggtcaaataaaacaaaaaaagaagaccgtaccacaaaaggttactatagccaaa

SEQ ID NO: 552652 - DNA, 96 bp, Homo sapiens
cttgacgttggctgtggtggtgggctgttaactgaacatcagaggctccttgaaatgctagatacagagaaggaactgttaaaagaaaaaataaag

SEQ ID NO: 552653 - DNA, 100 bp, Homo sapiens
tattccctgctggtgttctctagtttgcctaagtagaatttacatgggaatgcactctattctgctttcaagtgttctctgggatagagagagatcaagc

SEQ ID NO: 552654 - DNA, 119 bp, Homo sapiens
ggggcttaagttccgtgaactcagtactgatgcccagtggggcattcgtcttggtaaacttggtatatcatttgaggatgtggctgtggatttcacgctggaggaatggcagctactta

SEQ ID NO: 552655 - DNA, 135 bp, Homo sapiens
gcaagaaactgttgaattagacccgtttcctatagatgagaaaccatacaagctgtggaaaatgtttataggaggccttagctgggacactacaaagaaagatctgaaggactacttttccaaatttggtgaagt

SEQ ID NO: 552656 - DNA, 83 bp, Homo sapiens
tgagttgagtggagatgcttctgtggaagatgatgcttttatcaaggaaggaatcgtgtctcctagtgacctggaccttgtca

SEQ ID NO: 552657 - DNA, 100 bp, Homo sapiens
agggagcctgggacatgatcgacagccaggtcttcaaggagcccaagatgggtggcaaccaactatatctgaggaccagagccattttggggcaccagag

SEQ ID NO: 552658 - DNA, 100 bp, Homo sapiens
ctgggtgcagctctgcagcggctacatctgcaggaaggacgaggccaaaacgggctccacctacatcttttttacaggctgttcggctcttgaatcccag

SEQ ID NO: 552659 - DNA, 75 bp, Homo sapiens
ccgccccgtcgggcctcacgaggtgcttggattcgccctcatagtcctgtgtacctccagcgtggctgtcgctct

SEQ ID NO: 552660 - DNA, 100 bp, Homo sapiens
ccgggattttggaggccggggccgcgctgagggcgcccagctggagcggtggtgccccccccgggcacggggccatgtacaacgggatcgggctgccgac

SEQ ID NO: 552661 - DNA, 100 bp, Homo sapiens
cccctgtgctcagtaaggactcggcggacatcgaggtcgaatttacaagcactctcagcaacctttgattacctatgaaaaatatgatgtgacagactct

SEQ ID NO: 552662 - DNA, 83 bp, Homo sapiens
ggagccggagccgcagaggctcccgggctggactcaggcttctcaggcatgtgggcacattccatgacagtacaggattatca

SEQ ID NO: 552663 - DNA, 101 bp, Homo sapiens
atgcccaccactgccacaaacgccgcaccaggtcttgtagcagcgcctcctcggcagaatccagagaccacatttgaagtatatgttgaagtggcctatcc

SEQ ID NO: 552664 - DNA, 82 bp, Homo sapiens
cgactcaaagctgcacggcagtctgtttatgagaacattgatgatggcacctcagatcgcccctacagccatgctctggtgg

SEQ ID NO: 552665 - DNA, 100 bp, Homo sapiens
ggcagcccgtcggccgccgccaactacctgctctgtaccaactgccggaaagtgctgcggaaggtgactccccggacagctcaacaccaaagctttcgcg

SEQ ID NO: 552666 - DNA, 100 bp, Homo sapiens
aggatctgaagagctatggtgaaacaccactgaagcattgccaaggtcctaccagaaggaacactacccaaaatacaggttattccagtgggactcaaaa

SEQ ID NO: 552667 - DNA, 76 bp, Homo sapiens
atggcgtcttccgtgggcaacgtggccgacagcacagggtgggttaggagtacagaagatgctgtggactattcag

SEQ ID NO: 552668 - DNA, 100 bp, Homo sapiens
cgacagtgacctcatgggcaagaccatgacggaggatgatgacatcactaccgggttaatacaatctgttggaatgacactggagaatatattttatctg

SEQ ID NO: 552669 - DNA, 100 bp, Homo sapiens
ctcattgctcagcgcggacctagacctggaatcgcccaagtccctctactcgcgaggtatagctgtggaccaactgtatatgatcatgcgcaccttggcc

SEQ ID NO: 552670 - DNA, 100 bp, Homo sapiens
aacatgcaatgaacccaaaagggatgtatgttgtgttcacagcgaaggtactcccttcagcctgtcccagaaaggaggattccaaaccgatacttaggcc

SEQ ID NO: 552671 - DNA, 100 bp, Homo sapiens
ttgcctgccatatccttactggagagatggtagctataaaaatcatggataaaaacacactagggggctcctcgcacctaccccagcaactcaaattcac

SEQ ID NO: 552672 - DNA, 74 bp, Homo sapiens
atacatgaaggagacctagtggaagtggttctttcagaaataaacggtgactggcaaagagctgatgcagtctg

SEQ ID NO: 552673 - DNA, 50 bp, Homo sapiens
tcaaacttggaatggatttgaccaagatatgtgattctgttggactggca

SEQ ID NO: 552674 - DNA, 82 bp, Homo sapiens
gtcactcctttctttgtggtcttcatttgtgaatacatagcgaaaccttgaaagccatttgatgtcccctgctgagattcca

SEQ ID NO: 552675 - DNA, 100 bp, Homo sapiens
taacctgaagttggtcatcaaaccaggacacagcattgttggttttgccatgtactattttacctatgacccgtggattggcaagttattgtatcttgag

SEQ ID NO: 552676 - DNA, 121 bp, Homo sapiens
ttggagttttgcccacgcgttgtaattaagcctcgcacaatatggcaaacctgtcttcattaaagtccctgaggaccagactgggctgtcaggaggggtagcctccttcgtgtgccaagct

SEQ ID NO: 552677 - DNA, 100 bp, Homo sapiens
tggagattcaagatctgggtgccatcattttctggttctgttgatgaccctcttccagacgctgaccggaaaggagattgagattgacattgaacctaca

SEQ ID NO: 552678 - DNA, 51 bp, Homo sapiens
atctggattgtagccataagtggacttaggaattccagggaagaaatgtgg

SEQ ID NO: 552679 - DNA, 90 bp, Homo sapiens
catgtcccctttggagagtatcaaagccaacccagtatttgattaccagctctacttccaagaaccagtgctggagaatctggtaaaagc

SEQ ID NO: 552680 - DNA, 98 bp, Homo sapiens
gcctggcccgtgagtgcctcaacaactgagatgaacgtcgactcgcttgcaggcaagttgtcagggttcaactagatatagcttcacaatctctggat

SEQ ID NO: 552681 - DNA, 51 bp, Homo sapiens
caaaatgtcaacaaattgatggaattttgatttggctgctgggctgctacc

SEQ ID NO: 552682 - DNA, 75 bp, Homo sapiens
aggtatttgtgaaggagcagggagaagaggagctgctgaggattgagaggatccagaatccagatctctggaata

SEQ ID NO: 552683 - DNA, 82 bp, Homo sapiens
actcggacaagtacttcgacgaacactacgagtaccggagcatattaatgaaaagtgccataaactgaaaaaccaaacatga

SEQ ID NO: 552684 - DNA, 100 bp, Homo sapiens
aacgccaccaattccaacctggttatggtgcctggaagccagaacaacctccttctgaagcctctgcttcctgatactgaatacaaagtcacagtgactc

SEQ ID NO: 552685 - DNA, 100 bp, Homo sapiens
ctgagcttgccgcacaaaaagctagagagactgcctgcgctgctgacttaaggccccaacaccaaacacagaagcaacagccttacacagagtgttcagc

SEQ ID NO: 552686 - DNA, 82 bp, Homo sapiens
ctgctgcggggcatctacgcttacggtctctaattaacagaagatggcaaagcccagccacagcagctatgtccttcagcag

SEQ ID NO: 552687 - DNA, 100 bp, Homo sapiens
gcgccatggcggcccccggcagcgcccggcgacccctgctgctgctactgctgttgctgctgctcgagatcctgaaggagctagacgagtgctacgagcg

SEQ ID NO: 552688 - DNA, 50 bp, Homo sapiens
ccgtactccagaaaacttgattacaaatactttccaagactggaccttaa

SEQ ID NO: 552689 - DNA, 100 bp, Homo sapiens
cacccagctgccctcccgggaggctgcctgcctgtacaccaggggttggaaaaaccacactaggcaaagaacttgcgtcaaaatcaggactgaaatacat

SEQ ID NO: 552690 - DNA, 90 bp, Homo sapiens
tcatccaggagatgggacagcgtctcaatgtctatacacagaatgggattttacatatgctggacagaaataagagaatcaagccccggc

SEQ ID NO: 552691 - DNA, 100 bp, Homo sapiens
cagactgaaaatatgttttcagaggcatagaatcttcaggaaaatactggagttcctgagatctcaagggacattgctgctcggaatgttctggtgtcct

SEQ ID NO: 552692 - DNA, 75 bp, Homo sapiens
ggcggatgccctgcagtacctgcagaaggtctctggagacatcttcagcagggtcgggtgtgctgacagccggct

SEQ ID NO: 552693 - DNA, 90 bp, Homo sapiens
gggaggcatagcgcctctctgatcttcctgcatggctcagcccctcatatggaaaatttgaaatgcagaggggaaacagtagcaaaggag

SEQ ID NO: 552694 - DNA, 51 bp, Homo sapiens
tgtcggacggcgagggcccctccgccgctgggagtgtccactcgccttcca

SEQ ID NO: 552695 - DNA, 90 bp, Homo sapiens
ccggcgtctccgcagcagatcagggaccggctgctgcaggccatcgacccccagagcaactgacatattcgatgccatgttccctgtcac

SEQ ID NO: 552696 - DNA, 87 bp, Homo sapiens
gagtccgactcgctacgcgggtcttgcgagatatctggccgcctctgccgcagctggagaacatggtgatgagttttcgagtctccg

SEQ ID NO: 552697 - DNA, 96 bp, Homo sapiens
cgctggcgggagcgcggttcggggccgcagaggaaacttccattttagaagaatacagtatcaattggactcagaagctgggagctggaattagtg

SEQ ID NO: 552698 - DNA, 100 bp, Homo sapiens
attgggtggaagatggcgctggccggatggaaatcctaatgacagtctccaaattcgcctccatctgtaccatgttacttcgagagcttaagcatccaaa

SEQ ID NO: 552699 - DNA, 100 bp, Homo sapiens
agaacttatgctgactacgaatctgtgaatgaatgcatggaagattaaaaggagcccaagccccatctcatcctagcacaccctcctccactgtcctggc

SEQ ID NO: 552700 - DNA, 50 bp, Homo sapiens
gccctggccatctaccatgtgggtttgaacataatctttcatgtagcttt

SEQ ID NO: 552701 - DNA, 90 bp, Homo sapiens
tccgcaaggccgcccgggaactgctgacgcttgatgagaaggacccacggcgtctgttcgaagtgcctggtccctgtgaccatgaagacc

SEQ ID NO: 552702 - DNA, 75 bp, Homo sapiens
aacgacatcgatggcctggagaagttttctggatatgccgcagaaggatccgtgccagaagcaagcctgtgagat

SEQ ID NO: 552703 - DNA, 60 bp, Homo sapiens
agaccttgtggaggccttgcaggagtttggacccatcagattcaggaattgtagggcctc

SEQ ID NO: 552704 - DNA, 98 bp, Homo sapiens
ttttacctacgttggcggccccagaagggggacagccgcgccgctgctgcttttccgaagaggtgacttcgaccgagctctccagtggagaccagagt

SEQ ID NO: 552705 - DNA, 100 bp, Homo sapiens
cgggagtaggcgacgggcgtgagggcgaggcggcggcggcggcggccagagagcagcagccgcctggaatctgcaagcagaatatgaccgtctaaagcag

SEQ ID NO: 552706 - DNA, 75 bp, Homo sapiens
atggctcttctctggaagatcttgtggcctgtagtggtggagacacgcccagtggatgatcctactgctcccagc

SEQ ID NO: 552707 - DNA, 83 bp, Homo sapiens
tgctgacctacaagcagaagagacaatgcagatcttcgtgaagactctgactggtaagaccatcaccctcgaggttgagccca

SEQ ID NO: 552708 - DNA, 100 bp, Homo sapiens
ctggacagcattcttgtagacaatgttgcactacaattttttatggggccatgtttatgagtggactaagtgaaagcaaacaaacccatgtacacctgag

SEQ ID NO: 552709 - DNA, 100 bp, Homo sapiens
ctagatgtaaatgtcagtggaaaggagagctaccatcactaagccggatcgagctgggagatgtgacaccacacaatattaaacagttgaaaagattgaa

SEQ ID NO: 552710 - DNA, 100 bp, Homo sapiens
aaatgcagagctggagtcgtgtgtactgctccttggccaaggtgggcaatggcagaaggttatggggcttgcttaataaacaagccagagcttgttcaag

SEQ ID NO: 552711 - DNA, 115 bp, Homo sapiens
cagatgaaagagaagtttctggtcactccccaggattatgcgcggtctatcatttggcaagtgtacgcttacgtgatctatgtctaaaactggatgtttcaaatgagttacgaag

SEQ ID NO: 552712 - DNA, 100 bp, Homo sapiens
actgacctagtggcattcaacctccaggatcctcagcatgctctatgttctatgatgaggatggggatctggctcacgagttctatgaggagacaatcgt

SEQ ID NO: 552713 - DNA, 90 bp, Homo sapiens
caaaggtctggacactgaaaccaccgtggaagtcgcctggtgtgaactgcagagaggcaatatcaaggttttaaatctcggagaaatggc

SEQ ID NO: 552714 - DNA, 74 bp, Homo sapiens
aggagcggggccggaactggagccgaggcgcaggtggcgctggtggtgctcatcggggactcaggcgtgggcaa

SEQ ID NO: 552715 - DNA, 99 bp, Homo sapiens
ctgagtgtctgtccccagagcctcagtttgtgcaggacaccgacatggaacagggactcactggggggtctaatggctattgattgtccacatactggc

SEQ ID NO: 552716 - DNA, 100 bp, Homo sapiens
cctacatgactcactgtcacaggaatccagaaccctggctgaaattgcaaaagcagagctggacggcaccattctcaagagcagacctctacggattcgc

SEQ ID NO: 552717 - DNA, 102 bp, Homo sapiens
gccgaccgggcgcaccgaccatggcctccaaatgccccaagtgcgacaagaccgtgtacttcggcctcaggcccaggcccaaggccaagtgagagagcccag

SEQ ID NO: 552718 - DNA, 100 bp, Homo sapiens
gtacgtcccggccctgagcgcactctggagggattctggcatcagggaggctttcagccggagaagcgagtttcagctgatgaaggaactgagacacaga

SEQ ID NO: 552719 - DNA, 75 bp, Homo sapiens
ctctggattcaagtcccaggagtcctgaccagagagcaggttgacatcatggacatatgtgagtccatcctggag

SEQ ID NO: 552720 - DNA, 100 bp, Homo sapiens
cttcaactggtatctatgaggccctagagctccgggacaatgataagactcgctatatggggaaggatgaatatttcccccgcttccctcgccagtcttt

SEQ ID NO: 552721 - DNA, 100 bp, Homo sapiens
caaggtgaagctgtctcaaacattcaagaaaacacacagactccaactgtacaagaggagagtgaagaggaagaggatctgccttctgaggaagtggatc

SEQ ID NO: 552722 - DNA, 83 bp, Homo sapiens
aacccatcctgccgtccttctccactttcgccagcccgtgccgcgagcgcggcctgcaggagaaagtttcctacactactgag

SEQ ID NO: 552723 - DNA, 75 bp, Homo sapiens
gttcaaacttctatatcacagaaaagaaaacgttgtgtgacgtgatcctcatggtccaggaaagaaagatacctg

SEQ ID NO: 552724 - DNA, 90 bp, Homo sapiens
aaaatgcacaattctatctcttgggcaatcttcacggggctggctgctctgtgtctcttccaagggggctagagagctgaaggagagcca

SEQ ID NO: 552725 - DNA, 74 bp, Homo sapiens
gtggaagcaggactgcgccgcgtcttcctcaaggcctccaggcccaaggtcagcatcccactgtcagccatcat

SEQ ID NO: 552726 - DNA, 100 bp, Homo sapiens
agataaagagaggagtcacggaagatgatgggagacccatttatgcgttgggcgcggccctaaaacccaggctccccgcgccaccccccgtcaccacgcc

SEQ ID NO: 552727 - DNA, 74 bp, Homo sapiens
tgtaagcgcagaaagcaggcgaacccgcggcgcaataacgtgcagagcagagcgggcggaggaccccgggcgcg

SEQ ID NO: 552728 - DNA, 96 bp, Homo sapiens
agaactgcttaaggaggcaaaacgtgggaaaactagagctgaaacaatgggacccatgggttggctgaagtttctctttggctcatcagccaccca

SEQ ID NO: 552729 - DNA, 78 bp, Homo sapiens
agcaggtcggaggaaacagccagaccgagagcagcctgccggggcggaggtgcagtcagcctcagtttccaaagccgg

SEQ ID NO: 552730 - DNA, 100 bp, Homo sapiens
ggacgggcagctagcgcgaccctgagccggcgcccgtggtccggccatggacgacctcggcttgcagccaatttactggagcagggatgacgtagcccag

SEQ ID NO: 552731 - DNA, 97 bp, Homo sapiens
aggaacccctttcttctacagcaaaaaagaagtccaaggcttgcgagaaggtcatttccgtgggtcaaacggtcatcacgaagcatcggaacacccg

SEQ ID NO: 552732 - DNA, 90 bp, Homo sapiens
cagcgacatcaccaagctggaggtggacgccatcgtcaacgccggttgtgcagcctgactctgaagaagctggtggtcttcaaggagctg

SEQ ID NO: 552733 - DNA, 101 bp, Homo sapiens
tgactacctgctgtacaccctcaacaaacaccagcgctttggcaaattgtggctactaatttgccccctgaagatcaagatggctctggggatgactctga

SEQ ID NO: 552734 - DNA, 96 bp, Homo sapiens
ggcagtctgcggcggtgttctggtgcacccccagtgggtcctcacagctgcccactgcatcaggaaatgctctgaacgttcttctcatcatcgtgg

SEQ ID NO: 552735 - DNA, 90 bp, Homo sapiens
cccgaaaatggcacagaaatggtatcaagaaaccccgatcacaaagatacgaatctcttaaggggaaatacccgcagcccaaagggcaga

SEQ ID NO: 552736 - DNA, 90 bp, Homo sapiens
taaagttatccaggagccacaaagtgaggttccaattgtggacaagataaggaccattgctcaggctgtctatggagccaaagatattga

SEQ ID NO: 552737 - DNA, 75 bp, Homo sapiens
gatgaagtgcagaggtttttttctgctattcaaggatgcttggttgttgcacatgcattctggtccttgggcctg

SEQ ID NO: 552738 - DNA, 75 bp, Homo sapiens
gtctggagccctggccaccagcggagttactggaggtgaactgtttgaagacatagtggcaagagaatactacag

SEQ ID NO: 552739 - DNA, 78 bp, Homo sapiens
tcggatcacggtgagggaaagatgagcgaggagacggcgacttctgacaacgaagagatggaaaacttgatgactagc

SEQ ID NO: 552740 - DNA, 75 bp, Homo sapiens
cttggttcaagccagatagcacctgaggacagaacatatcaggatctaccatacccattgactaactatggaaga

SEQ ID NO: 552741 - DNA, 77 bp, Homo sapiens
gaagcttttgaacctatgtatatttacatcagttccaagatgagatgggattctccaacatggaagatgatggccca

SEQ ID NO: 552742 - DNA, 99 bp, Homo sapiens
ctgccgcattgctcccgccgggctgtagctgagcgcggagcccgtggggaccggtgagatcttgagccagatgattgtgcatccatttacatctttaat

SEQ ID NO: 552743 - DNA, 75 bp, Homo sapiens
agaaggcatatgaatccaaaattgattatgacaagggcagcagctcatcccagctccagtcgtggactgtccagc

SEQ ID NO: 552744 - DNA, 100 bp, Homo sapiens
ggccacgggatcctcatgttcactacccttcatgcatgaaagacaaagctactcagccccttcatgaataagttttttccagccagctttccaaatcgac

SEQ ID NO: 552745 - DNA, 82 bp, Homo sapiens
ggaaaaacttcttgccaaccaaaggcagcccaatggatccaatggtgatgaagagacctcagttgtatggcatgggcagtaa

SEQ ID NO: 552746 - DNA, 83 bp, Homo sapiens
gttcttctggctctaagatctgaatgttgtgaccactaatttggtaatccttatagatatgaactgattgatattcccatgga

SEQ ID NO: 552747 - DNA, 104 bp, Homo sapiens
cagagatgtctgacacagtctggcattgctggaggatacaaacgccgaggagtcttgtaaatgtaatggctggaaaaaccctaacccctcacccactcccccca

SEQ ID NO: 552748 - DNA, 75 bp, Homo sapiens
actgaagaaggaatataatgcattacatcaaagacacactgaggcttccgaagatcttctcaaggaacactacgt

SEQ ID NO: 552749 - DNA, 100 bp, Homo sapiens
ccgggtggaccatgacaccatcatcgacgccaccaagtgcggcaacttcgcgcgcttcatcaaccacagctgcaaccaaaaaggcattgggatgaacgag

SEQ ID NO: 552750 - DNA, 75 bp, Homo sapiens
agagctctttgaggatctgttaaggcaaatgtctgaccttcggctccaggtacggcggcgaagtgctaaaaggga

SEQ ID NO: 552751 - DNA, 101 bp, Homo sapiens
agagcttcatcaaaaatagtgatagctttgataaggtgaaaatcctatttataagagtgccgtaacaactgtggtcaatccgaagtatgagggaaaatgag

SEQ ID NO: 552752 - DNA, 100 bp, Homo sapiens
gcgaaggccgggacccggttccccggcccacagtgggggtgtgcaaacccgagagaactgggaggaagacaatgtgtggcaccctggactacctgccccc

SEQ ID NO: 552753 - DNA, 75 bp, Homo sapiens
cgcgctggcagtctggaaaaggcagatgtatactccagttccaacaccatcttctgagatgatcctgattcccag

SEQ ID NO: 552754 - DNA, 75 bp, Homo sapiens
ctgacagtggtagatacccctggctatggtgacgctatcaactgcagagattgggtcataaaggatttcatgatt

SEQ ID NO: 552755 - DNA, 100 bp, Homo sapiens
cgggtccagacccacgcggcgccagttctccggcgggaaggaaaaccgcgcagagagggccaattcctgtccccccagcagcatggcatcgtgtgctgaa

SEQ ID NO: 552756 - DNA, 90 bp, Homo sapiens
tggtcctcccaggatgaggtgtccaccaatgtgcgccaggggcgccggcaatctgggtggctgttgcaccacgccctccctcctgcccct

SEQ ID NO: 552757 - DNA, 124 bp, Homo sapiens
gtctgctgccatgtgagacgtgcctttgaccttctgccatgattgtgaggcctccccagccacgtgaaactgggccagcagcctcccccgatgggtcgtcagcaacgagggtgcctcaggatgt

SEQ ID NO: 552758 - DNA, 100 bp, Homo sapiens
ggccgtaatgccttggctgctctcagcccccaagctggttcccgctgtagcaaacgtccgcggcctctcagaaatcttgcagcagctccaccagcagctg

SEQ ID NO: 552759 - DNA, 101 bp, Homo sapiens
tatacgctacttttactcagagtttgaaggttgtgaccaaaagaggctccggtgctggagaatctggtaaaagcaccattgtgaagcagatgaggatcctg

SEQ ID NO: 552760 - DNA, 110 bp, Homo sapiens
gctacctggggcatctatgacaaggactcagtgcttcggaaagccctgcatgacagcctgcatgactgttcacattgggaggcttgtggatcagaatctgaacaaaattg

SEQ ID NO: 552761 - DNA, 75 bp, Homo sapiens
accctctcagccaacgatatggaggacgacagcatggtcagatttaatgtactacaatatgttgtcccagaagtg

SEQ ID NO: 552762 - DNA, 74 bp, Homo sapiens
ttagaaggaggttcaggctacgatatgtgcagcgggggctacagcgagtggggctagatccccagctgccactg

SEQ ID NO: 552763 - DNA, 50 bp, Homo sapiens
cggcgggtcgtgggcacctccaggtgctgaagtccacaggggatgtggcc

SEQ ID NO: 552764 - DNA, 75 bp, Homo sapiens
gctaatccagtggaaatcaggagaggattccggagtttgaatccacctttgacaattgtccgaaagacgtttgaa

SEQ ID NO: 552765 - DNA, 87 bp, Homo sapiens
tgaaggaagtggaggagatcagtctgctgcagccgcagtgacctagagtcccgcagggatgtgaagagagaagaaggagaggccttt

SEQ ID NO: 552766 - DNA, 100 bp, Homo sapiens
cgtgaacttgtgtacaccacataacccatctgagcctcatcttcctcatctgttttgagggacagtcattttgtttactcattcagccctgttgcaggtc

SEQ ID NO: 552767 - DNA, 75 bp, Homo sapiens
tgaggacttccttagtggtttccaggtactgggcctaatcgctacgtgcctctttggctatgatgcctatgtcac

SEQ ID NO: 552768 - DNA, 98 bp, Homo sapiens
cgggggcctggctaaggaaaccctattacctccaggtacgcatagctgctaaattcatcactcatgcacccccaggggaatttaatgaagtattcaat

SEQ ID NO: 552769 - DNA, 51 bp, Homo sapiens
gttcaaggaggtgctgaagagcgaggagtgggtgggcctgatagtcctgat

SEQ ID NO: 552770 - DNA, 75 bp, Homo sapiens
gcatgatggcctactgcgaccagatcttccaggacgagacgggcaagaaccggcagctgcattcagcctcagcgg

SEQ ID NO: 552771 - DNA, 100 bp, Homo sapiens
gaagagttaagaccagaagtactggaatcatacttcctttcagctgcagcatatcgtgagtgatgagatctgtgtgcaggtgactgacctttacctggca

SEQ ID NO: 552772 - DNA, 100 bp, Homo sapiens
agaaggggtgaaagagactcggtgacagatacagttcatggcctcccacgggaacgacgccgcgagagccaggtttgagtccaaagtaccctccttctac

SEQ ID NO: 552773 - DNA, 51 bp, Homo sapiens
gttgttcccggagatgcggcgcgcagcaaatgccagatgttaatgtaagct

SEQ ID NO: 552774 - DNA, 74 bp, Homo sapiens
caaaggcagcattctttctttccttaggaaaaagtcatacttacctggttgcttgcgcatctagtaatgttgga

SEQ ID NO: 552775 - DNA, 100 bp, Homo sapiens
agtgcgctccaagagcgacacgccgtacctcgcagaggccaggatctcctttaacctgggggcaggacctgttatggaatttgattatgtaatatgcgaa

SEQ ID NO: 552776 - DNA, 90 bp, Homo sapiens
cggcctccccttggattcagacgccgattcgcccagggaaacagtgcttcttagtcctacgtcagcagcagtttaatgtccaggctcttg

SEQ ID NO: 552777 - DNA, 75 bp, Homo sapiens
cgagggaggagaaagcggcagccgctggaggaaaatgtttataggaggccttagctgggacactacaaagaaaga

SEQ ID NO: 552778 - DNA, 100 bp, Homo sapiens
aagcttctgagggaggaggacaacaagtactgcgccgactgcgaggccaaagagtgtgaacatggctacgcctcttcattcccgtccatgccgagccccc

SEQ ID NO: 552779 - DNA, 100 bp, Homo sapiens
gcagaggaggcggccaaggacctggccgacatcgcggccttcttccgatccgagacaaagcatggaggacacaagaatgggaggaaaggcggactctcag

SEQ ID NO: 552780 - DNA, 90 bp, Homo sapiens
agagttgattgaaattatctctggtgctgcagctctcggggatctgatgagcttctttcttctggcatcattaacggaccttttaccatg

SEQ ID NO: 552781 - DNA, 100 bp, Homo sapiens
cttgaacaagaatttaatcaaaagagagcaaaatttaaggagttatatttggctaaagaggggctgttttgctgcagcttctgaagtgttaaagcacttg

SEQ ID NO: 552782 - DNA, 97 bp, Homo sapiens
atgaacgggacgcggaactggtgtaccctggtggacgtgcacccagaggaccaggcggcggtgatagtagaaaaggctcccaaagctcggataggag

SEQ ID NO: 552783 - DNA, 135 bp, Homo sapiens
cgcctttgcaggctgcggtgggatttcgttttgcctccggttggggctgctgtttctcttcgccgacggcattcccatcaagagcaccatggacaaccccaccaccacccagtatgccagcctcatgcacagctt

SEQ ID NO: 552784 - DNA, 99 bp, Homo sapiens
ctctgcagccacatactatccgtttgttcaggaaccaccagtgacagaatccataatgagatggcatcaacatcagataaaggtgcccaaggaagaaat

SEQ ID NO: 552785 - DNA, 75 bp, Homo sapiens
gaacttcctgggcagccgcccggtccagaaaaagtcgctggagtcgatcaactctaggctccaactcgttatgaa

SEQ ID NO: 552786 - DNA, 75 bp, Homo sapiens
gtgctaaaggtgacactgcaaatgaaattggacagctcctgcaaaatcttccttattctgaaaagatgacagttt

SEQ ID NO: 552787 - DNA, 75 bp, Homo sapiens
ttacacaaattgatgcacaaaataagctggaaaaatctgagctctggattaatcgaattacagctgctagccagg

SEQ ID NO: 552788 - DNA, 83 bp, Homo sapiens
tgtcccatcgcaaacccaaagatccccgttcctggagattctgattgagtgtctccagaacgctatagctatggcacctccag

SEQ ID NO: 552789 - DNA, 83 bp, Homo sapiens
ccaggggaggctggacgggacgggatgggcgacagcgggcggggaaagagcatctacggtgagcgcttccccgatgagaactt

SEQ ID NO: 552790 - DNA, 75 bp, Homo sapiens
ccgcgccatggacgggccgcgcctgctgctgttgctgcttctggggttacagaatgtctgaaggggacagtgtgg

SEQ ID NO: 552791 - DNA, 100 bp, Homo sapiens
cgcagccaagcagcagcccctgacaggttctcctgaaaagaaagctgaacattcatctataaatcaagaaaatggcactgcaaaccctatcaagaacggt

SEQ ID NO: 552792 - DNA, 100 bp, Homo sapiens
caaggatgcgctggggcctatgatgcttgagtcgttgaagaaagttggaaaagattctactgtcttactaatctgcatcaccgtgtttctttcatacctt

SEQ ID NO: 552793 - DNA, 98 bp, Homo sapiens
agaaggagacgtcgcctctgcttcggagaatcattaaccaatggcaacaggaatccaaggataaagtgatttccctcctgttaactcatctgcctttg

SEQ ID NO: 552794 - DNA, 75 bp, Homo sapiens
ccgaagaagaaaggattcgttacagccagagattgatactctcttaacttactggaataaagtatcacctcagga

SEQ ID NO: 552795 - DNA, 75 bp, Homo sapiens
tcggaatgtgatcacagagcctatttacccagaagtagtccatatgtactatactggcaattgctggagaagatt

SEQ ID NO: 552796 - DNA, 100 bp, Homo sapiens
aaaaaggaagctggaagaggcagcccagcgtctggagtatctatatgagaagctctgtgaggggacacatgtggtcctgtacccgctggtggccaagagt

SEQ ID NO: 552797 - DNA, 88 bp, Homo sapiens
taagcaactggaaaatgaattggagggactgaaggtttttcttcccccagtccctcagctgctgctgctgctcaggaggtcagatctg

SEQ ID NO: 552798 - DNA, 74 bp, Homo sapiens
gtgcccctacgtgcacaacatcacccgcaaggagtaaactacaaattcttgtgagtcctaattcctccttatcc

SEQ ID NO: 552799 - DNA, 102 bp, Homo sapiens
tcgaacccagaaaaaatacttcgcaaaatcccaaagcaaaattaccaggtacacagcacatccagaaagaaggaagagctctcaatcaagaggcagcgtgtg

SEQ ID NO: 552800 - DNA, 100 bp, Homo sapiens
agtccccacagcgaatgaacatcctaaacctggatccttcagttgcattgcaccgaacaagatttgtgatgaaatggagcctggaacaaactcttttcgg

SEQ ID NO: 552801 - DNA, 75 bp, Homo sapiens
ccccgctcctgctgctgacggcgcccaggccaccagcttgggctccccacggagggcagcaagtgggacttgggg

SEQ ID NO: 552802 - DNA, 50 bp, Homo sapiens
cgttgaagaatcttgaccttttcaaacagatagcagaatcctatttccag

SEQ ID NO: 552803 - DNA, 82 bp, Homo sapiens
ttaaagctggctttgcaggagaccagattcccaaatactgtttcccaaactagactgaatgtgggcccagttggcgtcattc

SEQ ID NO: 552804 - DNA, 100 bp, Homo sapiens
cagtcggcttctctacgcagaacccgggagtaggagactcagaatcgaatctcttctccctccccttcttgattctggaaaccaaaatggaggaaatgat

SEQ ID NO: 552805 - DNA, 90 bp, Homo sapiens
cttctgtggattaactcagtggctcaacaggctgaagggaggagaaaatgctgagaagcttctgcagttcaagcgttggttctggtcaat

SEQ ID NO: 552806 - DNA, 83 bp, Homo sapiens
agcgagcatcccgggcaagcactaccaggctgtgggtctgcacctctggaaggtgaaagaaaatggcccgaaccaagcagact

SEQ ID NO: 552807 - DNA, 90 bp, Homo sapiens
ttgtcgacgaccgacagggtggtgaaaggtcattgctccctggaggatgcctgaattctacaaccggttcaagggccgcaatgacctgat

SEQ ID NO: 552808 - DNA, 71 bp, Homo sapiens
catctggaattttgccgatttcatgactaaccagtacctgtcgcgaaatcgcctttcagaaattcctatag

SEQ ID NO: 552809 - DNA, 80 bp, Homo sapiens
gtgttaagagaagaaatgaggacatatcagtatcgtttgtagaagactatgaacctaccaaagctgacagttatagaaag

SEQ ID NO: 552810 - DNA, 75 bp, Homo sapiens
gacattgccatcccatgcaacaacaaggctgctgagcttcgtgcttatctgaaatctaaaggagctgagatttca

SEQ ID NO: 552811 - DNA, 82 bp, Homo sapiens
aggactccgggtgaggccggccacgccccgcacgacggccgaagccctgcagcccacgctacagccggagatgcagctcgag

SEQ ID NO: 552812 - DNA, 98 bp, Homo sapiens
ggaggaaggaacgaggcaaggagctaaagcagcgtgcgttcagccctgggttcaaatctgaacatcaatgatgtactagggaactactcattgactct

SEQ ID NO: 552813 - DNA, 100 bp, Homo sapiens
gtttctcaatctctgcagatggccgtacgtgtgaaggacatggatttgattgacatactttggaggcaagatatagatcttggagtaagtcgagaagtat

SEQ ID NO: 552814 - DNA, 87 bp, Homo sapiens
ccagagctgtgcctcccagcaccacagtccttctgcagtccctcgtccagccacccccagctacctctacccagatggaaagaccca

SEQ ID NO: 552815 - DNA, 75 bp, Homo sapiens
ttttgggttacaaaaatccagaccagtgagaaagatcagtctaaagaaaaggagaagaaagtgaaaaaaacaatt

SEQ ID NO: 552816 - DNA, 98 bp, Homo sapiens
agggagaaatgttttgtttgactccagtgttaagagaagaaatgaggacatatcagtatcggttcctgcacttggccatcatccatgaagaaaaggca

SEQ ID NO: 552817 - DNA, 80 bp, Homo sapiens
ggacctgcagcagctgagaaaggagctcggggactcccccaaagacaagggacccgagctgatccagaaagccaacggtc

SEQ ID NO: 552818 - DNA, 100 bp, Homo sapiens
aaggctgcggccccgcgccagagggccggtggctcctccgggcttctgaggacccgcagggagcgggtaaataccagctgtcccctacagtgaatatgcc

SEQ ID NO: 552819 - DNA, 80 bp, Homo sapiens
agtggaaacgcttgtagggtttcaccaggtttggtgcacctcgatttggaggaagtagggcagggcccttatctggaaag

SEQ ID NO: 552820 - DNA, 101 bp, Homo sapiens
cagccgcggatcgccgcgctcagcgacaaacaagtttcagaggtgccgggaagtctgagccttcgccctcctgctctccctccatgtccacctaggaggct

SEQ ID NO: 552821 - DNA, 75 bp, Homo sapiens
aggaaggaggcgacagcgccggagcagggtatcagcatggaagccatgagtgagaataaaatggtgccctctgag

SEQ ID NO: 552822 - DNA, 100 bp, Homo sapiens
tccacctcgacctctggttctacttcacactgcagaactgggttctggactttgggcgtcccattgccatggtctctaattaacagaagatggcaaagcc

SEQ ID NO: 552823 - DNA, 90 bp, Homo sapiens
aaagaagtaggaaaggctgctttggaaaaacagatgtgatcactgtgtccaatggaggccgaatcatgcgttcctgggagactaacatcg

SEQ ID NO: 552824 - DNA, 75 bp, Homo sapiens
ccatcattgatgtggtgcgatcggttcctatggaaagaaagaaaaagtacattgaaattaggaaagaagccagag

SEQ ID NO: 552825 - DNA, 71 bp, Homo sapiens
gtgggcagcagagggatggctgctcagctgctgactgatgaggcactgttaagtgggcagaccaacatcca

SEQ ID NO: 552826 - DNA, 75 bp, Homo sapiens
ctggtcttctcgtcggattgcccatgcacttgttgcagaaacagccaaggtcctcgatgggcttcctggaatatt

SEQ ID NO: 552827 - DNA, 50 bp, Homo sapiens
tgcacacagccaaagtctgcaaaggctggagcattggatttgctaaagga

SEQ ID NO: 552828 - DNA, 90 bp, Homo sapiens
aggacctcagcagcggtttcccaagtttcctgacttcttccatcctctggaaatcagctgtgatgctgaagaaggaagaagcaattccat

SEQ ID NO: 552829 - DNA, 134 bp, Homo sapiens
gaagctttacgttcatgtaaacagcatgacgtgaggccgtggatgcaggcattaagtgccgaaaacatttgaagagtcggagattagtcagtgcaaaacagcttggtgtggatagaattgtagattttcaattt

SEQ ID NO: 552830 - DNA, 99 bp, Homo sapiens
aaagcctgtggctatcgaggcatgcttgacacacatcataaactctgcacattcattctcaaaaacccacctgggtgtgttcgtgtagttcgaggtgaa

SEQ ID NO: 552831 - DNA, 98 bp, Homo sapiens
tggaattccatattttgtggaccacaatagaagaactaccacctatatagatccccgcacaggaaaatctgccctggaatctaagggaggaaattatc

SEQ ID NO: 552832 - DNA, 100 bp, Homo sapiens
ttcagaccgtggcgaagtggagagtgacatgcagttggatggcggtgactgcgtggtgaaatgtatagatgttgttcaggcttatatcaacagaatcaag

SEQ ID NO: 552833 - DNA, 76 bp, Homo sapiens
tgcgagtcttcggagcgaccccggcaggccgggctctcgccatgggtcactgtcgcctctgccacgggaagttttc

SEQ ID NO: 552834 - DNA, 80 bp, Homo sapiens
gggggagcggcgttggaggccaccgtttccagaaggtagaagatagcaccatgccgattcgtcgaactgtgaattctacc

SEQ ID NO: 552835 - DNA, 100 bp, Homo sapiens
tgctcagaagaacctgtacagagaggtgatgctggagaactacaggaacgtggtctccctggatatataaactctcttcacaagaagaaagtattgggac

SEQ ID NO: 552836 - DNA, 88 bp, Homo sapiens
tccagttcggagtcctgagtccggatgaactgggtggagccagccatcctgagacgtccgtacagcccgtactggtggagtgtcagga

SEQ ID NO: 552837 - DNA, 83 bp, Homo sapiens
cctgcacagccgcggcggcagcagcagtgagagacgagccaaactcaggctgtaccttgagcagctcaagcaactggtgcccc

SEQ ID NO: 552838 - DNA, 82 bp, Homo sapiens
tggccttagctgtgctcgcgctactctctctttctggcctggaggctatccagcgatgggagtcccagcttctggagacggg

SEQ ID NO: 552839 - DNA, 76 bp, Homo sapiens
gtaaagtcagtgacatgcccatgcgagtacctgaggaaggcccttccatactttgaccggctagactatgtgtcca

SEQ ID NO: 552840 - DNA, 98 bp, Homo sapiens
acccgggcagcgcttccattccgcggagctggctctgtgtgctccgggatggagcaggtgtgcagagggtgagaacccagctctgggaccaagtcact

SEQ ID NO: 552841 - DNA, 75 bp, Homo sapiens
gaggagaagcttgcagagcagctgaagcaagctgaggagctcagtcctccatgaatgccatgggctccctttccg

SEQ ID NO: 552842 - DNA, 100 bp, Homo sapiens
gtgcggagaagaagctgcggccgcacctggccaaggagtctactcttcatcttgtgttgagacttcgtggtggtgctaagaaaaggaagaagaagtctta

SEQ ID NO: 552843 - DNA, 50 bp, Homo sapiens
ggaagaggatgcggagacgcgggagtgttgaatatctcatgtaagagtat

SEQ ID NO: 552844 - DNA, 100 bp, Homo sapiens
atcccagatctacctgacgggcctgcgagggttgaagattgtgaagcaatagcctaagaaaaactgcttaaggttgaaaagagaaatttaagaaattgct

SEQ ID NO: 552845 - DNA, 51 bp, Homo sapiens
ctccaaattcgcctccatctgtaccatgggaacactgactatgccaaatgg

SEQ ID NO: 552846 - DNA, 83 bp, Homo sapiens
ggccagttttgaaatcgacacacaaagaatagagttgagcctgtgggacacttcggattttgcaagaacgaggctcaaggatg

SEQ ID NO: 552847 - DNA, 100 bp, Homo sapiens
cattcttctgagtcaaggagaggtggaaaagctaatcaagtgcgacgaaattcaggatatcaatgcttacaattgtgaagagcccacagaaaagttacct

SEQ ID NO: 552848 - DNA, 100 bp, Homo sapiens
cttaaccttgagtttacctgtccagttccgacagtcagtcctaagagaactctttaagaaagctcaacagggaatatcgataacttgatgaccccagaag

SEQ ID NO: 552849 - DNA, 98 bp, Homo sapiens
ggagatcccaggcggtgacagagtggagccatggctagagaagctccaccatgaggcgaggtggatggaggaagcgagctgaaaatgatggctgggaa

SEQ ID NO: 552850 - DNA, 73 bp, Homo sapiens
aggttaagctggctgtcctgaaatattataaggtggaggagaacagaaacagcttgttttttttcttattgtt

SEQ ID NO: 552851 - DNA, 95 bp, Homo sapiens
gcgaatatcgtcatcgttagaaggttactcaaatgagtcgtccagacttgattctctttctgatgaaatacctgatggctctcatagttggcatt

SEQ ID NO: 552852 - DNA, 98 bp, Homo sapiens
agatgtgtcctatgaataccgcttcctggagttcacgactctgagtgctggcaacgccctgctgcggcggctggtccgcattggggtgctggatgagg

SEQ ID NO: 552853 - DNA, 106 bp, Homo sapiens
cttgttcccccaaatgtctgactctgactctcggactgagaaacgcaaggtgcgcgcggagccatggttatcatgtcggagttcagcgcggaccccgcgggccagg

SEQ ID NO: 552854 - DNA, 100 bp, Homo sapiens
taccaagttttatacagatccagtagaagctgtaaaagacatccctgatggtgccacggttttggttggtgtagagatggggtttcaccacgttggccag

SEQ ID NO: 552855 - DNA, 71 bp, Homo sapiens
gacaagccacagattcatcctcaggcaacagcattattgagaaaagcccttacagaagagtgtggccgtag

SEQ ID NO: 552856 - DNA, 88 bp, Homo sapiens
agcatcgccacacaaggggagctcgtaaggtccctcaaagcgggaaatgcgtcaaagccttgagaaggaaaattatgacgtttgggct

SEQ ID NO: 552857 - DNA, 96 bp, Homo sapiens
ggaggacacgcagcacaaattgcgcagcgcggtggaagagatggaaactgtcaagcaaggcgttgatcagaagctggtggaaggccaggagaagct

SEQ ID NO: 552858 - DNA, 75 bp, Homo sapiens
agtggccggctccggaggcttggtgactccagtggcccagtgcgaagtgccagagggtggactggtccccaaatc

SEQ ID NO: 552859 - DNA, 90 bp, Homo sapiens
ccctggggtagaaccacgtgaaatggcagctatgtgtcttggattggctcacaggtgtgatgaatgcagactctgctaccattttggctg

SEQ ID NO: 552860 - DNA, 75 bp, Homo sapiens
gcagtgaattttccccccaaactgcaataagccgccttccaaggtgtaaattttgataccaccattgccgccttc

SEQ ID NO: 552861 - DNA, 90 bp, Homo sapiens
cccaccacatcattgtcaagttcccacagccccccaggttcgcctaatagtcttggctacttccctacagctgctaatcttagcggtgtc

SEQ ID NO: 552862 - DNA, 100 bp, Homo sapiens
tcctgtaacccagcctgtttcacttcttggtcatattgaacattccagatacctatcattactcgatgctgttgataacagcaagatggctttgaactca

SEQ ID NO: 552863 - DNA, 108 bp, Homo sapiens
aaggcctcaagctgctctgcagagacaagatccgcctgaacaacgccatctggagggcctggtatatccagtgcctgcaggacaagctgaacaagagggacaaagagg

SEQ ID NO: 552864 - DNA, 100 bp, Homo sapiens
cacctgcagatgaaacttattgaacaggatctgtgtcgagtggcatttattttcaactggcttggattttgtttatccttctgtatcaccaataccatag

SEQ ID NO: 552865 - DNA, 101 bp, Homo sapiens
ggcgaggacggtctctgccagtataaatgcagtgacgatctttaatctcatgaagtacgacagctacagccgcttcttaaagtctgacttgtttttaaaac

SEQ ID NO: 552866 - DNA, 50 bp, Homo sapiens
cgcggatctcaccgccgctcaggcattctcccagatggtgatcagcttct

SEQ ID NO: 552867 - DNA, 90 bp, Homo sapiens
caggcccagccgcagccgcagcagcagccgccgcggcggcacggaggagccagacacaaagagagggtcttgctctgttgcccgggctgg

SEQ ID NO: 552868 - DNA, 51 bp, Homo sapiens
agcatggcctgtacaacctcaaacagaccaagatgaagagacgagctgtgg

SEQ ID NO: 552869 - DNA, 83 bp, Homo sapiens
aacagcacggcgtggcctctcagcctcgcgctggccgcgcgccgaacccgagtccggcggcaccgacgacgacctcaacagcg

SEQ ID NO: 552870 - DNA, 73 bp, Homo sapiens
cgcatcgccacagctgaaggctgcgagggactaagagcagagcttctaaccctcctttatgtgactcagagaa

SEQ ID NO: 552871 - DNA, 74 bp, Homo sapiens
aacagtttccggtcaatgagcactattttggattagtcaattaattcgccaaaatgacgaacacaaagggaaag

SEQ ID NO: 552872 - DNA, 90 bp, Homo sapiens
ccgggatcgtgaccgagaccgtgaccgagagcgtgaccgagagcgcgaatatcgtcatcgttagaagatgacctgagaattaatttatgg

SEQ ID NO: 552873 - DNA, 51 bp, Homo sapiens
gtctcgaagaaaagcgcccatgtgatgtatgcctttgaagatgagaaaccc

SEQ ID NO: 552874 - DNA, 75 bp, Homo sapiens
cgagtcctgagcggccaggacgacgaggagcagggcctgactgcgcaggtctcctctgagcctccggcctccata

SEQ ID NO: 552875 - DNA, 100 bp, Homo sapiens
gaggagtatgaagatgtgtccggcagtagctttccgcagattgaaattaataaaatgcacatatcccagtccattgagacactcatgccaacaagaacct

SEQ ID NO: 552876 - DNA, 100 bp, Homo sapiens
caaacggcaagatgtccagtaatgtcccggcggatatggtgaaaggtgtagcagtcactcggcctacacccacagcatcgaccttgtgaacccagcgacc

SEQ ID NO: 552877 - DNA, 90 bp, Homo sapiens
aactcccctctgtactcggtgaagtcgtttgaagagcttcggctgtagatgacattaatgctgataagaatatctcttctgcacagattg

SEQ ID NO: 552878 - DNA, 100 bp, Homo sapiens
gcctttatctgatgatgatgaaagttacacaggctattagctccagattgtgaaatcatacaggaagtgggaaaactctatccactggagatagtatttg

SEQ ID NO: 552879 - DNA, 75 bp, Homo sapiens
ctttttacttgatccatacaaggccaaatttgagtttcatcatggtgactatgaaaaacagtttctgcatgtact

SEQ ID NO: 552880 - DNA, 50 bp, Homo sapiens
caagaagagaaagccccccagcatcaaggaatgctggaagatgaccttaa

SEQ ID NO: 552881 - DNA, 74 bp, Homo sapiens
ctcggctgctgatcacgaaccggagagcaaggttgagtttactattaaaccactggataagaaaattgatgtct

SEQ ID NO: 552882 - DNA, 74 bp, Homo sapiens
ccaatactggatttggtgctgttggttcggagaagatggtataaactggtccatcagtgacaaagacattgagg

SEQ ID NO: 552883 - DNA, 82 bp, Homo sapiens
ctcagagctgcccctggacgaccaggtcatcctgctgcgggcaggtctcctctgagcctccggcctccataagacccaaaac

SEQ ID NO: 552884 - DNA, 74 bp, Homo sapiens
acatttaattttagggtcctttatatagaagggagagtagtgagcagcggttccatcgcagtgaacgccgactc

SEQ ID NO: 552885 - DNA, 97 bp, Homo sapiens
atcccatcgggagatgctcatcaggtgaattatgtaacctcattacgctggatgtagctcacaatcaacttgaacaccttccaaaggagattggaaa

SEQ ID NO: 552886 - DNA, 75 bp, Homo sapiens
ctcacagattccagcttcggaacaagagaccctgatcgttagacacggtggcagtctgggccttggtttggcagc

SEQ ID NO: 552887 - DNA, 90 bp, Homo sapiens
cggggttcttggccagcgaagagatctacattaaccagctggaagccctgttgctggccttatgatgggaaatggagtaaaacaatggtg

SEQ ID NO: 552888 - DNA, 100 bp, Homo sapiens
ttagagaagacgttcatatcattgtcttccacagatgtgtcaccaaaccaggtgaaatgacaatggatgctctgttggctcgattgaaacttctgaatcc

SEQ ID NO: 552889 - DNA, 50 bp, Homo sapiens
tggagagaggccgcgtcctgggcagagatggggaacaggatggagcagct

SEQ ID NO: 552890 - DNA, 98 bp, Homo sapiens
ccatcagcttcagagaatggcagccatttatttgtcccgtggatgaagcctgctgggagcgtgaatgacatggccctggatgccttcgacttggaccg

SEQ ID NO: 552891 - DNA, 100 bp, Homo sapiens
gtagaggcgggcggcgcgcggcggcggcgctcggcgatggtaggcgtccctggagcggccgccttccagcccatgccagtgacggtaacccgcaccacca

SEQ ID NO: 552892 - DNA, 82 bp, Homo sapiens
caccgcgcccatggcagagccagacctatgaaatgcttcatgtcacacctccaatgagcccaccagatgtcctcaagaccag

SEQ ID NO: 552893 - DNA, 75 bp, Homo sapiens
ggcatttacagaaagagtcaacagcagtggcaacaggtgttggagcgggccggagagaagtagagtgggctgcga

SEQ ID NO: 552894 - DNA, 87 bp, Homo sapiens
atttaactatcagaatgaagatgaaaaagtcaccttgtctttccctagtactctgcaaacagctgtcggaaaaggtaacagaagatg

SEQ ID NO: 552895 - DNA, 99 bp, Homo sapiens
atcgtctgcctggtcctaagtgtggtgggcacagcatgggccaacagagcacttatggcaaggcatctcgagggggtggcaatcaccaaaacaattacc

SEQ ID NO: 552896 - DNA, 75 bp, Homo sapiens
cgagggagtttgacagctattaaaaccagggctccacagttaggagggaatgtgaaaaaacttggagacacatac

SEQ ID NO: 552897 - DNA, 100 bp, Homo sapiens
cccgggcggctgccgagaaggagggaggggaaacacaaagccggctacgcgctgcgaggaatgtatcctgtcaggtataatgtcagtgaatggcaagaaa

SEQ ID NO: 552898 - DNA, 75 bp, Homo sapiens
cctgtgtctgctggaactgttggagccgcagtgcagcctaattttgacttcagtgactgaagcaaggctgtgtga

SEQ ID NO: 552899 - DNA, 100 bp, Homo sapiens
gccagcgactccatctacacgaaaggcaccccggagattgctttctggggaagaatcttttagctgaaaaagtagagcagctgatggaatggagttccag

SEQ ID NO: 552900 - DNA, 75 bp, Homo sapiens
cggccccgcagcagctccaagaaggaaccaagagaccgagggtttagatgtagattctctggtcattgagcatat

SEQ ID NO: 552901 - DNA, 82 bp, Homo sapiens
agttgttgtacttgatatggtcgtctgtaaaggatttgtagaagatttagatgaatcggagctggactgtgccatgttacgc

SEQ ID NO: 552902 - DNA, 98 bp, Homo sapiens
cgtgtcctcccccgcatgacccccttggaaacatgccctgaactgtcacagaatgaaaccagcgctcttcagcgtcctgtgtgagatcaaagagaaaa

SEQ ID NO: 552903 - DNA, 83 bp, Homo sapiens
agccaagctcgtggcctgcctctgcgtgcatgaggtggaaagtgagaaatggtacctgtctacagacttcccttcaacatcca

SEQ ID NO: 552904 - DNA, 75 bp, Homo sapiens
gagacgccggctgctcctcccctccccgccgccaaaccaaacaggaagcttacttttctctacctagccaatgat

SEQ ID NO: 552905 - DNA, 75 bp, Homo sapiens
gacgaaacctctaacaaagtgaggaactatcgcatttttgagaagcagaacagccctgtggcccccacagcccag

SEQ ID NO: 552906 - DNA, 100 bp, Homo sapiens
gctccagcgacctcagccacaggaactagagacagcttgctttctgtcgtggcaatgttttgaaactggcaaaatcaggacatttgggcttccaggacag

SEQ ID NO: 552907 - DNA, 51 bp, Homo sapiens
aaatcctataacaatgcagtgtataaaggggaagattattagttggtactt

SEQ ID NO: 552908 - DNA, 81 bp, Homo sapiens
ggctgggaccgtgcgcgtgcgcctgggggcaccgctgccgttccgaggtctcctctgagcctccggcctccataagaccca

SEQ ID NO: 552909 - DNA, 98 bp, Homo sapiens
gggaagtgatgctggagaaccacagcagtgtggctggactaggtcctaatctacccatggctacagttgatataaaaaatccagaaatcacaacaaat

SEQ ID NO: 552910 - DNA, 98 bp, Homo sapiens
ggcatcatcgccttggctctagaagcaaacatcctgaggttagcattacacttctcccagtggagcccatgacttctgatcaggacgctaaggttgtg

SEQ ID NO: 552911 - DNA, 75 bp, Homo sapiens
tttcgaaggactctatccaacctattatatggtgaacactttggaacaacggaagctacagaagccttctttgca

SEQ ID NO: 552912 - DNA, 101 bp, Homo sapiens
atgctcagtttgatgcgtcacactacgacagtgagaaaggagccactgaggcggctcccagctgcgttggcgacatggccgacacccccagagatgccggg

SEQ ID NO: 552913 - DNA, 82 bp, Homo sapiens
ttctgtctcgactgcactttgagaagggtgcaggagccgtgggcggacagagccagggttctctccctgttagaagtctgcg

SEQ ID NO: 552914 - DNA, 100 bp, Homo sapiens
cctgagccatgcccatcgcagccgccccgaaggagccagttgagtggtgattttatgcaatggcttcaagccacagttcttcaccagtgcctcaaggaag

SEQ ID NO: 552915 - DNA, 115 bp, Homo sapiens
gcccgccgcagggcgctgacggtcccgcacgtctgccgctgccaccggcgcgcccgaggatgcttgaagatggaaagaaatttgattcctcccgggacagaaacaagccctttaa

SEQ ID NO: 552916 - DNA, 100 bp, Homo sapiens
atgccagatcccagattcaacagcagaaacgcttgttgaatggcttcagagtcaaatgatttggagtccaggaatgagactaagcatttatctgtaggaa

SEQ ID NO: 552917 - DNA, 75 bp, Homo sapiens
tctaaagtctttccaaaaggtcaaggttcacaagattgagatgctaccagatgggctgtttcagtgcaaaaagct

SEQ ID NO: 552918 - DNA, 96 bp, Homo sapiens
caagaagctggggctgaccatgcagaattatatccagatcgagagacagaagattctgaaagggttcaatgaaatgagagtcatcttggacaatga

SEQ ID NO: 552919 - DNA, 138 bp, Homo sapiens
agagacaccaggacagaaaagacagtgttctgctttcatggagttcacagaagagtcgaggagtaaacctcagtcagaaacgctgaaagcaggagacttgaggacacgaattagccgatgtcaagtgtgcatgaagag

SEQ ID NO: 552920 - DNA, 98 bp, Homo sapiens
acctttgagcatacaccgagagagtgaggagccagacgacaagcacacactatggcgctgaaacggattaataaggaggaggaagccaagaatctggt

SEQ ID NO: 552921 - DNA, 97 bp, Homo sapiens
tgcgaccccagtcggtgctccggggaggtcacctgacgaggaggtgagccccaggtgtatcccagagggatccgggtgacttctctgcagactgttt

SEQ ID NO: 552922 - DNA, 75 bp, Homo sapiens
ccgctgtgtgtctcgggcgttcagccgctcgctctccgccttccagaagatgtcatctgggtgattctcagtgtg

SEQ ID NO: 552923 - DNA, 74 bp, Homo sapiens
cactctacacattcaaagtcaccatctccgtgagcgacccctacatccagaggcatttcatccttcatgaagcc

SEQ ID NO: 552924 - DNA, 73 bp, Homo sapiens
cagctgtggacatctggagcctgggctgcatctttgctgagatgtctgaagatgatgagaaactgaaaaagag

SEQ ID NO: 552925 - DNA, 101 bp, Homo sapiens
gagaagctgcaagagcaacatctttcctcaccccaagtagtttatgccaacgtgacttcattcatacagatgaaccaaggatcgggatagcagtataaaat

SEQ ID NO: 552926 - DNA, 75 bp, Homo sapiens
aggactatgtgacactctatgtgaaaaacatcagagagctcgtactggcagttatcaatactctggctgaccatc

SEQ ID NO: 552927 - DNA, 83 bp, Homo sapiens
aggtggcccctgttgtgatcacttggctagagatttactacatccgtccttggaagaggaaaagaaaaaacataaaaagaaac

SEQ ID NO: 552928 - DNA, 100 bp, Homo sapiens
ggacttattccactgtgtctccttcactcgcctagaagattatcagcgtcgccttgatacctccagcctgaagttgtcagagtacccaaatgttgaagag

SEQ ID NO: 552929 - DNA, 51 bp, Homo sapiens
cctatgtacctgttaccactttcaaaagagtcagtggatcggtggggaaaa

SEQ ID NO: 552930 - DNA, 101 bp, Homo sapiens
ttctgtgaacacatctttggatcaaaactccagcaaacatggatggaatccgacgtggtaggcccagagcagatactgtccgcgatttaataaatgaagga

SEQ ID NO: 552931 - DNA, 100 bp, Homo sapiens
tcgtcgggagtgatcacctaccctacaggtggctgtacttttgatgatggtccaggggcctgtgattaccaccaggatctgtatgatgactttgaatggg

SEQ ID NO: 552932 - DNA, 98 bp, Homo sapiens
acatggacatcctgaagccaatcctgatcctggtgtatagcctggaagcaggacgccgcctcttgaagctgggtaacgttctccgtgacttcacgtgt

SEQ ID NO: 552933 - DNA, 90 bp, Homo sapiens
aacgcagtggcacagagtagcagaccccaagactgcttctgagacagaaacagatatctgtgctgaatgggagataaagaccatcactag

SEQ ID NO: 552934 - DNA, 89 bp, Homo sapiens
gcaaagatcgcctgcaccttcaaggccaaactatgcagattggtccagaaaagggcgtggtgcacctggcgacagcggccgtcctaaac

SEQ ID NO: 552935 - DNA, 100 bp, Homo sapiens
gggacagctaccgcagcatgagcgaaagctacacgctggaggattttttatcaagcagaaatgcatcgaacaacgagaatcaagatcactgagctaaatc

SEQ ID NO: 552936 - DNA, 90 bp, Homo sapiens
tactacatcccgcagtacaagaactggagagaagctgaaacctatcaacactcttcaaaatgcaatggaatgtaccacggactgtatctc

SEQ ID NO: 552937 - DNA, 80 bp, Homo sapiens
tggggccagggaaccctggtcaccgtctcctcagtgtctccagaacgctatagctatggcacctccagctcttcaaagag

SEQ ID NO: 552938 - DNA, 98 bp, Homo sapiens
agtactaccaaggacagcttttttcctgcaaggccaagctataacatcagaaatggtgaatgaatacaagaaaattcttttgctgaaaggatttgagc

SEQ ID NO: 552939 - DNA, 75 bp, Homo sapiens
tcacaccagacctacggagggagctggaaattcctgacgttcattgatctggcagcaatgaatgtggatcacgag

SEQ ID NO: 552940 - DNA, 74 bp, Homo sapiens
gaatataatgaacctcatgaaagcagaaccaactcggatattgttgagtttcaactagtggccccactgtgtcc

SEQ ID NO: 552941 - DNA, 75 bp, Homo sapiens
aatcatgcatttgctggcagtgattggaggaccacctttttggcaatctatgcttctggcccaggaacacaacta

SEQ ID NO: 552942 - DNA, 96 bp, Homo sapiens
caacatctcacttccgaaccggtgggactcttccctggacactgtgttgagttaattaaccaaaaagttccccagtcagtgaccaactcagtgcca

SEQ ID NO: 552943 - DNA, 90 bp, Homo sapiens
gtccccggctgaggcagcgcggccgcagcagccctgaccatgaatggcacctacaacacctgtggctccagcgacctcacctggccccca

SEQ ID NO: 552944 - DNA, 74 bp, Homo sapiens
gaagaacagctcgagagagcattacaagccagcctctgggaccgagacgagtttggcgcacagacttgtggcac

SEQ ID NO: 552945 - DNA, 98 bp, Homo sapiens
tccggttctgaggtcctggaggtgccatttccctctctgttgaagcaaaggccggggcagacctcctaacttccttgccgtccaggaagggatttcga

SEQ ID NO: 552946 - DNA, 83 bp, Homo sapiens
ttccactttgtaattccagcgagtcgacttcccatcctgagttggatcttagtaagagccctaagaccatgaaaaagctgctg

SEQ ID NO: 552947 - DNA, 100 bp, Homo sapiens
ctaattttcttccagaatccaaaatcatttttcttgaaaaaggacaagagagattctccctgagaaacaagcagaattttttgaaccatgggtgtactca

SEQ ID NO: 552948 - DNA, 119 bp, Homo sapiens
gggcttggaacccgggagccagatcttggaccctgaactgcacctctgtcaagagtttcgctctgctgcccaggctggagtacagtgatgtgatctcctgacgtcaagtgatccattcg

SEQ ID NO: 552949 - DNA, 105 bp, Homo sapiens
cgcaaacttccttcactggtgtagggacattggggttgatgaaacttacctctttgaatctgaaggtttagactgtcaagaacaagtatgccacatcgaagcatg

SEQ ID NO: 552950 - DNA, 100 bp, Homo sapiens
gactctttcacaggctggatgaagattgggatggacttgccagtttcaaaagtttcctgaagtctgaattcagtgaggaaaaccttgagttctggattgc

SEQ ID NO: 552951 - DNA, 75 bp, Homo sapiens
catttcagaggttcaccgccatcattggacccaatggctctgcctgaactctttgcttccggaatccgggattgt

SEQ ID NO: 552952 - DNA, 82 bp, Homo sapiens
gagccgcggcggggggaaaatggagcccttcaccaatgcagaaaaagtcctacctggagcgaagcgttaaggaagctgagga

SEQ ID NO: 552953 - DNA, 83 bp, Homo sapiens
cgtgctggccaaggtgaagcgcgagcgcgacgagtataagcggagaaaactccacggccagcgtgagcgaggcagagagaaag

SEQ ID NO: 552954 - DNA, 50 bp, Homo sapiens
agaatctgcccacagagttcgggaggaggaagccaagaatctggtgagcg

SEQ ID NO: 552955 - DNA, 83 bp, Homo sapiens
cccagcccagcgcctcggccgaacccctccgcagcaggaccaagaatcgccttcagccctgtctggtgcatccttggcagaaa

SEQ ID NO: 552956 - DNA, 75 bp, Homo sapiens
gggggttatggtgggaggagccgatactgagcttcttcctatttgccatgggtgtcaccaccccaataaacttag

SEQ ID NO: 552957 - DNA, 97 bp, Homo sapiens
aaaacgtgaccactgaggatgtggagaaggccacagaccatgtctggacagaagtctattctccttctcagcagcggtggctgcactgtgatgcatg

SEQ ID NO: 552958 - DNA, 99 bp, Homo sapiens
tgcagcctttcaaggaaaacatggaacaatttattattcaagtatttgattttcatcaagcagctgatggtatccaggaacaacagagacaagaacaag

SEQ ID NO: 552959 - DNA, 75 bp, Homo sapiens
cgcgagcgactgcggcgccgagccgttgatattcactgatggactccaaagaatcattaactcctggtagagaag

SEQ ID NO: 552960 - DNA, 88 bp, Homo sapiens
tcagcatccccaggctggccatcgtgtgaagccaacaaaatcctgcaccagcacctcggggcccctgaagagcggcttgctcttcaca

SEQ ID NO: 552961 - DNA, 97 bp, Homo sapiens
catcaatcttattccactgcatgtatttgtgttgttactgatgcagagatacagcaaaagagtctacataggacaagtaaatttttgtgaaacattg

SEQ ID NO: 552962 - DNA, 76 bp, Homo sapiens
gggtttggaagaggatcagtatggcatgcccctggccatcttcacaaagtgatgtcttggcattgcccattttcaa

SEQ ID NO: 552963 - DNA, 83 bp, Homo sapiens
ggacgagggccagctgacggagatggtgcagaagatggaggagctgagctgactgctgcccactttggaggaggcggtgggct

SEQ ID NO: 552964 - DNA, 90 bp, Homo sapiens
gacagacttgcttcccagggccgagggcctgtggttgtccactgcagtctgcgggccaggcatcgacatccgcaacgactatcagcagct

SEQ ID NO: 552965 - DNA, 90 bp, Homo sapiens
tgtggtattgtggaaattcccagaggactttggagaccagactggattatggacagaacttggaaatattgagaataatttcttaaagcc

SEQ ID NO: 552966 - DNA, 82 bp, Homo sapiens
ccgccatcttgtgggagcaaaaccaacgcctggctcggagcagcagcctctgagctgtggaaagtgaagaaggcattgaaga

SEQ ID NO: 552967 - DNA, 100 bp, Homo sapiens
tgaatgaatatctggttttgtctctgctgggcctgtgtgcctggaaaggaattgttttggcctaggatcatccaggaggagatgttaaagtaacccatct

SEQ ID NO: 552968 - DNA, 75 bp, Homo sapiens
tttcttctgtgggctgtgattttcagaggggaatgctaagagatacgatgaatggattaaagcagataaaatagt

SEQ ID NO: 552969 - DNA, 98 bp, Homo sapiens
ggcctctgagatatgccgtttacggatggcggcacccagtcagcagaggctggttgtagtttcggtctcaccacagtctagagcatcgctggctgcac

SEQ ID NO: 552970 - DNA, 76 bp, Homo sapiens
tatcgtttacgagtttactgcatcagtgatggaggacagagtgcggtgaagctgtacttcacaaaaacagtagagg

SEQ ID NO: 552971 - DNA, 80 bp, Homo sapiens
acgtaacaaatcagatcgcactcctgaaattaggaaaattgccactgctttataaggaatcccgttctgcttccagaagt

SEQ ID NO: 552972 - DNA, 51 bp, Homo sapiens
gatcccaggctgggccccgcggcggtcattgaaattatgagactatcattc

SEQ ID NO: 552973 - DNA, 82 bp, Homo sapiens
tcagggattgatcgcctcttcaggtgctgaaggtcgccatcctggctgagaagtacgcggtggactacacctggtatgtgga

SEQ ID NO: 552974 - DNA, 100 bp, Homo sapiens
taataacacaacaagtttagggagtccatggccagaaaacttttggggtaagtaaggaggtctctgtaccatggctcgtacaaagcagactgcccgcaaa

SEQ ID NO: 552975 - DNA, 100 bp, Homo sapiens
tgtgtttgtgtccatttctcccagcgcaccctctgcatatctctacccacttgtacataattcagcatccagcagagatacgtaggtaacctttccagag

SEQ ID NO: 552976 - DNA, 90 bp, Homo sapiens
agtatcataaaattcctctaaatgcaaagaatcgcattctgattttccatatggatcatttccctatgttgctagaccagtacactggca

SEQ ID NO: 552977 - DNA, 74 bp, Homo sapiens
gacgaggagggagaagacgaggatgatgcggaaattaaccccaaggaagaagaaattgtcgagacgaataacat

SEQ ID NO: 552978 - DNA, 82 bp, Homo sapiens
attggcaatgagcggttccggtgtccggaggcgctgttccagccttccttcctggggaggaggtacaggagaactgtgtgcg

SEQ ID NO: 552979 - DNA, 97 bp, Homo sapiens
aacagtttgtggcaagacaagctcagaactgagaagctgtcaccacaggttcttgggtgtctctggggagtccctgggccagaccttcctccagact

SEQ ID NO: 552980 - DNA, 75 bp, Homo sapiens
ctacgacgtccctcaaaccttgcttctaggagataaaaagggagtgcatccgccccaacccttttccccctcgtc

SEQ ID NO: 552981 - DNA, 101 bp, Homo sapiens
tgactcggaatcagaagctgaaacagcccatggaggtgtttgtggacgacgagaccaagctcacgctgcacggcctgcagcagtactacgtcaaactcaaa

SEQ ID NO: 552982 - DNA, 100 bp, Homo sapiens
gaagtgaagaaggcgcatcactcccagctgcgcaaagcttgcgaggtggcgttagatcctggccatcgtgtctatcctgttcattgtgctttccaccatt

SEQ ID NO: 552983 - DNA, 50 bp, Homo sapiens
aagaatgaagccgcggaccctcacgatgattcacctccagcagaaaggga

SEQ ID NO: 552984 - DNA, 90 bp, Homo sapiens
acatggaaattggactaaattaccagaatgcagggggcttcgtgggacacatatgcaacatgcctatgatttttacaagcctgatatgct

SEQ ID NO: 552985 - DNA, 99 bp, Homo sapiens
ggattggcattaactttgacagactcacacttttggccctgtttgataggtttgggccccatggtatccctgtgacagtatttcccaaaagggaatata

SEQ ID NO: 552986 - DNA, 87 bp, Homo sapiens
ttgccactcagctgacatatgaaggactcattgatgaaatttatggcattcagaacagtcccagtagggatggcacaatcagcgagg

SEQ ID NO: 552987 - DNA, 100 bp, Homo sapiens
agaagatttggccttctactctagtacagtagtatctctattgggatgcaagtattggaatggaatggaattcccttgacttctaaaacatatgaagaag

SEQ ID NO: 552988 - DNA, 74 bp, Homo sapiens
catttgctgaccttggcgacctcagctccggcctccaagatgtgccgtttgggggtgctaaagctggtgttaag

SEQ ID NO: 552989 - DNA, 71 bp, Homo sapiens
gtcttcgactgcaggaccaatgtcctgggccacctgcagcaggaggactcacgaatggcagtggaagatac

SEQ ID NO: 552990 - DNA, 100 bp, Homo sapiens
ggaagctgagggcacgtgtttgcggttcagccctttgatgaccgcagcagggacttccaaggaagatgccatgaaagcttacatcaacaaagtagaagag

SEQ ID NO: 552991 - DNA, 82 bp, Homo sapiens
tccgccgcggcactgatccccacagtgagaagcgccaccttcaagtgaacgtcaccaacccagtacagtgcagcctgcacgg

SEQ ID NO: 552992 - DNA, 76 bp, Homo sapiens
aacataaataggctgcttggagaaaatgatggggaaacaagagctttgcttcttggacacttaatgattgttggca

SEQ ID NO: 552993 - DNA, 90 bp, Homo sapiens
caaaatggaatgtaaccctagccaggtgaatggctcaagggctacttctacaagtccgaacagccagtccagcaaaatgaacagcattgt

SEQ ID NO: 552994 - DNA, 100 bp, Homo sapiens
gcgggcccggcggcggcggcagcggggtccgggtccggagcgccacagcctaatgggattgtttgaaaaacgtcgcttcaggaaattcctagtgtatgtt

SEQ ID NO: 552995 - DNA, 88 bp, Homo sapiens
cgcaacccggtgttcccgcgctttatcaagattatcgagctgagtcagtgctgattctctcaaatagagcttgaaggataaatcttca

SEQ ID NO: 552996 - DNA, 49 bp, Homo sapiens
gtcgaagaaggggacgccgacaaggatgccgaggaatgtgacagggctg

SEQ ID NO: 552997 - DNA, 97 bp, Homo sapiens
aggacatctgggggccacaaatgctccttctcctggagacgcaactcaaggtcaccccagctctgatctttgccatcacagttgctacaatcggctc

SEQ ID NO: 552998 - DNA, 51 bp, Homo sapiens
caaaatctggcctgaaataaaagacttcccaagtaagaagcggaagaggag

SEQ ID NO: 552999 - DNA, 82 bp, Homo sapiens
cctgctgctgtcttcaaagaaggtcagcccaaggccaaccccactgtcactctgttcccgccctcctctgaggagctccaag

SEQ ID NO: 553000 - DNA, 98 bp, Homo sapiens
aagcatgtagaaagccggaaacatatctgaagagatggattaagaatgctttggattaaggattgtggagcacatttcaatcattttaggattgtcaa

SEQ ID NO: 553001 - DNA, 100 bp, Homo sapiens
ggaagaatggcagtgctcaaactcaccgaccaggatgtaaatgaagaccctggagaagatgtggccctcctctctgttagttttgaggacactgaagcca

SEQ ID NO: 553002 - DNA, 75 bp, Homo sapiens
gttaccaagctgaagcacttccagctccgggcaccctgcagaagttcgtggatgacctgttccaggtgattctca

SEQ ID NO: 553003 - DNA, 97 bp, Homo sapiens
ttcaatgtgacacaaggaaagtattctacagatggtcagcaagaggatgaagccagtaaaattgaagctctgcacaagagaagaaatttacttgcag

SEQ ID NO: 553004 - DNA, 75 bp, Homo sapiens
ctctttgaaattgtaacaacgtctcgaactttctatgtgcaggaaacagagcaaatgcagcgttacaatcaaaga

SEQ ID NO: 553005 - DNA, 89 bp, Homo sapiens
tgcagcctcgaactcctggcctccagtgatccttctgcctcagcctcccaaggagcgaggaccacaggagactacctaggtggagaagc

SEQ ID NO: 553006 - DNA, 97 bp, Homo sapiens
ggaggaccccttctttgtggtgaaagggtcaatggcatgcagctttatggaaaatctcgccgagaagcagtctcctttcttaaagaagtgccacccc

SEQ ID NO: 553007 - DNA, 96 bp, Homo sapiens
gctcggtgccggactacgggcagcggctcaaggccaatctgaaaggcaccctgcaggtggaacacctgcagcaggagactgctgctctgaaaaagc

SEQ ID NO: 553008 - DNA, 98 bp, Homo sapiens
gttgtgtggtcgcgtctcggaaaccggtagcgcttgcagcatggaatccatgcagggaagttctgacgaaactgccaacagtggtgaagatggaagca

SEQ ID NO: 553009 - DNA, 100 bp, Homo sapiens
ggattccggcgggaactcgactcttggcgccaccgcctcatgcactgtgtaggtgctgtgattgtctccacgccccaggacatcgcattgatggatgcac

SEQ ID NO: 553010 - DNA, 98 bp, Homo sapiens
tcaacctagaccaatggacagcagaacagatacagggtatgactttgcagctgtccttgagtggtttgccgagcgggttgaccgcatcattctgctct

SEQ ID NO: 553011 - DNA, 90 bp, Homo sapiens
cctcgtgcggacgctcgtgcacagatacaacactatggctatgcatcctccaacgtcagccccgccctgccgctccccacggcgcactcc

SEQ ID NO: 553012 - DNA, 100 bp, Homo sapiens
ctggaggatgcttctcatcattgccaccactcatgtgactcgaaaagccctgtttcctggtgactctgagattgaccagctctttcgtatctttcgtatg

SEQ ID NO: 553013 - DNA, 75 bp, Homo sapiens
ctgacattgtgtgggaaattgatgagtatatcgattttgtaaccctccactgagtgaagaaatgttgcctcctgg

SEQ ID NO: 553014 - DNA, 100 bp, Homo sapiens
ttgagaccgagaatgtggaaacagcgggtccatatggaatatttgctggtagggatgcctccagaggactggccacattttgcctagataaagatgcact

SEQ ID NO: 553015 - DNA, 100 bp, Homo sapiens
gttggatggctcttgaaagtctggttaataacgagttctctagcgctagtgatgtggatatgaacgagactgccaaacaagaagatattttggaatccac

SEQ ID NO: 553016 - DNA, 87 bp, Homo sapiens
atggccgagtggtctaaggcgccagactcaagagtctgccccaaattctccaagaattggaagcccattgagcccaaagaaaaacag

SEQ ID NO: 553017 - DNA, 101 bp, Homo sapiens
tcattgcacctatctcccccatctcattgccacggctgaaccctccttctcaatcttggaacagcacccccttctttaagatgatacagaactttcaggaa

SEQ ID NO: 553018 - DNA, 82 bp, Homo sapiens
ccatatgcgaccacagaaggaaattcaacagaacttagcataaatgctgaaggaacgtcaaggtcgtgggaaataaaaggca

SEQ ID NO: 553019 - DNA, 75 bp, Homo sapiens
cgggccccgatggccccgaccgcgtgctggagctcttcgacccacccaagcggaacggaagccgccccttttcaa

SEQ ID NO: 553020 - DNA, 96 bp, Homo sapiens
ttcagcagctggagaatatgatattctttcagccactccatgtccaaaagaaccaaataaagagatgataaatgatggcgcttcctggacaatcat

SEQ ID NO: 553021 - DNA, 98 bp, Homo sapiens
ttgcttccttcttcatattgaagaacttcaaccccacagtgtatccttttcaagatcctgtttgaccaaactcagagatcaattaaggcacagcttca

SEQ ID NO: 553022 - DNA, 78 bp, Homo sapiens
ggaacacgaccagctgctcctcaagaagccagttgagggaagttctccatgaatgtacgtcacaatgatgatgaccga

SEQ ID NO: 553023 - DNA, 58 bp, Homo sapiens
caagtacttggcagatcactctcttagcagatatcttaatgcaattcagacaatgtgt

SEQ ID NO: 553024 - DNA, 97 bp, Homo sapiens
ggaacccagcctcccaagaaggctgtggagaagcagcagcctgtggaaagcagtgaagacagcagtgatgagtctgcgagggcggcactgctcacag

SEQ ID NO: 553025 - DNA, 95 bp, Homo sapiens
tctgcttttccacaaccagtttataagtgctgttaaatatgtgaatgctgcttctaaattacttgggcaaaattgggtccaaaacgcctttgatg

SEQ ID NO: 553026 - DNA, 51 bp, Homo sapiens
cagagactttcttcatgagattgaaacaggcgatcattatttcgaagttct

SEQ ID NO: 553027 - DNA, 75 bp, Homo sapiens
gaaagctttaggagttcacagtatcaatggcattgcactggacaacaagtctctgaatgaatgtgaatctctgct

SEQ ID NO: 553028 - DNA, 100 bp, Homo sapiens
ccgccccggtgcagatgaacctgtacgccacctgggaggtggaccggagctcgtccagctgcgtgcctaggtatacaaaactaggatatgctggaaatac

SEQ ID NO: 553029 - DNA, 75 bp, Homo sapiens
cactttccaaagtggatgcctccggggaggcatagaatgtcaagctaaccaggcgtccgctacttcagaagagtg

SEQ ID NO: 553030 - DNA, 100 bp, Homo sapiens
ccccagcccatcctctctaaccaaggttattcctgtcacgtggggccaaccctgagctgcggaacaaagagggggacacagcatgggacctgactcccga

SEQ ID NO: 553031 - DNA, 75 bp, Homo sapiens
aagtggccatacaccaggatccacccgatgaatgtgggaagactgagttggaagctgaaggtgttcctgaagtat

SEQ ID NO: 553032 - DNA, 100 bp, Homo sapiens
caaagataagaagatagctgagttggaaagtgattcgcctttgccagtctcatctcgtgtctgctttgttaagttccatgatccagactcagcagttgtg

SEQ ID NO: 553033 - DNA, 100 bp, Homo sapiens
gtgtccctttccttcctggcgctttcctgggttgcttctggcggccatggtgttgctgctgtactccttctccggtcatcatcagatttgaaatatttaa

SEQ ID NO: 553034 - DNA, 100 bp, Homo sapiens
ggcctcacacaatggagggtgaaaggtgatttgatgaaggctgctgcaggagagttcgcagatgatccctgctcttctgtgaagcgaggcaacatggttc

SEQ ID NO: 553035 - DNA, 100 bp, Homo sapiens
cagcagcaaaggatgagcggaaccttggaaaagctgatcttgcatctttaatggataaaacatttgagagaaagttgcctgttagttctttaacaatatc

SEQ ID NO: 553036 - DNA, 97 bp, Homo sapiens
agaacatcatccagtggcagacactgaaaataatgatcaccagcagcttgcaaaacttatccaggagtcgccaaccgttgaactgaaagacaagttg

SEQ ID NO: 553037 - DNA, 100 bp, Homo sapiens
caagatgatttatggtaataagccttcacttaacttaagggaccttggattatctgaactaaaaattggacagattgatcagctggtagaaaatctactt

SEQ ID NO: 553038 - DNA, 83 bp, Homo sapiens
ctggctgcggccgccctgggccgggccccaccggacgtcttccgtgtgtgctaagatcgtgcagctcctggggcagaatgagg

SEQ ID NO: 553039 - DNA, 74 bp, Homo sapiens
caaggatcatgccgcagccccactgacccaggagtaggggcctaagggtggggttgcccagactctcaagaaag

SEQ ID NO: 553040 - DNA, 75 bp, Homo sapiens
gctcttggcttccatacgtgtctcagacagatgatgtgcgaggtgatgccgaccatcagcgaagcagaaggcccc

SEQ ID NO: 553041 - DNA, 100 bp, Homo sapiens
cctcagctacgaggaggcgctgaggagagcatcgagagtaaacatgaggttacgatcctgggaggacttaatgaatttgtagtgaagttttatggaccac

SEQ ID NO: 553042 - DNA, 90 bp, Homo sapiens
cggggttctgcgactggagcgcccgctattttgcccagcccgtcatgaagtgctggtaaaccacagaagtcatctttgattttggcattc

SEQ ID NO: 553043 - DNA, 100 bp, Homo sapiens
gcccttccgacttggtactggcgccaacatggagaaagttgtgaagatggatcgagacatgaccaaggtaatcaaatgcaaagcagctgtgctatgggag

SEQ ID NO: 553044 - DNA, 100 bp, Homo sapiens
ctcaataaaccctatgctgctactgactggacgcacctggaagggggctgtttatggtggtggggacccaaactgtatgcattgttccagatgcgctctt

SEQ ID NO: 553045 - DNA, 50 bp, Homo sapiens
acatgagatggtagccaacccctcagcttcagctttagctgcagctgcct

SEQ ID NO: 553046 - DNA, 100 bp, Homo sapiens
gcggcgtcgggtttgggctggaggtcgccatggggcgaggcagcggcaccttcgagcgtctcctaggcgggcagggctgggcagcggcctgagtctcagc

SEQ ID NO: 553047 - DNA, 100 bp, Homo sapiens
ctgcagtagaattccttgtagataagcaactggattttttaactgaagatagtgcctttcagccctaccaggttgtaaagaagaaagttctaccctttct

SEQ ID NO: 553048 - DNA, 82 bp, Homo sapiens
ggcaaagcgaaattggtcattctcgctaacaactgcccagctttgagggtgagcttgtcggccacagactgctacattgtgc

SEQ ID NO: 553049 - DNA, 75 bp, Homo sapiens
ccgacacgctggccctgaggcaacggctcatcaggcaagccgattttttcagttgatattcaccctgacgggacc

SEQ ID NO: 553050 - DNA, 80 bp, Homo sapiens
atgcagattatatcgcatcctatggctcaaagaaagatgattataatctacctgttactcgtattttggacaatcttatg

SEQ ID NO: 553051 - DNA, 74 bp, Homo sapiens
ccgctctgggatcccggccaccagcaattgtccgttggtgtaatacggtgcccagtatgccgccaagaatgcag

SEQ ID NO: 553052 - DNA, 100 bp, Homo sapiens
gagctggtcgcagatcctgagacccggacagtggcagtgaaacagaatgcctcggctggggtggagcgcctcttgctggggaacaaatgtgacatggagg

SEQ ID NO: 553053 - DNA, 97 bp, Homo sapiens
cagaccaggaacaagagagaaagagtggatttcagcctgcacggatggtcttgaaacacaaatggtttttggcgaagctgctctcaggggagaaccc

SEQ ID NO: 553054 - DNA, 74 bp, Homo sapiens
tccctcgtcgaaaggattggattggcatctttagataccttcatgaaaacggtattatacaccgtgacttaaag

SEQ ID NO: 553055 - DNA, 100 bp, Homo sapiens
ctactactcggacaagtacttcgacgaacactacgagtaccggccgagtgtactacttcaaccacatcactaacgccagccagtgggagcggcccagcgg

SEQ ID NO: 553056 - DNA, 105 bp, Homo sapiens
cacctcagccctacaagatctacgaggtctgctccaatggccctgctcccacagaccccccaccccctggattttccttctccctccatcccttgacggttctgg

SEQ ID NO: 553057 - DNA, 100 bp, Homo sapiens
aagctgctgctacgaatgggagagtgtcttcatcttacccagtggaacctaagaaattaaattctccaggttgcccccaagtttcctggcagtgtgtgat

SEQ ID NO: 553058 - DNA, 98 bp, Homo sapiens
gagaagacgatctgcacttcgcattttggcattgacatttaattttagggtcctttatatagaagggagagtaggctgattcaccccaagagtggccg

SEQ ID NO: 553059 - DNA, 75 bp, Homo sapiens
gtggtgactgagcggagcccggtgacaggatggtccccgttctccgtgtcctgctgtccgctgacctgaaggggt

SEQ ID NO: 553060 - DNA, 101 bp, Homo sapiens
gacgatagtccaaaaactgaagaagatggtggataagcccacccagcctggcaggagatcgcagatgctgcggatgcttctgagccccggtggtgtgtccc

SEQ ID NO: 553061 - DNA, 89 bp, Homo sapiens
tgacatcaatgacaacgactggtcctatggctcggagaagaaagaggagaaggcagagcccccccaggctatgaatgccctgatgcggt

SEQ ID NO: 553062 - DNA, 75 bp, Homo sapiens
attggaccaattctagataccaaacgccacaggtcatcatctggatcatcccattctggttcccgttcaagttca

SEQ ID NO: 553063 - DNA, 74 bp, Homo sapiens
aagcaagctgaagacatcaagaagatcttcgagttcaaagagaccctcggaacagtgtgaacatggctacgcct

SEQ ID NO: 553064 - DNA, 75 bp, Homo sapiens
tgagtaccacaaagcaagagatgaattgccattcttgcatgaggtgccgtgagcgatgtggagatgcaggaacac

SEQ ID NO: 553065 - DNA, 98 bp, Homo sapiens
gacagcaacccgaagacagggaaatttaggcacaaagccaggctatttgatctctggagaaggatcctttcccttcctgcttgggttccacctgcacc

SEQ ID NO: 553066 - DNA, 100 bp, Homo sapiens
tgacctggtcctcatgctgccgaggctgttgctgttgatctgtgatcaaatgatgccgtttggaaaaatttcccagcagttgtgtggcgtaaagaaactc

SEQ ID NO: 553067 - DNA, 80 bp, Homo sapiens
aaatgaaacttctcaaatgagccaacctgagtcacaagcccaaacaaattcgaatatcttctaaaacaggaatacctctc

SEQ ID NO: 553068 - DNA, 100 bp, Homo sapiens
cgtattcgttgttctcggcgggctgtggggcctccgcgccgcggccgttagtcatgtcggcttcctccagattaggccgagcacttgctgagctatttgg

SEQ ID NO: 553069 - DNA, 75 bp, Homo sapiens
ggccgaaagggttgtagacatggcggccatcaggggaagagatggatcaagatggtgaaatagaagactccacca

SEQ ID NO: 553070 - DNA, 90 bp, Homo sapiens
acagcggcgagcagaactacggcgagcggctctgcttatgataatgtcaacaaagttcgagtagctatcaagaaaatcagcccctttgag

SEQ ID NO: 553071 - DNA, 102 bp, Homo sapiens
tgaggactttccttacctgtttttccagctcacccactgccagcagaggcgccaagcccatctttgtgtgcttgcatccaactgtgatgagcctatgtatgt

SEQ ID NO: 553072 - DNA, 100 bp, Homo sapiens
ccatgagctcagtggcctcctctgtgagcagcaggcccagtcggacaggactagactttggcatggcagaggaatttgcttccaaggctctcgaattgaa

SEQ ID NO: 553073 - DNA, 73 bp, Homo sapiens
aataagctatatactttggttacctatgtacctgttaccactttcaaaagagcttcagtttcagcgactcacc

SEQ ID NO: 553074 - DNA, 82 bp, Homo sapiens
gacaagattcgcttctatgagggaatgcagtttattctactccaagagattctgcctcccttgtgtccgggagaacatcaat

SEQ ID NO: 553075 - DNA, 100 bp, Homo sapiens
ggacggaagcacaggggccactcagagtcgcccgagaagggcgacagccagttttgtagtcaaaaagcagtcatctattcattgaattttacagcaaacc

SEQ ID NO: 553076 - DNA, 97 bp, Homo sapiens
aaacaggggcagaagaacaaggaagcggagaggcaagagatagaagatggtgagatttttgcaagtattaaccagaaggacggtatggtcagtttcc

SEQ ID NO: 553077 - DNA, 80 bp, Homo sapiens
ctcgcaacaagatcccctatgagagtcccatcttcagcagagccactgaggcggctcccagctgcgttggcgacatggcc

SEQ ID NO: 553078 - DNA, 96 bp, Homo sapiens
gaacgccgccatccagccaccattccaagatatgtacacggtgcagggggtgtgtttatagctgatgaagttcaagtgggctttggcagagttggg

SEQ ID NO: 553079 - DNA, 75 bp, Homo sapiens
acacaagtggagctccttttcctccacctaccttcccgaataaacctctcataatgaaggcccccgctgtgcttg

SEQ ID NO: 553080 - DNA, 97 bp, Homo sapiens
gcccggcagggcggagcctcccctcgcaggcgcatattaaatttcctattgactacccctattcaccacctaccttcagattcttgaccaaaatgtg

SEQ ID NO: 553081 - DNA, 75 bp, Homo sapiens
cttcccggacgctgggaaatgacaatgcagatcttcgtgaagactctgactggtaagaccatcaccctcgaggtt

SEQ ID NO: 553082 - DNA, 110 bp, Homo sapiens
agaagagtgagagatggaacccgaagaagaaaggattcgttacagccagagattggtaatggattaggaattagaattgtgggtggtaaagaaatcccgggacatagtgg

SEQ ID NO: 553083 - DNA, 100 bp, Homo sapiens
ataactgtcaagacaacagtgatgaggaaagctgtgaaagttctcaaggatttggtgctatggagaaatttttggtagaatataagagtgcagtggagaa

SEQ ID NO: 553084 - DNA, 96 bp, Homo sapiens
cggcggcccaagcggtttcaaacggcttagagcaggccgcttggttctgacccagctgagcatctggttttgtagcctggatgtgtctgctagtag

SEQ ID NO: 553085 - DNA, 83 bp, Homo sapiens
tgtactgctgctagaatgtttgaggtaaaattcccccagaaagtacactgatatttaatattgatctcctggagattcgaaat

SEQ ID NO: 553086 - DNA, 50 bp, Homo sapiens
gatcatcctgctgctccccggaacccaggacccagggatctcccccagcc

SEQ ID NO: 553087 - DNA, 89 bp, Homo sapiens
cgagcagttaggccgcgagcgactgcggcgccgagccggttcgtgctggccgtgggcagcgccgtctttgatgccatgttcaacggggg

SEQ ID NO: 553088 - DNA, 89 bp, Homo sapiens
tcgaaagtggattttgtgcaatttgacaggccaagatcaaggctcgagatcttcgcgggaagaagaaggaggagctgctgaaacagctg

SEQ ID NO: 553089 - DNA, 100 bp, Homo sapiens
ttggacagatccttcttgttgacctatgtttggatgacttgtcatgcaatcaaaatgaagttgaagcatcagcactgccagtgaaagatgtagaagataa

SEQ ID NO: 553090 - DNA, 143 bp, Homo sapiens
tggtcatcctggctaaaggagcagaggaaatggagacggtcatccctgtagatgtcatgaggcgagctgggccagaagatacctgaaattcctgcagatgttgtgggtgcccttctgttcctggaggattatgttcggtacac

SEQ ID NO: 553091 - DNA, 50 bp, Homo sapiens
gctactgtccccatagtactcggtctgcgggccaggcatcgacatccgca

SEQ ID NO: 553092 - DNA, 82 bp, Homo sapiens
gcgaccaggaggtgccggtggccgcgctcggacccggtttggtgcacctcgatttggaggaagtagggcagggcccttatct

SEQ ID NO: 553093 - DNA, 97 bp, Homo sapiens
gaaaatttcagacctctggaaagctcacccaggaaaaatatgcaatcgtcccattgatatacaggtgattgcccacagtgagtatcaaaagtccaaa

SEQ ID NO: 553094 - DNA, 83 bp, Homo sapiens
gcccccagccccttccaggccctgttctcagcccagatggctacctgtatgagcgtgaggccatcctggagtacattctgcac

SEQ ID NO: 553095 - DNA, 87 bp, Homo sapiens
accgtttcctccaggacagcacctagtcgtggccggaggagtctcagagctgtcagaaagggaacagtgttgataaagactgctgaa

SEQ ID NO: 553096 - DNA, 95 bp, Homo sapiens
agaagccattgagatcccgcagtttatcggccgcagttacctgacgtatgacaacccagatatcttgaagagcctcgatgctgattcatatccta

SEQ ID NO: 553097 - DNA, 96 bp, Homo sapiens
ggaggattggctcagccacccgctgggaatcgtgcagggattcttcggtccctccttgtggtccatttctgggcaccatgggctccacagtgtgca

SEQ ID NO: 553098 - DNA, 100 bp, Homo sapiens
cattgggggcctgtggaaattttcagtgaatgaaaactttgccattgatttgatagcagagcagcccgtgagcgaggtggagactcgggtgatagcgtgc

SEQ ID NO: 553099 - DNA, 90 bp, Homo sapiens
cttctgagctttcttcagagacctcagtgggctcggtttgttgcagttatgcaggtcatcacacaaactgccgagaatactgtcaagcca

SEQ ID NO: 553100 - DNA, 103 bp, Homo sapiens
ggaggaggagttccccttcgagaggaggcagattcccctctacatagacgacaccctgacggacagaactgtaccgctctctttttggccagctccaccctcc

SEQ ID NO: 553101 - DNA, 100 bp, Homo sapiens
gttcgggagtccttggaactgtggtccatggtaaagttttacaggtgcttcagcgaagagtcctgcgtctccatccctgaagtggagggctacgtggtcg

SEQ ID NO: 553102 - DNA, 100 bp, Homo sapiens
tggccggccccttggcactcgcctcggatttgggggcttcctcactcgtggctttccgaaggctgctgaaaccgaaacttcattgccccttcaatgtggg

SEQ ID NO: 553103 - DNA, 75 bp, Homo sapiens
gcggcggcggcggaacgccaggcagatatctccacaggaccttcttggttaaatcagggactacttctgaactct

SEQ ID NO: 553104 - DNA, 100 bp, Homo sapiens
ctctcagaagagtgagagagagctattagagattgtgaagaagaatttcgatctccgccctggggtcattgtcagactcttagatcctcagacaaacact

SEQ ID NO: 553105 - DNA, 98 bp, Homo sapiens
aggggagccatggcggctgacagtcgggaggagaaaggtgctggagaatctggtaaaagcaccattgtgaagcagatgaggatcctgcatgttaatgg

SEQ ID NO: 553106 - DNA, 100 bp, Homo sapiens
ggagatccacctatgatctcaggtcctcagaccaaccagcccaaggaacatcttgccaatttcaaatcggaggacacctacagctccgaggagactgtgg

SEQ ID NO: 553107 - DNA, 75 bp, Homo sapiens
cattaacctgccgccgcccctcaccagacagatcgctgtcaaaaccctaggatctaagcattgaagaacagtcag

SEQ ID NO: 553108 - DNA, 152 bp, Homo sapiens
cgagttctacttacaagacctggtgaaggtggaacggggctcccaggacctccactaatcaccagaacaaaatgtgcagtgcatcctaacgttagtcaaggctgccaaggaggctgtgcaacatgctcagattacaatggatgtttgtcatg

SEQ ID NO: 553109 - DNA, 100 bp, Homo sapiens
ccgggatcgtgaccgagaccgtgaccgagagcgtgaccgagagcgcgaatatcgtcatcgttagaagattccgtggagtgggaggggcgcagtctcttga

SEQ ID NO: 553110 - DNA, 101 bp, Homo sapiens
gatggcatctctcggcgccctggcgctgctcctgctgtccagcctctcccgctgctcagatggaggtgcagcgccggccctggttagtgaagtacggggac

SEQ ID NO: 553111 - DNA, 120 bp, Homo sapiens
ctcggttcgagatggagcgggcgcactgggaggtggaacgggccgaactgcaggtggattcaccaatgaacttgaagcatcctcatgacctagtcatattaatgagacaagaagcaacag

SEQ ID NO: 553112 - DNA, 48 bp, Homo sapiens
aaagtgcgaagatagaaccaccagacttggcagatgaacttgctcttg

SEQ ID NO: 553113 - DNA, 100 bp, Homo sapiens
ccccgcgctgcggcctggcggcttccaggcgcactaccgcggtgtggatgaggtcaccattgtcaacattttgaccaaccgcagcaatgcacagagacag

SEQ ID NO: 553114 - DNA, 83 bp, Homo sapiens
cccatagatggccagctttcccccgagggtcaacgagaaagagatcgacaatgcagatcttcgtgaagactctgactggtaag

SEQ ID NO: 553115 - DNA, 75 bp, Homo sapiens
agtgcccttccttgataagctgtttaaaccagagtgtgaacatggctacgcctcttcattcccgtccatgccgag

SEQ ID NO: 553116 - DNA, 107 bp, Homo sapiens
atttgggaagcagctgcctgctatgctgaaaacccctggaaacttgctaaagagctgtggaatcatcggaatccttcaccatggcatccagcccggcccagcgtcgg

SEQ ID NO: 553117 - DNA, 98 bp, Homo sapiens
gccactgcacccgctacctgcgcacggtggagaacctgttctcctgtgcctcctgttggctctctttgcatctggcctcatccaccgagtctgtgtca

SEQ ID NO: 553118 - DNA, 100 bp, Homo sapiens
ggaattaaaccacccccaatcattggaagatttggaacctcactgaaaattggtattgttggattgccaaatgttggaccccctggttgtggaatacgag

SEQ ID NO: 553119 - DNA, 99 bp, Homo sapiens
tctctataaagttatccaggagccacaaagtgagacggtctggaaaatcccgaagcagaagcccgtattcatctaggcattcaagatctcgtagcaggc

SEQ ID NO: 553120 - DNA, 95 bp, Homo sapiens
gcaagaccttcaatatcaaaaatgactttactgaagaggaggaagcccaggttggcaaaagcagcttttgatgatgcaattgcagaactggatac

SEQ ID NO: 553121 - DNA, 100 bp, Homo sapiens
ccgaacccaaaggggtggacgcggcctccaggtgctggagaatctggtaaaagcaccattgtgaagcagatgaggatcctgcatgttaatgggtttaatg

SEQ ID NO: 553122 - DNA, 100 bp, Homo sapiens
gccacgtcacgccaacaacaggggtaccaacaatgtcacttcacacgcctccatctccaagcagggcaccagtgtcttgtcacctggactccacatagga

SEQ ID NO: 553123 - DNA, 51 bp, Homo sapiens
tgtgaggcaacatcggataccactgggatcaccatccatctcaacagggcc

SEQ ID NO: 553124 - DNA, 98 bp, Homo sapiens
tgtgaagcaactgaagaaaatgtttgaagcaacaagattgcttgcaacaattgttatgcttgttctgtacagagtaatgagatgtgtgacggctgcaa

SEQ ID NO: 553125 - DNA, 100 bp, Homo sapiens
cacggaagcagctggataaagaacagaaaaagcttgtggtgaaggggggcaaaaaaaagaagcaagttctgaagttcactcttgattgcacccaccctgt

SEQ ID NO: 553126 - DNA, 98 bp, Homo sapiens
taaatcaactggatatgatccagttaaactttttaccaagctctggcttatcaggactccatagttctccaacagagaaatcttgaaaaggactgacc

SEQ ID NO: 553127 - DNA, 83 bp, Homo sapiens
ggaattcccagtttgacaccacaggctgagctccctgaaccagtctctgcgatatgataccagctattttgtggagtattttg

SEQ ID NO: 553128 - DNA, 101 bp, Homo sapiens
agcaggttttaaatcaagatttaacattccaacacataaaaattatttatccaacagctcctcccagggaaatcctcattgacgattcaatttgttgaagg

SEQ ID NO: 553129 - DNA, 104 bp, Homo sapiens
aagagacagataaatccaagtcaaataccaagcaaaatagtgtgcctccttcacagagcaaaagctgtgcctcacttctgcgggttgaaccctttgtatgtgcc

SEQ ID NO: 553130 - DNA, 73 bp, Homo sapiens
aatacaacattgaacgtcataagacttgttggtatcagaatggcaaagcaacttaaccttccagaaaatacag

SEQ ID NO: 553131 - DNA, 75 bp, Homo sapiens
cgctgctctgcgatctgccgatccagatataaagatgaagcgcagctgtataaagaagagcacctgaggaatcgg

SEQ ID NO: 553132 - DNA, 83 bp, Homo sapiens
gccagctccagagccacgtacgaaccctggggttattagtaaaacgattggagaaaggtggtaaagctgaacatgaaaatctt

SEQ ID NO: 553133 - DNA, 51 bp, Homo sapiens
gtcgcgggagccccgccgtgcagtcggagagcccccctccatgcgcctgaa

SEQ ID NO: 553134 - DNA, 73 bp, Homo sapiens
gagagagggcaccaccaaaagtgaggtcttctacccaggtgctggagaatctggtaaaagcaccattgtgaag

SEQ ID NO: 553135 - DNA, 76 bp, Homo sapiens
aacttacgtgtactttaccaacgagctgaagcagttgactggtctgagtgtctccaatggaaaggaccaacttgta

SEQ ID NO: 553136 - DNA, 100 bp, Homo sapiens
ctctctcgggattattgccgattgccagggtgctgaccgtgggagccgaccgagatgagaagcccttttctgtggaagatacttatttactgtgtccagc

SEQ ID NO: 553137 - DNA, 75 bp, Homo sapiens
attgaatgaaagacccagtgcaaagacatcaccatgaacactagcatgtgtgctgtatttatggagtttaaagat

SEQ ID NO: 553138 - DNA, 90 bp, Homo sapiens
aagcaggttttaaatcaagatttaacattccaacacataaaaattatttatccaacagctcctcccaggatgaatttgacaagctgaggc

SEQ ID NO: 553139 - DNA, 95 bp, Homo sapiens
aagatgagaccgcaattcgagaatcaaagggccgggagcgatgagttttgccgaattgacaagcccctgtgtcacagtgaggatgagaaactcag

SEQ ID NO: 553140 - DNA, 90 bp, Homo sapiens
ccgggatcgccgccgccttccacccgggcctcgccgccgcggcctctgccagagccagggtgtcaaattgagaaccaggtagatccccac

SEQ ID NO: 553141 - DNA, 90 bp, Homo sapiens
ttagggtcctttatatagaagggagagtccccttcccctgagcccatctacaatagcgaggggaagcggcttaacacccgagagttccgc

SEQ ID NO: 553142 - DNA, 101 bp, Homo sapiens
tctgctgctgccgccggcgaaggaggaggcgttgccgggggatcccaacaagccctcaggattcagaagtgttaaagctcctgtcactaaagtggctgcgt

SEQ ID NO: 553143 - DNA, 100 bp, Homo sapiens
tcgcggaagcagaggtttgggacaccattcgcttttcacccaagatgatttgatgtcttataaaactctgatgaaccatgatggctacacagacattaag

SEQ ID NO: 553144 - DNA, 51 bp, Homo sapiens
catgagcgaaagctacacgctggaggcaccagttagaagacaaatgaaagc

SEQ ID NO: 553145 - DNA, 97 bp, Homo sapiens
gctgctgtcgcccagcgccgccccgtcgtcgtctgccttcgcttcacggcgccgagccgcggtccgaacatgtgcattgccattgcgatttctcttc

SEQ ID NO: 553146 - DNA, 96 bp, Homo sapiens
ggacgtccaaggatgatgggcactgagtatcctgagctccagctggaccctaaattggatcctcttcctgctgagagtcccctaatgaacattgag

SEQ ID NO: 553147 - DNA, 100 bp, Homo sapiens
catgccccttccgattgggagggacaaggcagcctttacttgcatcaaaaacttatggaaccggaaacccctgaaggtatatggtggacgaatggctgaa

SEQ ID NO: 553148 - DNA, 75 bp, Homo sapiens
catcaagaaaatgtcttatagtggaaagcagtctactgaggtctatgttaacaatgaatgggcaaccagtgttgg

SEQ ID NO: 553149 - DNA, 82 bp, Homo sapiens
ttggagaggccgagggtttgatgaaggtggaggcagcgcggctctcagcgccgtgccgtccctgcagtgacaccgaggtgct

SEQ ID NO: 553150 - DNA, 76 bp, Homo sapiens
ggacaacctcagaggacaacgaagtgttcgaattttgatttggctgctgggctgctaccttgaaatccaagcccta

SEQ ID NO: 553151 - DNA, 75 bp, Homo sapiens
ggggaaaagaaacttatttctgttgacactaacaacctgcagtgtttcactgtgcggtgcagtgcggcggcagct

SEQ ID NO: 553152 - DNA, 87 bp, Homo sapiens
ggccctcagctaccacaagttaattcaggagaactaccttctcaattctgtgcaagggatatattctgttaaagatggaaaaaatgg

SEQ ID NO: 553153 - DNA, 100 bp, Homo sapiens
tggaagcggccaccgactactgtcagcagctgtgccaggatgacagtgatgggattccgtggtcagaagaacgggtggtacgtaaagtcctttatttgtc

SEQ ID NO: 553154 - DNA, 82 bp, Homo sapiens
gtctacgccatcgtggccacgcttctcatcctggacatctggtcagcccaaggccaaccccactgtcactctgttcccgccc

SEQ ID NO: 553155 - DNA, 100 bp, Homo sapiens
ccggacctcgcttacctgcatgctgctgcagatccctagtgtgaagggcttcgattttgctaagcagcatctgggtcagcacaataaagacgacatattg

SEQ ID NO: 553156 - DNA, 82 bp, Homo sapiens
ggatgactctgctgacagacgccttgccccttttggaacagaaacaggttttcctttggaatatggataaatacaccatgat

SEQ ID NO: 553157 - DNA, 75 bp, Homo sapiens
gcaaagaagacgtcatcttcttctaaaagggccgtgactcaagcttcctgcctgacacagctcacttcaagaagt

SEQ ID NO: 553158 - DNA, 75 bp, Homo sapiens
tgcccttgagtctaagttggcccaggctgaggagcagctagagcaagagaccagactggcacagcctccaggttg

SEQ ID NO: 553159 - DNA, 87 bp, Homo sapiens
tctcaattggacagtacatctgtggacaaagcagtacctgaaacagaagatgtgcaggtacgaattggagcaatgttggcttataca

SEQ ID NO: 553160 - DNA, 100 bp, Homo sapiens
gatattctccagcatatcttttctgttgtgacagacacttcacatactgctggagcctaaaatgacacgctctaaactgaaggaagtagtggaaaaagga

SEQ ID NO: 553161 - DNA, 90 bp, Homo sapiens
accttcacccagcatttcatccctcgtcgaaaggattggattggcatctttagagtcaagagcaatctgaatccaaatgcaaaggagttt

SEQ ID NO: 553162 - DNA, 127 bp, Homo sapiens
cccggacctgagcagcccgtacctctccaacggacccctgtctcccggaggagcgcgcaccgtgtcagctgtgatgcatgtttaaaaggaaattttcgaggtcgcagatataagtgtttaatttgct

SEQ ID NO: 553163 - DNA, 100 bp, Homo sapiens
ctgggagaggaaacttgatgcttctgggccaccatttgccagggcctcgctcgagtgcacaaaagcccgtttgaaagtcagggagaaagagctgaaagac

SEQ ID NO: 553164 - DNA, 100 bp, Homo sapiens
ggggccgtggggcttccgcctcgtgggcggcaaggacttcgagcagcctctcgccatttcccggaatgaagtggagctgggggagctgcttctgtcactg

SEQ ID NO: 553165 - DNA, 50 bp, Homo sapiens
gttccttcttcgagaaaccaagggccgttgctccagggagaactgcaaat

SEQ ID NO: 553166 - DNA, 89 bp, Homo sapiens
gcagcctgggggccacagctgcttcaatacagccttttcctccctctccatgaactctggaaacagtacatcagggacctgtgcagtgg

SEQ ID NO: 553167 - DNA, 82 bp, Homo sapiens
gacgcatgagtggcaggcccttcagccaggtcacgcatgaagggagcaccgtggagaagacagtggcccctacagaatgttc

SEQ ID NO: 553168 - DNA, 100 bp, Homo sapiens
tgttcccagaagcgaagtggagagcgccagagtaatgggcgcatgccaagcttactggagtatttgagttacaactgtaacttcatggggatcctggcag

SEQ ID NO: 553169 - DNA, 74 bp, Homo sapiens
gtgcagctgcctcagttcttagcgcagcacccaccaaggctccggatgtgttccccatcatatcagggtgcaga

SEQ ID NO: 553170 - DNA, 80 bp, Homo sapiens
ccattgtgaaagaaggttgggttcagaagagggtgtctggaggtcgcagccgcctgcatctcattgatctcggcagctgt

SEQ ID NO: 553171 - DNA, 88 bp, Homo sapiens
tcacagggcttcaacaagctagctgaggtatgaatcctaggacccagaataaggattctctagaggacagtgtttctacctctccaga

SEQ ID NO: 553172 - DNA, 83 bp, Homo sapiens
agcccgtgggcgagccgcccgcccgccgagcagccatgaggagtgtggccatctggggccgtgtggtatttgccactcaggag

SEQ ID NO: 553173 - DNA, 100 bp, Homo sapiens
gttcagcttctctaaactccaagatggaccacacatccccgacctacatgcttgctaacttaacccacttgcattctgaacaacttctgcagggcttgaa

SEQ ID NO: 553174 - DNA, 88 bp, Homo sapiens
ttcccatcggatatttattgcaagaatgctggcacatacgccacagcagaagtttctggcccccaaagacaaaccaagtggagacaca

SEQ ID NO: 553175 - DNA, 51 bp, Homo sapiens
ctcggagctaatccacaatctccgcatggacgtgactctggacccagacac

SEQ ID NO: 553176 - DNA, 82 bp, Homo sapiens
agaagaagacgaagaagcagaagcgtctgctcaggttgcagcaggagagaggagcggtggtgccccccccgggcacggggcc

SEQ ID NO: 553177 - DNA, 90 bp, Homo sapiens
cagcttttcagaactgcagggaaacagccatcatgaggcctccccatggccacccatggaccagtcggcattcacttcctcccttctgcg

SEQ ID NO: 553178 - DNA, 106 bp, Homo sapiens
cagaacctgagcagcctgtcttcagacagagagaggcccacggctgtttcttgaaatctgggtcggcgtcctcagctggccgagcatggtggcagcctgcaccctt

SEQ ID NO: 553179 - DNA, 75 bp, Homo sapiens
tcttactcgggagctggctgaagatggctactctggagttgaggtgacaggccgctgcggctctgtgctggtacg

SEQ ID NO: 553180 - DNA, 100 bp, Homo sapiens
aaaagggccaaccagatgaggagctcaagcccaagaagaaagtcttcgagaagttgcaggaacgtcaaggtcgtgggaaataaaaggcagttctacacag

SEQ ID NO: 553181 - DNA, 82 bp, Homo sapiens
ttggccagtaccatcgacagagcataagtacctctggcttcccctctcttcaactaggggatatgagactttctactcggaa

SEQ ID NO: 553182 - DNA, 95 bp, Homo sapiens
cgacagcttaacaattgaacccttgaatcagaaaggcaagagcccacctgaatgaccttgaaaatattattccatttcttggaattggcctcctg

SEQ ID NO: 553183 - DNA, 50 bp, Homo sapiens
tcctatgaccctggaattactgcagggctccagtggtccagaatctttta

SEQ ID NO: 553184 - DNA, 83 bp, Homo sapiens
cggcggtggcggcttggacgactcggagagccggggcagggtggacaggaagcagctcagcccagcctgggagaggccaaggg

SEQ ID NO: 553185 - DNA, 106 bp, Homo sapiens
tgtggggccgtgtctcagtccacccaaggtctcctcggatcgcctggagaggcactcggacctgcactattcctgatcagagaactccagttgcttcaacacacag

SEQ ID NO: 553186 - DNA, 83 bp, Homo sapiens
ctcagaagccatgcccctcaggctggaacttgccctgtctcctcgcagatgaggatgtacagttacccagcacgtgtacctcc

SEQ ID NO: 553187 - DNA, 75 bp, Homo sapiens
gctgttccaatcgctcctgtttgtcttctgctttggcccaggattggtccaaaggaagattttttccattgtttg

SEQ ID NO: 553188 - DNA, 74 bp, Homo sapiens
tgtcacacagcagtcaagtatgtcccaaacgtctaacacagatatgtagaactcttcttgaattctacagcagg

SEQ ID NO: 553189 - DNA, 89 bp, Homo sapiens
ggactaaattaccagaatgcagggcgtggaggtcctgaataaccatggtggctgctgtttgtcatcagacaatagaattgtctttacaa

SEQ ID NO: 553190 - DNA, 98 bp, Homo sapiens
aagaggaggtttttctatgatcaagcttttgctatttatggaggtcctggacccaagccagaagcctctgcaaagcttccttccagacctgcagataa

SEQ ID NO: 553191 - DNA, 83 bp, Homo sapiens
cgagtgcctgcaggatgtgagggaggactacagagacatcattgacactccaatggattttgctaccgttagagaaactttag

SEQ ID NO: 553192 - DNA, 104 bp, Homo sapiens
tatttgtggctgccacctacaagctcatggatcatgtggggactgagccatccattaaggaggagcgggctgcagatgacagcaaagaggttgagagcttccag

SEQ ID NO: 553193 - DNA, 98 bp, Homo sapiens
cagattttgaagctaaagttaagcaggtgcagcggaactgctgcctgacgctctgcaacttcagcatccccgaggagctggaattccagtaccgccgg

SEQ ID NO: 553194 - DNA, 100 bp, Homo sapiens
ccccgccggttcctcaccctcggggagcaacatggtgaacagagtatctgtcaggcaagagctgctgtgatggtttatgatgatgccaataagaagtggg

SEQ ID NO: 553195 - DNA, 110 bp, Homo sapiens
gcgacgctgctcaaaacctcgctccggaaaggggacacctggatattgtacctgtggatgcatcttatgaagtaaaagaactatatgtgccagaaaataaacttcatttg

SEQ ID NO: 553196 - DNA, 124 bp, Homo sapiens
gctatgacaagagaggaaacaaaaagttaaacaagcaagcctgccataagtgagaaggtgtcatggagaaactccagctgggcccagagattctgcagcgggaaaatccaaggcttatttatgc

SEQ ID NO: 553197 - DNA, 106 bp, Homo sapiens
cctcagctttacaaaccctgaatttataactgaccaacaaatggaattttcttgagcatgtttctaatcgttttgccattggaatccatggctcatgggctcttcc

SEQ ID NO: 553198 - DNA, 100 bp, Homo sapiens
ccgggacccgcgccgctgccctccggctccgcgggcggcccacggcgaggtcagttgctctccctggaaggaagagtgttctcggatttcaccttaaagg

SEQ ID NO: 553199 - DNA, 74 bp, Homo sapiens
cagagacttctactggctgcgctcctttctggccggaggttgaagaagaggatgaacttgaatctggagaccaa

SEQ ID NO: 553200 - DNA, 75 bp, Homo sapiens
actgggggattcgcagggaggatgtcgggacaccccggaagctgggaaatggctcccagccaacctctgataaac

SEQ ID NO: 553201 - DNA, 120 bp, Homo sapiens
aaaatggggattacagagtataacaatcagtgccgagcaattgtgatgagatattctgctgagtggaaggaccctgatgctcccataagacagaaaatgccccttgatgatctggataga

SEQ ID NO: 553202 - DNA, 113 bp, Homo sapiens
ctcggcctcgcggcgacggcggcggtggcggcttggacgactcggagagccgggtggcccagttgaaatccttcccttcctctaccttggaagtgcctaccatgcatccaagt

SEQ ID NO: 553203 - DNA, 76 bp, Homo sapiens
tggctggccaagttactggagccgatatgccttcaattaagttgcagagttctgatggagagatatttgaagttga

SEQ ID NO: 553204 - DNA, 83 bp, Homo sapiens
agctgctgagttctcggtgaaggcattttttactgtctacagaaacttattgtaattcatttttcctcactccagtagtaaga

SEQ ID NO: 553205 - DNA, 132 bp, Homo sapiens
ggattccgggacccgcgagcggagcggcgcgtgggtcggttgcggtcggccccggcaggtgaccttggagaaggtgctgggaattacagtgtctggaggcagaggacttgcctgtgacccccgatcaggttt

SEQ ID NO: 553206 - DNA, 75 bp, Homo sapiens
ccggtggactcggcccgcggcggcgcgctcacccgccccgttcagaccatggtgaatccgggcagcagctcgcag

SEQ ID NO: 553207 - DNA, 141 bp, Homo sapiens
cacactgggacgtcagcctcagcccccatggctgcaggcatcattgcgctggccctggaagccaacatgacgacagagatgatggtgtggattattgggccaaaagaggaagaggtcgtggtacttttcaacgtggcagag

SEQ ID NO: 553208 - DNA, 75 bp, Homo sapiens
tgcagaaaaggctgtcttggaacaatttggattccctttaactggaacagagatttgggaatggatgatgaagga

SEQ ID NO: 553209 - DNA, 100 bp, Homo sapiens
gcaaagccggctgttaccctgcacagccgtcaccctcaactttcccttcagttctggagagtcttggcttctgggaggaagtcagagggattatctcagg

SEQ ID NO: 553210 - DNA, 100 bp, Homo sapiens
gtctttccgcttcttgaatttctctctgtaaaggagctcatgatggagcagtccaagaagtcctccctcatggtggcccgcagtattctcaacaacaagc

SEQ ID NO: 553211 - DNA, 83 bp, Homo sapiens
cagcgatgctgaggatcgaggaacgttgtctgctgtggtcgccaggacccccccagagccaagaccttctccagaaggtgacc

SEQ ID NO: 553212 - DNA, 100 bp, Homo sapiens
gcgaagctggccaaagcctgcccagacggctcacctgtgcgggatggaacaaaaggtaactgcatcctgcccagcatgacggccccctgcccgccgccac

SEQ ID NO: 553213 - DNA, 100 bp, Homo sapiens
aattaaaggagaccctggccacccaggaacccacagataaccaagtcagacttcgtaagagaaaggaactgtggctgcaccatctgtcttcatcttcccg

SEQ ID NO: 553214 - DNA, 100 bp, Homo sapiens
ctacctctcttgtttggaagaactgatgaaggcccaaggactcacagttggaagactggagaagactttttaaaaagatctggatttttccttatgactt

SEQ ID NO: 553215 - DNA, 83 bp, Homo sapiens
gtgttgctgatcgcctgggtggttgttggcgtgtccctgcagcgaaggatcctggttggctgttactgaggcggagacacggg

SEQ ID NO: 553216 - DNA, 100 bp, Homo sapiens
cctctctaaaattgctgcctctggtggggaagtggaaggtctcagctgagtctgctctgatcacccaacaagacctagctccccagcagagagcggcccc

SEQ ID NO: 553217 - DNA, 96 bp, Homo sapiens
acaaaagaagagttaaatgccctcaagtcgacaggggatgggaccctaggttgtccttctattcaggccactcttcgttttccatgtactgcatgc

SEQ ID NO: 553218 - DNA, 75 bp, Homo sapiens
agagacacacatccttcgccaggaggagatggacctgaaggtactacagttcaagaacaagaaactggcagagcg

SEQ ID NO: 553219 - DNA, 83 bp, Homo sapiens
cgtccatccatttcgtggttcacccgctgccgggcaccgaggaccagctcaatgacaggaaactgttaaggcagcaataatag

SEQ ID NO: 553220 - DNA, 80 bp, Homo sapiens
cgccaggccaccaccggccgcctcagccatggacgcgtccctggagaagtaagactttgaccccgacgcaggcttcagtg

SEQ ID NO: 553221 - DNA, 88 bp, Homo sapiens
cataaacgcccccaatttcccagctgctaaaggaagaggaagattctgcttctcagaagatgcactattatagatactctaacgccaa

SEQ ID NO: 553222 - DNA, 100 bp, Homo sapiens
gttttgatcgcgcgtttgtgtagacaaatgtttatgggtcagcccagagacgaaaaatgagaccatttgaaggcttccagcgcaaagctattgtaatttg

SEQ ID NO: 553223 - DNA, 100 bp, Homo sapiens
agtcccatcactccaaggagagaagcattccaggatgccttgaagattttctgtaggataaaaggtggtcgagtttcaactgatgacgtgtttgctgttt

SEQ ID NO: 553224 - DNA, 75 bp, Homo sapiens
tgctgaaactcatcattttgccattaattatatccagcatgattacagcttatttgcactaatcttgatgaactc

SEQ ID NO: 553225 - DNA, 103 bp, Homo sapiens
gttcccgctgcgctaggggaagcgggcaggattctaacattttcagagaaccttttggaaagaacaagcctacttcaataaatgaaggagaataaagaaaatt

SEQ ID NO: 553226 - DNA, 90 bp, Homo sapiens
ggactggcagacccgtagctaagacgccaggatttcctggaagcagagaaatggcagtatttggcagtcgtattcagagataaacccctg

SEQ ID NO: 553227 - DNA, 82 bp, Homo sapiens
catcaaatacttcatatttggcttcaatgtcatattttggagttcctgagttggaggtagaagaagaaacccaagttcaaga

SEQ ID NO: 553228 - DNA, 100 bp, Homo sapiens
cggagcggccgggggcggccacggtgatgagccgggcctggcggacgcggcgccatcgcagtcagggcgtgatggtgggcatgggtcagaaggattccta

SEQ ID NO: 553229 - DNA, 75 bp, Homo sapiens
cgcagagacttctactggctgcgctcctttctggccggagtgtcaaagttcgatcagcagctgttacctgtttga

SEQ ID NO: 553230 - DNA, 100 bp, Homo sapiens
gcaattctaggggcttatagctccaataatggaatggctgggtggagaaggagacatactactgaccccattggaagaagaaccaggcatggaaagatgg

SEQ ID NO: 553231 - DNA, 75 bp, Homo sapiens
cgcagccccaacatctcctggctctttcactgccgcattgtctgtggtgatcgtggcagaggtggccctggtggc

SEQ ID NO: 553232 - DNA, 99 bp, Homo sapiens
gacccggaagcggatggcagggactgaaggtcacaccacagcgcattctcagagagagttcaacagcaggccaggtacaggatacgtacctgtggagtt

SEQ ID NO: 553233 - DNA, 83 bp, Homo sapiens
ctgccctctcgctttccctctcgcgtctctggctgcagctgtttttggaaggaagaaagatggaaagcggtgcagttctgctg

SEQ ID NO: 553234 - DNA, 51 bp, Homo sapiens
catctgttctatcttcccatcataaaaaagaccctaataggagtattcata

SEQ ID NO: 553235 - DNA, 133 bp, Homo sapiens
tgtgatgaaattagacctaatcacagtggaagcttttaagcctatactttctaccagaagcttgaagggtttggttaagctatggttgatactaaaggaggttttcccactatccgtatgcatcttctctgtt

SEQ ID NO: 553236 - DNA, 75 bp, Homo sapiens
ggcgcggggaccgctgtgctctcgaaagggtcctcagccacgcctgaccagagcctgatgtgcagcttcctgcag

SEQ ID NO: 553237 - DNA, 82 bp, Homo sapiens
gtttaaggagctgaaagcgcgatgtccagctcgccgctgtccaagaaacgtcgcgtgtccgggcctgatccaaagccgggtt

SEQ ID NO: 553238 - DNA, 50 bp, Homo sapiens
cacatccaaagtccctgcccccaaagaaagcactaccacaggaagagcaa

SEQ ID NO: 553239 - DNA, 100 bp, Homo sapiens
tgttctgggaacagccagggcttcagtggtttatcagatactatcattttggatataatatcaaactatctggtgcttcccaatcgaatcaccgttccac

SEQ ID NO: 553240 - DNA, 75 bp, Homo sapiens
ccttggagctgatgtcaatgccgctgacaagcatggtacttccagtgtggcctccaaatatgaagagctggagtg

SEQ ID NO: 553241 - DNA, 98 bp, Homo sapiens
gcggcagcagctggaggaggatcgcactgctcatcttggccatcactatacacaacgttccagatcatctggaccatataattccagaccacaacttc

SEQ ID NO: 553242 - DNA, 50 bp, Homo sapiens
cttcgtgataatgtaccttgtttaaaggtatgtctctgtgccagactgtc

SEQ ID NO: 553243 - DNA, 80 bp, Homo sapiens
ggcgagcgcgagcggcgcgagaaagtctggcccacgccctgcgactgagggaaggacagagccgctgtgacggccgcgtg

SEQ ID NO: 553244 - DNA, 115 bp, Homo sapiens
caagcggagagactcgccggccgagggtggccctaggggcagcgagcaagacagcaagcagcactctcgagtggaccctgaggagctcttcaccaagctcgaccgcattggcaag

SEQ ID NO: 553245 - DNA, 83 bp, Homo sapiens
ggcctcccgggctccgggaaaactacactggccaggagcaggccgggctctcgccatgggtcactgtcgcctctgccacggga

SEQ ID NO: 553246 - DNA, 101 bp, Homo sapiens
tggatggagcaccttcagaatcagagaagctttactcattttatgatctggagtcaactgtgaaaattaagaagccaatcaagacgaagttcagaatgcca

SEQ ID NO: 553247 - DNA, 73 bp, Homo sapiens
gcgcggaggaagcggagcggcgcgcgcgggacaagcaggatttcagatgcatgccaggtttccactgattgcc

SEQ ID NO: 553248 - DNA, 74 bp, Homo sapiens
ggatgaatcccagtccctgttacgggctaatggaggttggcaggatgctactaccccttcatcagtgacctccc

SEQ ID NO: 553249 - DNA, 87 bp, Homo sapiens
tgtcgagatcccctgtgtggccaagaagctggtgtgcggagatgaagttcccagtgacctgacagcagaggagcgtcaagaactgga

SEQ ID NO: 553250 - DNA, 80 bp, Homo sapiens
ctgttccggcgccggacccctatttgcaaagattgtcactgctgttccaagggcacacgcagagggatttggaattcctg

SEQ ID NO: 553251 - DNA, 51 bp, Homo sapiens
ttcagtttgtagagtaaatgaagaaattgataaagaaggtgtgattgaacc

SEQ ID NO: 553252 - DNA, 98 bp, Homo sapiens
gacactgaaaccaccgtggaagtcgcctggtgtgaactgcaggtgaaaagccatacaagtgtacctgggaaggctgcgactggaggttcgcgcgatcg

SEQ ID NO: 553253 - DNA, 75 bp, Homo sapiens
gaagtctatgccccccataccagctacagcggagcccatcgtggtgaggcttaaggaggtccgactgcagaggga

SEQ ID NO: 553254 - DNA, 74 bp, Homo sapiens
agacttgcaagctgctggatttgatgaggtgattggtctgttggacgtttttacacctgcaaggtctctggagg

SEQ ID NO: 553255 - DNA, 82 bp, Homo sapiens
gagaagttgttaccgaacatctcataaataaggcgatcattatttcgaagttctagtattctggatcaccgtgaaggaagtg

SEQ ID NO: 553256 - DNA, 75 bp, Homo sapiens
tttatattcatctcaaaaacaaaattctgaactcaggacttggcaagtctcaagtattcccatgtgttttaaaag

SEQ ID NO: 553257 - DNA, 75 bp, Homo sapiens
ggaaggaacagtacagagttgtacaggaggaaaaccaggaacaagctgaaagctggatacctaatgtcagtggag

SEQ ID NO: 553258 - DNA, 97 bp, Homo sapiens
ggagcactggcgtctgtttccttcgctgcaagctttcttcctggtggcagatgacatcatggattcatcccttacccgccggggacagatctgctgg

SEQ ID NO: 553259 - DNA, 58 bp, Homo sapiens
ggtggtttggacgccggcggagacgcgggcgagggtaagcttgatgattaccaggaac

SEQ ID NO: 553260 - DNA, 90 bp, Homo sapiens
aatcaaacagttttatattaatgttgagagagagggcatgagccagaaggagagctctaagtctgccatgatgtatattcaggagttgag

SEQ ID NO: 553261 - DNA, 50 bp, Homo sapiens
tgataagactcgctatatggggaagggagatttcctctggaagacatccc

SEQ ID NO: 553262 - DNA, 102 bp, Homo sapiens
ctgaggctgatatgcaatgtcacttacaacattaatcagatactgcatttaagaatccagttcggacctatggttatgcgttccttttttccctcactggat

SEQ ID NO: 553263 - DNA, 101 bp, Homo sapiens
tcccaagtcgtccccctctccgccccccaggaggggcgagagggagccgcagctgatgtcaggctttggacgtggaccggatggttctttacaaaatgaag

SEQ ID NO: 553264 - DNA, 75 bp, Homo sapiens
gtacaacgtgctggagagaccccgcggctgggcgttcatctaccacgctttcgtacaatgcagatcttcgtgaag

SEQ ID NO: 553265 - DNA, 100 bp, Homo sapiens
caccacggctaatttgatggagaaggttcgaggcctacagaacctagcctatcagctggggctggatgagtattaatgatgttttgcagcagttttctac

SEQ ID NO: 553266 - DNA, 75 bp, Homo sapiens
gcgcgagtgaggaaaggaggtactgtaggttccccctaaaggactcaaaacgtctaatccaatggttaaaagctg

SEQ ID NO: 553267 - DNA, 98 bp, Homo sapiens
aaacaagaagactgtccataggtctagacaatggtacaatctcaaattggagcgttattcagtatattaatgtcttattgataatggcagaacatcca

SEQ ID NO: 553268 - DNA, 74 bp, Homo sapiens
ctggtatacagctacatccaggagagaatgctgacagtcctgcaggtataattgaaatcctcaaaggaatgcaa

SEQ ID NO: 553269 - DNA, 74 bp, Homo sapiens
ccatttgtctttagtcttggcaaaggtggagccgccaccaaaatgcagattttcgtgaaaacccttacggggaa

SEQ ID NO: 553270 - DNA, 133 bp, Homo sapiens
cattcattcataggatcaactaacaaccatgtggtgaggaattcaagagctgaaggacaaacactggttcagggaccattgcaatttagagatgtggccatagaattctctctggaggagtggcattgcctgg

SEQ ID NO: 553271 - DNA, 74 bp, Homo sapiens
gttggaccttccggagcttctcagaagacagagggttttcttttgagtacgctggggaggaggaggaggaaggg

SEQ ID NO: 553272 - DNA, 100 bp, Homo sapiens
gcccttgcccctcggccgggcggacggttcctggtagagttacacagttgtgccgccagtatagcgacatgcctcctttgacgttagagggcatccagga

SEQ ID NO: 553273 - DNA, 101 bp, Homo sapiens
gggtctctgcgcatgaaatgctggagtttccgaagagctggagagttgacagcctcactgtccctgcactaggtcagacaatcccctttggggtacaggaa

SEQ ID NO: 553274 - DNA, 75 bp, Homo sapiens
gtgagtgatcactctcaatcccgggatgaaatactggagctgttgtagaagaaaaacttctgattttaatacatt

SEQ ID NO: 553275 - DNA, 80 bp, Homo sapiens
gtctgggtgttgaggggcgactggagccatggcggagtcggcgcctgctcggaattaaatgtgagggagtctgacgtaag

SEQ ID NO: 553276 - DNA, 74 bp, Homo sapiens
cccttcgccttcgttgagttcgaggacccgcgtattctaccttgtaaatactgttatttgtatatactgtaaat

SEQ ID NO: 553277 - DNA, 100 bp, Homo sapiens
aggaggcagacaaaggcgggcgcagcccagcagccgtgcgggcaccgggcgaggcaggcccactcctcccgcgagaaccctctgcccacagtggagattg

SEQ ID NO: 553278 - DNA, 83 bp, Homo sapiens
aagaacatgagaactgcgactcagcatgcagaagtcctcctgcatatgcccaagaggattgggagtggaatggacaccagcag

SEQ ID NO: 553279 - DNA, 95 bp, Homo sapiens
gaatcaagcacgcacacgagaacgacatcacccacttctacatgctcactatagacaaggtgctggagaatctggtaaaagcaccattgtgaagc

SEQ ID NO: 553280 - DNA, 100 bp, Homo sapiens
ctctggatggaccagaatacgaggaggaagaggtggccataccgttgaccgctcctccaactaaccagtttcgacacagccccaactgctggtacctgag

SEQ ID NO: 553281 - DNA, 90 bp, Homo sapiens
cttgagccagggagttgaaggctgcagtgagccctgtttttgccaccacactccagcttggctttggtgtcatccccagcactcctctgg

SEQ ID NO: 553282 - DNA, 98 bp, Homo sapiens
gtccaggaaggaggaggaataatatttatggagcatatattatggaacacacattcagtggccgaaaaagtgaggacaatccgcaaataccggagccg

SEQ ID NO: 553283 - DNA, 76 bp, Homo sapiens
ctcatacagaattacgcatttccacttctaatgaatggctgttgatggtgggtgtggggacactggagactgggaa

SEQ ID NO: 553284 - DNA, 74 bp, Homo sapiens
tggcagagcttgacccaggcactaattgtccgtgtggagcccttggtgaccatgggccaggtgactgccctgct

SEQ ID NO: 553285 - DNA, 75 bp, Homo sapiens
caagaccatgtctacacagacaacaccatcttctgaatgacagaggatcagttgtgttttctaataccaaagagg

SEQ ID NO: 553286 - DNA, 115 bp, Homo sapiens
atcagtgatgtccgggccagcataggtgctgggttcatttaccctttggtcggaacgttttgcagaacactgaaatctatggactctaaaatggacttcatttaaagaaacccac

SEQ ID NO: 553287 - DNA, 99 bp, Homo sapiens
cttccctgtatgtgatgatgaccgtcaccaactggttcaagctttctcctgtttctcagaggatttatcaattatgcaaaagttcggaagatgccagaa

SEQ ID NO: 553288 - DNA, 75 bp, Homo sapiens
cggatggtgtgatgtcacagggcatccactggaagtgccacagcattttaacagcttctctgtggatgatgagtg

SEQ ID NO: 553289 - DNA, 122 bp, Homo sapiens
gagagatcgtgaccgggatagagaaaggagctcagatcgtaataaggatcgcagtcgatcaagttttatgagcaatatgatgatgatgaaattggagctctggataatgcagaattggaagg

SEQ ID NO: 553290 - DNA, 100 bp, Homo sapiens
aagaaaatcgcccagctcaccaagggctgggaagaaacggtggatgccgccatttcccacctgttgaagacttgcctgtcgaagagttctaaggagcagg

SEQ ID NO: 553291 - DNA, 100 bp, Homo sapiens
ggttacaaccgcagcagtggtggctatgaacccagaggtcgtggaggtggccgtggaggcagaggtggcatgggtgccgtattcacctggaccaacctgc

SEQ ID NO: 553292 - DNA, 87 bp, Homo sapiens
cctccctgcttttgaaaacaccaagacagggattccatatcctcggtgtgctggaattgatgttcgtctgtgtgatgttggtgaggc

SEQ ID NO: 553293 - DNA, 100 bp, Homo sapiens
gggagctggctgaagatggctactctggagttgagtctcaacagatcaccccccaacttgcccttcaagttctacttcagtttgataaggctataaatgc

SEQ ID NO: 553294 - DNA, 100 bp, Homo sapiens
gtcgttcggccccgagtggagggcaaacctgtgaacccacccgagagcaacaaagcaggcgactacagccacgtgaagggtcaacatatttcactggcac

SEQ ID NO: 553295 - DNA, 100 bp, Homo sapiens
cccggaggaggaagaagaagtgttatatgtcctaaagtaaggtttcaggacccttgaacatctgtgaagaaatgactattctgcatggaggcttcttgct

SEQ ID NO: 553296 - DNA, 90 bp, Homo sapiens
caggtgcccagaggactttcttccagcttctgctgtccttctttgtggagagcaagatggggacattggttttggacctttacaacagag

SEQ ID NO: 553297 - DNA, 90 bp, Homo sapiens
agatcgggagccctgagcccatggcagctccagcctctgcctcccagaaactcagtgctggccaagaacagcaagccgatccacacgacc

SEQ ID NO: 553298 - DNA, 126 bp, Homo sapiens
caacgttcagtgcctcgaaagaacttccgtacgacctcgaggatgccatggtgttctggatcaacaagtgtgctcatgggagcttagaagatcccaaaagtataacccatcataaattaatccacg

SEQ ID NO: 553299 - DNA, 100 bp, Homo sapiens
cgttaatgtttgcaaatgcagaggaagaatttttctatgaggattatattcaactgctacatccctggtgtcaagtcaatgttggttcctgtcgatttat

SEQ ID NO: 553300 - DNA, 50 bp, Homo sapiens
ccgcagtgaccggactcgggggaggagcccgagcggcagtacatgcacat

SEQ ID NO: 553301 - DNA, 50 bp, Homo sapiens
gccaccgcgccccggcagcaaagagttgtggaaagtaaaaatgtagccct

SEQ ID NO: 553302 - DNA, 75 bp, Homo sapiens
cctcacccccaccagctgtagctgaacgtctggatggtggagaagagcaggctattgagggcacctacattgaca

SEQ ID NO: 553303 - DNA, 74 bp, Homo sapiens
ctgttcgagacttcagtatcctcatcaacttgataaaggagccatattggattgttcttcatgatcgaattgtg

SEQ ID NO: 553304 - DNA, 97 bp, Homo sapiens
cgctcttgctcctctctccttggcctctcctgggatcggcccaaggccagttctccgcagatgtggatgagtgtgtggaggggactgacaactgcca

SEQ ID NO: 553305 - DNA, 75 bp, Homo sapiens
aagaactacctgagctacctgacagccccggattattctgcctttgaagcgatatgaaaggtgaggtctatccat

SEQ ID NO: 553306 - DNA, 100 bp, Homo sapiens
catcctgctgctggcggcggctcagtgttatgctttggacagatgctggtttttcagcagcagacagagaagccagtctggagcttattaaactggacat

SEQ ID NO: 553307 - DNA, 100 bp, Homo sapiens
ctgcagccgccgcctccgacctgggcgctcagcccccggatcagcctgcctctggatgccatggacaatattaccaggcagaaccaattctacgataccc

SEQ ID NO: 553308 - DNA, 75 bp, Homo sapiens
ttctggccgaccctcgccttccttctctgcagcttccccgcaggttggtcaaagaaaaagtgatgtatgaaaaag

SEQ ID NO: 553309 - DNA, 94 bp, Homo sapiens
cgtggggaatttctcctggggctcagagtgctgttttggagtcagcggaagatcaccaaggccagggagtggttccaccgcactgtgaagattg

SEQ ID NO: 553310 - DNA, 75 bp, Homo sapiens
cagcaagcaaatcatttggttttggcaggagaatcctcattgacactggagaaccagcaattccagaatacatca

SEQ ID NO: 553311 - DNA, 105 bp, Homo sapiens
ctgctaataaagttgcagcgaggagaagcgcagcgacggcgtcgggagagcgcgcctagccggctcgcgagctgctttgtaccgcctcagtggagactggaatcc

SEQ ID NO: 553312 - DNA, 83 bp, Homo sapiens
tcgtggcctgcctctgcgtgcgatccctgctgccttggtgatcccgggctgacagccagagagcacagcggctcagctcctgg

SEQ ID NO: 553313 - DNA, 75 bp, Homo sapiens
tgggttctgacggataatttccaagccagtcattgaaattatgagactatcattcaaatggaagcattatagttc

SEQ ID NO: 553314 - DNA, 100 bp, Homo sapiens
gccatgcagccctccagccttctgccgctcgccctctgcctgctggctgcacccgcctccgcgctcgtcagctcgtgtgggcgctcgtccacaaacactc

SEQ ID NO: 553315 - DNA, 78 bp, Homo sapiens
agcctcttctgaaacactgggattacagagtcacgggagacaccgttctgtgttactgctgtggcctgcgcagcttcc

SEQ ID NO: 553316 - DNA, 75 bp, Homo sapiens
accagtgcccatgaaggtcagactgaggaattggcagcaatgaaacagattctcgttaagatgcatagtaaacat

SEQ ID NO: 553317 - DNA, 100 bp, Homo sapiens
tcgtgaacgaagattcgaaaagccacttgaagaaaagggtgaaggaggcgaattttcagttgataggcattaagaagaaatgcactcaccatgagcacca

SEQ ID NO: 553318 - DNA, 96 bp, Homo sapiens
gctcccagtccctgaaagcattaccgggttcgctaggctcacagatgttccatttaagcagacctcttccatagctgtagctggagcggtaattgg

SEQ ID NO: 553319 - DNA, 90 bp, Homo sapiens
ctggctccctcattaccgtcgccagcggagcgaacccgagagcgtggagcgggctgggccagattgttgaacagataaatacgaaactgc

SEQ ID NO: 553320 - DNA, 75 bp, Homo sapiens
cgggaagctgctgaaaaggctaaatgtgaactctcctcatctgtgcaggagtggagtcaacatatcaatggagca

SEQ ID NO: 553321 - DNA, 82 bp, Homo sapiens
cttaaaatcctgctctggccggattccagactcgtgggggaaaggctggaccgcctggcccggtgcaccatgcattgcaacg

SEQ ID NO: 553322 - DNA, 100 bp, Homo sapiens
gtcacccctcagcacatggtgggggccacaccatttgccgtggccaggctagaggtccagaggtgtccttctaaagctggtagaggtttcacgagtcatc

SEQ ID NO: 553323 - DNA, 100 bp, Homo sapiens
gatcgttacgaaattgactccttgataggcaaaggttcctttggacagggtgtgtccgcagccggccaggtggtatccctgaaggtgtggctgattgacg

SEQ ID NO: 553324 - DNA, 51 bp, Homo sapiens
ggacaagatatttatctaacttctgttaccaccaccctgtgaatctgcctg

SEQ ID NO: 553325 - DNA, 128 bp, Homo sapiens
gcggcctcctcctccctggtggggcctgtctgggtgaagcccctctgttcccgaaatggtggagtcaatgaagaaagtagcagggatggatgtggagctgacagttgaagaaagaaacctcctatctg

SEQ ID NO: 553326 - DNA, 96 bp, Homo sapiens
tgggtggtcagaatggatccacgcctgatggctccacgcatttcccttcgtggatctagtgaaaagccatttgatgtatgcggtcagagaagaagt

SEQ ID NO: 553327 - DNA, 75 bp, Homo sapiens
cctcgtgaagaacctgaaggacacactagacttcaagggctaccactggacccttcccctgtcttgaaccctgag

SEQ ID NO: 553328 - DNA, 100 bp, Homo sapiens
gcctaagagaactatggcaacatcaggtgactgtcccagaagtgaatcgcagagccaagattctgggtcagataatcgtataaacacagtcagtctcaag

SEQ ID NO: 553329 - DNA, 100 bp, Homo sapiens
gcagtcatcctacacggagcagagctacgaccggtccttcgaggagtccacgcagcactactatgagggggtgtgaggatgatttggctgagaagaggag

SEQ ID NO: 553330 - DNA, 135 bp, Homo sapiens
agtcgtcatggggcgagaacaagtgactctgaccagcaggcttaccttgttcaaagagaggaggaagacaatctgtctctgctgaccgcactgctggaagaaaatgagtcagccttggattgtaattcagaagaa

SEQ ID NO: 553331 - DNA, 100 bp, Homo sapiens
ctagtcactgtcgcagggacaggagtactccacagaggataaatttcaacctccggggccacaatagcgaggaaatggaagttccagtattaccgaaaat

SEQ ID NO: 553332 - DNA, 82 bp, Homo sapiens
tcacaatgaggctccctgctcagctcctggggctgctaatgctctgggtctctgaggtgcccacgagtgtattcggggagaa

SEQ ID NO: 553333 - DNA, 101 bp, Homo sapiens
accatacattgttactgtgcctgaaatgtcagatatgggtgtgacgtttctccagatacttcatgctgttcacctgtgtcctcgccgcaccactgccgcac

SEQ ID NO: 553334 - DNA, 100 bp, Homo sapiens
atatgattggctctttagctgaaatacttctgaaggtggaagtttagctgatgctataagtgaaaactacagaatcatgagttactttaaagaagcagag

SEQ ID NO: 553335 - DNA, 100 bp, Homo sapiens
cctcaacttcttgtcctcaagtgatcctcccaccttagcctcctaagtagctgggaccacaggatttgctcgaatatttgggtacccagtaggtatcgtt

SEQ ID NO: 553336 - DNA, 96 bp, Homo sapiens
ggcagcaagatggcgtctgctagtagggtcgttcaggttggtcaaagaaaaagtgatgtatgaaaaagaggcaaaacaacaagaagaaaagattga

SEQ ID NO: 553337 - DNA, 100 bp, Homo sapiens
ttggtgtcttcgtttgttatggccgctgctgtcgctatggagacagaacactcgtgaaactgctcaggccatcaagggtatgcatatacgaaaagccacg

SEQ ID NO: 553338 - DNA, 100 bp, Homo sapiens
cagcctcctgagtagccgggactacagtgtctccttgaacttcagaatgaagccatctttatgtggagtacggacctggacagtgtggccacactgtgtt

SEQ ID NO: 553339 - DNA, 101 bp, Homo sapiens
ctctgggtccaccaccttcaccaaggcctccggtgtggctgtctctgatggtgtcatcaaggtgttcaacgacatgaaggtgcgtaagtcttcaacgccag

SEQ ID NO: 553340 - DNA, 82 bp, Homo sapiens
aatgaagtataataccaagaaagccccacttggtacttgatgaagaagcagaagtttttatagtcaaaatgtggagattatt

SEQ ID NO: 553341 - DNA, 75 bp, Homo sapiens
acctggcggacaagagctacatcgaggggtatgccattgcattggccttaagggaaaagcagcgtgtaatattta

SEQ ID NO: 553342 - DNA, 100 bp, Homo sapiens
gctttggaggcagatctggaaacagtgtagcagcattggttttccaaaaaatgtgagactttttcttggacgaattcagattggcagtatggagttactc

SEQ ID NO: 553343 - DNA, 80 bp, Homo sapiens
tgctgccgccggcgaaggaggaggcgttgccggctccatcaagtatgatggtgaaggatgaatatgtgcatgactttgag

SEQ ID NO: 553344 - DNA, 83 bp, Homo sapiens
tggaggagctgtgcagccgcgaggaggcgcgggaggtgttcgagaacgaccccgagacgaagctccaccatgaggcgaggtgg

SEQ ID NO: 553345 - DNA, 75 bp, Homo sapiens
ggaggcagcacggcatcccagcctcagggctgcccggacggtgttggttggggagttcatgatcaagtgttgccc

SEQ ID NO: 553346 - DNA, 90 bp, Homo sapiens
tgcaagaggcgtttctataagaattgggtcgggtgtgctgacagccggctgttaagccctgcctgccccgcgccaaaggaagtgactgct

SEQ ID NO: 553347 - DNA, 75 bp, Homo sapiens
tcgctctttgcatcttaactgcagcagagaccacgcagaggctgcctttggatcaagtccaggaagtgcttcccc

SEQ ID NO: 553348 - DNA, 82 bp, Homo sapiens
gactgagtacctgaaccggcacctgcacacctggatccaggataacggaggctgggtctcggcgcggaagatggccggcggc

SEQ ID NO: 553349 - DNA, 83 bp, Homo sapiens
tctatgccgacatcgacgccgcctggcaggccctgcgcaccaggggttcagtcggctgccgtcaatgtcatctgcgagctggc

SEQ ID NO: 553350 - DNA, 100 bp, Homo sapiens
aagactctcttatcaatcagatgacacaagtcaaactctccgtgtatgatgtcaaagatagatctcagggaacaagccttggctgcccagttgccagtcc

SEQ ID NO: 553351 - DNA, 100 bp, Homo sapiens
ggggaatgcttttttatctcatattagtgcctgtgatggcatctttcatctaacaccgagtaaccagctcataaatcacatcgaacagtttttggatact

SEQ ID NO: 553352 - DNA, 90 bp, Homo sapiens
gcgacgagtcagtatttcgacttcgcgcagggcggcggcccgcagtacaggtccctggtgctgaaccgcctgcgtccagttgccagcggg

SEQ ID NO: 553353 - DNA, 100 bp, Homo sapiens
ggaagctgaaaaagcagctaccattacacccttcaggaagacaatgtcaacggcttctgcatatacagcaggtacggaaaaaggaccagatcaatattga

SEQ ID NO: 553354 - DNA, 100 bp, Homo sapiens
ccagccagcgccacatcagcagtcaaaagcacaagctgaaatgcagtccagatgccaacgtccggcggtacctccagctgacacagtcagaactcagcag

SEQ ID NO: 553355 - DNA, 83 bp, Homo sapiens
ctccaggctccggacacgatgcaggccatcaagtgtgtggtggtgggagatgggaaccggcactgccggctggcgcaggaggg

SEQ ID NO: 553356 - DNA, 118 bp, Homo sapiens
ctttcttggcccttgttcccccaaatgtctgactctgactctcggactgagaaacgcaagggggatatgagactttctactcggaatatcctgagtgttgcgtggatgtaaaacccat

SEQ ID NO: 553357 - DNA, 83 bp, Homo sapiens
cgtgggcaagtcggcgctcaccatccagttcatccagaccatggcaaaagttataaccaccgtactgaagttccctgatgatc

SEQ ID NO: 553358 - DNA, 100 bp, Homo sapiens
ctcagactgctgtgctagcaatcagcgagactccgtgggcgtaggaccctccgagccaggcagccgccacagaggacaccagatcatgccaacaccccca

SEQ ID NO: 553359 - DNA, 100 bp, Homo sapiens
gtccaacttgcctggaccagcttaatggttctgcgcgttccttcacctcgggcagaataactttgcagaagcccacaggttcttcacagagatcttaagg

SEQ ID NO: 553360 - DNA, 100 bp, Homo sapiens
acctccaaacccagttgatgggacattcatcctgccagctaagggatgaggaactgtccaaggagagtcaagaaacaaattggttttctgctccttctgc

SEQ ID NO: 553361 - DNA, 90 bp, Homo sapiens
tgcctgttatgaacttggctgtcttctattagacaaaccagaggtacttgctaaagaagctcctccagcttcaggctctaactgaagggg

SEQ ID NO: 553362 - DNA, 101 bp, Homo sapiens
agaaaacgagccagtgatttacaatagagcaagacagcccacctgaggatattgaccataaggactcatatctcattacaagaagcatcatggccgagcca

SEQ ID NO: 553363 - DNA, 75 bp, Homo sapiens
ccgagatcccaggcactgagtgactgcatactgcctctttttcgtggaagttcagatgttgatcaactaggaaaa

SEQ ID NO: 553364 - DNA, 100 bp, Homo sapiens
gcatcatctgctctgcggaggcctctacaagccgcgccgtaggacattgtgttggaggacacccagccgttctctcagcccatggttggctcccccaacg

SEQ ID NO: 553365 - DNA, 75 bp, Homo sapiens
ggaaaatgtccttccagcgctgcgcccggacagacaaggtcacagtcaaagtgcctcagaagaactcataagaat

SEQ ID NO: 553366 - DNA, 75 bp, Homo sapiens
cccggcccggcagcgacatggaagggaactctaatgatccaggacaaagaagttaccctggagtatgtatcaagc

SEQ ID NO: 553367 - DNA, 48 bp, Homo sapiens
ggcgcggcggccccgggaccaaggagggtttgaaattcctgatataga

SEQ ID NO: 553368 - DNA, 75 bp, Homo sapiens
ggcaggagtagctgatcaaaccaaggatggagcttactcacatagcatattggtatatcaaaatgaaatgcaagg

SEQ ID NO: 553369 - DNA, 100 bp, Homo sapiens
gtccggaccggagactttggggcctaactagaataatcatgggccagactgggaagaaatctgagaagggaccagtttgttggcggaagcgtgtaaaatc

SEQ ID NO: 553370 - DNA, 100 bp, Homo sapiens
gtcctgatttggtgtggcctggcatctatggtgcacccaatgctgctctttcagtctcacatggcaacgaaaacaacttgtatgtcttcacaaggatcag

SEQ ID NO: 553371 - DNA, 100 bp, Homo sapiens
gaatgaatgaagtgcttcagatttaaatactacgtggtgaacatgggtctgattgacaaactgtgtgcctgcttcctctcggtgcaaggcccagtggatg

SEQ ID NO: 553372 - DNA, 74 bp, Homo sapiens
gtaggactggtccttatggaaggagtgacagatactaagccagcttttcctgaatcccataaatatggatgggg

SEQ ID NO: 553373 - DNA, 100 bp, Homo sapiens
acggcgttgacgtaatttaggacgtggaatcataagcgaaacagcacactgtttgaataaagagcgagtcggctgagtgtgtccctgggtccctgggcac

SEQ ID NO: 553374 - DNA, 75 bp, Homo sapiens
agaattcatgattgaagaaatgcaggtgacgcggctctgtgacctctcagtggaaggggactcagtgacctccgt

SEQ ID NO: 553375 - DNA, 75 bp, Homo sapiens
atcctgtctgcagaggcccctcgcctgattgaggagtcctccgtagacgaggaagctgcagtaaaggaagatgaa

SEQ ID NO: 553376 - DNA, 90 bp, Homo sapiens
tgaagtacaaccagcatatgctacaagctccgacagttagttaatatgtgcatcaacccagatccagagaagcgaccagacgtcacctat

SEQ ID NO: 553377 - DNA, 101 bp, Homo sapiens
tgtcttcagatcttcacagcacagttcctgggaaggtggagccaccagcctctccttgaaactgccagaggcatgcagcattggtgatggaaagccctttg

SEQ ID NO: 553378 - DNA, 100 bp, Homo sapiens
ctttttcccccttgcctggctcctgtggtggcaggctgggcacgaggaccatgctgggccggagcctccgagaatgagacggtttaagcggaagcatctt

SEQ ID NO: 553379 - DNA, 100 bp, Homo sapiens
cttcaggcaggattgggtagtacatgtttgtaactacctggcattgccttttgttgaggttggatggcaagcatgtggtgtttggcaaagtgaaagaagg

SEQ ID NO: 553380 - DNA, 100 bp, Homo sapiens
ccaaaacctagatggcgtggccaatgccctggacaacgtggatgcccgcttgtgtagtaaaacgtgaatttaagaaggcagaacagttaattaaacatgc

SEQ ID NO: 553381 - DNA, 75 bp, Homo sapiens
ttcaggattgagacccggaaggcttcaaaggctgtcgcaaggaggaaggaggataagatcaatgccctcattaaa

SEQ ID NO: 553382 - DNA, 74 bp, Homo sapiens
tctgtcgctcttgtgccctagcaccccgagaaccgtcagtttgagccagatgtactccagccaaccaatctaag

SEQ ID NO: 553383 - DNA, 100 bp, Homo sapiens
ctgggcagagcttgaaataagtggagcggcggcatggaggctctcaccactcagctggggccggggcgcgagggcagttcctcgcccaactccaagcagg

SEQ ID NO: 553384 - DNA, 99 bp, Homo sapiens
ggaagagtacacaggtactgacacacaatatgtaggcaagcacacgacggttctgccctttatattaatcgagatgaggacatcgcaccatcagtatcc

SEQ ID NO: 553385 - DNA, 90 bp, Homo sapiens
atttaacatgtctttctgtaaatgacatctcactacagtctctacctgaaaatattggcaatggcttctagaagagtgagtctggaaaat

SEQ ID NO: 553386 - DNA, 103 bp, Homo sapiens
agattggagatcacagcttgcggctgcagaccgcggacaggggacagccccacaaacagagttgatcaagaacttaatggaaaacaagatgaaccgaaaaatg

SEQ ID NO: 553387 - DNA, 98 bp, Homo sapiens
gagctggtggaagtggttggaaatggcacctatggacaagtctataagggatcgcttacacctgagacgaactacagaacagcacgtaccagaggtgg

SEQ ID NO: 553388 - DNA, 100 bp, Homo sapiens
agcgaagaggtggagaaagtggtggagattgtccgctcgagcctgaaggaccctgagaaaggtgagccaccagctgggcagcatcatggacctcttcacc

SEQ ID NO: 553389 - DNA, 75 bp, Homo sapiens
cccgcggtggagcgggacacgaacgtggtggacgcggatctgtcaacatgggtaaaggagaccccaacaagccgc

SEQ ID NO: 553390 - DNA, 90 bp, Homo sapiens
gaagaattagctatcaaatccggccagcttcctttgctccaataagctttgcaatcaaggccaaagaaaatgatctgcttcccctggaaa

SEQ ID NO: 553391 - DNA, 99 bp, Homo sapiens
catggaagtgaagatgcaaatgttccagagtccctgtgaagcaggaagagtgagggcaggttcactgcagctcagcagcatgtctgcagggaattcatc

SEQ ID NO: 553392 - DNA, 100 bp, Homo sapiens
gggacgacccccgtggccatgctgaagcggaggcggccgctgctcgaggtcaccaagaagttctactcaatgggctgctacgagatctccctgggggaca

SEQ ID NO: 553393 - DNA, 48 bp, Homo sapiens
ttttccacaggcatcaaaatggttaaacccatccagagtaatggctgc

SEQ ID NO: 553394 - DNA, 50 bp, Homo sapiens
gctgcgcctcaacgcgccgttgtgcttcctgggtctgcaggtccagccgg

SEQ ID NO: 553395 - DNA, 75 bp, Homo sapiens
gaaccgcccaacatggcctcggagggagaaaactaaagttgccaaagttagccaaggagtagaagatgggcccga

SEQ ID NO: 553396 - DNA, 88 bp, Homo sapiens
tgcgttgacacgtcttatttaatccacatcatagtttcagaagaggagccccgccgaggcatgagggccgtgctccccccagaggaag

SEQ ID NO: 553397 - DNA, 98 bp, Homo sapiens
atgcacttgttgcagaaacagccaagagccaagattttcttcttcactcctcgcttggtggctcccagccagaggccggcagtggtgggaggctcgct

SEQ ID NO: 553398 - DNA, 50 bp, Homo sapiens
agacttaccgtgttatcccagaagccttaattttaaagaccccgaagcag

SEQ ID NO: 553399 - DNA, 124 bp, Homo sapiens
tggagatgtccgagcccaaggcaattgatcccaagttgtcgacgaccgacagggtggtgaaagatactcatttcaaagaacttccaactcttctccactgtgcagcaaaatttggcttaaagaa

SEQ ID NO: 553400 - DNA, 51 bp, Homo sapiens
gggcagcagcatgactgatggtggatcagctcagctactatttaataaaac

SEQ ID NO: 553401 - DNA, 82 bp, Homo sapiens
tcgcccggctttgcagcggggacttcggcggcggcgcctcaggcacctcggcccgggtgtcgtgaaaactacccctaaaagc

SEQ ID NO: 553402 - DNA, 90 bp, Homo sapiens
gccactaaccattttggaactgctagcagtactggaaacttggtagtgaaaggtgatggtcttttaagccgtcctatttttactcaggag

SEQ ID NO: 553403 - DNA, 74 bp, Homo sapiens
ctcgggagaagcagcgcctgttcccggggcagatccaggttcaggtgacttaagagattaaaattaatttggtt

SEQ ID NO: 553404 - DNA, 83 bp, Homo sapiens
agggcctccgtctggatttccaaggaagaatttcctctgaagcaccgcatcccagccatcactcttccacctgctccttagag

SEQ ID NO: 553405 - DNA, 80 bp, Homo sapiens
cgaggacatggacctgtacagcatcaactacctgcactttggggagcctaagtcctgtgcctccggagccagcgtggtgg

SEQ ID NO: 553406 - DNA, 100 bp, Homo sapiens
gcaagctgggcttcctggccgttactgtgcagtatatgcaggatcgaggtgctgtgcttcccatcagagtccacacaattgttatatctgttcagcatga

SEQ ID NO: 553407 - DNA, 80 bp, Homo sapiens
gccgaatgcgatcaaacctaatccgcgagacttgctaatatttcagacaacttttaagaggtgcagaatcaccaacacgc

SEQ ID NO: 553408 - DNA, 75 bp, Homo sapiens
tcgcatgcctggggttacacctaaacagtttgaaaacgaaatcatcctgaagctggaccacgaggtagaaggggg

SEQ ID NO: 553409 - DNA, 96 bp, Homo sapiens
cagaaatctttactgattccaatagctctggagctcagcagtggcaaagatgagatctccttgttggtggaacaggagttcctaagcctcaccaaa

SEQ ID NO: 553410 - DNA, 113 bp, Homo sapiens
agcagcagctcctgcctattctcctaacatgtatcctggagcgaatcctaccttccaaacagggagagacaaaggcagcgctgccctcgggggagtattggccctggcggaac

SEQ ID NO: 553411 - DNA, 75 bp, Homo sapiens
caaatccatcaagctcatcaaaagacctggaatggccaaatatcaaggtgaagttcaaagtttgaaactggatga

SEQ ID NO: 553412 - DNA, 83 bp, Homo sapiens
cggcgacagtggcggcggcgccatggcagggcttgcaggccccagcccacgcagcaggaggacacactgccgaagggaccagt

SEQ ID NO: 553413 - DNA, 100 bp, Homo sapiens
ttgtgtcatccgccccccgctcaatggcgactccctcaccgagtacgaagcgggcgtttgcgaagggagacccacctgcagctgtgcactgggtttcact

SEQ ID NO: 553414 - DNA, 111 bp, Homo sapiens
atgagcttgtggaagacacaaaagatggcatctggctggttcaggtttttcgttggaatatacgttgcacatttatggcgattctgagtgtgagggcagacttctgccagg

SEQ ID NO: 553415 - DNA, 100 bp, Homo sapiens
cagtgcttacaccgcccagcccactcaaggatatgcacagaccacccaggcccctacaaaggcttcagagtagatatctctgccaacatgaggacagaag

SEQ ID NO: 553416 - DNA, 76 bp, Homo sapiens
gttcagttggcaaaccagatatatgacttggttcgagaacttgtcttggacaattgcaaatcaaatgatggaaaaa

SEQ ID NO: 553417 - DNA, 83 bp, Homo sapiens
ccgccatggccgagccggcttcgtgagtgtgtccgcttgaaaccaactgacatacagcccgacatcttcagctatctcttaca

SEQ ID NO: 553418 - DNA, 101 bp, Homo sapiens
atgttggagccgtctgcaaagtgtccccggcaagaagcgtccagcctgcatgccgtgcggactgcacccaccagcaaggtgatcaagacccgctaccgcat

SEQ ID NO: 553419 - DNA, 73 bp, Homo sapiens
gatgatgaagatattgatgactatacgccatccgagaagctgccaccaacaacctcatgaaactagttcagaa

SEQ ID NO: 553420 - DNA, 120 bp, Homo sapiens
agaagttatttgccgaggatctgatgacgattactctttttgcagagctctgaagggaggctgaggtttccagcgttcctgaccatctgaccagttgcgtccggcctgatgtccgtgttt

SEQ ID NO: 553421 - DNA, 75 bp, Homo sapiens
aaactcttcagtttaaagctcaaggatgactcactggttgtgtggaaggaagtcgatttgacccggctgtctgag

SEQ ID NO: 553422 - DNA, 82 bp, Homo sapiens
ctttcacggacaacctcagaggacaacgaagtgttcgaacaccttccaccatgaccacctcagcaagttcccacttaaataa

SEQ ID NO: 553423 - DNA, 75 bp, Homo sapiens
agttctttgatatttggtgatctcttgaaaaaagttaaggaattgaatgatctggcacgggaccctccagcacag

SEQ ID NO: 553424 - DNA, 83 bp, Homo sapiens
ctcgcacttgctcaacaagggcctgccgcttgcatcaagatggtgctcatgtggaccagtggtgacgccttcaagacggccta

SEQ ID NO: 553425 - DNA, 50 bp, Homo sapiens
gtgaatgatcccgctacagatgaaacagaatctcgctctgtcacccaggc

SEQ ID NO: 553426 - DNA, 50 bp, Homo sapiens
agtaaagctaagatggaatcttcttcagggccatgatccaaaggaaccag

SEQ ID NO: 553427 - DNA, 83 bp, Homo sapiens
cgctgcggcctttcggcagccgaacggccgcggcaggaattgtggtgcttggaataaacagagcttatggcaaaaattcactc

SEQ ID NO: 553428 - DNA, 83 bp, Homo sapiens
cgacgcaaaccaaggatctggggatcttcgcactatcccaagatgtgtatatctcatgattgatatggagaaactagtcatgg

SEQ ID NO: 553429 - DNA, 80 bp, Homo sapiens
ggaggaattctcggctggagagcagaagaccgaaagtcaccttcaggccattcagaggaggaaagagaggggaatatgaa

SEQ ID NO: 553430 - DNA, 76 bp, Homo sapiens
tccaagatcaaggtcaacaatcaccttttccacaggttggatggcaagcatgtggtgtttggcaaagtgaaagaag

SEQ ID NO: 553431 - DNA, 100 bp, Homo sapiens
gaaacaagagttttccgcttattaggatcagacagctatgaaacccacgtagtcgaacaccgtgatgcttctcctgcagggcgtgtgatgaggaggcgag

SEQ ID NO: 553432 - DNA, 100 bp, Homo sapiens
caggagcagtggtgctgtcagcgcggccgtcggagacatgggagacccggggtcggaggaatttagataatgggctgtgtgcaatgtaaggataaagaag

SEQ ID NO: 553433 - DNA, 100 bp, Homo sapiens
tctgacatggctaagcaggctcaggtgcccctggcagcagtcatcaaaccgctggcaaggctgcccccagaggaggttcaggcccctcctgttgttgctg

SEQ ID NO: 553434 - DNA, 98 bp, Homo sapiens
caagggaaagagtcctgcatggtttcaagggacgtaccaggaggatggtgcccaggtctggccgtgggcctgggcttcggggcactggcagaggtcgc

SEQ ID NO: 553435 - DNA, 100 bp, Homo sapiens
cgcatcttcaacccctgacagcactcgctctgctcgcagtggacgaagtagagtcctagaggcactgaggatagaatttttgcggcatttgaagagcttt

SEQ ID NO: 553436 - DNA, 75 bp, Homo sapiens
ggcatttaacaaggcggtgtggtttactccatgcagttgtcaggaggctcccttctcaaagcagagccctgaaga

SEQ ID NO: 553437 - DNA, 75 bp, Homo sapiens
cctggagggcaaagcgtggtgcgagcaggggtcgggccccggctcagtggtcccaggcagctcgggtgtcggaac

SEQ ID NO: 553438 - DNA, 98 bp, Homo sapiens
gggacatgtttgccacccctcagtatcggggagtaagagcagctggagagagatgcatatgtccaggcactagcaagatttaccttactcacagtgag

SEQ ID NO: 553439 - DNA, 100 bp, Homo sapiens
gaccctcctgccaaaaggaaatgcatctttatgtcagaaacacaaagcagcccaaccaaaggattcttttactcaagaatgcatggaggagaaatctttc

SEQ ID NO: 553440 - DNA, 145 bp, Homo sapiens
tttgcagtacacgagataaacatcaaacacctacaaggagttggagatcttcgaggaagagtagccaggctaacatttccaatgatcactggccatctttggttcaagaggctacaactgaggccttgaagctttgcttttgtcc

SEQ ID NO: 553441 - DNA, 89 bp, Homo sapiens
tttcaggcatcctcatataattaaactttctttattggtgaaaacatgaatccagatggcatggttgctctattggactaccgtgagga

SEQ ID NO: 553442 - DNA, 99 bp, Homo sapiens
tggactggagaccattggatgatgcattagattcctctagtattctctatgctagaaaggtttaccgacaagactgtgaaactttcgggatggtggtga

SEQ ID NO: 553443 - DNA, 100 bp, Homo sapiens
agaagaggacttccaccatctcatgcccaggtactgaacgacacctgggtctccttcccttcctggtctgaggactccacgttcgtcagctccaagaaga

SEQ ID NO: 553444 - DNA, 75 bp, Homo sapiens
gccctacacagatatttgagcatgtgttcctgccctcaaggacgttttgttctgaagactctcatattcagctct

SEQ ID NO: 553445 - DNA, 100 bp, Homo sapiens
ccaccgtttggcatcccgactgtaagcaatctacgaagaccgaggaaaagctgcgggtgtcatggagaaactccagctgggcccagagattctgcagcgg

SEQ ID NO: 553446 - DNA, 50 bp, Homo sapiens
caagacgctgggcaagctgtggcgacttctgaacgagagcgagaagcggc

SEQ ID NO: 553447 - DNA, 80 bp, Homo sapiens
cagaccttcagcttcctctcgggcatgaccggaaaggccaagggcagcccaatggatccaatggtgatgaagagacctca

SEQ ID NO: 553448 - DNA, 90 bp, Homo sapiens
cacctccgtggtctggggcttcgcgctcttcttcttcttccagggactcagcacctggcagatgtatgtccctgggaagctgcatgatgt

SEQ ID NO: 553449 - DNA, 82 bp, Homo sapiens
gagacaccaaagaagagaaagacaaggatgaccaggaatgggaaagccccagataagaatgtgccttttgatgaaagaactt

SEQ ID NO: 553450 - DNA, 74 bp, Homo sapiens
tttgctacaaatggaggaggaggaggacgacgacgatggggatatcggtcatcgtattgaggaagttcctgaac

SEQ ID NO: 553451 - DNA, 50 bp, Homo sapiens
ttacaagccaaattgtgtttgctttggaagtgttttatctgacttacacc

SEQ ID NO: 553452 - DNA, 101 bp, Homo sapiens
gcaccgctactcggagggcgagcggacctccctggagaaggttgggataattcttcactattccacccttgccacagtactatgggtaggagtgacagctc

SEQ ID NO: 553453 - DNA, 73 bp, Homo sapiens
tgcctgctccacaagcggcgccgcgccctcggcctgcacggggttcaggataagtttgaggtgctgaattaca

SEQ ID NO: 553454 - DNA, 100 bp, Homo sapiens
ccgccccctaaagaaactggaggcccaaggttcgagactataagaggcttacccccatttctgtgctggaccatgcactagaatctttagataaccttcg

SEQ ID NO: 553455 - DNA, 103 bp, Homo sapiens
aacgaaaacgtagggaccacatcaaagacagctttcacagtttgcgggactcagtcccatcactccaaggagagaaggttcgagaacttgtcttggacaattg

SEQ ID NO: 553456 - DNA, 100 bp, Homo sapiens
gcatctaactaacacggtttttattgacagagctctgatagttgttccttgtgcagaaggtatgaaatgcctcaatatgggagtcgccgtcgattgttac

SEQ ID NO: 553457 - DNA, 100 bp, Homo sapiens
tctccttttccctctccctttccctaagcctggagcattggtaagcgtcacactgccaaagtgagagctgctggagaactcataatcccaggaacgcctc

SEQ ID NO: 553458 - DNA, 95 bp, Homo sapiens
gtattcctggccaggtgccgtggctcacacctgtaatcccagcacattgggaggctgaggctaaagtaaataatgccagcctgattggactgggt

SEQ ID NO: 553459 - DNA, 75 bp, Homo sapiens
ttttgttccaggaatcacaaatgatatgttcacagatgccctgacttatgttcacagacatgagccccaggttaa

SEQ ID NO: 553460 - DNA, 98 bp, Homo sapiens
catcataggtcgtcatgcttatggggatcaaatatttagcttcctgtggtatactgatgagcagaactcttccactacatacctcaattttgcctaag

SEQ ID NO: 553461 - DNA, 98 bp, Homo sapiens
ttcagccacctgccactcctgactgcatggaagccaggtgcaaggagaaaggattttgaggagggctcaggtaccagacagtgatgagcagtttgttc

SEQ ID NO: 553462 - DNA, 83 bp, Homo sapiens
cttcggcagtccacccaccgccgccgcctcccagaagccccatgtgccactcccctgatctgcagcttcggtaggccggtgga

SEQ ID NO: 553463 - DNA, 100 bp, Homo sapiens
atttccatcggtccttacagccgctcgtcagactccagcagccaagatggtgaagcagatcgagagcaaggacaaccctccatatgataagggagccttc

SEQ ID NO: 553464 - DNA, 100 bp, Homo sapiens
tgggaacgaggggtgaagcggcccaggtgaggttgtggaagctgatcgaggaagcctaagcaggctctgtgaagtgggaatagtggtatttgagtcaagg

SEQ ID NO: 553465 - DNA, 75 bp, Homo sapiens
aagaaaagcctctgggagcagaagggaggctccaagacctcatcaacaattaagaaagccaagatgacagatttt

SEQ ID NO: 553466 - DNA, 96 bp, Homo sapiens
gaagaggaagatgcctagcacagaccttctgatgttgggtgaacttctcacctgagggctgtaaagactcgtttgaaaatggagagccaagaacca

SEQ ID NO: 553467 - DNA, 100 bp, Homo sapiens
agaagctccagatggcgtcttccgtgggcaacgtggccgacagcacaggttaaacccatccagagtaatggctgcggccttacccaggaccctgggggag

SEQ ID NO: 553468 - DNA, 75 bp, Homo sapiens
ggcttcgcaggtctcacctcgacggtgatttgcaggtggggctgtccagccggacccgggtgcgggaactccagg

SEQ ID NO: 553469 - DNA, 89 bp, Homo sapiens
gcaccgcgcccatggcagagccagaccctttcctgctctgggaccctaccaaggtgcccccacgactgcaggctgtgactgatgaccac

SEQ ID NO: 553470 - DNA, 115 bp, Homo sapiens
tcaacgagctgctggaggacgagggccagctgacggagatggtgcagaagatggaggaggtactccaaagattcaggtttactcacgtcatccagcagagaatggaaagtcaaat

SEQ ID NO: 553471 - DNA, 75 bp, Homo sapiens
ctgtgggatggacatgcagccgtttggcatggttactataacaacagtaccaaggtggctgtgaaaaccctgaag

SEQ ID NO: 553472 - DNA, 75 bp, Homo sapiens
tacttcgtgctggtggcgttcgggccgcacccgcgcgtgtggacgaatgtggaacctcgctctgtggctgtgttc

SEQ ID NO: 553473 - DNA, 83 bp, Homo sapiens
cccgtttctggctccgggctgagcttcctggagaagaggaagctctggattaatcgaattacagctgctagccaggaacatgg

SEQ ID NO: 553474 - DNA, 142 bp, Homo sapiens
cccggatgctgcggcgcccgctggccgggctggctgcggccgccctgggccgggccccaccggacggtccccgccgccaccctcatggatcagccacagttcagcggggcgccccgctttctcacccggcccaaggccttcg

SEQ ID NO: 553475 - DNA, 75 bp, Homo sapiens
tgcttgttggaattggtgacaaaatcagaggcatactttatagaaagaactggttgtcttcttgggcggtgttgc

SEQ ID NO: 553476 - DNA, 98 bp, Homo sapiens
gtgttccgaatattgatacgcccggagatgtttccaaaggactggactgttatgcgcttggttgctaacaagtgaagcatatatgcgtttaagcaaac

SEQ ID NO: 553477 - DNA, 75 bp, Homo sapiens
gttgttaatactacctgcttttggatagaatgtaaagggaacactcatagggtggaccaaaggtttcaaggccac

SEQ ID NO: 553478 - DNA, 51 bp, Homo sapiens
cccggttgtcctcaggcgctgtcaggtgtggatgaggtcaccattgtcaac

SEQ ID NO: 553479 - DNA, 100 bp, Homo sapiens
ttggcattgactttttatcaaaaactatgtacttggaggatcgaacaacaagatgaaccttccaatagcaaccaagaaataaactctgatgacagacgac

SEQ ID NO: 553480 - DNA, 98 bp, Homo sapiens
acacactaggagatctcctcaaagaagtttgtccttctgctattgatcctgaaggccggaaggtggtggtcgtacgctgtgaaggcatcaacatttct

SEQ ID NO: 553481 - DNA, 113 bp, Homo sapiens
agcagggtctgcacgaaataaagctcctgggcaaggggacgtctgcagctgaatgttatacatccaggctctaccagggcctttcctttctatggatccatccgcatttgtgg

SEQ ID NO: 553482 - DNA, 100 bp, Homo sapiens
tgcgcctgggggtgcgcgcctgcgacctgcccgcctggtgccggtggtggtgtgcacattgagccccggtatagacagttcccccagctgaccagatccc

SEQ ID NO: 553483 - DNA, 80 bp, Homo sapiens
cagaaccttagcaaagaggagctgatagcggagctgcagcaattctgtggtgttcttggtcacacatttatggagtttct

SEQ ID NO: 553484 - DNA, 132 bp, Homo sapiens
taagcggcacgccacagcagaggaggtggaggaagaagagagggaccggatcccaggccccgtttgcaaggtatgataatcatagagaggccctacttaaaggtgggtttgatggcgaatatcaagatgaca

SEQ ID NO: 553485 - DNA, 109 bp, Homo sapiens
actacatcctcccgcacctgcggggcgaggaccgcgtctgccactgcaactgtggccgctccctgtgctgtcaggaatctacaggacttggctcgtatttacattcgac

SEQ ID NO: 553486 - DNA, 98 bp, Homo sapiens
ttgacttagtggaggaggtgcagctcaacttctaccagttcctcggggtgcagcagatgtccctggtagatttgggaaagaagcttttagaagcggca

SEQ ID NO: 553487 - DNA, 100 bp, Homo sapiens
aaaaacaatcgcttcaatgatgggaaggtggatcccgccgggaggtactttgctgagtattgggaaagggtcgttgtggtgcatagacccagagtataga

SEQ ID NO: 553488 - DNA, 99 bp, Homo sapiens
agtagataggaaagccagcaaaggcaggaaacttcggtccagcatgtctggcttgcacctagtaaagcagggccgagacagaaagaaaatagattctca

SEQ ID NO: 553489 - DNA, 74 bp, Homo sapiens
cctcatctccaggacagtgggaagagtggctggaggaattcagtttcttggggacatgccaatatttggtttct

SEQ ID NO: 553490 - DNA, 100 bp, Homo sapiens
tcagtccgaaggaggaagggaaccaacccactttctcggcgccgcggctcttttctaaaagtgacctaaagggagcatcgttaccgacagcaggcaggtg

SEQ ID NO: 553491 - DNA, 50 bp, Homo sapiens
agaagcagttctacaaggcgagccagaggccacaaccccagggaagcggg

SEQ ID NO: 553492 - DNA, 74 bp, Homo sapiens
cagtcaggtggggccggtgaagcagtgcttcgtggtgactgaaaaaggtgacgatgcctggggagcctgtggac

SEQ ID NO: 553493 - DNA, 82 bp, Homo sapiens
agccaggtgtacagccttgtgcctgacaggaccgtggccgaccggcagctgtggtactgactgtcctcacccacacccctgc

SEQ ID NO: 553494 - DNA, 89 bp, Homo sapiens
acagcagtgcgcaaattcaccaagagagacgtcttcctggagcggtctattatcctcccagtccacaacgctgaaccgtggctggacga

SEQ ID NO: 553495 - DNA, 100 bp, Homo sapiens
gttcgagcgctgttctcgctccggagccgctgcacatttcgatgccatggacaatattaccaggcagaaccaattctacgatacccaagtcatcaaacaa

SEQ ID NO: 553496 - DNA, 51 bp, Homo sapiens
attatgggagcgcatttccccaggaattttcctgcatggagtgctacatcc

SEQ ID NO: 553497 - DNA, 101 bp, Homo sapiens
agaaatttgtgccacagcctgctgaggaggctctgtgggaggatcagggctgggaactctagccctggccctggggatcctgggaggcctggggacagccg

SEQ ID NO: 553498 - DNA, 82 bp, Homo sapiens
ggattccaagtaactcttatttggtccgtaaaagccctgggctcagccagagcagggcagaggatgacgggatgaccagctg

SEQ ID NO: 553499 - DNA, 90 bp, Homo sapiens
agtgggaagcatgtcgtctttatcgctcagatcataggtatattgaactgttcctgaattcatgtccaaaaggaaaataagactctaggg

SEQ ID NO: 553500 - DNA, 84 bp, Homo sapiens
caaggctcttccctgaccattttctactgtccctgcgcgaggctaggcagctggaagagaaagaccgagtgctaaagaagcagg

SEQ ID NO: 553501 - DNA, 82 bp, Homo sapiens
gttcggtaaagtttctgttctctggttatcctgaatacatgtctaacaattttccttgcaacgttagctgttgtttttcact

SEQ ID NO: 553502 - DNA, 117 bp, Homo sapiens
gaagcgggcgagcggtggtttggacgccggcggagacgcgggcgaggtactccaaagattcaggtttactcacgtcatccagcagagaatggaaagtcaaatttcctgaattgctat

SEQ ID NO: 553503 - DNA, 51 bp, Homo sapiens
tgacatcccccgcatcctggtggccgggactgatcctttgaaatactccag

SEQ ID NO: 553504 - DNA, 76 bp, Homo sapiens
aagctaaccatgaaattgataacaatacgcttttggaaatgaaatcagctcaatgtcaattgctgcaagcttagtg

SEQ ID NO: 553505 - DNA, 100 bp, Homo sapiens
ttactgaagcccccagaagatgaggctgagcattacaagctgccactgcagagccccgccatggaagacacgccgttggtgatatcgaagcagaagacgg

SEQ ID NO: 553506 - DNA, 50 bp, Homo sapiens
tgagtgcccgctggccccggaagctacagcctgtgccatatttcgggagg

SEQ ID NO: 553507 - DNA, 101 bp, Homo sapiens
gctcactgccgacttcagggaggatccggacccccgcaaggtcaacctgggagtgggaggagcagcaaatggatttctcatggaagtttgtgttgattcag

SEQ ID NO: 553508 - DNA, 75 bp, Homo sapiens
aagcccttccgcggaccgaaagttttcggctttgtgagaaaccttaccatcaaacacgatggccagcaacgttac

SEQ ID NO: 553509 - DNA, 75 bp, Homo sapiens
tgaccataactctgccaaatatagaagtatgtcgagagtaccaacgtggcaattgcaaccgaggagaaaatgatt

SEQ ID NO: 553510 - DNA, 74 bp, Homo sapiens
ggggaccggatcatcaatgccttctttccagagggggaattgcaacccagtgaagaagttacctggaagtaaag

SEQ ID NO: 553511 - DNA, 74 bp, Homo sapiens
gttaaacaaatcctggaggcagttgctgtgctcctgacctctgataaagctgcagccaatttctcagatcgttc

SEQ ID NO: 553512 - DNA, 90 bp, Homo sapiens
agaaaatcgagcaggagctgacggccgccaagaagcacggcaccaaaaacaagcgcgggcagagcggcttgggtaaatccaccttaatca

SEQ ID NO: 553513 - DNA, 80 bp, Homo sapiens
aaattctggaacacctatatgaatggaacaaaagtgggacttttaaaatgttgccctgtaagaagagaagaactacagtg

SEQ ID NO: 553514 - DNA, 90 bp, Homo sapiens
cagaaggatatcgacgtcgtgatccagaagtccagagctgaggactgcctgtttgcaggcaaacctctactctggagccccttcttgcag

SEQ ID NO: 553515 - DNA, 95 bp, Homo sapiens
atctcaaaaacaaaattctgaactcaggacttggcaagtgcggagcgggccctggtggcgcggccctccctggagagtctgctggcagctggcag

SEQ ID NO: 553516 - DNA, 75 bp, Homo sapiens
gcaccttccaccaaccgccagatcggcaaccgcctccacgtttgataaactttcagaatcacagccccaaaccca

SEQ ID NO: 553517 - DNA, 83 bp, Homo sapiens
ccatctttgtggctgtgcttgccaggcctggctccagcaccatgactcctgtgaggatgcagcactccctggcaggtcagacc

SEQ ID NO: 553518 - DNA, 100 bp, Homo sapiens
gttttttttatcgctgccttgatatacacttttcaaaatgctttggtgggaagaagtagaggactgttgatcgctgtgttctctgtgaccgtgctgcacg

SEQ ID NO: 553519 - DNA, 100 bp, Homo sapiens
cccgcagcggccgggctgtcgcggcccccacctcagggtggtgttgatgatgaggtctccttgactgcgtatgtcacagctgcattgctggagatgggaa

SEQ ID NO: 553520 - DNA, 82 bp, Homo sapiens
gaatcgcaaggctcttccctgaccattttctactgtccctgcgcgaggtgagaagccctaccactgcaactgggacggctgc

SEQ ID NO: 553521 - DNA, 88 bp, Homo sapiens
caacatccgcgagttcctgcgcggctgcggggcttccctgcggctggagggagttttgaaaaataaatggtcaatactctacctcttg

SEQ ID NO: 553522 - DNA, 50 bp, Homo sapiens
caatgttcctgatagttttaatgaagatgcagtctacacagaactccagc

SEQ ID NO: 553523 - DNA, 98 bp, Homo sapiens
aaacctctccaccctcagtgacccggtgcagctagaagtccatatcggtctcttcgagccaggggacatgcagtacgagctgaacaggaacaacgtga

SEQ ID NO: 553524 - DNA, 101 bp, Homo sapiens
cacggggccgctgctcaagttccagatttggtctgctaccgctgccacggccccccctgctgccccggctggggagggtggtccccctgcaccccctccaa

SEQ ID NO: 553525 - DNA, 90 bp, Homo sapiens
atcaatgcggagttcgtgacccagcgctgctgggacatcgccttgggtcccctcaaacagattcccatgaatctcttcatcatgtacatg

SEQ ID NO: 553526 - DNA, 88 bp, Homo sapiens
tgtttggaaagacccaggagaagccgcccaaagaactggcctgcactgcccaaagtcttggaaacttgctggatatgatgtaccggga

SEQ ID NO: 553527 - DNA, 82 bp, Homo sapiens
ggatatgagcctgtttctggggcaaaaacattcaagaatgagagcgagaacacctgtcaagtgatcaacaaatacaagcgca

SEQ ID NO: 553528 - DNA, 100 bp, Homo sapiens
aagacagaaatgtcgcctgctccctccagagtggatggatgtagaactgctttctccaggggttaaaaataagaattttaaatgccaccgaacctatcgg

SEQ ID NO: 553529 - DNA, 75 bp, Homo sapiens
ccaagccctactgggaggcacggagggtggcgaggcagtcaacgaaacggaatattccaatgctctttgtccggg

SEQ ID NO: 553530 - DNA, 78 bp, Homo sapiens
gctgcccctcatggagtgcgtgcagatgactcaggatgtgcagaaggcgatggacgagaggagatttcaagatgcggt

SEQ ID NO: 553531 - DNA, 50 bp, Homo sapiens
ccttgctgatgaacctgactgaggtggtttgtgatgaaaatggttccaag

SEQ ID NO: 553532 - DNA, 75 bp, Homo sapiens
tgatcaggtggaacagattcagaaggagcaggattaccaaaggaacccagtgacttgattgtaaaaatttacaga

SEQ ID NO: 553533 - DNA, 100 bp, Homo sapiens
gcagaggcagaaggagccccagagctcaatgggggaccacagcatgcacttccttccagcagctacacaggttccactttcttcaaatattatctccagg

SEQ ID NO: 553534 - DNA, 114 bp, Homo sapiens
attaaagggggaaacgaagaagctagactcagatcagggtgccttcaccagggatggaagaggcaggctgcagcagagagatgcagagttctttcacacgtcgtgacttaaatg

SEQ ID NO: 553535 - DNA, 108 bp, Homo sapiens
ggacctgactgcattgtgtgatgaaaagaactgggaaggtgacagattgactgggatcccctcgcacatcctcaacagctccccatcagaccggcagattaaccagct

SEQ ID NO: 553536 - DNA, 82 bp, Homo sapiens
tgagagctgggttctattttccctcctcaaactgactttgcagccacggagagggaaacctcaaatgaattctgaaggggag

SEQ ID NO: 553537 - DNA, 76 bp, Homo sapiens
acaaaggtcgcctttgctactaccgcgactggctgctgcggcgcgaggagctgcagaggctggagacagagttggg

SEQ ID NO: 553538 - DNA, 137 bp, Homo sapiens
cccgggtccgagctgtcagcctctccaaagcctgcgcgagaggagccgggacacgcctagcgcgggctccagggcagcagaagaagcctttgtaaatgacattgacgagtcgtccccaggcactgagtgggaacggg

SEQ ID NO: 553539 - DNA, 90 bp, Homo sapiens
gcttaacgacagagatttttggaaagacgccctaagatagacatacttgaaactgaactttgaagattatccaatgagaattttatatga

SEQ ID NO: 553540 - DNA, 100 bp, Homo sapiens
tgctgcccgcgtccgaggctcgcgggcggcgggcccggaacatggtccaagacaattcctgggaaagttcagttcttctcaagtgagggttctgacacat

SEQ ID NO: 553541 - DNA, 99 bp, Homo sapiens
cctgcagcgagaggcccctgacgctcttccacaccgttcagtcaacagagaaacggccacaacacacagtgatcttgttctaagagcaacaaagctggg

SEQ ID NO: 553542 - DNA, 90 bp, Homo sapiens
tgaacctgtgtatctgccaggagacccagctgcagcacgtggaggactaccgccgggaaaactcttcaggtgaagatagttgatgacgag

SEQ ID NO: 553543 - DNA, 100 bp, Homo sapiens
tctggaaccgtggagacaccgagaaaccatgagtgtaaggttaccccagagtatagacaggtgtcatggagaaactccagctgggcccagagattctgca

SEQ ID NO: 553544 - DNA, 100 bp, Homo sapiens
caaaaacgtggttggatgtggaatcaatttttcttacttgaagaatatacaggatctgattatcagtacgtaggcaagaggtggctggatccaaacaaac

SEQ ID NO: 553545 - DNA, 103 bp, Homo sapiens
ctgatctataaatgcggtggcatcgacaaaagaaccattgaaaaatttgagaaggaggctgctgaggctcttcgtcagattgggcagaggacgataagcactg

SEQ ID NO: 553546 - DNA, 100 bp, Homo sapiens
attttgaagtaaaaattgtcagtaagggaagagatggaaattgcaggtgctgcagtgtctgaaatttccgggcctttctcaacagaggatgtagccagca

SEQ ID NO: 553547 - DNA, 100 bp, Homo sapiens
gatcgtggacatttcaacctccagaactgtgatccagtgtgatgaatgcagactctgctaccattttggctgtttggatcctcctttgaaaaagtctcct

SEQ ID NO: 553548 - DNA, 100 bp, Homo sapiens
gcagaaggaatttaaacgtcatactatactgacttctgttgaaaccattcaaagctaaagacatggaccttcagcagtgtaagaagatattgtacagtat

SEQ ID NO: 553549 - DNA, 100 bp, Homo sapiens
cccagggctggaagatgtggcagccggccacggagcgcctgcaggttttgattcccaccatggccatcacccagtttcggttatttaaattttgtacctg

SEQ ID NO: 553550 - DNA, 96 bp, Homo sapiens
gctacatactatggtgcttttatcaaaaagaacccaccaggcatggatgaccaactttggatgagtgatgtgtctgcaggaggagccactgttttt

SEQ ID NO: 553551 - DNA, 100 bp, Homo sapiens
aagagacgcacagtagaaccgatctcagccttgctgatcatctcgtacagcagcagaaaatgaccatgttacaggtgtctgcttttggggcagagttttc

SEQ ID NO: 553552 - DNA, 122 bp, Homo sapiens
tggaagatggcgctggccggatggaaatcctaatgacagtctccaaattcgcctccatctgtaccatgtccacccacaaatgaattatcaggagtgaacccagaggcacgtatgaatgaaag

SEQ ID NO: 553553 - DNA, 87 bp, Homo sapiens
agcctggctactcacagttgaagcctgattgcagactgctgagaaggaagaatttgaacatcaacagaaagagctggagaaagtttg

SEQ ID NO: 553554 - DNA, 90 bp, Homo sapiens
cttgtttcttatatgtgatgccattccagcactggactcatggaggctgagcatttattcagatggagaacatcattgcaacagtaagag

SEQ ID NO: 553555 - DNA, 87 bp, Homo sapiens
agagaaaaataggctgccagcaaacagtcttccgcaggaaggagatgtggtgatctgtgaaaatggttcgctattcacttgacccgg

SEQ ID NO: 553556 - DNA, 126 bp, Homo sapiens
ccgacacctctgagataaaagggcccctttcgactagcctctgctgaaagccctggaagaaagcgggacttttcccctgttccttggagtcagtattttgagtccatggaagatgtagaagtagag

SEQ ID NO: 553557 - DNA, 74 bp, Homo sapiens
tccaccaactccagcaggttcccaccttcacccctggcttctaagcccacaggccaaacgtaccaagaaagtcg

SEQ ID NO: 553558 - DNA, 75 bp, Homo sapiens
cacacacagggcggagagctggttaatgagctcctgacaagctggctacggggagatgagttcctacctgtgttg

SEQ ID NO: 553559 - DNA, 80 bp, Homo sapiens
cgaccttggacttctcagcctccagaatggcgccatgtcagaaccggctggggatgtccgtcagaacccatgcggcagca

SEQ ID NO: 553560 - DNA, 96 bp, Homo sapiens
cttgctgggagtggacttttccagtaaggaaagccctgactataatgtggaatttttccgacagtttatactggttatgaatgctttagataacag

SEQ ID NO: 553561 - DNA, 101 bp, Homo sapiens
ggagatccgctacgagggcatcctctacaccatcgacaccgaaaactccaccgtagcccttgccaaagaggcatttcatccttcatgaagccattcaggat

SEQ ID NO: 553562 - DNA, 115 bp, Homo sapiens
gaagttataacgctacacgaagaactaagaatattattagcacaagagcaccatactttgagggatcaccccttctgtgtcattctctgaggaaaacaagttcttctcaaggagg

SEQ ID NO: 553563 - DNA, 75 bp, Homo sapiens
attgaatcacttgaaaagaggctcgaggatctatcttgggatcccatggctttctttactgggctctggggcccc

SEQ ID NO: 553564 - DNA, 50 bp, Homo sapiens
ggattttgtcagcttgtcgtcaaggtgccgccgccggacgggactttaag

SEQ ID NO: 553565 - DNA, 82 bp, Homo sapiens
ctgccccgtctgtcaggaggtgctcaaaacgcccgtgcggaccacggcctgtcagcacgtgagtgcctgtgaagaaaacggg

SEQ ID NO: 553566 - DNA, 101 bp, Homo sapiens
ggcggattttctgctggccgtctgtaccgcactttaaaaggccatcggtggaagaaaggagccttctgtcacacacacatccctaggttaatacctgtcat

SEQ ID NO: 553567 - DNA, 82 bp, Homo sapiens
gaggagccgccgcgcgcccgcgccctccgcgcgacgccagggaaccttctgaccagcctcatgggctcctcagagcaggagg

SEQ ID NO: 553568 - DNA, 100 bp, Homo sapiens
tcagcctcccgaacagctgggactacagttttcggctttgtgagaaaccttaccatcaaacacgatggccagcaacgttaccaacaagacagatcctcgc

SEQ ID NO: 553569 - DNA, 74 bp, Homo sapiens
gaaatatcagcctccagtggcagcagtgctactatatcggggccacagatgatgcagccaccaaaatcatcaat

SEQ ID NO: 553570 - DNA, 75 bp, Homo sapiens
tcgcttgttctgcaaatccttattccccaaatccaccagctgaagtaaggctgatgttatagttgcaccacctac

SEQ ID NO: 553571 - DNA, 74 bp, Homo sapiens
gactatctgcttaatcagcttaagaacgccagcaatgattctctggctgatgaacttgctcttgtggatgtttt

SEQ ID NO: 553572 - DNA, 140 bp, Homo sapiens
attttccagttggggatggagattttcctcaccagaaactcctcttgcaaggtctgatggattctgtggaggaaaatgcccagataatcagagaagtggaagtggacaaggtctccatgctctccagggagcaggtggag

SEQ ID NO: 553573 - DNA, 82 bp, Homo sapiens
tcggcgcgggcccgggccccgagcgcccgaacaggagccttcacgtaaatgggtccagtcatgcctcccagtaagaagccag

SEQ ID NO: 553574 - DNA, 51 bp, Homo sapiens
gctggccctgaggcaacggctcatcagatactccaagtatcacagctaaat

SEQ ID NO: 553575 - DNA, 100 bp, Homo sapiens
cttcagtgcagacgcagtggtggccctggagcagtatgccagcaagaccttcccctcctccaatgagtcccgccaatgccccaatgcccgttgccagttc

SEQ ID NO: 553576 - DNA, 101 bp, Homo sapiens
catactattgattgggtgcgagaaaaatgtaaagacagagaaaggcatagacgggttagagccacagctgaaacaactacaaacaaaatatgatgaactta

SEQ ID NO: 553577 - DNA, 51 bp, Homo sapiens
accaagtgcatcaccatccccaggttacaagatgttcacctaagattgaga

SEQ ID NO: 553578 - DNA, 75 bp, Homo sapiens
taaaacagatattacctaccatttacaaatttggatttaggtggcgagtagaaaaagaagtaatttcaggaaaag

SEQ ID NO: 553579 - DNA, 115 bp, Homo sapiens
caagctacaaagcctagacctttcagccgctgccgaaatggaaatgagtggcttatactctcctgtcagtgaggatagcacagtgcctcaatttgaagctccttctccatcacac

SEQ ID NO: 553580 - DNA, 100 bp, Homo sapiens
ggaaccaattccggacacataacaagcagcagtgaggacaccaaaggtttcctttggatcctaaaagaagaaaagaatgggttcgcctggttaggcgcaa

SEQ ID NO: 553581 - DNA, 60 bp, Homo sapiens
ggccttagcattgttgcagcaaaggataagtctacttttcttccacgtaacaaccacagg

SEQ ID NO: 553582 - DNA, 82 bp, Homo sapiens
gggagcttccgggagggcggctcgcaggccgccatggcatcagatgaaggcaaactttttgttggagggctgagttttgaca

SEQ ID NO: 553583 - DNA, 75 bp, Homo sapiens
cggccctgtgggcctgggagctgcctctgaggaacacgccgcagaccatcagtgcttactatgcaagggttgccg

SEQ ID NO: 553584 - DNA, 75 bp, Homo sapiens
ggcgcgaagaggctggactcggattcgttgcctgagatctgccgacaccccaggccatcgagccccaggccatcg

SEQ ID NO: 553585 - DNA, 75 bp, Homo sapiens
gaatgacttctcatccaactcttccttactttttccacctatttccctggatattttgatggtcagtactggctc

SEQ ID NO: 553586 - DNA, 75 bp, Homo sapiens
caaagtcttatgtgtggacatcagctctcaaaggtctatggccctgtgttcactctgtattttggcctgaaaccc

SEQ ID NO: 553587 - DNA, 100 bp, Homo sapiens
caggcgtggaggaagaggcattgaggactttccttacctgtttttccagctcacccactgccagcagaggaacagaggcggctgagccaggaacgggatc

SEQ ID NO: 553588 - DNA, 74 bp, Homo sapiens
gtgattctacatctcaagctcatattttgaagtgtttacgggtctgaaggggcgtctcgattacctgagctctc

SEQ ID NO: 553589 - DNA, 100 bp, Homo sapiens
ggctggggttccctcctccgtttctgtatccccacgaggttggatttggtctagggagtcccagaaagaagtagaaaaagagagagaagcctaccgtcgg

SEQ ID NO: 553590 - DNA, 75 bp, Homo sapiens
tatggacaggtctacgccacatcacttaggttcggctttccagtttggcagcagcactacaaatttcaacttcac

SEQ ID NO: 553591 - DNA, 75 bp, Homo sapiens
tgctatgttactgcaatggcatgaaaaggtgtcaactctgcccgctcagttcctccttcctacccaccaccgcag

SEQ ID NO: 553592 - DNA, 100 bp, Homo sapiens
ctacaacccgcgcttctggccgcgggaaggagaggtgtagacggggcactgccttcagagcaggtcctgccagcctcgctggagaggatgccctcgtgtc

SEQ ID NO: 553593 - DNA, 89 bp, Homo sapiens
ggattcacgtggtggcggtggaaatttcggaccaggaccaggaagtaactttagaggaggatctgtacagaccttgaagattgaaaaaa

SEQ ID NO: 553594 - DNA, 100 bp, Homo sapiens
atcctgagacccggacagtggcagtgaaacagccgaatttgccacatacctgaatttctgccgttccttgcgttttgacgacaagcctgactactcgtac

SEQ ID NO: 553595 - DNA, 80 bp, Homo sapiens
acaagccgctggcagccgcggatctcaccgccgctcagggtctgggaagatccgaggtatctcctggagaagccatctat

SEQ ID NO: 553596 - DNA, 95 bp, Homo sapiens
aaggaagtgactcaaactgtgagaacttcagatcagaccccaacaccaacaagattcttgaaaaactgtgaagaagtgggtttgtttaatgagtt

SEQ ID NO: 553597 - DNA, 82 bp, Homo sapiens
gaagttatggcagagttagctaaagaactccctcaagtttcatttgtgaagggacaagaatccttcaagaaacaggaaaaaa

SEQ ID NO: 553598 - DNA, 97 bp, Homo sapiens
gcctgtcgctggagcacaaaagagtctccgcggtggaggtctgcgttgctcttgcttttcctcgctggggtgtacgtgatccgggccaaggtggtgg

SEQ ID NO: 553599 - DNA, 96 bp, Homo sapiens
cttaagtttcagcaacaccagcaaacagtggtgcacaagcttctcatcgtggtggagctgttgctgggggagatccctgaccggctgcagttccgc

SEQ ID NO: 553600 - DNA, 76 bp, Homo sapiens
gagcaagcggagctcccccaagagccggaaagagtcatcctttttgaacttccatgactcagactgcgaacccaag

SEQ ID NO: 553601 - DNA, 74 bp, Homo sapiens
cagtccgccgctcaccccgcggccgcaccttcccgccttctcaggcaccgtctgcgtcctgctgtccttcccct

SEQ ID NO: 553602 - DNA, 98 bp, Homo sapiens
ctgccctcctcctgcttccctggctcatgttgctcacaggtgtcagttgtacccgaggcgttctcagcagcagcaagtacctgtggtggatttccagg

SEQ ID NO: 553603 - DNA, 75 bp, Homo sapiens
cggcagcaagaacagagagagaggtggacagatctgagagatactgaggtgtgcctagattgatcggtataaggc

SEQ ID NO: 553604 - DNA, 51 bp, Homo sapiens
ctgctgaagcccaccgaattagggatctattggatttcccggtcccctggg

SEQ ID NO: 553605 - DNA, 89 bp, Homo sapiens
agaagcagttgcaggacaaacgggagcggaagagaggacccctatggtgtagccgtgggtggaactgtggggcactgcctgtgcacggg

SEQ ID NO: 553606 - DNA, 75 bp, Homo sapiens
gcggaacagccacagcagcctcccaaggagtctgcaagttgtgagaaagatcagtctaaagaaaaggagaagaaa

SEQ ID NO: 553607 - DNA, 100 bp, Homo sapiens
ttcaactcacagatccaggaaaaatcaaacgtattagaggaatggcctctccagggcacaccgtattcagctctgagcggtctttgctagtgaggccaag

SEQ ID NO: 553608 - DNA, 74 bp, Homo sapiens
ttttcctgtatattctctgtactatgtcgattcgacagacaaagaagtatgctgatgtgatcatccctagaggt

SEQ ID NO: 553609 - DNA, 100 bp, Homo sapiens
agagacagcgacggcagccggcacagctccgaccgcgaggacgacttctccgcagtttctcttcagcaacgggtagcagaattggaaaaaattaatgcag

SEQ ID NO: 553610 - DNA, 75 bp, Homo sapiens
caaaatgcaaaaaaggaggccaaagactttttgaagactaggctttggaggttttcaaagcagacggtgcttgga

SEQ ID NO: 553611 - DNA, 75 bp, Homo sapiens
gattctcagggattgatcgcctcttcagggggtgagaacatcaaaagcatcaaccagcagtcaggggcgcacgtg

SEQ ID NO: 553612 - DNA, 90 bp, Homo sapiens
gaagggggaccatcctctgcaggtaattccactgcttcaagggccaagggccccatctcctactaagcctctgcggaggtcccagcggaa

SEQ ID NO: 553613 - DNA, 80 bp, Homo sapiens
ggaagcgagatgtcgaagccgccacccaaaccagtcaaaccagttggtgaggtaacatacgtggagctcttaatggacgc

SEQ ID NO: 553614 - DNA, 100 bp, Homo sapiens
tggatattttaacagtatcggcacttcagactgtttgtctgtgggatataaacgcaggaccaaaagaaggcaaaattgtggatgctaaagccatctttac

SEQ ID NO: 553615 - DNA, 75 bp, Homo sapiens
cagagctctccgggttccccggctcgcggggcccggcgaagggcagttttccaagagataacttcaccaagatgt

SEQ ID NO: 553616 - DNA, 90 bp, Homo sapiens
aggacttccctttggatgtagcaaggaagaaattgttcagttcttctcaggtggtgatcgtggcagaggtggccctggtggcatgcgggg

SEQ ID NO: 553617 - DNA, 100 bp, Homo sapiens
cttttgctacgacctcattttctgctggaactgtatctggcaccaattctgacccagtcatttgtgatccctggctcttgtgatatgctgaagatttcca

SEQ ID NO: 553618 - DNA, 100 bp, Homo sapiens
gcaacttcttatggacagcctcccactggaagcccgaaagatgagatcaatacaggaaaccctgggagagtctgggagtttacttccaaataaattgaat

SEQ ID NO: 553619 - DNA, 100 bp, Homo sapiens
cagtctctgcacctcgcgccccagcagggccgttgctccagggagaactgcaaatatcttcatccacccccacatttaaaaacgcagttggagataaatg

SEQ ID NO: 553620 - DNA, 85 bp, Homo sapiens
gaaccttagggacaacaccgggacacccgcgaggccggaaaatgggtctttggaattttgacagagaatgtaatgaaaaatacgg

SEQ ID NO: 553621 - DNA, 90 bp, Homo sapiens
gcagttaccagctttggctgctcgcgcctccccaactcggatgaaggatttgggggcagagcacttggcaggtcatgaaggggtccaact

SEQ ID NO: 553622 - DNA, 98 bp, Homo sapiens
gccatggcgaggggtgcacggcggccacctgagtggcgcggcggtgtcagtccctctgtcgtgaaatcaagcaacgacgtcgaggagttgcctccatt

SEQ ID NO: 553623 - DNA, 100 bp, Homo sapiens
ctcatttggaagacagtgaatcagcagcattactttgctgtgaatgtgaagaatcagaaatctttactgattccaatgaccctaaagtaaattggttgaa

SEQ ID NO: 553624 - DNA, 74 bp, Homo sapiens
aacttgtactggagagaaatcctacaagtgtggttctgtacagagtaatgagatgtgtgacggctgcaaaccag

SEQ ID NO: 553625 - DNA, 107 bp, Homo sapiens
tacggctgcgcatgagtgggctgtaatcgggtgtctggggtttgtttcgacgccggaccgcgtaagagacgatgatgttgggcacggaaggtggagagggattcgtg

SEQ ID NO: 553626 - DNA, 75 bp, Homo sapiens
acacagtggatgtcgagaacggtgcttctatggcaggatatggcacgagatgtgcgtaccaatgaagtggtggcc

SEQ ID NO: 553627 - DNA, 100 bp, Homo sapiens
gagccagcctgagcgcaacacttctccgagccagcgagccagcgagccgccgacccgccgagcaaaatgagttttatggacgaggagccccctacaatgc

SEQ ID NO: 553628 - DNA, 98 bp, Homo sapiens
atgagacatttgctacagcatcccacattaagtcaacgttgctgagacaaaggaaaacccactcccttggaggagcatgaccttttcctgtaattctt

SEQ ID NO: 553629 - DNA, 75 bp, Homo sapiens
gctacacttttcaccaaggaactggtgctgcagcgagaggtgctggagaatctggtaaaagcaccattgtgaagc

SEQ ID NO: 553630 - DNA, 75 bp, Homo sapiens
ttggttaacttgggagaaagtttcatctgtggatggagtattgctctggattaatcgaattacagctgctagcca

SEQ ID NO: 553631 - DNA, 80 bp, Homo sapiens
ggccaagggcaagtgatttgacagatctttggtttcatggccaccttcctctgcatggcaagcatatggctgtcctataa

SEQ ID NO: 553632 - DNA, 90 bp, Homo sapiens
acgtctgcggaagtgcagctgcctcagttcttagcgcagattctgtttctggcgtctgcatacgcaagtccccaactcgctgaggagagc

SEQ ID NO: 553633 - DNA, 95 bp, Homo sapiens
ctggccacttgcttgggatcctttatcctggtcatcttctatttccaaagtagaagaagtatgtcttcctggaccccctggctggtgctgtaaca

SEQ ID NO: 553634 - DNA, 100 bp, Homo sapiens
ccggagaatgctgttacctgaaccccttacttcgaaggatcataagattcacaggtaatcttcagcaagtactgcaactccagcgacatcatggacctgt

SEQ ID NO: 553635 - DNA, 101 bp, Homo sapiens
ctccatcccactactctcaagatacgccaatgcgctcaaaggcaaaaaggaagtcggaatgggaacgaggtgcccagctcccgtggagaaagcttaaggac

SEQ ID NO: 553636 - DNA, 108 bp, Homo sapiens
cggcgaagccacagaaaccgtccctgctacagagcaggagttgccgcagccccaggctgagacagttttcggctttgtgagaaaccttaccatcaaacacgatggcca

SEQ ID NO: 553637 - DNA, 90 bp, Homo sapiens
gaagcacctgcacatccacactccgctgctcgacaggtcaccatcagaaaagctaagtttgctgtatagtgaggatcaggagatctgatc

SEQ ID NO: 553638 - DNA, 100 bp, Homo sapiens
ggaagctgttggagcagtgtggggaatttcccaccaggatgagtatgattggctgtgattttaggttgccaactttgcaacaatggaagatgaagaagag

SEQ ID NO: 553639 - DNA, 100 bp, Homo sapiens
aacagaatcagctgttccctgcgaaagatgtatcggcaagcagtgtaaacggaggacttggggaaaaaggaccacatagtccatcgaagaagagtccttg

SEQ ID NO: 553640 - DNA, 97 bp, Homo sapiens
cctgctattgctctgagggagtatcgaaagcttctcaataggtttggcatggacaagatctatgaaggccaagtggaggtgactggtgatgaataca

SEQ ID NO: 553641 - DNA, 50 bp, Homo sapiens
ctggaggtggatctgaagaacggtgttatccaagataaattctgtgggat

SEQ ID NO: 553642 - DNA, 76 bp, Homo sapiens
gttggaccttccggagcttctcagaagacagagggttttcttttgagcttccatgaggcaggctgaacctgcagat

SEQ ID NO: 553643 - DNA, 98 bp, Homo sapiens
aacaacaccacaataatccacagccaagtaggataagttctgaacgtcgaaaagaaaagtctcgagatgcagccagatctcggcgaagtaaagaatct

SEQ ID NO: 553644 - DNA, 50 bp, Homo sapiens
tggggaagcaaacaggggctggacaggcctctacaactactacgacgacg

SEQ ID NO: 553645 - DNA, 100 bp, Homo sapiens
gctgctgctgctgcgcgtcccgcccagccgcagcttcccaggactatctgctgccaaactcttgactgaatatggcgttagtgttttggttttagaagct

SEQ ID NO: 553646 - DNA, 116 bp, Homo sapiens
cgccggcctggaggggcgaagaggacgagggggccaaggcttcctccgggggctctctaaatacgtacagattctgcgataatgtgtggacttttgtactgaatgatgttgaattc

SEQ ID NO: 553647 - DNA, 100 bp, Homo sapiens
aagaagcagagactctacctgccctaggcgttcgtgaagagaagcagctgttgctattggaggagcactgctgatggttcttcagaactcaggaatcgtg

SEQ ID NO: 553648 - DNA, 100 bp, Homo sapiens
tacttgagctgggacactcctcaagaagtcattgcagttaagtcagctcagaacagaggctcagcagtggcccggcagcccaaagcagtgtccacaccag

SEQ ID NO: 553649 - DNA, 100 bp, Homo sapiens
taaaatgcaagttggataaaaggaggacctctcgccaagggccccaatgagtggcacacagtctactatcaccgacagatttaggcctattaaaggaagg

SEQ ID NO: 553650 - DNA, 83 bp, Homo sapiens
ggcggatgccctgcagtacctgcagaaggtctctggagacatcttcagcagccacgaccacctgctgtgcctggatggaggag

SEQ ID NO: 553651 - DNA, 51 bp, Homo sapiens
tgactatggaaaagttgccaaattgccatcagagggttctcgcttcagcac

SEQ ID NO: 553652 - DNA, 75 bp, Homo sapiens
gagactggagcccggttaggaagaatggagttggcgactcgctaccaggcccagctgtgagatacagtaagttca

SEQ ID NO: 553653 - DNA, 100 bp, Homo sapiens
cacctctgtctccagctccgttgactttgaccaaagggacaatttggacaagctcaggatgatcattgagagcatgctgacctcctcctccacgctcctg

SEQ ID NO: 553654 - DNA, 101 bp, Homo sapiens
ggagagcccggacatctgctttatatttctctcagaccattcccatcagtgagcattacaggcacctgaatggacagaagaggacctcagccaactgacaa

SEQ ID NO: 553655 - DNA, 101 bp, Homo sapiens
attggggggctcggctgcagacttggccaaatggacgggactattaaggtgcaaatatatacagagcttcataatcagcccaagaccacatagagcaaaca

SEQ ID NO: 553656 - DNA, 75 bp, Homo sapiens
ctgtcaccaacatcatctgaggctgaatttgataagaccacttgctcggccttgttctccccatgtgggccatag

SEQ ID NO: 553657 - DNA, 89 bp, Homo sapiens
attggacatgtcctagacatcacttagaggccataggaaaaggatacagagtagagtttcatgaacctgaaacttggtggaaatttgat

SEQ ID NO: 553658 - DNA, 100 bp, Homo sapiens
cggccatggcggcgactactgccaaccccgcttcagtatcagacacagcacagcagccatctgaagagcaaagcaagtctcttgaaaaaccgaaacaaaa

SEQ ID NO: 553659 - DNA, 100 bp, Homo sapiens
tctcaacaagttgctaagagaatatgataaaaagctgaggccagatattggaaagaatggaggtgttgtccaagttggagaattgttaccttgcaagatt

SEQ ID NO: 553660 - DNA, 90 bp, Homo sapiens
cacagacacgaccagtgaaactaacaaggagtgtgtcatgaacaatgtcacctgtactcggatctatgaaaaagtagaataaaaattcca

SEQ ID NO: 553661 - DNA, 100 bp, Homo sapiens
cacaactggcatgcttacaggagtgaaggtgaatcagttcagacagctgtattccaaagtcatcaatgataagcatgatgatgtcatggccaagtttggc

SEQ ID NO: 553662 - DNA, 100 bp, Homo sapiens
ctggtgatatgctgaaggacaatgccactgaggaggagatggacctgaaggtactacagttcaagaacaagaaactggcagagcggctggaacaacggca

SEQ ID NO: 553663 - DNA, 100 bp, Homo sapiens
gcaaggccgaggtctgcagcgacttcctcaaaggctactgccccctgggtgcaaagattctgaggttgggaccaagaaggaactatctattttaaaccaa

SEQ ID NO: 553664 - DNA, 86 bp, Homo sapiens
gtacctgcggccaattcggtggaacgaggacgcggactgcgaaggcagatgccatggacaatattaccaggcagaaccaattctac

SEQ ID NO: 553665 - DNA, 82 bp, Homo sapiens
ctgaggactgactggggttctgagactccctgtcccggaccgcaggattttttatcaagcagaaatgcatcgaacaacgaga

SEQ ID NO: 553666 - DNA, 106 bp, Homo sapiens
ataagtaatgccatctgttttcctaaaagactgaaatgggggcgaccattcttaggaatgaatctgaagtctgctgcagtaaaacacagaaggctttaaaatgttt

SEQ ID NO: 553667 - DNA, 113 bp, Homo sapiens
tggggatggttcttctaaatgaagcagcaacttcgaaaggcgatgttggaaaaagacggagtgtcatggagaaactccagctgggcccagagattctgcagcgggaaaatcca

SEQ ID NO: 553668 - DNA, 90 bp, Homo sapiens
cacctctgagaagggagacgacgctgctgggtccgctgagcggggcgacccgagctggagaatgctggaggagaccttaaggatggccac

SEQ ID NO: 553669 - DNA, 88 bp, Homo sapiens
ataacaagactgtccttcggacaagttttaggttggacgtgataagtatgagcctgcagctgtttcagaacaaggtgataaaaagggc

SEQ ID NO: 553670 - DNA, 100 bp, Homo sapiens
caggaaggtccagtgaaagagagccattctacaactactgaaaaagctaatattgctttatctgcagcctgttcccagaacattgacgtctatactagaa

SEQ ID NO: 553671 - DNA, 74 bp, Homo sapiens
cgaagatgcagctcaagccgatggagatcaaccccgagggcggctacttccctgagaatgtcaaggccatgacc

SEQ ID NO: 553672 - DNA, 96 bp, Homo sapiens
ctctattagggctaaatccaaatgctgattcagactttagacaaaggttttaaccgtgattggagataccacaaagaagaacgagtatggattacc

SEQ ID NO: 553673 - DNA, 87 bp, Homo sapiens
ctggagcagaaccccaggactgcgcccccgggagcgggcgcccagagataaggagggttcctgcccccaggtgaacattaactttcc

SEQ ID NO: 553674 - DNA, 85 bp, Homo sapiens
gaaatcactgcaccttaaaaacaaaagattgagctgcactgtattcctgtgacaaggagccctgtgcacatcccaactctcgatt

SEQ ID NO: 553675 - DNA, 87 bp, Homo sapiens
cgcagcgtctggtcactcgctctcctctggggactgcagagaagcaggacctcgggccatggggggacttgatctcatcttcatgcc

SEQ ID NO: 553676 - DNA, 83 bp, Homo sapiens
ttttcttagccctctacttttcaagacaccaagtgagaggccaaccaggaactgtggctgcaccatctgtcttcatcttcccg

SEQ ID NO: 553677 - DNA, 100 bp, Homo sapiens
agagggttgccttttcgtgcaactgaaaatgacattgctaatgacctgagggcactcgctttgctcctgtcagtacacactcccaaacagttaaacccag

SEQ ID NO: 553678 - DNA, 100 bp, Homo sapiens
gtgccttttgcctcccaccgtgattctgaggcctccccaaccatgtgcaattgatggatagaatggtgctatctgagctgttataatgttggcctcatgc

SEQ ID NO: 553679 - DNA, 51 bp, Homo sapiens
ctcctgagtagctgggactgcaggtcagaatgaaggaacgatttccgtagt

SEQ ID NO: 553680 - DNA, 97 bp, Homo sapiens
agggagtgcatcaaaggtgtgaacacaggcatgcccaagagaatcgtaaatgcaaaaattgcttgccttgacttcagcctgcaaaaaacaaaaatga

SEQ ID NO: 553681 - DNA, 50 bp, Homo sapiens
agtaccgccccgacctgcgcatgaccccgtacttctggacaagtaccctg

SEQ ID NO: 553682 - DNA, 82 bp, Homo sapiens
cgtggaagagaagattatcattgacaaggaatattattacaccaaggaggagcagtgcgacgttccgctgtcccctggagct

SEQ ID NO: 553683 - DNA, 50 bp, Homo sapiens
aacaacagtgacctgggatcagcaggtcgcaatggaagaagagatcgccg

SEQ ID NO: 553684 - DNA, 108 bp, Homo sapiens
catctctcccttcgcccagttccctgcatcctaagactcgaaggcagcacaggacctggaaaaattacatggagagtcacaccgggacagctcatgtcctatattcag

SEQ ID NO: 553685 - DNA, 100 bp, Homo sapiens
aaggagtctcgttggaaaacggagcttgtgctgcattgcacctgtcctcgcggccaaggtgctcagaggcgtcgaggtgactgtgggccacgagcaggag

SEQ ID NO: 553686 - DNA, 75 bp, Homo sapiens
aggaggaggccatcatcatgaaggacgtgcccgactggaaggtaagaatgattgatgttggctgatattggagtg

SEQ ID NO: 553687 - DNA, 82 bp, Homo sapiens
atttgaagaagagatcacttcaggtggcttttgtggaggaactgtggctgcaccatctgtcttcatcttcccgccatctgat

SEQ ID NO: 553688 - DNA, 82 bp, Homo sapiens
aagagactggagatgaggaggatgggagtcccatcgattcatggaaacagctattctcataaagtggacatcttttctttag

SEQ ID NO: 553689 - DNA, 100 bp, Homo sapiens
gctccctcccagcagagctacctatctatggagaaaatcattcaagtggccaagacctctgctgcacaggtggaagatggatgcctgaagtgtagactgc

SEQ ID NO: 553690 - DNA, 97 bp, Homo sapiens
aaggatgtgccatacaaagaactcttaaagcagctgacttcccagcagcatgcgattcttattgaccttggacctgatcccaaccttgaagaaagtc

SEQ ID NO: 553691 - DNA, 97 bp, Homo sapiens
ccatccctaatgaagtcaacgggtccagcatgacaggatggaagtacaagtgtcagcacctatattggaaccaaccagatggctgtgtgtgccaaag

SEQ ID NO: 553692 - DNA, 100 bp, Homo sapiens
ctagcaaaacaggcagaaatggaagtcaagagggaatcttatgcaagagaaagaagaaacgtgttcagttgatcatcaaatacttaaaggaccttgaaag

SEQ ID NO: 553693 - DNA, 75 bp, Homo sapiens
ggggagtgttgaagactctgcctcctacaaatatgtcatcatcagatttgaaatatttaaagtggatacaaaact

SEQ ID NO: 553694 - DNA, 75 bp, Homo sapiens
agtaggcaatcacctgaaggatctgacttccagaagcagcacagtcagcagcctccattcaagagttgattcatt

SEQ ID NO: 553695 - DNA, 89 bp, Homo sapiens
atggaaaatcgcttggttaaaacctgacacttttaacagatactaaaatgtctgatgatgctggtgacaccttagccactggagacaaa

SEQ ID NO: 553696 - DNA, 88 bp, Homo sapiens
tcctgagatcaaatggcacttcattggccacctacagaaacaaaatgtcaacaaattgatggatgcttgggatggaagaagtttgagt

SEQ ID NO: 553697 - DNA, 90 bp, Homo sapiens
agcaaagctgtatgaccttgccaaggatattatcaactcactggtaacaacagtattcatgctcatcgtatctgtgttggcactgatacc

SEQ ID NO: 553698 - DNA, 100 bp, Homo sapiens
ctgggagccccctccgagttacacctccagagccaaaagtagtgggcaaacgcagaggcgggaacaaactagccctcaagacgggaatagtagccaagaa

SEQ ID NO: 553699 - DNA, 75 bp, Homo sapiens
cttcacagtcgaggagagaaaggtactccaaagattcaggtttactcacgtcatccagcagagaatggaaagtca

SEQ ID NO: 553700 - DNA, 82 bp, Homo sapiens
cctttgccgatccgccgcccgtccacacccgccgccaggtactgccaaaattatgacatgataccaaggaaattagaatgtg

SEQ ID NO: 553701 - DNA, 74 bp, Homo sapiens
ccattaagtgtgggcgtctacagagacacaaggaggatgtgtatgagaacctgcacactaagaacaagagggag

SEQ ID NO: 553702 - DNA, 75 bp, Homo sapiens
gaaaaatcgagcagaaagaatgtctttcagcttctgacaggtccttcaggaagtactccagaagaaggcattgtt

SEQ ID NO: 553703 - DNA, 74 bp, Homo sapiens
aggaggatggactcggggagaaagaacaggccgcgtcccaaaccagttgtcttcctgcaacatggcttgctggc

SEQ ID NO: 553704 - DNA, 90 bp, Homo sapiens
tggggaagctgctaacccgacccggattggcgctgaggtggcccgtggggcaggtggaacaggaggattttgtaatggaagggcatggca

SEQ ID NO: 553705 - DNA, 82 bp, Homo sapiens
ttaaccttagccacaaagtcaaaggatattagaaatggctactccccagtcaattttcatctttgcaatctgcattttaatg

SEQ ID NO: 553706 - DNA, 75 bp, Homo sapiens
gacagagtggagccatggctagagcaggttacgggcaggacttgagtggcttcggacagggcttctcagacccca

SEQ ID NO: 553707 - DNA, 100 bp, Homo sapiens
gaccttcttttttcctttggctttgaagaagagctcaagagtctcctctggtggactccaaggccacgctgggcctcggcggggtggccgtggtcctggg

SEQ ID NO: 553708 - DNA, 98 bp, Homo sapiens
tcacacaaggcaggtgggtgaggaaatccagggtcagcttctggaggttggttggaacaatacggcaagtgctcgaaatgacatccagagaaatctaa

SEQ ID NO: 553709 - DNA, 100 bp, Homo sapiens
tgttgccaatttggataaacatggcacaaatccagcagggaggtccagatgaaaaagaaaagactaccgcactgaaagggacggagtgcatcaagccagt

SEQ ID NO: 553710 - DNA, 98 bp, Homo sapiens
ctctagtgaaaagaacaagaagtcttaccctcaggtcaaagcattcctgcatcgcatccggcagaacgtggccgactcagtggagaagggcctcacgg

SEQ ID NO: 553711 - DNA, 75 bp, Homo sapiens
cccgtactgcacatcgtggtggtcggatttcaccacaagaagggctgccagatcatggaagggaagtggttgctg

SEQ ID NO: 553712 - DNA, 100 bp, Homo sapiens
tcaagcgggtgaaatctggcatattagcgctagccctgcagacagaggtgtgctgacgacctgctacaacagaagaagttatccctatgcacctggccac

SEQ ID NO: 553713 - DNA, 75 bp, Homo sapiens
tccctgccccggcgccgtccgtgcccgcgggacctgacagccgggtcagaggtacatgtcccagagcaagcacac

SEQ ID NO: 553714 - DNA, 100 bp, Homo sapiens
gcatgcccctgcccacagagcagccccccagaacagaaagaggaccaaactcttacccaggatctactggagcagctgttggagcccatgacgcctgtcg

SEQ ID NO: 553715 - DNA, 90 bp, Homo sapiens
cacttatgtggctccagaaatcattgctgaaactggggcaaacctggtggacctgcagaagaagctggaggagctggaacttgacgagca

SEQ ID NO: 553716 - DNA, 101 bp, Homo sapiens
tcgctacggacttaaaatctccgcaccgcaccctccacctcagaacagtgcaaccctgaaactcgtcctgttgagaaaaaaataagatcagctcttcctac

SEQ ID NO: 553717 - DNA, 105 bp, Homo sapiens
ccgggccggttgctaagacttggcgaagcgctgcgctcgcgcccggatccctcaggggaacgcccttttgcttgtgactggcagggctgcgacaagaagttcgcc

SEQ ID NO: 553718 - DNA, 99 bp, Homo sapiens
tgaaaaggaacgagcagtgatggctgaaaaggatgctttagaaaaacacgatcagctcttagacagccaggtttcccttatccatcccctcatcatcac

SEQ ID NO: 553719 - DNA, 75 bp, Homo sapiens
gggacacaggttcccacgctggcgcccggcgaccgggtggggctgcgcggccagcctcccaactacgagatgctc

SEQ ID NO: 553720 - DNA, 82 bp, Homo sapiens
atgaaaaatttaacctgaagttggtcatcaaaccagtgcattccactcttcgttcaacttgttttggagagattaactcgag

SEQ ID NO: 553721 - DNA, 49 bp, Homo sapiens
cgaacatcttctggacctttgtccagaagttttcatgggctgagctgct

SEQ ID NO: 553722 - DNA, 95 bp, Homo sapiens
cagaccttcgcctcgccccgccggttcctcaccctcggggagcaacatggatggcttccttagcggtatccaactggcctaagcccatgccattg

SEQ ID NO: 553723 - DNA, 100 bp, Homo sapiens
cgggcggcacgcacgcggtgcagggtaacatggcggatgcggaaggtatgagagaatcgaaatcccaatccatattgtacctcatgtcactatcgggaaa

SEQ ID NO: 553724 - DNA, 101 bp, Homo sapiens
agaatttcgatctccgccctggggtcattgtcaggagtgtacctcacagccttctaggatctccagagtggacaggaatctcacttggagggaccatggag

SEQ ID NO: 553725 - DNA, 101 bp, Homo sapiens
ctgtcctgaaggaagtcagccacccgttcctcatcaggctgtttaatagcatacaggccctgtcagaaacctcatttgcaggactgaccaagttggagcta

SEQ ID NO: 553726 - DNA, 75 bp, Homo sapiens
tccgtgctgtcctacgaaagcctggtccacgccgtggccggagccgtggttttataggatcacattgacaaaagt

SEQ ID NO: 553727 - DNA, 50 bp, Homo sapiens
aaaataaaccaactggctttggcacttcagtatcagacacagcacagcag

SEQ ID NO: 553728 - DNA, 75 bp, Homo sapiens
gaggactgcctccccacaccaccgaccaggacctggtgaagctctgtcaaccaaacctctgcgccatgagagcca

SEQ ID NO: 553729 - DNA, 100 bp, Homo sapiens
ggactcctctctcaagagaagctgcaagagcaacatctttcctcaccccaaggctggctttgctacagctgaccactccagtcaggagagagagactgag

SEQ ID NO: 553730 - DNA, 87 bp, Homo sapiens
cacctcaatggcaagaattcctctttgactctgactggagaggaagaagaaattgtcgagacgaataacatgaggtcatatagaatc

SEQ ID NO: 553731 - DNA, 75 bp, Homo sapiens
acagagcagcagctacgggcagcagactgacacttcctccatggcccatctatcgccggcatcctctcaagtggt

SEQ ID NO: 553732 - DNA, 100 bp, Homo sapiens
gagagcctgaggagccattttgagcaatggggaacgctcacggactgtgtgggtggttctcttcccaaagtggaagccaaattcatcaattatgtgaaga

SEQ ID NO: 553733 - DNA, 100 bp, Homo sapiens
cccagtcccacttcaaacattcgtctcggaaaccccgcctcttacagtcacgaggccccttcacagatgtagtcactacaaatcttaaattgcgaaatcc

SEQ ID NO: 553734 - DNA, 97 bp, Homo sapiens
tcgcggccgccgcgcttcccggggagagaggcgagcgcggcgcccggaccgcggtaagaatgattgatgttggctgatattggagtgctcattcaca

SEQ ID NO: 553735 - DNA, 83 bp, Homo sapiens
cacagcccaccggggcacagccagagcagcacccagcaaattgtggctactaatttgccccctgaagatcaagatggctctgg

SEQ ID NO: 553736 - DNA, 100 bp, Homo sapiens
ctcctcagtcaacagctacagccaattttgctaactttgcacatttcaacagtcatgcagcactgccagtgaaagatgtagaagataaacctgaacaaca

SEQ ID NO: 553737 - DNA, 74 bp, Homo sapiens
cgggggcctggctaaggaaaccctattacctccaggtcatgatgatgggcagcgcccgagtggcggagctgctg

SEQ ID NO: 553738 - DNA, 100 bp, Homo sapiens
ctggcatcattaacggaccttttaccatgaatagttctactccttctacaggtgtgtatgggtgtcaaattgagaaccaggtagatccccaccacctaca

SEQ ID NO: 553739 - DNA, 75 bp, Homo sapiens
ggtctaaagtctttccaaaaggtcaaggttcacaagccccacaggagacaggatccgaagcaaagttgagctgac

SEQ ID NO: 553740 - DNA, 100 bp, Homo sapiens
ccggatccccgcgcacccggccaggagaccagtatgatgtctgtgccatttgcctggatgaatatgaggatggggacaagctgcgggtactcccctgtgc

SEQ ID NO: 553741 - DNA, 100 bp, Homo sapiens
ggcggagctgacggtggaggttcgcggctctaacggggctttctacaagaaggacagaataacgggctcccagattcacaagccccaccaagaggatcac

SEQ ID NO: 553742 - DNA, 100 bp, Homo sapiens
gtgcctttgaagctgccgatgccagagccaggtgaactggaggagcgatttgccatcgtgctgtggaaaggtgaaatccaggaattttgtccaaatacca

SEQ ID NO: 553743 - DNA, 90 bp, Homo sapiens
tgaagacatcaagggaaaatggggtgaggaagattttgaagacaatcgtcacttatacagccactgaagatcctggtgtcgccatgggcc

SEQ ID NO: 553744 - DNA, 51 bp, Homo sapiens
gtaccaggacagtgcatggcacatgacagcaagaatcacttgacaattggt

SEQ ID NO: 553745 - DNA, 75 bp, Homo sapiens
caaagggcagtcggcggagcttcgccaaggctggcgcagtcggagtaaactacaaattcttgtgagtcctaattc

SEQ ID NO: 553746 - DNA, 82 bp, Homo sapiens
ggtgtccccactgagctcttggaagagagcccaagaagatgaaaggattgttcttgttgacaacaaatgtaagtgtgcccgg

SEQ ID NO: 553747 - DNA, 75 bp, Homo sapiens
ccactggatccttctggaggatattgactatgcccccttagacgtggtagctacagcaagctgggtagcaggcag

SEQ ID NO: 553748 - DNA, 83 bp, Homo sapiens
aggcccggctggcgcacctgggcgtgcaggttttaaaatcaaagatgggaaaatcggagaaaattgcccttccccatggccag

SEQ ID NO: 553749 - DNA, 75 bp, Homo sapiens
ccaggttccaaatcatcaatgaagcaagtaagtacatggagaggttcacagccaccaagaagaagtttgcgtgaa

SEQ ID NO: 553750 - DNA, 82 bp, Homo sapiens
ggagctgagaacagaagtgagacagctgaagcgtgttggggaaggagctgtaaagagagaagctcttcgtgggcggtcttga

SEQ ID NO: 553751 - DNA, 74 bp, Homo sapiens
ggcgacgggacaaatggacctccgtgaaggcgtccgtcctgcgcatcgcagttaatttggagtggcccctggag

SEQ ID NO: 553752 - DNA, 76 bp, Homo sapiens
cctagacctttcagccgctgccgaaatggtttctaagcatgaattgaggaacagaagaagcagagcagatgatcgg

SEQ ID NO: 553753 - DNA, 74 bp, Homo sapiens
ggaagcagcagctcaccgaggacggggactcgattttttatcaagcagaaatgcatcgaacaacgagaatcaag

SEQ ID NO: 553754 - DNA, 75 bp, Homo sapiens
aacgatgtgcgagaactgcgcagacctggtggaggtgttaaatgaaagtatgtcgagagtaccaacgtggcaatt

SEQ ID NO: 553755 - DNA, 90 bp, Homo sapiens
cgggcccgtcaagctgcgcctgacaggttttgattcccaccatggccatcacccagtttcggttatttaaattttgtacctgcctagcaa

SEQ ID NO: 553756 - DNA, 83 bp, Homo sapiens
aggatatcttgggcgggggatgtgagcgctgagcccttggcagagtttatgtggccgaggcagacaagtggaattaggccttg

SEQ ID NO: 553757 - DNA, 71 bp, Homo sapiens
gagaagcaggagccctactcggcagactgcatcaacaagtatgggtctccgtacaccaaaaactcaggctt

SEQ ID NO: 553758 - DNA, 49 bp, Homo sapiens
cagggacccggtgacagcgtgagagctgaactagatgcagagcacgccc

SEQ ID NO: 553759 - DNA, 98 bp, Homo sapiens
cgggagacgagaagcctgaaaagtcgcagcgagctggagccgccggaggtgacttaagagattaaaattaatttggttgctgttggttctgaacaaat

SEQ ID NO: 553760 - DNA, 100 bp, Homo sapiens
gaaacacaagaagaaacgcctggtgcagagccccaattcctacttcatggatgtgaaatgcccaggcttttaaggataccggaaaaacacccgtggagcc

SEQ ID NO: 553761 - DNA, 50 bp, Homo sapiens
gtttccccaaagtcagtattctcctcaggaaaatgtttcaacgtgcgcaa

SEQ ID NO: 553762 - DNA, 83 bp, Homo sapiens
tcccccaaatgtctgactctgactctcggactgagaaacgcaaggcctggtctccaagtcctctcctaagaagcctcgtggac

SEQ ID NO: 553763 - DNA, 100 bp, Homo sapiens
gcccccaatttcccagctgctaaaggaagaggaaggttgggataattcttcactattccacccttgccacagtactatgggtaggagtgacagctcgaaa

SEQ ID NO: 553764 - DNA, 75 bp, Homo sapiens
aacattgccccccagaaggaggagccagagatgggggatcgtgggggtcctccctgcaagcccccagcacctgaa

SEQ ID NO: 553765 - DNA, 96 bp, Homo sapiens
gtcctcggcgccgccctgcgtggagccgccgccggccacccggaggctgaggggatctggcggtggagcgctaggatcagacgcccccgcgatgac

SEQ ID NO: 553766 - DNA, 157 bp, Homo sapiens
gggcggcctggcctctgggggggatgtggagccgggactgcccgtcgaggtgcgcggctccaacggggccttctacaagtatgaagactttggagactcaaccgttagctccggactgctgtccttcagaccaggacccagctccagcccatccttc

SEQ ID NO: 553767 - DNA, 100 bp, Homo sapiens
gaggtgtcactggccccggcctttgccccaatcttgtgtgggcactgaagggggactacaggttcgagagacttttccagatttctcagaataaagtagc

SEQ ID NO: 553768 - DNA, 82 bp, Homo sapiens
cacacattgaatgggccaaggaaaaatcgagcagaaagaatgtctttcagattcatgcccaagcacaaaacaacccatttaa

SEQ ID NO: 553769 - DNA, 75 bp, Homo sapiens
agaaggcaatgagccgacccatcttgtacagcaactggctgtcaaaggacagtcattttgtttactcattcagcc

SEQ ID NO: 553770 - DNA, 91 bp, Homo sapiens
gcgggcggcttcctggcctgggcgctccggtggcggcggaggtgcatctgcagacgcagcaggaggtgaagctgcgcatgacgggcatggc

SEQ ID NO: 553771 - DNA, 83 bp, Homo sapiens
tggagctgcggggccctggcatgaaagagcctggagacacaggccccatccttcccaatggggacacttcagggagcggctct

SEQ ID NO: 553772 - DNA, 75 bp, Homo sapiens
gatggacttgattctgatgagaggttgaagttcatgagttcgcccagcctcagtgacctgggcaagagagagccg

SEQ ID NO: 553773 - DNA, 75 bp, Homo sapiens
ccaatttgctggaaaaaatgacatccagcgacaaggactttagccacaacaagttgttcagaagaagcctgctca

SEQ ID NO: 553774 - DNA, 100 bp, Homo sapiens
ctgagttcctgctggagaaaggctatgagatgccacaccacatgaagcccttgccatattacagctatgaccagcctgtgatcgggtactgccaggccca

SEQ ID NO: 553775 - DNA, 87 bp, Homo sapiens
acattcaggatcaacttgaacgaatatttctggtaattgctctagcagatgcagtggaggaaaaccaaggcaatctgttccagtcat

SEQ ID NO: 553776 - DNA, 98 bp, Homo sapiens
ttaagtctctcatcaaaacaccagagcgactttcattagaaggagagcgacagcccaagtcaccagtataaaagaagcctgtattgttttgaatttga

SEQ ID NO: 553777 - DNA, 113 bp, Homo sapiens
cagagctggagtttgcaatccagccaaatacaactggaaaacagctttttgatcaggaagtggcagtgaagctagaatctcagaaggccaggcatccccagttgctgtacgag

SEQ ID NO: 553778 - DNA, 88 bp, Homo sapiens
gtctccgcgtcccgctcgctgggagagaggtacctctccttttccctctccctttccctaaggtatctcattcagttgctaaacttat

SEQ ID NO: 553779 - DNA, 90 bp, Homo sapiens
atgatgatgagggtccagtgtccaaccagggctacatgccttatttaaacaggttcattttggaaaagatagaaaatgctgctgaagaac

SEQ ID NO: 553780 - DNA, 80 bp, Homo sapiens
gtggacgaaggggccgacctcctagcgtccgtctccaagagagtatgaagagagtgcgtctgtagggcagggaagatggc

SEQ ID NO: 553781 - DNA, 74 bp, Homo sapiens
actccagcaggtcattccgtatcacaatcctgcctcagccggaaatcactgtggaaaatcttcccagttatttc

SEQ ID NO: 553782 - DNA, 83 bp, Homo sapiens
agagcatcgactggaccaagatcgagcccagcgtcaacttcctcaagtcgcccaaagagcttggggcttccttggtcgcaccc

SEQ ID NO: 553783 - DNA, 75 bp, Homo sapiens
cagcgactgcgattgcttacgagcagcacgggttctttgagcaggcggagcaaaagtgaggggcaccacaggcga

SEQ ID NO: 553784 - DNA, 75 bp, Homo sapiens
ttccccgacgcggggcgctgagaagcagagcatggggaagtgattgactgtgtgcaggagctgagccactccgtg

SEQ ID NO: 553785 - DNA, 100 bp, Homo sapiens
tggcctctaacaccatcccgctgccactgccgcagcccaatacctgcaaaggtggtggtcaccaatacaattccacatgaagtccagaagctccagtgcc

SEQ ID NO: 553786 - DNA, 100 bp, Homo sapiens
ccttgtgacatctactggcatggagtttcatttcacgacaatgacatattctccggtcaagtgaacaagtttccagctgtcaataccagcaaatatgcag

SEQ ID NO: 553787 - DNA, 100 bp, Homo sapiens
ctgtgggctggtgtgtggaactgctcctggcggaggagaagaccatctctgccaagtatgcagaggagcgcgaccgggctgaggcggaggcccgagagaa

SEQ ID NO: 553788 - DNA, 100 bp, Homo sapiens
tgaggataacatccctccagaagatggcagaggtggaggagacactgaagcgactgcagagccagaagggagtgcagggaatcatcgtcgtgaacacaga

SEQ ID NO: 553789 - DNA, 50 bp, Homo sapiens
gtgaacatgccaacaaattgattgaggttgccaatttggcctgttccatc

SEQ ID NO: 553790 - DNA, 75 bp, Homo sapiens
tcctttggaaatgtgctcacactggcttttttccagacttcaagctcccattccaacagtaagagcttcttccac

SEQ ID NO: 553791 - DNA, 100 bp, Homo sapiens
aacctggatggagagaccaacctgaagcggcggcaggtggtccgcggcttctcggagcttttcgatcctttggtacagaagacagaccgacagatcgtcc

SEQ ID NO: 553792 - DNA, 95 bp, Homo sapiens
gagcaccaggatctcgggctcggaacgagactgcacgattgaccgactcatcagtcacggggccgacatcctgaagcctgtaatgctcaggcagg

SEQ ID NO: 553793 - DNA, 101 bp, Homo sapiens
cttttcctcgctggggtgtacgctccatgttgttcactggaattcagacaaataccccagctttgttgaggcagctcatgaaccagatggactggctgtct

SEQ ID NO: 553794 - DNA, 75 bp, Homo sapiens
cttatgttgcacttattcatggaattacaatgggtgggctctcaaaggtctatggccctgtgttcactctgtatt

SEQ ID NO: 553795 - DNA, 144 bp, Homo sapiens
gcaggacggcactgccgggaggcggcggtgacaacgacggcggtggtgacgggcaccgggctcgcggatgtttccattcctgaaaaacccaagcttagatttattgaaagggcaccacttgtgccaaaagtaagaagagaacct

SEQ ID NO: 553796 - DNA, 82 bp, Homo sapiens
agcttccagttagtggatatagcacaccatccccagccagctgaactcacgggaatcaaatggcgtaggtacaattttggag

SEQ ID NO: 553797 - DNA, 50 bp, Homo sapiens
gccctgagacggtgtcccgccgaaagatagaagcagatttgggatatcct

SEQ ID NO: 553798 - DNA, 82 bp, Homo sapiens
ttatattcatctcaaaaacaaaattctgaactcaggacttggcaatgagaaagatcagtctaaagaaaaggagaagaaagtg

SEQ ID NO: 553799 - DNA, 74 bp, Homo sapiens
gaaaattggtattgttggattgccaaatgttgggttttgacacaagggcgcatatcttcaaagcacctagtacc

SEQ ID NO: 553800 - DNA, 51 bp, Homo sapiens
ggagtagatttgaagactcaaccagttattcaaggacacggaaaagccaac

SEQ ID NO: 553801 - DNA, 100 bp, Homo sapiens
caggcccggggagggtggttaccgctgaggagctgcagtctctgtcaaggtttcattgctgcagatatcaaagggacagggtcctggacccagttgtacc

SEQ ID NO: 553802 - DNA, 82 bp, Homo sapiens
actgcccagcgtgaccagtggccacctctgcagtgtcttccacaacctgggtcaaaatgtgggtacagctcctgattcccag

SEQ ID NO: 553803 - DNA, 98 bp, Homo sapiens
cggtcctcctgcaggagatgcaggcattgacacagaccttcaacaacaactggtcctatgaaggtgtgccacggaccacaatgtggacaacaccacag

SEQ ID NO: 553804 - DNA, 100 bp, Homo sapiens
ggtccagcatgagcgcggcgcctccggaggccagactttccactccttgctcacagcctccctgccgccccgccgagaacaaaactattgtgagtcgagg

SEQ ID NO: 553805 - DNA, 100 bp, Homo sapiens
caactattcgcggagctggaatgactggcaacccagttacagatgtagagctaaaacgactgaaggatgctttcaagaggacctgtggactctcatatta

SEQ ID NO: 553806 - DNA, 75 bp, Homo sapiens
gttcctatggcctaatgaacaacttccaggtgtcagcagttgagtctttggagggccccctgctccaggtggaag

SEQ ID NO: 553807 - DNA, 96 bp, Homo sapiens
ctccaactctgcagccagaatacctgcaggcagagaatagtgacagtggtacaggaaagaaagaaaaagaaaagaaaaacagaaagggcaaagaca

SEQ ID NO: 553808 - DNA, 100 bp, Homo sapiens
tacccccagtacacttactactatcctcattatctccaaaccaaggtccagcccagaatcaaatgcaggttccatctggatatggattgcatcatcaaaa

SEQ ID NO: 553809 - DNA, 100 bp, Homo sapiens
gtatagatgacataggtcacctcattcatgaaggcctacagaaggcctgaagctgcccagcaggcattccaaggcctgggtcctggtttctccggttaca

SEQ ID NO: 553810 - DNA, 100 bp, Homo sapiens
gaggaggcgcaggagactgaccgcaacggcagggctgaccccgcactacatctacccaccagccatcgtgcagcccagcgtggtgatcccagccgcccct

SEQ ID NO: 553811 - DNA, 75 bp, Homo sapiens
gccagagtttgtagcctattggaggaaaacacaccaaggtgtggacactgccagcggctgcagccgacttggaat

SEQ ID NO: 553812 - DNA, 75 bp, Homo sapiens
tgaatgtcggaatccattatctttcgggaaagctctctggggcaggatgtttggaaactggacatttggcacttt

SEQ ID NO: 553813 - DNA, 82 bp, Homo sapiens
aaacaccgaagggacattctgtcttcatggacatttttgaacttgtggttgttgatcattatgaaaatcctagaaacgtggg

SEQ ID NO: 553814 - DNA, 75 bp, Homo sapiens
cctgtgtcctggttgagggtctccagggttctttggggcccgaggtgtcctgatggcaaatttcaagggccacgc

SEQ ID NO: 553815 - DNA, 75 bp, Homo sapiens
gagctggggcgacgaggcgattgcgggggcctgggctagggtcgacatgttaaaacgggtcagttggcagccatc

SEQ ID NO: 553816 - DNA, 83 bp, Homo sapiens
caaggagctaaagcagcgtgcgttcagccctgggggtatttgaagtataccatacaactgttttgaaaatccagcgtggacaa

SEQ ID NO: 553817 - DNA, 88 bp, Homo sapiens
tctttgggaaagccactcgaaaaggagattccaggtatccattacttggccagccactgcagtacaatcctcctgctgttctgcacgg

SEQ ID NO: 553818 - DNA, 100 bp, Homo sapiens
cgggcgccatttgccagtgatggaccgtgctagtgacctgactgatgccttcgtggaggaagcaagaggctactatgagcagactggagttggacctctg

SEQ ID NO: 553819 - DNA, 80 bp, Homo sapiens
ggaaccactcattcacttctagacgacaaaatgcaaaaaaggaggccaaagactttgttatggaaacaaaggacatgctt

SEQ ID NO: 553820 - DNA, 50 bp, Homo sapiens
cagggacccccatggtgactatgccagatggagttttgctctcgttgccc

SEQ ID NO: 553821 - DNA, 101 bp, Homo sapiens
ctacagtgttctcgacttcgtcgctgctatgttagatactaaagaaggcttccccacaacccatatgcatctgctttgactggtggtttctatcatcctac

SEQ ID NO: 553822 - DNA, 133 bp, Homo sapiens
cttccccacctgcccggtgcccgaggaggcagccaagctcgtagcctgccactccgtgcacaatgcagatcttcgtgaagactctgactggtaagaccatcaccctcgaggttgagcccagtgacaccatcga

SEQ ID NO: 553823 - DNA, 100 bp, Homo sapiens
cttggatcttgcacaggaaggaattaaaggtgctgctggttgaccagcctctggccctaggagaccccgtagcgactgagggtcccagcaggccatgcag

SEQ ID NO: 553824 - DNA, 100 bp, Homo sapiens
tggagacgcggccatcgtggagatggtgccgggaaagcccatgtgtgtggagagcttctcccagtacccgcctctcgtcggcctggagattctacgccac

SEQ ID NO: 553825 - DNA, 82 bp, Homo sapiens
tctggaatttagcgctcgcccagctagccgcagaagagcttctcctcatcaactggggatgattacagttcttcctaaaaaa

SEQ ID NO: 553826 - DNA, 74 bp, Homo sapiens
caaggctgtcacacatcaagttaaatttggtcaacaaaatccacgtcaggtcagtgtgagaagaagattgtttc

SEQ ID NO: 553827 - DNA, 90 bp, Homo sapiens
aacaggtggagctcagtattctggaagtttgaagaaaacaggtctgaaacaaggtcttacccccagctgcttctgaacacagtgactgcc

SEQ ID NO: 553828 - DNA, 74 bp, Homo sapiens
acagattcagtggcctgcattgtgagaaagatcagtctaaagaaaaggagaagaaagtgaaaaaaacaattcct

SEQ ID NO: 553829 - DNA, 111 bp, Homo sapiens
aggttggagctgccgccgcctgcagtcggtgaccgcgcgactcggcgcccgcccgcgagcgtttcccaaagtgtattctgcggaactagcacctactgtgttctcaacacc

SEQ ID NO: 553830 - DNA, 100 bp, Homo sapiens
agggtatgacattgaacttactcatcacgtctctatagtgtcttctgagtgcagagctgaacaaggaggtgtctaccaacactgccatgattcagaccag

SEQ ID NO: 553831 - DNA, 50 bp, Homo sapiens
gacgtttacaaaactacagactgctgaatgccatggtggcaaaactgggg

SEQ ID NO: 553832 - DNA, 87 bp, Homo sapiens
gatgacctgtcagagctgtgtggacgcggtgcgcaaatccctgcaaggggtggcagatgctccgagacaaattccgagagttctccc

SEQ ID NO: 553833 - DNA, 97 bp, Homo sapiens
ccaagatagttgacagtgggcctgcagccaaggaaggaggcctgcaaattcatgacaggattattgaggtgtgggccatgtttgaggattgccccag

SEQ ID NO: 553834 - DNA, 75 bp, Homo sapiens
gcaaaggcacgggcagccggaaggacaccaagatgcggatccgggcctttccgaataagaagatctacttggaca

SEQ ID NO: 553835 - DNA, 98 bp, Homo sapiens
cttcacactgcagaactgggttctggactttgggcgtcccattgccatggaaacattaactggctttaagtggatgggaaacagagccaaacagctaa

SEQ ID NO: 553836 - DNA, 100 bp, Homo sapiens
acttgtgaatctttagagcctgtggtggttgatctgactcacaatgactctgttgtggattcgctaaatattgtaatggatcaaggagatacacctacac

SEQ ID NO: 553837 - DNA, 100 bp, Homo sapiens
tggaactagcgtcaaccttgaaggcatcgtgtggcaggaaacagaagatgatcagaagattttacttctgcttcgagcgtatgagcagaacaagctcagc

SEQ ID NO: 553838 - DNA, 100 bp, Homo sapiens
gtgggaaaggctcggctcatgttctgggacttaggagggcaggaagagctgcagtctttgtgggacaaggctttatcctgtggataaacgcagagtgaac

SEQ ID NO: 553839 - DNA, 86 bp, Homo sapiens
gggaagaagatcaaaacccaccatgccccagaaactaatctggattcactccctctggttgatacccactcaaaaaggacacttct

SEQ ID NO: 553840 - DNA, 75 bp, Homo sapiens
tctgggcgttcatgatcctggccagcctgctcatcgcctactgcagtgctggagaatctggtaaaagcaccattg

SEQ ID NO: 553841 - DNA, 75 bp, Homo sapiens
attgacgccatgtcgggttattcgagtgaccgagaccgcggccgggaccgaggaccgagtgtgtcagcagccagg

SEQ ID NO: 553842 - DNA, 75 bp, Homo sapiens
aaggagctcatcaaggacgggaagtcactcataagcgcgctcaagagcacttcgtcttagtaacatggccatggg

SEQ ID NO: 553843 - DNA, 122 bp, Homo sapiens
ccagcagcaaaaagcctgcatcagagctcccattgaccacgggttggaacagctggagacatggctcaggggagagagaaagcccagaaagaaagctactccagggtcctatggatatttca

SEQ ID NO: 553844 - DNA, 105 bp, Homo sapiens
ggagaacacagttggagaaaatcggcagctgagacggccttggccgatatgtgtcacaaagatgtctacacggaactgccagggaatggactcagtgatcaaacc

SEQ ID NO: 553845 - DNA, 96 bp, Homo sapiens
aagtcggcgctcaccatccagttcatccaggtagattttcgttccgtcacccaggctggagtgcagtggtgtgaccttggcttgctgcaacccttt

SEQ ID NO: 553846 - DNA, 83 bp, Homo sapiens
aatcacctcagcttcgcggagctgcttaagcccttctcccgcctcacttccgaggacaatgcagatcttcgtgaagactctga

SEQ ID NO: 553847 - DNA, 100 bp, Homo sapiens
gggcccagatatggacgcagcagagccgggtgccaggaccattgacaccagaaatggaggcacggcaggctacacggaaaagggagcagaaggcagcccg

SEQ ID NO: 553848 - DNA, 74 bp, Homo sapiens
cttgaagatgctttaatggatagttctgcagatccatggaaagcttcctgggaaacgtatgctagcagagcttc

SEQ ID NO: 553849 - DNA, 48 bp, Homo sapiens
caacctgttttagcacagatatgctaaaagatggcggcaaggcagccc

SEQ ID NO: 553850 - DNA, 100 bp, Homo sapiens
ggcccttatgtgaaagaaatgaatgatgccgccatgttttatacaaaccgagtcctcaaagagtacaaagatgtgttaacctcaccctacagatgaagat

SEQ ID NO: 553851 - DNA, 104 bp, Homo sapiens
gaagagatagatcatgcagagtattacctttacaacaggtggcgaaagcagtgaacaatgccactgcacagtcgctggtccttattgatgaatttggaaaggga

SEQ ID NO: 553852 - DNA, 74 bp, Homo sapiens
aaatttcagagaaggcctgaacttacaagaaggagaattcttattacagataacgaaggaggcccaacttcatt

SEQ ID NO: 553853 - DNA, 101 bp, Homo sapiens
agtaccagccagcgccagctgcagccctggccgcgcactcgcctcagctgagcctggggaactgggaacagccaggtgccccaaagcaaatacgcggagct

SEQ ID NO: 553854 - DNA, 98 bp, Homo sapiens
agctccgtgcgggtggctgtcagctcatgcccagacctacgatttagtatggctctgtgtgatcaggagaagactttcagacaacagagaaaagaaca

SEQ ID NO: 553855 - DNA, 100 bp, Homo sapiens
ttgaagagacccacccgcgacctcggtacctcggaccagctctgtaaaagccccgcctctgccttcggataggaatggaaactgaaagtggaaatcagga

SEQ ID NO: 553856 - DNA, 100 bp, Homo sapiens
gtcattcctgcctttgagcggactcccttttaaggttgctccttgagggcaggacagttcttatggctttatccgttgcgtaagcacagagaggtctgcg

SEQ ID NO: 553857 - DNA, 97 bp, Homo sapiens
gatgaaagttggtggaaatctggattccaaaggctatggtgtggcaacccctaaaggctcagcattaagccttacggacatccaaaaattgcttgga

SEQ ID NO: 553858 - DNA, 80 bp, Homo sapiens
cagcgcccctggtaactgacaaggaggccaggaagaaggttctcaaacaaggaactgtggctgcaccatctgtcttcatc

SEQ ID NO: 553859 - DNA, 90 bp, Homo sapiens
ccagtacaacagccacaaggggtcttcctgtggccctcaaacaaaaaatcactgcattacatcagcaggaccagctttatccagggactc

SEQ ID NO: 553860 - DNA, 100 bp, Homo sapiens
ctttgcggagagctgcaagccggtgcagcagccttcagcttttggcagcatgaaagttagcagttacaagatgttcacctaagattgagacctagtgact

SEQ ID NO: 553861 - DNA, 100 bp, Homo sapiens
agaaggtgtacctgcccatgttaacctctctgcatcatccatgctaatgattgcaatgcagtacacatccaatccagcacatcaggtccacccatctggc

SEQ ID NO: 553862 - DNA, 75 bp, Homo sapiens
aggattttccacaagatttacatccagaggcacgacaatgtgaggagaatccaaatcctcatatggcattccaga

SEQ ID NO: 553863 - DNA, 100 bp, Homo sapiens
cagcagaggatgatgagggcttcagtgcagacgcagtggtggccctggagcagtatgccagcaagctctggcagtttggccgctggatggacgtcgtggt

SEQ ID NO: 553864 - DNA, 98 bp, Homo sapiens
gctttggttttttcgtgtggaagatggtctattctggataagcaggttttgtgaagacatttattctttcttggacctcagatttaccagacatctca

SEQ ID NO: 553865 - DNA, 100 bp, Homo sapiens
catcaggtttttctcccgctccagaaaaagtggtttcagacaccctcacaggttttctaccatgcagcaactgaacatggaggaaaagatgtatatccag

SEQ ID NO: 553866 - DNA, 74 bp, Homo sapiens
cacaaaactagcatcctcctggaggagctcggctatcatgagaagtttttctctcctacaagaagccataatcc

SEQ ID NO: 553867 - DNA, 75 bp, Homo sapiens
caggaggcatatcgggtgctgaaggattttaaactgtctacggttcttaacctcatctgttaagttcccatgcct

SEQ ID NO: 553868 - DNA, 90 bp, Homo sapiens
cgcggacctccagtggccggctccggaggcttggtgactccagtggcccaggtgactgtaggacgaggatttggtgtcacataccaactg

SEQ ID NO: 553869 - DNA, 98 bp, Homo sapiens
cggagagcaaccgccaagcttggtgggagtcaagggctacaaacctcctgatgaaggaccttctgagtaccagactattccacttaataaaatagaag

SEQ ID NO: 553870 - DNA, 100 bp, Homo sapiens
caccgccatcattggacccaatggctctgatgcgagccacccctctggctgctcctgcgggttccctgtccaggaagaagcggttggagttggatgacaa

SEQ ID NO: 553871 - DNA, 100 bp, Homo sapiens
cggcgacggcgtcctcaggagctgtggggtcccctgctagaagtgggggactcggcgggtgccaccatggcaactgcaccatacaactactcttacatct

SEQ ID NO: 553872 - DNA, 96 bp, Homo sapiens
tgcaatcacatgcagtgtgctaaggcctgatgcctttaacctacttcaggaaaatctctaaggatgaaaattccttggccacctagattgtcttga

SEQ ID NO: 553873 - DNA, 100 bp, Homo sapiens
gacgctgagggcagccccgtccaggatttgtcccatcagatgaaaagaagaaacaaggttgtcaacgagaaaatgaaactctaatacaaagaagaaaaga

SEQ ID NO: 553874 - DNA, 98 bp, Homo sapiens
gtcggacccatggtttccagtgcagcgcggagtgggcgatgccagcgtgccagctctctatcaatatcagctcacatcattgaaaagataattttgaa

SEQ ID NO: 553875 - DNA, 51 bp, Homo sapiens
gcctcggcccgacgtgcccatcacagcttttcatgcaacacccaacactta

SEQ ID NO: 553876 - DNA, 100 bp, Homo sapiens
ctgggcgccaagccgcggagcctccagacgggtcaaaatgcagatcttcgtgaaaacccttaccggcaagaccatcacccttgaggtggagcccagtgac

SEQ ID NO: 553877 - DNA, 100 bp, Homo sapiens
ggctggggctccctgtatgcatggtgtggggttggtgtgattagcttcgcagtctggaaagctttaggagttcacagtattgcagaaaagctgaggcagg

SEQ ID NO: 553878 - DNA, 73 bp, Homo sapiens
aaaatatgtccctccggaggcacattgggaaccctgagatgaccactcccgggtcctgctgaaggcggagaac

SEQ ID NO: 553879 - DNA, 75 bp, Homo sapiens
ccgctgtccgccgcccgccgccgctggagctagagtaagactttgaccccgacgcaggcttcagtgattgccgcg

SEQ ID NO: 553880 - DNA, 75 bp, Homo sapiens
ggctactcagtttacagccactgcagtatcacagccagaaattccttgagctcataggcattgctcagggtcaga

SEQ ID NO: 553881 - DNA, 51 bp, Homo sapiens
ccagaagcgggcggcgcgggggagatggtgtggaagatttccttacaaggg

SEQ ID NO: 553882 - DNA, 96 bp, Homo sapiens
aggactgtgttcatgaagctgaggaggggagtaaattgaaaatattggggccatttagtaacttctttgcaagcaccgacgagagtgctggggaat

SEQ ID NO: 553883 - DNA, 75 bp, Homo sapiens
ctgagagggacacgcagtgacgagcggccgaagcagctttgcgacatagggcctgattacattccaacagaggaa

SEQ ID NO: 553884 - DNA, 75 bp, Homo sapiens
taaccctcaataagaaatgcacgcatttgattgttccagagccaaagggggagccagcaccgctctttgaccttg

SEQ ID NO: 553885 - DNA, 100 bp, Homo sapiens
gaaatgcatctttatgtcagaaacacaaagcagcccaaccaaaggcagagtctccttggaggtgacatggatatgggcaacccaggaaccctttcgccca

SEQ ID NO: 553886 - DNA, 82 bp, Homo sapiens
ctgggcgctccggtggcggcggaggcatgttatttgaaagcaattgagacgcaaccgaactttgcagtagcttggagtaatc

SEQ ID NO: 553887 - DNA, 100 bp, Homo sapiens
caaggtggagctggaggccaaggtggatgccctgaatgatgagatcaacttcctcaggaccctcaatgagacggatgcactgcgcaactctggtggcgat

SEQ ID NO: 553888 - DNA, 98 bp, Homo sapiens
aaaatatcccaggagagaatactactttgcaataacaatggaaaggtcatttcaagatctgcaactggaatatggacaaggacaccaaggtggttact

SEQ ID NO: 553889 - DNA, 131 bp, Homo sapiens
ctcaatatgcatcgtattattgccatagacagaattggagtgactctgatggaacccctgactaaaatgacagcccgaagcagtcgtattcctcgaccaagtgtgagtcaaggatgcagccgggaagctag

SEQ ID NO: 553890 - DNA, 51 bp, Homo sapiens
caaagccacattttcagcatttacacccagtgaagttattgccagtggact

SEQ ID NO: 553891 - DNA, 90 bp, Homo sapiens
accagaacaaaaccgagtcaacagggaagcagaggagaaccgggagccattcagaaaagggtctcccttgatctgagaatggctacctct

SEQ ID NO: 553892 - DNA, 74 bp, Homo sapiens
ggtttgatactgacctgtaaatcatcctttagaaaggacccaggagcgataacagtaaatcaaataagatattt

SEQ ID NO: 553893 - DNA, 100 bp, Homo sapiens
cagcaccccctatggaggagggaacatcagctcctggcacaccttacagtgcttagcgaatgccacagacggcgtgcggctagcagcccgcatcgtggac

SEQ ID NO: 553894 - DNA, 100 bp, Homo sapiens
ctgcctttcctcgccgtgttgctcccgcaccgagccggagccagtcttggtgctctgtgttcacctggttcatctgaggagctgcatctaccctgcccat

SEQ ID NO: 553895 - DNA, 100 bp, Homo sapiens
ttgctttcagaatttcacccaggttctgacagctccttcgagaactcatagaacggaagaccagctccttggatcccaacgatcaggtggccatgggaag

SEQ ID NO: 553896 - DNA, 75 bp, Homo sapiens
cacggccttaaagaagcctcctcaccagctctttcaccatgcctggatcacttcctttgaatgcagaagcttgct

SEQ ID NO: 553897 - DNA, 51 bp, Homo sapiens
acaggaagcgaccccgcgatggcaaggatggccaggccatgttatgggatc

SEQ ID NO: 553898 - DNA, 75 bp, Homo sapiens
ctcaaataaggaaattgacacctggcgtgacctccaagaagctggtgaactcggtggctggctgtgctgatgacg

SEQ ID NO: 553899 - DNA, 90 bp, Homo sapiens
agaagcagagttacaggacatgattaatgaagtagatgctgatggtgctggagaatctggtaaaagcaccattgtgaagcagatgaggat

SEQ ID NO: 553900 - DNA, 96 bp, Homo sapiens
aacctccacagtcaagaggacgatcctgagagtgagaagcctgactgaccccgcctagacgccaggcccacttcacgccgtctaagtggagaagtg

SEQ ID NO: 553901 - DNA, 100 bp, Homo sapiens
ggttcacccgctgccgggcaccgaggaccagctcaatgacagaatctgctttcagatgaaagactgtgtcagagtgaagcactttatgccttcttgagcc

SEQ ID NO: 553902 - DNA, 75 bp, Homo sapiens
gagaatatttaatggaaaatcgcttggttaaaacctgacacttttaacagcccagaagaatcagtgcggtttctg

SEQ ID NO: 553903 - DNA, 82 bp, Homo sapiens
ttgcagcctttgtgataactgcgtagcaagtctggaaaagtttgaaattccagtaaaaattcgtttgagtcctgaaccgtgg

SEQ ID NO: 553904 - DNA, 75 bp, Homo sapiens
gaattcagtactctgtaacacccagctaccagtggtctcacgtgtgaaacatggctacagattggctgggaagta

SEQ ID NO: 553905 - DNA, 75 bp, Homo sapiens
ctctctctaatcagccctctggcccaggcagtcacagagatgccatccaccagcaatggtgaaagcagcaagcag

SEQ ID NO: 553906 - DNA, 48 bp, Homo sapiens
gatattttcaacaaaggatttgggagatacttcaggggattaccggaa

SEQ ID NO: 553907 - DNA, 83 bp, Homo sapiens
agagcgccggcaagagctcggtgctggagaacttcgtgggccgaggagatgctctgctgaggggcagttgctatggttacagg

SEQ ID NO: 553908 - DNA, 90 bp, Homo sapiens
tggttcctgaaaaaaatcctcctccagaaagacagattccgctctgtgtccagaatagtccccaggaggcacggaacatgttacttcaga

SEQ ID NO: 553909 - DNA, 90 bp, Homo sapiens
gaagtcctttcaagtctctaggactggactcttcctaagcaagtccggaggcaaaaccttcaactgaggacttgggggataagaaggaag

SEQ ID NO: 553910 - DNA, 83 bp, Homo sapiens
ccaagcgggagtatgaccagtgtcgcatacaggactgatcctttgaaatactccagccatgactaaaagagaagcagaggagc

SEQ ID NO: 553911 - DNA, 83 bp, Homo sapiens
acctgccaatttaccagagataattgataacaccctgtaacagctgagatattagaaatggctactccccagtcaattttcat

SEQ ID NO: 553912 - DNA, 51 bp, Homo sapiens
cagagtgttgagaagtttattcagaaagagtcagaaataccatcagaggag

SEQ ID NO: 553913 - DNA, 83 bp, Homo sapiens
aaattgtgagaggaaaacagcctacccgcacttgcacctcctgcgccgccgccccccatccaaggatatgccttcaagcctcc

SEQ ID NO: 553914 - DNA, 82 bp, Homo sapiens
cggctccttaccagctcacctctcaccgcgcatgtttggagagtttattaaccacttaacctctcagaactgaacaaagaca

SEQ ID NO: 553915 - DNA, 100 bp, Homo sapiens
catagacgaactccgcaatgaggacgttcaggatttcttacaatctccagctacaacctgcttagcttgctactcagtacgtgaattaggatgcaggcaa

SEQ ID NO: 553916 - DNA, 100 bp, Homo sapiens
aggattaagcatgaaaatattgttgccctggaagacatttatgaaagcccaaatcacctgtacttggtcatgcagctgcagatgatgttgagggcaaaat

SEQ ID NO: 553917 - DNA, 75 bp, Homo sapiens
tgcgttgtaccatccgcctgtgggacacctaccaggcctatcatggtcaccatcaagcactggaagtgttggtac

SEQ ID NO: 553918 - DNA, 100 bp, Homo sapiens
gagagagtacatagattggaaatggctattgcatttcactcaaatgctgaaaaggttatctgtgctacaattgcatttggaatggggattgacaaaccgg

SEQ ID NO: 553919 - DNA, 100 bp, Homo sapiens
gagtgcatcaaaggtgtgaacacagatctcagtgaatatcttccggactctgccgcccagtgagaaccctgaatttgaccctgaagaggatgagcccaat

SEQ ID NO: 553920 - DNA, 82 bp, Homo sapiens
cggacaaaaaagaacaggagaagtctgaacacgaatattaagtgaacttgacgttgatgtaaatgaagggtctctaatggag

SEQ ID NO: 553921 - DNA, 100 bp, Homo sapiens
gttgtcaaggtggcctaccaggaggccaggggtgtcgccatgaaaacaagtgttcatagtcggttggggattatttataatcctacatcaaaaataaatg

SEQ ID NO: 553922 - DNA, 73 bp, Homo sapiens
caattatgaaagaagtcattccttttttgaagggatccggtgtgattaaagctggttttgctggtgatcagat

SEQ ID NO: 553923 - DNA, 90 bp, Homo sapiens
tcagaatgtgaaggattatttactcgatgatggaactctggtggtttcaggaagatgtgtgacagtgcggaagagggggtggacggagac

SEQ ID NO: 553924 - DNA, 100 bp, Homo sapiens
gaaaagtccaagcatagcaacagctcagagtcaagatctccactgaagttggcatcacaaatgttgatctttccaccgtggataaggatcagagcattgc

SEQ ID NO: 553925 - DNA, 97 bp, Homo sapiens
ccatcactcggattggcaggacctggggccaaaagccaaggaatgtgaattggacccttgctgcgaaggaagtacctgtaagcttaaatcatttgct

SEQ ID NO: 553926 - DNA, 75 bp, Homo sapiens
gagtcgcaccaaccggccgcctctgtccctttcccggatggctgtttcattgaggacattcttcagaactggacg

SEQ ID NO: 553927 - DNA, 83 bp, Homo sapiens
gtcaggaactcgactcagacgtggataaagataatcccgttggttccacggcaagatcacacgggagcaggctgagcggcttc

SEQ ID NO: 553928 - DNA, 96 bp, Homo sapiens
tagattgaagtgttggggtgttgttttatcaaggaagctgatgcttttactgactctgctatcagtgctaaagtgaatggcgaacacaaagagaag

SEQ ID NO: 553929 - DNA, 82 bp, Homo sapiens
tgactacctgctgtacaccctcaacaaacaccagcgctttggtgtaaacaggaacatcgataagtagtgtaaaaacttgcac

SEQ ID NO: 553930 - DNA, 49 bp, Homo sapiens
ctggcttcgggaattttaccaggaaatctggcattttttaaagtttgcg

SEQ ID NO: 553931 - DNA, 75 bp, Homo sapiens
ggaggttcaggctacggtgagccgaaggctacgaggaacaccggcaagagtatcgccaataagaacatcgccaac

SEQ ID NO: 553932 - DNA, 100 bp, Homo sapiens
accggcgtcgagaatttcaactggtgcttgtgagtgaggattctgacagtgatggcattgtggcccacttccctgcccatgagaagccagtgtgctgcat

SEQ ID NO: 553933 - DNA, 74 bp, Homo sapiens
ctggatctctggtgagacatttttcttccttctgtcacatcacacccaatgtggctgtcgctgggcgcggactc

SEQ ID NO: 553934 - DNA, 95 bp, Homo sapiens
ggacttgggcccagtttatggcttccagtggaggcattttggggcagaatacagagatatggaatcaggaggctactcacagtcgaactacaact

SEQ ID NO: 553935 - DNA, 90 bp, Homo sapiens
atgattgcctcgcatctgcttgcctacttcttcacggagctcaaccatgaccaagtgcagaaggaagccattaatttgctagaaccaatg

SEQ ID NO: 553936 - DNA, 100 bp, Homo sapiens
ctgggcaggaccggtggcagttggtacctcctgccccccgaggtctgcagtctcctgaacccagcagccatctacgccaacaacgagatcagcctgcgtg

SEQ ID NO: 553937 - DNA, 100 bp, Homo sapiens
atcccaggactttgggaggccgaggtctgggaggggctgaacgtggtgaagacaggccgagtgatgcttggggagaccaatccagcagattcaaagccag

SEQ ID NO: 553938 - DNA, 101 bp, Homo sapiens
acaagatgtcacctgaaagtggtcacagccgcatctttgaaggacatggatttgattgacatactttggaggcaagatatagatcttggagtaagtcgaga

SEQ ID NO: 553939 - DNA, 75 bp, Homo sapiens
gaatcaatcagaaggcagccgagaaacacttttgcatcagatcttctacagttgtctgaagattttgaatgtcag

SEQ ID NO: 553940 - DNA, 100 bp, Homo sapiens
ttacacttgaaatacagactgttggggaacaagaggttggtgttcgaggaagagacattgttgttcttggtgtggagaagaagtcagtggccaaactgca

SEQ ID NO: 553941 - DNA, 100 bp, Homo sapiens
ggctccgcagtgaccggactcgggggagttgatttatgaagactctatggatctaatcgcaaagctaccttgtgttgcagcaaagatctaccgaaatctc

SEQ ID NO: 553942 - DNA, 90 bp, Homo sapiens
ggcactgcagaaagtgggcctgagcctcgaggatgacggtgctgcaggaacccgtccagaatgattacggacctgaagccaaagaacaag

SEQ ID NO: 553943 - DNA, 75 bp, Homo sapiens
aaatctttgggatgctcaatgcgtttagtgggctacagatggcatggcatctaaaaccttacaatgcttgatttt

SEQ ID NO: 553944 - DNA, 113 bp, Homo sapiens
ctatcagcaacaattcccagaccttcagcccgtggcccggatgcaggacagacccctcagggccggaagcagctggaaaagactcagaaatcttcacagtgaatgggattctg

SEQ ID NO: 553945 - DNA, 75 bp, Homo sapiens
ccttcaaccactatctcagtgcaatgggttctcccatgggcaggtggtctctctggatgagctgcgccccttcca

SEQ ID NO: 553946 - DNA, 96 bp, Homo sapiens
cgtcaaagtcaaccgcaggacgcaggtgtagccataggcgctgactgaggtcctgggaacaagtctccagagggcagtggcactcaaacccacgta

SEQ ID NO: 553947 - DNA, 99 bp, Homo sapiens
ctcacacagtggcttctgctcaccaacagatgaagacagatgcaccaacgaggtcaatgggaaggatctttcaaaggccactcatgaagaggcagtgga

SEQ ID NO: 553948 - DNA, 83 bp, Homo sapiens
ggcggatcaggatcggaagcctgcgtaactttctcccttgatccgggagtctttccactggtaatagctcttcaagtctgcaa

SEQ ID NO: 553949 - DNA, 100 bp, Homo sapiens
cggacctgcggactagcgaacccggagttttcggctttgtgagaaaccttaccatcaaacacgatggccagcaacgttaccaacaagacagatcctcgct

SEQ ID NO: 553950 - DNA, 100 bp, Homo sapiens
caccggagacttttggggggaaactaggtcgatggtcggcggcgcccggatgggcagctgaggtactccaaagattcaggtttactcacgtcatccagca

SEQ ID NO: 553951 - DNA, 75 bp, Homo sapiens
ccagcagccaagatggtgaagcagatcgagagcaaggatggggaagcagaatagcaaactggcccctgaagtgat

SEQ ID NO: 553952 - DNA, 50 bp, Homo sapiens
cgcgcgggagcgctacggccccaacgggagaagaaatgggtgaccgttgg

SEQ ID NO: 553953 - DNA, 100 bp, Homo sapiens
ccgggacaccgcacagccgggaaatggacgtggcccagtggaacatcgggagcctccggaccatcctggacatggtggagcgcgagtgcggcaccatcat

SEQ ID NO: 553954 - DNA, 83 bp, Homo sapiens
ctccttcccagccgcgcggcttcctccagacctctcggcgcggccgacatcggcctggctgcctggggacgcaaggccctgga

SEQ ID NO: 553955 - DNA, 75 bp, Homo sapiens
ctggaaactgtacattgaagcagagggtggttctcttcccaaagtggaagccaaattcatcaattatgtgaagaa

SEQ ID NO: 553956 - DNA, 74 bp, Homo sapiens
cccaggggccattggaccctacagatttgttggacgatttaagtctcgtaaagaacgagaagctgaacttggag

SEQ ID NO: 553957 - DNA, 95 bp, Homo sapiens
attactatttcaattggataaaaactcagctgagttcacagtccacaagaatcggaatgtcagttaatgctattcgcaagcagagtacagatgag

SEQ ID NO: 553958 - DNA, 82 bp, Homo sapiens
gagcatgtgtcccgggcgctgtgcatccacactggacgcgagctgcgctgcaagcaagagtgagccatggagctacgtgtgg

SEQ ID NO: 553959 - DNA, 100 bp, Homo sapiens
tgcgggtggtcaccgagaagtccccgaccgactggatgctgaaaacgccattcaacagatgggtggccagtggcttggtggaagacaaatcagaactaac

SEQ ID NO: 553960 - DNA, 100 bp, Homo sapiens
tttattgtgaatgggagagtgtgggaagaacctgttttattcaccattcaggatctgcaggcccaagaccgagctcaccgcatcgggcagcagaacgagg

SEQ ID NO: 553961 - DNA, 50 bp, Homo sapiens
gggcttatagctccaataatggaatggctccctacctgatttatgtggaa

SEQ ID NO: 553962 - DNA, 74 bp, Homo sapiens
gcgctgttttcgacaggtgtgcaggtttcggcacatggagattgatagatgggagcctcactgtattgcccagg

SEQ ID NO: 553963 - DNA, 99 bp, Homo sapiens
cggtggccgccagacacccgcggcgaaggcggctcgggctcgggctccgagctgacctgtcctggacgcagcataactaacgaagctgctgcaggatga

SEQ ID NO: 553964 - DNA, 82 bp, Homo sapiens
cctgaagctcaagggactgtgtccaccctcagattggcggcagtaagcacacaatgaatgatcacctgcatgtcggcagcca

SEQ ID NO: 553965 - DNA, 88 bp, Homo sapiens
tgaattggcaccaagccttcccagttatcataaccttgaatggcgactagatgtacagttgtttttaagggaaatgaatagaaacaat

SEQ ID NO: 553966 - DNA, 98 bp, Homo sapiens
agctcaagtgtgctcagaatgaggtgcttcggtttcagacctcccacagtgtcacccagattcctggtcgggtggcttccagtggtcttcagtctgtc

SEQ ID NO: 553967 - DNA, 75 bp, Homo sapiens
ccactgatagaaatcatttccatcaataccgggtcgtttatacgcaatgcagactggaatgaagatcgatagtaa

SEQ ID NO: 553968 - DNA, 98 bp, Homo sapiens
ccggggccgcagtctggccacccgcttccatgcggttcgggtccaagatgatgccggatttacagctgttggaggatggtgatctgactgtgatagga

SEQ ID NO: 553969 - DNA, 100 bp, Homo sapiens
cttagcggcccggcgttgaattccgggaagtgggagcttcaggctcgctccgtgcgggtgcttttcagtgggaagaattggaagaagatatcaggaagaa

SEQ ID NO: 553970 - DNA, 100 bp, Homo sapiens
aaggacctgaagcatctcatctattatcgtttcaacacgataccccagaatcttccatgctccgtcacactgcagccaggcccagaggatacaggaaagg

SEQ ID NO: 553971 - DNA, 75 bp, Homo sapiens
taacttgggagaaagtttcatctgtggatggagtattggtggtcattgggactcccacacttaaacaaagaaagg

SEQ ID NO: 553972 - DNA, 83 bp, Homo sapiens
ctgctgcatagtttcggtcatctaaaggaggttttaaacagtataacagactttcttgtctgcacagaaagtcccagtacaac

SEQ ID NO: 553973 - DNA, 100 bp, Homo sapiens
gttcatctgcatatctgaccttcgggcccaagtttattacagaggtcagctgggaagagctaccactttaagtgtaactcctgaaatggaaagagtgaag

SEQ ID NO: 553974 - DNA, 100 bp, Homo sapiens
ctattggaaggaggagattctgaagataaggagctttgtgtccctggtgatgttggaacattaatgatggaacatggccaaacttcagtcatgatcctga

SEQ ID NO: 553975 - DNA, 100 bp, Homo sapiens
cagaatgaccttccttgggaatttatggtcgatcgtcttcctactgtcttgttttttccctgcaacagattatctccctccaaactctaaagaaggaata

SEQ ID NO: 553976 - DNA, 99 bp, Homo sapiens
acttcacgctggcgcgagccccgtcctccttcgccgccgcgcacaaccgcacgtgcagaggcagaagaggcctggaccttggcgcacacagacccagga

SEQ ID NO: 553977 - DNA, 73 bp, Homo sapiens
agccctcagcccacttaggataatggcgacagctgagggaccaaaatgtctttgactccaagaagaaagtgaa

SEQ ID NO: 553978 - DNA, 82 bp, Homo sapiens
ggaggatggcgcctgtctcttccgggctgtagaatgagtccctggaacgccagatgcgtgaaatggaagagaactttgccgt

SEQ ID NO: 553979 - DNA, 100 bp, Homo sapiens
taagctcatctgctcagagctgaatggccgctacatcagcaacgaatttaaggtggagagacggtgccgagacctcaaggccaagggaattttatttgtg

SEQ ID NO: 553980 - DNA, 90 bp, Homo sapiens
cgagaatgtcaagccagattttgttcagcccagggatgttcaggagctgaaagacggaatacaaacagaagcttgcacgagtaacccagg

SEQ ID NO: 553981 - DNA, 74 bp, Homo sapiens
tgggctggcactgtggtcgcatcagaaagcataacccctactgtagaactaaatgcactgtgcatgaaacttgg

SEQ ID NO: 553982 - DNA, 82 bp, Homo sapiens
cggaggaagggccacgccggcgatggaggcggcggcggcggactggcggggaaatcctcattgacgattcaatttgttgaag

SEQ ID NO: 553983 - DNA, 90 bp, Homo sapiens
cacaggcaacggccgaggagagtggaagtgtgagaggcacacctctgtgcagaccacatcgagcggcttctggctgtgatgggtcggaga

SEQ ID NO: 553984 - DNA, 99 bp, Homo sapiens
caaggagcaacttcccaaatatacatctaaaaagatgacaaactcatgtggaatgtggatttaaggaggaagattcaccaaggcctgaaaagagggaga

SEQ ID NO: 553985 - DNA, 74 bp, Homo sapiens
ataaactgctccacagattatttagagcttttagtttggatgctgaacagcctgattatgatttggattctgaa

SEQ ID NO: 553986 - DNA, 50 bp, Homo sapiens
gtccgcttttctctaaggaacccgatgggaaactcttgtctagtgatgtg

SEQ ID NO: 553987 - DNA, 87 bp, Homo sapiens
actgcaggacatctgcaatgatgttctggcttcaccgtatgttgtggaccatggggaatctggccctttgcgctgcaaccgctgcaa

SEQ ID NO: 553988 - DNA, 51 bp, Homo sapiens
cttcagtctataataaagagatgttctccctttcctggtgatgatgaagag

SEQ ID NO: 553989 - DNA, 90 bp, Homo sapiens
ctgactgcatggaagccaggtgcaaggagaaaggattttgaggagggccgacatcggcctggctgcctggggacgcaaggccctggacat

SEQ ID NO: 553990 - DNA, 83 bp, Homo sapiens
ctagagtgacacgttatctgagttctggatggaggtaaaggaatatcacggtaaagagaaatgtgtatgaccttacaagtatc

SEQ ID NO: 553991 - DNA, 82 bp, Homo sapiens
agccgtcctgcgggacgccggcgctgatggagttgtctgctggttctcagcttgaagaagattctgcagtccttattgatcc

SEQ ID NO: 553992 - DNA, 75 bp, Homo sapiens
ctatgcctctccgccactcatcaccaatgtcacggtgaaaggaaagcaagccaggatggatatttacgacactca

SEQ ID NO: 553993 - DNA, 100 bp, Homo sapiens
ggaaaacaagaggccccagagggaaaagaagcccaaagttttaaagaaactggcagacctttcacttcgtatccaacaaattgaaacaactctcaatatt

SEQ ID NO: 553994 - DNA, 100 bp, Homo sapiens
tcattctcgctaacaactgcccagctttgaggttggtcaaagaaaaagtgatgtatgaaaaagaggcaaaacaacaagaagaaaagattgaaaaaatgag

SEQ ID NO: 553995 - DNA, 88 bp, Homo sapiens
aatgacagcggcgaggagaacgtcccgctggatctgacccgagaatgttggctcaattaagaaacatcagggagataaattcaaccca

SEQ ID NO: 553996 - DNA, 82 bp, Homo sapiens
cagtggtgtgctttggacctgtgtacccacccaaggctaaaggcagagccaggtcttgggcgtctttggtactggctttttt

SEQ ID NO: 553997 - DNA, 100 bp, Homo sapiens
ccggaatgtcatccagcgagtgattaggcagtaccagcgacatcatgacgagtgaccacagccctgtctttgccacatttgaggcaggagtcacttccca

SEQ ID NO: 553998 - DNA, 99 bp, Homo sapiens
aggtgtcactggccccggcctttgccccaatcttgtgtgggcactgaagggggactacaggttcgagatgtctcatagttgggggaggaccctgtggct

SEQ ID NO: 553999 - DNA, 82 bp, Homo sapiens
ggatatcgacgtcgtgatccagaagtccagagctgaggactgcctgtttgcagagacaagaggagcagcagcggcaccgccc

SEQ ID NO: 554000 - DNA, 100 bp, Homo sapiens
gaggccagccccagttctgcagcagtatcctcactgattgagaagtttgaaaggtctcgaagtgctgcagctaaaactcatacaactgccttggctgggc

SEQ ID NO: 554001 - DNA, 75 bp, Homo sapiens
gggaagaaggtccgcgttaaattaagcactatcctttgtactccctcaacgtggcctccatgtggttgaagctag

SEQ ID NO: 554002 - DNA, 82 bp, Homo sapiens
cccacatgcccgctcacctgcgctgtgatgcctgcagagctgtggcttaccagaacattgatgatggcacctcagatcgccc

SEQ ID NO: 554003 - DNA, 76 bp, Homo sapiens
ggctcttgccctcatcctggttctggaatcctcagttcaagtttgcagcccaactgaagagcagggtcagcccacc

SEQ ID NO: 554004 - DNA, 82 bp, Homo sapiens
cgaggcaaggagctaaagcagcgtgcgttcagccctggggcttgccgctgttccgtaacccagtgattccagtcttggctgt

SEQ ID NO: 554005 - DNA, 100 bp, Homo sapiens
atgtacggcaaaggcaagagtaacagcagcgccgtcccgtccgacagccaggcccgggagaaacataaatgaatgcgaagttgagccttgcaaaaatggt

SEQ ID NO: 554006 - DNA, 75 bp, Homo sapiens
cccgcgccgacgcggggcccatggccaggaccaccagccagctgggctccttcacctaccaaacgcaaagaccgc

SEQ ID NO: 554007 - DNA, 100 bp, Homo sapiens
cctcctccttggtcgccgcgtccttggctggcgtctatcatggtgaacttacttcagattgtgcgggaccactgggttcatgttcttgtccctatgggat

SEQ ID NO: 554008 - DNA, 88 bp, Homo sapiens
gcgatgcggaagaagctaatcttgtacttcaagaggaggaatcacgctcggaaacaatggcttttccttccctccatgagaaagaagc

SEQ ID NO: 554009 - DNA, 50 bp, Homo sapiens
cggatctttgccatgatggataagatgacagatttgaagatctggaagag

SEQ ID NO: 554010 - DNA, 83 bp, Homo sapiens
agacccattgcacttcagtatctcaggcggcaccctgtccccgaggaggggaccatgacacaattcttctgatgtagagcgac

SEQ ID NO: 554011 - DNA, 88 bp, Homo sapiens
ttctaccgctgcggctactgcaagaacgagtcgggcagccgctccaatgatatgaggccccaggattcctggcgaggtcctcctcccc

SEQ ID NO: 554012 - DNA, 99 bp, Homo sapiens
aataatgtttgtcagctacctgatattaacattgctccacgttcaaacagcagtgttagcaagacctgggggagaggtcttccccagggaggtcctgaa

SEQ ID NO: 554013 - DNA, 75 bp, Homo sapiens
cgtgaccgagagcgtgaccgagagcgcgaatatcgtcatcgttagaaggctgaccggttccctgatgtgttacct

SEQ ID NO: 554014 - DNA, 75 bp, Homo sapiens
ccggctggaggccggactcaaccgcgtaaaaggtgtccgcaatgttgccagtgtctgtctgcagattggctaccc

SEQ ID NO: 554015 - DNA, 76 bp, Homo sapiens
cgcgcagatacccgcggtgcaccgcctgctgggagcgccgctcaaggcgataccagaaattgcagaagatcatgaa

SEQ ID NO: 554016 - DNA, 82 bp, Homo sapiens
ctgctgtacaccctcaacaaacaccagcgctttgggccagctgcgggccgtccagcggctgtgccacttctacagcgccgtc

SEQ ID NO: 554017 - DNA, 76 bp, Homo sapiens
caaggacaaagaaggcaaacccctgctgaaggctgactgtgctgtcctgattgttgctgctggtgttggtgaattt

SEQ ID NO: 554018 - DNA, 82 bp, Homo sapiens
caagaagccaaagaactggctaggcaaataagctttaaggttgatgccgccttacctttggacatcctaacctatgaagaga

SEQ ID NO: 554019 - DNA, 75 bp, Homo sapiens
tccagaatatctcagatgagcagattcaagatggaaaaggtgatgtaaccattacaaatgatggtgctaccattc

SEQ ID NO: 554020 - DNA, 97 bp, Homo sapiens
ttttgctaatgaatgattttaaacttgtcattaataaaatagcatatgatgtgcagtgtccaaagagagaaaagagtctcatcgtggaaggcaagag

SEQ ID NO: 554021 - DNA, 97 bp, Homo sapiens
tttgggaaacaaggcttccagtgccaagggaccacttaatagtgagtcttccaaccagagcttgtgcagcgtcggatccttgagtgataaagaagta

SEQ ID NO: 554022 - DNA, 75 bp, Homo sapiens
aaagctgcccagccaccagcaaccccccagatgttcctcctgctgatcaagagaagctttttatccagaagttac

SEQ ID NO: 554023 - DNA, 100 bp, Homo sapiens
gcgcgctctgcctgccgcctgcctgcctgccactgaggggagcttttggaagagtcccagatggaagcgaccaggctccggcagaaggcagaggagctag

SEQ ID NO: 554024 - DNA, 100 bp, Homo sapiens
ttaactataaaggagagcgccaaaccattactgatgatgtggaggttaacagctatctttctgatcacctgctgttaccagctaccacccataacaagac

SEQ ID NO: 554025 - DNA, 76 bp, Homo sapiens
ctgcagtggcgcctaaagtctgagagagggaagtcgcctctgtgctcaacccttaggagaaatcttgagagtggac

SEQ ID NO: 554026 - DNA, 75 bp, Homo sapiens
ctgtcattttcctacttgttcagtccatggtggttgatcttaagcatgaactggaaaatattgaacctactcaag

SEQ ID NO: 554027 - DNA, 75 bp, Homo sapiens
gctgcggaccatttataaccgcgacttcaagatcaggattttttatcaagcagaaatgcatcgaacaacgagaat

SEQ ID NO: 554028 - DNA, 100 bp, Homo sapiens
aggagggtgctaaaggagttgggattttgtgttcatgtcaagcatcctcataagagtggttaagaaagtagctcaatacatggctgatgtattggaagat

SEQ ID NO: 554029 - DNA, 51 bp, Homo sapiens
ggagctactctcaggctgcaagcagcgacagtgcccagggctctgatgtgt

SEQ ID NO: 554030 - DNA, 96 bp, Homo sapiens
cgccaaggccaccctctactgccgcgtcttcctgctcgacgggaccgaagtgagcgtggacctgccgtcaagtaagggagaattgactacgcttat

SEQ ID NO: 554031 - DNA, 100 bp, Homo sapiens
cccaccctccaactttgcgacggaaatgtgtcatcgaaagccagggaggctgccggcgtggaccgcgggaaggcggggctggggctcggcgggaggccac

SEQ ID NO: 554032 - DNA, 75 bp, Homo sapiens
cgaggacgcaacgtcgagaacatgaattgcttttgaaatcagaaagtcagtgcagggttgtagtgttgatgggct

SEQ ID NO: 554033 - DNA, 78 bp, Homo sapiens
ggacagcgggctggagcctgacgagctggcgggcatcatgaccggaagatgtgtataataggactgagtatccttttg

SEQ ID NO: 554034 - DNA, 50 bp, Homo sapiens
gattcgcagtggtcgcttcttctccttggctctctttaaactgtggggct

SEQ ID NO: 554035 - DNA, 100 bp, Homo sapiens
catcatggaatattttgatctgaagagacatgagctgtgtggagattacattaaagacatcctttgccaggtgattttctatgatagcgactggaacccc

SEQ ID NO: 554036 - DNA, 51 bp, Homo sapiens
caggacatggagtatgaaagacgagttgtggaaagtaaaaatgtagcccta

SEQ ID NO: 554037 - DNA, 100 bp, Homo sapiens
tcaagaggaacatcgtggtgaagaccgtggagatgcgggatggagaggaggtggatgccagtgtggtacgtgagatctgctccaagtacatctatgacca

SEQ ID NO: 554038 - DNA, 80 bp, Homo sapiens
tcctgcctcagcctcctaagtagctgggactacaggttgacatcatggacatatgtgagtccatcctggagaggaagcgg

SEQ ID NO: 554039 - DNA, 120 bp, Homo sapiens
gaccgcgcgcagggcctgcagcgggagctggacggcgagcgcgagcggcgcgagaaagtttacccaaggtccagcctagcccctaggcaccatgtcggacagtgatctaggtgaggacga

SEQ ID NO: 554040 - DNA, 83 bp, Homo sapiens
ccaaggggttcgtgcgctgtggagacgcggagggtcgaggcggcgcggcctgagaaactaatctggattcactccctctggtt

SEQ ID NO: 554041 - DNA, 74 bp, Homo sapiens
aagtccacgcagaactctttcagggtttcatcttcaaaaccagaagaaaataaaattcgtcaggaagatttaac

SEQ ID NO: 554042 - DNA, 98 bp, Homo sapiens
atttctggaagtagtcgaccatgtttggatttcttacaagaagtcacaaagacggtaaagaacaggtccaagaaaagctcaaagaaagcaaataccag

SEQ ID NO: 554043 - DNA, 100 bp, Homo sapiens
tccaacacagactgagtaccaaggaatgattgagattgtggaggaggttttgcaggctttggaggtactcccagtagcaccaccacctgagccaagatca

SEQ ID NO: 554044 - DNA, 98 bp, Homo sapiens
ggatgtgggaaaggctcggctcatgttctgggacttaggagggcaggaagagctgcagtctttgtgggacaagggtgtggggctggcctcgctcgtgg

SEQ ID NO: 554045 - DNA, 74 bp, Homo sapiens
gcgcggggaccgctgtgctctcggtaagtaaggaggtctctgtaccatggctcgtacaaagcagactgcccgca

SEQ ID NO: 554046 - DNA, 100 bp, Homo sapiens
acagtattgaaatgcatttgccttatacagctaaagccatggaaagatgtaaagcaattatagatcagtttggtcagagaataatctctgagcatttcct

SEQ ID NO: 554047 - DNA, 100 bp, Homo sapiens
atggagatacctaggccgggagagggagaacacagttggagaaaatcggcagctgagacggccttggccgttttctgaatttccagatcccatgtggggt

SEQ ID NO: 554048 - DNA, 75 bp, Homo sapiens
atgagtcgcttcaagtttatcggctttacaggaagtatggtgctggcatctgcttggcttctagagagtcttaca

SEQ ID NO: 554049 - DNA, 74 bp, Homo sapiens
gcacccccatcccactgtgggtcagcgatgactttgaggaggtgtgaccatgaagctcatggatgaggtcgccg

SEQ ID NO: 554050 - DNA, 85 bp, Homo sapiens
cgagatcaatgaacctttagatgaatttacacaaattgtggctactaatttgccccctgaagatcaagatggctctggggatgac

SEQ ID NO: 554051 - DNA, 50 bp, Homo sapiens
gggaacgaggggtgaagcggcccaggtcatcctgtacagttctacagcat

SEQ ID NO: 554052 - DNA, 50 bp, Homo sapiens
atgatttagttgattctctgaaggccttttcagatattaatggcaaagtt

SEQ ID NO: 554053 - DNA, 75 bp, Homo sapiens
gtgggggcaacaggacacagcacagattctcctgcccctgaagcttctgccctttcccaggaagagaacccaaga

SEQ ID NO: 554054 - DNA, 100 bp, Homo sapiens
cgcgagctgcgctggttcaccccgtggtcgaggagtcggcatccgtgtcattctggaccttactcccaactaccggggtgagaactcgtggttctccact

SEQ ID NO: 554055 - DNA, 75 bp, Homo sapiens
aaaaacagtcctttctactatggacaatggcgtctcttggccacatcttggttttctgtgtgggtctcctcacca

SEQ ID NO: 554056 - DNA, 75 bp, Homo sapiens
caccatggacgcgccgcgcgcctcggcggccaagcccccgaccggatttgctgaccatgaaagaatatcactgtt

SEQ ID NO: 554057 - DNA, 100 bp, Homo sapiens
gccgcggtttgtcgccagaaggaagatggcggatctggaggagcagttgtctgatgaagagaagaaaaagcttgtggtgaaggggggcaaaaaaaagaag

SEQ ID NO: 554058 - DNA, 100 bp, Homo sapiens
ctgagaaacattgcaggaaaaccttctcatttgctgaccaagatgctctacccatggtaccccaggaccagaaggcaaccatatttcagatttaccactt

SEQ ID NO: 554059 - DNA, 100 bp, Homo sapiens
gagatcctcagcggcgccttgcggagggaccccaaacagtgcaaccctgaaactcgtcctgttgagaaaaaaataagatcagctcttcctaccaaaaccg

SEQ ID NO: 554060 - DNA, 100 bp, Homo sapiens
tgtgagcgtaaccaacacctggtccagacctcatggtgccagagtactgttccgtgtggggctgacactggtgcgcctggcgctgggcactgcagagcag

SEQ ID NO: 554061 - DNA, 100 bp, Homo sapiens
cacggtgtggcagctgctctgaaccaggacctggacccggacccaaagtgccatgtctttaatgccacgtgcgagcgagggtttgcagcaatggaagaaa

SEQ ID NO: 554062 - DNA, 118 bp, Homo sapiens
cggaggctgcctcggcggagcagaggaaccacacgctgatcatggggaacgcccttttgcttgtgactggcagggctgcgacaagaagttcgcccgctccgacgagctggcccgccac

SEQ ID NO: 554063 - DNA, 100 bp, Homo sapiens
cagggcagcgacacctctactagccgagccggccgctgtgcccgctcggtcttcggcaacattaaggttggaatgttgcatcagcaggtagaagaacatg

SEQ ID NO: 554064 - DNA, 100 bp, Homo sapiens
aaacattcgtctcggaaaccccgcctcttacagtcacgaggtgatgacacaatgactggtgatgggggagaataccttaggcctgaggacctaaaagaac

SEQ ID NO: 554065 - DNA, 75 bp, Homo sapiens
ggccaagaacaagtgtattatgtgggtcattctcaaggcaccactatagaacactggaactattttggggctgat

SEQ ID NO: 554066 - DNA, 98 bp, Homo sapiens
aaggagtggactagggtcgccggggaagcggttttcggctttgtgagaaaccttaccatcaaacacgatggccagcaacgttaccaacaagacagatc

SEQ ID NO: 554067 - DNA, 75 bp, Homo sapiens
tgagttggacagataccaaagagggctgttgaagaggcattcgtaccagttattaaactctgttttgatgggata

SEQ ID NO: 554068 - DNA, 83 bp, Homo sapiens
gcacctggaccttggacattcagacttcagaatgttaatcccgtcatgtattgacccggaaacatcatctcatttgcctataa

SEQ ID NO: 554069 - DNA, 98 bp, Homo sapiens
cagaaatgaaaactgaagatggcaaagtagaaaaacactatctcttctatgacggagaatccgtttcaggaaagggcaattgaaggaacagactaaaa

SEQ ID NO: 554070 - DNA, 97 bp, Homo sapiens
ttgaagttgatgtggaaattgccaaacaatctgtgactattaagaccatgttggaaggattctaacattttcagagaaccttttggaaagaacaagc

SEQ ID NO: 554071 - DNA, 100 bp, Homo sapiens
taccttgtggaaatgatttcctcaggactccagattatctacaacactgatgagggtcaagctgtggctcagctgtgttccactgtccccaacgtgactg

SEQ ID NO: 554072 - DNA, 100 bp, Homo sapiens
tggggaagccgtggcgtcccccatggacgacgggtttgtgagcctggactcgccctcctatgtcctgtacagggatgtttcagcagcccctgagaaggaa

SEQ ID NO: 554073 - DNA, 83 bp, Homo sapiens
ctctgctgtagtcctgttcttctggctctaagatctgaatgttgtgaccactaatttgaggatgtactgagtaaagatgctgg

SEQ ID NO: 554074 - DNA, 90 bp, Homo sapiens
ggaaactgagtatgggatctgatgatgctgcctacacacaaggtaatgctatgggctatgtacgaatgataagatctggtggtcttcatt

SEQ ID NO: 554075 - DNA, 78 bp, Homo sapiens
tctcgctctgggtccctcagaatatgactctctgcctgaaaatagcgagacagggaagaaggagaaagggccaacccc

SEQ ID NO: 554076 - DNA, 75 bp, Homo sapiens
atgagaccgctactcacccgggggaatcccggaggcaagacacttgaggagaggcgctccagcctggacgctgag

SEQ ID NO: 554077 - DNA, 96 bp, Homo sapiens
ttcacggacaacctcagaggacaacgaagtgttcgggtatcgaggcaccaagccagattcgctcttcaagttggagcaaggagaacccccagggat

SEQ ID NO: 554078 - DNA, 82 bp, Homo sapiens
gctgctcgacgtgctgtgcttactggtcgcgagcagctgatgcagctgtacagtgcgcgccagcggcggcggctgaaccggg

SEQ ID NO: 554079 - DNA, 75 bp, Homo sapiens
cttgaaatgctacatttccaagaataatccagaatggctactctgatctatgttgataaggaaaatggagaacca

SEQ ID NO: 554080 - DNA, 76 bp, Homo sapiens
gcggctgctgctgctgctgctgctgctggtggcccctttgcagtctcctcttggcaaagtgaaagaagcagtgaag

SEQ ID NO: 554081 - DNA, 83 bp, Homo sapiens
gttcaacgatctgagatttgtgggccggagtggacgagagcatggatcattttgatgacattggtcccagtgttgtaatggcc

SEQ ID NO: 554082 - DNA, 78 bp, Homo sapiens
gtttccatcacgagtgccgccagcatgtctgacaaactgccctacaaagtcggaatggacaatcagaccgttctggct

SEQ ID NO: 554083 - DNA, 82 bp, Homo sapiens
gatggtgagatccccagtcagagccgtccagtaaatacaatcaagtggcatcttaaatttttgctggaagtggagtcatgag

SEQ ID NO: 554084 - DNA, 100 bp, Homo sapiens
ggcagaatacagagatatggaatcagagacctttggccagagcaagacataaaagattcttttcaacaagtgatactgagaagacatggcaaatgtgaac

SEQ ID NO: 554085 - DNA, 50 bp, Homo sapiens
tgcctctgacaatctctagtgtactccaaagattcaggtttactcacgtc

SEQ ID NO: 554086 - DNA, 99 bp, Homo sapiens
ctatatttttattgtctacctctgaaaccatgtacagtgaactgcctgaagaggggatcttctctggatcaagcaatggtggtgaaaaatgtttcgcaa

SEQ ID NO: 554087 - DNA, 82 bp, Homo sapiens
ggggacccaagccagcccgtgcgcctgttcaggggccggacctcgaatcttctggaagttcagacctatatcagcatcctgc

SEQ ID NO: 554088 - DNA, 75 bp, Homo sapiens
gaaacaggccatggagggacaggatccggaggcgccagctcaacccctcttagcaaatatccggctgtgatcaat

SEQ ID NO: 554089 - DNA, 100 bp, Homo sapiens
ggccttgtgtcctaccatggtatttgctaacgtttagagagtgcttccccttgccgagcactgggaaaaccgtcttcagatacagtccctaagcccaaga

SEQ ID NO: 554090 - DNA, 51 bp, Homo sapiens
cttctctagaccttgccaagatggcacaggaaggatttttactgggagagg

SEQ ID NO: 554091 - DNA, 50 bp, Homo sapiens
cagcacttcatccagcagtgcacagatccgagtgaagcctgacaggaccg

SEQ ID NO: 554092 - DNA, 99 bp, Homo sapiens
ttctcgctgatcgcctaacttctactgacgaagcttggaagttgcagaagacagcaaggccatcgtggacgggaacctgaagctgatcctgggcctcat

SEQ ID NO: 554093 - DNA, 100 bp, Homo sapiens
ctcttagcactttgaaagaaaaaggctacaaagctgctttcattggaataggtttgtgtctggagaaaagagtcttctataagcttatatcgggacttca

SEQ ID NO: 554094 - DNA, 100 bp, Homo sapiens
ccgaggggaaaggacggctttggcttcaccatctgctgcgactctccagttcgagtccaggccgtggattccgatggaagggatggatgatgaccccgaa

SEQ ID NO: 554095 - DNA, 75 bp, Homo sapiens
gtggcgttcgctgaggctcagagatgggtggaggtcagcccaaggccaaccccactgtcactctgttcccgccct

SEQ ID NO: 554096 - DNA, 82 bp, Homo sapiens
ttagctgtgctcgcgctactctctctttctggcctggaggctatccagcgtctggcgtgctcctgatcagagttactctgat

SEQ ID NO: 554097 - DNA, 82 bp, Homo sapiens
ctggccctctgtctgcctgtgtccctgaccatggctccctgcagtaccctttaacggctggcagtgatggtgaaagcatagg

SEQ ID NO: 554098 - DNA, 78 bp, Homo sapiens
gactggagcaggcagcagcccaggtttaccgacaagactgtgaaactttcgggatggtggtgaaaatgctgattgaaa

SEQ ID NO: 554099 - DNA, 99 bp, Homo sapiens
ctccatgatcgtggaggagatgaaggcagtggacacacagcatggagaaatccttcgcaatgtcaccatcctacgagacttaattcagtgcacaaatga

SEQ ID NO: 554100 - DNA, 90 bp, Homo sapiens
agaggaggatctgctgtgcatagccaagaccttctcctaccttcgggaatctgatatgatgcttcctggtgtgtttagtggttggtgcca

SEQ ID NO: 554101 - DNA, 82 bp, Homo sapiens
cggaaaggggcccggcgtctgcctcgagactgaagaccgagctgcctgagaactggacagacacgcgggagacgctgctgga

SEQ ID NO: 554102 - DNA, 76 bp, Homo sapiens
agacttaccctgaagtagttagaatgatttagtggttgaaggactgcgatgtgtagttttgccagaagatctttgc

SEQ ID NO: 554103 - DNA, 90 bp, Homo sapiens
attcaaaggagtggtgatgcacacatttggggttgcacaccgatgctccagaattgtgagggagccatactctacagctattccaccgag

SEQ ID NO: 554104 - DNA, 80 bp, Homo sapiens
ccgacaaacaccacgagaattccgcagcccacacggtggaaaacgaagctcattcccaacgtgcaaagccaaggcagcga

SEQ ID NO: 554105 - DNA, 102 bp, Homo sapiens
gcatgttctcttagtcagcatccttcaccacacagttggaatcgaggacccattccaacaatctcgtaaaacatggtggattactatgaagttctaggcgtg

SEQ ID NO: 554106 - DNA, 83 bp, Homo sapiens
tctctgaagaacctccgagtacgagcatcctttcctgaaactggccaaaccgttatctagcttgacaccactgatcatggcag

SEQ ID NO: 554107 - DNA, 74 bp, Homo sapiens
aaacattccatggcctatcaagacttgcatagtgaaattactagcttggtggtttgttggaaatgctccgacta

SEQ ID NO: 554108 - DNA, 128 bp, Homo sapiens
aattaccattaccacgaagttatggaagaaattgctgacaccatggtacaaatattcaaaggacttcaagaaaggtgatgatgaacagtctacacagatggctgcaagttgggaagatgataaagtta

SEQ ID NO: 554109 - DNA, 83 bp, Homo sapiens
cgccccgcagccccccaacatcctgctcctgctcatggacgaccgcgagcccagcattgacctgctgcaggccttcgtggagc

SEQ ID NO: 554110 - DNA, 74 bp, Homo sapiens
actaatcctgatattaagccatcaaatgtggaacctatggaaaagtatcctgtggagcacccagacaaattcct

SEQ ID NO: 554111 - DNA, 115 bp, Homo sapiens
gttaatcgcagccaagaacgagaagagccgcagtgagttgggcaggttcttggccaagcaggttacaaaagcaggttggtcactggaagatgttgacatatttgaaatcaatgaa

SEQ ID NO: 554112 - DNA, 82 bp, Homo sapiens
cactgctcctccttcatctcccaaggtacatcaggaacgtctctatcaagaatacaatttcagcaaggctgagggccatctg

SEQ ID NO: 554113 - DNA, 75 bp, Homo sapiens
cagccgcgaggaggcgcgggaggtgttcgagaacgaccccgagacgttttccaagagataacttcaccaagatgt

SEQ ID NO: 554114 - DNA, 98 bp, Homo sapiens
ctttgagccctaccttactggacagtcaaatcagtttgccaacccagactttatggagtccatctcagatgttgttgatgaagtaatacagaactgcc

SEQ ID NO: 554115 - DNA, 73 bp, Homo sapiens
ggtgggatcattggctatgtaaaagcagggagaaacaaaggcagcgctgccctcgggggagcattggccctgg

SEQ ID NO: 554116 - DNA, 100 bp, Homo sapiens
ggttccccggcccacagtgggggtgtgcaaacccgagagaactggaactctaagaaggagctgatgtggaggagcagctgagacagttcaagatgacgac

SEQ ID NO: 554117 - DNA, 74 bp, Homo sapiens
catatagacccggctttaccttatatcagaacattcagaagattctcggccttgccccttcacgagccgccacc

SEQ ID NO: 554118 - DNA, 83 bp, Homo sapiens
gactcagcggagccgaagccatcgtcacactgactcctgggtgacaaccaaagccaagcaactgaaggattcagtgacctgct

SEQ ID NO: 554119 - DNA, 75 bp, Homo sapiens
gcccctcgggccgacgccatgaagatcaaagatgccaagaaaccctggctgttgataatcaggtgtatgtggcca

SEQ ID NO: 554120 - DNA, 101 bp, Homo sapiens
tgagaaactgatgaagctgcagaaccaacgaggtggccgaatcttccttcaggatatcaagctcctctggtgcaagtgtggtagctattgacaacaaaatc

SEQ ID NO: 554121 - DNA, 87 bp, Homo sapiens
tggtccttgcgccgctgacttctccactggttcctgggcaccgaaagaaacctgctcctccaaagccagagcccaagcctaaaaagg

SEQ ID NO: 554122 - DNA, 83 bp, Homo sapiens
cgcgctactctctctttctggcctggaggctatccagccctgcctgctccgcttcagcggactctcgctggtctacctgctct

SEQ ID NO: 554123 - DNA, 90 bp, Homo sapiens
cggggagctgaacgtggacagcctcatcacccggctgctggagggtgcacattcaggttcccgagcacaaacatcaagataacgttcact

SEQ ID NO: 554124 - DNA, 73 bp, Homo sapiens
cccaagtagctgggattactgcaatgaatgacggtttttgttgctccacatcctcgtcagcatttggtgttgt

SEQ ID NO: 554125 - DNA, 75 bp, Homo sapiens
acaccccttgaccagcacacactgcaaggagatcaggtcaagaacccagtatggaagggagaagtgaaaagttga

SEQ ID NO: 554126 - DNA, 90 bp, Homo sapiens
ctctgagggaggagctggggacggcgaccctaggagaggttcaagtgctggggccggcagtggagagttccacgtgtacagacatctgcg

SEQ ID NO: 554127 - DNA, 102 bp, Homo sapiens
agccggagctgggcgcggattcgccgaggcaccgaggcactcagaggaggaggatacgaagcgttttcggcttcctgcccggagctgtgcagcaaacagtcg

SEQ ID NO: 554128 - DNA, 75 bp, Homo sapiens
tcacacgccgccatccgggaggcccagggaaggacctgctgaagttcccatgatgtcacccaatggatccattcc

SEQ ID NO: 554129 - DNA, 100 bp, Homo sapiens
agaagctcagcgtcctcaagaggaagttccatgccattgcagtgtcaactaggcctcagttacttttcagtttgcccaaattgagcccatctcaacattt

SEQ ID NO: 554130 - DNA, 100 bp, Homo sapiens
ctggagcgcgagtacagctgcaccgtgcggctgctggacgacagcgagtacacctgcaccatccagggtctaaaattcccaggactccacagctttgcac

SEQ ID NO: 554131 - DNA, 100 bp, Homo sapiens
gactgaagtatccagcgctcattgggaatttagttaaggacagtaataccccacttttattcgctataatttgcaagaaagagaaaatggtggaattttt

SEQ ID NO: 554132 - DNA, 99 bp, Homo sapiens
gtgatgccgggagttctgcatcttcatgttggcagtggaatccctctgaccggccctcctttgctgaaatccaccaagcctttgaaacaatgttccagg

SEQ ID NO: 554133 - DNA, 123 bp, Homo sapiens
cgcatgggtcgcagccgccgggccttcctcacaggcctggcgcgctccaaaggcttccgcgtccttgacgcctgcaggttggatggcaagcatgtggtgtttggcaaagtgaaagaaggcatg

SEQ ID NO: 554134 - DNA, 82 bp, Homo sapiens
agcgacagcggcgagcagaactacggcgagcggccacataaagaagatccctaatagtcatttctcaacaattatatagtca

SEQ ID NO: 554135 - DNA, 74 bp, Homo sapiens
caacagcggaatcatcgatgcaggggcctcaattaatgtatctgatggatttgaagactatggtacagattgcg

SEQ ID NO: 554136 - DNA, 82 bp, Homo sapiens
cggagagcggcctgcgggcgatcgggccgagaaggtggtcttctgccctgttaaagaagccctggaggtggactggagcagt

SEQ ID NO: 554137 - DNA, 100 bp, Homo sapiens
gcccacccctcctgtaacccagcctgtttcacttcttggtaggaatcctcaacctgtgcctaggattcagcaacaaaccacctggaacacatggtccctt

SEQ ID NO: 554138 - DNA, 100 bp, Homo sapiens
tgaagagacgttaaaatacttccctcgaagacgcgacgtccatttgtcgaaagaacaggagagccgcctaccctctcactggctgaaaagcaaaggggcc

SEQ ID NO: 554139 - DNA, 98 bp, Homo sapiens
ctcacattagccagtgtgaagacctccgaaggaccatagggcccatgcagaatctccaccatgtgtagacaacctaaaaagtgacatcggtgataaag

SEQ ID NO: 554140 - DNA, 90 bp, Homo sapiens
aacacgcagcagccgctgccgccgccgcgggagccgctgcccgaactcccggcccgaactccaggtcatacttatcctgacgaagctgta

SEQ ID NO: 554141 - DNA, 100 bp, Homo sapiens
gtttctcaaaaccagcatcgagatgtagttcctgagcatgaggctcccagcagtgagaattgagcggctggccaaggatattatgaaagacataggatat

SEQ ID NO: 554142 - DNA, 74 bp, Homo sapiens
gcagcccacgctcatgatcgacttcctcacccgcgcctgcgacctcggtgaggcggaaccaaccctcctggcca

SEQ ID NO: 554143 - DNA, 75 bp, Homo sapiens
acaccaaccaggacagaaatcattatcttagccaccagatgcttgctctgtcaaggcacagcctattgtctcctt

SEQ ID NO: 554144 - DNA, 90 bp, Homo sapiens
ggagatctccctgacatgcaagaacagggtccagacctgtgaccgcatcaagcagtcagcagctggcaccaagcgtcgggtgtttatcat

SEQ ID NO: 554145 - DNA, 90 bp, Homo sapiens
gttttactactcgccaggatctccaagattttctctgtgggcagttctttttgttttgggaagacttctgactttaattctttcagtact

SEQ ID NO: 554146 - DNA, 75 bp, Homo sapiens
tgcctcctgctgctgggcgatacactatcaaagttctctttgcatctcagggagtatatgttgctgcagtacggg

SEQ ID NO: 554147 - DNA, 100 bp, Homo sapiens
tcagaggtgaaaccaacagccagtgatatgctatacatggtgagctacatggaaatttactgtgaaagagtacgagatttgctgaatccaaaaaacaagg

SEQ ID NO: 554148 - DNA, 96 bp, Homo sapiens
gatattctttgctgcccttctggtacaccctcttatatcaggcccatcgggaaggcattcctgtcatgaggcctgggttgccaactatgagagacc

SEQ ID NO: 554149 - DNA, 100 bp, Homo sapiens
agggcttcctctttctcctcttcctcccgctgctgcagccgcgtggggcctcggctgggagcctgcacagtccaggtcagccatgtcatctgagcctccc

SEQ ID NO: 554150 - DNA, 80 bp, Homo sapiens
atcatgctggccaagaagatcatcattaaggacggaggcacggcccagctgagagccagcctggaggttacccagcagca

SEQ ID NO: 554151 - DNA, 83 bp, Homo sapiens
ctgcggaacctgcgcggctactacaaccagagcgaggccggcaacagctggaaacagagaagaaaaggagagaaaccgtggag

SEQ ID NO: 554152 - DNA, 97 bp, Homo sapiens
gtaggaaggaacttggttccccctccctcagcttccgccccaaaaggagaatccaaatcctcatatggcattccagaaagttccacggccaacagaa

SEQ ID NO: 554153 - DNA, 50 bp, Homo sapiens
cggggagggcccagcgcatccgacagggagaagaaatgggtgaccgttgg

SEQ ID NO: 554154 - DNA, 100 bp, Homo sapiens
cccaggaacccacagataaccaagtcagacttcgtaagagaaagggtacaggcatccttcacctgctattgttgcaagaacagtcagaattttacataca

SEQ ID NO: 554155 - DNA, 83 bp, Homo sapiens
gttcaagtttactgcgaagtccacccagcgttccggaggagcaggccgggctctcgccatgggtcactgtcgcctctgccacg

SEQ ID NO: 554156 - DNA, 76 bp, Homo sapiens
gtggactacttctaccgaccagagacccagcaccgcaaatcagccggcaccaggagcagttcatccagatgctgaa

SEQ ID NO: 554157 - DNA, 50 bp, Homo sapiens
acactgcgaaagcaaaccgaggagacaatgcagatcttcgtgaagactct

SEQ ID NO: 554158 - DNA, 98 bp, Homo sapiens
caggaaatattcgagtggcaactgcaatgaagttgaaaggaagctcaatccaactctcagacaaaaagctttgtcagatatgccaaaatcccttttgt

SEQ ID NO: 554159 - DNA, 83 bp, Homo sapiens
gggaaggagggcgtccgagtcaacaaccgcttcgagctgggggatatgagactttctactcggaatatcctgagtgttgcgtg

SEQ ID NO: 554160 - DNA, 147 bp, Homo sapiens
ccacctgaatcctcaggatactctgaagaactatgtaccttcttatgacccatccagtccacaaaccagccaggatgaatccttaaagcaattgcaggtagttcatcaaccatggatcttgccaagtgacacagaaagtgaaggagt

SEQ ID NO: 554161 - DNA, 100 bp, Homo sapiens
tggaagtgcagttagatcctgcaggacagctttgtgatgtaaaagtggctcaccatggggagaatcctgtggtttcccttgggggctttgaaataacacc

SEQ ID NO: 554162 - DNA, 83 bp, Homo sapiens
ataggatttaaccgctctctgcctcccaggatattagaaatggctactccccagtcaattttcatctttgcaatctgcatttt

SEQ ID NO: 554163 - DNA, 90 bp, Homo sapiens
agatggccttggaagaaatggtgcagagattaaatgcggtttccaagcacacggacaatgcagatcttcgtgaagactctgactggtaag

SEQ ID NO: 554164 - DNA, 75 bp, Homo sapiens
gaccagcctcttctgaaacactgggatatgaagagcattttaagaggtgcagcctctggaagtggatcaaactag

SEQ ID NO: 554165 - DNA, 82 bp, Homo sapiens
tgaccgagaggcacgagaactctggtcccggctacaggatgagaacaagttgagcagtgccaacggccatgaagaacgtagc

SEQ ID NO: 554166 - DNA, 82 bp, Homo sapiens
cgcgaaccgcagtatcatgctggccaagaagatcatcattaaggacggaggcacgacacgatgaggcgagtggtacgacaga

SEQ ID NO: 554167 - DNA, 83 bp, Homo sapiens
tgaagagctatggtgaaacaccactgaagcattgccaagggttttggccaaattgggcgagggcacaaaataaccacttaccc

SEQ ID NO: 554168 - DNA, 82 bp, Homo sapiens
gggaaaaacactcttggcacgagccgttgctagccagctggactgcaatttcttaaagtgtcttcgagagaactctgacgtg

SEQ ID NO: 554169 - DNA, 74 bp, Homo sapiens
caatttaagcctgatctaacccctagaaacaggttataactcgaaacgaactcatgctggaagaaactagaaac

SEQ ID NO: 554170 - DNA, 82 bp, Homo sapiens
cttctttctctttaccctcattggcgcttctctcctgcagtccgcctctgggccctgccgattcactttataggaacagctt

SEQ ID NO: 554171 - DNA, 75 bp, Homo sapiens
ggtgtaccaggcgaagctggccgagcaggctgagcgatacgacggtgctggggagtcagggaagagcaccatcgt

SEQ ID NO: 554172 - DNA, 97 bp, Homo sapiens
ttgcggatagctccaaactgggatatgccctaaaccagttgtttgagaaaatcatggcattagacattgatgagcgccacctactgcgtcttggtca

SEQ ID NO: 554173 - DNA, 100 bp, Homo sapiens
gatccagcaccatggggaagcgggacaatcgggtgggccctccagaatttccacagcatacacctggacctgttcccaacagtttcagccagcccccacg

SEQ ID NO: 554174 - DNA, 82 bp, Homo sapiens
gcagatggagaacctgatcgaacttcgattctgaaggaagatttccattaggtaatttgtttaatcagtgcaagcgaaatta

SEQ ID NO: 554175 - DNA, 87 bp, Homo sapiens
gcatgtggattttgtcgctggacgtctagagatgtgggcatggcagacaaatctgtaggttattcagcttctcaaggctggaaaagc

SEQ ID NO: 554176 - DNA, 99 bp, Homo sapiens
cttcccgcgtccgccgattcctcctccttggtcgccgcgtccttggctggcgtgattttttatcaagcagaaatgcatcgaacaacgagaatcaagatc

SEQ ID NO: 554177 - DNA, 98 bp, Homo sapiens
tgaaggcaggagcagatgtgaataaaactgaccatagccagagaacagccctccatcttgcagcccagaagccgtctcttcgggttcgtgaggcttca

SEQ ID NO: 554178 - DNA, 75 bp, Homo sapiens
gcaagttacacttggggttcattcagatccgagagaagcttgatcagttgagggccaacgcagacccgtcagtga

SEQ ID NO: 554179 - DNA, 95 bp, Homo sapiens
tcaaatgcagtcggcttgtcctggctcttgccctcatcctggttctggaatcctcagttcaaggactatgatttaatctccaaagaaccaaagcc

SEQ ID NO: 554180 - DNA, 75 bp, Homo sapiens
cgccgccactcacgctccactgcaacatcacggaccctaaagtaaattggttgaagaaattagatcccaaagatt

SEQ ID NO: 554181 - DNA, 82 bp, Homo sapiens
attctgtctgtccacgatagtgccaggcctatgttggaggaaggcccgaacaagacaggaacgtcctgtgccctggactgtg

SEQ ID NO: 554182 - DNA, 82 bp, Homo sapiens
accccgacatggccttctgtgccaacatccggcagcagtgtggacgaatgtggaacctcgctctgtggctgtgttcccttgg

SEQ ID NO: 554183 - DNA, 100 bp, Homo sapiens
ctgctgtggctgtctcggaacccgtggtcctccgcttcatgtctctgtcttcaacgctggagtgcagtggcgcaattatagttcaccatagcctcaacct

SEQ ID NO: 554184 - DNA, 75 bp, Homo sapiens
ggctgtgcaagtacctgccagagaacgacctgaagatcaggatcctcatgaccagccaaagagaagaagaattag

SEQ ID NO: 554185 - DNA, 50 bp, Homo sapiens
aggagccgccgccgccatatcaggctgatgaattcatccgagcaaatgcc

SEQ ID NO: 554186 - DNA, 82 bp, Homo sapiens
tccgttggccttcgtacccgtcttgattgagagaatggatcttggagaatgtctgaaagtccatgacctggctttaagagcg

SEQ ID NO: 554187 - DNA, 98 bp, Homo sapiens
ggcaatgcgctataaccgcctgaccgtgctggctggtgcaatgcttgccttgggactaatgacatgcttgtcagctatatgttctcctttcagccaag

SEQ ID NO: 554188 - DNA, 100 bp, Homo sapiens
ccaaagcagaataaatctgtactcgtgcctcatggatccaaattaaaggttatcaatactctggctgaccatcatcatcgtgggactgactttggtggaa

SEQ ID NO: 554189 - DNA, 74 bp, Homo sapiens
cggacgaggggaagtcgtacagcggtcacgagaagagaatgccttctagatgcaaaatcacctccaaaccagac

SEQ ID NO: 554190 - DNA, 100 bp, Homo sapiens
aacacgcaaacgagagctgaggctaatgaaaaacagggagatcttgtgcgaaaactcaaagaagataaagcaccccaagtagacgtagacaaagcagtgg

SEQ ID NO: 554191 - DNA, 100 bp, Homo sapiens
acaaccgctgggatgcatctgcctcagagcccgagtacatggaggaggtgtggatgaggtcaccattgtcaacattttgaccaaccgcagcaatgcacag

SEQ ID NO: 554192 - DNA, 100 bp, Homo sapiens
gccacccaccatggccgcagaccagcgcccgaaggccgacacgctggccctgaggcaacggctcatcaggtgggaccatccagttgcaggaaaacaagct

SEQ ID NO: 554193 - DNA, 100 bp, Homo sapiens
gcctcccgagtagctggggttacagagatttacaaacgaggaccacctggcagttcataaacacaagcatgagatgacattgaaatttggcccagcccga

SEQ ID NO: 554194 - DNA, 100 bp, Homo sapiens
aacatacaggagctgcaggctcagatttctcggcatgagagactaaggtgtcagtatgttcttcaagctgctctgctcctgggcccaagctattctcctg

SEQ ID NO: 554195 - DNA, 98 bp, Homo sapiens
agaagttgagaccgagaatgtggaaacagctgctacggaagaggcacataggaaatgacatcgtgacgatcatcttccaggagcctggcgcgctaccg

SEQ ID NO: 554196 - DNA, 74 bp, Homo sapiens
tcggtgtcaaagccaagacataaactcaaccccttctcttccaaaaggtttgtctacagattttgagcgttcga

SEQ ID NO: 554197 - DNA, 100 bp, Homo sapiens
agtggccggaacgggagccaacatggcagcggggttcgggcgatgctgcagggaaccctaaggactctgcaatatgaataattccctagagaacaccatc

SEQ ID NO: 554198 - DNA, 83 bp, Homo sapiens
atcagcttcctcacacccttgcgcaacttcctggagggggactggaagaccatctcggctccagggagttccacgctgtccag

SEQ ID NO: 554199 - DNA, 75 bp, Homo sapiens
caccctcaatgcctccaacctcatctaccccatctttgtcacgtggacccaagtggagagattgtggaactggcg

SEQ ID NO: 554200 - DNA, 97 bp, Homo sapiens
ccagaattggacccgaaaccatgcctcactgtcctaggcaagatcatctttgcagatgaatgcacagaagctgaggggcgacactggcacatgaaac

SEQ ID NO: 554201 - DNA, 75 bp, Homo sapiens
atccgcaaagtgtctacctcggggcagatccggaccaaggtgaccaagaatatggcccaggtgaccaaagccctg

SEQ ID NO: 554202 - DNA, 74 bp, Homo sapiens
cgcgctgtcctgctgtcaccaagagctggaggaccatcagcacgtgcccatcgacatccagaccagcaagctgc

SEQ ID NO: 554203 - DNA, 75 bp, Homo sapiens
cagtcagctgcacctactttcatgatttcaccaggaccatctgaatctgataatttttctcataacctgagagga

SEQ ID NO: 554204 - DNA, 75 bp, Homo sapiens
ttttagtagagggcaataaatgccacatgagatgatcacctcagcagaaaacttgtttgggaaatgggaagtaat

SEQ ID NO: 554205 - DNA, 100 bp, Homo sapiens
ttccagaaaaattacagcacatctcagtgaatttgcaagtggagtggaaacaaaatgtcagtcagtgtgcatgagaaccgcaagtccagggccagcagcg

SEQ ID NO: 554206 - DNA, 100 bp, Homo sapiens
aagttggcttatgagtggaacatggctagcaggaatgcttactgttgcgtggttcgttattaacaggaaactactttccagagaaaaacagccccccata

SEQ ID NO: 554207 - DNA, 100 bp, Homo sapiens
ctcaaactcccaggctcaagcagtcctaccatgtcagccttcccagtagctgggaccacagagctcatggtccatgtgggtggattgattcagatgggat

SEQ ID NO: 554208 - DNA, 75 bp, Homo sapiens
tgttgggccatttccgagaactcccatcagtttctgtatagtgtaaaaggacacagcattgttggttttgccatg

SEQ ID NO: 554209 - DNA, 74 bp, Homo sapiens
aacatttcccacaggacacgaagtttgtcggcccttgccttggcagagctgagatatcttaatgcaattcagac

SEQ ID NO: 554210 - DNA, 100 bp, Homo sapiens
gtctgagtgtctgtccccagagcctcagtttgtgcaggacaccgacatggaacagggactcactggggggttgccatagtttctaaatcttttgaaggaa

SEQ ID NO: 554211 - DNA, 98 bp, Homo sapiens
ctcagcctcccgagtaaatgggattacaggactctgcacttgtccaagagaagaatccagagaaatcagagcaggtcaaatagttctaaaagccatgg

SEQ ID NO: 554212 - DNA, 100 bp, Homo sapiens
tagtctcagaactgttccttcagccaaagaaacaagccgtggaataggtgtatcaagtaatggtgcaaagcctgaaattgctcgagactttaatcccaac

SEQ ID NO: 554213 - DNA, 100 bp, Homo sapiens
tggaaaatgccaacgccgtgtctgaagaactgataaatttcaaacggaagagagtggcagcatttagaaagaatctaattgaaatgtctgaactggaaat

SEQ ID NO: 554214 - DNA, 98 bp, Homo sapiens
aaggaagtttgtcctgtcctggatcagtttctttgtcatgtagccaagactggagaaacaatggacatgagagatggctttagaagaaaaagtttcta

SEQ ID NO: 554215 - DNA, 75 bp, Homo sapiens
gcaaggatatggagagccatgttttcctgaaggccaagacccggctggtgccgacaagaaagccgaggctggggc

SEQ ID NO: 554216 - DNA, 82 bp, Homo sapiens
ctaaagttaggcggcactccagccccagctcggatttccatttaaacagggttaatttggaagaatcttcaggagtggaaaa

SEQ ID NO: 554217 - DNA, 82 bp, Homo sapiens
ctgggtcagtccgccgctcaccccgcggccgcaccttcccgccttctcagggggaaatttgcagtggtgagaaaatgtataa

SEQ ID NO: 554218 - DNA, 100 bp, Homo sapiens
agtttgtagcctattggaggaaaacacaccaagatggcccactgcgtgaccttggttcagctgtccatttcctgtgaccatctcattgacaaggacatcg

SEQ ID NO: 554219 - DNA, 99 bp, Homo sapiens
cttcatctgtcctgaaacggaaatcggacagaaagcctttgcggggaggagagagaaaaggaacagttccgtaagctctttattggtggcttaagcttt

SEQ ID NO: 554220 - DNA, 107 bp, Homo sapiens
tgcaccgacctcgacgtcttgcctgtgtcccacttgttcgcggcctataggtgtggacactgccagcggctgcagccgacttggaatgacctgggagacaaatacaa

SEQ ID NO: 554221 - DNA, 75 bp, Homo sapiens
gtgatccagaagtccagagctgaggactgcctgtttgcagatctgcgagtgaagagggacgagggaaaagaaaca

SEQ ID NO: 554222 - DNA, 74 bp, Homo sapiens
ggtgggccgcgtcgaagacatggaccagggctacggaggtttgtctacagattttgagcgttcgaagttgaccc

SEQ ID NO: 554223 - DNA, 100 bp, Homo sapiens
acagcctggaaggtgcgtgtggggctgggtctcggagtgggagacgtggagtgcagttttagaggatgtccttgggaggatcgcaaagcagtctggtgag

SEQ ID NO: 554224 - DNA, 98 bp, Homo sapiens
ctccgtggccttagctgtgctcgcgctactctctctttctggcctggaggctatccagcgcgggcgctaatattgacacctgctcagaagaccagagg

SEQ ID NO: 554225 - DNA, 97 bp, Homo sapiens
ggaaaacatggggtttcgagtgggacaaggattgatagaaaggcacgtgtggttctcaaatataggcattctgatgggaacttgtgtgttaaagtaa

SEQ ID NO: 554226 - DNA, 100 bp, Homo sapiens
gcctgaagacccgcaagatcctcggcgtgggcggggaggatgacgacggggaggtgcatcgctccaagctgattgggcagaaagtggcccatgctctggc

SEQ ID NO: 554227 - DNA, 83 bp, Homo sapiens
cagacaagcatcctgaaaaccccaaagctgatgatgtgcgaggtgatgccgaccatcagcgaagcagaaggcccccctggagg

SEQ ID NO: 554228 - DNA, 98 bp, Homo sapiens
gagacaaagcagcgcccgtctgcttcgggcctctggaatttagcgctcgcccagctagccgcaggttaaaaagatcaagtggcatgagcagccttttg

SEQ ID NO: 554229 - DNA, 83 bp, Homo sapiens
ataaatcatgactgatcttgtagctattctaccttgtaaatactgttatttgtatatactgtaaatgatgacatcggtgggca

SEQ ID NO: 554230 - DNA, 101 bp, Homo sapiens
ggtaatgaccaagcagcgtcttcagaggaaggatagctgtacagcgtggtgaaggactcaatgagaagcagcagcgtgcagggtcaaagacagccggcccc

SEQ ID NO: 554231 - DNA, 115 bp, Homo sapiens
tatggctaataacacaacaagtttagggagtccatggccagaaaacttttgggggccgttgctccagggagaactgcaaatatcttcatccacccccacatttaaaaacgcagtt

SEQ ID NO: 554232 - DNA, 118 bp, Homo sapiens
ggttgctgttgcttggcctggtgggcccagtcctcggtgcggcgcggccagaatacctaaaggggcaggacctggatgctatcttgcaggatccttaacattgtcaaagactgaacta

SEQ ID NO: 554233 - DNA, 101 bp, Homo sapiens
gccgggaccggctgcagagacaggcgttcgaggagatcatcctgcagtgtgattcgcaaggggtggctcaccatcagcaacattggcatcatgaaaggcgg

SEQ ID NO: 554234 - DNA, 50 bp, Homo sapiens
tgtcaactctcttagaacaaaatgatttgcttgctgaaaatggtcgatta

SEQ ID NO: 554235 - DNA, 96 bp, Homo sapiens
gggcctgcctgactcacccattcatcagccctgaatctgtggaggctagtccagcagttaatgagaagagcgtgtattccactcataattatggga

SEQ ID NO: 554236 - DNA, 100 bp, Homo sapiens
ctaatggatcctcttccaaaaccacaaacttgcctacgtcagtaacagccaccaagacagccgctcaggaagcaatcttgcatgcgtctggaaatggcac

SEQ ID NO: 554237 - DNA, 84 bp, Homo sapiens
ctgcaaggaacaaaatgtttgtaaattctccttttaccaaggtgaccaagaatatggcccaggtgaccaaagccctggacaagg

SEQ ID NO: 554238 - DNA, 50 bp, Homo sapiens
gcagtttgagccaggacccctgtgctctccacctgcctgaagcaagaaca

SEQ ID NO: 554239 - DNA, 83 bp, Homo sapiens
gtgtcaggtggttgcggagctgtgtggacgaatgtggaacctcgctctgtggctgtgttcccttggcactccttagtcccctt

SEQ ID NO: 554240 - DNA, 102 bp, Homo sapiens
gcgactgcaccagcaagatcggcaggcgagattgcctgacccaggcctgctcggccctcacagggaagctcttcgtgggcggtcttgactggagcacgaccc

SEQ ID NO: 554241 - DNA, 90 bp, Homo sapiens
ttagagccccacattcccaacgcctactgtaactgcatgatccagtcatgatgctatggactcctactacgactacatatgggatgttac

SEQ ID NO: 554242 - DNA, 98 bp, Homo sapiens
cgcatgtggagttcggaggaaaagggctcaggttcacgcaaagaatctgctccacaagttttgcttccagaagaagagaaaattatagtggaagaaac

SEQ ID NO: 554243 - DNA, 90 bp, Homo sapiens
aacagatgaggctacagatgatgataaacggcgtgaattggaagagagaagggcacagttacctaagtatcaacgtaatcttcctcggcc

SEQ ID NO: 554244 - DNA, 100 bp, Homo sapiens
caacagactctcctgcagaccttcccaggaagccagagccacacacaccatcatggtcctgtgaacagcagagaatttcaaaggaccttgctaatatctg

SEQ ID NO: 554245 - DNA, 100 bp, Homo sapiens
cgcgtccgccgattcctcctccttggtcgccgcgtccttggctggcgtacaccaatgggaatcccaatggggaagtcgatgctggtgcttctcaccttct

SEQ ID NO: 554246 - DNA, 95 bp, Homo sapiens
cagttggaagcccgggaccgtttaaaaaactggctgcgggcctctcgggtgcttcttgtcggcttgaaaggacttggggctgaaattgccaagaa

SEQ ID NO: 554247 - DNA, 75 bp, Homo sapiens
gtgcccttcgacggcctggctgatccgacaacgactgaaagacctttcattcagaagctgtttcgtcctgtggct

SEQ ID NO: 554248 - DNA, 83 bp, Homo sapiens
cagaattgcaattccaaaatgtgtaagacgggatattctcttctgtgctgtcaaggggcagctgcaatgactctccgcacggt

SEQ ID NO: 554249 - DNA, 82 bp, Homo sapiens
cttagctgtgctcgcgctactctctctttctggcctggaggctatccagcacatccggctccgggttcgagcagagtactgc

SEQ ID NO: 554250 - DNA, 73 bp, Homo sapiens
tgaggacctactcacagataggaattgaaggtgaggcggaaccaaccctcctggccatgggaggggccgtggt

SEQ ID NO: 554251 - DNA, 83 bp, Homo sapiens
catgaaatgacaagattttaaaaaaatcccatgaggagaaggcattctaatttaggtcagcccaaggccaaccccactgtcac

SEQ ID NO: 554252 - DNA, 82 bp, Homo sapiens
agacatttcctgctcggaaccttgtttactaattgcttgttagcagtggcacaagatcttacagaggatgaagaaacagtag

SEQ ID NO: 554253 - DNA, 90 bp, Homo sapiens
tacacgcccagacacacacatacccaaccaaaaaaatctcccaagctcctctcttaggagttgtaagacgttcatcgccgtgttatcctt

SEQ ID NO: 554254 - DNA, 51 bp, Homo sapiens
ggtaacccgtgtgactttgactgggatgagtagtatgtcagcactctttca

SEQ ID NO: 554255 - DNA, 125 bp, Homo sapiens
atcaggggcctgattgacggtgtggtggaagcagaccttgtggaggccttgcaggagtttggacccatcaggtcgcagagtcatctgtttggtgggagctggaatctccacatgtaagtaaccct

SEQ ID NO: 554256 - DNA, 50 bp, Homo sapiens
ctcattctactcgaagaagaagagacagagtctccctctgttgcccaggc

SEQ ID NO: 554257 - DNA, 82 bp, Homo sapiens
ctacctggggatattatcaaatctactactgttcatggcagcggagcgtgctttggacaccatgaattttgatgttataaag

SEQ ID NO: 554258 - DNA, 83 bp, Homo sapiens
tgcagtgtttaaaaaggatgatattggacgaaggaatgggcaaggaattacatgaatgacagtcttcgaaccaatgtgtttgt

SEQ ID NO: 554259 - DNA, 49 bp, Homo sapiens
tcggcatgtagagaaatagcaaacccaatgctgggcagatacaagaagg

SEQ ID NO: 554260 - DNA, 83 bp, Homo sapiens
gcaagatcctcagcgtggatggcaacaagatcaccatcatgcccaagcatgaggacctcaagctggactgggcagcctttggg

SEQ ID NO: 554261 - DNA, 88 bp, Homo sapiens
ggacggaagacccctggctctataagctgaattatggcagcccagtcaagcctccacctcagatatatgacaagcagttggatgaaag

SEQ ID NO: 554262 - DNA, 78 bp, Homo sapiens
gaagtgcagaggtcaatctttatgtacaggaaacagagcaaatgcagcgttacaatcaaagacttattgaggaattga

SEQ ID NO: 554263 - DNA, 100 bp, Homo sapiens
cagcgatgctgaggatcgaggaacgttgtctgtgcagggctcgcggcctggcaagaatgtacagctgacagagaacgagatccgcggtctgtgcctgaaa

SEQ ID NO: 554264 - DNA, 82 bp, Homo sapiens
tgccttttcagagcgtacctgtgccactgtcaccattggaggaatacagaatgttgctgcgggatgtaaaagctcttaccct

SEQ ID NO: 554265 - DNA, 75 bp, Homo sapiens
aacatgcaggcaagcaggacttccgggaggaccaggatgctgccttcttcaagtggacgtgatgctgaatccagg

SEQ ID NO: 554266 - DNA, 95 bp, Homo sapiens
agtgtatcaaagtgtggactgaggttcgaactctggccagtgcaggaggaccagacaacttagtcctgctgaatcctgagaagtacaaagccaag

SEQ ID NO: 554267 - DNA, 78 bp, Homo sapiens
ctgcagaggccaggcgtgctcagcacagaaggctcagcctgtgggtacctgcccagatggcaggaaagggacacagcc

SEQ ID NO: 554268 - DNA, 100 bp, Homo sapiens
cggagacagctgtgaagtgtgaggttctttgtctgctggcagctaggggcgacgaggcgggacgtcatggaagtgtggagctgatcagaataatgttcag

SEQ ID NO: 554269 - DNA, 98 bp, Homo sapiens
cgaggcgagcaggagcagggaacagatcagaatcaagctttgcgactctgtctgggtagcactagtgttggaggtcagtatggcgctatctctgccct

SEQ ID NO: 554270 - DNA, 83 bp, Homo sapiens
gatgggcctactcgcccgccaccctgcgctgccgccgctctgaggagttaaaggttctcagaggcactgtgactgacttccct

SEQ ID NO: 554271 - DNA, 99 bp, Homo sapiens
cccagaccctggagcctcagttggaagcagccgatccagcctgcggagcctgtggggcagaaacctgtttccctccaatcttgtggttgcagctttccg

SEQ ID NO: 554272 - DNA, 51 bp, Homo sapiens
cggaaaactcccaacttcctgctgctctgttaaaagcgaaaatgaaacaat

SEQ ID NO: 554273 - DNA, 75 bp, Homo sapiens
ccaggccatcaagggtttccgcaatgcccctgttggtcaatataaaaaggcgatagccagcctgcatcacttagc

SEQ ID NO: 554274 - DNA, 100 bp, Homo sapiens
gcagggagaagagccatgggtcctcgacctgcagggagcagaggggacagaggcaccaaggacctccaagacaggctcctatccagcagtttgcagacaa

SEQ ID NO: 554275 - DNA, 83 bp, Homo sapiens
gggtcagcgggtctgggactggtggcaccggcggcggcgtaggacggaggcgtcgctagagtgcctggtgaagaatgtgatgg

SEQ ID NO: 554276 - DNA, 90 bp, Homo sapiens
gtgagagaaaggctggaagacgaggtgacagagctgaatgaacctctctccaatgaagatcgaaatctcctctctgtggcctacaagaat

SEQ ID NO: 554277 - DNA, 75 bp, Homo sapiens
taaatccagctagagaatggcatgtgcaaagatacagagctttgctgtctgcatgccgacatgctgggctcactg

SEQ ID NO: 554278 - DNA, 98 bp, Homo sapiens
accgacgccgacatggtcatgagcttcgtcaacctcgctctggcaggctgccctgagcacgctcaaccccaaccccacggacagctgtcccctctacc

SEQ ID NO: 554279 - DNA, 108 bp, Homo sapiens
gctgctaaaaacaagactggggctgctcccatcattgatgtggtgcgatcgatgtctttggtggacttgggaaagaggttgctagaagcagcaagaaaaggccaagat

SEQ ID NO: 554280 - DNA, 87 bp, Homo sapiens
tccctctacgcgttttggttcccggttggtgcttcctgttcgcagctgcggcagccgtgacttggcgagcacgaccctccccgggta

SEQ ID NO: 554281 - DNA, 138 bp, Homo sapiens
tggggagaagaggattggaggtgtcagtgttaaaggaacctctacaacgaaggtgaagccacggaagataagtgttctggacttggtgcctctttctgttatatgctttcctatttagttgggagaccagttgtatac

SEQ ID NO: 554282 - DNA, 75 bp, Homo sapiens
gcctttcaggaagagtgcttaaggccgaaatagaactatttgtgaacagacttgattcagtggaatcagttcttc

SEQ ID NO: 554283 - DNA, 74 bp, Homo sapiens
aaggaggccagtatggcttagtggctgcgtgtgcagctggagggcagaacccgaaaacagtggccaaatgtcag

SEQ ID NO: 554284 - DNA, 99 bp, Homo sapiens
agttgaggagttgctggccaaaggggcctgtgtacttgctgtagatgaaaatgaggcgtggagctatttcctatgacagttctgatcagactgcattat

SEQ ID NO: 554285 - DNA, 75 bp, Homo sapiens
cgtccaccggcggctccgcaagaagtaccgagaagcacactgatttatgtcagtacatggacaagcaccctgggg

SEQ ID NO: 554286 - DNA, 90 bp, Homo sapiens
aagaatgtactcgacaccttgcgctaaggagagagtgttgaaaaaaggagagcaccaaatacttgttgacgaaaaacctgtgcccatttt

SEQ ID NO: 554287 - DNA, 100 bp, Homo sapiens
gatttggggctatagaaaagacggcatctgctacctttgagagtgccaggcgccttggtgctgaattggggaagtctgttgtatatcaagagaccaatgg

SEQ ID NO: 554288 - DNA, 76 bp, Homo sapiens
atcagacctctgtggcagcattttttccagaacacaaaaggtgtgcattgtgcagaagcgggacacggagaagatg

SEQ ID NO: 554289 - DNA, 74 bp, Homo sapiens
aaaactgtttcagttgcagactttaggcctgaaagtactactataattccttgacccagcagtacctttactgg

SEQ ID NO: 554290 - DNA, 75 bp, Homo sapiens
gagactagctcctcgtattatgttcagtctctacgtttctctacagaaaggtatatgaatgacctaaaggtacaa

SEQ ID NO: 554291 - DNA, 83 bp, Homo sapiens
agaaaacatcaaagaggtctagcaaagatggagaacttaatgttctggatgatattttaactgaagtaccagaacaagatgat

SEQ ID NO: 554292 - DNA, 100 bp, Homo sapiens
agcattcctgaaatacatccaggaaagacatggagattctcttaaaaagagagctggcggtcaccatggcaatgcgggagctggtggaggccgaatgcgg

SEQ ID NO: 554293 - DNA, 100 bp, Homo sapiens
cagcctggcggacagcatgccttcgctgcgatgcctgtataacccagggactggcgcactcacagctttccagagtcaatcccgacgtgtcaatcccgac

SEQ ID NO: 554294 - DNA, 87 bp, Homo sapiens
ggcgagcggacggctgcatttacggggtctcccggagggccagagtcggtggaaaacgaagctcattcccaacgtgcaaagccaagg

SEQ ID NO: 554295 - DNA, 90 bp, Homo sapiens
cccggagaagcaggagccctactcggcagagagaaatagcccggaaacttgcaaatcctaagcaaccaacaaatccttttctagagatgg

SEQ ID NO: 554296 - DNA, 100 bp, Homo sapiens
ctgagaagcccataccactatttgttgagaaatgtgtggaatttattgaagatacagccccctccatcccatcggaagaggaaggaacaaaaggtcccgg

SEQ ID NO: 554297 - DNA, 100 bp, Homo sapiens
gctccggcagcgttcctgggagccgagggccagagactaagtacttaattcagtgcacaaatgagatgaatgtgaacatcccacagttggcagacagttt

SEQ ID NO: 554298 - DNA, 75 bp, Homo sapiens
ttcagagccgggcacactgggctctgcagcctcatcctacagccccctagatcccaaagagaagattgatattgg

SEQ ID NO: 554299 - DNA, 75 bp, Homo sapiens
gaccgccgccgccgccgccaccatggtgaaaacttttggcccgtttggaagcggcagccaggacaacctgactat

SEQ ID NO: 554300 - DNA, 100 bp, Homo sapiens
accgaccagactcatggaggccagattttctccaattaaccagatcttgccctggtgcagacaagacttagagccctgtaatggccggactgcccttcac

SEQ ID NO: 554301 - DNA, 101 bp, Homo sapiens
caaagagttaccagcagcccaagtgtacaggacggactcctctctgtaaagaggaaaggaaacagattcattgtctgtctgaggatgagttaagttcttct

SEQ ID NO: 554302 - DNA, 75 bp, Homo sapiens
ccagatattggcagtagagggtgctctttctctagaggagaaacttgtatcctggtcagatataggaggactgga

SEQ ID NO: 554303 - DNA, 100 bp, Homo sapiens
gtgacctgcatgtactgggggattcgcagggaggatgtcgggacaccccggaagctgggaaatgtattaaaggtggaagaaggtccatatctttttctgt

SEQ ID NO: 554304 - DNA, 100 bp, Homo sapiens
ttgtgattaccttccctgtcaataattactataatgatacagagaagctccagagggcccaggcctgggaaaaagagggtggcactgaatcaacaagaca

SEQ ID NO: 554305 - DNA, 100 bp, Homo sapiens
cagcacctttcggcttctgagacggcggcagcagcggcattcaggctctgtgtgctccgggatggagcaggtgtgcagagggtgagaacccagctctggg

SEQ ID NO: 554306 - DNA, 99 bp, Homo sapiens
tggagcaaggaaaagagccctggaatatgaagcaacatgagatggtggatgaacccacagaagatgaacaagtttctgctgtttgaggcacagactttt

SEQ ID NO: 554307 - DNA, 90 bp, Homo sapiens
aaacaagccgtggaataggtgtatcaagtaatggtgcaaagcctgaaggcactccacagaaggatgttattatcaagtcagatgcaccgg

SEQ ID NO: 554308 - DNA, 75 bp, Homo sapiens
gaagcagccgatccagcctgcggagcctgtggggcagggattacatctactacaacgacgtgtatgcctttaatc

SEQ ID NO: 554309 - DNA, 139 bp, Homo sapiens
gccagctcccgcggactgctgccgcctccttaccatgaagccagtaagtcgtcgcacgctggactggatttattcagtgtaccaaacgattccctggttatgattctgaaagcaaggaatttaatgcagaagtacatcg

SEQ ID NO: 554310 - DNA, 100 bp, Homo sapiens
cgagtgcttctgaaacgtcagctgcgctcccctaggagtgctgagcccgcggaaccgcagccatgaactccaacgtggagaacctacccccgcacatcat

SEQ ID NO: 554311 - DNA, 99 bp, Homo sapiens
gatctccgctttcgaagcattgtacagtgtgtgagagaatctggctccttgaaccctgaccatgggcctgcggtgatccactgtagtgcaggcattggg

SEQ ID NO: 554312 - DNA, 80 bp, Homo sapiens
cgtgaaggggcccttctcggtggaggccgacccatccaggttgatctcctatcaagagtttttggcatttgaatctgttt

SEQ ID NO: 554313 - DNA, 75 bp, Homo sapiens
gagacgtttcgggagccggagtctctccaccgcagacatgacgaaggagctcttgtccctggcaaagcgaaagcg

SEQ ID NO: 554314 - DNA, 50 bp, Homo sapiens
aacaagctgaagaaatggcatcagatacagtttatgtaacttgatggaag

SEQ ID NO: 554315 - DNA, 82 bp, Homo sapiens
caatatctgtcttcggtggactccttcggcagtccacccaccgccgccgcctcccagatgatcaagcggtgctgattcacga

SEQ ID NO: 554316 - DNA, 100 bp, Homo sapiens
gaaactgagtatgggatctgatgatgctgcctacacacaagagtgcttgtgcacagagctcgaaaactagctcaacaatactatcttgtgtaccaagaac

SEQ ID NO: 554317 - DNA, 51 bp, Homo sapiens
cgtgggcgtaggaccctccgagccagaaatggggtttcaccgtgttagcca

SEQ ID NO: 554318 - DNA, 50 bp, Homo sapiens
cctgagcttgctgtcagcaaatgtttgtgattcgcctttgccagtctcat

SEQ ID NO: 554319 - DNA, 80 bp, Homo sapiens
gaggcacggagggtggcgaggcagttccagtgtctcgccccatcctcaccctcagggttcccagggcccaggctgtggtg

SEQ ID NO: 554320 - DNA, 95 bp, Homo sapiens
cagcacggggacctgaagctgcttcgggaggctgaagccgacgtagcttctctgaacagacgcatccagctggttgaggaagagttggatcgtgc

SEQ ID NO: 554321 - DNA, 74 bp, Homo sapiens
catgaaatggtggatgaacccccagaatttcttgaggttggcaaaaagcagcctgctctggatgttctttatga

SEQ ID NO: 554322 - DNA, 74 bp, Homo sapiens
ggaccgggatcgtgaccgtggagggctgcgggcctctcgggtgcttcttgtcggcttgaaaggacttggggctg

SEQ ID NO: 554323 - DNA, 100 bp, Homo sapiens
aaaggaccaagtaacacagctttcacaagaggctatgcctttctgctgttccaagaggaaagctcagtacaagctttgatagatgcctgcctagaagaag

SEQ ID NO: 554324 - DNA, 80 bp, Homo sapiens
tatactcctcccagtgacgggtctggagtgcgtgggggaccggctgttggcggacaggtgctctagttcacagctatagg

SEQ ID NO: 554325 - DNA, 94 bp, Homo sapiens
cgccgattccggatctcattgccacgcgcccccgacgaccgcccgacgtgcattcccgtaggagctgtggcgcggggccttccaggagtctgag

SEQ ID NO: 554326 - DNA, 100 bp, Homo sapiens
caagacacttttcagaaagacagtcctgaatggggagcttacaggaggggccttccgaaatgggcgtcgagcatgcctgccagctccttgtcctgacacc

SEQ ID NO: 554327 - DNA, 80 bp, Homo sapiens
accgaaatagactctgaagtaatatctggactttgaaattatgaacacaatgacgtacagaagaaaacctttaccaaatg

SEQ ID NO: 554328 - DNA, 95 bp, Homo sapiens
tgcagattttgtggatcaatattattatggatggacccccagctcagagccttcgacgacgcagtggaagaacgagtgatcaacgaggaatacaa

SEQ ID NO: 554329 - DNA, 95 bp, Homo sapiens
ctggggcactgtccaccgccgcgagggcctgatccatcccacgacgaaatctcacaaaactgtcccttatcttcagtcacatgctggcagaaatc

SEQ ID NO: 554330 - DNA, 99 bp, Homo sapiens
cggcttgtccctgtttcgccacagttcctaccttatgagctcggttttcttatgcttataagagtggaacaggcccgccatgttcatagaggataaagc

SEQ ID NO: 554331 - DNA, 75 bp, Homo sapiens
cgggaacagccatgcaaaggcaggggaggaagccacctcgagaccagcatctcagacatgtcgaaaaagatgttt

SEQ ID NO: 554332 - DNA, 82 bp, Homo sapiens
agcgttctgcgtcatgggggagtgctgatcaactaaaagagattacctaggaacagtacgatttggggttatcacaaataaa

SEQ ID NO: 554333 - DNA, 50 bp, Homo sapiens
ggtgacacgcttccctggattgggtgttcctgcatgaagccaccgtgcgc

SEQ ID NO: 554334 - DNA, 100 bp, Homo sapiens
agagaatccctcaacatgctggttgacatcatggacatatgtgagtccatcctggagaggaagcggcatgacagcgaaaggtctacttgcagcatcttgg

SEQ ID NO: 554335 - DNA, 82 bp, Homo sapiens
ggaaaacatcgtggccaacacggtcttgctgaaagccagggaagggggatatgagactttctactcggaatatcctgagtgt

SEQ ID NO: 554336 - DNA, 83 bp, Homo sapiens
ctcataacagttgatgaaaaattgggaacatccttctgtatcagaaattcccatgtttccatatccagatttcttcaccaagg

SEQ ID NO: 554337 - DNA, 104 bp, Homo sapiens
ctggagcctcagttggaagcagccgatccagcctgcggagcctgtggggcagcccaccttgggacaccttgactccaagcccagcagtaagtccaacatgattc

SEQ ID NO: 554338 - DNA, 75 bp, Homo sapiens
tgaagactacagagaagcttcttcttgtgccgtgaacctcgttttgagattaagccagcacctaaccaagtcact

SEQ ID NO: 554339 - DNA, 100 bp, Homo sapiens
caaattctgaggcatttagcaggaccccaaagtgagaaccaggccatcaaccgtgctatgcagaaaccccaggaagagtacagcatcggtgtgctggaca

SEQ ID NO: 554340 - DNA, 98 bp, Homo sapiens
gccaggcctgcgcgggcccgaggccggaggaacccggactccggcgtagcgttgaagattcctgtctctggatccaaatcagagggccttctctacgt

SEQ ID NO: 554341 - DNA, 100 bp, Homo sapiens
caagcgcagggggacggggaccagcagctgtcgccgccgctctcaggatctggagtgggagagcaggatgggggactgatcggtgccgaagagaaagtga

SEQ ID NO: 554342 - DNA, 83 bp, Homo sapiens
ggatacaggactcagactcttactggctgacaaacgggctcatcataatgcactggaacgaaaacgtagggaccacatcaaag

SEQ ID NO: 554343 - DNA, 97 bp, Homo sapiens
cagattcgaattttacttctgaacgaaatggagaaactggaaaagaccctcttcagacttgaacaagacaaatttacatgtattggagaccagacca

SEQ ID NO: 554344 - DNA, 76 bp, Homo sapiens
gtatcttcatggtgcggctcatcttcgagaggcaacaagaatgggtgaatcagcaaagggaagatattgaaaggca

SEQ ID NO: 554345 - DNA, 100 bp, Homo sapiens
ttgtgtatgtagaagaccagaagtggatggagaaatgaaactagtgatcgagaagatggcctccccaaaggacatcatgtgacagactctgagaacgatg

SEQ ID NO: 554346 - DNA, 82 bp, Homo sapiens
cctgtgtgggcagctggagccttcagagttttgattcatcatggataatctgtcatcagaagaaattcaacagagagctcac

SEQ ID NO: 554347 - DNA, 83 bp, Homo sapiens
gaggacatggacctgtacagcatcaactacctgcactttggggagcctaagtcctggccctgggaggagcggggacactgagg

SEQ ID NO: 554348 - DNA, 83 bp, Homo sapiens
gacgggagccccatggtccggaagggagcatttcctgaagacgtagtcatgcagcacgtcagcagctcccagagcagccagcg

SEQ ID NO: 554349 - DNA, 75 bp, Homo sapiens
gtggaggacgaggggctccgggtcttccagagcgtgaagatcaagatcggtgtggacactgccagcggctgcagc

SEQ ID NO: 554350 - DNA, 100 bp, Homo sapiens
agcgctcagaagaacgcttcgcccgttggtgctataactggcatcaaatactcacaacatagctcaggatctgtcaaacaaaagttcttatggactcaaa

SEQ ID NO: 554351 - DNA, 100 bp, Homo sapiens
aaaagcagtgtcgacttaaagaccctctgcattagtcctcgggagcactgctgggttctctatgtggatgtgctggttcagattcagaacaagaaagtgg

SEQ ID NO: 554352 - DNA, 50 bp, Homo sapiens
agtggaagaatgtggagctcaacatccacaagacacccactgcagacccc

SEQ ID NO: 554353 - DNA, 75 bp, Homo sapiens
gaccgtgaccgagagcgtgaccgagagcgcgaatatcgtcatcgttagaagttggttaccacagagaagcgcttc

SEQ ID NO: 554354 - DNA, 96 bp, Homo sapiens
atttgacctcttggtttcagagagctccctggaccatctaatggctatgggagatgagggtctccccagacacccgagcacccacccgcttcgtgg

SEQ ID NO: 554355 - DNA, 100 bp, Homo sapiens
tacagctggagcgcccagaggcgagccctggtggaggaagagtcaaatgtcgctgcctccaatgccaagctggctttgttttatgactggctgttcttta

SEQ ID NO: 554356 - DNA, 100 bp, Homo sapiens
cacaagagctcttctctgttcgacatggcccaattcgagcggctagaatcttgcctgctccacagtttggaacacagacagacctatgggaacacacggg

SEQ ID NO: 554357 - DNA, 100 bp, Homo sapiens
ccttggcaaagctgccagagatattttcaacaaaggatttgtcactattccaggtcctcaggatatagccgtgacctaaacacagaaatctaccctggcg

SEQ ID NO: 554358 - DNA, 82 bp, Homo sapiens
tcaacaatgattgctcaagacttctttgtggctttgctaaaggacaggtcaataactgggagatggacaaactagagatgga

SEQ ID NO: 554359 - DNA, 100 bp, Homo sapiens
gcagcagaaggagcaggagcaaggtgtctgacttccagcaactgctggcctgtgccagggtgcaagctgagcactggagtggagttttcctgtggagagg

SEQ ID NO: 554360 - DNA, 100 bp, Homo sapiens
ttccagtccaagtcaccatcccccatgccgccagaggcccccaaccagatgacaacggcaacacgacaagaagtccttggcctctaccgcagcattttca

SEQ ID NO: 554361 - DNA, 100 bp, Homo sapiens
aggtgccaaaaacagaaagaaagaaaagaaggaaaaaggaaactgatttgacatggatgggtgcaaaaaagagctgccccgcttgcaagagccggaggag

SEQ ID NO: 554362 - DNA, 97 bp, Homo sapiens
cgcagtcgcccgcaaccggggcgaatcatggcggccgccaagacaatgcagatcttcgtgaagactctgactggtaagaccatcaccctcgaggttg

SEQ ID NO: 554363 - DNA, 100 bp, Homo sapiens
tttttgagccttacggagccgtctaccagatcaacgtcctccgggaccggagtcagaaccctccgcagagtaaaggttggttcttacttgaaatctccaa

SEQ ID NO: 554364 - DNA, 75 bp, Homo sapiens
gccccacactggcggatgaagcagctggtggggctctactgcgacaaggttacagaaattatctcagagattcgg

SEQ ID NO: 554365 - DNA, 82 bp, Homo sapiens
atgagaccctggtggagtttgctattgctggaccagctattccttctgttgtggcgtatccgaaaaggagtcagaccagcac

SEQ ID NO: 554366 - DNA, 78 bp, Homo sapiens
gcaaagtaaatgctgtcttttcccaaaagacaggctcttcacctgaagctttctaaaaccaatttttccaacaacaac

SEQ ID NO: 554367 - DNA, 98 bp, Homo sapiens
tttgtcgccagaaggaagatggcggatctggaggagcagttgtctgatgaagagaagtggttcctctggagattaaatgtacttcacagaacctcagc

SEQ ID NO: 554368 - DNA, 75 bp, Homo sapiens
catggtggacagaaagtcagcctcttgtggtgaaatgacaatggatgctctgttggctcgattgaaacttctgaa

SEQ ID NO: 554369 - DNA, 75 bp, Homo sapiens
acccactggaagcctagaaatgccattgatctgatgtacggaggcatctactgttttctgtgccaggactacatc

SEQ ID NO: 554370 - DNA, 80 bp, Homo sapiens
gcttggtttcggcatccttcttacgtcgggtggttttactggagtattggaactcagacaaatttacatgtattggagac

SEQ ID NO: 554371 - DNA, 139 bp, Homo sapiens
tggtgcttttgaaccactggaaagtgaggaattttgaagtacaccgtggtgacattgtatcattggtgaaactgattaaagatgttacagaaatgatggctcaagtagaagtgaaattatctgacacaacttcccaaag

SEQ ID NO: 554372 - DNA, 75 bp, Homo sapiens
gcagaaaattacctaaatgcactctttcgaaagaaagcttatatagaattggtgataggatcacaacttctgagg

SEQ ID NO: 554373 - DNA, 96 bp, Homo sapiens
cgccgcacggagttgcgtcccggggacttggggccgcagggagtattctaccttgtaaatactgttatttgtatatactgtaaatgatgacatcgg

SEQ ID NO: 554374 - DNA, 90 bp, Homo sapiens
agaactcctgaatcgtttgtgttagcaagtgaacatagagggagcaaaggagtttgctgctgctctcaccgctgagcggataaagacccc

SEQ ID NO: 554375 - DNA, 98 bp, Homo sapiens
ggagatgctgatcgggacccccccgcagaagggaactctaatgatccaggacaaagaagttaccctggagtatgtatcaagcctggatttttggtact

SEQ ID NO: 554376 - DNA, 83 bp, Homo sapiens
tcaaggttacggaggcagtgacggcgtgatggtgggcatgggtcagaaggattcctatgtgggcgacgaggcccagagcaaga

SEQ ID NO: 554377 - DNA, 75 bp, Homo sapiens
aggaaccttttagtacttccgttctccctggtctataacaggaatgccccttacccagcagcaggcagatatggc

SEQ ID NO: 554378 - DNA, 82 bp, Homo sapiens
ctggactgtcctctacagaaggaagcacaaaaagggacagtcggaactagaggctgctatccagccagatactagcctggtg

SEQ ID NO: 554379 - DNA, 101 bp, Homo sapiens
ctgctgcctagtgatcctgagtacaacacggtggcaagcaagtttaatcagacctgctcacacttcagaatagagaaggatgagattcatcttctccacga

SEQ ID NO: 554380 - DNA, 74 bp, Homo sapiens
gctgctaaaccgggatatccaggaagaagaagcagacgttgaaggcattcagtataaaacacttcgaacatttc

SEQ ID NO: 554381 - DNA, 73 bp, Homo sapiens
gggcaccggggagccggccttggacacggaaactgcagctgaggagccattgcagtcccatctccagaagacc

SEQ ID NO: 554382 - DNA, 95 bp, Homo sapiens
tgcacctggagatgctgttcataagatctacccaagtgcatatataaagttggctggggaacagaccagggaattggtggatttggagaagagcc

SEQ ID NO: 554383 - DNA, 100 bp, Homo sapiens
atacaccatcttggttacataatgaagggggcagctggcattttatgctatgtgggagcctatgtcttcatcacttatgatgactatgaccacttctttg

SEQ ID NO: 554384 - DNA, 100 bp, Homo sapiens
cagaagagggcaaaggcgtgtttgactgcaggaagaacgtgctgggtcacatgcagcaggaaacccgaaccctagcggagattgccaaagtggagctgga

SEQ ID NO: 554385 - DNA, 98 bp, Homo sapiens
ctgcctcggcggagcagaggaaccacacgctgatcatggtatagctgtggaccaactgtatatgatcatgcgcaccttggccatgcttggtgagtttc

SEQ ID NO: 554386 - DNA, 100 bp, Homo sapiens
cctcaggagagtggcccacgcagctggatgtaccgcatgtgatcactctgggactcgtggggctgcagcaccggaccaaaatgtctttgactccaagaag

SEQ ID NO: 554387 - DNA, 74 bp, Homo sapiens
tggtgaagtggaaaggatggcccccaaagcagttccggcgaggggggagcctcagcaggattgctgtgtgaaaa

SEQ ID NO: 554388 - DNA, 85 bp, Homo sapiens
acaccaaaccctgggttagagcaagctatcatggtgaacttacttcagattgtgcgggaccactgggttcatgttcttgtcccta

SEQ ID NO: 554389 - DNA, 142 bp, Homo sapiens
ctcccagcccggtgagacctgcctgaatggcgggaagtgtgaagcggccaatggcacggaggcctgcgtgacggggaggtttactgcatcgacgcgcggttctacgggaacgtcagccggttcatcaaccaccactgcgagc

SEQ ID NO: 554390 - DNA, 75 bp, Homo sapiens
atgcttactgttgcgtggttcgttattaacaggaagcaagatttccagatgtagcaaatgggtttattgaggaaa

SEQ ID NO: 554391 - DNA, 96 bp, Homo sapiens
gggccttcttggcattatttcgccttatgacccaggactattgggaaaacttgtatcaattggtgagtggcagtgtgatgagtgtttatagtggag

SEQ ID NO: 554392 - DNA, 98 bp, Homo sapiens
gggcctgcaatggctccaggaacagctgtgaaggtgatcataaggtccacagattattagatggcatgtcaaaaaatccttcagggaaaaacagagaa

SEQ ID NO: 554393 - DNA, 75 bp, Homo sapiens
tggctcccttctgccccagctccgtctcggcggcggcggcgctgcccctggcccctctggagctcagcagggagc

SEQ ID NO: 554394 - DNA, 100 bp, Homo sapiens
aacagagttacatagctgctatcagtgcccgctttgttcagctgcagcatggagagatagataaacggtttccacgggctcccttgctcagcagtatgcg

SEQ ID NO: 554395 - DNA, 83 bp, Homo sapiens
cagggaaccctggtcaccgtctcctcagcaaaagactgttgaagtagagagcattttgcccagctcactcggattctttgctg

SEQ ID NO: 554396 - DNA, 100 bp, Homo sapiens
cttttgtaaatctctttcgttttaacaaagatagagaagctattctggaatcagatgccagagtgaaggaacaacgtaaaggagctggagagaaagcctt

SEQ ID NO: 554397 - DNA, 98 bp, Homo sapiens
tataacatgcagatcgacttggtggaagcacacagagactcggggctcggagcccgcctgagcgagccccccggagatggcggccccctatcccggca

SEQ ID NO: 554398 - DNA, 74 bp, Homo sapiens
gccttcgccctttccacctcgcggcagttcgcttaaagcttttcaagccaggccaagaagctgtgaagtaccag

SEQ ID NO: 554399 - DNA, 100 bp, Homo sapiens
agcgagcagcgacgcgaggggcgcgcggagatggcagcgtccagcaactccagcctgtccggctcgtcggtgtcctccgaaaacgttgtgtgacgtgatc

SEQ ID NO: 554400 - DNA, 75 bp, Homo sapiens
gagagtcaccacaaggccaagggcaagtgatttgacaggagaacctccatttctaccagaatcctttgaccgaat

SEQ ID NO: 554401 - DNA, 83 bp, Homo sapiens
caaggataagggcgacagcaacagctctgccggctggaaggctactgcagcactggggtgtcagttgttggtccgacccagaa

SEQ ID NO: 554402 - DNA, 75 bp, Homo sapiens
gttcctccaggtttgccatcttcagacattggctccctggattatcaagagtttgtagttgacattgaatccagg

SEQ ID NO: 554403 - DNA, 98 bp, Homo sapiens
ttgccccgccaggaacccctgagggtacaggtttgcagattccgccagcagcacagcaagctctacagatgagtggctctttggcatttggtgctgtg

SEQ ID NO: 554404 - DNA, 51 bp, Homo sapiens
gggtccatgccactgtctactcccaggatgttttagaagaatgtatgtctc

SEQ ID NO: 554405 - DNA, 76 bp, Homo sapiens
ggaggcctggggaccatgggctccaggatcaaagttcttggagtctctgcggagtccctgggccagatctcacagt

SEQ ID NO: 554406 - DNA, 80 bp, Homo sapiens
tgagggagctgcttctgatttggactgttaaatagggtttggtgcaattctccattaatgaagataacatttgaattccc

SEQ ID NO: 554407 - DNA, 99 bp, Homo sapiens
gccctcgctcgttcaccgactcacacgggacgcccccctggcagtgcttagagccttcaaggttgggggccgtcccgctcctaaggcaggaagatggtg

SEQ ID NO: 554408 - DNA, 83 bp, Homo sapiens
gcggcactgatttgtccctggggcggcagcgcggacccgcccggagatgagatgaaggatttgggggcagagcacttggcagg

SEQ ID NO: 554409 - DNA, 100 bp, Homo sapiens
ctcgtgaccctggaggagttcctcgcatccactcagaggaaggagtttggggacaccggggagggctgggaggccatctggacccgcttctttcctgcct

SEQ ID NO: 554410 - DNA, 95 bp, Homo sapiens
tagtgaggaagtggtcctaactcctgcagagctcattgaaagattggagcagattctataccagactgttacaggattgaagaaagatttgtcag

SEQ ID NO: 554411 - DNA, 100 bp, Homo sapiens
agagctgtggcccgggggcctcttctggaccaggaaactctccaccagcagccgctcttctaaaacattcaaaccaaagaagaatatccctgaaggatct

SEQ ID NO: 554412 - DNA, 83 bp, Homo sapiens
cgaggatgccgtacgagatcaacaatgcagatcttcgtgaagactctgactggtaagaccatcaccctcgaggttgagcccag

SEQ ID NO: 554413 - DNA, 50 bp, Homo sapiens
agcagatggcaactctgatcccaactctgagcttgtggacaaatgtatag

SEQ ID NO: 554414 - DNA, 112 bp, Homo sapiens
tcaaaattaaaagaggagcagcatggcatttcagtcactggtttgcagagtccaggaatggaagttggatacactttgtgacttgtacgagacactgaccattacacaggct

SEQ ID NO: 554415 - DNA, 97 bp, Homo sapiens
atgggccgctgacatgaatatggagtagttttctctagcaaaggtcacagcaacagcccagcaggcagtgtggcccactctaccacctccgacatca

SEQ ID NO: 554416 - DNA, 74 bp, Homo sapiens
gccgctgcctcaggagcggaacaacgtcggcgagcgggactctatcaagaagaatatctaatccgtaccttgaa

SEQ ID NO: 554417 - DNA, 100 bp, Homo sapiens
atcactaaatactactctgaggggcttagaaattaacaggctgcacatcattgactcctgggcccaactgtgaccgatttaaactgcacataccatatgc

SEQ ID NO: 554418 - DNA, 100 bp, Homo sapiens
gaaaatgcatctcagacatttgatgacctccctgcaagatttggttatagacttccagctgaaggtttaaaggtatttcaggacagccaggagggggcgc

SEQ ID NO: 554419 - DNA, 82 bp, Homo sapiens
cgtgctttccgcgggtctgtccgggggctccggaccctcggcgcagggctgtcacatggtgactgaagaacttcattccata

SEQ ID NO: 554420 - DNA, 145 bp, Homo sapiens
ggaactggagaggaccaacaaattcatcaaagacgtaatcaaagacggcaacgcgcttatcagcgctatgagaaggccagtggggagtgacggcagcagaggaagaggaggaaaataagaggattggagaatttaaagaatctat

SEQ ID NO: 554421 - DNA, 82 bp, Homo sapiens
gtggacagcgccgtggccgcgctgctgctgaggcggagaggaggcactggctacaattaggcttctcgacgtcctgtgcgaa

SEQ ID NO: 554422 - DNA, 71 bp, Homo sapiens
acgtctcctcccgcctcaccacagctgtcgcctggttgggcccggaaatgggacgtcgcgctttctcaggg

SEQ ID NO: 554423 - DNA, 75 bp, Homo sapiens
ataaaactgaccatagccagagaacagccctccatcttgcagcccagaaggaatggagcagagaggtaacaacga

SEQ ID NO: 554424 - DNA, 83 bp, Homo sapiens
ctgtctgcggtccacatccaaccttttgacattatctcagattttgtcttcagtgaagatcttagcaaagcaatgtctcaaga

SEQ ID NO: 554425 - DNA, 100 bp, Homo sapiens
gactgctgtagttcagaagaggtttggctttccagagggcagtgtagagattagcctgaggcctgctcagtcgttcctaatgaataaaaatcaagtgcca

SEQ ID NO: 554426 - DNA, 75 bp, Homo sapiens
caggaccctcagggagagcgggcagccttccaggtggacaggatgaagtaggtgttccaggtagcaattcagctg

SEQ ID NO: 554427 - DNA, 101 bp, Homo sapiens
accaccactctcattagtgagaatggtcatgctgccgacaccctgacggccacgaacttccgagtggatggcaccgaaagcgaaggaagctcctgctcctc

SEQ ID NO: 554428 - DNA, 82 bp, Homo sapiens
ctctcggccagcgcctccgcggctcacgaggcccagggaatcctctggaccatcagattaccaatgaaagaggagaatcaag

SEQ ID NO: 554429 - DNA, 75 bp, Homo sapiens
ccgccgagacccagcacatcgccgaccagaaaaagcttgtggtgaaggggggcaaaaaaaagaagcaagttctga

SEQ ID NO: 554430 - DNA, 83 bp, Homo sapiens
aagaagttgagaccgagaatgtggaaacaggaacttagtgatttggcccgtgaccctccagcacaatgttctgcaggtccagt

SEQ ID NO: 554431 - DNA, 100 bp, Homo sapiens
ggcgggtgaccctgttcctgaacggcagccccaagaacggaaagggatctaccgaacagaaagggacaaagggacattgtatgagctcaccttcaaaggg

SEQ ID NO: 554432 - DNA, 90 bp, Homo sapiens
tactgcatcattttgtatcccaccagcaatgaatgagcgttccagcttctccatcttttggagaaatctcgtgctatccgccaagccaag

SEQ ID NO: 554433 - DNA, 75 bp, Homo sapiens
ctgtcccaagcaggagaacattgcagtgtttctgaaagatctatccagcactccgatggccagcaacaacaccgc

SEQ ID NO: 554434 - DNA, 100 bp, Homo sapiens
gtgaagtgatatcactgcctctgtggacaagacacctccaggagcccagctcacagccaccggtaccttcttccagaatcccacgtggcgaagtctcgat

SEQ ID NO: 554435 - DNA, 82 bp, Homo sapiens
gatcagatcgatctaagatggcgactgtcgaaccggtcgcctgcgaggccgctggccaggcctgagcctctgccaccatggc

SEQ ID NO: 554436 - DNA, 74 bp, Homo sapiens
cggagtttgagccccggaggcagagcggctgccatggatcccatgacagattctgttgtcacgtctccttacag

SEQ ID NO: 554437 - DNA, 103 bp, Homo sapiens
caagaacaagaaaaataagaagaagaaaggagacagagtcaacaattcaattgctggacacctgttctgctgttgtgtcctgccattctcctgaagaacagag

SEQ ID NO: 554438 - DNA, 80 bp, Homo sapiens
ttacagatgcaggatcggaaagaatcccggccagacgtgcgaacagctccagctggcatatagcactttctacattgtgg

SEQ ID NO: 554439 - DNA, 100 bp, Homo sapiens
cgcaacatcaagggagttttccggggccctctcagcaagaacgggaacaaaactctggagtcgttcacgcctactgaggagcatgtgttggtggtgcgcc

SEQ ID NO: 554440 - DNA, 100 bp, Homo sapiens
atggctcattgtagcctcaaactcccaggctcaagcagtcctaccatgtcagccttcccagtagctgggaccacagcagccctagcaaaccaagagtgag

SEQ ID NO: 554441 - DNA, 100 bp, Homo sapiens
aagttagattaccaccaccacctgatataaaaaaagaaattagtgaaggagatgaagtagaggatgagaacaagttgagcagtgccaacggccatgaaga

SEQ ID NO: 554442 - DNA, 75 bp, Homo sapiens
ctaacgctggccgacaacagcctggcgtccgccacgatcactccaagaactgaggcccctgtcagcagtgtcagt

SEQ ID NO: 554443 - DNA, 96 bp, Homo sapiens
aaggcttgtaatccaaagttactttggtgtcatggagaaactccagctgggcccagagattctgcagcgggaaaatccaaggcttatttatgccag

SEQ ID NO: 554444 - DNA, 100 bp, Homo sapiens
tctctgatcttcctgcatggctcaggtgaaacctaaacatttgtcttgcattggagtctgttcttttttgctggctgctagaatagttgaagaagactgc

SEQ ID NO: 554445 - DNA, 100 bp, Homo sapiens
ggcaggatggctgcgttgacacgtcttatttaatccacatcatagaactgggaccctggaacttggggataaattgctcgcaatagataatatccggctg

SEQ ID NO: 554446 - DNA, 100 bp, Homo sapiens
gcgattgtggaagctgctcgggaattggattatgaacgcattcataaaaaaatgctaaagccagcctttatcttcgatggacggcgtgtcctggatgggc

SEQ ID NO: 554447 - DNA, 101 bp, Homo sapiens
ggattactcgcccccacctgtggactctgaccgcaaacaaggagagcctactgagcagcctgagtgggttccagcaacagatagaaatgctttaagttcac

SEQ ID NO: 554448 - DNA, 83 bp, Homo sapiens
tgaccattttctactgtccctgcgcgaggaccaggaatcaccttcaagcctatgtcgtgaggctttggcagaaattaagaagg

SEQ ID NO: 554449 - DNA, 98 bp, Homo sapiens
ttggggtgagaccctcacttcatccggtgtcctgtggccaggcggaaagcagtgagaagcccaacgctgaggacatgacatccaaagattactacttt

SEQ ID NO: 554450 - DNA, 98 bp, Homo sapiens
gccgggacgggggtggccgtgcaggtcaaaatgcagatcttcgtgaaaacccttaccggcaagaccatcacccttgaggtggagcccagtgacaccat

SEQ ID NO: 554451 - DNA, 80 bp, Homo sapiens
ggaggagtgcggcgcggcggccccgggaccaaggagaccatggtgaatccgggcagcagctcgcagccgcccccggtgac

SEQ ID NO: 554452 - DNA, 74 bp, Homo sapiens
aaaaacaatagctcaaggaaacctttccaacacagatgtccaagctgccaagatgtacagttacccagcacgtg

SEQ ID NO: 554453 - DNA, 100 bp, Homo sapiens
ggagaagaatgagccgaagatgagcgaagccaaaaattatctaagcagtatccttaaccatgggaggctctcggtggagccagctggactggaggaggtg

SEQ ID NO: 554454 - DNA, 82 bp, Homo sapiens
gccgaaaggcccggaagcagaagggtgccgagacagaactcgtcagattcttgcctgcagtcagactcagtcacatgcccac

SEQ ID NO: 554455 - DNA, 83 bp, Homo sapiens
cccaaggattctgggggaggcctcagatatcagttttagagaatgtggcgtggagaaattctcaaggaaagagtaaaatgctg

SEQ ID NO: 554456 - DNA, 105 bp, Homo sapiens
ctcagctacccccgcacccacgcggccctgctgaaagtggcgcaaatgcatatagcactttctacattgtgggtttaatattatcaatgcagataccttttgtgg

SEQ ID NO: 554457 - DNA, 50 bp, Homo sapiens
agcggcgagcagaactacggcgagcggaaaaggtgtgagcggtactgggc

SEQ ID NO: 554458 - DNA, 100 bp, Homo sapiens
gtcagaggtgggcggctttgaccgagaggctgctggagctcgtgtttggacgccctgccacagtgactcaggtcactcaaggaactatccgaccagctgc

SEQ ID NO: 554459 - DNA, 98 bp, Homo sapiens
ggacaacaagtccacaacctgcttctcacctacctgatagtattttcctgacagcagcccttggatttcccgaggctttgattcctgttcagctgctc

SEQ ID NO: 554460 - DNA, 90 bp, Homo sapiens
cgggcatggtggtctggggcaacgcggaaggaattagcttaccgaaaggagatggtgagagctgacctaattaacaaaaaagttggaatc

SEQ ID NO: 554461 - DNA, 83 bp, Homo sapiens
gctatattgtcgatgattcagtcagagttttgtaggaaattgtgagattgatttggagatcaaacgatatttttgtagagctg

SEQ ID NO: 554462 - DNA, 100 bp, Homo sapiens
aggcgctctgaccactctccagcaccagcttccagttagtggatatagcacaccatccccagccagagttaaagttcctcgtaattttcgcttgttggaa

SEQ ID NO: 554463 - DNA, 107 bp, Homo sapiens
cggaggccagcggccgggatagccccggcggagcccgcagcttccctgccggttttaaaatcaaagatgggaaaatcggagaaaattgcccttccccatggccagct

SEQ ID NO: 554464 - DNA, 74 bp, Homo sapiens
accgggtccctcgcccaggtccccttggacaaatggaaccaccaccacctaaaatccccaaaattgagaccact

SEQ ID NO: 554465 - DNA, 100 bp, Homo sapiens
tctggggagaagcccaacaagtgtacgatttgctgaccatgaaagaatatcactgtttgctgcaattactgtgtcctgatttcccgctggagctcactca

SEQ ID NO: 554466 - DNA, 99 bp, Homo sapiens
caaactccaatggcccaaaacccacagaagttgtattagatgatgacagagaagatctttttgcagaaaaggatgcgcctccacttagcaaggctgggc

SEQ ID NO: 554467 - DNA, 100 bp, Homo sapiens
gagtagcgagtcggcaacccggagagttggccaccctgttcaagggcttaggagaaagtcaacacacttcgcaacttgaattggtcccagctgctcccag

SEQ ID NO: 554468 - DNA, 98 bp, Homo sapiens
gatgtttcctgaaatgtccatccacttatccagacccaatggaacatcagcaatgcttctgaatcaggaaacccaggcccaacggcaggtggatgcaa

SEQ ID NO: 554469 - DNA, 88 bp, Homo sapiens
aaagggcagtcggcggagcttcgccaaggctggcgcagtcggttatcttatgatgaggcttttgctatggctaatgatcccttggaag

SEQ ID NO: 554470 - DNA, 96 bp, Homo sapiens
gctgacattaccttgaatatggttacctacctggcagagataacaacgaacttgatgcaagtgataggtttgccaaggtcagacctctcatcatcc

SEQ ID NO: 554471 - DNA, 100 bp, Homo sapiens
cccggggtaggggtctcccgcgagcatgaacaggctgaacactttgccacgaggcttcggctccctgccagctcttgaggttctggacttgacgtacaac

SEQ ID NO: 554472 - DNA, 128 bp, Homo sapiens
ctcgcacatttgacttggaagcaatgtttgaacaaactcgaagaacagctgtggaaagaagttgcaaaacactggattatggattggatatgtctacttctggatgcaaattttactgttgttgtaat

SEQ ID NO: 554473 - DNA, 100 bp, Homo sapiens
caaggaagccacgtgcagacatctacaaccttcgatctcctgacgagatagaatttttgcggcatttgaagagctttttccagattatgtttaaaattga

SEQ ID NO: 554474 - DNA, 90 bp, Homo sapiens
catcccagacgaagacagtccctggatcaccgacagcacagacagaatccctgctaccacctatacggttcagacatccgagagcatgac

SEQ ID NO: 554475 - DNA, 82 bp, Homo sapiens
ctagattttctctcaaactacgaggatgtcagtgggggaggacccgcacgttcttacccagttggaggcctttgttactatc

SEQ ID NO: 554476 - DNA, 82 bp, Homo sapiens
tgagcgctggcctgctagtggtcatcctgaagttcagggcgacagctcagtgaagtcttcattcagttaccttcaaggaaag

SEQ ID NO: 554477 - DNA, 100 bp, Homo sapiens
agcgcgcccgctccggccggccctgcgcctcccgccgcgcccgggatgtattcgtccccgctctgcctcacccagaggccagaccaggagctgaccggga

SEQ ID NO: 554478 - DNA, 74 bp, Homo sapiens
tcggggacattattgcgcgtggaacggctgcttttggaagcacgtcagctaactgttcagatgatgcaaaatcc

SEQ ID NO: 554479 - DNA, 75 bp, Homo sapiens
cctgatctaacccctagaaacaggggctgaagttgttgctttccttctttggccacatagttaatgtgtcccatt

SEQ ID NO: 554480 - DNA, 50 bp, Homo sapiens
ccagaggtggggacatcttttcaaaggtggtataagttgaaatccaaacc

SEQ ID NO: 554481 - DNA, 75 bp, Homo sapiens
caagcttacgtctctgctcttcagtacaatcctgacactttcttcatgagcaacaaaccccaaagatacaaagac

SEQ ID NO: 554482 - DNA, 88 bp, Homo sapiens
gaagctaactattggaaagatctggcgatgacctacaaacagaggcatctttcaacctcatgtgcgacacctcctggttttggcgacc

SEQ ID NO: 554483 - DNA, 82 bp, Homo sapiens
gcggagtggagctcagccaggggcagccggctctggtgctcccagaagaggtgcaaatatatacagagcttcataatcagcc

SEQ ID NO: 554484 - DNA, 90 bp, Homo sapiens
cttggcccttgttcccccaaatgtctgactctgactctcggactgagaaacgcaaggtggacgcggatctgtcaacatgggtaaaggaga

SEQ ID NO: 554485 - DNA, 75 bp, Homo sapiens
aaaatgtcaacaaattgatgggtggatcagctcaagctcaaagtgagtcggctggaggaagagtgtgcactgctt

SEQ ID NO: 554486 - DNA, 91 bp, Homo sapiens
cgcggacatggtcatgagctttgtgaacctgggatgaggaagtacagacaattggtcagatagaactgtgcctcactaagcaagaccagca

SEQ ID NO: 554487 - DNA, 100 bp, Homo sapiens
aatatgaagagacacagtatggtagccacacccccagaatatatcactgatgtccattcgaatgacctgtctacaccacagatccttccatcaaatgaag

SEQ ID NO: 554488 - DNA, 98 bp, Homo sapiens
ccaaaacaaacgctattcctctcacagttcctgagttggaggtagaagaagaaacccaagttcaagagatgactttagatgagtggaaaaatcttcaa

SEQ ID NO: 554489 - DNA, 74 bp, Homo sapiens
gagtgcgtgggggaccggctgttggcgggagaactacgatgacccgcacaaaacccctgcctccccagttgtcc

SEQ ID NO: 554490 - DNA, 82 bp, Homo sapiens
tcagctctgtggaggagcagcagtagtcggagggtgcaggcaaggagatgagacaccatctacaaataatggaagtgatgat

SEQ ID NO: 554491 - DNA, 83 bp, Homo sapiens
aagagctttttcaagcgaagcatccgccgcaacctcagctacacctgccgggaagcctctgcacatcaaaccacgtctgtgag

SEQ ID NO: 554492 - DNA, 58 bp, Homo sapiens
gggccttgccccgggagcccgcgaggagctccatgaacctgcctccagacaaggcccg

SEQ ID NO: 554493 - DNA, 75 bp, Homo sapiens
catattggagtagcgaggaatctgattccaagcaaaaaccagcaatcaaggagaccgcgaaggcgtacattcccg

SEQ ID NO: 554494 - DNA, 101 bp, Homo sapiens
agttccgccatgagctggggcacggagctgtgggacccattccaacaatctcgtaaaacatggtggattactatgaagttctaggcgtgcagagacatgcc

SEQ ID NO: 554495 - DNA, 83 bp, Homo sapiens
cttacctaggaatgagagggacaggagtatctgaggatggagaactcagcagtagagatcttttcctagcaagctgttcacaa

SEQ ID NO: 554496 - DNA, 82 bp, Homo sapiens
ataacaaaagctgctcagagtctcaatgaacttgaataactgaagtgaagtgatggactccgatttggagagtagtaagacg

SEQ ID NO: 554497 - DNA, 75 bp, Homo sapiens
aggctctggaacttctgcccagctctccttggaacttaagagatttgagaacttcataaaatctcgtcctccttt

SEQ ID NO: 554498 - DNA, 96 bp, Homo sapiens
aactgagtcaggatgattgtaagttatggagaggaaacctggccagctctctatcgggctgctgctgggccccttgacatgtctctgccttccaca

SEQ ID NO: 554499 - DNA, 89 bp, Homo sapiens
cgggcagccatggccctccacagcccgcagctatcaagcccagagagagacgtggagagggacgtcttcctgtatagagcgtacctggc

SEQ ID NO: 554500 - DNA, 83 bp, Homo sapiens
ctggccaaactctgctatgacccagattttgccacgtgctgtacgccgacatcaagatggagaatgggaagtccaaggggtgt

SEQ ID NO: 554501 - DNA, 100 bp, Homo sapiens
taaagagaaaaatctggagcagtataatgatctcctgtatcgaaggtctaggtcactagtggattatgaaaatgctaataaagcactggataaagcaaga

SEQ ID NO: 554502 - DNA, 75 bp, Homo sapiens
ctcgaggctgctaagagactaacttttgaggaacttgaaaaagctttgagtacagcccaaaaaacagaggaagca

SEQ ID NO: 554503 - DNA, 75 bp, Homo sapiens
cccacgaatctgcccacccctcctgtaacccagcctgtttcacttcttgattcagccgttggtctttgaaatttc

SEQ ID NO: 554504 - DNA, 101 bp, Homo sapiens
aacagattcagtggcctgcattggactatggcaaggagtctcaggccaaggatgtcattgaagagtatttcaaatgcaagaaatgaagaaataaatctttg

SEQ ID NO: 554505 - DNA, 100 bp, Homo sapiens
gccagagggccgagagccgcggggagaaggccatcacccaggtcagcaagggcacctgcgagcaagccctacctgaacccatccttccatccctccaaaa

SEQ ID NO: 554506 - DNA, 73 bp, Homo sapiens
gccctcaaggtcgtgcgtctgaagcctacaagaaagtcccacgctgctggctccaagcagcacgagagcatcc

SEQ ID NO: 554507 - DNA, 74 bp, Homo sapiens
ccaggatccgatagctctctgcttattaatggttttgatgatgatggttcagaatttcatgaacatatatttct

SEQ ID NO: 554508 - DNA, 51 bp, Homo sapiens
tccacagctgggctatgtggcaacaaattaatgctgaactgttgtttcggc

SEQ ID NO: 554509 - DNA, 100 bp, Homo sapiens
gccgagaggagggcagcccagagccggaaatgaagatgacgccaacagactcggggagaaggtgatcctgcgggagcaggtgaaggaactcttcaacgag

SEQ ID NO: 554510 - DNA, 75 bp, Homo sapiens
caaatcaaccagagggaagaaaatgcaaactgaaacctgggaaacagtgcagaaattacagaagacatccccgtg

SEQ ID NO: 554511 - DNA, 75 bp, Homo sapiens
cgggatcaggagaaacaggctcgccaggtccgaggccccagccagtagagacggggtttcaccctgttagccagg

SEQ ID NO: 554512 - DNA, 76 bp, Homo sapiens
tcagactctgcgaaaggccgagagaagctggtcctgctcacgagagaaaaaggagtacgaggatgtcgtccaggaa

SEQ ID NO: 554513 - DNA, 82 bp, Homo sapiens
gaccgatatagctcgccaggtggtatcacctcttctgggctcaagatggacaacaagaagcgcctggcctacgccatcatcc

SEQ ID NO: 554514 - DNA, 75 bp, Homo sapiens
gggctgagagatgcattggattcagagcatacccgccgcaaggccctcgggaccaaggatcacgtcatgactccg

SEQ ID NO: 554515 - DNA, 98 bp, Homo sapiens
gaagattgagaaaaatcctgctaattgaggacgaggtggatgttatctggtggatgttataggttgcttgggagaccctacaagaagaattttcccgc

SEQ ID NO: 554516 - DNA, 83 bp, Homo sapiens
cacggacactcctgagctacagagactgaagaggactcaggagcaaatcagtaatatcctccccggcgtgaaggtcatcatcg

SEQ ID NO: 554517 - DNA, 115 bp, Homo sapiens
ttgttcccccaaatgtctgactctgactctcggactgagaaacgcaaggcctccggtgtggctgtctctgatggtgtcatcaaggtgttcaacgacatgaaggtgcgtaagtctt

SEQ ID NO: 554518 - DNA, 75 bp, Homo sapiens
tgcacactggctatcattgatccagtttatagaccagcaacagttctacctggctctggacaacaagatgatagt

SEQ ID NO: 554519 - DNA, 74 bp, Homo sapiens
tgaagggcatgtccctgcttgtcagggctgagagcgacgatttaatccagagactgacttcactatagaaccca

SEQ ID NO: 554520 - DNA, 88 bp, Homo sapiens
cgggcgagaagctgccgccgaacgacaggacgttggggcggcctggctccctcagacccaacatgagtgaagtttcctgcaagaaacg

SEQ ID NO: 554521 - DNA, 75 bp, Homo sapiens
gctttgtggacgctggcaacgcattcaagaaagccgacccccaaggcagcagaagaggatgaaacacaaaaccag

SEQ ID NO: 554522 - DNA, 82 bp, Homo sapiens
aggcgctcttcctggtgtcccgcccagtagagctggactggccattatggaggaggagctgcagcattcccattgtgtgaat

SEQ ID NO: 554523 - DNA, 98 bp, Homo sapiens
gttagatctcccatcactaggagttttgctcgagaagccttgaaaccagcgaaacaataatcaaagagcagttctgtcaaagaaaacaacataaatca

SEQ ID NO: 554524 - DNA, 100 bp, Homo sapiens
caacctggagctctacgcctcctacgtttacctgtccatggtaagaactcagggccctatcctcacagcaagtggcaaaaaccctgtaatggagctcaat

SEQ ID NO: 554525 - DNA, 100 bp, Homo sapiens
gtggccccaaactcggtaactctcatataaatagtaattccatgactcccaatggcaccgaagatttagtccatattatcgaaccaaggaaaaacttccc

SEQ ID NO: 554526 - DNA, 50 bp, Homo sapiens
ttaaccgtctgtctgcaacagcagagagttggaaactcaactattggaac

SEQ ID NO: 554527 - DNA, 101 bp, Homo sapiens
gcgggctgagcggcgagtttccgatttaaagctgagctgcgaggaaaatggcggcgggagcttactgaaacaaatgcaggtatcaagtgcttggactccat

SEQ ID NO: 554528 - DNA, 98 bp, Homo sapiens
aagatcgccaagctgtacgagctgcacgtcttcaccttcggcagccggctgtacgcacacaccatcgcaggtgaaatgacaatggatgctctgttggc

SEQ ID NO: 554529 - DNA, 100 bp, Homo sapiens
gaaacagaaacgattgtggaaacaggtccagacatcatctggtctccctgaacctgaaatcacaccatggatgattttgagcgtcgcagagaacttagaa

SEQ ID NO: 554530 - DNA, 50 bp, Homo sapiens
ctcatcccaatggacactgattcagtgtattaaaccgcacccctacgcat

SEQ ID NO: 554531 - DNA, 83 bp, Homo sapiens
ctttcggcggagggaccaaggtggagatcaaacgatttgacgggatctgaactatacacccaggcggccagcctcctgcatcc

SEQ ID NO: 554532 - DNA, 100 bp, Homo sapiens
gcgcagagtgccctacaactacctgcagcgggcctacatcaaggaaagtccatcagcttgataatggaggagaacaatgactccacggagaacccccaac

SEQ ID NO: 554533 - DNA, 98 bp, Homo sapiens
ttggattcctgtacaggagtggtgcagatttgacttgggctcatatgacataaggatgatcatctctggcacaacagctcacttttcttccaaggata

SEQ ID NO: 554534 - DNA, 75 bp, Homo sapiens
ccgcgagcgcggcctgcaggagactctttttgatcagaacaatgctgcaaaaaaagaagagtcagaaactgccaa

SEQ ID NO: 554535 - DNA, 82 bp, Homo sapiens
gaaagtctttatttacagcttcatggagacctggtcaggtgcctggaatacttattaagaaacgatgcaaatccagggatcc

SEQ ID NO: 554536 - DNA, 125 bp, Homo sapiens
gaaaaaacaaaacaaatatgaactatgataagctgagcagagccctgcgatactattatgacaagtgttttaactcaaatgggtgatgaaaaggactcttggaaagtgaaaactttagatgaaat

SEQ ID NO: 554537 - DNA, 74 bp, Homo sapiens
cgtgaacgaaagcagtgacggaggagcttgtaccaccgcctttctgagaaaagtctacagcattctttctctgc

SEQ ID NO: 554538 - DNA, 98 bp, Homo sapiens
ggacccctccttcacgcacgccctgcgcctggtgaaccaaggtctgctgagaacagacccagtccctgaggaaggagaagatgttgctgccacgatca

SEQ ID NO: 554539 - DNA, 100 bp, Homo sapiens
cggccatggctcacctccggggatttgccaaccagatataattgaccctgcaatcctgcgcccgggccgcctggacaaaacactgtttgtgggtttaccg

SEQ ID NO: 554540 - DNA, 100 bp, Homo sapiens
cgtaaagaacgccttctacatcggcagctaccagcagtgcataaacgaggcgcagcgggtgaagggtggagagattcaaccagttagcgtgaaagttgga

SEQ ID NO: 554541 - DNA, 74 bp, Homo sapiens
ggagagattttatgtgcaatacatggcatctagaacctactcttaggattatacttactcagctgttaagagta

SEQ ID NO: 554542 - DNA, 100 bp, Homo sapiens
ctcctgctctgtcctcatccccggcttaggttcgatacaagaggctgttttcctagcgtggcttgctgcctttggtaagaacatgtcgtccatcttgcca

SEQ ID NO: 554543 - DNA, 100 bp, Homo sapiens
ctccgagcagcccggggatccagcacgcagatgggcaccaacaaatgcgccagccagtcgggcatgactgcctacggcacgagaaggcatctctatgacc

SEQ ID NO: 554544 - DNA, 100 bp, Homo sapiens
gtagggatacaaaaggatggtgcaccaaagaacatggctctctatgctgacgtcggtggaaaacaattccctgtcactcgaggccaggatgtggggcgtt

SEQ ID NO: 554545 - DNA, 100 bp, Homo sapiens
agaggaggaaggagggacttcttggcttctcccagcatagccccaggaattacatgaacgacagccttcgcaccgacgtcttcgtgcggttccagccaga

SEQ ID NO: 554546 - DNA, 95 bp, Homo sapiens
ccggacccaaagtgccatgtctttaatgctgttcacggaagaccaggatgtagatgagggacttgtctatgacactgtattcaagcacttcaaaa

SEQ ID NO: 554547 - DNA, 101 bp, Homo sapiens
gccgagtaagaagacatacaaaagcctcttctgaaggaaaagacagtgtagtcctgcaaaacattttgaggcagcaattcccccaggcaagcaaccgtctt

SEQ ID NO: 554548 - DNA, 78 bp, Homo sapiens
cgaaacctggcacggctcttgcttccgatgatgagctagttgtgaaccccaaagtgttccctcacatcaagcttggag

SEQ ID NO: 554549 - DNA, 112 bp, Homo sapiens
ttgccgcagaagattctgtccagtggctcctgaaacatcaccctcagtctctaattaacagaagatggcaaagcccagccacagcagctatgtccttcagcagctaaacaac

SEQ ID NO: 554550 - DNA, 90 bp, Homo sapiens
ggcccggattatagtctctcgccacagcggcctcggcctccccttggattcagacgccgattcgcccagagtctcactctgtcatccagg

SEQ ID NO: 554551 - DNA, 75 bp, Homo sapiens
gaggcattttggggcagaatacagagatatggaatcagcttaccctcttctccacctgctccccggctgcccgca

SEQ ID NO: 554552 - DNA, 74 bp, Homo sapiens
ctggctcttgccctcatcctggttctggaatcctcagttcaagacattgggtttgcctatcacagatgaacaaa

SEQ ID NO: 554553 - DNA, 100 bp, Homo sapiens
cgaacgcccgcgccacccagggccggcgccgggcagggaggcgtccgagacgcgctggacaagcaggaggcaggtggaagtcatcataaagtttctgttt

SEQ ID NO: 554554 - DNA, 100 bp, Homo sapiens
cggagatctctctcatctcgctcggctgcgggaaatcgggctgaagcgactgagtccgcgatggaggatgaagcggatcccaaacggcagaagacagaaa

SEQ ID NO: 554555 - DNA, 50 bp, Homo sapiens
gtggacttgcaggatgacttagacgactgcttgaccactatgctatcatc

SEQ ID NO: 554556 - DNA, 100 bp, Homo sapiens
aaagataggcggccatggtccaaccttgaaggtgtccctacctgcaccggacgacgggggacacagaacgcaagtaccacctgcgttactacaaaacagg

SEQ ID NO: 554557 - DNA, 100 bp, Homo sapiens
gacccagaagagcagctgctacttcatcctgcagcggcgccgcgggcacggcgaggggggcggccgcctcaccgacggccatcctgagacgacagggtcg

SEQ ID NO: 554558 - DNA, 75 bp, Homo sapiens
ggagtggaaaggctctcagtgaaaaagaaagaacacccaggttaatgcctgataaagaaagcatgtattacccac

SEQ ID NO: 554559 - DNA, 75 bp, Homo sapiens
ctccgccgcagcttcagcacctcggcccagtggggttccagcgtgtttctgtgttataagaagtctgtacctgct

SEQ ID NO: 554560 - DNA, 99 bp, Homo sapiens
catctttctagaccatatctcttctttggattattttacaaaaccagactaccagaatgtggcagatcagattgcatttcaagctgctggtggattaac

SEQ ID NO: 554561 - DNA, 89 bp, Homo sapiens
tcggatcagagttcccaggggctcaagttacaatcgttcctgacaaagatgatgtactatactggcaattgctggagaagattttgcaa

SEQ ID NO: 554562 - DNA, 87 bp, Homo sapiens
actcctgcgaccgcatcaaagacgaatttcagctactgcaagctcagtaccacagtggctgtcgctgggcgcggactccaacgggag

SEQ ID NO: 554563 - DNA, 97 bp, Homo sapiens
ttcgtcaggaacgtggccgacgacaccaggagttggcatcctttggaagagttcgtgaaagctttctgcccagagctcctggaccaatgcatcttcc

SEQ ID NO: 554564 - DNA, 100 bp, Homo sapiens
gcttccacaccctctactccagggtggctcccggctgcctctgctgcagttcagagcaacttcaggagcttcccagccgagagcttcaggacgcctttcc

SEQ ID NO: 554565 - DNA, 100 bp, Homo sapiens
gctaaaggctatacggaagttttaaagaaatgcttccagactgcacacttttacttagaggacagtacatcccctagagttatatccacacctccaacac

SEQ ID NO: 554566 - DNA, 100 bp, Homo sapiens
tggctgatgaagggtggcacattttacagaataagtcagatgactttctgtctgcagaaccttggcctgaaaatgctacattatatcagcaattgaaagg

SEQ ID NO: 554567 - DNA, 100 bp, Homo sapiens
tgtattgatgcactggagggataggatgggcattgctcaaaaagagctgtcctgctgacggtgtgctgcatgaagaggaagaagaagaccgccaacccgg

SEQ ID NO: 554568 - DNA, 74 bp, Homo sapiens
ccatgcatctcctcggcccctggctcctgctcctgggttggatggcaagcatgtggtgtttggcaaagtgaaag

SEQ ID NO: 554569 - DNA, 90 bp, Homo sapiens
gcctagggaggcgaggttcccgcaccggataggacctacaagaacagtgaggagcttcggtctcgtattgtgtctggaatcatcacacct

SEQ ID NO: 554570 - DNA, 51 bp, Homo sapiens
atcctcgcctacgcctactaccagcaggggccttcctgctgtgctggacgc

SEQ ID NO: 554571 - DNA, 97 bp, Homo sapiens
tggccctgtgggtccccctggagaagacggagataagggcactaaattcaaagaactacaagacttcttcagtaccatcctattagcaactggaaga

SEQ ID NO: 554572 - DNA, 98 bp, Homo sapiens
agctgccctcgcgacatgggtcacccgccgctgctgccgctgctgctgctgctccacacctgcgtcccagccgggaagatttccagaggattccagaa

SEQ ID NO: 554573 - DNA, 50 bp, Homo sapiens
ttatttcttctactccagtggtgagaagaataactgaagtgaagtgatgg

SEQ ID NO: 554574 - DNA, 101 bp, Homo sapiens
gcgcacaacgtgcctttgaagctgccgatgccagagccaggtgaactggaggagcgatttgccatcgtgctgaatgaaactagtgatcgagaagatggcct

SEQ ID NO: 554575 - DNA, 75 bp, Homo sapiens
ccatcgactcctgcatcgccgtcaccgggaagtgggaatgtccttggcatcattgtgacgtgtgtggcaaacctt

SEQ ID NO: 554576 - DNA, 75 bp, Homo sapiens
attagctttagtgaaatgggctaataatgctggcaaagtggaaaaatgtgcggagccagatgaccaagatgctcc

SEQ ID NO: 554577 - DNA, 83 bp, Homo sapiens
cagctatctgcccggaggcaccacaggactgcagctccccagcacgcacaactttgatgaagatgaaatggatgatcctggag

SEQ ID NO: 554578 - DNA, 51 bp, Homo sapiens
cagagattgctcaggaagcaatggaggttttttgcatgtctgacacccatg

SEQ ID NO: 554579 - DNA, 100 bp, Homo sapiens
cactccttggatgatttccgaaggtaagaccattgcaattggaaaagttctgaaactggttccagagaaagactaagcattttcttgatgaccctgcaca

SEQ ID NO: 554580 - DNA, 80 bp, Homo sapiens
ggctgttttagcacagctgctaaaataggccaggcctgcaggacatacggcaattctgtggtgttcttggtcacacattt

SEQ ID NO: 554581 - DNA, 75 bp, Homo sapiens
cagagtgctacttacagtaccacagcagttacatattctgatgccaattctcggaagcaagaagcagagtggaaa

SEQ ID NO: 554582 - DNA, 101 bp, Homo sapiens
agaagcgcgaagagccgttagtcatgccggtgtggtggcggcggcggagactgcgggcccgtagctgggctctgcgagatatttctccctcgagtggctgg

SEQ ID NO: 554583 - DNA, 95 bp, Homo sapiens
tttctattttagaaagcagttcgggggaaatttgcagtggtgagaaaatgtataaagaaagattctgggaaagaatttgctgcaaagttcatgag

SEQ ID NO: 554584 - DNA, 75 bp, Homo sapiens
gccatggcggggaccgcgctcaagaggctgatggccgagtacaaacgcactcaaggagttgcccctggtcctgta

SEQ ID NO: 554585 - DNA, 75 bp, Homo sapiens
ccggagacagcccaaatatcctcggaagagcgctcccaggagaaacaagtgttttaaggatttccaactgcagcg

SEQ ID NO: 554586 - DNA, 80 bp, Homo sapiens
ggcgaagacgcgaccgcggcgcgagtcaccatgaacccttaggagaaatcttgagagtggacagcaattgtgaagatcgc

SEQ ID NO: 554587 - DNA, 75 bp, Homo sapiens
gatcagcgaggagcagcagcagctccagcaggcgctggctcctgctcagcggaaatccgaacgccagcagatctg

SEQ ID NO: 554588 - DNA, 98 bp, Homo sapiens
gcacctgccttcgctcccgcaccgtggaatcaactatgaaattataatcatagatgatggaagcccagatggaacaagggatgttgctgaacagttgg

SEQ ID NO: 554589 - DNA, 90 bp, Homo sapiens
cggagaagatgtggtggcttccgtttgttggtggaggaggtggcaggcctcggcggcatcaagcatgatggaaccatgtgtgatacctgc

SEQ ID NO: 554590 - DNA, 82 bp, Homo sapiens
acaaatggacctccgtgaaggcgtccgtcctgcgcatcgcagtgagaagccctaccactgcaactgggacggctgcggctgg

SEQ ID NO: 554591 - DNA, 74 bp, Homo sapiens
gcggcgtttggatgattgtctctcggcggcggagtcggaagaattaggaaggactatttcccagctcgttcatg

SEQ ID NO: 554592 - DNA, 100 bp, Homo sapiens
ctgatgagtgatgctatggaggagatcgacatgcaacaaggcacctcgtcagtaaaaccacaggctaatgagcttttctggaaaaagaagaaaagttcaa

SEQ ID NO: 554593 - DNA, 82 bp, Homo sapiens
cttagctgtgctcgcgctactctctctttctggcctggaggctatccagcgttcgaccttgaaactacaagagtgaatctga

SEQ ID NO: 554594 - DNA, 100 bp, Homo sapiens
ggaggctgtagtggggctggtggtgcttccaactgcgggacaggaagtggccgtagcggcttgttggataagaaggtgaacgggctttgccatcaatacc

SEQ ID NO: 554595 - DNA, 75 bp, Homo sapiens
aaaagaggatacctctgcgatcccgggtcatctccagatgctagggttatggccttggcaaatgcaacattatgt

SEQ ID NO: 554596 - DNA, 100 bp, Homo sapiens
gttccagccccaacgtagcaacaacaatggtgtggttggtgaatatggcagaaggagacccggaagctcaaaggagagtatccaaaaattccaagtataa

SEQ ID NO: 554597 - DNA, 100 bp, Homo sapiens
ggctctgaggatgagctggaggaggggtgcggttaaaatcggaactgatatgctagaattggactgccatatcacaaaagatgaacaagttgtagtgtca

SEQ ID NO: 554598 - DNA, 90 bp, Homo sapiens
cccacttcagtcaaagacagtagattatgagtcctggaagttgccgtactcagtacagaaggacagatccaagactttaaatttcctctg

SEQ ID NO: 554599 - DNA, 75 bp, Homo sapiens
tgcagtttgagtctgatgaggaggcctctttgcacctccacgtgccttcagtgcaatctgacgagctgcttcaca

SEQ ID NO: 554600 - DNA, 138 bp, Homo sapiens
ggaggctgccatggacgacgaggaggagacgtaccggctctggaaaatccgcaagaccatcatgcagctcctgtccaaatatgacccccagaaggaggcagagctccgcacctggatcgagggactcaccggcctctc

SEQ ID NO: 554601 - DNA, 100 bp, Homo sapiens
gggtctggagggctgagcagtcaactcaaatgcaagtccaagaggaggaggaggcggaggtccaagcggaaagatatgaaaaacagtagctccgtatcga

SEQ ID NO: 554602 - DNA, 106 bp, Homo sapiens
gccgagcgcggcccgggcgccatcgagccttggcggcggacgtgcaggcacattcaggaccccgcgagccagcggctgacgtggaacaagtccccaaagagcgtcc

SEQ ID NO: 554603 - DNA, 98 bp, Homo sapiens
cctgtgatccctcaagactggtccacggagtgtatgaccacaaacagccatcaagaccccgtgcctgtgtttgaggcggcacgcagcctagacgacag

SEQ ID NO: 554604 - DNA, 98 bp, Homo sapiens
aggaggtgcagcacataaggatggcaaacttcagattggagataaacttttagcagttgtaggtggcctagatatccacaaaaagatggtggtagatg

SEQ ID NO: 554605 - DNA, 75 bp, Homo sapiens
tcatgcatatttgagacaacatctggatggttggggagaacgttatttacctcatactctaccatgccatctttg

SEQ ID NO: 554606 - DNA, 78 bp, Homo sapiens
cggtctctgttccgcaggatgtgtgccggtccaacaaaagcccttgggtctgtttgacttgttcaagtgtccactgtg

SEQ ID NO: 554607 - DNA, 50 bp, Homo sapiens
tgttgggattactgactcataaccaggttttggtatcaggatgatgctgg

SEQ ID NO: 554608 - DNA, 92 bp, Homo sapiens
gggccttccacaccccctccgtgggtgtgtggtgaaaggtgtagcagtcactcggcctacacccacagcatcgaccttgtgaacccagcgac

SEQ ID NO: 554609 - DNA, 90 bp, Homo sapiens
ggctgcaggactgggcacagcatgagatccaaaggcagggcaaggaaactggccacaaaccaagatcactccatggatgaaatgacagct

SEQ ID NO: 554610 - DNA, 75 bp, Homo sapiens
gtgcacagagacatcaaaccagagaatctcttggaatatgacagaactgatggtttttcacacagtccctttggc

SEQ ID NO: 554611 - DNA, 76 bp, Homo sapiens
ttagcattatcttgacttttaaggttattgttcaaaactacaactccattttgacactttctcacttgtaccgatc

SEQ ID NO: 554612 - DNA, 75 bp, Homo sapiens
gtttttcggatcatgtctggtggctccgcggattataacaggtaaagagaaatgtgtatgaccttacaagtatcc

SEQ ID NO: 554613 - DNA, 80 bp, Homo sapiens
cactggtaatgtgtccattcgagggcggatcctctctggatgaccggaaagaagggatgaccgcgtttgtggaaaagaga

SEQ ID NO: 554614 - DNA, 120 bp, Homo sapiens
gaggtttaatggggcacccacagccaacttccaacaagatgtgggcacaaaaactaccattcgcctgatgaactctcaggatggaaaggcagatgtaaagtccctcatggcgaaatataa

SEQ ID NO: 554615 - DNA, 80 bp, Homo sapiens
ctgccatctcgaccacttcgaagaagtcagcaaggaactgtggctgcaccatctgtcttcatcttcccgccatctgatga

SEQ ID NO: 554616 - DNA, 75 bp, Homo sapiens
gagaatgtgtctcttgccaaagcgaagtaatggcaacgttgcagctaccagccactaatttggccaacttggcaa

SEQ ID NO: 554617 - DNA, 101 bp, Homo sapiens
ccggcccggcccggcccgccgagggccccagcgcaggagccgcgcccggacccagggtactccaaagattcaggtttactcacgtcatccagcagagaatg

SEQ ID NO: 554618 - DNA, 100 bp, Homo sapiens
aacagcttgtaaaagaagcaacagagagagaacaaaaagttaacaaatacaatgaagaccttgaacaacagaggactgatcaagactctgtcatcggcgt

SEQ ID NO: 554619 - DNA, 89 bp, Homo sapiens
cctcaggcctgcacggacggtgttggttgggacctgcctagagctggaacgttacctccagagcgagccctgctatgtttcagcctcag

SEQ ID NO: 554620 - DNA, 76 bp, Homo sapiens
cggctgccttccacctccagtgctgatgtggtggtacagtgggagctattctgacatgtccactggaagttgtaaa

SEQ ID NO: 554621 - DNA, 100 bp, Homo sapiens
gagtaaaagaagcaaggaagctgaagcagctttcttgaatgtctacaaaagattgattgacgtcccagactttgagagttttgacctgcctgaagagcac

SEQ ID NO: 554622 - DNA, 75 bp, Homo sapiens
gcaccctggccaggaagcggagggcgcgcgaggctgcggaagccctgacccgggagttctcggtgctcaagatcc

SEQ ID NO: 554623 - DNA, 78 bp, Homo sapiens
cgctacacagcaatgcatcgagcatcaacaacagcaacttgtgattggcggtgaccggatattcagttgcacatcccc

SEQ ID NO: 554624 - DNA, 75 bp, Homo sapiens
ggcggccgaggagctgggggtcgtcaccatgcaggttgaaaggattgttgacaaaaggaaaaataaaaaagggaa

SEQ ID NO: 554625 - DNA, 98 bp, Homo sapiens
aaacatcggttggatggataagaattttgataaaatcagagtgtggctgcaaagtgaaaagcttgaacctctttcgacgtgtagcagcagctttgccg

SEQ ID NO: 554626 - DNA, 90 bp, Homo sapiens
atgggtgccaaggagtcacggatcggattcctcagctacgaggaggcgctgaggagaggctgaccggttccctgatgtgttacctgcttc

SEQ ID NO: 554627 - DNA, 51 bp, Homo sapiens
gtccggggtcgcgcgggaattaaggtccctgtctggtcgcatcgttggtgg

SEQ ID NO: 554628 - DNA, 90 bp, Homo sapiens
gtgtcacagacgccagagagcctggatttcctcaaggtcccggaccagggagctgcagggaagatgagaatgtgcctactgctcctgatc

SEQ ID NO: 554629 - DNA, 50 bp, Homo sapiens
cctggcagcccagacgtttattcagaggagtacaaaccaccaggaacccg

SEQ ID NO: 554630 - DNA, 99 bp, Homo sapiens
cgccaggaccggccgaacgcagagatagcagcgacagtgagctggagctgtccacggtgcgccaccagccagaggggctggaccagctgcaggcccaga

SEQ ID NO: 554631 - DNA, 80 bp, Homo sapiens
ccctccaagagcactagtgtctagaaggcactaagggcccctgtaaagatagctgtcattttcaagcagctgagagttct

SEQ ID NO: 554632 - DNA, 100 bp, Homo sapiens
cagatgctaatttgggaaaaagctccaggattctgacagggatgttgcgaaggcaacgtgttggaccttccggagcttctcagaagacagagggttttct

SEQ ID NO: 554633 - DNA, 100 bp, Homo sapiens
aaggagcagccctggtgtcacctatcagtaaaaggtctattgaatgatggaactgtgggtatttttaggggcaaccagatgcgcttaaagcgagcctgca

SEQ ID NO: 554634 - DNA, 98 bp, Homo sapiens
gagcggctggagctctcggtcctatacaaggagtatgctgaagatgacaacatctatcaacagaagatcaagtgctcaggagctgtcccaggaaatca

SEQ ID NO: 554635 - DNA, 87 bp, Homo sapiens
atggacagggatgataattgggcctccaagaggaactctaatgatccaggacaaagaagttaccctggagtatgtatcaagcctgga

SEQ ID NO: 554636 - DNA, 78 bp, Homo sapiens
gctgtcgtttgtggtctcgcgcagggcggccccggttctggtgtttggcgtcggtctcaaaccatgaattatgtggga

SEQ ID NO: 554637 - DNA, 98 bp, Homo sapiens
gaggcagagctccgagaaaaggagacagagacggtggctcagggagtaaaggaaggccagttgagcaaacagaagtgttcctctgcatttcaaaacct

SEQ ID NO: 554638 - DNA, 101 bp, Homo sapiens
ggcagcctcactcccagtagtttctgcatttagtgagataagagcctggagaaagttcttgtggaattcagtcacaaggagttgtttgatttctataacaa

SEQ ID NO: 554639 - DNA, 100 bp, Homo sapiens
gggaccaccagcacccgccgggtcaccttcgaggcggacgagaatgagaacatcaccgtggtgaagggcatccgggttttgggatttgagattgacgcgg

SEQ ID NO: 554640 - DNA, 50 bp, Homo sapiens
tgtctgaactggatcataaatgacagaattaaagctatagagagtcccaa

SEQ ID NO: 554641 - DNA, 83 bp, Homo sapiens
cgaatatcttcccttacaagggttatatatggaattatggtaccctccctcagacccttctcaggtgcagccagagagacact

SEQ ID NO: 554642 - DNA, 50 bp, Homo sapiens
gcttcctgttcgcagctgcggcagtgctggctgccagctgctgcgccccc

SEQ ID NO: 554643 - DNA, 99 bp, Homo sapiens
gtctcaggagatgaattgatgaccctggctcataaacacattgtcaagactgtggatttcacgcagaatgagtccctggaacgccagatgcgtgaaatg

SEQ ID NO: 554644 - DNA, 82 bp, Homo sapiens
tcagagccaccagccaatgatcttttcaatgctgcgaaagctgccaaaagtgacatgcaggagtggattagaacaagatgac

SEQ ID NO: 554645 - DNA, 75 bp, Homo sapiens
gccgccgccacccgcctcccaccatggctctgaagagaatccacaagtcattgaaattatgagactatcattcaa

SEQ ID NO: 554646 - DNA, 100 bp, Homo sapiens
aagaaaacaaaaactgatgaccaagagaatgtgtcagccgatgcaccgagtccagcccaggaaaatggagaggtgaatgactggcaggaggactgggtcg

SEQ ID NO: 554647 - DNA, 119 bp, Homo sapiens
ccagctccaacaggattccatggtagctgggatgttagggctcagctatggctccaaaagcaatatactccgtttttttgcaaaactagtcacagacaaatgtgttgacttggacagga

SEQ ID NO: 554648 - DNA, 100 bp, Homo sapiens
gtctactctgatgtcaatcttgagggctagctcatggcagagaaattgcagctgcaggagcagctccaggcagaaaccgagctgtgtgccgaggctgagg

SEQ ID NO: 554649 - DNA, 101 bp, Homo sapiens
gcggggcagttcgggccggctgtcctggcgcgggccaagaccagcttcaagtctccatggtaccagaaaacaacaacctcacagcacctgaacctcaagaa

SEQ ID NO: 554650 - DNA, 120 bp, Homo sapiens
gcgaaaggaagcaagcagttcagaagagccaaggaataaacatgcaatgaacccaaaaggttctgatacaacaccccttttaaatggatcaagccaagacagaatgtttgagacaatggc

SEQ ID NO: 554651 - DNA, 97 bp, Homo sapiens
ggggcgcgacaggtcgtctagcgcgtgccccggagcccgcgcccgggtctggccgcctggataaataggatttaccaatccttggatgaagtgcttg

SEQ ID NO: 554652 - DNA, 74 bp, Homo sapiens
cccggaggcccaggacacaggcctgtcagagttgttcagtataatatcaatacagaagaattatattcctacct

SEQ ID NO: 554653 - DNA, 83 bp, Homo sapiens
cctactattacccccagtatctgcaagccaagtagcctctagttcgttagtcaaaacgtgaaaaaaaagacctgctttgccct

SEQ ID NO: 554654 - DNA, 99 bp, Homo sapiens
ccgaggcgggagcccgagctgagtcgagctcgccggagcgggtgctttgtctgggatggaaattccgttttatctggcagtcagtctggtgaactgctc

SEQ ID NO: 554655 - DNA, 83 bp, Homo sapiens
atagcatcaaactcagaacttactcctagtgagagccttgctactactgatgatgtatcaatataagtgatgaggattttctt

SEQ ID NO: 554656 - DNA, 50 bp, Homo sapiens
tggaagcagtcccaagtcgaagactaaggagggtgaggacaaaatcttct

SEQ ID NO: 554657 - DNA, 99 bp, Homo sapiens
aggaacagggacagcacctcatcccctggatgggggaccacaagatcctcatcgacaggtatgggcgacattgaaggactgatagataaagtcaacgag

SEQ ID NO: 554658 - DNA, 100 bp, Homo sapiens
tacttgtatctacggtggtgctcctaagggaccacaaatacgtgatttggagagagcttcctcggttatgtggacatgcttggtgtagcctatgaagccc

SEQ ID NO: 554659 - DNA, 75 bp, Homo sapiens
aaccacttagccaatcacaacgccaatctagaatactctgcggtggaagagatcatgcagctggtgaatgcctac

SEQ ID NO: 554660 - DNA, 100 bp, Homo sapiens
cctcctcactcacttccggtggcagccatctcttcctgtactctataccctgtctagccaggctacacatgaagctgttcatctcctttgcaggatgttg

SEQ ID NO: 554661 - DNA, 75 bp, Homo sapiens
acggtttcgctctttggaaaatacgggtgatgcaggttctgaatgctgatgccattgttgtgaagctgaactcag

SEQ ID NO: 554662 - DNA, 100 bp, Homo sapiens
gccgatgaatcacccaacatgctggtgtacagaaagtttgtccacactagaaattgaaaatagagcccaagaccttcatctctttgagactttgaagact

SEQ ID NO: 554663 - DNA, 113 bp, Homo sapiens
aatagaaaattttgacgtttatgcaattaaaccaggtcttgagagctgatgacaataacatgggcaatggctgctctcagaagctggcgactgctaacctcctccggttccta

SEQ ID NO: 554664 - DNA, 75 bp, Homo sapiens
ttgccgacccggatctcaacaatcccttcaagcaatgtttttggaacagtgccagtggttgcttctgcacagaca

SEQ ID NO: 554665 - DNA, 82 bp, Homo sapiens
gaggccctcatgtaccacacggtgctgactgggttacttttttaaacactaggaatggtaatttctactcttctggacttca

SEQ ID NO: 554666 - DNA, 100 bp, Homo sapiens
ggaggagtgtgtggactgcctggagcagggtggccgtggcagcgtcctgcagttcatgcccttcaccaccgttgactgcattcagccagtgccaaaagag

SEQ ID NO: 554667 - DNA, 100 bp, Homo sapiens
ctttaatggctgtagagctttccagacaatgccaaatggatgactgtggaatcctcatgaaatggtggacttgctttgtgaagagacagttcatgaacaa

SEQ ID NO: 554668 - DNA, 74 bp, Homo sapiens
ccagggaatatatgaacatatcactcttgcttattctgagaatatcctccgaatcctaaatctagagctccaag

SEQ ID NO: 554669 - DNA, 126 bp, Homo sapiens
tgtcacagacagaacctgagccaaagcacattcccacagagaaagtcaaggctgtggataccacggccactcctcaggatagtcaggaaggaacctttgggtcagagcattcagcgtcaccatcac

SEQ ID NO: 554670 - DNA, 100 bp, Homo sapiens
tgctgtattgcagaacagcctcagcctaaaatgatgcatcctgttgccagcagtaatccagctttctgtgggcctggcaagccttcctgcctcaatgaag

SEQ ID NO: 554671 - DNA, 96 bp, Homo sapiens
atacctttatccactctatggccttggagaactgccccaaggatttgcaaggcagtatttggcagtcgtattcagagataaacccctggagctatg

SEQ ID NO: 554672 - DNA, 132 bp, Homo sapiens
cagggtagggacttctcccgcagcgacgcggctggcaagactgtttgtgttgcgggggccggacttcaagatggagatcttataacaatttttgatagttctgacctttcctttgcaattcagtgcagtagg

SEQ ID NO: 554673 - DNA, 100 bp, Homo sapiens
gagtactacaacgtacccattccggaaggggacgaggaaggaaacatggaactcaggcagaaattcgagattgtcctgggtcacataatgccagctgagc

SEQ ID NO: 554674 - DNA, 74 bp, Homo sapiens
tggagaccttgacacttatatcctccctggtctgcgctcctcagaccaccggcaggtgaacagcctgatgcaga

SEQ ID NO: 554675 - DNA, 98 bp, Homo sapiens
cgctgtctgaggacaccctggcctacgcgctggtggtccaccaccctcaggatgaggtccaggctgaccccgggtttgtaccacctgggccgcactgt

SEQ ID NO: 554676 - DNA, 75 bp, Homo sapiens
cagattcgcagtggtcgcttcttctccttgacttgcagacctactggaagagaaccaagaagagctggcaactat

SEQ ID NO: 554677 - DNA, 75 bp, Homo sapiens
gatgtggaaactgctgcccgccgcgggcccggcaggagacttcctgggaatgaaaatggttggtgagctgctacg

SEQ ID NO: 554678 - DNA, 100 bp, Homo sapiens
atgctccgccagatcatcggtcaggccaagaagcatccgagcggcattttggaagtgtcaaaggccagggacatccctgttgtcatcgacgcggtgagtt

SEQ ID NO: 554679 - DNA, 95 bp, Homo sapiens
gggaaaagccatctcctattcaggtatctggaccttcgtcgatttggatctgtgccacatggaggttttgggatgggatttgaacgctacctgca

SEQ ID NO: 554680 - DNA, 51 bp, Homo sapiens
cggcggcggcggcggcggcgcaggtaagtgctcatctccagatggaggtag

SEQ ID NO: 554681 - DNA, 96 bp, Homo sapiens
caggaaggcgctggagaccttacgacgggttggggatggcgtgcagcgcaaccacgagacggccttccaagatgccactgtgtacgtggggggcct

SEQ ID NO: 554682 - DNA, 90 bp, Homo sapiens
cagtggcacggttctacagcagggcaccagagttgggacggcagccctcagtgcctgccatggactggagacagtcttgctctgttgccc

SEQ ID NO: 554683 - DNA, 75 bp, Homo sapiens
ggaatgcttactgttgcgtggttcgttattaacagtttggtaactctcattcgacatccatctgaactaatgaat

SEQ ID NO: 554684 - DNA, 100 bp, Homo sapiens
cccggctctcgtcagcctcccgccggccgtctccttaacaccgaacaccgccaatatacccagtagaagaattagaagaagaaagcgttgcagaagatga

SEQ ID NO: 554685 - DNA, 100 bp, Homo sapiens
actgatttcatatggaatatggcaactacatctggctcaaaacaaaggaaaccagaagagccaagtcccaggattccacgcagaacttggaagacagaga

SEQ ID NO: 554686 - DNA, 101 bp, Homo sapiens
gtggatctctgtgccacatgggaggtcatggagaagtgtaaggatgcaggattggccaagtccatcggggtgtcaaacttcaactgcaggcagctggagat

SEQ ID NO: 554687 - DNA, 97 bp, Homo sapiens
cctggtaatagaggacttgaagcagaaagcaagtgaatacgagtcagaaggtgaacagccatataccaggaataggataccagatttttggaaatgc

SEQ ID NO: 554688 - DNA, 101 bp, Homo sapiens
tgccggagccgtggtggcagccccgggaggagcactggcgtctgtttccttcgaacaccttccaccatgaccacctcagcaagttcccacttaaataaagg

SEQ ID NO: 554689 - DNA, 100 bp, Homo sapiens
ggacggtatcccgagcccaccgtgctacgcaggggagcagatggaccctactggaagtcagttggattcagatttctctcagcaagatactccttgcctg

SEQ ID NO: 554690 - DNA, 100 bp, Homo sapiens
cggtgttcaccgagtatcaggccagtgcgtttgggaatgtcaagctggtggtccacgactgtcccgtctgggtaagattatctccagccaaaatgtcaac

SEQ ID NO: 554691 - DNA, 73 bp, Homo sapiens
tcaatgagcactattttggattagtcaatgaaggatgataaagactatgctttaaaacaaatagaaggaactg

SEQ ID NO: 554692 - DNA, 100 bp, Homo sapiens
gttggctactggctgagcgagaagaaaatcaagaagctgaatttccaggccttcgccgagctgtgcagctcagttcctacccccggttgcgagaggagac

SEQ ID NO: 554693 - DNA, 50 bp, Homo sapiens
gtcttcctcttgtaggaaggccaagggttccgagtctgaggaagacataa

SEQ ID NO: 554694 - DNA, 75 bp, Homo sapiens
tgaccgagagcgtgaccgagagcgcgaatatcgtcatcgttagaagggcagctcagttctggcaccaaaccaaat

SEQ ID NO: 554695 - DNA, 87 bp, Homo sapiens
cttaagaactcttttcgaggaactatccgtaatgcacacgaatccggaagtgacgccagaagaagaggaagtgaaggctacagggta

SEQ ID NO: 554696 - DNA, 99 bp, Homo sapiens
gtcgtctgccttcgcttcacggcgccgagccgcggtccgaatgtgctggtggacggacagccatgtgaccgcgaggctgtggcggcctgccaggtgggc

SEQ ID NO: 554697 - DNA, 75 bp, Homo sapiens
aaaaactggatgttggtagaaaaagcaagagtttgttatatagcatgtggggctgccttccaggaggatgatgtc

SEQ ID NO: 554698 - DNA, 75 bp, Homo sapiens
attaattgtccttgggtcgaggtgtctcgtcggaccctttggggctcagtggagagaaactccagaaaatcttgc

SEQ ID NO: 554699 - DNA, 75 bp, Homo sapiens
tcatccagcaggcggtgacccgctaccggaaggccatcgccaagcagttggaattgatcacaccttttcagttgt

SEQ ID NO: 554700 - DNA, 101 bp, Homo sapiens
ggttaccaaaagaatgtatgatagcttctggaggcagttcaagcactctgagaagatgaagaactagcactggatggcagttttgatccagacctaaaaaa

SEQ ID NO: 554701 - DNA, 83 bp, Homo sapiens
actataaactattctgtactctgaatggtttagcaactcagtgtattcaaccattacgtgacaaagaagaaattggttacaga

SEQ ID NO: 554702 - DNA, 83 bp, Homo sapiens
ctggcgtgcactccgcacctcggggacattattgcgcgtggaacggctgcttttggaaggatttccagatgtgacttgcactc

SEQ ID NO: 554703 - DNA, 100 bp, Homo sapiens
tccgctcgattggttctactgtgggtctggactgatctccatgtcctgttgtggggcttttacagcctttggggcccaagggatgcagacagtgatgaaa

SEQ ID NO: 554704 - DNA, 75 bp, Homo sapiens
tttaagaacagatgaacaaggccttattgttgaagacctagtagaagaggtgagatggacagagacgtatgtgcg

SEQ ID NO: 554705 - DNA, 75 bp, Homo sapiens
gcccactggacgccgcccgcggccggaccggcctcatgcattgtgcgtcagcagcaatgtttatggtgaaaaatg

SEQ ID NO: 554706 - DNA, 73 bp, Homo sapiens
gacctaaagcctgactggggcaaggtcattgacgagactctggatgttaaggaaatgattttcaatgccgaga

SEQ ID NO: 554707 - DNA, 90 bp, Homo sapiens
aaaaatctgttacttgatgaacttcagaagtttggcaccaactggcccgtgtacatgaccaagccggatggtacgtatattgtcatgacg

SEQ ID NO: 554708 - DNA, 98 bp, Homo sapiens
agaattacagcagccaacctatgttgccctgagttacataaataggttctgatctacaatggccaactggacatcatcgtggcagctgccctgacaga

SEQ ID NO: 554709 - DNA, 83 bp, Homo sapiens
ccaaccaatgcgaccttaaacaaatttatagaggtgaatcaaaaactctggttttaagcaacctctcctacagtgcaacagaa

SEQ ID NO: 554710 - DNA, 75 bp, Homo sapiens
cttcgagcgggtgcgctgtggccttgagcacgagcggcaggaactgtggctgcaccatctgtcttcatcttcccg

SEQ ID NO: 554711 - DNA, 51 bp, Homo sapiens
gctggaatctctgcacgggccttgacgttggaacttgccaggaatccagca

SEQ ID NO: 554712 - DNA, 90 bp, Homo sapiens
gcagctattcttcttatggccagagccagaacagtttggacttctcccactgagcatgacaagcactcgaaaggctaaatcaaccagaaa

SEQ ID NO: 554713 - DNA, 90 bp, Homo sapiens
gtgattcaagttaatcatcagactgtgggtttcatcaccttaaatggttttgaaccaatgaaggtgtattcccttaaaaagacggacagc

SEQ ID NO: 554714 - DNA, 95 bp, Homo sapiens
gtggccgctgggggttgcggcggcgctgagccagcggggccggtgctggagaatctggtaaaagcaccattgtgaagcagatgaggatcctgcat

SEQ ID NO: 554715 - DNA, 74 bp, Homo sapiens
ttagctgtgctcgcgctactctctctttctggcctggaggctatccagcgtacttccagtgcccacccaagttt

SEQ ID NO: 554716 - DNA, 100 bp, Homo sapiens
tcaagggctgaaaataaatagggaagatggagacaccctctgggggtcctctctgagtcaaatccagtgaaactaattctgaagcaagcccttatagttg

SEQ ID NO: 554717 - DNA, 83 bp, Homo sapiens
gctcgggtcgccggagccgcgccccaccccgccagctccagagccacgtacggccataaaattttgagtagaaaaatccagaa

SEQ ID NO: 554718 - DNA, 83 bp, Homo sapiens
cttcggcagtccacccaccgccgccgcctcccaggcggtgcgtctttctacgtgaataggattttgtggctggccagatacac

SEQ ID NO: 554719 - DNA, 75 bp, Homo sapiens
ggctgggtccagcagaaaagagggaaataggggatcagtggcatttggcaattcaagaagcaattttagaaaaat

SEQ ID NO: 554720 - DNA, 75 bp, Homo sapiens
agtctacacaggacctgagaatctgagaaactgcagccattcaaactcctccccacgacactctgaagcagcgac

SEQ ID NO: 554721 - DNA, 75 bp, Homo sapiens
agaccaggacagaccaagagaataaggaccctgccaagaagcttgagagaagaaaaatttcagaaaaattgtctc

SEQ ID NO: 554722 - DNA, 83 bp, Homo sapiens
taaaaggagaacttgaaagttcggaccagacaatgcagatcttcgtgaagactctgactggtaagaccatcaccctcgaggtt

SEQ ID NO: 554723 - DNA, 87 bp, Homo sapiens
gggcccaggcccagggaccaggcggaggcgtcgcgggagcctttggggcaccacagagatgcggatgtattgctgtccttgaatatt

SEQ ID NO: 554724 - DNA, 82 bp, Homo sapiens
gttggttcgtgctggactacaatgcaggactgctctcctactacacgcgtgtccggagcggtgactggaaggggtacacagg

SEQ ID NO: 554725 - DNA, 98 bp, Homo sapiens
agtccagagcagaggaatctatacaaagaagtgatgctggagaattacaggaatcttctctcattgggccctcgggaccaaggatcacgtcatgactc

SEQ ID NO: 554726 - DNA, 100 bp, Homo sapiens
gcagcttttccggcctgacaacttcatctttgagaccgggtttcactgtgttagccaggatggtctcgatgtcttgacctcgtgatccacccacctcggc

SEQ ID NO: 554727 - DNA, 100 bp, Homo sapiens
tgggaggagcggaccgaccgctccaaggtgtaattgaaaagtgatcctctcttcagagatgtcaaaaacaaacaaatccaagtctggatctcgctcttct

SEQ ID NO: 554728 - DNA, 75 bp, Homo sapiens
ctgacatggaggatgatttcatgtgcgatgatgaggaggactacgacctgcacttttccagccattaactccagg

SEQ ID NO: 554729 - DNA, 87 bp, Homo sapiens
aaggcactcaaggaaaggatacagaaaaagcttgtggtgaaggggggcaaaaaaaagaagcaagttctgaagttcactcttgattgc

SEQ ID NO: 554730 - DNA, 135 bp, Homo sapiens
gctggctgcaaacccaactcctgagaatcatttctgggagaatgccgaagactgcatttcaacttcaagaatggataagtcaattgagcttcacttctctaattgaaatcaccgtgctgatggagtctgtctgtg

SEQ ID NO: 554731 - DNA, 100 bp, Homo sapiens
cagaggaagtttttggatggcaacgagctcaccctggctgactgcaacctgttgccaaagttacacatagtacagaatgaactctggaagcccagccagg

SEQ ID NO: 554732 - DNA, 75 bp, Homo sapiens
ccggcactctcgccaccaccgcgtggggcactatgacgcccgggccagagtcctcgtttgccacatgacctccct

SEQ ID NO: 554733 - DNA, 82 bp, Homo sapiens
caggaaggtctcacctgaggtgaaccttcgaccttggacttctcagcctccagaatgtttaaaattggtggtgaatggtgga

SEQ ID NO: 554734 - DNA, 74 bp, Homo sapiens
ggggcctggctaaggaaaccctattacctccagggcaagaatatcacggcatgggcatgagtagcttgaaactg

SEQ ID NO: 554735 - DNA, 83 bp, Homo sapiens
acttcacaggaattgccatttgtggccagcatcgaaatgttcagccttttagtgatgaagatgcatcaattgaaacaatgagc

SEQ ID NO: 554736 - DNA, 100 bp, Homo sapiens
tcccttcttgacaaccgtggcagccattacgtggctattgtctttgaaagcaacagctcctaccttggacgggagaaatttcagcagatttcaaggagcc

SEQ ID NO: 554737 - DNA, 103 bp, Homo sapiens
caccaagctctgctccacactgccaaccggccagaggacgagtgtgacttcccagactcccggccagccatcgaggacctcaagtactgcctggagaggacgg

SEQ ID NO: 554738 - DNA, 74 bp, Homo sapiens
gaggctatcacaagctgcaccagcttctaaccgaatcattcccagtgaccccttctgggtgccaactactgagg

SEQ ID NO: 554739 - DNA, 96 bp, Homo sapiens
ggattccagaggggtgacagcgaaataggatctcccacagctgggagatttagccgtgtctgaggttggctgggatggcctcagactcaactggac

SEQ ID NO: 554740 - DNA, 90 bp, Homo sapiens
tgggaagaggaattcaccttggcaattgaaggaacagactaaaaatcgtgtcctggaaggaaactacaggtactaccagggattttcagt

SEQ ID NO: 554741 - DNA, 98 bp, Homo sapiens
tgatggtcagctaggactcatgactactgaggattctgtggcagtgcccaggagcacatggatgaagtatgctcctcgcagcttctaacttcagtaag

SEQ ID NO: 554742 - DNA, 82 bp, Homo sapiens
aaatcctcattaaagatactctcgattcttgaagtgaaaagtccaataaagcaaagcaaatcagataagcaaataaagaatg

SEQ ID NO: 554743 - DNA, 82 bp, Homo sapiens
tccagcagctgtcaatgcattccaggaagcagctagtcttttgttacacgcatggggagatactctggaggaagcatttgag

SEQ ID NO: 554744 - DNA, 98 bp, Homo sapiens
aaatggagatgtgggaactggccagaagtttccaaggcaggaaaggtaaagagacaaagaaagtgccttgtacagatgcaaacggaggtgtagactgt

SEQ ID NO: 554745 - DNA, 82 bp, Homo sapiens
gccaccagcagaacccttggttcagactccgtgattctgaagacagaaactaatctggattcactccctctggttgataccc

SEQ ID NO: 554746 - DNA, 98 bp, Homo sapiens
tcctgattggcattaatgaagagtcagtggaaggcacggcaatctatttaccaggaatgtctgatcacagatacggggatggtggctctactttccag

SEQ ID NO: 554747 - DNA, 75 bp, Homo sapiens
acattcgatttattggaggcctacttgcagcatattacctatcaggagaggagatctggacgttggtggttggct

SEQ ID NO: 554748 - DNA, 89 bp, Homo sapiens
aggcattggtggtgtgtccaaatctgctgagcttgccaacaacatttgcaactttggatattgatggtgtaagaaaaataatctttgca

SEQ ID NO: 554749 - DNA, 50 bp, Homo sapiens
tgcggtctccccgccgcggctgagccacaacccgatctccgtcctggaca

SEQ ID NO: 554750 - DNA, 100 bp, Homo sapiens
aaagcccccaaaagcagctattcaggttatacattggctcttcaaagacgttcacctcatcagagaaatccctgactcctttgcagtggtgtagacatgt

SEQ ID NO: 554751 - DNA, 100 bp, Homo sapiens
ggatagggacccacttggaggacttgctgatatgtttggacaaatgccaggtgcgcaccctgtggcatgaccctcgtcacataggctggaaagatttcac

SEQ ID NO: 554752 - DNA, 75 bp, Homo sapiens
acggccatctgtgtgtctgggcagtgcaagttcaagtacccttacaagactgatggaattacagttgtataaata

SEQ ID NO: 554753 - DNA, 99 bp, Homo sapiens
acgaggaatggcggcggctgccgcaggacctgcagcatcccagaggttttgatgatgatggttcagaatttcatgaacatatatttctggagaaacacc

SEQ ID NO: 554754 - DNA, 90 bp, Homo sapiens
ggctagcggcctcgccaaggccctgaagcgcccacgtctttgcgccctctatcctcagccccgaagattcacggcccttccacagtacct

SEQ ID NO: 554755 - DNA, 100 bp, Homo sapiens
ctgaaccagtgcaagaaccagatggcgagactttgccttccatgcagttctttgtggttttccaggtctttgcagaagtccctgatggaatcacatgact

SEQ ID NO: 554756 - DNA, 100 bp, Homo sapiens
gcccaacgatcagcacttcagtcggaaagttggaacctctgacaagaccaagtactaccttcaaggggcaagattcttgccaagagaattaatgtgcgta

SEQ ID NO: 554757 - DNA, 100 bp, Homo sapiens
tgcagtcggcactgctactgcgaagacagctggcaggtgtgaatgacagaggtggtgccatccagcgcgctcagcgaggtcagcctgcgcctcctctgcc

SEQ ID NO: 554758 - DNA, 121 bp, Homo sapiens
gcccgccgccgccgccgccgccgcccctgttgcgatggcgcagaaaccccgttgacaaggcactgctttttcatgacgagagacaagagagacacctccaacttcgacaaagagttcacca

SEQ ID NO: 554759 - DNA, 82 bp, Homo sapiens
ggaaccctggtcaccgtctcctcagatgtgcactcccagcaacacccctgccacgccgcccaacttccccgatgcgctggcc

SEQ ID NO: 554760 - DNA, 90 bp, Homo sapiens
agaagcacctgcacctcagagtaaagctgctggacaacaccatggaaatatttgacattgaggatgaagatttgataaagtggaaggcac

SEQ ID NO: 554761 - DNA, 90 bp, Homo sapiens
cggtgcaagaaaatccatgctggcgatgaagtgattcaagttaatcatcagactgtggttcctgattatgtcactgtaataaagcaacca

SEQ ID NO: 554762 - DNA, 98 bp, Homo sapiens
ggcatctcctagtattgcatcctacagatgtgctgtaaacatcaaaagaagacggtgggatcaggagatgagccttacacaggttatctctagacctg

SEQ ID NO: 554763 - DNA, 85 bp, Homo sapiens
tcagtatatggatacggagtacaaaaacggcccttggatgatggaggacctcagcagccatgtcgaagccccatagtgaagccgg

SEQ ID NO: 554764 - DNA, 100 bp, Homo sapiens
gaccgagggactgggagtcgttagtgagacgtactccggccttttctgtgtggtcatcaacccgtacaagcagcttcccatctacacagaagccattgtg

SEQ ID NO: 554765 - DNA, 98 bp, Homo sapiens
aaaaccatgactgcgctggccaaggccatctccaagaacgtgctcttcgctcacctggatgacaacgagaggagggagtgcatccgccccaacccttt

SEQ ID NO: 554766 - DNA, 50 bp, Homo sapiens
cagatagccagcccatacaagatcgtgtcacgagaagagaatgccttcta

SEQ ID NO: 554767 - DNA, 75 bp, Homo sapiens
caggcagcaaaatgagctcttcagaagagatgctcccataatactctcagatagtgaagaagaagaaatgatcat

SEQ ID NO: 554768 - DNA, 100 bp, Homo sapiens
aatgttgtctatacatatactggaaagagaattgcattatatattggaaatctaacatggtgcagtcattggagaaatcgatgaagaaacagattctgcg

SEQ ID NO: 554769 - DNA, 74 bp, Homo sapiens
gctcatccttcttgataatgccaaaagatgttggctccgacttgacacctacttcatttggagttttataggac

SEQ ID NO: 554770 - DNA, 75 bp, Homo sapiens
gaacgaaagtgaacaggagccgctcttaggcgacacacctggaagcagctcgacacttcatgcaccagatcatca

SEQ ID NO: 554771 - DNA, 98 bp, Homo sapiens
ggggccgccggggccgccatggagcccgactcggtgattgaggacaagaccatcgagctcatggttgatgccggcccaggatggatcagacctgtgaa

SEQ ID NO: 554772 - DNA, 100 bp, Homo sapiens
actcggtggaaacagtcacgtccatagaacaggtgattgtagagaaggctccaaaagccagggtgcctgatctggacaagaggaagtacctagtgccctc

SEQ ID NO: 554773 - DNA, 78 bp, Homo sapiens
aaaactctccacggttaatgcatgctagaaacacaggttgtcacatccattggtgagctggttgaagtgtgttccacg

SEQ ID NO: 554774 - DNA, 90 bp, Homo sapiens
cagaaggtctctggagacatcttcagcagtgagtttatggtcgaggagcacgagctgcggaaggagaggatccaggaggattacaacgac

SEQ ID NO: 554775 - DNA, 99 bp, Homo sapiens
gtgatggaagtggcccaagggtctcccttctcggtgaacgttcagctgctgcaggaccacggggaaattgccaagaattcagaatctgataattcagat

SEQ ID NO: 554776 - DNA, 100 bp, Homo sapiens
tccaagcagccaggcagtatcgggagcaggaaagccagtgttgtggaccctagcacagaggttttccggacagacttgatcacagccatgaagatcccgg

SEQ ID NO: 554777 - DNA, 100 bp, Homo sapiens
cgatatggaagaggagggcaagaagggcaagaaggtcctgctgaaggagtacagcttcgacagtcgccacaagcccgcgttcaccgaggaggacgtgctc

SEQ ID NO: 554778 - DNA, 90 bp, Homo sapiens
gcagaagggaggctccaagacctcatcaacaattaagtgccaaacccaagtctgaaatccacgtgtctatggccactccggtcactgtgt

SEQ ID NO: 554779 - DNA, 100 bp, Homo sapiens
gtgaaccactactactgcaagcgccccatctatgagttcaagatcacatggtgggttattttggagctgttggagcactccttgagctgttgaagatccc

SEQ ID NO: 554780 - DNA, 90 bp, Homo sapiens
tgaagagaacagagagactctgaagttctacctgcggatcatactgggggccaatgtatttactaccagggagcacccaattcttcttga

SEQ ID NO: 554781 - DNA, 75 bp, Homo sapiens
aagtggagtggtggatcagaccaaagatggggctgttgataatcaggtgtatgtggccacagcctctcctgcccg

SEQ ID NO: 554782 - DNA, 95 bp, Homo sapiens
cagaatctttggatatgtgcatcagtggtttatgccaagtagttgtcctgggaacccctgcagaagaagatggtggtggcaaaattgatttaatt

SEQ ID NO: 554783 - DNA, 75 bp, Homo sapiens
tcgcagtggtcgcttcttctccttgaacctctaaaatgcagacctccagctctagatctgtgcacctgagtgaat

SEQ ID NO: 554784 - DNA, 100 bp, Homo sapiens
aggcttggcctgaaaacaggacggacctccatgcctttgagaacctagaaatcatacgcggcaggaccaagcaacagcataatcaccagcaacacccggg

SEQ ID NO: 554785 - DNA, 98 bp, Homo sapiens
gggagaggtttggaattgatgatcaagatttccagggtgtaccccagttgtcagtctgcttgtcagaagaaccggaagatcatattaaggctgcagct

SEQ ID NO: 554786 - DNA, 100 bp, Homo sapiens
agagaagaagcaaacctgtttctcctcatttgggaacaggtgacgtgtctgatgttggcctagggaagggacggtactacagtgtaaatgtgcccattca

SEQ ID NO: 554787 - DNA, 83 bp, Homo sapiens
ggcgatatggaagaggagggcaagaagggcaagaagcaatggctgccatccggaagaaactggtgattgttggtgatggagcc

SEQ ID NO: 554788 - DNA, 51 bp, Homo sapiens
tatttgttcagaatacttcattgagatgagcctgaagtcttgacagaacct

SEQ ID NO: 554789 - DNA, 100 bp, Homo sapiens
tctcattccatcttcattcatgactccagacaggaaacttggatttaactggccagaagcaggtattcaaagcagagaacaatccctgggtgacccccat

SEQ ID NO: 554790 - DNA, 50 bp, Homo sapiens
cacagctgcagatccggggagtaggggccaggatcctcttcctgctccag

SEQ ID NO: 554791 - DNA, 78 bp, Homo sapiens
gctaagaaagtggtgaatcccctgtttgagaaaaggcctaagaattttggcattgacatggagagtttgcatggtaat

SEQ ID NO: 554792 - DNA, 75 bp, Homo sapiens
aagtactttgaacttttccctcaggagcgaagccccctttggcaggtatcactggacaggccatggctccacggt

SEQ ID NO: 554793 - DNA, 100 bp, Homo sapiens
cgctgttgctgccgccatacgcgctctccctgtttaggaagaggagatcccagaactggagattgacgtggatgagctcctggacatggagagtgacgat

SEQ ID NO: 554794 - DNA, 100 bp, Homo sapiens
tgggtttgaacggaatgctggagtcagtggaagacggagctggtcggcccgaagtaatctatgccagcaattatgacaatgttagcagaccatgcagctc

SEQ ID NO: 554795 - DNA, 100 bp, Homo sapiens
gtggacgtcaaatactttgcccaggaggctctgactgttgaagattcctgtctctggatccaaatcagagggccttctctacgtccactcatccagaggt

SEQ ID NO: 554796 - DNA, 80 bp, Homo sapiens
gtgaagccacacagtgtccagatacgagggagctggtacatacactacctcttctttgagcacaaaatctacaaccacat

SEQ ID NO: 554797 - DNA, 100 bp, Homo sapiens
aaggattccaagtaactcttatttggttgctgaagcagaagattgttataatacagctctccgtctgtgtcccacccatgcagactctctgaataaccta

SEQ ID NO: 554798 - DNA, 75 bp, Homo sapiens
aggaagtaactttagaggaggatctgggtggttctcttcccaaagtggaagccaaattcatcaattatgtgaaga

SEQ ID NO: 554799 - DNA, 76 bp, Homo sapiens
ctcgcagcaatgaccctgtggccattctctactgagatgaagaaagaaaaagaatacctgctcagctccagagaca

SEQ ID NO: 554800 - DNA, 100 bp, Homo sapiens
cacagccacccggagttccttagttgaaaggtgcgccctgctgtgacaggttgatgataattagaagcatgctttccactgaacttcccgacaacatttg

SEQ ID NO: 554801 - DNA, 73 bp, Homo sapiens
tcagttacaagagaaactttatgtgcctgtaaaagaatacccagatgtggagccgccaccaaaatgcagattt

SEQ ID NO: 554802 - DNA, 75 bp, Homo sapiens
agaagaaggccaaacacagcatcgacggcatcctgagcgagcgaggttttgacacaagggcgcatatcttcaaag

SEQ ID NO: 554803 - DNA, 100 bp, Homo sapiens
ttgctctgtgtgctgagcgttctaaaggaaggcgtccgttggccttcgtacccgtcttgattgagagtgcctggaagagctgggatgtctggttgagtcc

SEQ ID NO: 554804 - DNA, 82 bp, Homo sapiens
gaacagttcattgaagctatcactgtcagtgctgaagtctggaacgttttttcttagagttccagaattgagactgaagtgt

SEQ ID NO: 554805 - DNA, 76 bp, Homo sapiens
ttgaaaatggacgagtaatcgcctgctttgattcattgaaacacccagaaatactctccacaccatgctgcactgc

SEQ ID NO: 554806 - DNA, 74 bp, Homo sapiens
tgcctacccgccggcccgcgggtctacttcctcaaagaacaagttgaaatcatcgcagaaggataaagttcgtc

SEQ ID NO: 554807 - DNA, 100 bp, Homo sapiens
tgtacctgcccccagctccggaaagtggcagcaccaacccatgggttcagttcttttgttccacggagaacagattctgcctgatcaatgcaggagtcct

SEQ ID NO: 554808 - DNA, 100 bp, Homo sapiens
cctggagagtcgtgcggacagcattgggagcggccgagccatcccaattaaacaggtcaatgtgacggtggactacattagaccagccagcccagccaca

SEQ ID NO: 554809 - DNA, 83 bp, Homo sapiens
ctaccatgtcagccttcccagtagctgggaccacaggaaacaggaagagcgagtacagcaagtacgcaagaaattggaagaag

SEQ ID NO: 554810 - DNA, 74 bp, Homo sapiens
caaggagccactcggcttcatcaaggtcctcgagtgggacttttcttggtagagatggaaatccaaataaacgg

SEQ ID NO: 554811 - DNA, 76 bp, Homo sapiens
ggacctcacatcaacttctaccagctggttgtacatcctggagacctgaagaattctgttgaagtcgcactgaaca

SEQ ID NO: 554812 - DNA, 75 bp, Homo sapiens
ggctacggcaccatgtacatgaagacacggcttttccagatcacccggaagttcaggctgaattctgaaggcaaa

SEQ ID NO: 554813 - DNA, 100 bp, Homo sapiens
cggcgcgcagctggcagccgctcgggtccttccatagtgacgccccccaaggacatctggaatgtcactggtgcccaggtgtacttgagctgtgaggtca

SEQ ID NO: 554814 - DNA, 74 bp, Homo sapiens
ttacaagcaagcatctggaacaatggtgtatgggttgtttatgttacaaaaggccaaagaggtgctgaaaaaat

SEQ ID NO: 554815 - DNA, 51 bp, Homo sapiens
agaatgaagccgcggaccctcgcggcattgtgaagaccctgtttctctagc

SEQ ID NO: 554816 - DNA, 98 bp, Homo sapiens
gccggcaaggggacccagtgcgcccgcatcgtcgagggttgtgagtcccggcccagcccctccacccccctgcccccccgatgcgaccatgggctctg

SEQ ID NO: 554817 - DNA, 95 bp, Homo sapiens
cttccagcaggacatggagcagtacctgtccactggctacctgcagattgcagagcggcgagggacaagaatccttcaagaaacaggaaaaaact

SEQ ID NO: 554818 - DNA, 80 bp, Homo sapiens
ctcatgggcacggctcgggacgggagtgcatccgccccaacccttttccccctcgtctcctgtgagaattccccgtcgga

SEQ ID NO: 554819 - DNA, 100 bp, Homo sapiens
gctgctcacagtcaccgctgtcattgtggaatgctacagctttccatgtaactgtccaagatgataataacatcgttgtctcattagaagcttcagacgt

SEQ ID NO: 554820 - DNA, 75 bp, Homo sapiens
atagagttgagcctgtgggacacttcggaagaggactgtcagaaggacgtagaaggcacggttttactgtgagga

SEQ ID NO: 554821 - DNA, 101 bp, Homo sapiens
tgccaagttgaaaatggacgagtaatcgcctgctttgattcattgaaaatcagtgtgcgtgtgaccaccatggatgcagagctggagtttgccatccagcc

SEQ ID NO: 554822 - DNA, 100 bp, Homo sapiens
agaacaggaggtggtagagggcatggatatctctactcgctccaaagtcaggtcaattcagtgaagatatgatacccacagtgggcttcaacatgaggaa

SEQ ID NO: 554823 - DNA, 80 bp, Homo sapiens
caagaaggaggtcagccgggtgctgtgcaagcggtgcgtgatcctgccatgaagcagtttctgctgtacttggatgagtc

SEQ ID NO: 554824 - DNA, 75 bp, Homo sapiens
gcgaccggcctcagctgcagcgggcccggggcgtggggcctgggtcatcttttcttgagtcccttctgcaaccag

SEQ ID NO: 554825 - DNA, 100 bp, Homo sapiens
caggatatgaagagaaaaatggcacctgtcaagactggatacacgtctgtttaactacgcaaaaggtaatgctggcatggcttactgggaccctaagtgt

SEQ ID NO: 554826 - DNA, 100 bp, Homo sapiens
aaaaattgaggagggcctgaagaagcagggcagcagtgctctggaggtggcagaatcacagctggtgttaacgagcttggatttacactgggcaacgtgg

SEQ ID NO: 554827 - DNA, 75 bp, Homo sapiens
cgaaaacatgaccgctgagcccatgagctcaatctgaaattgaagtgtctgtctctgcaaggaatatcagaaggc

SEQ ID NO: 554828 - DNA, 82 bp, Homo sapiens
tgggctcggtattccccttcctgctagtcctggtggatctgcagtacgaagtgagaagcgccaccttcaagtgaacgtcacc

SEQ ID NO: 554829 - DNA, 96 bp, Homo sapiens
tccaggccaagagggatccttcacccgtgtctgaaaccccatttcatttcactttgcctaaagaaggtgatatcatcccaccattgactggtgcaa

SEQ ID NO: 554830 - DNA, 87 bp, Homo sapiens
cgaatctataagaaaggtgatattgtagacatcaagtgcacacatataatcttagataatgctgatgttctgagtcagtaccaactg

SEQ ID NO: 554831 - DNA, 87 bp, Homo sapiens
cgtgcaacgcggagtggagctcagccaggggcagccggctctggtgctcccagaagaggtgatttgaagatattaaagctagaaatt

SEQ ID NO: 554832 - DNA, 100 bp, Homo sapiens
aaacgtccgggtccaaagagagaacaccaacgtgattcggtatatccagctgacggagatgaaactcagccgatgctcccagagagaaaaagaagccatg

SEQ ID NO: 554833 - DNA, 100 bp, Homo sapiens
tttacactgtcaaggatgacaaggaaagtgtccctatctctgataccatcatcccagctgtctccctcctccccgatggatgcctggatcctgagccgcc

SEQ ID NO: 554834 - DNA, 100 bp, Homo sapiens
tcatccacaatgatttctccagtgctcatcttgttctcgagttttctctgccatgttgctattgcaggacggaatcccagcatggtgagtgcctacatgt

SEQ ID NO: 554835 - DNA, 50 bp, Homo sapiens
actgcgctcagggacggcttgatggtgatgctgaacacagagcggctgat

SEQ ID NO: 554836 - DNA, 98 bp, Homo sapiens
cacctggagatctgcctgaaggacctggaggaggaccacgcctgcatccccatcaaggaaggcaacagcccccaggggagcaaccagggagtcaaaat

SEQ ID NO: 554837 - DNA, 100 bp, Homo sapiens
ccaagatgcagttttttgatgctgaggagctcctggtcgatgaagaggatgatgtttttggtgaagggaaatgatcttcattggttagcatgtgccttat

SEQ ID NO: 554838 - DNA, 75 bp, Homo sapiens
ctgattaccgaggagatgtaaattaaaatagctggctgtaattttccaggtatcagacttggtgataattctgaa

SEQ ID NO: 554839 - DNA, 75 bp, Homo sapiens
ggtgtcccagtaaagccaatgacccccaaggtggtcactctctggttcagggtcggagggagaagatggctttca

SEQ ID NO: 554840 - DNA, 75 bp, Homo sapiens
ccggtcaacatcgcggtcatcaagtacttactatactggcaattgctggagaagattttgcaattgttgcttctg

SEQ ID NO: 554841 - DNA, 83 bp, Homo sapiens
gaccagagagaggacgtggctgaagacaccaaagatgggggaggggaagcacacttccaccctgggcagcgtgtttggggacg

SEQ ID NO: 554842 - DNA, 98 bp, Homo sapiens
acgctctctgagagaccatccccaagcacagacgtccagacagacccccagaccctcaagccatctgcctggctttggcccttcaaagagactgtgag

SEQ ID NO: 554843 - DNA, 100 bp, Homo sapiens
atttaaagattttatgcatgtgcttgagttaagtgggcagaccaacatccacctcagcaaaaacttcttcctgacgaatcgcgccagggagcgctcagac

SEQ ID NO: 554844 - DNA, 90 bp, Homo sapiens
gtcggaggtctcatctttgaactactgccggagcttctgccaggcaagaagctcttctggctgccattagtgaaaaagacgccaatatag

SEQ ID NO: 554845 - DNA, 100 bp, Homo sapiens
agcaacaagaggcatctccgtgtcagccagaccttcaagaatgactcggggcccgccctgagcaatcacttcatggagataccccatcagcctgagtctc

SEQ ID NO: 554846 - DNA, 75 bp, Homo sapiens
gtgtgttcacatttgatcatggcatggtttttagaacttcagccataaaaatgggcagaattttccttgatcata

SEQ ID NO: 554847 - DNA, 87 bp, Homo sapiens
tggtgaggctcacgttggagggcttcgcgtctgcttcggagaccgtaagggtctctgctgctgatgaagctgtgaccaaacgcaccc

SEQ ID NO: 554848 - DNA, 100 bp, Homo sapiens
aaactggagagcttcatcaaaaatagtgatagctttgataagccggaaggtggtggtcgtacgctgtgaaggcatcaacatttctggcaatttctacaga

SEQ ID NO: 554849 - DNA, 100 bp, Homo sapiens
gctaccaaacacagatgtgactactgaagaaatgaaacaagaagaaaatttgagtgtaccgtttgtatgccattgcattggccttaagggaaaagcagcg

SEQ ID NO: 554850 - DNA, 83 bp, Homo sapiens
agtgcccaggcgaatttatgggaagaaattgtcaatacagtgggatggatagcagggtctcaggcacaaccagtaatggagag

SEQ ID NO: 554851 - DNA, 100 bp, Homo sapiens
aggagccatgaggggccaggcctcaggtcccacaggtcctaaaaacatcctgagtttctttggcctgccagaaagtcaccttcctgactcacctgtaagg

SEQ ID NO: 554852 - DNA, 75 bp, Homo sapiens
cagacaccgcctacaggagtatgatgcaaggcgggagtgggagactcgtctgcaggagacgctgggcccgcacta

SEQ ID NO: 554853 - DNA, 90 bp, Homo sapiens
cgccactgctcagcgtctgcacatccctacaatggctaaaacagcaatgggtgacagaccatgccaccactgccctgctccactatcagc

SEQ ID NO: 554854 - DNA, 96 bp, Homo sapiens
gtgattcaacatgaaacaatccctggcttgaaaaacagtccaattgatgaaagtgaggtgcaaacagcaactgatagtccctctgttaaacctaat

SEQ ID NO: 554855 - DNA, 82 bp, Homo sapiens
acatcagccccaaacaggacgaaggcgtgctgaaggaacccaagacagaccaggatgaggagcattgccggaaagtcaacga

SEQ ID NO: 554856 - DNA, 100 bp, Homo sapiens
gccgccgccgccgttttcgcctgcagctgctcaccgacactggccaaaagaagaccctagacaagaaagatggaagacgaatgtcttttcagaaacctaa

SEQ ID NO: 554857 - DNA, 98 bp, Homo sapiens
gaagcatttgcagacgttgtctcatgggtaccgcttgccaactttggaggggcatatgatattttcctgaatgcaaaagagcaaaacattgtgtttaa

SEQ ID NO: 554858 - DNA, 74 bp, Homo sapiens
cggcaaccaaatcggcgccaagggggggccctcagcctcttggccttgaacgggctgttcatcttgattcacaa

SEQ ID NO: 554859 - DNA, 50 bp, Homo sapiens
gaatgtggccagtaaaaatattgaggaaaatggttctcctgaagaacatg

SEQ ID NO: 554860 - DNA, 95 bp, Homo sapiens
aggccaaagaccactgtgatcctaaggtgctctgcataatcaaccctgggaaccccacagtgcacttcagaaggagatcacaacgcgttatcaac

SEQ ID NO: 554861 - DNA, 98 bp, Homo sapiens
tgagatgccagatcaaccactacccatgggtcaggttcctggaaggtgacgtgaaagatcactgtgcagcagcaatcttgacttctggaacaattgcc

SEQ ID NO: 554862 - DNA, 100 bp, Homo sapiens
caggattatggacttgaaagcgaggtgggatgcagatcttcgtgaagaccctgactggtaagaccatcactctcgaagtggagccgagtgacaccattga

SEQ ID NO: 554863 - DNA, 75 bp, Homo sapiens
ttttttaccaaggaagaatggttaaagggaatgacttcattacacctctactcttcatggatcttttggatgaaa

SEQ ID NO: 554864 - DNA, 50 bp, Homo sapiens
gaaacgattcaatgacccttctgaggacagaaaaatggttcgtattgttc

SEQ ID NO: 554865 - DNA, 100 bp, Homo sapiens
actggagcaggtgacaaaagtgctggaggacttcgtggatggagaccacgtcatcctgggggcagtacccaaaggaaacgctacgaaagaatacatggag

SEQ ID NO: 554866 - DNA, 99 bp, Homo sapiens
tggctctttgccgaaatgctagagaaatgaggcatttcatccttcatgaagccattcaggattttgaattgcatatgagtgcttggctcttccttctgt

SEQ ID NO: 554867 - DNA, 74 bp, Homo sapiens
ccagcccccagaaaggattgtgacatatcgttggacccagaattgagaaatttggagagcttgtaatgaccaaa

SEQ ID NO: 554868 - DNA, 90 bp, Homo sapiens
gtcaagagcgtgccctacttcaaggataagggtgacagcaacagctcggcgggctggaaggctttcatctgagtggcacagtaactgagc

SEQ ID NO: 554869 - DNA, 100 bp, Homo sapiens
ggcacctgtgtggatgcggaccagggctacgtgtgcgagtgccccgaaggcttcatgggcctggactgcagggagaaaccggccacaccgctgaaggcca

SEQ ID NO: 554870 - DNA, 100 bp, Homo sapiens
gaaggaagtcatcatgggccggcctggaacaggaatactcccccagttgcaagaggcgcaggaccgtggaagacttcaacaaattctgcacctttgtctt

SEQ ID NO: 554871 - DNA, 97 bp, Homo sapiens
aaaaggtgtacttgcaagaaacctcaggacttgagtaacagcaacatgattcatgatgttgctatcaaaagttgagaaattgtcagaagaaatcatg

SEQ ID NO: 554872 - DNA, 100 bp, Homo sapiens
ttcagttatcaagctttagagcctggctactcacagttgaagcctgattgcaggcggcgtgcaggaccagcggcggccgtgcaggcggaggacttcggcg

SEQ ID NO: 554873 - DNA, 75 bp, Homo sapiens
cggatggatgtgatgcctgctagccaaaagggaatctttgtctgaagtggaagaaaaatacaagaaagccatggt

SEQ ID NO: 554874 - DNA, 82 bp, Homo sapiens
gaagtgacgccatcggcagctgcagcagaagagcggaaatgtcaaacgtggagtaagactttgaccccgacgcaggcttcag

SEQ ID NO: 554875 - DNA, 100 bp, Homo sapiens
gtgactttgaacatgctggtgccgctagccaagctgtcctgcctggccaccctgggtgccctggaattcagccttctctacgaccaggacaacagctccc

SEQ ID NO: 554876 - DNA, 82 bp, Homo sapiens
gtatgtggaaatagcgcggctgtgcaagtacctgccagagaacgacctgaagagagctcagaaatatgctcagcaagtcttg

SEQ ID NO: 554877 - DNA, 100 bp, Homo sapiens
ggaaagcaaagaacttgagcgacagaatttggaaaccttcaaaggttctgtctgaacaccctccagcacgagtggttccgcgtgtccagtcagaagtcag

SEQ ID NO: 554878 - DNA, 100 bp, Homo sapiens
gaatatatcgcagtagttaaaaaactagatccaggttggaatcctcaggtaaagagaaatgtgtatgaccttacaagtatccccgttcgccaccaattat

SEQ ID NO: 554879 - DNA, 100 bp, Homo sapiens
ttcttgctttgtgcttgaaaaaaatcaaagcccctctgagtaagggctgaaaacacagttaaatcactttcaaagttaaaagactattaagaacacaaga

SEQ ID NO: 554880 - DNA, 100 bp, Homo sapiens
tgattatttcacggctcttcactgaggtgctggatcacaatgaatgtctaattatcacaggtgggtaaagcaggaatctgagatttccaaggaatctcaa

SEQ ID NO: 554881 - DNA, 100 bp, Homo sapiens
agcctgcccagacggctcacctgtgcgggatggaacaaaagtttagaagaagaatgtgaatcctctctttgcacatctgcgttaagagccaggaatctag

SEQ ID NO: 554882 - DNA, 98 bp, Homo sapiens
gcctaggcgaagatccggactctgggtgttttgctaccgtgaccgtttagaatcttatcttggctttggatcttagaagagaatcactaaccagagac

SEQ ID NO: 554883 - DNA, 73 bp, Homo sapiens
ttatccatcccatctcttggacagatgatgccagttaattactttgaataatcatccagaaccgcatcctgct

SEQ ID NO: 554884 - DNA, 88 bp, Homo sapiens
cagactacggacctgtctgggtctcagccgccaaagaccccgtccggtaggattttttatcaagcagaaatgcatcgaacaacgagaa

SEQ ID NO: 554885 - DNA, 100 bp, Homo sapiens
tcccttcgagcctgacctctacaagtctgagatggaggtccaggatgcagagctaaagctcaccatggatgatgatatcgccgcgctcgtcgtcgacaac

SEQ ID NO: 554886 - DNA, 98 bp, Homo sapiens
ttccccgtcagcatcccagccgtgctcacgacccaacatgagtgaagtttcctgcaagaaacgggacgactatttggaatggccagagtattttatgg

SEQ ID NO: 554887 - DNA, 49 bp, Homo sapiens
cgacctccgactactttctccttcaaggagtcagtggatcggtggggaa

SEQ ID NO: 554888 - DNA, 74 bp, Homo sapiens
ggcgcagctgggaaagctgctcaaggagcagaagtacgaccggcagctgagggacaagaatccttcaagaaaca

SEQ ID NO: 554889 - DNA, 87 bp, Homo sapiens
caaactacccattttcttttttggaactcatgagacagttgcatgctgagaatttgaaaaatgaagatgatgtagacactggactat

SEQ ID NO: 554890 - DNA, 83 bp, Homo sapiens
gtggaagttactgccgcgccaccgagtccggaccggagactttggggcctaactagtactatactggcaattgctggagaaga

SEQ ID NO: 554891 - DNA, 75 bp, Homo sapiens
ccactaatcaccagaacaaaatgtgcaggcctatggcatgtctgcgttacctttaaatctgataaaaggcactag

SEQ ID NO: 554892 - DNA, 78 bp, Homo sapiens
ctggagtctattcctggattcaatgtcatccagagcccagagcaggccaactgtgatttgagacggcagattgatgaa

SEQ ID NO: 554893 - DNA, 98 bp, Homo sapiens
gaagcagacctcgtggaagcgctggaaaaatttgggacaatatgccactttggagatttgttaatgataccaaagacaaaagaatgttagtttataaa

SEQ ID NO: 554894 - DNA, 87 bp, Homo sapiens
tgtccacatgctcctggtggatctggagctgctgctgggcatagccaagtcacaaggacatagtagctgaggggttgcgccagctgc

SEQ ID NO: 554895 - DNA, 72 bp, Homo sapiens
ccctctactggaggggtgaagaaacctcatcgttacagaaatttcaaagaacaggctccaaaaacaagatcc

SEQ ID NO: 554896 - DNA, 80 bp, Homo sapiens
tatgtccctcacactgtgtacaggtacttgaagaagcagaagctcaacatttatatcagtccatcttgcctgatatggtg

SEQ ID NO: 554897 - DNA, 107 bp, Homo sapiens
tggggatgagtgacggaaacccagagctcctgtcaaccagccagcttcctcttccaggccttcttgttcttgccttgtggcaatagctttggggcttctgactgcag

SEQ ID NO: 554898 - DNA, 100 bp, Homo sapiens
atcgcctctttccatcgaacattccgagaatgcgagagaaagagcctccgtcaccacatagccagcgatctgtacatgagacccaggaattatttccaaa

SEQ ID NO: 554899 - DNA, 50 bp, Homo sapiens
caagttgtttggctaaattcttcagatcatgagcgtcttgttgttcatcg

SEQ ID NO: 554900 - DNA, 100 bp, Homo sapiens
tctttctcaacctcatcttctggagcacaatcattgtggagaagacagttcaagacctcctgaacctgatgcatgacttgagtgcatattcagatcaatt

SEQ ID NO: 554901 - DNA, 76 bp, Homo sapiens
atggaaccagcagcaaagaagtgctatctggaaagagaggtcgctattaaagcatgaagactttctgaaacctgcc

SEQ ID NO: 554902 - DNA, 83 bp, Homo sapiens
ggatatcgacgtcgtgatccagaagtccagagctgaggactgcctgtttgcaggagaaaagccttacagatgctcatgggaag

SEQ ID NO: 554903 - DNA, 74 bp, Homo sapiens
aagcactttaaagtcacaacaacgtctattgaaagcccattcaaggaaaggtggcccagacagcgtgtatgtca

SEQ ID NO: 554904 - DNA, 82 bp, Homo sapiens
gttaagggagacaaagttgaaaacaaagtgctggtgtttttcatgcaccatctcactgagacctcaacaaagtttttatgag

SEQ ID NO: 554905 - DNA, 75 bp, Homo sapiens
ctgaaaccgatttctaacagagaggtgtggaaccactttgacagcggttcgtgcccaggccaggccatcggtgtc

SEQ ID NO: 554906 - DNA, 74 bp, Homo sapiens
gaacactggacttcagaaatacccctgaatggttggacagtgattcctgccaaaagtgtgatcagcctttcttc

SEQ ID NO: 554907 - DNA, 51 bp, Homo sapiens
attcccagcaacagatacaatgagcactctacacccccaagtgcatatggg

SEQ ID NO: 554908 - DNA, 50 bp, Homo sapiens
tggttaaaacctgacacttttaacaggtttgcctgcaatgagatttcatt

SEQ ID NO: 554909 - DNA, 83 bp, Homo sapiens
acttcgcgcgcaaggacctgagcgaggccgacgcgcgcatcttcaagggatccaggtccggcacgatcaagacccaggctaca

SEQ ID NO: 554910 - DNA, 80 bp, Homo sapiens
tggacaacagacctctgtttggggagacgtccgccaagaagctgcacacatacatgtaagagaagcaaaaatgtcagatg

SEQ ID NO: 554911 - DNA, 100 bp, Homo sapiens
cttgctgtgctgaatcctggctgtgtgaccccaaatcatacctcactcctgttagggatgaagagtctgaatcccaaagaaaagcaagatctagacaagc

SEQ ID NO: 554912 - DNA, 101 bp, Homo sapiens
agcggcctcacagtcatggatctggaagctgagggcacgtgtttgcggttcagccctttgatgaccgcagcagttcctgccagggaagaggaagcagctcc

SEQ ID NO: 554913 - DNA, 101 bp, Homo sapiens
ccacgaggacgagagccgtacagtgcttcacgtgctgggggacaggacctattgcaaggcccccgggcctacccatggtttactcctggcttgggggcatt

SEQ ID NO: 554914 - DNA, 100 bp, Homo sapiens
ctggcgctgccgcccaccttgtggccctgggctttaccatctttgtggctgtgcttgccaggcctggctccacatccataccccagtttaccaattcccc

SEQ ID NO: 554915 - DNA, 100 bp, Homo sapiens
gcagattcagtgtcatgtgaggacgtgcttcctgcttcatagataagaggaatcggatataacatcatccgggtacccatggccagctgtgacttctcca

SEQ ID NO: 554916 - DNA, 75 bp, Homo sapiens
ctgagctgggtctctgactcacttctgactttaggtttattcagtcaccatgaagctgctgctgctgcacccggc

SEQ ID NO: 554917 - DNA, 88 bp, Homo sapiens
gacagctgcacccatggacgttcgccagtgggttgacacagatcgctgctgggacatcgccttgggtcccctcaaacagattcccatg

SEQ ID NO: 554918 - DNA, 100 bp, Homo sapiens
cagtctatgatgagagtactgatgaggaaagtgaaaaccaaactgatctctctgggttggcttcaggccatcgaagacggcaatttggaggaaatggaag

SEQ ID NO: 554919 - DNA, 105 bp, Homo sapiens
gatcctgggctcccttggccacaaagcaggacaggggaccagagatcccccaactcaggagacgtgaagctggcagctgtagagacggggtttcgccgtgttagc

SEQ ID NO: 554920 - DNA, 100 bp, Homo sapiens
ctgtccctactacgatgcaatcctgagccgtaagttcatcatcgccaacgctcgggtggagaactgcgccgtcatctactgcaacgacggcttctgcgag

SEQ ID NO: 554921 - DNA, 100 bp, Homo sapiens
caagcaggttttaaatcaagatttaacattccaacacataaaaattatttatccaacagctcctcccagacaaagaaacagccttggtataatagcacgt

SEQ ID NO: 554922 - DNA, 100 bp, Homo sapiens
ctaacccagaaaattcgaaggaacacattaaactggtggatgcagcagatgtaagcgcttgtaagacgaatggaatgcaagccttttctcaaggtcttaa

SEQ ID NO: 554923 - DNA, 75 bp, Homo sapiens
tggtgaggtgaagaggtgtgaagagctagagcgaatattggacggagccggtgggagaggagagcatctccgacg

SEQ ID NO: 554924 - DNA, 74 bp, Homo sapiens
tgaaggcagaaggttccgagatcaggttggccaaggtgctgatgggaagggtgcctgacaggggaggccggccg

SEQ ID NO: 554925 - DNA, 98 bp, Homo sapiens
ttgggatgagagtcggagccgaataccaagctcggatccctgaatttgatccagcagccccgggctcagctcctggttcccagtatggcacaatgacc

SEQ ID NO: 554926 - DNA, 100 bp, Homo sapiens
agccggggactgggcgctaccaggtggtacgtcagcctgtcatatgcatcaacaaccatgtattttgttcgatttgtattgatttgtggttgaagaataa

SEQ ID NO: 554927 - DNA, 97 bp, Homo sapiens
agctgcatctgctcaaggagttcccgtgcctgggtcaggagggcctggacaagatcctagagatcttccttgacttgtccccactgcctgaaacaga

SEQ ID NO: 554928 - DNA, 82 bp, Homo sapiens
gcttagaggacttccctttggatgtagcaaggaagaaattgttcagttcttctcaggagggaaaacccctgatcctaaaatg

SEQ ID NO: 554929 - DNA, 88 bp, Homo sapiens
agatgatgtggtctacagaccaggagctgttgagtggaatgtcatggccagctcctcggacagtgaagatgacagtttcatggctgtg

SEQ ID NO: 554930 - DNA, 75 bp, Homo sapiens
attagaacgtgcccttcattatctgaagcatggtgacatggaccagaaggagagagatgttatcatgagggaatt

SEQ ID NO: 554931 - DNA, 80 bp, Homo sapiens
caagcaccgccgggtgcgctttctgcacgagaccgggctggccatgatctatgagcttactcacatagcatattggtata

SEQ ID NO: 554932 - DNA, 97 bp, Homo sapiens
tctggtcggatggggcaggatggctgcgttgacacgtcttatttaatccacatcataggaggaagttaacatccctaataggagggttctggttact

SEQ ID NO: 554933 - DNA, 100 bp, Homo sapiens
agacagagggaatttaagaaacatccacagcagcgactggcccaagttctttgaaaagccagatctgccagtgagcctcaggctttaggaactgaagagg

SEQ ID NO: 554934 - DNA, 83 bp, Homo sapiens
ccttggcctcctcctgctgctactgtgtccagcgcaggatccaaactactggatacaggtgcatcgcttggaacatggagatg

SEQ ID NO: 554935 - DNA, 120 bp, Homo sapiens
cagatagaaaacggcgagagtgggcgagaacgtccactgcgggccggcgaaagctggaccatgaatggcacctacaacacctgtggctccagcgacctcacctggcccccagcgatcaag

SEQ ID NO: 554936 - DNA, 100 bp, Homo sapiens
aacaaccagacagggcagcacgccgtcattgacatcaatgccttcccagggcgtctctggccgagcctctttttgtggaaaacgacagcagcagcagtgg

SEQ ID NO: 554937 - DNA, 105 bp, Homo sapiens
tacagaggagcccatggcatcatagttgtgtatgatgtgacagatcaggaaaatcaggaaaatgtttccaacctggtgattgaggacacagagctgaaacaggtg

SEQ ID NO: 554938 - DNA, 80 bp, Homo sapiens
cttccctgccagaaatgaaggttcagttatgaggcaaccctctaggaatacccactctggtgtacagacacgactggaac

SEQ ID NO: 554939 - DNA, 95 bp, Homo sapiens
cgattctggaggctttcggcaacgccaaaacagtgaagaacgacaactcctcacgattcatggagcagttgaggaatgagctacttcaggagaga

SEQ ID NO: 554940 - DNA, 82 bp, Homo sapiens
gtgaagctcaccgacagtgccctgagggccttcgagagctaccgcgccagacagatccagacatttaatgtggatgcaccat

SEQ ID NO: 554941 - DNA, 82 bp, Homo sapiens
caatgacacagttcctaagaacgccaacaggaaatatttttggagggttctcagcttccttgcttccatggctccagcacca

SEQ ID NO: 554942 - DNA, 96 bp, Homo sapiens
taggaacagctccggtctacagctcccagcgtgagcgacgcagaagacgggtgatttctgcatttccatctgagggctggtgaattaccagatctc

SEQ ID NO: 554943 - DNA, 101 bp, Homo sapiens
aaccatccagatgcgattttagtggaggactacagagccggtgatatgatctgtcctgaatgtggcttggttgtagagagacaagagagacacctccaact

SEQ ID NO: 554944 - DNA, 75 bp, Homo sapiens
agctttccacttcagaaaatgccctgacagacctgtgaccgcatcaagcagtcagcagctggcaccaagcgtcgg

SEQ ID NO: 554945 - DNA, 100 bp, Homo sapiens
caatgcattcagaagccaaaatggtgaaaagagatttgaatgcccggaatgttctaaaaggtttatgcggagtgatcatctctccaaacatgtcaaaacg

SEQ ID NO: 554946 - DNA, 75 bp, Homo sapiens
taaaagtgccttctgtttttaagcttctaattaaagagtgatgttgcacctgtaaccatctttttatgggtggag

SEQ ID NO: 554947 - DNA, 83 bp, Homo sapiens
cgccgctctgtctacaacccgaggatattagaaatggctactccccagtcaattttcatctttgcaatctgcattttaatgat

SEQ ID NO: 554948 - DNA, 75 bp, Homo sapiens
acaaggatctgcagccatttatattgcttaggctactgacctgcaatgcttcttttgccacccgagaccgtctgc

SEQ ID NO: 554949 - DNA, 71 bp, Homo sapiens
aggaccctctggaagcctagaaatggtccaggtcaagacctcgtctccgttctcatagtcgtagcagtgaa

SEQ ID NO: 554950 - DNA, 75 bp, Homo sapiens
atttgatgacctagatggaacacatgctctgatgcaattaccagctctggctgggtcgccacaacttgtttgacg

SEQ ID NO: 554951 - DNA, 100 bp, Homo sapiens
ctggaccgtggttttgcaggaaatgtgaatctcaggagagagcagccagagtggatctgaacgtctatgacactctttcgagctgacacagtgaagaaca

SEQ ID NO: 554952 - DNA, 100 bp, Homo sapiens
accaaggtagaaagcacgggacactggctggtggaagatcatgttcgaatatgggaagttttaaagacagaggagctccatcaagtatgatggtgaagga

SEQ ID NO: 554953 - DNA, 98 bp, Homo sapiens
agccgtggctgcgctctcttccctctgctgggcgtcctgttcttccaggatatggaatgtgcagatgtcccactattaactccaagcagcaaagaaat

SEQ ID NO: 554954 - DNA, 80 bp, Homo sapiens
ggataacgggaggtgaatttccatgtcaacatagtcctgacccaacatgagtgaagtttcctgcaagaaacgggacgact

SEQ ID NO: 554955 - DNA, 75 bp, Homo sapiens
gtgactgccatggagtgaagggacaaaaggtctttcagggatgtggtcagcccaaacctgctccagccctcagat

SEQ ID NO: 554956 - DNA, 74 bp, Homo sapiens
actattgcaaatgccagaaaactaattgatgagtgctctataaaaagctgcatcactgccttccacgtcacctg

SEQ ID NO: 554957 - DNA, 82 bp, Homo sapiens
ttcatctcctccgtcaccagccacatctaccagttgaggagctcaagcttgggaaaatggtgtgcattccttgtatcgtcat

SEQ ID NO: 554958 - DNA, 82 bp, Homo sapiens
cccccttccccacgcaaccccagatccatttacactttacagttcgtgctggccgtgggcagcgccgtctttgatgccatgt

SEQ ID NO: 554959 - DNA, 51 bp, Homo sapiens
ggtggagcgggacacgaacgtgaccgcaacagatgaccaaggaagtttggg

SEQ ID NO: 554960 - DNA, 75 bp, Homo sapiens
ggttcgggtgcgctgctcaaggacacggtctacaccgacttcgacggtctgcagggaactggccaggcaaggggg

SEQ ID NO: 554961 - DNA, 75 bp, Homo sapiens
agagagcgatcaacacgctgaacggcttgaggctccagtcaaaaaccattaagaagacacccactgcagaccccc

SEQ ID NO: 554962 - DNA, 83 bp, Homo sapiens
gccctcgtcctgcacttcctcctcggaatctgcaagcaagagtgagccatggagctacgtgtggggaacaagtaccgcctggg

SEQ ID NO: 554963 - DNA, 90 bp, Homo sapiens
cgtggctgcaaccttagcgacatcaggaagaacagggtcgaggatcgagagtatctgactgtcttctctcagatgattgcatttcatgat

SEQ ID NO: 554964 - DNA, 83 bp, Homo sapiens
atgtctttggagaacttctggagctggccaacgtgcaggagttgacgaaggatcagagattggtgtattcgggcagactgctt

SEQ ID NO: 554965 - DNA, 100 bp, Homo sapiens
catcttcaaagctgaactgaatgagtttcttactcgggagctggctgaagatggctactctggagttgagcctcctgtataagaagtaccgtattttctg

SEQ ID NO: 554966 - DNA, 100 bp, Homo sapiens
cccaccgcacagttatttgcaaagtcccaggtgaactcgtggcgagagaaggaaaatgcgcgtcccgggcgcgggctgtattcatcaccaaagaaaaaac

SEQ ID NO: 554967 - DNA, 50 bp, Homo sapiens
cggcggccgacggtggcggcgggatgcagctctgcttatgataatgtcaa

SEQ ID NO: 554968 - DNA, 96 bp, Homo sapiens
ggaaagcaagggattgctggctacagcttcagaagaccgaagcgttcgtatctggaagtgtactaatggtcacttgatgtgcgctggctgttttat

SEQ ID NO: 554969 - DNA, 100 bp, Homo sapiens
gagctcttcagaaaccaggctgctttcaggaacattgctgtggattcccagaataaatggacaactagtggctttaaaagtcatcagcatgaatgcagag

SEQ ID NO: 554970 - DNA, 98 bp, Homo sapiens
ggacatggtcctctgcgttcaggggttggatgcctacagctgatcaatgctctcatcacaccagcggaggaacttgacttccgagttcacatcagaag

SEQ ID NO: 554971 - DNA, 74 bp, Homo sapiens
ccgattcctcctccttggtcgccgcgtccttggctggcgtgtgtgttccagagaacaagccttcagacatttgc

SEQ ID NO: 554972 - DNA, 76 bp, Homo sapiens
actgggaaacatcattaaatcgttctacaggcgcggcagggccccggctgttcaccatccacctgatagacgcgaa

SEQ ID NO: 554973 - DNA, 96 bp, Homo sapiens
ccagatcaacgtcctccgggaccggagtcagaaccctccgcagagtaaaggtatcgacttcaatattataaagattctgaacaacccaagagcata

SEQ ID NO: 554974 - DNA, 74 bp, Homo sapiens
agccggacctgcttccgccagtggagacaacaggtgacagagctgaatgaacctctctccaatgaagatcgaaa

SEQ ID NO: 554975 - DNA, 99 bp, Homo sapiens
gagaaacccaactccatggacactgcaaatacctcacccttcaaagtaccagtaaaagtgcagttttaaagtgtctcctggatattcacaaaatttttc

SEQ ID NO: 554976 - DNA, 83 bp, Homo sapiens
ggctcaatgaccatggcaagaactggcgtcacgtttacaagcaattctgtggtgttcttggtcacacatttatggagtttctg

SEQ ID NO: 554977 - DNA, 51 bp, Homo sapiens
ccgccatccagccaccattccaagctgtccatgaagcagcatctggactcg

SEQ ID NO: 554978 - DNA, 98 bp, Homo sapiens
ttcaggctgcaacaaggagaagagccatggaaacaggaggaagaattcccaagccaaagctttccagtcctgttccagattatatcaaatcaactgtc

SEQ ID NO: 554979 - DNA, 101 bp, Homo sapiens
ttccgccctaatggaggtctccagtttcgcctgagattcctgaacgcctctgcgaacaaactggaaagccttcctccagccacgctttccgaagagacaaa

SEQ ID NO: 554980 - DNA, 95 bp, Homo sapiens
cttcccgcgtccgccgattcctcctccttggtcgccgcgtccttggctggcgtgtacaggtttgcagattccgccagcagcacagcaagctctac

SEQ ID NO: 554981 - DNA, 82 bp, Homo sapiens
ctcagtctctgtcagaggaagatcccttgaggcttcgtgacggagttatcagagacattgagaggcaaattcggaaaaaaga

SEQ ID NO: 554982 - DNA, 98 bp, Homo sapiens
acgtggtgtgtggggaccatatcatcattagtggccacaatgaccagaagatccggttctgggacagcagcttttcctcctggaggaggtgcgagagc

SEQ ID NO: 554983 - DNA, 82 bp, Homo sapiens
cagctatgcccccgtggccaccgcctccagcttgccaccaaagacctgcgactttgctcagagctgccatcagtcatgctct

SEQ ID NO: 554984 - DNA, 103 bp, Homo sapiens
ctgccacgcgacatctgcaaggacagttgtttggtgttttgcttcaggttatagatggagagacctataaaggctgaggctgaggtggcctccttgaaccgta

SEQ ID NO: 554985 - DNA, 90 bp, Homo sapiens
caagtcctgttcgctcttttcagcccctcggtgatttgatgaaggctgctgcaggagagttcgcagatgatccctgctcttctgtgaagc

SEQ ID NO: 554986 - DNA, 100 bp, Homo sapiens
tcctgatctctctcgctgtgagacatgtctgagactcctgctcagtgtagcattaagaaattccatgagtgaaaccgtcagactggtcagtggaatgcag

SEQ ID NO: 554987 - DNA, 83 bp, Homo sapiens
ctccgttagctaattaaaacatttttcagggacgtagccatccagaggatgtgttcgaaatgcgctttgccaagatgccggac

SEQ ID NO: 554988 - DNA, 90 bp, Homo sapiens
agctccgccttgaacctcgagttccttttagacagttccagatgaatgaccaagacggttacatggacacagaacagtatgaagaagcag

SEQ ID NO: 554989 - DNA, 75 bp, Homo sapiens
ctgtcctatgtcagcaaaaactggagcagaaattggaggctcagcatagtacagttgaaagcagagtgtaacaag

SEQ ID NO: 554990 - DNA, 100 bp, Homo sapiens
cgacgctttcaaagatgcactgcagagagcccggcagagaccgatcagaaaggatttcttaactggcactgctggcagagacggagaccgcggctggggc

SEQ ID NO: 554991 - DNA, 82 bp, Homo sapiens
attctccctctcctagaggcggcaatggatcacttggagtcctttattgctgaatgtgatcggagaactgagctcgccaaga

SEQ ID NO: 554992 - DNA, 75 bp, Homo sapiens
agagctatgatgcctccttatatttcctttcctggatgaaaatgttgtctcctttctaaattctctgccgatttg

SEQ ID NO: 554993 - DNA, 100 bp, Homo sapiens
tcagctgcactgtggcaaggcttttgcttccaaatacaagctgtataggtttgtatttcagcagtcagaaaaatttgcaaaggtggaaaaccaataccag

SEQ ID NO: 554994 - DNA, 98 bp, Homo sapiens
gctgcacctcccgcgccgcacggtggacgagacagaagccctgggggatgcggaggaagatgaggacgatgaggactttgtggaggtccctgagaagg

SEQ ID NO: 554995 - DNA, 89 bp, Homo sapiens
aattgcatgggaaaatcatggaagttgattactcagtctctaaaaagctaagaatcctgctgcatcacagaagctggaagttctgatgt

SEQ ID NO: 554996 - DNA, 98 bp, Homo sapiens
ttccgggagctgcctgagccgctcttcccttacagtttctttgagcagtttgtggaagcgatcagtttgatctgtggatgaaatgaatcatgattttc

SEQ ID NO: 554997 - DNA, 100 bp, Homo sapiens
tgatatcagacaccgagcttcagcaagctctctccaacgggctaccacccgatgccccatgaagtggagatcgcacacaccaagaagctgttccgcagga

SEQ ID NO: 554998 - DNA, 83 bp, Homo sapiens
agatcatcattaaggacggaggcacggtgcagaccatgaattacgtggggcagttagccggccaggtgtttgtcaccgtgaag

SEQ ID NO: 554999 - DNA, 112 bp, Homo sapiens
cctgtcttccccaacgccccggagccgccggccgctagcgtcagcgccagccagtgctgggcctaaaggagataacatttatgaatggagatcaactatacttggtccaccg

SEQ ID NO: 555000 - DNA, 50 bp, Homo sapiens
aattttacaccttctttctgtatcaggctctgactaccacccaaccttga

SEQ ID NO: 555001 - DNA, 51 bp, Homo sapiens
atacaggatatctaccacttcaataggctcacttcatggactcactttgcg

SEQ ID NO: 555002 - DNA, 100 bp, Homo sapiens
ggaggatgatatgggagtataatgttgtgagctcaaatgatacttttcccacagcaatgcacattgctgctgcaatagaagttcatgaagtactgttacc

SEQ ID NO: 555003 - DNA, 76 bp, Homo sapiens
tatctgattgggacaacattcagacccatttccagtcatgagagtttcataatagaagagcagagtttcttactat

SEQ ID NO: 555004 - DNA, 82 bp, Homo sapiens
accttggcggcgcccggagccggcgtggcgctcatcgagggacgcccggcccaagtgattacaccaccaccttcactgtcag

SEQ ID NO: 555005 - DNA, 75 bp, Homo sapiens
gagcctgaccttagtgccagggtcaccatctaccaggtggacatcgagcagctggatccccgcggccggactccc

SEQ ID NO: 555006 - DNA, 96 bp, Homo sapiens
ctccactccatgattctgctagtagtgggcacagagatcaacttgaaaacagtctgaatgaatttggtgaaaagtgggagttaaactctggagatg

SEQ ID NO: 555007 - DNA, 75 bp, Homo sapiens
agggcttcaagcccatcttggacttcagaacacctcacaactttgtggctgctgatactttggctgtgaggcaaa

SEQ ID NO: 555008 - DNA, 75 bp, Homo sapiens
cttttgtagaggaacctagtaaaaagggagcacttaaggaagagtggtgatggcacttctcaaatactggccaaa

SEQ ID NO: 555009 - DNA, 114 bp, Homo sapiens
gggagatgaacccaacctagtgggtgtaatacatcatgaactgcagggaggacgtaatgatggtgtggaaacaatcaagtcacgccttttgccttggctggaggcttcctttac

SEQ ID NO: 555010 - DNA, 75 bp, Homo sapiens
agtttgaagacttgctagttaggattttattactggcagcatgtatatcttttgatgctcacaactgtattcctg

SEQ ID NO: 555011 - DNA, 82 bp, Homo sapiens
ttccacttgcacgaaagctttcctaggccaaaaagaggatggattggatgctttggtatatgatttggattttcctgcctta

SEQ ID NO: 555012 - DNA, 97 bp, Homo sapiens
aagacgctgcgaattgacgccttttataataaagacacttatcttgcccaagagctggattataagaagaccagtctagcaccttatgtgaaagttt

SEQ ID NO: 555013 - DNA, 88 bp, Homo sapiens
gcctgcagaggtgccgacatggggcttaagatgtcctgcctgaaagaaactggcgatggaatatgagaggagccctctggaaagaaaa

SEQ ID NO: 555014 - DNA, 100 bp, Homo sapiens
catgtactgggggattcgcagggaggatgtcgggacaccccggaagctgggaaatgagccacccagagttccctcactgaagatctgagcatgacccggg

SEQ ID NO: 555015 - DNA, 98 bp, Homo sapiens
aagtcctacagagttatcaggttccagaccctgccttctcttctgaaagtggaagtatgcgagacttaagagctcaagtgactagtggtctcctgcca

SEQ ID NO: 555016 - DNA, 100 bp, Homo sapiens
gtccccatggataaaatctttcgccgggattctgacctgacttgtttgcagaaatgatcctggtggagggattgaaatgtctgagttcatccgagaggcc

SEQ ID NO: 555017 - DNA, 101 bp, Homo sapiens
cctggagcggagcgcaggcgccgagactgacaacgcggtcccacagttctctctggacactctgtacgtgtctacagcaaaacacgttttcgaaaaaaaac

SEQ ID NO: 555018 - DNA, 50 bp, Homo sapiens
ccaccagcacctgttgatccaccagtgtacaaaatggttcgttacatcag

SEQ ID NO: 555019 - DNA, 82 bp, Homo sapiens
cagaaacgtgaggatcaagaagccggactacaaggtcgcctacgtgcagctgcttcctcatcgtcctggtctgcctcatctt

SEQ ID NO: 555020 - DNA, 75 bp, Homo sapiens
ccacactccgcatcctggccagcatgcccagccgcaccattggagctcactggtggcctctgcgggcttggagag

SEQ ID NO: 555021 - DNA, 100 bp, Homo sapiens
aagaatttattcactcaagactaaaaactaaaggcctgggcctgagaactgaatcaggttcttgctcaagtaccaactctatggacccaggacaggtttg

SEQ ID NO: 555022 - DNA, 75 bp, Homo sapiens
ccggcgtccccggcgcgaagaggctggactcggattcgttgcctgagacaccattcgcttttcacccaagatgat

SEQ ID NO: 555023 - DNA, 53 bp, Homo sapiens
gaaaattctggataatggtgaatggctgtcggaaaaggtaacagaagatggaa

SEQ ID NO: 555024 - DNA, 50 bp, Homo sapiens
cccgtcgccgctcccgaagcttttccagatcttcgtgaagactctgactg

SEQ ID NO: 555025 - DNA, 102 bp, Homo sapiens
taacatcagacactgctgaaagagtcctagagggttttgctctgttgctcaggctggagtgcagtggcacaatcatggctgaatgcaccctccacctcccag

SEQ ID NO: 555026 - DNA, 100 bp, Homo sapiens
ggggttgcggcggcgctgagccagcggggccgcagcagccgctcttctaaaacattcaaaccaaagaagaatatccctgaaggatctcatcagtatgaac

SEQ ID NO: 555027 - DNA, 147 bp, Homo sapiens
ggatgcctttgccgccgccaagctcctggccctggccctgatcatcctgctgggcttcgtccagatcgggaagggtgagaagccctaccactgcaactgggacggctgcggctggaagtttgcgcgctcagacgagctcacgcgcca

SEQ ID NO: 555028 - DNA, 100 bp, Homo sapiens
ggtgaagaaggaagggggtgctctgaggggttatggttttgtgaaattcacagatgaactggaacagaagcgagccctgacggagtgccagggagcagtg

SEQ ID NO: 555029 - DNA, 83 bp, Homo sapiens
gtgaacttccagcagccggcggacgggtgaggtggctttgaccccgggttgcccggccagcacgaccgaggaggtggctggac

SEQ ID NO: 555030 - DNA, 80 bp, Homo sapiens
cctggggttactgtaaatgggaaggacaggcagagctaaacaagcttcctgcctgacacagctcacttcaagaagtgcac

SEQ ID NO: 555031 - DNA, 51 bp, Homo sapiens
cctgcaaggtgctggtggagaaatgatgaggacgctgaggcccagagaggg

SEQ ID NO: 555032 - DNA, 100 bp, Homo sapiens
gtgagccaccaaaaccacagtgttctttgcctcaagacccagctattgttcagctagagatgatcgctatggaaaatcctgcagacttgaagaagcagtt

SEQ ID NO: 555033 - DNA, 98 bp, Homo sapiens
tgtgaatatgccatgagcctggcaaaaaatacaggggacaaagagagcagtagtgccaagaagatatcagaccaggattgccaatgctaaggcaaatc

SEQ ID NO: 555034 - DNA, 98 bp, Homo sapiens
tgtttgtcatccttgtacagcaatctcctcctccactgccactacagggaagtgcatcacatgtcaggtccctggatggccggttgcaggtgtcccat

SEQ ID NO: 555035 - DNA, 122 bp, Homo sapiens
ccgccgccgccccccagaggcgccggagcccggaatcccgctcggagccagccagccgtcccgagctaccagcaggtagggaagacatatgagctactcaactgtgacaagcacaagtctat

SEQ ID NO: 555036 - DNA, 74 bp, Homo sapiens
agctcggttttcttatgcttataagagtggaacaggttaaacccatccagagtaatggctgcggccttacccag

SEQ ID NO: 555037 - DNA, 82 bp, Homo sapiens
ctcgcggcgagcggacggggtcgagtcagtgcgttcgcgcgaggagccccagaaccaggactgggggatttggagctgggca

SEQ ID NO: 555038 - DNA, 90 bp, Homo sapiens
cctgagcttttgtcagagaaagtatcactccttcatttttgtagaccaacttttctgggtgggatgtgtgtgggctgaaattccgagctg

SEQ ID NO: 555039 - DNA, 90 bp, Homo sapiens
ctcagagtcaaagaagaaaccgtgctcagaaactagccagattgaagtgctgggctttgacaaacttcctctgtggggtaccatcctcat

SEQ ID NO: 555040 - DNA, 80 bp, Homo sapiens
ggacgggccatacccaataaccaggtgcttggcaaaatcgagcgggccattgggtcctcactgagcagcgagtcgtcccc

SEQ ID NO: 555041 - DNA, 83 bp, Homo sapiens
ttgtggttggctatggtgatcttaatgggaaagaatactggcttgtgaaaaacaggatatgggtctgcaggatggagttcttc

SEQ ID NO: 555042 - DNA, 100 bp, Homo sapiens
attaccatggcgaggagtctctgtccgggggcctggctaaggaaaccctattacctccagcctcttagcaaatatccggctgtgatcaatgatatttcat

SEQ ID NO: 555043 - DNA, 100 bp, Homo sapiens
gggacagaagcgtttggggcagaagccgggaagttctcagctgtcagtgagggccagggggatcccccagggggcccggcccccaccgtcctggccccca

SEQ ID NO: 555044 - DNA, 100 bp, Homo sapiens
gttgtgagtgcttatggccacattcctgcatcagctcagccatcgcggtggataatattaatgcagctgtgatggatttgaaaaaaaagaagatccgcag

SEQ ID NO: 555045 - DNA, 80 bp, Homo sapiens
cttttgggggatcactgtcctctctcggcagcagattctcattcagattgtggatgcctcgtcagtcatcacttgggatt

SEQ ID NO: 555046 - DNA, 100 bp, Homo sapiens
gcgtacgccctcatggggaaaatctccccggtgactttcagggtttcttcagtgcccgtggtcatcgaccccttgacaagaagagagaagaggctcccag

SEQ ID NO: 555047 - DNA, 120 bp, Homo sapiens
aagcgtgaggccggcatcgtctttccgtcctctgaggcgacggccgcggctgcacaggaactgtggaaggtgcatcagtgaagaaatggaccaatgtgtataatcatggaatctccttgc

SEQ ID NO: 555048 - DNA, 139 bp, Homo sapiens
agaaatatgtgttaaattcactcgtggtgtggacttcaattggcaagcccaggccctattggccctacaagaggtgacaagtttcggttggtcatagctagtaccttgtatgaagatggtaccctggatgatggtgaat

SEQ ID NO: 555049 - DNA, 75 bp, Homo sapiens
ggcggacggttttcgtacgggcggccgtgcgcgaggcgagatcgaagacctgcaggtgaagctgcagcacgcgga

SEQ ID NO: 555050 - DNA, 90 bp, Homo sapiens
cgctcctgagggcaaaacccagagcagacaccgcagccaccgcggatgcaaagtactactgagcgagtgtgcttgatccagggaacggtt

SEQ ID NO: 555051 - DNA, 74 bp, Homo sapiens
gttagtgacaaagatgcaagcctggcattttttgatgattgtgtagataaaacagccaccgcactgtgttcctg

SEQ ID NO: 555052 - DNA, 100 bp, Homo sapiens
gaggcgtcgcgggagcctttggggcaccacagagatgcgggaagaactgtaggaatagtcacagcttgacaaccgaacacaacctgagtgtgctgagaac

SEQ ID NO: 555053 - DNA, 101 bp, Homo sapiens
gactctgaaatgaattagatggagatttaaaatagggcaatttagtgggaagagatacttaatttgaaggacagtgatatcgaagcgttggccaggtgttt

SEQ ID NO: 555054 - DNA, 75 bp, Homo sapiens
tggtattcgccggcacgcgaagtggccgcatccgcaagagagcatcagtgatgtcacgtttggagcaggggtcag

SEQ ID NO: 555055 - DNA, 80 bp, Homo sapiens
ggcctcggaccagccatttcggtgtagaagtggcagcacggcagaaggagaacttatggattgtgatggaaaatcagaat

SEQ ID NO: 555056 - DNA, 100 bp, Homo sapiens
ctgagggtgccctcaatgagcacatgaccagcttagcttctgtcctaaagtctgtgctgagacctataaccctgatgaggaagaggaagatacagatcca

SEQ ID NO: 555057 - DNA, 98 bp, Homo sapiens
aaatgactggtcacgcgggactgaacaccgcacaggcaggaggcatggccaagtggagaacatgcagctgaccctgaacctgcagacggagaacaaag

SEQ ID NO: 555058 - DNA, 90 bp, Homo sapiens
aggaaaagaacaagcttccaaccggtacaagtctggaggaatttcacagcctctcaaactacgttttcagctataacacggattcccgcc

SEQ ID NO: 555059 - DNA, 74 bp, Homo sapiens
gcttgtgatctccgctttcgaagcattgtacagtgtggaaactcgaactatctaccagtttcattacaagaatt

SEQ ID NO: 555060 - DNA, 75 bp, Homo sapiens
tacagcctttccttcataccatttgcaagacctgtggatgaagagccagagtcctctgaggtcgatgctgctggt

SEQ ID NO: 555061 - DNA, 75 bp, Homo sapiens
tagcaagaactgaggagcaccaggagacgcaactcatcgggtcaaaatgcagatcttcgtgaaaacccttaccgg

SEQ ID NO: 555062 - DNA, 100 bp, Homo sapiens
gcaaagagtctgccaaggagaagcagctgaaggaagaagagaagatcctggagagtgttgccgagggccgagggagaatttgttaacgagtacgttgggg

SEQ ID NO: 555063 - DNA, 97 bp, Homo sapiens
ccgccgaaaaagagaagacgctttacccgactctttgggccgttatctcacggagtgcatccgccccaacccttttccccctcgtctcctgtgagaa

SEQ ID NO: 555064 - DNA, 75 bp, Homo sapiens
gtaaagctccttgtcgtacagttttgctttcaaagcataggcggggtttcaccatgttgcccagactggtcttga

SEQ ID NO: 555065 - DNA, 76 bp, Homo sapiens
tggacatagatcagaagctaaagatggatgtcactgattttatcagtcatttgttcatgcagctgggaactgtggg

SEQ ID NO: 555066 - DNA, 73 bp, Homo sapiens
tgcgccggtggcgggactctggggaaaatggctgcgtcttcgagtggcagagatcctacaagaatccaggatg

SEQ ID NO: 555067 - DNA, 82 bp, Homo sapiens
caagaagatcatcattaaggacggaggcacgatgaggagcgggaaggcctcctgcaccctggagaccgtgtgggaagacaag

SEQ ID NO: 555068 - DNA, 82 bp, Homo sapiens
aatgcagagctttgtgagataccacccacttctgatacaaagtcagatactgcaacagaagaggacgagtcagcattaaaga

SEQ ID NO: 555069 - DNA, 101 bp, Homo sapiens
tgaagggaaggaaatcatgtcaagcgaagccttgaaaaagctgccctgagacggtgtcccgccgaaagggagcaatggaccacagaaattctgcattgaaa

SEQ ID NO: 555070 - DNA, 100 bp, Homo sapiens
atacaaagtaagctggaaagcagatggtactcgatggaggagatgtataagaaagctcatgctgctatacgagagaatccagtctatgaaaagaagccca

SEQ ID NO: 555071 - DNA, 97 bp, Homo sapiens
ggagggcaggaagagctgcagtctttgtgggacaaggtttgtgaaatggctgctgacatttctgaatccagcggggctgactgcaaaggagacccaa

SEQ ID NO: 555072 - DNA, 100 bp, Homo sapiens
ggacgcggctgccttcctgctctcctgccagatccctggcttgatgggccgtctcccacaggcagcgcctgctggaactcaacagctccctggagttcaa

SEQ ID NO: 555073 - DNA, 100 bp, Homo sapiens
gagcacctggctgatcctgcaccacaaggtgtacgatttgaccaaatttctggaagagcccacaactggagttttatataaagaagataattatgtcatc

SEQ ID NO: 555074 - DNA, 100 bp, Homo sapiens
gccaatgttggagccgtctgcaaagtgtccccggcaagaagaacattgatgatggcacctcagatcgcccctacagccatgctctggtggctggaattga

SEQ ID NO: 555075 - DNA, 75 bp, Homo sapiens
ccacccacaaacaaactacccattttcttttttggaactcatgagacagctacagagacttctgaagtggagagt

SEQ ID NO: 555076 - DNA, 50 bp, Homo sapiens
tttgaggcggtcctcctagcggcctggttcctaaatatttgtcacagcaa

SEQ ID NO: 555077 - DNA, 97 bp, Homo sapiens
gccgggcccgggcatggtggtctggggcaacgcggaagcctttctgagaaaagtctacagcattctttctctgcaggttctcttaactacagtgact

SEQ ID NO: 555078 - DNA, 75 bp, Homo sapiens
gtaaatgtcagtggaaaggagagctaccatcactaagctcttgcaagcttaggatatgaaaagagctgtgtgttg

SEQ ID NO: 555079 - DNA, 75 bp, Homo sapiens
gaaagacaaagacccagtgaacaaatccgggggcaaggccaaaaagaaggtgtgtagaccacactccaaaactga

SEQ ID NO: 555080 - DNA, 96 bp, Homo sapiens
aatagatttttccctctaccttaaggatgtgcaggatcttgatggtggcaaggacaaaccagtccagctacgggggcccagccagccagcagctga

SEQ ID NO: 555081 - DNA, 83 bp, Homo sapiens
ctgagaccctccagcgctgcctggaggagaatcaagagctccgaggtctgagttcactgacaccatcctgtccgtgcacccct

SEQ ID NO: 555082 - DNA, 82 bp, Homo sapiens
gttgtatttagtgtgacgactgttgacctgaaaaggtgggtcatgataactgggtacgtggagttctgttccattctggggg

SEQ ID NO: 555083 - DNA, 100 bp, Homo sapiens
gccgcttcagttctcccggtgtggccacgagtcgggtcagaagacatgtcttcatctacatggcatctttccttacctctatgtgccatacgatggttat

SEQ ID NO: 555084 - DNA, 95 bp, Homo sapiens
cggggtcatctttaactgcttggccgtgcttgccctgtcatcccacctgagaaccatgctcaccgaccctccattggaaaagaagtttgttcgag

SEQ ID NO: 555085 - DNA, 100 bp, Homo sapiens
gggcggggccgacggagcgcggcaggacttggctggacggcgcggccacggagaagggcgcggtcctcagaatggttggaatgaccctccagctttgaac

SEQ ID NO: 555086 - DNA, 95 bp, Homo sapiens
ggaactgcttatcctccagggaggaccaccccagaattatatccagatcgagagacagaagattctgaaagggttcaatgaaatgagagtcatct

SEQ ID NO: 555087 - DNA, 50 bp, Homo sapiens
gagaaattccttgaaatttgcaagactgctcaaggtggtggtcatcgaac

SEQ ID NO: 555088 - DNA, 100 bp, Homo sapiens
gatcctggccacctgcgaccacccctacattgtgaagctcctgggagcctactatcacgacgggaagctgtggctctcatttcactcttcagtgttcctg

SEQ ID NO: 555089 - DNA, 100 bp, Homo sapiens
gaagaacacgccccacttcaacaggaagcgcctctccaaactcatcaagaagatgattgccgccgtggacacagactccccccgagaggtctttttccga

SEQ ID NO: 555090 - DNA, 90 bp, Homo sapiens
cccatccagactgtttgatgctgaacttcaccgttaagactttgagaatcactacaagaaaaactccttgtggtgaaggttctaagacgt

SEQ ID NO: 555091 - DNA, 82 bp, Homo sapiens
ccgccgctcaccccgcggccgcaccttcccgccttctcagaacccagcttagactagaaagtctagaagacacacacataat

SEQ ID NO: 555092 - DNA, 75 bp, Homo sapiens
tacaagatggacagggatgataattgggcctccaagaatggaggagatgtataagaaagctcatgctgctatacg

SEQ ID NO: 555093 - DNA, 75 bp, Homo sapiens
cagatcgggagcgcaaggtcgccctcaaggccatgatcaaaacggctgcccttgagatggagttgctgcctcttt

SEQ ID NO: 555094 - DNA, 75 bp, Homo sapiens
caaacttcttaacccctagaccggtttttagtccattgactatgcagcctaatgattgcttccaagtatgatcat

SEQ ID NO: 555095 - DNA, 50 bp, Homo sapiens
catagccctcgattatgtgcttcagattcgaattgctgcagaaggaatca

SEQ ID NO: 555096 - DNA, 100 bp, Homo sapiens
agcttcctggggctagtggtcctctggtcttccctgaccccgcggccggacgacccaagcccgctgagcaggatgaggaatgaagagcttcgaaacttgt

SEQ ID NO: 555097 - DNA, 108 bp, Homo sapiens
cctgtggaggcaacactggccaagaagaggaaagtgcaaggaaggtggcttccctcaggaactctggttgggtgtcagcgcggacgccgtctccgtctacaagcgtgg

SEQ ID NO: 555098 - DNA, 99 bp, Homo sapiens
acaatgaacggttggaattcctgggtgatgctgttgttgaatttctgaccagctctttcaccatgcctggatcacttcctttgaatgcagaagcttgct

SEQ ID NO: 555099 - DNA, 82 bp, Homo sapiens
ccgggcgtggccgtgatacagttcgccgtcggggagcaccgagcccagatgatatcatcaagttgaatcgaaaggaagggaa

SEQ ID NO: 555100 - DNA, 100 bp, Homo sapiens
aactaatagcccttgaacagctatgcatgctgcttttgatgtctgacaacgtggatcgttgttttgaaacggcttttaccaagatggcctcagctccggc

SEQ ID NO: 555101 - DNA, 100 bp, Homo sapiens
tgaatatgatgattttttggacgaattcatggaggcagtttcttccaactccagtgtgctgctctgctcgttacaacttagcaattttggccttttttgg

SEQ ID NO: 555102 - DNA, 88 bp, Homo sapiens
ctccagaccagcctgcggtcccccacccgcctcccagcactcccatcaagctggaggaagacagaaaaggatatcatcttgcgggagg

SEQ ID NO: 555103 - DNA, 100 bp, Homo sapiens
ctcttctgcaggtactggaaacccacaggcacacccaacaaagaatggccgagtggattctgaggaccggaggagccgccactgcccgtacctggacacc

SEQ ID NO: 555104 - DNA, 75 bp, Homo sapiens
cagagaccaagatcactgataagaaatgttctcgacagcaagtgtcgacttcttccactacaaaatctccagcgt

SEQ ID NO: 555105 - DNA, 100 bp, Homo sapiens
aagatatgtgagatggtggatgaatccccaggtctccttccgctaccactgccagctgtactccgagtggagaaagaccaaccagaaagttcgcctgaag

SEQ ID NO: 555106 - DNA, 100 bp, Homo sapiens
cgtcaagatcctcaagaagaagaagttgcgaaggatccccaacggggaggccaacgtgaagaaggaccagtccaacgtcaggcggatgcacacggctgtg

SEQ ID NO: 555107 - DNA, 74 bp, Homo sapiens
tgaagacccggggcatctttgagaccaagtttctctctcagatcgagaggcagagtgtctctggcacagtttgc

SEQ ID NO: 555108 - DNA, 82 bp, Homo sapiens
aagagcctttattcatcgactcagtcagtctcttggtttggtctctaaaagtaaaggggcacgctatcatcactaactactt

SEQ ID NO: 555109 - DNA, 100 bp, Homo sapiens
agggcctggcactggccaaggagattgcacggggtcactctggtgcccattgaggagttcagcccggagttcgtggagccccgggtcagctgcatcagca

SEQ ID NO: 555110 - DNA, 104 bp, Homo sapiens
gctggtgcggcgcggggtgagcgtcgaggaggcgcaggagactgaccgcaacggcaggacaatgcagatcttcgtgaagactctgactggtaagaccatcaccc

SEQ ID NO: 555111 - DNA, 83 bp, Homo sapiens
ccgccacccgtgatcgtgcgccgaggcccgcgaggggtcgccgcccagacaatgcagatcttcgtgaagactctgactggtaa

SEQ ID NO: 555112 - DNA, 101 bp, Homo sapiens
gccaagaagaacttcggaggatggaagagctgcacaaccaagaggtgcaaaaacgaaagcaactggagctcagattatgatgaagatgactatgatgctga

SEQ ID NO: 555113 - DNA, 97 bp, Homo sapiens
cccaggagaaaagccagtattgcttgtgctcctaacaacctgtctcttggaccatctgaatctgataatttttctcataacctgagaggagtaatcc

SEQ ID NO: 555114 - DNA, 98 bp, Homo sapiens
cagcctcaggcctgcacggacggtgttggttgggtggtggtcgtggtgacaggactggccgctatggagccactgaccgctcgcaggatgatggtggg

SEQ ID NO: 555115 - DNA, 82 bp, Homo sapiens
gccttgttgcccagttccccagttctggcagattctggaaactgtacattgaagcagaggtcagccaaagaggagcaaagag

SEQ ID NO: 555116 - DNA, 60 bp, Homo sapiens
cttgcactagcagcgaacgattcgaatctacctgttactcgtattttggacaatcttatg

SEQ ID NO: 555117 - DNA, 100 bp, Homo sapiens
gggcagccatggccctccacagcccgcagggacacagcaggtcaggagagattcaacagcattacctcagcttattacagaagtgccaaggggatcatat

SEQ ID NO: 555118 - DNA, 100 bp, Homo sapiens
tttgaagtgtttgacgaaaaccgattgggaagttgaaagaatggagcctcatactgtatggcacagcagagcacccgtaccacaccttcagtgcccatca

SEQ ID NO: 555119 - DNA, 100 bp, Homo sapiens
cgagaagaaaatcaagaagctgaatttccaggccttcgccgagctgtgcaggttccagttacagccatcccttgtcataacttttgaactgtatttggaa

SEQ ID NO: 555120 - DNA, 101 bp, Homo sapiens
aaacagcagatttcccaagagcagcggaaaatgatccagtcacagattgtgaatcggcacggtcctgaggcagacaggcatttattacgctgcctattttc

SEQ ID NO: 555121 - DNA, 97 bp, Homo sapiens
gttagacttgtttcttatatgtgatgccattccagcactggactcatggaggctgagcatttattcagatcactttgggaagcagtgacatccaacc

SEQ ID NO: 555122 - DNA, 75 bp, Homo sapiens
catatgtggctaaggaccctgttaatcgcagagatcttttagagaaatctcgggttgttaaacagccaagaggtg

SEQ ID NO: 555123 - DNA, 83 bp, Homo sapiens
gtcgcttgaaaagactgggcttgtccttgctggtgcatgcgtcgtcggcctctgggcagcagacctgcctagagctggaacgt

SEQ ID NO: 555124 - DNA, 75 bp, Homo sapiens
tcactctcaaggatctccgtgtagaactccttggagaggttggatggcaagcatgtggtgtttggcaaagtgaaa

SEQ ID NO: 555125 - DNA, 90 bp, Homo sapiens
attatactcagtggctgcaaaaagctggacgtaaagaaagaagtgatgcactcaattctgcaatagataaaatgaccaagaagaccaggg

SEQ ID NO: 555126 - DNA, 88 bp, Homo sapiens
taaaggaaggtggtcaggggcagaaggtaattgaaacaggacagaacaatggcagcccgagtacttataattggcagtggaggaaggg

SEQ ID NO: 555127 - DNA, 100 bp, Homo sapiens
agtgcttaatgctgtcttaactagtgtaggaaaacggctcaacccaccgctgccgaaatgaagtataagcttataggctttatactgtggtgcctcgcct

SEQ ID NO: 555128 - DNA, 71 bp, Homo sapiens
aaaacaagaaaaattcactgtggtccagaagcagatatcggtgagacagggccttactctgtcactcaggc

SEQ ID NO: 555129 - DNA, 75 bp, Homo sapiens
aagtccagagctgaggactgcctgtttgcaggcgccaagcccatctttgtgtgcttgcatccaactgtgatgagc

SEQ ID NO: 555130 - DNA, 50 bp, Homo sapiens
accttgcgcttcttgcagtcgcccactgtttgtaacatggaagattggtc

SEQ ID NO: 555131 - DNA, 98 bp, Homo sapiens
ggacagacatgtcttcccatggagctgctgtaagtaaagatgattccattatttcaagtcttgatgtcactgatattgcaccaagtagaaaaaggaga

SEQ ID NO: 555132 - DNA, 97 bp, Homo sapiens
gatacccttggaagaattatgaatttaacagtaatgctgggtaaagttctttacaaagttcgctggaaaggctatacatcggatgatgatacctggg

SEQ ID NO: 555133 - DNA, 98 bp, Homo sapiens
aagaacttatcagagattgagaatgtccatggatttgtttctcattctcatatttcaccaataaaggccaaagagtgtggccagatgcaaaataagtg

SEQ ID NO: 555134 - DNA, 75 bp, Homo sapiens
cgcaacttcagcattaattctgttgccagcacctattctgagtttgcgacatggagattaagtagcttgcccaag

SEQ ID NO: 555135 - DNA, 75 bp, Homo sapiens
cgacagccaggcccgggagaagttgtgaccgagattcccgacgagagagactgaggggaagagaggaaggagggg

SEQ ID NO: 555136 - DNA, 97 bp, Homo sapiens
caacttcgggcgcgctgtacagcaagtcaatgccatggtccctggatggccggttgcaggtgtcccatcggaaggggctccctcatgtcatctactg

SEQ ID NO: 555137 - DNA, 99 bp, Homo sapiens
ttgcagattccgccagcagcacagcaagctctacagatgagtggctctttggcatttggtgctgtggcaggacctttattgggcttgaggtcacttcag

SEQ ID NO: 555138 - DNA, 90 bp, Homo sapiens
agacttgtttcttatatgtgatgccattccagcactggactcatggaggctgagcatttattcaggtttggaaggcgctttgagtccccg

SEQ ID NO: 555139 - DNA, 100 bp, Homo sapiens
aggaaaagttcccttctgctgtgaaactatttggcaagaggctggagatcgggtgctaccaaggttttgcttttgcatggaaatgtctactgcacagttg

SEQ ID NO: 555140 - DNA, 74 bp, Homo sapiens
gcagatatactattgtactatggacttcatcgctttatagcaggtatgtttattcctaaaacgaggtgccaatc

SEQ ID NO: 555141 - DNA, 87 bp, Homo sapiens
accactgctatctgattaaaccccctgaagaaaatgaaagggaaaatggacaggagattcttctgatggttcagaattttcaagatg

SEQ ID NO: 555142 - DNA, 98 bp, Homo sapiens
ttccactgatatctcaaaaggtgatctggacaaaggaacaggtatctcagccagagactgctgctactttgaaacgtacgatagaggccctgatggac

SEQ ID NO: 555143 - DNA, 82 bp, Homo sapiens
tgccgtcgctgcagagaccccgctatggctaacaccttccaccatgaccacctcagcaagttcccacttaaataaaggcatc

SEQ ID NO: 555144 - DNA, 51 bp, Homo sapiens
aattttctgaccctggacagcctatgaacctaaaggcagacccagaagagc

SEQ ID NO: 555145 - DNA, 100 bp, Homo sapiens
ctgatggagagctggaatctatgggattttcagctcgatacaatttcacacctgcacaataaggactctaaatggtgtcaggaacatttcctgaattaca

SEQ ID NO: 555146 - DNA, 75 bp, Homo sapiens
cccgactcgggcttggcgcggcggccagaggaaccccgagattgacgagatgcctgaggctgccgtgaaatcaac

SEQ ID NO: 555147 - DNA, 48 bp, Homo sapiens
gatggtttagaaatggaaaaatgtgccctggccaacgtcaacattggg

SEQ ID NO: 555148 - DNA, 110 bp, Homo sapiens
gagaaggtgaaattctgtgtgctccctccggcgagagactttgtcagctcccgcacagtaacgtgctggagaatctggtaaaagcaccattgtgaagcagatgaggatcc

SEQ ID NO: 555149 - DNA, 74 bp, Homo sapiens
gtgaaatattcaaggctctccagcacagacgatggctacattgaccttcagggccgttgctccagggagaactg

SEQ ID NO: 555150 - DNA, 83 bp, Homo sapiens
cccggactagcgagatggcaaggctgaggacgggaggctgattgagaggcgaagagcctggagacacaggccccatccttccc

SEQ ID NO: 555151 - DNA, 50 bp, Homo sapiens
aacccttgaggggaagttaaaggatgaaaactttcggaagagaaagttgc

SEQ ID NO: 555152 - DNA, 100 bp, Homo sapiens
gacaaaacagaaattaacctggtctcatttcgtcgtacaatttatcttgctattcagtcaagtgagaaagatcagtctaaagaaaaggagaagaaagtga

SEQ ID NO: 555153 - DNA, 90 bp, Homo sapiens
ctctgaccgcaaacaaggagagcctactgagcagcctgagtggctgccttgaggtgcagtgttggggatccagagccatgtcggacctgc

SEQ ID NO: 555154 - DNA, 100 bp, Homo sapiens
ctggagctgtctggttgtgagcagggtctgcacgaaataaagctcctgggcaaggggacgtctgcagctgacccctaaagacaatgaagagcgtgtgttc

SEQ ID NO: 555155 - DNA, 100 bp, Homo sapiens
tggattcctgaaaacatcaagaagaaagaatgcgtgtattttgtggaaagttccaaactgtctgatgctggactccagcgggaggaagaagaggcctttg

SEQ ID NO: 555156 - DNA, 98 bp, Homo sapiens
cctgcagtacctgcagaaggtctctggagacatcttcagcagatcagtggaccatcccctgcccggatcctctctctccacagactatggcagctggc

SEQ ID NO: 555157 - DNA, 100 bp, Homo sapiens
tttactttcccatccgtgactcctggaatgcaggacagtcattttgtttactcattcagccctgttgcaggtcccaataaactcttcataaggttgacag

SEQ ID NO: 555158 - DNA, 95 bp, Homo sapiens
agctggatccccaagatcttcaagaagaagacctgcacgacgttcatagttgactccacagatccgggatcctacatggctttccaccaacctgg

SEQ ID NO: 555159 - DNA, 83 bp, Homo sapiens
caaacatccatatcataagtggaattttggagatattcaaagaaaatgactgtggtgctagaagatcattacttttggaaagc

SEQ ID NO: 555160 - DNA, 50 bp, Homo sapiens
agaactacagcaacctcgtctcagtggggtattgtgttcacaaaccagag

SEQ ID NO: 555161 - DNA, 76 bp, Homo sapiens
aaagaaagagatatgaagatcttcctataaatagcaatccagatctattaatgagatgaagcggttggaagaaatg

SEQ ID NO: 555162 - DNA, 83 bp, Homo sapiens
gtggcgatggtcttcctgctggggctcatgtttgaggccctgggctgcatcttgtacctgctgtgcttccggcagcacccttt

SEQ ID NO: 555163 - DNA, 74 bp, Homo sapiens
atgagcatggtggccaacctcttgtatgagaaacgagagtcttttccaaatgatcttcagttcaatattctaat

SEQ ID NO: 555164 - DNA, 83 bp, Homo sapiens
gggaattgggaggtcggcggccccaaaagcaagtgaaccggagcaaacgacttccgatccagtctgcgctgttgcggctcccg

SEQ ID NO: 555165 - DNA, 123 bp, Homo sapiens
aaatgttctctgtgttctcagaagacgttctgtatttcagcttcctgctatgtgccctctttgttcctaaagatgcagcctcatttccaccttttgttgagaaaagccaggtattgcagttct

SEQ ID NO: 555166 - DNA, 97 bp, Homo sapiens
ctgcagctcgcggtttcctggcttctaggttatcaatactctggctgaccatcatcatcgtgggactgactttggtggaagtccttggttacatgtc

SEQ ID NO: 555167 - DNA, 100 bp, Homo sapiens
gcctataatatttgtcacctgaactacttcacattttccccaatatatgattaaaccacaggttccattatgggtcgacttgatgggaaagtcatcatcc

SEQ ID NO: 555168 - DNA, 82 bp, Homo sapiens
agcttcgacttagccctgctccaggaatgggacctcgagtcactgtgaccctctttcccagctgcccgctcctcagcacccg

SEQ ID NO: 555169 - DNA, 74 bp, Homo sapiens
atctacgtgctcaaccaggtggaccacttcagcaggttcaggagaagtggcacctggtggaggacctgtcgcga

SEQ ID NO: 555170 - DNA, 117 bp, Homo sapiens
aatgtttttctgttttgcctgaatacatgatttaaacaagagatttccacagaaggactccctggaggaaaagcggaagcggcagcggtctgaacgcctggaacggattttccaact

SEQ ID NO: 555171 - DNA, 100 bp, Homo sapiens
caccttctgtctcttcgtcaccttcgacctgctcttcatctccctgctctggatcatcgaactgaatgtattatccatgcagcagaagagaaggactgga

SEQ ID NO: 555172 - DNA, 98 bp, Homo sapiens
atgtaactccgaagacttaggcccttggacgcatccgactcacccgccccttggtatcggccgccccagaatgaagagcttcgaaacttgtctttgtc

SEQ ID NO: 555173 - DNA, 50 bp, Homo sapiens
accaacccccaaattggctgggacaggactcagtgacctttgaagatgtg

SEQ ID NO: 555174 - DNA, 101 bp, Homo sapiens
ctcgaagtgcgcaaacttgacactcaccctgaccggatttttagactctgaggagcagttggagctaatccacattatggaaatggaaaccaccgaacctg

SEQ ID NO: 555175 - DNA, 74 bp, Homo sapiens
gcaagatccagatcgggatttacgtggagatcaagcgcagcgatggtggtggtgaagtttattaagaaggagaa

SEQ ID NO: 555176 - DNA, 74 bp, Homo sapiens
aaaaacaaagcaaaaccagttaccactaatcttaagaagggcggcgactggcggcgcgatggacctgaccgggc

SEQ ID NO: 555177 - DNA, 75 bp, Homo sapiens
tcccccccgcgcagctgcaggaggaggccttcatgtcacaggtggacagacgccttcgtgggcctgagcacttgc

SEQ ID NO: 555178 - DNA, 100 bp, Homo sapiens
tgaaaggagagaaaggggagccgggagatgccagccttggatttggcatgaggtgtccgcagcggctacctctatgtgaccctcatctacaacgcctccg

SEQ ID NO: 555179 - DNA, 75 bp, Homo sapiens
aatccttgaaagaagaagatggagaagaaatagttacctatgatcagatcgagatggtgatcatggagcgtagca

SEQ ID NO: 555180 - DNA, 75 bp, Homo sapiens
cgggccctgctggaccagctcatgggcacggctcgggacgactgattcttgctattccaaatcctcttccacgtt

SEQ ID NO: 555181 - DNA, 74 bp, Homo sapiens
tagaattacctggaacttcatcatcatctacttcacaggaattgccatttcctttctgagaaaagtctacagca

SEQ ID NO: 555182 - DNA, 90 bp, Homo sapiens
gtttttgacagtactaaggatgaccatgggggctcagctaagcggcggccgcggcgccccggagcctgcgcaaacccagccccagcccca

SEQ ID NO: 555183 - DNA, 100 bp, Homo sapiens
ctatcctgccaactctatcgtggtcgtaggaggctgtcctgtctgcaggacaggctgcgggaggagctgcaggactgaggtacagaggccaggggcccag

SEQ ID NO: 555184 - DNA, 83 bp, Homo sapiens
aagaaatttggagtgtgcgtgcgcgccgagcgtgtctccagaacgctatagctatggcacctccagctcttcaaagaggacag

SEQ ID NO: 555185 - DNA, 74 bp, Homo sapiens
tttagagaaaaattatccgactcctcggaccagcaggacagaaagaagcttccggttctgaggtcctggaggtg

SEQ ID NO: 555186 - DNA, 100 bp, Homo sapiens
ctcaagttaaattatactactgaagaatgtgacatgaaaaaaatgcattatgtggaccctgaccatgtaaaggagaactgcgacacatcaccaagctgaa

SEQ ID NO: 555187 - DNA, 100 bp, Homo sapiens
aatcaagttagcatgctttctccagctgccctatcacctgccagctcatcacaaagctctaaaatccatccagttggccctgattggagtccttcaaatg

SEQ ID NO: 555188 - DNA, 74 bp, Homo sapiens
cataatctatgtcagaaacaagttaaagcacaactcccaaggggacaagcaggccttcgcactatcacgtcctc

SEQ ID NO: 555189 - DNA, 75 bp, Homo sapiens
gcgcccgaggcgtctgggatggtgtgggaccgggtgaccaagaatatggcccaggtgaccaaagccctggacaag

SEQ ID NO: 555190 - DNA, 100 bp, Homo sapiens
gtggaggttcgcggctctaacggggctttctacaagaaacttgaggagaggctggagttctggatggagaaatacgataaggacacagaaatgaaacaga

SEQ ID NO: 555191 - DNA, 83 bp, Homo sapiens
gccagggaaccctggtcaccgtctcctcagtgtctgctgttgcaaaaagaagaaaacattctctgcctgagttttaatttttg

SEQ ID NO: 555192 - DNA, 80 bp, Homo sapiens
cagaccttcgcctcgccccgccggttcctcaccctcggggagcaacatgggagtctcgctctcagtcaaaatctccaacg

SEQ ID NO: 555193 - DNA, 100 bp, Homo sapiens
tgctcctgcatcatccaacccttccaaacccctacacgatggctgtggctgcacgagtcacgggtacagagaaagcactttcaaaacttcacgagtattt

SEQ ID NO: 555194 - DNA, 75 bp, Homo sapiens
gagagcccagaagcgccagcctatccgcggctctgatgaagggtatcacattcccaacccagaggtcatcttcag

SEQ ID NO: 555195 - DNA, 75 bp, Homo sapiens
caagaactacaggctttacttttgtggtagaccgtctaagagaaggtacagtctttgcccgctgcctgatttttc

SEQ ID NO: 555196 - DNA, 75 bp, Homo sapiens
ctctgatgtcaatcttgagggctagcaatggctgccatccggaagaaactggtgattgttggtgatggagcctgt

SEQ ID NO: 555197 - DNA, 50 bp, Homo sapiens
actggctctgcccttccccatggacgaaccactcgttttgactattattt

SEQ ID NO: 555198 - DNA, 100 bp, Homo sapiens
tccacaagggcttcctggccctctaccaaaccgtgggtgaccaagaatatggcccaggtgaccaaagccctggacaaggccctgagcaccatggacctgc

SEQ ID NO: 555199 - DNA, 50 bp, Homo sapiens
acagagacagcagcccagtgcaatgagtgagagcgcagagagccctgaga

SEQ ID NO: 555200 - DNA, 74 bp, Homo sapiens
catctgtgcttgtggacagcaggtaccagcagtggatggagaggctttctcggtatcagcagtttaaagatttt

SEQ ID NO: 555201 - DNA, 74 bp, Homo sapiens
gagcaaggccgccagatgtgcagcttatcaaccagcccagccgtatcccttcggaacaggggggtcagcaatgt

SEQ ID NO: 555202 - DNA, 82 bp, Homo sapiens
agcggtgaaggcgaacgcggtctgcaagctgacgtatcacaggaagtcctggagaacctgaaggaccgctggtaccaggcgg

SEQ ID NO: 555203 - DNA, 82 bp, Homo sapiens
aaaaactggagagcttcatcaaaaatagtgatagctttgataagtatgcctggactgttgcccagtgtaagatctgtgcaag

SEQ ID NO: 555204 - DNA, 100 bp, Homo sapiens
cgccaccatggcggcgcccccgcagcccgtcacccacctcatctttgacatggacggacttcttctggtgtatgcagagaatatttccaaaatggtggga

SEQ ID NO: 555205 - DNA, 100 bp, Homo sapiens
agagaagtcacaaaacagcagatttcccaagagcagcggaaaatgatccagtcacaggctgaagaaatgtcaacaattgggagttttgaaggattccagg

SEQ ID NO: 555206 - DNA, 100 bp, Homo sapiens
tcagctctgatgccttcttccctttccgagataacgtagacagagctaaaaggaaaaagcggatggtggttcctgctgccctcaaggtcgtgcgtctgaa

SEQ ID NO: 555207 - DNA, 99 bp, Homo sapiens
ctggaggacatctgggggccacaaatgctccttctcctggagacgcaactcaagcgagcccacagcctcggtgccccccgagtcggacgtgtaccggat

SEQ ID NO: 555208 - DNA, 97 bp, Homo sapiens
ctttaagccttggaaatggaggaaaaagaagaccagcgacaaatttagagaaacctcggcaggacttaaagagagatctacttcagagccagcagtc

SEQ ID NO: 555209 - DNA, 101 bp, Homo sapiens
ggctacgccgaagcactcgttccgggggtgaagcctcctgcgccggccttgcctcgggtctcctctgagcctccggcctccataagacccaaaacagatga

SEQ ID NO: 555210 - DNA, 97 bp, Homo sapiens
tgcccttcaaaaagagtctcctggctgccttgatcctctgtctcctggtggtgagatttgatccagatccagaatataagaagtttttagaaaccta

SEQ ID NO: 555211 - DNA, 100 bp, Homo sapiens
cccccccttccccacgcaaccccagatccatttacactttacagtctcctctgagcctccggcctccataagacccaaaacagatgacacctcttcccag

SEQ ID NO: 555212 - DNA, 98 bp, Homo sapiens
ttttgatggtggaagtggtgaaacccaaacaacatctcctgctattccttgggctgcctttcctgcagtgatacccagcgccgcaaccctcatcattg

SEQ ID NO: 555213 - DNA, 100 bp, Homo sapiens
tgaacagctatgcatgctgcttttgatgtctgacaacgtggatcgttgttttgaaacattgctcatttagaaagtggatgtgtgggataacatgtccaat

SEQ ID NO: 555214 - DNA, 100 bp, Homo sapiens
catgttattatcataaaaatgaacagttttgtggaatagatgaccaaattggatatcaaagtattgcagagtgccttagcagccatccgacatgcccgct

SEQ ID NO: 555215 - DNA, 80 bp, Homo sapiens
acttggaacccacagtcattgatctctatcccagactgtatccagagctctctcaatacatggggctgagtttaaatgaa

SEQ ID NO: 555216 - DNA, 100 bp, Homo sapiens
ggacgacgaggaaccgcccaacatggcctcggaggagccaaggcaaagagggaccactgtgctcatggacccatcgctgccttccaaggaccatttccca

SEQ ID NO: 555217 - DNA, 100 bp, Homo sapiens
gtcatgagtcgcttcaagtttatcgccagaagatacctgaaattcctgcagatgttgtgggtgcccttctgttcctggaggattatgttcggtacacaaa

SEQ ID NO: 555218 - DNA, 100 bp, Homo sapiens
agcgggcagcggaaacgcactttgggtttgagactgtgtcggaagaggagaaggggggcaaagctttggagtttaacccttctgccaatccagaggcaag

SEQ ID NO: 555219 - DNA, 75 bp, Homo sapiens
atcctggtgaaaaacctgccccaggacagcaactgccagaatggactggtacctattgttgaaccagaggtaatt

SEQ ID NO: 555220 - DNA, 74 bp, Homo sapiens
cgcggccgcaccttcccgccttctcaggattttgacacttcatgacatgtcattatttagagcaataatgaata

SEQ ID NO: 555221 - DNA, 100 bp, Homo sapiens
cgctgtagcaaacgtccgcggcctctcagctcactggacagccagtgctcattggtggcaccatgggaacctgtagttatgttcttactggcactgaaca

SEQ ID NO: 555222 - DNA, 75 bp, Homo sapiens
aaaagggacccagggagcaactgcaggagcttcatctgaactcccagcccctgtggaggtgaatctgaagctccg

SEQ ID NO: 555223 - DNA, 50 bp, Homo sapiens
gttaaattgacaacaatggccatgtatcctgagcaagaagaacccatcag

SEQ ID NO: 555224 - DNA, 82 bp, Homo sapiens
ctggttgctgaagcgtcacaaggacctgggactccgcctctatgtggagactgaggacgcttcagtatcagacacagcacag

SEQ ID NO: 555225 - DNA, 75 bp, Homo sapiens
gctatgcccttcaacaaaacctggtgaagccctgggctgcatcttgtacctgctgtgcttccggcagcacccttt

SEQ ID NO: 555226 - DNA, 84 bp, Homo sapiens
acgggatccagagcgccgcgcacttcgtcatgttcttcgcgccctgatgtacggagcgcaagaggacggcagcgtcggcgaagg

SEQ ID NO: 555227 - DNA, 100 bp, Homo sapiens
tttgccgacccggatctcaacaatcccttcaagacgcaaacatgcagatctttgtgaagaccctcactggcaaaaccatcacccttgaggtcgagcccag

SEQ ID NO: 555228 - DNA, 102 bp, Homo sapiens
cgaggctgcggtgtctgctgctattctccgagcttcgcaatggccaggtacaaagcagaaagtgcatagaagatgtgatccactttgcctgggaagagaagc

SEQ ID NO: 555229 - DNA, 83 bp, Homo sapiens
gcccgaccccgtcccgaccctggccgccccgagcggagcctggaggaaagatgaatgggagggctgattttcgagagccgaat

SEQ ID NO: 555230 - DNA, 75 bp, Homo sapiens
agcgtcctcatgtggggggtaaaccactcgtgagacggtttaagcggaagcatcttactgccattgactgccagc

SEQ ID NO: 555231 - DNA, 50 bp, Homo sapiens
gtcggggaaccatggctgccccgagagcttattcagctgattctgaatca

SEQ ID NO: 555232 - DNA, 100 bp, Homo sapiens
gcggacagtggtctcgggctcgtgtgctgcacacagcctcctcatcaccacggaagggaagctgtggagctgggaaactggcgatggaatatgagaggag

SEQ ID NO: 555233 - DNA, 90 bp, Homo sapiens
actgcaggaacaccgtcacgctgctggaggaggtggagccgccaccaaaatgcagattttcgtgaaaacccttacggggaagaccatcac

SEQ ID NO: 555234 - DNA, 97 bp, Homo sapiens
ctcctaagtagctgggaccacaggcatttgggcagtccttctccatccaccggaaggttgctgaagatggagagactcgggaggaaacgcttctgca

SEQ ID NO: 555235 - DNA, 139 bp, Homo sapiens
attttcaggaggaagcgatggcttcagacagcatatttgagtcatttccttcgtacccacagtgcttcatgagagttccacttacttacatgatcatttcgagagatgtaatgttgattgctgctgttttttatgtcag

SEQ ID NO: 555236 - DNA, 50 bp, Homo sapiens
caggaacccagcaacaattcttctgccagccaccaaaaccctcaacaggg

SEQ ID NO: 555237 - DNA, 80 bp, Homo sapiens
ttgaagtcaaccatctcacacctttccaaaggacgcgaccataactctaaaagttcctggtccagaactttacacagaaa

SEQ ID NO: 555238 - DNA, 98 bp, Homo sapiens
ctcggaggaagccccccgcgctgtgcggaggcgcctcggctgccgggctgcggagccccggcccagcaagaggatagtgacaacctctggtgggacgc

SEQ ID NO: 555239 - DNA, 75 bp, Homo sapiens
agtcatcaccgttattcctactaacgtcctgtgtcactgagctttctgaaaaggatatgagcatgctcgaggaga

SEQ ID NO: 555240 - DNA, 98 bp, Homo sapiens
aacctacagaaacgttgtttggtcccgattccggaaaaggtgccaagagcttagttgaactccttgcttattctgtgtatgatgaagagattggttat

SEQ ID NO: 555241 - DNA, 50 bp, Homo sapiens
ctgaaccgcgcggccgaaccctccgatgggggctccggaggtggcgccca

SEQ ID NO: 555242 - DNA, 75 bp, Homo sapiens
ttgttgatccttaacgagctggtccgaatcagcagcatggagggagaggagataggaacaggtggcacatgtcag

SEQ ID NO: 555243 - DNA, 101 bp, Homo sapiens
cgtgcgtccctggcgcttccttcttctcttccggcggagagggcgtctctggccgagcctctttttgtggaaaacgacagcagcagcagtggcctggaaga

SEQ ID NO: 555244 - DNA, 82 bp, Homo sapiens
taaaatgaaagaaaccgctgaggcttatttgggaaagaagcctgctgatcttaagaagagaatagaatctttaattgaccgg

SEQ ID NO: 555245 - DNA, 89 bp, Homo sapiens
agcagacaagattcctgcagggctttgtgcggtgcctggtggtgctagctcctcccacctcagcacctgctgcatctggagcagcccaa

SEQ ID NO: 555246 - DNA, 98 bp, Homo sapiens
taatgctaaatttgtgaatgctgtgtatgataccttacttaatactataacaacgaacttgatgcaagtgataggtttgccaaggtcagacctctcat

SEQ ID NO: 555247 - DNA, 90 bp, Homo sapiens
cttctgcgctgtggagaagccagtgttgacatccctgcctgcgctggcggtcccacccccgactcccaccaaagcggcacctcccgcgtt

SEQ ID NO: 555248 - DNA, 100 bp, Homo sapiens
agccactggatgaagaagcgcggccttcacacatcccagccggtgactgcagtgaggagccttttgtggcagatgaatatattgaacgtcttgtatggag

SEQ ID NO: 555249 - DNA, 100 bp, Homo sapiens
gaactggcaaaatctccagagagccatggacattggagagagtggtattatggtgtaaacaacgattctttggagtactgccaaatctgtcgaaagggag

SEQ ID NO: 555250 - DNA, 75 bp, Homo sapiens
tgctgaggagaggagcgtcaacagcagcaccatggcggggatctgatgagcttctttcttctggcatcattaacg

SEQ ID NO: 555251 - DNA, 100 bp, Homo sapiens
ccgagcggggcccaacatggcggagagagaggtggagtccggcccccgaaagaggtggaattcggtgcgatctgtaagtcgttgtcgaagcaggagttta

SEQ ID NO: 555252 - DNA, 100 bp, Homo sapiens
tgcagaactacaacaacgagctggtcaagtttgcaggtggctggctcagaacggggagtgggcctttcctgttatcacaggctccctctttgtccttacc

SEQ ID NO: 555253 - DNA, 99 bp, Homo sapiens
attccacttaaaacctgaaaacattggaccacacaaagtcttactgtgacttctgacagctctctccatggaaggaggcggcggccgcgatgagccttc

SEQ ID NO: 555254 - DNA, 75 bp, Homo sapiens
gtccattccaaagacaactataaacgagtgactgggacaaggccaagtcatcaaggcatgggacattggggtggc

SEQ ID NO: 555255 - DNA, 96 bp, Homo sapiens
aggtagttgctgagtggcactgggtaaaagcccttaatctcacttgcaacgtgtggggagacccgcctccggaggtgtcgtggttgaagaacgaga

SEQ ID NO: 555256 - DNA, 86 bp, Homo sapiens
tcatgtatcccatagctgtgagtggcgatcacgagaacaataaggtggatattccatctattataaccaagaaactattaaaagca

SEQ ID NO: 555257 - DNA, 90 bp, Homo sapiens
tggagatggaactacttcagtgtcataccctaatgatcccagcaagataatgtcctgtcttctaagatgtgcatcaagcctggtacatac

SEQ ID NO: 555258 - DNA, 82 bp, Homo sapiens
ccagggaaccctggtcaccgtctcctcagcaagagtgagccatggagctacgtgtggggaacaagtaccgcctgggacggaa

SEQ ID NO: 555259 - DNA, 98 bp, Homo sapiens
ccgggagcgctgactggcccggctgggcagggatatcccaacttcgtggcgacctatggccgtggctaccccggatttgctccaagctatggctatca

SEQ ID NO: 555260 - DNA, 100 bp, Homo sapiens
aactttacgaacgttgcaggaaaagctagacttctggctgaaggagtacaacgatataattgacactggcaaaacaatgcagactttgctttccttggtc

SEQ ID NO: 555261 - DNA, 82 bp, Homo sapiens
agtgatagtgggatttgaacacctgaagctccccatcaagggaatgaacttcacaactcaaatccagtacctcaagcaagtc

SEQ ID NO: 555262 - DNA, 50 bp, Homo sapiens
aggtctctggagacatcttcagcaggcttcttgcacctgggtggcctccg

SEQ ID NO: 555263 - DNA, 99 bp, Homo sapiens
tgtctcggaacccgtggtcctccgcttcatgaaaaccagtgcagcctgtcaagcgagagcttttacggcatagggactacaaggtggacttggaatcca

SEQ ID NO: 555264 - DNA, 88 bp, Homo sapiens
gcttttatattcatctcaaaaacaaaattctgaactcaggacttggcaaccgtgcagtcggaggtccttgtgcatgaagacagatttg

SEQ ID NO: 555265 - DNA, 50 bp, Homo sapiens
cgacaggcggcgcgggcggcgacttaattcagtgcacaaatgagatgaat

SEQ ID NO: 555266 - DNA, 82 bp, Homo sapiens
caagttctcaattatttgagcctccgggcgacagagcaagaaaagcatttggccaagagacgaatgtccctttgaacaactt

SEQ ID NO: 555267 - DNA, 114 bp, Homo sapiens
tcccggctctcgtcagcctcccgccggccgtctccttaacaccgaacaccgatcggaaactccatggtacagctcagcaactgctccaggacagcaagacaaaaatagaagtca

SEQ ID NO: 555268 - DNA, 117 bp, Homo sapiens
aaaatcctgaggaagatgaagaccagagaaaccctgcaaaggagtccctagagacacctagtaatgatgatgaacaacatgggtggtgatgaggatgtagatttaccagaagtagat

SEQ ID NO: 555269 - DNA, 98 bp, Homo sapiens
ttctgcagtccctcgtccagccacccccagggaacaggcacggtctcctggtacccaacaataccaccgaccaggagctgcaacacattcgcaacagc

SEQ ID NO: 555270 - DNA, 83 bp, Homo sapiens
ccatgaagacctacaaggggtgcccgagcggctgctggggacggcggggaccgaataagaaagccttgagttttgtgaaaaac

SEQ ID NO: 555271 - DNA, 100 bp, Homo sapiens
ggcgctcgtgaggctgccttccggaacattaagaccattgctgagtgcctggcagatgagctcatcaatgctgccaagatcgtcagtatttaaacagatc

SEQ ID NO: 555272 - DNA, 100 bp, Homo sapiens
gtggagttgctgcccttccggagtccgccccgtgaggagaatgcactgcaagaagctgaagctcgttttcgtgaaattaagcttcagagggaagcccgag

SEQ ID NO: 555273 - DNA, 80 bp, Homo sapiens
gactcataacctggggatcccggtgttggtggtgtgcacaaaggatattatcaactcactggtaacaacagtattcatgc

SEQ ID NO: 555274 - DNA, 75 bp, Homo sapiens
tgaggcctccccagccacgtgaaactgtgctgattggacatatctcaaagaagatgaacaaacagactttccctg

SEQ ID NO: 555275 - DNA, 74 bp, Homo sapiens
aatgctgcgaaagctgccaaaagtgacatgcagctatcatggtgaacttacttcagattgtgcgggaccactgg

SEQ ID NO: 555276 - DNA, 75 bp, Homo sapiens
ccgcaacctccgccagcgtcggtccctgggcaggtgtggtgtctgctgcacagagctttacatccccgggagcct

SEQ ID NO: 555277 - DNA, 83 bp, Homo sapiens
ggctgctcgcggaccaccctgctccgaaaactaagacaaatttacatgtattggagaccagaccagaagcccttctgaattaa

SEQ ID NO: 555278 - DNA, 100 bp, Homo sapiens
atggtggcggctactcctcctggggcctcatccacatgctcacccacttggccgaggctctgcaccaggcccggctgctggccctcctggtcatcccgcc

SEQ ID NO: 555279 - DNA, 71 bp, Homo sapiens
gcagagcagcaactcacccagcacacaaaatggatctcttacgtaatagttatgcacgagtgcgagctgtg

SEQ ID NO: 555280 - DNA, 90 bp, Homo sapiens
aatctgagtttaaagcctgccaactcccctcatgtaaatatctctgcaaccttgtctccacaaggttttgcggctagttggctattcaag

SEQ ID NO: 555281 - DNA, 112 bp, Homo sapiens
tccctgcctcgcagcagatgttccctgtcactcagtaggtcgtttatacgcaatgcagactggaatgaagatcgatagtaaaactcctgaatgtcgcaaatttttatcaaag

SEQ ID NO: 555282 - DNA, 75 bp, Homo sapiens
gagcatttgctgcagaagcgtagtcggccagaggagtgacagtgaggattcacatttgggttatttcaagatgag

SEQ ID NO: 555283 - DNA, 90 bp, Homo sapiens
acactttggatggaaagcagacttgaggaatccacaattagaggacgaatgacaggaagattgttgaaagccatgagggaaaaaataaac

SEQ ID NO: 555284 - DNA, 74 bp, Homo sapiens
tggtttcgggatctcggtgctgcagacggcgagacctcctgcacaggagtctgctacaccatttttgatttggg

SEQ ID NO: 555285 - DNA, 73 bp, Homo sapiens
cagcagctggactatggcatctatgttatcaaccaggtggaatatgtgatcaagtgtgacatgtcagctctgc

SEQ ID NO: 555286 - DNA, 100 bp, Homo sapiens
atgttcagaaagaaggacagggatcacaaacactcagagtggaaaaagtaccatcatttgaaacagattttcagctgaactctcatctctcaacactggc

SEQ ID NO: 555287 - DNA, 100 bp, Homo sapiens
tgggtcagatactgccaagggctacaacctcctgaaacccatgggcaaagtcgtcacctatgtcaagttcatccgagaagtaacaccatatatcaagaag

SEQ ID NO: 555288 - DNA, 75 bp, Homo sapiens
cgcggatatgtcgtccggaaaccagccaagtgcaagatctgtgaatgggcgtttgaaagtgagccactatttctc

SEQ ID NO: 555289 - DNA, 100 bp, Homo sapiens
catattgtgtcttccccggccggtccctcgcctcccggccgagctgacggtggttggttctagctattgccatggtacgtttttatatggaaaaaggaac

SEQ ID NO: 555290 - DNA, 90 bp, Homo sapiens
tcaatctcagggctacaaccagtggcagcagggtcaacacagtcactcctggcggcaaaccaaacaaaaccagagtcatctggggaaaag

SEQ ID NO: 555291 - DNA, 100 bp, Homo sapiens
atgaatttgatgaagaaagtgaggaagggaaagcagcaatttcacaactcagggaactgcaagcacatgttgaccagataactgaaatggcagcagtaat

SEQ ID NO: 555292 - DNA, 100 bp, Homo sapiens
cctaaaggtccccagattcgagacttggaaagaggtggctgagatctgcgttgaaatggagctgcgggacgagattctgcccagagcccagaacatccag

SEQ ID NO: 555293 - DNA, 75 bp, Homo sapiens
caaccgcctacgagacactcaagtgttctcaggcgctgtggtctcaccttccactggggcaacaatgggccattt

SEQ ID NO: 555294 - DNA, 50 bp, Homo sapiens
cccgcggtgaccgaggcctgggccccggagatggcaagaaagaagctgaa

SEQ ID NO: 555295 - DNA, 100 bp, Homo sapiens
gctaggggaccaaggatggcaaaacgacgacaggagtgttcagcctgggtgttcctgtagatgctctcttctttattggtaaccagttggtggccacgag

SEQ ID NO: 555296 - DNA, 101 bp, Homo sapiens
tgagggagggtccgagccagccgctgttttgccggaggagcccctcaggccggcgccaatgcttcggcattagagaaagagattggtccagaacagtttcc

SEQ ID NO: 555297 - DNA, 100 bp, Homo sapiens
aagaagaccattcagatgggatctttccggatcaatccagatggcagccagtcagtggtggagctgtgaagagggataccaaggaaagttctttctgctg

SEQ ID NO: 555298 - DNA, 75 bp, Homo sapiens
gagttcctggaccgcgagagcatcaaactggtgtccatcgggtcccctggaagtgacgctgactcagccagtgag

SEQ ID NO: 555299 - DNA, 95 bp, Homo sapiens
gagaaggagctcagcgcagccctgcaggacaagggtgaagttgaacaaattgctatgatgaaaccaaaaggccagactgaacacgatgagggtat

SEQ ID NO: 555300 - DNA, 90 bp, Homo sapiens
ggaaaatgctggcgtcagcatcggaagatcattttattgacattgctgaagtggagacagttattgattctgcagaactgcaggcgtatc

SEQ ID NO: 555301 - DNA, 100 bp, Homo sapiens
gatatcagacaccgagcttcagcaagctctctccaacggctggctacagcaaacatcattcaagatgtccagcaaagggagcagcacagatggcagaaca

SEQ ID NO: 555302 - DNA, 83 bp, Homo sapiens
atctttccaccatcagccactctgcatctttccaacattccattgagaggatccagaatccagatctctggaatagctaccag

SEQ ID NO: 555303 - DNA, 88 bp, Homo sapiens
ccacacctactccctcccacgggaaactgtctctatggatctagctcagcctcacaggccaaagcatcagcaccagaacgcacaccca

SEQ ID NO: 555304 - DNA, 51 bp, Homo sapiens
tggagatcgtcccgcgcctgccgtgtaaatgagcaaagatggatcaggaag

SEQ ID NO: 555305 - DNA, 75 bp, Homo sapiens
ctgcaatcatgggtcaccaagagaggctgagagaccagatcctctgtcgatgggtcctcagaaagctctggaaac

SEQ ID NO: 555306 - DNA, 74 bp, Homo sapiens
ggaaggttaatgttcttcagaagaaggcaatagtttgggatgaatacctaactggaccctttggcctgattgca

SEQ ID NO: 555307 - DNA, 82 bp, Homo sapiens
acgctctctcagcagcttccaagagaaccaatggaatggagaagatttacaaccctgaagaatctccctatccctattttgt

SEQ ID NO: 555308 - DNA, 90 bp, Homo sapiens
gaataatatttatggagcatatattatggaacacattttggaaaatatgtcccatggagcacattctggttcgtctggaaactgattctc

SEQ ID NO: 555309 - DNA, 71 bp, Homo sapiens
ggaagtgacgtggacctggatcccactgatggcaagctcttccccagcgagttgcacacgctgtggcagaa

SEQ ID NO: 555310 - DNA, 80 bp, Homo sapiens
ccaggtgtaagcgcagaaagcaggcgaacccgcggcgcaataacgggtcagtatagaccttctgatttgctgtgccctga

SEQ ID NO: 555311 - DNA, 83 bp, Homo sapiens
aaacgctgattaaaagaagcacgcgctggccgcgcgccgaacccgagtccggcggcaccgacgacgacctcaacagcgtgctg

SEQ ID NO: 555312 - DNA, 83 bp, Homo sapiens
agattatagctctgtatgagaaggacaacacctacttaggcgaggcggctttgcacaaggtggacattcccagggccacgtgg

SEQ ID NO: 555313 - DNA, 100 bp, Homo sapiens
gggagccaacatggcagcggggttcgggcgatgctgcagggtgctcctgatccaacagcaggtgctagtatagatgatgaaaactgctggcacttagatg

SEQ ID NO: 555314 - DNA, 100 bp, Homo sapiens
acgctttttgcatacaagcaggaaaatgagatgttatccagctaatttcttgagatagaggacagagaagatgactcgttcccatagatttgaagatctg

SEQ ID NO: 555315 - DNA, 50 bp, Homo sapiens
agcaggcgaacccgcggcgcaataacggtcgccactgggacactgtgaac

SEQ ID NO: 555316 - DNA, 43 bp, Homo sapiens
aagaagccagtcaagcggccagacaatgcagatcttcgtgaag

SEQ ID NO: 555317 - DNA, 80 bp, Homo sapiens
tggtgaaatggagaggctggtcgcccaaactcggtgaaatacctggagtgctcagctctcacccagagaggcctgaaaac

SEQ ID NO: 555318 - DNA, 75 bp, Homo sapiens
aaggtcaaggagcctcggaagtcaagagactcagagtcccatagactcctgtggaagaggtccctgctgctattg

SEQ ID NO: 555319 - DNA, 98 bp, Homo sapiens
tttctgcgacttgtgttgggactgaatgtatgacaacatgtccacaatggtgtacataaaggaagacaagttggagaagcttacacaggatgaaatta

SEQ ID NO: 555320 - DNA, 80 bp, Homo sapiens
gtttctgtgatttactgttctggcacagacaggctgtgtgcatgcaccaaagaaagtggagctgttccaaaaagaaaaga

SEQ ID NO: 555321 - DNA, 82 bp, Homo sapiens
ggaccaacctacttagatgacaatgtcaagaaagaaaactcctccttgtacctaggactggaaggatcaccagcacatatgc

SEQ ID NO: 555322 - DNA, 113 bp, Homo sapiens
cttcgaggcatgatggtcgactacaagaagagggcggagcggagacgggagtattatgaaaagatcctccgggattgtggagggctgcgggaggtggaggtgactgcctgcct

SEQ ID NO: 555323 - DNA, 95 bp, Homo sapiens
cttctacagtgacggggagatcagcatttgcatggaacacatggtacatccagacactgaaggaccacaggccccggatggtgtgggacagccag

SEQ ID NO: 555324 - DNA, 74 bp, Homo sapiens
ccaaatttacgccatgaaagtggtgaagaaagagctggtgcatgatgacgaggcagcgtctatcccagactacc

SEQ ID NO: 555325 - DNA, 90 bp, Homo sapiens
attttgcagctattttggaacagattttaagccaccggctaaaagatggactctgtgactacatgactaataaaatatggcagaaatgac

SEQ ID NO: 555326 - DNA, 100 bp, Homo sapiens
acttgattacccgttaagtcccccaaagatgagatttacctgtgagatgtttcatcccaacatgctggcctgtgggcggccccaagcaacagcagtgtac

SEQ ID NO: 555327 - DNA, 82 bp, Homo sapiens
tggccgacaacagcctggcgtccgccacggagaactacgatgacccgcacaaaacccctgcctccccagttgtccacatcag

SEQ ID NO: 555328 - DNA, 75 bp, Homo sapiens
caagcaggccacgattgaatctctgaagaataatccagaatggctactctgatctatgttgataaggaaaatgga

SEQ ID NO: 555329 - DNA, 96 bp, Homo sapiens
cccgcggagcgcagctgagactgggggagcgcgttcggcctgtggggcgccgctcggcgccggggcgcagcagaaaggcctaaagaatgtatttga

SEQ ID NO: 555330 - DNA, 98 bp, Homo sapiens
ttgaagctcatagacttctcacacaggataatgttgcccctcgccatggcctgcagagtctcgggaaagttgccattgcccggcgtatgccacctcca

SEQ ID NO: 555331 - DNA, 102 bp, Homo sapiens
tcctaatagtaactctacatctggttctgctactagcaacccttttggtttagatccggacaaaggacagagtctttgacagtatcagccacctcatcaacc

SEQ ID NO: 555332 - DNA, 100 bp, Homo sapiens
tgcagcttcaagcttaggaccacccaccatgcctatccagcttccacagcgcggcacctgtacctccggggtggcgctggggttggctccatgaccaaga

SEQ ID NO: 555333 - DNA, 80 bp, Homo sapiens
cccctagaataagaacatactagaagtcccttctgctaggacaacgaggaacttccagcaccattacttgatgataaatg

SEQ ID NO: 555334 - DNA, 82 bp, Homo sapiens
acaacttccccctcgggctccactgccagggaggagtctgctactagtcttatcagctcttaaaaacagaaactcatctgtc

SEQ ID NO: 555335 - DNA, 78 bp, Homo sapiens
tgattttcaagcacttgctctggagggaagagcgatgggagaggaagtttcagctgatcctactgccacactcacagc

SEQ ID NO: 555336 - DNA, 83 bp, Homo sapiens
gccggaccgagcgcctcgacctcggtctgaggcctctccttccgatgaaaagagaaaggaagaatggactacagccaccaaac

SEQ ID NO: 555337 - DNA, 90 bp, Homo sapiens
ggtcttctgtgaggaatctggattgtcacctttgctgcaaaaaattacgggtactacattaaaccttctgaagtttcctatttgcaaccc

SEQ ID NO: 555338 - DNA, 136 bp, Homo sapiens
gaccgcgcgcagggcctgcagcgggagctggacggcgagcgcgagcggcgcgagaaatgggtaattccagaattgattggccataccattgtcactgtattactgctcatgtcattgcactggttcatcttccttc

SEQ ID NO: 555339 - DNA, 100 bp, Homo sapiens
ggacggcccggatgagtacgataccgaagcgggctgtgtgccccttctccacccagaggtgaaatgacaatggatgctctgttggctcgattgaaacttc

SEQ ID NO: 555340 - DNA, 100 bp, Homo sapiens
ggcagccctggtgtgggagcggccagctaggagcgctctgtggtgcctggggctgaacgcggctttctggtttggtgcacctcgatttggaggaagtagg

SEQ ID NO: 555341 - DNA, 100 bp, Homo sapiens
cctgactccactatctcagccaggtccttcttctaatattattggccagtctgtggaagaagctatcagggaagacatgtaaggaatttgcataagacag

SEQ ID NO: 555342 - DNA, 75 bp, Homo sapiens
ctcagtcagagtaggaaataattttcacaaccttcaagaaattcgggtcacccaacctgcctgcagtttaccctg

SEQ ID NO: 555343 - DNA, 97 bp, Homo sapiens
atggcaactgatacataataagacacaatctattctgctgattcacaattatggagactgttgtactaatggtcacttgatgtgcgctggctgtttt

SEQ ID NO: 555344 - DNA, 75 bp, Homo sapiens
cttacgtctgcggaagtgcagctgcctcagttcttagcgcagggcgacatggagtccaatgggaaatacatcacc

SEQ ID NO: 555345 - DNA, 51 bp, Homo sapiens
tgcccttgtggcgaatggggctcacgtcgacggagtttaagagagctgtga

SEQ ID NO: 555346 - DNA, 90 bp, Homo sapiens
cagagaaaaagaagccaaatgccacgagacctgtaacgcctccaagggggcagtaaacggctttgaccccgctcctcctcctcctggtct

SEQ ID NO: 555347 - DNA, 83 bp, Homo sapiens
ctggatttttttcgggtagtggaaaaccagggtggcccagttgaaatccttcccttcctctaccttggaagtgcctaccatgc

SEQ ID NO: 555348 - DNA, 82 bp, Homo sapiens
gggcgacgtgtgtccaggcgtttgccgatgcagtgagtgaggggggggccatggcggaggagcggcccccccggctggtgga

SEQ ID NO: 555349 - DNA, 50 bp, Homo sapiens
caggcgcagacctttctccaagaggaggccaaacgtaccaagaaagtcgg

SEQ ID NO: 555350 - DNA, 100 bp, Homo sapiens
ctggctctttggcggctcggaggagcggctgctgctgctgctgctgctgctggtggcccctttgcagcaatggctgccatccggaagaaactggtgattg

SEQ ID NO: 555351 - DNA, 90 bp, Homo sapiens
atacttctcaaatcttaatttcctaaaggccctgccctgggagaagccctgccacacgtcgtgcccacgctgagggcctgtctgcagccc

SEQ ID NO: 555352 - DNA, 75 bp, Homo sapiens
gctgaaggagcggtttgcaaacatgaaggaaggctggaagtacaccttgttggaggcttcagtgacgacaggcag

SEQ ID NO: 555353 - DNA, 75 bp, Homo sapiens
cttcgccactcacttggaggatgtgttttgggccacagcacagcaggccatgactgctccctgcgtctctggagc

SEQ ID NO: 555354 - DNA, 75 bp, Homo sapiens
gactatggacctatggagttggaggagaagaagatgattctttggccatcaaaccaccccagcaaatgtctcgga

SEQ ID NO: 555355 - DNA, 100 bp, Homo sapiens
ccaccggaatggagaaggaagaggagtcggaaatctggcattttttaaagtttgcgccccacaaagaggaaatattccaaaggtactcaggatgtaaaag

SEQ ID NO: 555356 - DNA, 100 bp, Homo sapiens
tcactaagcccatcgtctgctggtgcatcgggacgtgtgccaccatgttctcctctgagcaccagaattatggaacatttatcaacagcctaaaataaag

SEQ ID NO: 555357 - DNA, 97 bp, Homo sapiens
ttcggccgggatcttcggcaagactcacgtctccaacaaccaagctccccaagtgcaggcctggggtagtctcctgtctggacagagaagagaaaaa

SEQ ID NO: 555358 - DNA, 100 bp, Homo sapiens
agcggagcagtggtcggagatgtggcgaccggtgtcatggagaaactccagctgggcccagagattctgcagcgggaaaatccaaggcttatttatgcca

SEQ ID NO: 555359 - DNA, 100 bp, Homo sapiens
aatcatggtcaaagatgagatgacagacgtgactgggcgggtgctgcagccgccctccatcctctacgggggcaggaagctgcacacatacatgtaagag

SEQ ID NO: 555360 - DNA, 110 bp, Homo sapiens
ctagggaggacctcacttccccggggtgtaataatgttaactgagctctccacacaaggagatgcaagtcaggtgattgggcctcttactgaaggacagagaagaaatgt

SEQ ID NO: 555361 - DNA, 100 bp, Homo sapiens
tccgaggtgccaccgtggaaggacagaatgaggagaggagacgccgtgagcgggacgaccagatgtaccgagagcggctgcgcaccttgctggtcatcgc

SEQ ID NO: 555362 - DNA, 51 bp, Homo sapiens
gactgctcagggtgccagacctcatcctaaggcgggtctttggaaattgcc

SEQ ID NO: 555363 - DNA, 118 bp, Homo sapiens
ccgctttccatggagagtaaaggccggctggaaagtccccaagcgcatggaggagcaggacttggagcgaaggttcgagctgctgagccgcgagctgcgggccatgctggccatcgaa

SEQ ID NO: 555364 - DNA, 100 bp, Homo sapiens
gtggaactacttttggctcatggggcagatcctactcaccgtttgaaaattgaaaatattgaacttcccatggatacaaaaacaaatgaaagaagaggat

SEQ ID NO: 555365 - DNA, 75 bp, Homo sapiens
aaggattccaagtaactcttatttggtttccttgttgcagaatgaaagtgtagaaaaaaacaagagcatacaaag

SEQ ID NO: 555366 - DNA, 98 bp, Homo sapiens
gcagttgtcatatgtactgtgtcagccatcatgtgtgtcagcatgagaggcatcagcaggactcagacctctcagcagcgtgctctgacgctgacctc

SEQ ID NO: 555367 - DNA, 83 bp, Homo sapiens
ctgctctgtggggctctggccgcgcctggcctggccgggaccatgggacagaagatgagcctgtcggtcctggagggtatggg

SEQ ID NO: 555368 - DNA, 90 bp, Homo sapiens
aaagaagattccatggccaggccccactggaggagatgaggaaggctgccgaggatctggaaattgttgaggaacaggttagcaccactg

SEQ ID NO: 555369 - DNA, 90 bp, Homo sapiens
attctcagtgtggacaacctttccatcaaatatgcttatatgagttggaattaacgacctctggaaagatgccttttatgttaccaggac

SEQ ID NO: 555370 - DNA, 82 bp, Homo sapiens
agactgctgagcccgtccgtccgccgccaccacccactccggacacaggtgaaaacttttggcccgtttggaagcggcagcc

SEQ ID NO: 555371 - DNA, 82 bp, Homo sapiens
ctgaggcggccgcggggcccgagcgcaggttggatttggtctagggagtcccagaaagaagtagaaaaagagagagaagcct

SEQ ID NO: 555372 - DNA, 148 bp, Homo sapiens
cattgctgagatgagtgaggattgtttcagaaaatcaggcctcctcctggggaatgtgcctcagcttctgatggagatcttataacaatttttgatagttctgacctttcctttgcaattcagtgcagtaggatactgaaactgacat

SEQ ID NO: 555373 - DNA, 75 bp, Homo sapiens
aaaacgcttccatctttatccagagttgacgaaggatcagagattggtgtattcgggcagactgcttcccgatca

SEQ ID NO: 555374 - DNA, 74 bp, Homo sapiens
ggatcaatccagatggcagccagtcagtggtggagatcctgggaaaagtctattccgttctcagtgacagagaa

SEQ ID NO: 555375 - DNA, 100 bp, Homo sapiens
cctttggccttctagggactgacttcaaagaaggaaggaaagaatcaggcaggtcggcgtcctcgagggctacggccagactgccgcttctcctggctct

SEQ ID NO: 555376 - DNA, 98 bp, Homo sapiens
cggacctgagccgcgaggacacgggctgcaacctgcagcacatcagcgaccgggagaacatagacgccggatcgagctgggagatgtgacaccacaca

SEQ ID NO: 555377 - DNA, 90 bp, Homo sapiens
aaaagtcttcaagtctttcagacctggattaaagcctgtggtttccacagaagcaccacctatcatatttgccacaccaactaaactgac

SEQ ID NO: 555378 - DNA, 100 bp, Homo sapiens
cagggcgtgtggctgaggagatgctgccaatttgtggtgtctgaagaccaagactacacagctcattttgctgatcctgatacattagttaactgggact

SEQ ID NO: 555379 - DNA, 89 bp, Homo sapiens
ccgatcggagctccagcagccgggaacagctgggtatacagggagctaccctgtgtttctgagaccctttgtgacatctcacatttttt

SEQ ID NO: 555380 - DNA, 100 bp, Homo sapiens
aggtatggatctctggcagctgctgttgaccttggcactggcaggatcaagtgatgctttttctggaagtgaggtgccctctggtggtcagaagatgctg

SEQ ID NO: 555381 - DNA, 75 bp, Homo sapiens
agagaagaacattaacattgttcgcaaacggcacacatccatagttgtgcacaaggatgagttcttcttcggcag

SEQ ID NO: 555382 - DNA, 104 bp, Homo sapiens
acccaagagtcagcggtatattagttcagttaccactaccaggcctttccacagaagaaaacctgtctgcctccatcaccaaacaacctattcatcaaaaggaa

SEQ ID NO: 555383 - DNA, 100 bp, Homo sapiens
ggtggtcatgatgttcgacattaccaagcagtgctgttccctggacggccgccagtcaagaagctgttggagatgctgcaggagtggctggccagccttc

SEQ ID NO: 555384 - DNA, 100 bp, Homo sapiens
ctggttagtgtgctctgagggagggtccgagccagccgctgttttgccggaggagcccctcaggccgtgggcttggtgcttgcatttcctgcgttgcagt

SEQ ID NO: 555385 - DNA, 90 bp, Homo sapiens
aggggaagaggaaagcaaaggcgtcaggaatggttcttcctcagcgccctcacaaagccaatgctgaggagatgaccaagtaccacagcg

SEQ ID NO: 555386 - DNA, 101 bp, Homo sapiens
cgctgacagctgaggaagtctgcatccacattgcacataaagttggtgtgctgggcatcaaggtgaagatcatgctgccctgggacccaactggtaagatt

SEQ ID NO: 555387 - DNA, 97 bp, Homo sapiens
tttgagcccatgctacaagtgaagaaatgctgagccgattatcaggattagcaaatgttgttttgcatgaattatcaggagatgatgacactgatca

SEQ ID NO: 555388 - DNA, 75 bp, Homo sapiens
tgccgggctctgacccaggcgtgcgggtactcagaagaatcctcactatggatgggctcattgaggacattaagc

SEQ ID NO: 555389 - DNA, 74 bp, Homo sapiens
gggcggggtgtctggactggaacctctgggcccacccggcacagtcttcactaccgtagaagaccttggctcca

SEQ ID NO: 555390 - DNA, 98 bp, Homo sapiens
atcgccgcgctcagcgacaaacaatgaagatagtgatccggggagacaggaacacgggcaagacagcgctgtggcaccgcctgcagggccggccgttc

SEQ ID NO: 555391 - DNA, 98 bp, Homo sapiens
agatgtgcctcctgagattttgtctaatgaaagatcaatgagctgagcaatgttcctgttcctgtcatgctaatgccagatgacttcaaagcctacag

SEQ ID NO: 555392 - DNA, 75 bp, Homo sapiens
ggtctgaagaaaacatctcaaaacgatggaaagaactttctaaggaagacttatctcctgcctttgatcattcac

SEQ ID NO: 555393 - DNA, 74 bp, Homo sapiens
gaagtagaagatcctcataaagccaaagtagctgtgctatgtgtttccagatctgcttattgtttgggttcaag

SEQ ID NO: 555394 - DNA, 50 bp, Homo sapiens
ccttgggaggtgatgacactcagctcggcttgcccttcccctgcttgtgc

SEQ ID NO: 555395 - DNA, 90 bp, Homo sapiens
aaataaagtgaatgcacctatcttaacaaatacaacattgaacgtcataagacttgttggaggaagaaggcacctacgatcaaactctgg

SEQ ID NO: 555396 - DNA, 59 bp, Homo sapiens
tggagtggtggatcagaccaaagatggggcggcgactggcggcgcgatggacctgaccg

SEQ ID NO: 555397 - DNA, 96 bp, Homo sapiens
tcgcggcttgggctccgctttggggaggggcagcagcactagaaagtttgggatttggctcttacatcagtgaagtaaaagaagtcttgcaagagt

SEQ ID NO: 555398 - DNA, 133 bp, Homo sapiens
gaaaactaggaatctatgatgctgatggtgatggagattttgatgtggatgatgccaaagttttattaggtagtgtcgcctgcctctggtgggaccctattcagcggttactcttctcaggagcatctgacaa

SEQ ID NO: 555399 - DNA, 97 bp, Homo sapiens
cctcgctgaccaacatcatcactccagacctctttgagggcactgctgaatggatagcaagccaggtctaaactgcagtaatccatttactcagctg

SEQ ID NO: 555400 - DNA, 101 bp, Homo sapiens
caggccactcctgcagagtggagtcaaggctgtcctttggaggtataaattctctcagcttaaaggttcttcagatgatggcaagagcaaaatcaaatttt

SEQ ID NO: 555401 - DNA, 103 bp, Homo sapiens
cgcacgcggtgcagggtaacatggcggatgcggaaggtgctggagaatctggtaaaagcaccattgtgaagcagatgaggatcctgcatgttaatgggtttaa

SEQ ID NO: 555402 - DNA, 80 bp, Homo sapiens
ggttagtttctgcgacttgtgttgggactggtgagaagccctaccactgcaactgggacggctgcggctggaagtttgcg

SEQ ID NO: 555403 - DNA, 98 bp, Homo sapiens
ctctgacctccgggaaattggccatggcagctttggagccgtatactttgcttccgtatccatgattatttgtactttcaagtgctgagtcctgggga

SEQ ID NO: 555404 - DNA, 88 bp, Homo sapiens
ttcacctaccgcggcgtggacctcgaccagctgctggacatgtcctaggggggccctcagcctcttggccttgaacgggctgttcatc

SEQ ID NO: 555405 - DNA, 100 bp, Homo sapiens
ctcgccaccgctcccggccgccgcgctccggtacacacaggtttttcgttggaatatacgttgcacatttatggcgattctgagtgtgagggcagacttc

SEQ ID NO: 555406 - DNA, 101 bp, Homo sapiens
ttccccttccctgcccccttcccccacccccgactcgggcttggcgcggcggccagaggaaccccgagagtgcagacatcctcagcaccatcggctatgac

SEQ ID NO: 555407 - DNA, 75 bp, Homo sapiens
cgcctcctccagctgttgttgctgctggtgttcttctctatgggcctccaggctgtggtaaaacgttgattgcca

SEQ ID NO: 555408 - DNA, 75 bp, Homo sapiens
cggttgcgggggggaagtgactgggcggtgccggcgccggagacgatgccgttgctgccacctaaaagactttgg

SEQ ID NO: 555409 - DNA, 51 bp, Homo sapiens
ggaaggcgcctgaagaggacgaaggaactcaacagaggcaattattatccc

SEQ ID NO: 555410 - DNA, 82 bp, Homo sapiens
aataagacaagctttcaagaaattggcattgaagttacatcctgataaaaacccgttacttcatgtgaaaacaaagatggtt

SEQ ID NO: 555411 - DNA, 75 bp, Homo sapiens
atcaaatacttcatatttggcttcaatgtcatattttgggtagtatcttccccagcagatgttgctgaaaaagct

SEQ ID NO: 555412 - DNA, 78 bp, Homo sapiens
aaagagcccctcatcgagctcttcgtcaaggatttgcctcaaagggcactgcaaaaattgaacagaggaatcccaagg

SEQ ID NO: 555413 - DNA, 100 bp, Homo sapiens
acaccacagccacccttggtgatgagcctcggaaagtgctcctgcggctgtatggagcgattttgcagatgattgctcgctgtaagcagctcatctgtga

SEQ ID NO: 555414 - DNA, 100 bp, Homo sapiens
ggtgctgtcagcgcggccgtcggagacatgggagacccggggtcggaggtgtaacttggacccatttctcttgcgtgaatattgaacatcgaggagcgga

SEQ ID NO: 555415 - DNA, 87 bp, Homo sapiens
gattcctcctccttggtcgccgcgtccttggctggcgtaatgtaacgctgccatccacaagaaatgcatcgacaagatcatcggcag

SEQ ID NO: 555416 - DNA, 97 bp, Homo sapiens
ctccatctgcctctgttccctggaggactttctctgcccaagatcatctggctgaagaacaagatggatatccaaggcaaccctaagtacagagccc

SEQ ID NO: 555417 - DNA, 127 bp, Homo sapiens
tcgggctggttgttccgttgcgagctgcagctgcgatctctgtggtaggcccaggaggaactctctggaatgaaaaataaaatacaagtagttgtgcttgaaaacgaagggctccagcaacagctaa

SEQ ID NO: 555418 - DNA, 75 bp, Homo sapiens
acccgctgctcagcgtcctcatgtggggggtaaaccactcgcgtgacgacagcatgtacgatccctgaatgggcc

SEQ ID NO: 555419 - DNA, 100 bp, Homo sapiens
caaaagatgactacaaacataggatgttttggcgagagatgtattcagtggaggaagctgggcatacatcacagaaggaagccatggaagtaagccttga

SEQ ID NO: 555420 - DNA, 96 bp, Homo sapiens
tcgctacgcgggtcttgcgagatatctggccgcctctgccgcagctggagacgtccttctatggccgcttcaggcacttcttggatatcatcgacc

SEQ ID NO: 555421 - DNA, 50 bp, Homo sapiens
cgtggatctagagctgaagaagatgccttcaattaagttgcagagttctg

SEQ ID NO: 555422 - DNA, 97 bp, Homo sapiens
ctctgcactcccggccgggtggtgggcgcatatcctgggtagcctctaggaagcgctagacacatgaggagcatattatttaatatctagaagtcta

SEQ ID NO: 555423 - DNA, 100 bp, Homo sapiens
caggaaccaccagtgacagaagcatattgatgagagaaggatctgcaatgctgtttctccagacaaggatgttgatggctttcatgtaattaatgtagga

SEQ ID NO: 555424 - DNA, 50 bp, Homo sapiens
ggggttaccgggttatcgctgaagttggtgaaccatctaaagaagagaag

SEQ ID NO: 555425 - DNA, 100 bp, Homo sapiens
ccacgagactcaaacaacttgctgggaccatcccaaaatgacagagctctaccagtctttagatctatttaggtccacctgaggaaagcgctgcaccgcc

SEQ ID NO: 555426 - DNA, 90 bp, Homo sapiens
tccgaggcggcggcgaggggcgaacgacccgacgcaagatggcgagtaaagagagtttgcctcggagcgtgtgaacattcctccgctcgg

SEQ ID NO: 555427 - DNA, 100 bp, Homo sapiens
gcgagctgctgatacagaagagatggatattgaaatggacagtggagatgaagcctaagaatatgatcaggaagctcttcgtgggcggtcttgactggag

SEQ ID NO: 555428 - DNA, 82 bp, Homo sapiens
agaggctgcggagccccaggaggaccgagtctcagtctgtcacccaggctagtgcaatggtgcaattttggctcactacacc

SEQ ID NO: 555429 - DNA, 129 bp, Homo sapiens
agaccagtttaatgaccttgttatcagtgatggctcttctctggaagatcttgtgtacaagccagctgccatgttgtgagcacataccacatagctccatggagatgcccatgtgactgtgatgaagag

SEQ ID NO: 555430 - DNA, 75 bp, Homo sapiens
aagatttggaaccacagctgtccctacgtatcaggttggaagctgggatagatgggcagcagaagatcatgtgct

SEQ ID NO: 555431 - DNA, 99 bp, Homo sapiens
aagcagctgctgtcccgggcctaccccctggactccctggagaagcagatggaaaaggttggatggcaagcatgtggtgtttggcaaagtgaaagaagg

SEQ ID NO: 555432 - DNA, 98 bp, Homo sapiens
tttccatcggtccttacagccgctcgtcagactccagcagccaagatggtgaagcagatcgagagcaagagttgatctctctaatgtattagatcttc

SEQ ID NO: 555433 - DNA, 82 bp, Homo sapiens
tcatgagctttgtgaacctggatataacacgtgggaaccggaggagaacatcctggaccccaggctgctgatcgccttccag

SEQ ID NO: 555434 - DNA, 74 bp, Homo sapiens
cacagagcctcgcctttgccgatccgccgcccgtccacacccgccgccagaaaactttagaaactgttcctttg

SEQ ID NO: 555435 - DNA, 51 bp, Homo sapiens
gggtgtttgctgcgttgacaacagactcatgtgctcctcggtgcagaaggc

SEQ ID NO: 555436 - DNA, 101 bp, Homo sapiens
ctcagaaactggacgtggatgcatactgccctggccaaagagtgtggccagatgcaaaataagtggctgatgataaacattcaaaatgttcaagactttgc

SEQ ID NO: 555437 - DNA, 90 bp, Homo sapiens
cctctcgcggccctcagggcacagcccaaggctgtcagcctcccggcccagcctaaaatgaccaatgtgtgatttcagtggaataaatgg

SEQ ID NO: 555438 - DNA, 100 bp, Homo sapiens
ctagaaaggttggagctgccgccgcctgcagtcggtgaccgcgcgactcggcgcccgcccgcggtttgcgaggagcgatcgcatttgccttagctattcg

SEQ ID NO: 555439 - DNA, 100 bp, Homo sapiens
cagagtcggcacctgaaggacatggaggtcttcccagagtttgctgctgcccattcaaatttagcaagtgtactgcagcagcagggaaaactgcaggaag

SEQ ID NO: 555440 - DNA, 100 bp, Homo sapiens
ctggatgatatgaaccaaagatggaatgacttaaaagcaaaatctgctagcatcaggattgctgtcacgtctaatgtggctgctgcctcgtgtcacatct

SEQ ID NO: 555441 - DNA, 99 bp, Homo sapiens
ggaagggcaggatgaaaaccaagaaggagattttgaagatgcagatacccagcatgaagactttttgcttgccctacagatgaatgaagaacagtatca

SEQ ID NO: 555442 - DNA, 87 bp, Homo sapiens
ggtatcctccttagccacggggcccgtcccatttgagcctgtcaatgtcaccactgaccgagagggacagagcgggatgccaccagc

SEQ ID NO: 555443 - DNA, 97 bp, Homo sapiens
gatcgccaggtgctggaggacttcccaacggttctgaagaaagtctccaaatacattcaagagcagaatgagaagatctatgctccacaaggcctcc

SEQ ID NO: 555444 - DNA, 90 bp, Homo sapiens
cgttattgttgcacacttaagtcaagggtacatggaaaacttggggatttcacaataatttcttggacaataatgaggctacagacataa

SEQ ID NO: 555445 - DNA, 82 bp, Homo sapiens
ttgcttgatacaacaactgtactgggagagctaggatggaaaacatatccattaaatggggccattatgctgctggattgga

SEQ ID NO: 555446 - DNA, 82 bp, Homo sapiens
aaaccttataccctcatgagcatggtggccaacctcttgtatgagaaacgctatccagacagagcagctaccctcagctcta

SEQ ID NO: 555447 - DNA, 75 bp, Homo sapiens
tgcgcgcccgccagctgctccggagatacggtgatcataaacagcacaatcacaccgaatatgaccttcaccaaa

SEQ ID NO: 555448 - DNA, 75 bp, Homo sapiens
tgcagttccaatttcccaaaaagaaatttgccattttcagtggaaaacaagtggtcgttactagctaagatgtgt

SEQ ID NO: 555449 - DNA, 100 bp, Homo sapiens
gccaagaagatcatcattaaggacggaggcacggttcccgtgtcagtggctatgatgacacctcaagttatcactccccagcaaatgcagcagatcctcc

SEQ ID NO: 555450 - DNA, 82 bp, Homo sapiens
tgaccctgggagattactaccagggccggaggattaccatcaccggaaataacgaaggaggcccaacttcattcaataagga

SEQ ID NO: 555451 - DNA, 100 bp, Homo sapiens
atctgcaaggggtaaatgagggtgttgatttctccaaggatctgctgaaagttcttgatagtccacaatgggtgaaccacagcaagtgagtgcacttcca

SEQ ID NO: 555452 - DNA, 75 bp, Homo sapiens
gaagtcttctcccctgcacttcgctgcagggcgatgccagtccctccactccagaggagaacgaaaccacgacaa

SEQ ID NO: 555453 - DNA, 50 bp, Homo sapiens
cacacgccaccacacccggctgaggtgctgcagagcttcaagataatgga

SEQ ID NO: 555454 - DNA, 100 bp, Homo sapiens
tctctgctgcggcgcggggaccgctgtgctctcggtggtgatctttgtgaagtctgtgcagcggtgcattgccttggcccagctactagtggagcagaac

SEQ ID NO: 555455 - DNA, 74 bp, Homo sapiens
ggcttgccgcggcctgccgcaatggaaacatctatattctgagaagctcctccacccccaccacctgtgatccg

SEQ ID NO: 555456 - DNA, 95 bp, Homo sapiens
gtgtctaaggagctggttggagagtttttgcaatttgttcaacttgattggtcatatgcattagaaaaacccaacactggcagcatatttaatat

SEQ ID NO: 555457 - DNA, 100 bp, Homo sapiens
cctagaccctgcccaacagaatttatatagagatgtgatgttggagaactacagaaacctcgtctccctggaaagggttcaaagacaccagtcagtatgt

SEQ ID NO: 555458 - DNA, 75 bp, Homo sapiens
tttattgagaaaggagctgtttccagtcatgaggctgtggtggatctttctggtgctggagaatctggtaaaagc

SEQ ID NO: 555459 - DNA, 118 bp, Homo sapiens
gccagccgcaccatgccgctcctaagcctgcacagccgcggcggcagcagcagtgagaggaggaacaggaggcagcccggcgccgccagcagcgcgagagcaagagcaacgcggccac

SEQ ID NO: 555460 - DNA, 101 bp, Homo sapiens
cagcagccgccgccagagaggcccgcccaccagttcgcccgtccccctgccccgttcacaatgcagaatacttctatgaattcctgtccttgcgctccctg

SEQ ID NO: 555461 - DNA, 75 bp, Homo sapiens
ggctgtgcttctgggcggcagggaccgcggctgcccgaggtcctctcaaactgtgagtaactaagtggtttgtgc

SEQ ID NO: 555462 - DNA, 82 bp, Homo sapiens
cttacctgaagtaactcggatggccagaaagtttactcatatttcagctctgttacaggccctggccaacgtcaacattggg

SEQ ID NO: 555463 - DNA, 82 bp, Homo sapiens
tgttcgactgctagagccgagcgaagcgtgaagctcgtgtgtggagtgccacggtacaatcagacgacagatggacagtgtg

SEQ ID NO: 555464 - DNA, 100 bp, Homo sapiens
gtgtctgaggtggtgcgcggctccgtgctcctgcagtagaagactcagaaagtggtgtttacatgcgattcatgaggtcacacaagtgttatgacatcgt

SEQ ID NO: 555465 - DNA, 75 bp, Homo sapiens
ctgttttctaggtggaaagaatctgatgagccttttaggcctgttcaggagaggagttcattacttcggaagtgg

SEQ ID NO: 555466 - DNA, 50 bp, Homo sapiens
ctttcctctaaagtcaaactgcttgctcatcagtttggaaggaatttggc

SEQ ID NO: 555467 - DNA, 117 bp, Homo sapiens
gttttctctcacccatccatgggaagccctgctactgctggattagcgccaggcttgagtttgaagaaacagaagaacctgattttactgcattatgtcagaaattaaagataccag

SEQ ID NO: 555468 - DNA, 83 bp, Homo sapiens
cgtctggatttccaaggaagaatttcctctgaagcaccggatgccggctccaggagcagcagtggaggtcgggaacgcctcat

SEQ ID NO: 555469 - DNA, 75 bp, Homo sapiens
gaggggatcgtcagtagagatgctgcagtttccaacatggctagatccatcagaaactgaagccgtggagaacgc

SEQ ID NO: 555470 - DNA, 98 bp, Homo sapiens
tggaatacaagggcctcagggccggctaccactgcggctactgcgattccaaggagggcaaagcgtcctgcggttgtggcagcactgcctgaaggtat

SEQ ID NO: 555471 - DNA, 83 bp, Homo sapiens
ctgggctgagcttgtggcagaagggagggaagatcagttttcctgccatccaggctgctccctccttcagcaactcattccca

SEQ ID NO: 555472 - DNA, 100 bp, Homo sapiens
tccaatgatatctacagcacctatcacttgttccctccaagacaactgaatgaaatcatgagtggaggatctcaagtccacattttttggggtgctccaa

SEQ ID NO: 555473 - DNA, 90 bp, Homo sapiens
ctggaataatgggtactctttcctcgtggaatttgaagattctacagataaatcagaatccagcaactatcacaagaatactccttagcc

SEQ ID NO: 555474 - DNA, 75 bp, Homo sapiens
ctgcaaactcaacttgctgggccggtgcaactattcgcagtccgagcgatatggctcgtggacagcagaaaattc

SEQ ID NO: 555475 - DNA, 75 bp, Homo sapiens
ctggaccttctggattacaggccaaattagcaaattctcctgagaatgatattcctatggagatcaccacggcag

SEQ ID NO: 555476 - DNA, 83 bp, Homo sapiens
tgtcgctgcccgcctgccctgaggagtccccgctgcttgatttggcagctgatcggaagctctttcgtcttgtctccaatgac

SEQ ID NO: 555477 - DNA, 98 bp, Homo sapiens
gcaatatctctgggctttcacaggcttgcttccggcgtcatggctcaaagggccttcccgaatccttatgctgattataacaaatccctggccgaagg

SEQ ID NO: 555478 - DNA, 75 bp, Homo sapiens
ctgttcacagctacctgggctcccctttctggatccaccaggctgggctccgtaggcaccaactgcaaggacccc

SEQ ID NO: 555479 - DNA, 100 bp, Homo sapiens
attgtactcagtagaggagtatcagttcagtatcgctacttcaaagggtactttttagaaccaaaggacactttgccaccatcaccttgaccttcatcga

SEQ ID NO: 555480 - DNA, 100 bp, Homo sapiens
gcgctgctggcgctctggctgtgctgcgcgacccccgcgcatgacacttctgagaaattcatcaggctgtgaagcgcgccgtgatgaatatcgaacagag

SEQ ID NO: 555481 - DNA, 83 bp, Homo sapiens
tcaaagaagtatccagtgaggacattgctgacatgcatagcaacctctccaactatcaccagatcctgcaagccctggggaag

SEQ ID NO: 555482 - DNA, 98 bp, Homo sapiens
gtgcaacctggcctgctgcagtgggtgaagttttggtagtcttgctctgttgcccaggctggagtgcagtggtgccatcatgccaacctcgacctcct

SEQ ID NO: 555483 - DNA, 83 bp, Homo sapiens
ccctcacagtttgctctgctcttccaacaccagtggaagatgatcacatcccagaagacctatggagcattcatgatctagaa

SEQ ID NO: 555484 - DNA, 75 bp, Homo sapiens
tgttcctgaacggcagccccaagaacggaaaggttgccgaggagcccaagtagaagaaatatggagtttagagcc

SEQ ID NO: 555485 - DNA, 49 bp, Homo sapiens
cgttggggcggcctggctccctcagtgatgtcttggcattgcccatttt

SEQ ID NO: 555486 - DNA, 80 bp, Homo sapiens
ctacagcacggcgacaatacccaaagacagagagaccagcatgatctccttctgtccagactgtggcaaaagtatccaag

SEQ ID NO: 555487 - DNA, 75 bp, Homo sapiens
atgaggaaaatgtccttccagcgctgcgcccggacagacaagagttcttacggatatggtgacctattctccgac

SEQ ID NO: 555488 - DNA, 95 bp, Homo sapiens
ttctacggggccttctacagtgacggggagatcagcatttgcatggaacacatgagtgcatctccctcgccccctgagagtctcgtggaggagga

SEQ ID NO: 555489 - DNA, 100 bp, Homo sapiens
gggccctcattgactgtgaccctaggtacatgtcccagagcaagcacacggaggcccgggagctcatgtactcgggagccctgctcttcttcagccatgg

SEQ ID NO: 555490 - DNA, 100 bp, Homo sapiens
ccgagagcgtgaccgagagcgcgaatatcgtcatcgttagaagattgcagaaaagctgaggcaggccctcagccgctttccagtgatgtaggacagaacg

SEQ ID NO: 555491 - DNA, 88 bp, Homo sapiens
aaaatcacattttcagtgacgtttgttgatggcaacaaccctttccaagcagttcaagaagatatcagacaccccgaagaactttctc

SEQ ID NO: 555492 - DNA, 100 bp, Homo sapiens
agcagatcccacgccattttcacgatccactacacgcagaaccttcagggtttataaatctgacctcattttctcttcatgtcttgagcaaaataaacat

SEQ ID NO: 555493 - DNA, 100 bp, Homo sapiens
ttgaatgaaagcactggacaattaccaacaacttgttcctctgctgcctcgaacagcataaactgaattctccactttaccaatacttacaggatctggg

SEQ ID NO: 555494 - DNA, 90 bp, Homo sapiens
cagtttgattgatatccttctggcatattgctatgaaacccgtgtcactgaaggagagaagaatgaattacatgaatgacagtcttcgaa

SEQ ID NO: 555495 - DNA, 90 bp, Homo sapiens
gctgctggtgaaaagcttctccgagaggtgaggtgataaagcacggggacctgagatgcgtgcgcgatgaaggaatgcccatctacaaag

SEQ ID NO: 555496 - DNA, 82 bp, Homo sapiens
cgtttgggttctccacgcattctagactcccgaagagctgcggttggatttctcacgatgtccagtgttatctccatgtctg

SEQ ID NO: 555497 - DNA, 90 bp, Homo sapiens
cgcggacagcgggctggagcctgacgagctggcgggcactgaacttcccagccctgccgtggaagctgcctgccaggtcctccccatcct

SEQ ID NO: 555498 - DNA, 100 bp, Homo sapiens
tattcgcatgcctggggttacacctaaacaggaactccaggatggcattgggcagcggcaaactgttgtcagaacattgaatgcaactggggaagaaata

SEQ ID NO: 555499 - DNA, 100 bp, Homo sapiens
gaagcttcggagcggccggtactgttgaaagcgacaagtggaggcgccgctctagcggccgggactctgaactatggcgtttcccaggtatgctgaaatt

SEQ ID NO: 555500 - DNA, 75 bp, Homo sapiens
gcctctgttgtaggcaagatcaacaaagtgcctgaggcccccgtcattgacacccagcgcacctttgcctatgat

SEQ ID NO: 555501 - DNA, 100 bp, Homo sapiens
gcccgccctgcgccccgctctgctgtgggcgctgctggcgctctggctgtgctgcgcggcccccgcgcatggttgaaatcacaaagattagacacctttt

SEQ ID NO: 555502 - DNA, 100 bp, Homo sapiens
gagtttacttctcctccttctttgttcaagactgggcttccaccgagcagggtcccgggattcttgagctgtgcccagctgacgagcttttgaagatggc

SEQ ID NO: 555503 - DNA, 80 bp, Homo sapiens
gtcagtcgcgagcgaacgaccaagagggtgttcgactgctagagccgagcgaagctgccaggccgggcacctggtgtgta

SEQ ID NO: 555504 - DNA, 83 bp, Homo sapiens
tgattggaaactctttgggaaagccactcgaaaaggacactgcccatctctaagataagaacctggaaaggggactctgttgg

SEQ ID NO: 555505 - DNA, 90 bp, Homo sapiens
agctaatttattgacttggcaagggcttattgttccttgtatagagacatcctggcttgtggcagaggggattcgttttttataagaagc

SEQ ID NO: 555506 - DNA, 90 bp, Homo sapiens
cagcgcctgttcccggggcagatccaggttcaggtaactgcatcctgcccagcatgacggccccctgcccgccgccacctccagaccccc

SEQ ID NO: 555507 - DNA, 90 bp, Homo sapiens
cgcgtgtggaggaggctgaagtctcacatcagaggtgtcaagaccgagacatgggtgcccggcaccgcgcccgagcccactccattcaga

SEQ ID NO: 555508 - DNA, 100 bp, Homo sapiens
ctccggctgatcaagtctcctgcagaaattgaacgaatgcagattgctgggaagctgacatcacagcacacagcaagaaggaggccatcagcaaactggg

SEQ ID NO: 555509 - DNA, 107 bp, Homo sapiens
gttccttgtggagccggagctgggcgcggattcgccgaggcaccgaggcactcagaggagggtgcttcaaggatgaccgcatcgtcttctggacttggatgttctcc

SEQ ID NO: 555510 - DNA, 75 bp, Homo sapiens
gcggcccaatggactcgcctaaacggcctggggagtcactgcagatctctggaaacatggctacagaacatgtta

SEQ ID NO: 555511 - DNA, 51 bp, Homo sapiens
gggaggccaaggtcaagtttgaagagagatgttgatgcctaagaagaaccg

SEQ ID NO: 555512 - DNA, 100 bp, Homo sapiens
ccaggatgagttacgaagcctgttcagcagcattggtgaagttgaatctgcaaaacttattcgggataaagtagcaggtgccaacctggattcactggag

SEQ ID NO: 555513 - DNA, 95 bp, Homo sapiens
ccgacgccaggagcatgatatcagcctggaccgcatccctcgtgaccacccctacatccagtacaaaacctccacagctgttgagaaaaaggaga

SEQ ID NO: 555514 - DNA, 82 bp, Homo sapiens
tgcagtcggcactgctactgcgaagacagctggcagtgcagggctcgcggcctggcaagaatgtacagctgacagagaacga

SEQ ID NO: 555515 - DNA, 52 bp, Homo sapiens
ggctcactgcaacctctgcctcccaggttcaagcgattctcctggctcagcc

SEQ ID NO: 555516 - DNA, 78 bp, Homo sapiens
ttgtgtggctgaaaacatctcttctcttcttggacatttaccaaattctgcttggtcagaatcgtgatggcattgtgt

SEQ ID NO: 555517 - DNA, 100 bp, Homo sapiens
gcagcccttcaagaaagacttgatggtctggtagaaacaccaacaggatacattgaaagactggtcgaattgacaaatcttaccctacagtatgtggcca

SEQ ID NO: 555518 - DNA, 102 bp, Homo sapiens
ctcttcccgcccgccttccgccgtctcttcgagttcttcgtgctgctcaaggccccttcccagctgcctgcctgccctagccagctcccaggtgaagagact

SEQ ID NO: 555519 - DNA, 75 bp, Homo sapiens
agggaaagtgccgctttaaggagaactgcaggtacatcaggaacgtctctatcaagaatacaatttcagcaaggc

SEQ ID NO: 555520 - DNA, 51 bp, Homo sapiens
aggagattctgaagataaggaggtcaaaggttccgttacagttactatgat

SEQ ID NO: 555521 - DNA, 90 bp, Homo sapiens
taacttttctgtattttactatgagattcttaataacccagagcttgcctgcacgctggctaaaacgattgttggaccttcagatggaag

SEQ ID NO: 555522 - DNA, 101 bp, Homo sapiens
accaagaagctgagaatgctgtttcctcagacacacaaactcgggccacttctaagagtctcttacctgttaggtccaaagaagtcgatgtttccaaacag

SEQ ID NO: 555523 - DNA, 98 bp, Homo sapiens
aaaagaccagagaaagaattgaacgggtggtcaagaggccccggaaggtccaggtggccgcacttcaggccagccctcccctggatcaggatgaccgg

SEQ ID NO: 555524 - DNA, 96 bp, Homo sapiens
cctgatacattcaattcatggtttcttataaccctactccacgtctggtacagtagcagagggagctcccattattccaatttcagctcagctgaa

SEQ ID NO: 555525 - DNA, 100 bp, Homo sapiens
cctacgtggctgagagctccacagcagaggacgcgctctccatccgctcggagatgatccagcgcaaaggtacatgtcccagagcaagcacacggaggcc

SEQ ID NO: 555526 - DNA, 100 bp, Homo sapiens
gatttccacagaaggactgggatgatacaccttttccacagggaattgagttgtctctagtgatccctgaaaagttccagcatattttgcgagtactcaa

SEQ ID NO: 555527 - DNA, 100 bp, Homo sapiens
tgatgtccactgcctgtggaactccaggctatgtcgacagggtcagatgtgttactgggctggagtgtggtggcacaatcacgctcactgcatccttgac

SEQ ID NO: 555528 - DNA, 75 bp, Homo sapiens
aaaataaccgtccccgccagtcagaagttgagttttcggctttgtgagaaaccttaccatcaaacacgatggcca

SEQ ID NO: 555529 - DNA, 75 bp, Homo sapiens
ggacaggctggaacctcgcccctctgatcatcggatatcatggagtctggcaagacggcttctcccaagagcatg

SEQ ID NO: 555530 - DNA, 100 bp, Homo sapiens
cgaggagaagctgccgcccggctgggagaagcgcatgagccgcagctcaggtggagccccctgagctgcccgctgatctgcagcactggatctcctacaa

SEQ ID NO: 555531 - DNA, 87 bp, Homo sapiens
atgtgacgctggagaacctggcacttatgtcctccctgggttctcttacatctgatggaaaaaatttgtctcaggaaaaagaattgc

SEQ ID NO: 555532 - DNA, 100 bp, Homo sapiens
aaattgaaggcacaggaatatccatgtcggcttgtagagagattgcaatttgtaagactccagggcctcccagccgtgaataatctgatggttcctgaaa

SEQ ID NO: 555533 - DNA, 136 bp, Homo sapiens
tccagcttggctacgtggtgcaagagtcaggccagaacttcagcaccctggctgagaaggtctctggacctctgactgacactgtgcctgcccaggtccctgtatgcactgccacagtgccctgggccccatgtcc

SEQ ID NO: 555534 - DNA, 101 bp, Homo sapiens
ggccgtcggagacatgggagacccggggtcggaggaatcaaagatcaactcccactgaggacaaatggacctgtaattccgggtgtgacgagagaacgaga

SEQ ID NO: 555535 - DNA, 100 bp, Homo sapiens
ggcgctttggagccggccccaggcagcgtgtgtcggtcgcctagtctggagaactagtcctcgactcacggttgagtgtcacccatacctcacacaggag

SEQ ID NO: 555536 - DNA, 82 bp, Homo sapiens
gaggagcgggaagagttgctgggactacgtctactttgagaactcctccagcaacccatacctgatccggagaatcgaggag

SEQ ID NO: 555537 - DNA, 90 bp, Homo sapiens
gtccaagttcaaccaagccattagctttgctgttccttgatcatcagtccgaaaggcggtatcacacagactctgcagccacactgccta

SEQ ID NO: 555538 - DNA, 101 bp, Homo sapiens
gccaagctcatctctgagacccggaggaggttcgaagctgagtatgtgacagaaaaattgtatggcgacttcttgagctggaagctagaggaaacccttgc

SEQ ID NO: 555539 - DNA, 50 bp, Homo sapiens
gctggagaacgcggctaaagttctgatgaatcccaaggactgcagcaaag

SEQ ID NO: 555540 - DNA, 133 bp, Homo sapiens
gcactttttggatcggcatctagtctttccgcttcttgaatttctctctgtaaaggagctgtggcagaggtaaaacttcgagatgatcaatatacactggaacacatgcatgcttttggaatgtataattacc

SEQ ID NO: 555541 - DNA, 100 bp, Homo sapiens
ggagagctcgccttggagagcccaggagcaggggagacatggtggctattatcatggaaaactaatttttcccagagaatttcctttcaaacctcccagt

SEQ ID NO: 555542 - DNA, 100 bp, Homo sapiens
gctttcaacatgattgaccagaaccgtgatggcttcattgacaaggaggacctgcacgacatgctggcctcgctgggatttgttaaggattccaagtaac

SEQ ID NO: 555543 - DNA, 120 bp, Homo sapiens
cgacacaattgtctgtgacagtaacagtacttgggatcccccagttccaaagtgtcttaaagtgatggaatggggagaagatattaaagcagtttcaaaagatgaagcagtgatgttggt

SEQ ID NO: 555544 - DNA, 101 bp, Homo sapiens
ctgtgctcgcgctactctctctttctggcctggaggctatccagcattcttcgctgctgctgccttaccgccgagaaccaccacccgccaggcgtcttgcg

SEQ ID NO: 555545 - DNA, 51 bp, Homo sapiens
ctcacagccgcctctgacgcattgacacagatgggggtctcactatgttgc

SEQ ID NO: 555546 - DNA, 75 bp, Homo sapiens
attttattcttcctggttcgtgcattcatcctccataagaaatcaggacctttgatatttaggaaaactatgttt

SEQ ID NO: 555547 - DNA, 101 bp, Homo sapiens
ccggtctggacacagaaagagaagatgtgtactctggcacacccaccaaggtgagacacatggacagtcaagtggaggatgagtttgatttggaagcttgt

SEQ ID NO: 555548 - DNA, 83 bp, Homo sapiens
agatgcatgccagtggcaccggcgtgatgcgatcatgtcacactgcagtggaggactcagaattcatgattgaagaaatgcag

SEQ ID NO: 555549 - DNA, 100 bp, Homo sapiens
aacaccatacctatcttacacacaggggctgcttgctctcggtgactacatgaatgtccagtgccatgcctgcattggaggcaccaatgttggcgaggac

SEQ ID NO: 555550 - DNA, 75 bp, Homo sapiens
tgcgcctcacggccagatcccagtcttctcattcacaggttaaggctacctttccagataatccaacagctaaat

SEQ ID NO: 555551 - DNA, 100 bp, Homo sapiens
ggacactttgttattggagaaacatgcagattatatcgcatcctatggctcaaagaaagatgattatgcacaggattcccaaagaacagtggtggctcaa

SEQ ID NO: 555552 - DNA, 100 bp, Homo sapiens
ggcgggtggcagcgatccgcgggctggcgacgtagaggaggacgcctcacagctcatctttcctaaagggccatgaagcccccaggaggagaatcgagca

SEQ ID NO: 555553 - DNA, 73 bp, Homo sapiens
agagctccagtgagtccagctcctctgacagcgaagactccgaaacaggagaactacgatgacccgcacaaaa

SEQ ID NO: 555554 - DNA, 82 bp, Homo sapiens
gcgggtctgctcgggggtctacttcgaggatgaaggatttgggggcagagcacttggcaggtcatgaaggggtccaacttct

SEQ ID NO: 555555 - DNA, 89 bp, Homo sapiens
agacattgtctcccaagacaacttcctcaccagcaccttacagattagaaatgatatttgccaaatttgatgaagtgcaaagttcaggc

SEQ ID NO: 555556 - DNA, 100 bp, Homo sapiens
cagaccagctcggctacctggtactgagtgaaggtgcagtgctggcgtgaatcagaaatcctgcaccatgagaagcagtacgagccattctactcatctt

SEQ ID NO: 555557 - DNA, 100 bp, Homo sapiens
aaggcagctcgctctgggagcctagaatgcatcagtgcccttgtggcgaatggggctcacgtcgagtgagcgaaatgcagaagctggatgcacaggtcaa

SEQ ID NO: 555558 - DNA, 95 bp, Homo sapiens
gttcctctccacttcgtttagttgcgctccatggacagatcaacgaacctggacattgaggagctcaaggctctgggcgtggggaggctgagaca

SEQ ID NO: 555559 - DNA, 83 bp, Homo sapiens
tgacaaaacgccgctggagaaggatggcatcaccgttgtgaaggatatggccctgaagccacatgagcggaaggagaagtggg

SEQ ID NO: 555560 - DNA, 74 bp, Homo sapiens
aggttcaaaaactaagcatccagaggccctgagcagctttcagcactggagagactggctccagctttccttga

SEQ ID NO: 555561 - DNA, 74 bp, Homo sapiens
taatgtttacggcgaagtctactcaacgtttccaagtgaaaaatgtactctgacctgaatcctgaattttcctt

SEQ ID NO: 555562 - DNA, 101 bp, Homo sapiens
ggcggagatgccccgccgggcaaaatcgattgctgacagaactggaatctcctgcttggtggccctttagctccaagctttggaagacaccaccggaaaca

SEQ ID NO: 555563 - DNA, 75 bp, Homo sapiens
aatcctgctatccaggctgccattgacctcacagcgggggctgcaggcattctggaatttatcagtatagcagtg

SEQ ID NO: 555564 - DNA, 73 bp, Homo sapiens
tttgcgcaagcaggtagcgccgctgctgaagagtttccaaggagagggctggtgaattaccagatctctgtca

SEQ ID NO: 555565 - DNA, 100 bp, Homo sapiens
tcgccgggccggtactccaggtccgacccgcgaacccctctgggatccccgccgctctgtctacaacccgagtggtatgtgtgcaacagagagaaattat

SEQ ID NO: 555566 - DNA, 84 bp, Homo sapiens
gaaactgttgtgcctcttcatattggcgatcctgttgtgaatgtatcctgtcaggtataatgtcagtgaatggcaagaaagttc

SEQ ID NO: 555567 - DNA, 101 bp, Homo sapiens
aggatatgctgtattcagctcaggaccaggcaccttctgtggaaggctgaaaatgatgagaatggacaagcagaaaacttttccatggacccacaattgga

SEQ ID NO: 555568 - DNA, 90 bp, Homo sapiens
tcaaacgcctgataccaattgatgaatactgtaagggtctctcattcatcacttttatctgctatgtggcgtcctcagcatctgccttcc

SEQ ID NO: 555569 - DNA, 75 bp, Homo sapiens
gatcgcccaatccacatgcttttccaggaaactcaacagtgtaaatttgatggccaggagacaaaaggatccaag

SEQ ID NO: 555570 - DNA, 131 bp, Homo sapiens
gagactggagcagagccgctgggcgccggagccgaggcgagcgccgcgcgcaccactggtgagaagccatttaaatgtgatcagtgcagttatgtggcctctaatcaacatgaagtaacccgccatgcaag

SEQ ID NO: 555571 - DNA, 73 bp, Homo sapiens
ccacctacagaaacaaaatgtcaacaaattgatgggtgtgtgcagtggcctcagggatccggaaagtctagga

SEQ ID NO: 555572 - DNA, 88 bp, Homo sapiens
cttggatagactgttggtgcatgctacaaaaagagagtaatcaagtcagaggattatatgacttttatctgcctagagaagaactatg

SEQ ID NO: 555573 - DNA, 83 bp, Homo sapiens
gaaggaacgaggcaaggagctaaagcagcgtgcgttcagccctggggttatttggaaatagcggtgcttgcagcgcttgcgga

SEQ ID NO: 555574 - DNA, 100 bp, Homo sapiens
ccccggcctgcgctcccatccacacgctcggaacaagatcactcaaggtgaaggataatctactaataccagcactttgaatgaaaatttgtttctctgc

SEQ ID NO: 555575 - DNA, 90 bp, Homo sapiens
ggcgacgcggggccatgtgcaggaccctaacgacaggcgcctccggcccatttacgtgtaagaagaagcttgggaagctgccacctcagt

SEQ ID NO: 555576 - DNA, 97 bp, Homo sapiens
ttatccaggagccacaaagtgaggtggtaaagccaaaatctccagaacccgaagcaacgctgacatttccatttctggacaaaatgcctgaagccaa

SEQ ID NO: 555577 - DNA, 98 bp, Homo sapiens
tcggcttgaaattaccaactgctttcctttccctcagcacacagaggatgatgctgactttgatgaagaaaaattggaagctccaccacccaccccag

SEQ ID NO: 555578 - DNA, 97 bp, Homo sapiens
cgttggggaccagatgaagaaaaatcaggctgctgacgatgacgacgaggatctaaatgacaccaattacgatgagagattatggagaagtctggcg

SEQ ID NO: 555579 - DNA, 100 bp, Homo sapiens
cagagatggcgagcgcccggattggggatgagtatgcggaggacagctctgatgaggagccttttttccggctgctgaacttgcgcaagctgggcctgag

SEQ ID NO: 555580 - DNA, 100 bp, Homo sapiens
ctgccacacaagcacctttatgaagccagaaggaaaagccaggatgcgcgtgatgagtagcacatttgtgtgtccaactgaaattatcgcttttggcgac

SEQ ID NO: 555581 - DNA, 82 bp, Homo sapiens
tccggctcatcacctcctcactcgcctccgcgcagagagacaatgcagatcttcgtgaagactctgactggtaagaccatca

SEQ ID NO: 555582 - DNA, 98 bp, Homo sapiens
tcagatactagagctggccacactgcaggacattgggaaggtacaaagtgaaatcacttcagcaaacacagaagatgatgatgacgacgatgatgagg

SEQ ID NO: 555583 - DNA, 50 bp, Homo sapiens
aaagtgcccggacccaaaacaggaagagaacggcccttccagtgcaatca

SEQ ID NO: 555584 - DNA, 98 bp, Homo sapiens
gttccttcgcgcgtgaggctgcggctctgacgggaaaggggctgtttgccacacagctcatccggaagggggagaccatcttcgtagaacggcccctg

SEQ ID NO: 555585 - DNA, 130 bp, Homo sapiens
ccgagcctgggaggccggccggtgccagcacctttcggcttctgagacggcggcagcagcggcattcaggatgatcacggacgtgcagctcgccatcttcgccaacatgctgggcgtgtcgctcttcttg

SEQ ID NO: 555586 - DNA, 100 bp, Homo sapiens
atcctgaaagccatgcagcggataagaatgtgccttttgatgaaagaactttatctttctacaatgaagagtggaatttctatgtttaaggaataagaag

SEQ ID NO: 555587 - DNA, 100 bp, Homo sapiens
gctgtatcttatctatggaagataaagcatggagttggctaatggatgctgacatatctgaagagatggattaagaatgctttggattaaggattgtgga

SEQ ID NO: 555588 - DNA, 82 bp, Homo sapiens
gacaacaatgagatcgtggacaagatcatgggcaaaggacagatccagcccagagcctgaccacctgcgaggtctgcggtgc

SEQ ID NO: 555589 - DNA, 100 bp, Homo sapiens
attactcagtctctaaaaagctaagatgccttcaattaagttgcagagttctgatggagagatatttgaagttgatgtggaaattgccaaacaatctgtg

SEQ ID NO: 555590 - DNA, 130 bp, Homo sapiens
tgtggatgctttgaaatctgataagaaagtacggaccataataatcaggagtgaagtcccagggatattctgtgctgtaggtcccattagtccaccacagccaccttcagtcagtgcatggaataagccc

SEQ ID NO: 555591 - DNA, 90 bp, Homo sapiens
cttttgtccctttgcctcatcccaggttgccttggaaaatgccaacgccgtgtctgaaggcatttcagaagatggacacaaagaagaagg

SEQ ID NO: 555592 - DNA, 82 bp, Homo sapiens
caagagcagcggaaaatgatccagtcacagacaatgcagatcttcgtgaagactctgactggtaagaccatcaccctcgagg

SEQ ID NO: 555593 - DNA, 75 bp, Homo sapiens
ccgcttgcagcggggacgcgaggacccgggctgggctttcctcacccgggtgcctcatctccagacatggagccc

SEQ ID NO: 555594 - DNA, 75 bp, Homo sapiens
ggaaccagaagctgcagaagaagccctggagaatggaccaaaagctcaggtaccagacagtgatgagcagtttgt

SEQ ID NO: 555595 - DNA, 82 bp, Homo sapiens
ctcaccgacagtgccctgagggccttcgagagctaccgcgccagacagatggaaatcatattatgtagaatacttgggtgac

SEQ ID NO: 555596 - DNA, 100 bp, Homo sapiens
ctcggcgcctggcgctggcgctggccaaggctgtattttgaaggtggcgtctcatctgtctacctctgggatctggatcatggctttgctggagtgatcc

SEQ ID NO: 555597 - DNA, 97 bp, Homo sapiens
ccacgcacatctacggcgcctcggccggggcgctcacggccacggcgctggtcaccggggtctgcctggaccagaatctgagggagagcagattcgg

SEQ ID NO: 555598 - DNA, 75 bp, Homo sapiens
atgtggaggggaatagactccatctatccatatgaggtaatgagaggccctaagatcccagaggatgccataaga

SEQ ID NO: 555599 - DNA, 75 bp, Homo sapiens
cagaactggatgctcaaggccctgcccccagccctgcagtatcagaggttctggtgatagcagtcattcacaatc

SEQ ID NO: 555600 - DNA, 83 bp, Homo sapiens
aggaaaaggaggaattcgccgtgcccgagaatagctccgtccagcagcttgcattcacaagagatgggctctgtggtctgtgg

SEQ ID NO: 555601 - DNA, 100 bp, Homo sapiens
cctaaaggcaacagcaggactacgcttactgccagaacacaaagccaaggctctgctctttgagaacggccggtttgtgggcgatgctgaccttgaaaga

SEQ ID NO: 555602 - DNA, 100 bp, Homo sapiens
gcgctatggaggagctcgatggcgagccaacagtcacttaagactttgaccccgacgcaggcttcagtgattgccgcggatcagaagcctgagcactttg

SEQ ID NO: 555603 - DNA, 101 bp, Homo sapiens
gggccgggcagctagcagggcgcttcgggaatcatattgacaggtcatgaaaatgagaccaaaagatctctggaagcgattaatgataaaatttcatggag

SEQ ID NO: 555604 - DNA, 100 bp, Homo sapiens
cggggctgcataatgggacgaaagcctttctctttcaagaataagaccacagcttgccaaagagaagattgaaggatgccatatttgtacatctgtcaca

SEQ ID NO: 555605 - DNA, 76 bp, Homo sapiens
tggagtccggacatctgaaacttggattatattccatcacaacaagatattctgcttgccagaagacccaccaaag

SEQ ID NO: 555606 - DNA, 51 bp, Homo sapiens
gctttatgcagatggagaaatcttgaaggatcagttcttaagagcagcccc

SEQ ID NO: 555607 - DNA, 101 bp, Homo sapiens
ttcaagcagtgcctgtctccgcacttacggttcgagaaatggctgctactaccttaagcggtctgctacagtgtaactttcttaccatggacagtcctatg

SEQ ID NO: 555608 - DNA, 75 bp, Homo sapiens
agcgatggcatagtaaatgaaaacttggaaggatttgatgccctggatccctttattcccatcctggtttccaac

SEQ ID NO: 555609 - DNA, 107 bp, Homo sapiens
ctgcagggcctgggccgccgctgctacctgcagcgccgtgtggcacgacacaaaaatcaggttgcccccaagtttcctggcagtgtgtgatactgaggaggtgagct

SEQ ID NO: 555610 - DNA, 75 bp, Homo sapiens
ggagatctcccccttcttcaagacccacgaggattacagagttagtcacattgacttatttactgaaccagaagg

SEQ ID NO: 555611 - DNA, 50 bp, Homo sapiens
tggaggctgagcatttattcaggcaatgaatcgctccctggctaatgtga

SEQ ID NO: 555612 - DNA, 82 bp, Homo sapiens
gggtcgagcacataacggggttcgggtgtctcgtgtgtgaacatcacaggtggatccataaagaacccagccaacccgcaga

SEQ ID NO: 555613 - DNA, 75 bp, Homo sapiens
ccaacatcctgctcctgctcatggacgacaattcagaaggagctggcggacatcactttagaccctccacctaat

SEQ ID NO: 555614 - DNA, 89 bp, Homo sapiens
ccagaagaagggaaggcgcgagtgaggaaaggaggtactgtaggttggtcaaagaaaaagtgatgtatgaaaaagaggcaaaacaacaa

SEQ ID NO: 555615 - DNA, 90 bp, Homo sapiens
ctcaacatctctcagagacgaaagacgccaaattccagcgaaacagctgatgccagccagcttgaagacccctgccacagaagaagggaa

SEQ ID NO: 555616 - DNA, 90 bp, Homo sapiens
cgcggtgcagggtaacatggcggatgcggaaggtctacttccccagcaggacagcatcattctcctatatcttctagacatcactcatct

SEQ ID NO: 555617 - DNA, 99 bp, Homo sapiens
cgggacagagcggtcggtgacagcctcaagggcttcagcaccgcgcccatggcagagccagaccgtctgaacgggatgaacagcagcatctgggagcat

SEQ ID NO: 555618 - DNA, 100 bp, Homo sapiens
caggtgaaaggagcagtagatgatgatgtagcagaaggcaggagttggtggtgggtctcacaaaggagctgaccctgaacattaacctaactaactccgg

SEQ ID NO: 555619 - DNA, 114 bp, Homo sapiens
accagtacctcttggacagacatttttggggattaaatgtgcaaataagatatctccattaacatataccattctgaaactaaagacatagacaatcccccaagaaatgaaaca

SEQ ID NO: 555620 - DNA, 106 bp, Homo sapiens
gcggcccccgctcccgggaaccgttcccgggccgttgatcttcggccccacacgggggatatgagactttctactcggaatatcctgagtgttgcgtggatgtaaa

SEQ ID NO: 555621 - DNA, 90 bp, Homo sapiens
cttttcacagcatcagcagtcatctcactagttatgttcaaaaaagagtgctaacaggaatgaatgaaacttctgctgtaatcattgctg

SEQ ID NO: 555622 - DNA, 82 bp, Homo sapiens
aagaaaaagaaatacgtgaattctggcacagtcatcgacatcctgagggggaaggccacccggcctgcttccacctcccagc

SEQ ID NO: 555623 - DNA, 90 bp, Homo sapiens
ggaggagattctggggcagtatcaacggagtctccggggaacttctacttgcagaaaagtgggctaaaatgaacaagctcccctttccaa

SEQ ID NO: 555624 - DNA, 90 bp, Homo sapiens
gggagactgactgcctatgaatttgctaaacttaaaagcaagctggttctctgggatataaataagcccttaatcctacagtcactggga

SEQ ID NO: 555625 - DNA, 101 bp, Homo sapiens
cgagcaccgggccctctgcgacctggggccctgggtgaagtgctccgccgcccttgcctccagtttctttcaagatggcttgaaaacagctgataagttga

SEQ ID NO: 555626 - DNA, 99 bp, Homo sapiens
ctgatctcataaataatttgggaaccattgccaagtctggtactaaagcattcatggaggctcttcaggctgactgtgctgtcctgattgttgctgctg

SEQ ID NO: 555627 - DNA, 90 bp, Homo sapiens
aatgtaactgtgtgcaaggataacagatcaagagactgaaatctcatccttctatcatcatatggagtggcaataatgaaaatgaggagg

SEQ ID NO: 555628 - DNA, 51 bp, Homo sapiens
caaaatggtggtctctttataatgatgatgttgaatttgaagtatcatcgg

SEQ ID NO: 555629 - DNA, 83 bp, Homo sapiens
gcgccctggcctccctcaccttggacacctcgcttggaaaaatggctacaaacttcctagcacatgagaagatctggttcgac

SEQ ID NO: 555630 - DNA, 98 bp, Homo sapiens
accgccgcccccccagacaagatggacaccgcggaggaagccggcacagtcttcactaccgtagaagaccttggctccaagatactcctcacctgctc

SEQ ID NO: 555631 - DNA, 50 bp, Homo sapiens
agcaaaagccttccatgattacaatcgctgttctggcatccatttgcgtt

SEQ ID NO: 555632 - DNA, 83 bp, Homo sapiens
ctcaatatctgtcttcggtggactccttcggcagtccacccaccgccgccgcctcccagataattcgtgtccagtccccggat

SEQ ID NO: 555633 - DNA, 97 bp, Homo sapiens
cctcatctgcctcctgctcatcctgcatcgcccctgggtggctccagctatggctaccgtggccgagactgccgggccaacctttatttgctgccca

SEQ ID NO: 555634 - DNA, 75 bp, Homo sapiens
ggacgtgcttcctgcttcatagataagaggcaccacaccaaccccgtgggcactgagtggcggtggaagatggac

SEQ ID NO: 555635 - DNA, 50 bp, Homo sapiens
caacttcactaagtccatggaagaagatctgggacatgagcgatgatgag

SEQ ID NO: 555636 - DNA, 100 bp, Homo sapiens
caagaaatgccccttcactggtaatgtgtccattcgagggcggatcctctctgtccgctgcctggcccggaagcggaggaactcacgggatggggacccg

SEQ ID NO: 555637 - DNA, 101 bp, Homo sapiens
ccgggcttctgtgaaacatggcggtaggctgggaccataacacaagaccgctgatgaggaggaggaccagcctctcagccttgcctggccttctgaaaccc

SEQ ID NO: 555638 - DNA, 101 bp, Homo sapiens
tcacagtttaggtctcaaggcaagcctattgagttaacacctctgccgctgctaaaaggctggctacagcaaacatcattcaagatgtccagcaaagggag

SEQ ID NO: 555639 - DNA, 97 bp, Homo sapiens
agctggccgtggctctcttggcagccttcctgatttctgcagctctgtgtgaagggaaatcctcattgacgattcaatttgttgaaggccaatttgt

SEQ ID NO: 555640 - DNA, 111 bp, Homo sapiens
cttcagagacctaagctttttccagagaagagaagctttactggtgttccagccctaaggtaaaataccatgaagattttgaaaaaacaaaggggagaggctttactcccg

SEQ ID NO: 555641 - DNA, 100 bp, Homo sapiens
cccggccctgaggatggacccaggagatcccgctggtgaccctgccgctggcgagcgccaccgcatggacctcctgccccccgaggtctgcagtctcctg

SEQ ID NO: 555642 - DNA, 98 bp, Homo sapiens
ctccaatggcgctttctacaagcaagatggattctggatatactctgagtattgtaacaaccacctggatgcttgcatggagctctccaaactgatga

SEQ ID NO: 555643 - DNA, 87 bp, Homo sapiens
aagaaaccagccgaacttcagggtttccaccgttcgttcaagggtgagaactctgtctcagtcgacgggaagtgcagtgactccacg

SEQ ID NO: 555644 - DNA, 91 bp, Homo sapiens
aatgtctgactctgactctcggactgagaaacgcaagaattaaacaaccaccatgtcgagcaaaaaggcaaagaccaagaccaccaagaag

SEQ ID NO: 555645 - DNA, 98 bp, Homo sapiens
cctgtcttcagatcttcacagcacagttcctgggaaggtggagccaccagcctctccttggaggaagttaacatccctaataggagggttctggttac

SEQ ID NO: 555646 - DNA, 82 bp, Homo sapiens
ctcccctccactttctcccgggtagaggggaagagattgaactttgctgacctttgatgtgaggcgctcagccagggccaag

SEQ ID NO: 555647 - DNA, 75 bp, Homo sapiens
cagtagatgatgatgtagcagaagattgttgtgtccactgtatcctggcttgcttgttctgcgaattcctgaccc

SEQ ID NO: 555648 - DNA, 75 bp, Homo sapiens
gaaaaatgcaaagatgtagatgagagaaatgaggtttgatccagatcggtttgatgatgaattagtaatgaaaac

SEQ ID NO: 555649 - DNA, 97 bp, Homo sapiens
ggtgcccgaggaggcagccaagctcgtagcctgccactccgtgcgtaaatcaacagactgggaagatgatggttggggagcatgggaagaaaatgaa

SEQ ID NO: 555650 - DNA, 100 bp, Homo sapiens
gccgttgcctccagcaccacttctaatgatcactggggtgatcctgctggctgttggagtctggggcaaacttactctgggcacctatatctcccttatt

SEQ ID NO: 555651 - DNA, 82 bp, Homo sapiens
ctggagcctcagttggaagcagccgatccagcctgcggagcctgtggggcagcgagattttcccctaccttgtggtggttat

SEQ ID NO: 555652 - DNA, 100 bp, Homo sapiens
caggattcgggcttctttgagatcagtatcaaatatttactgaaatcctggagtaataagctggaaacaacttctggtggattcctgtagtgggcccttt

SEQ ID NO: 555653 - DNA, 100 bp, Homo sapiens
ggcagctgtcttcctttgcaaaacgagactgttaataaaacctaccccagggtaggacggactgttcgcaaagtgcctgcattcgtgaggatgattgctc

SEQ ID NO: 555654 - DNA, 126 bp, Homo sapiens
gctcgacctcctggtcagcacttaccggctgccccagatcgcgcgcctggacaacggactcacaccacccggcaagaactgctcactacggctccctgccccagaagtcacacggccggacccaag

SEQ ID NO: 555655 - DNA, 90 bp, Homo sapiens
ctcgtctcctggaggaaaatggatagcaaaacctgatctcataaaacctaggtcacaaaggacagccctgcaaaacagaccctatttgga

SEQ ID NO: 555656 - DNA, 98 bp, Homo sapiens
gccccatccaagacagctgaacctttgaaattcccaaagaagagaggtcccaaacctggcagcaagatgagctttgatccaaaccttctccacaacaa

SEQ ID NO: 555657 - DNA, 107 bp, Homo sapiens
aaacaagtgtgtgcatctggctgttagaagaattcatgctcatccgggtcagcccaaggccaaccccactgtcactctgttcccgccctcctctgaggagctccaag

SEQ ID NO: 555658 - DNA, 100 bp, Homo sapiens
ggctgcctcctgcagcccccatagcaggtcctccccacacggccgctcacaatgcctcggtggacatgtgcgagctcaaaagggacctccagctgctcag

SEQ ID NO: 555659 - DNA, 75 bp, Homo sapiens
gggcggcgaccggggcctgggtccacgccgagggcaggacgaacttcaccagctgcatcttcctcccgtgaggct

SEQ ID NO: 555660 - DNA, 83 bp, Homo sapiens
gtctgcgagccaggattcccgggcgccctgcgtccggcagaggaggcgagcatcccgctcaggtgatgaggaacccctcgcgc

SEQ ID NO: 555661 - DNA, 80 bp, Homo sapiens
actatgttcgggccgtcctgcatctcctgagcgagcccagggcgtggtgctgaaagtgctcacaaacttcaagagcagtg

SEQ ID NO: 555662 - DNA, 49 bp, Homo sapiens
ctccctgggcaccaggcagctaacagagtggaatgttggctgtccgtga

SEQ ID NO: 555663 - DNA, 74 bp, Homo sapiens
ccatgcttgaaaacatggggattggaattcgatggtgatggaatttcctgataatgtgttaaatctcgatggac

SEQ ID NO: 555664 - DNA, 98 bp, Homo sapiens
ttgtttgtggatcgctgtgatcgtcacttgaatccagactccaaaatgatgcaaatcaacctgactggatttttgaatggaaaaaatgctcgagaatt

SEQ ID NO: 555665 - DNA, 51 bp, Homo sapiens
tgatgctcaagttagtagaacagatcagtttgtctgccattgtggatttcc

SEQ ID NO: 555666 - DNA, 75 bp, Homo sapiens
gttcgttgtacctgatactgttgacatgactaagatccgctgttgtaccaggggtctaatcaggcctgtgtctgc

SEQ ID NO: 555667 - DNA, 74 bp, Homo sapiens
ctgcagaggtgctggagctggcaggaggaagaacgtgcaaaacgtgaggagctagagcgaatactggaagagaa

SEQ ID NO: 555668 - DNA, 98 bp, Homo sapiens
ccggttccccggcccacagtgggggtgtgcaaacccgagagaactgggagtaagtccatgagtgatgtcagcgcagaagatgttcaaaacttgcgtca

SEQ ID NO: 555669 - DNA, 85 bp, Homo sapiens
ctgaaccaagcagcacgcgtatctatgccattgccaaggatctatcttgggatcccatggctttctttactgggctctggggccc

SEQ ID NO: 555670 - DNA, 50 bp, Homo sapiens
tgaagcgcgcccggcgtcacgtctcttgttttcagcagccactgtaaagc

SEQ ID NO: 555671 - DNA, 100 bp, Homo sapiens
tgcttcaggtcacgctggtcgactgccccgggcacgcctccctcatccggaccatcatcggcgtttcagaagctatctcctgagcagtgtgtaattctct

SEQ ID NO: 555672 - DNA, 83 bp, Homo sapiens
tggagatggagcccggactcctgggggatgcagatgccatggacaatattaccaggcagaaccaattctacgatacccaagtc

SEQ ID NO: 555673 - DNA, 75 bp, Homo sapiens
caggaggaggacggcagcaaccgcagcagcagccttcagggtgtccgcaatgttgccagtgtctgtctgcagatt

SEQ ID NO: 555674 - DNA, 75 bp, Homo sapiens
agacaagtgtcctaggagagtgaacaggtgtgactgcacagaaaagttacaaaacaaatttgactttttgcgctc

SEQ ID NO: 555675 - DNA, 98 bp, Homo sapiens
ccgcacaggcggggggcgtaggcgcgcggggcccgccatggctgcgtcggagctctacacaaagattccaactccacagagtgaccagagagaggacg

SEQ ID NO: 555676 - DNA, 100 bp, Homo sapiens
ggaagacttcaaagaaacattaagaacttggatcccattcacctgaggcacccgaagaagagaccatccatatttccagacctccttaactacgtgtttt

SEQ ID NO: 555677 - DNA, 100 bp, Homo sapiens
gacttggctgatttccccagggagtgcatcctttggaaggatatcgaatatgtcaccaatcaaatgcagccctgaggatttggctactgcatataacaac

SEQ ID NO: 555678 - DNA, 75 bp, Homo sapiens
ctgggatgtgccttagaggattatggggttcaggataagtttgaggtgctgaattacacaagcattcctatcttt

SEQ ID NO: 555679 - DNA, 100 bp, Homo sapiens
tgcagggtggctgacaacctggtcacaggattatggcagggaaagtaaaatgggtcactgatatcgagaagtcagtgctgatcaataactttgaaaagag

SEQ ID NO: 555680 - DNA, 89 bp, Homo sapiens
gcctacccgggatacggaggagggaattcctggaaaactcaagcaattcgtatttgacttacattctggaaaactgcacagagaattcc

SEQ ID NO: 555681 - DNA, 100 bp, Homo sapiens
ctcagctctagctgatactacagacagtacaacagtgccctgcaggagtcattaaatcaaaacttcatgctgatcatcacccaccgagaagtccagcggg

SEQ ID NO: 555682 - DNA, 99 bp, Homo sapiens
acgatgtcttgggatcaattgcatatggaaaccaagatcactccatggatgaaatgacagctgtggtgaaaattgaaaaaggagttggtggcaataatg

SEQ ID NO: 555683 - DNA, 100 bp, Homo sapiens
ggcgcgcacacacacctgctgtccaggtggaccagatgttccagttcgcctccatcgatgtggcgggcaacctggactacaaggcgctcagctacgtgat

SEQ ID NO: 555684 - DNA, 100 bp, Homo sapiens
atccttgtgacctttgggtaactctacactctatgggctacaataaagctctggagttgacagagggacagcaatcagacctattgctttgagagctgtg

SEQ ID NO: 555685 - DNA, 100 bp, Homo sapiens
gggtgccttcgttccccccgagttcgacgtgaccgggaacacctttgagattctgtttctggcgtctgcatacgcaagtccccaactcgctgaggagagc

SEQ ID NO: 555686 - DNA, 98 bp, Homo sapiens
caaaggaaaactgtaatggaaaaatggcaaccctgtctgtaggaggaaaaactgtatcacgttttcgtgttgcagtattttacagagctagcccaagg

SEQ ID NO: 555687 - DNA, 82 bp, Homo sapiens
ctcccgcgccgcacggtggacgaggaaggatgtgcccgtggaacaggtgacacacgcagacagagagcaaaccaagaaggtg

SEQ ID NO: 555688 - DNA, 99 bp, Homo sapiens
tgatgccacctggaccaggaataccacctctgatgcctggaatgccaccagtgaagcgtgacattcaggaaaacgatgaagaggcagtgcaagtcaaag

SEQ ID NO: 555689 - DNA, 74 bp, Homo sapiens
agagcgtgaccgagagcgcgaatatcgtcatcgttagaagggaaattcacctcttctatagaagagtttgtttt

SEQ ID NO: 555690 - DNA, 82 bp, Homo sapiens
acaagatggtttacatctcgaacgggaagtgccagacacagcttcagaatgtgactccttaaattcttccattggaaggaaa

SEQ ID NO: 555691 - DNA, 101 bp, Homo sapiens
gcagcttccaagccctcaaagtttgaaaggcaaaattctagtgaagggccgttgctccagggagaactgcaaatatcttcatccacccccacatttaaaaa

SEQ ID NO: 555692 - DNA, 75 bp, Homo sapiens
ccccgaacgggttgcttcccccgctgcgagataacgaaggaggcccaacttcattcaataaggagcctgacggat

SEQ ID NO: 555693 - DNA, 100 bp, Homo sapiens
attctttagacacattaactgggaagaacttctggctcgaaaggtggagcccccctttaaacctctgttggttaaatggaaaccacccttgggaactgga

SEQ ID NO: 555694 - DNA, 100 bp, Homo sapiens
ccctgtggagcccaggttgttggccacagccaattcaaaggaaggagtgggactctgggacattcgaaaacctcagaggacccagatgatgtggtaccag

SEQ ID NO: 555695 - DNA, 100 bp, Homo sapiens
aaccacatccctctttaaaaattccgccgaaaaagagaagacgctttacccgactctttgggccgttatctcacactcggtgaaatacctggagtgctca

SEQ ID NO: 555696 - DNA, 83 bp, Homo sapiens
ggggcgcggatgggatccagctgttagtcgggtaggcatagttgctggatttgtgcgactcggtgaaggatgatgcccggagg

SEQ ID NO: 555697 - DNA, 100 bp, Homo sapiens
caacaactgtggcatgggcattggcggcggcaagggtgtgggccgaagatatgctcatgtggtgttgaggaaagcagacattgacctcaccaagagggcg

SEQ ID NO: 555698 - DNA, 100 bp, Homo sapiens
tgtggatggataaaggaaggtggtgcctgcagccatttatcacccaacagcagagaggtgtgggaaatggaactggatagactcaagaatcaggatggcg

SEQ ID NO: 555699 - DNA, 75 bp, Homo sapiens
ggtggactccttcggcagtccacccaccgccgccgcctcccagagcactgacacggctcccgggacctcggcagg

SEQ ID NO: 555700 - DNA, 74 bp, Homo sapiens
gctgacgtggctcttgccctggcaagtgctgcctcccaaaatgggagacttgcagctcctctgctgaaacgttt

SEQ ID NO: 555701 - DNA, 83 bp, Homo sapiens
caagcctgttcggcgggactgtgatggccagagagatgacgatcttagacaatgcagatcttcgtgaagactctgactggtaa

SEQ ID NO: 555702 - DNA, 100 bp, Homo sapiens
tttggatacattattgatgtttctctacacggcagagatgatagcaaaaatgcacatccggggcattgtcaagtcctggtacctgggctagcttggttcc

SEQ ID NO: 555703 - DNA, 50 bp, Homo sapiens
gcggcttctgcgagggcagcctgaggtttttcgttggaatatacgttgca

SEQ ID NO: 555704 - DNA, 100 bp, Homo sapiens
ggaaacttaggggccacgtgagccacggccacggccgcatagggatgattctctgaacgactgtcggatcatcttcgtggacgaagtcttcaagattgag

SEQ ID NO: 555705 - DNA, 100 bp, Homo sapiens
ctcattgaagcagaggacaacatgaactgccaggatgtaaatgaagaccctggagaagatgtggccctcctctctgttagttttgaggacactgaagcca

SEQ ID NO: 555706 - DNA, 100 bp, Homo sapiens
tcacccagagcaacttccagtcctgcaagctccattcatgcttttgaacttctcagatagaggaaccccagtgaagactgatcagttcttacaattctca

SEQ ID NO: 555707 - DNA, 75 bp, Homo sapiens
cccagcgtcccagggcccaggccgagcagaaattccttgagctcataggcattgctcagggtcagatgacagttc

SEQ ID NO: 555708 - DNA, 98 bp, Homo sapiens
acaatgcggacctctctgggctggctattaaggcaacagcattattgagaaaagcccttacagaagagtgtggccgtaggtcagctattcacagtagt

SEQ ID NO: 555709 - DNA, 75 bp, Homo sapiens
tctcttccatccccatcttacagatgtattaagaagcctcagtgcccgaagtgacgaaaccaagtttaagccaac

SEQ ID NO: 555710 - DNA, 89 bp, Homo sapiens
caggattcaccacagtacttcacatcgtcgttcacatggggcaatccctattcaacagaggaaaatgggtcaacttgcttctggaatta

SEQ ID NO: 555711 - DNA, 75 bp, Homo sapiens
tgcctttttccgctgtaaataattaagaagaccaagtagcatccaaggtgaatggaggcattgagaacacattag

SEQ ID NO: 555712 - DNA, 117 bp, Homo sapiens
ctatgtttagcatcttctgtcatgagaagtggcgatcaaaattgggcgaacctttcctacacacccatacttctctgcccagcttggagcaggacagctatcgctttacaacatttt

SEQ ID NO: 555713 - DNA, 89 bp, Homo sapiens
gaatatattcggcaaggaagcctctctgctaaaccccctaacagggacaattacatccgctcctgcaagctgctccctgatgggcgcac

SEQ ID NO: 555714 - DNA, 125 bp, Homo sapiens
ggaattccagagttctggtttaccatcttcagaaatgtggacatgctgagtgaattagtccagggagaagtagaagccaaggttgaagaattaaaatttgatcgttactctgtatttaggcctgg

SEQ ID NO: 555715 - DNA, 75 bp, Homo sapiens
tttacagaggaatagtctacaaaggaagacttgtaacctggagaagaggatgtttgccacacgagtcactcgaga

SEQ ID NO: 555716 - DNA, 100 bp, Homo sapiens
ttcagatcttcacagcacagttcctgggaaggtggagccaccagcctctccctgggcccgtcacagctggagctgactctccaggcatccaagcaaaatg

SEQ ID NO: 555717 - DNA, 88 bp, Homo sapiens
ggagcccagcctcgttgcggccatcgccctgccggaccgcgcctcaggctcccccagatgcgtttagcccagcccctgctggtaacca

SEQ ID NO: 555718 - DNA, 75 bp, Homo sapiens
tgattcttattgcttgtggaacaagttaccatgctggtgtagcaccccacaggaagccccaagtcagccgcccgc

SEQ ID NO: 555719 - DNA, 96 bp, Homo sapiens
agtggctggcggtgcctggacgtacaatactaaggctcgtacgtctgcatcgattatcttacgtggggcaaatgatttcatgtgtgatgagatgga

SEQ ID NO: 555720 - DNA, 97 bp, Homo sapiens
tgctggtggacatgaaggactccttccaccacaatgtggctgctctccgagcctccgtggagacagggttccaggacatagtctgaggcaagatgga

SEQ ID NO: 555721 - DNA, 75 bp, Homo sapiens
cctagaggcctgcggcctgcgtggtatgtgtgcaacagagagaaattatgcgaatcactccaggctgtctttgtt

SEQ ID NO: 555722 - DNA, 75 bp, Homo sapiens
cagccactagtctgcttgctttctcctacagcatatccaaaagctttacaaggagatagtgttttaggtgctggt

SEQ ID NO: 555723 - DNA, 58 bp, Homo sapiens
agacaaggactcacagtggctgcaagatacttgccagaactaatacagctgatgaaat

SEQ ID NO: 555724 - DNA, 87 bp, Homo sapiens
ttggtaaagaacgatcgtccagtggagttgcatccaagaattgatgcccggagagctgatgaaaaccttggaatgcttcttgtagaa

SEQ ID NO: 555725 - DNA, 50 bp, Homo sapiens
tggaagacttgggtccttgggtcgcaggctggtgtgcaatggtgtgatct

SEQ ID NO: 555726 - DNA, 100 bp, Homo sapiens
agtttggtgtccagatggacagagttgatcagcattagtgccagcagtagttcccaagggctgtctcagccatccacccagacgactcagtatctgagag

SEQ ID NO: 555727 - DNA, 90 bp, Homo sapiens
gcagaaatcacattggaccctcctcccaactgtagaaatggtggagtcaatgaagaaagtagcagggatggatgtggagctgacagttga

SEQ ID NO: 555728 - DNA, 75 bp, Homo sapiens
ggaagagcgcagtggctctgccgacgccgcgttcagaaagggccaattcctgtccccccagcagcatggcatcgt

SEQ ID NO: 555729 - DNA, 50 bp, Homo sapiens
agaaaacatcaaagaggtctagcaaagagttttttgatgcagaaggaagt

SEQ ID NO: 555730 - DNA, 74 bp, Homo sapiens
aaaaccagttattgaatatcaagaggaggagttgttggaactagaggctgctatccagccagatactagcctgg

SEQ ID NO: 555731 - DNA, 50 bp, Homo sapiens
gtcagagctgaggtacttcgtgaaggtgacaaccaaagccaagcaactga

SEQ ID NO: 555732 - DNA, 96 bp, Homo sapiens
gtggcccccttcatggccaacatccctctcctcctctaccctcaggacggcccccgcagcaagccccagccaaagattgagaggatccagaatcca

SEQ ID NO: 555733 - DNA, 100 bp, Homo sapiens
cactgctcctgctggccgcctggacggctcgggcgctggagaagatggctgtgccacccacgtatgccgatcttggcaaatctgccagggatgtcttcac

SEQ ID NO: 555734 - DNA, 128 bp, Homo sapiens
gtctactagtacgactggcgggttgacctcagtctcctggagcttccagccagagggggccgacactactgtgtcgacattccactgcccttctcccaaaaagatgtcttttcgaaaaatggatccca

SEQ ID NO: 555735 - DNA, 88 bp, Homo sapiens
gagaccatggagaccctcacggagctgggcgacgagctgaccctgggagacatcgacggtgagactgtggagatgagaaggtggtgga

SEQ ID NO: 555736 - DNA, 49 bp, Homo sapiens
cgccatgtccttcttccggcggaaagcctttgacgacccctatgccctg

SEQ ID NO: 555737 - DNA, 100 bp, Homo sapiens
cccacccccaggcatagaagacaatagacagtgtgcgttatgtttgacttatggtgatgacagtgctaatggggtccactggacggggcctgagctacaa

SEQ ID NO: 555738 - DNA, 75 bp, Homo sapiens
cttcgttattggagccaggcctacaccccagttaccggtattgtaagaacaagccgtacccaaagtctcgcttct

SEQ ID NO: 555739 - DNA, 75 bp, Homo sapiens
ggctacagcttcagaagaccgaagcgttcgtatctggaagggtgctttcttctgcgacctggtactcatctacct

SEQ ID NO: 555740 - DNA, 74 bp, Homo sapiens
ccgtttaacctttattgtggtggagtccaccccgctgtggtcagcccaaggctgccccctcggtcactctgttc

SEQ ID NO: 555741 - DNA, 83 bp, Homo sapiens
caggggcctcccgcgccccccgggacccccacgccgccgccagcacttgcacctcctgcgccgccgccccccatccaaggata

SEQ ID NO: 555742 - DNA, 100 bp, Homo sapiens
agttcgccgatgggaaacccggagaccaaatccttgaaaacctcggatcaattctcagctggtggcacaacaagtggcacaacagtatgccaccccacca

SEQ ID NO: 555743 - DNA, 75 bp, Homo sapiens
caaacaagacaacttgagctgaaagcgaaaaactatgctgaccagagtgactgaaaactcctgaggcatttcctg

SEQ ID NO: 555744 - DNA, 99 bp, Homo sapiens
aaggagccaccgcccccgcccgaccatggccgagggtgcgagacaagaagcttctcaatgacctgaatggagccgtggaggatgcaaagacggcccggc

SEQ ID NO: 555745 - DNA, 73 bp, Homo sapiens
cacacctgccaagagagcccaggccgagttccccacctgcgattgcgtcggctctttattgagaaactaccaa

SEQ ID NO: 555746 - DNA, 90 bp, Homo sapiens
agcctctccagcctcccgcgaagggccgttgctccagggagaactgcaaatatcttcatccacccccacatttaaaaacgcagttggaga

SEQ ID NO: 555747 - DNA, 50 bp, Homo sapiens
cccatcactgcttccctcagccataacagagattcagttgtggaaattct

SEQ ID NO: 555748 - DNA, 100 bp, Homo sapiens
tcgaagatatggtgagacttgggaaggattctggtctgaaaccatttgaacagcgcaagacgttcaaagaacactttagaaagaacacattccatgaaag

SEQ ID NO: 555749 - DNA, 101 bp, Homo sapiens
atcgagaggatctggtgtaccaggcgaagctggccgagcaggctgagcgatacgacggccctgggaggagcggggacactgaggacctctctccaaattgg

SEQ ID NO: 555750 - DNA, 83 bp, Homo sapiens
caggaacttattatgaccccaatacccagcaaaagcgaaagcttcggatctacatttccaatacgttcagtcccagcaaggcg

SEQ ID NO: 555751 - DNA, 113 bp, Homo sapiens
ctgcggcagacggcgacagtggcggcggcgccatggcagggcttgcagcaaagaatggctcaagaagtactgacacatttaaaggagcatcctgatgcttggacaagagtcga

SEQ ID NO: 555752 - DNA, 75 bp, Homo sapiens
gcaacgtaaaatccttggaaaaggttggttgaatctggcgatgtggaacccatggatatggagggctgactatat

SEQ ID NO: 555753 - DNA, 90 bp, Homo sapiens
atgaaataacctttgacaagattttcaatcagaaaattgttgtatcacggactgattcaccgagcccaaccgtactcaactcacatattt

SEQ ID NO: 555754 - DNA, 95 bp, Homo sapiens
ttatcaaaaaactgccccttaccacgagactacaaatccctccaggatatcattgccatcctgggtatggatgaactttctgaggaagacaagtt

SEQ ID NO: 555755 - DNA, 82 bp, Homo sapiens
ggacgccgcggggtctccgggacagatcttcgtgaagactctgactggtaagaccatcaccctcgaggttgagcccagtgac

SEQ ID NO: 555756 - DNA, 100 bp, Homo sapiens
atttgtttcccttagccagcccgagcaagtaaagattggagggccaaacatgtgggctattacctctgaagaacgtactaagcatgacaggcagtttgat

SEQ ID NO: 555757 - DNA, 50 bp, Homo sapiens
caaacaggagctggagcagctcaaagagggaggagtctgctactagtctt

SEQ ID NO: 555758 - DNA, 74 bp, Homo sapiens
aaatgcttatcacatggaagcagaggtacctggcaaagaattctgcaactttgttcagtgccagcgattatgaa

SEQ ID NO: 555759 - DNA, 100 bp, Homo sapiens
gtgattgactttgatgagaacactgctctggatgatgcagaagaggagtcctttaggaagcatgtaaaagtcacatctgaggctctgggtcatgctggca

SEQ ID NO: 555760 - DNA, 98 bp, Homo sapiens
aaacacagaaggaaatacccagactgttactacaacctcgggcgtctgtttaattggttggggtcagataagaagaggagtgacaatcaagccaacag

SEQ ID NO: 555761 - DNA, 100 bp, Homo sapiens
ctcctgggaggcgaggacggtctctgccagtataaatgcagtgacggtacagcagggaagaactggaaactcagagaaagaaactgcccttccatctaca

SEQ ID NO: 555762 - DNA, 154 bp, Homo sapiens
gtccggagttggcggggccctgcgccggaggaggaggaccaggcccgcgggctcagctctcgccgccagcgggccgcagaggctgacgcttgtgcttgccctggcaaccctgatagctgcctttgggtcatccttccagtatgggtacaacgtg

SEQ ID NO: 555763 - DNA, 75 bp, Homo sapiens
ttgccatgaaatatggaaacgactcctcggccgagctgagtgagcgggctgacgcacgaggcacacaggaaggag

SEQ ID NO: 555764 - DNA, 90 bp, Homo sapiens
ggggctgccgcaggcccagctgctctggcgcaagagagtgactcagacatctcctctacaagtacctaacccatcctggatgcaccacca

SEQ ID NO: 555765 - DNA, 96 bp, Homo sapiens
ttgtgaagatcattaatgaagtaaagcccacagagatctacaaccttggagcccagagccacgtcaaagattcatcaaacgtgaggaagcctttgg

SEQ ID NO: 555766 - DNA, 87 bp, Homo sapiens
gaggaggacgaggactacgtgccgtcggatgatcaagcggtgctgattcacgagagtggaagcctccagagcttggggctttctggc

SEQ ID NO: 555767 - DNA, 83 bp, Homo sapiens
gtgctgccctcgcactggcgctgcaacaagacgctgcccgtcgccttcaagggtctcagcttcttggaagtgaaagaccagct

SEQ ID NO: 555768 - DNA, 75 bp, Homo sapiens
ctctgcccaaagaaagaaggagggttattttgatgaagacagtatggatgaatttatagcctcagattctgatga

SEQ ID NO: 555769 - DNA, 82 bp, Homo sapiens
ctggcccaggaggatgggcccgttgtggtgggcgtggacttcactggctccaatggagacccctcctcacctgactccctac

SEQ ID NO: 555770 - DNA, 90 bp, Homo sapiens
gccgagcccgacctcgggcgccccgccggtcacctccgcgcggacaccagatgcctggagttactgtaaaagacgtgaaccagcaggagt

SEQ ID NO: 555771 - DNA, 100 bp, Homo sapiens
tgggccggacatctactgggtcagcttcatcctcggcggcggtggccgctagctccaaggaagactgcagttcgtcatgaatcatgcagtggtctctata

SEQ ID NO: 555772 - DNA, 100 bp, Homo sapiens
agacactggtcatccgaaatcaacttggaaagtcaaattacgtgtggcatatggactcctgacgaccaacaggggacggcaaaacagaacagaaaggcgg

SEQ ID NO: 555773 - DNA, 98 bp, Homo sapiens
cgacaggccgggtccagggactgcaacccagcgagggacgcgggcagccatggccgaagcggcgcctgcccggatgacgagttccagttattacagag

SEQ ID NO: 555774 - DNA, 101 bp, Homo sapiens
ccggcgtgccccaccatgtcagacgcagccgtagacaccagctccgaaatcaccaccaaggttggtgttcgaggaagagacattgttgttcttggtgtgga

SEQ ID NO: 555775 - DNA, 80 bp, Homo sapiens
cagatgagcccaaggttcttaatgaatgtctaaggttcacaatctatacagttgcataaaagtagcagaagactttgtat

SEQ ID NO: 555776 - DNA, 49 bp, Homo sapiens
aggaatcacgctcggaaacaatggctgcatgtttgagcctgaagggaat

SEQ ID NO: 555777 - DNA, 98 bp, Homo sapiens
ttgggcgccccggacgagagctccgtgcgggtggctgtcagatgcagatggaaacctgtgtcgaagtaaccaactgttgcaagtcatgctgaccatgc

SEQ ID NO: 555778 - DNA, 82 bp, Homo sapiens
ctgacatggaggatgatttcatgtgcgatgatgaggaggactacgacctggttttaaaatcaaagatgggaaaatcggagaa

SEQ ID NO: 555779 - DNA, 90 bp, Homo sapiens
cagattcgcagtggtcgcttcttctccttggtgacttcaggtggaacattcattggcattggacggaaaacaccagattgccaagggaac

SEQ ID NO: 555780 - DNA, 83 bp, Homo sapiens
attctttcagatggagaaggaaaaaatggaaccatcgagttgatggaacccgaatggaggatctttggttccataccaatgca

SEQ ID NO: 555781 - DNA, 75 bp, Homo sapiens
gccccgtgcagcctggggctccttatggcaaccctaagaacatggcctacacggagaacagccccagcccaggtg

SEQ ID NO: 555782 - DNA, 73 bp, Homo sapiens
ccaggtagcggtacatggccacaagcggaggggaggtggtgatgatggtgatgaggtgccacaaatagatgct

SEQ ID NO: 555783 - DNA, 101 bp, Homo sapiens
gagaggctttgcagttcccacctcgggaagctccggcagaacccaggcgagggacagctccggacaggctgacaaacgggctcatcataatgcactggaac

SEQ ID NO: 555784 - DNA, 51 bp, Homo sapiens
accggggcggtccgttgccaaagccagtttattggtagtttgaaacagctc

SEQ ID NO: 555785 - DNA, 79 bp, Homo sapiens
ccacgctgctgatcgtcctgctgctgatggtgtgcgtaggtggcaagtgggagaaaccatcagaaattttggaaatcaa

SEQ ID NO: 555786 - DNA, 100 bp, Homo sapiens
cttggactgagtcctgcaggacacaggctgctccagttacagcaccacccggccgctgcacccggctgctcccaggccccccagccggcccctgccccgt

SEQ ID NO: 555787 - DNA, 95 bp, Homo sapiens
gcccctttgggctgcggccggttctaccagactgtcctgcctggctgtgggcctggccctgctgaagcgctgcgtgctcatgtacgggtccctgc

SEQ ID NO: 555788 - DNA, 100 bp, Homo sapiens
ttcacacacattgtcaagctctgcaaacaaggctgtactggctcaagttggtatgtgagctatgaaagaagcacaacattctgaaattttttggttattg

SEQ ID NO: 555789 - DNA, 83 bp, Homo sapiens
cattagcctggctcaatatctaatcaatgtcagagcagtcattatggcgaaccttggctgctggatgctggttctctttgtgg

SEQ ID NO: 555790 - DNA, 100 bp, Homo sapiens
cacacactatggcgctgaaacggattaataaggtgttgacagctcttctaccacaagcagtgcttctccaatgcccaacagttatgatgccctggaagga

SEQ ID NO: 555791 - DNA, 90 bp, Homo sapiens
ggatctgatgaaaattctcttcattctcttggactgaacttaaatactgatagtcctaagattttccaaaagaccaagtgcagcatctgt

SEQ ID NO: 555792 - DNA, 100 bp, Homo sapiens
tctggagtcccaactcatgaaatttagagttcaagcaagcaagatacgagagcttttagcagagaaggatgacatggaagcttaccggacccagaactgc

SEQ ID NO: 555793 - DNA, 99 bp, Homo sapiens
gccctccccgcctctgcgtctttgctcccggagcgcttgaaggagctgcgggcatttcgtgtcctgtctgaaccaattggtccagaatccccaagctct

SEQ ID NO: 555794 - DNA, 75 bp, Homo sapiens
aaggggttcctggtcatacaccagtactaccaaggacagcttttttcctgcaagtgagaaggcaaccaaagtgca

SEQ ID NO: 555795 - DNA, 75 bp, Homo sapiens
tgaccgctcctccaactaaccagtaacagtgatgatgtcaaatgcttttgctgtgatggtggactcaggtgttgg

SEQ ID NO: 555796 - DNA, 52 bp, Homo sapiens
gagaaggtggaaatcagagagaggcactggtgtggttacaagtgttccttcc

SEQ ID NO: 555797 - DNA, 100 bp, Homo sapiens
ctcatcctgccttgtgctcacagcttttgtcagaagtgtattgataaatggggtagagaagatgaagtccatgtcacagcttgcagttttgtcaagacgg

SEQ ID NO: 555798 - DNA, 100 bp, Homo sapiens
catcgtggtggaaaacctggctggcctcaagtacagggtcatcaagggcatgtggcgggcgtgtttgtgtgcctgctggagtacccccgggggaagagga

SEQ ID NO: 555799 - DNA, 100 bp, Homo sapiens
tgaaggacgtggccactgtggccttctgcgacgcgcagtccacgcaggagatccatgagaagatacagaaggtggtcatggcactaggagactacatggg

SEQ ID NO: 555800 - DNA, 75 bp, Homo sapiens
gttttttgtggcttccttcgttattggagccaggcctacaccccagttcaaatctgaacatcaatgatgtactag

SEQ ID NO: 555801 - DNA, 100 bp, Homo sapiens
cccctgctgcggcggctgcagtccagcctgcagtctcagcgaagctcacagcagagtccggcagcgtcttctcttgagggagcaatttggagaagagctg

SEQ ID NO: 555802 - DNA, 75 bp, Homo sapiens
gcagctactgactctgtttcagccatcttcgataaaggcaaaaaggtactgtctgatgagcgtgaaaggttgttt

SEQ ID NO: 555803 - DNA, 100 bp, Homo sapiens
gcggcggcctgggctgctgactgcgcacttggaatagtagcaggcggcggcggcggaacgccaggcaggtgtcatggagaaactccagctgggcccagag

SEQ ID NO: 555804 - DNA, 80 bp, Homo sapiens
cctgcccccaagaaggaagtcatcatgggccggcctggaacagcattttgaaagcgaagcagaagccgtagaatcagcgg

SEQ ID NO: 555805 - DNA, 82 bp, Homo sapiens
ttgggacccaccgctgccctcagctccgagtccagggcgaggccaccagcttgggctccccacggagggcagcaagtgggac

SEQ ID NO: 555806 - DNA, 100 bp, Homo sapiens
caaagatgtaatgctggagaactacagcaacctcacttcactgggatcccttattctgagagcataaaagaaatgctaacgacatttggaactgctacct

SEQ ID NO: 555807 - DNA, 100 bp, Homo sapiens
ctacgatgaacttcagagcagagtgtccaatcttgaagaaaggctccgtgcatgcatgcaaaaactaggcatgtcgggccccaggcctgtggtgctgagc

SEQ ID NO: 555808 - DNA, 80 bp, Homo sapiens
agaagcgagaaaagatgaaacggaccctaaataagtctgagacgaagtcctcgaatcaagcagttgtcatttagcaggac

SEQ ID NO: 555809 - DNA, 75 bp, Homo sapiens
gtggatcgctgtgatcgtcacttggttctgcaagaaagtgccagcaaccttggtctgaagcaactgccagaaccc

SEQ ID NO: 555810 - DNA, 100 bp, Homo sapiens
gcttgggagaggtgggctccaccctgtacactaaagctaatcttatcctttgtcgcagagactatctgagataaaccgagaaaactggtgtacaatagag

SEQ ID NO: 555811 - DNA, 122 bp, Homo sapiens
gcacagggcaaggcggcggacggctgcgtcgcccgaggcgaggaggagcgctggcgatgagctttgatccaaaccttctccacaacaatggacataatgggtaccctaatggtacttcagca

SEQ ID NO: 555812 - DNA, 82 bp, Homo sapiens
actcagccttcctgcataccctggaccagcagaaacctagagtggtcagcccaaggccaaccccactgtcactctgttcccg

SEQ ID NO: 555813 - DNA, 88 bp, Homo sapiens
taatcatggacacagccccaggatgtgcagggtgaaaggtgtagcagtcactcggcctacacccacagcatcgaccttgtgaacccag

SEQ ID NO: 555814 - DNA, 116 bp, Homo sapiens
gtcttccccaggcctgcgtccgagtctccgccgctgcgggcccgctccgacgcggaaggttatcaatactctggctgaccatcatcatcgtgggactgactttggtggaagtcctt

SEQ ID NO: 555815 - DNA, 51 bp, Homo sapiens
ggaagatgtatttgtacaccagaacaccaatcagggtcttcaggcctggaa

SEQ ID NO: 555816 - DNA, 74 bp, Homo sapiens
gaggaggaggcggaggtccaagcggaaagtgaaggaagcccatcccccagaattgagctgctgcataatattga

SEQ ID NO: 555817 - DNA, 98 bp, Homo sapiens
cgacagggccgattccggagtggctttatcttcaagccaggatgaagggagactgggcaagactcttacgccccacactgcaatttggtcttgttgcc

SEQ ID NO: 555818 - DNA, 100 bp, Homo sapiens
ggaccgcgtgcctgagtaccctgcccagacgttcacatcggatgcggcgacaccaccaccaccaccaacaccaccaccagcatcaccaccacaaatcccg

SEQ ID NO: 555819 - DNA, 100 bp, Homo sapiens
gtgaggaccatgcaagcccgaggcttcggctcggatcagtgacttctgacagctctctccatggaaggaggcggcggccgcgatgagccttcagcctgcc

SEQ ID NO: 555820 - DNA, 50 bp, Homo sapiens
ggagcaattgctggtcctgagcctgaggctgttgaagctcaaatccgaag

SEQ ID NO: 555821 - DNA, 75 bp, Homo sapiens
ggaagaacttcttcagaattagaaaggagctgcttcccaataaggaaacacaaacggggattcagcgtccgatcc

SEQ ID NO: 555822 - DNA, 90 bp, Homo sapiens
caagaatgtgcttaagaagttcatctgcatatctgaccttcgggcccaaggagcgctgacccagctgatccagctctatcatcgcttcca

SEQ ID NO: 555823 - DNA, 75 bp, Homo sapiens
aatggccgattacttacgttgcttaattattcagagggatctcttgagatttcagaagaaagtggtagcttcctt

SEQ ID NO: 555824 - DNA, 75 bp, Homo sapiens
gccaggaggaggaggaggtggtgcgcaaggtggaagcagggaaaggcctggagatgaggaagctggttctctcgg

SEQ ID NO: 555825 - DNA, 88 bp, Homo sapiens
gaggaattacaacttcattttacttatgaagaaaaatctcctggcaattacatttcaccagtgatcattaaagaatgggcagcttaca

SEQ ID NO: 555826 - DNA, 75 bp, Homo sapiens
actattctactgctggaagctcaagtgcttggatttacactgggcaacgtggttggaatgtatctggctcagaac

SEQ ID NO: 555827 - DNA, 75 bp, Homo sapiens
tccccgcccccgagcagccgaggcagtatttggcagtcgtattcagagataaacccctggagctatgggatgtta

SEQ ID NO: 555828 - DNA, 136 bp, Homo sapiens
cgccgggccctcttcgacagctacacaaatctggaacgggtggccgattactgcgagaacaactacatacagttgattatggaagattcccacaagagtaccacgtcagagacagcacctcaacctggttcagcag

SEQ ID NO: 555829 - DNA, 97 bp, Homo sapiens
gagaagctcagggagcaggtggtgaagcgtgaggagctcttcatcgtcagcaagcacgtgaagaacagtaagcacagcaacaagtacgaaggctggc

SEQ ID NO: 555830 - DNA, 75 bp, Homo sapiens
caggacatcactttagatgatgttgctgatagtccaactccaccgccaccacctccaccagatgacattcccatg

SEQ ID NO: 555831 - DNA, 101 bp, Homo sapiens
gacgagaaagaaataagattgcagctgcaaagtgccgaaacaagaagaaggagaagacggagtgcctgcagaaagccccttcagcacgccggtgcccttcc

SEQ ID NO: 555832 - DNA, 103 bp, Homo sapiens
ggaggcgagctagccgggagttacaccgccaccgccagccccaggtacccagtttgttaagccgacagttggagttccacaagtgttctcccagatgacccct

SEQ ID NO: 555833 - DNA, 100 bp, Homo sapiens
tactgcaccccgtcccacatccctttctccaacaggaaggcaacagcccccaggggagcaaccagggagtcaaaatcacaccggaccagcagaagaggag

SEQ ID NO: 555834 - DNA, 100 bp, Homo sapiens
ccacgactgcctgggacctggccaagggctccacacaccaagaccaaggttgcaaaggagtttggcttccaaaataatggcttctcggtttacatcaata

SEQ ID NO: 555835 - DNA, 123 bp, Homo sapiens
cttttccactgtatttggagaagaatggaaagagaagactgatagagacttcgttaaggaagggatgagaccatgcagcctgcgaaaccatcctttcttgaatattttgaacaaaaagaaaag

SEQ ID NO: 555836 - DNA, 100 bp, Homo sapiens
ccaatgtcagagaaatctttgacaagggacgtccagatcggtgacatcgtcacagtgggcgagtgccggcctctgagcaagacagtgcgcttcaacgtgc

SEQ ID NO: 555837 - DNA, 98 bp, Homo sapiens
gtcaaaaattttcccagcagtactctactattgtaaagcttatgtccctgatgccaaaaatgcacctactctttcctctaactctggtgaggtcattc

SEQ ID NO: 555838 - DNA, 75 bp, Homo sapiens
gagcttctcagaagacagagggttttcttttgagggcatcttctctgcattcagtttcatccaagtcattccggg

SEQ ID NO: 555839 - DNA, 90 bp, Homo sapiens
gcgtgctgggaggagactggagcccggttaggaagaatggagttggcgactcgctaccagtaatagctcttcaagtctgcaataaaaaat

SEQ ID NO: 555840 - DNA, 75 bp, Homo sapiens
agagctcatctggaattttgccgatttcatgactaaccagtgagcttgaagaaatccgcaaatgtgggatgaaaa

SEQ ID NO: 555841 - DNA, 100 bp, Homo sapiens
ggcgcagccatgatcacctcggccggtgaatgacgtgccattccagaacctgacacgggaggaggcagtgcagttcctgctggggctgccaccaggcgag

SEQ ID NO: 555842 - DNA, 75 bp, Homo sapiens
gaacccgagctatagagaaaggagatgaggtttctgcataaagaccaactcctcggaagggaaggttttcatcaa

SEQ ID NO: 555843 - DNA, 74 bp, Homo sapiens
tggctctgtcggtgtaaaaaagttggtcaaagaaaaagtgatgtatgaaaaagaggcaaaacaacaagaagaaa

SEQ ID NO: 555844 - DNA, 100 bp, Homo sapiens
aacttgaaaagacctaccggaatgatcctcttcaagatctcttgttcttccccagtgatgacttttcaaagtaaatggtctcaaccagtgaatggaaaaa

SEQ ID NO: 555845 - DNA, 90 bp, Homo sapiens
gtaagttgatccatccagatgaggatatatccctgattgataggttatatgattggaaaaagagtcctgactctgatgtggctgctactt

SEQ ID NO: 555846 - DNA, 76 bp, Homo sapiens
cctgattctacccaagtacatatgatttcagctgcaatggcaggtggataagattgtggaccagctgcagcagtta

SEQ ID NO: 555847 - DNA, 75 bp, Homo sapiens
gcatcaagaaaatctccatcgaagggaacatcggtaattggatcatgctgatctataaagggggtgatgaatatg

SEQ ID NO: 555848 - DNA, 50 bp, Homo sapiens
tcctcccgtccttctcatccttctccaatatcagatggaaatgatgcgga

SEQ ID NO: 555849 - DNA, 75 bp, Homo sapiens
cgcgaggctgcccggagtccggataagccgggcgggagcccctcggccaggccatctggctgctgtgcacaggcg

SEQ ID NO: 555850 - DNA, 83 bp, Homo sapiens
tggtgcatgcgtcgtcggcctctgggcagcagaatagcctaacatggcagaccagagacagcgctcactgtctacctctgggg

SEQ ID NO: 555851 - DNA, 83 bp, Homo sapiens
ctgcctttacttaaacatctacgtgcccacggaagatgacaatgcagatcttcgtgaagactctgactggtaagaccatcacc

SEQ ID NO: 555852 - DNA, 100 bp, Homo sapiens
gttcgacagcgtcaggagcaccacagccctggccctgcagcagatctgtgacttcctccgcggagccacagtccatagaatcctcggccagcaggtcccc

SEQ ID NO: 555853 - DNA, 75 bp, Homo sapiens
ccggagcaggcgaggtggccggagccgtgtggaccaggaggagcgctgcaaaacccatttatggcggttggctgc

SEQ ID NO: 555854 - DNA, 75 bp, Homo sapiens
gtcattgcaggaagtggatgagttccacctcattttagagtatcaagcagcacagtttaatggcaacgagaagcg

SEQ ID NO: 555855 - DNA, 100 bp, Homo sapiens
aagctgctctgcagagacaagatccgcctgaacaacgccatctggagggcctggtatatccagtctgcagtacagcaatggcgatcagaaggtagaacag

SEQ ID NO: 555856 - DNA, 100 bp, Homo sapiens
gaaagaacacgtcagcgaaacccatctgatcgacatgttattatacggctacgtcaccaactccaaggtgaagtttgtcatggtggtagattcctccaac

SEQ ID NO: 555857 - DNA, 100 bp, Homo sapiens
agaaaatctccctgctccgcagcgacatcaccaagctggaggtggacgccatcgtcaacgccggttcttcacacacccccattcggcgtagtacccagag

SEQ ID NO: 555858 - DNA, 90 bp, Homo sapiens
gctggagattccacccaaatcctcttctccaagaaggcaatggtggcttgctatccgggaaatggaacaggttatgttcgccacgtggac

SEQ ID NO: 555859 - DNA, 98 bp, Homo sapiens
tctaagcaggttcatgccagcccagaacagagaatcagaatggagctggtttgtcaaaatccaaaggaagccgaattggatttgatagcacacagtgg

SEQ ID NO: 555860 - DNA, 100 bp, Homo sapiens
ctgcggaacaggacgccctctgatttgatattcactgatggactccaaagaatcattaactcctggtagagaagaaaaccccagcagtgtgcttgctcag

SEQ ID NO: 555861 - DNA, 100 bp, Homo sapiens
gaccaaatttcctgctgaacagtattacaggaaaatcctgccttgcttcgttgggcctatgcaagaacaataaatgtctatcctaatttcagacccactc

SEQ ID NO: 555862 - DNA, 100 bp, Homo sapiens
cgaggagatcgccattatccccagcaaaaagctccgcaacaagatagcaggatcgataaagaattggctagtggtgaatactttttgaaggcaaatcaga

SEQ ID NO: 555863 - DNA, 100 bp, Homo sapiens
cctccagaccagcctgcggtcccccacccgcctcccagcactcccatcaagctggaggaagtgttctaagaacggaagcatctgggctggatggaattta

SEQ ID NO: 555864 - DNA, 83 bp, Homo sapiens
ctgaagcttttcctgtcctagttatctaccttgcctgctcctatgccacagtgtacctgatctacctgaaatttaaggcaacc

SEQ ID NO: 555865 - DNA, 98 bp, Homo sapiens
ataatgtggaacctggatgaatgtagagagaaagtacttcaaggttttaaaatcaaagatgggaaaatcggagaaaattgcccttccccatggccagc

SEQ ID NO: 555866 - DNA, 100 bp, Homo sapiens
ctacatcctgggcgtcttcccaggctgtcatataactcctgagaatagtggttcttaactctgaccttgctaagcagtactctgacagactagaatgctg

SEQ ID NO: 555867 - DNA, 90 bp, Homo sapiens
ttcctgataacgaggctgtggagcagcacaggcagcctgcttctgcaaagtggtacgatcgaagggactatgtcttcattgaattttgtg

SEQ ID NO: 555868 - DNA, 80 bp, Homo sapiens
gaagatggacgaggtcctgtacagcatcgccgagaagggcggcaaggagtacctgatgcgggcccacttcggcctgccta

SEQ ID NO: 555869 - DNA, 90 bp, Homo sapiens
attctgatgaagatgatgatgaattgggtagagagaccaaagatcttgatgagatatctccggagcatttggataatgtgacagttggaa

SEQ ID NO: 555870 - DNA, 82 bp, Homo sapiens
gaacgagacttttctcagatgttggatatttgcttggaaaaacgtgtgggtacgaccttgttcagcttcttaggactctgca

SEQ ID NO: 555871 - DNA, 100 bp, Homo sapiens
gacagatgtcaacctggaaaatggcctggaacccgctgaaacccacagacatatctgaagagatggattaagaatgctttggattaaggattgtggagca

SEQ ID NO: 555872 - DNA, 100 bp, Homo sapiens
gataattcatgacagaagggagtttgctaaatttgaaaaggagaaaatgaatgccaaatgggacacgagcagacaaaaggatcggcaaaaggaaatggac

SEQ ID NO: 555873 - DNA, 100 bp, Homo sapiens
ttcttttgacctgagggctgctattgtatatcacactaaagttattacaagaactgtgtacagtatttaatgtagatttaccatgccgtgtgaagtcttc

SEQ ID NO: 555874 - DNA, 100 bp, Homo sapiens
gtatgtccgctatccagaacctccactctttcggagagctattgaaattgtagagtcagatgtcaaaagccagactattctcaaaccactgtctgaatgt

SEQ ID NO: 555875 - DNA, 97 bp, Homo sapiens
ggggaaactgggaacaacctcaaaaccaaaaccagacacagcacaagcagcggccacaggtggcgaaattcacatactcactgtctgtggcaaatgg

SEQ ID NO: 555876 - DNA, 100 bp, Homo sapiens
tgaccacaacaagcaagcatgcagcttactgcttgaaagtcgtccagcatgctctgcccaccccacgccgaggtgcactgaccatgagcctcaactcctc

SEQ ID NO: 555877 - DNA, 97 bp, Homo sapiens
gaccttgaagacgacttcgaccctgcccagcacgaccagctcatgcaggacagtcattttgtttactcattcagccctgttgcaggtcccaataaac

SEQ ID NO: 555878 - DNA, 90 bp, Homo sapiens
ttaggaagtatggattcactaacttccagtgaagatgaagattatggaagagattcgggccctcccactaagaaaattcgatcatctccc

SEQ ID NO: 555879 - DNA, 82 bp, Homo sapiens
cagcattatccaacggctgctggaagcaaaatgatgcttcaacacccaggccaggtctctgcctcggaagtgagtgcttctg

SEQ ID NO: 555880 - DNA, 82 bp, Homo sapiens
cccggacggcctgcagagcgctgccatcatgagtcccagctatctgacttcatgtgaaagatggctaatgcagaagtgagtg

SEQ ID NO: 555881 - DNA, 100 bp, Homo sapiens
gagacttccttgcttctttggagaatgatatcaaaccaattaccagagactgatgactgtggcggagacgattacagctctcatgtttcctttccagtgg

SEQ ID NO: 555882 - DNA, 50 bp, Homo sapiens
gctgcggaacaggacgccctctgataccaccgctgaaacttcacttctac

SEQ ID NO: 555883 - DNA, 50 bp, Homo sapiens
gagaaggcactcaagtttatgggagttgaccacatttggccatttcccag

SEQ ID NO: 555884 - DNA, 100 bp, Homo sapiens
ctcggaggcgctccctcagaaggaagctccttgggagaggcgtgggcccaggtgaagaagagcctggcggacgaagcagaagttcacctcaagttctctg

SEQ ID NO: 555885 - DNA, 100 bp, Homo sapiens
gacacagccaagtttaaagatttttatcagtttaccttcaccttcgctaagaacccagggcagaaaggtttaggtttacccaaggtccagcctagcccct

SEQ ID NO: 555886 - DNA, 98 bp, Homo sapiens
tagaaacgtgttcgctgcccagaagaagggaaggcgcgagtgaggaaaggaggtactgtagccctgggcatttccagctcgagagttccttcgaaaga

SEQ ID NO: 555887 - DNA, 83 bp, Homo sapiens
gctgcttatggcggcgctggagagggggcgctgagctgttggggctctattccgttcgctggttcgccacctcaggggaacga

SEQ ID NO: 555888 - DNA, 100 bp, Homo sapiens
ccaaatcccacagaggcatctgagcagagcatcctggccagaacaagccaaggagccaagacgagagggacacacggacaaacaacagacagaagacgta

SEQ ID NO: 555889 - DNA, 75 bp, Homo sapiens
attccacatgtggagaggaagatcttggacttatttcagcttaataaggaataagtcttgactgggatgaaaaga

SEQ ID NO: 555890 - DNA, 100 bp, Homo sapiens
cttctttttcccacagccaatcccactaatcctgatgaggctgacaaagttgggctgccagttttgagacgctgcagtgtgagggacctgtctgcactga

SEQ ID NO: 555891 - DNA, 98 bp, Homo sapiens
cagcgatggaagaggatcaggagctggagaggtggagtaaccttactgagagctgcagccaaaaaccacgctcgagtgacagtggtgtgtgaaccaga

SEQ ID NO: 555892 - DNA, 50 bp, Homo sapiens
tcggaaaccggtagcgcttgcagcatggactttctgaagaccttttcccc

SEQ ID NO: 555893 - DNA, 75 bp, Homo sapiens
acctcccggcccaagatgtccctggtgatgcctgccatggcccccaatgaacctagaagtcggaatccggaagaa

SEQ ID NO: 555894 - DNA, 82 bp, Homo sapiens
gacaaaactgtatttaccttgataagccaatggacacgtcagtgttatctgaagaaggaggagagccttttcagaagaaact

SEQ ID NO: 555895 - DNA, 100 bp, Homo sapiens
agactcaggacggacaagcacagtcttcggaaggttaagatcaatctacaaggagatatagtagatcgtggaagcactaatctgggagtgaatcaggccg

SEQ ID NO: 555896 - DNA, 50 bp, Homo sapiens
taggtcccctcaatggggacacagctttagcgtcacctccctcactgggc

SEQ ID NO: 555897 - DNA, 100 bp, Homo sapiens
gaaactgttgaattagacccgtttcctatagatgagaaaccatacaagctgtgatgaacagactagccactttgcattgactggaaacaatggcatttac

SEQ ID NO: 555898 - DNA, 100 bp, Homo sapiens
agaacaatcttgaatcatgaagctactaaccagagccggctctttctcgattctctaaccatggcacaggtagagaaacgtggaggtttgctccggaaat

SEQ ID NO: 555899 - DNA, 74 bp, Homo sapiens
gtgaggatggatctttataagagaggaattccccctgctagtgccggtggtggtgtgcacattgagccccggta

SEQ ID NO: 555900 - DNA, 100 bp, Homo sapiens
gttcagcgttctgctgaatcagcagcttaactctggctactatgtatctgggagctcctcaggcttccaggggggccagatcacactcagcatgcagaag

SEQ ID NO: 555901 - DNA, 82 bp, Homo sapiens
cagcccccggccgcagcgcaggcagcccagcagggcgtgatggtgggcatgggtcagaaggattcctatgtgggcgacgagg

SEQ ID NO: 555902 - DNA, 100 bp, Homo sapiens
ttttttacaaagtgtgttgcattttccaaaaggaggagatgttaaagtaacccatcttgcaggacgacattgaagattggtcttctgttgatctaagatg

SEQ ID NO: 555903 - DNA, 100 bp, Homo sapiens
gaagagatggtggattctcactgagttttgactagcggaagaaaagtttttggctttcacccccaaccagtgaccaaagacttgaccactcaaagtccag

SEQ ID NO: 555904 - DNA, 98 bp, Homo sapiens
ccagaggagagttctccaaacatgatcgtttactgcaaaccgatggatgcactgactggtctatcgatatcaagaaatatcaagttttggtgggagag

SEQ ID NO: 555905 - DNA, 100 bp, Homo sapiens
cgcggagcggacgcgcgtggcgctgcccgggcacagtcttttgctgagcgcctgcgcctgggaattgcagtgattcatggagaggcgcaggatgccgagt

SEQ ID NO: 555906 - DNA, 100 bp, Homo sapiens
agtgggggtgtgcaaacccgagagaactggggagccatggacaactgtttggcggccgcagcgctgaatggggtggaccgacgttccctgcagcgttcag

SEQ ID NO: 555907 - DNA, 50 bp, Homo sapiens
agagaagactgatagagacttcgttaagaaattgtgcatcttcgacagtt

SEQ ID NO: 555908 - DNA, 100 bp, Homo sapiens
gaactggcgaggtagttccttcgcggtggagagaccttcacggcatggtgcaactcccacctgcggaaggcaggcacacagatcgagaacattgatgagg

SEQ ID NO: 555909 - DNA, 100 bp, Homo sapiens
cgatcgtcattgcaggaatgcttggggctgtgatctcaggaatctggctggataggtccaaaacctacaagtggggtggaagacaacccgtgagtattac

SEQ ID NO: 555910 - DNA, 75 bp, Homo sapiens
agctcaaccatctgaggaaggaccaggaaggaaaggccatgaagtacttgtcatacctgctgtaccctctctgtg

SEQ ID NO: 555911 - DNA, 100 bp, Homo sapiens
ctattcatgtcattgaaaggcgctgcaagctggatgtagatgcacccagactgctgaagaaggatgataaggatgccttctatgtggcagacctgggaga

SEQ ID NO: 555912 - DNA, 100 bp, Homo sapiens
ctgaaccttcacctagccccaggattacaaggaaaagcaccaggcaaaccaccatcacatctcattttgcaaaggggccttggacaagattcgctatgag

SEQ ID NO: 555913 - DNA, 90 bp, Homo sapiens
catgtccgcccaggcgcagatgcgggccctgctggaccagctcatgggcacggctcgggacgatattgatgatgttaagaagttcaaacc

SEQ ID NO: 555914 - DNA, 100 bp, Homo sapiens
cctcatcctcgaagaattacctgtacttgcgagatggttccttcatcagcttcaggccaagttcgaagtcactatgtagactggagaatgtggcgcgatg

SEQ ID NO: 555915 - DNA, 75 bp, Homo sapiens
gaaaaacaagctgaagaaatggcatcaggttacaggaggttccagtggcatcgggaagtgcattgctatcgagtg

SEQ ID NO: 555916 - DNA, 96 bp, Homo sapiens
gaagtttttgcacaattaacagatgaggctacagatgatgataaacggcgtgaattggttaaaacgtttggacctctggccgcaggaaatgggacc

SEQ ID NO: 555917 - DNA, 75 bp, Homo sapiens
aaaaggcctaagaattttggcattggtgaggacaccagtgatgaattctgaagcaaaagttctggtgcctgggat

SEQ ID NO: 555918 - DNA, 90 bp, Homo sapiens
cctggccagcctcctgggcgcgggatttcttacaatctccagctacaacctgcttagcttgctactcagtacgtgaattaggatgcaggc

SEQ ID NO: 555919 - DNA, 82 bp, Homo sapiens
ggcgccgagaggccgtgcgggacgcgggcgccaggaccggccgaacgcagaggattttttatcaagcagaaatgcatcgaac

SEQ ID NO: 555920 - DNA, 100 bp, Homo sapiens
tcctttgcaccctgcttggagacggacttgcttccgatatgaggccccaggattcctggcgaggtcctcctccccttttccagcagcaaaggtttgacag

SEQ ID NO: 555921 - DNA, 111 bp, Homo sapiens
gatcgatgtttcaatattggaagcgctttgatttacagcagctgcaggtaattcagtaccaaactgttcgatatgatatcctccccttatctcctgtgtcccggaatcggc

SEQ ID NO: 555922 - DNA, 111 bp, Homo sapiens
ccagccgcaccatgccgctcctaagcctgcacagccgcggcggcagcagcagtgagagacctcctgccccccgaggtctgcagtctcctgaacccagcagccatctacgcc

SEQ ID NO: 555923 - DNA, 137 bp, Homo sapiens
tgacctgttcctacaccttgcatcatgccagctttgtcaacgggatctgggagtgacactggtcttatatccagatggccaggctcagatgattcaccccaagcctgcagacttccggaatcctggcccagggcggc

SEQ ID NO: 555924 - DNA, 100 bp, Homo sapiens
ccgctcagacatctctattcccgcctctccgacccggtctcacttcgctcctgggcagctgcgcggagaactggggtgctggagaatctggtaaaagcac

SEQ ID NO: 555925 - DNA, 100 bp, Homo sapiens
tgcccacaacgcccttctcagcatgaagcatcctgaaagatccagggccaggttccccaggattggggagttgacacgaatgcagagtttgagtccagat

SEQ ID NO: 555926 - DNA, 90 bp, Homo sapiens
accaaatgtgagccagctgcggagcagtgcgtcagagtttcagttcctccaggagtgatccaaaatggagcgcgggtcctgagccgaggg

SEQ ID NO: 555927 - DNA, 100 bp, Homo sapiens
caaaattatcaacaccaaaaagctttctgctagggggtgttttgaatgctgtatcaaatgcctggggggcattccctatgcctctctgattgccaccatc

SEQ ID NO: 555928 - DNA, 75 bp, Homo sapiens
cgtggcttttgtgaagcacagcacggtactggagaacacggatgagtggttcgcctccagcacacagagctacat

SEQ ID NO: 555929 - DNA, 100 bp, Homo sapiens
gtcctgttccaccttcagagcgtcacggcgtacgccctcatggggaaaatctccccggtgactttcagttgtctgagggaagtcaaaagcatgcaagcct

SEQ ID NO: 555930 - DNA, 50 bp, Homo sapiens
tggccggcaaccagctgtaagcgagaagaaaaagtcagcactttttgaag

SEQ ID NO: 555931 - DNA, 101 bp, Homo sapiens
ggaaagacatggagattctcttaaaaagggtcttgttttgccacccaggctggagtgcagtaatataatcttggctcaccgcagcctcaacctcctgggct

SEQ ID NO: 555932 - DNA, 90 bp, Homo sapiens
gagatgagagaggacccaacatggggcagaagcttgaaatcctcattaaagatactctcggacctggagcagttggctaaagagcaagac

SEQ ID NO: 555933 - DNA, 75 bp, Homo sapiens
gccaagagccaggaccccctagaagtctagaaatgtgccctgcaggagtcattaaatcaaaacttcatgctgatc

SEQ ID NO: 555934 - DNA, 83 bp, Homo sapiens
tgtagacaccatcctagtcaaatgtgcagatgccaataggtctgaagaactgttgcccaattcaacagtgccagcattccaac

SEQ ID NO: 555935 - DNA, 75 bp, Homo sapiens
gagaggagggacatgattttgaactttgctgaacagaattccttcaagcagagcactgtccagagcttcctccag

SEQ ID NO: 555936 - DNA, 100 bp, Homo sapiens
aggagttaacctcctgcaaaaaaggcatcttgtccctacatcttctcttctgactttggctacatctcatagatgaatctgaatttagagacaaactcac

SEQ ID NO: 555937 - DNA, 90 bp, Homo sapiens
tcgccttactcactctctcgggattattgccgattgccagggtgctgaccgtgggagccgaccgagtggtgaactatgacaatgtagtgg

SEQ ID NO: 555938 - DNA, 87 bp, Homo sapiens
aatatatcgagttagtggcaatctggcaacaatacagaagttaagatttattgtcaaccaagctggttttcccatgggctatgcagc

SEQ ID NO: 555939 - DNA, 80 bp, Homo sapiens
agaaaaacagcctagactagacgcacatcaggaagacagattcctgaatttgacaacttgtacctggatatgaatggaat

SEQ ID NO: 555940 - DNA, 100 bp, Homo sapiens
ccctggctgatgccaaacagtttgcggcaatccaaaaagagcagctgaagcaacaatctggaattgaatgatctggcacgggaccctccagcacagtgtt

SEQ ID NO: 555941 - DNA, 74 bp, Homo sapiens
ggatgatgcattagattcctctagtattctctatgctagaaaggcatcattcttaacaaagaagttaaatattg

SEQ ID NO: 555942 - DNA, 83 bp, Homo sapiens
ccccaacaagaggaaagacacacctaccaagaagccagtcaagcggccaggtgagaagccctaccactgcaactgggacggct

SEQ ID NO: 555943 - DNA, 74 bp, Homo sapiens
cacgtgcggtgctcgtcgggagtgatcacctaccctacagatcacaaaatttgtccaggatagacatagagcta

SEQ ID NO: 555944 - DNA, 60 bp, Homo sapiens
gctggtctttcttggactattccagagaggttcaagaagacgtggaagctgcgggctctg

SEQ ID NO: 555945 - DNA, 83 bp, Homo sapiens
ccaagccagaagaaatcaacctgctcaccggggagtctgatacacaggcacgtggactccctttaatccagtgactgtcaggt

SEQ ID NO: 555946 - DNA, 100 bp, Homo sapiens
gagcagtctctggacaagatgaccacactccaggaatgccagtgcatcttttgcacagctctgaactagatgcagagcacgcccagaaggtcctggaaat

SEQ ID NO: 555947 - DNA, 50 bp, Homo sapiens
tggctgctcctcctcttcaccagtgtctgcagtaaaacccactgttgccc

SEQ ID NO: 555948 - DNA, 75 bp, Homo sapiens
caactactcccaggagtgtggcagctttctcctggctgagagcatcctcctgcccctgctcgagtcttgcagtgt

SEQ ID NO: 555949 - DNA, 90 bp, Homo sapiens
gactttcgacaaggaagtgaaacaccaatgcaggcaatggacctcatcatgaccgttgctgtacttacaatgaaaacaacttggtggatg

SEQ ID NO: 555950 - DNA, 75 bp, Homo sapiens
ggcgaacccgcggcgcaataacgggagcgcttgtgagtgccttggctgatgacaccttacacttatggaatttac

SEQ ID NO: 555951 - DNA, 100 bp, Homo sapiens
acaatgatggtggtgatgatggtgttggtgttgaggttatggaggttttgatgactatggtggctataataattacggctatgggaatgatggctttgat

SEQ ID NO: 555952 - DNA, 75 bp, Homo sapiens
atggcccagacccccgacggcatctcctgtgagctccgagaagctgaggacagggaggaagaagagggggaggaa

SEQ ID NO: 555953 - DNA, 100 bp, Homo sapiens
gaggaggggctccggctggtctgtggtgaggttgtgaactaaaggccgacaaagattatcactttaaggtggataatgatgaaaatgagcaccagttatc

SEQ ID NO: 555954 - DNA, 75 bp, Homo sapiens
atttccttttaaacatcctgatgaatggagagcatgtcttggctgttcaaccgtactttctccagaaggatcagc

SEQ ID NO: 555955 - DNA, 75 bp, Homo sapiens
caagatcccctatgagagtcccatcttcagcagagatggtcatcatgggccagtgctactacaacgagaccatcg

SEQ ID NO: 555956 - DNA, 90 bp, Homo sapiens
gactgaagtatccagcgctcattgggaatttagttaagattcaggaattgtagggcctcaacctatagactttgtcccaaatgctctccg

SEQ ID NO: 555957 - DNA, 74 bp, Homo sapiens
aactgaagtttggagcgatcacatcattttcccaagttggttgaagccatggataacagaacccacagatgcag

SEQ ID NO: 555958 - DNA, 100 bp, Homo sapiens
tgtctcgggaccccgacagctgcggttggcgggcaccataggccgaagcacccgggatttggtgctatggagaaatttttggtagaatataagagtgcag

SEQ ID NO: 555959 - DNA, 83 bp, Homo sapiens
cgagcacgagctgtgaggggattcacttgtgtgcggaactcctcggaaccatgtcggctcctccctgaagaagaggttcaagc

SEQ ID NO: 555960 - DNA, 75 bp, Homo sapiens
gcgtccagaatttcaacaagcagctggtgctgccttcacctgcctggagactgccttccgcctggacgccctgca

SEQ ID NO: 555961 - DNA, 100 bp, Homo sapiens
cggctattcatacaccatgcaaaacagaaccttccaaatttccttttccaactaaggaattacatgaatgacagtcttcgaaccaatgtgtttgttcgat

SEQ ID NO: 555962 - DNA, 100 bp, Homo sapiens
cacttccacagccaagtgcgggagtccacgggaaaaagacctcgatgaagttctgcagacccactcagtgtttgtaaatgtttctaaaggtcaggttgcc

SEQ ID NO: 555963 - DNA, 109 bp, Homo sapiens
ctcaatatctgtcttcggtggactccttcggcagtccacccaccgccgccgcctcccaggaactgtggctgcaccatctgtcttcatcttcccgccatctgatgagcag

SEQ ID NO: 555964 - DNA, 97 bp, Homo sapiens
ccagcccagaacagagaatcaggtcttgagagctgatgacaataacatgggcaatggctgctctcagaagctggcgactgctaacctcctccggttc

SEQ ID NO: 555965 - DNA, 74 bp, Homo sapiens
gccagcagctgtggtactccagacaaaaggttactgaaatctgtccatcacaatccttcaaaatttggaattca

SEQ ID NO: 555966 - DNA, 74 bp, Homo sapiens
ttttgcacaagggcagtcaccatgaaaggtcgttgaggacttccacatggagattggcacaggaccagactcaa

SEQ ID NO: 555967 - DNA, 90 bp, Homo sapiens
caacgatgaggcatacgctgaggagtttggcaacgagacgtggggcgtaacaaaggaagcagaagatgcacctgaaaaactttccagagc

SEQ ID NO: 555968 - DNA, 95 bp, Homo sapiens
taatgaatttgcccaatgttttgatgattggcagagacccactgtctggttctctacttttagagtcgaaaataaatcctaacactgcataccag

SEQ ID NO: 555969 - DNA, 75 bp, Homo sapiens
ccttatacagctaaagccatggaaaggaagctctatgcagaactgtgccaaggcatcgtggacatagccatttcc

SEQ ID NO: 555970 - DNA, 98 bp, Homo sapiens
cttggtttttgtagtccatgggattggaccagcttgtgatctccgctttcgaagcattgtacagtgtggtaatagcctgcagctggtgttttgagaag

SEQ ID NO: 555971 - DNA, 90 bp, Homo sapiens
gcacgcagcctggggactctgcctcgtgccgctgagcctggcgcagatcggagcagctgcattggcatggaagaatcctatttcaagctg

SEQ ID NO: 555972 - DNA, 82 bp, Homo sapiens
tggagctgcggggccctggcatgaaaggtttacccaaggtccagcctagcccctaggcaccatgtcggacagtgatctaggt

SEQ ID NO: 555973 - DNA, 75 bp, Homo sapiens
tgtcaaagccatcatatatcagtatatggaagaggactgaccgatgatcagattgaagaattgaaattgaaggat

SEQ ID NO: 555974 - DNA, 100 bp, Homo sapiens
agtggtgaaggagtgtgtgcagcggtacactgatgctgaagtactatgagccttcggaacttgtggagagactacaaagttttggttgttatggtccctt

SEQ ID NO: 555975 - DNA, 100 bp, Homo sapiens
agagattcagccagcacactcctcgcgagcaagaggaggcctaccagaaactggccagcgagaccctggaggagctggactggtgtctggaccagctaga

SEQ ID NO: 555976 - DNA, 98 bp, Homo sapiens
cctgggccttctggtcaacctggccgtccggggcccccaggccccccacctgcagtaaatggggagcaggagaaccgagtgcagaagggaaatggata

SEQ ID NO: 555977 - DNA, 100 bp, Homo sapiens
cttcgtcccgcggagtccaggcttcagagccctggaaaccaacaggtataaccatatcacagccacatacttcctgctggctgaaaggatcctgagagaa

SEQ ID NO: 555978 - DNA, 82 bp, Homo sapiens
caccgagctcgcggcacggtaggagagagtattatgagggaggccgaggacttcatgctccggacagagaaacggcgctggg

SEQ ID NO: 555979 - DNA, 75 bp, Homo sapiens
ggcgagacgcgcagcgccggcgcccgggagacccaggaggagcccgcagctgcatcttcctcccgtgaggctggc

SEQ ID NO: 555980 - DNA, 48 bp, Homo sapiens
tggaagagaaagtaatgttggtggttgagaaagatcagtctaaagaaa

SEQ ID NO: 555981 - DNA, 80 bp, Homo sapiens
cggtgttaacgtctgctccagctcgcagcccgctgctgggagcgagcccagggcgtggtgctgaaagtgctcacaaactt

SEQ ID NO: 555982 - DNA, 100 bp, Homo sapiens
ggacaatggacctgcgcagatggggactgtggtgccatctttgcttcatcaggacctggcagccttgggcggaacagcagctggtggactgcgcccagga

SEQ ID NO: 555983 - DNA, 96 bp, Homo sapiens
caaccataaagagaaagctagtgaatgggaaaatggtagcgaagccactggtgaaggaccgggaagctgagcttctgtactttgctgatgtctgcg

SEQ ID NO: 555984 - DNA, 98 bp, Homo sapiens
ttatacctagaagtctactaatggacagttagtcacccacctacatgttgagttttaaacccaatgaaggagttatcataataggagccacaaacttc

SEQ ID NO: 555985 - DNA, 90 bp, Homo sapiens
cagaaattctggaacacctatatgacaccattcgcttttcacccaagatgatttgatgtcttataaaactctgatgaaccatgatggcta

SEQ ID NO: 555986 - DNA, 100 bp, Homo sapiens
tcaagatgaaccgcaaggagagaagttcttatgactcctccatgtctccaggattcactccttctccagttgcacagccacacccttcagctggccttaa

SEQ ID NO: 555987 - DNA, 100 bp, Homo sapiens
agatgacagaggaagaagtagagatgctggtggcagggcatgaggacagcaatggttgtatcaactatgaaggttcaaaagctgtctaagaatgaagtgc

SEQ ID NO: 555988 - DNA, 90 bp, Homo sapiens
cggaaaacctaaccatgaagacttgaacttaatacagcaagaaagaccatcaagtttaccagggagagaccattctaacacaggtaccgt

SEQ ID NO: 555989 - DNA, 74 bp, Homo sapiens
cctacgccaacgaggagcgccgcgagtaccggcagcagctaccaagaaaccagcccctgaaaagaagcctgcag

SEQ ID NO: 555990 - DNA, 98 bp, Homo sapiens
gcacctatggacaagtctataagagagcatcagtgatgtcacgtttggagcaggggtcagttacatcgggacaccacggactccgtcgtcagccaaag

SEQ ID NO: 555991 - DNA, 100 bp, Homo sapiens
tcccaggaacacgggaggttcagaaggggaaagtgatttccctaaggtctcacaacccggtggtactttataatcccaaaattcttctcctagatgaagc

SEQ ID NO: 555992 - DNA, 80 bp, Homo sapiens
gttgcaggtggacagctggccagtgatcgagcgctaccctgcagaactgtaagagtaaatgggtccagtaattggaatga

SEQ ID NO: 555993 - DNA, 100 bp, Homo sapiens
gattcgcagtggtcgcttcttctccttgtgggacacagcaggccaggaaagatttcgaacaatcacctccagttattacagaggagcccatggcatcata

SEQ ID NO: 555994 - DNA, 101 bp, Homo sapiens
cagcagcaggagcctggagcgcgagtacagctgcaccgtgcggctgctggacgacagcgagtacacctgcaccatccagatggagttttgctcttgtcacc

SEQ ID NO: 555995 - DNA, 100 bp, Homo sapiens
cggaagcccagcgcggagccggccgcggccccctgttgtgttgctgcggagaggtgcagtagacattgttgcaatcatgatcggcaatctgaaaggcaca

SEQ ID NO: 555996 - DNA, 80 bp, Homo sapiens
aaacttgatccaaagacaatgaaggtttctctggaaacccccctggtaagtgtggaggaggcgggacactctgacccaag

SEQ ID NO: 555997 - DNA, 83 bp, Homo sapiens
gaaggagggttggctgcacaaacgagatgggggctccggaggtggcgcccaggctctgagctaccctaggtctgcagactagc

SEQ ID NO: 555998 - DNA, 90 bp, Homo sapiens
gaggaagatgatggagatttgcctgtgagctgttcctttgggtaccatgctggtggctggggcaaacctccagtggatgagactgggaaa

SEQ ID NO: 555999 - DNA, 74 bp, Homo sapiens
gcaatatgtaatccaactcacctccatgttcaaattttgtacagcagcaatttcttactctctctgcaagtttt

SEQ ID NO: 556000 - DNA, 96 bp, Homo sapiens
ccttagtttgcaccgagagaccatttgcagcggaattaaacaaccaccatgtcgagcaaaaaggcaaagaccaagaccaccaagaagcgccctcag

SEQ ID NO: 556001 - DNA, 50 bp, Homo sapiens
actccagaattcctaatagaacaagcaaacatgaacgttggagttgccca

SEQ ID NO: 556002 - DNA, 75 bp, Homo sapiens
cggaaaccccgcctcttacagtcacgagttcttcaccaaaggacatggatgaaaatgaaagcaaccagtctctga

SEQ ID NO: 556003 - DNA, 99 bp, Homo sapiens
atcaagctgaaatagcacagctggccaatgaaaagcagaagtgtattgattctgcaaatttaaaggtgactgtaatcaatgagagactgaagacagatc

SEQ ID NO: 556004 - DNA, 75 bp, Homo sapiens
gactttttgtacttacaaagtccatgctaacctactatgagggtcgagcagagattttcagctgaactctcatct

SEQ ID NO: 556005 - DNA, 95 bp, Homo sapiens
cttcagtgcagacgcagtggtggccctggagcagtatgccagcaaggaaacccagaagttctgtgaacaagtccatgctgccatcaaggcattta

SEQ ID NO: 556006 - DNA, 80 bp, Homo sapiens
gtgctggccctcagcagtcccggcctctggcagcacttgccccaaaggtgtggaaacaggaagagaactagaactggaag

SEQ ID NO: 556007 - DNA, 100 bp, Homo sapiens
acaaagatacagtgattatagtattgatagagctacattctcctgatagcaggaacacgttgatcctacgctgcaaagatacagccacagcacactcctg

SEQ ID NO: 556008 - DNA, 98 bp, Homo sapiens
agaaacctcaagatgtggatttaccttatcccctcaacaacttttcagtggcaagctttaatccagtgtgaccagttgaggaaggagctggagaggca

SEQ ID NO: 556009 - DNA, 80 bp, Homo sapiens
cagattattgagatggcctgtctgataactgactctgatctcaacattttggctgaagtggaggtttagccgttggaaca

SEQ ID NO: 556010 - DNA, 97 bp, Homo sapiens
cccccaggatacagggtcaaaggagagcacaaccatcgcagttggaagcccatggggcaggtggtgttcccactgatgaagagcaggcgactgggtt

SEQ ID NO: 556011 - DNA, 50 bp, Homo sapiens
tgaataaggagccgagctttatgtccatgaaggaggtgggtgatggctta

SEQ ID NO: 556012 - DNA, 82 bp, Homo sapiens
aagcctgcgcgagaggagccgggacacgcctagcgcgggctccagatgccatggacaatattaccaggcagaaccaattcta

SEQ ID NO: 556013 - DNA, 90 bp, Homo sapiens
gaggccttcgtcttccgaatgaactacagccgcaagaaccaggactcggaaggagttattcctgatgaagctaaagctttgtctctgttg

SEQ ID NO: 556014 - DNA, 106 bp, Homo sapiens
gtccttctccactttcgccagcccgtgccgcgagcgcggcctgcaggagcacaggaagtcctggagaacctgaaggaccgctggtaccaggcggacagcccccctg

SEQ ID NO: 556015 - DNA, 98 bp, Homo sapiens
cgctttgattgctaccctggtatatgcacttttcaggtgcttttgaagatgatgatatcacgcacgttgaaggaagtgtagatcctattcgagatata

SEQ ID NO: 556016 - DNA, 86 bp, Homo sapiens
ccagctctgcagccacatactatccgtttgttcaggaaccaccagtgacagagagctggcgttacagcccaaagatgatattgtag

SEQ ID NO: 556017 - DNA, 82 bp, Homo sapiens
aggctgaagacagagggctctgatctgtgcgacagaatgaaggatttgggggcagagcacttggcaggtcatgaaggggtcc

SEQ ID NO: 556018 - DNA, 101 bp, Homo sapiens
gaagaggacgagggggccaaggcttcctccggggtcagcccaagactaccccgtcggtcattctgttcctgccgtcctgtgaggagccccaagccaacaag

SEQ ID NO: 556019 - DNA, 137 bp, Homo sapiens
cttttccatcaacaggggcaaatcgaagtagagagcgaaaccatcttcaagttagcagcgtttattttacaggaccacagaatactggccatggtgcaacttctggttttggcagtgcttttacaggacaacaagga

SEQ ID NO: 556020 - DNA, 83 bp, Homo sapiens
gttctccaaataccagctcgacaaagatggggttgtcctctttaagaaggtagccgggctgagaggccctgtgctgcgcctgc

SEQ ID NO: 556021 - DNA, 90 bp, Homo sapiens
ctttgattctccatatcacctacagtttctacagcagtataatcactacaaatccaatgtggagattttcaaattgcaaccaaataaacc

SEQ ID NO: 556022 - DNA, 98 bp, Homo sapiens
gccagggtctgcagggcctgggccgccgctgctacctgcagcgccgtgtggcacgacacaaaaatcagatggtggatgcttccaaaagcatcgaagct

SEQ ID NO: 556023 - DNA, 99 bp, Homo sapiens
cacttggcgtgacttcactacttttaagcaaaagaatgtgcctggcatcagaagggatgaaaatggaagaatcaaagctaataaaagcaaaagaatccg

SEQ ID NO: 556024 - DNA, 124 bp, Homo sapiens
ctgcacgacctgctcctacagccggcgatccactcccggctgttcccccggagagctctgagctcttcaccctgacctatggtgccctggtcacccagctatgtaaggactatgaaaatgatga

SEQ ID NO: 556025 - DNA, 75 bp, Homo sapiens
ctccagccgaaggagaagggggaatgttccagtggaaaacttctttgtgaaatgcaatggagcactcattaacac

SEQ ID NO: 556026 - DNA, 101 bp, Homo sapiens
ctggaataggcctttctccacctcattatgggcactatggggatccgtcgcacacagcatctccaacaggttgcagaagttttacaagtacctccaatgag

SEQ ID NO: 556027 - DNA, 100 bp, Homo sapiens
aggctgaagtctcacatcagaggtgtcaagggtgtccgcaatgttgccagtgtctgtctgcagattggctacccaactgttgcatcagtaccccattcta

SEQ ID NO: 556028 - DNA, 51 bp, Homo sapiens
catgcacttccttccagcagctacacagaagtaactgctccccctgaggat

SEQ ID NO: 556029 - DNA, 82 bp, Homo sapiens
aattcagaaggagctggcggacatcactttagaccctccacctaattgcagttgtcatggatgcactggtagaagatgatat

SEQ ID NO: 556030 - DNA, 100 bp, Homo sapiens
gtcctttatatagaagggagagtagacaggccgacggtcgcaaggtcctacggtcaagcatccgggagtttctatgcagcgaagccatgttccacctggg

SEQ ID NO: 556031 - DNA, 100 bp, Homo sapiens
cgggtgccgagatttgggagagacgctctgaactgactgccccgcatcaccggagcgtcccagctgcgaggaggtatatttgaaggctcccatgattctg

SEQ ID NO: 556032 - DNA, 82 bp, Homo sapiens
ataaactcaagcagcgagtcatccagagtgaaccagaggaaatgcctccagaagcaaagatgaggatgaagaatattggaag

SEQ ID NO: 556033 - DNA, 82 bp, Homo sapiens
tgcttatggcggcgctggagagggggcgctgagctgttgggattcttcgctgctgctgccttaccgccgagaaccaccaccc

SEQ ID NO: 556034 - DNA, 83 bp, Homo sapiens
cgcggattcgccgaggcaccgaggcactcagaggagctacgagttccagggagctctgtcctggtgaccgtgcccgggttatg

SEQ ID NO: 556035 - DNA, 100 bp, Homo sapiens
gtgtgaaaatctacactttcaatcaaagcagacccctgtaaaagagcccaacagtgaaaatgtagatatcagcagtggaggaggcgtgacaggctggaag

SEQ ID NO: 556036 - DNA, 82 bp, Homo sapiens
gtagccgcagctgcgggtccgggattcccagccatggcagattcctccgggcagcagggcttcacaggctgctcaagaagcc

SEQ ID NO: 556037 - DNA, 76 bp, Homo sapiens
ccttcgttgcccccttaggattgagcgtcccgtctgacgtggagttggccattctcaagcacaacctgggtgaggc

SEQ ID NO: 556038 - DNA, 75 bp, Homo sapiens
gtcctttcaagtctctaggactggactcttcctaagcaagtccgaaatacccacctcggaaagacttggtccgag

SEQ ID NO: 556039 - DNA, 83 bp, Homo sapiens
cagtggaaaatgcgctcgggctggaccagcagccacaacacatgcgtgtatcttgcttgggctatcttccctgctctgccacg

SEQ ID NO: 556040 - DNA, 100 bp, Homo sapiens
tcccggcgacatactacctctggccccgagatcagaatgccggtgctggagaatctggtaaaagcaccattgtgaagcagatgaggatcctgcatgttaa

SEQ ID NO: 556041 - DNA, 50 bp, Homo sapiens
ccggtacatctgaaagccgggaaatgcctttccgctgtgcccattgccat

SEQ ID NO: 556042 - DNA, 119 bp, Homo sapiens
ctgactcagtggagcaagagcacactccagcttccgcagcctgggtcaacacagaaagcatccttgcccaccaccaagctccagggctcagttcaaccatcttgccctgaacactcttc

SEQ ID NO: 556043 - DNA, 74 bp, Homo sapiens
ggaaatcagggctccttcttaactaaagttctttatagctccaagctctacagattcttcaaatatattgagaa

SEQ ID NO: 556044 - DNA, 80 bp, Homo sapiens
agaaggcagctctcactcaggcaaagttccaggaagaggccgactcagtcagccagaccctggcgaagctcaactccaac

SEQ ID NO: 556045 - DNA, 50 bp, Homo sapiens
aggttcgactccagctgcaggagctttttttccacttacaaagagaacgg

SEQ ID NO: 556046 - DNA, 75 bp, Homo sapiens
caagtttctggacactctccgagaggtgaaggaggatggactcagacaagttctggaggagatgaaagctttgta

SEQ ID NO: 556047 - DNA, 78 bp, Homo sapiens
caggtgagaggcggatctacagacatagcgccatcatgaccgggtcctataacaacttcttcaggatgtttgatagag

SEQ ID NO: 556048 - DNA, 74 bp, Homo sapiens
cctccccagagtccaatggatcaacacagccaaggtgatgtaaaattctcaaacaatgagatagataaaaagta

SEQ ID NO: 556049 - DNA, 98 bp, Homo sapiens
tcgacacccaagagcagcttgtgcacctgaaactaagatctgcttcaaatactaccatggagtgagtggggccctgcgagcaaccacccccagtgtca

SEQ ID NO: 556050 - DNA, 100 bp, Homo sapiens
cgcctccgccgctgcctcaggagcggaacaacgtcggcgagcgggctagctgtgttccgccatgtcagaatggagggatgtgtctccggccacaactctg

SEQ ID NO: 556051 - DNA, 100 bp, Homo sapiens
atactgaaggagcaggaaaaccggaagggcctgatagccgccatctgtgcagggaatgaaagctactggttgattttaaagtgcctgggcctcacaggtt

SEQ ID NO: 556052 - DNA, 97 bp, Homo sapiens
gctgggggatccaacgcacacttaaggctccagcaaagacctgccctcattcacccagaatgtgcacaggctggtcaacgacctgcgctactacaga

SEQ ID NO: 556053 - DNA, 110 bp, Homo sapiens
aaagcatttcggctcagctggaggaggccagctctacaggcggagctatgcctgttccagaccagccttcatcagcctcagagaagacgagttccctgagccccggctta

SEQ ID NO: 556054 - DNA, 88 bp, Homo sapiens
gacagcgcgtgcccgcgaggagccgccgcgcgcccgcgccctccgcgcgacgccagccctggactttgtctcacaagatgaaatgttg

SEQ ID NO: 556055 - DNA, 75 bp, Homo sapiens
gcccagggggtgcgaggataccccacgtgtacaagggagaagaagccacattccaaatctcaggcctccagacca

SEQ ID NO: 556056 - DNA, 100 bp, Homo sapiens
agagacaagcccgaggcctgacttctagcactcctgagtttgagccctatgagcagtggaacctaggatcctgtttgaccaaactcagagatcaattaag

SEQ ID NO: 556057 - DNA, 98 bp, Homo sapiens
cggcctcggcctgtcgggggtaccacagggccagccaagtctcgggatggtgaacgtactgtctattgcaacgtacacaagcatgaaccccttgtgct

SEQ ID NO: 556058 - DNA, 100 bp, Homo sapiens
caaagtcatcgacggcacctcgggggccacactgcaggcctccgcgctcagtgtatttgactacagtcattccttatgagaaaaaaaacggaccaccgtc

SEQ ID NO: 556059 - DNA, 96 bp, Homo sapiens
cagccgccgccggcggcggcggcgtgagccaccgcgcaggaaatcatcgagttccccatcctaaagctaaatggccggaccatggagattgagtct

SEQ ID NO: 556060 - DNA, 99 bp, Homo sapiens
ctttgctcttccatccgcctttgatcgtcttcctcttcagccatccaggtatattgagatcttcagaagtagcaggagtgaaatcaaaggattttatga

SEQ ID NO: 556061 - DNA, 50 bp, Homo sapiens
cgcagtggtcgcttcttctccttgatttgatccatatggaaagaataagt

SEQ ID NO: 556062 - DNA, 123 bp, Homo sapiens
cgcatctcggcctcctctgccaccagggagctggacgagctgatggcttcgctgtcggatttcaagatcctgcgcagccgaggctgtgttagcgccaaggacttccagcagctgttagcagag

SEQ ID NO: 556063 - DNA, 98 bp, Homo sapiens
gtcggggggcacgcagctgaagctcatcatgaccttccagaattacgggcaagcgctgttcaaacccatgaatgcaccgtccaggtgaggttagagct

SEQ ID NO: 556064 - DNA, 83 bp, Homo sapiens
attccactgcatgtatttgtgttgttactgatgcagagatacagcaaaagagtctacatagtagccggatcgagctgggagat

SEQ ID NO: 556065 - DNA, 74 bp, Homo sapiens
ttctatgctccttggtgtggacactgcaaaaatgagaaagatcagtctaaagaaaaggagaagaaagtgaaaaa

SEQ ID NO: 556066 - DNA, 134 bp, Homo sapiens
gcaggggccggagggcccacaacccgcagagacttctactggctgcgctcctttctggccggagatttcagaagaaagtggtagcttcctttccaagaacagttctgagcacaggaatggataaccggtacctg

SEQ ID NO: 556067 - DNA, 75 bp, Homo sapiens
cctcctcggcgtgagcgacagcggcaaactcctctggtgcaagtgtggtagctattgacaacaaaatcgagcaag

SEQ ID NO: 556068 - DNA, 90 bp, Homo sapiens
actctacctgcatttccagtctgacattagtgtggcagctgctggtttccacctggaatacaaaagtgtcatggagaaactccagctggg

SEQ ID NO: 556069 - DNA, 100 bp, Homo sapiens
tcctgcggctgcgactcaggctccggcgtctgcgcttccccatggggctggcctgcggcgcctgggcgctctgaggtttgggccccatggtatccctgtg

SEQ ID NO: 556070 - DNA, 100 bp, Homo sapiens
ctgaaccaaaagctgtgagaacaactacacgttacgctattcgttgtggtccaaaacagtttacctcttatctaacagccggttgctgaaccaatcccca

SEQ ID NO: 556071 - DNA, 80 bp, Homo sapiens
tcccagtgacgggtctggagtgcgtgggggaccggctgttggcggatatggatcagaaactttcgaagttggtagaagag

SEQ ID NO: 556072 - DNA, 98 bp, Homo sapiens
aaaacttccagaagaattagattttctgctttaactgccgcctcacctgtggagctctgggtacaggatctctctaggagctgacactcgaaccttca

SEQ ID NO: 556073 - DNA, 74 bp, Homo sapiens
atcatgccagggagccaagcgtcctgcccggccggtacagctctgccggggggggaaaaagtggtaccattttg

SEQ ID NO: 556074 - DNA, 101 bp, Homo sapiens
gtgatggtcagctaggactcatgactactgaggattctgtggcagtgcccaggaaaactcactaccatgagaattgcagtgatttgcttttgcctcctagg

SEQ ID NO: 556075 - DNA, 75 bp, Homo sapiens
ccgcgctctgggcacagccttggaaagtcaggaccgcgacggcagcagagcaaatcagcatgattcttcagaggc

SEQ ID NO: 556076 - DNA, 74 bp, Homo sapiens
cagcagcccccgaaggccctatcaggacatggagtatgaaagacgataagttttttcagtcagccatgagcata

SEQ ID NO: 556077 - DNA, 100 bp, Homo sapiens
ggaagctgctctgatggcgtaatcatcaaggttgctgataaaatgggtttgcctgcaatgagatttcattctctacatttaaaggacatcctttctgagc

SEQ ID NO: 556078 - DNA, 100 bp, Homo sapiens
catgacgccatcctgccgcagctggcgcagcccacgctcatgatcgacttcctcacccgcgcctgcgacctcgccatgaagtcggggggcacgcagctga

SEQ ID NO: 556079 - DNA, 100 bp, Homo sapiens
attcgtaatgcgactcaaagctgcacggcagtctgtttatgaggtttgcttctctggcggtcttcagaatcaacatccacacttccgtgattatctgcgt

SEQ ID NO: 556080 - DNA, 138 bp, Homo sapiens
agcgcttgagggggactggcctggcgtgcactccgcacctcggggacattattgcgcgtggaacggctgcttttggaagcatttaaatcaaacggtattgagatggattgggttatgaaacataatggtccaaatgac

SEQ ID NO: 556081 - DNA, 97 bp, Homo sapiens
aaagaaggagggtcctctcagtgattaagaaccaacgaaacgtatgctttccttccaagggttagctgagttggcacatcgagaatatcaggcagga

SEQ ID NO: 556082 - DNA, 100 bp, Homo sapiens
tggatggtacctcggggttctctcctgcccccaagctgggtaacagctgtggactggcactttgaggaggctgtggatggtgagtgcccaccacagcgga

SEQ ID NO: 556083 - DNA, 100 bp, Homo sapiens
aactgccggacgccctatcgcaagcagacctgatggccaaaagaaaggaagaaaatttttcctctcctaaaaatgccaaaaggccaagacaagaagaatt

SEQ ID NO: 556084 - DNA, 100 bp, Homo sapiens
aatcttcgggcagagagaaggaaacacttagaggaagttctggagatgaagaaccagcagcacaaacactgttggggcaacagtgaacagccaagccgcc

SEQ ID NO: 556085 - DNA, 50 bp, Homo sapiens
tttgccaggtgtttgttaccttgggcagcaggatgggtgtggaagcagtg

SEQ ID NO: 556086 - DNA, 113 bp, Homo sapiens
tcgtgatcccggcgacatactacctctggccccgagatcagaatgccgctgttaaacgtttaatgaaagaagcggcagaattgaaagatccaacagatcattaccatgcgcag

SEQ ID NO: 556087 - DNA, 49 bp, Homo sapiens
tcctctctgagtcaaatccagtgctaccaagtggcccatccaacaggac

SEQ ID NO: 556088 - DNA, 51 bp, Homo sapiens
gaggattgcccggaagttcctcataaggtgtactattgactggaagaaagg

SEQ ID NO: 556089 - DNA, 50 bp, Homo sapiens
aaacattatataccttggggaaagctgatatttcaaaagaacaaggcctt

SEQ ID NO: 556090 - DNA, 78 bp, Homo sapiens
gaagctgctgcggttcctgagccggagatgtccagctcgccgctgtccaagaaacgtcgcgtgtccgggcctgatcca

SEQ ID NO: 556091 - DNA, 100 bp, Homo sapiens
acagtgtggagagccgtgatatgttccagttgcacatttcctgcaaggactccaaagtggtgagctctggattaatcgaattacagctgctagccaggaa

SEQ ID NO: 556092 - DNA, 100 bp, Homo sapiens
aagaagagcccagctagcaccttcgccctctccagccaggtctctgagcggcccctgatgttcctgttggacactcctggcgtgctggctcctcggattg

SEQ ID NO: 556093 - DNA, 95 bp, Homo sapiens
tcatcatgagcgatgttaccattgtgaaagaaggttgggttcagaagagggcctgattacatcaaccccagagccgtgcagctgggctcccttct

SEQ ID NO: 556094 - DNA, 80 bp, Homo sapiens
gatgaagcggtgaaaaaagattcagagttggataagcacttggaatcacgggttgaagaggtccagttccggccgtaccg

SEQ ID NO: 556095 - DNA, 100 bp, Homo sapiens
agaagtgcccgaggagagttaacagggttgtctcctcacagactatgagctccttgaaagagggaatcgtgtcttactcatctttgtatccccagtgtct

SEQ ID NO: 556096 - DNA, 82 bp, Homo sapiens
cgcgctctgggcacagccttggaaagtcaggaccgcgacggcagcagagcaaatcctcactatggatgggctcattgaggac

SEQ ID NO: 556097 - DNA, 75 bp, Homo sapiens
gcctcacaagtagctgggattacagctacgtctcggccatggtgcctgtgaagtcccccagggagtactacgtgc

SEQ ID NO: 556098 - DNA, 74 bp, Homo sapiens
ggacgctgtcctggaggaattcaagcgagcagcccctgtcaaagggaacaggaagcagtccacggagggtgacg

SEQ ID NO: 556099 - DNA, 75 bp, Homo sapiens
cccaagggcgacttctccagccgggcccgcgaagtggttcgagaacttgtcttggacaattgcaaatcaaatgat

SEQ ID NO: 556100 - DNA, 74 bp, Homo sapiens
aacgccaggcgccgctcctttacagaaacattgaatgaggaggataaagcaaagattgctaaaagcaagaagaa

SEQ ID NO: 556101 - DNA, 90 bp, Homo sapiens
actatgacatccgggccgacgtatggagcctgggcatctcgttggcgcctgtgtctggcagagctggtgtgagacgagacaatcctgccc

SEQ ID NO: 556102 - DNA, 100 bp, Homo sapiens
gtcatcgatggagaaaaaaccattatccagaatcccacagaccagcagaagactacaaatccctccaggatatcattgccatcctgggtatggatgaact

SEQ ID NO: 556103 - DNA, 71 bp, Homo sapiens
ttttgatattcagagccttggaagtcaacactgtcagtttgagggcctgtgtctgctgtccctgctggtag

SEQ ID NO: 556104 - DNA, 85 bp, Homo sapiens
gtctgtctcctgttttctaggtggaaagaatctgatgagccttttaggcctgttcagttttctggatatgccgcagaaggatccg

SEQ ID NO: 556105 - DNA, 100 bp, Homo sapiens
tgtatcaggatccaaggaacgtttggggtttcctagatggaacttgctaaggaagaaaagtgtgaatttctgccattcctgtccccacggaaggttatag

SEQ ID NO: 556106 - DNA, 97 bp, Homo sapiens
ttgcaagcattctatccaaatggcaatggtggcttgctatccgggaaatggaacaggttatgttcgccacgtggacaaccccaacggtgatggtcgc

SEQ ID NO: 556107 - DNA, 100 bp, Homo sapiens
ctctgaaggccgccagcccagccccagccccagccctacagagtcatcagtgagttctgcctcagtcagctcccaagtgaggacgcagtcacctttgaag

SEQ ID NO: 556108 - DNA, 116 bp, Homo sapiens
aaacaaactaacagcagaagctattcagacacccctgaaatctgccaaaaaaaatgctgaaccagatctggacgacaatgaggatgaggaggagcctgccgtagaaattgaacctg

SEQ ID NO: 556109 - DNA, 100 bp, Homo sapiens
tcagatctacttgaaaaattaagtgaattgatttggttggaatgctcttttaccgatgctttaacatacagccactagacgaagtcttgctctgtcgccc

SEQ ID NO: 556110 - DNA, 90 bp, Homo sapiens
tggagcaccgatgatgtgcagatcaatgacatttccctgcagtgcaagaagaaacacacgctgctgtgccccgactttgcccgcaggggg

SEQ ID NO: 556111 - DNA, 131 bp, Homo sapiens
caagatccccctgaacctgcacctccatcacgacccattcaggagcctccaggagcccagacaccagccccccaccatgcttaaaggagctgctcctttgaagatactaaatataggaaatgtcagtactc

SEQ ID NO: 556112 - DNA, 75 bp, Homo sapiens
tcatacaccagtactaccaaggacagcttttttcctgcaagggacagagcagaatgggctgatatagatccggtg

SEQ ID NO: 556113 - DNA, 100 bp, Homo sapiens
tgctgttgtagtgtgggcaaggcctggggcccacactgtgagaaatgtccccttccaggcacagggccaataataagaagtggacaatacagtatttgct

SEQ ID NO: 556114 - DNA, 88 bp, Homo sapiens
atccggctcctccagctaccggcccaaggccatctacctggacatcgatggacgcattcagaaggccagtggagagagagtgaattta

SEQ ID NO: 556115 - DNA, 100 bp, Homo sapiens
tgagcctggaacggaagtgaggatcacctacagaacctcaagaaggcatgaagccagcccctgcagtgccgtccacccgcccctctgggcctgcctgtgg

SEQ ID NO: 556116 - DNA, 74 bp, Homo sapiens
cagggaaccctggtcaccgtctcctcaggttaaaaataagaagttggttgagctgctgagaaggaaagttcgtc

SEQ ID NO: 556117 - DNA, 74 bp, Homo sapiens
cgctctagacccagcgctgcgtaggcccgggagatttgaccgagagttatcaggaactgttgccgttattacat

SEQ ID NO: 556118 - DNA, 115 bp, Homo sapiens
ccgcgggggccatgaccgtggagcagaacgtgctgcagcagagcgcggcgcagaaggatgaggaagatggagagaatgcccacccatatagaaacagtgaccctgtgattgggac

SEQ ID NO: 556119 - DNA, 100 bp, Homo sapiens
tgtagccatcaacccgagtgcagtttcgatggaaaatgaagcatttcttctgaggccctgaagaagtatcaagtgggctttgacattgcggtggtgagag

SEQ ID NO: 556120 - DNA, 100 bp, Homo sapiens
gagaactactatgtccagcctatttgcacaccatccaggagtcagtttattactggaaatccagaaaaggctttgaaagactcactacaaccctatgagg

SEQ ID NO: 556121 - DNA, 90 bp, Homo sapiens
gcataatgacattgtggacagtgacagcgatgctgaggatcgaggaacgttgtctggccagctgcgggccgtccagcggctgtgccactt

SEQ ID NO: 556122 - DNA, 100 bp, Homo sapiens
gctaaattacatattccagtaatggtggatgaagttgttcattgtttgtcaccacaaaaaggacaggctgcaaggtgtgactgttgtaaatctcaaggaa

SEQ ID NO: 556123 - DNA, 83 bp, Homo sapiens
cgccatgtcgggttattcgagtgaccgagaccgcggccgggaccgagggtcctcagccctcgctctcgctggcggagcagcac

SEQ ID NO: 556124 - DNA, 82 bp, Homo sapiens
cggccgggcagcgccgccaccatgttcctgggcaccggggagccggccttggacacggtacaccaggggttggaaaaaccac

SEQ ID NO: 556125 - DNA, 83 bp, Homo sapiens
gcgcggcggggctgaggcggccgcggggcccgagcgcaggtctgcagcccagagggcaccttctgcaaacatgtctgtggatc

SEQ ID NO: 556126 - DNA, 100 bp, Homo sapiens
ctagaccctgcccaacagaatttatatagagatgtgatgttggagaactacagaaacctcgtctccctggacaagcccacagggtatggctccagcagtc

SEQ ID NO: 556127 - DNA, 75 bp, Homo sapiens
aggaagaattctttgatgccgtcacaggcccgatgagagaaagggaaagttaaggatgctggagcagaacaatgg

SEQ ID NO: 556128 - DNA, 96 bp, Homo sapiens
ttgaaaatggaagagggaaacaacaatgaagaggtaattcacttgaacaactttcactgccatcggggacaagggaactgctcgcagaaagaagaa

SEQ ID NO: 556129 - DNA, 75 bp, Homo sapiens
gtgctttccagccgcgagctgtcaggccgagtgtcaggccgggcaggtattgttgcagcatctggcagtgagact

SEQ ID NO: 556130 - DNA, 100 bp, Homo sapiens
ggtatgggagtcccaaaagacagctccagttttacaggattgacttctaaggactcttggtacatgaggaagaaacccggaaggggaagaggaaagcaaa

SEQ ID NO: 556131 - DNA, 89 bp, Homo sapiens
ggtatcaaatggaaagtttttccaaatattcatctgtacagtatcaccttttgccatgatagcatttctttcattggacagttccttac

SEQ ID NO: 556132 - DNA, 75 bp, Homo sapiens
gttagcttgacctatgcagatcttattccaggagagatgaatggagagtatagaggcagaggatttggacgagga

SEQ ID NO: 556133 - DNA, 100 bp, Homo sapiens
aaagtctaccttgtacttcaacacccaggagaagagcgccaggcgccgcggggggtatttgaagtataccatacaactgttttgaaaatccagcgtggac

SEQ ID NO: 556134 - DNA, 75 bp, Homo sapiens
cagacccacccgccatgaagccccccgcagagctgaaaccaccaatgggtgaggtcgtcacccctacggcccccc

SEQ ID NO: 556135 - DNA, 75 bp, Homo sapiens
gtcgccgggaccctcgcgcgcgaccgccgaatcgctcctgcagcagaggttgacatcatggacatatgtgagtcc

SEQ ID NO: 556136 - DNA, 132 bp, Homo sapiens
ctcatggtatatttgcagccagtactctatatgaacaatccgtctggatcacggatgtaggaagtggtgaccaagaatatggcccaggtgaccaaagccctggacaaggccctgagcaccatggacctgcag

SEQ ID NO: 556137 - DNA, 50 bp, Homo sapiens
gagcccaaagacccctggagacatggagaagtacagcatcggggagccca

SEQ ID NO: 556138 - DNA, 100 bp, Homo sapiens
aacgaaatgaagttgtagttgaattaaggaaggtgacttaagagattaaaattaatttggttgctgttggttctgaacaaataatgagttcttttatttg

SEQ ID NO: 556139 - DNA, 75 bp, Homo sapiens
cgacgaggctgacggcggccaggtggtgggcgccaaggttgtgacaaatgcccggagtcctggagctcgctgtta

SEQ ID NO: 556140 - DNA, 50 bp, Homo sapiens
agacaagacacttttcagaaagacaggtgtatgtggaatttgatgatctt

SEQ ID NO: 556141 - DNA, 75 bp, Homo sapiens
gttttgcctcgattgcaacaacatcattagcgccgacaccatgtggatccaggttcggaccatggacgggaggca

SEQ ID NO: 556142 - DNA, 95 bp, Homo sapiens
ctttaccgccatgctgtgccttgtggtgcaggaggcaaaggtgtctggggtacacctggacaggtgtatgatgtggaggaggtggatgtgaaaga

SEQ ID NO: 556143 - DNA, 100 bp, Homo sapiens
tggaatatgaagagacatgagatggtagctaaacatttagcttgtcacattttggaatgctgtgatgggctggcccaggatgtcatcggctccatcggac

SEQ ID NO: 556144 - DNA, 100 bp, Homo sapiens
ccaagagcctcttccttggccagaaggcatttggctttatgtcccgagttgccctacaagcagagaagatgaatcatcacccagaatggttcaatgtata

SEQ ID NO: 556145 - DNA, 75 bp, Homo sapiens
ctttgggacaaaactgtatttaccttggcataaagacagtgtttgcaggatccagttgcaatgatattgtctgca

SEQ ID NO: 556146 - DNA, 100 bp, Homo sapiens
agcagcgtgcgttcagccctggggcgccttctgcggcaggcggacagatcctcggcgcggcagggccggggcaagctggacgcagcatgatgcgcgcagt

SEQ ID NO: 556147 - DNA, 82 bp, Homo sapiens
cttcgctgtggcatggcggacgaggggaagtcgtacagcgcctcagagaaccgtgaaagctctgtatgactacaaagccaag

SEQ ID NO: 556148 - DNA, 50 bp, Homo sapiens
aggaaatgcaccaggttgcaagttccgaggattctgaagacgacggggag

SEQ ID NO: 556149 - DNA, 82 bp, Homo sapiens
acgagcgacggcggaacccgtgggcctgtggactgcagcctcggcggtcagcaggatcttagaaatgaagttgaaaaattac

SEQ ID NO: 556150 - DNA, 100 bp, Homo sapiens
tgagaactatgtggcagatatcgaggtggatggaaagcaggtacccgaggattaataaagaatctttacttcctgtagcaaaggacgtgtcttactcagg

SEQ ID NO: 556151 - DNA, 100 bp, Homo sapiens
ctcatcatcccgtcagagctgaggtacttcgtgaaggtctcctctgagcctccggcctccataagacccaaaacagatgacacctcttcccagtcccccg

SEQ ID NO: 556152 - DNA, 97 bp, Homo sapiens
ccccggcgggagcggcggcaagaaaaatgccagccagaagaggcgttcgctgcgcgtgcacattccggtctcggtccagctcgacttccagctcagg

SEQ ID NO: 556153 - DNA, 83 bp, Homo sapiens
cttccaggacgagacgggcaagaaccgacccgtgcctgtatattccacgctttgcgcacctgctggaattcggggagaagaac

SEQ ID NO: 556154 - DNA, 90 bp, Homo sapiens
tggtgctttgtcgcgagtctcaagtgtccatcttgcagtccttgtttggagagttcttcaccaaaggacatggatgaaaatgaaagcaac

SEQ ID NO: 556155 - DNA, 100 bp, Homo sapiens
ggacagaactgtgtttctcacccaggaggagggtgttaaaatcatcacacaacaggttcaaccaagtaaaatcttacccaaaccagtgacagcaactcta

SEQ ID NO: 556156 - DNA, 73 bp, Homo sapiens
tccgtgcgcccagcgtcccagggcccaggccgagcagcccaagaagatgaaaggattgttcttgttgacaaca

SEQ ID NO: 556157 - DNA, 82 bp, Homo sapiens
cccggattggggatgagtatgcggaggacagctctgatgaggagtccctgaagaggaaggagaaggaatatgagcatgaaat

SEQ ID NO: 556158 - DNA, 98 bp, Homo sapiens
aggctcgcctcgactccaaatggttgaaaacagatatacagggagtgagttttccgggagtccctacagccaccctcagtattcctcgtacaacgact

SEQ ID NO: 556159 - DNA, 100 bp, Homo sapiens
ggggcccccagaagtgatcgctcagctggagaacgcggctaaagttctgatgacctagaggatcaagacataatgggagcatttttagacaagccaaaga

SEQ ID NO: 556160 - DNA, 50 bp, Homo sapiens
cagggaagtgcatcacatgtcaggtttctggaataggaaaagttacagag

SEQ ID NO: 556161 - DNA, 82 bp, Homo sapiens
ctgaatcgggagctgaccagcaggggaaaaagacctcgatgaagttctgcagacccactcagtgtttgtaaatgtttctaaa

SEQ ID NO: 556162 - DNA, 100 bp, Homo sapiens
gaggaggctgcgagcgagccgcgaaccgagcgggcggcgggcgcgcgcaccatgggggagaaacccgggaccagggccaattcctgtccccccagcagca

SEQ ID NO: 556163 - DNA, 49 bp, Homo sapiens
gtgaggaggctctagtaactgtccaggtactccaaagattcaggtttac

SEQ ID NO: 556164 - DNA, 50 bp, Homo sapiens
ttagcacagacgctccagagggaatcagagatcattgatttcttcctggg

SEQ ID NO: 556165 - DNA, 50 bp, Homo sapiens
cctggaagagtcgctggccgaaggacccagatgatgtggtaccagttggc

SEQ ID NO: 556166 - DNA, 96 bp, Homo sapiens
agccccagcggatctgagcaattcgtcagacgagagagctgcaccagcagtgtgctggagaagagaaacgagttggcacacgcacagtgtttgttg

SEQ ID NO: 556167 - DNA, 82 bp, Homo sapiens
caagagtgcttatcccagctaagctccaggtaatagctcttcaagtctgcaataaaaaatggcctccaacaaaactacattg

SEQ ID NO: 556168 - DNA, 124 bp, Homo sapiens
gaaggaggaaaagaagcagttcctgatgttacaaatgaacaaggatctcccagaacaccttccaccatgaccacctcagcaagttcccacttaaataaaggcatcaagcaggtgtacatgtccc

SEQ ID NO: 556169 - DNA, 75 bp, Homo sapiens
tgcggaccctgctgccgctgctggcggccctgcttcagactgcacagacagttctggtggtggttgtggtgtttg

SEQ ID NO: 556170 - DNA, 100 bp, Homo sapiens
gccaggcttgcttcaactctagcccagatctggcagatcacatccgttccatacatgtagatggtcagcgaggagggcactcctcaagactttgatcctt

SEQ ID NO: 556171 - DNA, 73 bp, Homo sapiens
gcacctggagaccttcgagcaccccaacgtggtcagcatgttacaccagacagctatattccatgccttgcag

SEQ ID NO: 556172 - DNA, 90 bp, Homo sapiens
ggagattgacttcctgcagcaactctatgaaatggtaacaaacctgaatttggcaactggcatcataaacagaagcagtgcttcagctcc

SEQ ID NO: 556173 - DNA, 100 bp, Homo sapiens
tcgggatgccgtccgaagtcggcgacagcggccggggcgcaggcgcccgtgcggaatggcagggagagtcccgtattctcagagtaaaagttgtttctgg

SEQ ID NO: 556174 - DNA, 78 bp, Homo sapiens
ctgtaccccaatggggtcccctttaagtttgaccagaaagagcagaagagcttcctggggcctcggaaggattactgg

SEQ ID NO: 556175 - DNA, 112 bp, Homo sapiens
cctggagcctcagttggaagcagccgatccagcctgcggagcctgtggggcaggtgagaagccctaccactgcaactgggacggctgcggctggaagtttgcgcgctcagac

SEQ ID NO: 556176 - DNA, 101 bp, Homo sapiens
cctgagttgcacatcaatgacctatggagagtctggcagtgggatgaaaagatatcttaatgcaattcagacaatgtgtccacacattcttcgctatttga

SEQ ID NO: 556177 - DNA, 96 bp, Homo sapiens
gtggtaattaccatcaatactatggaatgcattttgaaacttaaggatgggatacaggacgccaggaaagcatgtgcagatgcaactctctctcag

SEQ ID NO: 556178 - DNA, 100 bp, Homo sapiens
gtcgacgtccctggaaacggccacacggatgccatggttacttttgccacgaataccctctaccatctgctttggtcagggtgccgctcgaggatttaaa

SEQ ID NO: 556179 - DNA, 75 bp, Homo sapiens
tactgttcacgaaatcctgtgcaagctcagcttggagggtgatgtgaatgaaaactttgccattgatttgatagc

SEQ ID NO: 556180 - DNA, 100 bp, Homo sapiens
caggactcggtcgaagcatggctggacgatcactgggactttaccttctcatactttgttagaaaagccaccaggtactccaaagattcaggtttactca

SEQ ID NO: 556181 - DNA, 75 bp, Homo sapiens
tgcacaccaaaccctgggttagagcaaggatccttcatctgtacctaatgcagacaatgccttcacattatttta

SEQ ID NO: 556182 - DNA, 82 bp, Homo sapiens
agaagagcagagcggagggagccccagacacgcctccgaaagccgccaggactctgctgtgaacctgacgggcaccaacggc

SEQ ID NO: 556183 - DNA, 74 bp, Homo sapiens
tgaagatggccctcagcacacgccacagacccctttgcttctgtttttgggaatgaatcatttggaggtggatt

SEQ ID NO: 556184 - DNA, 100 bp, Homo sapiens
ggagagggaggcggcggaccgtcccgcgcggggcacgatgttgaacatgtggaaggtgcgcgagctggtggacaaagcattgtttcccagagaaagctgt

SEQ ID NO: 556185 - DNA, 80 bp, Homo sapiens
tggaaaacacagatccagagtgttactggcttacaaattggattgagcttacatcacgagaaaaagcagccaaggattat

SEQ ID NO: 556186 - DNA, 90 bp, Homo sapiens
gggaggtggaccggagctcgtccagctgcgtgcctaggtgggatgtgtgtgggctgaaattccgagctgcggttgtgcatgagaatacac

SEQ ID NO: 556187 - DNA, 75 bp, Homo sapiens
agaacatggaggatcgtcaggctctaaacaaaattctggcaccttctaaaaatgaacaagagcagctctgatttg

SEQ ID NO: 556188 - DNA, 90 bp, Homo sapiens
cttagctgtgctcgcgctactctctctttctggcctggaggctatccagcgtgtacgaagccatcgacagcagagatggagcatcttgtg

SEQ ID NO: 556189 - DNA, 97 bp, Homo sapiens
caagtggatcccttgggcctaggacttcgcgagaccagttgggcaacatggtgatgatgaacagtctacacagatggctgcaagttgggaagatgat

SEQ ID NO: 556190 - DNA, 82 bp, Homo sapiens
gaagatagtgcctttcagccctaccagcgctggccgcgcgccgaacccgagtccggcggcaccgacgacgacctcaacagcg

SEQ ID NO: 556191 - DNA, 100 bp, Homo sapiens
tgaagatggcggcagtggtggaggtggaggttggaggtggtgctgctggggaacgggagctggatgaggtggaaactaattctaagccagactgctggag

SEQ ID NO: 556192 - DNA, 75 bp, Homo sapiens
tcatcctgcacgccggcgagtgccagcgggaaatcgtggaacacatggtccagcactttaaaacacagatctttg

SEQ ID NO: 556193 - DNA, 51 bp, Homo sapiens
tcaccggagcgtcccagctgcgaggagaactgataaatttcaaacggaaga

SEQ ID NO: 556194 - DNA, 75 bp, Homo sapiens
gtagcgctcgtctggcggagctggctgctctgttaaaagcgaaaatgaaacaattgcctgcggcaacagttcgac

SEQ ID NO: 556195 - DNA, 100 bp, Homo sapiens
ctgccgccgccagggtctgcagggcctgggccgccgctgctacctgcagcgccgtgtggcacgacacaaaaatcagctcatgggcctcctgagtgaccca

SEQ ID NO: 556196 - DNA, 97 bp, Homo sapiens
gctgcccatcttcttcggcgccctgcgctccgtacgctgcgcccgcggcaagctttatcttcaagccaggatgaagggagactgggcaagactctta

SEQ ID NO: 556197 - DNA, 75 bp, Homo sapiens
agattgccctgtaaccgccatgcagaagaaatctggctatcatactgcagaaccttggcctgaaaatgctacatt

SEQ ID NO: 556198 - DNA, 98 bp, Homo sapiens
gaggatgttacagatgctggtcttaccacttatcatctccagtcttgtcacaggaaccaacgtccaagaggcccagaagatactcaacaacagcggac

SEQ ID NO: 556199 - DNA, 100 bp, Homo sapiens
cgtccagcagatggcggatgccctgcagtacctgcagaaggtctctggagacatcttcagcaggtggagccatcgaagcccccacccacaggctgacaga

SEQ ID NO: 556200 - DNA, 101 bp, Homo sapiens
tgaccagattggctcagaaatcatagaagagctgggggaacaacgagaccagttagaacgtaccaagagtagacagaatcaaattggatatccccaacctt

SEQ ID NO: 556201 - DNA, 100 bp, Homo sapiens
tccacctacctcaacaacccgtacgtgcggaaggccctcaacatcccggagcagctgccacaatgggacatgtgcaaggacttctggagccccgtcctgg

SEQ ID NO: 556202 - DNA, 50 bp, Homo sapiens
cctgttatttgtctcaacaaaagacatactggagcatagtgaaagagtct

SEQ ID NO: 556203 - DNA, 90 bp, Homo sapiens
ctggattacaggccaaattagcaagtccatctgggaagcgggatttgggttgatgaggagaaatggcaccagctacaagtaacccaagga

SEQ ID NO: 556204 - DNA, 75 bp, Homo sapiens
ctgagctctatctcagtgtacacggatcgtgggggtcctccctgcaagcccccagcacctgaagatgaggatgag

SEQ ID NO: 556205 - DNA, 106 bp, Homo sapiens
tttccatttgcgataagagtcttcagtttgttgcagaaaaaaataaagaagcttgaaagtgtcattactgcagtggcaccgcacgtggtattgttgtctacactgg

SEQ ID NO: 556206 - DNA, 90 bp, Homo sapiens
tgcggcagggccagctgaccggccggggcctggtccgggcggtgcaggcctccggtgtggctgtctctgatggtgtcatcaaggtgttca

SEQ ID NO: 556207 - DNA, 74 bp, Homo sapiens
ccatcctaactcagctattattttgcactatgcatggcatgggcaggccctgaagcagagaccacgatttgtag

SEQ ID NO: 556208 - DNA, 97 bp, Homo sapiens
ctgtttacatggaactcagacatctgcaaatcatgctgccgggccgcaagtacagccctgggtacaacaccgaggtgggagacaagtggatctggct

SEQ ID NO: 556209 - DNA, 98 bp, Homo sapiens
tccgctggagcggagccggccgtacgcggtgctgcgagggcagaacctgggtagatgacattaatgctgataagaatatctcttctgcacagattgtt

SEQ ID NO: 556210 - DNA, 100 bp, Homo sapiens
ctggaacagaatcaacccagaacggatagctccctcctggaaaagttattgggccagttcaattgtcttactcatcaactggagtgtacccaaaacaaag

SEQ ID NO: 556211 - DNA, 75 bp, Homo sapiens
catcatgccagggagccaagcgtcctgcccggccgaaaaatttgagggactgtttcggacttatgatgactgtgt

SEQ ID NO: 556212 - DNA, 80 bp, Homo sapiens
agactatcgacagattgccaactggtcgatcacaccgctcatgtacccagcctccttcttcttctccgtgcccagcacag

SEQ ID NO: 556213 - DNA, 83 bp, Homo sapiens
gaaaccgctgaggcttatttgggaaagaagagatatactgccattggagaactggggaaagctactgatacactagattctac

SEQ ID NO: 556214 - DNA, 82 bp, Homo sapiens
tgtgctttctgtcccagaactccaggatgaatctggttatagatggacaagagacgatcattctgcaagcaggcaacctgaa

SEQ ID NO: 556215 - DNA, 82 bp, Homo sapiens
cctcgactccaaatggttgaaaacagatatacaggatttgtacacacagatatgacgaaagacttgaaagaagaacatttaa

SEQ ID NO: 556216 - DNA, 76 bp, Homo sapiens
gccagatcctaatcttacccccatgggccttcctcgacccaaaagatgtgattcagcactgccagcgagtcaaacc

SEQ ID NO: 556217 - DNA, 97 bp, Homo sapiens
gctccccctataagcctcggcctccacagaaagtgtgttgttatgaggattcaatgaggagacctgtatgaagtgccttcccctgtgcctggctcat

SEQ ID NO: 556218 - DNA, 82 bp, Homo sapiens
agggcagagggcacctgagcggctggagagcctgttggagaaacacaaagagaggtcctgggcctatgtcaagaagtgcaaa

SEQ ID NO: 556219 - DNA, 82 bp, Homo sapiens
tcaaattttcaagtgccaaacggaggaatacctcgtatgcaacctcaggcttcagccaggaaaagactactttgtgtgtatc

SEQ ID NO: 556220 - DNA, 75 bp, Homo sapiens
ccccaacagcacggcgtggcctctcagcctcgtttattaggagtgctctctgaccacttaaatgcagagattgct

SEQ ID NO: 556221 - DNA, 95 bp, Homo sapiens
atttagatgctaatcagattgaagagcttccaaagcaacgcacctcttgctttttcctccaaagtatgttatgttaagtttcgtgatccatcaag

SEQ ID NO: 556222 - DNA, 98 bp, Homo sapiens
cgagatgtctcgctccgtggccttagctgtgctcgcgctactctctctttctggcctggaggctatccagctttgtttcgacgccggaccgcgtaaga

SEQ ID NO: 556223 - DNA, 75 bp, Homo sapiens
cagactcttcaaaacgcactcattcagtttgctactagtgagcatgtttttgaacacattaacaccgaagttcta

SEQ ID NO: 556224 - DNA, 90 bp, Homo sapiens
ggcggcggccgagggcgtcgcggactctccccgcgatgatgccgactgctgcagtaagaatgtcttttccacctcatttgaatcgccctc

SEQ ID NO: 556225 - DNA, 74 bp, Homo sapiens
gttaaggattccaagtaactcttatttgaacctcattctcaccacactctggagcaacccggacatggacactc

SEQ ID NO: 556226 - DNA, 83 bp, Homo sapiens
gttggaatgctcttttaccgatgctttaacatacagccactagcccaaacaaattcgaatatcttctaaaacaggaatacctc

SEQ ID NO: 556227 - DNA, 75 bp, Homo sapiens
gagctcaagacctaccacgaggtggtggacgagatctactttaagcatttttcagttgaaggacagttggaattc

SEQ ID NO: 556228 - DNA, 50 bp, Homo sapiens
ttttctcctccataggattacaagagagatgcaggtcagctcctccagta

SEQ ID NO: 556229 - DNA, 83 bp, Homo sapiens
atttcacagcactctgggcgaaaattggatgtgaaaatgaagccagaccgagaccaccgctgaaacttcacttctacacagag

SEQ ID NO: 556230 - DNA, 82 bp, Homo sapiens
ccgggactggtcagatgaacccatcaaagagtgcggtcctggacccaagccagaagcctctgcaaagcttccttccagacct

SEQ ID NO: 556231 - DNA, 98 bp, Homo sapiens
tcaccatggagctagcaaaaaagggctttattggtgaaaaaccatacaagtgtcaaatttgcaatcagtcttttagaattaagaaaacattaacaaaa

SEQ ID NO: 556232 - DNA, 75 bp, Homo sapiens
gacgaataaatggctagataagacaatgcagatcttcgtgaagactctgactggtaagaccatcaccctcgaggt

SEQ ID NO: 556233 - DNA, 82 bp, Homo sapiens
gacggagctgcagtcggcactgctactgcgaagacagctggcaggtataccaagcttggctacgcaggcaacactgagcccc

SEQ ID NO: 556234 - DNA, 77 bp, Homo sapiens
cgggacctgggctgggaacccgcggtggagcgggacacgaacgtgcgggctgacgcacgaggcacacaggaaggagg

SEQ ID NO: 556235 - DNA, 50 bp, Homo sapiens
gctgatgtcaacagtgaaaacgctgttttggagtcagcggaagatcacca

SEQ ID NO: 556236 - DNA, 83 bp, Homo sapiens
accagctgtgggagaaggcccagcgagtatgacctggacgcgtgtgacattcaagaaaaatacccggatttatttcaagtgaa

SEQ ID NO: 556237 - DNA, 98 bp, Homo sapiens
atttctacttggtggtgtgtaacgactgtaatcaggttgtcaaaccgcaggcatttcaatcacattatgagatgacctcgacaggaaactgcaggcta

SEQ ID NO: 556238 - DNA, 75 bp, Homo sapiens
gaaactctcagtttgtgtttctgagaaaggtcctcgaggccacacgggttaatcgaagaaagagcgcactggctt

SEQ ID NO: 556239 - DNA, 74 bp, Homo sapiens
agccactgttcgtctctggaggagatgactataagattaaggtggttgtgtcaaaccgattggtgacatctcca

SEQ ID NO: 556240 - DNA, 50 bp, Homo sapiens
cacatccattgtggagcagccttttgggattaataaagaactcttcagaa

SEQ ID NO: 556241 - DNA, 75 bp, Homo sapiens
gaactggaaacgcagaagacacttaaataggcacaccttgggcccaccccacctccacatagccttaattacaaa

SEQ ID NO: 556242 - DNA, 99 bp, Homo sapiens
aatggaatcaggcagttttgtgtccatgtgaacaacttgaatcacctcaaaaacatttgggacctgtatggcaactacagtggatagaacaagatcgag

SEQ ID NO: 556243 - DNA, 90 bp, Homo sapiens
cagccggctctggagtgcgggcgggggcgacagggccgattccggagtgggaagtgctctctggcgtggtggtcatatcgagtaaggatt

SEQ ID NO: 556244 - DNA, 80 bp, Homo sapiens
cttcatcatcatctacttcacaggaattgccatttcctgctatgggatggatgaagaagagaaccactatgtctcgcagc

SEQ ID NO: 556245 - DNA, 90 bp, Homo sapiens
ggcctccggaagcagcaccaaattgaagaggagctgggcagcaaggctaagtttgccggcaggaacttcagaaaccccttggccaagtaa

SEQ ID NO: 556246 - DNA, 116 bp, Homo sapiens
aaattaaaagaggagcagcatggcatttcagtcactggtttgcagagtccagcctgagttctaccaagtatgccacaccaaaaaggattatgaagaaattggacctagcatttgtc

SEQ ID NO: 556247 - DNA, 82 bp, Homo sapiens
aaatttgaatctgaattcccttcttcattaactggaaaaggggtgtacacaatggagaatatgtcccatggctatattgcta

SEQ ID NO: 556248 - DNA, 97 bp, Homo sapiens
tgctgcacaacctctcccccggctccatcgacctcaaggacatcaacttccggccgcagatgtcccaggttggaaaagagactgttcaaaccactga

SEQ ID NO: 556249 - DNA, 100 bp, Homo sapiens
aggaaatccaactcaaagaagctaagcacattgcagaagaggcagataggaagtatgaagaggcacagaaaactgaatctgtagataacgagggagaatg

SEQ ID NO: 556250 - DNA, 101 bp, Homo sapiens
tctgacagtggatcacaacttggttcaatgggtagcctcaccatgaaatcacagcttcagatcactgaagaaaaagtcagcactttttgaagtgtctgagg

SEQ ID NO: 556251 - DNA, 83 bp, Homo sapiens
cagcgacatgtggcgcctcccgggactcctgggccgagacaatgtggagctcatactgaaaaccatcaataaccagcacagcg

SEQ ID NO: 556252 - DNA, 100 bp, Homo sapiens
gaactgatagcttatggttctccattgtgatgaaagcacatggtacaggtcatgatgatgggcagcgcccgagtggcggagctgctgctgctccacggcg

SEQ ID NO: 556253 - DNA, 100 bp, Homo sapiens
tcggaggtctcatctttgaactactgccggagcttctgccagacatcaccacggagctggcatacctcacacgagaactgaaggcagatccttgcgtggc

SEQ ID NO: 556254 - DNA, 96 bp, Homo sapiens
tttccacaccgctcaaatgttatctgggaaattaaagttctacgtaaagagagtatggagctcgtaaaattaggatcagtgtcgtttagggatgtg

SEQ ID NO: 556255 - DNA, 78 bp, Homo sapiens
ggccttactccttcacagatcgtggctttgaagcgtatgttgaatttcaatgtgcctcatattaaaaacagcacagga

SEQ ID NO: 556256 - DNA, 76 bp, Homo sapiens
gataaagaacttcttcccaaaatgggttacctgtcctgctgccgattcctggatgacaatcagatcgtcaccagct

SEQ ID NO: 556257 - DNA, 96 bp, Homo sapiens
cgcgcagctacctcatgactattgcaccacgcccggggggacgctcttctccaccacaccgggaggtgaccattgtgaggtagatattttgttcta

SEQ ID NO: 556258 - DNA, 76 bp, Homo sapiens
ctctacctggcctacttcgtgcgtgagcgagcttgcctacatgtagcctgtgttgtacagcagaaagatgccaggc

SEQ ID NO: 556259 - DNA, 100 bp, Homo sapiens
cccagttccaaagtgtcttaaaggttctgatggtcctttggctaccagcaaaccagtccctgcagaaaagtcaggtcttccagtgggtcctgagaacgga

SEQ ID NO: 556260 - DNA, 100 bp, Homo sapiens
cagccatggaacccgggttacagcagtgagggggccacggctcaagtactcccctgccctcaacaagatgttttgccaactggccaagacctgccctgtg

SEQ ID NO: 556261 - DNA, 98 bp, Homo sapiens
gccacaccgccgccacaccgccgctgcctcagtcatgccgcttagcctgcgacgcttatgattagagccaacaatttgaaatggcctgctcacctgat

SEQ ID NO: 556262 - DNA, 85 bp, Homo sapiens
atctctggtgcatgctgatgacgaaaaacgagtgctcccaccccagcccgttgctgcccagctattggaacactgtataacacca

SEQ ID NO: 556263 - DNA, 75 bp, Homo sapiens
tccaacgccaccaattccaacctggttcaaatggtgaaagacgatgacccctcctggaagcccacttttatcgtg

SEQ ID NO: 556264 - DNA, 51 bp, Homo sapiens
gcagaagctccagagcccagacttgcaggtaatggggccacctgcttgaca

SEQ ID NO: 556265 - DNA, 100 bp, Homo sapiens
cacagtctcagccccatggggtatatccaccctcaagtgtggctcttgcagccaatgccggaacaggatttgctgttgctgagcctcaaatcgcaatgtt

SEQ ID NO: 556266 - DNA, 101 bp, Homo sapiens
ttacattagcagatatactattgtactatggacttcatcgctttatatgatcctggtggagggattgaaatgtctgagttcatccgagaggccacaccccc

SEQ ID NO: 556267 - DNA, 99 bp, Homo sapiens
gagaatcctcagtgtttgctaggttacactcctggcacaccttacaaagtgtcctgttcccccaccagcggggctgtgccaccgtactcctcctccccg

SEQ ID NO: 556268 - DNA, 80 bp, Homo sapiens
ccctaatcaagtgtgggatagtataatccagcaggcaaccaaagtcctaggcctacttacaagcctccagtctcaaatta

SEQ ID NO: 556269 - DNA, 82 bp, Homo sapiens
gctctcgtcttctgcggctctcggtgccctctccttttcgtttccggaaacatggttttaaaatcaaagatgggaaaatcgg

SEQ ID NO: 556270 - DNA, 80 bp, Homo sapiens
ccagcctgcggagcctgtggggcaggtacaaattctgagctgtctaacccctctgaaacggaatctgagcgtaaagacga

SEQ ID NO: 556271 - DNA, 100 bp, Homo sapiens
cctgatgtgcagttaaaaaatctgcccttttatgatgtccttgatgttctcatcaagcccacgagtttagctcctctggtgcaagtgtggtagctattga

SEQ ID NO: 556272 - DNA, 83 bp, Homo sapiens
ctatttggcaagaagcagatgcgcattttgatggagcccactgcggaagagggcagcccggcaagcccgggccctgagcctgg

SEQ ID NO: 556273 - DNA, 147 bp, Homo sapiens
gaaagcctcctgcgtggaagcttccctgaggaagagctgataacaccttaaacctcctctggattcaagttaaaggtattgttgcagcatctggcagtgagactgaggatgaggacagcatggacattcccttggacctttcttcat

SEQ ID NO: 556274 - DNA, 100 bp, Homo sapiens
cagggacctgcttggccagcgacagatcctttgctgctctgtctgccggttcttgaggcgtcctgcctctgcggctctgccccctgcatcctgtgcagct

SEQ ID NO: 556275 - DNA, 50 bp, Homo sapiens
tgtaaaccagagattgcatatggcatcagtgtcattcaaggacgtgacta

SEQ ID NO: 556276 - DNA, 100 bp, Homo sapiens
ggaagatggcgctggccggatggaaatcctaatgacagtctccaaattcgcctccatctgtaccatgctctaagcgaaagacatgaggcctcagcctgaa

SEQ ID NO: 556277 - DNA, 90 bp, Homo sapiens
gctgatataatggccaagaggaatcagaaacctgaagttagaaaggctcaacgagaacaagctatcagcctcccaactgatatccaggct

SEQ ID NO: 556278 - DNA, 100 bp, Homo sapiens
aatcggtggccatgatctctaggtcactggaaggactgagcgcattcaggagcctggaggaactcatcttggacaacaatcagctgggggacgaccttgt

SEQ ID NO: 556279 - DNA, 100 bp, Homo sapiens
ccatctacaggtatggatcccaaagccaaacagcacatgtggtggcgacatgtctaagaatgtgagccagtcacagatggcaaaattgaaccaacaaatg

SEQ ID NO: 556280 - DNA, 75 bp, Homo sapiens
gaaggtctagtcgacacggctgtaaagacagctgaaacgggatacatgcaggcaacatcagatgctgacctgaaa

SEQ ID NO: 556281 - DNA, 101 bp, Homo sapiens
gcgatgaccacgctacgggcctttacctgcgacgacctgttccgcttcaacaacatgttggtcaaagaaaaagtgatgtatgaaaaagaggcaaaacaaca

SEQ ID NO: 556282 - DNA, 90 bp, Homo sapiens
gaagatgttctcgtgttctcaccacagggaaggcagaagcacagagccccacaggctaagaaaatgagacggagtttcactgttgttgcc

SEQ ID NO: 556283 - DNA, 98 bp, Homo sapiens
ttgacgcccctggggagattggacaagtatgctgcaagtgagaacatatttaacaggaatccatcaacagcatcaagtccagactaagcaaaagtggg

SEQ ID NO: 556284 - DNA, 90 bp, Homo sapiens
cagacatcgagaagcataatgacattgtggacagtgacagcgatgctgaggatcgaggaacgttgtctgaacacccagtgcatcccagaa

SEQ ID NO: 556285 - DNA, 120 bp, Homo sapiens
tgacaatgggctattggccgacatatgtgcctatggaagttcatttaccaccagagatccttttatcctgccacaccagcaggttgataaaggagccatcaaatttgtactcagtggagc

SEQ ID NO: 556286 - DNA, 100 bp, Homo sapiens
ctctgcaccgctaggccgtccccgaccttgcctgaacaaggtttctggtcctcataccgtgtggttgagtgaaatcaaaacttccacgatagcaatgctg

SEQ ID NO: 556287 - DNA, 74 bp, Homo sapiens
ccggctgcggtggctgtcgccccccaccctgcagccaggactcgatggagtttgcagctcaccttgtgaagatg

SEQ ID NO: 556288 - DNA, 51 bp, Homo sapiens
gcggcggccagaggaaccccgaggtccaagacaactttgacaagattgaat

SEQ ID NO: 556289 - DNA, 90 bp, Homo sapiens
agaaattttaaagactgttgtgaacagggatgtacctaattcttcgagtgcttcgactgaccatgatcccctgggccccctccctcctgg

SEQ ID NO: 556290 - DNA, 73 bp, Homo sapiens
gaggtgctgctgctgagtacttttggctatgatgatggatgcttaaatggcagaggccaagcccagactccag

SEQ ID NO: 556291 - DNA, 75 bp, Homo sapiens
gagttattctggcttccaatagaggtggccttggagatgctctttactggtgagcccatttctgcccaggaggcc

SEQ ID NO: 556292 - DNA, 83 bp, Homo sapiens
ctttgctggaggttaaaagtttacccagggtttatgccctggacagcatcatgcagacctggtttacactctttactcccacc

SEQ ID NO: 556293 - DNA, 75 bp, Homo sapiens
agaacaccccaatgattgctggccttgggaaggcatccgtgtacaagatttgcagagaaatgtatgacgatggag

SEQ ID NO: 556294 - DNA, 141 bp, Homo sapiens
ccggggcctgagggggcctggcggagcccgagcgcggcccggcccgcagcgtggggccccgagcgcgggatgtcaaaccctgaagtgatccgagctctggagcgtggataccggatgcctcgcccagagaactgcccagag

SEQ ID NO: 556295 - DNA, 90 bp, Homo sapiens
atcacgaggtcaggagatcgagaccatcccggctaaaacggtgagaaaccctatcgttgcaacatctgtggggcccagttcaaccggcca

SEQ ID NO: 556296 - DNA, 100 bp, Homo sapiens
ggcggcggcggccaagcccaacaacctttccctggtggtgcacggaccgggggacttgcgcctgatattaacctggctgcagagccaaaagtgaaccgag

SEQ ID NO: 556297 - DNA, 75 bp, Homo sapiens
ttaatcctgaaagccatgcagcgggctggttatgatggtgagagtatcggaaattgcccgttttctcagcgtctc

SEQ ID NO: 556298 - DNA, 76 bp, Homo sapiens
accttcgcctggcccaccactcccagaggtctcggcgcggaagatggccggcggcgtggacggccccatcgggatc

SEQ ID NO: 556299 - DNA, 82 bp, Homo sapiens
cactttcgccagcccgtgccgcgagcgcggcctgcaggaggttttggctacgggcctccacctccaccgccagatcagtttg

SEQ ID NO: 556300 - DNA, 100 bp, Homo sapiens
gaaagttcctcaagatggagactttgactttttggctgctgaacagttcaagaaaaccagtctccatgtggctaagagtgttttgaacaacagacatata

SEQ ID NO: 556301 - DNA, 73 bp, Homo sapiens
atcaacctgggaaggaattcaggctggaaaaggcatttcatccttcatgaagccattcaggattttgaattgc

SEQ ID NO: 556302 - DNA, 83 bp, Homo sapiens
gcatcacgtgtctgcactcgctttcctcggattcccggatgtggtgctgaagctgctgaaagatggcagaagaagtggtggta

SEQ ID NO: 556303 - DNA, 99 bp, Homo sapiens
cagtttttccacaccgctcaaatgttatctgggaaattaaagttctacgtaaagagagtatggagctcgtaaaattaaaatacggggttgtagaaggca

SEQ ID NO: 556304 - DNA, 100 bp, Homo sapiens
atggaatccttctcctcctgcttgtgagcccagaaattatgatgtgatgaccccaatggttgatatacttatgaaactttttcgaaatatggtgaatgtg

SEQ ID NO: 556305 - DNA, 75 bp, Homo sapiens
agctcaatggcggcagtcgcgctgagggactcggctcaggccaccccagcagacatgtttgccaaggcctttcgg

SEQ ID NO: 556306 - DNA, 100 bp, Homo sapiens
atcaggtgtaaggtgcgcagcagaaagcatttaaccagcatggctacttcatattttggaaagcagtttttaagacaacaatgtgcaggttctatctgtg

SEQ ID NO: 556307 - DNA, 75 bp, Homo sapiens
caggcactgagctgtctgtgcgcggtctcctctgtggtctgcttcctactgtctcctgcagcttccttcatcact

SEQ ID NO: 556308 - DNA, 126 bp, Homo sapiens
tcctgttataaatacgatgttgcagctcagccctgaagaaaagggaaaacttgctgcggttgctcaaggtgctggagaatctggtaaaagcaccattgtgaagcagatgaggatcctgcatgttaa

SEQ ID NO: 556309 - DNA, 101 bp, Homo sapiens
cagcgacacaattgtctgtgacagtaacagtacttgggatcccccagttccaaagtgtcttaaaggttatggaggttttgatgactatggtggctataata

SEQ ID NO: 556310 - DNA, 75 bp, Homo sapiens
attgccctgtaaccgccatgcagaagaaatctggctatcataatcagcacttgactgtttattttcaaatctcac

SEQ ID NO: 556311 - DNA, 96 bp, Homo sapiens
caggcgcctccggcccatttacggtttacacagtaaacaatgtgaatgtgatcaccaaaatacgcacagaacatctgaccgaggaggaaaaaaaga

SEQ ID NO: 556312 - DNA, 83 bp, Homo sapiens
gccttctctgtcagctctttccccgtcagcatcccagccgtgctcacggctttaaggagttttaagctgagtgtcactgtaga

SEQ ID NO: 556313 - DNA, 83 bp, Homo sapiens
ccgtccgccgccaccacccactccggacacaggttgcttataaaaagggagtcaaacatctttctgctcttcttgatccagag

SEQ ID NO: 556314 - DNA, 100 bp, Homo sapiens
gttgcgagagaggctgcagggggagcacagccagaatggggaggaggagcctgagtgtactccttggatgggattctggtgtttggtttgctctttgttt

SEQ ID NO: 556315 - DNA, 88 bp, Homo sapiens
ccaccgccgtgaacggctgcgtgaccggcattttccctgaagatgagatcccagagaaggcctgcaggcgcctgcttgaagggaggcg

SEQ ID NO: 556316 - DNA, 73 bp, Homo sapiens
gccagcaggcagatgattcaacagtatgaaatgtactgcaaagattcacggcgacagttgcctgctgtcagta

SEQ ID NO: 556317 - DNA, 75 bp, Homo sapiens
caacgtgatgatctgtgagaccaaagttctctcagctactggaagagaaaaacaccctttccattcagctctgcg

SEQ ID NO: 556318 - DNA, 50 bp, Homo sapiens
cttggactgagtcctgcaggacacaggtttctgggtgtctctggggagcc

SEQ ID NO: 556319 - DNA, 90 bp, Homo sapiens
gggccgtactgtgagaacaagaaagaccacagcaagattctttcattcgtctcctcctagcctgggggaccaggctcgaactgaccctgg

SEQ ID NO: 556320 - DNA, 88 bp, Homo sapiens
cagattactgagagtcttccgttactagcgatagggtctcaccatgttgcccaggctggtcttgaactcctggactcatcctaaagtg

SEQ ID NO: 556321 - DNA, 100 bp, Homo sapiens
ccctcaagactggtccacggagtgtatgaccacaaacagccatcaaggttggtgacatcgtgaaagtcacaaggatgaatataaatggccagtgggaagg

SEQ ID NO: 556322 - DNA, 74 bp, Homo sapiens
cataatatagcaggaacaacacattcaggtgctgaaaaagaaggacagaataacgggctcccagattcacaagc

SEQ ID NO: 556323 - DNA, 100 bp, Homo sapiens
ggccagtattatcaggcatggagatgctactgatgtcaggtactaaggctcgtacgtctgcatcgattatcttacgtggggcaaatgatttcatgtgtga

SEQ ID NO: 556324 - DNA, 100 bp, Homo sapiens
gcttcaatgatgggaaggtggatcccgccgggaggtactttgctgctggaggaaagcaggaatgttcagaggcaaatgaagattctgcagaataagcaag

SEQ ID NO: 556325 - DNA, 50 bp, Homo sapiens
agaatgagatagccgtcctgagaaagctggagtgcagcggcgcgatctcg

SEQ ID NO: 556326 - DNA, 75 bp, Homo sapiens
acagcggccccctggagggggcagtcccgggagaacctgcggcggccggagcggactgcaatgtgccgatcttag

SEQ ID NO: 556327 - DNA, 74 bp, Homo sapiens
gaggaggaagccgagtttggcgaggaggatcttttccaccaacagctgtggtcgccaggacccccccagagcca

SEQ ID NO: 556328 - DNA, 111 bp, Homo sapiens
ttaaaagcccaggcccagtgggaatacgtatcacctgctcatgtcccatggggggacttgatctcatcttcatgccaggccttgggtttgacaaacatggcaaccgactgg

SEQ ID NO: 556329 - DNA, 82 bp, Homo sapiens
ctgaggcggccgcggggcccgagcgcaggaatgcagtttattctactccaagagattctgcctcccttgtgtccgggagaac

SEQ ID NO: 556330 - DNA, 96 bp, Homo sapiens
gcggttcctgcgcgcccgggatttcgatctggacctggcctggcggagaatttggatggagagacccggaactgccggaagtgattcagatgttgc

SEQ ID NO: 556331 - DNA, 100 bp, Homo sapiens
tggactgaaggccgctatgatcgaattggtggaaaggttgaagttcaagagctcagaccctaaagtccagaggtgtccttctaaagctggtagaggtttc

SEQ ID NO: 556332 - DNA, 75 bp, Homo sapiens
ctcaagatacgaaatgagacttttgaagtgcctttgatttctggatgtgttcagagcaacattgttttgttgaca

SEQ ID NO: 556333 - DNA, 75 bp, Homo sapiens
aggctcctggcaagttctgcagatgtccccttggagaaaatgctgagaagcttctgcagttcaagcgttggttct

SEQ ID NO: 556334 - DNA, 118 bp, Homo sapiens
ctgaggaattcgagaccatagttttgaaggcccttgtgaagggttacgaagtgacagtgctggtgcgggactcctccaggctgccatcagaggggccccggccggcccacgtggtagt

SEQ ID NO: 556335 - DNA, 75 bp, Homo sapiens
tttcctgctggtggcaaccgcctacgagacactcaaggtcacttagaaaattggaattgtaccatggaacttcat

SEQ ID NO: 556336 - DNA, 100 bp, Homo sapiens
caccggccgcacgccatgagggccctgtgggtgctgggcctctgctgcgtcctgctgaccttcgtggatgctgggcacagagctgtcatctttgaccgat

SEQ ID NO: 556337 - DNA, 75 bp, Homo sapiens
agaactggattcgtggcgccacaagctcattcactgtgtagacgatcctgaagatcctcgtctccgggggcggca

SEQ ID NO: 556338 - DNA, 75 bp, Homo sapiens
tcaactttactgagaattttccacctcctgacacaacaccactcactgggaatggaggaagaagatgtgattgaa

SEQ ID NO: 556339 - DNA, 97 bp, Homo sapiens
gcggcgggctcctgcgagaagcaagcggaacttcctgaggccccatggcgggtgccagaaaatggacacgaccttcaccgagggtgctgtaccgggg

SEQ ID NO: 556340 - DNA, 50 bp, Homo sapiens
ggtggaggtggaggtggaggtggagattggactggctaaggacgatcagc

SEQ ID NO: 556341 - DNA, 50 bp, Homo sapiens
cgcgacacccttgaagctgagaaatggaccttctggaccctgcacggtgg

SEQ ID NO: 556342 - DNA, 82 bp, Homo sapiens
ggaagatggacagctgggaattgctgaattagaactgcagaggttcctctacagcaaggaagtgagctcacaatgactcaag

SEQ ID NO: 556343 - DNA, 100 bp, Homo sapiens
tttcttgttttctcaacattcacaatgtccatatatagaatttgaatcatttgacaagaataagactgattttatgggaaaattaagcagatgctccagt

SEQ ID NO: 556344 - DNA, 75 bp, Homo sapiens
gtctacaaggcgaggcggaaagatggtttgagccccagctacatagatctgactgagtgtccctacatgtggccc

SEQ ID NO: 556345 - DNA, 90 bp, Homo sapiens
aaggaggtagaccaggaggatttcctgatcatccacatcgaggttttgaaacagtgattgatatgcccgagcacaaccctggcaatttgg

SEQ ID NO: 556346 - DNA, 75 bp, Homo sapiens
agcatcaccatctcttcagcaactggtagtagagggccgttgctccagggagaactgcaaatatcttcatccacc

SEQ ID NO: 556347 - DNA, 100 bp, Homo sapiens
atcacagcagcaaaaccttcatggtgatccatggctggacggagtacttcttgcaagcagagctgacaagcaacgtcttaaaaacaggcgtggtgcgctg

SEQ ID NO: 556348 - DNA, 100 bp, Homo sapiens
cggacagaagatggtgcagaagaaaccagccgaacttcagggtttccaccgttcgttcaaggttggtgttcgaggaagagacattgttgttcttggtgtg

SEQ ID NO: 556349 - DNA, 98 bp, Homo sapiens
gggaaggcgcgagtgaggaaaggaggtactgtagaagaatggctacgtgactgtcagtgagatcaaagccagtcttaaatgggagaccgagcgagcgc

SEQ ID NO: 556350 - DNA, 100 bp, Homo sapiens
agctcggaattctgtatagaaaaagcacctggatcccagtctttcaatggcttcaagacaaccagaagtgcctgggcctattccctggtggattccagtc

SEQ ID NO: 556351 - DNA, 74 bp, Homo sapiens
ggaaattgtacagtgacatcttctgggatttagtctgagtatgctcaggtaatcaaaatgttgggaaatggacg

SEQ ID NO: 556352 - DNA, 75 bp, Homo sapiens
cacagacagaatccctgctaccaaaatttaaaagcctgttgattcaagaactttctaaagtatttccggaagaca

SEQ ID NO: 556353 - DNA, 50 bp, Homo sapiens
gctcccccgatcctattcccagtcgtgcaagaaactatattcagtctttg

SEQ ID NO: 556354 - DNA, 106 bp, Homo sapiens
ctacctctggctcaagttttcacttatcatctattccaccgtgttctgggaaatgggtcctgatgaatatgaagagatggaagaagaggaggaggaggaagaggag

SEQ ID NO: 556355 - DNA, 60 bp, Homo sapiens
tccgtgctgcacggaagaatatcagctccagcacatgcagatgacaatccaggctctcca

SEQ ID NO: 556356 - DNA, 75 bp, Homo sapiens
aaaacacccacctgaaaatatcattgatggattcagcgtttgttggaagcacagtctctgatgccctgttcccct

SEQ ID NO: 556357 - DNA, 89 bp, Homo sapiens
agaactgtagatgcccggctgaaattaagtgaggaattgagtggtggtagattgaagggagagcctggggatgtacaggagatgcctgc

SEQ ID NO: 556358 - DNA, 78 bp, Homo sapiens
tttgacagggacatcagtggagccttctcagacccacagacacagaatgttcagcttaacaaagaaatgacacttgcc

SEQ ID NO: 556359 - DNA, 89 bp, Homo sapiens
ggccggcttggagaggccgagggtttgatgaaggtggaggcagcgcggctctcaggaagctcttcgtgggcggtcttgactggagcacg

SEQ ID NO: 556360 - DNA, 75 bp, Homo sapiens
cagcctggctcctggtggctccagcagcagatgccttcaattaagttgcagagttctgatggagagatatttgaa

SEQ ID NO: 556361 - DNA, 100 bp, Homo sapiens
tgacactgcagctgcagtcaacctcttccccaatttcaatgcgtgctggtcccaaaggcgataacatctatgaatggagatcaaccattctagggcctcc

SEQ ID NO: 556362 - DNA, 112 bp, Homo sapiens
caacgctgagacagaccggctggaggctcgcaagaaagccaagaacaagcagctgggccatgaggaaggacagaagcagtacaacatccacgtgggaactgctggatcaaag

SEQ ID NO: 556363 - DNA, 75 bp, Homo sapiens
ttgctttccaaaatggcgcgggtgctgaaggctgcagccgcgaatgccgtagactttggctgagcaaaacactaa

SEQ ID NO: 556364 - DNA, 83 bp, Homo sapiens
cagccgcctccttgacagtcttcggcaggaagggtggcccagttgaaatccttcccttcctctaccttggaagtgcctaccat

SEQ ID NO: 556365 - DNA, 90 bp, Homo sapiens
tgaaggaaattttgccaaagaagtgagccatgaaatggatggacttatttttcagcctactggaataccatgtttgtgtggaagtgcccc

SEQ ID NO: 556366 - DNA, 82 bp, Homo sapiens
gctgcgggaaatcgggctgaagcgactgagtccgcgatggagtaccatggggcgcaagttggaccctacgaaggagaagcgg

SEQ ID NO: 556367 - DNA, 75 bp, Homo sapiens
ctctaacactcatcttcaaaagactgaatccgtctcttgctcaagtgaaaattgaagaagcaaagcgagaactag

SEQ ID NO: 556368 - DNA, 114 bp, Homo sapiens
gccgcaccatgccgctcctaagcctgcacagccgcggcggcagcagcagtgagaggcttgggcactgtttaaaggaaagttccgagaaggcatcgacaagccggaccctcccac

SEQ ID NO: 556369 - DNA, 77 bp, Homo sapiens
accacagtactatcgtctatcattggatgaagtggctccggagatcaggaggatgcattagcacaacaggcctttga

SEQ ID NO: 556370 - DNA, 100 bp, Homo sapiens
cgacggctgggggctcccggcgcgggggacgctggtgaccaagatggcggcggagctggtggaggccaaagtgtctcaaaggctgttgagcacatcaata

SEQ ID NO: 556371 - DNA, 129 bp, Homo sapiens
ttcccaaattggtaacctggaggccttgagagaccttaatgtaagaagaaatcacctagtacatttgcctgaagatgacgtccggttgtttgccttcgtgcgcttcaccaccggggatgccatgagcaa

SEQ ID NO: 556372 - DNA, 90 bp, Homo sapiens
agagcatacagcatcatctgaggacggctcaggagcatgacaagcgagaccctgtggtggcttattactaaaatgcttggacagaagaga

SEQ ID NO: 556373 - DNA, 98 bp, Homo sapiens
gcacctgcgaggctgtgatgatcctgcgctcccgtttcctggatgccaggtgtctgcggaaactcgaggacattcaccacgatgattttcctctcttt

SEQ ID NO: 556374 - DNA, 75 bp, Homo sapiens
gctaggtgagcggctccggccagagtttcgctcttgttgtccaggctggagtggaatggcgtgatctcggctcac

SEQ ID NO: 556375 - DNA, 98 bp, Homo sapiens
ttcggcgctatggaggagctcgatggcgagccaacagtcactgcttgcttccggcgtcatggctcaaagggccttcccgaatccttatgctgattata

SEQ ID NO: 556376 - DNA, 75 bp, Homo sapiens
caggcgctggcgtccggcctgacggaatcggacatgtccaaaccaccgtgttacgaagaggcggtgctgatggca

SEQ ID NO: 556377 - DNA, 83 bp, Homo sapiens
gattcacaccgtcttcggtctcctggggtcggcgccgagtgggaggatggcggaagagtctgctacaccatttttgatttggg

SEQ ID NO: 556378 - DNA, 100 bp, Homo sapiens
caactgaggcagcggcaggctcaggtgcagccgctggatcacagtcaccttctatatagcaccatccccaggatgcaggagccggggcagattgtggaga

SEQ ID NO: 556379 - DNA, 90 bp, Homo sapiens
gatgaagttaaaaatgtgccttgtggaacaagccatgaagactttgaatttatttcaggaacacgaatgcgcaaacttgctcgagaaggc

SEQ ID NO: 556380 - DNA, 97 bp, Homo sapiens
gacgacaccgttcgtggggtcccctggtgcttctatcctaataccatcgacgtccctccagaagatgaccaaaatgttagacttgcttgaggacttc

SEQ ID NO: 556381 - DNA, 100 bp, Homo sapiens
aagactctcctctgaggtagcagcccccagagaaggttagctgttctctgatggaggctgaaccgtctgagcccagaagtgctgaggtgacgaggaagcc

SEQ ID NO: 556382 - DNA, 80 bp, Homo sapiens
tctggatggaagccatggatggccgggaacctcatcagcgagagctttctaactgtcaaaggtgctgccctttttctacc

SEQ ID NO: 556383 - DNA, 98 bp, Homo sapiens
taggctcttccctggctgcgaacccaggctccctccagctgctctgttaaaagcgaaaatgaaacaattgcctgcggcaacagttcgactcctttcaa

SEQ ID NO: 556384 - DNA, 99 bp, Homo sapiens
gccaaatccagtgctattgaaacagcctgaagaatgcaatcttaatttgcctgtatgggacccaagggtgaccaagaatatggcccaggtgaccaaagc

SEQ ID NO: 556385 - DNA, 88 bp, Homo sapiens
gagggactgggagtcgttagtgaggagctctgtgtgtcgtctgagcagtcgcgagaagatttccctccaggacttgtccaaggagcgc

SEQ ID NO: 556386 - DNA, 83 bp, Homo sapiens
gatgtcactcaggagcacgagcgaagtacagcttatggatgggtatcatgatattagctggtttgacatcaagtcatttgtga

SEQ ID NO: 556387 - DNA, 75 bp, Homo sapiens
cttacctgtcctactcaccgatttgaagattcaatatactaaggaagacgtattttagcagatgaagcactcaag

SEQ ID NO: 556388 - DNA, 74 bp, Homo sapiens
aaaaaatgaccttcggtatattgaaatgcagctgtcggaaaaggtaacagaagatggaactcgaaatcccaatg

SEQ ID NO: 556389 - DNA, 100 bp, Homo sapiens
aggaactgtggcttgtgatccatgggcgagtctacgatgtcacccgcttcctcaacgagatttttgagaaaactgcctttccaaacagcattgcagttga

SEQ ID NO: 556390 - DNA, 50 bp, Homo sapiens
catcctcgtgctggaggaacaggtggctttttctcaagtatattttccag

SEQ ID NO: 556391 - DNA, 88 bp, Homo sapiens
caagagtctcgaccactgaatggaagaaaaggacttttaaccaccattttgtgacttacagaaagggtcttgctctgtcacccaggct

SEQ ID NO: 556392 - DNA, 100 bp, Homo sapiens
gaagatgaaacttttcctcctttcccacctccagcctctccagagagacaagatggtgaaggaactgagcctgatgaagcagggcactgtgacctttgaa

SEQ ID NO: 556393 - DNA, 50 bp, Homo sapiens
gagaccgagctagatgggctcagggggacttgatctcatcttcatgccag

SEQ ID NO: 556394 - DNA, 83 bp, Homo sapiens
cctgctccggagtcataaagaggacgccgggacaccaagaagcagggaaatgactgggcagtttgacccttaagcctgaagat

SEQ ID NO: 556395 - DNA, 50 bp, Homo sapiens
ggagaaggcgctccggggcgaagcagagatcctgaaggagctagacgagt

SEQ ID NO: 556396 - DNA, 100 bp, Homo sapiens
tttggttacctatgtacctgttaccactttcaaaaaggcggggtttcaccatgttgcccagactggtcttgaactcctgagcttaagcaatccacctgcc

SEQ ID NO: 556397 - DNA, 100 bp, Homo sapiens
tacaacacagacaccaaataaaatagccatctcacctttgaaatcgccaaataagggcagaagagatgaaagtctgaaagtggatgagcatctggccaaa

SEQ ID NO: 556398 - DNA, 100 bp, Homo sapiens
caaaaataatctgtaatactaaagacaatataaatactgcaacaactgtagctgacttaaagtcaataataaatgaatgctataactaccttgagttaat

SEQ ID NO: 556399 - DNA, 75 bp, Homo sapiens
ctgaaaaatcaatgctgtccaaacttaaacatgcctacgagcgggacctggaggctgacatcatcggcgacacct

SEQ ID NO: 556400 - DNA, 50 bp, Homo sapiens
cgcggagccgcgcagccctcggagcacggataagttctgaacgtcgaaaa

SEQ ID NO: 556401 - DNA, 100 bp, Homo sapiens
atgtctgtgtctaatctatcatggttatgtttaaaactcctgtgtcaattactgaacatcccaaaatcaatgagtggctcacattggtagaaaaggagat

SEQ ID NO: 556402 - DNA, 75 bp, Homo sapiens
cagttgtcatatgtactgtgtcagccatcatgtgtgtcagcatgagagatagtcactgccaatccttggaacaca

SEQ ID NO: 556403 - DNA, 97 bp, Homo sapiens
cacggagatacactttgtcaccaaatgtgcctttcaggcagctgacacacaagagttcaggaccaaactgcacaaagtatttcgtgagatcacccaa

SEQ ID NO: 556404 - DNA, 100 bp, Homo sapiens
ctggagacgccgtggcagcctgaacggagtgtgcgacggattgggagagagtacccagagaaggagaagccagcaaaggagacgacacagacaagacctc

SEQ ID NO: 556405 - DNA, 83 bp, Homo sapiens
aggatgggaccaccgcatacattcaccaggtgacggtacagaaagtggaatggatatgaaagcatacctgagatctatgatcc

SEQ ID NO: 556406 - DNA, 74 bp, Homo sapiens
ttgaagagggctgcaaggtgggaagtgaagtcagtgcctcagttgctgctgacgaagaatttgatgaactatgt

SEQ ID NO: 556407 - DNA, 100 bp, Homo sapiens
ctgttttatcaatcaggaagtcaagtatctttttacaggacttaaattgcctccttctgaagaaataaaaacaggtgaggatgaagatgaggaagataat

SEQ ID NO: 556408 - DNA, 50 bp, Homo sapiens
ctacaaccttcgatctcctgacgacccatgactgaagagttgctgaaaca

SEQ ID NO: 556409 - DNA, 98 bp, Homo sapiens
cctttgtcacgccactgccatgtgccatcacaggaagatgagaatgtgcctactgctcctgatcctccaagtcaacatttacgtgggcatgggacagg

SEQ ID NO: 556410 - DNA, 76 bp, Homo sapiens
agaagttcttcgatgtatctaaacttggcaccaagtatgatgtattcggaaggaagtgacattgtacctcagagta

SEQ ID NO: 556411 - DNA, 90 bp, Homo sapiens
ggtcgataagctggaactgatgggcggaggctcagctgtgattgacatggagaacatggatgatacctcaggctctagcttcgaggatat

SEQ ID NO: 556412 - DNA, 100 bp, Homo sapiens
cctcaagcaacagagtgagctccagagtcaggaggctgttgtggatcttcatgctgatgactctcgcatctctgaggatgagacagagcgtaatggcgat

SEQ ID NO: 556413 - DNA, 97 bp, Homo sapiens
taccgaagtctgcttctgcttccaaaggagaaccgcagtgaaagtgctggacccaaaggagacaacatttatgaatggaggtcaactatattgggac

SEQ ID NO: 556414 - DNA, 100 bp, Homo sapiens
gggagggtggttaccgctgaggagctgcagtctctgtcaaggtcagtttaggggctggtgcaaaggatgagttgcacattgttgaagcagaggcaatgaa

SEQ ID NO: 556415 - DNA, 100 bp, Homo sapiens
tcctggagtagagtcttttttcactgagggtgtcatggagaaactccagctgggcccagagattctgcagcgggaaaatccaaggcttatttatgccagg

SEQ ID NO: 556416 - DNA, 75 bp, Homo sapiens
cgagactcaaagtcctcagagcaagagatgaccttatcacaatgacaagagcacctcaaaggcagcagcctcaag

SEQ ID NO: 556417 - DNA, 100 bp, Homo sapiens
cacgggtgcaggaattcacacagaaaagtggaggccaaggcgtgagaattcctcaatgactgccctctaaaggaagaggaagaccatgtactcagctgca

SEQ ID NO: 556418 - DNA, 78 bp, Homo sapiens
ggggtcacggtgtttgccgtggggaagcaccgtctgcgtcctgctgtccttccccttcatcttcagcccctgcctggg

SEQ ID NO: 556419 - DNA, 90 bp, Homo sapiens
caggccacagtgtcctgggactccggagggtctgatgaagcaccgcccaaggatgatcttgaagaccttatagttaattgggatgagagc

SEQ ID NO: 556420 - DNA, 90 bp, Homo sapiens
attcctgcaaattccaaagctgttggaataaataaaaatgactacttgcagtacttgttcttctcaccactaaatccaatacgagttcat

SEQ ID NO: 556421 - DNA, 100 bp, Homo sapiens
gcaccttgcgcttcttgcagtcgagataatcattcaggtcttcgtgagctaaggccaaacaaacaaaaaacacttgctttgatggactgaatactgttat

SEQ ID NO: 556422 - DNA, 100 bp, Homo sapiens
aatgacaattacctgacgatcacagggccttcgcaccccttcctgtcaggggccgagtggcccaccctcaggaccctcaccacccatcagagaagcctgt

SEQ ID NO: 556423 - DNA, 100 bp, Homo sapiens
accaagaagagcagaaatgacctgatccacgcagaggagggagaggaccggtttgcagatctctgtgctgttggtgtggtacatggacggctatcacaac

SEQ ID NO: 556424 - DNA, 76 bp, Homo sapiens
ggaagacatccagtgtacctacggaaatcctaactaccactgtgacatattcgatgccatgttccctgtcactcac

SEQ ID NO: 556425 - DNA, 83 bp, Homo sapiens
gtctggcccggcgggaagggagaagacactgcgtcaagcaggtgccccgaataacgtgagaagccctaccactgcaactggga

SEQ ID NO: 556426 - DNA, 83 bp, Homo sapiens
tgctcctgtcgccttcgcctcctaatccctagccactatgttctgggaagtcatcagtgatgagcatggcatcgaccccagcg

SEQ ID NO: 556427 - DNA, 50 bp, Homo sapiens
ggacaccgcagtatgaggcagagagaggtggagaagagcgagtacttgag

SEQ ID NO: 556428 - DNA, 101 bp, Homo sapiens
atttgttaaggattccaagtaactcttatttgttcattatgctgacatatcttttcatgttggcctggctgggagtcacggctttcacctcactgccagtt

SEQ ID NO: 556429 - DNA, 80 bp, Homo sapiens
ggcgcgatgcccttcaggaaaggcacttccgttccggcgcccctccggtcatcaacccgctgggcaccagcttcccggac

SEQ ID NO: 556430 - DNA, 100 bp, Homo sapiens
ctgtgtcagaaggccacctcaagaggaacatcgtggtgaagaccgtggagatgcgggatggagaggccgccgactcgaagcgtgagcagttccggaggta

SEQ ID NO: 556431 - DNA, 75 bp, Homo sapiens
acctcaggacttgagtaacagcaacatggaaggagctgaagagaatgcaggacctggacgaggatgccaccctca

SEQ ID NO: 556432 - DNA, 50 bp, Homo sapiens
gctgtattgcagaacagcctcagcctgtcgttgaggacttccacatggag

SEQ ID NO: 556433 - DNA, 92 bp, Homo sapiens
atcctggtgtcgccatgggccgccgccccgcccgttggtaccagcctccgaacctcgccatctctaccctctactggaaggcctggcccctc

SEQ ID NO: 556434 - DNA, 51 bp, Homo sapiens
atttaattctcagaagccgatcacaagtgactggtctgattgggaagaaca

SEQ ID NO: 556435 - DNA, 75 bp, Homo sapiens
acagaaatctcttgggagaataagttatgtgaaatcctagctaaagaaaaggacactataagaaaggaatattgg

SEQ ID NO: 556436 - DNA, 75 bp, Homo sapiens
ggatgtcggcgaagagttcaaccaggtgacagagctgaatgaacctctctccaatgaagatcgaaatctcctctc

SEQ ID NO: 556437 - DNA, 88 bp, Homo sapiens
gaccctgggatcctgccccgggccactgtctgtgaagcagccgccctggagaaacagatcgctccttccaactcctcagaacctccac

SEQ ID NO: 556438 - DNA, 100 bp, Homo sapiens
atactgggctgaagaactttgaaagagctctctacttttatgaacaggcatgttatttgaaagcaattgagacgcaaccgaactttgcagtagcttggag

SEQ ID NO: 556439 - DNA, 100 bp, Homo sapiens
cttttgtgaaagtgtataactacaatcacctaatgcccacaaggaacccttctctgaagcaacagctcttctcctacgccattctgggctttgccctctc

SEQ ID NO: 556440 - DNA, 51 bp, Homo sapiens
aggcagcaggggtcctcattcacaggccaagactaaggggctgcagagcgg

SEQ ID NO: 556441 - DNA, 101 bp, Homo sapiens
ccggcccgggccgcacccgccggccccatgaggagggacgtgaacggagtgaccaagagcaggtttgaggaatcatattgacaggtcatgaaaatgagacc

SEQ ID NO: 556442 - DNA, 83 bp, Homo sapiens
ggagtccggagtaacttggccaggctggccccgagcggaactggagaaagctgaggaccttgtgccggagccgactactggag

SEQ ID NO: 556443 - DNA, 98 bp, Homo sapiens
gctgaggacccaaagtcatttcccaggctggcggagatttttggctttcacccccaaccagtgaccaaagacttgaccactcaaagtccagctcccca

SEQ ID NO: 556444 - DNA, 90 bp, Homo sapiens
tttggcagaataaatgaaccagatgatgctgaataatcccctatttgctggaaatcctcagcttcaagaacaaatgagacaacagctccc

SEQ ID NO: 556445 - DNA, 98 bp, Homo sapiens
ttaacagactcctgacgcccacacattcgttcctggccagaagtaaaagcacagctgccttgtctggagaagcagctccagaagaaaaggaagtcatt

SEQ ID NO: 556446 - DNA, 98 bp, Homo sapiens
gttcctgatgccgtgggcaaatgtcgaagtgctggaattaaggaagagagaagggcacagttacctaagtatcaacgtaatcttcctcggccaggaca

SEQ ID NO: 556447 - DNA, 75 bp, Homo sapiens
cacttggtgaatggagatgcagctcagcagggctgctaaggaagcaaaaaaggctaagcaagcatctaaaaagac

SEQ ID NO: 556448 - DNA, 74 bp, Homo sapiens
gctggtcaacgaccgcggggcgcaggcaagatgatgatgaatgaagtcctggcagcttcctgtgtcccaggcct

SEQ ID NO: 556449 - DNA, 90 bp, Homo sapiens
gcagctgcctcagttcttagcgcagttccaggaatggatggaggtgctttaactgatacaagtctcacagattcctattttagcaccagc

SEQ ID NO: 556450 - DNA, 75 bp, Homo sapiens
aaaatgtaaagacagagaaaggcatagacggggtttgtggatgcacttagatgtttgcaatgagcactgtggctg

SEQ ID NO: 556451 - DNA, 97 bp, Homo sapiens
tccctagactcctgtctccttccaagggctaggcctgggggaccagaagcaagaggacatgctgggcctgcgccccccactgctcgccctggtgggg

SEQ ID NO: 556452 - DNA, 100 bp, Homo sapiens
cgagcggtgacctggaccacggcgcagacgcgggcgagctgcggctcggacgccagcggacacgcgggcgaggctgctttgactctcccgcgaagacctt

SEQ ID NO: 556453 - DNA, 75 bp, Homo sapiens
caagaggggaagctgacagagatacctacagacggagtgctgtgccacatatgagggaaggcaccattggagata

SEQ ID NO: 556454 - DNA, 100 bp, Homo sapiens
cgacggctctgcagttaacgggaccagctctgcggagagcctcctcaacaagcccaagagtgagatgaccccagaggagctgcagaagcgagaggaggag

SEQ ID NO: 556455 - DNA, 100 bp, Homo sapiens
ttagaaggaggttcaggctacggtgagccgaaggagttcattcaaaagtgcctgcagtctgagcctgctcgcagaccaacagccagagaacttctgttcc

SEQ ID NO: 556456 - DNA, 75 bp, Homo sapiens
atgctgccagggtccctgaagagggaagacacgcggaaacagaacatttccccagaggagctcaaaatggagttg

SEQ ID NO: 556457 - DNA, 109 bp, Homo sapiens
gccccaagacagagcgctactcctggcagtgcgtcaatcagagcgtcctgtgcgagctccagcattgactttctagcaagccagggatttgattttaataaagtttttc

SEQ ID NO: 556458 - DNA, 51 bp, Homo sapiens
ccaggccggaccgggccgggcgcccgcaggaggagaacatttgcctgcact

SEQ ID NO: 556459 - DNA, 101 bp, Homo sapiens
gcctcccagtgtctctgctgctcaaaatttctcttccagacaccattcgcttttcacccaagatgatttgatgtcttataaaactctgatgaaccatgatg

SEQ ID NO: 556460 - DNA, 83 bp, Homo sapiens
atgatggtcaattgccatgcacacttctgggaacttagtgatttggcccgtgaccctccagcacaatgttctgcaggtccagt

SEQ ID NO: 556461 - DNA, 50 bp, Homo sapiens
cttgatgagtggatgccaacaaaacgggcccagcacagggatcacattgt

SEQ ID NO: 556462 - DNA, 90 bp, Homo sapiens
gaaacaatggcatttacagaaagagtcaacagcagtggcaacaggttttcctcctccaccaggcgctccacctccatctcttataccaac

SEQ ID NO: 556463 - DNA, 76 bp, Homo sapiens
cagcagtcagggacatttctgaagcgagcgtcttcgatggaactgtggctgcaccatctgtcttcatcttcccgcc

SEQ ID NO: 556464 - DNA, 96 bp, Homo sapiens
ccagagctgcaaatatgttcaagatggctaaaaattggagtggcaggatggggaagcagaatagcaaactggcccctgaagtgatggaggacctgg

SEQ ID NO: 556465 - DNA, 78 bp, Homo sapiens
gtttttcggatcatgtctggtggctccgcggattataacaggtaagaatgattgatgttggctgatattggagtgctc

SEQ ID NO: 556466 - DNA, 89 bp, Homo sapiens
ccagactgggggcgagctgagcacctgtagtcaatcacacgcaggtacggaatggccacatcaaaagaatcactgataatgacatccag

SEQ ID NO: 556467 - DNA, 100 bp, Homo sapiens
gcgggtggcagcgatccgcgggctggcgacgtagaggaggacgcctcacagctcatctttcctaaagccccgacgaagacccatcatgagcaaccacaca

SEQ ID NO: 556468 - DNA, 100 bp, Homo sapiens
ggaatcccgttcttcgccatggagcaggttgttgccctggatgcccaaaatattgtagctgtttcatgtggagaagctcatacgttagcgctaaatgaca

SEQ ID NO: 556469 - DNA, 75 bp, Homo sapiens
tgggggtgtgcaaacccgagagaactggaggctgaggggatctggcggtggagcgctaggatcagacgcccccgc

SEQ ID NO: 556470 - DNA, 112 bp, Homo sapiens
agcgagctgagtggttgtgtggtcgcgtctcggaaaccggtagcgcttgcagcatggctcttgtcaggatggtgaagctgttcatcggaaacctgccccgggaggctacaga

SEQ ID NO: 556471 - DNA, 87 bp, Homo sapiens
tatcttcccatccaatacttggtgactggtctattcaagttcaagtgaatccagaagatcagctgccatgttacttgactcacacca

SEQ ID NO: 556472 - DNA, 105 bp, Homo sapiens
cagcaagggcaggggcagccgggatgcgctggtctcgggagccctggagtccactaaagcgtctcacagaaagttctccgctcccagacatgggtccctcggctt

SEQ ID NO: 556473 - DNA, 100 bp, Homo sapiens
aatggcaaggcagagccaccagaaaggaattccagagacgctgtaacactctgatttcattgattgagaaagaaaatatggaaattgaggaaagagagag

SEQ ID NO: 556474 - DNA, 87 bp, Homo sapiens
ctcggacccacccgcagacggcccttctgggtgctgctacccccgtatgatgatgccactgtgaatggtgctgccaaggagccaccg

SEQ ID NO: 556475 - DNA, 82 bp, Homo sapiens
cggcccggcggctgctgctgctgctgacgctgctgctgcccggcctcggggaccatcagcacgtgcccatcgacatccagac

SEQ ID NO: 556476 - DNA, 74 bp, Homo sapiens
gccgatactgagcttcttcctatttgccatggatgcaaccttaaaatcagtgacaagaaacattccaaacaagc

SEQ ID NO: 556477 - DNA, 74 bp, Homo sapiens
acatttaattttagggtcctttatatagaagggagagtaggagactgagtgccctttgcggcttgctgtctgcc

SEQ ID NO: 556478 - DNA, 74 bp, Homo sapiens
ctggcgttggtgggagccgtgctctacctctatccggcgggaggcagcaccgggctcttgatggacttggcagc

SEQ ID NO: 556479 - DNA, 90 bp, Homo sapiens
cgacgctggtgtccagtgcattcctcattgtcaaggtcatcctctctgaggacctggccatgggctccgacgcagagggggagaagatca

SEQ ID NO: 556480 - DNA, 100 bp, Homo sapiens
ttcctgaagaagaacctgcgagccgacaacgccttcatgctgctcacgcagaaccacaccttcatcaagcggtccgaggtggaagaagtggattttgccg

SEQ ID NO: 556481 - DNA, 83 bp, Homo sapiens
cgtccgacgaggatatcgtgtctggagcagtggagcccaaagacccctggagacatggtctcggcgcggaagatggccggcgg

SEQ ID NO: 556482 - DNA, 82 bp, Homo sapiens
tcaggctggaacttgccctgtctcctcgcagatgaggtcccagcacacctggaaagttctgcaaggcctcagctacagaaag

SEQ ID NO: 556483 - DNA, 90 bp, Homo sapiens
gacacggatatcacctttgccactgacattgcagagctgtgggctgtgttccacaagttcaaaggagaaccaggacgtcctggcagcccg

SEQ ID NO: 556484 - DNA, 75 bp, Homo sapiens
gcattggcggcggccccagcgcgtggcagccgtgcgccgccaagcccgtggaccgggagcccgtggaccgggagc

SEQ ID NO: 556485 - DNA, 90 bp, Homo sapiens
gcgtgaggcgggcggccagggcacgaaggccaatgatgaggccaatcagagtgatacaagtgtctccttgtcagaacccaagagcaaaag

SEQ ID NO: 556486 - DNA, 83 bp, Homo sapiens
tagcaccttctccagtcgacactctcgcgcccggaggaactgtggctgcaccatctgtcttcatcttcccgccatctgatgag

SEQ ID NO: 556487 - DNA, 75 bp, Homo sapiens
gggcattaagacagttgccatccacagtgatgttgatgctagttctgttaatcactgttctgaagatggtgtttg

SEQ ID NO: 556488 - DNA, 101 bp, Homo sapiens
tttggatgtgggatccggttccttggtgtcatccagccttagcaaaccagaggtgtggtggacacaggcctattcatcaacatggctgagagagtctactt

SEQ ID NO: 556489 - DNA, 90 bp, Homo sapiens
acactctaattgcctcctgatagcacacagaaaggggccagtgtcattcaaagatgtggctgtggatttcacccaggaggagtggcggca

SEQ ID NO: 556490 - DNA, 100 bp, Homo sapiens
gtgcatcccgggcgcctggcagtgtgacgggctgcctgactgcttcgacaagagtgatgagaaggagtgccgttcttgggtgtctctggggagtccctgg

SEQ ID NO: 556491 - DNA, 100 bp, Homo sapiens
gcagacaaaagacctcggggccggcctcgcaaggcgcttcccctttccagagagccagaaagaaggatcgtgggactttaccagatcggtttgtaataac

SEQ ID NO: 556492 - DNA, 90 bp, Homo sapiens
ctcccacccttattacctggagatgatgacatggatagatgaggagcgggaaggcctcctgcaccctggagaccgtgtgggaagacaagc

SEQ ID NO: 556493 - DNA, 100 bp, Homo sapiens
aagaagaaaaagaaggccctgagtcaaagaagatgcctcgaactaaacaaattcatcccagaaatctaagaggttgagaaagtggcgacttctataagac

SEQ ID NO: 556494 - DNA, 99 bp, Homo sapiens
cctcagccttccaagtagctgggactacagacatgcgccagcacgcctgccatcactggtgcaagctatatttaacggagatcctgatgaagttcgagc

SEQ ID NO: 556495 - DNA, 74 bp, Homo sapiens
taagggtgacagcaacagctcggcgggctggaagaacctaaaggcagacccagaagagctttttacaaaactag

SEQ ID NO: 556496 - DNA, 100 bp, Homo sapiens
tccgagccagccgctgttttgccggaggagcccctcaggccgaaatcatcgagttccccatcctaaagctaaatggccggaccatggagattgagtctac

SEQ ID NO: 556497 - DNA, 90 bp, Homo sapiens
gtaacccgtgtgactttgactggattgtggtggtgccatgcagcaagaatcagagagatgcagagttagagccagaaggcctgacatggc

SEQ ID NO: 556498 - DNA, 75 bp, Homo sapiens
gaaacaggcttactctgacttccctgggatactggtagacacagtctgggccctctcttaccttactgatgctgg

SEQ ID NO: 556499 - DNA, 99 bp, Homo sapiens
tagaagtgggacccaaatctacaatgtacctgtttgaaaatggtagaatagataacatttttactgagccctattccagatttatgattgaacttacca

SEQ ID NO: 556500 - DNA, 51 bp, Homo sapiens
aacaaggtcgacaactactcagacatacgaaaagggtgaagagtttatcca

SEQ ID NO: 556501 - DNA, 90 bp, Homo sapiens
gcccaaggtccaccgagcccgcaaaaccatgtccaaaccaggaaatggacaggtggacccaagtggagagattgtggaactggcgaaagg

SEQ ID NO: 556502 - DNA, 100 bp, Homo sapiens
gctgccggcttgttcttactggccctgagtctttgggggcagcctgcagaggctgcgcatactccagcaaggcagcgaacacaaagagcagacacacagc

SEQ ID NO: 556503 - DNA, 96 bp, Homo sapiens
tcctgcaggtgaaagagctgatcagtgtcaccaaagaatctaccgttgaagaagatcccatgcaaaaccagtgcaccctcgggctccttttttgcc

SEQ ID NO: 556504 - DNA, 75 bp, Homo sapiens
gttggcggggcgggggacagtagttgtagacgcccgcccctgcctcagagaagtctatccagaagttaaaggaga

SEQ ID NO: 556505 - DNA, 100 bp, Homo sapiens
agctgcaaaaagggccatcaccaataaatgctttcagcaacttccctatagaatatactgatgataatgctctgattcctaagaattcttctgtaattgt

SEQ ID NO: 556506 - DNA, 90 bp, Homo sapiens
gctggacaggcagagtgctgatgtgaaaaataccacgacaaaaccaccctatctgcaaaatgaatgttcaccgtcgatgtgagaccaacg

SEQ ID NO: 556507 - DNA, 100 bp, Homo sapiens
cgggtgaggagctggtggcgtcggcaggttcgaggcgattcgagctctgttcactcggagagcccgccggctgcctgagtgtgggttcgggtggacacag

SEQ ID NO: 556508 - DNA, 89 bp, Homo sapiens
tgcaatcttcaggaaagtaagagggccataggaaaaggatacagagtagagtttcatgaacctgaaacttggtggaaatttgatcctga

SEQ ID NO: 556509 - DNA, 96 bp, Homo sapiens
attcattcttgacctcatactgaacaaattcatgatgttgctatcaaaagttgagaaattgtcagaagaaatcatggagataatgcaaaatttaag

SEQ ID NO: 556510 - DNA, 98 bp, Homo sapiens
ccagagccaaggtccagggggcaaggtcgtggctgttgagctaatggaccgaactgaaatgccatgccaggcattagtgaggatgctagccaagaaac

SEQ ID NO: 556511 - DNA, 82 bp, Homo sapiens
atggcaaccatgcagctattaaccagtgtcagacatgaagacatcttatccatcctcactgctgtcaacgatgatgtgagtc

SEQ ID NO: 556512 - DNA, 98 bp, Homo sapiens
gtagaaaataccagtgggaaaaggaagtgctggcctgtatccggtgtccgaggcgaactcagtaagatgatgttaagaggaaacctgaagcaagtgcg

SEQ ID NO: 556513 - DNA, 83 bp, Homo sapiens
gcgcgagggaggaagagaactactcctttttacctttggttcacaacatcatcaaatggtttgaagactgcttcattctgcct

SEQ ID NO: 556514 - DNA, 90 bp, Homo sapiens
ggcagtgatcacacgtcggctgctgggaagatctggattctcgtttcaggcctggagctgctgaagactgctattgggaaagctggctac

SEQ ID NO: 556515 - DNA, 100 bp, Homo sapiens
ccttttggctaaactcatccaaacctgtcaacatgttgaagattgtcagtggcttcgccccgaggagagctgactgccctgggctgctgcctccggcaga

SEQ ID NO: 556516 - DNA, 99 bp, Homo sapiens
gtgggagtctccgcgtcccgctcgctgggagagagttttcggctttgtgagaaaccttaccatcaaacacgatggccagcaacgttaccaacaagacag

SEQ ID NO: 556517 - DNA, 90 bp, Homo sapiens
gtgttggggtgtccgagttgccgccggagaggagtggcctcgcccgcttgctgatgaccaaacacccaggcaaacgtctgggttgtggac

SEQ ID NO: 556518 - DNA, 100 bp, Homo sapiens
taggaaaactaggaatctatgatgctgatggtgatggagattttgatgtggatgatgccaaagttttattagtattctaccttgtaaatactgttatttg

SEQ ID NO: 556519 - DNA, 100 bp, Homo sapiens
aaaaacaagctcagggatcccactgattctactttacgaatacttcagagagtcagagttgtgccagaagtctcttaatggcagatagaatgcaaatagt

SEQ ID NO: 556520 - DNA, 90 bp, Homo sapiens
gtcagagaacacaggaccagtttgccatcccaaggccgaagctgttccaaagacctaatgcgcttgctgtccagcagttgacagctgctc

SEQ ID NO: 556521 - DNA, 98 bp, Homo sapiens
gctgaaaatttacttctggatgccaatctgaatatcaaaatagcagataacaacgaacttgatgcaagtgataggtttgccaaggtcagacctctcat

SEQ ID NO: 556522 - DNA, 75 bp, Homo sapiens
ctcgcgtgtggtggccaactcggaggagatcgccttctatgggggccatgaggatgaagtgatcaaagtccgaac

SEQ ID NO: 556523 - DNA, 127 bp, Homo sapiens
aaggttatgtgctgctctcctgagcaacatctctgactgtgatgaaacattcaactactgggagccattggataacagggcaagattcagaggaagaaaaggatattgatgcattatgttgaagcca

SEQ ID NO: 556524 - DNA, 83 bp, Homo sapiens
cttcgggccctcctgccttccccaagaagatgaaaggattgttcttgttgacaacaaatgtaagtgtgcccggattacttcca

SEQ ID NO: 556525 - DNA, 90 bp, Homo sapiens
cgacagaaggcgtctcatggcgttggaataccggctctcagcggctaaacagtatctcacctccctaaactggttaatagtggcatggaa

SEQ ID NO: 556526 - DNA, 50 bp, Homo sapiens
gcgggtgcagcaggaacagagcaaggtgccactggacgagcgcatcgtct

SEQ ID NO: 556527 - DNA, 89 bp, Homo sapiens
gccgagtagccacagcggcagctccagcccggcccggcagcgacatggaaggtactccaaagattcaggtttactcacgtcatccagca

SEQ ID NO: 556528 - DNA, 100 bp, Homo sapiens
agtgcttatcctaagaactcctggacacatcttggagctgatattgcctcaggaaatgagagaaaatgtcttctgaggctgatctggtgtctcacatctg

SEQ ID NO: 556529 - DNA, 83 bp, Homo sapiens
ccgccgggaggaggaggaggagccgagaggagctgagcgagcgcggaagacctgcctagagctggaacgttacctccagagcg

SEQ ID NO: 556530 - DNA, 99 bp, Homo sapiens
gagacaagatgtccgccagagctgcggccgccaagatgatggagcagtggtatcacctgaccttggggacatgtctcctgaagggccgcagccccccat

SEQ ID NO: 556531 - DNA, 100 bp, Homo sapiens
gagtatctgaagcagcatgcagctgttagtggtttctttacctccagaaagaagaatattggccccttgaattctggaagttcattgaagagtctgaaat

SEQ ID NO: 556532 - DNA, 75 bp, Homo sapiens
ggaagcagcacgggatcccagcctcaggcctgcacggacggtgttggttgggctgcacagcctcacagagatttt

SEQ ID NO: 556533 - DNA, 100 bp, Homo sapiens
cagctcaattcttcgctcctccaagtctacatccccgattactcggtgcgagccctttcggatctgcagtttgttaagcgtcttcctccacttgatgaag

SEQ ID NO: 556534 - DNA, 75 bp, Homo sapiens
tacaacattaatcagatactgcatttaaggttgctgctaaaaccttgcctttttataaggactacttcaatgttc

SEQ ID NO: 556535 - DNA, 74 bp, Homo sapiens
tggtctacaagactctcttcgctctttgcatcttaactgcaggcacctgaatggacagaagaggacctcagcca

SEQ ID NO: 556536 - DNA, 100 bp, Homo sapiens
atcatgcggcctgatatttgtctttatggaactcagcaacatcacatacaggatggaccctatattgacaacatcagttccagtgtactcattgaaagtg

SEQ ID NO: 556537 - DNA, 75 bp, Homo sapiens
tcctctgccccaggacccccacaccaccccaggtctcctctgagcctccggcctccataagacccaaaacagatg

SEQ ID NO: 556538 - DNA, 100 bp, Homo sapiens
ttgcttccccgtcctctgacatcgcctgcagccgagcgggcccgttccgccggagctgaggaccagtgcctgaaacagtatgttgagctcttgatcaaag

SEQ ID NO: 556539 - DNA, 96 bp, Homo sapiens
ccaccttcagcccccccgcgaacgcccaaggagaatgaagtttctagattagaagacataatgcagcatttaaaatcaaagaagcgggaagaaagg

SEQ ID NO: 556540 - DNA, 100 bp, Homo sapiens
tgacaccaggtgccattagcatccccatttcacagatgaggaaaccgaggcagagaagactccattaataatatacctctttcatttcctaattgactat

SEQ ID NO: 556541 - DNA, 75 bp, Homo sapiens
ctacaaaccatactaaattattccatttgcaacttatccccaacaggtggttggaggcaaagtaaagaagcccgg

SEQ ID NO: 556542 - DNA, 100 bp, Homo sapiens
gaagcagataccaggttcggctgcagctgggcagtctgggcagtggaggcagaggatccggcactccacccagagcctctttgagtacatgaagggcatt

SEQ ID NO: 556543 - DNA, 75 bp, Homo sapiens
tggcggatgccctgcagtacctgcagaaggtctctggagacatcttcagcaggtctgtttatgatggtgaagaac

SEQ ID NO: 556544 - DNA, 100 bp, Homo sapiens
tgtcttttctgtgacgggagcaatgctgacctcggtttcctggacccattccgactcagctgtatgcaggagctattcttgaagtttgtggatgaaaatt

SEQ ID NO: 556545 - DNA, 75 bp, Homo sapiens
ctcccgctcggccccgccagcagcactgtggaggccgtcctcgtacctggagtagaacagaaaaattattatgtc

SEQ ID NO: 556546 - DNA, 100 bp, Homo sapiens
gacatttaattttagggtcctttatatagaagggagagtaggtatgtgaaagcaagaacagagctaacatgggattatggctatgaagctgggactgtgc

SEQ ID NO: 556547 - DNA, 75 bp, Homo sapiens
tatgatagtagcatggagtcacggctctcgaacagtgtggcctgatgaaactatgggaccctttggacctcaaga

SEQ ID NO: 556548 - DNA, 98 bp, Homo sapiens
ttcagatgtggtggaatatgccaaggaaaaactggagagcttcatcaaaaatagtgatagctttgataacttgaagtacaatcttgttgtgtgtttat

SEQ ID NO: 556549 - DNA, 83 bp, Homo sapiens
gttcgacggagcggagttccaggggcggcggtatcggtggctgccctactacagcgggtgtacagcaagctgtgattcctggg

SEQ ID NO: 556550 - DNA, 75 bp, Homo sapiens
ggtgccagactgcacgctccattctagggaagggggtaaatcttttcaagacactaaaacaggtgactcagccct

SEQ ID NO: 556551 - DNA, 98 bp, Homo sapiens
gtcattataccttcacccagcatttcatccctcgtcgaaaggattggattggcatctttagattgctgcccattgaaagagctgctcggaagcagaag

SEQ ID NO: 556552 - DNA, 90 bp, Homo sapiens
gaaagaaataccaaggaagactatttttggacatgtcctcatagagatttcaagtacccacaagaaactcaacgagagtcttgatgaaaa

SEQ ID NO: 556553 - DNA, 75 bp, Homo sapiens
cttggcgagcctggatctccaagtgaccccctcagcaactcctgatgaacaggctggggtgcagtggcgtgatct

SEQ ID NO: 556554 - DNA, 100 bp, Homo sapiens
cacctgaggacgtctcaaagaagctcggcgggagagctgagcgctcggaagaaccaagacatagaagatccttatgactgcaagaagtgcaggatgagtt

SEQ ID NO: 556555 - DNA, 80 bp, Homo sapiens
aagctcatggcctgccactgcgtgcgtgtggacactgccagcggctgcagccgacttggaatgacctgggagacaaatac

SEQ ID NO: 556556 - DNA, 97 bp, Homo sapiens
aaatgtcttcagagtacctgtcttagaccattggtggcaaactgcagagagactttcaagcagctggctggatgttcgtcatattgaaaagtatgta

SEQ ID NO: 556557 - DNA, 82 bp, Homo sapiens
cgtggacaagtttgcagatcgggagcgcaaggtcgccctcaaggccatgatcaaaacctgctgatgcaaggaatcccctggg

SEQ ID NO: 556558 - DNA, 100 bp, Homo sapiens
aatcagcaggcacaggaacaagtggacggcctggtccaatggctcctcagccacggaaatgagagagtgtgaacatggctacgcctcttcattcccgtcc

SEQ ID NO: 556559 - DNA, 82 bp, Homo sapiens
ggcggtggaggacgaggggctccgggtcttccagagcgtgaagatcaagatcgttttccaagagataacttcaccaagatgt

SEQ ID NO: 556560 - DNA, 75 bp, Homo sapiens
gctgctaggagccggtcagagggtcatgttggcagcttcctattggtctcttctggccccagcagttgagatggc

SEQ ID NO: 556561 - DNA, 100 bp, Homo sapiens
gatctaaaggagctgtcagatggagaaataaaagtggccattagtactgtgagcatgaaccttgaggctggagcattggatttgctaaaggagcttaaga

SEQ ID NO: 556562 - DNA, 80 bp, Homo sapiens
ttggattcacccacagcggggcggcggcggcggcggctgcggcccaatataggtatttctttaaatccagaacaatggag

SEQ ID NO: 556563 - DNA, 100 bp, Homo sapiens
gtatccaagatagttgacagtgggcctgcagccaaggaaggaggcctgcaaattcatgacaggattattgaggtggtctggagaaagctgggagatgcag

SEQ ID NO: 556564 - DNA, 101 bp, Homo sapiens
tcaaagaatgatatttccaaagtttgcagaaaagaatatgagagatcatgatgcagccgtccttttggatttctttttaataatgtgtgacccttcacctt

SEQ ID NO: 556565 - DNA, 100 bp, Homo sapiens
cagaaacttacctgtctggaactcatacagctcaagcttcacctgtggtctggcaggggccctggcctcaaaccctgttgatgttgtgaggacacgtatg

SEQ ID NO: 556566 - DNA, 82 bp, Homo sapiens
tagaatcatgctgagccgagctgtggagtgctgccccaccagcgtggaggaactgtggctgcaccatctgtcttcatcttcc

SEQ ID NO: 556567 - DNA, 99 bp, Homo sapiens
tgtgcacagcttgccactggcgctgcctgccgcctggtggaggctgtgctctcaggagagcgggctcccttactactggaatgcagacacagaccttgt

SEQ ID NO: 556568 - DNA, 90 bp, Homo sapiens
gggacctgctgctggacccggcctgggagaagcagcagcgcaagaacaccttccaccatgaccacctcagcaagttcccacttaaataaa

SEQ ID NO: 556569 - DNA, 75 bp, Homo sapiens
cggatcccagcttcctgcagccaggtgcatctgcagacgcagcaggaggtgaagctgcgcatgacgggcatggcg

SEQ ID NO: 556570 - DNA, 88 bp, Homo sapiens
tcccaggcccggctgctcatcgaaaagtatgagcccaaccagcagtttctggagcgaggtctcctctgagcctccggcctccataaga

SEQ ID NO: 556571 - DNA, 101 bp, Homo sapiens
caatgttggagccgtctgcaaagtgtccccggcaagaagggaggacatgtatgcccaggactctatagagctactaacaacatctggtatccagtttaaaa

SEQ ID NO: 556572 - DNA, 83 bp, Homo sapiens
atttgctcttacgtatttgtgtgacttgactcttcaaacacaaaggatggtgaaacgccacttataaaggctaccaagatgag

SEQ ID NO: 556573 - DNA, 90 bp, Homo sapiens
agaaaagcaagatactgaaatgtgatgaacatgcctgtggactttctcctcgagacattaccactattaaacttctcaatgaaactagag

SEQ ID NO: 556574 - DNA, 74 bp, Homo sapiens
attcatcccacatcagttattagtggctatcgacttgcttgcaaatggattaccgggccttggtgcatgagcga

SEQ ID NO: 556575 - DNA, 100 bp, Homo sapiens
tggaaaacatatccattaaatggggtatgtcgagagtaccaacgtggcaattgcaaccgaggagaaaatgattgtcggtttgctcatcctgctgacagca

SEQ ID NO: 556576 - DNA, 100 bp, Homo sapiens
ggccaaaaatgtgcatactcacagagttagagagagggatggtgtctgtccatgtgaatgtgctgtgtggaagagttaaagggcccaactaaatgttcca

SEQ ID NO: 556577 - DNA, 100 bp, Homo sapiens
atcacgttgacgtccatttaccagtcttccctggcaagattcttctgaattgtgctgccttggccaaaagagatccttgccagcacattacagaatattt

SEQ ID NO: 556578 - DNA, 100 bp, Homo sapiens
ttcgaagtctcggtcccgaagccgatctctctctcgttcaaggaagcgcaggctgaggtgaccattgtgaggtagatattttgttctaattttccagatg

SEQ ID NO: 556579 - DNA, 75 bp, Homo sapiens
tctgcccctgcataattcagttaagacccaggaccacccccaccttctccattactaggtttgaaaccactgcag

SEQ ID NO: 556580 - DNA, 101 bp, Homo sapiens
atcccttccgaggcccgacttcgggaaacagaagtacctgtgcgccagcagaaatgattgcactattgataaattccgaaggaaaaattgtccatcttgtc

SEQ ID NO: 556581 - DNA, 75 bp, Homo sapiens
gcaccgggatcggttgccttgagcctggtattttcaaccaccaggaacttggatacagtgtgctttagaatccag

SEQ ID NO: 556582 - DNA, 100 bp, Homo sapiens
ttcatttaaccccaaaatcagtgattctacatctcaagctcatattttgaagtgtttacgggaacgaatgcaggaatttgggaactgagctgtgcaagtg

SEQ ID NO: 556583 - DNA, 100 bp, Homo sapiens
tcggcgcctgttctcgggctgtttggcgggcagatcgggagcggtgccgagaaaaatttccttactagatgacatttcatcgcaatgtccgatcgtttgg

SEQ ID NO: 556584 - DNA, 75 bp, Homo sapiens
atccaaatcttctccctggacctcgtgcatacggtgaaaggtgtagcagtcactcggcctacacccacagcatcg

SEQ ID NO: 556585 - DNA, 100 bp, Homo sapiens
ggaccaaggtgcacgagctcaaggagcacaacgggcaggtgacagctgaaacagaaccgcatgagggaaagaggaaagtggaatctctgtggcccatctt

SEQ ID NO: 556586 - DNA, 83 bp, Homo sapiens
cggcgagggcgcctacggcatggtgtgacctgcctagagctggaacgttacctccagagcgagccctgctatgtttcagcctc

SEQ ID NO: 556587 - DNA, 78 bp, Homo sapiens
caactctaccgctgccaccaatgaggttcctgaggtcacagtgttttccaagtctcccgtgacactgggtcagcccaa

SEQ ID NO: 556588 - DNA, 50 bp, Homo sapiens
ctgcaaaagctcaggttaatccagttttgagtatccgaggagcccaggag

SEQ ID NO: 556589 - DNA, 90 bp, Homo sapiens
cgcgatttggcgttaacttattgacccatggggaggagggtcacttcccgtgaaaagatgtgaaaggaccacccacccaccgtctgtctt

SEQ ID NO: 556590 - DNA, 50 bp, Homo sapiens
agtgtgggaagccaagcagatacaagtcacatgtgccaatttaacgaacg

SEQ ID NO: 556591 - DNA, 83 bp, Homo sapiens
cgaggcggcgggggacaagtcggcgccccagagcggacgaggctggcagtgatggtgaaagcataggaaactgccccttttcc

SEQ ID NO: 556592 - DNA, 75 bp, Homo sapiens
ggattaggtagcaactacctaggtggtcgtagccccactgaggttggatggcaagcatgtggtgtttggcaaagt

SEQ ID NO: 556593 - DNA, 99 bp, Homo sapiens
atcgtggaacacgtagatctgggtgcatactattatagaaaatttttctaccagaagggattcttgggatggccagcatattccagtacttttctccat

SEQ ID NO: 556594 - DNA, 100 bp, Homo sapiens
cagagatgcaaaaatgcaccctactccagcatcgcaccccaagaaaccaggtgtaaatgcagacaaagttggaattgaagctgccgaaatgctattagca

SEQ ID NO: 556595 - DNA, 82 bp, Homo sapiens
cctggcgcgatgcgtcaagtacactgaaattcatcctgagatgaggtgcaaggatggcttgaaaggatttacattttctgca

SEQ ID NO: 556596 - DNA, 97 bp, Homo sapiens
ggggccactgcactgggtgattcacgtgtgcccaggccctgaggtgggccggacctgggagtggcagatcacgcgctgccccatgatcccgtgctac

SEQ ID NO: 556597 - DNA, 58 bp, Homo sapiens
caaggaaagaagatcaagctacagatatggcaagaaggggttaaaagtggaatgtatg

SEQ ID NO: 556598 - DNA, 100 bp, Homo sapiens
cggaacattgcctagtagaccctgaggctttacaacagtgccactgacccctatgcttcatcgcagtaggaatggcagccccatctatgaaggaaagaca

SEQ ID NO: 556599 - DNA, 90 bp, Homo sapiens
gagagcgccccagggcaagccccgctccggccaacaaagaagcctgtgtctcccaaatcaggaacactgaagagccctcccaaaggattt

SEQ ID NO: 556600 - DNA, 100 bp, Homo sapiens
ctggctgaacttcaccttttggctttcttggcctgatgctgaactctcgagggttacactcctggcacaccttacaaagtgtcctgttcccccaccagcg

SEQ ID NO: 556601 - DNA, 97 bp, Homo sapiens
aaatcacttggaaaagagctgtggatggcttcacgttcactgaaggcgataagaaacagaagcctatcagttgctgaagaaggccacccttcaggat

SEQ ID NO: 556602 - DNA, 82 bp, Homo sapiens
tagcgacatccgagtgcagaacctgcaaggtctctaattaacagaagatggcaaagcccagccacagcagctatgtccttca

SEQ ID NO: 556603 - DNA, 100 bp, Homo sapiens
tgaaacctgcttgagatggagaagcatcaagacagctgatatggaggagatgtatttaatgcagttcgaacattaagcaatgccgaggactatctcgatg

SEQ ID NO: 556604 - DNA, 100 bp, Homo sapiens
cagcagccggctctggcccaccggggtccgggagacattcacggcatggtgtaactcccacctccggaaggcggggacacagatcgagaacatcgaagag

SEQ ID NO: 556605 - DNA, 100 bp, Homo sapiens
tggaatccctacgcgtccctttgggtttagcacgatgagctcaatcggcactgggggaggttcccctgaaggatgctaaggaatacgctgaatccatagg

SEQ ID NO: 556606 - DNA, 101 bp, Homo sapiens
caacaacattggcgatgcctcctcgctcatccgagccaccattgtcttgctggaatgagtacctgacaactcggatcgagcagaaccttgttttgaattgc

SEQ ID NO: 556607 - DNA, 90 bp, Homo sapiens
atggcatcctggccgatgccacggagcaagtgggccagatctctccagcgaacactgaatgagttaaaagagtatcaaaagcagcatgac

SEQ ID NO: 556608 - DNA, 101 bp, Homo sapiens
tccacatatcggagcttcttcccacctcggcctactcaagcatgagatcggaggcgggagattctcattcagattgtggatgcctcgtcagtcatcacttg

SEQ ID NO: 556609 - DNA, 74 bp, Homo sapiens
acctgcaagcgcccggcagcggcccgcgagttagaaaagctactgggagaaattattgcttgtctgcaattcag

SEQ ID NO: 556610 - DNA, 98 bp, Homo sapiens
agcaagcggaggtgctgggagcgagttggctggtttttcgttggaatatacgttgcacatttatggcgattctgagtgtgagggcagacttctgccag

SEQ ID NO: 556611 - DNA, 100 bp, Homo sapiens
aaggttgtttggcttgtttaacagcatataccatcttcctatgcatggaaactcattatgagaaggactcacaccacccggcaagaactgctcactacgg

SEQ ID NO: 556612 - DNA, 89 bp, Homo sapiens
gcgacatgtggaaaatgacggttataagaccatttatttctttggagacaaaactatgccaggaaatgatcttcattggttagcatgtg

SEQ ID NO: 556613 - DNA, 100 bp, Homo sapiens
aggaggcagtagccaaacacccaggtcctagcagaagatgtgactcagactgcctctgggtggggctggctggcccacagatcctgccaccatgccgcag

SEQ ID NO: 556614 - DNA, 117 bp, Homo sapiens
ggcctccgcagcgacaacatggaggccgtgaagaccttcaatagcgagatgatatcatcaagttgaatcgaaaggaagggaagaagcagaattttccaagactaaatagaagactcc

SEQ ID NO: 556615 - DNA, 80 bp, Homo sapiens
ggccaccaaccgtggcatcacgcggatgataaggatgccttctatgtggcagacctgggagacattctaaagaaacatct

SEQ ID NO: 556616 - DNA, 90 bp, Homo sapiens
tgcctgtgcacgggattggcagtaattggaggaagaatgatagcacagaaaatctctgtcagaactggtgagggcttccacaactaccac

SEQ ID NO: 556617 - DNA, 74 bp, Homo sapiens
tggatttatgcaaacttgggccaaaggacagttagaagacagtagatgcgagccacccctctggctgctcctgc

SEQ ID NO: 556618 - DNA, 128 bp, Homo sapiens
aaaaagaggtcaataatgaaagtggagagtcacagaggggaacagatttcagtgtcctccttagctctgcaggtacttaagagattatggcatcagaaacccacaatgttaaaaaacggaacttttgt

SEQ ID NO: 556619 - DNA, 82 bp, Homo sapiens
cttgtatgcatactccacagcacctgtctcttgcatggcaccaagaatgttaccaattcaagcagtttaagattgccaagac

SEQ ID NO: 556620 - DNA, 143 bp, Homo sapiens
gactgtattcaggcgttacagtcgttttcgagaaatgcataaaacattgaagttaaagtatgcagaggaatgtatcctgtcaggtataatgtcagtgaatggcaagaaagttcttcatatggatcgaaacccttactacggag

SEQ ID NO: 556621 - DNA, 100 bp, Homo sapiens
agatgagctttgagcctggtgaccagaggacagttatgggatggatgggaaggttaatcagccccgtctcactgcagacatcaactggcaaggcctagag

SEQ ID NO: 556622 - DNA, 122 bp, Homo sapiens
gccggctactgccgcttcagttctcccggtgtggccacgagtcgggctgctttgaatgctgcatcaagtgtctgggaggagtcccctacgcctccctggtggccaccatcctctgcttctcc

SEQ ID NO: 556623 - DNA, 97 bp, Homo sapiens
ggactccacagtattcgacatcaaatacaggtagatgaactctatgaagcttattgtatccagcgacgcctccaggatggtgccagcaaaatgaagc

SEQ ID NO: 556624 - DNA, 97 bp, Homo sapiens
ggagagaagagaatgcctgaagacttggatgaaaatatggattacaggttgatgtgggagacagctttattaaaccgcctggagcgaattttcgaag

SEQ ID NO: 556625 - DNA, 75 bp, Homo sapiens
ttccatggatgccccttgataacaggtataaagatggctgtgaccacatcggggagcaccgagatgatgaaagag

SEQ ID NO: 556626 - DNA, 100 bp, Homo sapiens
tcacctttgtttatgacacgatacaactcaccatcacctttgaagagtcagttgaccactgtgtgcagtgtgaagaagcagcctgattttgccacttcag

SEQ ID NO: 556627 - DNA, 83 bp, Homo sapiens
tccagaagcagatatcggtgaggttcctgcacttggccatcatccatgaagaaaaggcactgaccatggaagtgatccgccag

SEQ ID NO: 556628 - DNA, 100 bp, Homo sapiens
cttgaggatcgaatcttcactcccgctgtctcagcagtctacagcacgggtgtactctgtgtgaccgcgcctatccctcggactgtcccgaacatggacc

SEQ ID NO: 556629 - DNA, 75 bp, Homo sapiens
tgctcaaggccaagatggacgccgagcaggatcccagccctgtgcaccaaggtgccggaactgatcagaaccatc

SEQ ID NO: 556630 - DNA, 83 bp, Homo sapiens
accagctcacctctcgccgcacatgtttggagactctatcaagaagaatatctaatccgtaccttgaacatacgccttcccag

SEQ ID NO: 556631 - DNA, 100 bp, Homo sapiens
ggttgaggttcaatgcagacaagacggatgtgatgctggaactttatattgctgttggaatatctggagccatccaacatttagctgggatgaaagacag

SEQ ID NO: 556632 - DNA, 100 bp, Homo sapiens
gctgccagcattagcctggctcaatatctaatcaatgtcaggatggtggccgatcctgataaccctttggtgctggacatcctgacgggctcttccacct

SEQ ID NO: 556633 - DNA, 75 bp, Homo sapiens
aagtgcttggggatggagtgcctccaaaggttgctgagactgaggctgatgtgaatccaaaggcctatccccttg

SEQ ID NO: 556634 - DNA, 100 bp, Homo sapiens
ctacaacacggctgtcaagctggcgcgccagagcggcatcgaggctatctatgtgcctgctgatgacttgactgaccctgcccctgctactacgtttgcc

SEQ ID NO: 556635 - DNA, 93 bp, Homo sapiens
ggactccttcggcagtccacccaccgccgccgcctcccaggagcatcagatccatgctgctgctgactcggagccccacagcttggcacaggc

SEQ ID NO: 556636 - DNA, 100 bp, Homo sapiens
gaagaaggggagctgccccttccagagcaacacagaggccacagcccctggctttgacaacatccttttcaatgcgcaccatggacctgctggactggag

SEQ ID NO: 556637 - DNA, 51 bp, Homo sapiens
gtgacaaacagagatatcatttgtcagcgtccagaggaccagaggttaatt

SEQ ID NO: 556638 - DNA, 51 bp, Homo sapiens
cagcatgcctcggtcctataagctggtgatgcggtactgggagcccatacc

SEQ ID NO: 556639 - DNA, 75 bp, Homo sapiens
gcaaagttctgagaacattacagcagatcaagaaatccagctcaaattctcacctgctacacacccctcagaggg

SEQ ID NO: 556640 - DNA, 76 bp, Homo sapiens
aggagcgcggaatcggggagcgtccggagctagctggatcctctaggcaggtgtaattacttcaagcctccaggat

SEQ ID NO: 556641 - DNA, 139 bp, Homo sapiens
cagatggcagatttgcatctttacaaccagaagctcagggagaagttgaaggaggaggagaacacagtggatcatgacaactggcccaagggagcaggggacctttctgttgtcaaaaagatgaaggagacctttaagg

SEQ ID NO: 556642 - DNA, 101 bp, Homo sapiens
ccaggagatggttcgggcctagcggagccgggactggagagaaccatggagtctggcagtaccgccgccagtgaggaggcacgcagccttcgagaatgtga

SEQ ID NO: 556643 - DNA, 98 bp, Homo sapiens
atactttgaagatcgtcatggggtggtatggtcaggaaaaagactacaatgtactagtcatggatcttctgggacctagcctcgaagacctcttcaat

SEQ ID NO: 556644 - DNA, 100 bp, Homo sapiens
gggacatccaggggaagagaaggtggactttgagaagaaagctgggacgacatatatctttagcaaaggtggtggacaaatcacgtataagtggcctcct

SEQ ID NO: 556645 - DNA, 78 bp, Homo sapiens
ggagactcctgaccctcagaatggagcagcggctgcggcagcgcaacactgaaaccgaggagagcctggtgaagcggc

SEQ ID NO: 556646 - DNA, 75 bp, Homo sapiens
agcgacgacaaggcttggaaacatacttacaggttttgtgatgaaggaacctgtacagataaagccaatattctg

SEQ ID NO: 556647 - DNA, 100 bp, Homo sapiens
cgggcaagaccaccttcgtcaatgtcatcgcgttcaacttcctcaattgctttgcctcactcttctatattgcctttgtcttgaaagatatgaagctttt

SEQ ID NO: 556648 - DNA, 100 bp, Homo sapiens
aagctctgctgccccgcaggcaccttcgggccctcctgccttcaaaccagcctggacaccaagtctgtgtcagaaggccacctcaagaggaacatcgtgg

SEQ ID NO: 556649 - DNA, 100 bp, Homo sapiens
tgaagcctttaaatgcagcatctgcgatgtgaggaaaggcacctccaccagttgaatctggtatcaagtgtcactctctccaagtccgcatcggaggctt

SEQ ID NO: 556650 - DNA, 75 bp, Homo sapiens
ggttgctgagcaagtgtaaagacctcagccaggtggagtattgttgcagcatctggcagtgagactgaggatgag

SEQ ID NO: 556651 - DNA, 50 bp, Homo sapiens
gaagaactggaacgttgtaaagtgcaggattttgtgtcatgtatagagaa

SEQ ID NO: 556652 - DNA, 76 bp, Homo sapiens
taaagaacttgcagttgaaggagtataacacaggttattctcgttcaagttaatccaggtgagactttcacaataa

SEQ ID NO: 556653 - DNA, 75 bp, Homo sapiens
tccacactgcaatgtttttgtggaacatgtcttaggaaaagtcctcagtgctgtgggcagtgcccagctactgat

SEQ ID NO: 556654 - DNA, 100 bp, Homo sapiens
ctgggatacgacccctatcaggaaatattcgagtggcaactgcatactgtaagattgatgttaaaggcatggtgttcaccccacttcatcagcgtacata

SEQ ID NO: 556655 - DNA, 83 bp, Homo sapiens
cctacagcaaggcctacggcaggatgggaacaagttgaaatcatcgcagaaggataaagttcgtcagtttatgatcttcacac

SEQ ID NO: 556656 - DNA, 74 bp, Homo sapiens
gcatttggccgcctccctaccgatccagtccttctgtggaacttctgaacatcttttattagtggaaatatttt

SEQ ID NO: 556657 - DNA, 89 bp, Homo sapiens
gaactatagagtttgtggacagatttatattggttggacgtgataagtatgagcctgcagctgtttcagaacaaggtgataaaaagggc

SEQ ID NO: 556658 - DNA, 74 bp, Homo sapiens
aaactccaccagccccgtgtccttcattgccacgtacagaaccacaccttcatcaagcggtccgaggtggaaga

SEQ ID NO: 556659 - DNA, 80 bp, Homo sapiens
cctctgcacgggagcgcaggaggaacaaatggaaaggactagacattggatctgctggaggaaggaaaggccacggttcc

SEQ ID NO: 556660 - DNA, 98 bp, Homo sapiens
tagcagtgtctcgggtcatcacttggacaacagaacccaaaagttctgatgttcggaagtcggatatgttgcggtcactatctaacacaaaacctaca

SEQ ID NO: 556661 - DNA, 75 bp, Homo sapiens
ctagtcaaagaacgctttctgttcaagaggcagctgcgtatttaaaagtactaggttttgacaagcttgcatcat

SEQ ID NO: 556662 - DNA, 90 bp, Homo sapiens
gcagttctaaatttgaatttgagttgaaacattgtagtcggtatatacatgacttatttccttcactcatcaagaatttggatcccgtac

SEQ ID NO: 556663 - DNA, 82 bp, Homo sapiens
ttttatttttccccaattcagcagagaatattttcaagggggattctgaaagtcaagaagacatcatccggaatattgccag

SEQ ID NO: 556664 - DNA, 98 bp, Homo sapiens
ttgctattgccatgcagatgttcagtttagctcatcgtcctgtcagactagcctgatagactaaagcagtttagtgtggcaccaagacactttgaaga

SEQ ID NO: 556665 - DNA, 83 bp, Homo sapiens
cgggaccatcgccggagcctgaggacacttctctgtcgtcacagttaggcggtaaccagcgtgagctcgcccgccagaagaat

SEQ ID NO: 556666 - DNA, 90 bp, Homo sapiens
catgagtcgggtacaggagctggagacgagcttggctgaactgaggaaccagatggataatcagcaactgctgtgatgagatgctgcctt

SEQ ID NO: 556667 - DNA, 75 bp, Homo sapiens
gcgggcgggaagatggcggctgggttcaactatttgtcgtagatgtccagacaagccagatcaccaagatcccca

SEQ ID NO: 556668 - DNA, 100 bp, Homo sapiens
gccgtgggcccgaccgcggggacccattggtgctgaagacatggacggcttccaggcagacacggaggaggaggaagaggaggagggcgactgtatgatc

SEQ ID NO: 556669 - DNA, 87 bp, Homo sapiens
tgtatgcactttactacaaagatggacttctctgtacagactggaatcagccattttaccaagaaagttgggtttcttttactggca

SEQ ID NO: 556670 - DNA, 75 bp, Homo sapiens
gccccgggcaaagcccatctggtccgccgagcagatatgtgttgagacggattctccgccgagctgtccgatacg

SEQ ID NO: 556671 - DNA, 100 bp, Homo sapiens
tgggcatgcctgcagtactcttggcccatggacctgaaggagaagcacctgggctgaaaaactgggtggtagctgaagacgtggtgtttaaacctgtggc

SEQ ID NO: 556672 - DNA, 100 bp, Homo sapiens
gccgggctgggctcagccggacggttcctgctgtggctgcccaccccctcattgcaccagacagctggcagagagagaagttggctagcatggaatcacc

SEQ ID NO: 556673 - DNA, 100 bp, Homo sapiens
atagagccataaagaaagcaaagcgcagaaatgttggatttgaagatattgctgcatatcgagctaaaggaaagcctgatgcagcaaaaaagggagttgt

SEQ ID NO: 556674 - DNA, 83 bp, Homo sapiens
acccacagctggccgtccccgacgccttcaacagcagccgaaaggactcagaccaggttgcactgatgacatcgtcaccagcg

SEQ ID NO: 556675 - DNA, 73 bp, Homo sapiens
tctgggagaatgccgaagactgcatttcaacttcaagaatgtgaacaacgtgggaatgtcgtatgagtatcct

SEQ ID NO: 556676 - DNA, 50 bp, Homo sapiens
gttggattcaaagacagcccagaatctctatacagaaggtggtcatggca

SEQ ID NO: 556677 - DNA, 100 bp, Homo sapiens
agcggttggcaccactgaagtgaccgaatgagacatatgtagagtgtgtcggtcagaaggaacacctgagaaaccgctttatcatccttgtgtatgtact

SEQ ID NO: 556678 - DNA, 100 bp, Homo sapiens
agctggaatggtgagaccaacatccgtgacacctggactctttcaggttctgaagacggcccccaagttacatgaactacctgctagactcacaccccag

SEQ ID NO: 556679 - DNA, 98 bp, Homo sapiens
ctttactttttgcttcaccgacatagtcattatgccgaagagaaaggtgcagtagacattgttgcaatcatgatcggcaatctgaaaggcacaaaaat

SEQ ID NO: 556680 - DNA, 101 bp, Homo sapiens
cccgggcccaggcccggccccagccgccgctgcggagcccgccgggaccccccggagcgcggccacggcgcagggccatgaagcccccaggaggagaatcg

SEQ ID NO: 556681 - DNA, 74 bp, Homo sapiens
tgctgtgaaccagcagaatttttgaacagtagcaggacccagtgctccataaaggataatagtttccagtacac

SEQ ID NO: 556682 - DNA, 75 bp, Homo sapiens
gaagcagtttgccgaagagcagcagttggatggcaagcatgtggtgtttggcaaagtgaaagaaggcatgaatat

SEQ ID NO: 556683 - DNA, 75 bp, Homo sapiens
tcgcatgagcacctcatacggctgcttctggagaagctaagtttggtgcgaacgccattctgggggtgtcccttg

SEQ ID NO: 556684 - DNA, 100 bp, Homo sapiens
caagcttagagcgtctggccaagaatcagaggaagtggtagtttatgccaacgtgacttcattcatacagatgaaccaaggatcgggatagcagtataaa

SEQ ID NO: 556685 - DNA, 100 bp, Homo sapiens
tccaaggaagaggactccacgggtggagtgtgttactcttggggctggaatgagcatggcatgtgcggagatggcactgaagccaacgtctgggccccaa

SEQ ID NO: 556686 - DNA, 98 bp, Homo sapiens
gctggaccagttgatgggcacctcccgggacgacctcgaagtagggggaaaactgcagtggaagatgaggacagcatggatgggctggagacaacaga

SEQ ID NO: 556687 - DNA, 76 bp, Homo sapiens
caaccacctcgagcggctgctggacgaaggccaatggaagcactgttgtgaagaacttatgaaaattgagattatg

SEQ ID NO: 556688 - DNA, 105 bp, Homo sapiens
caggtcctcgggggcggcggccacgccaaggacggatctaccttctgagatatcatccttcttcagggagataaggaaaaaaagccacagggtcccggagagcca

SEQ ID NO: 556689 - DNA, 82 bp, Homo sapiens
agccgcctcttggtttgcgtcctgcactgaaaggaaatgacggattttacaaccttttagtcctcacggtggccactaagga

SEQ ID NO: 556690 - DNA, 98 bp, Homo sapiens
ctctgtggcagcattttttccagaacacaaaaggactgtgggaaggagttcacgcacacggggaacttcaagcggcacatccgcatccacacggggga

SEQ ID NO: 556691 - DNA, 74 bp, Homo sapiens
tacacaacaaaacattcatggagggggaagaagcgagcagctgcaaagcatctaatagaacgctactaccacca

SEQ ID NO: 556692 - DNA, 87 bp, Homo sapiens
gaaaccaaggaagatcggaaattagcctaaattacctacttgaggaaagtgatgaagcattgggcccaacaatgatgagttggaatg

SEQ ID NO: 556693 - DNA, 75 bp, Homo sapiens
gagcaagtggagtagcagaaccaggagcctcttccatacatgagatatcatttgaggatgtggctgtggatttca

SEQ ID NO: 556694 - DNA, 100 bp, Homo sapiens
agacaagaggagacactgagggaacaaacacttctggatgcatccattctttgtgggaaagagattcctcgctggatcaatcgacttgcctacttcagct

SEQ ID NO: 556695 - DNA, 75 bp, Homo sapiens
cgccagggtcccaacatcgatgcccatgactatgtattcagttcaatctcatccctcccagcagctccccttcca

SEQ ID NO: 556696 - DNA, 75 bp, Homo sapiens
gattcgtatctaagactctgggacactcctgaagtcgggaaatgacaaatttacatgtattggagaccagaccag

SEQ ID NO: 556697 - DNA, 100 bp, Homo sapiens
cccggctagggcacggaccgcctaggccgagattgctcttaaacttggtgtgactgctaatgatgtaaagaatgtcattatctggggaaaccattcctcg

SEQ ID NO: 556698 - DNA, 82 bp, Homo sapiens
ctggaccgtcgccttgctcctcgccgcggcggggactgcaggttgttcctcaaagtcattcaagctgtactcgccgaaggag

SEQ ID NO: 556699 - DNA, 100 bp, Homo sapiens
ttggctacctgaagaaggccttcaacctctacaaccagtcaagtctctatttatgaggtggacaagcaagattgtcgcaaattttgcactactggcatcg

SEQ ID NO: 556700 - DNA, 101 bp, Homo sapiens
gtggaatattggggggctcggctgcagacttggccaaatggacgggactattaaggttccgaggcctcatcctgctgctgaccttcctaatttacgcctgc

SEQ ID NO: 556701 - DNA, 83 bp, Homo sapiens
cgcggggtgagcgtcgaggaggcgcaggagactgaccgcaacggcaggttgatattcactgatggactccaaagaatcattaa

SEQ ID NO: 556702 - DNA, 82 bp, Homo sapiens
cacacagctcagaacagctggatcttgctcagtctctgccaggggaagattccttggaggaggccccgcagcgacatggagg

SEQ ID NO: 556703 - DNA, 75 bp, Homo sapiens
ggatgacaaactctggagtaattggagccaagaaatgagtatagacaatgactgtggggacaacagtgacgaagc

SEQ ID NO: 556704 - DNA, 76 bp, Homo sapiens
ccgagtggcggtccgacagagtcctccgtgtcctcccccgcatgacccccttgatgcagattctgcccaagaagcc

SEQ ID NO: 556705 - DNA, 100 bp, Homo sapiens
tggaggtggaagagttcttgaaagaagctgcagtcatgaaagagatcaaacaccctaacctggtgcagctccttgaaggggtagaagagccatccaaaaa

SEQ ID NO: 556706 - DNA, 111 bp, Homo sapiens
cgatgctgcgaaaagaaaagctgtggaaaccgaaatgagactccatcggacccagtcataattgacagatgtccagttcattcaacaacatttctttaaaacacgatcttc

SEQ ID NO: 556707 - DNA, 75 bp, Homo sapiens
tagatgcacaaagaaagcgcctttctccaggctcaaaagagtatcaggaggagatgttaaagtaacccatcttgc

SEQ ID NO: 556708 - DNA, 80 bp, Homo sapiens
cttagaagtgcttaaggaagagtgatgaagattctgctcctaagtgtaggagagaacttggtgcctcttccactctggag

SEQ ID NO: 556709 - DNA, 100 bp, Homo sapiens
ggcgacggcaacagtgaccagctcatgggcttcgagagagactcggaagctttggcgctgaccacaatgctgagcaggaagcagcagctgcaggcccagt

SEQ ID NO: 556710 - DNA, 88 bp, Homo sapiens
gagcggcgcgcccggcgtgccgagcggcaacggggctccgggccctaaggggtcaaaatgcagatcttcgtgaaaacccttaccggca

SEQ ID NO: 556711 - DNA, 88 bp, Homo sapiens
ccgcgcggcgctggactggagcagaaccccaggactgcgcccccgggagcgggcgcccagaggtgaatgtaagacctttacttccttc

SEQ ID NO: 556712 - DNA, 88 bp, Homo sapiens
ggagacgaagagcccgggcggcgctcgtacttctggccactgggcgagcgtctggcagatgccttcaattaagttgcagagttctgat

SEQ ID NO: 556713 - DNA, 98 bp, Homo sapiens
atgttcaagatggctaaaaattggagtggtctctaattaacagaagatggcaaagcccagccacagcagctatgtccttcagcagctaaacaaccaaa

SEQ ID NO: 556714 - DNA, 82 bp, Homo sapiens
ggacagcgcggcggggagcgacgagagccttcacgtaaatgggtccagtcatgcctcccagtaagaagccagaaagctcagg

SEQ ID NO: 556715 - DNA, 98 bp, Homo sapiens
aaaggatctaaggaccaaagctgacagtttctttacttgctctgcctgcagttgaacacaaagacctggaggagactcccacctccttcagggagaag

SEQ ID NO: 556716 - DNA, 88 bp, Homo sapiens
tgcctttcaagtgcatgcagctcactgatttcatcctcaagtttccgcacaggaacaagactgccaatggagactgccgcagagaccc

SEQ ID NO: 556717 - DNA, 82 bp, Homo sapiens
tctgctgcggcgcggggaccgctgtgctctcgtcaggatggctaaaggtgaccccaagaaaccaaagggcaagatgtccgct

SEQ ID NO: 556718 - DNA, 100 bp, Homo sapiens
cttgttctcaccgatcttcttgtgtcaccatgctattatgcatagaaagcctgtgcctactacactggcacaagtggatagagaaaagatctatcagtgg

SEQ ID NO: 556719 - DNA, 100 bp, Homo sapiens
atatgaatgagattgttacacaaattgatgcacaaaataagctggaaaaatctgagcttctcacctggggcgggtgggttctgcaccaccctcccaccct

SEQ ID NO: 556720 - DNA, 100 bp, Homo sapiens
ctgccaccgggaggtgtggaagagccgggcagttgcagtggtgcagaatggctgacctcagtcttgcagatgcattaacagaaccatctccagacattga

SEQ ID NO: 556721 - DNA, 82 bp, Homo sapiens
gaaggaagatccggcgcggggcacaggatccggagctggagcccccaggccaccccagcagacatgtttgccaaggcctttc

SEQ ID NO: 556722 - DNA, 82 bp, Homo sapiens
cgccacctggaccgctccatttgtgtgtcccggcatggatatccggaacaacctcactaggttgcatgagctggagaattgc

SEQ ID NO: 556723 - DNA, 96 bp, Homo sapiens
cctcctgagtagctgagactacaggcagccgtgtctgtgtttttgtctcgcagaattagagcccattgggaacgatgccaccaccgtcagacattg

SEQ ID NO: 556724 - DNA, 75 bp, Homo sapiens
gtgaaggggaggtgccagcccgcgaatccggccggagtcacccacaaaagctgtatataatgccagacattggaa

SEQ ID NO: 556725 - DNA, 98 bp, Homo sapiens
cgctctaaaggttatggtttcatcacgatttccatggtgtcagtgattcatattcctgataggacttataaactatcctgcagaatattgtatcaata

SEQ ID NO: 556726 - DNA, 98 bp, Homo sapiens
gaagttctggttgctggatttggtcgcaaaggtcatgctgttggtgatattcctggagtccgctttaaggttggcaaaagcagcttttgatgatgcaa

SEQ ID NO: 556727 - DNA, 85 bp, Homo sapiens
tggccgtagcggcttgttggataagggggacttgatctcatcttcatgccaggccttgggtttgacaaacatggcaaccgactgg

SEQ ID NO: 556728 - DNA, 96 bp, Homo sapiens
tggagcaaggcgacgaaccttggagagaggagaacgaacatcttctggacctttgtccaggctggagtgcagtggcgtgatctcggctcactgcaa

SEQ ID NO: 556729 - DNA, 97 bp, Homo sapiens
tttcacctttgaattcagccagtggtcacagctggatgtttgcgacatcccagagagcttccagactgacaggcctgtcagagtatacgccgatgga

SEQ ID NO: 556730 - DNA, 82 bp, Homo sapiens
ggccacctgagtggcgcggcggtgtcagtcagagcaccataacatggtgtgggaagtgaagacaaatcagatgcctaatgca

SEQ ID NO: 556731 - DNA, 100 bp, Homo sapiens
tgtgaggaccgtgacccacctggtacatcgcctcagggcattcatttcaggctccttctaaatggccaagggtgtcaaattgagaaccaggtagatcccc

SEQ ID NO: 556732 - DNA, 100 bp, Homo sapiens
ggaatctcctacctgcttgagggattcaagaagtcctgggtgacagtgaggcttttccgtggcattggatgagtggcgtggagcagcaggtggcctctct

SEQ ID NO: 556733 - DNA, 82 bp, Homo sapiens
ccgtgacatcctgggatattctttgttgagagcttctttgtgatattggccacagtgaagaaaaactgggctttcactatga

SEQ ID NO: 556734 - DNA, 75 bp, Homo sapiens
atgatgctactaagcaactggactttacacgaaaggaccctggtttgatatgtacctatctgctcgagactccgt

SEQ ID NO: 556735 - DNA, 82 bp, Homo sapiens
cctcaccatacaggaacagggcagacgttagcgtgagtgatcactctcaatcccggtcattgaaagaaaatcttgcaaggtg

SEQ ID NO: 556736 - DNA, 90 bp, Homo sapiens
ccacacttgaaggccttgcacacctgcagccctaccaactactgtgtgaagacattcacaggacacagagaatgggtacgtatggtacgg

SEQ ID NO: 556737 - DNA, 102 bp, Homo sapiens
tgacagagattgatgagaaagaatatatcagccttcggctcatcatatcagagctgaggaatcaatatggtcctgagaacattatctgtagctgtatctccc

SEQ ID NO: 556738 - DNA, 90 bp, Homo sapiens
cggcggcagcggcagcgcggcggggccgggacctcagcagccatgtcgaagccccatagtgaagccgggactgccttcattcagacccag

SEQ ID NO: 556739 - DNA, 74 bp, Homo sapiens
ctcatccggaccatcatcggcggtattatagctgcaaatgtccttgtattctgtttatggagagtaccttctct

SEQ ID NO: 556740 - DNA, 75 bp, Homo sapiens
atttttttcgggtagtggaaaaccagttgcagagtgggcaggatcttaagacccgataggtgcagaacccatctg

SEQ ID NO: 556741 - DNA, 51 bp, Homo sapiens
gccttccagctgtttgaccgaacagaagttggacttcatagagtctgacag

SEQ ID NO: 556742 - DNA, 100 bp, Homo sapiens
cacatgatcatcagtatttgcctcctgtgtcccaaccggcctgagtcaactccctgtgctgtcaggaatctacaggacttggctcgtatttacattcgac

SEQ ID NO: 556743 - DNA, 123 bp, Homo sapiens
aaggatttgacaaagccacttttgaaagtcagatgtctgtgatgaggggtcaggacccactcttctgtttgtaaaggtgacccaagggaaagaagaaactcggaggttttatgcctgttcagc

SEQ ID NO: 556744 - DNA, 90 bp, Homo sapiens
gttaactctttactgtggtctaatggagacagcactcgactgaaagtgaaggacccagactctagttagccaggctgaggcgcactacaa

SEQ ID NO: 556745 - DNA, 75 bp, Homo sapiens
gccgggagctggtacacagcctcagcatttaaatcaaacggtattgagatggattgggttatgaaacataatggt

SEQ ID NO: 556746 - DNA, 98 bp, Homo sapiens
cagaacaaagcagaagccacaactgtgaaaaggaaagcatccagctcagaaggttccatgaaagtcaaagatggagcggcagcgcctcgctcgagaga

SEQ ID NO: 556747 - DNA, 97 bp, Homo sapiens
aagcagaaagccgcctcttggtttgcgtcctgcactgaaaggaaatgacggattttaactttgaccagaataagctggaagaagaaatgagaaagcg

SEQ ID NO: 556748 - DNA, 83 bp, Homo sapiens
ggaactggtgaacgcaggatgcgaccaggtttaccttccagaggctggcaatgctgtttcactggaggacacggctaagaagg

SEQ ID NO: 556749 - DNA, 100 bp, Homo sapiens
caatgtttgactatgaatgtttcgttataactgcctggaaggttagcgtcaaagaagttgagagtcacaatggcttcagcctttcgcctttctttgaaac

SEQ ID NO: 556750 - DNA, 75 bp, Homo sapiens
tttggcattgacatttaattttagggtcctttatatagaagggagagtagtctaacttctccctggccatcctga

SEQ ID NO: 556751 - DNA, 100 bp, Homo sapiens
gcaattgatcccaagttgtcgacgaccgacagggtggtgaaaggactgactgcattgcacagatgatggatatttacgtatgtttgaaacgaccatcctg

SEQ ID NO: 556752 - DNA, 51 bp, Homo sapiens
cagcctcccgagtacctgagattagcccagaccatgaaatggaggctcagg

SEQ ID NO: 556753 - DNA, 82 bp, Homo sapiens
ttttccctctccctttccctaagctccaattaaggaacagctatatcctgcttccttctgtaagcagcatcgacttgtgcaa

SEQ ID NO: 556754 - DNA, 100 bp, Homo sapiens
ggaggcccaggtctccgtgcagcccaacttccagcaggacaagctatggaagggccgctggcagggcaatgacattgtcgtgaaggtgctgaaggttcga

SEQ ID NO: 556755 - DNA, 82 bp, Homo sapiens
gagattttggagaggcaaccaacaggtgcagttaataaccaaagcaggccacaaagccacagcagtggagaatttagcctgc

SEQ ID NO: 556756 - DNA, 96 bp, Homo sapiens
gctgaggggcttgcctgaagcgagggtgccggtggtggtgtgcacattgagccccggtatagacagttcccccagctgaccagatcccaggtgttc

SEQ ID NO: 556757 - DNA, 87 bp, Homo sapiens
gcgtgctccagttcactaactgccggatcctgcgcggagggaaactgctcagtatgacgccgtgcccatccagtccagcgtggtgtt

SEQ ID NO: 556758 - DNA, 88 bp, Homo sapiens
tgtcatcagtggctgcatcacgggaggagctattggtttcagaggcattacgagattggacgaccaaatatttctgaacaggaacccc

SEQ ID NO: 556759 - DNA, 56 bp, Homo sapiens
gccgctgccgccgccgcagctgccaaaatatttaataccgcgatctcagccaaact

SEQ ID NO: 556760 - DNA, 101 bp, Homo sapiens
gcactgatagaactctataatgcacccgaggggcgatacaagcaggatgtgtacttgcttcctaagaaaatgggcacaacgactctgtaaacgctgtggtc

SEQ ID NO: 556761 - DNA, 75 bp, Homo sapiens
gcgagagagtcagctgcaacaggaagacccaatggatagatacaaggctgtggccacagatttccagaatgaaag

SEQ ID NO: 556762 - DNA, 99 bp, Homo sapiens
acgtccgtatcatcaagaacagaacaggccctatggggcatacctatggctttattgacctcgactcccatgcggtttgaattcctcagcaacatctac

SEQ ID NO: 556763 - DNA, 100 bp, Homo sapiens
ctggcacgccttcaccgcactcgaccaggaccacagcggcaaggtctccaagtcccagctcaaggtgtgatgatgatcagatgtctaacgataaggagcg

SEQ ID NO: 556764 - DNA, 90 bp, Homo sapiens
caccaatgtatggagttcaaaaatatgatcccattaactcgacatcatgtgaggctctgtaaaccatgcaagcttgagccagagccccgc

SEQ ID NO: 556765 - DNA, 103 bp, Homo sapiens
tgctgctgagcttggcctcggcgtcctcgggtgtcatggagaaactccagctgggcccagagattctgcagcgggaaaatccaaggcttatttatgccaggct

SEQ ID NO: 556766 - DNA, 50 bp, Homo sapiens
cattccagaatatctcagatgagcaggccccagatgagaccaccctaaag

SEQ ID NO: 556767 - DNA, 90 bp, Homo sapiens
gcgggaccgcatcgaccgcctggagggattaaagcctgtggtttccacagaagcaccacctatcatatttgccacaccaactaaactgac

SEQ ID NO: 556768 - DNA, 98 bp, Homo sapiens
tggaaattggaggctgaaagcatgggattttttaccaaggaagaatggttaaagggaatgacttcattacagatggaaagaagaagtttgacaaagag

SEQ ID NO: 556769 - DNA, 83 bp, Homo sapiens
aacgaggaaagtcccaggatgactactgtgtcaattcccttggtaatgaagacccaacagattccttcaaaagttctttttaa

SEQ ID NO: 556770 - DNA, 100 bp, Homo sapiens
cagggaaggaagcaaagcaaatggagaatggcatgctggtgacggacagtgcagggaagcaactgcagagtgtggcaaaggagcagagaactttgacaag

SEQ ID NO: 556771 - DNA, 100 bp, Homo sapiens
cttccctgggctgggcgtcagccgccaccggcagcagcagcaccaccggacgctgattggggccctggtcctgtctgtgggcatctatgcagaggttgag

SEQ ID NO: 556772 - DNA, 90 bp, Homo sapiens
ccgaaggttcccagtggtgtgagtgacgggcggtggcactctgtgcaggtgcagtactacaacaaggcatcatctctttcaacgtataaa

SEQ ID NO: 556773 - DNA, 50 bp, Homo sapiens
cagcctcttctgaaacactgggcccaagaggagagggtttgaccgcttcg

SEQ ID NO: 556774 - DNA, 83 bp, Homo sapiens
gacgcgaggacccgggctgggctttcctcacccgggccttagaaaatttacgtgtatacctgtgtgagaaaatcatagctgag

SEQ ID NO: 556775 - DNA, 98 bp, Homo sapiens
ttcactgaagaagtggggaaaacaaggctcagacagggtgaaaggtgtagcagtcactcggcctacacccacagcatcgaccttgtgaacccagcgac

SEQ ID NO: 556776 - DNA, 83 bp, Homo sapiens
acaattgctaggcggagacagtgcagggaagagagaccttagaaaggatcaggactggcggccgcttacaaacacgcagatgg

SEQ ID NO: 556777 - DNA, 82 bp, Homo sapiens
ggccgcccccacagcaccccgggctggcgtgagaaaatgtggacacagacttgccaggcagcctggggcagagtgaagagaa

SEQ ID NO: 556778 - DNA, 98 bp, Homo sapiens
gactacatctatgacctgtatgctgtgtgcaatcaccatggcaccatgcaaggggggcactacacagttgctgccaaacaaggtgaatccgacccaga

SEQ ID NO: 556779 - DNA, 100 bp, Homo sapiens
gtggaggcagaggtggcatgggagtcgctgccacaaaaagtccgattattttcattggtacaggggaacatatagatgactttgaacctttcaaaacaca

SEQ ID NO: 556780 - DNA, 98 bp, Homo sapiens
cggcggcgtctgtctctgcggcttctggttctcacttgtcgaacttctccttgtgaggctgagcttcaggaattaatggaacaaattgacatcatggt

SEQ ID NO: 556781 - DNA, 51 bp, Homo sapiens
cagtccccgcgcgtggtcatccagggcagcacgctgaggaaacgcaagatg

SEQ ID NO: 556782 - DNA, 70 bp, Homo sapiens
cggatttggagggaccctacgaaccaggagtcaggctgaaggggatgctaagggagataaagcaaaggtg

SEQ ID NO: 556783 - DNA, 98 bp, Homo sapiens
agaatttcagcagttctctgatttttatattttattcctcttcctatccaatccctgccttttgagtccaggtgaatcccaaggactgcagcaaagcc

SEQ ID NO: 556784 - DNA, 82 bp, Homo sapiens
tcccagctgcagctgtggctgcagtttgaggctctgaacaaggagaaaagccttacagatgctcatgggaagggtgtgagtg

SEQ ID NO: 556785 - DNA, 90 bp, Homo sapiens
ctgcagtactcgggcaagaccaccttcgtcaatgtcatcgcgagtaaacatcagtctccaaagataactacatcccttcttcccatcaac

SEQ ID NO: 556786 - DNA, 71 bp, Homo sapiens
actccaaccctgtcatggaagcttttgataagtatgctgtgcgcttcatccctcgggagaatggcgtttac

SEQ ID NO: 556787 - DNA, 99 bp, Homo sapiens
gttgtgggctgtgtactagtagggtaggagtttttgttcagggaccagcggaacgaggctttctgtcgttaataggacattgctacaagtggttggtgt

SEQ ID NO: 556788 - DNA, 100 bp, Homo sapiens
tcaagatgtggatttaccttatcccctcaacaacttttcagtggcaacacccttcacaatagcaaacgtaaacgatggaattgatggaatcaaccgaaat

SEQ ID NO: 556789 - DNA, 84 bp, Homo sapiens
ggaggaatccgagaagagcagagcggagggagccccagacacggccgccatggcatcagatgaaggcaaactttttgttggagg

SEQ ID NO: 556790 - DNA, 75 bp, Homo sapiens
ctgtcaccttggctctcccacccaatggagatggctctaatgattgaccccaaagttgcatttcctcgtcgagcg

SEQ ID NO: 556791 - DNA, 75 bp, Homo sapiens
cggcccctcagggccacggctttagcggtgtcttttgcgtacggcaagaagaagctgaaatacctgccctacaat

SEQ ID NO: 556792 - DNA, 100 bp, Homo sapiens
gaggtcagtaactaaattggagaaaagcattgatgacttagaaggtgacacaactggcaagctattttgagcccttgatcttagccgcagttggtgtggc

SEQ ID NO: 556793 - DNA, 83 bp, Homo sapiens
gaactctgtccagttttcaaaccacacagacaggccgacggtcgcaaggtcctacggtcaagcatccgggagtttctatgcag

SEQ ID NO: 556794 - DNA, 75 bp, Homo sapiens
ggaagtcatcatgggccggcctggaacagcatttaaatcaaacggtattgagatggattgggttatgaaacataa

SEQ ID NO: 556795 - DNA, 75 bp, Homo sapiens
tcagccttccgagtagctagaactacaggcaagaaaattggatgtatattttgaatatgaagaaaaaataatgag

SEQ ID NO: 556796 - DNA, 100 bp, Homo sapiens
gttgcaacggagataaattcccggaaccgcgattcggcgtgtcaggttcaaaaaggcatttgaatctgagccaacactacagtcaggaattaattatgcg

SEQ ID NO: 556797 - DNA, 101 bp, Homo sapiens
aggacggggcggcaggcgccttcgcggaccgagcctgacggagccggaggctgggagccgcggcggcctggggctaaggcagctggataagcacagccagg

SEQ ID NO: 556798 - DNA, 90 bp, Homo sapiens
ttccatttgcaacttatccccaacaggaagaggagcaggacttggatggtgagaaggggccatcatcggaagggcctgaggaggaggacg

SEQ ID NO: 556799 - DNA, 98 bp, Homo sapiens
aatacctcttgggactgggctcgatttgaggtggaggagcggcgggagcgctacatggactcctatgacatcgtgctggagaaggacgagactctgga

SEQ ID NO: 556800 - DNA, 104 bp, Homo sapiens
ctggcggagagcggcctgcgggcgatcgggccgagtaagactttgaccccgacgcaggcttcagtgattgccgcggatcagaagcctgagcactttggctcgag

SEQ ID NO: 556801 - DNA, 113 bp, Homo sapiens
cacggtccagcggtcacctacccccagcaccacctccagcccctgcgcctcggatgttgtacctcaggcgttgttagatcagtatttatctatgactgacccttctcgtgcac

SEQ ID NO: 556802 - DNA, 50 bp, Homo sapiens
cacgatagacagcatattctggcaggaactgcaagcacatgttgaccaga

SEQ ID NO: 556803 - DNA, 99 bp, Homo sapiens
gagcgacgagcagccggtcagcatgagcgagctctaccctctgcagatctcccccgtgtcttcctatgcaggcaagcaccggaagcaccccggcggccg

SEQ ID NO: 556804 - DNA, 98 bp, Homo sapiens
gaaaatcggttccatcccagcatgctctcaaattacctaaagagcctaaaggttcctgcacttggccatcatccatgaagaaaaggcactgaccatgg

SEQ ID NO: 556805 - DNA, 82 bp, Homo sapiens
tacctgaatgtcacccgcaaggcctactggcaggtccacctggaccagcctgggttctgaggaaaacgcaatggtggccatg

SEQ ID NO: 556806 - DNA, 83 bp, Homo sapiens
ggccgatgcagctcttccaaagctaagtactatactggcaattgctggagaagattttgcaattgttgcttctgatactcgat

SEQ ID NO: 556807 - DNA, 122 bp, Homo sapiens
gactctccattccagaaccatggcccaatttgtccgtaaccttgtggagaagaccccggcgctggtgaacggggtattccctcagcggatactacacccatccatttcaaggctatgagcac

SEQ ID NO: 556808 - DNA, 153 bp, Homo sapiens
ggctccgggcggcgcgaagcgctggtggcgggcccgggctgcggcgtgtgcgcgcccgccagctgctccggagatacgagcccataggcagcatgtcatccatggaagtgaacgtggacatgctggagcagatggacctgatggacatatcgg

SEQ ID NO: 556809 - DNA, 75 bp, Homo sapiens
ggcggccaagatgtccgtgcctggaaatcgtggaacacatggtccagcactttaaaacacagatctttggggatc

SEQ ID NO: 556810 - DNA, 82 bp, Homo sapiens
gtcgtcttcagttaatggcaagacttgcagagggtcaagagcaatctgaatccaaatgcaaaggagtttgttcctggggtga

SEQ ID NO: 556811 - DNA, 50 bp, Homo sapiens
gcatactgcgagccctgctacatttcaggtcaattcagtgaagatatgat

SEQ ID NO: 556812 - DNA, 100 bp, Homo sapiens
tctggagtgcccccagcccagagcccggatgccggctccaggagcagcagtggaggtcgggaacgcctcattgtggagcccccgctccctcaggagaagg

SEQ ID NO: 556813 - DNA, 85 bp, Homo sapiens
ttcgacttcagtaatttgagtagtaggtggagccccctgagctgcccgctgatctgcagcactggatctcctacaacgaggccag

SEQ ID NO: 556814 - DNA, 82 bp, Homo sapiens
gctgggactacagacatgcgccagcacgcctgacttaattcagtgcacaaatgagatgaatgtgaacatcccacagttggca

SEQ ID NO: 556815 - DNA, 100 bp, Homo sapiens
ccatggagaagctgcggcgagtcctgagcggccaggacgacgaggagcagggcctgactgcgcagattgatgctttgacagaagtggtggctgctgtaaa

SEQ ID NO: 556816 - DNA, 48 bp, Homo sapiens
tcgggatcacacttatgattggttaaaaggactactgactcaaactct

SEQ ID NO: 556817 - DNA, 83 bp, Homo sapiens
cgaaggggaaggcgcctgaagaggacgaagagctgagctcaatgtgcagcaatggatgacgacagcctggatgagcttgtggc

SEQ ID NO: 556818 - DNA, 100 bp, Homo sapiens
attatgtggtgtgccgagactgtgaagtcaccaatgatggacataccattcaggttatcctgaagtcaaaatcagcattccccgtcggagccctttctag

SEQ ID NO: 556819 - DNA, 98 bp, Homo sapiens
ttgattctaatggccatgtggtgctgacagattttggtctgagtaaggagtttgtggctgatgaaagtcgccaacatccagcagcagctggcccggct

SEQ ID NO: 556820 - DNA, 100 bp, Homo sapiens
cgatccactgggagcatcagtagcaatggtcacagccaccaacagtatggaagagactctgatgcaaataggcccagtttaccctcaatttaccctcttc

SEQ ID NO: 556821 - DNA, 100 bp, Homo sapiens
ttccagcgcccgggaagctactggtgttctaagaacggaagcatctgggctggatggaatttagcatcaagcagagtcccctttctgttcagagtgttgt

SEQ ID NO: 556822 - DNA, 97 bp, Homo sapiens
tcgaatgtgactgactagcagcttcattttgaagctgtaggttccatgaggacaggccttgagtctgtcctggtctctggaatcacggtgtctagta

SEQ ID NO: 556823 - DNA, 83 bp, Homo sapiens
aagcccaaaaagctgaaggtggaggcgccgcaagcgctgagctctctgacacagctggctattctagtcccagaagaaagagg

SEQ ID NO: 556824 - DNA, 74 bp, Homo sapiens
cagtgatgaatgcaagaggcgtttctataagaattgagccatgcggctccctgacctgagaccctggacctccc

SEQ ID NO: 556825 - DNA, 100 bp, Homo sapiens
ccctctgggaggcttaccgagagtttgaaagtgcgattgtggaagctgctcgggaaggaatcgtgtctcctagtgacctggaccttgtcatgtcagaagg

SEQ ID NO: 556826 - DNA, 98 bp, Homo sapiens
cagcttcaagcttaggaccacccaccatgcctatccaggcagccacctcccgcccctgtacctggatggccatgtgtttgcaagtcagccccggctgg

SEQ ID NO: 556827 - DNA, 100 bp, Homo sapiens
tcctgactgtagctgccttgcccatgctgaagcagagcaatggaagcattgttgtcgtctcctctctggctggaggatttgacagctaaggatattgaag

SEQ ID NO: 556828 - DNA, 95 bp, Homo sapiens
tgagcaggcagcttacaagttggatgcatattcaaaaaaactggttgaggctgtgaagctgggcagggtttcagctgagctgaggttggaagtcc

SEQ ID NO: 556829 - DNA, 76 bp, Homo sapiens
aggcgatgtagatgtttcagattctgatgatgaagatgataggatgtcaagaaagcagagttgcatctgtctacag

SEQ ID NO: 556830 - DNA, 100 bp, Homo sapiens
gaatgacagcggcgaggagaacgtcccgctggatctgacccgaggaatggcggcgctagatagtaaggcatcagggaagatgggaatgcgagctgtagtc

SEQ ID NO: 556831 - DNA, 98 bp, Homo sapiens
agggaggctttcagccggagaagcgagtttcagctggtcaatgtgacggtggactacattagaccagccagcccagccacagagacagtgcctgcctt

SEQ ID NO: 556832 - DNA, 76 bp, Homo sapiens
ctcattcgggtggagctgagccggagacaggtgcaaggatggcttgaaaggatttacattttctgcacttaggtaa

SEQ ID NO: 556833 - DNA, 82 bp, Homo sapiens
acttcagagacactgccaagcagccttagccctagtgtagaggtgggctggatgacactttgcacacaattattgattatgc

SEQ ID NO: 556834 - DNA, 82 bp, Homo sapiens
gtggactgcagcctcggcggtcagcagacccaacatgagtgaagtttcctgcaagaaacgggacgactatttggaatggcca

SEQ ID NO: 556835 - DNA, 100 bp, Homo sapiens
atctacgagtggatggtcaagagcgtgccctacttcaaggataagggtgacagcaacagctcggcgggctggaaggaaccagcacctatgacagaagatc

SEQ ID NO: 556836 - DNA, 96 bp, Homo sapiens
ggaggatcacctgctaatacacgatacctttttcttggcgattatgtggacagaggttattttagtatagagaaatgcactcggtgatggaaagag

SEQ ID NO: 556837 - DNA, 75 bp, Homo sapiens
tggccgctacctacgggctcccaggagttctcttgagcgctgtcggcttcaatgaaatggaggccccgaccacag

SEQ ID NO: 556838 - DNA, 87 bp, Homo sapiens
gcttcccaccgaagatgaacagggttcctggggcatcgacgatctccatatttcattgcaagatttgaggcttaagcaacttcttcc

SEQ ID NO: 556839 - DNA, 80 bp, Homo sapiens
gtccagagctgaggactgcctgtttgcaggaacttgctactaccagcaccatgccctaccaatatccagcactgaccccg

SEQ ID NO: 556840 - DNA, 100 bp, Homo sapiens
cacgccgccatccgggaggcccagggaagatataagagttcggaccgcccagcacacaaggtcagcatgctgctcctctgtcacgctctcgctatagctg

SEQ ID NO: 556841 - DNA, 100 bp, Homo sapiens
gcagaacgtgagggtgtaacttacaaaaagagaggaggttcagatgagcccctgctgacttgagagagacagagagaccacgccgattgctgagaggaac

SEQ ID NO: 556842 - DNA, 90 bp, Homo sapiens
cagaggttggcttggaaagaccaagtaagactttgaccccgacgcaggcttcagtgattgccgcggatcagaagcctgagcactttggct

SEQ ID NO: 556843 - DNA, 75 bp, Homo sapiens
ttccagaaggtgttgcttcccgcccaggatcaggaatatcactttcctgattcctggtttctacagctacatgga

SEQ ID NO: 556844 - DNA, 100 bp, Homo sapiens
ggaatttccaaggggattcaaacttcaacagaatgtggcaaccagcttcgccgacacgaggtgaccatctgcaattacgaagcatctgccaacccagcag

SEQ ID NO: 556845 - DNA, 109 bp, Homo sapiens
cctccgtttagtctcctcctcggcgggagccctcgcgacgcgcccggcccggagcccccagcgcagcggccgcgctgtctgaaaacgtggtgaaccgcatgaaggagcc

SEQ ID NO: 556846 - DNA, 98 bp, Homo sapiens
cgtgattcccgtgattgcgttacaagctttgtctccttcgacttggagtctttgtccaggacggttcccaacaaggctacgcagaagaacccccttga

SEQ ID NO: 556847 - DNA, 100 bp, Homo sapiens
accttatcaaaacaagaatgctatcaataatggtgttcgaatatctggaagagatatgcctcttcatgttcgacgcagtagtgacccagctctaattggc

SEQ ID NO: 556848 - DNA, 99 bp, Homo sapiens
gtccggtgcaggtgaggggcgcgcgcctgcccagctttgcagcccccgaacgcggcctcgcacagatctcacattcttgaaggtggcattgaagagcac

SEQ ID NO: 556849 - DNA, 82 bp, Homo sapiens
cagtatggcttccagtacccccttgccatggcagcaaagttcccaacaaggctacgcagaagaacccccttgactgaagcaa

SEQ ID NO: 556850 - DNA, 90 bp, Homo sapiens
aaacattgtttgaggattcctttcaacaggtgaccaagaatatggcccaggtgaccaaagccctggacaaggccctgagcaccatggacc

SEQ ID NO: 556851 - DNA, 83 bp, Homo sapiens
ctcacggagaagaaggcctccgacgtgggaggaggagctcgccaagcgcatgaaccttcagaccatggtggacacgctgcagg

SEQ ID NO: 556852 - DNA, 83 bp, Homo sapiens
aaccaaaggaattttgaagtcaccactgaggaggaattcaccctgttcgtctatgacatatctgaagagatggattaagaatg

SEQ ID NO: 556853 - DNA, 97 bp, Homo sapiens
gggtttcttcttccttgagaacgatctgattcatcatcatctgaaccagggatcacagtctaaggtccaggtcttgactccactaacggggacttct

SEQ ID NO: 556854 - DNA, 100 bp, Homo sapiens
tcctataaatctcgcccaaacaggaaaggagtttgggctttgcaaaactgagaacaaagccaagtcgggcaaacagaattcaaagaagctgtactgccaa

SEQ ID NO: 556855 - DNA, 80 bp, Homo sapiens
ttgtgaacattcaagtgaagcaaaagcctttcatgattatggggatatgagactttctactcggaatatcctgagtgttg

SEQ ID NO: 556856 - DNA, 83 bp, Homo sapiens
agcagcgtgcgttcagccctgggtaattgacccaggactcattttcaggaaagcctgaaaatgagtaaaatagtgaaatgagg

SEQ ID NO: 556857 - DNA, 74 bp, Homo sapiens
gaaaaccctgctgatgtcagtgttatatcctccaggaatactggccaggccttgtctgatgccattaaaaaatg

SEQ ID NO: 556858 - DNA, 83 bp, Homo sapiens
ctatgatgttgtaaaagttattggaagaggtgcttttggtgaagtgcagttgtgtgccgtgcaggtgaagctggagctggggc

SEQ ID NO: 556859 - DNA, 83 bp, Homo sapiens
gggaggccaagcgaccacccaaagaagattgctgctgcagaaaacaatggaaatgaatcaggtgtaagagagctactaaaaag

SEQ ID NO: 556860 - DNA, 85 bp, Homo sapiens
ggaatactctcttcttgcagaattgcttaacagcattgcgcagtgatgaagtgattgatttaatgataaaagaatatccagccaa

SEQ ID NO: 556861 - DNA, 100 bp, Homo sapiens
tcctggaggatgaacggctagccagcgcccagcaggcagaggtgttcaccaagcagatccagcagctccaaggcatcgactgggcccccgagagtaaccg

SEQ ID NO: 556862 - DNA, 48 bp, Homo sapiens
gctgaagggggctctttatataatggatgagacttctgtgagcagcga

SEQ ID NO: 556863 - DNA, 100 bp, Homo sapiens
ttagccaacccaaattaccttaattggggacttgatctcatcttcatgccaggccttgggtttgacaaacatggcaaccgactggggaggggcaagggct

SEQ ID NO: 556864 - DNA, 83 bp, Homo sapiens
aggtaccggctgggccggaagatcggcagcggctccttcggagacatctatctcgggagtgcatccgccccaacccttttccc

SEQ ID NO: 556865 - DNA, 90 bp, Homo sapiens
tgctatgttactctcagttctggaattattctccttttggagaatctggtcgagaagtgaactgaagttatacattggctcttcaaagac

SEQ ID NO: 556866 - DNA, 82 bp, Homo sapiens
cgcgcgtgcgcggacatggcctcaaacggtgagcatctgcctggagtgtaacagcagcaaactgcgcgggctgaagcggaag

SEQ ID NO: 556867 - DNA, 101 bp, Homo sapiens
aatagactgcacctggctatcccaaccaggagggacgataaggtcttggtatggtgactcctgtgaacgatcttagaggatctgattctattgcgtatgac

SEQ ID NO: 556868 - DNA, 100 bp, Homo sapiens
gaggagcggcaggacgagcatggctacatctcccggtgcttcacgcggaaatacacgatgagttccacccgttcatcgaggccctgctgcctcacgtccg

SEQ ID NO: 556869 - DNA, 80 bp, Homo sapiens
agctgctgaacctgaggaagatcagctccgacttggacgggcacccggtcccgatgacggtcgaaccaaacccattccaa

SEQ ID NO: 556870 - DNA, 50 bp, Homo sapiens
taatcgcctgctttgattcattgaaagatgaacgtgaagccagagaaaat

SEQ ID NO: 556871 - DNA, 75 bp, Homo sapiens
ggcaagacaagctcagaactgagaagctgtcaccacagagcaatatactttgctgcttattcaaactgcaaggaa

SEQ ID NO: 556872 - DNA, 50 bp, Homo sapiens
gtgggaacttcggagagctcagattagtatctggagtccatctttcacca

SEQ ID NO: 556873 - DNA, 100 bp, Homo sapiens
cagcgactcggaagattcgaggcggcgggggacaagtcggcgccccagagcggacgagctcctgaaactctgatgagagccctggaacttttgaattacc

SEQ ID NO: 556874 - DNA, 133 bp, Homo sapiens
caaaaactgatgaccaagagaatgtgtcagccgatgcaccgagtccagcccaggaaaatggagagcatcctaatgtcctatgatcacgtggaactcacattcaatgacatgaagaacgtgccagaagccttca

SEQ ID NO: 556875 - DNA, 107 bp, Homo sapiens
ggcatgggaagtatgagaaggtgcttgtggaagggggcccggctccctaggcgtcccatctcgactcactgctcctaagatcccagaaggggagaaagtggacttcg

SEQ ID NO: 556876 - DNA, 75 bp, Homo sapiens
ctgctcctagccaagatctcctcatcacaaaggctctggaggccacgggcatgatgcttcgggtcctggtggggg

SEQ ID NO: 556877 - DNA, 90 bp, Homo sapiens
ctggagaaggacctggaggaagcccatcgagagaagagcaaaggagactgcaccatccgtcgttacagtgtttctgccacctctgtacaa

SEQ ID NO: 556878 - DNA, 100 bp, Homo sapiens
atgatgctgatggtgatggagattttgatgtggatgatgccaaagttttattaggtctgctgagaacagacccagtccctgaggaaggagaagatgttgc

SEQ ID NO: 556879 - DNA, 100 bp, Homo sapiens
ggattgcccaccacgataatgcagttcttattactagaggactactgagcccagccaggctgtatgccattgctgccaaagaaaaagatattcaagagga

SEQ ID NO: 556880 - DNA, 75 bp, Homo sapiens
tttaaaattgcaactgaagcaaactcagacaggtttctacgataaagacagttcagggtggagttctagcaaaga

SEQ ID NO: 556881 - DNA, 98 bp, Homo sapiens
ggtgccagagtttgtagcctattggaggaaaacacaccaagggttttggccaaattgggcgagggcacaaaataaccacttaccccttctcaccgagg

SEQ ID NO: 556882 - DNA, 100 bp, Homo sapiens
cagggaacagctgcggtgctctgccatattgtgtcttccccggccggtccctcgcctcccggccgagctgacggtgatggagaggtgattgaacaaatta

SEQ ID NO: 556883 - DNA, 75 bp, Homo sapiens
gttgcaaagaagaatattggctcactatttttcctctgggcatagtgaaccagaggaaatgcctccagaagcaaa

SEQ ID NO: 556884 - DNA, 100 bp, Homo sapiens
caaggagccacacctggaccagaccccaggaaaggtgttgggatggccaccaactgggggagcctcttgcaggataaacagcagctagaggagctggcac

SEQ ID NO: 556885 - DNA, 100 bp, Homo sapiens
ttgaggctcgcgagcctccttcgccgcgccccacttgctcgtgcactttacacacatgaggtctgaatgccattcatctagccatgatgagcaatagcct

SEQ ID NO: 556886 - DNA, 50 bp, Homo sapiens
tgctattccttgggctgcctttcctgcagaacaatgagatggtggagcta

SEQ ID NO: 556887 - DNA, 80 bp, Homo sapiens
acctctatgaatctttaagtgaaaagcaaggcatgacacaagaatcctttggcacctgcggcagccagaacacaaagtcc

SEQ ID NO: 556888 - DNA, 100 bp, Homo sapiens
gccctgccgcgctgtttacatctttgccaagaagaacgacattcccttcgagctgcgcatcgtggatctgattaaagtgcccagcgcacccgtgatcgac

SEQ ID NO: 556889 - DNA, 80 bp, Homo sapiens
tcaactccagataaatataagctacaggcacatcttaaagttcacacagcactggtacaatgactcttcttgcttttcac

SEQ ID NO: 556890 - DNA, 100 bp, Homo sapiens
gaaagagtggaagagaaaattgtgaactaaggccccctgcccccttttcctggtgcatgtgaagttatcaaaaacaggtggagccgccaccaaaatgcag

SEQ ID NO: 556891 - DNA, 100 bp, Homo sapiens
cgggaccccagcttttcagaactgcagggaaacagccatcatgagtgaaattcgtaaggacaccttgaaggccattctgttggagttagaatgtcatttt

SEQ ID NO: 556892 - DNA, 83 bp, Homo sapiens
cccagcccgctagccgcggaccaacagatgatatcatcaagttgaatcgaaaggaagggaagaagcagaattttccaagacta

SEQ ID NO: 556893 - DNA, 100 bp, Homo sapiens
gggcgctccaggaggcactcacaggcccagcctaaagccggggtcaggcgcagaacagtaccttggaggggagctctgggcacacctggcccgtagtgag

SEQ ID NO: 556894 - DNA, 82 bp, Homo sapiens
ctccactccgtcccccgcgggtctgctctgtgtgccatggacggatggactcaccctgtcacccaggttggactgcactggc

SEQ ID NO: 556895 - DNA, 75 bp, Homo sapiens
catggatcagaaggcagacaagcagcttttcagatgcaaatgagtcaagggtccagagaaggaggagaagttgag

SEQ ID NO: 556896 - DNA, 74 bp, Homo sapiens
gctgtggttaccttagatgcaagtgatgatggaatcttggccaaaatcgtgtgctattaccacagctactggca

SEQ ID NO: 556897 - DNA, 90 bp, Homo sapiens
ggagcacctgcagctggcgcctctgcagtggggacttgtccaaggtggatctgagcctcctcatgtgctccaggcagagatcaggattcg

SEQ ID NO: 556898 - DNA, 73 bp, Homo sapiens
tcctttatatagaagggagagtagggaggacatgtatgcccaggactctatagagctactaacaacatctggt

SEQ ID NO: 556899 - DNA, 99 bp, Homo sapiens
tttgctgcaagatcgaggctgtcctctggtgagaaggtggtgaggcttcccgtcatattccaggcctcatgcattgtgcgtcagcagcaatgtttatgg

SEQ ID NO: 556900 - DNA, 100 bp, Homo sapiens
gtctgtgccgacaagatggcggacggggagctgaacgtggacagcctcatcacccggctgctggagggacgtggtgggtcctctggtgcgaaattccgga

SEQ ID NO: 556901 - DNA, 74 bp, Homo sapiens
ataatatggtgaacggccgcctggcagataaacccactgccctacagccgcgtggtgcacacctaccgcctccc

SEQ ID NO: 556902 - DNA, 98 bp, Homo sapiens
tgcttatgatgaacagagttatgattcctatgataacagctatagcaccccagcccaaagaagatgcagcacactgtcaaaatatccggagacgccag

SEQ ID NO: 556903 - DNA, 74 bp, Homo sapiens
atgagtcaagcggaactttgattacaaggaatttcatatactacactcttgcactcctgtaatgagcctggcac

SEQ ID NO: 556904 - DNA, 95 bp, Homo sapiens
tccagcccaagatgattccagcagtggtcttgctcttactccttttggttgaacaagcagatacgatgaatggattaaagcagataaaatagtaa

SEQ ID NO: 556905 - DNA, 51 bp, Homo sapiens
ttcgcagtggtcgcttcttctccttggttacctacctgggcaaagtctcca

SEQ ID NO: 556906 - DNA, 101 bp, Homo sapiens
gaagcctcggccacttggttctgccagatgttcctggggttactgtaaatgggaaggacaggcagagctaaacaagaattctgcttggtcagaatcgtgat

SEQ ID NO: 556907 - DNA, 74 bp, Homo sapiens
cacactaattgccaacaacaatgtgcctgatttgagatggggtcccaggtctcggtggaatcgggagctctgca

SEQ ID NO: 556908 - DNA, 98 bp, Homo sapiens
gagcatcccaggaaggggttcccagaagtcagaatccaagatggaacatcggaatttgccttttatgcgtgagctgaggtatctatttgcacttcttg

SEQ ID NO: 556909 - DNA, 90 bp, Homo sapiens
gttgagtctaccaaaaagaatgaaccgcttgcttcttatttaggtttgggccccatggtatccctgtgacagtatttcccaaaagggaat

SEQ ID NO: 556910 - DNA, 80 bp, Homo sapiens
ctactttcatctctggaaggctgaaaatacactatctaaggattcagagactgtttttgatattcagaatgacagaaata

SEQ ID NO: 556911 - DNA, 99 bp, Homo sapiens
cgcttcaagaagcctgctgagttcaccacaggccccaatacctatgaagacgcagccgcctacatccaagcacaatttgaaagcaaaaaccgctcaccc

SEQ ID NO: 556912 - DNA, 50 bp, Homo sapiens
agagaccctggacagtgtcctcaaaaaggtggccattaaacgggaaaatt

SEQ ID NO: 556913 - DNA, 75 bp, Homo sapiens
cctgcatagccttcacagagagtccagttgccaagagctggtggagttgagatctataatggagatcgtaaaata

SEQ ID NO: 556914 - DNA, 75 bp, Homo sapiens
gccaagcgccgtatgggactttgggcgctgtgagcggcggcgagcagatcagtgtgcgtgtgaccaccatggatg

SEQ ID NO: 556915 - DNA, 98 bp, Homo sapiens
tggtgctgtgcgcgaggctcctcactgcagcgaaggaacaaaatccagtctcatagcagaggagaatataatgtttacagcaccttccagagccatga

SEQ ID NO: 556916 - DNA, 100 bp, Homo sapiens
ttcagatgggatctttccggatcaatccagatggcagccagtcagtggtggaggatcaggagcgtctgggcaagcagctcaagttacgtgcagaaaggga

SEQ ID NO: 556917 - DNA, 100 bp, Homo sapiens
aaaataaagatgatctcaatcatgtggatttgaatgtgtgtacaaggccaaatttgagtttcatcatggtgactatgaaaaacagtttctgcatgtactg

SEQ ID NO: 556918 - DNA, 100 bp, Homo sapiens
tttgctacatgctctgatgacggcactgttagaatctgggactttcttcgttgccatgaggaaagaattctccgagagccccccaagatgaacccagtgg

SEQ ID NO: 556919 - DNA, 87 bp, Homo sapiens
aaaggccccatacaatgaagtagacattggtggaaacatttagttaatgttcgtgaagaaattgaagagttttttccaagaatgtgg

SEQ ID NO: 556920 - DNA, 90 bp, Homo sapiens
atcacattttcatgcatcattttttcaaaataggaatatcctccgaatcctaaatctagagctccaaggatgctggtcattaagaaaggt

SEQ ID NO: 556921 - DNA, 83 bp, Homo sapiens
ggatcctgaaccgcgcggccgaaccctccggagcttactccacgggaacagcctctagataatctgagttgttgaaaatacga

SEQ ID NO: 556922 - DNA, 75 bp, Homo sapiens
cgtgcccaccgaccggcctcgagcgccccggcgggagaattaaacaaccaccatgtcgagcaaaaaggcaaagac

SEQ ID NO: 556923 - DNA, 100 bp, Homo sapiens
tgggccgagtggcagggacgacgcccaggtggtttgttctggatgcagaaaccagagatctagtttctatccacacagacgggaatgaacagctctctgt

SEQ ID NO: 556924 - DNA, 100 bp, Homo sapiens
agattcaccaaataagctatatactttggttacctatgtacctgttaccactttcaaaacattggattcaaaggctaacaatttgtccagtctgtccaag

SEQ ID NO: 556925 - DNA, 75 bp, Homo sapiens
cacgtgtgcccaggccctgaggtgggccggacctgggagtggcagattcctggtcgggtggcttccagtggtctt

SEQ ID NO: 556926 - DNA, 100 bp, Homo sapiens
gaaagcaaacagaaatttgtgctcaaaacccccaagggaacagaaagaacagcttcaaaagatgaaagacttcgggtctgagccacagatggctgaccat

SEQ ID NO: 556927 - DNA, 51 bp, Homo sapiens
agtggaaaggctctcagtgaaaaaggatttaagtgccctgtatgctcaaaa

SEQ ID NO: 556928 - DNA, 98 bp, Homo sapiens
cctcccaagtagctggggttaaagaacaatcaaccatgacgaccgaatctggatcagactcggaatccaagccggaccaggaggccgagccccaggag

SEQ ID NO: 556929 - DNA, 101 bp, Homo sapiens
atacccagtgacttgaaggagcctccccagcctcctaggagttgatccctgaattttattatctccctgagatgtttgtcaacttcaataattataatctt

SEQ ID NO: 556930 - DNA, 98 bp, Homo sapiens
ccggagcgtgccctcgccgctggtggctgaatccacagaggagcctgctggttctaatcggggacagtatcctgaggattcctcaagtgatggtttaa

SEQ ID NO: 556931 - DNA, 100 bp, Homo sapiens
ttttacagaatgttgccaagctgctgataaagctgcctgcctgttgccaaagccgaagcccctttccttaaggccctggtttgtcccgaaggggcctagt

SEQ ID NO: 556932 - DNA, 71 bp, Homo sapiens
gaggtcctgtacagcatcgccgagaagtttcaggtttagctgtgcctcccagtgactataatgacaaggaa

SEQ ID NO: 556933 - DNA, 75 bp, Homo sapiens
cgctttggaaacatctttaccctgttcattgggccagaggtgtttttggggaaaaaaatcacaatctggacgtga

SEQ ID NO: 556934 - DNA, 100 bp, Homo sapiens
attcacccttgtagagtcattcctgcctttgagcggactcccttttaaggccaagtataaggagcgagggacggtcttggctgaggaccagctagcccag

SEQ ID NO: 556935 - DNA, 100 bp, Homo sapiens
gcagaggaggagcgcagcccggcctcggtgtggatgaggtcaccattgtcaacattttgaccaaccgcagcaatgcacagagacaggatattgccttcgc

SEQ ID NO: 556936 - DNA, 98 bp, Homo sapiens
taattttagggtcctttatatagaagggagagtagaatgtctacacaaggaagtacaggatttggcttttctagatgtcgtatccaaacttcgcagtc

SEQ ID NO: 556937 - DNA, 75 bp, Homo sapiens
ccggctccatcttgcgggagaccgggttgggctgtgacgctgctgctggggtcagttttgggaggtcatcagcga

SEQ ID NO: 556938 - DNA, 95 bp, Homo sapiens
ctggggatcgctacggaccttaaaatacccgcaacagccccttcgtcccaattctggagagtcttggcttctgggaggaagtcagagggattatc

SEQ ID NO: 556939 - DNA, 50 bp, Homo sapiens
agaaactcagcaacacttcgtaccaggcagctgagcctccacccagaccg

SEQ ID NO: 556940 - DNA, 75 bp, Homo sapiens
tttctaatccctgctctgtcactaacaagctgcgtgatcttcggatattaggaatttacgatttgctcataaacc

SEQ ID NO: 556941 - DNA, 76 bp, Homo sapiens
aggtcaggaagcagaatattccttatatggttttggagatcatattcattggaggacactggaagatgggaagaaa

SEQ ID NO: 556942 - DNA, 100 bp, Homo sapiens
atcaagggaaaatggggtgaggaagattttgaagacaatcgtcacttatacagggcaagaagagtggactaactcaagacacaaggcaccttcagcgagg

SEQ ID NO: 556943 - DNA, 98 bp, Homo sapiens
gaagatgtggtggcttccgtttgttggtggaggaggtggcaggcctcggcggaatgcttctagtcacaacagacacccttggccatgactttcatgtc

SEQ ID NO: 556944 - DNA, 80 bp, Homo sapiens
ctcagtctgttcttgtgaggctgagggtctgggaggctgggaggcggcagaatgcagccagaggagggcacaggctggct

SEQ ID NO: 556945 - DNA, 85 bp, Homo sapiens
cgcatgcgcctaaagctgacgggtttgaaatggcttcgatgttagccgggacccgactcagcttgaaatccatggcccaaaatga

SEQ ID NO: 556946 - DNA, 100 bp, Homo sapiens
cctggctcaggagctgcggccccaaatccactggggcagcacctactccgtgtcagtggtggagaccgactacgaccagtacgcgctgctgtacagccag

SEQ ID NO: 556947 - DNA, 50 bp, Homo sapiens
gagaaggatatccagacagccctaattttgctacttgagaagatagaaca

SEQ ID NO: 556948 - DNA, 75 bp, Homo sapiens
accaccttcaagggagtcgaccccaacagcaggaatagctcccgctgctccagcccgcgatgaggaaaagtccag

SEQ ID NO: 556949 - DNA, 74 bp, Homo sapiens
tggcccaggtactggcctatctcctccgcaggttttgatacttatagaggactcccttcaatttccaatggaaa

SEQ ID NO: 556950 - DNA, 75 bp, Homo sapiens
gcagtataagatgatctgccatgtgttcgagtcggaggatgaagctgcagtaaaggaagatgaagaagaagtttc

SEQ ID NO: 556951 - DNA, 74 bp, Homo sapiens
ttgaatccccaggcccttgttggggcacaaggtggcagatgtgttcagagcaacattgttttgttgacacaagc

SEQ ID NO: 556952 - DNA, 82 bp, Homo sapiens
gcggagctggaatgactggcaacccaggtctgccatcatggatgttctcgcagaagcaaatggcacctttgccttaaacctt

SEQ ID NO: 556953 - DNA, 82 bp, Homo sapiens
tccgaaggaggaagggaaccaacccactttctcggcgccgcggctcttttctaaaagtgagaagatggtataaactggtcca

SEQ ID NO: 556954 - DNA, 75 bp, Homo sapiens
gtccgtgatctcagcgggcacgtgtctgatgccaatgcaagttacttaagagcagctcgagctggacaccttgaa

SEQ ID NO: 556955 - DNA, 83 bp, Homo sapiens
ccagcacctacgtcccgctgccgtcgccgccgccaccatgcccaagagaaagagactctgacctgtttttgttggacacccgt

SEQ ID NO: 556956 - DNA, 124 bp, Homo sapiens
cgccgagtcctagcgcctggcctgcgcgccgctgcccgcgccacagacaatgcagatcttcgtgaagactctgactggtaagaccatcaccctcgaggttgagcccagtgacaccatcgagaat

SEQ ID NO: 556957 - DNA, 100 bp, Homo sapiens
atatctgttaacagactgcttttacacctacgttatgatgtgattgctcaagcccaatctgggactgggaaaacggccacatttgccatatcgattctgc

SEQ ID NO: 556958 - DNA, 88 bp, Homo sapiens
tgctttttctaactatttcaagatgatatttattcaccaaacaagtacagtacgggtggctggcaagatggccgaataggaagagctc

SEQ ID NO: 556959 - DNA, 90 bp, Homo sapiens
gcaagagtaacagcagcgccgtcccgtccgacagccaggcccgggagaaactctatcaagaagaatatctaatccgtaccttgaacatac

SEQ ID NO: 556960 - DNA, 100 bp, Homo sapiens
gtgcacactggctatcattgatccaggagcaagaagatttgtgaccttggattttgggaggcctatattgttgactgatgtattgattcccacttgtgga

SEQ ID NO: 556961 - DNA, 75 bp, Homo sapiens
gctatcagcatggaattgtggcagcttcctgcctgacacagctcacttcaagaagtgcacaatgtcagaacgtgg

SEQ ID NO: 556962 - DNA, 75 bp, Homo sapiens
cttcgatgagctctcggattccttatgcagagtggccgacttgataaatttgcgcctcattttggtaagcggaaa

SEQ ID NO: 556963 - DNA, 100 bp, Homo sapiens
agtagggcatccttcacccatctgaagggaggaaatagtggcaggtgacagtctgcatgtgcagttttcagggtgtcaaattgagaaccaggtagatccc

SEQ ID NO: 556964 - DNA, 83 bp, Homo sapiens
gatgtgcgatgtgcggaagggcacctccacccgagatacggggtcaaccttcattcttctgcgtaaagatatccagttttccc

SEQ ID NO: 556965 - DNA, 99 bp, Homo sapiens
ctctgaaggaaatggaaacaccgttgtcagcacttggaatacaagatggttgccgggtcatgttaattgggaaaaagtggatgaaagcagaagactcat

SEQ ID NO: 556966 - DNA, 137 bp, Homo sapiens
ttaatagtgagtcttccaaccagagcttgtgtagcgtcagatccttgagtgataaaggagtagagaacccttaggagaaatcttgagagtggacagcaattgtgaagatcgccagagagttctgtgtttcatcaccg

SEQ ID NO: 556967 - DNA, 83 bp, Homo sapiens
cagataccgtttgacaccaccacatttaaatcaaacggtattgagatggattgggttatgaaacataatggtccaaatgacgc

SEQ ID NO: 556968 - DNA, 90 bp, Homo sapiens
ccgggcgccaccgctgccacctccgcgagtgtctttggtgcaacactaacaaggcttgtctggactacccagttacaagcgtcttgccac

SEQ ID NO: 556969 - DNA, 82 bp, Homo sapiens
gtgtgacactcttccacctagagcattccgtctctcatcctctgccatgtggcatggtgctgatgtgaaatgtgtagactgg

SEQ ID NO: 556970 - DNA, 95 bp, Homo sapiens
caggcttcccagcagcggcttatggaccagtggcagcagcggcggtggcggcagcaagaggatcaggtgacgagctcatcttcttggaccctcat

SEQ ID NO: 556971 - DNA, 90 bp, Homo sapiens
gtcagaccagaccgtccgggtgaaggtcaatgtgcgaaatggaatgagcttgcatgactgccttatgaaagcactcaaggtgaggggcct

SEQ ID NO: 556972 - DNA, 83 bp, Homo sapiens
tagtgggtgtaatacatcatgaactgcaggtttccaacatggctagatccatcagaaactgaagccgtggagaacgctctcgg

SEQ ID NO: 556973 - DNA, 100 bp, Homo sapiens
ccgccgtctacccgtggccgctgccggtctacggtcccctcctcggccgccccccgcccggccgcccgccctcgggcctccccccgggccctcggtcccc

SEQ ID NO: 556974 - DNA, 89 bp, Homo sapiens
ggagagcaaagtgaggctgctggagggtgacaagctcctcgcacaggagtacatcgatgcccaccctgagaccatcgtcctggacccgc

SEQ ID NO: 556975 - DNA, 95 bp, Homo sapiens
gaccagttacactccatacgcaaaccgcgatacattttgctgaacaaatagcaaagccaatggagatcttcgtggatgatgagacgaagttgacg

SEQ ID NO: 556976 - DNA, 51 bp, Homo sapiens
ctgcaacactcctctacagtttgaggatctcttccacattcctccttctta

SEQ ID NO: 556977 - DNA, 75 bp, Homo sapiens
acagatgatgccagttaattactttgaatatatatttttgccatcatggatcagtttggagatatattagaaggt

SEQ ID NO: 556978 - DNA, 95 bp, Homo sapiens
gccacggtctgcccacccaacgcgaagacggtaacccgtgtgactttgactgggatgttttagaagaatgtatgtctcttcccaagctatcttct

SEQ ID NO: 556979 - DNA, 99 bp, Homo sapiens
ttcatgtctcatgagaagtgcctgaagcacgtgaggatcccgtgcacgagtgtggcacccagcctggtccggattagtgacaagagctggggttaggat

SEQ ID NO: 556980 - DNA, 101 bp, Homo sapiens
ccagtatgaagtggtgaaggagtgtgtgcagcggtgcccctgtagacaatggccctcgtgtctgccgattcccgcattgcagaacttctcacagagctcca

SEQ ID NO: 556981 - DNA, 100 bp, Homo sapiens
cggcccttcctcagccgggagtcgctgagcggccaggccgtgcgccggcctttggtcgcctccgtgggcctcaatgcttccttcaaaatgtctactgttc

SEQ ID NO: 556982 - DNA, 87 bp, Homo sapiens
ttcgctggccatttaggagctctgctcaaagccagacgacttaattcagtgcacaaatgagatgaatgtgaacatcccacagttggc

SEQ ID NO: 556983 - DNA, 90 bp, Homo sapiens
ccaccgttgccgccttctcgagggcattaagaagaaatgcactcaccatgagcaccaacttctgcatctgcctgatcatatttaaaggaa

SEQ ID NO: 556984 - DNA, 73 bp, Homo sapiens
tggaagaactcgtcatgctctttgtagcgtggtgcttctgttgctcacaggaattaaccgacttgcagaggga

SEQ ID NO: 556985 - DNA, 90 bp, Homo sapiens
acagtcagtctggtactaacaatgcagacaggtgatttggcttctgcacagttaggaggagcaccaaaccgatgggaggttttgtcagcc

SEQ ID NO: 556986 - DNA, 74 bp, Homo sapiens
ggatccctccttctcccggcgcctcaagcggaagggtgcaatatgtgacttctgtgaagcttgggtttgccatg

SEQ ID NO: 556987 - DNA, 87 bp, Homo sapiens
ccgacagtagaggagctttaccgcaattatggcatcctggccgatgccacggagcaagtgggccagtacttcctcgcgtattgctaa

SEQ ID NO: 556988 - DNA, 83 bp, Homo sapiens
aaggattcaaatgctagcagacacggtggctactctgcctcggggacgaaagcagttgctgatgtatattcaagatgagtgga

SEQ ID NO: 556989 - DNA, 83 bp, Homo sapiens
tggggctgcccctgctgctcatctcgctggccttcgcgcaggagatctcgattgtcctattttgtaacggattatgatccaac

SEQ ID NO: 556990 - DNA, 95 bp, Homo sapiens
tttcacttgcctttggaaatgaaggtgcagaaaccatgggagttgttttggagaatcatgtagtgacagatgaagacgaacctgctttgaaacgc

SEQ ID NO: 556991 - DNA, 100 bp, Homo sapiens
gggtgaccaagggcaaaggctacaaaggaggtggaggccggaaaggtcgcaccaagagagaagctgctgccaacaccaaccgccccagccctggcgggca

SEQ ID NO: 556992 - DNA, 83 bp, Homo sapiens
tttaaacgagatttacagaagcttccagaatggcttttagcaacctgtggctgtgctttttagcttctgtctctagtaataag

SEQ ID NO: 556993 - DNA, 75 bp, Homo sapiens
cacctccaatattatggctactttaaagctggcacagtgatgtttgagtatggaatgcggcttggcagagaagtt

SEQ ID NO: 556994 - DNA, 50 bp, Homo sapiens
aaccacaagacgactcaataggaggaagggttcaggataagtttgaggtg

SEQ ID NO: 556995 - DNA, 75 bp, Homo sapiens
cttttaactactggaagtttgcgtgccttcaacaattggatccatggctttgacagaaggggcattgtgtcagca

SEQ ID NO: 556996 - DNA, 49 bp, Homo sapiens
tctgctgcactgctttcagcatgcaatactatactggcaattgctggag

SEQ ID NO: 556997 - DNA, 101 bp, Homo sapiens
tagtaacgtcatggaggatgaacgacagaatgattgactggctatcctggccattggctcagcatgtggatacatgggtaattgcactcctgaaaggactg

SEQ ID NO: 556998 - DNA, 80 bp, Homo sapiens
agaagtgcaagagcagaggccttctctagaccttgccaagatggcacaggtactccaaagattcaggtttactcacgtca

SEQ ID NO: 556999 - DNA, 90 bp, Homo sapiens
agcttaataggcaatgggcagtcaccagcattgcctcgaccacactcacctctctctgctcatgcaggtctaaagaccctcattccagag

SEQ ID NO: 557000 - DNA, 100 bp, Homo sapiens
aaaggatatggttttgtctagaacaagaggttcagccctatgtagctacaacctaaagccttctgaatacactacatctccaaaatcttctgttctctgc

SEQ ID NO: 557001 - DNA, 100 bp, Homo sapiens
ctggagcctcagttggaagcagccgatccagcctgcggagcctgtggggcaggagaagaaactgaggcctggaatttgattaactcattcaaggttaccc

SEQ ID NO: 557002 - DNA, 95 bp, Homo sapiens
agcaccagcttccagttagtggatatagcacaccatccccagccaaatgacctggatgaccctgaaagaggaatgatttttgtctgctctgcaac

SEQ ID NO: 557003 - DNA, 100 bp, Homo sapiens
ccggccgtgtccaagggggacgggatgcggggcctggcggtcttcatctcggatatccgcaactcaccagtggcagttcgcagcctccaggacttggctc

SEQ ID NO: 557004 - DNA, 50 bp, Homo sapiens
gggccaaaggacagttagaagacagtagagggcactaggaggaggctaag

SEQ ID NO: 557005 - DNA, 100 bp, Homo sapiens
cgcccgcttcaaccccaggggaccagaggaactcagccctgattgcgacacgaatgcagagtttgagtccagatcccaaagcccagtacacaagtatcta

SEQ ID NO: 557006 - DNA, 100 bp, Homo sapiens
cacttctcggtgacagccgagggcggcctgagcccggcgcaggtgaccggcgcgcgggagcgctacggccccaacggcaagtatatcgcgtcaacacagc

SEQ ID NO: 557007 - DNA, 50 bp, Homo sapiens
ccgggtcttctacctgctcctgggcatccccaatggattggacaattgcc

SEQ ID NO: 557008 - DNA, 98 bp, Homo sapiens
tcgggctcatccaaggatgagattttgccagagaaaggacgagcagcaagtcagggagcttaagacgagatgatgcctattggccagaaggaaagcgt

SEQ ID NO: 557009 - DNA, 101 bp, Homo sapiens
tcgagagcgtcatgaacccgagctatagagaaaggagatgaggtcgaagtggttctggaaactttggtggtggtcgtggaggtggtttcggtgggaatgac

SEQ ID NO: 557010 - DNA, 99 bp, Homo sapiens
cttggctcactgcagcctcaacttcttgtcctcaagtgatcctcccaccttagcctcctaagtagctgggaccacagagacggggtttcaccacgttgg

SEQ ID NO: 557011 - DNA, 96 bp, Homo sapiens
cactgcctctggcatccccgacttcaggaattcctcctgatcagcagagactgatctttgctggcaagcagctggaagatggacgtactttgtctg

SEQ ID NO: 557012 - DNA, 82 bp, Homo sapiens
ctgtcttcggtggactccttcggcagtccacccaccgccgccgcctcccagtcgggaacatgccctgtgtgccgccgtcatt

SEQ ID NO: 557013 - DNA, 100 bp, Homo sapiens
gaggatgacggcaagacagtggatgggccagcccgcctcgccgaggaggccttcttccgtggggttagccagtctgctcgtctgatggttcacaccgtgg

SEQ ID NO: 557014 - DNA, 89 bp, Homo sapiens
gccgccaacgcgcaggtgctagcggccccttcgccctgcaggtgctggagaatctggtaaaagcaccattgtgaagcagatgaggatcc

SEQ ID NO: 557015 - DNA, 83 bp, Homo sapiens
ctgagccacatcatcagacaactacaggcctgctctctggttccagatttaacagaggctttggatgaagatgcagaccccac

SEQ ID NO: 557016 - DNA, 100 bp, Homo sapiens
cgctggagcaggtcttctcaaagtacggacagatctctgaagtggtggtcgtggtgacaggactggccgctatggagccactgaccgctcgcaggatgat

SEQ ID NO: 557017 - DNA, 83 bp, Homo sapiens
aacaaatcggaagctagggccttccagcgggagatacagatgacccaccaagaattactcagaaccctgtgatcaatgggaat

SEQ ID NO: 557018 - DNA, 100 bp, Homo sapiens
caaattccggaccccatctgagctccacaatgataacttctccctctccaccattgccgagggctctcacccaaatctccatggtgatccgggacctgac

SEQ ID NO: 557019 - DNA, 99 bp, Homo sapiens
cgacggcgcggcgcgcctggggcccggtggggtcctgcggggacgcgggcgaggacggcgcggacgaggcagctgtcgcctggttgggcccggaaatgg

SEQ ID NO: 557020 - DNA, 98 bp, Homo sapiens
tcctcaactttgaagagatcgactacaaggagatcgaggtggaagaggaccagtcctgcctctgttgtagaagacatgtggtgtatataaagtttgtg

SEQ ID NO: 557021 - DNA, 100 bp, Homo sapiens
gcttgccctggtcttgctcggccgatgaagtgcagaggtttttttctgacgagctcatctgcgcctttgtttagaacgcttaaaagttctgattccacta

SEQ ID NO: 557022 - DNA, 96 bp, Homo sapiens
ccctgcctggactggtcctgagattcctgaatcagaacattagcagtgttgtggctgcattttccgaccttcttcacgtccgaatccctaacagct

SEQ ID NO: 557023 - DNA, 82 bp, Homo sapiens
tctttctgttcaggccagaccctctgggagcttctcagccattttccacagatcagaaatgcactcggtgatggaaagagag

SEQ ID NO: 557024 - DNA, 73 bp, Homo sapiens
cagtaccagagacagaagcagatggattcgtccttttaggactatctcaagcaggtgctggacattgatcttc

SEQ ID NO: 557025 - DNA, 83 bp, Homo sapiens
gaagaagaatttcgatctccgccctggggtcattgtcagctcaccatggatgatgatatcgccgcgctcgtcgtcgacaacgg

SEQ ID NO: 557026 - DNA, 51 bp, Homo sapiens
tttatttctttggagacaaaactatgccaagcaaacgccctggaggagcag

SEQ ID NO: 557027 - DNA, 101 bp, Homo sapiens
cgcgtctaagcggcggcggcggtggcagcggcggaaaccgaaggggagccatggcggctgacagtcgggaggagaaagattattcagagctgggagagctt

SEQ ID NO: 557028 - DNA, 98 bp, Homo sapiens
tcctagtaatctctttgtggtttcttctgatttctgccattggggtgttggggatgtcctttgcactgaccctgaactgccagattgacaaaaccagc

SEQ ID NO: 557029 - DNA, 87 bp, Homo sapiens
aaatgaattttgaccacaagaatgaaactctaagtatatcagatagtggccaaagcctccaagaacctcatgtccacgcaaagcttg

SEQ ID NO: 557030 - DNA, 100 bp, Homo sapiens
ttcctaccatctaaaatacgaaggtttctggctggatccgagatgagtggggcaatcagatctggatctgccctgggtgtaacaagcctgacgatgggag

SEQ ID NO: 557031 - DNA, 82 bp, Homo sapiens
cgagaacgtccactgcgggccggcgaaagctggtaactaggatttctacctcaaccgcgagacctatgcaaggacggtgtgg

SEQ ID NO: 557032 - DNA, 100 bp, Homo sapiens
tggatgtgtctggtgtgggtttcccaagcaaggttccttggaagaagatgtctgcagaggtgagcccattggcaggggtaccaaagtgatcctccatctt

SEQ ID NO: 557033 - DNA, 74 bp, Homo sapiens
cgcctccttcccagccgcgcggcttcctccagacctctcggcgcgggagtccaatgtgctgattgctgctaaca

SEQ ID NO: 557034 - DNA, 51 bp, Homo sapiens
acttgacactcaccctgaccggtccatctgggaagcgggatttgggttgat

SEQ ID NO: 557035 - DNA, 100 bp, Homo sapiens
ttgttgaaatccgaaatttcttgggtgaaaaatatatccgcagggttcggatgagaccagccctcaaggacgttttgttctgaagactctcatattcagc

SEQ ID NO: 557036 - DNA, 80 bp, Homo sapiens
ggatgaagatgactttgatgatacccttgttgctattgacacctggaaatgtttcaacgtgcgcaagcgttgcggcggcg

SEQ ID NO: 557037 - DNA, 75 bp, Homo sapiens
gcgcaggcgccgagactgacaacgcggtcccacaggtccatctggttggtattgacatctttactgggaagaaat

SEQ ID NO: 557038 - DNA, 75 bp, Homo sapiens
attggaccaagagaacaatgggaaccagtctttcaaaatgccaagtttcttcctaacagtggtgattctactctg

SEQ ID NO: 557039 - DNA, 83 bp, Homo sapiens
atttctggccaaaactacaaacaagacttcgcagtttgctgaggctaaacactatcatgccaagttggtgaatataagaaaag

SEQ ID NO: 557040 - DNA, 100 bp, Homo sapiens
gccacgcgtcggactggtctgtctgagggagatggtgacaagctcaaggcctgcgaggccccttcacagatgtagtcactacaaatcttaaattgcgaaa

SEQ ID NO: 557041 - DNA, 85 bp, Homo sapiens
agcctggaaacgaggcactcagttggaagagtccagcaagattcaccaagagaacatgggacaggctctcagccccgacatgctg

SEQ ID NO: 557042 - DNA, 75 bp, Homo sapiens
gacctgggaaattaagtttcttgcggaggctggctacagcaaacatcattcaagatgtccagcaaagggagcagc

SEQ ID NO: 557043 - DNA, 98 bp, Homo sapiens
cttcatgaactccaagccaaaatcacagctttgagtgagaaacagaaaggaagctgttgaagttattgaagtacctgttgctatattctaagaaatta

SEQ ID NO: 557044 - DNA, 82 bp, Homo sapiens
ttggcgcctgcccctgcaacgggagaacactctgctccagccaaggtggtgagggcagctgttcctaaacagcgcaaaggca

SEQ ID NO: 557045 - DNA, 100 bp, Homo sapiens
ggtcccggcagacgaagcgagccccctggtggaagccagcagaaccagttccctgtattgaacactgatatacaaggaatgaatagaagtcaagaaaaac

SEQ ID NO: 557046 - DNA, 99 bp, Homo sapiens
gctagaggaccgagccgcccagccccgctcccccggacccatcggcgcgctgcccacacctccaggcgaccgggtgtctgatgatttgtgagcctcaag

SEQ ID NO: 557047 - DNA, 100 bp, Homo sapiens
ggagatgtccgagcccaaggcaattgatcccaagttgtcgacgaccgacagggtggtgaaagagttactggaggtgaactgtttgaagacatagtggcaa

SEQ ID NO: 557048 - DNA, 50 bp, Homo sapiens
ggccagggcgcgcgtgcgcggagtgaccaaagacttgaccactcaaagtc

SEQ ID NO: 557049 - DNA, 90 bp, Homo sapiens
tggccatgaccatccagcacatcgtggcggagaaggagcaccggctcaaggaggtgacgaggccacccagagccaggcggtgcaggagcc

SEQ ID NO: 557050 - DNA, 75 bp, Homo sapiens
ccagaacctttaagcgtaacagagtcacctgggtggctgttgcaccacgccctccctcctgcccctgaggcccgg

SEQ ID NO: 557051 - DNA, 76 bp, Homo sapiens
ggaaaatgccaacgccgtgtctgaagccctttctaaggcacaaaatgatgtgatggaaatgaagatgcagtcagag

SEQ ID NO: 557052 - DNA, 50 bp, Homo sapiens
ggggaggtcacctgacgaggagagagaagaagaaggaggttcctgctgtg

SEQ ID NO: 557053 - DNA, 101 bp, Homo sapiens
aacacgccccgcgctgctgggtcccgccagacacgccgccgccgcaggtaagtaaggaggtctctgtaccatggctcgtacaaagcagactgcccgcaaat

SEQ ID NO: 557054 - DNA, 74 bp, Homo sapiens
tttttgggctggtggtttcggcaggtatccacaaattacccattatcaaaaacaaatagttcatcaaatgattt

SEQ ID NO: 557055 - DNA, 100 bp, Homo sapiens
aaagacctcaccaagaatttggcatttcaaggagtatgctgctgctgttccgctttgcgtcctcgctacaaacgcctggtggacaacatattccctgaag

SEQ ID NO: 557056 - DNA, 75 bp, Homo sapiens
ccaggggaccaagctggagatcaaacgatttttcaagccacattcaattgataggatgaaaaaatttaagagaag

SEQ ID NO: 557057 - DNA, 100 bp, Homo sapiens
tcgagtcggccggctgggacttgcagggtttggacagaggagccaaaggccaaatttccactttcagcagttttatttcagctgttagcccgaagaaaga

SEQ ID NO: 557058 - DNA, 75 bp, Homo sapiens
acaatgcaggactgctctcctactacacggtggagctgatcagaataatgttcagcatcaaccccctggagaacc

SEQ ID NO: 557059 - DNA, 82 bp, Homo sapiens
ttctcaacgcctggaggacgccttatggagccagcatattccaggacatggatttgattgacatactttggaggcaagatat

SEQ ID NO: 557060 - DNA, 75 bp, Homo sapiens
catggtttctatgcccctctatgcagtcatgtatcctgtgtttaatgaggttaatgttgaagaaggaaaatgcgg

SEQ ID NO: 557061 - DNA, 75 bp, Homo sapiens
gcggagggactgcaccttctccatcaggtgcagaagcccattttccttctttcgcaggtaaaaaacatgaagcag

SEQ ID NO: 557062 - DNA, 75 bp, Homo sapiens
aaccggaagaagcatcttaactacacagaattcacgcagtttctccagcatcacagccacagctgccagtattgg

SEQ ID NO: 557063 - DNA, 100 bp, Homo sapiens
aggaatagaggtggaaagtactcagaatggagatttacagacagtcatctgggtggaggacacccttttgggatcagcactgaaagtgacgccatatccc

SEQ ID NO: 557064 - DNA, 51 bp, Homo sapiens
ccagtgttcaccatcctggccccggaaggacatcggtgggatcaagtgaaa

SEQ ID NO: 557065 - DNA, 51 bp, Homo sapiens
cctaggcatgtttctgggacaaatgaggaaacagagcaaatgcagcgttac

SEQ ID NO: 557066 - DNA, 50 bp, Homo sapiens
cccgtccacgcacagcgaggaggtaaagagaaatgtgtatgaccttacaa

SEQ ID NO: 557067 - DNA, 100 bp, Homo sapiens
cggaacccaaaggaaccattgatcagcgggtggctctttttccgttacttggctattggctattggaggtggacacaaaggaagaggcagccagacagct

SEQ ID NO: 557068 - DNA, 100 bp, Homo sapiens
tttccaagagaagagcacagaagagggagaagtggctgctctgcgcctcacggccagatcccagagaatttggatggagagacccggaactgccggaagt

SEQ ID NO: 557069 - DNA, 100 bp, Homo sapiens
ttttttggacagagatgccattgaggctctatgcagggtgatggattggagttcaagagacacttcctgaagattaaagggaagctgattgatattgtga

SEQ ID NO: 557070 - DNA, 98 bp, Homo sapiens
acaggttgagggatgggactggaaatcaaatgttacagggacaggagagagtggcaagagtacgtttatcaagcagatgagaatcatccatgggtcag

SEQ ID NO: 557071 - DNA, 101 bp, Homo sapiens
tgctccagatgaggtgatggcaacggccaacttcggcaagatccagatcgggatttacgtggagatcaagcgcagcgatgcggagattctggagctggctg

SEQ ID NO: 557072 - DNA, 98 bp, Homo sapiens
ctctggcgctggtcaagtcacaggacaccgaagaaaccatcacgtacacgattttccaagatagcctccaacacccagagtcgccggactttcatcaa

SEQ ID NO: 557073 - DNA, 90 bp, Homo sapiens
agattaaatctcagggaaactcttatggaggaacaggagtacagctgtgtagtaaagatgccttctggtgaatttgcacgtatatgccga

SEQ ID NO: 557074 - DNA, 75 bp, Homo sapiens
tggcgcggcttttggcggcctttctgctcctcgcggcccagcaaattgtggctactaatttgccccctgaagatc

SEQ ID NO: 557075 - DNA, 98 bp, Homo sapiens
caagtcgagaggaaactgttgtgcctcttcatattggcgatcctgttgtgagcaggggagagaagacagaagaggttggagaggtcagggaggtgcca

SEQ ID NO: 557076 - DNA, 76 bp, Homo sapiens
ggcgacgctaagttgctgatcgtggcgtaagactttgaccccgacgcaggcttcagtgattgccgcggatcagaag

SEQ ID NO: 557077 - DNA, 82 bp, Homo sapiens
agccgagcgaggcagctctgagccgcgcgagttttgcggcctccaggtggtggatccaatttttcattaggttttgatgaac

SEQ ID NO: 557078 - DNA, 90 bp, Homo sapiens
ggccaatatggcagcgcccagcaacaagacagagctggcctggagtccgcggctggccgcgtgagtagggtttctccatgttggtcaggc

SEQ ID NO: 557079 - DNA, 100 bp, Homo sapiens
gggcaaactaagccgattttccggaaaaagggtaagggactgttctgaagaacctttccatttagtgatcaagatatggaagctgatttctgaaaatgct

SEQ ID NO: 557080 - DNA, 74 bp, Homo sapiens
agaaaacaaggcgattccgcagtccccccgttccctggaggtcctgtggaatgtatatttaaagttggagttcg

SEQ ID NO: 557081 - DNA, 90 bp, Homo sapiens
gatgtcaacaattacaaaggcaggtccgcccgtctgcgcccctcacaggaagccggagggtcgctctgatcccgaatctcccacaggcgt

SEQ ID NO: 557082 - DNA, 100 bp, Homo sapiens
caatgctcaccgtaagcctttggtcataatcgctgaagatgttgatggagaagctctaagtacactcgtcttgaatagacaggcagcaccatctggcctg

SEQ ID NO: 557083 - DNA, 100 bp, Homo sapiens
tacaaccacatgatggagaaaattaagagttatgtgaattatgtgctaagtgaaaaatcatcaacctttctaatgaagaactcgcacacaaagcagcatg

SEQ ID NO: 557084 - DNA, 71 bp, Homo sapiens
acgccggccgcgtgtggcagggagcacgtttgccgtggacgggaaagattgcaaggtgaataaagaagtgg

SEQ ID NO: 557085 - DNA, 114 bp, Homo sapiens
gggaggagccgcagcccttcagacgcttgcacagcatctgtcacagctgcttttttctcaaccaggatcactactcttggaatcaaagataaatccaaatactgcatatcagaa

SEQ ID NO: 557086 - DNA, 90 bp, Homo sapiens
gatggaacacggctccatcatcacccaggcgcggagggaagacgccctggtgctcaccaagcaaggcaaatgtgcaataccaacatgtct

SEQ ID NO: 557087 - DNA, 82 bp, Homo sapiens
cttctttgaactggaccccgcgagcaccagagtcggcgtaactatcgcctgacaggaataccctctaccatctgctttggtc

SEQ ID NO: 557088 - DNA, 75 bp, Homo sapiens
gtcgggatcccgccccgcccggagccccggcccccacaggaagtcctgagttgaggcttgcgggatcctttccgg

SEQ ID NO: 557089 - DNA, 100 bp, Homo sapiens
agcgcccggggctccggggacggcgagatgggcaagcccaggaacgtggcgctcatcaccggtatcacaggccaggaaacatcccagttatctggactcc

SEQ ID NO: 557090 - DNA, 82 bp, Homo sapiens
gggaaaggggaaatgagttcaccagaaaccaacaggcagcacaggaggctggagccccttggatgtattactgcactcactg

SEQ ID NO: 557091 - DNA, 75 bp, Homo sapiens
cctcatgtggggggtaaaccactcggtgtaccttgaaagacttttaacatacgcagagatagatatctgtccggc

SEQ ID NO: 557092 - DNA, 98 bp, Homo sapiens
tgaaaaccaactcagcgtgggtgactttgtaaaaatacagaaggcctttgagtgtcgagttatagcagtgctggattgggagctgtcaaccattggtc

SEQ ID NO: 557093 - DNA, 100 bp, Homo sapiens
ctttgaacttctcactggcaaggaaatcaaagagcaggaggttgtggacaaagtcatggaaacactggacaatgatggagacggcgaatgtgacttccag

SEQ ID NO: 557094 - DNA, 100 bp, Homo sapiens
ctggggctccgcagcaggaggacgccatggacgacaaggaaatctgacccggtcgtctcgtaccgcgagacggtcagtgaagagtcgaacgtgctctgcc

SEQ ID NO: 557095 - DNA, 74 bp, Homo sapiens
gcctggggaggctctggcccgggctccgcgtacttcctgttcagagtctctctgagaaatcaaggaaagtattc

SEQ ID NO: 557096 - DNA, 88 bp, Homo sapiens
ggatactcttgttaccagaattccaaaggttctggatgaagctggaggcagattcgtcgctttctctggagaaggacagtcattgcgt

SEQ ID NO: 557097 - DNA, 98 bp, Homo sapiens
atggtttcaagatcctgcttcgccagtgctgggtccctccaatgtgtttgctgccaaattcacattatgagcaagtcatgactgcatttggaggcaaa

SEQ ID NO: 557098 - DNA, 89 bp, Homo sapiens
tcattgagctcagccgacagggcaaagaggctgaatttcaatatgctgaaaccgtatttcgagataagtctggtcgtaagaggaatttg

SEQ ID NO: 557099 - DNA, 78 bp, Homo sapiens
tgctctgtctcagcgccgcctccctgcttcttaacaggaatcaacagtgagacaattatgaaaccagcttcaatttca

SEQ ID NO: 557100 - DNA, 101 bp, Homo sapiens
gtcccctggggctggattccgccttccggcttttcccagaccccagagccgtgcccgtggttgacacgagctgtgtccccagctgttcccgtctacaatgg

SEQ ID NO: 557101 - DNA, 90 bp, Homo sapiens
cgcgctgatcggattggccgtcatgggccagaacttaattctgaacatgaatgaccacggctttgtgctgtcggaaaaggtaacagaaga

SEQ ID NO: 557102 - DNA, 100 bp, Homo sapiens
atgatgtccaaaaacacatctgttccagtctctgcagtctttatggacaaacctgaagagtttatatctgaaatggacctactgtgtgaagacattcaca

SEQ ID NO: 557103 - DNA, 75 bp, Homo sapiens
ggatcaccctgcggaacctggaggaggtggagttctgtgtggaaggtgctggagaatctggtaaaagcaccattg

SEQ ID NO: 557104 - DNA, 106 bp, Homo sapiens
cgcggggccgggtccgggagccccagggcagccgccccgccgagtcgcagacaatgcagatcttcgtgaagactctgactggtaagaccatcaccctcgaggttga

SEQ ID NO: 557105 - DNA, 75 bp, Homo sapiens
caggcctgccgatgttatccagacacaacttcgaaaccagctaattcatgagttgatgcaccctgtattgagtgg

SEQ ID NO: 557106 - DNA, 95 bp, Homo sapiens
cgggaccggccgcgatgggaccggaggcggcgcgggcggcggcggcgcagacaaagacaatgcagatcttcgtgaagactctgactggtaagacc

SEQ ID NO: 557107 - DNA, 74 bp, Homo sapiens
gcaaaaccaacgcctggctcggagcagcagcctctgagcttctcaataggtttggcatggacaagatctatgaa

SEQ ID NO: 557108 - DNA, 73 bp, Homo sapiens
tcccaggtagccgcggagcgcacccccgtgcccttttcaggtgagagcacagtaaggactattgctatggatg

SEQ ID NO: 557109 - DNA, 90 bp, Homo sapiens
gtgtatcttctcagattggcttcaactgcagttggtgtagtaaacttcaaaggttctggagatatatcttcagattctattgaccacagc

SEQ ID NO: 557110 - DNA, 100 bp, Homo sapiens
atctggttcaacagggcatcgcgcacagagacctgaaatccgacaacatccttgtggagctggacccaggccgccctccccactgttaccaacatgaagc

SEQ ID NO: 557111 - DNA, 83 bp, Homo sapiens
ttcaccttcacgatgtttcccttggtcaaaagcgcactaaatcgtctccaagtatacaccaacaagtattccagaagtccaac

SEQ ID NO: 557112 - DNA, 100 bp, Homo sapiens
ttggtaaagaaggactgtctaaagtcaagtctatcctagaatctgtcaccagctggagaatgctggaggagaccttaaggatggccaccaccactatgaa

SEQ ID NO: 557113 - DNA, 50 bp, Homo sapiens
cagctggatgcagaggcactgtgcagtgtcctgggtcatgaaacttaatc

SEQ ID NO: 557114 - DNA, 90 bp, Homo sapiens
ccgccgccagagaggcccgcccaccagttcgcccgtccccctgccccgttcacaataactggatgttggagccagctctagccacaggag

SEQ ID NO: 557115 - DNA, 51 bp, Homo sapiens
cagagaccggggaactctactcttcctacagttttgcggcctccaggtggt

SEQ ID NO: 557116 - DNA, 100 bp, Homo sapiens
ggtccctcgcctcccggccgagctgacggtgtcatggagaaactccagctgggcccagagattctgcagcgggaaaatccaaggcttatttatgccaggc

SEQ ID NO: 557117 - DNA, 99 bp, Homo sapiens
aacacggagctgccctacttcgtgctgggtggattttcggaaaagacatatgaatggagctcagaagaggaggagccagtgaaaaaggcaggaccagtc

SEQ ID NO: 557118 - DNA, 100 bp, Homo sapiens
gctacaaaggctccaccttccacagggtgatcccttccttcatgtgccagggattgtgggactttaccaaatcggtttgtaataacacctagaagacgct

SEQ ID NO: 557119 - DNA, 101 bp, Homo sapiens
ccacccgcgagtccagcgtcgccgcagccccccaatgcggccgcgagaagcagcgggggggcaggcgatcgaagtgtgtgtcagttcctggagctgtgtca

SEQ ID NO: 557120 - DNA, 82 bp, Homo sapiens
ctcgatcttgggacccaccgctgccctcagctccgagtccagggcgaggtggcagtagagaagagcatcacagaagttgctc

SEQ ID NO: 557121 - DNA, 98 bp, Homo sapiens
tcttgataaaaagagatgtggggggattctcgacctgctaacagaactggaccttttcggccagaggcattgatgtgcagcaggtttctttagtcatc

SEQ ID NO: 557122 - DNA, 74 bp, Homo sapiens
ttaccccccgaatccagaggctgaatgagctagaggccccaaggcccagaagaaatttaagcgtcttatgctgc

SEQ ID NO: 557123 - DNA, 95 bp, Homo sapiens
cgaggcggccacccgagacgcggcgcgcacgctccggcctgcgaattcaattcgtcataatctgtccctacacagcaagttcattcgtgtgcaga

SEQ ID NO: 557124 - DNA, 98 bp, Homo sapiens
tggcagtacctgaccactctctcccaggagtcagtggatcggtggggaaaatgctgcttaccctgggccctgggctgtagaaagaagacaccaaaggc

SEQ ID NO: 557125 - DNA, 80 bp, Homo sapiens
tggacgctcgcacccgcttcgcagacaggcgcacgcagtggagagggggatatgagactttctactcggaatatcctgag

SEQ ID NO: 557126 - DNA, 75 bp, Homo sapiens
ttgcacacaaagaagagacatgatgtatttgcatccttccctgcttcagccagcactaagtcaggagattggaaa

SEQ ID NO: 557127 - DNA, 100 bp, Homo sapiens
cgaatcacttaaaggagtggacattgctagcaatgagctcccaaagccatccaggcgatgtaccaattttgacaactgaagacgacatggtttctcagcc

SEQ ID NO: 557128 - DNA, 75 bp, Homo sapiens
gacgctgctgggtccgctgagcggggcgacccgagtgaagctattaagtacctcacagaagctcttcagtctatc

SEQ ID NO: 557129 - DNA, 82 bp, Homo sapiens
cttttggatcctgattcagccatccatcgttattaggtacgtacctgtgggcatcatgttccttgttggaagcaagatcgtg

SEQ ID NO: 557130 - DNA, 100 bp, Homo sapiens
ggcggacctgtgaggggatccgacttgccggcagaacttacgctgcgggaccccgggcactgttgctgctgcgggaggaggaattttgttgtcagagaat

SEQ ID NO: 557131 - DNA, 51 bp, Homo sapiens
cacaaacatgttcacaacgggcatggctgcaaccccaccctatggatgaac

SEQ ID NO: 557132 - DNA, 98 bp, Homo sapiens
tacgtttacaacggctacagcgtggtttttgtggggactaagagtggcaagctgaaaaagatcctccaggtcctattgacaatactaagattgcagtc

SEQ ID NO: 557133 - DNA, 83 bp, Homo sapiens
cgaccagctcagcaaccgcgtgaaggacctgatgaatctcctgctgtgtgtcctaactgtggtagtgaccacgtggttctcct

SEQ ID NO: 557134 - DNA, 50 bp, Homo sapiens
aggaaagatgggacctcccggcccagcagtatatgaacctctagaaaatg

SEQ ID NO: 557135 - DNA, 82 bp, Homo sapiens
agcgcaaccacgagacggccttccaagatgaaggatttgggggcagagcacttggcaggtcatgaaggggtccaacttctcg

SEQ ID NO: 557136 - DNA, 50 bp, Homo sapiens
atgatttcttgctagatgaaagtgcttctcccgttggcaacggttacatc

SEQ ID NO: 557137 - DNA, 101 bp, Homo sapiens
atcttctttcaacaaggatagaaatatcagcctccagtggcagcagggtatgttggagctagaggctgagcatgaccaggacctgagtaaacaggataagc

SEQ ID NO: 557138 - DNA, 100 bp, Homo sapiens
tggtgaagcccgcggcgcgcgcctctcccggaccctgcagggttacactcctggcacaccttacaaagtgtcctgttcccccaccagcggggctgtgcca

SEQ ID NO: 557139 - DNA, 83 bp, Homo sapiens
tcaatatctgtcttcggtggactccttcggcagtccacccaccgccgccgcctcccaggtgaaaggtgtagcagtcactcggc

SEQ ID NO: 557140 - DNA, 100 bp, Homo sapiens
cgactccggagacagcccaaatatcctcggaagagcgctcccaggagaaacaagtattggcaagcttgccagtgtacctgctggtggggctgtagccgtc

SEQ ID NO: 557141 - DNA, 97 bp, Homo sapiens
gcactcctgttcctggtcctgacgcccccctcccgcccggaaagctgcccagccaccagcaaccccccagttctggacatggcaagacatgtgccac

SEQ ID NO: 557142 - DNA, 51 bp, Homo sapiens
tatctaccacccgagatgccccaagctgagatctgtatctgtggacctgaa

SEQ ID NO: 557143 - DNA, 75 bp, Homo sapiens
cagagtggaccaccccatgaacctcgaaaatgctgctcaaattccagtggctactccacaggtctctcctaacac

SEQ ID NO: 557144 - DNA, 82 bp, Homo sapiens
acaaccgagcagcactgtcagcagatgtcgaataaaactgattcttgctattccaaatcctcttccacgttgacagcccttc

SEQ ID NO: 557145 - DNA, 98 bp, Homo sapiens
agggaaccgtcgggtgtgaccattgagagggaaaaggaaccatattacgttcgttgcatcaaacccaatgacaagaaatctccacagatatttgatga

SEQ ID NO: 557146 - DNA, 100 bp, Homo sapiens
gctgttttctgattccaagccacttgggtcagaggatatagataatcaagggatattaatgcacacgcctgtgttactggtaaacccatcagccaagggg

SEQ ID NO: 557147 - DNA, 50 bp, Homo sapiens
aggagactggatgatagaattgtcaaaatgcagatcttcgtgaaaaccct

SEQ ID NO: 557148 - DNA, 75 bp, Homo sapiens
ctggccgcgacctcagccgcccgccgcccgccggggggatggtatgaagaagcattagaacagtttgaagaaatc

SEQ ID NO: 557149 - DNA, 90 bp, Homo sapiens
cgccaggtgagcgcgctccctggcaccgttggcccccggagggtcgggcccagttgcggcgagcgggtctacaactcgaacaaagacagc

SEQ ID NO: 557150 - DNA, 101 bp, Homo sapiens
acccgggatggcgaggcccccgagcgctccccgccctgcagtccgagctacgacctcacgggcaagatgaggaaactgaacttgccccaagtcacatggct

SEQ ID NO: 557151 - DNA, 100 bp, Homo sapiens
agctgtttccacgtgcggtgctcgtcgggagtgatcacctaccctacagcatctgcaggggctgctgagagtaaatacttggcgcctccagctgctggcc

SEQ ID NO: 557152 - DNA, 75 bp, Homo sapiens
taccagcgtgtgtaccagtccctctgccccacatcctgggtcacgagaagagaatgccttctagatgcaaaatca

SEQ ID NO: 557153 - DNA, 75 bp, Homo sapiens
gaaggaacactcctctgtcctcgtcatgttccacgccccatctgcggtctcctgtttgataaaagaatattggcc

SEQ ID NO: 557154 - DNA, 85 bp, Homo sapiens
ccagtccatctcagagatgctcagctcacaggcgctggggtgaagaatggggcatgggtggctacgtaaagatggccaaagaccg

SEQ ID NO: 557155 - DNA, 100 bp, Homo sapiens
tttacttgtgcccttctggagtttcaaatcctgctctactcacagcgcatgtactggcattgaaaacattgacgaagctattacattgcttgaacaaaat

SEQ ID NO: 557156 - DNA, 75 bp, Homo sapiens
ataaaaagagatgtggggggattctcgacctgctaacagaactggaccttttcgcagcagccgctcttctaaaac

SEQ ID NO: 557157 - DNA, 125 bp, Homo sapiens
cctggagacagctgccccgagggtctcctccagtagacggtacagcgaaggcagagagttcaggaaggatctgagtctctccctgcggagacagccctgaagaactcctgtaacgtcaagctggc

SEQ ID NO: 557158 - DNA, 75 bp, Homo sapiens
gggcagtcgcgccagagctgagcggagggcgcggcgcgagaacgacccagtggcctttgaggatgtggctgtgaa

SEQ ID NO: 557159 - DNA, 100 bp, Homo sapiens
accaaggcgaggagctcagcatggtcatcctgctgccggatgacattgaggacgagtccacgggcctgaagaagctccagcggaacatcttggcctcgaa

SEQ ID NO: 557160 - DNA, 101 bp, Homo sapiens
ccgtgggccgcagccactcaggactgtcaaagggctacttctacaagtccgaacagccagtccagcaaaatgaacagcattgtctaccagaagcagttcca

SEQ ID NO: 557161 - DNA, 75 bp, Homo sapiens
gatcgggcgcatcactgctcagcctgtgactcgaccagtcctgcctctgttgtagaagacatgtggtgtatataa

SEQ ID NO: 557162 - DNA, 90 bp, Homo sapiens
tgggattacaggtgtgcaccaccacgcccagcactgctgatggttcttcagaactcaggaatcgtgttgcatgcattgtttctacccacc

SEQ ID NO: 557163 - DNA, 97 bp, Homo sapiens
gaacccagaggtcgtggaggtggccgtggaggcagaggtggcatggggtaaggaaactgaggcataaagaagttaaaatgcctgaacaaaagcacac

SEQ ID NO: 557164 - DNA, 98 bp, Homo sapiens
ctctgtatgaagaacgatccccacctttgcctcagaaagacctatttcagaatgtgacagtgatgataacatgggtgccaaaaatacttcaataggag

SEQ ID NO: 557165 - DNA, 100 bp, Homo sapiens
agaacctgacagaatggatagaaattttaaagactgttgtgaacagggatgtacctaatagaccaaatgagagggttgacactgtatcagaaaaaccaag

SEQ ID NO: 557166 - DNA, 100 bp, Homo sapiens
ctgcatgaccagttctggagctactggaataggatctatttggaaagtcagacccatacctggaattccacaagcagacatctgatggaaactggctaat

SEQ ID NO: 557167 - DNA, 100 bp, Homo sapiens
ggcctctcaactcaggccatctggcgccgactctgggatgaactgatgaagacaaggccttccagtttggaatctcatcggatcagatcgagcagctcca

SEQ ID NO: 557168 - DNA, 83 bp, Homo sapiens
cattcaactagccaaggaaaaaaagcagagaggagcggggagcaatgcagaagaccagtatggtgctgtgaaatgttgcaaaa

SEQ ID NO: 557169 - DNA, 100 bp, Homo sapiens
atggacacgctaaggatacagtatgtgtgtgaacagaataaggccatccacggcttccgagagacagagaagtcgcgctggtcagaagccagccgggcca

SEQ ID NO: 557170 - DNA, 97 bp, Homo sapiens
ggtgatttctgcatttccaactgagggtttgtgtttagtgaatcagagggatctgcattagaacagtttgaaggtggcccctgtgctgttattgcac

SEQ ID NO: 557171 - DNA, 75 bp, Homo sapiens
agcctgtctcttggatggagtaccagtagctttaaaaaaagtgcaggacccagatgatgtggtaccagttggcca

SEQ ID NO: 557172 - DNA, 73 bp, Homo sapiens
atgaccctaaaaatggcgattctgcaaccaagcacctgaaacagcaggcccaggatgttttggtgcaggagat

SEQ ID NO: 557173 - DNA, 100 bp, Homo sapiens
tggagggctgagcagtcaactcaaatgcaagtccaagaggaggaggaggcggaggtccaagcggaaaggtgatgggcagaatctgtttacgaaagacgtg

SEQ ID NO: 557174 - DNA, 75 bp, Homo sapiens
atagatactacactgaatttcctacagttcttgatattacagctgctctgttaaaagcgaaaatgaaacaattgc

SEQ ID NO: 557175 - DNA, 100 bp, Homo sapiens
gtcggggagctatcgtcgtcttcaaagagcgccttcgctgacacgctgacgcccgcgcgcctcagccaggcccgcttcagcgcctgcctgccgcccagca

SEQ ID NO: 557176 - DNA, 74 bp, Homo sapiens
aagagagactgactgggcaacatgttattcagatgaaggatttgggggcagagcacttggcaggtcatgaaggg

SEQ ID NO: 557177 - DNA, 75 bp, Homo sapiens
tgagaggacaagcccagattccaaaacttatgtcaagtgaaaggaaagcaagccaggatggatatttacgacact

SEQ ID NO: 557178 - DNA, 75 bp, Homo sapiens
ggggcccctcgcctcccctctgaggaccgaagatgagcttcctcttgatgttttagaagaatgtatgtctcttcc

SEQ ID NO: 557179 - DNA, 49 bp, Homo sapiens
aaaatgctgtgaatgagcctgtcatgagtgacactgaatatgcagagtg

SEQ ID NO: 557180 - DNA, 75 bp, Homo sapiens
ggcacatgtacgggaaggacaaagtgggaatgggtaccacagaccatgtcatcgtcctggcgtccacgaaccgag

SEQ ID NO: 557181 - DNA, 75 bp, Homo sapiens
tggacctaaaccgctggagggctggaaggctcgcgatgcctctacacaagtatcccgtgtggctctggaagcggc

SEQ ID NO: 557182 - DNA, 75 bp, Homo sapiens
agcgttctaaaggaaggcgtccgttggccttcgtacccgtcttgattgaggaagccagcagacctgcagaacttg

SEQ ID NO: 557183 - DNA, 73 bp, Homo sapiens
ggaggcggaggtcgataagctggaactgatggagcacgagtgcttccaggaggagctgaggaaagcgcaaagg

SEQ ID NO: 557184 - DNA, 83 bp, Homo sapiens
aaagacagtcctcgtcagcactgactttcagctatggaatcggaactgtggctgcaccatctgtcttcatcttcccgccatct

SEQ ID NO: 557185 - DNA, 105 bp, Homo sapiens
gcgattccagagagcggcggaaaggataagcctcgacttagaagctaccgagttaccctaagaaagctttggaatcttctaatgcccacgaagaagttaaacgct

SEQ ID NO: 557186 - DNA, 100 bp, Homo sapiens
cacccccagttggttgcagttccagaaattcttatgccggtctagatccaagcaaccagatcaatgaactgagccatgttcaaatccctgttatgttgat

SEQ ID NO: 557187 - DNA, 100 bp, Homo sapiens
ccgaggatcaggaaaaactatggccttcaagagggaattgaaaactaaagaacctgtaatcatgagtactcttgagactgtacgaatatttctgacagag

SEQ ID NO: 557188 - DNA, 74 bp, Homo sapiens
aaggaaggggagcccgggacccccgggggcgcagatgccagaggaacaagcattctgtgttttggtgaaaatca

SEQ ID NO: 557189 - DNA, 75 bp, Homo sapiens
cacatctgtgctggagcatctgccttcggaaaggttatgaaggacagaatctggcaaagatcctcaaggatttag

SEQ ID NO: 557190 - DNA, 58 bp, Homo sapiens
caggcacacaagtgtgaggagttgctaaatgctcaggaatcaaacattttaagtccag

SEQ ID NO: 557191 - DNA, 90 bp, Homo sapiens
atgcccaagacattataaacgaagaattgtatttgcaacgggtagcagaattggacaaaattacttatgaaagagacagttttagacagg

SEQ ID NO: 557192 - DNA, 105 bp, Homo sapiens
gctactacgtggcgctggcctggacctcatcggcgctcatgtacttcatttgctggaactttgcctgtcacctttcgttgcctggaagaaaatctggggattgat

SEQ ID NO: 557193 - DNA, 100 bp, Homo sapiens
ctggagtgaactggattccatgtagagacccctggaggtttttgccaatccagaagactgtgtagcatttggcaaaggagaaaatgccaagaagtatctt

SEQ ID NO: 557194 - DNA, 100 bp, Homo sapiens
tctattgaagatgtccaaaaggaaattaaaagaggcacgaagctggttcatctctaacaagtatttagtgaaacgacagagcagagactatgatgtggaa

SEQ ID NO: 557195 - DNA, 75 bp, Homo sapiens
gtccctcacccccaccagctgtagctgaacgtctggatggtggagaagagcaggaatccggagatgatgagtatc

SEQ ID NO: 557196 - DNA, 100 bp, Homo sapiens
ccaacgtccgtatcatcaagaacagaacaggccctatggggcatacctatggctttattgacctcgactcccatgcgagacgaggacttgctatgttgcc

SEQ ID NO: 557197 - DNA, 75 bp, Homo sapiens
ggcagccggcagctttgcagcgggtctcagatgatgataaagaaaagggagagggagctcttccaactgggaaat

SEQ ID NO: 557198 - DNA, 78 bp, Homo sapiens
caggcagtttatgatattaacagactagactccacagatattgatgatgttaagaagttcaaaccgggttacctggaa

SEQ ID NO: 557199 - DNA, 83 bp, Homo sapiens
attgacagtcacaattttgtaataaggctctggcacgttttgggggaggtgcctgcaggacccaacatactcaatgagcttcc

SEQ ID NO: 557200 - DNA, 75 bp, Homo sapiens
cgcgctgacagctcgagtgagcggactgcccaggacttcggaactagacgaggagtgggaactggtggtgctggg

SEQ ID NO: 557201 - DNA, 74 bp, Homo sapiens
tgtcgaaaagaaatcagaaatggaaagtgttttggcccaggttacaagaggacccacctgtgggtgtcagtggc

SEQ ID NO: 557202 - DNA, 73 bp, Homo sapiens
aagaactcagatgccaagtgtgtggctgaactgcagaaagaggagcgagaacccgagcagcgccatgagcaac

SEQ ID NO: 557203 - DNA, 96 bp, Homo sapiens
gatgaagatgatgaggaggaggaagaagaggaggaggaaggtaaagacagtgatgaggccgaggacgctgagctctatgatgacctttactgccca

SEQ ID NO: 557204 - DNA, 83 bp, Homo sapiens
ttctctgaacatactgccttatgggacagatcaaccatcactggtgcaagctatatttaacggagatcctgatgaagttcgag

SEQ ID NO: 557205 - DNA, 100 bp, Homo sapiens
gtgcatgttagtgctcaagagcctcattatctaccacccgagatgccccaaggctgacgttcctcagggagtgattcgagtgcaagctccccatctttcg

SEQ ID NO: 557206 - DNA, 50 bp, Homo sapiens
gacaaaagctcaacagcatttgaagctaaaccagccccagaaatatttga

SEQ ID NO: 557207 - DNA, 100 bp, Homo sapiens
ggaggccggctgaggagcgccgctgcctcgcctcgggtgagaactctgtctcagtcgacgggaagtgcagtgactccacgctactgagcaacttgttaga

SEQ ID NO: 557208 - DNA, 83 bp, Homo sapiens
ctcagagagggaagagattcagccagcacactcctcgcgagcaaggcgggcagggctgggcagcggcctgagtctcagcggac

SEQ ID NO: 557209 - DNA, 75 bp, Homo sapiens
cgacaacatggaggccgtgaagaccttcaatagcgaggcagttcaattaacctccagaagatggctgaacctgca

SEQ ID NO: 557210 - DNA, 83 bp, Homo sapiens
cttggaggaggtatgcctggactgggccaggctaattcacctaaataagattgatcctcatgctccaaatgaaatgctctatg

SEQ ID NO: 557211 - DNA, 50 bp, Homo sapiens
aaaatggtggagttggaataaagaataatccagaatggctactctgatct

SEQ ID NO: 557212 - DNA, 115 bp, Homo sapiens
ttgacattcaaccgtacccgccaagctgtcatcacaaaagagttgattgaaattatctctggtgctgcagctctgctaagtgctatttatggaggtacctatatgctgaataaac

SEQ ID NO: 557213 - DNA, 51 bp, Homo sapiens
aaagacttcacgtcttgccgaatgaaagctcctgggtagaactgcacttca

SEQ ID NO: 557214 - DNA, 101 bp, Homo sapiens
agaggaacagcctatgtgggcttccacggagaggagaaggcagagcccccccaggctatgaatgccctgatgcggttgaaccagctgaagccagggctgca

SEQ ID NO: 557215 - DNA, 100 bp, Homo sapiens
agatttcagatactctgactccacctttacttttacctacgttggcggccccagaagggacagaaattcttggcaagtcagttcgtataatattctctac

SEQ ID NO: 557216 - DNA, 95 bp, Homo sapiens
cgagcggaggagcaggcgccggaggcagtcttgattgatatggaagaaggggtagtgaatgaaattctgcagggaccactgagagatgtatttga

SEQ ID NO: 557217 - DNA, 130 bp, Homo sapiens
gcccgggaactgctgacgcttgatgagaaggacccacggcgtctgttcgaagaggagaaggcagagcccccccaggctatgaatgccctgatgcggttgaaccagctgaagccagggctgcagtacaagc

SEQ ID NO: 557218 - DNA, 88 bp, Homo sapiens
ctgcacattaggttgcagtatgtggccagttatttgcctcagtaaaagagatgggagaggacagaagaactcagatgccaagtgtgtg

SEQ ID NO: 557219 - DNA, 74 bp, Homo sapiens
ccagccctgcctctccctgggctctgcaaagtggaagatgctttctacaaaggtgaactcaggctgaatgagga

SEQ ID NO: 557220 - DNA, 100 bp, Homo sapiens
ccaggaacatggactgaagtatccagcgctcattgggaatttagttaaggacattgaggtgctgctgggccacggggcagacccaggcatcagggacagg

SEQ ID NO: 557221 - DNA, 83 bp, Homo sapiens
ccttgccgctgctgtcctgcgaccccaagcaggtcgcaatggaagaagagatcgccgcgctggtcattgacaatggctccggc

SEQ ID NO: 557222 - DNA, 98 bp, Homo sapiens
tcctgtgtgcatggctttccaaaaggaaattcaaagaagctttttcactatttgacaaagatggtgatggaactataacaacaaaggaattgggaact

SEQ ID NO: 557223 - DNA, 74 bp, Homo sapiens
gggagaccctgtgcccctaaatcgcggtccactgcgcgcgtcagggattgtcaatgaggcagatcagattccga

SEQ ID NO: 557224 - DNA, 75 bp, Homo sapiens
tgaggccgtgagggccccactggactgggcgctgccgctttctgagccctgaccctctattctgcaccctgtgag

SEQ ID NO: 557225 - DNA, 50 bp, Homo sapiens
accaagatcaggaacctgccctgtcagaaattggctttggaaaaatggaa

SEQ ID NO: 557226 - DNA, 82 bp, Homo sapiens
gagctcaactccaaccacgacggggccgacgagacctcaggcaaaacaacgagtggatgagaaacccagcctgggagccgtg

SEQ ID NO: 557227 - DNA, 102 bp, Homo sapiens
atggctctgaaacctcatcagagttttctaaaatgcaagaagatctgtgtcatattgcccataaaggttaatgttcgtgaagaaattgaagagttttttcca

SEQ ID NO: 557228 - DNA, 100 bp, Homo sapiens
aaaattcttcagacattacgagaaatgttagagaagaaagacagctttgtggaagagctcgatcaagtcatccgccaaagaagcctgtccagtttggaac

SEQ ID NO: 557229 - DNA, 73 bp, Homo sapiens
ttaattttagggtcctttatatagaagggagagtaggcttatgtacataaaagcgtgatggaggaactgaaga

SEQ ID NO: 557230 - DNA, 100 bp, Homo sapiens
aacattaccgtcatattccacccattactaagactttgccaaccccaatgcattgcacctctcattgcatgtgaatgatggctcctgttctattctctca

SEQ ID NO: 557231 - DNA, 75 bp, Homo sapiens
agaacagcctccgcggctccggggagaagactcacagatgaatgcttctcacccggaaacaaacttgccagttgg

SEQ ID NO: 557232 - DNA, 124 bp, Homo sapiens
ccctttccaaaccagacccctgtgtcatcctcaagatgcagtctcatgggcagtggtttgaggtgtcatggagaaactccagctgggcccagagattctgcagcgggaaaatccaaggcttatt

SEQ ID NO: 557233 - DNA, 87 bp, Homo sapiens
agacaggaggcagcagacggacatccagttcacacaaaagatgttggacaatttctacaattttgcttcatcatttgctgtctctca

SEQ ID NO: 557234 - DNA, 100 bp, Homo sapiens
aacccatctgatcgacatgttatttgctgtccccggcataggtccatctctgcagaagccatttcaggagtacctggaggctcaacggcagaagcttcac

SEQ ID NO: 557235 - DNA, 50 bp, Homo sapiens
gccccagcccctggagaggatgcagaatcaggaaacccaggcccaacggc

SEQ ID NO: 557236 - DNA, 100 bp, Homo sapiens
gcggcagtatccttggggcactgtgcaggcctcccaaagtgaaatgcctgaccaagatctggcaccccaacatcacagagacaggggaaatatgtctgag

SEQ ID NO: 557237 - DNA, 98 bp, Homo sapiens
tttgacaacgcttccaagcattgctattacaactgtaagccaggagtgccctgccttggacaagacgcagctgaatctctaagtgatgctactgccac

SEQ ID NO: 557238 - DNA, 75 bp, Homo sapiens
cggagcagaggaaccacacgctgatcatggtcattcctgtcccaatcagctgctctactactgatgacattaaag

SEQ ID NO: 557239 - DNA, 88 bp, Homo sapiens
gacgcgcccggcccggagcccccagcgcagcggccgcgaaagccatcactgcccaggtagaagagaagcgcaggaagaaacaactgga

SEQ ID NO: 557240 - DNA, 74 bp, Homo sapiens
tggctcccttctgccccagctccgtctcggcggcggcgggtattaatctctggagaagacacatccacagttag

SEQ ID NO: 557241 - DNA, 90 bp, Homo sapiens
cgcggacatcgtctcctgtgtggcgatggtcttcctgctggggctcatgtttgaggaggtcttgctggagttgctagaacaatgtgtgga

SEQ ID NO: 557242 - DNA, 102 bp, Homo sapiens
cgtgtcctgaaaagtgcgaccgttctcccaaggaatttccacggtgctggagaatctggtaaaagcaccattgtgaagcagatgaggatcctgcatgttaat

SEQ ID NO: 557243 - DNA, 95 bp, Homo sapiens
caggaggggaagcgatggctgggcccgcgtggatctctaaggccctggctgtggagaatgctgaaggaagaagacgcagaagcaggacgaccctg

SEQ ID NO: 557244 - DNA, 100 bp, Homo sapiens
tgccaatgtggagcagtggcggtgtgtctctatcctccggaatcattcaggcggtgcccaaatgagtttactggtgatcgctgccaaaactacgtaatgg

SEQ ID NO: 557245 - DNA, 100 bp, Homo sapiens
ctccgatttaaggtgcccgagtccacgctgatggactgccgtagaccattccaaaatatgcccggtgctatccgcccagctgctcctagaccaccattta

SEQ ID NO: 557246 - DNA, 101 bp, Homo sapiens
tcaaccgccagatcaacctggagctctacgcctcctacgtttacctgtccatgccagatgacgtgtactactgtggaataaagtacatcaaagatgatgtc

SEQ ID NO: 557247 - DNA, 74 bp, Homo sapiens
tcgtatgtccgctatccagaacctccactctttcggtcctagcagaagatgtgactcagactgcctctgggtgg

SEQ ID NO: 557248 - DNA, 97 bp, Homo sapiens
aaggatacagtctcagaggacaccattaggctaatagagaaacagtatcaacaacctgcaggctgagttaaacaagatttttgccctgcggaagcaa

SEQ ID NO: 557249 - DNA, 82 bp, Homo sapiens
gatgctgcaaaacgtgactccccacaataagtcaaaatgcagatcttcgtgaaaacccttaccggcaagaccatcacccttg

SEQ ID NO: 557250 - DNA, 100 bp, Homo sapiens
gcagcatctgcgatgtgaggaaaggcacctccaccagaacaactctgctcatggtgattacatgcaaaataacgagagcagcttaatagagcaagctcca

SEQ ID NO: 557251 - DNA, 83 bp, Homo sapiens
cgaccactgcccggctgccttccacctccagtgctggtgaaaggtgtagcagtcactcggcctacacccacagcatcgacctt

SEQ ID NO: 557252 - DNA, 82 bp, Homo sapiens
tggaggagaaaatgaatgcagagcagcaactacagagcacacagtgtgaaatcaaagttgcacaacccaaagaggtatatag

SEQ ID NO: 557253 - DNA, 75 bp, Homo sapiens
ggtgatctgtgtgaggatctgaaggctcagcagaaactacaggcctcactctcagtggctgtgaactccatcatg

SEQ ID NO: 557254 - DNA, 73 bp, Homo sapiens
gaccgacttctgcagtacgagaacgtggatgaagactcttcggaccgagacatgggtgcccggcaccgcgccc

SEQ ID NO: 557255 - DNA, 82 bp, Homo sapiens
cgatgttttcgccaccgcgcccaggtcagcccaaggccaaccccactgtcactctgttcccgccctcctctgaggagctcca

SEQ ID NO: 557256 - DNA, 83 bp, Homo sapiens
ggaaaacctaaccatgaagacttgaacttaatacagcaagaaagaccatcaagtttaccactctattaccaggttttaaactt

SEQ ID NO: 557257 - DNA, 100 bp, Homo sapiens
aaagtggctctacaaacccaagatctttaatctcatgaagtacgacagctacagccgcttcttaaagtctgacttgtttttaaaacacaagcgaaccgag

SEQ ID NO: 557258 - DNA, 100 bp, Homo sapiens
aagtgcaaaaagtctgtcaactgggtgatcaaatcttttgatgttaagggaagcctgaaaattattccatccagtccaatggatcagatgggcaagatga

SEQ ID NO: 557259 - DNA, 51 bp, Homo sapiens
ccgaggtgccaccgtggaaggacagaatggacttgattattcttagaaatg

SEQ ID NO: 557260 - DNA, 100 bp, Homo sapiens
gtgaagacttagatgtggattggaggaggagcaatctcagaactgttatgaagaccttcgaagttcttcattctttctcactttgccatcatgtggcctc

SEQ ID NO: 557261 - DNA, 80 bp, Homo sapiens
gcctcagttggaagcagccgatccagcctgcggagcctgtggggcaggctttgaacttggcctactccagcatttacggc

SEQ ID NO: 557262 - DNA, 100 bp, Homo sapiens
aatggcggcggctgccgcaggacctgcagcatcccagaggtctcagtcagtctctccacctccagttctctccccaccaaggagtcccatctacccgctc

SEQ ID NO: 557263 - DNA, 87 bp, Homo sapiens
tggagtccgtgtaagctcggcgacagccctagcagcgaggccaaaacagggatttcagtcataatcggttgtctaactggaacatca

SEQ ID NO: 557264 - DNA, 97 bp, Homo sapiens
ctcacatcatctattgttccatcacagccataaccagcagaccacagcattcaggcatcctgtgacgggacagttttctccagaaaatagtgaattc

SEQ ID NO: 557265 - DNA, 75 bp, Homo sapiens
tgatgcgtctacggatgagcatttagtgaaggatttgggcagcctcaatggggaatccatcaacagcatcaagtc

SEQ ID NO: 557266 - DNA, 96 bp, Homo sapiens
gactcgaggaaccttggatgaagaggatgaggaagcagacagcgatactgatgacattgaccacagagtctgaagatgatgagaaactgaaaaaga

SEQ ID NO: 557267 - DNA, 80 bp, Homo sapiens
ccccagaaaggattgtgacatatcgttggacccagaattgaggagcggaaagaatgtcggagcgggccgcggatgacgtc

SEQ ID NO: 557268 - DNA, 100 bp, Homo sapiens
cctccgctgtcgcccccgcagcaccgctactcggagggcgagcggacctccctggagaaggcacttcctggacctcactactacacatggggagaccacg

SEQ ID NO: 557269 - DNA, 50 bp, Homo sapiens
ttgcccagtatgatggggcatacaaggtgtgagatcaaccatgagttccg

SEQ ID NO: 557270 - DNA, 100 bp, Homo sapiens
ctgagaggttctgctcccatgcagaaggagaagacagcctgaagaagatgcagctgatggagcttgcgattctgaatggcacctacagagatgccaacat

SEQ ID NO: 557271 - DNA, 98 bp, Homo sapiens
cctgaacctgcggcacccctctgatgacccatttggattctctgatttcactgccaagattctcatcaattacagttaaagactcttcatgaagattt

SEQ ID NO: 557272 - DNA, 100 bp, Homo sapiens
caggttacttcttcctcaacaccagcaccgcagatgttgtcaaggtggcctaccaggaggccaggggtgtcgccatggttgctgtgctgcttatggatac

SEQ ID NO: 557273 - DNA, 100 bp, Homo sapiens
gaggaggaggatgaatttgatagagagcgagaattagaactgcagcgtcagcgtgacttgcataagatcaagcagcttcagcagacagtgagagacctgg

SEQ ID NO: 557274 - DNA, 83 bp, Homo sapiens
aaaggaacccaacagagatctcttctgttctccactgctaggtctctaattaacagaagatggcaaagcccagccacagcagc

SEQ ID NO: 557275 - DNA, 75 bp, Homo sapiens
aaaaagagaagacgctttacccgactctttgggccgttatctcacatttgaatataacctgccgctttgcaggtg

SEQ ID NO: 557276 - DNA, 76 bp, Homo sapiens
ctgcctatagaccaggcgtcttttgccagccaaaacaggttgggcagatgcagattctgagacaacagattgccaa

SEQ ID NO: 557277 - DNA, 74 bp, Homo sapiens
cgagcgggtgcgtctgccgcagagtcggcacctgaaggacatggagtacccaccacccttgattcctccccggg

SEQ ID NO: 557278 - DNA, 75 bp, Homo sapiens
gatgccaagagttcgagaccagctggggcaacaaagtacatgtcccagagcaagcacacggaggcccgggagctc

SEQ ID NO: 557279 - DNA, 100 bp, Homo sapiens
cacacttcgagctgaagcacctctccagcggggacctgctccgggacaacatgctgcggggcacaggaatgtatcctgtcaggtataatgtcagtgaatg

SEQ ID NO: 557280 - DNA, 75 bp, Homo sapiens
agcgggcctggactgtgggctggtgtgtggaactggaacaggagtacagctgtgtagtaaagatgccttctggtg

SEQ ID NO: 557281 - DNA, 100 bp, Homo sapiens
ttgctttccaaaatggcgcgggtgctgaaggctgcagccgcgaatgccgtaggctttggaactgcgacataactagcgatggctgctgcgatctcacaaa

SEQ ID NO: 557282 - DNA, 83 bp, Homo sapiens
tgagtttcctgatggagtaaccctagatgtgtgcattgcaatgttgtgtactctgatgtggctgctctgaagtctcacattca

SEQ ID NO: 557283 - DNA, 74 bp, Homo sapiens
cagccggagagaacacggccgaaggaaggatggctgtggcaatttggggagtgggtggacgtggtcgtggatga

SEQ ID NO: 557284 - DNA, 75 bp, Homo sapiens
cggcgccctgcgctccgtacgctgcgcccgcggcaagatggcccactgcgtgaccttggttcagctgtccatttc

SEQ ID NO: 557285 - DNA, 100 bp, Homo sapiens
gcgaataagtttcggagcatcggttaacagcctatgggtgaaatttggctttcattcatgaatgaggcacagactgccaaggctgggggcaacatatctg

SEQ ID NO: 557286 - DNA, 75 bp, Homo sapiens
ttcaagctcttctggcagtgattctgacagtgaggttgacaaaaagtgggaatgtaagacggacttagatattgc

SEQ ID NO: 557287 - DNA, 108 bp, Homo sapiens
aaggagccacaaagaagaaaacatttcttttaatttttaaacttggtttgaaagcagcccacccatgtgcccgtgacaatggtggctgctcccacatctgtattgcca

SEQ ID NO: 557288 - DNA, 90 bp, Homo sapiens
agcgtcctgcagcggcccgcgggcgccaagtactttttcaagtctatggatcaggatttcggggttttctccagggatttaagggccagc

SEQ ID NO: 557289 - DNA, 116 bp, Homo sapiens
gaaaacacaaaaaacaggataaaatcttatgattatgaggcatgggcaaaacttgatgtgggcctcggcttcacaggatggggctgccagtgtcctgggcccctcctgccctctgg

SEQ ID NO: 557290 - DNA, 100 bp, Homo sapiens
acggagaggagctgcctgctcaaagagctgcaccgcttcgagtctattgccattgcccaaggtgtcatggagaaactccagctgggcccagagattctgc

SEQ ID NO: 557291 - DNA, 98 bp, Homo sapiens
gacaagggaccatctgctgggtggactgtggacccaacatgagtgaagtttcctgcaagaaacgggacgactatttggaatggccagagtattttatg

SEQ ID NO: 557292 - DNA, 101 bp, Homo sapiens
ccctgcagcggaaccggacccagtccctgagccgcccctacacccacagacacgaagatcgattgagaagttattagaatgggaaaacaataggttatacc

SEQ ID NO: 557293 - DNA, 100 bp, Homo sapiens
ctaaaaccttcctcaccgtgtactcaggggaaatgctgtctgtagctgagcacttcctggagcagcagatgcacccaacagtggtgatcagtgcttaccg

SEQ ID NO: 557294 - DNA, 75 bp, Homo sapiens
aatgttcatataaatggtggcagaaataccagaagaacattgatgatggcacctcagatcgcccctacagccatg

SEQ ID NO: 557295 - DNA, 50 bp, Homo sapiens
tctgcatccttaactgagaatgagaatgtgacagtgatgataacatgggt

SEQ ID NO: 557296 - DNA, 100 bp, Homo sapiens
gcaagtccgatggagaggctaagcacctggagtggaagatcatttatgttggctcggctgagagtgaggaatttgatcagatcctagactcggtgctggt

SEQ ID NO: 557297 - DNA, 80 bp, Homo sapiens
agaaaagaagaggaggaattaaattttaatgaagatattctgtgtccacatgaccaaactagagtcagaacgaatactag

SEQ ID NO: 557298 - DNA, 75 bp, Homo sapiens
agcctcagttggaagcagccgatccagcctgcggagcctgtggggcagtgctgaagctgctgaaagatggcagaa

SEQ ID NO: 557299 - DNA, 128 bp, Homo sapiens
cccgtgggcatatttagtcattcatttttgatcaggagaaagaagacagccatcatttgaaagatcagctgtttcatgtattagccttgcacatgcggctttatagcattgactctgagtataatccc

SEQ ID NO: 557300 - DNA, 75 bp, Homo sapiens
tggcgccaggacgaaggccctactgggcaaggaattgtcttagaagaaagaaggcaagccaccattttacccacg

SEQ ID NO: 557301 - DNA, 49 bp, Homo sapiens
gcagtcatgttgtataaccccgggtgtgggccatgtttgaggattgccc

SEQ ID NO: 557302 - DNA, 100 bp, Homo sapiens
ctgggaaggtggagccaccagcctctccttgttgtaaatcaagatggccagcctctcatagaaggaaaacttaaagagaagcaagtcagatggaagttca

SEQ ID NO: 557303 - DNA, 101 bp, Homo sapiens
tttatcttcagcctaccccctgaaatcattcacaatccaaatttcacagtcagagacaaccgagataggaaaacatttgatgtaattgtgatagatccacc

SEQ ID NO: 557304 - DNA, 75 bp, Homo sapiens
agtgactgaattaaaaggtgtcaagaagctcagaatgttactccacaggatccgctgaacataggatgttgccac

SEQ ID NO: 557305 - DNA, 90 bp, Homo sapiens
gtggccacatactttctcagaaaccttcacatcttggtcaagaatttaagaagtgcaacatggccaggggctgcctctgctgcttgaagt

SEQ ID NO: 557306 - DNA, 100 bp, Homo sapiens
cagcaatgaaatcctgctttcttttcctcagaactactatattcagtggctaaatggctccctgattcatggacccattccaacaatctcgtaaaacatg

SEQ ID NO: 557307 - DNA, 100 bp, Homo sapiens
gagacatgtctgagactcctgctcagtgtagcattaagaaatacctcagggactttttcagcgtgatgctccagtccgcaacatctcccctccacatcaa

SEQ ID NO: 557308 - DNA, 82 bp, Homo sapiens
gtggagaacttcttgatttgctgggagacatcaaccttacaggtcctaggcctacttacaagcctccagtctcaaattatcc

SEQ ID NO: 557309 - DNA, 131 bp, Homo sapiens
ttcaggaggaagcgatggcttcagacagcatatttgagtcatttccttcgtacccacagtgcttcatgagagggccgttgctccagggagaactgcaaatatcttcatccacccccacatttaaaaacgca

SEQ ID NO: 557310 - DNA, 76 bp, Homo sapiens
ctctacatagacgacaccctgacgctgtcaataccagcaaatatgcagaaagctatcggatccaaacctatgctga

SEQ ID NO: 557311 - DNA, 50 bp, Homo sapiens
gccaagcagccttagccctagtgtagaggacccagatgatgtggtaccag

SEQ ID NO: 557312 - DNA, 75 bp, Homo sapiens
accggggtctccctcccaggacacaggagtcaaggaattcctcctgatcagcagagactgatctttgctggcaag

SEQ ID NO: 557313 - DNA, 90 bp, Homo sapiens
gtggattatttggtcactgaggaagagatcaatcttaccagagggccctcagtgacacagattctcatgtatccagttctacctcagttc

SEQ ID NO: 557314 - DNA, 51 bp, Homo sapiens
ggcggagtcggggctcctgacgcactttaagccctcaggaggaccattcta

SEQ ID NO: 557315 - DNA, 50 bp, Homo sapiens
aattgcttggttccttgtcacaaggagccttcacgtaaatgggtccagtc

SEQ ID NO: 557316 - DNA, 75 bp, Homo sapiens
gcaagaccgcgaggcgagacctcttaccgagacatgggtgcccggcaccgcgcccgagcccactccattcagatc

SEQ ID NO: 557317 - DNA, 100 bp, Homo sapiens
ggctgtgaaactgcggaggcacgtggagatgtaccaatgggtagaaactgaggagtccagtcaggtcaattcagtgaagatatgatacccacagtgggct

SEQ ID NO: 557318 - DNA, 102 bp, Homo sapiens
gtggggaggaagaggaggaggaagaagaaggtgatgagttcaacctggtcattgctatcatctgtataatggtcttagagcaagtcttctagatgactatca

SEQ ID NO: 557319 - DNA, 50 bp, Homo sapiens
taatcccagcacttggggaggctgaggcaggtggatcatgaggtcaggag

SEQ ID NO: 557320 - DNA, 83 bp, Homo sapiens
cagttccaaggactccacgggtgcctacaccaactaatgttacaattgaatcctataacatgaaccctatcgtatattgggag

SEQ ID NO: 557321 - DNA, 120 bp, Homo sapiens
aagaaactgaggcctggaatttgattaactcattcaaggttacccagttggtaacgatgggggtccatcctcttcaagtaagactacaaacaagtttgagggactatcccagcagtcgag

SEQ ID NO: 557322 - DNA, 96 bp, Homo sapiens
cactgaggaggccgagagatgaggccggagcccaccaagttctgggaagtgtcatggagaaactccagctgggcccagagattctgcagcgggaaa

SEQ ID NO: 557323 - DNA, 80 bp, Homo sapiens
agccgaggccgccgccgcctctccttgctgcagccatggaaaattaatgcagagaactcctagttgggcaatcagttcca

SEQ ID NO: 557324 - DNA, 74 bp, Homo sapiens
gaagagggagcagagcaagaaaaaaaggaagacgatgacttcagaaatacatgctacaggatttaactatcaga

SEQ ID NO: 557325 - DNA, 50 bp, Homo sapiens
ggacggacaagcacagtcttcggaagcagatggactgctcccccacggcc

SEQ ID NO: 557326 - DNA, 80 bp, Homo sapiens
ctcacaggttgaaaaaccaaagctccctgctgcataagaccttgtcagaggtccttatgtcgtcagaagatcgagaagct

SEQ ID NO: 557327 - DNA, 100 bp, Homo sapiens
ccgcgccacccagggccggcgccgggcagggaggcgtccgagacgcgctggacaagcaggttttatgctgctgaaatcattcttggtctgcagttccttc

SEQ ID NO: 557328 - DNA, 100 bp, Homo sapiens
aagaagggcagcgagcaggagagcggctggtggtccaggccgtggtgcctgccaggtgatgtggggcaaagccccccgcacaggccactgagagctccgg

SEQ ID NO: 557329 - DNA, 91 bp, Homo sapiens
gacggattcatttagagctgcggaacaggacgccctctgattctctgctttctatccgtcaagatgataaagtcgtgtgcccgagaaccaa

SEQ ID NO: 557330 - DNA, 82 bp, Homo sapiens
ctccaactggaggccaccctgtggttcagatattaataaggcagcggaaagaagaaatatgaatacggctccatcaagaccc

SEQ ID NO: 557331 - DNA, 100 bp, Homo sapiens
gaccgggtggccgccagcaatattgtccagatgaaggacggtgtaattgaaaagtgatcctctcttcagagatgtcaaaaacaaacaaatccaagtctgg

SEQ ID NO: 557332 - DNA, 74 bp, Homo sapiens
cgtgaccgagagcgcgaatatcgtcatcgttagaagattactgacagccctgtcctaggagcacaacgtccgag

SEQ ID NO: 557333 - DNA, 100 bp, Homo sapiens
aggttgatgcctttggaacgtcattcattctcgatgtcgtgctaaatcagtattccagcgtcttcaggaaacagtttagactctcttcaagatgacaatc

SEQ ID NO: 557334 - DNA, 75 bp, Homo sapiens
gcaagcatctgggccatcttcaatggtataactccaccagggaatgctccgactgtcacttcaatgagcagcatc

SEQ ID NO: 557335 - DNA, 49 bp, Homo sapiens
aaacttcagatatgggatacggaaatggctagtgatgagctgaaagaga

SEQ ID NO: 557336 - DNA, 75 bp, Homo sapiens
gacctcgttgaggtggagagcagcgtgggcaatggctgccatccggaagaaactggtgattgttggtgatggagc

SEQ ID NO: 557337 - DNA, 82 bp, Homo sapiens
cgactagcgcgggcccgttgcggctgcaggcaccatggaccgagcccccacggagcagaaagtggatctcttcagcctggga

SEQ ID NO: 557338 - DNA, 100 bp, Homo sapiens
tcggcccgtgggcttctccccgagtctccccgagtcggttggcattaagaggtgcggccgggtgtgtggcaacattacttcatgatgcagccatgaaccc

SEQ ID NO: 557339 - DNA, 75 bp, Homo sapiens
gttctaattgctaatccagtatttgcggatagctccaaactgggatatagcctggcccaactagagaatctgtgc

SEQ ID NO: 557340 - DNA, 75 bp, Homo sapiens
tccaagccgtgcgcgaccatgccttcacgagacggggttttgccacattggccaagctgatctcgaactcctggc

SEQ ID NO: 557341 - DNA, 75 bp, Homo sapiens
acgtggatgatgggcttatttctctccaggtgaagcagaaaggtgttagtaaaatggcctttcgccatttaattg

SEQ ID NO: 557342 - DNA, 75 bp, Homo sapiens
gtcactcctggtgaccagcattcaagggagtgcatccgccccaacccttttccccctcgtctcctgtgagaattc

SEQ ID NO: 557343 - DNA, 108 bp, Homo sapiens
aagtctgagagagggaagtcgcctctgtgctcgtgagtgcatggggtataagacaggaattccaggcttggactggagtgaagccctcaagatccacaaagacaaaac

SEQ ID NO: 557344 - DNA, 98 bp, Homo sapiens
cccaagcccgccacgccgcccagcccggccccgcccgcgccggaagagccacgccgggcaaactctttgattctacaatagctgatgagggaacatgg

SEQ ID NO: 557345 - DNA, 100 bp, Homo sapiens
cccggtcggctaagattgctgaggaggcggcgggtagctggcaggcgccgacttccgaaggccgccgtccgggcgaggtaaactaacattatggattttt

SEQ ID NO: 557346 - DNA, 100 bp, Homo sapiens
gtcaattccactgaagtcctcatttctgctgagcaatgcagtcttacacgtggtctctaacatacacagtgacgacggctgctgggtccccagctgagaa

SEQ ID NO: 557347 - DNA, 50 bp, Homo sapiens
gcctccccagtagctgggactacagatggaggctggacagtaattcagag

SEQ ID NO: 557348 - DNA, 100 bp, Homo sapiens
cagtgcacagcaggcaacgaagctgggaaggaaagctgtgtggtgcgagtaactgtacagtggcatatcgatgcatttacttcaaaactttttctactgg

SEQ ID NO: 557349 - DNA, 100 bp, Homo sapiens
catccttaccaccagaagctatccacaacttcgcagaggtatatgggacaggttgctcatcaactcccaacctaagtccagaaagacctccactcttcaa

SEQ ID NO: 557350 - DNA, 100 bp, Homo sapiens
tgacaaggccacaactctgcagtggaccacagcattcctgaaatacatccaggaaagacatggagattctcttaaaaagaggagaggagacgccgtgagc

SEQ ID NO: 557351 - DNA, 100 bp, Homo sapiens
ctgcaaccttagcgacatcaggaagaacagggtcgaggatcgaggagagcctgacaaggagctgaatcctaagaagaagatttgggagcagatccagcct

SEQ ID NO: 557352 - DNA, 83 bp, Homo sapiens
agaacccttccggtgggctaggtactgagcgcgcgagatgtgtatatctcatgattgatatggagaaactagtcatgggccaa

SEQ ID NO: 557353 - DNA, 75 bp, Homo sapiens
cgcgcttcttccccactcccgagacagttgagtggtgattttatgcaatggcttcaagccacagttcttcaccag

SEQ ID NO: 557354 - DNA, 73 bp, Homo sapiens
agatccaggaggccatcaaaaagcctctgacacaaaagcggcgccaggaaattgaacaaaaacttgaagttca

SEQ ID NO: 557355 - DNA, 75 bp, Homo sapiens
gcggaagtgcagctgcctcagttcttagcgcagtttccgttactatggcaatgacggcagggactacaacaacct

SEQ ID NO: 557356 - DNA, 90 bp, Homo sapiens
gtgggaagagaagtttgcagaactgaaatggaggtcagagcttcattacagaagttttgattacgaagatgcaggctaccagactgcaga

SEQ ID NO: 557357 - DNA, 90 bp, Homo sapiens
gaaaagcatgcgccaagctgcagcagatgcaaagcctgaaaatgttcctcctgctgatcaagagaagctttttatccagaagttacgtca

SEQ ID NO: 557358 - DNA, 100 bp, Homo sapiens
tgcgccggaagctggcgtactccggcagcgaaagcggtgcagacgggaggaagtgtcttcattggctgctctggcatggagctgatatcacacacgtaac

SEQ ID NO: 557359 - DNA, 75 bp, Homo sapiens
ccggtactcagccttttaaaaactggaggaggagatgttaaagtaacccatcttgcaggacgacattgaagattg

SEQ ID NO: 557360 - DNA, 82 bp, Homo sapiens
aaagaaactcctggttgagctcaaagttattttacattgtgacagttaacaccaacatggttgatttaaatgactacttaca

SEQ ID NO: 557361 - DNA, 110 bp, Homo sapiens
acaagagagacggcgaggcgcgctccctgcccggcagcgactcggaggatgacgctgtcagtatagaaagtggtacaaacactgaacgccctgatacacctacaaacacg

SEQ ID NO: 557362 - DNA, 100 bp, Homo sapiens
tttcttgtacaaagtggaatttcctactgtatcatgatcatcataggagtggagaacatgcacaatgatgtccttgcattgcccatttttaagcaagaag

SEQ ID NO: 557363 - DNA, 73 bp, Homo sapiens
gtggaaagtctgcactctttcaactggcagagaaattttactgcaggataaaactccaggataaaactgtcaa

SEQ ID NO: 557364 - DNA, 75 bp, Homo sapiens
tgacatccttaaaagcaacttgcagaactgcagcaagacatggatttgattgacatactttggaggcaagatata

SEQ ID NO: 557365 - DNA, 120 bp, Homo sapiens
cggccgtcttcatgtttgctttcgcttccctctacacgcaaatcccaggaatcagagatcattgatttcttcctgggggcctctctcaaggatgaggttttgaagattatgccagtgcag

SEQ ID NO: 557366 - DNA, 74 bp, Homo sapiens
tatccagaacctccactctttcgggcccttaagtgagaagcaggaggctttgatgaccaagagccccgcatcca

SEQ ID NO: 557367 - DNA, 74 bp, Homo sapiens
agaaagcaggcgaacccgcggcgcaataacggaagacaactgttagttttgtggcttactgctgctccacccag

SEQ ID NO: 557368 - DNA, 100 bp, Homo sapiens
aagcccgggagacacagtgtcagaattacaaggtgagatcagccgcccggccaagctatcttctcgctagcagtttgcctatctggggcgcctggctcac

SEQ ID NO: 557369 - DNA, 96 bp, Homo sapiens
tcttaataactcagtaatggaatatcaccccaggataataatcttctggagatcagactgctcatatctggagatacgcggtgcagctgccgacac

SEQ ID NO: 557370 - DNA, 73 bp, Homo sapiens
cctggagtgtgtgcccactgaggagtccaacatcaccatgcaggaccgtataatagacgctggccccaaagga

SEQ ID NO: 557371 - DNA, 75 bp, Homo sapiens
gtctgaactaggatgtcccgacatgaagggatcgactacaagaccaccaccatcctgctggacggccggcgcgtg

SEQ ID NO: 557372 - DNA, 75 bp, Homo sapiens
gctcccctcccccatcaaaggaaaggggaaaatgtctcagtcgaaagtacaaaattggacagctgtacatgatca

SEQ ID NO: 557373 - DNA, 82 bp, Homo sapiens
gaagataaacgaggggctggaacacctcgccaaagcagagaaataatttccgtgagggtggaagaaaatcataccatatcag

SEQ ID NO: 557374 - DNA, 82 bp, Homo sapiens
ctggagcccggttaggaagaatggagttggcgactcgctaccaggcatgatgcactctcctggctttgacgggaatagcagc

SEQ ID NO: 557375 - DNA, 50 bp, Homo sapiens
atggcaaagaaacctattctgagatgacatagacactaggtttttacagc

SEQ ID NO: 557376 - DNA, 138 bp, Homo sapiens
aacaagataacctgcagactacattggaaaggagatttgctatttactctgctcgagatgatgaggaattggtccattcaacgaaacggaatattccaatgctctttgtccggggagatggcgttgtcctggttgccc

SEQ ID NO: 557377 - DNA, 75 bp, Homo sapiens
ttccatgaatcacaaatgttcttaatggcatctagaatgagtatgctcaggtaatcaaaatgttgggaaatggac

SEQ ID NO: 557378 - DNA, 95 bp, Homo sapiens
ctctgatttgctgtcagccatgaacggatggatgtgatgcctgctagccaaaaggaatcgagagctccagatcatgagaaagctagatcactgta

SEQ ID NO: 557379 - DNA, 98 bp, Homo sapiens
gtgctgtggtcagagtcgctgatgacccagcagatggctgggatgaacttctatggagccaatggcatgatgaactatggacagtcaatgagtggcgg

SEQ ID NO: 557380 - DNA, 83 bp, Homo sapiens
gccttcaggcaggaagcagcccccagcctcggacgccgtggcccttgggagagaggtacaagtcactgtgcccagagacgtgg

SEQ ID NO: 557381 - DNA, 100 bp, Homo sapiens
ccgcgcccgtggccgccgtgcaggcggccgtcagcaacctcgtccgggagctcgaggccatgagcagatataccagcccagtgaacccagctgtcttccc

SEQ ID NO: 557382 - DNA, 80 bp, Homo sapiens
aagggggccaggccggccatgagcagggcaggtcacgagaagagaatgccttctagatgcaaaatcacctccaaaccaga

SEQ ID NO: 557383 - DNA, 83 bp, Homo sapiens
gagggcgagttctcggtcaccatgtggtcctcagattacacagatgaatcttgcactttcaagatatcattgcgaaatttccg

SEQ ID NO: 557384 - DNA, 75 bp, Homo sapiens
gaggagctcatcgggcagattagcgacatccgagtgcagaacctgcaaggaccctgatgcttggtgtgacctgag

SEQ ID NO: 557385 - DNA, 75 bp, Homo sapiens
ctcggctccagaaattcattcacaaacctggcagcactggatgtgtgtgagaagtggggagaaatgccaccacta

SEQ ID NO: 557386 - DNA, 71 bp, Homo sapiens
gccatcacggcggccgcagtggcgtcctggagccctcctcagagtgatcagcagctggactgtgccttgga

SEQ ID NO: 557387 - DNA, 100 bp, Homo sapiens
gtctcccccacggatgaggagaaggtaactgtgctgagggtctgggtacgaactaccgagggcatgtgaacatcacccggtcaggcattgagtgccagct

SEQ ID NO: 557388 - DNA, 82 bp, Homo sapiens
gagaaagtctagcctcctgtgcaaaggtcaaaatgaaggggtgatccattcatgttgcagcagtctacaaatccagcaccag

SEQ ID NO: 557389 - DNA, 90 bp, Homo sapiens
cggccctttggggaaatgcgtgcactgcgtccctctagagcaaaaagatggcacctttgcagcagggggctacatgccccctctccggtt

SEQ ID NO: 557390 - DNA, 100 bp, Homo sapiens
ggtttttgctgcgccaacgcagtgaccgaaggctccgctcacgcccgggtgcacacatcttgaccaactcagcagcaaggtggattttctttgtgtttaa

SEQ ID NO: 557391 - DNA, 102 bp, Homo sapiens
cacccgaggagttccgcccctttctggcaaagatgagggggattcttaagcaaagaatggctcaagaagtactgacacatttaaaggagcatcctgatgctt

SEQ ID NO: 557392 - DNA, 100 bp, Homo sapiens
aagcagaggtgtcccagctcacaggagagaacccacctggctttcaaccaacttgggtattttgacctgtatagaatgttctggcatccatagggaaatg

SEQ ID NO: 557393 - DNA, 50 bp, Homo sapiens
tttgatccagaacttgcagcaacaatagggccctaattcaatcatgattg

SEQ ID NO: 557394 - DNA, 50 bp, Homo sapiens
tggctgagggcagagactctcccgattatgatgcatcattatcacagaag

SEQ ID NO: 557395 - DNA, 90 bp, Homo sapiens
gcctttctacatgagggataatgaagatggccctcagcacacggtgtgtttccattgtagaaaacctggtcatggaattgcagattgccc

SEQ ID NO: 557396 - DNA, 100 bp, Homo sapiens
tcacagatcctgacatgatcaaaacagtgctagtgaaagaatgttattctgtcttcacaaaccggagggtaatcaaatgcaaagcagctgtgctatggga

SEQ ID NO: 557397 - DNA, 75 bp, Homo sapiens
tagtggttttgggatatgtttacagagcaaaggtggagaggccaggaaggtctacgatgatgcccacaatatgct

SEQ ID NO: 557398 - DNA, 75 bp, Homo sapiens
cttccccatggggctggcctgcggcgcctgggcgctctgagattatggtgacaagctgaacatggagctgagtga

SEQ ID NO: 557399 - DNA, 51 bp, Homo sapiens
tagaaattgcaccacagatatatgggttgcaactcatgcagcaattccaga

SEQ ID NO: 557400 - DNA, 98 bp, Homo sapiens
attatcacaattactgatgggagcaagttgactaccaccagtggagtccaggatgaggcagaatccagagaccacatttgaagtatatgttgaagtgg

SEQ ID NO: 557401 - DNA, 90 bp, Homo sapiens
ctgatctagtgcttctcgaaaaaaaccttcaggcggcccatgggagaacgcttgttcccactcatccaaacaatgcattcaaatctggct

SEQ ID NO: 557402 - DNA, 100 bp, Homo sapiens
gcaaccagatcattccgtcaccttcagccacatcagaacttgacaataaaacccacagtgagaatttgaaacaggcatgttatttgaaagcaattgagac

SEQ ID NO: 557403 - DNA, 90 bp, Homo sapiens
ggattctcgacctgctaacagaactggaccttttcggcattgaacctggccacatcccaggtaccgtgaacatccccttcacagacttcc

SEQ ID NO: 557404 - DNA, 74 bp, Homo sapiens
caggggctctgggagtggctgccagggagccccagactctggtaaatgctctgcttcctcctgcctggatactt

SEQ ID NO: 557405 - DNA, 74 bp, Homo sapiens
gttaaggattccaagtaactcttatttgggatgcccgggtagttaaagacatggcaactggaaaatccaaaggc

SEQ ID NO: 557406 - DNA, 100 bp, Homo sapiens
ataaagccagtatgatagcaatgatggcagaccggaacatgaacattttgcagtactgcccctcttccgacatgtggacgctctttgaaacatgtgacgt

SEQ ID NO: 557407 - DNA, 85 bp, Homo sapiens
taagggggagagtgacccagcctaccagcaataccaggatgccggagagaagtggatgggccctatacctccagccgtgaatgcc

SEQ ID NO: 557408 - DNA, 90 bp, Homo sapiens
tcccaggcatcatcacagttattgacaccgaaaccgttggagagggccagccatgctgtgacctacaagcaaactaaatagccaacattt

SEQ ID NO: 557409 - DNA, 76 bp, Homo sapiens
ctcggttttcttatgcttataagagtggaacaggagttcatccgtgagggctgccttcacaagctcaccaagaagg

SEQ ID NO: 557410 - DNA, 118 bp, Homo sapiens
gttcttggagttgctggtgttctatactggaagaggcatgccagaggtagagcagtgacctgaaaaaaatgtctggatttctagagggcttgagatgctcagaatgcattgactgggg

SEQ ID NO: 557411 - DNA, 100 bp, Homo sapiens
gctacacctcagcccggggctgcactgccaccctgggcaacttcgccagaccatcaacttaacttgtaaaactaccaactgttgctacacacaggcaaag

SEQ ID NO: 557412 - DNA, 75 bp, Homo sapiens
gccatcgttgctgccttcttcgtcaagcaattaccagctctggctgggtcgccacaacttgtttgacgacgaaaa

SEQ ID NO: 557413 - DNA, 75 bp, Homo sapiens
cttcgttgcttgcttgcctgtgcgcgcgtgcgcggacatggcctcaaacgaccctctttcccagctgcccgctcc

SEQ ID NO: 557414 - DNA, 80 bp, Homo sapiens
taggatatgtagatgagtttttgctacagaacatatctgaagagatggattaagaatgctttggattaaggattgtggag

SEQ ID NO: 557415 - DNA, 74 bp, Homo sapiens
aggcggtgacagagtggagccatggctagagtgtctccagaacgctatagctatggcacctccagctcttcaaa

SEQ ID NO: 557416 - DNA, 80 bp, Homo sapiens
cgcccagaggcgagccctggtggaggaagaggttctgccatcttgaaacccccattctgtttccagcccagaagaaatgc

SEQ ID NO: 557417 - DNA, 97 bp, Homo sapiens
gttgcgccaggcagccctgaaatcagctcgagacatgtgggctgattacatcctggagcaggccatagaggtgctgacccgctccagcctagaagtt

SEQ ID NO: 557418 - DNA, 100 bp, Homo sapiens
ggaaaccagtggccacagcatctttgtctagccccagtgcagatcagtcgcatcgaatacattcattcaaagaacttcatccaccgggatgtgaagccag

SEQ ID NO: 557419 - DNA, 75 bp, Homo sapiens
agacggcgaggcgcgctccctgcccggcagcgactcggagatcatgctttacgattatggaatatccagacggac

SEQ ID NO: 557420 - DNA, 100 bp, Homo sapiens
aacatgaaacagcatctcagacttctttcccagatgtttataatgagggcacacagacactggtgaagacatttgaagtatgtgatcttcctgttcgagc

SEQ ID NO: 557421 - DNA, 100 bp, Homo sapiens
cccccagccagggtcaccatcaaaatggaatgtaaccctagccaggtgaatggctcaaggaatctttctgacattgatcaagatggaaaacttacagcag

SEQ ID NO: 557422 - DNA, 112 bp, Homo sapiens
agcagatcaaaggataaacttgaccaggtttccagtgaaataaattctctctggcccaaaatccgggttccattaaaagttgtgaggactgctgaaaacaagttaagtaacc

SEQ ID NO: 557423 - DNA, 88 bp, Homo sapiens
gcagatggccaccttcgccatcaattacaaaatacagaaggtggtcatggcactaggagactacatgggcgcctcctgtcacgcctgt

SEQ ID NO: 557424 - DNA, 73 bp, Homo sapiens
atttacagaaagagtcaacagcagtggcaacaggttactaccggtactacaacaagtacatcaatgtgaagaa

SEQ ID NO: 557425 - DNA, 100 bp, Homo sapiens
ccactggtgtttggtgtacccatgtgactaatttgtccaaagagagatgggaacagctgctcagatttcaatggtggttgtactcacgagtgtgttcaag

SEQ ID NO: 557426 - DNA, 100 bp, Homo sapiens
cggcccacagtgggggtgtgcaaacccgagagaactggacaggactatgaagagctagaaaagcagctgaaagaagtctttaaggagcgaagcaccattc

SEQ ID NO: 557427 - DNA, 80 bp, Homo sapiens
ccatcccgtgaggactcaaagcaccccattcacagctcctgaaactctgatgagagccctggaacttttgaattacctgg

SEQ ID NO: 557428 - DNA, 75 bp, Homo sapiens
gcgaccgcgggtgcatccagtttctgcgcccagtattctaccttgtaaatactgttatttgtatatactgtaaat

SEQ ID NO: 557429 - DNA, 50 bp, Homo sapiens
gtcaccggtcgctctcaggaacagcagtgaatgagttcacggtgatcagg

SEQ ID NO: 557430 - DNA, 86 bp, Homo sapiens
gaacatgacgccgtcacccttcctgcgattctacttagcaatggctgccatccggaagaaactggtgattgttggtgatggagcct

SEQ ID NO: 557431 - DNA, 100 bp, Homo sapiens
cgttccgctcttagtgcgcggtgagttccccggcgctaagccgggagacaagatccgatctactgagagctgcgaggtggattcaccaatgaacttgaag

SEQ ID NO: 557432 - DNA, 88 bp, Homo sapiens
ctactggggccagggaaccctggtcaccgtctcctcagatgtggtggtacagtgggagctattctgacatgtccactggaagttgtaa

SEQ ID NO: 557433 - DNA, 95 bp, Homo sapiens
cgggaggacggagagaaggcggcgcgggaggtgaagttgctgctgttgggtcagactatgatgactggagaccgtctctggccagtttgcttcaa

SEQ ID NO: 557434 - DNA, 100 bp, Homo sapiens
gggaggcgctgcggaccggcggcccaggcacggagaggcggcgagaccgcaggaggctgaaccgtctgagcccagaagtgctgaggtgacgaggaagccc

SEQ ID NO: 557435 - DNA, 50 bp, Homo sapiens
ggttaaaacctgacacttttaacaggtctttgactttgaactgagcagcc

SEQ ID NO: 557436 - DNA, 92 bp, Homo sapiens
cttacccgagaacgtgcgggaagagaagatcatcgagcatttcaaacgctcaccatggatgatgatatcgccgcgctcgtcgtcgacaacgg

SEQ ID NO: 557437 - DNA, 100 bp, Homo sapiens
cttgttctcgagttttctctgccatgttgctattgcaggacggattgatcatggccttgccaggttggtgacagtatattgtgagcatggtcataaagct

SEQ ID NO: 557438 - DNA, 97 bp, Homo sapiens
cttatgagtggaacatggctagcaggaatgcttactgttgcgtggttcgttattaacagggtgttgaaagcagcaggggcctagaagacattaaacc

SEQ ID NO: 557439 - DNA, 50 bp, Homo sapiens
cagcctcctgcgtagctgggattacaggtttcatttagtggagaaattgg

SEQ ID NO: 557440 - DNA, 74 bp, Homo sapiens
ggagcgttgccgaatccttttggaggctgccaggataataagggtgacagagctgaatgaacctctctccaatg

SEQ ID NO: 557441 - DNA, 99 bp, Homo sapiens
ccggtggttgctgttgcttggcctggtgggcccagtcctcggtgcggcgcggccagaaagttggagtgactggtccccctgatccacaagtccgctgtc

SEQ ID NO: 557442 - DNA, 117 bp, Homo sapiens
actaaccctgctatcctagcagtgctggattcctctggcagaagttcctgctatcatcccaatggaaatgtctgagatcaatggcttttcaaaagcagcacaccaaactgtcaaagt

SEQ ID NO: 557443 - DNA, 100 bp, Homo sapiens
cgccgccttcacgaagctcggggagctgacgatgcagctgcatcccgtggccgactcttctcctgcgggggatgagtatttccgcatgaagctgcagtgg

SEQ ID NO: 557444 - DNA, 100 bp, Homo sapiens
taaaacatcgccccttctgcttcagtgtgaaaggccacgtgaagatgctgcggctggtcagacacattctatgtgaaaaacatggcaaaatcatggaagc

SEQ ID NO: 557445 - DNA, 74 bp, Homo sapiens
aatctcaggagagagcagccagagtggaatggaagttggatacactttgtgacttgtacgagacactgaccatt

SEQ ID NO: 557446 - DNA, 98 bp, Homo sapiens
ccgtggcggccgcggcgatgactcggacccaggtaccgcagactcgcccttaagcaccacccgttgaagtcaaatgagccgtcttcagcagagatttt

SEQ ID NO: 557447 - DNA, 75 bp, Homo sapiens
aggtggacgccatcgtcaacgccgacatgcgtcgggatgtccaggaaatttttcgcatgaccccccacgagaagc

SEQ ID NO: 557448 - DNA, 80 bp, Homo sapiens
ggagacgagtggtgggagaaccagccgactggagcaggcagcagcccagtgggaaagaagcctaaggaataaagtcatct

SEQ ID NO: 557449 - DNA, 99 bp, Homo sapiens
ggaaaaaccacaattttgtacagattacaagtgggagaagttgttactactatacctaactgaaactgttgaggagcccatggaggaagaagaagcagc

SEQ ID NO: 557450 - DNA, 75 bp, Homo sapiens
gccttcgctatctcatggacacaggtaccagaggtttgaaaaggcatttctcctagctgttgacgttggtgctcg

SEQ ID NO: 557451 - DNA, 100 bp, Homo sapiens
aggagcgcccacggagctggacccccagagccgcgcggcgccgcagcagattgtggatttcttaaagaagaagcatgattttgtagaccttattataaag

SEQ ID NO: 557452 - DNA, 100 bp, Homo sapiens
cccagaccctgaggaaggccatgaaagggctcgatcttagcaaagcaatgtctcaagatggtgcttctcagttccaagaagtcattcggcaagagctaga

SEQ ID NO: 557453 - DNA, 82 bp, Homo sapiens
aaagagcgtttggatcaggacggacgcttgacgaagttatacggaagcgtctcctcattgatggagatggtgctggagatga

SEQ ID NO: 557454 - DNA, 75 bp, Homo sapiens
ctcctccttggtcgccgcgtccttggctggcgtagtctcactctgtccttcaggctgtgagtgcagtctcctgat

SEQ ID NO: 557455 - DNA, 100 bp, Homo sapiens
ggacatcgacatccaggcgaactcggcctatcgctaccctccgaagtccgaactgtcaagtaatccacctctggctaccatccttattcctcctcatgct

SEQ ID NO: 557456 - DNA, 75 bp, Homo sapiens
gacgtggatttggggatggctataatgggtatggaggaggacctggaggggctgcttgctctcggtgactacatg

SEQ ID NO: 557457 - DNA, 90 bp, Homo sapiens
cagcagttaggaagttcttcttctttttagatcctttaagaacagagtctcttctccttcaagtccgtggttctggtggagcccgactga

SEQ ID NO: 557458 - DNA, 82 bp, Homo sapiens
cagggtctggagagggggagccaggggaggacgcaggatccctgctgccttggtgatcccgggctgacagccagagagcaca

SEQ ID NO: 557459 - DNA, 82 bp, Homo sapiens
tagctttccagttcttcttacccagggcttagaaagtaacgattttgaaatgctaaatgtagttaacctgcagtacagtgaa

SEQ ID NO: 557460 - DNA, 95 bp, Homo sapiens
ggacaagcagaagaagaaggtgtactcctttctattttaaagagccaagcctcagagataagaagactgttagaatgccctcggtaacacagagg

SEQ ID NO: 557461 - DNA, 48 bp, Homo sapiens
tgggacgagattctgaactcattatgcctgaggaagtgcaccatggag

SEQ ID NO: 557462 - DNA, 104 bp, Homo sapiens
agaaaatcaatctaaacatttgtgggaagttgtattcatcaataatgaaatgctgactaaggaacaagatgatggtggtgctaccccagtacaggatgaacggg

SEQ ID NO: 557463 - DNA, 96 bp, Homo sapiens
cgaagagctgccgcgacgcccggcccgcagggcaggtcgccactgggacactgtgaaccaggagtgagtcggagctgccgcgctgcccaggccatg

SEQ ID NO: 557464 - DNA, 49 bp, Homo sapiens
aaccttcgatctcctgacgatgccggtggtggtgtgcacattgagcccc

SEQ ID NO: 557465 - DNA, 101 bp, Homo sapiens
ccggacagcacatacagcgagagcttcaaggacgcagccacagagatctgatcatagagaggtggacatatgattgaagtcaggttgaacagtcattcccc

SEQ ID NO: 557466 - DNA, 51 bp, Homo sapiens
ctcaaaagtggggggcaggaaagtttgctgaggctaaacactatcatgcca

SEQ ID NO: 557467 - DNA, 87 bp, Homo sapiens
gcactgccgaagaatctgtatctcaaaatgtggaagggacccaggctgattcagaaattcatgccgaagtccaacttaagaattatg

SEQ ID NO: 557468 - DNA, 98 bp, Homo sapiens
gccccgggcccaaagcgcgccggctcccgctcgggcggccgcggacatgtgcaggatgtccttcaagggccagttctgtgactattgcaattctgaag

SEQ ID NO: 557469 - DNA, 80 bp, Homo sapiens
gcggaccggcgtccccggcgcgaagaggctggactcggattcgttgcctgagaattcagaaggagctggcggacatcact

SEQ ID NO: 557470 - DNA, 82 bp, Homo sapiens
tcggtattccccttcctgctagtcctggtggatctgcagtacgaagatgatatcatcaagttgaatcgaaaggaagggaaga

SEQ ID NO: 557471 - DNA, 100 bp, Homo sapiens
ctttctcgctgatcgcctaacttctactgacgaagcttggaagttgcagaagctgaacatctccttcccagccactggctgccagaaactcattgaagtg

SEQ ID NO: 557472 - DNA, 74 bp, Homo sapiens
ctgcacatacatgtcttcagaatcaaggtaactcaactggacccaaataaatcattattggaggtaaagttgtt

SEQ ID NO: 557473 - DNA, 100 bp, Homo sapiens
ccccaagctccgagaagaccggcggccaatcacagtccactttggacaggttagtagcaaagatgaagattttcttgacctttctgttgatgtggagcag

SEQ ID NO: 557474 - DNA, 90 bp, Homo sapiens
ggataaggaacatctcttcccagcggctcaggccccatctccttggctaacccctgatccagcctctgttcaggtacggctgctgtggga

SEQ ID NO: 557475 - DNA, 82 bp, Homo sapiens
catcgctcagacaccatggggaaggtgaaggtcggagtcaacggggagtaactattcccagtcagaggcgctatgtgtatta

SEQ ID NO: 557476 - DNA, 100 bp, Homo sapiens
cgccatctcacgcctgctggaggtgtctgacttccagcaactgctggcctgtgccagggtgcaagctgagcactggagtggagttttcctgtggagagga

SEQ ID NO: 557477 - DNA, 116 bp, Homo sapiens
tcaacaatgatgacaacttctgcaaggcggtttctagtgcaaatcccctgctcagggtcttcatccagaaacgaggttcgatacaagaggctgttttcctagcgtggcttgctgcc

SEQ ID NO: 557478 - DNA, 100 bp, Homo sapiens
ggcggcggcggcggccggagcttctctcagccgaaaatgacagatggcgagacctggacaggaaatgccctcttcagattgaccaaccgagcaccagcat

SEQ ID NO: 557479 - DNA, 138 bp, Homo sapiens
atcatggcggatggccccaggtgtaagcgcagaaagcaggcgaacccgcggcgcaataacgaagaaagccagcttccctctacaagtgctctgggaaaaggagagcaggttgaagtaacatttcctgtactgagactt

SEQ ID NO: 557480 - DNA, 80 bp, Homo sapiens
gtttgtggcagacagacttatgctggaactgggttttagcaagggtgaagttgaacaaattgctatgatgaaaccaaaag

SEQ ID NO: 557481 - DNA, 82 bp, Homo sapiens
ggagatcccaggcggtgacagagtggagccatggctagaggccatcagcatcagcaaagccatcaacacccaggaggccccc

SEQ ID NO: 557482 - DNA, 82 bp, Homo sapiens
ttgcttgcttgcctgtgcgcgcgtgcgcggacatggcctcaaacggtgtacccacccagctcaggtgaggactacggcaggg

SEQ ID NO: 557483 - DNA, 90 bp, Homo sapiens
cctttcctcaggagtcatttctgttccgcacaggcctgctgaactgggtgctttatatagggcaagctgtgcattgagcggagactctcg

SEQ ID NO: 557484 - DNA, 97 bp, Homo sapiens
agttcttgcagatcaacagcctggggaaactgccgacgctcaaggatggtgatttcatcttgaccgaaaggcttcgaacctaatgaacaatccccag

SEQ ID NO: 557485 - DNA, 75 bp, Homo sapiens
aggaaccaaaatggctttttggcacaatggaaaaatgtatcggcaagcagtgtaaacggaggacttggggaaaaa

SEQ ID NO: 557486 - DNA, 122 bp, Homo sapiens
tcccacaaaagctaattgagtacacgttcctgttgagtacacgttcctgttgtccgggttgactctgccaccatcccccggcaggacgaagttccccagcagacagtggccccacagcaaca

SEQ ID NO: 557487 - DNA, 78 bp, Homo sapiens
cctatcctccttcaggaccaacgtgtgaagatgccttaagaaaaaataagagcttaattgggccggatcaaaaggagt

SEQ ID NO: 557488 - DNA, 98 bp, Homo sapiens
ttctaagatgatcgcccggctgggcaaggagatcaacaacccagagtccgtgtattactgggcccagaaggtggtgaaactgaaacagatcgaacaca

SEQ ID NO: 557489 - DNA, 100 bp, Homo sapiens
gccatcagcagtgccatccagcttctagaagacccattacagaggacacgccgctttttggatgcctcctatgcctggcgggagtcttgtctgagctggc

SEQ ID NO: 557490 - DNA, 75 bp, Homo sapiens
ccttgcgcctgcctctccaggatgtctacaaaattggtgctctgaccactgttgaaggattgatcacccgtgcta

SEQ ID NO: 557491 - DNA, 100 bp, Homo sapiens
gactggagtccaagttcaaacaggtggaggagagtcataagcaacacctggccaggcagtttaagttgtgtgacttcattgagacacattacctgaatga

SEQ ID NO: 557492 - DNA, 101 bp, Homo sapiens
cgtagggtgaacaacccgttcttgcctcaggccagtcgcctccaggccaagagggatccttcacccgtgtctggacggaaccactgcactccaggttcctt

SEQ ID NO: 557493 - DNA, 90 bp, Homo sapiens
gtgaacctggcgatttgcttgcaggttgaaatcacaaagattagacacctttttagataggtgttcttcagcaccactgacaacacggtt

SEQ ID NO: 557494 - DNA, 119 bp, Homo sapiens
cgcggacttcatcatccctgtggagattgatggggtggtccaccaggcacgtctgagaatggtggatgtggtggagaaagaagatgtgaatgaagccatcaggctaatggagatgtcaa

SEQ ID NO: 557495 - DNA, 90 bp, Homo sapiens
tacccttgcagatctattccggccacccattgatttgatgcataaaggcagctttgaaacatcttcgagtgcttcgactgaccatgatcc

SEQ ID NO: 557496 - DNA, 73 bp, Homo sapiens
gcctggtcctggccccggagctgttgctggacccctggcaggaatcaaaggcatgggaggttgatacctgccg

SEQ ID NO: 557497 - DNA, 100 bp, Homo sapiens
tcacagcgggactcttggcctgtccctcacatccgatgcaccctttttgtcagattatcaggatgaggctcttgaatgtcgtctctcaactagccaaacg

SEQ ID NO: 557498 - DNA, 101 bp, Homo sapiens
gaacagaaggcgatcaaggccaagtatccgccagtcaataggaagtacgagtgtgaaacaaaatccagtctcatagcagaggagaatataatgtttacagc

SEQ ID NO: 557499 - DNA, 100 bp, Homo sapiens
ctcgagaacatcgtggccaactcgctgctgctgaaagcgcgtcaagcctacaacacagcagtcccctcaggatgagcaggaaaagctcttggatgaagcc

SEQ ID NO: 557500 - DNA, 89 bp, Homo sapiens
agagcttttaggcatacaagtaccctggctgaggcctttgaaattgttgttcgccatgccaagaactacaccaatgccatgttcaagaa

SEQ ID NO: 557501 - DNA, 139 bp, Homo sapiens
ggcactgcctggctgcgagcacatgatggcgatacgggagctcaaagtgtgccttctcgggacaatgcagatcttcgtgaagactctgactggtaagaccatcaccctcgaggttgagcccagtgacaccatcgagaat

SEQ ID NO: 557502 - DNA, 98 bp, Homo sapiens
atctctaaatcccatcctctttcgaggtgttggcccagatggctacctgtatgagcgtgaggccatcctggagtacattctgcaccagaagaaggaga

SEQ ID NO: 557503 - DNA, 75 bp, Homo sapiens
atttcagagcaacctctttcaggctttaatagtgtttacaggcattggagtttttacatgctaatcaagtgatcc

SEQ ID NO: 557504 - DNA, 98 bp, Homo sapiens
cttgaagacacgcacttatcattcagtggtgcctacaccaactaatgttacaattgaatcctataacatgaaccctatcgtatattgggagtaccaga

SEQ ID NO: 557505 - DNA, 100 bp, Homo sapiens
ttttcatgacctttctcatctgactcgtgatctgcccatcttgttactccctagcagtgtggtaaggtaaataccagctgtcccctacagtgaatatgcc

SEQ ID NO: 557506 - DNA, 75 bp, Homo sapiens
caacacgtgcccctacgtgcacaacatcacccgcaaggtgctggagaatctggtaaaagcaccattgtgaagcag

SEQ ID NO: 557507 - DNA, 75 bp, Homo sapiens
tgtacagatgaagggtttattccagcctgcttactggcagcagaacttgctgaattcactgccaagattgcactt

SEQ ID NO: 557508 - DNA, 75 bp, Homo sapiens
ggcggtggggctgcggcgcctgggactgcaccgcaccgagggcgagctccagatacattggtgaagtaggagaca

SEQ ID NO: 557509 - DNA, 90 bp, Homo sapiens
atccgccagtcaataggaagtacgagtgaaatgcttccagactgcacacttttacttagaggacagtacatcccctagagttatatccac

SEQ ID NO: 557510 - DNA, 83 bp, Homo sapiens
gttcgcgtctctctgctgcggcgcggggaccgctgtgctctcggttgtgaccgagattcccgacgagagagactgaggggaag

SEQ ID NO: 557511 - DNA, 83 bp, Homo sapiens
gccagctgcacactcttggggctctacctctttttcaaagtaaaataccatgaagattttgaaaaaacaaaggggagaggctt

SEQ ID NO: 557512 - DNA, 76 bp, Homo sapiens
tctggccaatgtcgttcgccaagtacaggaagaggatcacctagcccgggtagaagaggcaatcacccgtatgctt

SEQ ID NO: 557513 - DNA, 100 bp, Homo sapiens
aggaatgaccctagccagactcagggatcaaagagcaaacagattcagtggcctgcattgggttaaagcacgaattgggagctctcagcgacatcaccag

SEQ ID NO: 557514 - DNA, 100 bp, Homo sapiens
ggaaatggagggcatcttcaaccacaaaggtatctctgatgaatatataacacctatgtttagtttttataaaagtattggggaactgaaaatgactcaa

SEQ ID NO: 557515 - DNA, 75 bp, Homo sapiens
tggctggggtcatgggagcctacttggggagccccatctacatggccagaggcattgatgtgcagcaggtttctt

SEQ ID NO: 557516 - DNA, 90 bp, Homo sapiens
acatgaccagcttagcttctgtcctaaagggagtggagcaactgctgtagtccaagcagcttattgtgcccctaaaaaggagaaagtggc

SEQ ID NO: 557517 - DNA, 100 bp, Homo sapiens
cctccatgcgcagtcatgagtcgcttcaagtttatcgtttaagcggctgcagggcaagaggaaccgagggagagaagaaatcaactttgtggagatcaaa

SEQ ID NO: 557518 - DNA, 73 bp, Homo sapiens
ccaaccatgggaaaggagagtggatgggactcaggtggaacaaaccaaggagcacgcactctccaaggagcga

SEQ ID NO: 557519 - DNA, 75 bp, Homo sapiens
gctgttccaatcgctcctgtttgtcttctgctttggcccaggttagctccattcagaaccaaatgcagtccaagg

SEQ ID NO: 557520 - DNA, 100 bp, Homo sapiens
caagagattatcaaagtgacacctcttcaacaaatgcttgcctcatgtactggagctatactgacatcagtaatagatggagtttcactcttgttgccca

SEQ ID NO: 557521 - DNA, 82 bp, Homo sapiens
ggaaggtcttggagcgaagagctcggaccaagcgctcaggtgggtggaattaaagacaaagtgctggcggcacacagagcgg

SEQ ID NO: 557522 - DNA, 98 bp, Homo sapiens
ggatgatgagaggccccctgaggagtatgaccagccctgggagtggaagaaggagcggatttccaaagcctttgcagatggagtctcactctgtcatc

SEQ ID NO: 557523 - DNA, 101 bp, Homo sapiens
ctgaataacaaggaagcaggaatgtatcattgcgtgtgctgcgacagtccactcttcagtatccggctgctttgatgaacctgggagccattctgcacctc

SEQ ID NO: 557524 - DNA, 74 bp, Homo sapiens
aagcctgcacagccgcggcggcagcagcagtgagagctgccgcagcgggaaccgcaagagcttggtggtaggaa

SEQ ID NO: 557525 - DNA, 100 bp, Homo sapiens
gtctctatgaatgtgactaccctggttacctcatatcacctggctgcagtggaagaaagaaagatcaagtccctggtagctctcttggttgagacacaaa

SEQ ID NO: 557526 - DNA, 100 bp, Homo sapiens
ccatcggaggatccgagtgtgaatttcctgaagaacgttggggagagtgtggcagctgcccttagccctctgggaattctatgagcatgccaaggctctg

SEQ ID NO: 557527 - DNA, 92 bp, Homo sapiens
gagtcatttccttcgtacccacagtgcttcatgagagacaatgcagatcttcgtgaagactctgactggtaagaccatcaccctcgaggttg

SEQ ID NO: 557528 - DNA, 101 bp, Homo sapiens
caaggaagccacgtgcagacatctacaaccttcgatctcctgacgacaggcattttggagatcaaagatgggtagaaaagatgctgctactataaaacttc

SEQ ID NO: 557529 - DNA, 100 bp, Homo sapiens
cgagctgttccgccggagcccccggcccaagggcgacttctccagccgggcccgcgaagtgaaggtagaagatagcaccatgccgattcgtcgaactgtg

SEQ ID NO: 557530 - DNA, 83 bp, Homo sapiens
ccctaatggaggtctccagtttagctggatgaaaaagaaagtcggcgtctgttccaacagatcctttctggtgtggattattg

SEQ ID NO: 557531 - DNA, 95 bp, Homo sapiens
aaccgcagcgtgtcagaccagttctatcgctacaagatgccccgtctgattgccaagaatagcctaacatggcagaccagagacagcgctcactg

SEQ ID NO: 557532 - DNA, 75 bp, Homo sapiens
gatctttccggatcaatccagatggcagccagtcagtggtggaggttcttcccactagtaaaagcagccaaatga

SEQ ID NO: 557533 - DNA, 83 bp, Homo sapiens
aaagttgtcatccgtggagcaggaaaccagattcagtttaaggagaaagtgctgtggaccgctatcaccctctttatcttctt

SEQ ID NO: 557534 - DNA, 75 bp, Homo sapiens
ctttgttggtaccgacccatctataaggcctttagggattaatgaaaatcaagttccatcctcagacaagaggta

SEQ ID NO: 557535 - DNA, 100 bp, Homo sapiens
ggcagaaggcctctctcctgatacagcaggcgctcaccatgttccctggagggtgttccaatgaattcactcaggtttctctttgagggtcagagaattg

SEQ ID NO: 557536 - DNA, 72 bp, Homo sapiens
tcaaggagagagccacagcccccttctttgtatttcagaggatggagatgaagatgaggaagctgagtcagc

SEQ ID NO: 557537 - DNA, 101 bp, Homo sapiens
agcccagccaagcccagccaagccccgccgatcgcgggcaccggagccagccccgcagcgggtttttcgttggaatatacgttgcacatttatggcgattc

SEQ ID NO: 557538 - DNA, 75 bp, Homo sapiens
ttccaggatttcctccacctgtacctccagtttctattgctccaccccctccccctatgcctcagttgactccac

SEQ ID NO: 557539 - DNA, 100 bp, Homo sapiens
gctttcccatgagccacaaaagaatgcccgaatctgggacatctgtcatcaaggggcaggctgctcaggatgcaaggacctgaaggagaagaaggagaag

SEQ ID NO: 557540 - DNA, 100 bp, Homo sapiens
ggattccaagtaactcttatttgaggccagtaagcttgtcatgtcctatgtggcagctgtttgtggaaaaggagcagaagttaatcaagttaaagaacag

SEQ ID NO: 557541 - DNA, 75 bp, Homo sapiens
ctccacgcccctgcccgaagcctgacccgactgcctctctcagtgagctccataatgggagaagtaaagaacaaa

SEQ ID NO: 557542 - DNA, 100 bp, Homo sapiens
gcaacttcaagtccaggaagcccaagtccatcttcaaagcggagagcgggaggagccacggagaaagtcagaatgtacatggcaagtcaaagcaaacgat

SEQ ID NO: 557543 - DNA, 98 bp, Homo sapiens
cgggctgtggggcctccgcgccgcggccgttagtcatgtcggggagagacaaaggcagcgctgccctcgggggagtattggccctggcggaacgcagc

SEQ ID NO: 557544 - DNA, 100 bp, Homo sapiens
tggggttgtgatggcccaggttcttcaaaagatagcagagaggagccttcaggggaagtagaggtggccgaggttggggcacacgaggaaatcgtagtcg

SEQ ID NO: 557545 - DNA, 100 bp, Homo sapiens
ctcagtgcgaagaagctgcagccgcacctggccaagggagtctactcttcatcttgtgttgagacttcgtggtggtgctaagaaaaggaagaagaagtct

SEQ ID NO: 557546 - DNA, 100 bp, Homo sapiens
tccccgagatgcagctgatgcagtccgagagctagatggaaggaaatgggtcctgatgaatatgaagagatggaagaagaggaggaggaggaagaggagg

SEQ ID NO: 557547 - DNA, 100 bp, Homo sapiens
tttgtgtggagcacacattgaatgggccaaggaaaaatcgagcagaaagaatgtctttcagctggcatactgtgtagtgcagtttttagaaaaggacagc

SEQ ID NO: 557548 - DNA, 50 bp, Homo sapiens
gcttatcgtggtcgtgcatgcctgcagctttcaagatgttagaaagttca

SEQ ID NO: 557549 - DNA, 96 bp, Homo sapiens
gtcattgtaagaatttcacatacattatatgacctagacaagccacagttgagtcctgggtgaaagacaagatgccaaagaaatctggtcgctggt

SEQ ID NO: 557550 - DNA, 50 bp, Homo sapiens
cccctggaggttctggacctgctggtccaaatggtccccccggtcctgct

SEQ ID NO: 557551 - DNA, 90 bp, Homo sapiens
tgcactgctccgggtgtcggctccggcgggacgggcggttctgcgtacccctctcctttccacctggatgtttgaggttgtgtagatgtg

SEQ ID NO: 557552 - DNA, 98 bp, Homo sapiens
tgccactctccaacttctaaacctcccaaacctgatcagcccctaaagagtgcctggtgaagaatgtgatgggatcactagcatgtctgcggagagcg

SEQ ID NO: 557553 - DNA, 100 bp, Homo sapiens
caacgtgtaatcagaaggcacagattagaggaaggaagagacaaggcgcctctgtcgaagagccttctgctggtccccagtgccctctccctcctgctcg

SEQ ID NO: 557554 - DNA, 134 bp, Homo sapiens
attggaggtgtcagtgttaaaggaacctctacaacgaaggtgaagccacggaagataagatgttcgagcctgtgagctgcaccttcacgtacctgctgggtgacagagagtcccgggaggccgttctgatcgac

SEQ ID NO: 557555 - DNA, 90 bp, Homo sapiens
acctctttgtacatcttctgcaattactcgatgctgggctcttgcactgtttggtggaaatggtgagacaggatttgagcaaaattctac

SEQ ID NO: 557556 - DNA, 48 bp, Homo sapiens
gaaaccttcacatcttggtcaagagactaaggtgtcagtatgttcttc

SEQ ID NO: 557557 - DNA, 82 bp, Homo sapiens
tgagtcgcggtgggtcctcgcttgcagttcagcgaccacgatcagtcgcatcgaatacattcattcaaagaacttcatccac

SEQ ID NO: 557558 - DNA, 76 bp, Homo sapiens
atgagatggtggatgaacccacagggtggttctcttcccaaagtggaagccaaattcatcaattatgtgaagaatt

SEQ ID NO: 557559 - DNA, 80 bp, Homo sapiens
atgcagaaagagggggccggggagaaggagatgccttcaattaagttgcagagttctgatggagagatatttgaagttga

SEQ ID NO: 557560 - DNA, 50 bp, Homo sapiens
ctgctgtgcgtctgaagtgatggcggagagtctcattctgttgcccaggc

SEQ ID NO: 557561 - DNA, 75 bp, Homo sapiens
gatccaaagagcccttcgagcaccacgacccggcactacgtgggctcagcagctgcttttgcagggacaccagag

SEQ ID NO: 557562 - DNA, 101 bp, Homo sapiens
tccggccgccatcgcgacggccaaaaggagcggcgcggtcttcgtggtgttcgtggcaggacttgtcttacaaggaccggcactggcatgaagcctgtttc

SEQ ID NO: 557563 - DNA, 102 bp, Homo sapiens
gcggccagcagaaggagaacacgctgcttcacctcttcgccggcgggatgaagccaacgcacacgatggtcaactgctggttctgcaaccaggatacgctgg

SEQ ID NO: 557564 - DNA, 80 bp, Homo sapiens
caacaccacaataatccacagccaagactatctgatcaacgtgatggatgccctgggcctgcagccgtcccgcaccctcc

SEQ ID NO: 557565 - DNA, 74 bp, Homo sapiens
agctgtgatcccccatacctggcctgccgtctcctggctgctgcttgcatatgaacagattatggcctttgcaa

SEQ ID NO: 557566 - DNA, 101 bp, Homo sapiens
cacaaaagcacacaaagacctcctcctccacaggggagacagaggaacatcatttacagcgagcaatttcagcacagcaagtgtttagagaaaaaaaagag

SEQ ID NO: 557567 - DNA, 74 bp, Homo sapiens
aactccaaatattagagcttagagaaaaccagttaaaaatgttgcctaagcacagtaaccttggtgcacgaccg

SEQ ID NO: 557568 - DNA, 74 bp, Homo sapiens
aggtgaccggcgcgcgggagcgctacggccccaacgggctgcccttgagatggagttgctgcctctttggctct

SEQ ID NO: 557569 - DNA, 75 bp, Homo sapiens
tccaggcaacaaatatgaatgacttcaaacgaggagggacattgcttgggcctccagactctgtggttgatgtgg

SEQ ID NO: 557570 - DNA, 98 bp, Homo sapiens
agggccgagagccgcggggagaaggccatcacccaggtcagcaagggcacctgcgagcaaggtcctttcccataacctgtgcacggtgctgaaggttc

SEQ ID NO: 557571 - DNA, 75 bp, Homo sapiens
ctttgtggtgcctcattcccataacgacccagcttccagctgatcttaccaagatgcatctcacagaaaaccctc

SEQ ID NO: 557572 - DNA, 98 bp, Homo sapiens
accaataaggacaaaatggaatgtgaagagcaaaaagtctcagatgagctcatgagtgaaagtttagattttgaagaatgtgctcacaaattgctgaa

SEQ ID NO: 557573 - DNA, 74 bp, Homo sapiens
tgaccagcggcggggatgctcaaggattttttatcaagcagaaatgcatcgaacaacgagaatcaagatcactg

SEQ ID NO: 557574 - DNA, 100 bp, Homo sapiens
ccggggctgtgaaccctggcgaccactgcttctccgtgggcagcattggcgaccagcgcttcacggctgctttgtaccgcctcagtggagactggaatcc

SEQ ID NO: 557575 - DNA, 102 bp, Homo sapiens
ccaagttccggcacaccgaggctcggccgccccgccgcgaggacggggaggtttactgcatcgacgcgcggttctacgggaacgtcagccggttcatcaacc

SEQ ID NO: 557576 - DNA, 75 bp, Homo sapiens
gcacttcattggccacctacagaaacaaaatgtcaacaaattgatggaaggcagacggtaacaagtactccttgc

SEQ ID NO: 557577 - DNA, 74 bp, Homo sapiens
gaagatcaaagatgccaagaaaccctgtcacgagaagagaatgccttctagatgcaaaatcacctccaaaccag

SEQ ID NO: 557578 - DNA, 75 bp, Homo sapiens
tttattcagaagcaaagtcttttacagtggagttagttacaaattcccaggtcaaaagaaattatgaattataag

SEQ ID NO: 557579 - DNA, 82 bp, Homo sapiens
cagtggagccaccagcagcgggtgggcgacctcttccagaagctggtcaaaatgcagatcttcgtgaaaacccttaccggca

SEQ ID NO: 557580 - DNA, 100 bp, Homo sapiens
ctggtgggcatagtggctgccctgctgggggtggcactgaatcaacaagacaagcaactcaattgattaatgctttgatcaaggatccagacaaagaaat

SEQ ID NO: 557581 - DNA, 98 bp, Homo sapiens
gagaagcggcgctccaccggcgtggtcaacatccctgccgcagagagctgtaactgaagttcgtgaagtcaccagaaaatcagtccctcgtaattcct

SEQ ID NO: 557582 - DNA, 83 bp, Homo sapiens
gcgttttgcaatgcagatgtaggtattagaaaactactcggatgctccaatgacaccaaaacagattctgcaggtcatagagg

SEQ ID NO: 557583 - DNA, 100 bp, Homo sapiens
caaggagctcttacagatggacctgtacgcgctgctaggcattgaggagaaggcagcggacaaagaggagccaaaaacctgtatatcatctccgtgaagg

SEQ ID NO: 557584 - DNA, 90 bp, Homo sapiens
gggaaaagggaggagcgctccggtggtctggcgcgctgggctcgctaggtggaatatgtgatcaagtgtgacatgtcagctctgcagaag

SEQ ID NO: 557585 - DNA, 88 bp, Homo sapiens
cggtttccccagcagtagcctctgcgaccaggtgcggcttcagcgtttagtgggctacagatggcatggcatctaaaaccttacaatg

SEQ ID NO: 557586 - DNA, 82 bp, Homo sapiens
aggcggaggcgtcgcgggagcctttggggcaccacagagatgcgggtatcatgatattagctggtttgacatcaagtcattt

SEQ ID NO: 557587 - DNA, 83 bp, Homo sapiens
ctctgcagtataaactaggagacaagatccatggattcaccgtaaaccagcaattctgtggtgttcttggtcacacatttatg

SEQ ID NO: 557588 - DNA, 100 bp, Homo sapiens
ttgaggccacagttaaagctgcactgggaagacttcgatgtgttcacaaagggggagaacgtcagtccacgggggccgaaggccagagaccaggatttgg

SEQ ID NO: 557589 - DNA, 90 bp, Homo sapiens
cttcactccagtgcctccgacgcctcctgatgaggctgacccgcggctgattgagtccctctcccagatgctgtccatgggcttctctga

SEQ ID NO: 557590 - DNA, 75 bp, Homo sapiens
atttacgcggatgtcggcgaagagttcaaccagattcttggtgccaccattgagaactccaggattgtcctgcag

SEQ ID NO: 557591 - DNA, 129 bp, Homo sapiens
gttcatatatccaatgccgaacctaagcacaatagcaatagacagttagaaagaagtggaagatttggtgaggccagtaatagtagccatgagtctcgtattggtctagctgaggggttggaatccgag

SEQ ID NO: 557592 - DNA, 50 bp, Homo sapiens
ccagaagaaaacctgaatctctgagttacagaatgtctgaaggggacagt

SEQ ID NO: 557593 - DNA, 82 bp, Homo sapiens
aacttacccgagaacgtgcgggaagagaagatcatcgagcatttcaaacggcggatgttcccccccttcaaggtgcgagtca

SEQ ID NO: 557594 - DNA, 100 bp, Homo sapiens
atgtcttcagaggaaggacaaatgctgcagagatccgtgctcagctcacagagcagatgaaatgcctggaccagcagtgtgagcttcgggtgcaactgtt

SEQ ID NO: 557595 - DNA, 100 bp, Homo sapiens
aatgtacacgataattaaagagtaaagttgtgctcaacgaggactgattacggtgagcagcaacctcagctacgtcatcgagcccctccctgacagcaag

SEQ ID NO: 557596 - DNA, 85 bp, Homo sapiens
catctttgagaccaagtttctctctcagatcgagagctgtcttgtcgacggtctcactgatgcctcttctgcattcaaagttcct

SEQ ID NO: 557597 - DNA, 60 bp, Homo sapiens
gctgcgcacggactgctggagatggtggagtccgtcagtacatgtcccagagcaagcaca

SEQ ID NO: 557598 - DNA, 100 bp, Homo sapiens
ctccgccggctactgccgcttcagttctcccggtgtggccacgagtcggggatttgtcttggctgttactatgacacgggaagcaattgatgaatttcgg

SEQ ID NO: 557599 - DNA, 100 bp, Homo sapiens
cccgcgtgtgccctaagcacacctggagcaacaacctggcggtgctcgagtgcctgcaggatgtgagggaggtagaagatgacagattattgaggttgtc

SEQ ID NO: 557600 - DNA, 60 bp, Homo sapiens
tcccgattggagacaggaccaaagaaaactttagaaactgttcctttggagaggaaaaag

SEQ ID NO: 557601 - DNA, 74 bp, Homo sapiens
acgggctttctgctgccgcccgcaagcagaggttcaaggctgtgtctgccaagagcaaggaagacctggtgtcc

SEQ ID NO: 557602 - DNA, 98 bp, Homo sapiens
aattccgcgggcggtgtagaggcggcggacgggccggagggaggatgttaaagccccgcggcttttaaggataccggaaaaacacccgtggagccgga

SEQ ID NO: 557603 - DNA, 75 bp, Homo sapiens
aaagaatacattcctgattacctgccacccattgtgtcttctcaagaaggctgttcctgattcgatctgcttgca

SEQ ID NO: 557604 - DNA, 75 bp, Homo sapiens
gccctggagcagctgcagtcccacatcgaaggctgggaggcagaggtggaggagacactgaagcgactgcagagc

SEQ ID NO: 557605 - DNA, 101 bp, Homo sapiens
acctggtggaaaaggttgatctcatagacaagtttgtacatccaaacatccagagctgctgttggcggattgtacccacggggagatgattcctcatgaag

SEQ ID NO: 557606 - DNA, 107 bp, Homo sapiens
catgccgctcctaagcctgcacagccgcggcggcagcagcagtgagagccctcccaggcccaatacttcaaagcatcctacctctgctcaatatatattacttggag

SEQ ID NO: 557607 - DNA, 83 bp, Homo sapiens
gtcctggagcacttccacaagtatatggggattccgcagatccggcagctttccgaaaggcacagaatcaaaagtttctgtgg

SEQ ID NO: 557608 - DNA, 51 bp, Homo sapiens
tcttcttcgagtatttgtagaaggaaatgatcctagataattgatagatcc

SEQ ID NO: 557609 - DNA, 75 bp, Homo sapiens
tgtctccagaaaaagagtttaaaataaaagaagatttggatcaagtacaggaagagagaatggattctgcaagac

SEQ ID NO: 557610 - DNA, 100 bp, Homo sapiens
ggtgggtttatctcaaggcctgagtagccggtaacaaacgagggttcccgggattggaccgacgcagccatggagtgttcagcctgggtgttcctgtaga

SEQ ID NO: 557611 - DNA, 75 bp, Homo sapiens
gcaccgagtccagcccaggaaaatggagaggagcaagagcagctctacctgaggtcaggtgtggtgtcctctgcc

SEQ ID NO: 557612 - DNA, 82 bp, Homo sapiens
cagtgagcaaggcatcaacgagtttctcagagatgggcagtagcgaaccccttcccatcgcagatggtgacaggaggaggaa

SEQ ID NO: 557613 - DNA, 100 bp, Homo sapiens
ataccatcatctctggcaccttccaccagtggagagagggcaccaccaaaagtgaggtcttctacccaggagctgctgctcaagaggtcatcaaaataat

SEQ ID NO: 557614 - DNA, 83 bp, Homo sapiens
cggggactcaggagtgcccgcgccctgagcgctcagctccagaggcggaactgtggctgcaccatctgtcttcatcttcccgc

SEQ ID NO: 557615 - DNA, 100 bp, Homo sapiens
aaagaatagagttgagcctgtgggacacttcggctcaccatggatgatgatatcgccgcgctcgtcgtcgacaacggctccggcatgtgcaaggccggct

SEQ ID NO: 557616 - DNA, 100 bp, Homo sapiens
cacagggataggctaaggagtaaggacgagctcagccaagcagaaaagaatgatatggaacctagcaaagctgttccactgaatgcatctaagcaagatg

SEQ ID NO: 557617 - DNA, 75 bp, Homo sapiens
ggacagccgcccctggtgcacacaccctcgtattctcctgcccttccccagatgtgtgcaacagcaccgatcttc

SEQ ID NO: 557618 - DNA, 95 bp, Homo sapiens
cagatttgatgctgcctggactggtgatgccccctgctggtctgcctcagcctgagaatctcttatacacctccaaaaggcccaacgccatcctg

SEQ ID NO: 557619 - DNA, 100 bp, Homo sapiens
gcttggagcacttcctattccactggattgggaaagaccatggcaggtatgtgaaacaagaagttctgggtcctttcatcataagggagaagcttcagaa

SEQ ID NO: 557620 - DNA, 74 bp, Homo sapiens
ccgtccgaggtaattgtctgccacgagtgcacattctgaaaacagattgagatggccatcctgcggttccctta

SEQ ID NO: 557621 - DNA, 75 bp, Homo sapiens
cagattcgcagtggtcgcttcttctccttggatggccgagcctcgatttaacaacccctacttctggccccctcc

SEQ ID NO: 557622 - DNA, 74 bp, Homo sapiens
gagcggcgagtttccgatttaaagctgagctgcgaggaaaatggcggcgggagcctttctgagaaaagtctaca

SEQ ID NO: 557623 - DNA, 75 bp, Homo sapiens
catcagattttgcattggatattcgcatgcctggggttacacctaaacagaagaagcgcacgctgaaggggtcca

SEQ ID NO: 557624 - DNA, 100 bp, Homo sapiens
accgagaccgtgaccgagagcgtgaccgagagcgcgaatatcgtcatcgttagaagactggcatccttcgaaccaactgtgtggactgtttagatcgcac

SEQ ID NO: 557625 - DNA, 97 bp, Homo sapiens
gtcgcgatgctgcccggtttggcactgctcctgctggccgcctggacggctcgggcgctggagagctgcagaaactggagggcagcagtggacctgt

SEQ ID NO: 557626 - DNA, 50 bp, Homo sapiens
cagcagactccagaggtgatcaaggtctttgactttgaactgagcagcca

SEQ ID NO: 557627 - DNA, 100 bp, Homo sapiens
caaacctttttgaagatgcaacgagtgcacttgcatttaaatcaaacggtattgagatggattgggttatgaaacataatggtccaaatgacgctagtga

SEQ ID NO: 557628 - DNA, 100 bp, Homo sapiens
tttcattgaaaatgcccgtctcttcatatttgagactttctgtcgcatccaccagtgtatcagcattaattcacacaaaagatgttggacaatttctaca

SEQ ID NO: 557629 - DNA, 85 bp, Homo sapiens
tgcttcccatcgaagctctagaaatgaatgtttccatctcttcagagatgaaccaggagatcatgcacgccctgaagatgacctg

SEQ ID NO: 557630 - DNA, 75 bp, Homo sapiens
gctggctctcacgtggaggcggggaaatttcgcccaccgattcatggggatacggtccagaaccagctggtggtc

SEQ ID NO: 557631 - DNA, 90 bp, Homo sapiens
caccactgcagccatgatctccttaacggacacgcagacacgtcagctaactgttcagatgatgcaaaatcctcagattcttgcagccct

SEQ ID NO: 557632 - DNA, 100 bp, Homo sapiens
tgcttctgttcccatgcagtggccccatagtcctggatttgaagaccagccctgctacttaccaggaaagaacggtgaccatcagaagacaaacagtagg

SEQ ID NO: 557633 - DNA, 83 bp, Homo sapiens
attgctctcgccatggctctcagcgatgctgacgtgcaaaagcagactcatccatctcccccaactcaaaaatgaaacaaaga

SEQ ID NO: 557634 - DNA, 50 bp, Homo sapiens
ttaaggattccaagtaactcttatttgatatttggagttcttacaacatg

SEQ ID NO: 557635 - DNA, 95 bp, Homo sapiens
ctgaaggctgtcttgatcaggaaactgaagactctctgcttttgccacagcagttcctgcagcttccttgagccaccatgttcagccagcagcag

SEQ ID NO: 557636 - DNA, 51 bp, Homo sapiens
gtagccatggcacaagaatatagcattgaatgccccagaggagcccgaaac

SEQ ID NO: 557637 - DNA, 100 bp, Homo sapiens
agtcagaggcctgggcgcagctctggactctgcgtataacagcgatcagtgggtgaccgcggctgcgagggactttgtcatccgtcctccaggatctggg

SEQ ID NO: 557638 - DNA, 76 bp, Homo sapiens
attacagtgatcatcataggcttatgtcttgctgcaggtaaactaacattatggatttttccaagctacccaaaat

SEQ ID NO: 557639 - DNA, 100 bp, Homo sapiens
gccgcagaccgtctggaaatgcgaatcctaaagcgtttcctcgcttgcattcagctcctctgtgtttgccgcctgggtagatcgacacttgagaaagctg

SEQ ID NO: 557640 - DNA, 100 bp, Homo sapiens
gaccagtgtcagcattttattggctctagcacaagatgggacatcccctgaagtccaggttcgagaaatggctgctactaccttaagcggtctgctacag

SEQ ID NO: 557641 - DNA, 100 bp, Homo sapiens
atcacttctcaggggaacgatgcaacacacctgcacgcaacagaagaagaagaggtgcagtatattcaggctgagaaaaacaacaagggcccaatggagg

SEQ ID NO: 557642 - DNA, 75 bp, Homo sapiens
gcggaggctcaggcagcttgagtgtctttggtgcaacactaacaaggcttgtctggactacccagttacaagcgt

SEQ ID NO: 557643 - DNA, 92 bp, Homo sapiens
agagccaaactcagctcgcccggtttctcggcgaatgacagcacagacaatgcagatcttcgtgaagactctgactggtaagaccatcaccc

SEQ ID NO: 557644 - DNA, 100 bp, Homo sapiens
cccgcccccgccggggtagagatccggagcgccaccggcaaagaggtgttgcagaacctcggccccaaggacaagaaatgtgaacataatttgagcaagc

SEQ ID NO: 557645 - DNA, 82 bp, Homo sapiens
ggacagcggcacagaggagggaggtttttagaacttcagccataaaaatgggcagaattttccttgatcatatcggtggtac

SEQ ID NO: 557646 - DNA, 75 bp, Homo sapiens
gtcaactgcttctcaggtagcaagtacatggggagacagaatgttgctgcgggatgtaaaagctcttaccctcca

SEQ ID NO: 557647 - DNA, 50 bp, Homo sapiens
ccaccgccctggccatctaccatgtggagagtcgcggttgctgatcgtgg

SEQ ID NO: 557648 - DNA, 100 bp, Homo sapiens
agcctcagcaaagagcataatccaactcagtatgaagagcggatgaggatacagaaggctggaggaaacgtcaggtggaatttccagaggcccggatctt

SEQ ID NO: 557649 - DNA, 97 bp, Homo sapiens
ttcagggatgagtcatgtggcagtggaaaatgcgctcgggctggaccagcagatggatgatgatgacgacgacgatgacgtaggagatcatgacgat

SEQ ID NO: 557650 - DNA, 74 bp, Homo sapiens
ctggcacactaatgtgttcaaggtgctggttgaggttttccctgatgaatttcacctccagactttgaatcctt

SEQ ID NO: 557651 - DNA, 118 bp, Homo sapiens
aagtggtgaatcccctgtttgagaaaaggcctaagaattttggcattgcttcccatcgacggtcagtgcgcacgttgtaatcagctgaggccatgtcaggagacggagccacggagca

SEQ ID NO: 557652 - DNA, 83 bp, Homo sapiens
ctgcccttcgccaaggagatcgtctctctcatcgaggcccaaaccgccaagatacagtttatgtaacttgatggaagaaaatg

SEQ ID NO: 557653 - DNA, 100 bp, Homo sapiens
tcttggggaaactcggagggaccctggcccggaggaagaaagccaaggagggtgaaaggtgtagcagtcactcggcctacacccacagcatcgaccttgt

SEQ ID NO: 557654 - DNA, 75 bp, Homo sapiens
attgttccgtgctgttcctgagtgtcaactatctgggggggacattcccaggtatctcttcaactgtggagaagg

SEQ ID NO: 557655 - DNA, 100 bp, Homo sapiens
tttctctacaaagctgggggaggctcatatattgctgcagttgccaccttccagagaagaggtacgagatgacaagacaaccataaagtgtgaaacctcc

SEQ ID NO: 557656 - DNA, 100 bp, Homo sapiens
aatatgttagcgttgtatcttgggagaaagacacagtctccatcatcccaggggcgccctcgcgcgacgtcctgctggtctctgccatcatcaccgtcag

SEQ ID NO: 557657 - DNA, 101 bp, Homo sapiens
gaggaaccatgtctccatccccgaccgccctcttctgtcttgagagttggaaactcaactattggaacaatgtactgttgacacaagtgttgctaaagaac

SEQ ID NO: 557658 - DNA, 82 bp, Homo sapiens
gcagactacggacctgtctgggtctcagccgccaaagaccccgtccggtaggtatcatgatattagctggtttgacatcaag

SEQ ID NO: 557659 - DNA, 82 bp, Homo sapiens
aaagaaggagacgtggggtcactggtgtatgtcatggaagccttaatacagatattggcagctgctgcagctgagcgagatg

SEQ ID NO: 557660 - DNA, 100 bp, Homo sapiens
aacaaagccacccagccaatgaagcacagacggggtttcaccgttttagacaggagggtcccgatctccagacgtcgtgatcctcccgccttggcctccc

SEQ ID NO: 557661 - DNA, 75 bp, Homo sapiens
cccaaaatattctagaaggggaaaagctacttcaaggtgatggagtccagaactaaactgcacaatgaaagcaag

SEQ ID NO: 557662 - DNA, 100 bp, Homo sapiens
gttgctgattgttggaggttcttttggtcttcgtgagttttctcaaatccgatatgatgctgtgaagagtaaagcacttctggatccagctgtgtgatag

SEQ ID NO: 557663 - DNA, 98 bp, Homo sapiens
aatgatgttgagcagcagatgtacttctggcagtacggccactggacagagtgcagtgtgacctgcgggacagaaactgatttcactccagactggtg

SEQ ID NO: 557664 - DNA, 100 bp, Homo sapiens
ctcaaccatcagtccctgctttaagggtatggctctctcggcatgatgaccagcgtgctggtttgtccagatggcaagacagtagaagcagaggctgccc

SEQ ID NO: 557665 - DNA, 82 bp, Homo sapiens
cgaaaaaaagatggagccctgcatatgattggctctttagctgaaatacttctgaagatttaaagattgattgtctccagga

SEQ ID NO: 557666 - DNA, 97 bp, Homo sapiens
ctgcaagcatggcaaagactggcaaaagcacaaggattctcgctgtgacagagacaacaccgagtatgagaagttacgagaagtttctgagaagctg

SEQ ID NO: 557667 - DNA, 98 bp, Homo sapiens
gaaacaggacctcggaaggattccaggcttttagcaagaagtttctgcaaggttggtcaggccaaagatgaactgctgaccaatcagctgatagacca

SEQ ID NO: 557668 - DNA, 75 bp, Homo sapiens
aacaatggtaaatgtgccacatattcatgcaaggcagcctggcatcctcgctacaacctcattgttgtgggccga

SEQ ID NO: 557669 - DNA, 83 bp, Homo sapiens
gcagctgcctcagttcttagcgcagggaagtatgggtagtattacctgcatcgcttggaaaggtgatacattagtgcttggag

SEQ ID NO: 557670 - DNA, 99 bp, Homo sapiens
ctggaagacatggccactccagtcggtgttgagcacggcgagcagtctcaggcctttagtgatgatgaacacggctctagataaggaggggcagatttt

SEQ ID NO: 557671 - DNA, 82 bp, Homo sapiens
ctgggcgctccggtggcggcggaggtggttttacgcacgacgagctgctgaaggtgtggaaaggactgttttattgcatgtg

SEQ ID NO: 557672 - DNA, 83 bp, Homo sapiens
gccggttcttggtgggatctgagcaggttgattcttcaccacactgaaaccattaggaaaaatccttgtggttaacagcagag

SEQ ID NO: 557673 - DNA, 83 bp, Homo sapiens
cctgagttcaagcgattctgcatcagcctcccgaatagctgcgattacaggaagcaggagctggccaacagctcggatgcgac

SEQ ID NO: 557674 - DNA, 75 bp, Homo sapiens
cccgagcggagcgccgcacgttcccaaccgcgaggccagatgctgcgggaaatcacagatcaggaacacaacgtg

SEQ ID NO: 557675 - DNA, 74 bp, Homo sapiens
gtcctttcacgcgtgtcttcgtgttggtgcgcttttcactggtcataaaggcagttgtgaaaaacttcaggaca

SEQ ID NO: 557676 - DNA, 100 bp, Homo sapiens
catcgccctgtggatgactgagtacctgaaccggcacctgcacacctggatccaggataacggaggctggcatccacccaacccaccagtatcaccagga

SEQ ID NO: 557677 - DNA, 83 bp, Homo sapiens
ctcgcccgcagccccgagaccgcagcccagctcaacattggcaatgtgctccctgtgggcaccatgcctgagggtacaatcgt

SEQ ID NO: 557678 - DNA, 74 bp, Homo sapiens
ggcaagatatattttgtcatttcagtggaaagtctggcacagacatagggcctgattacattccaacagaggaa

SEQ ID NO: 557679 - DNA, 100 bp, Homo sapiens
ttccaaccagtctcggtgcgaggcctcaccaaaccccacggcaccaagtatagatgagaaagtagatcttcattttattgcattagttcatgtagatggg

SEQ ID NO: 557680 - DNA, 82 bp, Homo sapiens
attaatgcagatgaggcgttctttgaactcccccactggaaaggattctgaaagaaatgaagtcagccctcagaaatgaagt

SEQ ID NO: 557681 - DNA, 75 bp, Homo sapiens
tccacagatgtgtcaccaaaccaggtctatgttaacaatgaatgggcaaccagtgttggggaaggagggagcttt

SEQ ID NO: 557682 - DNA, 89 bp, Homo sapiens
tggagctgctgcttgacacgtgggtttccaggaccagggaacagctcatttatttgaaaatcactgggctgctatttccaacttccgac

SEQ ID NO: 557683 - DNA, 98 bp, Homo sapiens
gccacattctgactcacacaggagaaaagccgtttgtcctttagaagaagccacactctctgaattaaaaactgtcctcaagagcttcctaagtcaag

SEQ ID NO: 557684 - DNA, 90 bp, Homo sapiens
acgaccccgagtcgcagatggcctgccacgttttccgcgccacagaccccagccagatgggcggaagccatttccaattaaccatggtga

SEQ ID NO: 557685 - DNA, 90 bp, Homo sapiens
tcccgaatagctgggattacagataatcacatttttgcctggggcaatggtggtaatggccgcctggcaatgacccccacagagagacca

SEQ ID NO: 557686 - DNA, 51 bp, Homo sapiens
tgcccatgttgtggaactcccatagagttgcagaatgaagaagagtctgga

SEQ ID NO: 557687 - DNA, 83 bp, Homo sapiens
ctacacaggacctgagaatctgagaaactgcagttcaaatctgaacatcaatgatgtactagggaactactcattgactcttg

SEQ ID NO: 557688 - DNA, 101 bp, Homo sapiens
atttgcgcccgtgtatagctggatcctggtgctccggggcctggtgggcttcgggatcggaggagttccccagtcatagaatgagtccatttaagtcccag

SEQ ID NO: 557689 - DNA, 98 bp, Homo sapiens
ctccaatcgctggtagaagcaccacaccaacatctagtcccttccgaatacagattctgttcatcttgctctgaaattaaataattctgaactcatgg

SEQ ID NO: 557690 - DNA, 74 bp, Homo sapiens
ccgccggcgaaggaggaggcgttgccggtccccagaagaccatgtctgtgttgagctgtatctgtgaagccagg

SEQ ID NO: 557691 - DNA, 98 bp, Homo sapiens
gtttcattattttgatggctgaagaatatttcctagttggtgaactatgacaatgtagtggacacaggttctgaaacagatgaggaagacaagcttca

SEQ ID NO: 557692 - DNA, 51 bp, Homo sapiens
caccgtctgagtctgcagtcccgaggcgtccgagctgggccacagcctgaa

SEQ ID NO: 557693 - DNA, 90 bp, Homo sapiens
ctcatcctggtcactagcggactcttcttcgccttcgaccaagcttcttgaaaggcctgtctacacttgctgtcttccttcctcacctcc

SEQ ID NO: 557694 - DNA, 100 bp, Homo sapiens
acctgactgatgccttcgtggagcataagcagtactataatggatgtagacagcacaatttccagtgggcgttcaactccagcaatgatgaatggacaag

SEQ ID NO: 557695 - DNA, 75 bp, Homo sapiens
cttgaaaccagaaaacgtgttgctggcatcagcagacccatttcctcaggccctcagccacaagtacggtggaca

SEQ ID NO: 557696 - DNA, 75 bp, Homo sapiens
caaaactgtcccgggtgggaagaggaacagcctatgtgggcttccacggagtcattttttgagaccagtactgtt

SEQ ID NO: 557697 - DNA, 50 bp, Homo sapiens
ggggagcggagccatggcctccggagttgtatcccgcattttgtattcac

SEQ ID NO: 557698 - DNA, 51 bp, Homo sapiens
cgtgctgatttctttcaacctcgcacactgatttatgtcagtacatggaca

SEQ ID NO: 557699 - DNA, 50 bp, Homo sapiens
ctcccatccctgcagcatgaacaagatggccctgctgtggcaccagtgac

SEQ ID NO: 557700 - DNA, 75 bp, Homo sapiens
ccgagatgataaggactggaaatctgccactaaccttccccaactcaagagagtgggactccccggcccccccgg

SEQ ID NO: 557701 - DNA, 90 bp, Homo sapiens
cggagtgggcgatgccagcgtgccagggagtgcatccgccccaacccttttccccctcgtctcctgtgagaattccccgtcggatacgag

SEQ ID NO: 557702 - DNA, 98 bp, Homo sapiens
gggacccggaggaccgtatccccagcccactgggctacgcaggtggtccagctgctcacctgtgacctgctactgtcgctacggacagcgctctggca

SEQ ID NO: 557703 - DNA, 100 bp, Homo sapiens
cgctgccgtcgccgccgccaccatgcccaagagaaaggctggagtgagacagctctacgtacagattgactttgcagccatgtagtgaatggaaagaaat

SEQ ID NO: 557704 - DNA, 100 bp, Homo sapiens
agttggagttattaattagcccaacctgttcttgcaaacaagcagatatttgtgtggttcctccccgggcagaagaaatcaccattccagctgatgtcac

SEQ ID NO: 557705 - DNA, 73 bp, Homo sapiens
cgcgcgcccggccggcccggagcaccgagctcgcggcacggtaggaggtttggtgcacctcgatttggaggaa

SEQ ID NO: 557706 - DNA, 101 bp, Homo sapiens
cgtttctgtacatggattatctgctattgtggacgatgaaaggctctctgcagaggagatggatgagaggaggcggcagaacattgcttatgaatatctgt

SEQ ID NO: 557707 - DNA, 75 bp, Homo sapiens
cctccgtctggatttccaaggaagaatttcctctgaagcaccggcggctgtgcgtggcgagcagtggacgcccat

SEQ ID NO: 557708 - DNA, 98 bp, Homo sapiens
taccacagccagacctatggcaatgggtccaagtgcgaccttaatgggaggccccgggaggccgaggttcgggtgcaacacgcaggactacatctggc

SEQ ID NO: 557709 - DNA, 75 bp, Homo sapiens
atgaccgacctcaccctgtcgcgggattatggctgctgttcctcaaaataatctacaggagcaactagaacgtca

SEQ ID NO: 557710 - DNA, 80 bp, Homo sapiens
acctaatgttatcgcggaatgatggtgtctgtactggtgatgtgtcacactcgggagttggcttttcagatcagcaagga

SEQ ID NO: 557711 - DNA, 88 bp, Homo sapiens
aaagggaagtcatttctactggacttcatgcttagatacatgtataacaaggtgagacactttgacagcccctacctgttgtaccacg

SEQ ID NO: 557712 - DNA, 51 bp, Homo sapiens
cctaaagcctgactggggcaaggtgaggtcccagcttgaagagaaagaaaa

SEQ ID NO: 557713 - DNA, 75 bp, Homo sapiens
catcccctggatgggggaccacaagatcctcatcgacaggcccccgaggtcatcatgtcccagcactacgacggg

SEQ ID NO: 557714 - DNA, 75 bp, Homo sapiens
tggaaccggcctgtctgcctgctgcagtctttttcggctttgtgagaaaccttaccatcaaacacgatggccagc

SEQ ID NO: 557715 - DNA, 80 bp, Homo sapiens
ccacgttccactttcctcaccccaaatatgtggacctgtacaaggtggccatgaacatcctcaacagcggccggttcagc

SEQ ID NO: 557716 - DNA, 100 bp, Homo sapiens
cattttcggcaaccgctgctggcagttttgccaggtgtttgttaccttgaattacatgatgcgtaatgctgtgctggcagccatggcggagatggtgctg

SEQ ID NO: 557717 - DNA, 100 bp, Homo sapiens
tcaagatcaagaccggcgtggtgaagcgaacggggaagataaccgaagggtggtttgagaaacccaccaggccaactgggaattagaattgattcaaaac

SEQ ID NO: 557718 - DNA, 100 bp, Homo sapiens
gaagacttccagtagctccaaggaggttaagattcgagtggtgaatgcatttcgtagttctttatatgaagggttagaaaaaccggaatcaagaagttcg

SEQ ID NO: 557719 - DNA, 74 bp, Homo sapiens
gggactacgaccacctcttcaagctgctcatcatcggcgacagcggtggcgtgggcatagaaggaaggccagtg

SEQ ID NO: 557720 - DNA, 100 bp, Homo sapiens
ggggaagcctctgcgccgccggcaccatgagcaatgaagcagctgctgacccagctctagttttcgggaagtcagatgaccttttccctcccgcggctct

SEQ ID NO: 557721 - DNA, 101 bp, Homo sapiens
caggcgaatggctcttgggattgttattcttctgcttgttgatgtgatatgggttgcttcctctgaacttacttcggggcctcaaatctgaccctatcgga

SEQ ID NO: 557722 - DNA, 86 bp, Homo sapiens
agctcaccgacagtgccctgagggccttcgagagctaccgcgccagacagggtttccaggcctgaggtgcccgccctggccccagg

SEQ ID NO: 557723 - DNA, 128 bp, Homo sapiens
agggccacaacggctgggtaacccagatcgctactaccccgcagttcccggacatgatcctctccgcctctcgagagctagagccggtgcaggccacgcagaacaagacagggaagtatgtgccgccg

SEQ ID NO: 557724 - DNA, 75 bp, Homo sapiens
actggcatgctcaaggaatgggctattaagatagaagagtgatggatgtcatttctcgttcacagctttacttgg

SEQ ID NO: 557725 - DNA, 82 bp, Homo sapiens
cctagctctgtaactgtttacattcaaatctgaacatcaatgatgtactagggaactactcattgactcttgttgatgcatt

SEQ ID NO: 557726 - DNA, 75 bp, Homo sapiens
ggggcatcaggtttttctcccgctccagaaaaagtgatgcaggttctgaatgctgatgccattgttgtgaagctg

SEQ ID NO: 557727 - DNA, 100 bp, Homo sapiens
gcctggccagaatctacagctaccagatggcacttacacccgtggtggctttcctgggggaatgcctggtaattttcccggaggaatgcctggaatggga

SEQ ID NO: 557728 - DNA, 75 bp, Homo sapiens
gttgaaatcgatggaactatacatcaggtgattccttcaacacccagaatgagccagaagacatgatgaaaaaag

SEQ ID NO: 557729 - DNA, 83 bp, Homo sapiens
cagctgtactaggactgggaacggtgtactaatggtcacttgatgtgcgctggctgttttatccacctactagcagatgcccg

SEQ ID NO: 557730 - DNA, 82 bp, Homo sapiens
gatcatccaagtggaggttcctacagagattcatatgagagttatggacacgtcttctgggggcccagcacgtgcttatcca

SEQ ID NO: 557731 - DNA, 75 bp, Homo sapiens
atcctaagcgtctgagtgctgcagtgggaagtggtggttcaagtggaggatgatggggatggcgattacatgtct

SEQ ID NO: 557732 - DNA, 80 bp, Homo sapiens
ctaatttgaaccatgtttggattgaagccgcctctgtattacttaccaggttgatgccggcccaggatggatcagacctg

SEQ ID NO: 557733 - DNA, 51 bp, Homo sapiens
gctctgcaacgcttctcagtagcaacctccaagtcccagatcatgtctctg

SEQ ID NO: 557734 - DNA, 75 bp, Homo sapiens
gtcgctagaactcagttgtgcgttgcggccagtcgccactgctgtgttgacttcaaaatcaaaactgtagagcta

SEQ ID NO: 557735 - DNA, 90 bp, Homo sapiens
catgaccagcagggaccttgggtcacatgacaatctctctccaccttttgtcaattccagaatacaaaatatttgttcagtcgaatcaag

SEQ ID NO: 557736 - DNA, 82 bp, Homo sapiens
aagtggttcaacagctccggctggaggccggactcaaccgcgtaaaattggctggggaacagaccagggaattggtggattt

SEQ ID NO: 557737 - DNA, 90 bp, Homo sapiens
gttcacataagaagttcttcgatgtatctaaacttggcaccaagtatgagtttcaagaagtttttaaccgaagtgtcatgattattgcag

SEQ ID NO: 557738 - DNA, 101 bp, Homo sapiens
aaccttgctttggattttatgtgctacagtctgcggaacggagcagtatttcaatgtggagagacaaagcatggaggacacaagaatgggaggaaaggcgg

SEQ ID NO: 557739 - DNA, 75 bp, Homo sapiens
cgcaacactcgcttggttggggagatcggcgcttggccggtatctttcagatgaaggcattgaagcttgcacaag

SEQ ID NO: 557740 - DNA, 100 bp, Homo sapiens
cgcagttcatcttcctccctgtgtactttccatttgccttcctggattggatttgtcctgtatccccccagtggaggtcctgcatgggatctgatggatc

SEQ ID NO: 557741 - DNA, 82 bp, Homo sapiens
tcctttttacctttggttcacaacatcatcaaatggtttggtgcacctcgatttggaggaagtagggcagggcccttatctg

SEQ ID NO: 557742 - DNA, 83 bp, Homo sapiens
cacaataagagcagaggatggaacacttcagtgcattcaaggtggggaccaaggcatactgaacacattttttagcagctggg

SEQ ID NO: 557743 - DNA, 50 bp, Homo sapiens
gcaggcatttcaatcacattatgaatataacaccagcaatcctgacttgt

SEQ ID NO: 557744 - DNA, 100 bp, Homo sapiens
cgcgtggacggcttccacccccgcaggctgctgctcagcggcccccctcaggtttgatctgtggatgaaatgaatcatgattttcaagctcttgcattag

SEQ ID NO: 557745 - DNA, 78 bp, Homo sapiens
cagcatggaggacgatgcaccagtgatctacgggctggagttccaggctccatggtccccttctcgatgcgcatcttg

SEQ ID NO: 557746 - DNA, 75 bp, Homo sapiens
ggaaatttattgagattgctgcccgaaagaagcgaaattttattctggatcagcgtttgtgaggcatatcctgtc

SEQ ID NO: 557747 - DNA, 100 bp, Homo sapiens
ggaacaatgtactgttgacacaagtgttgctaaagaacagagccttccctcagtgatggctggatctaccatgaaagacttgtgaatccaggaagagaga

SEQ ID NO: 557748 - DNA, 75 bp, Homo sapiens
caccatcgactacgtggaggacgctttggagtttaacccttctgccaatccagaggcaagcacaatattccagag

SEQ ID NO: 557749 - DNA, 100 bp, Homo sapiens
ctgcggccctggcaggtaccatgagaggcatcattgctaaggcggtgcccccatgctgttcgtcgtcccctgggcagtggtcaagtgtctgttcgagaac

SEQ ID NO: 557750 - DNA, 98 bp, Homo sapiens
tggcctctggatcataatctgctgacccctggcctaaatgcgatggccaggtattactgacacaagtgtggaagcgtttaaacctggtagaatgtgac

SEQ ID NO: 557751 - DNA, 100 bp, Homo sapiens
ctctgagggagggtccgagccagccgctgttttgccggaggagcccctcaggccggtcatggaggacgctggcggcggcgaggagaccccggccccggag

SEQ ID NO: 557752 - DNA, 78 bp, Homo sapiens
ttgacctcttcgatgtgcgagactttggaaagacggttgatgatgaagcgccggccgtgtaaatgaagatcgggtgag

SEQ ID NO: 557753 - DNA, 82 bp, Homo sapiens
acgacgttgccgggtacaagtgcaactgcctgctgccctacacaggtcagcccaaggctgccccctcggtcactctgttccc

SEQ ID NO: 557754 - DNA, 50 bp, Homo sapiens
ggagcaccaggagacgcaactcatcggggtggcccttgggtagggtgaag

SEQ ID NO: 557755 - DNA, 83 bp, Homo sapiens
ccctccttcacgccacacacacagaggtggagaagagcgagtacttgagaaagaagaggaagaagatgatgatgaagatgaag

SEQ ID NO: 557756 - DNA, 83 bp, Homo sapiens
cccggagtcttcctgatccatggacccgatgaacatagacacagaaaaagcttgtggtgaaggggggcaaaaaaaagaagcaa

SEQ ID NO: 557757 - DNA, 90 bp, Homo sapiens
ctgactacctgctgtacaccctcaacaaacaccagcgctttggagtcggtggctctgaggctgcgaggtgggacctgctgctgtgctggg

SEQ ID NO: 557758 - DNA, 100 bp, Homo sapiens
gcacggtcaacaccttctcccagagcgtcagcagcctgttcggcgaggacaacgtgcgcgccgctcagaagaattatatccagatcgagagacagaagat

SEQ ID NO: 557759 - DNA, 98 bp, Homo sapiens
cctggccccggctctctggaccttgtctcgctcgggagcggaaacagcggcagccagagaaaagttttagagacagtctttgatgaagtcatcatggt

SEQ ID NO: 557760 - DNA, 90 bp, Homo sapiens
ccgatttgtgtatgaactactgtcttgggtagaagagatgcagctgtcggaaaaggtaacagaagatggaactcgaaatcccaatgaaaa

SEQ ID NO: 557761 - DNA, 98 bp, Homo sapiens
agctccagtcagtgtacaagatggacccgctacggaacgagcagcagccgctcttctaaaacattcaaaccaaagaagaatatccctgaaggatctca

SEQ ID NO: 557762 - DNA, 100 bp, Homo sapiens
gccccaccgtcgcctggtgcctcccgcctccgtgtgccctggttgtgagaagacgtctgtgtcgtgcggttggtttgttggaccttgaactcaatcggct

SEQ ID NO: 557763 - DNA, 98 bp, Homo sapiens
atctggtcctacctaattgcacggattgctttgaaagccttgatcaggggaaaggctgggacttgggctatgctctggacaaggctggctggtgcaat

SEQ ID NO: 557764 - DNA, 90 bp, Homo sapiens
attcgaagtgtatagacactgagtctctctgtgttgttgctggtgaaaagggatctgatgtgatgtatgcagttgaagttcctggacccc

SEQ ID NO: 557765 - DNA, 101 bp, Homo sapiens
tttgtacgccttcgacctcatctacctcaatggagagacattcactactttcactgcctaagaatcctggaccttctcaaaggcacagaggcctccacgaa

SEQ ID NO: 557766 - DNA, 82 bp, Homo sapiens
aggagagaggaggaggagtgcggcgcggcggccccgggaccaaggaggtctcaccaacggctttgggggtgcgaggagcgag

SEQ ID NO: 557767 - DNA, 100 bp, Homo sapiens
gggtgagccttctcgtggcggcggggaccgtccagcccagcgattctcagtcaggcattatcctgcactgaaaactctggaacatctagagcatacctac

SEQ ID NO: 557768 - DNA, 83 bp, Homo sapiens
cttcgtctttgcagcgtagcccgagtcggtcagcgccggaggtgtggacactgccagcggctgcagccgacttggaatgacct

SEQ ID NO: 557769 - DNA, 97 bp, Homo sapiens
gtctaaagtctttccaaaaggtcaaggttcacaagggctgccaggcgcccagctgtgcccagatggatgggacagagacccggcagcggaggctgga

SEQ ID NO: 557770 - DNA, 83 bp, Homo sapiens
gtcgcctgccaccgagccgggcccacctccccaccaaggaagggctgggttacgacccctacaaccctgagctgcccaagccc

SEQ ID NO: 557771 - DNA, 74 bp, Homo sapiens
gtgcgatctggacgcggcgctgctgaccgacatcgaaggacagagcgggatgccaccagcttgtccaaagggaa

SEQ ID NO: 557772 - DNA, 100 bp, Homo sapiens
aacaagacggccgtggttgtggggaccataactgatgatgtgcgggttcaggaggtacccaaactgaaggctggcggtaaggctggaaaggactccggaa

SEQ ID NO: 557773 - DNA, 100 bp, Homo sapiens
aaccaaattgtcgccattaagaaagttattaatgctgcactggctttagcagcaaaaccacagagtaaactggcccaagagaacatggatctttttaaag

SEQ ID NO: 557774 - DNA, 75 bp, Homo sapiens
tatttgctgttggatcgtttcatactttacgcttgtgtgataaaactggggattacaaggcagaggaagacccag

SEQ ID NO: 557775 - DNA, 88 bp, Homo sapiens
gtatctgatgaatattttccttctgaaccagggttctgcatccactacaacattgtcatgccagccctggagagtgaatttgtttcct

SEQ ID NO: 557776 - DNA, 98 bp, Homo sapiens
gctaaattcttgtcagattacgcagccaagtcatcaaggcatgggacattggggtggctaccatgaagaaaggagagatatgccatttactgtgcaaa

SEQ ID NO: 557777 - DNA, 50 bp, Homo sapiens
tgtgatcagtctgaaatacagactcacaccacccggcaagaactgctcac

SEQ ID NO: 557778 - DNA, 88 bp, Homo sapiens
gtcaccactggacctccaaggaagccacgtgcagacatctacaaccttcgatctcctgacgaatggcagtcttgggcacgtccatctg

SEQ ID NO: 557779 - DNA, 100 bp, Homo sapiens
ccctggactaccgcctggatcctcagctccagctgcactgctcagacgaggccttgctgtctctaactctgatctgatatcctgctttgagcaaataaaa

SEQ ID NO: 557780 - DNA, 88 bp, Homo sapiens
gatagaggaaatgtatgatgaaggtgttggtggaatgagcgttgcatgtgtcttgaagagaaaagcagtgctttggcaggactctttc

SEQ ID NO: 557781 - DNA, 100 bp, Homo sapiens
attcaagaaggacaaagagatcatagccgagtatgaaagtcaagtcaaaggtgtgctgggcatcaaggtgaagatcatgctgccctgggacccaactggt

SEQ ID NO: 557782 - DNA, 74 bp, Homo sapiens
aagatcaagaaagtgggaaccactgagaaggaacatgaagagcctggcagagagcaggtgtgtgatacacgtcg

SEQ ID NO: 557783 - DNA, 50 bp, Homo sapiens
cgtctatgtggcgcccggcataggtaaactcgggggccaggactcttttg

SEQ ID NO: 557784 - DNA, 82 bp, Homo sapiens
cttgttccgaggcggccccagagcgccatcatgaccgggtcctataacaacttcttcaggatgtttgatagagacacgcgga

SEQ ID NO: 557785 - DNA, 98 bp, Homo sapiens
aatcaaagctacatctgtgacacaggacactgctgtggacagtctcagtgctgcaactactactatgaactctggtatgtcaccacagtggatcccaa

SEQ ID NO: 557786 - DNA, 88 bp, Homo sapiens
ggtgcgggccctctggaccctggagtacaccccgcagcacagccgcgacttcaaggtgctggagaatctggtaaaagcaccattgtga

SEQ ID NO: 557787 - DNA, 102 bp, Homo sapiens
atgcaatatgatgaggatgatgatgaaatcaccccggatttgtggcaagaagcatgctggattgtaatcagggtggaattgcgtttgttgccataaaaggag

SEQ ID NO: 557788 - DNA, 75 bp, Homo sapiens
gaggcttcgagtgacccgggtgccgaggagcgggaagagttgctgggaccctgtacacgtatcctgaaaactgga

SEQ ID NO: 557789 - DNA, 90 bp, Homo sapiens
cgagaacggtgcttctatggcaggatatgttaaagccttccatctgaagtatgatgaagttcgtctggatccaaatgttcagaaatggga

SEQ ID NO: 557790 - DNA, 96 bp, Homo sapiens
tgcttgaaggctgctcgaggaacaggagcagcggcgaaacccaggtctgtcggtttacgaggtccagcctgatgagtgaagaggctaagcgaggag

SEQ ID NO: 557791 - DNA, 82 bp, Homo sapiens
caccaccctggcgcaggcggtgcaagcagtcttactactttgaccgcgatgatgtggctttgaagaactttgccaaatactt

SEQ ID NO: 557792 - DNA, 103 bp, Homo sapiens
tgctctgtgcgcgcctccatctgggccatggatgggtggacgtctgatttatgaagctccccatccacctatctgagtacctgacttctcaggactgacacct

SEQ ID NO: 557793 - DNA, 74 bp, Homo sapiens
atggcggccgccggggctgcggctacacacctaggattacttgtatggacaaactaccacatatctgacatata

SEQ ID NO: 557794 - DNA, 100 bp, Homo sapiens
ttttcctttgtcctggggagccgggcgcgaagagcgggcgtcatctctcgggagattatgtttgagaccttcaacaccccggccatgtacgtggccatcc

SEQ ID NO: 557795 - DNA, 100 bp, Homo sapiens
caagtatgaaatagcagttgaaactgagtcagtggaacctagtgaagtgaaacaagcaacttcaacatcaggaccagcatcagcagttgctgatccaccc

SEQ ID NO: 557796 - DNA, 73 bp, Homo sapiens
agaagagatggagacagagacagaggccgaagctctccaggaaaaggagacagaactcaaggtggaagtaccg

SEQ ID NO: 557797 - DNA, 90 bp, Homo sapiens
gctttctgtgccgggggtgatatcagaggttcactatagttgcggagagtctgcagcaagttcggcagcagcttaaaaagttggaggaat

SEQ ID NO: 557798 - DNA, 112 bp, Homo sapiens
tctgttgccctgtgatctgcaggtccggagagacgcacagctaagatgtcaggacatcctggaagctgggaaaggaaacatgattcccgtgacagaattccggcagttctct

SEQ ID NO: 557799 - DNA, 109 bp, Homo sapiens
cccgcccagttggcccagaggatctcttctaacatccagaagatcacacagtgttagctgtaggtaaaacttgcctactgatcagttacacaaccaatgcatttcctgg

SEQ ID NO: 557800 - DNA, 100 bp, Homo sapiens
ggagtgccctgtcctgccggagccgctgtgtgcaaagttcctattgatggtccccccatactggacacagagtatagaaaaaaatgggatgccctggtaa

SEQ ID NO: 557801 - DNA, 100 bp, Homo sapiens
cacctacccattggtctaaacttgatccaaagacaatgaagccaccaaccaaggcaactcagctgatgctgtaacaaccacagaaactgcgactagtggt

SEQ ID NO: 557802 - DNA, 100 bp, Homo sapiens
cgccccggccggacctcgaccctgagctctatctcagtgtacacggccccgtgaagcttggcggggaggccgcccacctcccacacctgcggccgctgcc

SEQ ID NO: 557803 - DNA, 83 bp, Homo sapiens
agtatcactcgctcccttgatgatcttgaggctccctggggaagggaatgcagggttgctggggctgggcccagaagcagcag

SEQ ID NO: 557804 - DNA, 82 bp, Homo sapiens
tgaccatcttggtgagaaacattaagacctactaccagatctgactgcagccatgagcagcaatgagtgcttcaagtgtgga

SEQ ID NO: 557805 - DNA, 100 bp, Homo sapiens
cggctggatgggaagttaatgtttacggcgaagtctactcaacgtttccaaggctccctggcattgggcagtgttacagtgcactcttctgaacctgaag

SEQ ID NO: 557806 - DNA, 75 bp, Homo sapiens
caacagaatgggccgccacaaaccccatttggccctcaaacagccacatgaaatgaagatcacctctgcctatct

SEQ ID NO: 557807 - DNA, 98 bp, Homo sapiens
aaacactgtgtcatattcttgggttcaaattcaagttttaccaggaaacctcgacctgtctcccagttggttgcacagcaggttactcagcagtttgt

SEQ ID NO: 557808 - DNA, 95 bp, Homo sapiens
aaacagctatggtgatgattagagacatactaatgtacatggtagagttggctttgtgggacacagctgggcaggaagattatgatcgcctgagg

SEQ ID NO: 557809 - DNA, 83 bp, Homo sapiens
ctttgggcctattatggtcatttctaaattccaaaatggtctctgctggatgaaccgaatcctaacagtccagccaatagcca

SEQ ID NO: 557810 - DNA, 100 bp, Homo sapiens
cctggccaggaggtcggccagcggtttgcactagacatgacgagggatgaatacaacgccctgcccgcctggaagcaggtgaacctgaagaaagcaaaag

SEQ ID NO: 557811 - DNA, 100 bp, Homo sapiens
tccaatcttgtggttgcagctttccgtacggcctcgaaaaagcccaagacagcagaagcagacacctccagtgaactagcaaagaaaagcaaagaagtat

SEQ ID NO: 557812 - DNA, 83 bp, Homo sapiens
ggtggaactgggcgagctgcggctgcgggtgcggcgggtcctggccgaagcaattctgtggtgttcttggtcacacatttatg

SEQ ID NO: 557813 - DNA, 75 bp, Homo sapiens
acctgtgaccacccctgaagaaattgcacagacctttccaaagtgaaactgatgagatttgatgatccactgttg

SEQ ID NO: 557814 - DNA, 89 bp, Homo sapiens
ccgggagtaggagactcagaatcgaatctcttctccctccccttcttgggacactggcccagggagagctgaatgagatgaggacccgc

SEQ ID NO: 557815 - DNA, 101 bp, Homo sapiens
cccgagccggtgcagtacacacactggaacacacaccagccgcctttatttgaaggtagacgcatcgaatttgcagaacaaataaataaaatggaggctag

SEQ ID NO: 557816 - DNA, 75 bp, Homo sapiens
actctctgacttaccttctcaagttaacttctcaggtcccccggcagagggcagtagagatggccggcccaaggc

SEQ ID NO: 557817 - DNA, 75 bp, Homo sapiens
tgcatgaccagttctggagctactggaatagcatccgtacccttccgaagagcagaagaaacagttagcgcaaga

SEQ ID NO: 557818 - DNA, 51 bp, Homo sapiens
gcctagcacagaccttctgatgttgattttaccaaatgttgcaagaactct

SEQ ID NO: 557819 - DNA, 113 bp, Homo sapiens
cgcgcgcagggcctgcagcgggagctggacggcgagcgcgagcggcgcgagaaagttttaaaatcaaagatgggaaaatcggagaaaattgcccttccccatggccagcttgt

SEQ ID NO: 557820 - DNA, 95 bp, Homo sapiens
tacgagtgcaacatctgcaaggtccgcttcaccaggtattgttgcagcatctggcagtgagactgaggatgaggacagcatggacattcccttgg

SEQ ID NO: 557821 - DNA, 100 bp, Homo sapiens
cattgctaatgactgctacaagcatctattgctggcaccatctgacgtggcaggctgggggatttttatcaaagatcctgtgcagaaaaatgaattcatc

SEQ ID NO: 557822 - DNA, 100 bp, Homo sapiens
ttgatgatattgtggatcccaatgattcagatgtggaggagaatatatcctctaaatctgatactcctgctttgaacttgctgtgggagaagtgttgcag

SEQ ID NO: 557823 - DNA, 100 bp, Homo sapiens
tgcaaccttgatgaacagctcaaggtctttgtgtcccgacactctgccaccttctccagcattgtgaaagtggtctgcgcccagggcttgcaggcaaagg

SEQ ID NO: 557824 - DNA, 100 bp, Homo sapiens
cttgacgttcctgacgaagcaggagatcctcctgaccatggccaacctggagcgcaccttcatcgccatcaagccggacggcgtgcagcgcggcctggtg

SEQ ID NO: 557825 - DNA, 50 bp, Homo sapiens
ctcggcgccgcggctcttttctaaaagtaccacgttgatgagcgaacaat

SEQ ID NO: 557826 - DNA, 82 bp, Homo sapiens
ccgggagatcccaggcggtgacagagtggagccatggctagaggtgtccctggccagtgtccttccacctgtccacaagcat

SEQ ID NO: 557827 - DNA, 100 bp, Homo sapiens
cacaacagcaacagctgtgatcacagtcactgacaccaacgataatcctccgatcttcaatcccaccacggttctgtacagagtaatgagatgtgtgacg

SEQ ID NO: 557828 - DNA, 100 bp, Homo sapiens
atgaggaaggacacttggaaattgaacaagcgtcacttgacaagcctatagaatcgtttgcagaaaaaacttcagcatgtgccaggaacacaacctcacc

SEQ ID NO: 557829 - DNA, 75 bp, Homo sapiens
cggagaccagatcaaaggaccggacaaagaggaggtgtggatgaggtcaccattgtcaacattttgaccaaccgc

SEQ ID NO: 557830 - DNA, 82 bp, Homo sapiens
tgattttggacttcatagcctctagaactgcgtttaaatgcagaattgcaggcaaaaacagctgacgtggttcaacaagcta

SEQ ID NO: 557831 - DNA, 82 bp, Homo sapiens
aactggagagagaccagacctgcaagctctttgacacacagcagttcttgtcaggccctgaagaggaaagtgaggatgactc

SEQ ID NO: 557832 - DNA, 75 bp, Homo sapiens
attccaagtaactcttatttgtgcgtcagcatttatcccgtttgccaaccattgatccgaataccaggaccctgc

SEQ ID NO: 557833 - DNA, 100 bp, Homo sapiens
gaaatagtaggagaatcaaatgataaactgcgaggacagagccactggacggcaccgaaagcgaaggaagctcctgctcctcctaaagccgaagccaaag

SEQ ID NO: 557834 - DNA, 116 bp, Homo sapiens
cctcaccatacaggaacagggcagacgttagcgtgagtgatcactctcaatcccggggtcatggaggacgctggcggcggcgaggagaccccggccccggaggccccgcacccccc

SEQ ID NO: 557835 - DNA, 89 bp, Homo sapiens
tgacaagtgatgagaagctgtcggagcttcccaagattgttctctggggccggactgagaaatgcctgaaggagacgacggaggagatc

SEQ ID NO: 557836 - DNA, 99 bp, Homo sapiens
atgagaggatgtggtggtctactctgatgtcaatcttgagggctagtgcaggtcgtaatctgaaggagtggctgagggagcaattttgtgatcatccgc

SEQ ID NO: 557837 - DNA, 82 bp, Homo sapiens
ggccgtggcgggtgccgagggcccggacgagggtgagaagccctaccactgcaactgggacggctgcggctggaagtttgcg

SEQ ID NO: 557838 - DNA, 83 bp, Homo sapiens
catcgcaaccaccgccctggccatctaccatgtgtccacagatcctggtccctacaaataagcctgctcatgtgagataagaa

SEQ ID NO: 557839 - DNA, 74 bp, Homo sapiens
gaagtcactcataagcgcgctcaagaggaacctccacaaggagctcattttctttccagaagtctagatgatgc

SEQ ID NO: 557840 - DNA, 83 bp, Homo sapiens
aggaaatcaaggacttcctgctcacagcccgacgaaaggatgccaaataattatatccagatcgagagacagaagattctgaa

SEQ ID NO: 557841 - DNA, 101 bp, Homo sapiens
cattggccggcaacttgttccagtctggtaggacggcccttcagatcggggacagcctgaacaccgaaaaagcgacactgattgtcgtccacacagatggg

SEQ ID NO: 557842 - DNA, 80 bp, Homo sapiens
catacgactgaccctggagctgaaggccaggttttgcagtggtctgaggatatgatggatgatatctgtcaggagcaatt

SEQ ID NO: 557843 - DNA, 88 bp, Homo sapiens
aactcaaccccttctcttccaaaagttgaaaacgaggcccactgcgactttgtgaagctgcgggagatgctgattcgggtcaacatgg

SEQ ID NO: 557844 - DNA, 100 bp, Homo sapiens
tctcagaggaggagttccagaagcatgaaggtgctactcgtgagcagtagtcgccatccagacagatggattgtccctggaggaggcatggagcccgagg

SEQ ID NO: 557845 - DNA, 74 bp, Homo sapiens
aagcagccgatccagcctgcggagcctgtggggcagtcctgagaaacatctttgtcctcacctgcatcatcatc

SEQ ID NO: 557846 - DNA, 74 bp, Homo sapiens
gagagcctcacagacccagccatcgttaagatgaagataaaacgttacctgcagagtcgggatgtacaatagag

SEQ ID NO: 557847 - DNA, 98 bp, Homo sapiens
tgggacatcctgagtggggagcagctgcgggtgttccgggagcaccggggctccgtcatctgtctggagcaagagtgagccatggagctacgtgtggg

SEQ ID NO: 557848 - DNA, 74 bp, Homo sapiens
attcctcgcccacatctgtgccaggctgagtatgagtttatcagctctggtctctacctagtggtgttattgca

SEQ ID NO: 557849 - DNA, 98 bp, Homo sapiens
ggcgatggagactacagagcaccagagcgagctccactggttcaacagcctctcctccagtttcgaccccagtcacaggacacaagagaatggtcatc

SEQ ID NO: 557850 - DNA, 99 bp, Homo sapiens
ggctgctgtttctcttcgccgacgggtctcctatggacagaagtgcgggcaaggagctttgttcctccccgatgtcaccctcccacagcccacttgcta

SEQ ID NO: 557851 - DNA, 83 bp, Homo sapiens
aactagatctttctgacaacaaactcgaagactggcatgaggatatccgacatgaagccagtgacttcccatgtagagtggcc

SEQ ID NO: 557852 - DNA, 101 bp, Homo sapiens
gggttcgcgcccgccgacccgcgccctgctccctctcagcacctgggcggacggagctgtgccgccagcgtatggccacgcggccaccagaccgacctgag

SEQ ID NO: 557853 - DNA, 75 bp, Homo sapiens
tctggcctttggcacgtcctgctccgtggtgctctatgaccccctggccccttcacagatgtagtcactacaaat

SEQ ID NO: 557854 - DNA, 90 bp, Homo sapiens
ctatgaggccgtggagctggtcccagcaggagcgccaactcaggcagcttgggctgcagccaagatctctgatggctcccagtactatgt

SEQ ID NO: 557855 - DNA, 100 bp, Homo sapiens
aggctgtgttagcgccaaggacttccagcagctgttagcagaggctacaaccactagcacggctgacgatggccctttctgcggagaccgagtcacacat

SEQ ID NO: 557856 - DNA, 83 bp, Homo sapiens
cagctccaaccatgggaggccgcgtctttctcgctctgggcgacgttgctggcagaggaaatgagaagaagcccagtagcgtg

SEQ ID NO: 557857 - DNA, 90 bp, Homo sapiens
accttaataagaaagaaagaagagtaggaactcctcaaaaacacagatatgtagaactcttcttgaattctacagcaggagcaagcggtg

SEQ ID NO: 557858 - DNA, 98 bp, Homo sapiens
ggcaagaaccccatgaaagctgtgggactggcctgatgagattgagccacgcccagtgtttgagaagaagcccctggtatgggaggaggatatggagc

SEQ ID NO: 557859 - DNA, 98 bp, Homo sapiens
gccggcccagactccactccccagctgtgaaaggcagctgatttagaagaaagttttaatgaacatgaactggagccctcatcacctaaaagtaaaaa

SEQ ID NO: 557860 - DNA, 75 bp, Homo sapiens
tgaaggtacacccaatagagagagaaagtttcattgtgcaaatctaacttcatggcctcgctggctgtattcctt

SEQ ID NO: 557861 - DNA, 74 bp, Homo sapiens
gtgccctacttcaaggataagggtgacagcaacagctcggcgggctggaagtacacagtgtatagtcaagccag

SEQ ID NO: 557862 - DNA, 100 bp, Homo sapiens
caccgccatcgggatgccagtggagaagaggtacaacagtgtcctgttcggagaactgcagccagctcatccagaccatcgaggacacaggcaccatcat

SEQ ID NO: 557863 - DNA, 96 bp, Homo sapiens
ctcccgagtggctgggactacaggatgagttccacccgttcatcgaggccctgctgcctcacgtccgcgccttcgcctacacctggttcaacctgc

SEQ ID NO: 557864 - DNA, 51 bp, Homo sapiens
gagccctgcgatactattatgacaagtgctgctcacggccgtgaactgcta

SEQ ID NO: 557865 - DNA, 51 bp, Homo sapiens
tagtcatggcagaagacctccatgattctaccagaaaggaatgaagaacag

SEQ ID NO: 557866 - DNA, 100 bp, Homo sapiens
tgatggtctttttttggatgctgacatgtacaacgctctctgtaagaccctgcagcgtgactgtttggtctgggatctgccgatatgggggatatgaaga

SEQ ID NO: 557867 - DNA, 74 bp, Homo sapiens
ggaataagcctggaagaaaaagatacaacgaactagcacaacgaggattgtggtggtgccatgcagcaagaatc

SEQ ID NO: 557868 - DNA, 50 bp, Homo sapiens
atcgcccaatccacatgcttttccagaacccagcttagactagaaagtct

SEQ ID NO: 557869 - DNA, 89 bp, Homo sapiens
gcgaaggattgtggtcccgcctcacctggggtatggagaggaaggaagaggagagaagatgactgaggaggaggtggagaccgttctgg

SEQ ID NO: 557870 - DNA, 98 bp, Homo sapiens
atgaacatgtttactggtaacaataagatctgtggttggaattatgaatgtccaaagtttgaagagttaccagatgtatgctactcatggtgggtcct

SEQ ID NO: 557871 - DNA, 100 bp, Homo sapiens
cctcattccaagttccaggattaattctgtgtttctgaaagatctatccagcactccgatggccagcaacaacaccgccagcatagcacaagccaggaag

SEQ ID NO: 557872 - DNA, 90 bp, Homo sapiens
gcttctccagcgctccttgctcgcaaggcgggggaggcggcggcccagccacgatggtactccaaagattcaggtttactcacgtcatcc

SEQ ID NO: 557873 - DNA, 74 bp, Homo sapiens
agaagatgagaccgcaattcgagaatcaaagggccgggagcgatggttttaaaatcaaagatgggaaaatcgga

SEQ ID NO: 557874 - DNA, 82 bp, Homo sapiens
tcccttcacccgggctccgctcttgccttctccacacttgtttggtcttaaccatgaacttctctggaggagggaggcagga

SEQ ID NO: 557875 - DNA, 75 bp, Homo sapiens
gcacctgcacatctccagacggatgttatcaatactctggctgaccatcatcatcgtgggactgactttggtgga

SEQ ID NO: 557876 - DNA, 97 bp, Homo sapiens
cctgaggaagaagagcaagtaatacatgaagatgatgaaagaccttctgagaaaaggtatcagttagcagagcaatcaagccctttgcagaacctgg

SEQ ID NO: 557877 - DNA, 100 bp, Homo sapiens
ggaaaattactgatacagagacgatggtcggaatcagatttgaaaatgaaagtgtaaaatttatgaagaccattcctggtacagcactggtagaaatggg

SEQ ID NO: 557878 - DNA, 100 bp, Homo sapiens
aacaagtgcaaaggccctttatgaagaagcagactacagtgcctttggtacagacacgctaataaagaagaagaatgttttaaccaacgtattgcgtcct

SEQ ID NO: 557879 - DNA, 75 bp, Homo sapiens
tccggagcttctcagaagacagagggttttcttttgagatggaggagatgtataagaaagctcatgctgctatac

SEQ ID NO: 557880 - DNA, 109 bp, Homo sapiens
gtgatggcggtggagactctgtccccggactgggagtttgaccgcgttgacgacggctcgcagaacactacaacaacaggagtgcaaacttctctacagccgaaaagag

SEQ ID NO: 557881 - DNA, 75 bp, Homo sapiens
cctgcgcctggggctcacggacatcaacgaggcctacgtggagacgctgaaggaatcagagatcattgatttctt

SEQ ID NO: 557882 - DNA, 100 bp, Homo sapiens
ggcctctggagtcaaatacaccaagtcgtaaacctaaactgggacaggaactgggccggggccagtatggtgtggtatacctgtgtgacaactggggagg

SEQ ID NO: 557883 - DNA, 100 bp, Homo sapiens
tctcaagttttctctcacccatccatgggaagccctgctactgctggattagcgccagtcttggattcatgcagaacctggcagatttctttcagtgtgg

SEQ ID NO: 557884 - DNA, 83 bp, Homo sapiens
gccgagtgcagaagatctgggtgcccgtggaccacaggccctcgttgcccagatcttcatggcggctgaagagatgcattggc

SEQ ID NO: 557885 - DNA, 100 bp, Homo sapiens
ttcatggacatggccatgctcgtggagagccagttggtgtacatgggttttgatgcactcgtggccgaagctgcgctgagagtgttcagaggcaacgtcc

SEQ ID NO: 557886 - DNA, 75 bp, Homo sapiens
tttaggtatcaccactaaaatctccaggggcaccattgaaatcctgagacctgcggctccgccccagaggccgcc

SEQ ID NO: 557887 - DNA, 90 bp, Homo sapiens
gagctgtccatgcagccatggaacccgggttacagcagtgagggggccacggctcaagagaggaaggacgcggccgccatggaccccatg

SEQ ID NO: 557888 - DNA, 82 bp, Homo sapiens
agcgcggaaatctggaaccgggatggcgacgtctacactgagtcggaggcgaagggcgaactttctgaccaagtatacaact

SEQ ID NO: 557889 - DNA, 134 bp, Homo sapiens
tcgaaattcctgaggcgctgggagccgcaccacctaacgctggccgacaacagcctggcgtccgccacggtgactctgttttgagaagtgcaaccagatctctcctggaattcaacacaacagtgagctgtgac

SEQ ID NO: 557890 - DNA, 75 bp, Homo sapiens
ccgctggcccctcgcgcgtgaggatctatctcagttttggggcagtgccgtgacaatgttgagccaaaaaagttg

SEQ ID NO: 557891 - DNA, 100 bp, Homo sapiens
ctggccccggctctctggaccttgtctcgctcgggagcggaaacagcggcagccagaggtggaatgaatcttacttgttgaatatcttctggttactagt

SEQ ID NO: 557892 - DNA, 100 bp, Homo sapiens
aacagacagtttttgtttcaaaagaaacatgttggaagatcaaaggcacaggctgagggtaaaaagctgggattggtaggctgggtccagaacactgacc

SEQ ID NO: 557893 - DNA, 82 bp, Homo sapiens
cggagcccgagcagccgccgccatggcaaggcgccatgttttggaagtttgacctgcacacaagctcgcacctggacacgct

SEQ ID NO: 557894 - DNA, 135 bp, Homo sapiens
ggatgaaaacgaagatgacgtgtatggaaactcatcaggacggaagcacaggggccactcagagtcgcccgagaacaggaggatgcattagcacaacaggcctttgaagaggctcggagaaggacacgcgaattt

SEQ ID NO: 557895 - DNA, 83 bp, Homo sapiens
caaggacggcgttctggatctcaaagcgaacaccttccaccatgaccacctcagcaagttcccacttaaataaaggcatcaag

SEQ ID NO: 557896 - DNA, 100 bp, Homo sapiens
gcggcggcggcctcggctgaagaaagaaggtgggagcggagagcgcaggcgtgaggagctgatcacgcagtacctggctgagcttcggaaccccgaggag

SEQ ID NO: 557897 - DNA, 83 bp, Homo sapiens
gtgaaaaggtggagatggcgttagaaggcgctgaacgaatgcaggaatttgggaactgagctgtgcaagtgctgaagaaggag

SEQ ID NO: 557898 - DNA, 100 bp, Homo sapiens
ggggaccctcatcaacaacgtggaaagtgagccaggccggggtgcccaatatatccgagctgcagactggggcagcacctactccgtgtcagtggtggag

SEQ ID NO: 557899 - DNA, 83 bp, Homo sapiens
ctccgggcccccaggcatggctagctcggagaatggggtactaagagaaaagcacgaagctgtggatcatagttcccagcatg

SEQ ID NO: 557900 - DNA, 100 bp, Homo sapiens
gatcgtacatcgagacctcaaggtcaccatgtacttgacaagatttcatttacttaagtgccatgttgatgataataaaacaattcgtactccccaatgg

SEQ ID NO: 557901 - DNA, 74 bp, Homo sapiens
tcctgtcgtccgttctctcaggctcccgttcagatccgaattcgagatccaaaccaaggaggaaaggatatcac

SEQ ID NO: 557902 - DNA, 82 bp, Homo sapiens
acagaaatcttgaaacagtgtctcctgaaaggaaggattaaactgcaaatatctcatgaagctgctgcctgtatcactggtc

SEQ ID NO: 557903 - DNA, 93 bp, Homo sapiens
cagctccccacgctgcatcatgagtgcagccggctgcaggagcagctagcgcaggtcttgggcgtctttggtactggcttttttaggggtctg

SEQ ID NO: 557904 - DNA, 100 bp, Homo sapiens
gtccccgggggcggggaaagaggccaattcctgtccccccagcagcatggcatcgtgtgctgaaccctctgagccctctgccccactgcccgccggggtc

SEQ ID NO: 557905 - DNA, 75 bp, Homo sapiens
gcgtggaagagttggacggccctgcggctctgcgccacaggtcagcctgccagtatactggggggcagccatagt

SEQ ID NO: 557906 - DNA, 100 bp, Homo sapiens
aaaatgagtctacagttataccaagtggatagtagaacttatctactggatttccgtagtattgatgatgctgcagttggagaagaaacttgaacgtgaa

SEQ ID NO: 557907 - DNA, 100 bp, Homo sapiens
cctcacttccccggggtgtaataatgttaactgagggcttatttcaaaacctttgtccctcagttccaggaggcagcatttgccaatggaaagctctagg

SEQ ID NO: 557908 - DNA, 83 bp, Homo sapiens
attcgggtgtcggaaccagtgctttccctgccggtgcgcaggggaagcgtgactgtgctcagaatccagggcctgaaaaccca

SEQ ID NO: 557909 - DNA, 82 bp, Homo sapiens
gcgggagtgttcgttgtgccagcgactaaaaagagggtggcccagttgaaatccttcccttcctctaccttggaagtgccta

SEQ ID NO: 557910 - DNA, 75 bp, Homo sapiens
aaatgtttgacgacactgatggtttgctcaatagtggcataccagccagctggagacaacagtcacacctttgat

SEQ ID NO: 557911 - DNA, 82 bp, Homo sapiens
aaggattgtcctgagaagatcctgtattcttggggagagttgctaggaaaatgcaggagtcctggcaaaataagcatgcagg

SEQ ID NO: 557912 - DNA, 83 bp, Homo sapiens
gttagaactcgcgtttccacttcagagatctgcttcctgcctgacacagctcacttcaagaagtgcacaatgtcagaacgtgg

SEQ ID NO: 557913 - DNA, 90 bp, Homo sapiens
cgtcgtgcacgcgggccagaggcgaaatgagccgtcagactgctacagcattacctaccggtacctcgaagtgtccaccatcccagaggg

SEQ ID NO: 557914 - DNA, 75 bp, Homo sapiens
ggaaaatcatattatagatggagtaaaggatgaatctggttatagatggacaagagacgatcattctgcaagcag

SEQ ID NO: 557915 - DNA, 90 bp, Homo sapiens
ctggacctccaaggaagccacgtgcagacatctacaaccttcgatctcctgacgatataattaatggatttgccttaccactaaaagaag

SEQ ID NO: 557916 - DNA, 100 bp, Homo sapiens
tctcgcttgtggactccgatatattgcccttcttcccttagaagaactgctgaaccgactctgagaaatttgcaattgggagcagtagtttcagcccacg

SEQ ID NO: 557917 - DNA, 80 bp, Homo sapiens
ctgagacctgccgtgctgggtgtgtactaatggtcacttgatgtgcgctggctgttttatccacctactagcagatgccc

SEQ ID NO: 557918 - DNA, 75 bp, Homo sapiens
atcctgccgcggacttctctgcacagcatccctgtgacagccaaaacagagtggagtacgagaaaagggtccgag

SEQ ID NO: 557919 - DNA, 83 bp, Homo sapiens
gaacgaggcaaggagctaaagcagcgtgcgttcagccctggggaccccaaaatgtatgtacagacagtgcttgatgttcataa

SEQ ID NO: 557920 - DNA, 50 bp, Homo sapiens
agtccccagagtatttctatgtggctaccaagtcaggattgttaccccca

SEQ ID NO: 557921 - DNA, 83 bp, Homo sapiens
cggcagtccacccaccgccgccgcctcccaggccgactcgcgggccgctgcacccaccgccaaggacaaaaggagcccagcgc

SEQ ID NO: 557922 - DNA, 83 bp, Homo sapiens
gagagcgtgaccgagagcgcgaatatcgtcatcgttagaaggaattgaatgatctggcacgggaccctccagcacagtgttca

SEQ ID NO: 557923 - DNA, 98 bp, Homo sapiens
agcccttagcgtggactgggctggccccggaagcccccacgggctctacctgaccctgcagcacccccaggcccacgtggacatctacgagaaacagc

SEQ ID NO: 557924 - DNA, 76 bp, Homo sapiens
ccgcaaagcagattctatttttactgaagaaggagagaccacactgccatgcctccctctgggccccgaggaaccc

SEQ ID NO: 557925 - DNA, 100 bp, Homo sapiens
tgactgaagcgcccgtccattccaagaatttattgccatgtacacttacgagagttctgagcaaggagatttaacctttcagcaaggggatgtgattttg

SEQ ID NO: 557926 - DNA, 75 bp, Homo sapiens
agaacagactgtaccgggaaaatgactgcatgttcccctcaaggttaaaaagatcaagtggcatgagcagccttt

SEQ ID NO: 557927 - DNA, 74 bp, Homo sapiens
gaagaccacacactgggaaacatcattaaatccttaagctcttggactcactgaggcagtaaaagaaccatatc

SEQ ID NO: 557928 - DNA, 83 bp, Homo sapiens
cgcgagtgggagcaccaggatctcgggctcggaacgagactgcacggaggaagaaggcacctacgatcaaactctggagttcc

SEQ ID NO: 557929 - DNA, 75 bp, Homo sapiens
attttttctgttctctgttctgtttcccaatgcagaaaagaagggaacccagtgacttgattgtaaaaatttaca

SEQ ID NO: 557930 - DNA, 95 bp, Homo sapiens
cgccttctgcgtctcccggctggtggggaagcctctgcgccgccggcaccatgagggggcagtacccaaaggaaacgctacgaaagaatacatgg

SEQ ID NO: 557931 - DNA, 75 bp, Homo sapiens
caggtgtctcttctcgccctggcggggaagatgtggacgagtgctcactagcagaaaaaacctgtgtgaggaaaa

SEQ ID NO: 557932 - DNA, 98 bp, Homo sapiens
gggaaaagaggaactgttgatatagccagagcccgaaaagaagattactctgcaacagctaaagaaatgcactcggtgatggaaagagagccactatt

SEQ ID NO: 557933 - DNA, 90 bp, Homo sapiens
tatggcagtggcgtgatgatcggggcctctggcatccatataacaggattgacagccggatcattgagtgtggggtgatcagccccagat

SEQ ID NO: 557934 - DNA, 90 bp, Homo sapiens
caaaggaaaacgaggaaagtcccaggatgactactgtgtcaagttacaggaaatacaggaggcagaggaacaaataaaagacaccacgag

SEQ ID NO: 557935 - DNA, 100 bp, Homo sapiens
tgaaaaccctgctgatgtcagtgttatatcctccaggaatactggccaggttgcctgcggacacgctgggcctctgtcctgatgctgctgagctccctgg

SEQ ID NO: 557936 - DNA, 90 bp, Homo sapiens
ctttggttggaagacctattatcagatcaaccaccaaagtgggaaacattgaaatcaaggctgccgcgggcggacacgccagaggaggag

SEQ ID NO: 557937 - DNA, 90 bp, Homo sapiens
gggtatgaataatgactttcctccaagagcacattgcctggtaagatggccacggaaaggtatgatatatttgatccaagacagtccatt

SEQ ID NO: 557938 - DNA, 102 bp, Homo sapiens
aggaagacctcggctgctgccttcgccggttcccattctacttttggtctccgcccactaaactggcgatggaatatgagaggagccctctggaaagaaaag

SEQ ID NO: 557939 - DNA, 137 bp, Homo sapiens
ccgcggagctgctgcagtccttcgcgccctcctcgccctccccaccgacatcatgctccagttcctggctgccaaacgagggattctttcatctggtcggggcagaggaattcattcaagaggtcgaggtgcagttc

SEQ ID NO: 557940 - DNA, 49 bp, Homo sapiens
gaaagagtcaacagcagtggcaacagattcatgttacatgtaaagctgt

SEQ ID NO: 557941 - DNA, 73 bp, Homo sapiens
gcgtggaagtatgtatgacagaatgcgacgaggaggacccatgggccgtggaggctatggaggtggtggcagt

SEQ ID NO: 557942 - DNA, 97 bp, Homo sapiens
tgcgatgtgatgctggagaactttgcacatgtaacatccctggttcgatcctttggtacagaagacagaccgacagatcgtccaataccacctcgag

SEQ ID NO: 557943 - DNA, 83 bp, Homo sapiens
cccagaccctggagcctcagttggaagcagccgatccagcctgcggagcctgtggggcagggaggagtctgctactagtctta

SEQ ID NO: 557944 - DNA, 89 bp, Homo sapiens
cgcccgtgtcggagaccccgcgccggaccctgaggcagcgatataccaacaagctacggcaggagttgcagagcctgaaagtagacaca

SEQ ID NO: 557945 - DNA, 98 bp, Homo sapiens
ggagaaatgttttgtttgactccagtgttaagagaagaaatgaggacatatcagtatcgggattgcttggcattttgtacagaaccagtttttgccag

SEQ ID NO: 557946 - DNA, 50 bp, Homo sapiens
gaggaagcaatacatccagtatgaggttatgaagacagtatggagtttcc

SEQ ID NO: 557947 - DNA, 90 bp, Homo sapiens
aggagccacaaagaagaaaacatttcttttaatttttaaacttggtttgaaagttgtggacatcggatacccaaggagacgaagctgaag

SEQ ID NO: 557948 - DNA, 82 bp, Homo sapiens
ctcgaccccagaggctcagatgaaagaccgacccggttctttcagaggacagtactctgacctgcatgcagcattacgagga

SEQ ID NO: 557949 - DNA, 90 bp, Homo sapiens
gctggaagggatgtcgtctcagcagtgctcgggcgcaggaaggaagcagccaccctcgccatggcctccccgcccgcctgcccctcggag

SEQ ID NO: 557950 - DNA, 100 bp, Homo sapiens
gaggatgttcaggacatggcccctgtcttcgtgggcacaccctactatggctatgtgtacgaggacacccttccggcacagaggacgaggagcaagctgg

SEQ ID NO: 557951 - DNA, 76 bp, Homo sapiens
gataagcaactggattttttaactgaagatagtgcctttcagccctaccaggtgaccccagtggctgaaagcagga

SEQ ID NO: 557952 - DNA, 90 bp, Homo sapiens
gttcagaagagccaaggaataaacatgcaatgaacccaaaagggttttgcagcatttggacaaacaaagccagtagtaaccccttttggt

SEQ ID NO: 557953 - DNA, 75 bp, Homo sapiens
ccaagatggagactgccgagcagccttgagccgacctagaggatcaagacataatgggagcatttttagacaagc

SEQ ID NO: 557954 - DNA, 100 bp, Homo sapiens
gaaaagccctgtcaaagcaagagatggctagtgcttcatccagccaaagaggtcgtggaggtggatctggcaattttatgggtcgcggagggaactttgg

SEQ ID NO: 557955 - DNA, 90 bp, Homo sapiens
ggaaatttggccagttatccaattgatgaactagtagatagagccaaacaatcttttcaagatgcagacagacatgctgaactatctgga

SEQ ID NO: 557956 - DNA, 137 bp, Homo sapiens
tatcccgacgagctgccgtggacccagggctgagccgtgaccatgagggccatcccgaaactgtgattgttttctgggcctgagccaagattctgccaaaagactgcgctttgtggcaggagtcatctttgttgacg

SEQ ID NO: 557957 - DNA, 100 bp, Homo sapiens
tgatagcatcaaaaacaacattgaagaggaggaaaaagaggttggctcagctttaccgatttgttacaactcaagcaagggccagcagaaattctctttt

SEQ ID NO: 557958 - DNA, 76 bp, Homo sapiens
gccgcccgccgggccgcggacactgtcgcccggcgcccagccctgggcgctgcctatggcacagccaagagcggta

SEQ ID NO: 557959 - DNA, 75 bp, Homo sapiens
cagccacaacttccagctggagagcgtcaacaagctgtaccaggacgaaaaggatgagttccacccgttcatcga

SEQ ID NO: 557960 - DNA, 100 bp, Homo sapiens
ggcctctccagggagtgctctgttcacggctccatcgctgttaggggaaatttgcagtggtgagaaaatgtataaagaaagattctgggaaagaatttgc

SEQ ID NO: 557961 - DNA, 75 bp, Homo sapiens
gatcaacctggagctctacgcctcctacgtttacctgtccatgaggcaaggtctcactcggtcatccaggttgga

SEQ ID NO: 557962 - DNA, 80 bp, Homo sapiens
ctcatcgagaagcgggctttccaggacaagtactttatgatagggggatatgagactttctactcggaatatcctgagtg

SEQ ID NO: 557963 - DNA, 82 bp, Homo sapiens
aggaaatctggccgccgccgccgcgagcgctcccgagtatctgactgtcttctctcagatgattgcatttcatgatccagag

SEQ ID NO: 557964 - DNA, 71 bp, Homo sapiens
aaagacatggagattctcttaaaaagggagatgcacttatttacatggaaccagagaaacaagtgatgtcc

SEQ ID NO: 557965 - DNA, 78 bp, Homo sapiens
aaaactcaggcttcgccacctgcgtgcaaagttcatgatcaagagggcccaaggacggaagcgctttgggatgaagaa

SEQ ID NO: 557966 - DNA, 98 bp, Homo sapiens
gtcgcgccgtgacctgtacaggtcgcgggagtcgtagggaggacgccgggacacctggaagccgagaaatgggcgtctctggccgagcctctttttgt

SEQ ID NO: 557967 - DNA, 80 bp, Homo sapiens
caggtctaccgggccacgcaccgcctgctgctgctgggattttttatcaagcagaaatgcatcgaacaacgagaatcaag

SEQ ID NO: 557968 - DNA, 83 bp, Homo sapiens
tccaggcacgcgaggcccctcagtggtatgtgtgcaacagagagaaattatgcgaatcactccaggctgtctttgttcagagt

SEQ ID NO: 557969 - DNA, 75 bp, Homo sapiens
ggcaaggagctaaagcagcgtgcgttcagccctgggtgtgccggtccaacaaaagcccttgggtctgtttgactt

SEQ ID NO: 557970 - DNA, 102 bp, Homo sapiens
aaaactcatcaccttaaggtgttaagtgtaaggatcttcatgatgaaatttctgtaaatgtactaaggctcgtacgtctgcatcgattatcttacgtggggc

SEQ ID NO: 557971 - DNA, 100 bp, Homo sapiens
cttccgacggcctggtcctgtgttggatggcaagcatgtggtgtttggcaaagtgaaagaaggcatgaatattgtggaggccatggagcgctttgggtcc

SEQ ID NO: 557972 - DNA, 98 bp, Homo sapiens
gtgaagaaggcgcatcactcccagctgcgcaaagcttgcgaggtggcgttagagtctcactgtatcacccagactggagtgcagtggtaccatctcag

SEQ ID NO: 557973 - DNA, 100 bp, Homo sapiens
cctctggccagctgactgcacttcttttttgagaaaggaaggaatatatcctgactgattgtggtgatgatgtccagcaactctgtgaagcaggagaaga

SEQ ID NO: 557974 - DNA, 100 bp, Homo sapiens
tggcttgtcaggaactcgactcagacgtggataaagataatcccgttggagaccttccccagacgcctccaggggctgtcccagacccctctcttgccag

SEQ ID NO: 557975 - DNA, 82 bp, Homo sapiens
gggtctagatgtaaatgtcagtggaaaggagagctaccatcactaagtataaggatgcatttatgaaagcaaatcctggcta

SEQ ID NO: 557976 - DNA, 98 bp, Homo sapiens
ctttaataagtgttgcgctggttcaaggttgggcattgggtggaggagcagaatttactacagcatgtgatttcaggaattgcattttgtgaaaaaag

SEQ ID NO: 557977 - DNA, 100 bp, Homo sapiens
tcttcagatcgttctgattcagagcgaggtgctggagaatctggtaaaagcaccattgtgaagcagatgaggatcctgcatgttaatgggtttaatggag

SEQ ID NO: 557978 - DNA, 100 bp, Homo sapiens
caaaggaaagtgtgctaataaggtgtgatccctcacatccacaaatctctgattggaaagaagggacagcagaaaactgcttagagggatgctttaacca

SEQ ID NO: 557979 - DNA, 75 bp, Homo sapiens
agcgaccgggagaacatagacggaacccacttccagcgggtgatcccagaagatggccctgcagctcagaaccca

SEQ ID NO: 557980 - DNA, 82 bp, Homo sapiens
agcggttgggctcgcggcgagcggacggggtcgagtcagtgcgttcgcgcgagacgttggacctctcgaacaaccagctgag

SEQ ID NO: 557981 - DNA, 75 bp, Homo sapiens
gggacaagtcggcgccccagagcggacgaggtagctgtagccatacctaatagacctcctgatgctgtacttaca

SEQ ID NO: 557982 - DNA, 95 bp, Homo sapiens
ggccgtgttgctgatcgcctgggtggttgttggcgtgtccctgcagcgaaggatcctggctctggcacgttttgggggaggtgcctgcaggaccc

SEQ ID NO: 557983 - DNA, 100 bp, Homo sapiens
gagacttttggggggaaactaggtcgatggtcggcggcgcccggatgggcagctgaggtttctctgtcattcacagaaaaatgaatcatttaaacctttg

SEQ ID NO: 557984 - DNA, 50 bp, Homo sapiens
ccaagatgccatctgttattaaagtggatgacaatattccacttagggta

SEQ ID NO: 557985 - DNA, 90 bp, Homo sapiens
atctccttctttgagattgatggacgtaagaacaaggacccatacaatgtactggccccaaagggagcttcaggcaccagggaagaccct

SEQ ID NO: 557986 - DNA, 100 bp, Homo sapiens
agagcttttgaagctggatggggttttgccctcaccaaaactttctctcttgataagtgtgcagtttcctcaagggcagagattttgtccatcttgtcca

SEQ ID NO: 557987 - DNA, 100 bp, Homo sapiens
aacagctcatcgccgcatcaagagaagatctggccttatgcccaggcctgggccctcagaaaggttgtgagtcccggcccagcccctccacccccctgcc

SEQ ID NO: 557988 - DNA, 111 bp, Homo sapiens
tatgaatcaaatgcaacaggaaaaagagctaacagaaaacattttgaaagtgtgtttgaaagatgtatggtgatcttgaaacctccagacacaagaaaacttctagcaaat

SEQ ID NO: 557989 - DNA, 51 bp, Homo sapiens
gaagaagccaaaaacattctggggcttggcctctgtgttctccaaccgcac

SEQ ID NO: 557990 - DNA, 101 bp, Homo sapiens
ctcttgcttttcctcgctggggtgtacggttactataacaacagtaccaaggtggctgtgaaaaccctgaagccaggaactatgtctgtgcaagccttcct

SEQ ID NO: 557991 - DNA, 74 bp, Homo sapiens
tatcaatgatttcatgtttgagcagcaaaggagaacttttgcaacatatgttgaaaacgaggcccactgcgact

SEQ ID NO: 557992 - DNA, 50 bp, Homo sapiens
gggatgcctgcaccattactggtctcctaaaaacccagaacagaagatca

SEQ ID NO: 557993 - DNA, 75 bp, Homo sapiens
cgtcctcgaagccaccagctcccgggacccgctcagcgatagtttatgtggccgaggcagacaagtggaattagg

SEQ ID NO: 557994 - DNA, 78 bp, Homo sapiens
gaggattcagtcttgcagccactcgagacatcacttctgttcaacactctgctccagccaaggtggtgagggcagctg

SEQ ID NO: 557995 - DNA, 75 bp, Homo sapiens
gggaggtgaatttccatgtcaacatagtcctggcaggtgcaccttggtaaagatcctatgtcttttaaacttaaa

SEQ ID NO: 557996 - DNA, 75 bp, Homo sapiens
cctcagccttccgagtagctgggattacaggttatggaattccactgaaagacggagatgagaaaacagatgaag

SEQ ID NO: 557997 - DNA, 90 bp, Homo sapiens
gagaatgcagccgtgtgacagtaactgaacattggtctaaagtctttccaaaaggtcaaggttcacaagcaatacgtttggtttaatatt

SEQ ID NO: 557998 - DNA, 100 bp, Homo sapiens
tcctccctcttctcccgactatttggcaagaagcagatgcgcattttgatgggaatcgagcccactggaaacatggtgaagcagccagccaagttcactg

SEQ ID NO: 557999 - DNA, 90 bp, Homo sapiens
cttcggattatagtctctgaccatgtggaattcccagtacgacaggcagggtatatttacttctggcacatgggaagagaaatcagatga

SEQ ID NO: 558000 - DNA, 137 bp, Homo sapiens
cgttggtccggacctcaagctacccacgttctagtcccgcctctgtcatttcctagagctgtggcctcggtgtcccagaagcttttgttgacaattccagtttccgaacaaaacatttcggcaatggtgagggcttc

SEQ ID NO: 558001 - DNA, 98 bp, Homo sapiens
acggatagtgaaagccaatgaccgtgaatataatgaaaagttccagtatgcgatttacagatattaacgactccttgggaaaactggacttcagtcgc

SEQ ID NO: 558002 - DNA, 87 bp, Homo sapiens
tgggcatcacgtcccccagcgccgacaccaacaagcgcaagagagacgaaggcttgcacagaaatctggaggcagtatcacctaacg

SEQ ID NO: 558003 - DNA, 96 bp, Homo sapiens
gtttaataatgatagaatgaagaccacaataaaagagacctctacttagctcagcaattcttaccttgagagggctgaacccccctcatcgtgtca

SEQ ID NO: 558004 - DNA, 75 bp, Homo sapiens
atttgttaaggattccaagtaactcttatttggttgctgcttttgctcagaggacatccatgaccctaatggtct

SEQ ID NO: 558005 - DNA, 100 bp, Homo sapiens
caagatggcggcggagctggtggaggccaaagatggtggatgtggggggccagcggtcggagcggaggaagtggatccactgctttgagaacgtgacatc

SEQ ID NO: 558006 - DNA, 74 bp, Homo sapiens
caaaattgaaaaaatggttgacctcacccagatatggatcagaaactttcgaagttggtagaagagctcacaac

SEQ ID NO: 558007 - DNA, 100 bp, Homo sapiens
agatccacattgaggtagtggacaaagaactcggttgcctttgaggatgtggctgtgaacttcacccaggaggagtgggctttgttggatccttcccaga

SEQ ID NO: 558008 - DNA, 75 bp, Homo sapiens
cctgccagctttcgccacaggaggaatgatccaggccctgggaggcttctttacttactttgtgattctggctga

SEQ ID NO: 558009 - DNA, 80 bp, Homo sapiens
ccgccggctcatcacccagtctggagaccgcctgcagcagaaaccacggacggagagcgaagtgcgaaaaagccagctgt

SEQ ID NO: 558010 - DNA, 75 bp, Homo sapiens
ctagcgtcctggaattacttcaatcaaagagaagaagaaggaggttcctgctgtgccagaaacccttaagaaaaa

SEQ ID NO: 558011 - DNA, 82 bp, Homo sapiens
ggtccggcgagaggggctgtgacagtcggagtcccaagctgcggttcggctgctgccgagctcaccatggatgatgatatcg

SEQ ID NO: 558012 - DNA, 75 bp, Homo sapiens
agtacccattaatggaagagattgggttcttggtgcttggcatgaggttgaatggatcgcagcagttaccattgc

SEQ ID NO: 558013 - DNA, 100 bp, Homo sapiens
cttcctacggctacgggaaggatcgtccagtggctgaggctggacagagcacaggttcgtgctggccgtgggcagcgccgtctttgatgccatgttcaac

SEQ ID NO: 558014 - DNA, 100 bp, Homo sapiens
atgaattaatacagacttggaaactctgaaagaacttagaatcagcattttgagtttccaggttaactaaggtctcagctgtaaaccaaaagtgagagga

SEQ ID NO: 558015 - DNA, 75 bp, Homo sapiens
aagatggcgactgtcgaaccgtcgacagaggtacgttcttggagacacagcaatgcagaagatggccaagtccca

SEQ ID NO: 558016 - DNA, 82 bp, Homo sapiens
cgcctcgcctcgggacccgcggtccccgctcttgctggtgtcgtgaaaactacccctaaaagccaaaatgggaaaggaaaag

SEQ ID NO: 558017 - DNA, 100 bp, Homo sapiens
cggcgtgctactgtgcgctcgatccagcaccatggggaagcgggacaatcgggtggttatctaccttgcctgctcctatgccacagtgtacctgatctac

SEQ ID NO: 558018 - DNA, 101 bp, Homo sapiens
tgagatgggccgcctcatcactggagccaccagcccaaccgtgttgtatagatcgcggattcaggtgtggctctatgagcaagtgaatatgcggatagaag

SEQ ID NO: 558019 - DNA, 76 bp, Homo sapiens
tcctggaccgcgagagcatcaaactggtgtccatcggtacggcatcagcccggacagcatcatcctgtacgggcag

SEQ ID NO: 558020 - DNA, 82 bp, Homo sapiens
tttggcattgacatttaattttagggtcctttatatagaagggagagtaggtgtaatcgaatcctggaccggaaaggggaag

SEQ ID NO: 558021 - DNA, 82 bp, Homo sapiens
aaaggccagtgactaccaacgtttggaccagaaggtgtgatccctcacatccacaaatctctgattggaaagaagggacagc

SEQ ID NO: 558022 - DNA, 83 bp, Homo sapiens
ttttgtgcagattgccagtctaaaggctaccggctctctgaccagttccacgacatcctcattcgaaagtttgacaggcaggg

SEQ ID NO: 558023 - DNA, 98 bp, Homo sapiens
gagcttaaaacggagtgatcggctttggagaaagctggaagtcgagtgtgctactcaactcaggagatttggagacaaactgaacttccggcagaaac

SEQ ID NO: 558024 - DNA, 76 bp, Homo sapiens
gtcgagacgccgtccgccatccagatctgccggatgcttctggctggcacacctggcttcccctccatgctcagaa

SEQ ID NO: 558025 - DNA, 100 bp, Homo sapiens
gccacaactctgcagtggaccacagcattcctgaaatacatccaggaaagacatggagattctcttaaaaaggtggatgaaactcagtttaagaagatcc

SEQ ID NO: 558026 - DNA, 99 bp, Homo sapiens
cctccctgcgccccgccccgaggttggggctttgaagaatgcagccggatttcctcctctgatgctcctcttcagcctttggtatcctctccttctctg

SEQ ID NO: 558027 - DNA, 109 bp, Homo sapiens
ttcccaggatggtgatccgtgtatatattgcatcttcctctggctctacagcggacccagatgatgtggtaccagttggccaaagaagagcctggtgttggtgcatgtg

SEQ ID NO: 558028 - DNA, 75 bp, Homo sapiens
ctttttcagctactatcgtcattgaaactctctgtatgaaaaagctgatatcaaggggcctgaagacaagaagaa

SEQ ID NO: 558029 - DNA, 49 bp, Homo sapiens
gagccagagcctgcagtcccacacggacacagaatttccaggtgttgtg

SEQ ID NO: 558030 - DNA, 82 bp, Homo sapiens
agacatggaagaggtctgagcagtgggccaccatcgagcagctgtgcattacagatgtagagctaaaacgactgaaggatgc

SEQ ID NO: 558031 - DNA, 75 bp, Homo sapiens
cacagaggcagaccctgcagccatattcatccacaatgcgatacctttcatagggtttggctttttggataatgc

SEQ ID NO: 558032 - DNA, 90 bp, Homo sapiens
ggataaaaccatccatcaattactaccaagtggatgaaactcagtttaagaagatcctcggctacatcaacacggggaagcaagaggggg

SEQ ID NO: 558033 - DNA, 100 bp, Homo sapiens
gaaaaactcgccaaactgcaggcacaagtgcgcattggtgggaaagttaaagcggcaactggggaagaagtatctgctgaggatcttggaggtgctgatc

SEQ ID NO: 558034 - DNA, 100 bp, Homo sapiens
gggctcgagagctcgccccgaacgggggtcttcctcctccgccgttgacagatcatcagaaaagcccttactgaggaaaaacgtgtctcaacaaaaacat

SEQ ID NO: 558035 - DNA, 100 bp, Homo sapiens
cgtcaaagtgcacagcttccccacactcaagttctttcctgccagtgccgacaggacgttggacaagctcaggatgatcattgagagcatgctgacctcc

SEQ ID NO: 558036 - DNA, 82 bp, Homo sapiens
gggaagagaagatcatcgagcatttcaaacgaccatggtgaatccgggcagcagctcgcagccgcccccggtgacggccggc

SEQ ID NO: 558037 - DNA, 83 bp, Homo sapiens
ctcttcctctggcccgaagccttcctttatcgctttcagtggactaaagaggatggacatagaacttccacctctgctgtccc

SEQ ID NO: 558038 - DNA, 75 bp, Homo sapiens
gcgcgagggccctgggcaaggcccgacagccatcccaggcctcaggacctgagttctccgacgcccacatgacat

SEQ ID NO: 558039 - DNA, 100 bp, Homo sapiens
gtcactgggatttgggaagttccttcttctttgctggcactgttattacaaccataggttcaagatgttgttcctataactagttatgacactgctggat

SEQ ID NO: 558040 - DNA, 97 bp, Homo sapiens
cagacagaacagttaatcctcaatttaagcctgatctaacccctagaaacaggacacagcattgttggttttgccatgtactattttacctatgacc

SEQ ID NO: 558041 - DNA, 90 bp, Homo sapiens
gggacattcgatacatcttcacagccacacctgccaaggactttggtggtatctttaggagaaggcagagcccccccaggctatgaatgc

SEQ ID NO: 558042 - DNA, 100 bp, Homo sapiens
atttctgtaacctgctttgtatcttgatgttctgtaatcagcaaagtgtatgtgacccgccttcacaaaataatgcaggattatatgcgtcaggcaggag

SEQ ID NO: 558043 - DNA, 76 bp, Homo sapiens
aataaagcaagatcttatccacagactccaggcatatcttgaagaacatggacccatggatgaaggaccagatctt

SEQ ID NO: 558044 - DNA, 75 bp, Homo sapiens
ccagtctctgatcgaaggggagtttccacagtgattgatgctgcctcaggaagtcctggctgagcaaggttggaa

SEQ ID NO: 558045 - DNA, 101 bp, Homo sapiens
tgcagcagagggagcttgccttgaaggacaagaacagcgccgtcaccagcagggcaacaggtttgtctatgctggctctaactcgggcgtggtccaggccc

SEQ ID NO: 558046 - DNA, 97 bp, Homo sapiens
ttctagaagttgaagttacaaaggaaagaccacagcaagattctttcattcgtctcctcctagcctgggggaccaggctcgaactgaccctggacat

SEQ ID NO: 558047 - DNA, 90 bp, Homo sapiens
agatggcgaccgccatgtacttggagcactatctggacatttgtttcgacgccggaccgcgtaagagacgatgatgttgggcacggaagg

SEQ ID NO: 558048 - DNA, 100 bp, Homo sapiens
atttgttaaggattccaagtaactcttatttgatgtgaaaggaccacccacccaccgtctgtcttgtggtcagtcaccctacaccgagacaacaacgtgg

SEQ ID NO: 558049 - DNA, 73 bp, Homo sapiens
ccgggagttcctccgcaccctgcccggcttcctcatcgtggccgagatcgaacaagactgccaatggagactg

SEQ ID NO: 558050 - DNA, 75 bp, Homo sapiens
cgctggcagccgcggatctcaccgccgctcagggcattggacaaaatccggtatgaaagcttgacagatcccagt

SEQ ID NO: 558051 - DNA, 101 bp, Homo sapiens
gcctcgtgtctgccgtcaaccgcaggaggatgaagctgctgctgggcatcgccttgctggcctacgtcgcctcaacatggccaacgccctggccagcgcca

SEQ ID NO: 558052 - DNA, 98 bp, Homo sapiens
atgagtgtgaagaagccttccaaggggtcatcctgtatatcctcctggtgggctatcctcccttctgggatgaggatcagcacaagctgtatcagcag

SEQ ID NO: 558053 - DNA, 100 bp, Homo sapiens
ggctgaagaaggagccgggggcctatgactggaccccagcggtgaaattcgcctgtgagctggaaggaaacagtgaattagtgccatcttacgattcagc

SEQ ID NO: 558054 - DNA, 96 bp, Homo sapiens
caaaggcactggaggattgagctagatggcagaagattttcaagtcccggctggtggagttgttagtgtcctatggcaacaccttctttgtggttc

SEQ ID NO: 558055 - DNA, 82 bp, Homo sapiens
cagactgactggcacagtggagaaaccgcctcgaaaacggagaagcaggattcactggcaaaatttgctggcagaaaactga

SEQ ID NO: 558056 - DNA, 80 bp, Homo sapiens
gagaatgacagaagttaaaaacaaccaaacaaaagccaggttgaggcctctaggaatactcccccagttgcaagaggcgc

SEQ ID NO: 558057 - DNA, 75 bp, Homo sapiens
gctttgcctgtgagaggaacaagcgtccctgatccagaaggtggacaaatccttcagaaagatcaggaaatcaag

SEQ ID NO: 558058 - DNA, 100 bp, Homo sapiens
gaagaaaattggcaaagctgtggaagactccaagccctactgggaggcacggagggtggcgaggcagatgaagacactgaggctcagagaggttaagtga

SEQ ID NO: 558059 - DNA, 100 bp, Homo sapiens
aaccagatcttggcacgcaggagaatgtgcagtggaggcttgcctcttgcatcagctgagacgccgtgccgctggcttcctgcgcagtgacaagatggca

SEQ ID NO: 558060 - DNA, 98 bp, Homo sapiens
agtgcccttgtgacagggcatgccagagctggtcgttccccatcaggaagtcctcgcagaagtgcaagtcctgaaagaatggactgaagctctcaagt

SEQ ID NO: 558061 - DNA, 95 bp, Homo sapiens
gttggtgattctctgctagatgttgtggttgaaaataatctagatattgatggctttgatgaactgtctcattgtgttgagcctgagccatctca

SEQ ID NO: 558062 - DNA, 100 bp, Homo sapiens
ccaaccatgctcaacttcggtgcctctctccagcagactgcgataatgttaattcaagactctcgaagagaagcttcagtgcagatggatttgagatgct

SEQ ID NO: 558063 - DNA, 78 bp, Homo sapiens
agcggggcaggagcgcttccgcaccatcacctccacggttgtgagtcccggcccagcccctccacccccctgcccccc

SEQ ID NO: 558064 - DNA, 75 bp, Homo sapiens
ctgctttatggacttgcatcaggagtagcaaaatgtacatggcaagtcaaagcaaacgatcgcaagtaccacgaa

SEQ ID NO: 558065 - DNA, 78 bp, Homo sapiens
cgagtgaccgagaccgcggccgggaccgagggtacacggtcctcttctcgcacggcaatgccgtggacctgggccaga

SEQ ID NO: 558066 - DNA, 75 bp, Homo sapiens
cagcaccgccaggcctggatgggccccatctgccagctggccttcccggtctgggaggggctgaatgtggtgaag

SEQ ID NO: 558067 - DNA, 109 bp, Homo sapiens
ccagaccctggagcctcagttggaagcagccgatccagcctgcggagcctgtggggcaggaactgcaagcacatgttgaccagataactgaaatggcagcagtaatgag

SEQ ID NO: 558068 - DNA, 75 bp, Homo sapiens
gccaactgcttcgaagcgccagactttcggagactgtgggagggtgcatctgcccggaagactcagactcctgca

SEQ ID NO: 558069 - DNA, 75 bp, Homo sapiens
tcctcggaagagcgctcccaggagaaacaaagctcccagctcctccagcagccgacaggaggcccgtcaagatgc

SEQ ID NO: 558070 - DNA, 87 bp, Homo sapiens
ccagagagggcccacacgactagaaggacgactgcctggcgcgatacaaaaatgctcagctgtcgcaggccctggaggagctgggag

SEQ ID NO: 558071 - DNA, 75 bp, Homo sapiens
gaggaaagaggaggaaaacaaaagctgctacttatggaagatacaaaggtttggatttaggtggcgagtagaaaa

SEQ ID NO: 558072 - DNA, 101 bp, Homo sapiens
gcagaagccatttcaggagtacctggaggctcaacggcagaagcttcaccacaaaagcgaaatgggcacaccacagacttcacagagaatgcagttgtctt

SEQ ID NO: 558073 - DNA, 100 bp, Homo sapiens
gtgtccgctctgctcggccgcgggctcccggaggactgcagggtaaaaaggaactccaggtctctctttttcaaacactggtgctgctaatgtttaatga

SEQ ID NO: 558074 - DNA, 80 bp, Homo sapiens
agaagttgagcctgatgaagaagaagccttcagtggtggctattatagaggtgggtttgaacccaaaatgacaaaacggg

SEQ ID NO: 558075 - DNA, 51 bp, Homo sapiens
ggattggagagaaacaggaactgaggtcttatatccagatggccaggctca

SEQ ID NO: 558076 - DNA, 98 bp, Homo sapiens
ggaggaggatgactcggatgtctggtggggcggagcagacacagactatgcagatgggagtcaccgttacttcatccccaatccgaggagcaggagat

SEQ ID NO: 558077 - DNA, 75 bp, Homo sapiens
cagagttgttatttttcagcgtgaacaagagtgcaaatggtcaagaaaaggcttcatccggacgaggtggtgcat

SEQ ID NO: 558078 - DNA, 74 bp, Homo sapiens
ttgcagaacagcctcagcctacagtatgctggctatgactattcgcagcaaggcagatttgtccctccagacat

SEQ ID NO: 558079 - DNA, 101 bp, Homo sapiens
ctattgtcactgccatgcctggtggcctgcctgtacccacgagccctaacatccagccgtccccagctcacgggtttcgtggctgtcccaacaaaaaatcc

SEQ ID NO: 558080 - DNA, 75 bp, Homo sapiens
gcccactcgcctcacctgagcctggggtttggaatcacttgctaggagtcttgtctctctgccacccaggacatc

SEQ ID NO: 558081 - DNA, 100 bp, Homo sapiens
ggagatgttgcaggcgccgagagggcgggccagggccgcactccggagactcgcggttgctacgcgcaccatggctggagatcgtcagtatttaaacaga

SEQ ID NO: 558082 - DNA, 101 bp, Homo sapiens
tgccacctgctgcacccacgaatctgcccacccctcctgtaacccagcctgtttcacttcttgatggagcagatggtgctttttacccagatgaaatacaa

SEQ ID NO: 558083 - DNA, 100 bp, Homo sapiens
tgcaaggagaaaaaaatcgggggcaagcaggcatatctcaggaaggtggttatcactaggctaaaactggacaaagaccgcaaaaagatcctcgaacgga

SEQ ID NO: 558084 - DNA, 100 bp, Homo sapiens
cccttggtttgaccagcctcaccccgtggctccttggggccagcagcagataacccagcagccaactggcttcatgcgcgctccactcggaaaaagcggt

SEQ ID NO: 558085 - DNA, 98 bp, Homo sapiens
gaggacctgaagaaactgaagaagaaaatacaacgtatactggaccagaagtttcaggcttccgttacaagatgaggtctgtgtatgctcacttcccc

SEQ ID NO: 558086 - DNA, 75 bp, Homo sapiens
ccgggcccggatgcgggagccagaggccagggaggactacttcgctggcccggtgatcatgtccattgaggagaa

SEQ ID NO: 558087 - DNA, 100 bp, Homo sapiens
tactgagccgtgagagccgcagtggatggctggaggtgcagggccaggaggaacatgaggatcaggtcatccagctgatgaacgcgatcttcagcaagaa

SEQ ID NO: 558088 - DNA, 100 bp, Homo sapiens
aaaattgagacggagctaagagatatctgcaatgatgtactggaggagatgttaaagtaacccatcttgcaggacgacattgaagattggtcttctgttg

SEQ ID NO: 558089 - DNA, 90 bp, Homo sapiens
cttgagtcccagtggcaccactattcagctctcctatgtggacgccgagggcaaccctgtgggtgtggtacagatgaccttcctgcggct

SEQ ID NO: 558090 - DNA, 100 bp, Homo sapiens
tcggaaaaacataccaagaatgatatattgcattcacgcactgagaaaacctttccaacctatgagagaaagagatgtgaagaaagaagacgggtcatag

SEQ ID NO: 558091 - DNA, 98 bp, Homo sapiens
gtggcgtcgtctgcgaccgctgccttctcggggccagtgcctcagtttcaatccaggtaacctttaaatgaaacttgcctaaaatcttaggtcataca

SEQ ID NO: 558092 - DNA, 75 bp, Homo sapiens
gaggacggggaaaaagcggccaaagaagtgaagctgctgctactcggcctccccatggccacccatggaccagtc

SEQ ID NO: 558093 - DNA, 90 bp, Homo sapiens
acagtattacacactgctgaaccaggccccagacatgctgcataggctgaacataacttctttttttcaaagttccctgtgttgtgaact

SEQ ID NO: 558094 - DNA, 135 bp, Homo sapiens
gaggggcaaagctcaagatggcggacaaaacgccaggcggatctcagaaggccagttcaaaggtatgatcctgatattctgctaggatatgagattcagatgcattcctggggttacctcttacaaagggctgcc

SEQ ID NO: 558095 - DNA, 100 bp, Homo sapiens
atgggaaaccacgcaggcaaacgagaattaaatgccgagaaggccagtacggtttcaagtgccccatttgctccaagtctgtggcttctgacgagatgga

SEQ ID NO: 558096 - DNA, 100 bp, Homo sapiens
acagcccaaaccatcatttaccctatggagggcgttgaagggcaagattaagaaggaaagctccaagagggagctgctttccgacactgcccatctgaac

SEQ ID NO: 558097 - DNA, 98 bp, Homo sapiens
atgacgataagcaaccagcatttagagctgtttatgaagcactgagaaatacagaaagaatttactttcaggttttcttacctaaagggagcaaagag

SEQ ID NO: 558098 - DNA, 83 bp, Homo sapiens
ggagaaacacctttaacaatgcttcagagtcaggtgagaagccctaccactgcaactgggacggctgcggctggaagtttgcg

SEQ ID NO: 558099 - DNA, 75 bp, Homo sapiens
cagcattggcgaccagcgcttcacgccactacaagcctgcttgcagcactttacagttttatctgtagcattgtt

SEQ ID NO: 558100 - DNA, 75 bp, Homo sapiens
caagaactggattcgtggcgccacaagctcattcactgtgtagcatcctgaggttagcattacacttctcccagt

SEQ ID NO: 558101 - DNA, 75 bp, Homo sapiens
ttctaatttgaaccatgtttggattgaagccgcctctgtattacttaccagccgcctaaggacgacaagaagaag

SEQ ID NO: 558102 - DNA, 83 bp, Homo sapiens
cgtggccttagctgtgctcgcgctactctctctttctggcctggaggctatccagcgccaagtcctgtatctgccatgtctgt

SEQ ID NO: 558103 - DNA, 95 bp, Homo sapiens
aggatattgacccggagggcaagaagtttgaccgagggcagagcggcttgggtaaatccaccttaatcaacaccctcttcaaatccaaaatcagc

SEQ ID NO: 558104 - DNA, 100 bp, Homo sapiens
tggcgggccgcgcgcgggtctccgtggaagtccgtttcgtgagcagcgccaagaatggcagttcggaaaaccctcattcctcctcagcctcctgatgttg

SEQ ID NO: 558105 - DNA, 83 bp, Homo sapiens
cagcgacagagccaaaatcagagctggaacctgaggagagaggcaacaagattgacctggctgaaaggagagaggtttcccag

SEQ ID NO: 558106 - DNA, 83 bp, Homo sapiens
cggggctgaggcggccgcggggcccgagcgcagggactttgaacatgtcggggatcgccctcagcagactcgcccaggagagg

SEQ ID NO: 558107 - DNA, 50 bp, Homo sapiens
ctcactgcaacctctgcctcccaggctgaggcaggagaatggcgtgaacc

SEQ ID NO: 558108 - DNA, 90 bp, Homo sapiens
cagacaccagccccccaccatgtgcttacagaactccctgaaagatgtgaaagacgtcggcattctacaagtgaaggttttaaaggcagc

SEQ ID NO: 558109 - DNA, 75 bp, Homo sapiens
ggctgctgtgcacaggaatatgggcagttgcagtggtgcagaatggctgacctcagtcttgcagatgcattaaca

SEQ ID NO: 558110 - DNA, 100 bp, Homo sapiens
cacctcttcttgctgcagagagcagcagggcgcatattaaagatcgcatagaggctgtgttatatgcaggaaaattgcctaagaattatgacccaaaagt

SEQ ID NO: 558111 - DNA, 75 bp, Homo sapiens
gtctgttgaggcatctggacaccacacacatcatcagtctggttttcctcctccaccaggcgctccacctccatc

SEQ ID NO: 558112 - DNA, 101 bp, Homo sapiens
atattgaagtgtcaaaatccatagatggaaaagatggctctgaacaagaaggaacacagagggtgcgacagcccagaccctgatacttcatatgtgctaac

SEQ ID NO: 558113 - DNA, 75 bp, Homo sapiens
tgcgacggaaatgtgtcatcgaaagccagacccccagggtggccagcggcagagccagcagacacagcatttctc

SEQ ID NO: 558114 - DNA, 76 bp, Homo sapiens
tatattaatactcctggacctgtgtgtcagttaatgtggtctcccatgtctcattattggtaaaggttttcaaggt

SEQ ID NO: 558115 - DNA, 73 bp, Homo sapiens
tttgatgttgttgaaggagaaaagggagtaactattcccagtcagaggcgctatgtgtattattatagctacc

SEQ ID NO: 558116 - DNA, 75 bp, Homo sapiens
gctgggatcctagagctggaacagatgggccatcaactgagaaagaccttgacgaaaagaagaaagaacctgcaa

SEQ ID NO: 558117 - DNA, 96 bp, Homo sapiens
gcggcggaggatgagcctgcagagcgcgcagtacctccggcaggatggggaagcagaatagcaaactggcccctgaagtgatggaggacctggtga

SEQ ID NO: 558118 - DNA, 50 bp, Homo sapiens
gcggtcttgactggagcacgacccaaggcctcagtggctttagaggatgt

SEQ ID NO: 558119 - DNA, 75 bp, Homo sapiens
ttgcagctcatttgcaagtcagaaccaaatacagaccaacttgattatgcggtgacttccacagtaaagcaagcc

SEQ ID NO: 558120 - DNA, 110 bp, Homo sapiens
catgagtgatgtggaggaaaacaacttcgagggcagagagctggtcaggctcaccatcgagaagcagggacgtccgtctccgacgagccccgtgaagcccagttcccctg

SEQ ID NO: 558121 - DNA, 75 bp, Homo sapiens
tgagtcatttccttcgtacccacagtgcttcatgagaggcatttggctttatgtcccgagttgccctacaagcag

SEQ ID NO: 558122 - DNA, 101 bp, Homo sapiens
ccagtgatgctttattttcaaagaaatgttacaactacagttttcttctattatcatcatcgttttccttgaagcgtgccggtggtggtgtgcacattgag

SEQ ID NO: 558123 - DNA, 107 bp, Homo sapiens
gtggaggcaggctgcggcagacggcgacagtggcggcggcgccatggcagggcttgcagctcagagtcaagatctccactgaagttggcatcacaaatgttgatctt

SEQ ID NO: 558124 - DNA, 100 bp, Homo sapiens
tgtgtggtccaatgtagtgatgaagaatgacgttaaccctctgggcgaagcattgatgaaagctttgataagccaaagtgcccctaaaaccaatgagaac

SEQ ID NO: 558125 - DNA, 100 bp, Homo sapiens
gagaacaccggcacaaagaacacaagaaggagaaggaccgggaaaagtccaagcatagcaacagcatcaggcactggccaagatgatgctgatggccact

SEQ ID NO: 558126 - DNA, 82 bp, Homo sapiens
atttatttctcgattcgctgtcggaggagaatgagaccctggtggagtttgctattggaaggagtcaagactgagaacaacg

SEQ ID NO: 558127 - DNA, 50 bp, Homo sapiens
gggaaattaagtttcttgcggaggtgattgctggcttcaaccgccttcgg

SEQ ID NO: 558128 - DNA, 96 bp, Homo sapiens
aaagatctcgtacaagatccttctttgtgtgggccatgtttgaggattgccccagcattcagttctatgagtaataaatatccacaggctgttttc

SEQ ID NO: 558129 - DNA, 101 bp, Homo sapiens
ttttttgagatagttgttagcgtctaaaagggagctcgaggagcagcacggcatccactgcaacatgacgttactcttctccttcgcccaggctgtggcct

SEQ ID NO: 558130 - DNA, 122 bp, Homo sapiens
gccaccatacctcaacactgtattttcaacccgctcttcgttcaatctccaaagtccaatggatgggaccccaatgaaatgttcaagttcaatgaggagaactacggtgtgaagactaccta

SEQ ID NO: 558131 - DNA, 90 bp, Homo sapiens
tcagccttcttaggagttgactttggctactactggttccatcgtatggctcatgagagaatttcccaagagatttgtgtagttatggat

SEQ ID NO: 558132 - DNA, 100 bp, Homo sapiens
ggctgcggtttgctgggaacggagggctgcagcgcccaccctgcgccagagaccagataaagcttgcattgatgacaatgttgatatggtgaagtttctg

SEQ ID NO: 558133 - DNA, 90 bp, Homo sapiens
ccctgttgaaacacagggaagaaattggtaatcgatcctccaggtcctattgacaatactaagattgcagtcactaaatgtggtaatgtg

SEQ ID NO: 558134 - DNA, 75 bp, Homo sapiens
tgttatatcctccaggaatactggccaggtttcctatcctgggagcaggagagtgtgcctatttgaatgacaaag

SEQ ID NO: 558135 - DNA, 98 bp, Homo sapiens
cgactttggagaaaccaccgtgctggaccgcttttacaatgcaggtgaaaggtgtagcagtcactcggcctacacccacagcatcgaccttgtgaacc

SEQ ID NO: 558136 - DNA, 50 bp, Homo sapiens
catcacgtggggcaggacggtcagaatctccggcctgtgaaactgtgagg

SEQ ID NO: 558137 - DNA, 51 bp, Homo sapiens
ggtttaatgacccgagcctcagggataaggcaaccactgagaaaacggaac

SEQ ID NO: 558138 - DNA, 90 bp, Homo sapiens
ctctgctgtgggcgctgctggcgctctggctgtgctgcgcggcccccgcgcatgacaatgcagatcttcgtgaagactctgactggtaag

SEQ ID NO: 558139 - DNA, 99 bp, Homo sapiens
tccactcttcggcgaagctttacgttcatgtaaacagcatgacgtgaggccgtggatgcaggcattaaggctgtgcagggtcggtctatcacccaacaa

SEQ ID NO: 558140 - DNA, 78 bp, Homo sapiens
caaaggcagccttttccccatggcagcccctgttctggagcatcagatccatgctgctgctgactcggagccccacag

SEQ ID NO: 558141 - DNA, 100 bp, Homo sapiens
ctccgtggccttagctgtgctcgcgctactctctctttctggcctggaggctatccagcgactcagtggcctttgaggatgtggctgtgaacttcaccca

SEQ ID NO: 558142 - DNA, 73 bp, Homo sapiens
gagaccgtccgaggtaattgtctgccacgagtgcacattctgaaaacagaaactacatctgaccagagtgata

SEQ ID NO: 558143 - DNA, 96 bp, Homo sapiens
ctctcatctcgctcggctgcgggaaatcgggctgaagcgactgagtccgcgatggagttgctgccaaacaaggtgaatccgacccagagaggaaag

SEQ ID NO: 558144 - DNA, 73 bp, Homo sapiens
ggagagagaggtggagtccggcccccgaaagaggatgtcatgtggcctgtgttttggaccgtggttcgtacct

SEQ ID NO: 558145 - DNA, 100 bp, Homo sapiens
ctcctaaaaacccagaacagaagatcattaagagagtgattgctcttgaaggagatattgtcaggtagaaatgagtcctctggaaaatgcaattgaagtg

SEQ ID NO: 558146 - DNA, 75 bp, Homo sapiens
ttggaccccgcggcgcccctcggcctcggagcaacgagcgcagcgccgatggaagatggtaccccaaagcatatc

SEQ ID NO: 558147 - DNA, 98 bp, Homo sapiens
caccactccaggaccaaaagaggaagatagtcttgggacccttgcatggtgtttcaaagggtggtgaagaactaagaagacttgcactatctgccaga

SEQ ID NO: 558148 - DNA, 98 bp, Homo sapiens
agcctcatgttttcaccagtcacatctcttactactgctagtcgctgcaacactcctctacagtttgagtgagttctctggtgatgttgatagcctgg

SEQ ID NO: 558149 - DNA, 74 bp, Homo sapiens
acctctacaaggatctgcagccatttatattgcttaggctactggaagggcctgtcccagtcggctttacccta

SEQ ID NO: 558150 - DNA, 74 bp, Homo sapiens
gctcgaccacagcaagctcctggggccacgccccaggaggatgcggacaacctacccgtgattctaggggagcc

SEQ ID NO: 558151 - DNA, 75 bp, Homo sapiens
tctacttagctcagcaattcttaccttgatatctatagagaaatggggtttggtcactatgaagaagaagaaagc

SEQ ID NO: 558152 - DNA, 75 bp, Homo sapiens
agcacccacctgcttatcctctatggtgtccaggacaaccctccatatgataagggagccttcagaatcgaaatc

SEQ ID NO: 558153 - DNA, 76 bp, Homo sapiens
gggtgaagtgctccgtcgcccttgcctccaggtccctccttgtggtccatttctgggcaccatgggctccacagtg

SEQ ID NO: 558154 - DNA, 100 bp, Homo sapiens
agctggcgcagcccacgctcatgatcgacttcctcacccgcgcctgcgacctcggcttgtgagtggcaattccattgaagagaaattgttgaaaaatgga

SEQ ID NO: 558155 - DNA, 50 bp, Homo sapiens
ctggaacattcagaatctacggagaggttcgatacaagaggctgttttcc

SEQ ID NO: 558156 - DNA, 75 bp, Homo sapiens
tctacagagaagtgatgttagagaattatgggaacgtggtctcactgggtgccgtgagcgatgtggagatgcagg

SEQ ID NO: 558157 - DNA, 138 bp, Homo sapiens
tgatgctctatgatctcttctttgccttcctacaaacaggaaattacaaagaggccaagaagatcattgaggtaaattggcaggatgaggagcagcaaatcaaaagaggtgcctttaccaaatccaaggaactctcaa

SEQ ID NO: 558158 - DNA, 106 bp, Homo sapiens
tccttgtggagccggagctgggcgcggattcgccgaggcaccgaggcactcagaggaggtcatcatcagatttgaaatatttaaagtggatacaaaactatttcag

SEQ ID NO: 558159 - DNA, 90 bp, Homo sapiens
caaagatatgtttttggactctaatttcacggacactgaaagcagagaccatggagcttcttgcttacgaggaaatatttcagtaaaagc

SEQ ID NO: 558160 - DNA, 100 bp, Homo sapiens
ctatcgaaggacatgaagactaccacatgatgatagaagaagtcagagatgccatggaaaatgaaatgagaacccagcttcgccgacaggcagctgccca

SEQ ID NO: 558161 - DNA, 75 bp, Homo sapiens
gtaatgctgaaactgcaactgacctggtggtcttagacagttttaatccaggtgctggtttgccaactgacaaaa

SEQ ID NO: 558162 - DNA, 75 bp, Homo sapiens
cgatcgacccggtaccaagaaggggagtgcccgcggcagtgtactaatggtcacttgatgtgcgctggctgtttt

SEQ ID NO: 558163 - DNA, 99 bp, Homo sapiens
ttctcaactgttgtcctcatgatgtcctttctggaactgcttattgtgtaacagaacctggagcaggctctgatgtagctggtataaagaccaaagcag

SEQ ID NO: 558164 - DNA, 83 bp, Homo sapiens
attaacctccagctttttaagcaggggtatagaacaggctatgcttacaggcatcctctcattcgagagaagcctaggcacaa

SEQ ID NO: 558165 - DNA, 83 bp, Homo sapiens
caggaagctttggatcagacttttgtgttgcagttcgggtcaaaatgcagatcttcgtgaaaacccttaccggcaagaccatc

SEQ ID NO: 558166 - DNA, 100 bp, Homo sapiens
ctacctggaccgcacgctcctcgcgcaaggagggtagagctcaagttgggagctgaaagtgccgacagcattggtgccgtgttaaatagcaaagatgagc

SEQ ID NO: 558167 - DNA, 98 bp, Homo sapiens
tcgcgggagcctcgggcaccatgagcgacgtggctattgtgaaggagggttggctgcacaaacgaggagtacgagagggcctccaaagtggaccagtt

SEQ ID NO: 558168 - DNA, 100 bp, Homo sapiens
tgcttcccgaggagcattggaaggctccgagctctgtccagtggtgggagtattacatcccctcctctttctccagcattgccgaagtataaattagcag

SEQ ID NO: 558169 - DNA, 75 bp, Homo sapiens
cctcaacaagaaggacgtggaagaggcagtctcggaaacggggtctctgggggatccagtgacgtgcccaaccac

SEQ ID NO: 558170 - DNA, 80 bp, Homo sapiens
acctgtacccaatatagaagaagtagtacttcccaaaaatgaaccaaaaacttttgctagaaaatcagcttttacgagag

SEQ ID NO: 558171 - DNA, 48 bp, Homo sapiens
gcagtggtcgcttcttctccttgctgcacagttggggatcttcaaacc

SEQ ID NO: 558172 - DNA, 100 bp, Homo sapiens
tggccctctaccaaaccgtgggcgccaagcccatctttgtgtgcttgcatccaactgtgatgagcctatgtatgtcaagttggtggaggccctttgtgct

SEQ ID NO: 558173 - DNA, 81 bp, Homo sapiens
gcatcagcactgcctctggcatccccgacttcagcaagaagacagtttcgtggtgggcacagccgagggaacagtcttcca

SEQ ID NO: 558174 - DNA, 97 bp, Homo sapiens
cgcactttttggatcggcatctagtctttccgcttcttgaatttctctctgtaaaggaggctgaagccgacgtagcttctctgaacagacgcatcca

SEQ ID NO: 558175 - DNA, 100 bp, Homo sapiens
atctatcaggcaccagacttgggatcagttataaactctagagtgcatgtttgctaaaaaagctggagcacattccgtgtatgcctgtgagttatccaag

SEQ ID NO: 558176 - DNA, 100 bp, Homo sapiens
cgccagagctgagcggagggcgcggcgcgagaacgttgtttgatgtgtgcacagtgtcacgaacagacagagaaaccaaactaactttagtgtttgaaca

SEQ ID NO: 558177 - DNA, 98 bp, Homo sapiens
cacaaggcagctcgctctgggagcctagaatgcatcagtgcccttgtggcgaatggggctcacgtcgaactgccacaagtttcaaaatgtacttggaa

SEQ ID NO: 558178 - DNA, 75 bp, Homo sapiens
atcctgaaagccatgcagcggacgggtctcactatgttgcccaggctgatctcaaactcctgttctcaagcgatc

SEQ ID NO: 558179 - DNA, 96 bp, Homo sapiens
cattgtggatgcaaatctgagcgttctcaacttggttattgtaaaaaaaggataactataatgggatgagctttgtctgtattggggctatcttgg

SEQ ID NO: 558180 - DNA, 82 bp, Homo sapiens
actgctcctgctggccgcctggacggctcgggcgctggaggacatagaaaacatcagtcttgaacttctcttcaagaacccg

SEQ ID NO: 558181 - DNA, 88 bp, Homo sapiens
tttctgtgacgggagcaatgctgacctcggtttcctggacccattccgactcagttaacccagtatccactccagttgcacttcccac

SEQ ID NO: 558182 - DNA, 90 bp, Homo sapiens
cagatgacgaagatgatgatgaagatgggcaagacaatcagggcacagtgactgaaggactgacacttcctccatggcccatctatcgcc

SEQ ID NO: 558183 - DNA, 100 bp, Homo sapiens
ttcttcctatgttcatggtggagtagatgctagtggaaagccccaggaagctgtttatggccaaaatatggtggagttaccttaggaatggtgcttttat

SEQ ID NO: 558184 - DNA, 100 bp, Homo sapiens
ttccattagctgctgtcatcaagccctttgccaccattccttcaaatgagcctgggcctcgccgcgatgccggagaagaggcccttcgagcggctgcctg

SEQ ID NO: 558185 - DNA, 73 bp, Homo sapiens
gttagtgctgtgtgctggagggcactaccagatgggaatcaggaaacccaggcccaacggcaggtggatgcaa

SEQ ID NO: 558186 - DNA, 100 bp, Homo sapiens
agttggtctacctattggcttctccttgcctgattgtttgcaggttgtcagagaagtacagcactattcctgatcagagaactccagttgcttcaacaca

SEQ ID NO: 558187 - DNA, 100 bp, Homo sapiens
cggagaatcgcgaggcagagcgggagcgcgcagccaggctatgactttgcagccgtcctggagtggttcgcggagcgtgtggaccgcatcatcctgctct

SEQ ID NO: 558188 - DNA, 90 bp, Homo sapiens
gcaaaacaactttcccatgtttccctctcctaaagcctggaatttcagagggatgatgaggagtctgatgaggaagctgtgaagaaaacc

SEQ ID NO: 558189 - DNA, 100 bp, Homo sapiens
gagggtctccagggttctttggggcccgaggtgtcatggagaaactccagctgggcccagagattctgcagcgggaaaatccaaggcttatttatgccag

SEQ ID NO: 558190 - DNA, 83 bp, Homo sapiens
cccagctaagccacgttcaacttcctgacctgtcaggagccttcacgtaaatgggtccagtcatgcctcccagtaagaagcca

SEQ ID NO: 558191 - DNA, 75 bp, Homo sapiens
agaagtggctgctctgcgcctcacggccagatcccagggccctgtggtaggaggctggtacaaggttttggatcg

SEQ ID NO: 558192 - DNA, 121 bp, Homo sapiens
gtgcctatgtgaaactgctttctaaaacaccagaactcaacctgagctcacaatgtctctctgcaccaagctccatgactcaggatttgcctggagttcctgggaaagaccagttgttttc

SEQ ID NO: 558193 - DNA, 98 bp, Homo sapiens
ggcccttcaggatgcccagatcaactcagtgttcaacaagtactgtgtcaacatgcaaggccagaatgtggccccgtcccagagcaccacccgagaca

SEQ ID NO: 558194 - DNA, 89 bp, Homo sapiens
gctttgtctccttcgacttggagtctttgtccaggacgaccatgctcgacagctgaccaaggccatgatgcgaaaggccacggccagcc

SEQ ID NO: 558195 - DNA, 100 bp, Homo sapiens
gtgcagctgcctcagttcttagcgcaggaggaggactgagcttatctgactccagagctttcaggagggaagaaagatgtcagatgaagatgatctagaa

SEQ ID NO: 558196 - DNA, 75 bp, Homo sapiens
gcttctgctgtccttctttgtggagagcaagcatgctcatgcacattcatctggatacttcatcactcaagactc

SEQ ID NO: 558197 - DNA, 83 bp, Homo sapiens
ccggaggctccgaggctcctgcgctcccgcgccgcgctcccctcgcccgcccgggccgccagacctggaatggccaaatatca

SEQ ID NO: 558198 - DNA, 100 bp, Homo sapiens
ctgagaggaaggaggaagaggatgccatgcagaactgcacactcagtccctctgtgctccaggactccctcaataatgaagtggtaaggctatgtcgcct

SEQ ID NO: 558199 - DNA, 75 bp, Homo sapiens
cttcaggcacactacagaactaaatatgcatgtccagaatggctacaacagtccctgatggttgccgcaatggcc

SEQ ID NO: 558200 - DNA, 100 bp, Homo sapiens
tgtgacctcgagcatcactttcaaaccagatgccttcaattaagttgcagagttctgatggagagatatttgaagttgatgtggaaattgccaaacaatc

SEQ ID NO: 558201 - DNA, 128 bp, Homo sapiens
cgggatcgtgaccgagaccgtgaccgagagcgtgaccgagagcgcgaatatcgtcatcgttagaagatgccatggacaatattaccaggcagaaccaattctacgatacccaagtcatcaaacaagaa

SEQ ID NO: 558202 - DNA, 80 bp, Homo sapiens
atgtcgacttctgaaacatccaaacatcgaaactggcagacctttcacttcgtatccaacaaattgaaacaactctcaat

SEQ ID NO: 558203 - DNA, 75 bp, Homo sapiens
gaattttggcatcaaggacaaacccaccttcatcaaaggggctctggaatgtttttgtcaggcagcatctgaagt

SEQ ID NO: 558204 - DNA, 83 bp, Homo sapiens
gcaaggaatgtcctgaccaacttggacccaggcctgatcttttggccagaaggagattaaaaagatgcccctcaagatggctg

SEQ ID NO: 558205 - DNA, 98 bp, Homo sapiens
gctgaaggcctccagcaggacctccgccctcctctccggctttgccatggttcaaaccttgtactactcagctgatcacaagctgcttgatgggaacc

SEQ ID NO: 558206 - DNA, 90 bp, Homo sapiens
cgtggatttggggatggctataatgggtatggaggaggacctggaggcgacgttgtggacgtttaccagcgggagttcctggcgctgcgc

SEQ ID NO: 558207 - DNA, 75 bp, Homo sapiens
agaaggcgacaggaaccagctcgggggccaactctgaggagtccactgcagcagaaatggtggagtcaatgaaga

SEQ ID NO: 558208 - DNA, 98 bp, Homo sapiens
cgaagcgggctgtgtgccccttctccacccagaggagaggaaaattctcagaatttaaagctcatacagctccagttcgaagtgtagacttttcagct

SEQ ID NO: 558209 - DNA, 100 bp, Homo sapiens
aaacagtccttccactcataggtcatacagcctatgtgcttcccaagctgtatgtgaagctacattactgtgtgagttgtgcaattcacagcaaagtagt

SEQ ID NO: 558210 - DNA, 75 bp, Homo sapiens
gtccctgaagagggaagacacgcggaaacaggtctctgtggcacattttgtttcccgtgccttgggtgtcaagtt

SEQ ID NO: 558211 - DNA, 102 bp, Homo sapiens
gacatcactggctacacatttccagcaggctgcagatacgagtggacaagctcccaatcgtcaactcatgacttactggttacaggagcttcagcagaagag

SEQ ID NO: 558212 - DNA, 74 bp, Homo sapiens
gagcaccggggccaccaggagggagccagcagaaaactgagcttccggtcacagagaacgtgcagacgattccc

SEQ ID NO: 558213 - DNA, 85 bp, Homo sapiens
tcgatttgtctcaatgaaggttgatttcatcagactaaaaagttacaggacttcagtgccctgaacggttagagaaattaatgaa

SEQ ID NO: 558214 - DNA, 152 bp, Homo sapiens
atccaggggggtcactgcgacgttcacagaggaacactgccggggcccaaccacaagacgactcaataggaggaagccatcatcgtctacagactgccgtggacctggaaatgcagcaagctcctgatgaaatccatccatgcagggttaaa

SEQ ID NO: 558215 - DNA, 50 bp, Homo sapiens
gatgatggacatcggctccacccgggcctcggcaagacgcgcaggaagac

SEQ ID NO: 558216 - DNA, 91 bp, Homo sapiens
tgcagtccaggctgaagacagagggctctgatctgtgcgacagaccgccaccggcacggccaggccagcatggtggaccacttacttccag

SEQ ID NO: 558217 - DNA, 100 bp, Homo sapiens
ttctggaagtcatcaagcccttctgtgtcatcctgccggaaattcagaagccagagaggaagcagaacagccctgtggcccccacagcccagcccaaagc

SEQ ID NO: 558218 - DNA, 75 bp, Homo sapiens
tgaaacgtctgtgggttacgccatctttaaggcagagactccccctaatgggccagattgtggctatggctcctt

SEQ ID NO: 558219 - DNA, 75 bp, Homo sapiens
tccagaagagtatgaacatccaaatccctggaaagagagtttccagcagttggttcaaaatcaaaggaagcccag

SEQ ID NO: 558220 - DNA, 100 bp, Homo sapiens
ggaaatccaaaaagaaaaaaaagaaaaagaagaagcaaggtgaagataactctactgcacaggcgacctggtgagcctcccctggacctgggcagcatcc

SEQ ID NO: 558221 - DNA, 82 bp, Homo sapiens
cggagttgccatgaaatatggaaacgactcctcggccgagctgagtgagaacattctagtatgccagtagaaaaaaatatca

SEQ ID NO: 558222 - DNA, 50 bp, Homo sapiens
ccttcaccttccttcatgatggccatggagaagtgtaaggatgcaggatt

SEQ ID NO: 558223 - DNA, 126 bp, Homo sapiens
ggatcccggagagccccggagtgagcggagtagcgagtcggcaacccggagaataccgtagcagtaggcaggacagttccaattcaacaaaaacctctttaccctggcactcaaaactgtaatgat

SEQ ID NO: 558224 - DNA, 75 bp, Homo sapiens
catttcaggaaaacagagaaagaagtgataggagggctctgtagtcaccttcaggccattcagaggaggaaagag

SEQ ID NO: 558225 - DNA, 100 bp, Homo sapiens
gagttgttcttccatagtggatgttttggccactggacatcagaaccacattttgggtttgaagaatcttctacatggatctgcaggcccaagaccgagc

SEQ ID NO: 558226 - DNA, 100 bp, Homo sapiens
ctggagagcttcatcaaaaatagtgatagctttgataagtgaaagaaaagatgttgtcccggttaagagtagtttccaccacttgtactttggcatgtcg

SEQ ID NO: 558227 - DNA, 82 bp, Homo sapiens
catcctcctggccaccgactcctacaagcattagtgccagcagtagttcccaagggctgtctcagccatccacccagacgac

SEQ ID NO: 558228 - DNA, 82 bp, Homo sapiens
gtcagtcgcgagcgaacgaccaagagggtgttcgactgctagagccgagcgaagcgaggccccgtgtgggccgcggcccggc

SEQ ID NO: 558229 - DNA, 100 bp, Homo sapiens
atctgtccagcatgactcatccccgggagtgttgacgctgcaaactcctgcccctccagcccccggggagcggggtcttcagggtacaaggtgggccgag

SEQ ID NO: 558230 - DNA, 100 bp, Homo sapiens
aacaaatctgtgagcccaacagtcaatccaatgtctactgctatgcagaatgaacgacatatctgaagagatggattaagaatgctttggattaaggatt

SEQ ID NO: 558231 - DNA, 100 bp, Homo sapiens
cggagacttcagctcagccagagtggttcgtgctggccgtgggcagcgccgtctttgatgccatgttcaacgggggaatggccacaacatccacggagat

SEQ ID NO: 558232 - DNA, 100 bp, Homo sapiens
ccattcagcccgagcgcccggcggactcgctctccgtctccagcaatgacgccagtccacccgcatccgtggcttccctccagccccacatgatcggggc

SEQ ID NO: 558233 - DNA, 87 bp, Homo sapiens
tgactggaggctggcggacaggcgacagcgacctgcggcagaactcagcctcctcccaagctccctgtgggtcctagccacaagctc

SEQ ID NO: 558234 - DNA, 98 bp, Homo sapiens
cggcgccgagaggccgtgcgggacgcgggcgccaggaccggccgaacgcagaggacctgaaggagaagaaggagaaggtggaggagaaggcaagccgg

SEQ ID NO: 558235 - DNA, 51 bp, Homo sapiens
cgtctggccaagaatcagaggaagtgggttgctactggagatatagccact

SEQ ID NO: 558236 - DNA, 75 bp, Homo sapiens
gataaacttcagaaagaactcaatgtacttaaatcagaacaggctggtcacagtggctcacatctctaattccag

SEQ ID NO: 558237 - DNA, 60 bp, Homo sapiens
acgggtcatttggtcatctgcatgcccaaggttccatcaatggtgagcaccagcctgaat

SEQ ID NO: 558238 - DNA, 80 bp, Homo sapiens
cagtccacccaccgccgccgcctcccaggcatgagtacagtaccagaagttatcgttgcacggcactgtggacttcgagt

SEQ ID NO: 558239 - DNA, 100 bp, Homo sapiens
accccgcccagttggcccagaggatctcttctaacatccagaagatcacacagtgttcatatatagcagtgacgaggatgatgaggactttgagatgtgt

SEQ ID NO: 558240 - DNA, 100 bp, Homo sapiens
gagcgatgttaccattgtgaaagaaggttgggttcagaagagggccaaaccaaacaggaagcttacttttctctacctagccaatgatgtcatacagaac

SEQ ID NO: 558241 - DNA, 100 bp, Homo sapiens
cattttactccgcccagaagacaacatcaggctgcctctgcctgtgagtttctggatattgtagagctgctgctccagtctggtgctgaccccactctcc

SEQ ID NO: 558242 - DNA, 75 bp, Homo sapiens
cagatttctgctcacttcatgggctggcctggaattgacgatgctgacatagcccagagatacaggataagcaaa

SEQ ID NO: 558243 - DNA, 75 bp, Homo sapiens
ctgctcgtcacttgcctcccgggagtcgctgtggcaaaaggtctgcggtgacagctcttcttcagagagaaggac

SEQ ID NO: 558244 - DNA, 100 bp, Homo sapiens
gaacaagaagagaaccttgaagcaagtggattactttgatattgtgaagagccccatggatctttctaccattaagaggaagttagacactggacagtat

SEQ ID NO: 558245 - DNA, 75 bp, Homo sapiens
ctaggattatacattgtaagaggtgacaacgtaatttagcttgggttaaatcatataacatctgctttgaattgg

SEQ ID NO: 558246 - DNA, 75 bp, Homo sapiens
tccctgacatgcaagaacagggtccagctggagcgaagcttgcgggacgtcgtagagaaaaccatccaaaagtac

SEQ ID NO: 558247 - DNA, 90 bp, Homo sapiens
gtcttcttctacacccgactggtcctctttcccacccagcctccttggagcggggaaggagagctcttcagttcctttggcaccttcacg

SEQ ID NO: 558248 - DNA, 85 bp, Homo sapiens
agaaaagagaaaaggagaaggataaagggaaggacaaggaattacataacatcaaacgtggctcggcttattccaggggtgtgtt

SEQ ID NO: 558249 - DNA, 75 bp, Homo sapiens
ggagccctgcatatgattggctctttagctgaaatacttctgaagtgatttagaatctagaagagaagtaaaaaa

SEQ ID NO: 558250 - DNA, 75 bp, Homo sapiens
actggacagttaccttattcaaacatcaacaacagggaccaggttattcagcttctcaaggctggaaaagcgaag

SEQ ID NO: 558251 - DNA, 90 bp, Homo sapiens
aagaaagaaacaaaagttcacctctgcgaaggatgactcactggttgtgtggaaggaagtcgatttgacccggctgtctgagaaggaacg

SEQ ID NO: 558252 - DNA, 75 bp, Homo sapiens
gcactgtttgcaaaggttgcagcaaccaaaagccaggtttcctgaaatgcagtttttccagcaagaaaatgtgag

SEQ ID NO: 558253 - DNA, 51 bp, Homo sapiens
cagcaggctgcggtcccagcggggtcttgctctgtggcccaggctggagtg

SEQ ID NO: 558254 - DNA, 100 bp, Homo sapiens
tgcattatgtgaaattgagactgacaaagctgtggttaccttagatgcaagtgatgatggaatcttggccaaaatcgtgagcaaagactcaggtggactg

SEQ ID NO: 558255 - DNA, 74 bp, Homo sapiens
gggtcggcgccgagtgggaggatggcggaagtatcgagaaccttccctgcgaacttcagaggaacttccagctg

SEQ ID NO: 558256 - DNA, 112 bp, Homo sapiens
cttcagcgtgaggagcgccaaggtgctggcgctggtggccgtgctgctgctcgcagcgtgccacctcgcctcccgccgctaccgagaagaagactgcataaactgggcgtgt

SEQ ID NO: 558257 - DNA, 100 bp, Homo sapiens
ggttactcgcacgcggatttggctggcgtcccgcatattgatgatgttaagaagttcaaaccgggttacctggaagctactcttaattggtttagattat

SEQ ID NO: 558258 - DNA, 75 bp, Homo sapiens
aagggcagtcggcggagcttcgccaaggctggcgcagtcgacttaattcagtgcacaaatgagatgaatgtgaac

SEQ ID NO: 558259 - DNA, 50 bp, Homo sapiens
ctccttctcctggagacgcaactcaagcgtcaagggttccacactgttgg

SEQ ID NO: 558260 - DNA, 75 bp, Homo sapiens
taatcgctgaagatgttgatggagaagctctaagtacactcgtcttgaatagctgtcggaaaaggtaacagaaga

SEQ ID NO: 558261 - DNA, 82 bp, Homo sapiens
cccggcgctaagccgggagacaagatccgatctactgagagctgcgaggtagttttggatgttgggtgtggaactggaattc

SEQ ID NO: 558262 - DNA, 90 bp, Homo sapiens
ggatgccctgcaccgggtccggcagggggcgacgatggccttctgaggggctgggacaccagggtacccggcaaatttctcttcaccagc

SEQ ID NO: 558263 - DNA, 90 bp, Homo sapiens
cttccaccggcagggcttctcctatgactacgtctttgactggaacatgctgaaattcggtccccagccccaccccagccccaaaggagg

SEQ ID NO: 558264 - DNA, 100 bp, Homo sapiens
cttttacagtattatacctggtctgaaaagaagatggaattgtcaaagcttgttgaaatggatgcagtcagaactgaatgttgaagaagtggtaaatgac

SEQ ID NO: 558265 - DNA, 96 bp, Homo sapiens
cagacgggcaaggaggggaccgagaatcaaggcgttgagcctcaagctcctgttcgacacagtggagaccatgggaaaagactatttgtcatcaga

SEQ ID NO: 558266 - DNA, 74 bp, Homo sapiens
atgcggatcaccctgcggaacctggaggaggtggagttctgtgtggaaggtccacctcattcatttaaccgaga

SEQ ID NO: 558267 - DNA, 98 bp, Homo sapiens
gaggctctcggatgatagagtggagacacttaaagccgttctgctgcggactatgctgagaaggaaaataccatagcaaaagctctggaagatctgaa

SEQ ID NO: 558268 - DNA, 80 bp, Homo sapiens
caaagatgaaatccgtataccagatgtcgaacctgctgcttttctcgctatgctgaagctcttctcaaccatctgtgagt

SEQ ID NO: 558269 - DNA, 100 bp, Homo sapiens
cgacagtcctctctttcaggccatcctggataacccggtggtgcagctgggcctgaccaacccgaaaacattgctagagtgcccacatggcaatggtgga

SEQ ID NO: 558270 - DNA, 101 bp, Homo sapiens
aattacgggaacagaaagaaaagtccgaaagagctggtcggggtatgataggtcggggaagagggggctttggaggccgaggccgaggccgtggacgaggg

SEQ ID NO: 558271 - DNA, 83 bp, Homo sapiens
ggttctccatcgcgcgcacggcagcctagcgcaatgaggcgggcagcactgcggactgtagaagcggccaggaagaaaaccac

SEQ ID NO: 558272 - DNA, 114 bp, Homo sapiens
tacttctccgccaacgcggtcatctcgcagaacgccatcaaccagctcatttttgaaacgttggggttgttggagtggttggattttccctggaattgagtgagaaattcagaa

SEQ ID NO: 558273 - DNA, 96 bp, Homo sapiens
gaagcctgtacctgttttatacttgcttttgcttcagcgttctgtggttgtcaacaggaggagaaagtgcaggccatgccacttcctctcaggagc

SEQ ID NO: 558274 - DNA, 83 bp, Homo sapiens
caaatgctgaggactcagaccggtctctgcaagactacggagccgagatggctctgagtacctgatccagcacgactcggagg

SEQ ID NO: 558275 - DNA, 100 bp, Homo sapiens
cgagcttcgaagtgacatgtacattctcaatgagagcctcacagacccagccatcgttaaggaaaattgcctaagaattatgacccaaaagttaccccag

SEQ ID NO: 558276 - DNA, 75 bp, Homo sapiens
gttagtcctgagactgaggcgagtgaagagtctttgcagttcaacctggaaagaatcgacaaggagaacgttgaa

SEQ ID NO: 558277 - DNA, 90 bp, Homo sapiens
gcggcggcgtctgtctctgcggcttctggttctcacttgtcgggagactcatgcatctgtatgccgtgtgcgtggactgcctggaagggg

SEQ ID NO: 558278 - DNA, 90 bp, Homo sapiens
cacaaatgtttttctgttttgcctgaatacatgatttaaacaagagatttccacagaagtgctctggaactgaacccgcagtatcttcca

SEQ ID NO: 558279 - DNA, 89 bp, Homo sapiens
caaacagaccttgaaagacaaaactggcactgattcaaattcaacagaatcctctgaaacttccacagtgtcttctgagaaaccaccag

SEQ ID NO: 558280 - DNA, 110 bp, Homo sapiens
ggaagatcagggatcaaaactcattcgaaaagctaaagaggcaccattcgtacccgttgggttaatcatctcattttagtggagccttggggtttccctgaacgaccaga

SEQ ID NO: 558281 - DNA, 75 bp, Homo sapiens
aggccagcatccaagccgcgtcggctgaaagttccgggcaaaaggtaatcaaatgcaaagcagctgtgctatggg

SEQ ID NO: 558282 - DNA, 83 bp, Homo sapiens
gtgaaccttagggacaacaccgggacacccgcgaggccggaaaatgggggatatgagactttctactcggaatatcctgagtg

SEQ ID NO: 558283 - DNA, 90 bp, Homo sapiens
actggtgtgtggggccggaggagtcagctgtgtgtccagaacgtgccatggagacgcttaacgagaagagcaagttagtaccttgtacca

SEQ ID NO: 558284 - DNA, 82 bp, Homo sapiens
cccaaagacccctggagacatgacctgcctagagctggaacgttacctccagagcgagccctgctatgtttcagcctcagaa

SEQ ID NO: 558285 - DNA, 74 bp, Homo sapiens
gagaccatggctgactacctgctgtacaccctcaacaaacaccagcgctttggagaactattgtcgagtgatgc

SEQ ID NO: 558286 - DNA, 126 bp, Homo sapiens
aactttcccaacaacagcctcaggcaggtcattgccgcattgaggtttccagggaagagatttttgagggcgctattttcttggaaggtgttactgttaaaggtgtaactcaagtaacaacacaac

SEQ ID NO: 558287 - DNA, 82 bp, Homo sapiens
gaggactctggagctgacagcgcgcacttcacccgcagttggttttataggatcacattgacaaaagtaccatggagtttta

SEQ ID NO: 558288 - DNA, 142 bp, Homo sapiens
cgcgcggccgcccctcggccccggagcccctcggcggcgccaccatgtactcgggagccggccccgcccgtggaccgggagcccgtggaccgggagccggtggtgtgccaccccgacctggaggagcggctgcaggcctggc

SEQ ID NO: 558289 - DNA, 83 bp, Homo sapiens
ttttccacaattagagagaaactaagtagtggacagctttatgaaggcaaagaacagatggagtttgaagaatccatgagacg

SEQ ID NO: 558290 - DNA, 82 bp, Homo sapiens
cctggatctcctccatcctgctggccatgctctacgggacagggtcggcactcttcaccctcccgagccctgcccgtctcgg

SEQ ID NO: 558291 - DNA, 98 bp, Homo sapiens
ggagctgaacgtggacagcctcatcacccggctgctggaggaatcatggtgtcatggaaagggatttactttatactgactctgttttggggaagctt

SEQ ID NO: 558292 - DNA, 75 bp, Homo sapiens
gaggaatctgtgctttctgtcccagaactccagagatcctacagtaaggaattgtttgaagaagttatttcaaag

SEQ ID NO: 558293 - DNA, 90 bp, Homo sapiens
caacacctgagccaggtgaagggccccgtaaattggaaggatgcacaagttccaaggttacgtttcagttgaagccatccttgtcaatat

SEQ ID NO: 558294 - DNA, 126 bp, Homo sapiens
actatacacctctgcatgaagctgctattaaagggaagatcgatgtgtgcattgattgctcatttagaaagtggatgtgtgggataacatgtccaatgtgtccgaggagagaagaaaaaggcagca

SEQ ID NO: 558295 - DNA, 75 bp, Homo sapiens
cgagcacataacggggttcgggtgtctcgtgtgtgaacatcacagcatgaaaacattccttttgaagacaagact

SEQ ID NO: 558296 - DNA, 100 bp, Homo sapiens
cagccatcaggtaggctgcgttgaggatctttgctcttccatccgcctttgatcgtcttcctcttcagccatccagaaacctctgcgccatgagagccaa

SEQ ID NO: 558297 - DNA, 82 bp, Homo sapiens
ctcattgtcactgaagtgctggaagactgggaagattcagttaacattgcactggatgtgtgtgagaagtggggagaaatgc

SEQ ID NO: 558298 - DNA, 50 bp, Homo sapiens
ccggggttcgtggcagcgctggtggcagcacaacaagattcgcagcgtgg

SEQ ID NO: 558299 - DNA, 100 bp, Homo sapiens
gttcgtcatggggctgtttggaaagacccaggagaagccgcccaaagaactgtgaataaccctataccttccaatttgaaatcagaagcaaaaaaggctg

SEQ ID NO: 558300 - DNA, 100 bp, Homo sapiens
ctcgttaaagttgatgcaaagacaaaggcacagctggatgaatggaaagcaaagaagaaagcttctaatggggtattcttcagcggaaataaggaaacag

SEQ ID NO: 558301 - DNA, 100 bp, Homo sapiens
ttccaacacataaaaattatttatccaacagctcctcccagcatgctacaagtgaaaactgatgagaaactgaatgtgtctgatgagaatacagcaagtt

SEQ ID NO: 558302 - DNA, 89 bp, Homo sapiens
gcctccttatgtctccaacatggaccgcctgggggactcggaactgtgaattcacataaaagggcatcagaaaaatacaaagacaaccc

SEQ ID NO: 558303 - DNA, 86 bp, Homo sapiens
ggacatcctggaagctgggaaatggatgtgggctctcttgatgagaagatgaagagcttggatgtgaatcaggactcggagctcaa

SEQ ID NO: 558304 - DNA, 91 bp, Homo sapiens
ctctgctcctctagaagatttcacagcaatgctggactgcagtgactatgttctaggaactgtggctgcaccatctgtcttcatcttcccg

SEQ ID NO: 558305 - DNA, 83 bp, Homo sapiens
cccatccagccacctgcagccatcacccaggtcatgttgctggccaatccactgaaggtgatgtagtcaaggtgatcgtctcc

SEQ ID NO: 558306 - DNA, 87 bp, Homo sapiens
ctggagcgactgctggatgcagtgaaacagtgctatacgtattggtcacgttggaatgcaaattgagcacatcattgaaaacattgt

SEQ ID NO: 558307 - DNA, 89 bp, Homo sapiens
gaagatggctactctggagttgaggaatggaagttggatacactttgtgacttgtacgagacactgaccattacacaggctgttatttt

SEQ ID NO: 558308 - DNA, 100 bp, Homo sapiens
caatttccctccctgcaggcggaaggaaggcaattagagcggacacgatgaggcgagtggtacgacagagcaagtttcggcatgtatttgggcaagcggt

SEQ ID NO: 558309 - DNA, 75 bp, Homo sapiens
agccaccccagcagaggccttatggatatgaccagatttgataatgggctgcattaaaagtaaagaaaacaaaag

SEQ ID NO: 558310 - DNA, 87 bp, Homo sapiens
ctaccccagtgctcagcctttccatgctctccatcacctatcacagcagcatccgctctctggagttataggtatggacacagtaag

SEQ ID NO: 558311 - DNA, 75 bp, Homo sapiens
aggccacctatgaagaagactgggaagtatttgaccctcagaaaaagtggacagggcagtgctgaaggaactgag

SEQ ID NO: 558312 - DNA, 135 bp, Homo sapiens
cggcgagccaaagaggagccggccgcgcgggccgggaggggacggccgccggagccgcgaggccaagtgctggagaatctggtaaaagcaccattgtgaagcagatgaggatcctgcatgttaatgggtttaatg

SEQ ID NO: 558313 - DNA, 100 bp, Homo sapiens
tgtcggatgaagataagacactttctcagttacagagagacagcccacctgaggatattgaccataaggactcatatctcattacaagaagcatcatggc

SEQ ID NO: 558314 - DNA, 100 bp, Homo sapiens
agaggaggcagtggccctggtggaagacttgcagaaagaacctggaagacagaggctggagatgctggcccgcgagagacattgatgcattttgctgtgc

SEQ ID NO: 558315 - DNA, 90 bp, Homo sapiens
ccgcaccagccgcgcttctgtccgcctgcagtaatgatgtagacatggaaacagatcactactccaatggagttggagaaacttcatcca

SEQ ID NO: 558316 - DNA, 50 bp, Homo sapiens
cctcgggcacataccatgcctggaaggacagtcattttgtttactcattc

SEQ ID NO: 558317 - DNA, 83 bp, Homo sapiens
ccacatggtgtcagatgaatatgagcagctgtcctctgaagaccttgacctcccaaggctccagaatacctgctctgggctgg

SEQ ID NO: 558318 - DNA, 82 bp, Homo sapiens
gagccgagagccacactttcaagtaaaccagggtggtgaaggaggagatctttgatgacaatgccaagcttccctgcttcaa

SEQ ID NO: 558319 - DNA, 75 bp, Homo sapiens
ctctttagctgaaatacttctgaagtgaaagtaatttttctcccaagtttaacgaaaaggatgggcatgttgaga

SEQ ID NO: 558320 - DNA, 75 bp, Homo sapiens
tgggaaaaatggaccaacttctttggcaagtggacattttactggctcaaaagaagctcattcacacagaagacc

SEQ ID NO: 558321 - DNA, 100 bp, Homo sapiens
cagagcttgtttttcttttcactcctcctacagtgagacctaaggattgtcttcggtctattatgagaagagtgaaccacaaagatcctcacgttgctat

SEQ ID NO: 558322 - DNA, 75 bp, Homo sapiens
ccaggggtcagttgtccagttcatccctgagccttgagctcccagtcgcaggccaagtcatcaaggcatgggaca

SEQ ID NO: 558323 - DNA, 80 bp, Homo sapiens
gggctttctgctgccgcccgcaagcagagggttccgagtctgaggaagacataaccttgtgcctgcctgcccacctctct

SEQ ID NO: 558324 - DNA, 82 bp, Homo sapiens
cagtactaccggcccctgcatacaatgcagatcttcgtgaagactctgactggtaagaccatcaccctcgaggttgagccca

SEQ ID NO: 558325 - DNA, 105 bp, Homo sapiens
gccaaccgcaaccattgacgccatgtcgggttattcgagtgaccgagaccgcggccgggaccgagggtctgccatcatggatgttctcgcagaagcaaatggcac

SEQ ID NO: 558326 - DNA, 74 bp, Homo sapiens
ggcgcttcgccaagggggtgcagtacaacactccatgtgtcctaccagaagtacttcaagctggagcccctcca

SEQ ID NO: 558327 - DNA, 51 bp, Homo sapiens
attctgcaagcaggcaacctgaatacaggcactcaaggagttgcccctggt

SEQ ID NO: 558328 - DNA, 83 bp, Homo sapiens
ggaaaaagcccgtgaggatgcagcccgggaaagagctaggtggtgaagcagtattttccaatttgaagattcatttgaaggtg

SEQ ID NO: 558329 - DNA, 83 bp, Homo sapiens
cgcaactgagaggaactgagacccaagcagctcagtaaacaatggctgccatccggaagaaactggtgattgttggtgatgga

SEQ ID NO: 558330 - DNA, 82 bp, Homo sapiens
gctcggaatcttcctcttcctccaccaccaccacctagaggggggaaatgctccctctgatcctgatgctgtgagtgctgaa

SEQ ID NO: 558331 - DNA, 100 bp, Homo sapiens
cccgcggcgagcgagctcctgaggccccttcacagatgtagtcactacaaatcttaaattgcgaaatccatcggatagaaaagtgtgtttcaaagtgaag

SEQ ID NO: 558332 - DNA, 82 bp, Homo sapiens
cccccgggacatgcatcgtcccctggactctctcaatcttcaggcagtgacagtggtgggagcagcagcagcagcagcagca

SEQ ID NO: 558333 - DNA, 88 bp, Homo sapiens
ggcgggctgtggggcctccgcgccgcggccgttagtcatgtcggtctgtccttgaggaaatacactgctacgagcctcagctcaacag

SEQ ID NO: 558334 - DNA, 98 bp, Homo sapiens
ggccaccctcttccgcatcacatccaatgctatgatcaaccgtggagattggtgaaagcgtgagaggggaagatgtctacatcatccagagcggctgc

SEQ ID NO: 558335 - DNA, 82 bp, Homo sapiens
cagaaggcctctctcctgatacagcaggcgctcaccatgttccctggaggagcaggccgggctctcgccatgggtcactgtc

SEQ ID NO: 558336 - DNA, 100 bp, Homo sapiens
ccaaaccatccagatgcgattttagtggaggactacagagccggtgatatgatctgtcctgaatgtggcttggttgtagactacacttgctgctttgaag

SEQ ID NO: 558337 - DNA, 74 bp, Homo sapiens
gggggccgaggcgacgagcagtacatgcagctcctggagtcaatttctcccgaagatgactcggatacaaaaag

SEQ ID NO: 558338 - DNA, 87 bp, Homo sapiens
ttgtggcgaggcagatcctgccccgtggccgcggccgtctcgtagcagacggttgatgatgaagcgccggccgtgtaaatgaagatc

SEQ ID NO: 558339 - DNA, 75 bp, Homo sapiens
gcttctaaacctctggaggaggaggagtccttcaataatgttaaacagtggctgcaggaaatagatcgttatgcc

SEQ ID NO: 558340 - DNA, 98 bp, Homo sapiens
cggggcctgaggagcgggcacagggcaaggcggcggacggctgcgtcgcccgaggcgaggaggagcgctggcggtttattacccagaactctttgtct

SEQ ID NO: 558341 - DNA, 74 bp, Homo sapiens
cacctctagccaactacctgctctccaaggagcatgctcgcagctctccagaacctgggtatcaacccagcaaa

SEQ ID NO: 558342 - DNA, 90 bp, Homo sapiens
cctgcacctggtcaatgagttcctttatgttctcatcgtgctcatgaagcacctgaggatgttcacgtcccagtatgcccactctgtaat

SEQ ID NO: 558343 - DNA, 89 bp, Homo sapiens
cattttactgtcaagacatttcttcggcattctgcaacaggactacaggaatatgtggaagctgtctcttttcaacacttcatcaaaac

SEQ ID NO: 558344 - DNA, 74 bp, Homo sapiens
gaatgtcttgtgattggagttggtaccatgtcagctgtccaggcagccatcttgtctggagacaagtctgagaa

SEQ ID NO: 558345 - DNA, 75 bp, Homo sapiens
gttaccaagctgaagcacttccagctccgaaacattgctgaggctcttgtcagcaaaggtctagccacagtgatc

SEQ ID NO: 558346 - DNA, 90 bp, Homo sapiens
agaggaacgagctgagctggcagagtcgttcgtttaccaagcaaaagttgggggtcgctggttcccagccgtctgcgcacacagcaagaa

SEQ ID NO: 558347 - DNA, 75 bp, Homo sapiens
attacctggaacttcatcatcatctacttcacaggaattgccatttaagctgctgatgggagctccaccctggga

SEQ ID NO: 558348 - DNA, 100 bp, Homo sapiens
gctttgcagctgacctacatctcgaagaaatattgtaatgcgagaacttgctccacaatttcatattccatggtcaatacccttagaagctgaagatatc

SEQ ID NO: 558349 - DNA, 130 bp, Homo sapiens
ggacgggacgtgcggcccagcgagttggtcggtcccggggtcacccgctacgggaagcaggcctcgccacaggaaccactcgttttgactattattttatcactctttgtgaaacttcacaatgttcggg

SEQ ID NO: 558350 - DNA, 82 bp, Homo sapiens
tcgcttgcagttcagcgaccacggtttttcgttggaatatacgttgcacatttatggcgattctgagtgtgagggcagactt

SEQ ID NO: 558351 - DNA, 121 bp, Homo sapiens
ttggccacctccccaggtgatgcctgaagctcaagggactgtgtccaccctcaggtctcaccaacggctttgggggtgcgaggagcgagcaggagccgggcggcggcctggggaggaaggc

SEQ ID NO: 558352 - DNA, 100 bp, Homo sapiens
tgcacatccaggctggtcagtgtggcaaccagatcggtgccaagattagtgatgatgaaccaggttatgaccttgatttattttgcatacctaatcatta

SEQ ID NO: 558353 - DNA, 95 bp, Homo sapiens
cctgggcagctttgtactcagcctccttaccattatgcaagtgatagaggttgtcaagtctgcatgtggccctttcccaaatcctctggaagaag

SEQ ID NO: 558354 - DNA, 50 bp, Homo sapiens
cggaaaactcccaacttcctggtcccaggaaggtggcgtcagcatctgca

SEQ ID NO: 558355 - DNA, 100 bp, Homo sapiens
gtgccgtgcgccgcagcccgggcccaggccccggcagcgcctgggacaagtaactctcgaagtgataaaagctgtttctttgtgaaatatgggcccgaaa

SEQ ID NO: 558356 - DNA, 99 bp, Homo sapiens
atcaaagcgagagcgcctcggcctctccagctgtccgcgtactgtaagattgatgttaaaggcatggtgttcaccccacttcatcagcgtacataagtt

SEQ ID NO: 558357 - DNA, 82 bp, Homo sapiens
catcccccccgacgccgtcgcggtggactgcaagacaatgcagatcttcgtgaagactctgactggtaagaccatcaccctc

SEQ ID NO: 558358 - DNA, 75 bp, Homo sapiens
tgattcttcttctgcctcagcctctcgagtagctgggattacagatcttagacgaattttacaatgtgaagttct

SEQ ID NO: 558359 - DNA, 100 bp, Homo sapiens
gcacacagacactggaagacagctgggttttctagtcttgaactactggctacgtggctaccaaatgcctaagggagttcgttcacagctgagttatgaa

SEQ ID NO: 558360 - DNA, 74 bp, Homo sapiens
gccttgttaatctgtataaccttccaggggacaaggtgttgaaagcagcaggggcctagaagacattaaaccga

SEQ ID NO: 558361 - DNA, 100 bp, Homo sapiens
aacccctctaactggtgtgatggcgtgtcacactgccccggcggggaggacgagaatcggtgtggaagaccaacactgtcatctgaagttggaatcatca

SEQ ID NO: 558362 - DNA, 100 bp, Homo sapiens
gcgctcttgacagccaggtaccagatgtgacatttgttgtgtcacctttcgaacacatcgaggactgctgcgtcacaacgcgcttgtccacaaacaactt

SEQ ID NO: 558363 - DNA, 50 bp, Homo sapiens
tagcacaccatccccagccagtctggaggcggctggtggaaatccaattc

SEQ ID NO: 558364 - DNA, 88 bp, Homo sapiens
ggtgggatttcgttttgcctccggttggggctgctgtttctcttcgccgacgatgatgataattccgaagaaggcttccacactattc

SEQ ID NO: 558365 - DNA, 75 bp, Homo sapiens
gtgggcgctgctggcgctctggctgtgctgcgcgacccccgcgcatgtgaacagagtatctgtcaggcaagagct

SEQ ID NO: 558366 - DNA, 75 bp, Homo sapiens
caccaacaacaccacaataatccacagccaaggaggagccgatcactttctgtgaggaagccttcgtgtcccact

SEQ ID NO: 558367 - DNA, 100 bp, Homo sapiens
tgtcgcgtgcggccaggaaaacttgccggtgggcgcgtggcccccgggggccgcgccggcgcccttccagactgctctggcccatttagagtctcttgca

SEQ ID NO: 558368 - DNA, 83 bp, Homo sapiens
cgcggcgagaaagcacggggtgaaactgaccacagtgctcaccacccaccaccactggcgccggctctgcagcagtaccgcac

SEQ ID NO: 558369 - DNA, 75 bp, Homo sapiens
ttacgtctgcggaagtgcagctgcctcagttcttagcgcagtaacaaatgtggcaattattttggatctatcacc

SEQ ID NO: 558370 - DNA, 100 bp, Homo sapiens
cgaggggctggaacacctcgccaaagcagagaaatagtaacttgggtttttactcctgtaacaactgaaataacaagtcttgatacagagaatatagatg

SEQ ID NO: 558371 - DNA, 75 bp, Homo sapiens
gtggagtttgatgttgttgaaggagaaaaggtggatgggaagagagtcccaagggatgcagggcatcctctgtac

SEQ ID NO: 558372 - DNA, 82 bp, Homo sapiens
aaagagcagtctcacatgaagaccaatttttacgtctagatttccatgcccatggaagtcgttgctgctcctagcttacctc

SEQ ID NO: 558373 - DNA, 75 bp, Homo sapiens
atgaagagacacagtatggtagccacacccccagctgtgctttatcatcgttggggacatctagacttggccaag

SEQ ID NO: 558374 - DNA, 98 bp, Homo sapiens
tccccgcgttccatgcgcacagggacagggggtgttgaaagcagcaggggcctagaagacattaaaccgataccacagaaatacaaaggatcattaga

SEQ ID NO: 558375 - DNA, 51 bp, Homo sapiens
ctctgatgtggagttcttgaagcaactaagacccaacatgagtgaagtttc

SEQ ID NO: 558376 - DNA, 75 bp, Homo sapiens
acgttcaaacaagcagctttttgaattactttgttatgcagaaagtgcctccccatggccacccatggaccagtc

SEQ ID NO: 558377 - DNA, 100 bp, Homo sapiens
tgctcgccgtccccgccatgctgtctctagactttttggacgatgtgcggcggatgaacaagcggcagggtgatctggaccctctggcatctctcaaatc

SEQ ID NO: 558378 - DNA, 75 bp, Homo sapiens
aaccagttaccactaatcttaagaagtgcaactgcagatagaagacctgactcgtaaactgcgcacaggagacct

SEQ ID NO: 558379 - DNA, 50 bp, Homo sapiens
gtggcctaaaacttcggcgttggttctgggaggtgatcagtgatgaacat

SEQ ID NO: 558380 - DNA, 73 bp, Homo sapiens
gcgaatatcgtcatcgttagaagagccctcaggactgcccccggaccctgctctcacccctggcacccgtgcc

SEQ ID NO: 558381 - DNA, 100 bp, Homo sapiens
tgagaggccccctgaggagtatgaccagccctgggagtggaagaaggagcggatttccaaagcctttgcaggtcccagtagggatggcacaatcagcgag

SEQ ID NO: 558382 - DNA, 74 bp, Homo sapiens
ccccgagcgaggccaaccttcaggaggaggaggactatggcagccagggacgccacttcaggcagcctgtcaga

SEQ ID NO: 558383 - DNA, 99 bp, Homo sapiens
cctcctcgccagcagccgtccggagccagccaacgagcggtagcagaaggtcaagaaatttgtgtgattgaagccatgaaaatgcagaatagtatgaca

SEQ ID NO: 558384 - DNA, 82 bp, Homo sapiens
ctggcactgcgcttcttcaaagagctggagtggaccagagaaattgcttgctttagatgaactcattgatagttgtgaacca

SEQ ID NO: 558385 - DNA, 50 bp, Homo sapiens
aggagccttggagtatgatcagggtaagcttgatgattaccaggaacgaa

SEQ ID NO: 558386 - DNA, 100 bp, Homo sapiens
aggggccccaaaggaaggcttcggtgactcaggaagcggggagaggtggtgagagatgacccctgttgaggatttcattggtgtctgccacaggccgcca

SEQ ID NO: 558387 - DNA, 71 bp, Homo sapiens
gcagcccagcgggaggatctggagacagccatggagttctacttagagaaatacccgcagcccaaagggca

SEQ ID NO: 558388 - DNA, 75 bp, Homo sapiens
tccgctattcagcagagagctattattccctgtattaaagatcaagcttcaggagtctccggaagacatgcctgc

SEQ ID NO: 558389 - DNA, 113 bp, Homo sapiens
aagaggttcggaagtgccaaggtcatccggtccctccacgggcggctgcagggtggaggggacggcaaaacagaacagaaaggcggagataaaaagaggggtgttaaaagacc

SEQ ID NO: 558390 - DNA, 75 bp, Homo sapiens
ggcagctgtactaggactgggaacgggtgaaaggtgtagcagtcactcggcctacacccacagcatcgaccttgt

SEQ ID NO: 558391 - DNA, 98 bp, Homo sapiens
tcacgttattgaagacatcaagggaaaatggggtgaggaagattttgaagacaatcgtcacttatacagcattaataataagctacagcagccggagg

SEQ ID NO: 558392 - DNA, 100 bp, Homo sapiens
gcaaaggagacccaaggaacagtgccaagttagatgccgattacccacttcgagtcctttattgtggagatttaatccagagactgacttcactatagaa

SEQ ID NO: 558393 - DNA, 74 bp, Homo sapiens
cgggctcgtggggcgcctggagtgagggttctggttcccgccggcgagattgagaggatccagaatccagatct

SEQ ID NO: 558394 - DNA, 101 bp, Homo sapiens
aaaaattccgccgaaaaagagaagacgctttacccgactctttgggccgttatctcacgaagatgagaatgtgcctactgctcctgatcctccaagtcaac

SEQ ID NO: 558395 - DNA, 82 bp, Homo sapiens
tcctgaggaggacccagagcaggacagcggcccggaggacctgcctctcgtcaggaagcggggagaggtggtgagagatgac

SEQ ID NO: 558396 - DNA, 82 bp, Homo sapiens
ctaaagcagcgtgcgttcagccctggggtcctccagcagcctgacctgagtgggttagtgatccagagaaaccagcaggcca

SEQ ID NO: 558397 - DNA, 100 bp, Homo sapiens
aagaatggatttggatttcgtgatagtgatctggatatttgtatgaccctggaaggccatgaaaatgcagagctcttgaggatgacgattgccaaacaaa

SEQ ID NO: 558398 - DNA, 100 bp, Homo sapiens
agtggactagcttcttcgctaattttgacacagaaattcctttcctgctagaactttcagaatctcaggcgggtgagatgatttcaagctttttagatca

SEQ ID NO: 558399 - DNA, 82 bp, Homo sapiens
ctcaccgacagtgccctgagggccttcgagagctaccgcgccagacaggaaggaaaatcacctcggcagtgtttgaaggaag

SEQ ID NO: 558400 - DNA, 48 bp, Homo sapiens
gattcgttcctggatcttgcgaggcttattgttcctcgaagcgagtgc

SEQ ID NO: 558401 - DNA, 113 bp, Homo sapiens
gaagcttgaaagacttggtaatggcgacgggtttggtactccaaagattcaggtttactcacgtcatccagcagagaatggaaagtcaaatttcctgaattgctatgtgtctg

SEQ ID NO: 558402 - DNA, 102 bp, Homo sapiens
cgccagcctgcgaaggtggcggcgctgctgctcgggctgctcttggagggggaaatttgcagtggtgagaaaatgtataaagaaagattctgggaaagaatt

SEQ ID NO: 558403 - DNA, 74 bp, Homo sapiens
agccatgccagttcgagcagctgacaaattggctcctgctcagtatatccggaatctacttatgggacccatat

SEQ ID NO: 558404 - DNA, 100 bp, Homo sapiens
cttcattcccactcatgagatccaagtctctacagttaactggcaaagaagaaatgcactcggtgatggaaagagagccactattctgaagaacacttgg

SEQ ID NO: 558405 - DNA, 100 bp, Homo sapiens
ctgatggacaggtgtcccagaccgacgagttgccaccttccagagaagaggtacgagatgacaagacaaccataaagtgtgaaacctccccgccttcctc

SEQ ID NO: 558406 - DNA, 83 bp, Homo sapiens
attcaccagtgaagccgtgacatcctgggatattctttgttgagagatgtggtgaagctgtagagaaaaacaagcgtctcatc

SEQ ID NO: 558407 - DNA, 100 bp, Homo sapiens
atgtccttgatgttctcatcaagcccacgagtttaggagagtgcgtagaagggctgcgggaaaatgactatctgctgattcattcctgccgccagtggac

SEQ ID NO: 558408 - DNA, 98 bp, Homo sapiens
acaatgaatgtctaattatcacagcagtgcctgatttgagatggggtcccaggtctcggtggaatcgggagctctgcacgtggtgattgtgggtgggg

SEQ ID NO: 558409 - DNA, 90 bp, Homo sapiens
ggaaatgtcactgccaaagctggagtcgttcaacggggatgctgagaacttgctggagtcacagccactgggatcctttctcatcagggt

SEQ ID NO: 558410 - DNA, 75 bp, Homo sapiens
gcggcgcgtcctccgcagaggcccccgacggagacaaggacggttatgaagacagtatggagtttccagaccata

SEQ ID NO: 558411 - DNA, 100 bp, Homo sapiens
ctacatcttttcgtcgcttgccggctgtctgatgaagagcagcgagaatggcgcggccgcggagctggtgacccagaactgcgaggcttatgaggcccac

SEQ ID NO: 558412 - DNA, 82 bp, Homo sapiens
tggagctgggtcagtccgccgctcaccccgcggccgcaccttcccgccttctcaggccctgggctgcatcttgtacctgctg

SEQ ID NO: 558413 - DNA, 98 bp, Homo sapiens
tttctgcgccatcctgcaccgccaccggcccgacctcatgttggcgctgtacgtttatgagtacctgctgcacatcggtgcccagaagtcagcccaga

SEQ ID NO: 558414 - DNA, 75 bp, Homo sapiens
gttcagcagcgcggcagagtcatgggggaagaggagcaggacttggatggtgagaaggggccatcatcggaaggg

SEQ ID NO: 558415 - DNA, 97 bp, Homo sapiens
ggcgcagtgggcatcggcattgccgtggtcatggtgctggcccagcagggggagtacagtgaggccatccccatcctgagggcagccctgaagctgg

SEQ ID NO: 558416 - DNA, 100 bp, Homo sapiens
gagcgctactcctggcagtgcgtcaatcagagcgtcctgtgcggtaggtgagctcgtgaaacaatatgaagaggagaaaatagccttttaaggaaattgg

SEQ ID NO: 558417 - DNA, 100 bp, Homo sapiens
gcggcctccaggcctcaggccccctcaccatcctagaggtcaagatcagctctggctagaggctgacccgcggctgattgagtccctctcccagatgctg

SEQ ID NO: 558418 - DNA, 100 bp, Homo sapiens
atttcagggtaaagaaagtgcctacatgttgttttatcggaaatcccagttgcagagaccccctgaagaaatttctgaataaattggcagaagaacgcag

SEQ ID NO: 558419 - DNA, 90 bp, Homo sapiens
acactatcaaagttctctttgcatctcaggccatcgaggagggcacgctggaggagatcgaagaggaggtccggcagaagaaatcatcac

SEQ ID NO: 558420 - DNA, 83 bp, Homo sapiens
tgctgctctgcatggatttcatgacgttatgaaaggaaaattgcctaagaattatgacccaaaagttaccccagatccagaaa

SEQ ID NO: 558421 - DNA, 102 bp, Homo sapiens
ctgaacttaaaaagcagtctaaacctgtgaccacccctgaagaaattgcacagactgtctgcaactttacagatggtgcattggttcagcatcaggagtggg

SEQ ID NO: 558422 - DNA, 75 bp, Homo sapiens
gctggaggaggagtattactcgtccaggtccgggaagctgaaagtccccgaatgggtggataccgtcaagctggc

SEQ ID NO: 558423 - DNA, 83 bp, Homo sapiens
cccacagctgcctacagaaccgtcccaaaatatggcaaagaaacctattctgaggaactgtggctgcaccatctgtcttcatc

SEQ ID NO: 558424 - DNA, 90 bp, Homo sapiens
cgataaatcagacagaacagttaatcctcaatttaagcctgatctaacccctagaaacagcggcagtacatacctgtgaaaatgaagagc

SEQ ID NO: 558425 - DNA, 100 bp, Homo sapiens
acaaaacaaatatgaactatgataagctgagcagagccctgcgatactattatgacaagcagagcatcctggccagaacaagccaaggagccaagacgag

SEQ ID NO: 558426 - DNA, 82 bp, Homo sapiens
gctgaagcaaaattcagagagattgcagaagcccaagaagatgaaaggattgttcttgttgacaacaaatgtaagtgtgccc

SEQ ID NO: 558427 - DNA, 75 bp, Homo sapiens
cagtcagtgaccaactcagtgccaaaaccaggattcactccttctccagttgcacagccacacccttcagctggc

SEQ ID NO: 558428 - DNA, 75 bp, Homo sapiens
agctggtggaactagatgtgtctcgaaatgataaagagaggcctgtccagtctttgaaaacatcaagagatactt

SEQ ID NO: 558429 - DNA, 83 bp, Homo sapiens
gtgctcgctggcaccccgaacgggttgcttcccccgctgcgaggtgtcccgacccaggctaagcttgagcatggctgagcagg

SEQ ID NO: 558430 - DNA, 100 bp, Homo sapiens
tgactgcctggatccacgtcttctacaagagttgtctggatttctcgaacttttagtcgagtactttagaaaatgcctgattgacatttttggaattctt

SEQ ID NO: 558431 - DNA, 100 bp, Homo sapiens
agcttgtgaccagttgggatggacaaaacccaccaagatccagattgaagctattcctttggccttacaagagtacatccaagccattatgatgatggag

SEQ ID NO: 558432 - DNA, 100 bp, Homo sapiens
agaatgaagaaagtcagggggactgcaaaggccaatgttggtgctggcaaaaaggaatttcttcacatggctcctggagaagtgaccatcacagttcgcc

SEQ ID NO: 558433 - DNA, 50 bp, Homo sapiens
tggaatttctgaaaacatcagaagtgcccacttcacagagaatgcagttg

SEQ ID NO: 558434 - DNA, 100 bp, Homo sapiens
cggcctcccagccgcgttctcctccgccgctcctccgggcttgccctggagccctcagcaaaaacttgcccaactagaagaggcgaagcaggcttccatc

SEQ ID NO: 558435 - DNA, 99 bp, Homo sapiens
ggggatgaggggagcatgggtgccaaggagtcacggatcggattcctcagctacgaggaggcgctgaggagagactcagcccgcctgcacccaggtgaa

SEQ ID NO: 558436 - DNA, 101 bp, Homo sapiens
gtccacgtttattgccttgatgattgggtcctacgcctcctcggcagtcacctttccaggaatcaagattgtggtggtctgggtgggcaccaacaaccacg

SEQ ID NO: 558437 - DNA, 101 bp, Homo sapiens
acgcatgcctggagtggaggactagatcatcaattgaaaatgcatgatttgaacactgatcaagttaattggccttggtcctcacagctccaaaaagaaac

SEQ ID NO: 558438 - DNA, 50 bp, Homo sapiens
tacaaggagatcgaggtggaagaggatttttagactctgaggagcagttg

SEQ ID NO: 558439 - DNA, 51 bp, Homo sapiens
gcctgagatcagagtcacgcccttggtcctattttgtaacggattatgatc

SEQ ID NO: 558440 - DNA, 75 bp, Homo sapiens
ggcgtggatagcctgaaggcagccattcagggtttagatgtagattctctggtcattgagcatatccaagtgaac

SEQ ID NO: 558441 - DNA, 98 bp, Homo sapiens
gtgatcgactcggacacagaggacagcggcagcgacgagaacctggatcagcttgagaatgccagactgtcatcagagatgaatacttctactgtcaa

SEQ ID NO: 558442 - DNA, 100 bp, Homo sapiens
ccacctgcagcacatcagcgaccgcgagatgcccgaagtgtatgtggtagaagaccaaagaagagatgagctaggaccatccacctgcctcacagcctgc

SEQ ID NO: 558443 - DNA, 83 bp, Homo sapiens
ctacctgctgtacaccctcaacaaacaccagcgctttggggtggcccagttgaaatccttcccttcctctaccttggaagtgc

SEQ ID NO: 558444 - DNA, 74 bp, Homo sapiens
caagaacctgaacgaggacacgaccttcctgcccttcacgctccaggagctagttccacaggcgcatgggccac

SEQ ID NO: 558445 - DNA, 119 bp, Homo sapiens
aatctggtccaaacaatcatgggaatttccaaggggattcaaacttcaacagaatgtggcaaccagacttggaatggaaaattatctatgtgggctctgcagaaagtgaagaatacgat

SEQ ID NO: 558446 - DNA, 82 bp, Homo sapiens
gcccaagagctatcaggggaagatatgcatcagttccatcgagccattactacaggtttcccaaaccactccttatgatcca

SEQ ID NO: 558447 - DNA, 82 bp, Homo sapiens
gccttccttgtaacagcgcgaatccccaccaaggttattggagtgatgagtaaagaatacataccaaagggcacacgttttg

SEQ ID NO: 558448 - DNA, 106 bp, Homo sapiens
ggcagcgggtcctacgaggagggctgtcagagcctcatggagtacgttacagatgtagagctaaaacgactgaaggatgctttcaagaggacctgtggactctcat

SEQ ID NO: 558449 - DNA, 75 bp, Homo sapiens
tagcattgttggtgtcaacaacaatgaattcggctggctcatccccaagatgccctttcaagggcgacagctaca

SEQ ID NO: 558450 - DNA, 50 bp, Homo sapiens
gtcagctgcatctcccaattccgtctggttggtttccaatacggtagatg

SEQ ID NO: 558451 - DNA, 100 bp, Homo sapiens
tcacaaggccagtttctgatcgtccgccccgaggctgaggaccagtaggcagctcccaagatggtggacccaagtggagagattgtggaactggcgaaag

SEQ ID NO: 558452 - DNA, 75 bp, Homo sapiens
cagccccttgtcagccagggctgaacccccgcaggaggaggaagccaagaatctggtgagcgaagccatcgcagc

SEQ ID NO: 558453 - DNA, 90 bp, Homo sapiens
tggccccgagatcagaatgccggtgtaatggataggtaacagagaagacctcgtcccttcctagtcagggcatcagcatgactgagtgct

SEQ ID NO: 558454 - DNA, 100 bp, Homo sapiens
agccttgccgggggtctggccccaaagggcccctgaaatcttgatgagaagtggccacaatcgtgctgtggattggtggagtttgggagcattaatgtat

SEQ ID NO: 558455 - DNA, 82 bp, Homo sapiens
ctcccggcgccatgtgagggggctcgggggccgcggggggccgggcgctccccgccggagatgaggaaactgaggatcagag

SEQ ID NO: 558456 - DNA, 80 bp, Homo sapiens
gccgccgccgccatgaacaactcgggcgccgacgagatcgggagccttcacgtaaatgggtccagtcatgcctcccagta

SEQ ID NO: 558457 - DNA, 90 bp, Homo sapiens
ggcgctttcttcctggagcggagcgcaggcgccgagactgacaacgcggtcccacagctttaccgatttgttacaactcaagcaagggcc

SEQ ID NO: 558458 - DNA, 99 bp, Homo sapiens
actgagcccaggccacagtaccctattcacgctctgtgcttgtgccaaggaatggccaacctgctgacgggccccaaacggaacctgatggccctggcc

SEQ ID NO: 558459 - DNA, 76 bp, Homo sapiens
ctctcaggacaacccagatgtgcaacaaagtgcgatggaatgtatcctgtcaggtataatgtcagtgaatggcaag

SEQ ID NO: 558460 - DNA, 90 bp, Homo sapiens
ggagcgggtccttcggagatatctacctggcatgcttttcacttccactgcatctctcgctggctcaaaacacgacaggtgtgtccattg

SEQ ID NO: 558461 - DNA, 74 bp, Homo sapiens
caagtacccagagcagccgggaaggacgtgtttgagatgaggtttgccaagatgccagatgagcccgtggaggc

SEQ ID NO: 558462 - DNA, 83 bp, Homo sapiens
ggagaagagaccccaagagtgttgagcagcccatcgtgcttaaagaagggagcatcagatccatgctgctgctgactcggagc

SEQ ID NO: 558463 - DNA, 100 bp, Homo sapiens
aacccctgggacctggaaccacatcactgatcaaattggcatgttcagcttcactgggttgaaccactttggcttcatgtttgaaagctcgccgggcggc

SEQ ID NO: 558464 - DNA, 87 bp, Homo sapiens
tcgtgggcaccccattctggatggcacccgaggtcatcaaacagtcggcctatgactcgaagacattgctacaagtggttggtgtgg

SEQ ID NO: 558465 - DNA, 96 bp, Homo sapiens
atgcagctggccaagctgatccgacagagaaagttttcatggagtgataatgaaaggagcagcagccgcattaatatcccagagagagcaagtgga

SEQ ID NO: 558466 - DNA, 100 bp, Homo sapiens
ccttggctgacctcagagtcctttttggcatctaacctcctgtggataagggctcagaatagcaccattgctggagaaattgacacaagattctcttttt

SEQ ID NO: 558467 - DNA, 75 bp, Homo sapiens
gagacttgccggcttatggtttcaatgctggattgtggcgggcgtgtttgtgtgcctgctggagtacccccgggg

SEQ ID NO: 558468 - DNA, 75 bp, Homo sapiens
agagcatctcccagaagaaggtgaagatcgagctggataagagccgcacaggcgatgccaagcccagcttcttcc

SEQ ID NO: 558469 - DNA, 74 bp, Homo sapiens
aaacattgaacttgctgtcatgaggcgagatcaatccctcaaggctatcttagcggcacagagacgaggagaag

SEQ ID NO: 558470 - DNA, 90 bp, Homo sapiens
cggaggatgagcctgcagagcgcgcagtacctccgtattctaccttgtaaatactgttatttgtatatactgtaaatgatgacatcggtg

SEQ ID NO: 558471 - DNA, 100 bp, Homo sapiens
gaagtcaaagcgattaatttacagatgtttcacaaagctcagtcttgtttctggcgctggagacatcaagcttactaaagacacaggagttgacgatcag

SEQ ID NO: 558472 - DNA, 96 bp, Homo sapiens
cccttaccgggagtttcactgaaggtagcctttccagtaaatatatgactcagggaaaagcctcagcgaagaggacccagcaggaatcatgaggga

SEQ ID NO: 558473 - DNA, 117 bp, Homo sapiens
cggcggccgaagacactgcgactccggagacagcccaaatatcctcggaagagcgctcccaggagaaacaaagtcaacctatttgatttcttgacaagaccacaatctgatcccaaa

SEQ ID NO: 558474 - DNA, 100 bp, Homo sapiens
ctgcctgcattggcctcccaacgtgctgggattacagactcttagggttcctctcagtttgaagtattcctgcccttctgaaagcacatggaaactagca

SEQ ID NO: 558475 - DNA, 100 bp, Homo sapiens
ttgagaattcagagaaactgctgagtgaccactgaacgaaaagatctaatcttaaggcttactcaagctgtattagtcgacaggaccatttacatttcag

SEQ ID NO: 558476 - DNA, 90 bp, Homo sapiens
gctattgagcatgcagattttgcaggtgtggaacgcctagctcttgtcacaggtgtccaagtcacacagagccacggaatctcacaggag

SEQ ID NO: 558477 - DNA, 100 bp, Homo sapiens
ccccacctgcggattttattcctgcgcatgtggcctttgacaaaaaggactacaaagctgatgaagacccagcattattccagtcagtcaagaccaagag

SEQ ID NO: 558478 - DNA, 75 bp, Homo sapiens
tccacccaccgccgccgcctcccagcgccgtgccgtccctgcagtgacaccgaggtgctcctagccgtctgcacc

SEQ ID NO: 558479 - DNA, 75 bp, Homo sapiens
gacaggccagtggatcggaatggtggagaacttcaaccaggcactcaagcatcgatttcttccctgtgaaaacaa

SEQ ID NO: 558480 - DNA, 89 bp, Homo sapiens
gagaacctgaacaagtcccagctgaagctgggcatctggggcgctacgtggtgaacatgggtctgattgacaaactgtgtgcctgcttc

SEQ ID NO: 558481 - DNA, 100 bp, Homo sapiens
ggagaggacggagcccttgatgacgagggccacagtgggattaaaaagaccactgaggagcaggtgcagcacgtatctcccatgcgccaagtggagcccc

SEQ ID NO: 558482 - DNA, 87 bp, Homo sapiens
cgtgtactgcttgagaacagaatacattgctgattatctcatgcaggtgtgttccagagaacaagccttcagacatttgctatattg

SEQ ID NO: 558483 - DNA, 75 bp, Homo sapiens
cttcaccttcgctaagaacccagggcagaaaggtttaggtgttggggatgtcctttgcactgaccctgaactgcc

SEQ ID NO: 558484 - DNA, 75 bp, Homo sapiens
agtatcctgatagttctttccagtgttacagtgttcagtaaagagagcgttttcccaaagaaaataacatagcac

SEQ ID NO: 558485 - DNA, 83 bp, Homo sapiens
gactggcactgggctctgaggacaatgcagatcttcgtgaagactctgactggtaagaccatcaccctcgaggttgagcccag

SEQ ID NO: 558486 - DNA, 75 bp, Homo sapiens
tccatctcgaaaaagaaccgcgcgggaagccccagcccgcagccctcggggatcattgagaagcagccaggccac

SEQ ID NO: 558487 - DNA, 75 bp, Homo sapiens
ggatctggaggagcagttgtctgatgaagagaagatcgatgctatagaagacaaacaagggaaggttttttttcc

SEQ ID NO: 558488 - DNA, 102 bp, Homo sapiens
agatcctgacactaaggaaatgctgaagcttttgttgcacgtgcattatttaatcacatagacaagtcaggattgaaggatagttctgtcgaagaactcaag

SEQ ID NO: 558489 - DNA, 75 bp, Homo sapiens
ctttgactttgatggggctcagaaaaagctgagggaatgtgaatcagtgctgagggtgtaaatggaggagaggag

SEQ ID NO: 558490 - DNA, 83 bp, Homo sapiens
gttggtggtgcggggcggcagccgattcctggccacctccatagcaagcaggttttgggatttgagattgacgcggtgaactc

SEQ ID NO: 558491 - DNA, 100 bp, Homo sapiens
cagccaccgactgggggcaacttggcacttagaaccgcagcagggacgtcggtttgctatcgggactcggcgaggacgaatgatatggaacctagcaaag

SEQ ID NO: 558492 - DNA, 100 bp, Homo sapiens
gaatacttgcagcttccaaaggaaaggtcttgtccagaaggctaaaaaagcaaaggacaggttgttgaaacgagaaggggatgatcgagcagagtcaggg

SEQ ID NO: 558493 - DNA, 83 bp, Homo sapiens
gtaaccaccatcaaaaccattgaagaaaattcttttgggagccaaacccacggaaatctgaaatagagtactatgctatgttg

SEQ ID NO: 558494 - DNA, 98 bp, Homo sapiens
tcactttggaagatcgaggaaggcagaccacctgaagttgggagtttgagaccagcctgaccaacatggttcctgggtggagctacccatgaacagca

SEQ ID NO: 558495 - DNA, 76 bp, Homo sapiens
gcttgggatcctttatcctggtcatcttctatttccaaagtgccagtgacggggtggcccgtgagctgatgacgag

SEQ ID NO: 558496 - DNA, 100 bp, Homo sapiens
aatgctttgcacgtgcctgggcaacggagtcagctgccaagagacagctggcagcgatcgacccttcacccttgacgatttacagtacatgatctttcat

SEQ ID NO: 558497 - DNA, 137 bp, Homo sapiens
ccggcgcgctggagcgttttccggccgtgcgtttgtggccgtccggcctccctgacatgcagggctctggaggccacgggcatgatgcttcgggtcctggtgggggctgtcctccctgccatgctactggctgcccc

SEQ ID NO: 558498 - DNA, 89 bp, Homo sapiens
ctgaactcttcagataatcagagtggaggaagtacagccagcagacagagcgggatgccaccagcttgtccaaagggaagttccaggag

SEQ ID NO: 558499 - DNA, 82 bp, Homo sapiens
ctggtcgaacagttttttctaatggctattcaaggggacggcaaaacagaacagaaaggcggagataaaaagaggggtgtta

SEQ ID NO: 558500 - DNA, 83 bp, Homo sapiens
ccaaggccacaaaggagagctccgtggagagaagagacggggtctgactgtgttacccaggctggtcttcaactcttggcctc

SEQ ID NO: 558501 - DNA, 83 bp, Homo sapiens
agaaaacaaggcgattccgcagtccccccgttccctggaggtcctgtggaatggagggtcacgcagcacaatgccagctctgc

SEQ ID NO: 558502 - DNA, 100 bp, Homo sapiens
gacggaaccgccatgggtgctgagtggagagtggggaccgcggaccccgggggcaggtattttgaaggtggcgtctcatctgtctacctctgggatctgg

SEQ ID NO: 558503 - DNA, 83 bp, Homo sapiens
cgacacacaaagaatagagttgagcctgtgggacacttcgggcatatcacacctgaaaaattttatgtggaagcttgtgatga

SEQ ID NO: 558504 - DNA, 100 bp, Homo sapiens
caggcatcagttggtactcgccatgaaactcaaagatcgagaggtgcgagtactccagaaggaactggctgcatccacctctgaagacacgcacccttac

SEQ ID NO: 558505 - DNA, 75 bp, Homo sapiens
ccgaaccgggtgtccacatgagtgcctctcccagcagatccagctaatgggaatgacagcaagaaatttaaacga

SEQ ID NO: 558506 - DNA, 100 bp, Homo sapiens
actcaaatgcagtcggcttgtcctggctcttgccctcatcctggttctggaatcctcagttcaaggatgtaatccctgttcattactacttaatacctcc

SEQ ID NO: 558507 - DNA, 90 bp, Homo sapiens
caaggcaagcctattgagttaacacctctgccgctgctaaaaggttgtactcagactatctctactttgcaagttcgaataaatccgcgg

SEQ ID NO: 558508 - DNA, 100 bp, Homo sapiens
catgaatgaggagtacgacgtgatcgtgctgggcaccggcctgacgggattggaagccattgtagaagatgaagtgacccagaggttttcctcagaggag

SEQ ID NO: 558509 - DNA, 83 bp, Homo sapiens
cgcgagtgggagcaccaggatctcgggctcggaacgagactgcacggaaagtatgcctcagactcctcccttttcagcaatgt

SEQ ID NO: 558510 - DNA, 83 bp, Homo sapiens
gggccattttccagacctcatccaggtcttgggcgtctttggtactggcttttttaggggtctgcctggggattacccttgct

SEQ ID NO: 558511 - DNA, 75 bp, Homo sapiens
ctcccagctggcagaagcctatgaggttaaaattgcagagttttctcgtactccagaagactttctaaagaaata

SEQ ID NO: 558512 - DNA, 100 bp, Homo sapiens
tgctcttctccaggctctgtgaatcgagagctccagatcatgagaaagctagatcactgtaacatagtccgattgcgttatttcttctactccagtggtg

SEQ ID NO: 558513 - DNA, 83 bp, Homo sapiens
ggaagagcatcctatggtgtgtcaaaaggcaaagtgtgttttgagatgaaggaggaggagggggccagtgggggagcagtcca

SEQ ID NO: 558514 - DNA, 83 bp, Homo sapiens
ccaaaggcagcaagttctacggcccggaattaaacaaccaccatgtcgagcaaaaaggcaaagaccaagaccaccaagaagcg

SEQ ID NO: 558515 - DNA, 100 bp, Homo sapiens
gtggacgccgccgaagaagcatcgttaaagtctctcttcaccctgccgtcatgtctaagtcagagatgagagtccggagtgttgtcatgtgaagcctgcc

SEQ ID NO: 558516 - DNA, 80 bp, Homo sapiens
gcagtgattttaaccaaggcagttggtggaaatgaggatgctgaaaacgccattcaacagatgggtggccagtggcttgg

SEQ ID NO: 558517 - DNA, 75 bp, Homo sapiens
aaggagcagctggagcgtattgagaggaaggtcctgggaactccaacaagggagcaaatcagagaaatgaaccca

SEQ ID NO: 558518 - DNA, 115 bp, Homo sapiens
gctgaggaggccggctgcagccccaagacagagcgctactcctggcagtgcgtcaatcagagcgtcctgtgcggttttaagaagaagcagtgatgaagaaaaagttctttgtttg

SEQ ID NO: 558519 - DNA, 100 bp, Homo sapiens
agccctacaatcaggtgcagcattcagagaccgtcgaaagcggattccaaggaatccaggccagaagcggactcctagaagaggggagcagcaaggatgg

SEQ ID NO: 558520 - DNA, 103 bp, Homo sapiens
atgaccaatgactcagaagggaaaatgggatttaaacacccaaagatggagatcttataacaatttttgatagttctgacctttcctttgcaattcagtgcag

SEQ ID NO: 558521 - DNA, 71 bp, Homo sapiens
caacgccccggagccgccggccgctagcgtcagcgccagccagttcaacctggtgtgtgctgactcctgga

SEQ ID NO: 558522 - DNA, 75 bp, Homo sapiens
tcttagagaaacttggagaagggttgcctgtgatttgcttcggaggattattcgtatcttgaatctcagtaagag

SEQ ID NO: 558523 - DNA, 75 bp, Homo sapiens
aaggacacggtctacaccgacttcgacgaccattactgggacttccacccccaccacgtgcacagcgagttcgag

SEQ ID NO: 558524 - DNA, 144 bp, Homo sapiens
cagaactgttccttcagccaaagaaacaagccgtggaataggtgtatcaagtaatggtgcaaagcctgaagatcgcaaaagtggccgcacagccctgcatttggcagctgaagaagcaaatctggaactcattcgcctcttttt

SEQ ID NO: 558525 - DNA, 90 bp, Homo sapiens
atttcttacaagaagtcacaaccaacaaatggaattttcttgagcatgtttctaatcgttttgccattggaatccatggctcatgggctc

SEQ ID NO: 558526 - DNA, 87 bp, Homo sapiens
cacaaccatgcggacatcggcttctgcctggtgctctgcgtcctcatcgggcttatgttcgaggcatgttatgttacccagagaact

SEQ ID NO: 558527 - DNA, 100 bp, Homo sapiens
gtgaggctcccctcaacaacttctctgtggcgcgcctcaggcccaggcccaaggccaagtgagagagcccaggccacaggacatgctgccattctgccaa

SEQ ID NO: 558528 - DNA, 73 bp, Homo sapiens
attgcaggaagtggatgagttccacctcattttagagtatcaagcaggagccctggaggtatcacctgccaaa

SEQ ID NO: 558529 - DNA, 75 bp, Homo sapiens
gatgcgcaggggttttctgcacttctacactcaggtgctggagaatctggtaaaagcaccattgtgaagcagatg

SEQ ID NO: 558530 - DNA, 74 bp, Homo sapiens
tggatatccttcacttcaaaatagcttcataaagtcaggatgcctgccatattagatggagaggaggcagtttc

SEQ ID NO: 558531 - DNA, 100 bp, Homo sapiens
cccccggccccggagctgcctggaggcggccgcactcggggaaatcctcattgacgattcaatttgttgaaggccaatttgtggactcctacgatccaac

SEQ ID NO: 558532 - DNA, 100 bp, Homo sapiens
gactgcgggagccgggagcagttgattgctcacgtgtaccaggcctcaagctccggggaaaggacattggaaagcccatcgagaaggggcctagggcgaa

SEQ ID NO: 558533 - DNA, 75 bp, Homo sapiens
aagaagcatcgttaaagtctctcttcaccctgccgtcatgtctaagtcagagtgtatcgcattaagttcaaggag

SEQ ID NO: 558534 - DNA, 100 bp, Homo sapiens
ctccttgtacggcatgcaggtcctgctcttcgagaaccagtgtgctggagaatctggtaaaagcaccattgtgaagcagatgaggatcctgcatgttaat

SEQ ID NO: 558535 - DNA, 80 bp, Homo sapiens
cccacacaaggaggatctaagcagcaaggatagcaaaacctgatctcataaaacctaggtcacaaaggacagccctgcaa

SEQ ID NO: 558536 - DNA, 101 bp, Homo sapiens
cagtactgattgaattactcaaggctgcctctctgcaaagttgaggtcaagtttacccatgggggaactggttccagccaaaccgcaccaacctgtggcag

SEQ ID NO: 558537 - DNA, 80 bp, Homo sapiens
tcacttcacctctttctggaaaccagctttaatgaagcaccagttgagattcccagtccttctgaaaccccagctaaacc

SEQ ID NO: 558538 - DNA, 101 bp, Homo sapiens
ctttttaatcttgaaagcagagttgaaatagaaaagtctctaacacaggcttggaagcgtttgtgtctgctgccaagaagctaccacgagaagatgtgtat

SEQ ID NO: 558539 - DNA, 103 bp, Homo sapiens
tggaattatgccctgttggttccaatgctgggattggctgcttttcaccatggtgaatccgggcagcagctcgcagccgcccccggtgacggccggctccctc

SEQ ID NO: 558540 - DNA, 98 bp, Homo sapiens
tgcaattcataatggagctactgtactggctattggaaggaggagattctgaagataaggagagttcagatcattcaggatcaacaactccatcatct

SEQ ID NO: 558541 - DNA, 89 bp, Homo sapiens
ttatggctgttctgaactgtctcttcgactcattgagccagatgctgaggtgtatgtgctcaagaggccttatgtggatgagttcctga

SEQ ID NO: 558542 - DNA, 118 bp, Homo sapiens
tatcagcactatttgaaacttttatctcatctggcttggcgcctgaggttctcccattagggacttcatctgcagcatcctcaccattaaaaaaagaacagcccttatttactctacg

SEQ ID NO: 558543 - DNA, 100 bp, Homo sapiens
aacaccaccccagtgccaactgccatctatacatgtagaacaaactgtccattctcaagagactggaaccacgaaggcggaggaccggggcatgctgctg

SEQ ID NO: 558544 - DNA, 74 bp, Homo sapiens
gaccaagtagatggagttctcaggaacttagtgatttggcccgtgaccctccagcacaatgttctgcaggtcca

SEQ ID NO: 558545 - DNA, 85 bp, Homo sapiens
aaggagactacctacactgaacagagccatgaagaacttggagaggtgttttcggattgcaaatatgaaccactggccaccctca

SEQ ID NO: 558546 - DNA, 100 bp, Homo sapiens
tggcagacatcgagaagcataatgacattgtggacagtgacagcgatgctgaggatcgaggaacgttgtctggctgcctgctgtttcccggggagatcat

SEQ ID NO: 558547 - DNA, 95 bp, Homo sapiens
tccactttcgccagcccgtgccgcgagcgcggcctgcaggaggtactccaaagattcaggtttactcacgtcatccagcagagaatggaaagtca

SEQ ID NO: 558548 - DNA, 98 bp, Homo sapiens
gcgcactgacaatccagctaatccagaaccactttgtagatgaatatgatcccaccatagagattgtccccttggggcggaaagaagccaaggccaag

SEQ ID NO: 558549 - DNA, 89 bp, Homo sapiens
aaatgatgtattttgtgatcgcagcgatgaaaggacccattccaacaatctcgtaaaacatggtggattactatgaagttctaggcgtg

SEQ ID NO: 558550 - DNA, 97 bp, Homo sapiens
gtcctttcaatggccccattaagggaagagtttacatcacaaattatcgtctttatttaagaagtttggaaacgagtccagtgtcgtgctgctgcag

SEQ ID NO: 558551 - DNA, 83 bp, Homo sapiens
caactatagcatatccacatgaccatatactccttgacgacagggactaccaccttcaccttcatgcccacaaggtgtcacac

SEQ ID NO: 558552 - DNA, 82 bp, Homo sapiens
cgccgagcacccaggcgactgcctcatcttcaaggaagccatcttcgacaagagcacagggaaggttgttttgaagacgttc

SEQ ID NO: 558553 - DNA, 87 bp, Homo sapiens
gtcccttcaacaagtctgccctcaaggaagccatgtttgatgatgatgctgaccagtttcctgacgcatgcagcagaactgattaaa

SEQ ID NO: 558554 - DNA, 100 bp, Homo sapiens
actaggagatctcctcaaagaagtttgtccttctgctattgatcctgaaggtgttggagcgggccggagagaagtagagtgggctgcgaggagaaggaaa

SEQ ID NO: 558555 - DNA, 71 bp, Homo sapiens
ccgccatgtcatccacttcgcccaacctccagacaacaagggaggtgtcacagttttccatttagatcaac

SEQ ID NO: 558556 - DNA, 100 bp, Homo sapiens
ctcccgagcagctgggattacagatccagctccaggtcccacaggggctcttcttccccacgaaaaagatcttattcaagttcatcatcttctcctgaga

SEQ ID NO: 558557 - DNA, 88 bp, Homo sapiens
cttcttcgttatggacagcatccaaacattatcactctaaaggatggcactccacagaaggatgttattatcaagtcagatgcaccgg

SEQ ID NO: 558558 - DNA, 75 bp, Homo sapiens
ggagaggtgttaccggaacggcggcgacaagggtgttcccgaactagagtggaagtagatttgctgaccaaggag

SEQ ID NO: 558559 - DNA, 100 bp, Homo sapiens
atgagcaagacctaaatgagcctcttgccaaagtgtcccttttaaaaggagcgtcctggggagttggaattcagaaggaatctctcagacgcaaatctcc

SEQ ID NO: 558560 - DNA, 90 bp, Homo sapiens
gattcgcagtggtcgcttcttctccttgacctgtcgcgaaatcgcctttcagaaattcctatagaagcatgtcactttgtttctctggaa

SEQ ID NO: 558561 - DNA, 100 bp, Homo sapiens
ctgataaacatgaatctgagagtatttatgaactgccaatccaaactttctgacatgcctttaaaaaggtgcaggttttgcagcatttggacaaacaaag

SEQ ID NO: 558562 - DNA, 101 bp, Homo sapiens
cgccctggccctctcgctgttgctggtctctggctccctcctcccagggccaggcgccgctcagaacgattcagaatggacagtttagaagaacctcagaa

SEQ ID NO: 558563 - DNA, 83 bp, Homo sapiens
ctggccctgatcatcctgctgggcttcgtccagatcgggaaggactagacgcttgaagcaaagctgccatcccagaagacgac

SEQ ID NO: 558564 - DNA, 82 bp, Homo sapiens
ccgcgggctctgccaggagagaagactgacatccacgacagcgatggcagttccagcagcagccaccagagcctcaagagca

SEQ ID NO: 558565 - DNA, 82 bp, Homo sapiens
catcagacctggcactacttgtccaagacgtactggtggcgaggagcggtggtgccccccccgggcacggggccatgtacaa

SEQ ID NO: 558566 - DNA, 83 bp, Homo sapiens
ctcggcggcggcggagcgggcggcagagcagggcggcggcgactcggtcagcccaaggccaaccccactgtcactctgttccc

SEQ ID NO: 558567 - DNA, 88 bp, Homo sapiens
ttccggatcgggggcaagcggaaggtgatgcccaagatggaccagagcattggggagtcagcaatgtccgttgtgttaaatcagctgc

SEQ ID NO: 558568 - DNA, 90 bp, Homo sapiens
agcagattcaaagccaggcaccattcgtggggacttctgcattcaggttggcaggaacccggcgatatggctgccgctgtgccccgcgcc

SEQ ID NO: 558569 - DNA, 51 bp, Homo sapiens
gcgtgggaggcggaagagactgcagagattcagaatatacccccctggaca

SEQ ID NO: 558570 - DNA, 83 bp, Homo sapiens
ccaacgccacgctcagcaccttcattgaggtgctcttacagcctgttccaagtgtggcttaatccgtctccaccaccagatct

SEQ ID NO: 558571 - DNA, 86 bp, Homo sapiens
cgagtgacatctgggccggaccagctggtgctgcgcggcgcagacaatgcagatcttcgtgaagactctgactggtaagaccatca

SEQ ID NO: 558572 - DNA, 80 bp, Homo sapiens
cacctgtgcactcgctccgtacctggacctgctgaatcatagcccacatgtccaggtcagcccaaggccaaccccactgt

SEQ ID NO: 558573 - DNA, 90 bp, Homo sapiens
attggaggtatcaactgtaagaagaggaaagacttgtctcaggttgcacataggcaaaggtgtgcagttggaatgtaaaggtgaaggtga

SEQ ID NO: 558574 - DNA, 100 bp, Homo sapiens
aggcgaagctggccgagcaggctgagcgatacgacgggaatcacgctcgcttctagccaggctgtcagcaacgccaggaagctggagtggccactgacgg

SEQ ID NO: 558575 - DNA, 97 bp, Homo sapiens
agtgaacctatcgaaggacatgaagactaccacatgatggttatcaatactctggctgaccatcatcatcgtgggactgactttggtggaagtcctt

SEQ ID NO: 558576 - DNA, 100 bp, Homo sapiens
cagcaataccaccttcagtacttggcaagatttgatgctcttgtgctcagtgacatcattcagcacaagctccgggtggataaggcagctgctgcagcag

SEQ ID NO: 558577 - DNA, 90 bp, Homo sapiens
cctgtgacctggccgatgaggaagtactgagcctgttggaggaactggcccggaaacaggaggacgcagacctcaacaccaacatcgagg

SEQ ID NO: 558578 - DNA, 100 bp, Homo sapiens
atattccatctactgtctttttcttcaatgggcagcatatgaaagtggattatgggtatgttcgcaattcgtgctgatcatgattttgtagtacaggaag

SEQ ID NO: 558579 - DNA, 119 bp, Homo sapiens
cgatcagagatcggcggagaccctcgaagtgcgcaaacttgacactcaccctgaccgagctctgattatacaaaaccaggagacattgaccctacatcagtagcaagtcccaaagatcc

SEQ ID NO: 558580 - DNA, 75 bp, Homo sapiens
ggcgcgtcgactgcccagagtccgcggccggggcgcgggagcacggggtcactctggtgcccattgaggagttca

SEQ ID NO: 558581 - DNA, 100 bp, Homo sapiens
ccggaagccctgagggcagctgttcccactggctctgctgaccttgtgccttggactgggcgttcatcaacaccaacatctttgccaggaccaagataga

SEQ ID NO: 558582 - DNA, 100 bp, Homo sapiens
ggccgaccccgacccggactcggacaaggagacatggtctcaaagtaccgagaacctttgatccataccttcctgaggggagtgagagatcctgatggtg

SEQ ID NO: 558583 - DNA, 100 bp, Homo sapiens
tggcatttgtgaaggaggctgaggctttgattgagcgtggacaggctgagcgacttcgaggggaagaagggtgtgggccgaagatatgctcatgtggtgt

SEQ ID NO: 558584 - DNA, 100 bp, Homo sapiens
atcctccctgtcctgaacatctttaagaatatgaatggtgaaaagaacggaggggagcccgatgacgctgaactagtaaggctcagtaagaggctggtgg

SEQ ID NO: 558585 - DNA, 50 bp, Homo sapiens
gccgttgcatcggtgcagggcaaggtacttcctatttaacagacattgtg

SEQ ID NO: 558586 - DNA, 83 bp, Homo sapiens
gtcgagcacataacggggttcgggtgtctcgtgtgtgaacatcacaggtgatggcatcagctgagaagggaaggaagcccatg

SEQ ID NO: 558587 - DNA, 87 bp, Homo sapiens
caaacctggcaggaatccctggggggaaaccgtgtttctgcccagttttccttcatagtcagatgctctgggagctggtgctgttgg

SEQ ID NO: 558588 - DNA, 76 bp, Homo sapiens
ggggccatcgctgccgtctttcacacactgatagaatctttagaacacgatgttcttgatgataatacagagcaga

SEQ ID NO: 558589 - DNA, 100 bp, Homo sapiens
cctagtccacggagctcaatggcggcagtcgcgctgagggactcggctcaggtattggcaagcttgccagtgtacctgctggtggggctgtagccgtctc

SEQ ID NO: 558590 - DNA, 100 bp, Homo sapiens
acgagttcgagcagcagcggtaccgttacgcggagctctcggaggaggacctgaagcagctgctttatcttcaagccaggatgaagggagactgggcaag

SEQ ID NO: 558591 - DNA, 100 bp, Homo sapiens
ggtctggccgtcggctgcggcgccatcggtaatcccgtttgttggcaccattcctgatcagctggatcctggaactttgattgtgatacgtgggcatgtt

SEQ ID NO: 558592 - DNA, 97 bp, Homo sapiens
ccagcactcccagctgcgcagggcctgccaggtggcgctcggttatttcttatgagggtcatggatatcccctatctaaacttggaaggaccagact

SEQ ID NO: 558593 - DNA, 83 bp, Homo sapiens
caatgaggctccctgctcagctcctggggctgctaatgctctgggtctctgtctgaagatgatgagaaactgaaaaagaggaa

SEQ ID NO: 558594 - DNA, 82 bp, Homo sapiens
ctgagggcagaggtggaaggtttggaggctagaaatgagagttcccagatggtttccacggtgatgtgtacctaacagtgaa

SEQ ID NO: 558595 - DNA, 100 bp, Homo sapiens
aaatgtctctctatccatctctcgaagacttgaaggtcaaaatgcagatcttcgtgaaaacccttaccggcaagaccatcacccttgaggtggagcccag

SEQ ID NO: 558596 - DNA, 100 bp, Homo sapiens
gacgcagagtgggcggcggtggtggttgatgagaacatgaaggtagcacagaaaagagatgctgtcttgcagggaatgttttatttcaggaaagatattt

SEQ ID NO: 558597 - DNA, 100 bp, Homo sapiens
tcgccgttcgcctgtggctggacaacacggagaacgacctcaaccaggggcatagaatgtcaagctaaccaggcgtccgctacttcagaagagtgtactg

SEQ ID NO: 558598 - DNA, 50 bp, Homo sapiens
agtttgaagagttccctgccgaagctgagtcagtgctgattctctcaaat

SEQ ID NO: 558599 - DNA, 75 bp, Homo sapiens
caaccccgagccgctggtgctacaggatcacagaagaactgcagcttcctggggagcagtttcacctccacaggc

SEQ ID NO: 558600 - DNA, 100 bp, Homo sapiens
gactccggagcaggagaagttcctccgccaccactttgagacactgactgagtccccctgcagagggatgctgagaacttgctggagtcacagccactgg

SEQ ID NO: 558601 - DNA, 100 bp, Homo sapiens
ggcctcaacatgaatggctactttcacgacagtcattttgtttactcattcagccctgttgcaggtcccaataaactcttcataaggttgacagaagcac

SEQ ID NO: 558602 - DNA, 96 bp, Homo sapiens
gatccccagacacatgctaacaggatctacaggatgatcaaacttggtctgggtattgatgaagatgaagtggcagcagaggaacccaatgctgca

SEQ ID NO: 558603 - DNA, 83 bp, Homo sapiens
cagagcctcgcctttgccgatccgccgcccgtccacacccgccgccagaatgttgtaccatctttgggtaggcagacttccct

SEQ ID NO: 558604 - DNA, 100 bp, Homo sapiens
gcatttttatctctggtggctctgctacggcggcgcagaaatgaggcagaagcggaaagatgtttctttctcagcaaaatagaggagaagcttacccctc

SEQ ID NO: 558605 - DNA, 88 bp, Homo sapiens
tgtctccttctcttcctcagggctcccgtgtctgctcgccctccgacgctgctcaggtgaaagaacttgtcctggacaacagtcggtc

SEQ ID NO: 558606 - DNA, 100 bp, Homo sapiens
cggtgcccgaggagtagtcgctggagtccgcgcctccctggccggcacagtcttcactaccgtagaagaccttggctccaagatactcctcacctgctcc

SEQ ID NO: 558607 - DNA, 52 bp, Homo sapiens
ctgtatgaactgctgacgggaatgctttgtttttgggaggctgaggaaggag

SEQ ID NO: 558608 - DNA, 114 bp, Homo sapiens
tttcggatgatgccttcaatactacctttatttccaccatagggggaacacacctgaaactagaggaacagcttatgtggtctatgaggacatctttgatgccaagaatgcatg

SEQ ID NO: 558609 - DNA, 100 bp, Homo sapiens
gccaccaacttccctctgcggccgtttgtcattcccttcctgaaggacactggcctgagactgtctgcagttgcaccgcagatcctcctgcccggctggc

SEQ ID NO: 558610 - DNA, 86 bp, Homo sapiens
cagtcggcaaggagagacgtcgctgaggggcttgcctgaagcgagggaacttgagagagatttgctgggataaggcgggacatttc

SEQ ID NO: 558611 - DNA, 50 bp, Homo sapiens
ccaagctcgtggcctgcctctgcgtgcgtacatgtcccagagcaagcaca

SEQ ID NO: 558612 - DNA, 100 bp, Homo sapiens
gaaaaatattgttaagaaaatggttgctttcaataaccaagaggagatgttaaagtaacccatcttgcaggacgacattgaagattggtcttctgttgat

SEQ ID NO: 558613 - DNA, 100 bp, Homo sapiens
gccatcgacaaatcttatgataaacccgcggtagatgatgatgatgaaggcatggagacctttcaaggagcagggacaagttacaggaatgttctccaag

SEQ ID NO: 558614 - DNA, 100 bp, Homo sapiens
tctgcctttgacaggagaggctgcttcttgtagaggtcttccccagggaggtcctgaactacacagctgagaacatctgtaagtgggccttagaaaacca

SEQ ID NO: 558615 - DNA, 87 bp, Homo sapiens
gtagtccattcactaaacactgcaatacaagcttggcaacagtgatggaatggggagaagatattaaagcagtttcaaaagatgaag

SEQ ID NO: 558616 - DNA, 100 bp, Homo sapiens
cgatcttcggcgccactggccagaccgggctcaccaccctggcgcaggcggtgcaagcagggaggagtggatgcgggccatccagatggtcgccaacagc

SEQ ID NO: 558617 - DNA, 90 bp, Homo sapiens
gccgagtcctagcgcctggcctgcgcgccgctgcccgcgccacagggaagcagtttaagtgcacggtgtgtgactacacagcggcccaga

SEQ ID NO: 558618 - DNA, 98 bp, Homo sapiens
tcggcctccccttggattcagacgccgattcgcccaggtcttgagagctgatgacaataacatgggcaatggctgctctcagaagctggcgactgcta

SEQ ID NO: 558619 - DNA, 82 bp, Homo sapiens
cggagagccacgcatgcgcactggtccagctgggagctccccgacctccaggagggcaagatccaagccatcagcgactcgg

SEQ ID NO: 558620 - DNA, 95 bp, Homo sapiens
ccgcctcccgctcctagcaggttgctactgccccgaacccgcgctgcagggaacagcggggcaaacagttccccagaacagcaaaagaaactatg

SEQ ID NO: 558621 - DNA, 82 bp, Homo sapiens
ccaaaaagcattgctggtatttcgaaggactctatccaacctattatatgtgttgccacatctgcaaacttcctgggagagt

SEQ ID NO: 558622 - DNA, 102 bp, Homo sapiens
tcgcttcgtcctacacttgcgcaaatgtctccggtttatcaggtagaagatgtgtgtgaagaagaaatgccagaagagtcagatgaatgtgtccggatggat

SEQ ID NO: 558623 - DNA, 51 bp, Homo sapiens
ggccttcccatcaccatcacagagagcgataagctgagctgtctctcttgc

SEQ ID NO: 558624 - DNA, 58 bp, Homo sapiens
tgaagcgactgagtccgcgatggaggctgaaggggatgctaagggagataaagcaaag

SEQ ID NO: 558625 - DNA, 100 bp, Homo sapiens
caccagctcatgagagtccacaaaacaatgccttcaagtgccaagaaacagtgcgacttcaaccaaggtgccaagtcctgccctgccaacttcttggcag

SEQ ID NO: 558626 - DNA, 100 bp, Homo sapiens
agtggatcttcgtcgggggcaagggtggtgtgggcaagaccacctgcaggtagctgagcagctcatcaaccccttcggagaggacgatgatgactttgag

SEQ ID NO: 558627 - DNA, 83 bp, Homo sapiens
ccgctcgtcagactccagcagccaagatggtgaagcagatcgagagcaaggagtacgagagggcctccaaagtggaccagttt

SEQ ID NO: 558628 - DNA, 90 bp, Homo sapiens
cgaccgcggctcggaccacgtggaagtgggcattgatgaggacatgactgcccgaattagcatggctgatgtcaagttctctttccaatg

SEQ ID NO: 558629 - DNA, 98 bp, Homo sapiens
gaagacaacccccatggcaatgacagtgccaaagccagccgggccaggaccaaagccggtgatctccgagatacagagctacttcctcagccgagccc

SEQ ID NO: 558630 - DNA, 100 bp, Homo sapiens
acctcaagcttgcagcatcaggaggcctgcgtaagtgaggaaacagctgatcctgctcctgtggcctccagcctcagcgaccgaccagtgacaatgacag

SEQ ID NO: 558631 - DNA, 80 bp, Homo sapiens
caccgcctggtctctttcctgtggccagcccaggtccgcgggagagctgtggggcttggtgagtgtttcgtggcctctcg

SEQ ID NO: 558632 - DNA, 100 bp, Homo sapiens
aaggcagactttttgatattcagagccttggaagtcaacactgtcacacgtcagctaactgttcagatgatgcaaaatcctcagattcttgcagcccttc

SEQ ID NO: 558633 - DNA, 100 bp, Homo sapiens
ctccgccgccgccgccttgctgctgctcaaagctgctgccgccccttgggctaaaagacctggaatcatttttctgataatgaggcagagcgggttaaaa

SEQ ID NO: 558634 - DNA, 90 bp, Homo sapiens
agaggggccactgctgggccctgaggctgcaccaagtggcgaaggagccggctccaagatacgggacgtgcaggaaacactgatgcccca

SEQ ID NO: 558635 - DNA, 51 bp, Homo sapiens
tgttacgctaggaatatggcaaacgggcaagattcttgccaagagaattaa

SEQ ID NO: 558636 - DNA, 82 bp, Homo sapiens
gcagctgctgtcccgggcctaccccctggactccctggagaagcagatggaaaagcggacctggaaaatatgacaagtgccg

SEQ ID NO: 558637 - DNA, 100 bp, Homo sapiens
ctcctccgaaccccttcatgcccaaatcccggaaactccagcgtgtctccagccgtggatagaccactggaacaatgagaaggagagaattctactggtc

SEQ ID NO: 558638 - DNA, 73 bp, Homo sapiens
ttgtcttggtatactacatggcaaaatgggaaaggcagtgaaatcaactgtgcagaccatcactgttggagga

SEQ ID NO: 558639 - DNA, 83 bp, Homo sapiens
gctggacgaagagctctcctccttcttcctcaactatctcgctgacacgcagcccagcgacttctccgtgtcccttaaagcgt

SEQ ID NO: 558640 - DNA, 86 bp, Homo sapiens
cctggcgggcgaggaggaggcgctgcgtcagtaccagcagatccaggatgccagaaaccatgtgagccaagccatttacctgctta

SEQ ID NO: 558641 - DNA, 98 bp, Homo sapiens
gagcccgccgggaccccccggagcgcggccacggcgcagcttgccttgcgccatggactggcagccagacgagcagggcctgcagcaggtcctgcagc

SEQ ID NO: 558642 - DNA, 110 bp, Homo sapiens
attcaagactgtttttcctacctgttcagcacttctttcagcgatatgaagttaaatccagctgctgtgacttactcgaagcctcgattggccacattttggtactacgc

SEQ ID NO: 558643 - DNA, 101 bp, Homo sapiens
tggtcgtctgagagctttacgtcatcttcgattagctaataaccaactgcaattcctacctccaggtactccaaagattcaggtttactcacgtcatccag

SEQ ID NO: 558644 - DNA, 88 bp, Homo sapiens
aggggccctccacattctggccgctgtggagctcctgggtgacattgtgcagaactgtagtctggaagactcacagattgagaaggaa

SEQ ID NO: 558645 - DNA, 75 bp, Homo sapiens
gatcttcctgttcattctgcaagaacccaagagaaggttagcatcttgcaaggaggtagtaacatatccagtcgt

SEQ ID NO: 558646 - DNA, 75 bp, Homo sapiens
cccgagtccgcgggaagatggcggcgccgctcatccccctctcccagcaggtggagattctggacgcaaagacaa

SEQ ID NO: 558647 - DNA, 97 bp, Homo sapiens
ggctggcggacaggcgacagcgacctgcggcagaggcgtgcaaagactccagaattggaggcatgatgaagactctgctgctgtttgtggggctgct

SEQ ID NO: 558648 - DNA, 124 bp, Homo sapiens
gagatgggcctactcgcccgccaccctgcgctgccgccgctctgaggagttaaaggtcaaaatgcagatcttcgtgaaaacccttaccggcaagaccatcacccttgaggtggagcccagtgac

SEQ ID NO: 558649 - DNA, 96 bp, Homo sapiens
cgggacccgcccgcccgcgggaggttatcaatactctggctgaccatcatcatcgtgggactgactttggtggaagtccttggttacatgtcatta

SEQ ID NO: 558650 - DNA, 82 bp, Homo sapiens
ctcccctcggaactcgggcatcatggcctcagggcgaactttctgaccaagtatacaactacccagagggcctaggagaagt

SEQ ID NO: 558651 - DNA, 105 bp, Homo sapiens
tgtgccatcatcgtggtagttattgtaagctatgactttgcagccgtcctggagtggttcgcggagcgtgtggaccgcatcatcctgctcttcgacgcccacaag

SEQ ID NO: 558652 - DNA, 74 bp, Homo sapiens
ctaaagcagcgtgcgttcagccctgggaatgaagactattctcagcaatcagactgtcgacattccagaaaatg

SEQ ID NO: 558653 - DNA, 75 bp, Homo sapiens
agctggtggctggagcgaccccttgttctttggtggcgctggtgaatcaggtctaggaaaatcgactctcataaa

SEQ ID NO: 558654 - DNA, 100 bp, Homo sapiens
catctttcccctctttatgaaatctcccaggaagatcaagaaagtgggaaccactgagaaggaacatgaagctcagagtcaagatctccactgaagttgg

SEQ ID NO: 558655 - DNA, 50 bp, Homo sapiens
gctgaagcgactgagtccgcgatggaggtccctgtgcgttttattgcgac

SEQ ID NO: 558656 - DNA, 75 bp, Homo sapiens
acaaaattcaggaaggactattctcattaagatattgtactccaagatacttggattacgaagatttggagcgca

SEQ ID NO: 558657 - DNA, 50 bp, Homo sapiens
cagcgaatcggtggccatgatctctaggaattacatgaatgacagtcttc

SEQ ID NO: 558658 - DNA, 106 bp, Homo sapiens
ctgccacggtctgcccacccaacgcgaagacggtaacccgtgtgactttgactgggtgagacacagtaacctggttgaactctgcatctggaaagctgaagactga

SEQ ID NO: 558659 - DNA, 98 bp, Homo sapiens
tcgactacaagaagagggcggagcggagacgggagtattatgaaaagatcgttgaaatcacaaagattagacacctttttagataggtgttcttcagc

SEQ ID NO: 558660 - DNA, 100 bp, Homo sapiens
ggcaccgaggccaaggtggatgaggcccaggctgatgggaaggagcacccaggagctgaagcctatgaaagagacaaccagcaccaagatgaagcagaag

SEQ ID NO: 558661 - DNA, 82 bp, Homo sapiens
cctggagcctcagttggaagcagccgatccagcctgcggagcctgtggggcagggaagtcccacctggccatcgtgcagaag

SEQ ID NO: 558662 - DNA, 100 bp, Homo sapiens
acatggtgtgggccgacatcaagagctgcgagatccaacaggtttttgtctacaatgaagcagaatgccctgcaaggtgtggtgcccagtgagacagagg

SEQ ID NO: 558663 - DNA, 100 bp, Homo sapiens
ccgagaagaaggctgctggcaaaggggacgtcccaacgaagagaccacctgtccttcgagcagaacaccttccaccatgaccacctcagcaagttcccac

SEQ ID NO: 558664 - DNA, 100 bp, Homo sapiens
ggagtaagagcccatagcagtctgccagacaatagagcatatgggctaaatttattgtgaagaaatcagaagatgaagaagacgccgctaaagatactta

SEQ ID NO: 558665 - DNA, 97 bp, Homo sapiens
ctgtggtatggaagatcaaacaaacttgttgggcttctcgacggagagaggttctccagcatttggctcaaggccccaagggcacatgtgacaagaa

SEQ ID NO: 558666 - DNA, 76 bp, Homo sapiens
gcattgctgatcttgtacttggattcagcaaggaaccttccgaagacccttttgaggacttctttgggaatcgaag

SEQ ID NO: 558667 - DNA, 98 bp, Homo sapiens
cgggctgaagcgactgagtccgcgatggagtaagactttgaccccgacgcaggcttcagtgattgccgcggatcagaagcctgagcactttggctcga

SEQ ID NO: 558668 - DNA, 100 bp, Homo sapiens
caacatttagctgggatgaaagacagcaaggtggggtggaagacaacccgtgagtattacaccttcatgtgggttactttgcccattgacctaaacaaca

SEQ ID NO: 558669 - DNA, 50 bp, Homo sapiens
gttcacgtcccgcacacccaagggacagagcgggatgccaccagcttgtc

SEQ ID NO: 558670 - DNA, 98 bp, Homo sapiens
cagaagccagaggctggagccggtgctggactacaaagctgatgaagacccagcattattccagtcagtcaagaccaagagaggccctttgggaccca

SEQ ID NO: 558671 - DNA, 51 bp, Homo sapiens
cctaccattggaacagcgaatagatattcggcccatctggttagacaatct

SEQ ID NO: 558672 - DNA, 75 bp, Homo sapiens
caagagggccccgctgaccaggtggctgcagaaaaagcatgctttacgctgttattgtcaagccatgcaagttta

SEQ ID NO: 558673 - DNA, 100 bp, Homo sapiens
acggccgaggacttcgccgaccaggtccgagccggcgagtccctgatgaagctggtgtccgacctcaagcagttcctgatcctcaatgacttcccctccg

SEQ ID NO: 558674 - DNA, 51 bp, Homo sapiens
agccttcccagtagctgggaccacagggttaaagcacgaattgggagctct

SEQ ID NO: 558675 - DNA, 90 bp, Homo sapiens
cagccttcctcctctgcctcctcagtcttggcggagccatcgaaattcctatggatcaggcctgtgggagcaaatctgtgtatgacggcc

SEQ ID NO: 558676 - DNA, 100 bp, Homo sapiens
atttcttagacaagaagatggtcacctctggacttattggacaaaatgttgacattcaacccacacaagaggattgaagtagaacaggctctggcccacc

SEQ ID NO: 558677 - DNA, 100 bp, Homo sapiens
ttggagatggggaccgccctggacatcaagattaaaagagcgaataaagtttatcacgccggggccaaatttgagtccctctttaggacgtatgacaagg

SEQ ID NO: 558678 - DNA, 75 bp, Homo sapiens
gcttcgacgccctctgcccgctccagaagcagtttccaacatggctagatccatcagaaactgaagccgtggaga

SEQ ID NO: 558679 - DNA, 96 bp, Homo sapiens
gcttcttccacctgcccgttaacattcgaaaatgtcaagagtttgacaggaggagtcaatggaggtgtccactgtacagatgtaacaaatgcaagt

SEQ ID NO: 558680 - DNA, 75 bp, Homo sapiens
tggcaagattcttctgaattgtgctgccttggccaaaagagaagctgcacacatacatgtaagagaagcaaaaat

SEQ ID NO: 558681 - DNA, 76 bp, Homo sapiens
atcatggaagttgattactcagtctctaaaaagctaagattttatttggagagaagcaagcatctttgcctctttg

SEQ ID NO: 558682 - DNA, 83 bp, Homo sapiens
cttggtttgcgtcctgcactgaaaggaaatgacggattttgtgtccctggccagtgtccttccacctgtccacaagcatgggg

SEQ ID NO: 558683 - DNA, 75 bp, Homo sapiens
tcagaagactagaaggaagttcctggccattcagaaatgcttcggttacccacagtctttcgccagatgagaccg

SEQ ID NO: 558684 - DNA, 96 bp, Homo sapiens
gctcgctgggagagaggtacctctccttttccctctccctttccctaaggcctcattgaatttgaagaatgtgacactgctagtgcagttgaaggt

SEQ ID NO: 558685 - DNA, 80 bp, Homo sapiens
tggagagttttctagaagcctgtcgaaaaatgggggtgcctgagacgatgccactgacaaggacctgtcggacctggtgt

SEQ ID NO: 558686 - DNA, 83 bp, Homo sapiens
tgcgtgtaggtgaagggggcttcctgaccgaggacgtgagcgacagaatagaaaaggaatccctggatggcccgatcgtgaag

SEQ ID NO: 558687 - DNA, 88 bp, Homo sapiens
ctcaacaccagcaccgcagatgttgtcaaggtggcctaccaggaggccaggggtgtcgccatggtggactgggtggttatggatcagg

SEQ ID NO: 558688 - DNA, 80 bp, Homo sapiens
ggaacaggacgccctctgatcactctcgagtggaccctgaggagctcttcaccaagctcgaccgcattggcaagggctcg

SEQ ID NO: 558689 - DNA, 74 bp, Homo sapiens
atgagggccgtgttgacgtggagagataaagccgagcactggaacttgatgggaaacctgcttctcctactccg

SEQ ID NO: 558690 - DNA, 128 bp, Homo sapiens
aaagagtttgctgagaagaaatttaaggaggtggccgaggcatatgaagtgctgtctgacatgctgttccctcgtcacaccaatgccagtgctcgagacaacaccatcaacctgatccacacgttccg

SEQ ID NO: 558691 - DNA, 83 bp, Homo sapiens
cggcatggctctcctggtgctcggtgaactactgagttcttcattatgtctgatggagattatgattacctcatcaagttttt

SEQ ID NO: 558692 - DNA, 100 bp, Homo sapiens
ctaggcgttcgtgaagagaagcagctgttgctattggaggaggtatcagtttttggaagaagcttttcaaaatcagaagggtgcaattgagaatctactg

SEQ ID NO: 558693 - DNA, 83 bp, Homo sapiens
ttgtaatttcctagaaggaggattgagctgtaaaattgacaagcttggcatgtggaaatcagcacatctgggcctgtgattcc

SEQ ID NO: 558694 - DNA, 97 bp, Homo sapiens
gacggacagaggagtcgtagcggtcgaggcttttgcggctccggcgtgccggaaagcactactgcagtcttcagttaagcaacaagtagaagctatt

SEQ ID NO: 558695 - DNA, 98 bp, Homo sapiens
ccacaggaggctgtgcgggccccgctccgcttcgaatggtacttcgggatgacttcagacaaaacccttcggatgtcatggttgcagtaggagagcct

SEQ ID NO: 558696 - DNA, 75 bp, Homo sapiens
cagcgacaccgcgagctatatctgcgcgtggagctgagtgacgtacagtgttctaagaacggaagcatctgggct

SEQ ID NO: 558697 - DNA, 75 bp, Homo sapiens
ccgtgtgggagcgggagctgcggaaaggtgaggaattttaaattggaacaagagcaagaaaaaaacaaaatcttg

SEQ ID NO: 558698 - DNA, 95 bp, Homo sapiens
aattgatattttgatgaacaatattgaacgctatcttaagaacaaaatccagtctcatagcagaggagaatataatgtttacagcaccttccaga

SEQ ID NO: 558699 - DNA, 100 bp, Homo sapiens
ttttggtaaaattacagaattggccaagtactatactggcaattgctggagaagattttgcaattgttgcttctgatactcgattgagtgaagggttttc

SEQ ID NO: 558700 - DNA, 50 bp, Homo sapiens
ggcctcctcagacactctcaagagattgattacacagtacctaccgttat

SEQ ID NO: 558701 - DNA, 126 bp, Homo sapiens
gcctttgtgtccgtgtcccgagaccgcaccacccgcctctgggccccagacagagccgagactgtctgaagctgggcccacctgctgagggagaagtcgtccaagtcaagtggcccgatggcaaac

SEQ ID NO: 558702 - DNA, 131 bp, Homo sapiens
gatgaaaacaaaatagcagagaaacctgactgggaggcagaaaagaccactgaatctagaaatgaggcacggacccagaggagaccattctccacgccttcaaagtgttcgacactgaagggaaaggtttc

SEQ ID NO: 558703 - DNA, 90 bp, Homo sapiens
gtttcagaggatcctgtagccataaagattgcagggctgaaatctctttaatgatggagggaagcaggcagacgcgagtgtctcggccat

SEQ ID NO: 558704 - DNA, 95 bp, Homo sapiens
caggctgcatcaggatgaatgatgacccaagtatggaaggttgaaaaataccggccacagaccctgaatgatctcatttctcatcaggacattct

SEQ ID NO: 558705 - DNA, 100 bp, Homo sapiens
cgtgatcgactcggacacagaggacagcggcagcgacgagaacctggatcaggctgatcaggctgccaaggtagagaagatgcgccagagcgtcctcgag

SEQ ID NO: 558706 - DNA, 74 bp, Homo sapiens
ggcggcggcagcgggtcttgggtcctccgagagcagcagcggggtgagcccctccagactccgaataggagatc

SEQ ID NO: 558707 - DNA, 71 bp, Homo sapiens
ccaataggacatgatccaggaagagcagtaagggactgagctgctggagaggcgggagatttttgagcagc

SEQ ID NO: 558708 - DNA, 75 bp, Homo sapiens
agaggagttgaacgtagtagagcaggtgcgggttcagatcgatcctgtcctcggtaccgtgggctttgggtctgg

SEQ ID NO: 558709 - DNA, 89 bp, Homo sapiens
attcgcagtggtcgcttcttctccttgggacagatatggcttttctaaagactgctttggaaatggcaagaacagcagtatattcctta

SEQ ID NO: 558710 - DNA, 97 bp, Homo sapiens
cgaagcgggaaaaaggctgggtgccgccgtcccccagctgcgcaaccctaggaactctcggcaatgtctcaggctgtgcagacaaacggaactcaac

SEQ ID NO: 558711 - DNA, 87 bp, Homo sapiens
cctcgcgtcgcgcccgggaggaaggaacgaggcaaggagctaaagcagcgtgcgttcagccctgggcctggctcccaccatgagtgc

SEQ ID NO: 558712 - DNA, 75 bp, Homo sapiens
cagtaattgatgaagatgacccagtgctaggggaagactattacagtcaatgctgaggatcctcctatggttgtg

SEQ ID NO: 558713 - DNA, 100 bp, Homo sapiens
tatttcaacttcacctcggcaacaattacttacctggcccaggaggatgggcccgttgtgcttgaggcagccctaggtgaggccaagaagcaacttcagg

SEQ ID NO: 558714 - DNA, 100 bp, Homo sapiens
ggaggacttgcagaagtaccacaacagggacacctggttccagctgcagcacgtggacgctgactcggaagtgcagaacactatggctatgcatcctcca

SEQ ID NO: 558715 - DNA, 50 bp, Homo sapiens
ggaggccttccagctgtttgaccgaacagctccccaggtgtgtcctggta

SEQ ID NO: 558716 - DNA, 50 bp, Homo sapiens
ggagcacagcagtcccgagtgcagttggtagctggcagtgttgtgatggc

SEQ ID NO: 558717 - DNA, 75 bp, Homo sapiens
cggaagtgcagctgcctcagttcttagcgcagcagagagagatcatcattgcctgaatttagctttgtgactgca

SEQ ID NO: 558718 - DNA, 100 bp, Homo sapiens
acacggtgtgcaaggggagtcgtggcgtcgtctgcgaccgctgccttctcggccccatctgctttgatatgattgaagaagcatacatgacaaaatgtgg

SEQ ID NO: 558719 - DNA, 75 bp, Homo sapiens
tagtattaaaataaaatacctggatgaggaagatgaagaggtttctctggaaacccccctggtaagtgtggagga

SEQ ID NO: 558720 - DNA, 90 bp, Homo sapiens
gacttggatatgctgacgactgtgcaggaagaaaacgagccagtgatttacaatagagcaagggtttcgaaaaaacgatgaaatgaaagc

SEQ ID NO: 558721 - DNA, 75 bp, Homo sapiens
aaaggaagacttgtaacctggagaagaggtgagacgtggtcttgtaacacagtggttaagaatgtgactttggag

SEQ ID NO: 558722 - DNA, 98 bp, Homo sapiens
tttctgatctgtctgaatgtttaattaatcaggaatgtgaagaaattctacaggtatctccatacagccaagaataaagaaagaaagggatagatgga

SEQ ID NO: 558723 - DNA, 82 bp, Homo sapiens
gctcttaacccagtttgaaacgtaactggttccctgaccagcgccatcatgaccgggtcctataacaacttcttcaggatgt

SEQ ID NO: 558724 - DNA, 100 bp, Homo sapiens
tgccaaactcagatttcctggtgcatttttaccttgtgatgcacctgggattaaccagcgaggatcagggatatcccagagaaggaaggaaatacccttt

SEQ ID NO: 558725 - DNA, 75 bp, Homo sapiens
gaaacagaggactaattttggcagttctaaatttgaatttgagcttttgtctggtcctctgagccccagtgagag

SEQ ID NO: 558726 - DNA, 51 bp, Homo sapiens
cttctttgagaaccacccatatttcagaatttgaaagacatattggctgac

SEQ ID NO: 558727 - DNA, 75 bp, Homo sapiens
gtgcccgctgtgcgtgtggacttctacaatgcagacgagctcaaggtgctatggtctttagaattgggtcactgg

SEQ ID NO: 558728 - DNA, 100 bp, Homo sapiens
gaacagctctgacggccggtatgtgaaggagaactgcaaacctctgaagttccaggtattcctgaagcagatcaacagctccctggtggactccaacatg

SEQ ID NO: 558729 - DNA, 98 bp, Homo sapiens
aattcctgacgttcattgatctgagaatggatcttggagaatgtctgaaagtccatgacctggctttaagagcggattatgaaattgcatccaaagaa

SEQ ID NO: 558730 - DNA, 96 bp, Homo sapiens
cccacactggcggatgaagcagctggtggggctctactgcgacaaggtgcggctctatgagtggacaacagagaaggagctgcgcactgagtgcaa

SEQ ID NO: 558731 - DNA, 75 bp, Homo sapiens
ctttccagcagtcagttgaacaagacaacttatttgataaaataatgttgagtttccatgaagaacaggaagtac

SEQ ID NO: 558732 - DNA, 133 bp, Homo sapiens
aaacacccacatacaggagacaccaaagaagagaaagacaaggatgaccaggaatgggaaagccccaggaatgttagttcggccggagaggaggcccgcagaaggatgagagagtgtgatgggcttacggatg

SEQ ID NO: 558733 - DNA, 98 bp, Homo sapiens
ccatcgttgctgccttcttcgtcaagtgagatggaagattttcgaggtatagcagaagaatcatttccaagctttctcaccaattcattatttggtaa

SEQ ID NO: 558734 - DNA, 90 bp, Homo sapiens
gaggaaacgtcggaaactttagagaagttaagagaagaattagctatcaaatccggccagaactttgaggtggaggctgatgacttggtg

SEQ ID NO: 558735 - DNA, 74 bp, Homo sapiens
tggagctgggccaggccgtggaggatgtgaggtctggaacagctgcagccattttgccaccatgggaaacctgg

SEQ ID NO: 558736 - DNA, 89 bp, Homo sapiens
gccgggatttgggtcgcagttcttgtttgtggatcgctgtgatcgtcacttggtgagcacctgcggatctgtccccagggctacacctg

SEQ ID NO: 558737 - DNA, 75 bp, Homo sapiens
gcgaaggatccccaacggggaggccaacgtgaagaagctcacagaacatttcctgcctgttgctcacactctgtt

SEQ ID NO: 558738 - DNA, 83 bp, Homo sapiens
catgaaaatgtggggaagggttcccttttctccaggtccagctccccctcctcatatgatgctggcaagtcaaccattggagg

SEQ ID NO: 558739 - DNA, 82 bp, Homo sapiens
ctgcatttcctcctttcgtctttacaaggtagccgtttggcgtcgtgaggtactactacaaacgggagatcctggaacgggt

SEQ ID NO: 558740 - DNA, 100 bp, Homo sapiens
ctttgggacatttcatgagtcattcaagcaacatttctaagcactattcctgatcagagaactccagttgcttcaacacacagtatcagtagtgcagcca

SEQ ID NO: 558741 - DNA, 82 bp, Homo sapiens
gtcggggatcggtcgcctgagagaagaagaaaggagggcgcgggctaatgaccgagaatacaatgagaaattccagtatgcg

SEQ ID NO: 558742 - DNA, 83 bp, Homo sapiens
ctcgctgtgagacatgtctgagactcctgctcagtgtagcattaagatgtgttcagagcaacattgttttgttgacacaagca

SEQ ID NO: 558743 - DNA, 90 bp, Homo sapiens
tgcaggcacagcccgagaaaccgcagcactacacgaaagccatcaccaagtcgggcctccagcacctggccccccctccgcccacccctg

SEQ ID NO: 558744 - DNA, 100 bp, Homo sapiens
ctcacgtgcccatcagtgacagcaagtccattcagaattttctggatatgccgcagaaggatccgtgccagaagcaagcctgtgagatacagaaatgttt

SEQ ID NO: 558745 - DNA, 90 bp, Homo sapiens
aagtagccgctccgagtggaggcgactgggggctgaagagcgcgccgccctctcgtcccactttccagatctttgatgatgcgtacaaat

SEQ ID NO: 558746 - DNA, 100 bp, Homo sapiens
tgggattaatgctaaatttgtgaatgctgtgtatgataccttacttaatactttctgtggaagcaaatcattgaacgcaatggaggagtcctcaccagtg

SEQ ID NO: 558747 - DNA, 50 bp, Homo sapiens
ggtgcagtgtgtctggtcttatgaggtctgggataaaagtgaaagtggtg

SEQ ID NO: 558748 - DNA, 101 bp, Homo sapiens
tgacatggaggatgatttcatgtgcgatgatgaggaggactacgacctggacctcagcagccatgtcgaagccccatagtgaagccgggactgccttcatt

SEQ ID NO: 558749 - DNA, 133 bp, Homo sapiens
atgttggctagactagaaatcaaacaacttggaaatcgatcacaaccaggcattaagttcacagttgaatataagctgggattccaagtggacaatgttttggcaatggatatgccccaggtcaacatttctg

SEQ ID NO: 558750 - DNA, 82 bp, Homo sapiens
gtgacgggtctggagtgcgtgggggaccggctgttggcggtgcaagaagaaacacacgctgctgtgccccgactttgcccgc

SEQ ID NO: 558751 - DNA, 74 bp, Homo sapiens
tcatctcgggcctggtgctgctcgcctacttcctgccggcgcaggcgggctgacgcacgaggcacacaggaagg

SEQ ID NO: 558752 - DNA, 83 bp, Homo sapiens
gggactaaactggcgggctccgtggaagcgtggccggcagcgtcccggacgaggaggaactctaatgaatcattgattgacca

SEQ ID NO: 558753 - DNA, 75 bp, Homo sapiens
atgaacccaaccaaaaacagagagaagattgtagagaaaaagttagctgctatgcctgaccatacagatgtttcc

SEQ ID NO: 558754 - DNA, 48 bp, Homo sapiens
tgtggctgaagagttccttaagaatctggaagctgaggctgtgttccg

SEQ ID NO: 558755 - DNA, 73 bp, Homo sapiens
atgtcccctattatctcccctgcccagagatcttactgcttttcaggaagccttggacgctgcaggtgataaa

SEQ ID NO: 558756 - DNA, 75 bp, Homo sapiens
accgtcgccggccgcccgcacgtccgtccggattcactccttctccagttgcacagccacacccttcagctggcc

SEQ ID NO: 558757 - DNA, 76 bp, Homo sapiens
aaacccggagggagagtcccgcctgaagaaacctggatctttgctagaaagagagcttcacgaggctgacattgtg

SEQ ID NO: 558758 - DNA, 80 bp, Homo sapiens
cgaggctcggccgccccgccgcgagacctgcctagagctggaacgttacctccagagcgagccctgctatgtttcagcct

SEQ ID NO: 558759 - DNA, 101 bp, Homo sapiens
ctgaaaaagaaatgtactccttgtgtcttttagcaacattaatgggctgtcctttggaggtataaattctctcagcttaaaggttcttcagatgatggcaa

SEQ ID NO: 558760 - DNA, 148 bp, Homo sapiens
ccacccccgccctgcgccagccttcgtccccgcagaggaccccccgacaccagcatggactgctgcaccgtccgtaaaagccctgggctcagccagagcagggcagaggatgacgggatgaccagctgcagagaggagtactctactg

SEQ ID NO: 558761 - DNA, 82 bp, Homo sapiens
cggagagaactcagcgaggattctgagaatttcagaaactgtggaggagtgtcactgtagattccatggacgaggagaaaat

SEQ ID NO: 558762 - DNA, 75 bp, Homo sapiens
caatgctggatagataccgaattcttatcacaaagaggccccacagtatcaaatatccgcctggctggattagag

SEQ ID NO: 558763 - DNA, 82 bp, Homo sapiens
agcgaccgagggactgggagtcgttagtgagaagccccatgtgccactcccctgatctgcagcttcggtaggccggtggacc

SEQ ID NO: 558764 - DNA, 96 bp, Homo sapiens
ggaaatgtttatcactgttgagtttgagcttgaaactaaccaaaaggaggtgacagagccagtcttggtgctctgtgttcacctggttcatctgag

SEQ ID NO: 558765 - DNA, 75 bp, Homo sapiens
tcaacatctctcagagacgaaaggtcaacgtattgaaacttactgttgaagacttggagaaagagagggatttct

SEQ ID NO: 558766 - DNA, 100 bp, Homo sapiens
ccggctgtctgatgaagagcagcgagaatggcgcgggatacccacccaccatcccagggtctacaacatccacagccggaccgtcacccgctatcctgcc

SEQ ID NO: 558767 - DNA, 50 bp, Homo sapiens
gtgaaagaaggttgggttcagaagagggggaggcttgtggatcagaatct

SEQ ID NO: 558768 - DNA, 76 bp, Homo sapiens
tcctggatgacgtggctcctggacccgcaataaaggtgtggaatatcaaacaaatgattaagttgacacaggaaca

SEQ ID NO: 558769 - DNA, 145 bp, Homo sapiens
cctgggaatccacgtcctagactctagccgtcccactgaccctctgagccacagcagcaacagcagctcagaagtttcttaatgtcacgagcgttcacctgttcaaggagagatgggacactaacaaggtggaccaccacactga

SEQ ID NO: 558770 - DNA, 82 bp, Homo sapiens
gaaaatagcacacttttactctacgcaactgttgctttttcatgattgacgtgagtgaattcagatataactcaagcttgtt

SEQ ID NO: 558771 - DNA, 100 bp, Homo sapiens
tgttcggcttcatgggcaatcagagtagaagtcgaaatggcagaagaagaggagaggacatgatgcatccactcaagtaacaattcaggttttaaaccag

SEQ ID NO: 558772 - DNA, 82 bp, Homo sapiens
agcaacagtggcaatgagaccagtggaagcagcaccatcggggagacaagcaattttcggctttgtgagaaaccttaccatc

SEQ ID NO: 558773 - DNA, 95 bp, Homo sapiens
ctgcggcgcgctgctggacgaagagctctcctccttcttcctcaactatctcgctgacacgcaggtcctgggcatggggagcctgacgttttgaa

SEQ ID NO: 558774 - DNA, 100 bp, Homo sapiens
gaggcagagcctaagagaactatggcaacatcaggtgactgtcccagaagtgaatcgcaggacctgggaggaaggcaaggtgctcatctttgatgactcc

SEQ ID NO: 558775 - DNA, 100 bp, Homo sapiens
ctttgaagtgggagcccagttggaagcccgggaccgtttaaaaaactgctgtcaccactgactaaagaagagaaaactgcggcagagcaattcaaatttc

SEQ ID NO: 558776 - DNA, 90 bp, Homo sapiens
gtctggatggaacctgagctgggtctctgactcacttctgactttagacccaacatgagtgaagtttcctgcaagaaacgggacgactat

SEQ ID NO: 558777 - DNA, 100 bp, Homo sapiens
ggacgagctggagaaggccatcaccacgcagaacgtcaacaccaagtgcatcaccatccccaggtgtgctgggcatcaaggtgaagatcatgctgccctg

SEQ ID NO: 558778 - DNA, 96 bp, Homo sapiens
cctcctcccagtgctgaagtcccaaggagccgccctgcagcttgtacctccttttaaacctcaagtaacatctgagacagatactagatattttga

SEQ ID NO: 558779 - DNA, 83 bp, Homo sapiens
ttcctgccacagcggcttcgagctctcctctgatggcaggacctgccaaggtctcaccaacggctttgggggtgcgaggagcg

SEQ ID NO: 558780 - DNA, 88 bp, Homo sapiens
attcctttcttggcaactggaggtcaaggcgaatatttaacttatatctgcctgtcaggtactactgagcgagtgtgcttgatccagg

SEQ ID NO: 558781 - DNA, 74 bp, Homo sapiens
gacgtccggcttcggagcgggagtgttcgttgtgccagcgactaaaaagaggggaacgcccttttgcttgtgac

SEQ ID NO: 558782 - DNA, 80 bp, Homo sapiens
tcccggagagccccggagtgagcggagtagcgagtcggcaacccggagttccaggaatggatggaggtgctttaactgat

SEQ ID NO: 558783 - DNA, 83 bp, Homo sapiens
cgaactgggtgcggggacaggcatcgtggggatcttggcagcgctgcaggacctgcctagagctggaacgttacctccagagc

SEQ ID NO: 558784 - DNA, 87 bp, Homo sapiens
gctcggaatgttcgtggaacttaataacctgcttaacaccacccccgacagggcggagcaggaatagccaggccagaagaaggaagg

SEQ ID NO: 558785 - DNA, 100 bp, Homo sapiens
ccggccgcctcgggccgctgctctgcctgctgctcgccgcgtcctgcgcctggtcaggtactccaaagattcaggtttactcacgtcatccagcagagaa

SEQ ID NO: 558786 - DNA, 99 bp, Homo sapiens
gatgtggatgtgtatggaccttcagttccaaagatgatgaatctgaaaggaaatccggaattatcacagagctgaccggttccctgatgtgttacctgc

SEQ ID NO: 558787 - DNA, 75 bp, Homo sapiens
agctgttttaactatccctgcctgtgactttcaaggtgtgggaggtgctgaaccttttctggccatgaaccatta

SEQ ID NO: 558788 - DNA, 75 bp, Homo sapiens
ctggtaggcacgggcggctccgcagtgaccggactcgggggagcatcaagcattgcacagttctctccaataaca

SEQ ID NO: 558789 - DNA, 75 bp, Homo sapiens
cgtagagtcgctggagcgggcggagctgtgcgagagcctcctcacttgggaggcatacacggaatacctgaggag

SEQ ID NO: 558790 - DNA, 80 bp, Homo sapiens
ctacctctggccccgagatcagaatgccgctgagcgggctttggacaccatgaactttgatgtgattaagggaaagccaa

SEQ ID NO: 558791 - DNA, 83 bp, Homo sapiens
caaaaatgagtgtgaggcgaacagccatcccgggcactatgtgaatttggggttaaagatcgaggtccggaagccactaggag

SEQ ID NO: 558792 - DNA, 96 bp, Homo sapiens
caagcccgtggatcccccaattacagtatgcctttcaggacaaaaatcacctttatctggtgtgatccctcacatccacaaatctctgattggaaa

SEQ ID NO: 558793 - DNA, 90 bp, Homo sapiens
ccgatctgagcgcttggccaagtacaaccagctcctcagattaatggagtggacgtgactgaggccaggcatgaccacgccgtctccctg

SEQ ID NO: 558794 - DNA, 100 bp, Homo sapiens
gggaggagcagtgaaagagaagggaatgctaagaactgctgggaggatgacagaacaggagtacagctgtgtagtaaagatgccttctggtgaatttgca

SEQ ID NO: 558795 - DNA, 100 bp, Homo sapiens
caagaagttcaccttcgtctgcatggctctgtcactcacggaagtgaccaagttcactcctggatgctagctacaagccaagccttagacactgtctgga

SEQ ID NO: 558796 - DNA, 75 bp, Homo sapiens
cgtcctccgggaccggagtcagaaccctccgcagagtaaagatctccaggggagcccaccagcctagtcaacatg

SEQ ID NO: 558797 - DNA, 82 bp, Homo sapiens
agacatttcttcggcattctgcaacagggtttggaaatcccttgtctccaggttgctgggattgacttcttgctcaattgaa

SEQ ID NO: 558798 - DNA, 98 bp, Homo sapiens
cagcaccgccctcgcctcctgcagccgcatcgcccgccgagccacagccacgatgatcgcgggctcccttctcctgattcagaatggacagtttagaa

SEQ ID NO: 558799 - DNA, 93 bp, Homo sapiens
cagatcgagagcacagagacttcttgccatggctgccgtaagaattgaacacctacctcttcatgatgcaagcccaaggcattctgatccggg

SEQ ID NO: 558800 - DNA, 100 bp, Homo sapiens
ggacattgtggcccgagacgaggtggagaggactacttccagcaacccagtctcctgccatgtccgaccccatcacgctgaacgtcggggggaagctcta

SEQ ID NO: 558801 - DNA, 50 bp, Homo sapiens
gggcacaggcagtgtctggaattgatatgcctgaatattcagtcacaaat

SEQ ID NO: 558802 - DNA, 73 bp, Homo sapiens
tcgatccgcccacagacctcaaattcaaagcattcctctgaatattgatttgctgaatagcccagacttattg

SEQ ID NO: 558803 - DNA, 90 bp, Homo sapiens
agatctaaaagccacccaggccttggtcctagcacccactcgagaattggctcagcagagttctctgtggcccatgaccttcggcctggc

SEQ ID NO: 558804 - DNA, 75 bp, Homo sapiens
gaatggagagggaccggatctcagctgaaactagaggaccgttctgtggtgccccgagatgtggtccggcacatg

SEQ ID NO: 558805 - DNA, 75 bp, Homo sapiens
agcaacatcatgacattgctgttccagtgcatgcaggagctcagcctgaggaagaaaggcctggagtgcctcgtg

SEQ ID NO: 558806 - DNA, 83 bp, Homo sapiens
ctaatatttaagaaagaagatgttaactttcagggtggcccagttgaaatccttcccttcctctaccttggaagtgcctacca

SEQ ID NO: 558807 - DNA, 74 bp, Homo sapiens
taatcccagcactttgggaagccaagacagccagctaaaggtgtggatgagcaaatacggctggagtgccgacg

SEQ ID NO: 558808 - DNA, 106 bp, Homo sapiens
atgaccttccagaattacgggcaagcgctgttcaaacccatgaagtgactctcctattccatctgtttcttcgggatcatcttcacctctttcagccacttctgcc

SEQ ID NO: 558809 - DNA, 50 bp, Homo sapiens
cgacaggcggcgcgggcggcgggacaaagtggccttcatcacaggaggcg

SEQ ID NO: 558810 - DNA, 97 bp, Homo sapiens
catggagaggggccgtggcccctgcagcggaaccggacccagtccctgagccgcccctacacccacagggaacagaaagaacagcttcaaaagatga

SEQ ID NO: 558811 - DNA, 74 bp, Homo sapiens
tgccagcacctttcggcttctgagacggcggcagcagcggcattcaggagacagaagaaattctggcagatgtg

SEQ ID NO: 558812 - DNA, 101 bp, Homo sapiens
atagtacattgatacgtcttttaaatgaattgctgccatgggaaccaaagttaatgaaggctttccaaagaaacagacggcaaatggatacatcttgtttt

SEQ ID NO: 558813 - DNA, 75 bp, Homo sapiens
ggccgcagtgccacttcgacatcgagatcaaccgggagccggagcagtctgaatgccagaatggataaccgtttt

SEQ ID NO: 558814 - DNA, 80 bp, Homo sapiens
atgaagccactgattagcaatttaaagatcctctccaagacatggatgggtgcaaaaaagagctgccccgcttgcaagag

SEQ ID NO: 558815 - DNA, 75 bp, Homo sapiens
aaacacttcaaactcaaccatatctaccaggacgggagtatgacaaggacgggaacctccggccatggtggaaga

SEQ ID NO: 558816 - DNA, 88 bp, Homo sapiens
gtgagctcaccgcccagcccaaaccaggagattgcgagggagcgatgcggtgcagcgcgggcgcaccctacgacgcgcacaccaccgg

SEQ ID NO: 558817 - DNA, 136 bp, Homo sapiens
gtgagctcccgggatgggaaaggcgacctgggggagccgcccccgacacggcccacgataattcgtgtccagtccccggatggagtgaagcggatcacagcaacaaagagagaaacagcagcaacatttttgaaaa

SEQ ID NO: 558818 - DNA, 101 bp, Homo sapiens
gctgcagcagcaagtcccatcggaggacctccctgccctgtataccgagggaacagtttgaaggatgacctctaggaagaaagtgttgctgaaggttatca

SEQ ID NO: 558819 - DNA, 73 bp, Homo sapiens
gagcgcgtccaggcctgacagctctgcggctcgggccctgagtgtctttggtgcaacactaacaaggcttgtc

SEQ ID NO: 558820 - DNA, 100 bp, Homo sapiens
aagacaatggagggatgcttgtatggtctccatatcacagtatcccagatgccaaatcacgtagaaaatctaattgtgtgaaagaagtagaaaaactgca

SEQ ID NO: 558821 - DNA, 97 bp, Homo sapiens
gcccaaggtctgcgtcaccgtcctgccccccgacgagagcggccggccccgcaggagttttggtggggaagtgtcctgggacaaatctttgtgcatt

SEQ ID NO: 558822 - DNA, 100 bp, Homo sapiens
aatgggctggattcactaactgaacttaacttgcgacacaatcaaatcactttcgtgtggacagaggactgcagaaaatcaacctatcctccttcaggac

SEQ ID NO: 558823 - DNA, 127 bp, Homo sapiens
aagaaaaagcttgtattctggttgatcatcttagggagccattgtatataaaggacttaaccaccaccatgtcgagcaaaagaacaaagaccaagaccaagaagcgccctcagcgtgcaacatccaa

SEQ ID NO: 558824 - DNA, 100 bp, Homo sapiens
cagagcccctcgtgaaggagtatgctgcgtttgtgctgggcgctgccttttccaggtctgccatcatggatgttctcgcagaagcaaatggcacctttgc

SEQ ID NO: 558825 - DNA, 85 bp, Homo sapiens
gagagccccggagtgagcggagtagcgagtcggcaacccggagggagctcgaggagcagcacggcatccactgcaacatgacgtt

SEQ ID NO: 558826 - DNA, 75 bp, Homo sapiens
tgacccaccaccatacaacttccttgaggcgcgaggtactccaaagattcaggtttactcacgtcatccagcaga

SEQ ID NO: 558827 - DNA, 98 bp, Homo sapiens
aggcgggaggcaacggagctaccagccgacgcaaacatgcagatctttgtgaagaccctcactggcaaaaccatcacccttgaggtcgagcccagtga

SEQ ID NO: 558828 - DNA, 100 bp, Homo sapiens
ctaccatggcctttcctggccccagcaaatggagctgctcctggtgaacaagctcaagtggaacctggccgcaatgaccccgcacgatttcattgaacac

SEQ ID NO: 558829 - DNA, 82 bp, Homo sapiens
tgacaggcgagccctatgctttacttccgagggcggtgtcagcaaagctagtgaatgatgaacccacaacagccactgatcc

SEQ ID NO: 558830 - DNA, 50 bp, Homo sapiens
aagcacaaaaagggacagtcggagttaagccatttgagtgcttaacatgt

SEQ ID NO: 558831 - DNA, 102 bp, Homo sapiens
ggaccagacgttgattcacacaaccgagcagcactgtcagcagatgtcgaataaaacaatgcagatcttcgtgaagactctgactggtaagaccatcaccct

SEQ ID NO: 558832 - DNA, 100 bp, Homo sapiens
ctacaattggagtcagagtcccaaagacatggagacctgtcggccatggagcctaatgatagtaccagtaccgctgtggaggagcctgacagcttggagg

SEQ ID NO: 558833 - DNA, 100 bp, Homo sapiens
agaggaagaagaccaaggcccaccatgccccaggcatcacgttgggtggtttccatttagaccgaggccggttcagaacttcccaaatgatggtcctcct

SEQ ID NO: 558834 - DNA, 50 bp, Homo sapiens
ccgcgggcccggccacggcggagccaagcacaggaagtcctggagaacct

SEQ ID NO: 558835 - DNA, 75 bp, Homo sapiens
ggaggtcgataagctggaactgatgggcatgaccattcggcccctggtagacctgttggctgtgaagaaaaagca

SEQ ID NO: 558836 - DNA, 76 bp, Homo sapiens
ccgctgccttcctcgcactgctcaagagtctcaggagcaggggctgcggcagaggctgctggacgagcagttcgca

SEQ ID NO: 558837 - DNA, 122 bp, Homo sapiens
gaaaggagtcactgccttctaacgaaagggcagtacagactttggcagctgagatctgtatctgtggacctgaatgttgatccctcgcttcagattgacatacctgatgcgctcagtgagag

SEQ ID NO: 558838 - DNA, 89 bp, Homo sapiens
tgacggagatggtgcagaagatggaggagttttatccaagtatgaagatcagattactattttcactgactacctagaagaatatccag

SEQ ID NO: 558839 - DNA, 100 bp, Homo sapiens
aatgcagttccttaaaagctgcttccagtgggaatccacattaagaagtacaatagcattcgcggattaaatttctatcagcaagtgaaactggtcaatt

SEQ ID NO: 558840 - DNA, 97 bp, Homo sapiens
gctgactcagaagcctctgttccccgggaattcggaaatcgatcagatcaacaaagtgttcaagtcccagccaccaccctgagattatgcggctctt

SEQ ID NO: 558841 - DNA, 89 bp, Homo sapiens
ttaagggcgttttgcagcgacccagctataagttcttcttcaagtctatggacgacgatttcggagggaatctggaaaaattgcaatca

SEQ ID NO: 558842 - DNA, 83 bp, Homo sapiens
ggtcgccctcaaggccatgatcaaaactgtactaatggtcacttgatgtgcgctggctgttttatccacctactagcagatgc

SEQ ID NO: 558843 - DNA, 75 bp, Homo sapiens
aaggagttccaccaggccgggaagcccatcgggattttttatcaagcagaaatgcatcgaacaacgagaatcaag

SEQ ID NO: 558844 - DNA, 73 bp, Homo sapiens
atggatcatccgtttgttgacaaggtagaatatgtggcctagaagaagatttaaagaacggcaaaatcttact

SEQ ID NO: 558845 - DNA, 83 bp, Homo sapiens
ccaccctccaactttgcgacggaaatgtgtcatcgaaagccagatatctccggagcatttggataatgtgacagttggaatgc

SEQ ID NO: 558846 - DNA, 73 bp, Homo sapiens
tggcattgacatttaattttagggtcctttatatagaagggagagtaggaaaatatgcccaggttaccaacaa

SEQ ID NO: 558847 - DNA, 99 bp, Homo sapiens
gctgatgaaagatgacggctccttctgcgtctgtgaggccaatgcaaatggaaatgatgtcactctgaaactcaggctggaatacactggcatggtcat

SEQ ID NO: 558848 - DNA, 100 bp, Homo sapiens
cagttgacacacctcatggtatatttgcagccagtactctatatgaacaatccgtctggatcacggatgtaggaagtgtacgaattggagcaatgttggc

SEQ ID NO: 558849 - DNA, 83 bp, Homo sapiens
aacccactgaagacgtctgcgtgagaatagagaccaccgaggtgtggacactgccagcggctgcagccgacttggaatgacct

SEQ ID NO: 558850 - DNA, 83 bp, Homo sapiens
aaggattccaagtaactcttatttggcctgatcttttggccagaaggagattaaaaagatgcccctcaagatggctgtgcctg

SEQ ID NO: 558851 - DNA, 74 bp, Homo sapiens
gggtgaagcctcctgcgccggccttgcctcgggtgtcgtgaaaactacccctaaaagccaaaatgggaaaggaa

SEQ ID NO: 558852 - DNA, 75 bp, Homo sapiens
ggaatggtgagaccaacatccgtgacacctggactctttcaggttctgaaaaaggcctaaagaatgtatttgacg

SEQ ID NO: 558853 - DNA, 83 bp, Homo sapiens
cccgtccgtccgccgccaccacccactccggacacaggttcgtgctggccgtgggcagcgccgtctttgatgccatgttcaac

SEQ ID NO: 558854 - DNA, 51 bp, Homo sapiens
ttacatcctgataaaaacccgtgccaaacatcagcctggatgtgctacagc

SEQ ID NO: 558855 - DNA, 127 bp, Homo sapiens
gccaaggccaaatatgaatttttatttggcagatctgaagggaaagctccagatactactggtaatgccgctgtcatcaaatatgaggagaaacctccaaaaccagcatttcagaatggttcctcag

SEQ ID NO: 558856 - DNA, 100 bp, Homo sapiens
agggcccacgggccagccccgccgccctcgcaacctggcagccgccgccgtggaagatattgatgatgttaagaagttcaaaccgggttacctggaagct

SEQ ID NO: 558857 - DNA, 100 bp, Homo sapiens
ctacttcaacccgcaccttgtgttccggaagttccaggttgtgaccgagattcccgacgagagagactgaggggaagagaggaaggaggggcgggctcct

SEQ ID NO: 558858 - DNA, 75 bp, Homo sapiens
cggtactcaagggcatgggcagcggccagttgcgagaagaagtcctcaccagtgaacggagacctctctgaacta

SEQ ID NO: 558859 - DNA, 90 bp, Homo sapiens
accttttgcagtttaatatggggcacattgaagtctttttgcaaagggccaataataagaagtggacaatacagtatttgcttcattgtg

SEQ ID NO: 558860 - DNA, 90 bp, Homo sapiens
ctccgccaccgtgcacatccgaatgggtactttagattgattgccgagcggggcagttttgtgagccttcatctgaagccttcagttcac

SEQ ID NO: 558861 - DNA, 51 bp, Homo sapiens
cggagataacaccatcttcaagggacaagaatccttcaagaaacaggaaaa

SEQ ID NO: 558862 - DNA, 50 bp, Homo sapiens
tatataccttggggaaagctgatatccagaggaacaaggagacattgtgg

SEQ ID NO: 558863 - DNA, 100 bp, Homo sapiens
agcctgtggacgcctggcccaccctgagtgatgaaaactttcggaagagaaagttgcctgtggtaagttcagttgttaaagtaaaaaaattcaatcatga

SEQ ID NO: 558864 - DNA, 74 bp, Homo sapiens
gatgccagaggtcaacaaggttctggacaagatgaagtctttctgccagctctgcagccagatggaacagctgg

SEQ ID NO: 558865 - DNA, 82 bp, Homo sapiens
accatggggaagcgggacaatcgggtgaataccctctaccatctgctttggtcagggtgccgctcgaggatttaaaagcaac

SEQ ID NO: 558866 - DNA, 75 bp, Homo sapiens
gatcccccagatctttgggaaaggagaatgcgctcgggtgccaggaccattgacaccagaaatggaggcacggca

SEQ ID NO: 558867 - DNA, 82 bp, Homo sapiens
aggattgtcactccaacctcttttcgctggatgtgtgaacctattgggtactgtacaacttcaagcctcgaaatcagatagg

SEQ ID NO: 558868 - DNA, 83 bp, Homo sapiens
cctttgaattaattatggctgtttcccttgggggctttgaaataacaccaccagtggtcttaaggttgaagtgtggttcaggg

SEQ ID NO: 558869 - DNA, 82 bp, Homo sapiens
ctgcgtcccagaagtgcctgcagttcagacccttctctcccctccactttctcccggcaacaacaggagatgctggccatga

SEQ ID NO: 558870 - DNA, 75 bp, Homo sapiens
cagagaaactcatcaggatttatcctggtacaggtttgcagattccgccagcagcacagcaagctctacagatga

SEQ ID NO: 558871 - DNA, 100 bp, Homo sapiens
tggctttccagttgtttgacaagagtggaaatggagaggtgacatttggccctgctggagacggcgctgacgcgagtggtcctgcccatgcccatcctgg

SEQ ID NO: 558872 - DNA, 82 bp, Homo sapiens
ccctattcacgctctgtgcttgtgccaagtatgagcaatttgagagcacaattggctttaagctcccaaaccaccggtcagc

SEQ ID NO: 558873 - DNA, 96 bp, Homo sapiens
ccctcaccacccctatccagacggctgcccttcaagtaccacccaataggggcacaaaacgtccccgggatgatgaagaggaggagcagaagatgc

SEQ ID NO: 558874 - DNA, 82 bp, Homo sapiens
gaaacatatctattatatcacagcaggaacgaatgcaggaatttgggaactgagctgtgcaagtgctgaagaaggagatttg

SEQ ID NO: 558875 - DNA, 50 bp, Homo sapiens
ccgggactccctggaaacctagaaatgtggttagcaggaagaagatgagc

SEQ ID NO: 558876 - DNA, 102 bp, Homo sapiens
atgtggaaattgccaaacaatctgtgactattaagaccatgttggaagatcgtgagaccaggactgaaaatgatcaagaaatttctgaagacacaagatcac

SEQ ID NO: 558877 - DNA, 98 bp, Homo sapiens
tttggttcgagtttgtgatgctacatatgataaagctccagttgaaaaagaaggaatccacgttctagacagagcgggatgccaccagcttgtccaaa

SEQ ID NO: 558878 - DNA, 100 bp, Homo sapiens
ctcgcccctgggtggatgaagacttaaaagacagcagtgacctgcaccaagcagaagaagaaggccaatgatgaggccaatcagagtgatacaagtgtct

SEQ ID NO: 558879 - DNA, 90 bp, Homo sapiens
aaaatgacagactcgttcactgagcaggctgaccagcgtctgaccaaacacaccaagttcgtgcgggacatgattcgggaggtgtgtggc

SEQ ID NO: 558880 - DNA, 110 bp, Homo sapiens
ctcagcctcccgagtggctgggattacaggaacaagtgtcattcaaggatgtatgtgtggacttcactcaggaagagtggtatctgctggaccctgctcagaagattcta

SEQ ID NO: 558881 - DNA, 90 bp, Homo sapiens
gaaagaaatagcgtctgagatcataggattactgatgctggagcgatgactacctgtccctggagggttcccgctggccaccagccatca

SEQ ID NO: 558882 - DNA, 100 bp, Homo sapiens
tgcagcaggaattgggatcgtgtcgctgcggagtgtacctcacagccttctaggatctccagagtggacaggaatctcacttggagggaccatggagcag

SEQ ID NO: 558883 - DNA, 82 bp, Homo sapiens
ggatctgaggcaggagatgcctcccccgcgggtgttcaagagctttctgagtactttgaactcaagtaaacaaaagggaaga

SEQ ID NO: 558884 - DNA, 75 bp, Homo sapiens
gcttggttaacttgggagaaagtttcatctgtggatggagtattgtcagaaaaagtggacagggcagtgctgaag

SEQ ID NO: 558885 - DNA, 100 bp, Homo sapiens
aagaagaaagccaggctggcatcattccacaggcaaaatacatatctcagtgcattgatgagatcaagcaggagctgaagcaggacaacatagcggtgaa

SEQ ID NO: 558886 - DNA, 75 bp, Homo sapiens
cttcaacctgctctgcttgtacattgggcagaatgccttcagaaaacggtatccacaaattacccattatcaaaa

SEQ ID NO: 558887 - DNA, 89 bp, Homo sapiens
ggcacacagataccgtttattaaaagagctgtggctgctgttgtacagtggcctgattatagctcactgtagcctcgaaattctgggcc

SEQ ID NO: 558888 - DNA, 100 bp, Homo sapiens
cttggtgtcgtttttccttgagctgaacgtcttgcaacagtggccgcacgcatagcatgaaacagttgatggctatagaagatatttcactcaaattgta

SEQ ID NO: 558889 - DNA, 75 bp, Homo sapiens
tgtgtcatcctgccggaaattcagaagccagagaggaagggagctcactcagtgggtttgatgtggtggatgctg

SEQ ID NO: 558890 - DNA, 80 bp, Homo sapiens
caggaatatcgagagcgtcatgaacccgagctatagagaaaggagatgagggggggccctcagcctcttggccttgaacg

SEQ ID NO: 558891 - DNA, 151 bp, Homo sapiens
ggaatcatggcggctgcgctgttcgtgctgctgggattcgcgctgctgggcacccacggagcctccggggctggcagctcctttgggacccagatcatcgggggccgggaggtgatcccccactcgcgcccgtacatggcctcactgcaga

SEQ ID NO: 558892 - DNA, 100 bp, Homo sapiens
gaatggccttgttttcttgctctggggctcttatgctcagaagaagggcagtgccattgataggtgtttctacacctgtgggttatgacaaagacaactg

SEQ ID NO: 558893 - DNA, 100 bp, Homo sapiens
caggaccctaacgacaggcgcctccggcccatttacgattttaacctttgagaccaagaacccgtcggaattagcagaacgtttgcgctctgtttgtggg

SEQ ID NO: 558894 - DNA, 87 bp, Homo sapiens
cttgccagaaaccttatgttgcacttattcatggaattacaatgggtgggccagtcccacagaaccaaggtcctcaccatccccacc

SEQ ID NO: 558895 - DNA, 50 bp, Homo sapiens
tgcaaatgggtatctgaaaaatggatcagcaacagggagctgccaccacc

SEQ ID NO: 558896 - DNA, 74 bp, Homo sapiens
ctcagtcggtgctatgatataatacctgaaactttactgtcattcaatattaacagggttgcaactcaggctgt

SEQ ID NO: 558897 - DNA, 100 bp, Homo sapiens
aatgctttggcccctggtgacatgtacatggtgtaatgacagtggacagcggactgcagcgaaccgctggacagcagctgttccttctcccgagggcgag

SEQ ID NO: 558898 - DNA, 50 bp, Homo sapiens
tgcaactattcgcagtccgagcggaaaactgtggtatgtctgtgtgtaat

SEQ ID NO: 558899 - DNA, 90 bp, Homo sapiens
gctcatgccactggtcaccctccccaaagcacattgagtcacgtactcttgcaattgcccgcaacctgactcagcagctccagaccacgt

SEQ ID NO: 558900 - DNA, 50 bp, Homo sapiens
tgagtgatcactctcaatcccggacctggagtggaagatcatttatgttg

SEQ ID NO: 558901 - DNA, 80 bp, Homo sapiens
gacaacattgatgagacatacggtgtgaatgtgcagtttgagtctgatgaggaggaggatgaagaaggttataacgatgg

SEQ ID NO: 558902 - DNA, 100 bp, Homo sapiens
gaggtggaggccgtcaaagtgcacagcttccccacactcaagttctttcctgccagtgccgacaggacgacctgtgaccgcatcaagcagtcagcagctg

SEQ ID NO: 558903 - DNA, 75 bp, Homo sapiens
ctgagcccgtccgtccgccgccaccacccactccggacacaggctggagtgcagtggcgagatctcgactcactg

SEQ ID NO: 558904 - DNA, 98 bp, Homo sapiens
ggggcttttgtatttcctgcctctgccccacccccaaagtatgtagaatttaatctgctgtatgatcggggcacaaagtttggcctcttcactccagg

SEQ ID NO: 558905 - DNA, 87 bp, Homo sapiens
gttgggcaaaggcagctttggcaaggtcaccatcagaaaagctaagtttgctgtatagtgaggatcaggagatctgatcctgattgc

SEQ ID NO: 558906 - DNA, 75 bp, Homo sapiens
tttccgaggaggaggacagcgagcgcagcagtgacggcgaggaggccgagtttccctgaaacctgggctcttgaa

SEQ ID NO: 558907 - DNA, 100 bp, Homo sapiens
ttttcagcctcatccagcaggcggtgacccgctaccggaaggccatcgccaagggaggtggggaagacagggctccagctaccacaggacgggctctggg

SEQ ID NO: 558908 - DNA, 98 bp, Homo sapiens
cctgtggaaaatggccttcagtgatcttacatcgaggactgtgcatctttatgataattggatcaaagatgctgagctatttatgaagaaattgatgc

SEQ ID NO: 558909 - DNA, 99 bp, Homo sapiens
aagcagcagaggagcacgaggatcgtgggagctaagaaggatacagcaggccaggagcgatttcacaccatcacaacctcctactacagaggcgcaatg

SEQ ID NO: 558910 - DNA, 98 bp, Homo sapiens
aagaaagtcctaaacctgctgaaggcctcaactccatatagcatagattcagattctttgggaatggagtgtattatttcgggaagtgcctctccaac

SEQ ID NO: 558911 - DNA, 100 bp, Homo sapiens
ctcgcagaggccaggatctcctttaacctgggggcaggagaagctgtccacctagccagggactttgggtacgtgtgcgaaaccgaatttcctgccaaag

SEQ ID NO: 558912 - DNA, 89 bp, Homo sapiens
gaagaagggaaggcgcgagtgaggaaaggaggtactgtaggtggccaatttcttattgtcgggaactcaaaggttattccattcctttt

SEQ ID NO: 558913 - DNA, 83 bp, Homo sapiens
attctgcagccaattcaaattcaattttcgccaactctagtatggtcttgctgcattcagggcttttttaaagtcggaattct

SEQ ID NO: 558914 - DNA, 74 bp, Homo sapiens
ccgagccaggactatgtgccagccagccaggagtatgctgctgctgttccgctttgcgtcctcgctacaaacgc

SEQ ID NO: 558915 - DNA, 75 bp, Homo sapiens
gacccgttgccagagtgcagagttaatgcctagcttgttgcctggcactgaagagaaagtaaatatttgaacaag

SEQ ID NO: 558916 - DNA, 96 bp, Homo sapiens
atcactgagctctgccgggacatgttctccaaaatggccacttacctgactggggaactgacgggattacatgcagaacatccacggcaaggagat

SEQ ID NO: 558917 - DNA, 75 bp, Homo sapiens
ccccattggctggtgtgccatcaacagcaagatcctagtgcccccacggagttcaacttcgtggccaagaagctg

SEQ ID NO: 558918 - DNA, 100 bp, Homo sapiens
tcgcgcagccatgtccgaggagaagcccaagatccagtccttctgtggaacttctgaacatcttttattagtggaaatattttctacacaatgaagtcaa

SEQ ID NO: 558919 - DNA, 100 bp, Homo sapiens
cgcctgaggaccggcaacatggtgcggtcggggaataaggttggtcaaagaaaaagtgatgtatgaaaaagaggcaaaacaacaagaagaaaagattgaa

SEQ ID NO: 558920 - DNA, 83 bp, Homo sapiens
ctctgcccacgtcgagcgtgcccgagacccgagggacaaactctgcctgggcgagtccttttcctgcgttatgtcgttcagac

SEQ ID NO: 558921 - DNA, 49 bp, Homo sapiens
gcgcgaatatcgtcatcgttagaagagtacccaaaggcaagtggaacag

SEQ ID NO: 558922 - DNA, 100 bp, Homo sapiens
gctttgcctcctgctgctgctgctctgccagttcatggaggaccgcagtgcccaggcaggggaaatgctgtctgtagctgagcacttcctggagcagcag

SEQ ID NO: 558923 - DNA, 99 bp, Homo sapiens
ttattgacattgctgaagtggagacagttgtcgccgtgatcctgaaggcgctgacctacgacgagaagcggggtgcctgcagcgtgggcaccaacgtca

SEQ ID NO: 558924 - DNA, 98 bp, Homo sapiens
gatgcacaccaccaacattcttggcattacgcaggccagcaactcccagctcaatgcaatggtaccctcttaccaattatacttttggtacaaaagag

SEQ ID NO: 558925 - DNA, 75 bp, Homo sapiens
ccacttccgaaaccacaagtttgccgattcaaggcggataagaaggcggcacaagaaaagatgatccagcaggag

SEQ ID NO: 558926 - DNA, 75 bp, Homo sapiens
agctgccttaatatatacctgcactgtctgtaggatggaatcagtgtgagtggctttcccctgtccagtcctttt

SEQ ID NO: 558927 - DNA, 124 bp, Homo sapiens
tttgctgttggatcgtttcatactttacgcttgtgtgataaaactggggattggtcttgatttgagcaatggtaaacctcgagacaacaaacaagcaggggtgtttgaaccaaccatagttaaa

SEQ ID NO: 558928 - DNA, 90 bp, Homo sapiens
ccgccgccgcagcgcgaacatggacgccgtcaacgccttcaaccaggagtttcaaccacaccacgggcttttgaccacacaaaacagaac

SEQ ID NO: 558929 - DNA, 95 bp, Homo sapiens
aggaggagtgcgcgtgttgggggcccccggagagatgccatggacaatattaccaggcagaaccaattctacgatacccaagtcatcaaacaaga

SEQ ID NO: 558930 - DNA, 82 bp, Homo sapiens
agatgattgtatgaagcacttcaagggctcggtggagaagctgtgtagtgtggagcagggtcttactctgttgcccaggctg

SEQ ID NO: 558931 - DNA, 51 bp, Homo sapiens
ggtgctcaattcccatacatgcactagagaattgctggaatccacaaatac

SEQ ID NO: 558932 - DNA, 75 bp, Homo sapiens
tagcctcaccatgaaatcacagcttcagatcactggatcttaagattgaaagtgatgttcaagaaccaactgaac

SEQ ID NO: 558933 - DNA, 50 bp, Homo sapiens
aagagaagaccccgctgggatggaggcggggtttcaccatgttgcccaga

SEQ ID NO: 558934 - DNA, 99 bp, Homo sapiens
ctggcggagaagactcgaacggctcccacagccgggcgttgggggaaaggtatcttggagatggccgcttccatctggagtctgtcatgattgccaacc

SEQ ID NO: 558935 - DNA, 100 bp, Homo sapiens
ctgacaagtaagaatgaacctctacttaaacctggagacagagtatttcagttactaactgatctgaaagagcagcgtaaagaaagtggaaagaataaac

SEQ ID NO: 558936 - DNA, 52 bp, Homo sapiens
ccaaagtgcagcgctgtgcagtggagagccttatagatgcaagtgaagacag

SEQ ID NO: 558937 - DNA, 102 bp, Homo sapiens
ggtggtgcctatgtgaaactgctttctaaaacaccagaactcaacctggttggcaaggccacaggcttcctcaagaactttctgatcgagcccttcgtcccc

SEQ ID NO: 558938 - DNA, 75 bp, Homo sapiens
tgcaccaacatctggtacttcagctaagacaccctctgagaacatcgtagctgtgggagctgggttctgcgacgg

SEQ ID NO: 558939 - DNA, 101 bp, Homo sapiens
gtgtcccatgtttttgagtatatccgttctgagacatacaaatagtatcagaatggcaaagcaacttaaccttccagaaaatacagatgattggacaaaag

SEQ ID NO: 558940 - DNA, 83 bp, Homo sapiens
caaaaataagagcccggatgctgaagcaaaattcagagagattgcagaagcttggattagaagaacaagaaagactccaccta

SEQ ID NO: 558941 - DNA, 82 bp, Homo sapiens
cgacaagccgctggcagccgcggatctcaccgccgctcagggtccggcctctttggcctacccccgttggctccgctgcccc

SEQ ID NO: 558942 - DNA, 90 bp, Homo sapiens
gctgctcatcgtttgcgacgttccctcagcctctgcccaaagaaagaaggagactctttttgatcagaacaatgctgcaaaaaaagaaga

SEQ ID NO: 558943 - DNA, 100 bp, Homo sapiens
ggcgagctgggtggtctggagaccatggagaccctcacggagctgggcgacgagctgaccctgggagacatcgacgacaaatcttcctattttcaagctg

SEQ ID NO: 558944 - DNA, 83 bp, Homo sapiens
tgtgcctcctcctcctgtggtggaggagaaggaaagccagagcagctgagttccagataaaaactgtcagacccggcctgtag

SEQ ID NO: 558945 - DNA, 90 bp, Homo sapiens
cgcccggaaagctgcccagccaccagcaaccccccagttgcagtaccatgcaggactagcatctggccttttaaatcagcagtcattgaa

SEQ ID NO: 558946 - DNA, 82 bp, Homo sapiens
acggagataaattcccggaaccgcgattcggcgtgtcaggcgccatgtcagaaccggctggggatgtccgtcagaacccatg

SEQ ID NO: 558947 - DNA, 82 bp, Homo sapiens
agagattggactgggagggcaacgagcacaacaggagctacgaggagttgttgtctgtgctgtgaatgccctcgcccaccat

SEQ ID NO: 558948 - DNA, 100 bp, Homo sapiens
ccgaggcgtgcacatgctcgcccagccacccccaggacgccttctgcaactccgacatcgggatctgtgaacaagaggaacctcagcagccaggacaggc

SEQ ID NO: 558949 - DNA, 97 bp, Homo sapiens
gatattagcctaacaagatggaagcaggtttaaaattttacataagaagttacctttttcagggtgatctggaccctctggcatctctcaaatcgct

SEQ ID NO: 558950 - DNA, 101 bp, Homo sapiens
tggcgctgctggctgcgctctgcccggcgagtcgggctctggaggaaaagaaaggttgaaatcacaaagattagacacctttttagataggtgttcttcag

SEQ ID NO: 558951 - DNA, 75 bp, Homo sapiens
cacaagggcttcctggccctctaccaaaccgtggcacttctcagaacttctggatgagttttcccagaacgtctt

SEQ ID NO: 558952 - DNA, 82 bp, Homo sapiens
ggcctaaaacttcggcgttgggagaactacgatgacccgcacaaaacccctgcctccccagttgtccacatcaggggcctga

SEQ ID NO: 558953 - DNA, 82 bp, Homo sapiens
cgagaatagctccgtccagcagactctttttgatcagaacaatgctgcaaaaaaagaagagtcagaaactgccaacaaaaat

SEQ ID NO: 558954 - DNA, 100 bp, Homo sapiens
gccgccgccgccgccgcgccgagcggaggaggaggaggaggcgaggaggagagactacttcgattttcagaattcctcctgggaatgctgactccttgct

SEQ ID NO: 558955 - DNA, 87 bp, Homo sapiens
aaaaagagaaacctgggtgaactttcacggacaacctcagaggacaacgaagtgttcggagttggtccaggtagcaatgatgagacc

SEQ ID NO: 558956 - DNA, 109 bp, Homo sapiens
ctttggcctgcgagacaccttgagcatcgcatccacggattcctttgcttccgcagcagaggtgcaaatatatacagagcttcataatcagcccaagaccacatagagc

SEQ ID NO: 558957 - DNA, 75 bp, Homo sapiens
cagagcgtgaagatcaagatcgcttcggaaccaaaaagaagcttcccagagccggggccaggagccccaagcgcc

SEQ ID NO: 558958 - DNA, 98 bp, Homo sapiens
ggatccaagaaggagtggagtctttggctggctatgcagacatctttctgatgccttcaattaagttgcagagttctgatggagagatatttgaagtt

SEQ ID NO: 558959 - DNA, 82 bp, Homo sapiens
ctgcggtggcgtctccacacgaatccagcaactatcacaagaatactccttagccacttcaattgggataaagagaagctaa

SEQ ID NO: 558960 - DNA, 101 bp, Homo sapiens
tgtgaagctctccagcatcatcgaggtcccatcagtttcagagactcctccactctctgggaatgacacggactccctctcctgcgacagtggcagttcgg

SEQ ID NO: 558961 - DNA, 90 bp, Homo sapiens
gggatgtgccttagaggattatgggcattgtgtggctgctcaattaatgtaccaacactggatggaagaaacatacctatgtcagtaaat

SEQ ID NO: 558962 - DNA, 50 bp, Homo sapiens
ctagcgtcctggaattacttcaatcaacaagttggaattgacagaggtga

SEQ ID NO: 558963 - DNA, 74 bp, Homo sapiens
catcattgatgtggtgcgatcgattcatgatgttgctatcaaaagttgagaaattgtcagaagaaatcatggag

SEQ ID NO: 558964 - DNA, 105 bp, Homo sapiens
gtggagcgtgtcctgaaggagttccaccaggccgggaagcccatcggacaatgcagatcttcgtgaagactctgactggtaagaccatcaccctcgaggttgagc

SEQ ID NO: 558965 - DNA, 100 bp, Homo sapiens
ccaaaccatgtctggagtgaaggaggccgacttcaaggatcttgagactcaaccccatatggtgttggggatgtcctttgcactgaccctgaactgccag

SEQ ID NO: 558966 - DNA, 82 bp, Homo sapiens
gggatatcgggtggcggctcgggacggaggacgcgctagtaacccttaggagaaatcttgagagtggacagcaattgtgaag

SEQ ID NO: 558967 - DNA, 100 bp, Homo sapiens
ggcggccaccgcgactccggctctgcgctcggctgcctgacttcttcctgctgctgcttttcagggtgcctccacttctcattcagagaattcagtgcat

SEQ ID NO: 558968 - DNA, 100 bp, Homo sapiens
ccaaagcctaccatgagctcttggaggcgagcctgctgcgggagatcgcgctagcgagcttttatgaggacggaggggatgaagacattgtgaccatttc

SEQ ID NO: 558969 - DNA, 74 bp, Homo sapiens
ccgagaacacgctggcggccattcggcagcagcccctgtcaaagggaacaggaagcagtccacggagggtgacg

SEQ ID NO: 558970 - DNA, 109 bp, Homo sapiens
ccgcccagagactgctgagcccgtccgtccgccgccaccacccactccggacacaggtgcgcgcggagccatggttatcatgtcggagttcagcgcggaccccgcgggc

SEQ ID NO: 558971 - DNA, 75 bp, Homo sapiens
ctaactccagatatctacctaattgattggtgaccatggaggaagaagatgagtctcgagggaagacagaggagt

SEQ ID NO: 558972 - DNA, 101 bp, Homo sapiens
ctccctggacaacaggagaggcttctacagccaggacctgcccccaggagcctctcaggggctcttactctctgtcagtccgcctcagccgccctgcatcc

SEQ ID NO: 558973 - DNA, 83 bp, Homo sapiens
agccaaacatcaagcagaatgtgatttgcttgaagatatgaggtttacccaaggtccagcctagcccctaggcaccatgtcgg

SEQ ID NO: 558974 - DNA, 98 bp, Homo sapiens
gtagtccagcatccagctcgacgttagaagggtgaacttctcacctgagggctgtaaagactcgtttgaaaatggagagccaagaaccaacggaatct

SEQ ID NO: 558975 - DNA, 50 bp, Homo sapiens
aggtcactacaatggtgaacaactgtgggtaattccagaattgattggcc

SEQ ID NO: 558976 - DNA, 101 bp, Homo sapiens
cttggagccagaagctacatgacccctaaacggtctcggcgcggaagatggccggcggcgtggacggccccatcgggatcccgttccccgaccacagcagc

SEQ ID NO: 558977 - DNA, 100 bp, Homo sapiens
tggttgttttttcctgtatgaagcggttggcaccactgaagtgaccgaatgagaaaatgtcactgaaattcacaaatgcaaaacggattgaaggacttga

SEQ ID NO: 558978 - DNA, 98 bp, Homo sapiens
agaaaatgctggcctaatagagtggcaaaggagcagattagtaggcggcttgatggtatattactcgaggggtttttaaatattgtcaggaaaaagaa

SEQ ID NO: 558979 - DNA, 100 bp, Homo sapiens
gctaaaagatgacagacttggacaacatgtcccaacattacatcccaatttgggaatggatgatgaaggagatgatgacccagttcctctaccaaatgtg

SEQ ID NO: 558980 - DNA, 75 bp, Homo sapiens
ctttgattcaaccagtacttctggagtgtatggtgctcagcagggagaccccctttcccgctatatcttcaggaa

SEQ ID NO: 558981 - DNA, 100 bp, Homo sapiens
ggactacctggcaagtggttatcagtctgcgctcctcagaccaccggcaggtgaacagcctgatgcagaccgaggagtgcccacctatgctagacgccac

SEQ ID NO: 558982 - DNA, 88 bp, Homo sapiens
gcccactctgcggagttagcagtcacgacctccagcacagggagagtcccgtattctcagagtaaaagttgtttctggaattgatctc

SEQ ID NO: 558983 - DNA, 74 bp, Homo sapiens
aggaatactttcaagtcatcccaaatatggttccatccctaaacttatacctgtacaggaagaggcacatacaa

SEQ ID NO: 558984 - DNA, 101 bp, Homo sapiens
ttaggctgatatccttgggaactgtggaggaaatcatgtatttacgacagatatacaagcagggtagtccatgatggtaagtcatagaactctgccctctg

SEQ ID NO: 558985 - DNA, 83 bp, Homo sapiens
gttttgttttcccctcggcactaggcagcggaggagcccgaccgacccggagcatcagatccatgctgctgctgactcggagc

SEQ ID NO: 558986 - DNA, 100 bp, Homo sapiens
caggtgaaaatgtcaaaactaacagaacatcacaggactatgatcagcttccttcatgttcaggagaaggaagccaacatccttttggagccatgaatat

SEQ ID NO: 558987 - DNA, 100 bp, Homo sapiens
gactgaccgctgccgcccagcacgtccagcagtctgagctatcagctgaagaaagtccagaaaaattaggaacctcccagctacatcgccggaaagtcat

SEQ ID NO: 558988 - DNA, 83 bp, Homo sapiens
cttgagtcagtgcgccgctctccagcccgcttgaacgcgggagatacagatgacccaccaagaattactcagaaccctgtgat

SEQ ID NO: 558989 - DNA, 82 bp, Homo sapiens
gcaacctccacccccgagatctccttggaagcagaacccatagaactcgtggaaactgggatcgcttacacctgagacgaac

SEQ ID NO: 558990 - DNA, 100 bp, Homo sapiens
ctcaacaatacagcagaccatctccggtgactctgacatcattagaagcatgccagaacagactggtgaaaagtaaaccttttcacctacaaaatttcac

SEQ ID NO: 558991 - DNA, 98 bp, Homo sapiens
tacgggctcccttcgccaaactcttcattttctcttgttctaagaacggaagcatctgggctggatggaatttagcatcaagcagagtcccctttctg

SEQ ID NO: 558992 - DNA, 90 bp, Homo sapiens
caacagcagggtggagatcgtggctgccatgcgccggatacgggactactcaccaggggattctccaccagggacaccgccagcgtcccc

SEQ ID NO: 558993 - DNA, 75 bp, Homo sapiens
gcacattacaacttcaagaaaattacggtggtgccgtccgccaaggtctgaatttcctgctgctgttcacaaaga

SEQ ID NO: 558994 - DNA, 82 bp, Homo sapiens
agggaaccctggtcaccgtctcctcagaaatgtggtttggttttgagctggaagagagtacaaggtgcttccggaaagcttc

SEQ ID NO: 558995 - DNA, 75 bp, Homo sapiens
atggaccaaaatgaacacagtcactgggatgaccactcccgggtcctgctgaaggcggagaacagccacagccac

SEQ ID NO: 558996 - DNA, 100 bp, Homo sapiens
aaaagatttccagcagcaacaggtccgtttattaatggttagtcgaatggctaaaccagaggaagtattggttgtagagaatgatcaaggagaagttgtg

SEQ ID NO: 558997 - DNA, 98 bp, Homo sapiens
cctgccccggcttcaggatttacacagacgtggggcgatgcttgtgaccctgcagctcctcaaaaaaagcaaactcaagttcctgcctcctcaggcgg

SEQ ID NO: 558998 - DNA, 74 bp, Homo sapiens
ggaggacgccaaagaaggctacaggactctggtgctgaggaagagaaggcgggagcagccaccgtgaagaagcc

SEQ ID NO: 558999 - DNA, 89 bp, Homo sapiens
tgcggcgcctgtgggatccagttccagttctacaacaacctgttggagcacatgcagtcccatgcagatgcctgtgaggagccaccaac

SEQ ID NO: 559000 - DNA, 100 bp, Homo sapiens
agagccctggatggttgatagagagctgactagaggcctgtgttcaggtgaccaagaatatggcccaggtgaccaaagccctggacaaggccctgagcac

SEQ ID NO: 559001 - DNA, 100 bp, Homo sapiens
gtttagccaacccaaattaccttaattctccagggttccttgaaaagaaaacaggtagttaacctatctcctgccaacagcaagcgacccaatggctttg

SEQ ID NO: 559002 - DNA, 100 bp, Homo sapiens
actgtgcccattacttctgcctggactgcattgtcgaatggtccaagcactattcctgatcagagaactccagttgcttcaacacacagtatcagtagtg

SEQ ID NO: 559003 - DNA, 98 bp, Homo sapiens
tggaccccaagaagaccattcagatgggatctttccggatcaatccagatggcagccagtcagtggtggaggtgctcagagccagaccctggtttgag

SEQ ID NO: 559004 - DNA, 87 bp, Homo sapiens
tcttggagttgctggtgttctatactggaagaggcatgccagaggtagagcaggtggtgctgtgggtcggcctgggcgtcctggtgg

SEQ ID NO: 559005 - DNA, 100 bp, Homo sapiens
ggagaggacaagattaaagtcaagagaagccttgaggatgagccaagattacgccttcccatacattatattagtgttatctttggttactctggctgtg

SEQ ID NO: 559006 - DNA, 75 bp, Homo sapiens
tgcgttggtgcttctgtaatgtctatactgccaaaaatccaagcgtctactagaaaaatctcagagggtagaagc

SEQ ID NO: 559007 - DNA, 83 bp, Homo sapiens
gttgtggtagctcaaattgacccaaagaagttgaaaaggaagcaaagtgtgaatatttctgattttttatcaagcagaaatgc

SEQ ID NO: 559008 - DNA, 90 bp, Homo sapiens
catcagcctgggctgcagcgcgctgccgccgcggggccggcaggcagcagactgtcctgggaagctgttcatcttccattcttccttgcc

SEQ ID NO: 559009 - DNA, 100 bp, Homo sapiens
ccgaacgcgagggcggcgcccggggactggagctgcgcgcaatagattcttctgatgtagagcgactggaaagattcttcgactcagaagatgaagactt

SEQ ID NO: 559010 - DNA, 75 bp, Homo sapiens
ctgaacttccctgtgtcccgcaatgccaacctcagcaccatcaagcagaggagaattctgcctaagccaactcga

SEQ ID NO: 559011 - DNA, 90 bp, Homo sapiens
attctagatgatattggacatggagtaaaggtactatggatatagaggagagaaatcgccaaatgaaaattaacaaatacaaacaggtag

SEQ ID NO: 559012 - DNA, 74 bp, Homo sapiens
aggaatctggaattttattaaacatgatcaatataatcatctggtattattttccttctgcctggaggacttgc

SEQ ID NO: 559013 - DNA, 74 bp, Homo sapiens
cggagctgacggtggaggttcgcggctctaacggggctttctacaaggttgagtctccttctcagatggatgtt

SEQ ID NO: 559014 - DNA, 97 bp, Homo sapiens
attaatgaatatgaaaaatggctgagtcgggatataagcccagaagagatagatttaaagaatgaaccttggtataaattcttttcggaattggagt

SEQ ID NO: 559015 - DNA, 100 bp, Homo sapiens
cttcgtacccacagtgcttcatgagagagccagtcttggtgctctgtgttcacctggttcatctgaggagctgcatctaccctgcccatgccatagatcc

SEQ ID NO: 559016 - DNA, 75 bp, Homo sapiens
gtttgatgttcgtgactttggaaagatccagacatttaatgtggatgcaccatgccagaccgtggaagatttaac

SEQ ID NO: 559017 - DNA, 97 bp, Homo sapiens
caaattgaggcgcaatgatgagaggatgtggtggtctactctgatgtcaatcttgagggctagattttatcatgtgggcaacctgctgcaactggtt

SEQ ID NO: 559018 - DNA, 98 bp, Homo sapiens
ggatttccagccagagctgagcggcgcgggctccagactcgccgtggtcaagttcaccatgagagggaaatgtgactggaaacagtaactccacgttc

SEQ ID NO: 559019 - DNA, 100 bp, Homo sapiens
aatgtctgaaagagcagcagaaacgctactttccaggccatctcggaaacgcaggtcccttggcgatgttgggaatgtgacggtggccgtgcccacggtg

SEQ ID NO: 559020 - DNA, 100 bp, Homo sapiens
gcgagccgagcgaggcagctctgagccgcgcggtgtggatgaggtcaccattgtcaacattttgaccaaccgcagcaatgcacagagacaggatattgcc

SEQ ID NO: 559021 - DNA, 75 bp, Homo sapiens
gagtccgaggtctacgacgacggcaccaacaccttcttctgagcttggggcttccttggtcgcacccaccacctg

SEQ ID NO: 559022 - DNA, 90 bp, Homo sapiens
gccgccaataaccacggagccggcagcggcgcgggaggccgtgcgggctccccacaggtgcaggaagccgccgcccagccatggacgggg

SEQ ID NO: 559023 - DNA, 82 bp, Homo sapiens
tcaggaggcccaagacaccacagaagccctccgagcccaggtgtggccaaacgtggacaactatgagctgtacgaaaagctg

SEQ ID NO: 559024 - DNA, 73 bp, Homo sapiens
gtggacttcggggggaccacgtccttccagtgcaaggtgcagcagcgaaggcaggaactggaacaggtgctgg

SEQ ID NO: 559025 - DNA, 100 bp, Homo sapiens
acagcagcagcaagttagtggattaaaatctcccaagaggaatgacaaacaaccagctcttcagataacccagcagccaactggcttcatgcgcgctcca

SEQ ID NO: 559026 - DNA, 83 bp, Homo sapiens
caaaacttcaagccaaacatcaagcagaatgtgatttgcttgaagatatgaggtttttagaacttcagccataaaaatgggca

SEQ ID NO: 559027 - DNA, 82 bp, Homo sapiens
gcagagtgctgatgtgaaaaataccacgacaaaaccaccctaagaaacttgcccaggccaaagaagagaacgtgggcttaca

SEQ ID NO: 559028 - DNA, 100 bp, Homo sapiens
aaaaattaattggtaaaccgcttcaaccagcaagacctgttcgtcatctgacttctcccccaggattgcacctctgcctccacctcccctactaccacct

SEQ ID NO: 559029 - DNA, 82 bp, Homo sapiens
ccaggctgggagcatccccttagcagcagcctctggatcgacgagaacgtgctaggagcccagctggacgttgaggccgccc

SEQ ID NO: 559030 - DNA, 83 bp, Homo sapiens
gaagaccttcaagcagcgccgcaccttcgccctgggcgctgcctatggcacagccaagagcggtaccggcattgcggccatgt

SEQ ID NO: 559031 - DNA, 83 bp, Homo sapiens
cttggcgcctgcccctgcaacgggaggtttggtgcacctcgatttggaggaagtagggcagggcccttatctggaaagaagtt

SEQ ID NO: 559032 - DNA, 97 bp, Homo sapiens
cccggtccgcggcgccgaggctcgcaccgggagctgcccatgggccgggcccggagttccggcgcgccgggagccgtgtcacatttgaagacgagca

SEQ ID NO: 559033 - DNA, 75 bp, Homo sapiens
ctgcagctctgctgagagagtgcaagccgtgggctgggatagatgggcagcagaagatcatgtgcttcgtgatac

SEQ ID NO: 559034 - DNA, 101 bp, Homo sapiens
atgcactttactacaaagatggacttctctgtacagcaacgattggcccagatgctgttctgggggcagcaaggtgtggccaagaatcccgaagcagcaat

SEQ ID NO: 559035 - DNA, 98 bp, Homo sapiens
agctcactgcatcctccgcctcctgggttcaagcagttctcctgcctcagcctcccgagtacctggaactacaggtactcgggaggctgaggcaggag

SEQ ID NO: 559036 - DNA, 74 bp, Homo sapiens
caacgagaggaacgtgtccacgcgccagggtattggcaagcttgccagtgtacctgctggtggggctgtagccg

SEQ ID NO: 559037 - DNA, 100 bp, Homo sapiens
agtgaacagaaaaagaggatacctctgcgatcccgggtcatctccagatgctagggttatggttactccacaggatccgctgaacataggatgttgccac

SEQ ID NO: 559038 - DNA, 80 bp, Homo sapiens
caacagggacatcgtggagacggtgctcaacctgagcactacaaacaccactggtttcccgaaaagccgtccaagggctc

SEQ ID NO: 559039 - DNA, 75 bp, Homo sapiens
agctccctgcgggacctctcggaagccggactcgctcagcagcagcctgaaaacttgctacaagtatctcaatca

SEQ ID NO: 559040 - DNA, 82 bp, Homo sapiens
gcgaagccttgaaaaagctgccctgagacggtgtcccgccgaaagttttccaagagataacttcaccaagatgtccagtgat

SEQ ID NO: 559041 - DNA, 73 bp, Homo sapiens
gggctccgaggtgggcaactctcaggcaggttatgatgtgattgctcaagcccaatctgggactgggaaaacg

SEQ ID NO: 559042 - DNA, 100 bp, Homo sapiens
ggaaggcgtgggcgacccggtgtgtggcgcgcccagagccccgcgtttcagccctagggaagttcagaaatgtccagaaatgacaaagaaccgttttttg

SEQ ID NO: 559043 - DNA, 90 bp, Homo sapiens
tgcgtgttacatagatttgtttgtcatcatgcagttaagcaggactccttggaagagactgaagaaagcattgatgccttagtgtcctcg

SEQ ID NO: 559044 - DNA, 48 bp, Homo sapiens
atacacagtgacattcagtctgaagggcaccaccacgaggcgatttgt

SEQ ID NO: 559045 - DNA, 103 bp, Homo sapiens
gtgtacaacccgacgaggaacgaatgggacaagatcccgtccatgaatcagggcagcaaggcgaaccccatccctactcactggagctcagctttgattttta

SEQ ID NO: 559046 - DNA, 82 bp, Homo sapiens
aaatttataaatgactgtacagaactgttccgtgagctgatgcaccagaaagctgaaaagctgctagcagaagaaagtcttc

SEQ ID NO: 559047 - DNA, 74 bp, Homo sapiens
ttgacaatacaggaaatgtttatgccttcaattaagttgcagagttctgatggagagatatttgaagttgatgt

SEQ ID NO: 559048 - DNA, 50 bp, Homo sapiens
actagagcaaataaccgttttgaaattcctccaggatcactaagttcaag

SEQ ID NO: 559049 - DNA, 100 bp, Homo sapiens
gaagcctttggtatccagggctcatgttcacttgatgaaaactcctccaaaagcaatatgttaaggatacctgtaagaaaggccttagtaggcctttcta

SEQ ID NO: 559050 - DNA, 100 bp, Homo sapiens
ctatggccgtgggcctcaacaagggccacaaagtgaccaagaacgtgagcaagcccaggcacagccgacgccgcggggcccattacgcagtccaggcaag

SEQ ID NO: 559051 - DNA, 75 bp, Homo sapiens
agggcttttactcctacctgtgtaccgagccaggcttgggcactgtttaaaggaaagttccgagaaggcatcgac

SEQ ID NO: 559052 - DNA, 96 bp, Homo sapiens
gcccctggggagattggacaagtatgctgcaagtgagaacatatttaacaggataatcgagttcacattggaccaaaaatggaaattcgggtcgtt

SEQ ID NO: 559053 - DNA, 101 bp, Homo sapiens
acctcatacggctgcttctggagaagagtcattcttatagaagagcatcagaggaagataaaaaagaatcctcaatgtcaggcccctgagcccaagctaag

SEQ ID NO: 559054 - DNA, 100 bp, Homo sapiens
agaaagaggaggggaggaggaggaggattcagggaataggagctggggagcccttctgcgccacagtgaacagagtatctgccaagcccgggcttccgtg

SEQ ID NO: 559055 - DNA, 97 bp, Homo sapiens
agcgatgctgacgtgcaaaagcaggacactcatgaggaccatgatacttccactgagaatacagacgagtccaaccatgaccctcagtttgagccaa

SEQ ID NO: 559056 - DNA, 82 bp, Homo sapiens
gaagaagtgttacaacgaggagaagcactctcagtttcctgctctacgaaacgcactcttttgccttgaagcggcattggac

SEQ ID NO: 559057 - DNA, 75 bp, Homo sapiens
gtgtcctccgtgggagcccgagatgaagagcatgagtgtgggggacccccgaaccttccccttcatcgagccccc

SEQ ID NO: 559058 - DNA, 82 bp, Homo sapiens
tgcggcctggcggcttccaggcgcactaccgcggacttcaaacaagtgtgaagaggctgtgtggcgagattgtggaactgaa

SEQ ID NO: 559059 - DNA, 99 bp, Homo sapiens
gactaccaaggagaagctatagactacttctactccaccaggaagggttctgtgctacaaattgatgtttagataaacttcagtgaaatgactcttcag

SEQ ID NO: 559060 - DNA, 90 bp, Homo sapiens
cggcagccgagcccgcccgcgcgccgaggcggggtttcaccatgttgcccagactggtcttgaactcctgagcttaagcaatccacctgc

SEQ ID NO: 559061 - DNA, 101 bp, Homo sapiens
aaatcacagcacctgattcccaaggcaagacagttgttcaaacgcagaaatgtctatttgcccagaaatgatgaatctatgcttgaaagtcctatacagga

SEQ ID NO: 559062 - DNA, 75 bp, Homo sapiens
tggagatgaacctctaacacagtggaaaggaaccgttctggatcaggaatgtatcctgtcaggtataatgtcagt

SEQ ID NO: 559063 - DNA, 90 bp, Homo sapiens
gtgtggaatcggcagcgaggaatcctggagcacagagaagctcccagctttgaaggtcttgcggtgactggtcgaattgacaaatcttac

SEQ ID NO: 559064 - DNA, 90 bp, Homo sapiens
ctcttgaattgttccttcaagtgtagctatgttgtaactaatggccttgggcgttctgccctaggtccaaatgttaccaaaatcactcta

SEQ ID NO: 559065 - DNA, 75 bp, Homo sapiens
ctcacctcaagccacgcatatgataattttgtagataaagttggagaaagcaacaatatggtataacaacaagtg

SEQ ID NO: 559066 - DNA, 100 bp, Homo sapiens
gcagcgtccagcaactccagcctgtccggctcgtcggtgtcctccggtgttggtaaatcatgcttattgctacagtttacagacaagaggtttcagccag

SEQ ID NO: 559067 - DNA, 75 bp, Homo sapiens
aagatatctgtgaagactctgatatagatggtgattatagagtggattccagtggaatgacactggtgatgcttg

SEQ ID NO: 559068 - DNA, 82 bp, Homo sapiens
attccaagtaactcttatttgccaaaaccttcaaggaatagaagataaaatcacaaaaatgaaggttactatggtagcttgg

SEQ ID NO: 559069 - DNA, 75 bp, Homo sapiens
ctggccatcttcacagatgacgtgggtgtttctctatgagaagggctaccagacctcgagcggcctcatcagcag

SEQ ID NO: 559070 - DNA, 51 bp, Homo sapiens
ggaggaggcgaggaggagagactcctaccgtatgtgaacgggagctgtgtg

SEQ ID NO: 559071 - DNA, 83 bp, Homo sapiens
tgacatctgatgctgtggaacttgcaaatcgaagtctcctgggctacctgaccaagtacgactgctccagtgcggacatcaac

SEQ ID NO: 559072 - DNA, 58 bp, Homo sapiens
aggagcggaaagactagatgccgatccaaaaggatttggtgctatggagaaatttttg

SEQ ID NO: 559073 - DNA, 76 bp, Homo sapiens
agatcaaccgctccatgcagaactggcaccagctatcattcaggttgaagaccagaatacaggtgcaattgagaac

SEQ ID NO: 559074 - DNA, 100 bp, Homo sapiens
ctcgttggcccgggtatcccagcgcggacccacgcgatacgctgacgccccgacgccgatccggccgagccaacccagcgatctgctcacgagctgccca

SEQ ID NO: 559075 - DNA, 75 bp, Homo sapiens
ggacgctgcgcggctactacaatcagagcgaggccgcctagtaatagaggaggagacatttctaaaatcgcaccc

SEQ ID NO: 559076 - DNA, 100 bp, Homo sapiens
gcatcttctacctccgcattgtaccctctgaggtggagcctttcttatcctggcccaagatccaggaagaagaactttggcatcagctacctgggccggg

SEQ ID NO: 559077 - DNA, 98 bp, Homo sapiens
gaggaggaaatgcgagcttcgctcaagaccctgcaccggatggcagagaaagcggcactgcagaggtggagctgaagaagggagccactctcaaaatc

SEQ ID NO: 559078 - DNA, 103 bp, Homo sapiens
gccatttcggtgtagaagtggcagcacggcaggatcccatggtccattattgcctttaccaagtcgttacagaatgggctctcgagatacacctgaacttgtt

SEQ ID NO: 559079 - DNA, 74 bp, Homo sapiens
ctgggaattgctgaattagaactgcagaggttcctctacagcaaggtgtcacgtcttgaaattttaaatgtcct

SEQ ID NO: 559080 - DNA, 137 bp, Homo sapiens
ttcgattgaagcacatcgaccggcgacagcagccaggagtcatgagcgacagcggcgagcagaactacggcgagcgggcaaggggagagccagttgcgcagagccctgcaaccagcagtccagggagaagtggtgaa

SEQ ID NO: 559081 - DNA, 82 bp, Homo sapiens
tagtcgtggccggaggagtctcagagctgtcagaaagggacctgttgcaatgagagtggcaaaattagcaattaatcaaggg

SEQ ID NO: 559082 - DNA, 50 bp, Homo sapiens
gcggtcgccatcagacccgcgaagggcagctggtggaatttttgaagaaa

SEQ ID NO: 559083 - DNA, 100 bp, Homo sapiens
atcacggcgttctacacagcgactagaagagctgaaactggtcattgtttgtgctccccaaacctaaagtgatctcctgtctagagcaaggggaagagcc

SEQ ID NO: 559084 - DNA, 100 bp, Homo sapiens
actaaaaagatatttgatattgatgaagctgaagaaggtgtaaaggtggctattatcatggaaaactaatttttcccagagaatttcctttcaaacctcc

SEQ ID NO: 559085 - DNA, 83 bp, Homo sapiens
cagcctctctaggagcagattacagcttcctgcctgacacagctcacttcaagaagtgcacaatgtcagaacgtggaattaag

SEQ ID NO: 559086 - DNA, 101 bp, Homo sapiens
gtcctaccggaaacctaggaaaaggtgttggggatgtcctttgcactgaccctgaactgccagattgacaaaaccagccagaccatagggctatgatctgc

SEQ ID NO: 559087 - DNA, 75 bp, Homo sapiens
caaagaagatgcctcgaactaaacaaattcatcccagaaatctaagaggttatgaagacagtatggagtttccag

SEQ ID NO: 559088 - DNA, 74 bp, Homo sapiens
tccatgatgactggctttgctccagacacagatgacctgaagcaggagggccgtgtagccatcacccgagtggc

SEQ ID NO: 559089 - DNA, 90 bp, Homo sapiens
ccccgccagctccagagccacgtacgatttgggccaggcttagtcatctattggtatggatttatccaggagctggactgcaaccgggaa

SEQ ID NO: 559090 - DNA, 100 bp, Homo sapiens
cctgcgctacctgtcggaggagggtgtcatggagaaactccagctgggcccagagattctgcagcgggaaaatccaaggcttatttatgccaggctgagt

SEQ ID NO: 559091 - DNA, 101 bp, Homo sapiens
taagaggagaaatagcaggacctccagacacaccatatgaagacccagtgagaatatgctgatccgtgtcaataatgatgggacttattgtgcaaattgga

SEQ ID NO: 559092 - DNA, 75 bp, Homo sapiens
cgggcaccgcggtgctgctggtcacggccaacgtgggctcgctcttcgacgactgaacttcgaccacttccagat

SEQ ID NO: 559093 - DNA, 100 bp, Homo sapiens
gggctcgttaccacatgaaggctgactctgtggttgacctgctttcctacaatgtgcaaggagcccgagtgcacccgatgaccaaggaccctggaggcca

SEQ ID NO: 559094 - DNA, 90 bp, Homo sapiens
gtgggcaagttgccgtgcctggagatctcacagcccaggcctgagcccaacagtcggtccaagaggtggctgccatcccacgtctacgtg

SEQ ID NO: 559095 - DNA, 90 bp, Homo sapiens
caacggcggcctccaggcctcaggccccctcaccatcctagaggtcaagatcagctctggctagatgctgcaatttcacagcagttcctt

SEQ ID NO: 559096 - DNA, 82 bp, Homo sapiens
cctggtggatctgcagtacgaagggccacccagtgctcctgcagaagatcgttcaggaacacccgacagcattgcttcctcc

SEQ ID NO: 559097 - DNA, 97 bp, Homo sapiens
agaaaagcgaaggattgtggtcccgcctcacctggggtatggagaggaaggaagaggaatgatgagaagacagcagctgattacaagattttaggtg

SEQ ID NO: 559098 - DNA, 83 bp, Homo sapiens
ctctcagcaagaacgggaacaaaactctgattactgtgccatgctatgaaggaccatatagtccgtgttgcaaatgaagctga

SEQ ID NO: 559099 - DNA, 75 bp, Homo sapiens
actgtcctggctgtgctggccttagtgccccaggatcagggaggactgcacagactccccctccccccggcccct

SEQ ID NO: 559100 - DNA, 73 bp, Homo sapiens
tgtggtggaagcagcagtccaggaatgcagtcagtctgttgatgaaactatatgatattgctgataggatgag

SEQ ID NO: 559101 - DNA, 82 bp, Homo sapiens
ctccctcccgcgcgtgctgcgggtctgctcgggggtctacttcgagggaagcttgctgtcttcgatacgtggagctccttgg

SEQ ID NO: 559102 - DNA, 74 bp, Homo sapiens
caatatggaatattttgtgccacacacaaaaagattttagtccatggagaacagaatgaaatggccagattgaa

SEQ ID NO: 559103 - DNA, 100 bp, Homo sapiens
tgtggaggagctggatgtcatgttcagtgaactggtgaactgtttgaggcgaagagatgctggtttgttgaatcagttgcaagagcttgacaagcagata

SEQ ID NO: 559104 - DNA, 83 bp, Homo sapiens
cgaagttccggcgcatcctccacaccgacaccatctggaggaggcgttgccgtgagggtagatgacattaatgctgataagaa

SEQ ID NO: 559105 - DNA, 83 bp, Homo sapiens
ccaccggatactggggcttccccaactgcaggcttatctccagaagaagaagagaaaaggagaatccgaagggaaaggaataa

SEQ ID NO: 559106 - DNA, 97 bp, Homo sapiens
ccaggatctggagaatcatccatctgttcttaagtatgagaagattaagtttcggtgtctgaactgctcagcttcgcaagtctgctctcaggatggc

SEQ ID NO: 559107 - DNA, 82 bp, Homo sapiens
ccgaggccgccgccgcctctccttgctgcagccatggagttgggacagcgtcttcgctgctgctggatagtcgtgttttcgg

SEQ ID NO: 559108 - DNA, 83 bp, Homo sapiens
tccctgcagactggcaggagcagattccaaaggcacaggaagaagcttgcagtccacaggtcctggctaccctgggaagagac

SEQ ID NO: 559109 - DNA, 98 bp, Homo sapiens
gtcttgctcggccgatgaagtgcagaggtttttttctgttaaacacagtgggaatatcacttttgatgagattgtcaacattgctcgacagatgcggc

SEQ ID NO: 559110 - DNA, 50 bp, Homo sapiens
aagttgggtgcagattttcatggagccagcaccgctctttgaccttgcca

SEQ ID NO: 559111 - DNA, 76 bp, Homo sapiens
cagtgcgtcaatcagagcgtcctgtgcgcatcaagatggtgctcatgtggaccagtggtgacgccttcaagacggc

SEQ ID NO: 559112 - DNA, 74 bp, Homo sapiens
cccgccgcagctcctcggacgcagataggagaaagaattcgagtcatcttggacatggaagataagactttagc

SEQ ID NO: 559113 - DNA, 88 bp, Homo sapiens
gtggggcgcgcgtgcggaggaccaggcgcggcgcggctgcggctgaggtattgttgcagcatctggcagtgagactgaggatgaggac

SEQ ID NO: 559114 - DNA, 100 bp, Homo sapiens
acaaccacatgattgggattgggccagtcttaaatatctacccatggaataaagagctgtatttgatcagattgttaaaggaaatgggctggcaggaaga

SEQ ID NO: 559115 - DNA, 100 bp, Homo sapiens
ccatagcccgggcgtggccgtgatacagttcgccgtcggggagcaccgagcccaggaatatcgttcagaaaaatctcttgaagaattgagtaaacttgtg

SEQ ID NO: 559116 - DNA, 96 bp, Homo sapiens
caaggattggtccgacctcgtaacgccacaaggaataatgggctactgaaagcattaaaatgctggtgacattgtgtcaatctgatactgaagaaa

SEQ ID NO: 559117 - DNA, 97 bp, Homo sapiens
agagctactgaggacagaaattgttaatcctctgagaattgaacacttgtcctgctccttcacctttttcttgcatggagacagcaatgtttgtacc

SEQ ID NO: 559118 - DNA, 74 bp, Homo sapiens
ctctgtctgtcccttgcaggatggagaagaacattcttacatgctgattcctgacattcagacaactgacttgt

SEQ ID NO: 559119 - DNA, 93 bp, Homo sapiens
gacaaagagcccctcatcgagctcttcgtcaagcaaattgtggctactaatttgccccctgaagatcaagatggctctggggatgactctgac

SEQ ID NO: 559120 - DNA, 89 bp, Homo sapiens
tcagaaggagctagctgaaataacccttgatcctcctcctaattgcagacacaattagaacagttaccagaacacatcaaggagccaat

SEQ ID NO: 559121 - DNA, 97 bp, Homo sapiens
caagaatcgccttcagccctgtctggtgcatccttggcagaaagtgaggaggaaaacacccccattatttccatgaggacaacttacaaggacctgt

SEQ ID NO: 559122 - DNA, 112 bp, Homo sapiens
agccgctgccgctatggatgatcgagaggatctggtgtaccaggcgaagctggccgagcaggctgagcgatacgacgacgcaaacatgcagatctttgtgaagaccctcact

SEQ ID NO: 559123 - DNA, 100 bp, Homo sapiens
ccatcctgctttacaggcgcaaactggaccgggaggaaatcaaaccattgccaccttccagagaagaggtacgagatgacaagacaaccataaagtgtga

SEQ ID NO: 559124 - DNA, 80 bp, Homo sapiens
gttaaggattccaagtaactcttatttgtgctggacccaaaggagacaacatttatgaatggaggtcaactatattggga

SEQ ID NO: 559125 - DNA, 126 bp, Homo sapiens
ggagtcagtggatatccaaccctgaagatatttagagatggtgaagaagcaggtgcttatgatggacctaggactgctgaggatcttatgtctctccttgatgccgacattcattctgcccaccca

SEQ ID NO: 559126 - DNA, 74 bp, Homo sapiens
ccccttcggagacaacaacctgctgggcaccttcatctggaataaggtggaaaggagactatggaaccaggatc

SEQ ID NO: 559127 - DNA, 83 bp, Homo sapiens
tgaatcctatatggatggttaaaacccgaatgcagctagaacagaaatggactcaccctgtcacccaggttggactgcactgg

SEQ ID NO: 559128 - DNA, 82 bp, Homo sapiens
cctccgagcgcaaggacagcgcgaggtccgcgcagcccagcgcagccatggcgtgatggtgggcatgggtcagaaggattcc

SEQ ID NO: 559129 - DNA, 83 bp, Homo sapiens
gaaatcactgcaccttaaaaacaaaagattgagctgcactgtattcctttatgcaatgccaaccaaaaccatagaagtgttgc

SEQ ID NO: 559130 - DNA, 100 bp, Homo sapiens
tcggcaggtacagcacttgggagcccgaggagaacatcctggactcgcggctcattgcagccttcgaacaaaaggcataattggaatatcatttggagaa

SEQ ID NO: 559131 - DNA, 100 bp, Homo sapiens
ttgccgccggagaggagtggcctcgcccgcttggaaactacagtcgtcgggaaggaacaagaggctccagttggagtgctcagaatactcctcgaggaaa

SEQ ID NO: 559132 - DNA, 145 bp, Homo sapiens
atatgtaggtctcctgtccaacccgcaagctcatgtatcaggagttcgattcctataccagtgccagtctatacaggtactattctgccctaaaaactatggaacaattagagaatgtgtactttccctgggttagtcaataccg

SEQ ID NO: 559133 - DNA, 100 bp, Homo sapiens
cgagcagcagtgtgtcacgctctggggaccagacctctcccggagctcctcgccaccctcactgctggaccaactgcagatgggctgtgacggggcctca

SEQ ID NO: 559134 - DNA, 75 bp, Homo sapiens
taaattgccgcgatacccaaggcagacattcaacacctttacatttagcagtggccataaaatgcagtaaaaaca

SEQ ID NO: 559135 - DNA, 100 bp, Homo sapiens
tgcgaagtggttgagaagcctgtacctgttttatacttgcttttgcttcagcgttctgtggttgtcaacagggcaaatgacacagctttgtgaactgatc

SEQ ID NO: 559136 - DNA, 75 bp, Homo sapiens
ctgggcacgaggaccatgctgggccggagcctccgagaaaactccatccggcacaacctgtcactgcatagtcga

SEQ ID NO: 559137 - DNA, 87 bp, Homo sapiens
agaggtcataggggttccacagtcttttcagaaactcatatttaagggagaagatggtataaactggtccatcagtgacaaagacat

SEQ ID NO: 559138 - DNA, 98 bp, Homo sapiens
tggttttgatatggattatacccttgctgacctcgaagtagggggaaaactgcagtggaagatgaggacagcatggatgggctggagacaacagaaac

SEQ ID NO: 559139 - DNA, 98 bp, Homo sapiens
aggacgctgaggggcggaggcgggagaggcgagctcgcgatgagtggtctcggcaggctcttcgggaagggaaaatgtttcaacgtgcgcaagagttg

SEQ ID NO: 559140 - DNA, 83 bp, Homo sapiens
ggggaatccggaagggacacgctgaacagtttttcagaagaagtgaagtcaagatgaagaaccatttgcttttctggggagtc

SEQ ID NO: 559141 - DNA, 110 bp, Homo sapiens
ccgcggggggctgtcggggaaccatggctgccccgagagctttccagagtgttgaatcttccaccagaaaacttgatcacatcaatatctgcagttccaatttcccaaaa

SEQ ID NO: 559142 - DNA, 100 bp, Homo sapiens
tcctgcaagaggaggcaattgacaggaactacgtcccggggaaggtaattcagaggtccgtggggccagccagcctgagcttgctcaccttcaaagtcta

SEQ ID NO: 559143 - DNA, 100 bp, Homo sapiens
gatgaacatgtgcttggtgtcgtttttccttgagctgaacgtcttgcaacagtggccgcacgcatagggtgataaaagaaaatgtggctgaagttacccg

SEQ ID NO: 559144 - DNA, 100 bp, Homo sapiens
tggcagtgaagagctgctgaagtacatgcttcatagtccttgcgtctctctgtaccttctcaaaccagatttcatgaggcggcctgatcgaacatttgac

SEQ ID NO: 559145 - DNA, 100 bp, Homo sapiens
aaaagtttgactgaaaaagtttctctctatagaggtgacatcacattgctagaggtagatgctatagtcaatgccggtcttaaagaaagtgcagaagaga

SEQ ID NO: 559146 - DNA, 100 bp, Homo sapiens
cagagagagagcgcgagagatggagatgggcagacggattcatttagagctgcggaacaggacgccctctgatgtgaccctggcaaagatgagagtgcac

SEQ ID NO: 559147 - DNA, 51 bp, Homo sapiens
gtgacttcccggacgctgggaaatggtggttagacgatgctattattgacg

SEQ ID NO: 559148 - DNA, 82 bp, Homo sapiens
gcacaatgatccttttgctcctggtggaacagttgttgcagcaagcgattcaggagttattcctgatgaagctaaagctttg

SEQ ID NO: 559149 - DNA, 82 bp, Homo sapiens
ctgagccggccgagcggcgacggaccgcgaggagctgtaaaattgacaagcttggcatgtggaaatcagcacatctgggcct

SEQ ID NO: 559150 - DNA, 100 bp, Homo sapiens
tgctaactaccagacgatgaaagaacatttcctctagtttctggataatgagcaggcacacaggttgaaaggattgttgacaaaaggaaaaataaaaaag

SEQ ID NO: 559151 - DNA, 80 bp, Homo sapiens
ctccaaccatgggaggccgcgtctttctcgcactgagattatgaggctctggcctccactggccactcactcgtgaccct

SEQ ID NO: 559152 - DNA, 90 bp, Homo sapiens
ttcatctacaacccgcgcttctggccgcgggaaggagaggtatttgtaggcaaaataccaagggatttatatgaggatgagttggtgccc

SEQ ID NO: 559153 - DNA, 100 bp, Homo sapiens
tgctgctgctgctgcccgcgtccgaggctcgcgggcggcgggcccgggtacggggctgatgttgacgtcaaccaccacctgactcctgatgtccagcctc

SEQ ID NO: 559154 - DNA, 98 bp, Homo sapiens
tgtcagcactgctccacctctgattccaccaccggattattcagagctgggagagcttcccccacgatctcctttagaaccagtttgtgaagatgggc

SEQ ID NO: 559155 - DNA, 115 bp, Homo sapiens
taataaggaaaacataacaattgttgatatatccagaaaaattaaccagcttccagaagcagaaaggttgttctgttgtccccagttccagaactgagggattcttcaaaacttc

SEQ ID NO: 559156 - DNA, 100 bp, Homo sapiens
agatgcaccggacactttgttattggagaaacatgcagattatatcgcatcctatggctcaaagaaagatgattatattttatcatgtgggcaacctgct

SEQ ID NO: 559157 - DNA, 100 bp, Homo sapiens
ttggcgccctgctctgcgcacacgctcagcgacatgtcctcacctacatggaggatgcagtgtgccagctgctagaaaacagggaagatattagccaata

SEQ ID NO: 559158 - DNA, 75 bp, Homo sapiens
agaagaaatagttacctatgatcgactgaatttgctcttaaagaaatcatgtcctctggaggtgctgaagatgat

SEQ ID NO: 559159 - DNA, 100 bp, Homo sapiens
agggaccgaagtgactgtctaggagagcatttgtatgttatggtgaatgccaaatttgaaggtacggacattgctgcaggagaagaggttgccatcaagc

SEQ ID NO: 559160 - DNA, 101 bp, Homo sapiens
tttttgaccagaaaaccgacaaccttcccagaaagtccaagctcgtgggatttcagtcataatcggttgtctaactggaacatcagcttggaatcacaaac

SEQ ID NO: 559161 - DNA, 75 bp, Homo sapiens
tgctgagtattctagcctccgaaaacatctggtggttcactcaggtttaagaaaatctacgaagaaacgcagtga

SEQ ID NO: 559162 - DNA, 50 bp, Homo sapiens
gtgcagcagtgcggtgaggcgaggttggaattaacgacctctggaaagat

SEQ ID NO: 559163 - DNA, 98 bp, Homo sapiens
atgttctctcgcgcgggtgtcgctgggctgtcggcctggaccttgcagccgcaatggctctgacgcccgctctgcggcttcggtgtttgaacaggcca

SEQ ID NO: 559164 - DNA, 74 bp, Homo sapiens
cgttaaagggaagcgggtcgttatgagctgatcactggagattccatcgttagtgctgaggcagtatgggatca

SEQ ID NO: 559165 - DNA, 74 bp, Homo sapiens
aggctcagtacatcacagacgcagaaggagcccagcgaagtgccaacacctaagagacctcggggccgaccaaa

SEQ ID NO: 559166 - DNA, 90 bp, Homo sapiens
gaatttttgtggattttgcctcagcttcacaccgtcaaaagagtcggactcaggcccttaagcaaaactacatctacatccaccactggg

SEQ ID NO: 559167 - DNA, 82 bp, Homo sapiens
ccagaccctggagcctcagttggaagcagccgatccagcctgcggagcctgtggggcagcagatactttctgagtgcctact

SEQ ID NO: 559168 - DNA, 100 bp, Homo sapiens
aagaaaaagattcctttcttggcaactggaggtcaaggcgaatatttaacttatatctgcctgtcagggtcaacatatttcactggcacctattcacaag

SEQ ID NO: 559169 - DNA, 75 bp, Homo sapiens
gttgtgcaagaggtactgtccatcaaacatcttccaccacagcttagaggtcatgatgatgggcagcgcccgagt

SEQ ID NO: 559170 - DNA, 88 bp, Homo sapiens
aagaatctcatgagtttgtcattgaggctggagctttgatgttggctgataattgactgcagatgagctgtggaaaggcgctttagca

SEQ ID NO: 559171 - DNA, 119 bp, Homo sapiens
cagatgcagatctgaagacctattttactgataagaaaacacatctttacacactaagtgttgaaattccgtaaacttaacttcaatggggagggtgaacccgaagaactgatggtgga

SEQ ID NO: 559172 - DNA, 90 bp, Homo sapiens
ctgagcttcagcgtcagccgcgacggcgcctcgtctcgcggcgccagcgtttgctgccaattgatggggcaaatgatctcttttttcagc

SEQ ID NO: 559173 - DNA, 101 bp, Homo sapiens
gacctcaagcggcagaatgctcttctggagcagcaaggtctgcctcgtggtaagaacagcgagagtgactaagctccagtgataagggcaatgctgtttct

SEQ ID NO: 559174 - DNA, 90 bp, Homo sapiens
ctgcggaaacggcgggtttcccaggacctggaagtggatactgctattgttcatccagttcccattcgtatgactccaagcaaaatccac

SEQ ID NO: 559175 - DNA, 113 bp, Homo sapiens
acctgcgggtattggatgattggtagctaagactcccgaatacttcagaagtggggaaatgggcagctggtggaatttttgaagaaaatggaatctcgaggccccctttcgtg

SEQ ID NO: 559176 - DNA, 83 bp, Homo sapiens
gtttccttgcccggggccgcgggaaggccgaccgactgccgcgatgatatcatcaagttgaatcgaaaggaagggaagaagca

SEQ ID NO: 559177 - DNA, 100 bp, Homo sapiens
gtggagacggacatagtcgtggatcactacaaggaggagaagtttgaggacaggtccccagcggatggtggttcctgctgccctcaaggtcgtgcgtctg

SEQ ID NO: 559178 - DNA, 74 bp, Homo sapiens
aggaaggaacgaggcaaggagctaaagcagcgtgcgttcagccctggggttcatgcatgggagatctcagacca

SEQ ID NO: 559179 - DNA, 96 bp, Homo sapiens
cttcaatccagttccaaggactccacgggcttacaagagcagtgattcccaggctttctcagcaatgtaccccatttcctgacatttacagctgaa

SEQ ID NO: 559180 - DNA, 95 bp, Homo sapiens
ctgggattggaactgtgtttgggagcctcatcattggttatgccaggtcccaaagttgtttctaaagaaattccagtagagtccatcgaagaggt

SEQ ID NO: 559181 - DNA, 90 bp, Homo sapiens
caaaatggaagtgaatccccctaaacaggagcacctgctggcgctaaaaggttgcaacaaggacagtgtcagagcaggctgtaaaaaatg

SEQ ID NO: 559182 - DNA, 95 bp, Homo sapiens
gttaatatgcagaagaaatccatataggatctttgagtatttgcaactcagcctagaagaggactctgtttggaaacaagatcaagtctgtggct

SEQ ID NO: 559183 - DNA, 100 bp, Homo sapiens
caggatattaatgattataaccggagattctcagggcaacccagatctgttggtgctatgtaatgacatggatatgaacgagctgcctacgaacctcccc

SEQ ID NO: 559184 - DNA, 74 bp, Homo sapiens
ggagcagttgggaatcaggtctggaatactcctaaccaagaagttgcccagggacattaatcgagagacaaaga

SEQ ID NO: 559185 - DNA, 48 bp, Homo sapiens
ctgctatactccctattatgtggcggttgtggaacaggaaatgaaaaa

SEQ ID NO: 559186 - DNA, 96 bp, Homo sapiens
tggacaacaccatggaaatatttgacattgaggtgtctggaaatgaagtatggaaatgaaatcatgaataaagacccagttttcagaatctctcca

SEQ ID NO: 559187 - DNA, 87 bp, Homo sapiens
ggcaccaagacgcaggggggatatccacagttcgatcaaggaccacggaggggtgatcgtgaacatcactgccaccctggggaaccg

SEQ ID NO: 559188 - DNA, 100 bp, Homo sapiens
ctcacagtcaccgctgtcattgtggctttcactcaggcccatttctaatgaaagtcccaaggagatcaagaaacctttggtaactggtagcaaagaacct

SEQ ID NO: 559189 - DNA, 74 bp, Homo sapiens
cgaggttcgagtgttgcagagcctgcggggcaagatcttggtgcttcatgccccacctccaaccaagatcaaac

SEQ ID NO: 559190 - DNA, 106 bp, Homo sapiens
tggcctgcaccctaaccaggaggcacactccttgttcctggacatccacccgggtgtgtccgcagccggccaggtggtatccctgaaggtgtggctgattgacgac

SEQ ID NO: 559191 - DNA, 97 bp, Homo sapiens
gcctaacgttcacttcactcacgggaagaagtggagaagcgctttgagggtcggctcaccaagaacatgtcaggatccctctatgagatggtcagcc

SEQ ID NO: 559192 - DNA, 82 bp, Homo sapiens
aggactctggagctgacagcgcgcacttcacccgcagttggtttttagaacttcagccataaaaatgggcagaattttcctt

SEQ ID NO: 559193 - DNA, 50 bp, Homo sapiens
ccggccctgagctcccggcggcgcagagaaatgatatcgccatggcaatt

SEQ ID NO: 559194 - DNA, 98 bp, Homo sapiens
ggctccctaacaggcccgcctgtctgctcgtggccagcggcgccgccgaaggtcgcctgcgaggccgctggccaggcctgagcctctgccaccatggc

SEQ ID NO: 559195 - DNA, 100 bp, Homo sapiens
gccagatagtaccatgatagctgtatcagtgacttaagagattaaaattaatttggttgctgttggttctgaacaaataatgagttcttttatttgaggt

SEQ ID NO: 559196 - DNA, 83 bp, Homo sapiens
gcagccgatccagcctgcggagcctgtggggcagcgcaccttttgacaagacagccaacatcaccttctccctcaatgctgac

SEQ ID NO: 559197 - DNA, 98 bp, Homo sapiens
ctcctcagagttttctgctaaggagaacaagaattcaagccaggaagaagcagcaatctgtcttctggattaaaactgaagatcaacctactttcaac

SEQ ID NO: 559198 - DNA, 100 bp, Homo sapiens
ggaagaaaccattacaatagatcgagcctgcagacaagaaacattcgtttatgagatggacaagacaagcgctctgagcctcagcaatgtggcaggcgtg

SEQ ID NO: 559199 - DNA, 83 bp, Homo sapiens
cgagaccggctacttctcggcgctgccgtctctggaggagtactggcaacagttcaaatctgaacatcaatgatgtactaggg

SEQ ID NO: 559200 - DNA, 82 bp, Homo sapiens
tggcgggcgagcggctcctctgccagagttgattatggaagattcccacaagagtaccacgtcagagacagcacctcaacct

SEQ ID NO: 559201 - DNA, 74 bp, Homo sapiens
agccggagcctagaagtcagctgcgcagttgtgtagcagttgagtaatgctggttagctgttaaggtggcgtgt

SEQ ID NO: 559202 - DNA, 96 bp, Homo sapiens
cgcggccaggcgattcggtgaagcgattcctgcaggcgttggttcccctctttgacctgggagtcatttaatacttcatgattagaacaaatatgt

SEQ ID NO: 559203 - DNA, 145 bp, Homo sapiens
acagtgaaagtatccagtatgtctttccaccgtaccctagagttggcatcttgtttaccagaggggagcgatatggtccagacctgtacatgaataactttggttagtcagagtgaaatattcaataatgagtggtgcagctttg

SEQ ID NO: 559204 - DNA, 82 bp, Homo sapiens
tccgttgggtccggccgctctgcgggactctgaggaaaagctcgcaccagatgccatggacaatattaccaggcagaaccaa

SEQ ID NO: 559205 - DNA, 96 bp, Homo sapiens
gaggagccggagatgcagctcaaggggaagaaagatgggctatgtgcgggagtatattctgtgggcagcgtctaaatcccagcttctggcacacca

SEQ ID NO: 559206 - DNA, 75 bp, Homo sapiens
ctgctgccccaggctctgcagcccctgctgctggttctgcccctgctgcagctacagaagtcaagattccaaaac

SEQ ID NO: 559207 - DNA, 111 bp, Homo sapiens
actacaaggacgagttctcgggcagaggcgacctccccgcgttccatgcgcacagggacagggctccaccgggggacggctacgtgcaggcggacgcccggggccccccgg

SEQ ID NO: 559208 - DNA, 75 bp, Homo sapiens
aaatttgaaaggcttcgaggcagcggatccagccgcagaagccaggatgaaggtagcctgcatcacagagcaggt

SEQ ID NO: 559209 - DNA, 82 bp, Homo sapiens
gtccccactgcggtccacggccaggtgaacaatgcaaaatgatgcttcaacacccaggccaggtctctgcctcggaagtgag

SEQ ID NO: 559210 - DNA, 101 bp, Homo sapiens
aacaccaccactctcattagtgagaatggtcatgctgccgacaccctgacggccacgaacttccgagtggcagtggccggtgtccagctgcctactttctg

SEQ ID NO: 559211 - DNA, 80 bp, Homo sapiens
cctccagccccaagagaaacacgacctctcttgaaggaaacagatgtgcaccccagatactcgcccagctggtctggaag

SEQ ID NO: 559212 - DNA, 100 bp, Homo sapiens
ggcgggaggacgggctgccgcagggccgttgctccagggagaactgcaaatatcttcatccacccccacatttaaaaacgcagttggagataaatggacg

SEQ ID NO: 559213 - DNA, 82 bp, Homo sapiens
ttatacctagaagtctactaatggacagttagtcacccacctacatgttgaggaattaaggataacctagacgacataaaga

SEQ ID NO: 559214 - DNA, 83 bp, Homo sapiens
caaacagctaatagaccaggggaaaactgttttatttgcatttgaagaagctattgcaggtgcagttaataaccaaagcaggc

SEQ ID NO: 559215 - DNA, 50 bp, Homo sapiens
ggtagatctccttgaatatccagtgtcgtgaaaactacccctaaaagcca

SEQ ID NO: 559216 - DNA, 98 bp, Homo sapiens
tgagacctccactggctgtttgtttgctggatcatcgcttggtaaacgagaaatgttgctgaagtgctgctgaaagggccagagatgcaaggatttgg

SEQ ID NO: 559217 - DNA, 82 bp, Homo sapiens
gccagggaaccctggtcaccgtctcctcaggctaactatatgtcagaaagcatcagcttttctcgatggacccattcatcta

SEQ ID NO: 559218 - DNA, 109 bp, Homo sapiens
aaaagactgggcttgtccttgctggtgcatgcgtcgtcggcctctgggcagcagatgtggaaactaaagcccagagagaaagtctgacttgccccacagccagtgagtg

SEQ ID NO: 559219 - DNA, 100 bp, Homo sapiens
cgacggcctggctttctgcgccatcctgcaccgccaccggcccgacctcatgagcgggacggtatgcgggccatcctggggtcctacgacagcgagctga

SEQ ID NO: 559220 - DNA, 83 bp, Homo sapiens
taaagttactgctgttaaaaagacctgaaagatgtctgaaaattccagtgacagtgattcatcttgtggttggactgtcatca

SEQ ID NO: 559221 - DNA, 100 bp, Homo sapiens
agagccgagatgagcatctgcacgagatggcactggagcaaatcacggcagtcactacgaatgctgaagcttggaacaatttgtcaacttcctatatccg

SEQ ID NO: 559222 - DNA, 78 bp, Homo sapiens
ccgggatcaaagtgtaccagtcggcagcatgggctcccagccccattgccaataccttcctccactatcgaaccagca

SEQ ID NO: 559223 - DNA, 131 bp, Homo sapiens
tgtatgcatggtgtggggttggtgtgattagcttcgcagtctggaaagctttaggagttcacagtgtgggagacctacctgatgcagatattaaacctccagaaaatgtactgtttgtgtgtaaattgaac

SEQ ID NO: 559224 - DNA, 75 bp, Homo sapiens
tcgcttggtgtcctcctggcctcagcaacctgacaattctgtcgtgtcccggtgcctgactgacagaagttcttg

SEQ ID NO: 559225 - DNA, 98 bp, Homo sapiens
tagacagcttgttggccttttaagcccaatggtctatcaggaagtagaagagcagatagaagaagtcagagatgccatggaaaatgaaatgagaaccc

SEQ ID NO: 559226 - DNA, 100 bp, Homo sapiens
tgatactctcattggttgcaaaaccttgatctgtgaaagcgggcgttttggaagataccggaagtagagtcacggagagcaatacgagaattggagaccc

SEQ ID NO: 559227 - DNA, 90 bp, Homo sapiens
ccagacagagatgatcatcaccaagcagggacgttcatagccctgatgaagcaagttactctgctctcctaataaatgcaagaaaatgac

SEQ ID NO: 559228 - DNA, 74 bp, Homo sapiens
gcgcccagcggattctacattgcctccggagatgtggacgagtgctcactagcagaaaaaacctgtgtgaggaa

SEQ ID NO: 559229 - DNA, 90 bp, Homo sapiens
gaaattttctacagataccaaaggaaaaccaacttctcggacacaggtgggcacagtcagtggtgtgctgctagttacaccaaataatat

SEQ ID NO: 559230 - DNA, 98 bp, Homo sapiens
ccaatgctgcaaggggtgtgaggagaggagccgctgtttttcactgagctgccataccccgaaagtgccaccatggcaactgcaccatacaactactc

SEQ ID NO: 559231 - DNA, 74 bp, Homo sapiens
cgagaagagcagagcggagggagccccagacacggtgtctcccagtctgctaaagccctaaggccatcaccatg

SEQ ID NO: 559232 - DNA, 90 bp, Homo sapiens
ccgccgcctgtgcgcctctgctgagtcatccaaggttttgccatcaaggggggacgatttaccaaagcccaagactgcgcctcctccttc

SEQ ID NO: 559233 - DNA, 83 bp, Homo sapiens
agcggatgtggcagccccgagccatggctctcgccgtccgagtcgtttattgataccagcgggcaagcagaaaacaagaggct

SEQ ID NO: 559234 - DNA, 84 bp, Homo sapiens
gtgaccctgccgctggcgagcgccaccgcatgggtggaaggactgtggcacgccctgcgctgggagcaggacagggagctactt

SEQ ID NO: 559235 - DNA, 95 bp, Homo sapiens
tctttcccttgagagagacgccaatggcagggctgcaccagtggttaaacccatccagagtaatggctgcggccttacccaggaccctgggggag

SEQ ID NO: 559236 - DNA, 80 bp, Homo sapiens
agcagcatcacaagctcagcctggacagcaacagtgtggtgctcaccttgggcacatttttgatgatgggcctcgtccaa

SEQ ID NO: 559237 - DNA, 90 bp, Homo sapiens
ccagcggcaacctcatcgccttcatcatctacgagtttgtcctgggagattgtatggagatttgtgacccagaaggaaatctctgacctc

SEQ ID NO: 559238 - DNA, 100 bp, Homo sapiens
aaggaacgaggcaaggagctaaagcagcgtgcgttcagccctgggttgatattcactgatggactccaaagaatcattaactcctggtagagaagaaaac

SEQ ID NO: 559239 - DNA, 99 bp, Homo sapiens
ctgctttcttcagcctatgtagacagccacaaatgggaagcaagagaaaaagaacattactgtcttgaacacacgcaggacttgaaagatgttactaat

SEQ ID NO: 559240 - DNA, 101 bp, Homo sapiens
agatgccaggcagatttataaccctcccagtgggaaatatagcagcaatttgggcaactttaattatggtggtttacatcttggagaaaaaacattctcga

SEQ ID NO: 559241 - DNA, 82 bp, Homo sapiens
agctgggcgcggattcgccgaggcaccgaggcactcagaggagggcagctggtggaatttttgaagaaaatggaatctcgag

SEQ ID NO: 559242 - DNA, 100 bp, Homo sapiens
cttcccaatcccactgatgaggatcagcccatgattgcttcacctgtggtatcagacatcacaacatggggctcaccaagcagtacctacgctatgttgc

SEQ ID NO: 559243 - DNA, 75 bp, Homo sapiens
catgaggccaaaggcagttgtattggctatacttgagaccattccagttctaccagttcattccaatggatcacc

SEQ ID NO: 559244 - DNA, 82 bp, Homo sapiens
gtggagccggagctgggcgcggattcgccgaggcaccgaggcactcagaggagcagcctcccgcgacgatgcccctcaacgt

SEQ ID NO: 559245 - DNA, 90 bp, Homo sapiens
ttacacctgctcctttgctgtcagtgaagtggccaaagtggaacaggtgaagttcgatgccacatccatgcatgtcaagcctcaggtggc

SEQ ID NO: 559246 - DNA, 83 bp, Homo sapiens
ggggctgactgtcgctctgcctttgacaggagaggctgcttcttgtagaggcggctatgagaggttttcctccgagtacccag

SEQ ID NO: 559247 - DNA, 100 bp, Homo sapiens
ggtgctctcccagccgtccgacctggatctccaagacgtagaggaagtggagatcggcagagacaccttctggcccgctgctggaaacgcgttctgccag

SEQ ID NO: 559248 - DNA, 75 bp, Homo sapiens
gaaggagagatctctgctgcctgcattgaggggtattgtccccagtatcagaaccggaagaagaaaatgatcctg

SEQ ID NO: 559249 - DNA, 100 bp, Homo sapiens
ggcttccccagcctgcaggccctggctgggcgtctctggccgagcctctttttgtggaaaacgacagcagcagcagtggcctggaagacgccaccgctaa

SEQ ID NO: 559250 - DNA, 75 bp, Homo sapiens
ccggtccggcccgctgcccgcggcgccagcaccatgataccagggtcctgtactgctgatccggagaaccaagga

SEQ ID NO: 559251 - DNA, 75 bp, Homo sapiens
ctctgagttcttgggcacgttcatcttgattaatagctctccagacccccagctggccatgtggtgagttcaggg

SEQ ID NO: 559252 - DNA, 100 bp, Homo sapiens
gagcagaacctgctgcagcagaagagatacatcgagatatttccaagcagaaggaatgaagttcgaacacatgtcggttcttataagggaaagaaaatcg

SEQ ID NO: 559253 - DNA, 100 bp, Homo sapiens
gggcgtgaatactttttctcccgaaggaagattatttcaagtggaatatgccattgaggctatcaagtctgaagatgatgagaaactgaaaaagaggaag

SEQ ID NO: 559254 - DNA, 75 bp, Homo sapiens
aaagagccctctgcactagcgccgcaggaccgcggacccgagatatgaggccccaggattcctggcgaggtcctc

SEQ ID NO: 559255 - DNA, 100 bp, Homo sapiens
agcacatgcggagactccgaggtggaggaggagtccccaggaaagcgcctggacgcagggggtccactggacggggcctgagctacaacttcacccacct

SEQ ID NO: 559256 - DNA, 100 bp, Homo sapiens
atatctcatcttcaaggacaagcccttgcctggactccccttccagaccacaacttccccggtgatatgggaccctggaggaggaagtctacaatgtggg

SEQ ID NO: 559257 - DNA, 96 bp, Homo sapiens
agcggagcctgagcaaggagcgggtccgtcgcggagccggagggcgggaggaacatgacatcgcggagcgaaaccttgaaagccatttgatgtccc

SEQ ID NO: 559258 - DNA, 75 bp, Homo sapiens
gtaccaccgacaggagccatctggaagagtgcctgggacaagaatccttcaagaaacaggaaaaaactcctaaaa

SEQ ID NO: 559259 - DNA, 75 bp, Homo sapiens
cattgtctttgccttctccagcaggcaagcaggaaacatgacagctgccctacaggcagctctgaagaacccccc

SEQ ID NO: 559260 - DNA, 75 bp, Homo sapiens
ccagtcgggccaagagaagaggcggtggaggacacgacgcgcttaaaggaaagtccatgagatgctgaagaaggg

SEQ ID NO: 559261 - DNA, 100 bp, Homo sapiens
gagagggggcaccggaggtgacaacaataacaagactgtccttcggacaagttttagatggagtcccctgtttccacaccagcagtgctgccaatacacc

SEQ ID NO: 559262 - DNA, 100 bp, Homo sapiens
tgtggcgcggtttcctgtacctgccttgggatccggagggaggaagctgggacacccgggagtcaggaaatgaatacagtcgttttgaagctaaaataca

SEQ ID NO: 559263 - DNA, 100 bp, Homo sapiens
gcgtctccggctgcacagcgctcagagagaaaaggaacagttccgtaagctctttattggtggcttaagctttgaaaccacagaagaaagtttgaggaac

SEQ ID NO: 559264 - DNA, 100 bp, Homo sapiens
tgtctggacaccagaggagtctctctcatcctcccggattgctctgaggccaggagagcactgcagtttcctcctgaaggctggctccggctctccctca

SEQ ID NO: 559265 - DNA, 90 bp, Homo sapiens
cgtgcgcaaaggcctgcagtgcgcgcacccaggggctgatgatgatggggaaatcacctacgagaatgttcaagtgcccgcagtcctagg

SEQ ID NO: 559266 - DNA, 100 bp, Homo sapiens
tgtttcttcggggcttgccgttcgttcgtttccagcctcaggaatttatggtcgcctttttgaatgaggagctgtggccctcaagaatcttcaaattaaa

SEQ ID NO: 559267 - DNA, 98 bp, Homo sapiens
cgccgcgctcagcgacaaacaagcacattcaggaccccgcgagccagcggctgacgtggaacaagtccccaaagagcgtccttgtcatcaagaagatg

SEQ ID NO: 559268 - DNA, 101 bp, Homo sapiens
gagaagcatgggaaggaggccgagccgggatctcaggtcctcgggggcggcggccacgccaaggacggttccacttacttacatgatcatttcgagagatg

SEQ ID NO: 559269 - DNA, 97 bp, Homo sapiens
gctccttgacaagcacatggggatgaagaggtatgaagtggctggacgccgagtgctcttctactttgatgagaaaccagccctgagcaaaggggtt

SEQ ID NO: 559270 - DNA, 107 bp, Homo sapiens
ctcaccatcatcaagacggaaaaagtcgatctggagcttttcccctccccgggagaccaagacacattccaccccagtggggggtcccataccactcatggatctga

SEQ ID NO: 559271 - DNA, 100 bp, Homo sapiens
ccaaaaaggtgattggcatcctccaggatgatgatgctgaagctatccttgctgcagacttcgaaattggtcactttttacgtgagcgtataatcccaag

SEQ ID NO: 559272 - DNA, 50 bp, Homo sapiens
ctgcgagggactaagagcagaccttcagtttggaaacctgcagaattatg

SEQ ID NO: 559273 - DNA, 87 bp, Homo sapiens
gaccgagaccgtgaccgagagcgtgaccgagagcgcgaatatcgtcatcgttagaaggagaagatggtataaactggtccatcagtg

SEQ ID NO: 559274 - DNA, 76 bp, Homo sapiens
gtggaattcctcctttcaaaagggtcgacaagtgcccccaatgatttatggtacaacttcattgaactgccctacc

SEQ ID NO: 559275 - DNA, 101 bp, Homo sapiens
cgctgctaggcattgaggagaaggcagcggacaaagaggtaccaggatcatctatgaccggaaattcctgatggagtgtcggaactcacctgtgaccaaaa

SEQ ID NO: 559276 - DNA, 100 bp, Homo sapiens
gccgaggccgcggagctcgcggaggcaaggccgaggataaggaggtcatcgtattgaggaagttcctgaacttcctttggtagttgaagataaagttgaa

SEQ ID NO: 559277 - DNA, 100 bp, Homo sapiens
gtctctggcagagcaccgaaccccagatgtgctcaagaaatgccagcagttatgtgtctcggtaccacgtgaaagactcctcacgccacgtcatcctagg

SEQ ID NO: 559278 - DNA, 80 bp, Homo sapiens
tgttccggaagcagcacccctacacgttcccgggtggcagtggcactgtctttgcccggctcctgctccagcccagcccc

SEQ ID NO: 559279 - DNA, 100 bp, Homo sapiens
agcagactccccagccacctggggctcccattatggcaggtacactcacgtggaagctgagtgtcctttcctgacttttgacgacctcctgaaccggttg

SEQ ID NO: 559280 - DNA, 100 bp, Homo sapiens
tctgctttgttgggagtgatggatggacagcatgcagcagaactgattaaaacagtggcatctcgctatgatgaatatgttaatgtgaaggatttttctg

SEQ ID NO: 559281 - DNA, 100 bp, Homo sapiens
agagcgcctgcgaccccagtcggtgctccggggaggtcacctgacgaggagatggccttcgccggattttatgtcaagttggtttacaagaagggccaga

SEQ ID NO: 559282 - DNA, 99 bp, Homo sapiens
tcgattttcaaatcttgtattacaggctcttctcgttttactgaaaaaggcacctcctcagctgcccaaactccaaaatgatggtagagaattgaccaa

SEQ ID NO: 559283 - DNA, 75 bp, Homo sapiens
ggcggatgccctgcagtacctgcagaaggtctctggagacatcttcagcaggttcgaagtcaacaataccattct

SEQ ID NO: 559284 - DNA, 83 bp, Homo sapiens
gttttgaaatcgacacacaaagaatagagttgagcctgtgggacacttcggcttccccgggcgctgcctggacaggcctgcct

SEQ ID NO: 559285 - DNA, 100 bp, Homo sapiens
gtggagatatggcgcaactgcggcgcacagagcttgagaataaactacagcagcagttaacacaggcagcccaggaacttgcagcagagaaagagaaaat

SEQ ID NO: 559286 - DNA, 89 bp, Homo sapiens
aatgtccttccagcgctgcgcccggacagacaaggtcgccccacggctgaattctcggtgataaaggcgcccactggaccctcccaacg

SEQ ID NO: 559287 - DNA, 97 bp, Homo sapiens
cacctagagctggccagtatgactaacagggagctcatgagcagcattgtccatcagcacatccgcgtgggctgggagcagctgctcaccaccattg

SEQ ID NO: 559288 - DNA, 98 bp, Homo sapiens
acagaatggtcagaaaccctccataacctgaaggaatccatcacttgaagatcaagcttgtgaccgaatttaccgagtagggcagcagaaagatgttg

SEQ ID NO: 559289 - DNA, 100 bp, Homo sapiens
tgataactgagccaaagtggtgatgctacttgaggggaatttctgcaacccatagtcaacgattacatggactcacaccacccggcaagaactgctcact

SEQ ID NO: 559290 - DNA, 100 bp, Homo sapiens
ccgcaggcagcgcgcgaacgtgggcgtggggatggccaccagtttccggacagcttcgtgctgggtgaatgaaaactttgccattgatttgatagcagag

SEQ ID NO: 559291 - DNA, 100 bp, Homo sapiens
ttggccccctctgatctgcgccgggtcgccacatactgcatcagaagagctaacaattgctggaatgacctttacaacttttgatcttggtgggcacgag

SEQ ID NO: 559292 - DNA, 83 bp, Homo sapiens
gtcgtagggaggacgccgggacacctggaagccgagaaatgattgacgtgagtgaattcagatataactcaagcttgttagag

SEQ ID NO: 559293 - DNA, 105 bp, Homo sapiens
cagaggtccctcagcaaagatggtacaaaagagtctttggaggatgcggctttgatggtttccacagtgcctacacaacctgataatccattttctcaccctgac

SEQ ID NO: 559294 - DNA, 90 bp, Homo sapiens
gcggtgcgcgcggcccggcgacgggggatcctgaggcccggtgttaatgttgactttgcaaaatgatccacccactttggaaacaggggt

SEQ ID NO: 559295 - DNA, 96 bp, Homo sapiens
ccggaaagagcgaaagaaagaagtggtggaggaggttcgggaactccaggagcagctggcccgacagcaggtccatgtggagcttgacgtggccaa

SEQ ID NO: 559296 - DNA, 75 bp, Homo sapiens
tccgggccgcgcagctgccgaacgacgtggtcctacaggtgttggagagcacaatggctgaacaagtccttcctc

SEQ ID NO: 559297 - DNA, 100 bp, Homo sapiens
ctgccgcgccaccgagtccggaccggagactttggggcctaactagtgataacaatccatattcctcatttggagcaactctggtgagggatgatgagaa

SEQ ID NO: 559298 - DNA, 74 bp, Homo sapiens
aacagttgaatcaaagtatggacacaggttttgcacactagggaccaagaagccctcggggacactgctgagaa

SEQ ID NO: 559299 - DNA, 50 bp, Homo sapiens
cggggaggtcacctgacgaggaggccaatgagaacagcctgctgagtgcg

SEQ ID NO: 559300 - DNA, 75 bp, Homo sapiens
gtggtgaagggtacttttcatggtgcatggaaggaaagccaatgcgcagattacctggctggtgtttgcttgttc

SEQ ID NO: 559301 - DNA, 100 bp, Homo sapiens
atcaacaacgacgccgagctctggggcgtcttgcagccctatgagcatctcatctgcggcaagaacgccaatgttgagaaggagtctcgctctattgccc

SEQ ID NO: 559302 - DNA, 100 bp, Homo sapiens
cgcctgcccagtattctaccaggcctggtgctggcctcctgtgatgggccttcgcactcccaggagtacgagagggcctccaaagtggaccagtttgtga

SEQ ID NO: 559303 - DNA, 100 bp, Homo sapiens
tccagattccaagctgaagaagagcaaaaggcggagctgtagccactgtagcagcaagacatatctgaagagatggattaagaatgctttggattaagga

SEQ ID NO: 559304 - DNA, 100 bp, Homo sapiens
caggctggccaactcaccctcatccttgtcgaccatcatatcttatccaagtgtgatccctcacatccacaaatctctgattggaaagaagggacagcag

SEQ ID NO: 559305 - DNA, 90 bp, Homo sapiens
ggattttctatggagacaatcaggagttttggggtgcctctgccaactggtggaatcatcgccacttccagcaccacgccaagcctaaca

SEQ ID NO: 559306 - DNA, 73 bp, Homo sapiens
aggttcatgccagcccagaacagagaatcaggtatttcagtgaaaattacactagtgaagctcatcagattct

SEQ ID NO: 559307 - DNA, 100 bp, Homo sapiens
cagcactcgggctccacaatgtagaggaaatggcatcgcctggcaggaccgtgtgtatgtacaacaaaataatgtggagaacgtctacaatttgggatta

SEQ ID NO: 559308 - DNA, 100 bp, Homo sapiens
ggtgaatttcagtcagcctcagaggttgacttctacattgataagttatgtgtctcggtaccacgtgaaagactcctcacgccacgtcatcctaggcacc

SEQ ID NO: 559309 - DNA, 100 bp, Homo sapiens
tgttggtgacatcgtggacattccaggaacctctgttgccatcagcaactgtgatggtctggtataatacttctccacgtctgcttcaggaagaaagtgc

SEQ ID NO: 559310 - DNA, 83 bp, Homo sapiens
ctattttgcagtacatccagatttctttggacagcaccccgtagaaagggaactgtggctgcaccatctgtcttcatcttccc

SEQ ID NO: 559311 - DNA, 100 bp, Homo sapiens
tccagaagtccagagctgaggactgcctgtttgcagagtctcactctgttgtcacccaggctggagtccagtggcaggatctcaactcactgcagcctcg

SEQ ID NO: 559312 - DNA, 100 bp, Homo sapiens
gaacacagtgaaaaccattttgcggggcagttgttataatgtgagtccatagaggccactgtattctattgaagaacatgtctaacagtaacactactca

SEQ ID NO: 559313 - DNA, 100 bp, Homo sapiens
cccaggtctgcacgaagttccggcgcatcctccacaccgacaccatctggaggaggcgttgccgtgagggcctccccatggccacccatggaccagtcgg

SEQ ID NO: 559314 - DNA, 75 bp, Homo sapiens
gaggccgggcggcgcttctgtcctcctactcggacccgcaggtgcctgtcctgagacccatggacctgatggtgg

SEQ ID NO: 559315 - DNA, 100 bp, Homo sapiens
ctccagggtgtcaggactaagagaagtcacaaaacagcagatttcccaagagcagcggaaaatgatccagtcacagatggatgatgatgacgacgacgat

SEQ ID NO: 559316 - DNA, 85 bp, Homo sapiens
cgagaccgcggccgggaccgagggtgtttcccattaaacactaccaggacaaaatcaggccttacatccagctgccatcgcacag

SEQ ID NO: 559317 - DNA, 82 bp, Homo sapiens
cagctgcggtggcagctgctgagttctcggtgaaggggatttgggagcagcttgtcttacacaaggacgaaggaaaaggtca

SEQ ID NO: 559318 - DNA, 74 bp, Homo sapiens
gagtcatgtggcagtggaaaatgcgctcgggctggaccagcaggtgctcttacagcctgttccaagtgtggctt

SEQ ID NO: 559319 - DNA, 100 bp, Homo sapiens
aaaaattcatctgggcggtatctggaacttgctggtagccggtctgggtctccaggaagagttctgaccacaacagccctgtccactgtgagctctggtg

SEQ ID NO: 559320 - DNA, 75 bp, Homo sapiens
cctccttcagcctcctggcgcccatccgcagcaaggacgtccgcagcagacctcctgccccccgaggtctgcagt

SEQ ID NO: 559321 - DNA, 100 bp, Homo sapiens
tctatgattatgatgcagcaaacagtactgaattatcacttctggcagatgaggtaaagggagaagatgaggaagagaacaatttggaagtacgtgaaac

SEQ ID NO: 559322 - DNA, 98 bp, Homo sapiens
tggatcaaacatgtcacaagagtcggacaagtgctggagaatctggtaaaagcaccattgtgaagcagatgaggatcctgcatgttaatgggtttaat

SEQ ID NO: 559323 - DNA, 100 bp, Homo sapiens
atgggagtcccaaaagacagctccagttttacagagaagcctgtgtctcccaaatcaggaacactgaagagccctcccaaaggatttgatacgactgcca

SEQ ID NO: 559324 - DNA, 49 bp, Homo sapiens
tactgaggtgaaccctgagagcctggaaaactgtcgctgaaaagcagga

SEQ ID NO: 559325 - DNA, 75 bp, Homo sapiens
ccgaggtgcctttctccaaaaggttttgtagtgcatccctgagcatgagcacagaatgaagcggcgtttggatga

SEQ ID NO: 559326 - DNA, 97 bp, Homo sapiens
agaagacgactatgaagctgcttctgatttttataggaagggagttgatttactcctagaaggtgttcaaggtgtcatggagaaactccagctgggc

SEQ ID NO: 559327 - DNA, 82 bp, Homo sapiens
aaccatcaatgagatcgaagacactttccggctttatcctgtggataaacgcagagtgaacgagtttggggagtcctacgag

SEQ ID NO: 559328 - DNA, 75 bp, Homo sapiens
gccttcgtcttccgaatgaactacagccgcaagaaccaggactcggaagaatggagccgcccgtagggcagtggc

SEQ ID NO: 559329 - DNA, 50 bp, Homo sapiens
gtcactgcagcactggtggaacttgagaaataagcgggttttgaaaacaa

SEQ ID NO: 559330 - DNA, 100 bp, Homo sapiens
cctgactacagctggagcgcccagaggcgagccctggtggaggaagagctctggccaggctgccgcacctctacaggaactttgccgcggagcagtatgc

SEQ ID NO: 559331 - DNA, 83 bp, Homo sapiens
tcggggtgccagaaggaaagcatagctctctgatgtaaaggatggagtaaatcaagcagcacctgcatttggatttggcagca

SEQ ID NO: 559332 - DNA, 99 bp, Homo sapiens
gcttctaaaactggaatgacaggaatggcctcctcccttagctccctgttcttggatttgcctactggctgggaagaagcatatacttttgaaggtgca

SEQ ID NO: 559333 - DNA, 75 bp, Homo sapiens
gcagcctgctcgagggccaggacgccaagttcgaacctctgacatgggtggctatgctacttgccatgacttcac

SEQ ID NO: 559334 - DNA, 75 bp, Homo sapiens
tggaagtacaagtgtcagcacctatagagctgcaaacatgattccggctcacgacagtcctttagcggcactggc

SEQ ID NO: 559335 - DNA, 95 bp, Homo sapiens
gttgctgggctcggcgtgctgcggagagacagcgtctggagaccatcctcagtctctgtgctgaatacacaaagcctgacagtcgcttatctact

SEQ ID NO: 559336 - DNA, 100 bp, Homo sapiens
tctggggtctggctctgccccttttcttcttctgctgggaggttggggtctctgggagctctgcagtgataaatgctgctcattctttctacaatggaac

SEQ ID NO: 559337 - DNA, 100 bp, Homo sapiens
gagagcgaggcggggccgccggggccgccatggagcccgactcggtgattgaggacaagaccatcgagctcatggggtcaggcccagccccaggcccagt

SEQ ID NO: 559338 - DNA, 100 bp, Homo sapiens
tcctcctcggcgggagccctcgcgacgcgcccggcccggagcccccagcgcagcggccgcgatctgactgcagccatgagcagcaatgagtgcttcaagt

SEQ ID NO: 559339 - DNA, 100 bp, Homo sapiens
tttgtgctgctcacagtcaccgctgtcattgtggcttgaagtacatctggattccttatgtgtgcatgttagcagcatttggtgtatgttctcccgaact

SEQ ID NO: 559340 - DNA, 50 bp, Homo sapiens
ctgacggcgactgcgggaggccagaactcccccactggaaaggattctga

SEQ ID NO: 559341 - DNA, 100 bp, Homo sapiens
ctggtacccatcctcaagggaggccgtttctaccagcttctgcagaaagccgtcattacacctgattttgaaaaaaaccactgtgttccaccatatagtg

SEQ ID NO: 559342 - DNA, 82 bp, Homo sapiens
ataattttatcccagggtggctgaatcacggaatgcggcttctacgctccggcactctgagttcatcagcaaacgccctggc

SEQ ID NO: 559343 - DNA, 83 bp, Homo sapiens
agttggaagcagccgatccagcctgcggagcctgtggggcagattaagcctgatcaagatgacaacctcccaaaagcaccgag

SEQ ID NO: 559344 - DNA, 101 bp, Homo sapiens
cgcagatgtggacttgaaagaagctgcagcggaggaaggcgaggaaccagcagcacaaacactgttggggcaacagtgaacagccaagccgcccaagctca

SEQ ID NO: 559345 - DNA, 98 bp, Homo sapiens
gcttcccttcctcaaataaggaaattgacacctggcgtgacatatctgaagagatggattaagaatgctttggattaaggattgtggagcacatttca

SEQ ID NO: 559346 - DNA, 95 bp, Homo sapiens
atccgctttggagggagaaaggagattgcctcggattccgacagcagcctggagtactcgggtactttgagttcagtggctcaccccagcctcct

SEQ ID NO: 559347 - DNA, 87 bp, Homo sapiens
atcagtgcccttgtggcgaatggggctcacgtcgaacacagaaccacacatgcagctaccccgggtggcacagcaccaccattgccg

SEQ ID NO: 559348 - DNA, 100 bp, Homo sapiens
gacgaggagggagaagacgaggatgatgcggaaattaaccccaagcaaggacacccaggcccattattttcctccagcctccatggaccacagtcttcca

SEQ ID NO: 559349 - DNA, 100 bp, Homo sapiens
agaagccaaatgccacgagacctgtaacgcctccaagggttttggttgatggagaattgttaccacagatttttgtgaagatgttacagagggataagcc

SEQ ID NO: 559350 - DNA, 90 bp, Homo sapiens
agagatcaaaacaagccctccaggaactcactaccttccactggaagaatctcaaacagcgctacttactcaggatcagtggcaccagcc

SEQ ID NO: 559351 - DNA, 76 bp, Homo sapiens
gatgcagggctctgcccgtaaccagcatggagatatggaccaaaaggaacgagacgtgattatgagggagtttcgt

SEQ ID NO: 559352 - DNA, 82 bp, Homo sapiens
gttgccgtcccttcgcctccttcaccgccgcagaccccttcaagttctagtcatgatgttctcaaatagtgatgaagctgta

SEQ ID NO: 559353 - DNA, 90 bp, Homo sapiens
attcagtattccaatcacagagaacttaagactgacaatctacctaatcaagctagccttttaatcggccgtctacattcacaggcctag

SEQ ID NO: 559354 - DNA, 89 bp, Homo sapiens
ggatgatcataaacttagccttgatgaacttcatcgtaaatatggaacagacttgagccgggttgcagatgctgctaaaaacacagaag

SEQ ID NO: 559355 - DNA, 99 bp, Homo sapiens
agctgcagaatggctcgctgaccatccgcaggactgaggggagccccaggggagctggggcagcatgactggggtgataaatggccggaaatttggcgt

SEQ ID NO: 559356 - DNA, 83 bp, Homo sapiens
tatgccatcacagacaccgcctacaggagtatgatgcaagcaagagtgagccatggagctacgtgtggggaacaagtaccgcc

SEQ ID NO: 559357 - DNA, 97 bp, Homo sapiens
aagatggagatgtgattaagactgagggagccactctaagcctctgacctttttgagcctgggaaatgcttaccttgctctgaagaatatcagtggg

SEQ ID NO: 559358 - DNA, 46 bp, Homo sapiens
gcatcatggactgtgcgcccaagtggttcagcactgagtcatgctt

SEQ ID NO: 559359 - DNA, 75 bp, Homo sapiens
gacaggtctacgccacatcacttaggaaactctttatacagtgaaacaggaggaaagaaaaatgcagcaataaag

SEQ ID NO: 559360 - DNA, 100 bp, Homo sapiens
aagcaaagcaagttaccaatgtctcttctccatgatcgaatccggcctcatctatgggagacatccatttaagatcaactgtttacatgtgatacatcga

SEQ ID NO: 559361 - DNA, 100 bp, Homo sapiens
ggcagcggcgcgtggccacgtggttcaaccagccggcccgtaagatccgcaggtgctatgctcgccttcaccctcgtgctgtcaactgccgcaagaagaa

SEQ ID NO: 559362 - DNA, 82 bp, Homo sapiens
tctgaatcgtgcaggttccgggaagacacggtgaccagctgaatcgtgtggtctcgtttgttaaatacaagtaaggaacaca

SEQ ID NO: 559363 - DNA, 100 bp, Homo sapiens
cgccgagctggacccggaccggttttgggtgaccctggcaaagatgagagtgcacatttcgtcctgcctgaaggtccaggagcagatggccaactgcccc

SEQ ID NO: 559364 - DNA, 100 bp, Homo sapiens
ccatcgttgctgccttcttcgtcaaggtgaatctggattgggaaagtcgacattaatcaactcattattcctcacagatttgtattctccagagtatcca

SEQ ID NO: 559365 - DNA, 100 bp, Homo sapiens
gacggaagacccctggctctataagctgaattatggcagcccagtcaagaatgtccctcttccagtggaaagcccaaccatgcagacatcttgctcataa

SEQ ID NO: 559366 - DNA, 75 bp, Homo sapiens
cagatttgttattggtgggcctcaggagaatgaagtttctagattagaagacataatgcagcatttaaaatcaaa

SEQ ID NO: 559367 - DNA, 101 bp, Homo sapiens
gaggcagggtgttagccaagcggattgagccaggacacaacaccgcggagccctgcaggcggccgactgcagctcccgcccactccttctggccggctatg

SEQ ID NO: 559368 - DNA, 90 bp, Homo sapiens
gagccgccagcgcgtgcgctacgactcctccaaccaggtcaagccgcctgtcttggttagatggctctggattaggattctcactggaat

SEQ ID NO: 559369 - DNA, 87 bp, Homo sapiens
gaggcagaggtggaggcgctttgaaagccatattttctgctcttaagaatcttcaagataagattcgacgcttggaacttgagagga

SEQ ID NO: 559370 - DNA, 75 bp, Homo sapiens
tggtaataagttggtggacgctggggaagagtgtgactgtggtactccaaaggtactctggtggtgtaaaggatt

SEQ ID NO: 559371 - DNA, 87 bp, Homo sapiens
gaactatggttttcacttagcccaccacatggcccttggacttctatttttgggaggaggaagggcaaaagagttggtagtggtgca

SEQ ID NO: 559372 - DNA, 100 bp, Homo sapiens
gccaatttcatgaatttcaagagagtaccattggggtaaaagatgatgaatgcgagtcagatgcagaaaatgagcaaaaccatgatcctaatgttgaaga

SEQ ID NO: 559373 - DNA, 75 bp, Homo sapiens
gtgatgagaagctgtcggagcttcccaagaatctggcaatgggggcaggagctgttggagctttgcagctgacct

SEQ ID NO: 559374 - DNA, 100 bp, Homo sapiens
cgccgccgcccctgcacaacaacaacaacaactgcgaggaaaatgagcagtctctgcccccgccggccggcctcaacatctctcgagtacaacatctttg

SEQ ID NO: 559375 - DNA, 98 bp, Homo sapiens
aaatatctgttaacagactgcttttacacctacgcctgtggactttctcctcgagacattaccactattaaacttctcaatgaaactagagacatgtt

SEQ ID NO: 559376 - DNA, 83 bp, Homo sapiens
gccagctgacggagatggtgcagaagatggaggagcctcctgcccgaaggccacctgaacctaacggctccctgcaacgctgc

SEQ ID NO: 559377 - DNA, 83 bp, Homo sapiens
cctgtgtgctgcagaacccccagaccatcataaaaatggctacaaacttcctagcacatgagaagatctggttcgacaagttc

SEQ ID NO: 559378 - DNA, 83 bp, Homo sapiens
cgtccatcacctggcactcaagggatcaaggtggtcggacattgtgtggtgtaatgaggattggcctggttgcaaaaggcttg

SEQ ID NO: 559379 - DNA, 90 bp, Homo sapiens
attttggtaatactacaccaagaaaccaggttatccctcgaactcctagctcatttcgacagccttgtacaggtttgcagattccgccag

SEQ ID NO: 559380 - DNA, 75 bp, Homo sapiens
gcgcctggcctggccgggaccatgactgtgccctgtccacggtgcctcctgcatgtcctgctgccctgagctgtc

SEQ ID NO: 559381 - DNA, 100 bp, Homo sapiens
aggcgactagcggcggcgggagcggcgccgagaggccgtgcgggacgcgggcgccaggaccggccgaacgcagagggggcaatggcggcttcctgtgttc

SEQ ID NO: 559382 - DNA, 139 bp, Homo sapiens
gagaaactatgatgagcagacactttaatgaccctaatgctgatgcctacttcaccaagagaaagtggggtgtgacttttgttccaataatgaagagtcctttatcctggatgctgacagcaacatgggaaacagaatt

SEQ ID NO: 559383 - DNA, 98 bp, Homo sapiens
gtcatgttcatgggaaactcaatctgggtgtgaattccagctcaaccaagataaaatgaatttttccacactgagaaacattcagggtctatttgctc

SEQ ID NO: 559384 - DNA, 100 bp, Homo sapiens
tagaacctggaatttatgcaggatattttgattggaaggactgcctgcctccaacaggcttgttagcagtggcacaagatcttacagaggatgaagaaac

SEQ ID NO: 559385 - DNA, 51 bp, Homo sapiens
gccttcctcctcgctttgtgatgcaggacagtcattttgtttactcattca

SEQ ID NO: 559386 - DNA, 100 bp, Homo sapiens
ggaagtcgcgaccagagccattggagggcgcggggactgcaaccctaatcagagacccctggcacaagatccctgccctggacccagagaagctcaatgt

SEQ ID NO: 559387 - DNA, 100 bp, Homo sapiens
gaggtgacatcacattgctagaggtagatgctatagtcaatgccgccctaccacttatgtcttggatgaagatgaacctcgattccttgaagaagttgat

SEQ ID NO: 559388 - DNA, 100 bp, Homo sapiens
tggctgctcagctcgggccacggagaggagcagcccccggagacagcggcacagaggtgcttctgccagggttttgacccaccacatcagagtgacacaa

SEQ ID NO: 559389 - DNA, 73 bp, Homo sapiens
cagagctgtgggctgtgttccacaagttcaaaggcgtccgacctccgatcatgaacgggcccctgcacccgcg

SEQ ID NO: 559390 - DNA, 75 bp, Homo sapiens
gcgcgaagaggctggactcggattcgttgcctgaggtttttggattcaaagcataaaaaccattacaagatatac

SEQ ID NO: 559391 - DNA, 100 bp, Homo sapiens
caacatttcctctcgggaagagatagatcatgcagagtattacctttacaaccaccatttgtaatggagaagtggattgtaggaatagcaaaaagtcaga

SEQ ID NO: 559392 - DNA, 99 bp, Homo sapiens
tgggaggacactccaacacatttctttacacagatgttgatgttagtgaagattcacctcctcccctacctgaaagaactcctgaatcgtttgtgttag

SEQ ID NO: 559393 - DNA, 83 bp, Homo sapiens
cggcgtccccggcgcgaagaggctggactcggattcgttgcctgagcaaagtggaagatgctttctacaaaggtgaactcagg

SEQ ID NO: 559394 - DNA, 100 bp, Homo sapiens
gatgccaactccttcttcccacgctgctactgcctgggggctgaggatgacaaaaaagccttcatagatgacagccgtgacgccagtcctcctgagcccg

SEQ ID NO: 559395 - DNA, 95 bp, Homo sapiens
aggcatcgcatcttgtttagatatgctggtcctgaagatgatgctgccattaccttgggcattttgtcagtgatgctgatctttgccttcttcca

SEQ ID NO: 559396 - DNA, 118 bp, Homo sapiens
aatttgtatagagatgtgatgttggagaactacagaaacctggtctccctagttttcggctttgtgagaaaccttaccatcaaacacgatggccagcaacgttaccaacaagacagat

SEQ ID NO: 559397 - DNA, 75 bp, Homo sapiens
cttcagggaggtcagttttttagcaattgtatgatggctatgatgaagagtatgactgtcccattttagatgaag

SEQ ID NO: 559398 - DNA, 98 bp, Homo sapiens
gaagaagaaggagcgcacgtgggccgaggccgcgcgcctgatggcccactgcgtgaccttggttcagctgtccatttcctgtgaccatctcattgaca

SEQ ID NO: 559399 - DNA, 49 bp, Homo sapiens
ccgacccggcggacgcggcgtctggcccagctgagagccagcctggagg

SEQ ID NO: 559400 - DNA, 75 bp, Homo sapiens
gcgaggcggagaaggtgtacatcgtgcatggcgtccagacccaagtcttggattgaggaacaggcaatgggatca

SEQ ID NO: 559401 - DNA, 82 bp, Homo sapiens
tcttccctcctgtcactatcagcaagtcacaatcaggtacttgctaaagaagctcctccagcttcaggctctaactgaaggg

SEQ ID NO: 559402 - DNA, 100 bp, Homo sapiens
tattttgacatcagttatattccatctactgtctttttcttcaatgggcagcatatgaaagtggattatgggttccggaagatctcaaagagttccagac

SEQ ID NO: 559403 - DNA, 74 bp, Homo sapiens
ctagtgctcgtcgccgtggcgccatgggtgttgtccgcagccgcagattacacagatgaatcttgcactttcaa

SEQ ID NO: 559404 - DNA, 74 bp, Homo sapiens
ctactttggacttttgtttcaggaaagccctgagcagaaatttccaaggcaggaaaggtaaagagacaaagaaa

SEQ ID NO: 559405 - DNA, 75 bp, Homo sapiens
cgcgggaagcgcagcagtgcctccaagggttcttaaagcagagataaacaggggtcacatgacgacagaagccaa

SEQ ID NO: 559406 - DNA, 98 bp, Homo sapiens
cctggggaacctgctcaaagccctgggtcgcttggaagaagccaaggcaccccctgtaatggcctatcctgctactacaccaacaggcatgataggat

SEQ ID NO: 559407 - DNA, 100 bp, Homo sapiens
gcagctggagcgccgacgtccccgaggatacacagtgctgaggcagaacgcagaaattccgggtagatatgcctggctcaggcagtgcattcatccccac

SEQ ID NO: 559408 - DNA, 100 bp, Homo sapiens
ttcggccttggtcccagcgccttcccacggagcagcactcttcaccctgcacagccttgttagatgcagaatgtcatgtatgacttaatcacagaactca

SEQ ID NO: 559409 - DNA, 82 bp, Homo sapiens
cctgtcccatcgcaaacccaaagatccccgttcctggagattctgattgaggccagcatccttcagaaaaagcatccccgag

SEQ ID NO: 559410 - DNA, 100 bp, Homo sapiens
cggagacccccgcttccagtgcaggagcaatttacagcaatgagggatttatacatgaaaaatggacaaggatttgcattagtttattccatcacagcac

SEQ ID NO: 559411 - DNA, 74 bp, Homo sapiens
tggttcggaaaggcattcaggaagctcaagtggagctgcagaaggcttttatcttgagaacatggtgtctggag

SEQ ID NO: 559412 - DNA, 93 bp, Homo sapiens
gacgtccctcaaaccttgcttctaggagataaaaagtcttgctatgttgctcaggctggtcttgaacccctgagctcaagtgatccaccggcc

SEQ ID NO: 559413 - DNA, 50 bp, Homo sapiens
gcgctgttcaaacccatgaaggcccagtgttcaccatcataccaggggcc

SEQ ID NO: 559414 - DNA, 96 bp, Homo sapiens
cttccagctggacccccacacgaaggcctgcaaggctgtggagcacgaacttccaggagccggtgcagccgctgacacagcagcaggtggcgcaga

SEQ ID NO: 559415 - DNA, 100 bp, Homo sapiens
gtggcccgggcggctgggagaagcggagtgttgtgccggtggtggtgtgcacattgagccccggtatagacagttcccccagctgaccagatcccaggtg

SEQ ID NO: 559416 - DNA, 96 bp, Homo sapiens
tggcatatcagatatgcaagtctgtgaattctctagaggacaaaatcccagtccttggcacaaactcaggaaatggaagccggagtctgttttttg

SEQ ID NO: 559417 - DNA, 75 bp, Homo sapiens
cggcgctccgtgcgcggagccgtctgcctgcatctgctgctgaccctcgtgatacacaatcatcatcttactagt

SEQ ID NO: 559418 - DNA, 100 bp, Homo sapiens
actgaagatattggaaaccctaaaacttctcatgcaacatacttggcccagtgctgtccccggcataggtccatctctgcagaagccatttcaggagtac

SEQ ID NO: 559419 - DNA, 82 bp, Homo sapiens
gcctcaacatcttcaggtgatgatcaaccttctgcgttgcgaagacagaatcaagctgactgaaactgttgaggagcccatg

SEQ ID NO: 559420 - DNA, 74 bp, Homo sapiens
ccgaccctcagcatcctcctcagaaaggctggtggcatcagggaccattgttgtggaaggccatgaattgcacg

SEQ ID NO: 559421 - DNA, 114 bp, Homo sapiens
cagggcagcatctctggtgcatgctgatgacgaaaaacgttcttgatcaatatgaacgagaaggatttaacttcctagccaaggtgtttaattcttcacattccttcttagaag

SEQ ID NO: 559422 - DNA, 98 bp, Homo sapiens
ctgcattccactcacgtggcgctgcgacggccacccagactgtcccgactccagcgacgagctcggctgtgggcaaaataacatggcagccagacgaa

SEQ ID NO: 559423 - DNA, 100 bp, Homo sapiens
accccctggatcccagctttgtggctgccgtcatcaccatcaccttcaatccgctctactggaatgtggtctcctttacagaaaggggcttggataagga

SEQ ID NO: 559424 - DNA, 99 bp, Homo sapiens
aaggcctgggcctgagaactgaatcagggaagaaggagaaagggccaacccctgaagaagcaatacagaaactgaaggagacagagaagatactgatca

SEQ ID NO: 559425 - DNA, 74 bp, Homo sapiens
tctggcctcccacggatatgttgaagtaacaagcttgcctagagcatgctcgaagacgaccttcagctcagtga

SEQ ID NO: 559426 - DNA, 50 bp, Homo sapiens
ccccgttcctggagattctgattgaggcatcctctggtatcacgattcca

SEQ ID NO: 559427 - DNA, 96 bp, Homo sapiens
gaccagaccatgttagataaacttgtggatggacttgctacctcttgggtgaactctagcaattacaaggatgacccctccggcgaaggtgtcctg

SEQ ID NO: 559428 - DNA, 96 bp, Homo sapiens
gagtttgaccatgagcagtcccgacgcagcaaaggcaaacttggaaagagcaagatcggcagccctaaaggtggaataattaatgatagttctgaa

SEQ ID NO: 559429 - DNA, 50 bp, Homo sapiens
gccgaccggcgccgggagatcctgggttatgaagacagtatggagtttcc

SEQ ID NO: 559430 - DNA, 100 bp, Homo sapiens
gcagattctacaacacatggtggaatgtatccgggaggtcaacgaggtcatccagtgcctatgttgaaaaatatctactggagaagtccagactcgttta

SEQ ID NO: 559431 - DNA, 75 bp, Homo sapiens
gaaaatcaacgacaacttgagcacagggttctatggcctggatgagtctgacctcgacaaggtcttccacttgcc

SEQ ID NO: 559432 - DNA, 100 bp, Homo sapiens
gccgagcaggaggcgccatcatggtacaggtttgcagattccgccagcagcacagcaagctctacagatgagtggctctttggcatttggtgctgtggca

SEQ ID NO: 559433 - DNA, 100 bp, Homo sapiens
tgcaatggcccccaagggcatcttctgtaacccgtacaacaatctgatcttcatctggggcaacttcctcctgcagagagtctcgctctgtcacccaggc

SEQ ID NO: 559434 - DNA, 50 bp, Homo sapiens
cctggggctgggctacttcgcgagcttaaagcagcgcctgggtaagagta

SEQ ID NO: 559435 - DNA, 90 bp, Homo sapiens
gcgaggggcgcgcggagatggcagcgtccagcaactccagcctgtccggctcgtcggtgtcctccgctgccttcctatttcaaggaaaga

SEQ ID NO: 559436 - DNA, 75 bp, Homo sapiens
gaacgaacatcttctggacctttgtccagtgaacaaggggagaagaattgccttcagctccacgtcgttactgaa

SEQ ID NO: 559437 - DNA, 101 bp, Homo sapiens
ccactgtggtctgttgtaccccactgctggggtggtggttccaatgagacagggcacaccaaactccatctgactcagcccacctgcacccaggtgaaata

SEQ ID NO: 559438 - DNA, 74 bp, Homo sapiens
agcatcctttagaagaatccaggaccgtgtgtatgtacaacaaaataatgtggagaacgtctacaatttgggat

SEQ ID NO: 559439 - DNA, 100 bp, Homo sapiens
taaagacgtacgaagccgtcgccaagagatgacctggcttccaccactttctgctattcaagcacctggcaaagtggaaccaaccaaatttccatttcca

SEQ ID NO: 559440 - DNA, 75 bp, Homo sapiens
ctcccgagtggctgggattacaggtcatctcgatgcactcctgaggggcttggttctgggaaaactaggaaaagc

SEQ ID NO: 559441 - DNA, 100 bp, Homo sapiens
gaagttcaagctctacctgaccatcatcctgctcctgggtgccgtggcatgtcgatttgtccttcactacagttgtggccccatcaaagtgaaaactgaa

SEQ ID NO: 559442 - DNA, 82 bp, Homo sapiens
tcatcacagacaacagcctggtggcagcgacttcccaagtaagaagcggaagaggagccgctggaaccaagacacaatggaa

SEQ ID NO: 559443 - DNA, 75 bp, Homo sapiens
acctgaggttcagattaagaaatctgccccaaagtcttagaactgggccatgaagcccccaggaggagaatcgag

SEQ ID NO: 559444 - DNA, 89 bp, Homo sapiens
gtgagacatgtctgagactcctgctcagtgtagcattaagtaatgctacagccctttgactatgatccgaatgaaaagagtaaacacaa

SEQ ID NO: 559445 - DNA, 100 bp, Homo sapiens
ggaagctgttgcagagtgcctaaaccataacctcacaatcttctttgatgtcaaaggccatgcacacaaggacttcaactaaccaactaaagaactgttc

SEQ ID NO: 559446 - DNA, 100 bp, Homo sapiens
ttgtcctgcagctgatggctgttctgtgcgagagaatgtctgagcagatattcacaaacgtcactcagcagtgacagtgacagtgaaggggataatccgg

SEQ ID NO: 559447 - DNA, 75 bp, Homo sapiens
gagcgccgcggacgcgtcatcgagtgtgacgtggtgaaagagaggaagcagtgcattggtgaaggcaacgttagg

SEQ ID NO: 559448 - DNA, 87 bp, Homo sapiens
atgatggcgccactgccttggcagaagcttttaggatggaattgtcagccacttgaagaagcaggcaggaccagcttcagtgcctct

SEQ ID NO: 559449 - DNA, 75 bp, Homo sapiens
ccagagccaaggtccagggggcaaggtcgtggatccagccgcagaagccaggatgaaggtagcctgcatcacaga

SEQ ID NO: 559450 - DNA, 100 bp, Homo sapiens
gcgccttcctcaacgacgcggacatggtcatgagctttgtgaacctgggaaatctggcattttttaaagtttgcgccccacaaagaggaaatattccaaa

SEQ ID NO: 559451 - DNA, 87 bp, Homo sapiens
tggactcacggctgcttggagcgtccgccatgaggagaaggtgctgtccttattcccagcccagtcaagagctaccggggctggcta

SEQ ID NO: 559452 - DNA, 100 bp, Homo sapiens
tcggagcgcgacacggagactaggtggcaggcttctccagggaaagtgaccgaggcagtgaaagaggccattgacgcagggtaccggcacttcgactgtg

SEQ ID NO: 559453 - DNA, 95 bp, Homo sapiens
cgtcatcatgctgaccaccaatcagatccgtaagtatccatatattcctgcacatattacaaagcctaaggaacataagaagttgtttctggttc

SEQ ID NO: 559454 - DNA, 87 bp, Homo sapiens
caaggttctggacaagatgaagtctttctgccagactgtggcacgtttcaggcaggattcctccttcattcaaactgcatcacccag

SEQ ID NO: 559455 - DNA, 75 bp, Homo sapiens
ctaaatgcagattccagaaaaattacagcacatctcagtgaatttgcaagtggctgtgggtcatcttattgctgc

SEQ ID NO: 559456 - DNA, 50 bp, Homo sapiens
atgtggtcttcaaaagagcagaagagatggcattggagtcaagagagatt

SEQ ID NO: 559457 - DNA, 82 bp, Homo sapiens
ttgctagaatggcccaatatagctttgacaagtcacggtctagatcacattctcgatccagaggaaggcgatactctcgctc

SEQ ID NO: 559458 - DNA, 100 bp, Homo sapiens
gtccgagacgcagctgccgcgccggggcctgagctgccgcctcctccgccgcccgaaaacccggagtgccccgcacagttggattggatgctgctggcaa

SEQ ID NO: 559459 - DNA, 100 bp, Homo sapiens
tcaaagacagctttcacagtttgcgggactcagtcccatcactccaaggagagaagaatcccaaggactgcagcaaagccaaaaagctggtgtgtaatat

SEQ ID NO: 559460 - DNA, 94 bp, Homo sapiens
aaacaagacagttctgtctgcagaagcccattatggctgtaactggagatgacacagtgatcagggccaaagcggtcagtgagaaggaagtgga

SEQ ID NO: 559461 - DNA, 100 bp, Homo sapiens
cctgctgcctctccagttggctttggaatccaagaatgtgaagctggcccaacatgctttggcagggatgcaggtgtaaaatactagacagacatctggc

SEQ ID NO: 559462 - DNA, 99 bp, Homo sapiens
gccgggtcatgttaattgggaaaaaggccaaatttgagtttcatcatggtgactatgaaaaacagtttctgcatgtactgagccgcaaggacaagactg

SEQ ID NO: 559463 - DNA, 100 bp, Homo sapiens
gggagtcaccactggacctccaaggaagccacgtgcagacatctacaaccttcgatctcctgacgagtctctgctgctgatgaagctgtgaccaaacgca

SEQ ID NO: 559464 - DNA, 127 bp, Homo sapiens
tgaaaatccaacccaccaccccatcagagccaacagcaattaaaagtcagttaaaaatttgtaagcagatttctgctcatggcagatcttcttccaatgtaaacggtggacctgagcttgaccgttg

SEQ ID NO: 559465 - DNA, 75 bp, Homo sapiens
gaggccgtggatgcaggcattaagcattggggagaatcttcaactgctggtggaccggcccgatggcacctactg

SEQ ID NO: 559466 - DNA, 100 bp, Homo sapiens
cagaagatccagctttgttgaaaagcgaagccgttagtcccttaatacaaaggcctgtcagagttgttcagtataatatcaatacagaagaattatattc

SEQ ID NO: 559467 - DNA, 98 bp, Homo sapiens
ggacgaggccgccctcagttgctgctccgacgcggaccccagtaccaaggagttcatccgtctgggcagcctcagcaagctctcggggaaggggctcc

SEQ ID NO: 559468 - DNA, 87 bp, Homo sapiens
tcccatctcccatgatgtatgctggaccaactgagtatgaagtgtaacagaacagactttaccacctgaaactgctgcttcaagttc

SEQ ID NO: 559469 - DNA, 75 bp, Homo sapiens
aaaagtgactcagctgcctgcaagacaaaggtagctggatccgtagagacagaatgttgctgcgggatgtaaaag

SEQ ID NO: 559470 - DNA, 82 bp, Homo sapiens
aactgagacccaagcagctcagtaaagtgcttcttaacctaccagtcctgccagagtttgatatatagaaggtgtttgctcc

SEQ ID NO: 559471 - DNA, 102 bp, Homo sapiens
ggcgcgggggcggcgtgtcaggtggttgcggagctgggagtgcatccgccccaacccttttccccctcgtctcctgtgagaattccccgtcggatacgagca

SEQ ID NO: 559472 - DNA, 73 bp, Homo sapiens
gatgagctgtggcttgtcatgaagctgctaagtggaggaaactatggtccaggaggcagtggaggaagtgggg

SEQ ID NO: 559473 - DNA, 100 bp, Homo sapiens
ccatgccgcagtaggacagcaggcccaagtctgcacatcccagggtttgaacatcctcatccctgtgttagaccggatccgatatgtgcagagtctcaag

SEQ ID NO: 559474 - DNA, 75 bp, Homo sapiens
ccctttgcaggatgcagaagaagccaaaaacattctggacctgcctagagctggaacgttacctccagagcgagc

SEQ ID NO: 559475 - DNA, 97 bp, Homo sapiens
cagatgcgattttagtggaggactacagagccggtgatatgatctgtcctgaatgtggcttggttgtagataaaggctggtggtgggagaatgctat

SEQ ID NO: 559476 - DNA, 98 bp, Homo sapiens
cacttcatcaagataactctgggagaagcagaaaaccctgtgccagggacaggaaagataggatctgagaataaaggattagaaactaccaagaacaa

SEQ ID NO: 559477 - DNA, 51 bp, Homo sapiens
gatgactaccgagactatgacagtccagagttgctgatgattcctctgatc

SEQ ID NO: 559478 - DNA, 98 bp, Homo sapiens
ttggcggaaggacccgagacgtgaaaaaaacaggcgtattctggtaatttcgaggaggaggaacagcacagcatgctgggctctggatttaaagctga

SEQ ID NO: 559479 - DNA, 90 bp, Homo sapiens
cgcctgccctcagccgcccgctggccgggagcggagcccctgtggtggcctggtttgctttcgaccctggctcggcgcactcggacatca

SEQ ID NO: 559480 - DNA, 50 bp, Homo sapiens
cgtgtacgtgcctgtgcctaaagagtctgatgatgaagaaaattttattg

SEQ ID NO: 559481 - DNA, 75 bp, Homo sapiens
gctgactgtctgacaaattgttatcaggtcttcttaattatacatcatgcaccgctggtgaactcgttagctgaa

SEQ ID NO: 559482 - DNA, 80 bp, Homo sapiens
tcgccctggccgacaagcacgcaagcgatcagtgggtgaccgcggctgcgagggactttgtcatccgtcctccaggatct

SEQ ID NO: 559483 - DNA, 49 bp, Homo sapiens
agtcagaaccctccgcagagtaaaggaagctgagctggaacgcctggaa

SEQ ID NO: 559484 - DNA, 95 bp, Homo sapiens
tccatttgctaaaggaatagtgtttgattttgtggaagtataatactttgtcattatgagatgtcgtctctcggtgcctcctttgtgcaaattaa

SEQ ID NO: 559485 - DNA, 80 bp, Homo sapiens
gtcgagaaatgacagatgtgatcattgagaccatgaagtccaacccaggcaagttaggaaatcaacattgaatcccaatg

SEQ ID NO: 559486 - DNA, 90 bp, Homo sapiens
gcgattatggacccggccgaggcggtgctgcaagagaaggcactcaagtttatgattgagaggatccagaatccagatctctggaatagc

SEQ ID NO: 559487 - DNA, 100 bp, Homo sapiens
ggtaaactcagaccacattatccactggttgataggtcaggaaatgttcatcaccagtttcaaaagcttctgactgaattcaacaaatccactgatgcat

SEQ ID NO: 559488 - DNA, 51 bp, Homo sapiens
gcccgcgccggaagagccacgccggtcttcgccttgatcgtgttctcctgc

SEQ ID NO: 559489 - DNA, 100 bp, Homo sapiens
aaaatcgtggcctccatgtgggacagcctgggagaggaacagaagcagaacaaaggaagtttactgttcattctcctgatgcttcatctggaacaaattc

SEQ ID NO: 559490 - DNA, 82 bp, Homo sapiens
ccgcgggccagcgcaccggtcccccagcggcagccgagcccgcccgcgcgccgactcggtgaaatacctggagtgctcagct

SEQ ID NO: 559491 - DNA, 75 bp, Homo sapiens
cagcgattgcttcagcccaagttactgaaggaactgggaacagccaggtgccccaaagcaaatacgcggagctgc

SEQ ID NO: 559492 - DNA, 71 bp, Homo sapiens
agcactgggtgaaggacctgggcagcctcaatggggccctcctcagtggggacacacagacagacgccacc

SEQ ID NO: 559493 - DNA, 83 bp, Homo sapiens
ttgggcgcgcagatacccgcggtgcaccgcctgctgggagcgccgctcaaggtcaaaatgcagatcttcgtgaaaacccttac

SEQ ID NO: 559494 - DNA, 50 bp, Homo sapiens
gctccgtgtttctggaaagtgacagcaggaggccactgtctgcagctccc

SEQ ID NO: 559495 - DNA, 100 bp, Homo sapiens
gttgtctacaagagatcagctgtagaacaggctcccatagacatgtccaaagacttccactacagagtcgatgctccgagggagaggagcttgttacaaa

SEQ ID NO: 559496 - DNA, 98 bp, Homo sapiens
ctaaaccacaaatatacaacaaggccattttctcaaacgagagtcagcctttaacgagattgccttgcaacaggtttccatgttcttccgatcagaac

SEQ ID NO: 559497 - DNA, 100 bp, Homo sapiens
gcgcatgtggagttcggaggaaaagggctcagataaacaggggtcacatgacgacagaagccaagagggctgcaaagatggaaaagaagatgaaaatttt

SEQ ID NO: 559498 - DNA, 75 bp, Homo sapiens
aagctgcaccagcttctaaccgaggattttatattggaagacatggatcttgctgccaacgagatcagcatttat

SEQ ID NO: 559499 - DNA, 51 bp, Homo sapiens
aaggagacgctgcagcgcacggaccccccaaagacacacgtgacccaccac

SEQ ID NO: 559500 - DNA, 99 bp, Homo sapiens
cttaaggaacttacgcacttaaaataattgggcagaagagaagcagtgaaggagtgcagaggcatcacctgaaagggggtggcccgattctacaggtca

SEQ ID NO: 559501 - DNA, 51 bp, Homo sapiens
cccttctccacttgaccaggctggtggatccataaagaacccagccaaccc

SEQ ID NO: 559502 - DNA, 100 bp, Homo sapiens
attacctgcacgacacatggaaattggactaaattaccagaatgcaggggctcatcatatgcccgaagctcagtggttacggctgtgaaatttacaattt

SEQ ID NO: 559503 - DNA, 82 bp, Homo sapiens
aacaagacagttctgtctgcagaagcccattatggctgtaactggagatgacacagggggatatgagactttctactcggaa

SEQ ID NO: 559504 - DNA, 121 bp, Homo sapiens
ctaactgtatcgtgcacagcactgacaagggccccaacagtgcattagtgcagcagcttatcaaaggccagaagcggactcctagaagaggggagcagcaaggatggaatgacagccgtgg

SEQ ID NO: 559505 - DNA, 100 bp, Homo sapiens
catgtctgcgagccaggattcccgcgtgagtgcatctccatccacgttggccaggctggtgtccagattggcaatgcctgctgggagctctactgcctgg

SEQ ID NO: 559506 - DNA, 73 bp, Homo sapiens
agctgcagaaccaacgaggtggccgaatcttccttcaggatatcaaggaatacggttggacagaatgaactga

SEQ ID NO: 559507 - DNA, 100 bp, Homo sapiens
aagtaccttcgccggtcaccggctcctgcagggtgctggagaatctggtaaaagcaccattgtgaagcagatgaggatcctgcatgttaatgggtttaat

SEQ ID NO: 559508 - DNA, 83 bp, Homo sapiens
gcatcatctgaggacggctcaggagcatgacaagcgagaccctgtggtggcttattactgaacgaatgcaggaatttgggaac

SEQ ID NO: 559509 - DNA, 101 bp, Homo sapiens
atttggattattttagaaacaaatttggaaagaaaaagaatggcgtccgtttcagatcccagacattgaccctaatgccaagctgctccagccacctgcac

SEQ ID NO: 559510 - DNA, 82 bp, Homo sapiens
caacagccagtggagactggaacacaaccatagcctgtttcgtagccatattaattcggagctggagtttgttcagatcatc

SEQ ID NO: 559511 - DNA, 90 bp, Homo sapiens
gcggctttatcagtttgacttcatgggcctcagaaacaccacagaaatcgtgacaacgtctgcaggtattgaagcccctgggtgataatt

SEQ ID NO: 559512 - DNA, 80 bp, Homo sapiens
gttcgcggtgacggtggcgccgcccggggcgaggcagggccagcagcaggcgggaggttttaaaatcaaagatgggaaaa

SEQ ID NO: 559513 - DNA, 83 bp, Homo sapiens
ctcagaccggtctctgcaagacttaaagcttttcaagccaggccaagaagctgtgaagtaccagggtcctcgggacttccaga

SEQ ID NO: 559514 - DNA, 100 bp, Homo sapiens
gcaccaccatggagggcctggccaaactgaagcctgccttcaagaaagatggttctaccacagctgctagctgacgtggtggacagtgaggcgctgcagg

SEQ ID NO: 559515 - DNA, 82 bp, Homo sapiens
cccgtgtttgctgcggcaaggacgagccggggcgctgaagataacgaaggaggcccaacttcattcaataaggagcctgacg

SEQ ID NO: 559516 - DNA, 50 bp, Homo sapiens
ggtcaaagcctgcatcaggaaggctgtggacatactcaagacagagcggc

SEQ ID NO: 559517 - DNA, 100 bp, Homo sapiens
cagcatcccagccgtgctcacgggctccacgtgttccccacgtttgtggcgtacgagctcacggtgctggtgttcctcaccttgtcagtggtggtgatga

SEQ ID NO: 559518 - DNA, 75 bp, Homo sapiens
cggaagcctgcgtaactttctcccttgatccgggagtctttccactgggggtggcactgaatcaacaagacaagc

SEQ ID NO: 559519 - DNA, 74 bp, Homo sapiens
gtgtggctacatgacactcttattgaaacaacagactatgctgggcttattgtatgacgattactactattatg

SEQ ID NO: 559520 - DNA, 100 bp, Homo sapiens
cgtgtcttcctaaaagaaggttttattgggaggtaaaggtcaatgcgtaggggtagagtaaggttttcagtgaagtatgccttttcaatttggaacccag

SEQ ID NO: 559521 - DNA, 87 bp, Homo sapiens
ggaggggagggggcgttagccccgcgcagccgccggcgtcgccgccatggacctaggagagtagttatcttgatggaattagaagtt

SEQ ID NO: 559522 - DNA, 101 bp, Homo sapiens
agtccggggcagccttctttcctgcaaccacgggaacttcgagagaaggtccttctccagcccactgaggactgtgttttcaccgcactgggcatcaacag

SEQ ID NO: 559523 - DNA, 100 bp, Homo sapiens
aatatgaccgagccacactgagcctgaaggattggccatttgatgatggagctccaccccctaatcagatagtagatgattggttaaacctgttaaaaac

SEQ ID NO: 559524 - DNA, 95 bp, Homo sapiens
gcgaccgtctggatccccgcccaggaagcccctctgaagcctcctcgccgccgtttctgagaaggctgttcggctcttgaatcccagcgatgaaa

SEQ ID NO: 559525 - DNA, 74 bp, Homo sapiens
gccatggccttctacgttgtgaaaatggatgacttgaaagtagggcatccttcacccatctgaagggaggaaat

SEQ ID NO: 559526 - DNA, 80 bp, Homo sapiens
attcagagatctttctcttctccagaaaattttcagagacaagcagtggtcgtggagggcccccaagacccaacagaggg

SEQ ID NO: 559527 - DNA, 100 bp, Homo sapiens
cctgaatgaactaaagcctttagtgcattctcctcatgctattgtgtgatgactatgactccaagaaacgcaaacagcgggctggtggagagccctgggg

SEQ ID NO: 559528 - DNA, 51 bp, Homo sapiens
gccgagctgaggcggtcgcggccatgaaggagtgcctgtgaagaaaacggg

SEQ ID NO: 559529 - DNA, 80 bp, Homo sapiens
gataaagtgattttttgcctttgttgattaactggacaaattcaggatatccgacatgaagccagtgacttcccatgtag

SEQ ID NO: 559530 - DNA, 75 bp, Homo sapiens
gaaagagtaattcacgcagagccggctttgcagacaggggcaagtgtccgagtggtgaatcagctacttacagag

SEQ ID NO: 559531 - DNA, 80 bp, Homo sapiens
tgagcatttcctcctgacggctgtacttgagcagtcacctggcacaggttttgctgttactgctcagtgtagtcacacct

SEQ ID NO: 559532 - DNA, 119 bp, Homo sapiens
ttcctccatcatccccaccttccaccggaggtgctactggctccttcagatccgcaaggatgctctccgggcgctcaactttgcgtacacggtgagcacacagcgatctaccatctttc

SEQ ID NO: 559533 - DNA, 75 bp, Homo sapiens
tcttgcctgtgtcccacttgttcgcggcctataggacctccgggagaagaactggaaggccatggaggcactggc

SEQ ID NO: 559534 - DNA, 100 bp, Homo sapiens
cgacccttaccctcagcgagagaagtaaccgagatacaactcgtcaacgaatcaaattcagtgatgacagagtatgcaagagtcaccttctcaactgttg

SEQ ID NO: 559535 - DNA, 95 bp, Homo sapiens
gacaagccgctggcagccgcggatctcaccgccgctcaggaccccaggcaggcacagtcttccccgccgtggtcctatgaccagtcttacccctc

SEQ ID NO: 559536 - DNA, 100 bp, Homo sapiens
ttcgcagtggtcgcttcttctccttgcgttttgctgctgacatcatctccgttttggccatgaccatgagtggggagcgtgagtgcctcaagtatcggct

SEQ ID NO: 559537 - DNA, 100 bp, Homo sapiens
aagcattagtgcttcaattaatccagaagatagtactttccctgtgctcttaaagttccgtacagataaaggaagagatcccagttctgatacatatgag

SEQ ID NO: 559538 - DNA, 97 bp, Homo sapiens
ctctcatctacaccttgcagaataacctccagtatgttgccatctctaacctaccagctgccactttccaggaacgccagcgcctggagaccatcct

SEQ ID NO: 559539 - DNA, 75 bp, Homo sapiens
acttgagcctgcagtgtgctgtgagagatctaccactaggtgtgagttcttgatacgaatgaaaggccaagagtt

SEQ ID NO: 559540 - DNA, 75 bp, Homo sapiens
cttcgaggtggagtcggagctgggacgtattctaccttgtaaatactgttatttgtatatactgtaaatgatgac

SEQ ID NO: 559541 - DNA, 75 bp, Homo sapiens
caggacagctgttccttggccatcccaaagctattctgggggcaacagagcttcataaacaagcagatatgcaag

SEQ ID NO: 559542 - DNA, 100 bp, Homo sapiens
gccctgttccccgcgctgcggcctggcggcttccaggcgcactaccgcgagcgcatcagcgaggaggtggggctgctgcagctccttggggaccccccgc

SEQ ID NO: 559543 - DNA, 96 bp, Homo sapiens
cggggaaccaacgatggcacgaacattgatttgaggaggatgcttcgcagtttacgaaggcgccctgcgtccggcagaggaggcgagcatcccgct

SEQ ID NO: 559544 - DNA, 82 bp, Homo sapiens
gccacaaaggagagctccgtggagagaagtgctgctcacggccgtgaactgctacagcgtgaaggccgccacccgggtccag

SEQ ID NO: 559545 - DNA, 82 bp, Homo sapiens
ggggattcgcagggaggatgtcgggacaccccggaagctgggaaatgatctggtggctggacccagagctgacctatggctg

SEQ ID NO: 559546 - DNA, 100 bp, Homo sapiens
cagccttctgagccttcctcatctgatgcctgttaggctccctttgctgctgaggtcctgggtgccatcccagcacttgccccggaagacccaggtgtcg

SEQ ID NO: 559547 - DNA, 75 bp, Homo sapiens
ccaggcaaggattccggagagaggatcaggtgttttcaggttaaccgtcaggtaaatcaacagactgggaagatg

SEQ ID NO: 559548 - DNA, 98 bp, Homo sapiens
gaaacagcaagcaaatcatttggttttggcagcttgccaatgcaacggccacagtaaatgcatcaatcagagcatctgtgagaagtgtgagaacctga

SEQ ID NO: 559549 - DNA, 90 bp, Homo sapiens
agccctgttaaaggatggctttggctttgcagacagcacagtcttacagatcacagattctgctggccatattctctactccaaagagga

SEQ ID NO: 559550 - DNA, 51 bp, Homo sapiens
aaagatctttcggaatgaccggactcctagaagtaccccaccccacccctg

SEQ ID NO: 559551 - DNA, 75 bp, Homo sapiens
ttcccaggctgtcatataactcctgagaatagtggttcttaactctgcatttagtaagaagaagattgatgacag

SEQ ID NO: 559552 - DNA, 75 bp, Homo sapiens
aaaaaggagcttgccttctgagctttgtaccaaagacctgggaaaaagtttcattccagggctttatattacaag

SEQ ID NO: 559553 - DNA, 82 bp, Homo sapiens
gtggctactctgcctcggggacgaaagcagatgggacctgcaaaggataaactggtcattggacggatctttcatattgtgg

SEQ ID NO: 559554 - DNA, 98 bp, Homo sapiens
gacaattgctaggcggagacagtgcagggaagagagaccttagaaaggatcaggactggcggtgacgggtcagtcttacgagaatatggtaactgaga

SEQ ID NO: 559555 - DNA, 61 bp, Homo sapiens
gccgccatacgcgctctccctgtttagtgttctcaggcgctgtggtctcaccttccactgg

SEQ ID NO: 559556 - DNA, 75 bp, Homo sapiens
ccatcttcgaacttagacttccggaaggactttggcgagggattttttatcaagcagaaatgcatcgaacaacga

SEQ ID NO: 559557 - DNA, 100 bp, Homo sapiens
ggtttgctgagctggttggccctgtgatccctcaagactggtccacggagtgtatgaccacaaacagccatcaagtgcgtcagcatttatcccgtttgcc

SEQ ID NO: 559558 - DNA, 82 bp, Homo sapiens
tttagtgcactcttctccttcacagtaaagtggctgctgcagatctgggacacggccggccaggagcggttccgcaccatca

SEQ ID NO: 559559 - DNA, 75 bp, Homo sapiens
gaaagatgacaccacctttgatgagaaatggtggagtcaatgaagaaagtagcagggatggatgtggagctgaca

SEQ ID NO: 559560 - DNA, 87 bp, Homo sapiens
caggaggaggtggcggcggcgggaagatgtattgttgcagcatctggcagtgagactgaggatgaggacagcatggacattcccttg

SEQ ID NO: 559561 - DNA, 100 bp, Homo sapiens
ctcgtggtgcccgatccgcgccgaaaaggagcgcagctgcagcccgcagggcgccatcctcgtgctggggcgccttcagccgctgctacaagctgacaga

SEQ ID NO: 559562 - DNA, 104 bp, Homo sapiens
tgctcgcgctactctctctttctggcctggaggctatccagcctgagcgggctttggacaccatgaactttgatgtgattaagggaaagccaatccgcatcatg

SEQ ID NO: 559563 - DNA, 75 bp, Homo sapiens
atcgagactatcgctaatgagtatagcgaccgctgcacgccgagcagtgttgagtccttcagagaagagttatca

SEQ ID NO: 559564 - DNA, 75 bp, Homo sapiens
taggattgtagctttggatctgcgaagtcatggtctcacttgccctggaacctctgtcagaaacttacgacagct

SEQ ID NO: 559565 - DNA, 105 bp, Homo sapiens
gtgaatttaaaggagcagccctggtgtcacctatcagtaaaagtatcctaagaaatccggtaaccaataagaagcattacagattgtatgtgatttataaagttc

SEQ ID NO: 559566 - DNA, 93 bp, Homo sapiens
cagttggaagcagccgatccagcctgcggagcctgtggggcagatgacagtcatgtccctttccagggacctcaaggacgactttcacagtga

SEQ ID NO: 559567 - DNA, 75 bp, Homo sapiens
ctacagatgaattaagttcagctattggagtgaagaatatgttgcttaagtccaactgtgttttggaagcttttg

SEQ ID NO: 559568 - DNA, 82 bp, Homo sapiens
ccaaggctggctcctcaagaaagaagcctaagttcgaggcccaggcgcctccatcagcgccgcctgcgccccgggccgaggc

SEQ ID NO: 559569 - DNA, 51 bp, Homo sapiens
cagtaagagtgggctgtttgcacaataccaagtttccaggcccgaagagca

SEQ ID NO: 559570 - DNA, 74 bp, Homo sapiens
ttacaaagcatgggagtgcagctgcctgacaacaccgatcacagaccaacaaaagatgcgacccgattcaagca

SEQ ID NO: 559571 - DNA, 74 bp, Homo sapiens
cgccactgccgcaggaggcgtgaggatgtagctgagctgattcgggccagagcctgccagagggtggtggtcat

SEQ ID NO: 559572 - DNA, 83 bp, Homo sapiens
gatattaggaccacaagaagaaaagggaaagcagcatgttggccaggatatattgtgagaaagatcagtctaaagaaaaggag

SEQ ID NO: 559573 - DNA, 90 bp, Homo sapiens
cattcataggctatgtttgtaaatgtccccgaggatttaatgggattcactgtcagcacaatacactgcctctaggactgggacagatag

SEQ ID NO: 559574 - DNA, 83 bp, Homo sapiens
aagcactcgttccgggggtgaagcctcctgcgccggccttgcctcgggttcgatacaagaggctgttttcctagcgtggcttg

SEQ ID NO: 559575 - DNA, 51 bp, Homo sapiens
tgttgccaacaacggctcttctcaagctggagtgcggtggtgtgatctcgg

SEQ ID NO: 559576 - DNA, 51 bp, Homo sapiens
gcagcgtgcgttcagccctgggtggatgaggatcgcagtacggaacctgac

SEQ ID NO: 559577 - DNA, 100 bp, Homo sapiens
gatatcaccaaactggaggatgcctatgtattccctggggatggcgcatcacacaccaaagagccaatggccaaaggccctgccaagaattcagaaccag

SEQ ID NO: 559578 - DNA, 75 bp, Homo sapiens
aaagcagcgaacctcgagaccaacgtggaggagctgtgggtggaagcttcctgcctgacacagctcacttcaaga

SEQ ID NO: 559579 - DNA, 74 bp, Homo sapiens
gccttggggagaagaaactgaagatggaattatgcataataagggttatcagctctttgaagaagtcaaaagct

SEQ ID NO: 559580 - DNA, 96 bp, Homo sapiens
tctggagagtcaccgcggcggcgccgggtggtggttaaaccatgttaaggaggattttacagagggtctatcatatgcaagtcacacggttggttt

SEQ ID NO: 559581 - DNA, 75 bp, Homo sapiens
gttttctctcacccatccatgggaagccctgctactgctggattagcgccagatcgatctggaatagaaaacgtc

SEQ ID NO: 559582 - DNA, 101 bp, Homo sapiens
gaggagaggggtcctgaggagaactatagcagtgggctaccttgagaatggagcgaggagccaaggagaagaaccaccagctttacaagccctacaccaac

SEQ ID NO: 559583 - DNA, 75 bp, Homo sapiens
ctggaaatccggcggcgccagccactcggagctaatccacaatctccgcagtaccaggatcatctatgaccggaa

SEQ ID NO: 559584 - DNA, 89 bp, Homo sapiens
caggctgcaggaagaagaagggacacctttcacagctatcagggaagaatgtgaaagatgttgcagaagtgttccagaagtggctgaag

SEQ ID NO: 559585 - DNA, 76 bp, Homo sapiens
gggaaaagattgcccacgaattgggtcgatctgtgacagatcagctgtttaaggaagacagagcaggcattggata

SEQ ID NO: 559586 - DNA, 74 bp, Homo sapiens
gctggttcctgggaggccagttaaatgtctctgatgtgaagttcatttccaatccgccctccatggtggcagcg

SEQ ID NO: 559587 - DNA, 99 bp, Homo sapiens
cggagtatctggaaagctcgggacaggatgcatgtgatagtgatggaagatatgctgaaagactttctccttggagaacacttattattggttggcaac

SEQ ID NO: 559588 - DNA, 74 bp, Homo sapiens
agaaaatgaaaggagagcaagaatctcataggtgcataaggcaaatccaatacgcaagtaccagggtctggaga

SEQ ID NO: 559589 - DNA, 50 bp, Homo sapiens
aaagtttgatgagcagagaactgctactggcggcgactggcggcgcgatg

SEQ ID NO: 559590 - DNA, 90 bp, Homo sapiens
agccattaaaatgaaacaaccttgccaggcaaaggcagctcgagcatctcatctgacgtgagttcaagtacagatcacacgcccactaaa

SEQ ID NO: 559591 - DNA, 90 bp, Homo sapiens
gagaactatagcaatctggttttcttggtaccaaatatgccccaacagcggcaagaccagcatcatcagagtgccatgatgcacccagcg

SEQ ID NO: 559592 - DNA, 98 bp, Homo sapiens
tgggcgcggaggcgaccgccatggcgttcctcaaactccgtgaccagggctggctctcgctcgccaaggctcgctacgcgatgggcgccaagtcggta

SEQ ID NO: 559593 - DNA, 100 bp, Homo sapiens
cttatgcaaacggtgaccctcatgttggacatgctttaaataaggttattgacccagtggctccacgatatgttgcattactgaagaaagaagtgatccc

SEQ ID NO: 559594 - DNA, 100 bp, Homo sapiens
tttccaggggctgcagagcatggactgttaaatcttgcacttcttctgagtgagtaccaaaagaattggtggagctccatttgaagctgatgaggaaaat

SEQ ID NO: 559595 - DNA, 101 bp, Homo sapiens
ggagctggcggcgacggccacaggggcggcgacggcgcagtgcgaagcgaaacagataaaatcagtggttctggaagtaactctgatatgatggaaaacag

SEQ ID NO: 559596 - DNA, 100 bp, Homo sapiens
tggctggagacatgagcaagaaaagcctctgggagcagaagggaggctccaagacctcatcaacaattaagggattaatgaaaatcaagttccatcctca

SEQ ID NO: 559597 - DNA, 78 bp, Homo sapiens
gcagatcagaggtagtcggacctttcccgctggcgcgcagcctcagctaggatgtacagttacccagcacgtgtacct

SEQ ID NO: 559598 - DNA, 83 bp, Homo sapiens
ggaaaatgcgctcgggctggaccagcaggaagacctccgtgtggatggccgtggctgtgaggactaccgatgtgtcgaagtgg

SEQ ID NO: 559599 - DNA, 121 bp, Homo sapiens
aagatgcagttttttgatgctgaggagctcctggtcgatgaagaggatgatgtttttggtgaaggttgcaaaagcttctcatttcagagagatgccaggatcctaagtgcctgccaaactt

SEQ ID NO: 559600 - DNA, 50 bp, Homo sapiens
cttctgtcacatcacacccaatgggtcagattttggcaaattttaaagcc

SEQ ID NO: 559601 - DNA, 95 bp, Homo sapiens
ggcggacgggccggagggaggatgttaaagccccgcgattttgtggaagtataatactttgtcattatgagatgtcgtctctcggtgcctccttt

SEQ ID NO: 559602 - DNA, 100 bp, Homo sapiens
gagaagtctggaatccgctgaagtagaccaaagctagggctcactaacaagttgcagaagtggttctcaccattcaggaagcccttcagctcactgttca

SEQ ID NO: 559603 - DNA, 75 bp, Homo sapiens
agaggcttgaagtgtggggagaacttggtgaagcggctcagccccagggcagcacatcagagacaccatggaaca

SEQ ID NO: 559604 - DNA, 83 bp, Homo sapiens
ctgggatccccgccgctctgtctacaacccgaggtttccagccaatggattctggtcaactggtggagattggctgacaccct

SEQ ID NO: 559605 - DNA, 83 bp, Homo sapiens
cccgccaccctgcgctgccgccgctctgaggagttaaagattggcggcagtaagcacacaatgaatgatcacctgcatgtcgg

SEQ ID NO: 559606 - DNA, 74 bp, Homo sapiens
gaggttcctgtgcaactcttcacaggaacttagtgatttggcccgtgaccctccagcacaatgttctgcaggtc

SEQ ID NO: 559607 - DNA, 96 bp, Homo sapiens
agtaataagatcgctagggggcccgtgcccagcccacccacgcacaatctcagtcctcgcaatacccacaagggtttggaaatcccttgtctccag

SEQ ID NO: 559608 - DNA, 82 bp, Homo sapiens
gttcacacgacgcgctgctgccgcgattacccggttccagggtctccctccactgctgtagtaacccgggtccggggcctcg

SEQ ID NO: 559609 - DNA, 100 bp, Homo sapiens
gtgctccaggacagcgtggactttgatattgatgtgaacgcctctgtgtttgaaacaaacattcgagcggatgctgtgtacctggactcggaagaggagc

SEQ ID NO: 559610 - DNA, 90 bp, Homo sapiens
cgcggccccgcgtcgggagaactgggatcgccccaagagcaccgcgaggatctttaatctcatgaagtacgacagctacagccgcttctt

SEQ ID NO: 559611 - DNA, 98 bp, Homo sapiens
ccagttccggcccgaggacaccgactaccagcagccatgaagtcggggggcacgcagctgaagctcatcatgaccttccagaattacgggcaagcgct

SEQ ID NO: 559612 - DNA, 83 bp, Homo sapiens
ttccggatctcattgccacgcgcccccgacgaccgcccgacgtgcattcccggtaagttcggggagacttcaggccagggcag

SEQ ID NO: 559613 - DNA, 50 bp, Homo sapiens
cggtgccggactgcgcctgctgcgcatctctgacacgctgtgggccatcg

SEQ ID NO: 559614 - DNA, 100 bp, Homo sapiens
gaggaggaggaggtggagttgctgcccttccggagtccgccccgtgaggagaatgggacagagcagaatgggctgatatagatccggtgccgcagaatga

SEQ ID NO: 559615 - DNA, 75 bp, Homo sapiens
actctaatatgagcagcatggtagttacagcattagtgaccagaaggatcccaaggatcgaatggttcaggttgt

SEQ ID NO: 559616 - DNA, 100 bp, Homo sapiens
aacaaaatctcctccacaccttgtctgtctttgataataaagatgacattgccagttttgtcaaagggaaggtaaaggatgttttagaagaatgtatgtc

SEQ ID NO: 559617 - DNA, 100 bp, Homo sapiens
tcagaagcaggcggaggagacggcggccttcgaggaggtcatgaaggacctgagcctgacgcgggccgcgcgggcaagcacgaggagcggcaggacgagc

SEQ ID NO: 559618 - DNA, 50 bp, Homo sapiens
tcctactcctccctcaactccctcatcgcaaaagctggcaggctgacaga

SEQ ID NO: 559619 - DNA, 100 bp, Homo sapiens
ggagcagaaggactcggacacagcacagtgccaccctacagccctgggagctcaggccccgcaaccccaggggtcaacatggccaacagcatcgccagcc

SEQ ID NO: 559620 - DNA, 101 bp, Homo sapiens
tccagcacccggagcctcctcagtgtgagcagcgggatggaaggggacaacgaggataccggaaaaacacccgtggagccggaggtggcaattcaccgaat

SEQ ID NO: 559621 - DNA, 96 bp, Homo sapiens
agtggcccccacgccagccacagaagcactcaaaaggctatgagaatggtacaaacagattgagactccagaagcaaatcttgaagagcgaaaaga

SEQ ID NO: 559622 - DNA, 51 bp, Homo sapiens
ctcttccttcagatcactattcagaagaattttgatgaagcaagaacacag

SEQ ID NO: 559623 - DNA, 98 bp, Homo sapiens
tggcattggaaccgtgtttggcagcttgatcattggctatgccagctggaaaaggattttggtctgagatgctgggcgtgggggacttctattacgaa

SEQ ID NO: 559624 - DNA, 98 bp, Homo sapiens
gatctatgcacgcagatgctggagaagtccccttatgaccagtaggttcagctgcagcccggaaagaaatcataagaaacaaaattcgagcaattggc

SEQ ID NO: 559625 - DNA, 96 bp, Homo sapiens
cttccagtgggcagggtcagcaggcccaaacccccacagttcatcaatggtgctaaggaaatttgctatgctcttcgagctgagggttattgggct

SEQ ID NO: 559626 - DNA, 50 bp, Homo sapiens
tgaggcctccccagccatgtgaaactagccagtcttggtgctctgtgttc

SEQ ID NO: 559627 - DNA, 76 bp, Homo sapiens
agaagcaggagccctactcggcagcctccaggggcttccagaacccggagacactggctgacattccggcctcccc

SEQ ID NO: 559628 - DNA, 100 bp, Homo sapiens
ttatagcctcaaactcccaggctcaagcaatcctaccatgtcagccttcccagtagctggaactacaggttatcaatagtctggctgtctatcgtcatcg

SEQ ID NO: 559629 - DNA, 98 bp, Homo sapiens
tctgaccagtagctctgtggcagaccagttcactcttagccctaggggacctctttctcctggacattgaagatatggccctttggaggtgacccagg

SEQ ID NO: 559630 - DNA, 152 bp, Homo sapiens
gacacaagctggagagatacatgacctcaaggacatgttggatgtgaaggagcggaaggttaatgttcttcagaagaaggatcaactcactatcctgaaggtccattctcccaagaagaggggacagaaagacagatctatttgtaagaaag

SEQ ID NO: 559631 - DNA, 74 bp, Homo sapiens
gagcgtcgccgccgccgccgccatgaacaactcgggcgccgacgagatcggaaagaagcttccggttctgaggt

SEQ ID NO: 559632 - DNA, 89 bp, Homo sapiens
ctgggagagaggtacctctccttttccctctccctttccctaagctatgctaagaaggaatctgatcttaatggcgcccagatcaagct

SEQ ID NO: 559633 - DNA, 80 bp, Homo sapiens
tgcatcgttccgagtcctgtactggactgcatcaggccgcgtctcctcagggtcaaaatgcagatcttcgtgaaaaccct

SEQ ID NO: 559634 - DNA, 87 bp, Homo sapiens
gttgagcggggaagagagaggcctctggtccacggactcagccgaggagacatgaagccattattatatcaggaaccgaaatggcca

SEQ ID NO: 559635 - DNA, 100 bp, Homo sapiens
ggggcaaggggtctgtcccgggcgcagcgagaggatggtcatccgcgtgttcatcgcctcttcctcgggcttcgtggcgtgcacttacatttcaatcgac

SEQ ID NO: 559636 - DNA, 51 bp, Homo sapiens
attcaatgtcatccagagcccagagcaggcctgtagtggtggagacacgcc

SEQ ID NO: 559637 - DNA, 100 bp, Homo sapiens
cgaaaaagctgcttgaatgtctgccgaaatgttcaagtttaccaaaagagaggcaccgctggaacactaatgaggtccagcatgtctggcttgcacctag

SEQ ID NO: 559638 - DNA, 75 bp, Homo sapiens
ctttatcgtctgcaacaacatgttaagggcgccagcctcccagtgatggacctgactgaactccccaagtgcacg

SEQ ID NO: 559639 - DNA, 87 bp, Homo sapiens
ccgggctgagcttcctggagaagaggaagcccatgaaacccctgaaggccaccgccaccacctcccagcccgtgctcaccatccagc

SEQ ID NO: 559640 - DNA, 98 bp, Homo sapiens
cgtgaccgacctattccgagccattgaccaagaggagaaggggaagatcacattcgcacaaggccaatcagcccccccacggtgtcccccaactctct

SEQ ID NO: 559641 - DNA, 75 bp, Homo sapiens
cagaacctccacagtcaagaggacgaaccgcatgcacgaatccctgaagctttttgacagcatctgcaacaacaa

SEQ ID NO: 559642 - DNA, 74 bp, Homo sapiens
gccgccgcgggtccgtgcgcccagcgtcccagggcccaggccgagcagacgccccgaccagtgcgcccagcgcc

SEQ ID NO: 559643 - DNA, 74 bp, Homo sapiens
agaagataaagctcaaagattactcaaagcaaagaaacttaccagtgatgagtcagaggctaactgttctgcca

SEQ ID NO: 559644 - DNA, 75 bp, Homo sapiens
aagctgctaacccgacccggattggcgctgaggtggcccgtggggcagtaagactttgaccccgacgcaggcttc

SEQ ID NO: 559645 - DNA, 87 bp, Homo sapiens
cagctacatcatagctttaaaggcagaggacatgagagatggctttagaagaaaaagtttctactcttcccattatgcgagagagcg

SEQ ID NO: 559646 - DNA, 75 bp, Homo sapiens
ctgccaccgaggccccctcttcgcctcctccaggctcaccccgaggtggctgaggctggaattgggtgccccttt

SEQ ID NO: 559647 - DNA, 90 bp, Homo sapiens
gcagaagttacggcgacagctcctcgcgcagcagatgccagcctgaagccaaaagtagaatgtagtgtggtgacagagttcactgaccac

SEQ ID NO: 559648 - DNA, 75 bp, Homo sapiens
ctcgctccggagccgctgcacatttcggtgtgttccagagaacaagccttcagacatttgctatattgacgctga

SEQ ID NO: 559649 - DNA, 83 bp, Homo sapiens
agcaaaggcaccgtgacaggccaagtgcaggggccagaagacaaagtcaattccatgcagaagctcctcctggggtagagaca

SEQ ID NO: 559650 - DNA, 83 bp, Homo sapiens
gaggtcctgccgtccatgcggaagatcgtcgccacctggatgctggagatatggctcgtggacagcagaaaattcagtctcag

SEQ ID NO: 559651 - DNA, 124 bp, Homo sapiens
ggcgcctacgaggacgtggcgggtggagctcagaccggtgggctagaaaaccgcctgattcccactgagttacgccgagaggctctggccttacaggggtccctggagtttgatgatgctggag

SEQ ID NO: 559652 - DNA, 75 bp, Homo sapiens
cggaaggcggtacagacagccattaccatcctggttccaggacctcaatacagtctccatcttcatatggtaaca

SEQ ID NO: 559653 - DNA, 82 bp, Homo sapiens
gacgaggagcagggcctgactgcgcaggcgaagagaaaggcatgcaaagacaatagatatagctcaagaagaagttctgacc

SEQ ID NO: 559654 - DNA, 100 bp, Homo sapiens
ggaggtctcatctttgaactactgccggagcttctgccaggagatgtcagtgaaaaaagggatccagaatgattactaacctatgactcccaacagtatg

SEQ ID NO: 559655 - DNA, 76 bp, Homo sapiens
tcttgctggtacatgatatgtcagaggaactgtggctgcaccatctgtcttcatcttcccgccatctgatgagcag

SEQ ID NO: 559656 - DNA, 100 bp, Homo sapiens
tcggcctgaacctcttcaacaataagactttgaccccgacgcaggcttcagtgattgccgcggatcagaagcctgagcactttggctcgagacaattaag

SEQ ID NO: 559657 - DNA, 98 bp, Homo sapiens
ggatttggtgtaatgcagaagacttgttccatgaaagtacattggggcacgtgttggctacgtttgtggttttaagaaagcctgagggcctgaaggca

SEQ ID NO: 559658 - DNA, 82 bp, Homo sapiens
aatcaggcacagtgcttgccatccaggagctcccagtcccaatgaggaaccagcagagccactgacaagactttaagcaaga

SEQ ID NO: 559659 - DNA, 100 bp, Homo sapiens
gggccctcatggacggttggatcagggccgaagactggagcgctgctcagcgctttcgttcagctgtgccacatttccacgacgctggcagagaagacgt

SEQ ID NO: 559660 - DNA, 90 bp, Homo sapiens
aacttctgcagtatctgtaaccgagctgtacaggaagaggcacatacaaagaaaagaatccccgaaagggcggtttgtgatgctcctgcc

SEQ ID NO: 559661 - DNA, 101 bp, Homo sapiens
cttaataatgacaatctcctcagggaaggggcagcacagtactaggttttgacaagcttgcatcatgcgtgagtataagctagtcgttcttggctcaggag

SEQ ID NO: 559662 - DNA, 100 bp, Homo sapiens
gcgtgaggccgcggagcgccagctcaatgaagattaatgcagtatcgaatggacaagtccgaggtgatagttacagtgaaggttgtctgggtcaaacagg

SEQ ID NO: 559663 - DNA, 51 bp, Homo sapiens
ggagaagacccagcaggcccaggtacggttcctggagcagcagaacaagat

SEQ ID NO: 559664 - DNA, 100 bp, Homo sapiens
atatgatcaagttctcgtggagtcagacaatgagtattctaccttgtaaatactgttatttgtatatactgtaaatgatgacatcggtgggcactaaccg

SEQ ID NO: 559665 - DNA, 90 bp, Homo sapiens
ctggacagcaccatgtccaccaaagcggagcagtatgaccgcacctcgagcaggagtggggatgccacgtctgcccccagcgcccggccc

SEQ ID NO: 559666 - DNA, 75 bp, Homo sapiens
aactacagatactttgaagtagaagaagctgatgattagtgacaagagctggggttaggatccggttggactctg

SEQ ID NO: 559667 - DNA, 80 bp, Homo sapiens
agctgcgccatggccagagtgagtcacccctttccagccagcaaacaagttgtctgtgctgtgaatgccctcgcccacca

SEQ ID NO: 559668 - DNA, 102 bp, Homo sapiens
cccaaatcaagtatacagaaaatcggtgaagagaggttttgaattcacgcttatggtagtggtacctggagtagaacagaaaaattattatgtctgtgttcc

SEQ ID NO: 559669 - DNA, 100 bp, Homo sapiens
gttacaatggttggtctgatttacccatatgttatgaaggagaatgtcatgttccaattttagaagccaatgtagatgctcagccaaaaaaagaaagcta

SEQ ID NO: 559670 - DNA, 116 bp, Homo sapiens
agtaactgaacattggtctaaagtctttccaaaaggtcaaggttcacaaggcagcagcttaaatgccatttacagatactataatcaagtgggacggaagcccacgatgaagtgga

SEQ ID NO: 559671 - DNA, 98 bp, Homo sapiens
atttatggaccttactgcagaacgtcccaattcttcaggccaagaacgtgctggccaaagcgctctatgacaatgtggccgagtccccggatgagctc

SEQ ID NO: 559672 - DNA, 98 bp, Homo sapiens
tgaaccctgctcagaggaatttgtacaggaaagtgatgttggagaactacaggagcttggtatcattggttttctgaatttccagatcccatgtgggg

SEQ ID NO: 559673 - DNA, 90 bp, Homo sapiens
gtctggggctggagagcacctgaagagaggaaaagctgaccagcaagaagaacgtcggagacaaaagcagatgaaggttctgaagaagga

SEQ ID NO: 559674 - DNA, 100 bp, Homo sapiens
atacgttgtgaaggaatgaccctaggagagctgctgaaggaatttagataatgggctgtgtgcaatgtaaggataaagaagcaacaaaactgacggagga

SEQ ID NO: 559675 - DNA, 98 bp, Homo sapiens
gaggctccgcaccagccgcgcttctgtccgcctgcagtaaaaaagcacgcttagattggaatactgatgctgcgtctttgattggagaagaacttcaa

SEQ ID NO: 559676 - DNA, 100 bp, Homo sapiens
cctgcttttttgagggaattgatgatgttcactggaaggaaaatgggacattagttcaagtagcaactatatcaggtgtcatggagaaactccagctggg

SEQ ID NO: 559677 - DNA, 100 bp, Homo sapiens
ggccgcgcagcccccgggcgcccgcgtgtgcctgagccgtggcggccgcgtcttctgcgtcagcgacagccaggataaagatggtgatagagcagttcac

SEQ ID NO: 559678 - DNA, 98 bp, Homo sapiens
tttctgcccgcctgagtgatcttgaaatgaataggtgctcttacagcctgttccaagtgtggcttaatccgtctccaccaccagatctttctccgtgg

SEQ ID NO: 559679 - DNA, 100 bp, Homo sapiens
gcaaactctgttgtcttcacaaaccagggtggctgaggtcctggaaggcaaaggagcagggaagaaaggccgttttcagggcaaggccaccaagatgagc

SEQ ID NO: 559680 - DNA, 75 bp, Homo sapiens
gtcgacatgagtgatgtggaggaaaacaacttcgagggcagagtctataacttgacccaggagttcttccggcac

SEQ ID NO: 559681 - DNA, 98 bp, Homo sapiens
ggacatcttactggtccatgctactgagactgacaggaaagtctatcaggtgtttgaaagtgtggctaagaagtatgatgtgatgaatgatatgatga

SEQ ID NO: 559682 - DNA, 100 bp, Homo sapiens
ggaaagcatcatcagacccaagtgccaagttatttactttcccatcaggtttcctgatgtgagcagatgatcctgaagctgacgcaacaggatgaaaatc

SEQ ID NO: 559683 - DNA, 100 bp, Homo sapiens
tcaggctcaaatgaatgaaaggaggatgttaaaggcaaattctctgaagaccacgggtcctgttgtggagtaaactgttattattttaccatgcagaaga

SEQ ID NO: 559684 - DNA, 100 bp, Homo sapiens
cttgtccgtgccaaatttcctgaacacaccattatgatttgagagggaagatctgatctcctagaattagagttggtacagaaaccatttcagctccaaa

SEQ ID NO: 559685 - DNA, 80 bp, Homo sapiens
aggtcttatacagccaggggatattattcggttgaccagaggggattcccctgaaaccaatgttggcccatcccacccgg

SEQ ID NO: 559686 - DNA, 73 bp, Homo sapiens
tcctgaagaaggcaacagatatgatggcatttataaggtggtggaagctacaatgattttgggaattacaaca

SEQ ID NO: 559687 - DNA, 75 bp, Homo sapiens
cagcagcatgtaaagtcagtgacagccccatgagtcattacgggccaatagtcgactgctggaacaacttcaaga

SEQ ID NO: 559688 - DNA, 135 bp, Homo sapiens
ctgggctggcatcggcgtcctccagagttgtgaatctgccctgactcactatcgtcttgttgccaatcatgaagtttgcctgcaatggtactgtaattgagcatccggaatatggagaagtaattcagctacagg

SEQ ID NO: 559689 - DNA, 97 bp, Homo sapiens
ccggcttcaggatttacacagacgtggggcgatgcttgtgaccctgcagctcctcaaactgagtcagtgctgattctctcaaatagagcttgaagga

SEQ ID NO: 559690 - DNA, 100 bp, Homo sapiens
agatggagagggaccacctcaggaaggaggtggaggggctgcggagacagagccctccggccagcggggagccgtttccctggggagatggtaaccatac

SEQ ID NO: 559691 - DNA, 98 bp, Homo sapiens
gatggggctggacctgctggtgttcgcccacgaccatgaaatcatgaccaccccaggaaaagagaactttcgcctgaaaagttacaagaacaaatctc

SEQ ID NO: 559692 - DNA, 75 bp, Homo sapiens
tccaagaaaagattcggagacagtatttaagcacaaatgacttggcagatgaacttgctcttgttgatgtcatcg

SEQ ID NO: 559693 - DNA, 100 bp, Homo sapiens
gaaaatatgttttcagaggcatagaatcttcaggaaaatactggagttcctgagatctcaagggtgtgctctgtgcaactcccctcatttttatcattcc

SEQ ID NO: 559694 - DNA, 75 bp, Homo sapiens
atttaaccgctctctgcctcccaggacggggaggtttactgcatcgacgcgcggttctacgggaacgtcagccgg

SEQ ID NO: 559695 - DNA, 90 bp, Homo sapiens
cccagttcaagtggttctcctgcctcagcctcccgagtagctgagattacagaatggacagcaaattatggatgaacctatgggagagga

SEQ ID NO: 559696 - DNA, 82 bp, Homo sapiens
attcccagccatggcagattcctccgggcagcagggagctgcagaggctggagacagagttgggccaacccgctgagcgctg

SEQ ID NO: 559697 - DNA, 100 bp, Homo sapiens
ctaacatggataagcatgccctgaaaaagtatcgtcgagaagcctatcatcgggtgtcaaattgagaaccaggtagatccccaccacctacagtaaaaag

SEQ ID NO: 559698 - DNA, 90 bp, Homo sapiens
ggctgaagagcgcgccgccctctcgtcccactttccaggtgtgctgggcatcaaggtgaagatcatgctgccctgggacccaactggtaa

SEQ ID NO: 559699 - DNA, 75 bp, Homo sapiens
tttattactttgaagtgaagattgtcagcaaaggaagagatggcccaccttgggacaccttgactccaagcccag

SEQ ID NO: 559700 - DNA, 90 bp, Homo sapiens
ctgctccttctacatctgcagataaagtggagagactttgagagttttgacctgcctgaagagcaccagattgcgcacctccccttgagt

SEQ ID NO: 559701 - DNA, 83 bp, Homo sapiens
cggtgcctgtccccgggggcgccatggcgaccggagcgaacgccacgccgttgggaaggtgctcgggtcttcggggcactggg

SEQ ID NO: 559702 - DNA, 83 bp, Homo sapiens
agaatgtcctggcagcattcagccagtattttaggctttacaggaagtatggtgctggcatctgcttggcttctagagagtct

SEQ ID NO: 559703 - DNA, 75 bp, Homo sapiens
gagaaaaaaataaactcctatttgtttatggcaagcgttacagtgtttctgccacctctgtacaaaagacaattt

SEQ ID NO: 559704 - DNA, 100 bp, Homo sapiens
ggactatgggggaactgatggcgttcctgttacctctcatcattgtgttaatggtgaagcacagcgattcccgtactccaaagattcaggtttactcacg

SEQ ID NO: 559705 - DNA, 100 bp, Homo sapiens
cttccttttctcggggctcccgtgggcaaaatgtcgtgactttgagaatatgctgtggtttgaatctttgctgttttatggttgtgaagaacgagagcaa

SEQ ID NO: 559706 - DNA, 98 bp, Homo sapiens
ttcgcgctgctgggcacccacggagcctccggggctgaggctgtggccaggccagctgggctcggggagcgccagcctgagaggagcgcgtgagcgtc

SEQ ID NO: 559707 - DNA, 90 bp, Homo sapiens
ggacgagcacctgccgcgtggcggggctgtggagcggccgctgaccccggagacacctatggctgccgatgaaggctcagcagagaaaca

SEQ ID NO: 559708 - DNA, 100 bp, Homo sapiens
aggcaacgtgttggaccttccggagcttctcagaagacagagggttttcttttgaggatgtttgccacacgagtcactcgagagaatctctgagtcctgg

SEQ ID NO: 559709 - DNA, 90 bp, Homo sapiens
ttgacagctattaaaaccagggctccacagttaggagacttgatcctgctccctcggtgtctgcattgactcctcatgctgggactggac

SEQ ID NO: 559710 - DNA, 100 bp, Homo sapiens
ggggactgcaggggttctcagagaggaaattcaggaaactttgacttcggagtatttccagatttgcaagattgctgtgctaaggagacagcaacgtatg

SEQ ID NO: 559711 - DNA, 109 bp, Homo sapiens
aagtttctttcaccgcagtgggctaccataaacacatcaccttgatttttaatcccacgggaaatgtttcaacgtgcgcaagcgttgcggcggcgggcagaggactact

SEQ ID NO: 559712 - DNA, 108 bp, Homo sapiens
tgcaaagaaaaaaatttctcatattgctgaacaaagccccagtgcagatcgatctggaatagaaaacgtcaactctgtggaggctttgcaggaaactctcattcgtgc

SEQ ID NO: 559713 - DNA, 75 bp, Homo sapiens
taatgaatgaagctgctgatgaaatagcaactggagctcagatatttgtcaggatacgaatcaggttctcttcaa

SEQ ID NO: 559714 - DNA, 98 bp, Homo sapiens
atatggtggaacagaagcctggatacaggactcagactcttactgcatttcagatctgctcggtagacctggtgcaccaccaccatgttggctgcaag

SEQ ID NO: 559715 - DNA, 74 bp, Homo sapiens
tttggcgaggacggggcgccggcgccgccgcccccgggctcgcggcctgcagatgaagatctccttcaacgaca

SEQ ID NO: 559716 - DNA, 80 bp, Homo sapiens
acttgatccaaagacaatgaagaacactctgctccagccaaggtggtgagggcagctgttcctaaacagcgcaaaggcag

SEQ ID NO: 559717 - DNA, 100 bp, Homo sapiens
atggctacttgggccatgtcatccgcaaaggcctcaatgcctacctggaaggttcatggagatttgctctgacccatctgaagtccatatggctctgtat

SEQ ID NO: 559718 - DNA, 126 bp, Homo sapiens
ctcccgcggcggccgctgctgtgcatcccggccgtctgggcggccgccgcgcttctgctctcagtgtcccggacttcagatgttcatttggatttggaagaccgcctggcaaaatttatgaagaca

SEQ ID NO: 559719 - DNA, 50 bp, Homo sapiens
tcagcggatggtctgggtggacctggagagtcaagggtccagagaaggag

SEQ ID NO: 559720 - DNA, 132 bp, Homo sapiens
gatgcttgaggactcagatgagcaactggattatactgtactgcccatgaaaaaggatgttgaccggacaggtttgagacgggccaactcagtccaggcctccagacctgccccaggctcggtgcagagccc

SEQ ID NO: 559721 - DNA, 75 bp, Homo sapiens
ctgtaccagcatatgagtttcaggaggattggcacttctctgtttgatgaagagggagccaagattgtcaaagac

SEQ ID NO: 559722 - DNA, 82 bp, Homo sapiens
cttgtggagccggagctgggcgcggattcgccgaggcaccgaggcactcagaggagccctgaccctctattctgcaccctgt

SEQ ID NO: 559723 - DNA, 100 bp, Homo sapiens
cggctggactgcaacctggctgtacagctcctcaagtgcaacaagtcccacttccgaaaccacaagtttgccgatgtggggaacgccaagcacaacgtgc

SEQ ID NO: 559724 - DNA, 100 bp, Homo sapiens
ctggggccagggaaccctggtcaccgtctcctcaggttgcactagtcgggggttccatgctggggggcagaaggaatgctctctaccgtctgaaaccgtt

SEQ ID NO: 559725 - DNA, 106 bp, Homo sapiens
tttacaaaccctgaatttataactgatgtttctcgggaaactctaaaaagcaggaagaaatcagattacagtctaaataaagtgaatgcacctatcttaacaaata

SEQ ID NO: 559726 - DNA, 100 bp, Homo sapiens
gtcatcacggacgagaactggagagaactgctggaaggagactggatgatagaattgcagatcgggagcggtgccgagaaaaatttccttactagatgac

SEQ ID NO: 559727 - DNA, 50 bp, Homo sapiens
cattgaagctgctgctgagcccgggaggaccctcactacgtccagcaggc

SEQ ID NO: 559728 - DNA, 88 bp, Homo sapiens
ccgggtccagacccacgcggcgccagttctccggcgggaaggaaaaccgcgcagagagcatgacgacagagatgatggtgtggattat

SEQ ID NO: 559729 - DNA, 99 bp, Homo sapiens
gtgaggcggccgccgcagcccaggcgcgggggcgacgacaggactatgagagtaaattgcaggccttgcagaagcaggttgaaacccgatctctggctg

SEQ ID NO: 559730 - DNA, 83 bp, Homo sapiens
gacagattctgcctgtaccaaacgtggttgtacgagacgtggcctgtggcgctaaccacacgacattcaatccacgtcaagga

SEQ ID NO: 559731 - DNA, 98 bp, Homo sapiens
tctagaagaaatgccctccgggtcacaggataagatgatggaccatttggattgtgcaacaaatgaagaaaaccctgtgatatctggtgaacagattg

SEQ ID NO: 559732 - DNA, 75 bp, Homo sapiens
aacctggctttcccgactgctccatcgaggcagccatggtgaagggcttccgttacaagatgaggtctgtgtatg

SEQ ID NO: 559733 - DNA, 100 bp, Homo sapiens
tcctcctcctcctcttcctcctcatcctcctcatcttcttcatcctcctcctcctcaggtcctaggcctacttacaagcctccagtctcaaattatccag

SEQ ID NO: 559734 - DNA, 90 bp, Homo sapiens
gctctgagggagggtccgagccagccgctgttttgccggaggagcccctcaggccgcctctgtgtcctttgtcccaatagtaacaactcc

SEQ ID NO: 559735 - DNA, 100 bp, Homo sapiens
agtggagtccattatttcctctggcttcctcaaattcatattcacagatgtgttcagagcaacattgttttgttgacacaagcatttagaagaaagtttg

SEQ ID NO: 559736 - DNA, 100 bp, Homo sapiens
aagactctgagcccccgaactctgcaaagcctccagaggacataccacctccaggatcaggatgcagagaacagagtgttctgaacatcaacacaaagtg

SEQ ID NO: 559737 - DNA, 75 bp, Homo sapiens
ctgcggtggcgtctccacacgtccaagtggtaagaagttcagaagcaagcctcagttggcaaggtacctgggaaa

SEQ ID NO: 559738 - DNA, 100 bp, Homo sapiens
ggcccgggactacgaccacctcttcaagctgctcatcatcggcgacagcgtgcgcgtcccgggacgactggcgctgtgcgcgctccatgcacgagttttc

SEQ ID NO: 559739 - DNA, 90 bp, Homo sapiens
cggctctcttatggcgaatgcaacccgaagagagagtgaggggccagtgtcattcaaggacgtggctgtggacttcacccaggaggaatg

SEQ ID NO: 559740 - DNA, 88 bp, Homo sapiens
cctcgccatgccggcccggcggctgctgctgctgctgacgctgctgctgcccggcctcgggatccctagcaactggaactaaagccgg

SEQ ID NO: 559741 - DNA, 90 bp, Homo sapiens
cttggacagcagattttggtttaatatctgattgggacaacattcagacccatttccagtcatgagaactgcaagcacatgttgaccaga

SEQ ID NO: 559742 - DNA, 83 bp, Homo sapiens
caaacttcaacagaatgtggcaaccaggccttcactattctgtgtgatattttgatgatcttcagccatcagattatgtcagg

SEQ ID NO: 559743 - DNA, 74 bp, Homo sapiens
cggtgacgacaggcagcaaaagaccaggcctgctgcgggtcatctcaggggttcttcagctcggcaacatcgtc

SEQ ID NO: 559744 - DNA, 74 bp, Homo sapiens
tggtgcttctccagtgatggataaaccaccagaaaagaggggatctgatgataaaaaaagtagtgtgaagtccg

SEQ ID NO: 559745 - DNA, 74 bp, Homo sapiens
atgtttaacgatgatggtgactgcctggatccacgtcttctacaagaggtgatggctggaccggcggaggaggc

SEQ ID NO: 559746 - DNA, 97 bp, Homo sapiens
aggccttgcttttatcgaacttgtcaatgaaggaaggtgagagttacgtgtgtgcatccaatgaaccatttcgtaaagtcgattacaccaaaaatat

SEQ ID NO: 559747 - DNA, 104 bp, Homo sapiens
cccagccgaccttgagctccaggagttcgtctcttacgtctgcggaagtgcagctgcctcagttcttagcgcagaaagctgtctgccaaggagaaggagacgac

SEQ ID NO: 559748 - DNA, 89 bp, Homo sapiens
gaatggctttggaagactatcagaggccaaacatggtgatccatgtgtgtgatgaagcaaaaaacttgaaagaagattttacttgcccg

SEQ ID NO: 559749 - DNA, 96 bp, Homo sapiens
aatcgattaaggcagaagatacaggcagaacatgctagtcatggagatcgagaggaaataatgagttgcaggccccgggcattctgtctggcggac

SEQ ID NO: 559750 - DNA, 83 bp, Homo sapiens
ggaagaatgggtgatagaaagagacagcctgctggatactcatccagatcaataagatggagtggtggagccgcttggtgtcc

SEQ ID NO: 559751 - DNA, 83 bp, Homo sapiens
ctccctacacaccctggttggacaggctcctacccagagattctacccagtgaaactcccacagcaacgcaggtagatggggc

SEQ ID NO: 559752 - DNA, 95 bp, Homo sapiens
gttctgacaagatggccgggctgccccgcaggatcatcaaggtataatttggcttcctgagattctgccttagcaagaaaggagtgggaaatacc

SEQ ID NO: 559753 - DNA, 83 bp, Homo sapiens
tggggatccctgctcttcgctctcttcctggctgcgtccctaggttatgaaggacagaatctggcaaagatcctcaaggattt

SEQ ID NO: 559754 - DNA, 101 bp, Homo sapiens
tgcgctgttcgtgctgctgggattcgcgctgctgggcacccacggagcctccggggctgaagtcggccagagcagcatgtggatctccactgatgccgccg

SEQ ID NO: 559755 - DNA, 98 bp, Homo sapiens
gcttatatttccaacagagttccacagatgaagaaataacatttgtatttcaagaaaaggacagagcgggatgccaccagcttgtccaaagggaagtt

SEQ ID NO: 559756 - DNA, 76 bp, Homo sapiens
cgacaacatggaggccgtgaagaccttcaatagcgagaaaaggatgcgcctccacttagcaaggctgggcaggatg

SEQ ID NO: 559757 - DNA, 97 bp, Homo sapiens
gaattcagaaggagctggcggacatcactttagaccctccacctaattgcaggtgtcatggagaaactccagctgggcccagagattctgcagcggg

SEQ ID NO: 559758 - DNA, 82 bp, Homo sapiens
cctcgccgtggccatgtgcagccgctacgaccaagaatcgccttcagccctgtctggtgcatccttggcagaaagtgaggag

SEQ ID NO: 559759 - DNA, 100 bp, Homo sapiens
ctcgggggccctacggcccctggctctgcctcctggtggccctcgccctggacgtcgtgagagcaatgagtcggatgtggtcgagagcctggatgaaatc

SEQ ID NO: 559760 - DNA, 83 bp, Homo sapiens
cgccacgccgcccagcccggccccgcccgcgccggaagagccacgccggtcagcccaaggccaaccccactgtcactctgttc

SEQ ID NO: 559761 - DNA, 75 bp, Homo sapiens
atccagacggcagggagtgcatcaaaggtgtgaacacaggattgtcaccagacctgcaatctatggagcagattc

SEQ ID NO: 559762 - DNA, 98 bp, Homo sapiens
cctctctctgtccccggccgccatggagcagccgccggcgcctaagagcggagcgtgctttggacaccatgaattttgatgttataaagggcaagcca

SEQ ID NO: 559763 - DNA, 76 bp, Homo sapiens
ctcttctccctccccttcttgagttatggtgaatggttgcatggatttgaaaaaaaggcaaaagaatgtatggctg

SEQ ID NO: 559764 - DNA, 100 bp, Homo sapiens
cacaaacccactggacaccttcgtcccctttgatccctgtgtgctgaagaggatagaatcacttgaattcctggatgaaatggagctgctggagcagctc

SEQ ID NO: 559765 - DNA, 80 bp, Homo sapiens
agagctttgctacattggaacagggccgcctctcaagaattcaaggaagccttctccctatttgataaagatggcgatgg

SEQ ID NO: 559766 - DNA, 74 bp, Homo sapiens
tctcctggggtcggcgccgagtgggaggatggcggaaaacccagcgggtgccgcttctccacccgaggcttcca

SEQ ID NO: 559767 - DNA, 75 bp, Homo sapiens
atgtggaggagaatatatcctctaaatctgatgccccttcacagatgtagtcactacaaatcttaaattgcgaaa

SEQ ID NO: 559768 - DNA, 82 bp, Homo sapiens
cgcggtgctgctggtcacggccaacgtgggctcgctcttcgacgacgtgaggagcattacaactgcatctccgccctgcaca

SEQ ID NO: 559769 - DNA, 80 bp, Homo sapiens
aaatgagactccctcagatccagtgataattgacaggtttccacttgagcggcacagtgacagaacctgcaatacaatcg

SEQ ID NO: 559770 - DNA, 83 bp, Homo sapiens
gacgcggacagcgggctggagcctgacgagctggcggaaaaggattatagcagtctttgtgacaagcaaccgataggaagacg

SEQ ID NO: 559771 - DNA, 100 bp, Homo sapiens
atttagcagctagtaacttcacttatttcaggggtggcccggtggaaatcctgccctttctgtacctgggcagtgcgtatcacgcttcccgcaaggacat

SEQ ID NO: 559772 - DNA, 82 bp, Homo sapiens
cccaaaaagctgaaggtggaggcgccgcaagcgctgaggatgcctaaatcaaaggaacttgtttcttcaagctcttctggca

SEQ ID NO: 559773 - DNA, 75 bp, Homo sapiens
cacaactccagtgctaactcaacagatctgtctatggcagtgcagaaattttcccagtcattgcaagatttccag

SEQ ID NO: 559774 - DNA, 98 bp, Homo sapiens
atctgcacttcgcattttggcattgacatttaattttagggtcctttatatagaagggagagtagttatgagttgcagaaacgaattgctgaaatgga

SEQ ID NO: 559775 - DNA, 94 bp, Homo sapiens
gcagctgcagccccggcggccgaacgcccgcggcgcgggactccatcgtcagatgatatcatcaagttgaatcgaaaggaagggaagaagcaga

SEQ ID NO: 559776 - DNA, 100 bp, Homo sapiens
aggtccatggtcccaggccgcagcaaagttctgagactaagcacaaaacgagtggatcattcaaataccagattggcttcccagcttgatagaaatccag

SEQ ID NO: 559777 - DNA, 82 bp, Homo sapiens
gccgcgctgcgcatctccaacagcgacctgagcggtcagccatgtcatctgagcctcccccaccaccacagccccccaccca

SEQ ID NO: 559778 - DNA, 76 bp, Homo sapiens
tagcgctatgcctgcggcggagactgcatcaggctctcgccatggccatgcagaaaatctttgcccgggaaatctt

SEQ ID NO: 559779 - DNA, 100 bp, Homo sapiens
tcgtgctgctgggattcgcgctgctgggcacccacggagcctccggggctggtcgcaatggaagaagagatcgccgcgctggtcattgacaatggctccg

SEQ ID NO: 559780 - DNA, 74 bp, Homo sapiens
atcatcctactcagtctgttctccactcctcatggaatcattgaccttcaaggacgtgtttgtggacttcaccc

SEQ ID NO: 559781 - DNA, 97 bp, Homo sapiens
ttgggcttctccagatgccggggctgggtccttcccaaggttgaggtatttgtggaaacattagacaaatgttttgaaaatgtctgtgagctggatt

SEQ ID NO: 559782 - DNA, 50 bp, Homo sapiens
agaaggtgaactgtctggataagtgatgtcttggcattgcccattttcaa

SEQ ID NO: 559783 - DNA, 87 bp, Homo sapiens
caaagttttgcagatcttcaacaagaggacccaggagaaattcgccctcaaagagcatcagatccatgctgctgctgactcggagcc

SEQ ID NO: 559784 - DNA, 75 bp, Homo sapiens
tttagccaacccaaattaccttaattgtacaaacccgtagtgctgatgaaccaatgacaacatttgttgtctgta

SEQ ID NO: 559785 - DNA, 100 bp, Homo sapiens
caggacccgcagcagagacgacgcctgcagcaaggagaccaggaaggggtgagacaaggaagaggaagctgccacttttgctagagagcaaggctttgag

SEQ ID NO: 559786 - DNA, 100 bp, Homo sapiens
gaactttgttcctaagcccgtcgagacatgatgagatcgaatatgatgttccttgtcaccttcaaggtgtgactgcacagaaaagttacaaaacaaattt

SEQ ID NO: 559787 - DNA, 100 bp, Homo sapiens
aaatcctggggttaagtctctcatcaaaacaccagagcgactttcattagaaggagagcgacagcccaagtcaccagatccccgtcgaggtcaagatcaa

SEQ ID NO: 559788 - DNA, 89 bp, Homo sapiens
gactacccctaccccactgacttcctgggtcccctccctgccaaccccgtcaaggtggtcttccgggatccgtatcggtttaagaagcg

SEQ ID NO: 559789 - DNA, 95 bp, Homo sapiens
gcccatggttacacttgtccgggggagaccttgaatttggtgtggaagaaataacatcagtagttcaggtcttgggcgtctttggtactggcttt

SEQ ID NO: 559790 - DNA, 100 bp, Homo sapiens
accgcggaagtcttactcaatatggagtctcccagcgatatcctggatgagaagcagatctgctgcaggccaacttcaccatccgggaagatgccaaccc

SEQ ID NO: 559791 - DNA, 100 bp, Homo sapiens
attttgaagtacaccgtggtgacattgtatcattggtggggatagtttcatagtaagttctgaattccctgtaagactgagtgtatacttagaagaagag

SEQ ID NO: 559792 - DNA, 100 bp, Homo sapiens
ctgatcacctgtctggagcaaggaaaagatccctggaatatgaagagacacagtatggtagccacacccccaggaatcaaggattttcttttgctttgtg

SEQ ID NO: 559793 - DNA, 83 bp, Homo sapiens
gggacaatggtcaccgtctcttcaggtttacccaaggtccagcctagcccctaggcaccatgtcggacagtgatctaggtgag

SEQ ID NO: 559794 - DNA, 74 bp, Homo sapiens
tttctttggcatgcagattgaagtaacagcatggataggtccagcttggagggacggtttgaagatgaggagct

SEQ ID NO: 559795 - DNA, 100 bp, Homo sapiens
gaatcgttgttggtctcctccttgctgcccttgttgctggtgtcgtctactggctgtacatgaagaagtcaaatagccggatcgagctgggagatgtgac

SEQ ID NO: 559796 - DNA, 75 bp, Homo sapiens
cgctgtggtacttctcgcagtccccgcgcgtggtcatccaggagggagccatggatttgctgcgggagctgaagg

SEQ ID NO: 559797 - DNA, 50 bp, Homo sapiens
gagcccccttgctggattatatctacaggaacaagttgaaatcatcgcag

SEQ ID NO: 559798 - DNA, 100 bp, Homo sapiens
gaagctctctccagaaagacatcctgagaggacttggcagagatgatttacacaatgaagaaagtacatgcactttgggcttctgtatgcctgctgctta

SEQ ID NO: 559799 - DNA, 100 bp, Homo sapiens
aagggcgcgtcgcctcggacgtccactgcaccctgcgcgagaagccgctgttgtgacaagaaaagctgtggcaaccgaaatgagactccctcagatccag

SEQ ID NO: 559800 - DNA, 50 bp, Homo sapiens
cctggggcgcaccgccaagagctgggaaatgggacgtcggtcatcagata

SEQ ID NO: 559801 - DNA, 88 bp, Homo sapiens
gcaagttcttctacagccccagttatgtggacgagctgttaaaccaggttaatacaatctgttggaatgacactggagaatatatttt

SEQ ID NO: 559802 - DNA, 75 bp, Homo sapiens
ggcaccgcggatctggggccgtcctcaggaaaaggggaagatagtgatgtactcagtataaatgcagatgcttat

SEQ ID NO: 559803 - DNA, 75 bp, Homo sapiens
cttgatgccactaagctgctacttcaagctttggccatcaatagctctgagaagtctggacagctgatcacctga

SEQ ID NO: 559804 - DNA, 90 bp, Homo sapiens
gaggctggacaggaccccccgaggtaattcagaggtccgtggggccagccagcctgagcttgctcaccttcaaagtctatgcagcaccaa

SEQ ID NO: 559805 - DNA, 100 bp, Homo sapiens
gccccgacatgattccttacttctccgccaacgcggtcatctcgcagaacgccatcaaccagctaatgagtccctggaacgccagatgcgtgaaatggaa

SEQ ID NO: 559806 - DNA, 100 bp, Homo sapiens
gaagaagcatcgttaaagtctctcttcaccctgccgtcatgtctaagtcagaggttggtcaaagaaaaagtgatgtatgaaaaagaggcaaaacaacaag

SEQ ID NO: 559807 - DNA, 83 bp, Homo sapiens
atttaaaccacatggctatctaaagagatctgccttctggagactgcgccgtcctcccgggagagccagaaagaggacatggc

SEQ ID NO: 559808 - DNA, 75 bp, Homo sapiens
ctagcgcctggcctgcgcgccgctgcccgcgccacagggcgaactttctgaccaagtatacaactacccagaggg

SEQ ID NO: 559809 - DNA, 98 bp, Homo sapiens
aatcggaaaccacgcgtcctactacaaagatgctctgcggtttttgggctgtgttgacatcaaggatctaccaggtacaggtttgcagattccgccag

SEQ ID NO: 559810 - DNA, 75 bp, Homo sapiens
ttcttcttcaagtctatggacgacgatttcggtgccctcagccagcatgacccgcctggcacgctcccgcactgc

SEQ ID NO: 559811 - DNA, 80 bp, Homo sapiens
gtcccgaccctggccgccccgagcggagcctggagtcacggacaagttcactgagagcgtctacgtcctggccaacgagc

SEQ ID NO: 559812 - DNA, 100 bp, Homo sapiens
gactgtttggagtgaagaagtagaaattgaaagagaagtgctcttagaaaaggccataggaaaaggatacagagtagagtttcatgaacctgaaacttgg

SEQ ID NO: 559813 - DNA, 100 bp, Homo sapiens
tgaagatagtttaaccaaacaaccagaagaagtatttgatgtcttagagaaacttggagaaggctgtccaatgtgaaagaaaacccattgaagtatcacg

SEQ ID NO: 559814 - DNA, 98 bp, Homo sapiens
gaaaaacagtaaagatggaaaaccagttattgaatatcaagaggaggagttgttggtttcagagaaaatccattgatggaagctttgggtccaatgat

SEQ ID NO: 559815 - DNA, 76 bp, Homo sapiens
aataaaagagacctctacttagctcagcaattcttaccttgtcaaagattctaaactgcctgcatataaggatctc

SEQ ID NO: 559816 - DNA, 75 bp, Homo sapiens
gaagccacgtgcagacatctacaaccttcgatctcctgacgactcaagactgcagtgcagatgacgacaacttcc

SEQ ID NO: 559817 - DNA, 83 bp, Homo sapiens
ccccactcctccaagaaccaacccccaaattggctgggacaggaactgtggctgcaccatctgtcttcatcttcccgccatct

SEQ ID NO: 559818 - DNA, 90 bp, Homo sapiens
gtcctggacccagctgagcgggcggtcattcgcatcgcagccctgggcgctgcctatggcacagccaagagcggtaccggcattgcggcc

SEQ ID NO: 559819 - DNA, 90 bp, Homo sapiens
gaagaaaatcaggctctttgcacaataacttcatttcccagtggcagctctcgccgtcgggattactatgacagaggatatgatcggggc

SEQ ID NO: 559820 - DNA, 100 bp, Homo sapiens
cacttctgtggcctatcacctctccaaaatggggtggaaggatattgtccttttggagcagggcaggaaagtggagaatgaggacatgaataaagaccag

SEQ ID NO: 559821 - DNA, 83 bp, Homo sapiens
tagagcggagcctggcgggcgtgggaacccaggccccgccgaggcggccaggattgtcagtggcttcgccccgaggagagctg

SEQ ID NO: 559822 - DNA, 101 bp, Homo sapiens
tgctgctgggagcccagggagcgccgcgcgaccaggaggcggcggcgccgccggctttggtcgagcctcttaggcagagtttaacacatgggagctgcctg

SEQ ID NO: 559823 - DNA, 82 bp, Homo sapiens
catcgacaagatgcgccgcgccagctcctactcctccctcaactccctcatcgaattcagaaggagctggcggacatcactt

SEQ ID NO: 559824 - DNA, 75 bp, Homo sapiens
agtctgtgccccaatggttcgatattcaaagttaatcatgttatcagccctctgttggatatctactttcctgaa

SEQ ID NO: 559825 - DNA, 83 bp, Homo sapiens
cgcgcctgggctgccggcacttcgcggcagaggggaggtatggtgtcaagaaaacatagtcaccattattacgaaaagtaaaa

SEQ ID NO: 559826 - DNA, 101 bp, Homo sapiens
agatgaagcaaggcccaatgacccaggcggaatgaatctgaagtctgctgcagtaaaacacagaaggctttaaaatgttttcttgcataaaattcaaaact

SEQ ID NO: 559827 - DNA, 101 bp, Homo sapiens
attcgtaccagttattaaactctgttttgatgggatagaggctcggcatggctgcccggggccacagctggccctgcctgcagcagacgccaacgtccacc

SEQ ID NO: 559828 - DNA, 82 bp, Homo sapiens
taacagccaagatgctgcggaatctgctgagcccaaatcttgtgacaaaactcacacatgcccaccgtgcccaggtaagcca

SEQ ID NO: 559829 - DNA, 96 bp, Homo sapiens
acctgaggaagactcagaaacacagcctgatgaggaggaagaagaagaagaagaaaaagtttctcaaccagaggaaaagcaggtgatattctcagt

SEQ ID NO: 559830 - DNA, 75 bp, Homo sapiens
catcttgaaggacgacccgacggtgatcactcaggtccccagtctatgtgaggatctcctgtcttctgttgacca

SEQ ID NO: 559831 - DNA, 78 bp, Homo sapiens
cacaggacacgaagtttgtcggcccttgccttggcagagctgagagttgcatgctgagaatttgaaaaatgaagatga

SEQ ID NO: 559832 - DNA, 100 bp, Homo sapiens
ggccactgcggacgatgcggagaccagtgaggccacggagatcatcgagggcacccagacagaggagttcatgatcaagtgttgcccacaccaaatgctt

SEQ ID NO: 559833 - DNA, 75 bp, Homo sapiens
gttccgtggcctcgcccaggccgacggtcatgacttgtgctgaccctggcgagattgccaacgggcaccgcaccg

SEQ ID NO: 559834 - DNA, 100 bp, Homo sapiens
gggaagacgcggcggcggcggcggaggatgagcctgcagagcgcgcagtacctccggccatgtttttggtatactgtgcactggagaaagaacctgtgcc

SEQ ID NO: 559835 - DNA, 117 bp, Homo sapiens
cggggaggccagagcgtggagcgctgcgcggcgcggcggccgggccctcgagacggggacggatgaagactccgggaaggctgacagcgacgtggctgacgacgtgcctgtggccca

SEQ ID NO: 559836 - DNA, 95 bp, Homo sapiens
cgccgcggtggctgaactgtccccggcgcggccagccggtggcagtgaacagagtatctgtcaggcaagagctgctgtgatggtttatgatgatg

SEQ ID NO: 559837 - DNA, 98 bp, Homo sapiens
gaatgtgttgaatgacatgggagacacgccgcttcatcgagctgcctttacaggacgaaaggaaggcccttttgtctacttgtctttagtaggaaacg

SEQ ID NO: 559838 - DNA, 75 bp, Homo sapiens
cgatccttttccctccagtcaggatcctcagtcttccacaatgaaccctgtttacagccccgtgcagcctggggc

SEQ ID NO: 559839 - DNA, 75 bp, Homo sapiens
gaaaagggcaacgattcagtttcaccaacctcagagatttaaggagccaccagaaatggaactattgaaattttt

SEQ ID NO: 559840 - DNA, 85 bp, Homo sapiens
ttacaatatccggccctactggaatattttaaagtaaatctcaggtgttacatcattgcactttttgtgaagaaatatgggaacc

SEQ ID NO: 559841 - DNA, 83 bp, Homo sapiens
cgccgctgcctcaggagcggaacaacgtcggcgagcggggttttaaaatcaaagatgggaaaatcggagaaaattgcccttcc

SEQ ID NO: 559842 - DNA, 75 bp, Homo sapiens
gtaccagaggtggggactgttgttggaggaacactttccagcttcctggacaagatcgacgtgatcaagcaggct

SEQ ID NO: 559843 - DNA, 97 bp, Homo sapiens
gaagactctccctccctggattgttgtcacaagggcatcagtccacaccagatggcctaccacagttagagagagaagaaaagctgtggatgatgaa

SEQ ID NO: 559844 - DNA, 82 bp, Homo sapiens
gtgcgtttggcgggatcctggtggtgagaagccctaccactgcaactgggacggctgcggctggaagtttgcgcgctcagac

SEQ ID NO: 559845 - DNA, 100 bp, Homo sapiens
accaatttttacgtctagatttccatgcccatggaagaatattccctctgtatacttgcatttttttctatcaattgacgcttacaattatttttgcaag

SEQ ID NO: 559846 - DNA, 90 bp, Homo sapiens
gagagacagaagcggacccagaaatgatcaaggtgtccctacaccacaccgaagatactcaccttgtggagattggaaggatgccagctc

SEQ ID NO: 559847 - DNA, 96 bp, Homo sapiens
ggcgcgggcaggagcctggcgaggatgcaccttcccctgccttggaaagctgtcaccactgactaaagaagagaaaactgcggcagagcaattcaa

SEQ ID NO: 559848 - DNA, 75 bp, Homo sapiens
aaagctatggaaggaaaatggataacagatcagttgacaggtgctctagttcacagctataggggaacaggtgga

SEQ ID NO: 559849 - DNA, 97 bp, Homo sapiens
gcccgcatcagcggcctcggggaatggaagcggagaacgcgggcagatttgcctactggctgggaagaagcatatacttttgaaggtgcaagatact

SEQ ID NO: 559850 - DNA, 98 bp, Homo sapiens
tgactactcgcatcgcgcactttttggatcggcatctagtctttccgcttcttgaatttctctctgtaaaggagatcttggacatgatacctggatgt

SEQ ID NO: 559851 - DNA, 97 bp, Homo sapiens
ggtgccggtgcctgtccccgggggcgccatggcgaccggagcgaacgccacgccgttggtttcaaatcgccactgtcaccgaaaaaggtgttgaaat

SEQ ID NO: 559852 - DNA, 100 bp, Homo sapiens
cagatcgtgcacgagaccggctacttctcggcgctgccgtctctggaggagtactggcaacagacccaacatgagtgaagtttcctgcaagaaacgggac

SEQ ID NO: 559853 - DNA, 50 bp, Homo sapiens
gacggcggcagcagcggcattcaggtgtggatgaggtcaccattgtcaac

SEQ ID NO: 559854 - DNA, 82 bp, Homo sapiens
ttggagagaagctcaaccactggaaatggggttcaggcccctcctgttgttgctgcaactccctcacccacagcagtacctg

SEQ ID NO: 559855 - DNA, 75 bp, Homo sapiens
acctctgacaagaccaagtactaccttcaagatacactctggaaatgattaaactagtaccacataatgaaagtg

SEQ ID NO: 559856 - DNA, 87 bp, Homo sapiens
acatgagatggtggatgaacccccagtgacactccattcagggtaatggacaagatggagtttgcagaggcgaggaaaacacctgtt

SEQ ID NO: 559857 - DNA, 82 bp, Homo sapiens
agaagagccaaggaataaacatgcaatgaacccaaaaggcaatgttgtggagaagtgtgttactcacgcctcacgtacggag

SEQ ID NO: 559858 - DNA, 98 bp, Homo sapiens
cttttatgtgcgtttgctgtcaggagctagtttaccagcctgtgacaactgagtgcttccacaatgtctgtaaatttctccacagacactacccaaag

SEQ ID NO: 559859 - DNA, 90 bp, Homo sapiens
aaaaagagaaacctgggtgaactttcacggacaacctcagaggacaacgaagtgttcgggtgtcaaattgagaaccaggtagatccccac

SEQ ID NO: 559860 - DNA, 50 bp, Homo sapiens
ccaggcgggagaactaccgcagcagaatttgaaagacatattggctgacc

SEQ ID NO: 559861 - DNA, 99 bp, Homo sapiens
ggagcacggaaacttgttcagaccacatatgagtgcctgatgcaagccattgatgcagtttttcagttatgggacaaaaatattatatcaaaacactga

SEQ ID NO: 559862 - DNA, 100 bp, Homo sapiens
tcgggttttagtgattccttcctcaaatgttagcattacaactgaaggtggtgtttttaaggctcatcttactttcccaaaagattatcccctccgacct

SEQ ID NO: 559863 - DNA, 82 bp, Homo sapiens
tggccgtgttgctgatcgcctgggtggttgttggcgtgtccctgcagcgaaggatcctgaggactaccccaatggcacctgg

SEQ ID NO: 559864 - DNA, 78 bp, Homo sapiens
cacttcattggccacctacagaaacaaaatgtcaacaaattgatgggatacaatgtctctttgctatatgaccttgaa

SEQ ID NO: 559865 - DNA, 100 bp, Homo sapiens
cgggccgtccatcctcgcattgctgttgaatggtgcctacgaccgcttcctgccctacattctcatgggaagtctgaccatcctgacagccatcctcacc

SEQ ID NO: 559866 - DNA, 51 bp, Homo sapiens
aataagttcgccaaagcgacaggagcttttttccagaaaggaggagtcaag

SEQ ID NO: 559867 - DNA, 83 bp, Homo sapiens
ctacttccaggtgaatccaacaagatcccccgtctgaggactgacctttttccgggcaacaccctccactaaagagtcaagcc

SEQ ID NO: 559868 - DNA, 100 bp, Homo sapiens
actctgagaccatggatatatcggttaatggatctgggccctgcacatataccatctctggctccagggaatgtgagcctcaagtactacagccttccag

SEQ ID NO: 559869 - DNA, 100 bp, Homo sapiens
tttataccggttcagcaagtatgttctcagaagctatacactcattatctgatacttgtaatcagtgccgcgtatgatgctgtccttgacagaaatgtgg

SEQ ID NO: 559870 - DNA, 74 bp, Homo sapiens
gtccctctgacacatccaacttcgacgtggatgacgacgtgctgagaaacacgtcagccataatggcaggtgaa

SEQ ID NO: 559871 - DNA, 75 bp, Homo sapiens
gctgaagtccctggaggaggagctggagaggaaggcgaggctccagatgctggaggccatctgcaagcactggga

SEQ ID NO: 559872 - DNA, 83 bp, Homo sapiens
caactgaaagtcacgattaggactgacaataagaataactgaagtgaagtgatggactccgatttggagagtagtaagacgtg

SEQ ID NO: 559873 - DNA, 98 bp, Homo sapiens
tatgaatggcagtgactctggaccaagcgaagcagcagttttgggaatttcgatcgttttcggaataattctttatcaaaaccagatgattcaactga

SEQ ID NO: 559874 - DNA, 48 bp, Homo sapiens
tgtgtcccacttgttcgcggcctatagtttcaccagtgatcattaaag

SEQ ID NO: 559875 - DNA, 82 bp, Homo sapiens
acccaggaacctcgccatccagaacacttctcagaacttctggatgagttttcccagaacgtcttgggtcagctcctgaatg

SEQ ID NO: 559876 - DNA, 100 bp, Homo sapiens
cctggacctgccgcagatcgctgtagtgggcggccagagcgccggcaagagctcggtgctggagaacttcgtgggccgatccacatgaagaccatgcccg

SEQ ID NO: 559877 - DNA, 100 bp, Homo sapiens
gcaccgtgcacgtggtcgtcaacaaccagttgaatccttggcctgaatatatttacacacgtcttgagatgtataatatactaaaagcagaacatgattc

SEQ ID NO: 559878 - DNA, 100 bp, Homo sapiens
gaatctggtccaaacaatcatgggaatttccaaggggattcaaacttcaacagaatgtggcaaccaggccaggtgtggtgtcttacacctgtaatcccag

SEQ ID NO: 559879 - DNA, 100 bp, Homo sapiens
ctcgaccccttctgcccggcgcttcggcccgggccgctcaggtgcagctgagtcagtgctgattctctcaaatagagcttgaaggataaatcttcatttt

SEQ ID NO: 559880 - DNA, 51 bp, Homo sapiens
actgcgcccccgggagcgggcgcccagagagcaggacaggctgctttggtt

SEQ ID NO: 559881 - DNA, 82 bp, Homo sapiens
gcgagggcgcgcggctggtgtccgccccgcccgaaagatgatcatgacgcagtcctgaggtttaatggggcacccacagcca

SEQ ID NO: 559882 - DNA, 75 bp, Homo sapiens
acagccattcggagctacatccagtgaataaggagccgggtgtgggctgagccctgcctgattgatgctgccaag

SEQ ID NO: 559883 - DNA, 74 bp, Homo sapiens
atgtcagtattgtcatgagatctgcaggacattcccagatatcacgtattaaaccattaaaaatctcaagtgac

SEQ ID NO: 559884 - DNA, 83 bp, Homo sapiens
aggactcctcgcctggctcggaaggtgtcgtgaaaactacccctaaaagccaaaatgggaaaggaaaagactcatatcaacat

SEQ ID NO: 559885 - DNA, 99 bp, Homo sapiens
aagagaagcagtgaaggagtgcagaggcatcacctgaaaggtattgacctgatggacatggcttcggacatcctgcagcccaaaggagatgatgtggcc

SEQ ID NO: 559886 - DNA, 100 bp, Homo sapiens
ggccttagcgatctatattccctttccagaagatgattccaacgccaccaattccaacctgctacaagagactgtgaaaaggaagttggaaggagctcga

SEQ ID NO: 559887 - DNA, 82 bp, Homo sapiens
gcagggccagcagcaggcgggaggacctgaaggagaagaaggagaaggtggaggagaaggcaagccggaaagagcgaaagaa

SEQ ID NO: 559888 - DNA, 49 bp, Homo sapiens
atggagtgcctccaaaggttgctgaggttgaagcactggacaatgccac

SEQ ID NO: 559889 - DNA, 100 bp, Homo sapiens
ccgagtccagcccaggaaaatggagaggttaagaatagacccaccagcatttcgtgggatggtcttgattcagggaagctctacaccttggtcctgacag

SEQ ID NO: 559890 - DNA, 88 bp, Homo sapiens
gggaaagtgctaaagccgctgaggtgtgtgatcctgtaaaattaaatcttccaagatgatctggtatatattaattataggaattctg

SEQ ID NO: 559891 - DNA, 75 bp, Homo sapiens
tgctaatccagtggaaatcaggagagaggagttgaagccaaacagccaaattctgccattaggaagtgtgtaagg

SEQ ID NO: 559892 - DNA, 83 bp, Homo sapiens
gactccatggccaactccttcgtgggcacgcgctcctacatggctatgtggcaaaatctggcaaaggcagagaccaaacttca

SEQ ID NO: 559893 - DNA, 100 bp, Homo sapiens
ctagtctggaaaaacgactaccggcagctcgagaaggagctgcagggccagccctgttcacagagacaccccatgacatgacagcacggacgggcgagga

SEQ ID NO: 559894 - DNA, 50 bp, Homo sapiens
acgacccggagcacccgacccctgaggtgagttctgcatcctggtacttc

SEQ ID NO: 559895 - DNA, 97 bp, Homo sapiens
tgcagcccctgcgtcgccgggaccctcgcgcgcgaccgccgaatcgctcctgcagcagagataacatccctgaggacctcagagaccctttctacgt

SEQ ID NO: 559896 - DNA, 49 bp, Homo sapiens
gaagatcacaccactcacgctcaagattttgacagtgaagaactggaga

SEQ ID NO: 559897 - DNA, 100 bp, Homo sapiens
ggagccctggaatgtgaagagacatgagaccatagccaaacccccagatggagtgaaggtacctgagcgcaggaaccatggtcttcattgctgcctcagc

SEQ ID NO: 559898 - DNA, 100 bp, Homo sapiens
gagcagagtggaccaccccatgaacctcgctggagcagttcagcatggagagcccatcagccagcctggtgctggatccccctggcttttctgaagggcc

SEQ ID NO: 559899 - DNA, 98 bp, Homo sapiens
tgctgcttatggcggcgctggagagggggcgctgagctgttggggaagaattttaaatcgtttctccaaagacattggacacttggatgatttgctgc

SEQ ID NO: 559900 - DNA, 75 bp, Homo sapiens
cctgagctcagctgctccaaagacatccagtatctcaaggacagtcattttgtttactcattcagccctgttgca

SEQ ID NO: 559901 - DNA, 141 bp, Homo sapiens
aggagatggaggtggccacgcagaaggtggacgccatgcggcaggaaatgcggagagctgagaagctcaggaaagaggatgaagcctgctgggagcgtgaatgacatggccctggatgccttcgacttggaccggatgaag

SEQ ID NO: 559902 - DNA, 75 bp, Homo sapiens
aaaggaacgggatgatcatgaagagttagcctggcctggcataatgggccccagttgtgacagcgttgaggaaga

SEQ ID NO: 559903 - DNA, 74 bp, Homo sapiens
ctggctccccatactagtcgccggaccatggccaacctggagcgcaccttcatcgccatcaagccggacggcgt

SEQ ID NO: 559904 - DNA, 83 bp, Homo sapiens
ctctctggaggccaggagatggtttgtccgatatgtgcctcgatgccctggggagaccccaactaccgcagcgccaacttcag

SEQ ID NO: 559905 - DNA, 100 bp, Homo sapiens
cacgcccggggcccgcgtcgcgatcgcgacggctacagctacggaagccgcagttgggagccacgtgtaccagtgtgtgttgatcttggcttgattcagt

SEQ ID NO: 559906 - DNA, 50 bp, Homo sapiens
tttggaactgtcaggtacctcaaagcatggtgttatggtccagattactg

SEQ ID NO: 559907 - DNA, 90 bp, Homo sapiens
gatgcatctggttcttctaaaggagcaattctccaatacttacagtaatctcatattaacaggtgccgacgccaccgccgagcccatgat

SEQ ID NO: 559908 - DNA, 100 bp, Homo sapiens
aaagcattgatggaatgtgctttagaagttaaaaagtgttctaagaacggaagcatctgggctggatggaatttagcatcaagcagagtcccctttctgt

SEQ ID NO: 559909 - DNA, 50 bp, Homo sapiens
cgaatagctctgaccacccggcgaagatgactcttctacaaaagtggaca

SEQ ID NO: 559910 - DNA, 50 bp, Homo sapiens
ggtacatctgaaagccgggaaatgagcagtgtgacctttgaagacgtggc

SEQ ID NO: 559911 - DNA, 97 bp, Homo sapiens
tcatacagagcttgtttttcttttcactcctcctacagtgagacatcttcatttgattgtacaccatctcccagcaagacaccagttgaaaacccct

SEQ ID NO: 559912 - DNA, 100 bp, Homo sapiens
tgagagccggacgggcactgggcgactctgtgcctcgctgagggctaccggctctctgaccagttccacgacatcctcattcgaaagtttgacaggcagg

SEQ ID NO: 559913 - DNA, 100 bp, Homo sapiens
tgctgttgatattgtcaaagagtaatgccaatctgccttcatcccttcgccgtgtgaattcctttcagtatttaaaccgaggctgcactagatactttgc

SEQ ID NO: 559914 - DNA, 74 bp, Homo sapiens
tcaagctgcagtggttcgacaagctgctgatgactgtgggccacgactgcttcccggtgctgttcacctatgac

SEQ ID NO: 559915 - DNA, 99 bp, Homo sapiens
ctcccaaaaatagacgcaccattgaagttaaccggtgtaggagaagaaatccgcagaagcttattaaagttaaggagagacagcgtctggagaccatcc

SEQ ID NO: 559916 - DNA, 100 bp, Homo sapiens
acaggtgctgagccggcttaccgcgcccgtcgtcaccactcagcttgacaccaagaatatctcctttgagaggatgctataaaatcaccacggtctttag

SEQ ID NO: 559917 - DNA, 99 bp, Homo sapiens
attgtctcccacggcagcagctaacttcacacgccgaaacctggctgactgtcttcggagtcggcgtactgagcgctttgggcagggaggtgcggggcc

SEQ ID NO: 559918 - DNA, 100 bp, Homo sapiens
gtgcgggccaccctcagactgtacgcagagagctacgagagggatcccagcggccatgaccaggagccacagaccaaacctggaccacccaaaaagccga

SEQ ID NO: 559919 - DNA, 100 bp, Homo sapiens
ggcaccgaggcactcagaggaggatccagccgcagaagccaggatgaaggtagcctgcatcacagagcaggtcttgaccctggtcaacaagagaataggc

SEQ ID NO: 559920 - DNA, 100 bp, Homo sapiens
ccggaaccgagcaatggcagacgtgtcccttcaccggaacccagcaacggaaatctggcattttttaaagtttgcgccccacaaagaggaaatattccaa

SEQ ID NO: 559921 - DNA, 75 bp, Homo sapiens
ggatgtcggcgaagagttcaaccaggtttgaaagagaagatagtgaggagctttgaagtctccccagatgggtcc

SEQ ID NO: 559922 - DNA, 75 bp, Homo sapiens
gtgacccacggccgcctccggagcccgacgcggcagccatgttgttcagttctggagtcttttggatgggcttgt

SEQ ID NO: 559923 - DNA, 74 bp, Homo sapiens
aaggcggctaagtcccggcagcgggaacacagagagcgaagccaggaagatgagaatgtgcctactgctcctga

SEQ ID NO: 559924 - DNA, 134 bp, Homo sapiens
tcccatcaggtggggaaagatgctgttccaggcgcacactagtctacaaggccagagctttctggaagggggcatttcagagactcctccactctctgggaatgacacggactccctctcctgcgacagtggca

SEQ ID NO: 559925 - DNA, 98 bp, Homo sapiens
caaagtacagctctacgagctcaagacctaccacgaggtggtggacgagatctactttaagaaccaagatccaattccctggagaatttttaacccct

SEQ ID NO: 559926 - DNA, 83 bp, Homo sapiens
ggattctcgacctgctaacagaactggaccttttcgagcgtttcccaaagtgtattctgcggaactagcacctactgtgttct

SEQ ID NO: 559927 - DNA, 95 bp, Homo sapiens
agagtccgggagcccgagcttgaggcctgtcccctcagttcccaggtgccatgaggaagcctcgtcggaagtcccggcagaatgccgagggccgg

SEQ ID NO: 559928 - DNA, 75 bp, Homo sapiens
agtggaaaatgcaaagtgtgtgcaagcaaatgcttttattcagacgaagggaacgtcatcgtttggaaagcgtcg

SEQ ID NO: 559929 - DNA, 75 bp, Homo sapiens
gcgagttcctgcgcggctgcggggcttccctgcggctggaggcgaaacctaaccaaactgtccctcatcttcagc

SEQ ID NO: 559930 - DNA, 100 bp, Homo sapiens
aaaagactgggcttgtccttgctggtgcatgcgtcgtcggcctctgggcagcagaaattccgggtagatatgcctggctcaggcagtgcattcatcccca

SEQ ID NO: 559931 - DNA, 100 bp, Homo sapiens
ctactatattcagtggctaaatggctccctgattcatggaggagaacatttgcctgcactgggcggcgttctccggctgcgtggacatagccgagatcct

SEQ ID NO: 559932 - DNA, 82 bp, Homo sapiens
cgggtccagacccacgcggcgccagttctccggcgggaaggaaaaccgcgcagagagggggatatgagactttctactcgga

SEQ ID NO: 559933 - DNA, 75 bp, Homo sapiens
cggaagtgcagctgcctcagttcttagcgcagttgctctcaccagaagatttagtgaatgcgtgcaagatgctgg

SEQ ID NO: 559934 - DNA, 60 bp, Homo sapiens
tctgaccagacacaagaagagaagacttgcagtcacagggactgttgacatttagggatg

SEQ ID NO: 559935 - DNA, 75 bp, Homo sapiens
gaggagcggggcggcgcaggcgcctacaacacagcagtcccctcaggatgagcaggaaaagctcttggatgaagc

SEQ ID NO: 559936 - DNA, 88 bp, Homo sapiens
ctttcaccattttggataataggatatggtttcggaactttcagatactaatggaccatactaccaaggaccagtccacctgaaccac

SEQ ID NO: 559937 - DNA, 100 bp, Homo sapiens
cccagctctgcagccacatactatccgtttgttcaggaaccaccagtgacagatgtctgccaatgattttggacaacaaactgagccacccattgttaga

SEQ ID NO: 559938 - DNA, 100 bp, Homo sapiens
ggaagaacggtgaatttcccccgcaggatcagttcgacagcttagacaagcatacacaatggggaattgacttcttggaaagatatgccaaatttgttaa

SEQ ID NO: 559939 - DNA, 100 bp, Homo sapiens
gtctgacagaggctgaggaggaggagctcagggctgagcttaccaagagtaacagttacccctcaatgagcgacccctacctgtccagctattacccgcc

SEQ ID NO: 559940 - DNA, 75 bp, Homo sapiens
gaagagcgagagaaaagagaggacagcggacgagcagatccgatgtattagacacagaaatgattggggagctct

SEQ ID NO: 559941 - DNA, 75 bp, Homo sapiens
aggaggtggagaaggcttgggctcgcgccgctgaagccaaatggagcggagtccctgaaagatttttgccaggaa

SEQ ID NO: 559942 - DNA, 96 bp, Homo sapiens
aaatctatcacttacctgatgcagaatcagatgaagatgaagattttaaagagcagactagacttctcaagctgccaatttgtggtgtctgaagac

SEQ ID NO: 559943 - DNA, 90 bp, Homo sapiens
agtccatccaattaagaatttgcattcttcacattcatcagctgaagaaacacttaaattctggaaatagcgactcagtatcatggccag

SEQ ID NO: 559944 - DNA, 101 bp, Homo sapiens
tgttcaaacagcactgccaaatagcagaagaataccatgaggtcaaaaaggaaatcaccctgcttgagcaaaggaagacatggatttgattgacatacttt

SEQ ID NO: 559945 - DNA, 80 bp, Homo sapiens
ctatgcggacattacagccccgggcaccatgactacgctgactgccatgggaaattaaagagggtgctttactgttgccc

SEQ ID NO: 559946 - DNA, 50 bp, Homo sapiens
ttcggcgttccgtgagtgaacggtccacgctgcttttatgagctgtaaca

SEQ ID NO: 559947 - DNA, 78 bp, Homo sapiens
caggactgccaccagtaccaggagcaccaggaatgcctccagacatgcttcagcttatcaacaaccaagacagtgact

SEQ ID NO: 559948 - DNA, 82 bp, Homo sapiens
ctgtgacagtaacagtacttgggatcccccagttccaaagtgtcttaaagcggaagatccatccaaaagctatgtgaaatta

SEQ ID NO: 559949 - DNA, 100 bp, Homo sapiens
gaaaaggggtgattgttgcaaagagcaaagaagaggcctgcaaagctgtacaagagatcatgcaggttaagcaaccttttccacgggatggataagaata

SEQ ID NO: 559950 - DNA, 90 bp, Homo sapiens
ctatgaccctatgaccccagtcaatgccaggttatccggtgttggctcctgctgcttactatgaccaaactggtgcccttgtagtgaatg

SEQ ID NO: 559951 - DNA, 83 bp, Homo sapiens
caaggagctaaagcagcgtgcgttcagccctgggagctgttgcgcagccattggtacctgtattggggaaacatagcatacaa

SEQ ID NO: 559952 - DNA, 96 bp, Homo sapiens
gaaaaccttatcaagaaatatgggacacatttcttgctatctgctactctgggaggttgccgaggagcccaagtagaagaaatatggagtttagag

SEQ ID NO: 559953 - DNA, 90 bp, Homo sapiens
gtgtcgcagggtgtggtcaaccagcctgagtatgaggatggcagtgcctggaagcaagatcccttccaggagagcggcctccacctgagc

SEQ ID NO: 559954 - DNA, 75 bp, Homo sapiens
ccaaaaaggatgtcatgttcctggcctggaagccatcttcgacaagagcacagggaaggttgttttgaagacgtt

SEQ ID NO: 559955 - DNA, 75 bp, Homo sapiens
tggaaaggaaccgttctggatcaggacatcttccttttaagcagtgactcgggaatcgaggccacttccatcctg

SEQ ID NO: 559956 - DNA, 100 bp, Homo sapiens
ctgcaaggtctctggaggaattcaatgatgtgagatgagtatgatgtatgtgccatttgtttggatgagtatgaagatggagacaaactcagaatccttc

SEQ ID NO: 559957 - DNA, 75 bp, Homo sapiens
ggggattctcgacctgctaacagaactggaccttttcggaactcgaatcatttatgacagaaagtttctgttgga

SEQ ID NO: 559958 - DNA, 75 bp, Homo sapiens
gcttgaacatcctttgactggttagccaggtcaccatcagaaaagctaagtttgctgtatagtgaggatcaggag

SEQ ID NO: 559959 - DNA, 99 bp, Homo sapiens
ggccctgggagctggaggaaccgcggtaaacgcaaagcactgaagttgaattttgcaaatccacctttcaaatctacagcaaggtttactctgaatccc

SEQ ID NO: 559960 - DNA, 129 bp, Homo sapiens
ttttcaatgtccattccgctgtgttgattgaggacgttcccttcacggagaaagattttgagagtgtggccatctggggccgtgtggtatttgccactcaggagacatgtccctatgacatagcagtgg

SEQ ID NO: 559961 - DNA, 82 bp, Homo sapiens
tagtaaacggggctgctggtgggccgcgtcgaagacatggaccagggctacggagagacctgtcggccatggagcctaatga

SEQ ID NO: 559962 - DNA, 100 bp, Homo sapiens
tttctacagactacggtttgagctcagatatcgggctgaacggtcaaagacattcacaacatggatgtttcggagcaacatcccctgtcacctggttgat

SEQ ID NO: 559963 - DNA, 75 bp, Homo sapiens
cattttgggtgattttaaactagatgatgattattccccaccttctaagagacaaagaccaacgagccaccacag

SEQ ID NO: 559964 - DNA, 83 bp, Homo sapiens
atatggaatgttcttaacccagaagtagctgaatgtgttactccattgctgaggagtgagatggtgaattgtctttgagtcgg

SEQ ID NO: 559965 - DNA, 73 bp, Homo sapiens
cgaagagaccacctgtccttcgagcagctgcagtacagcaatggcgatcagaaggtagaacagctgtatggct

SEQ ID NO: 559966 - DNA, 50 bp, Homo sapiens
aggtggtgcgcggctccgtgctcctgagcacagcaatggaggaaacagct

SEQ ID NO: 559967 - DNA, 101 bp, Homo sapiens
cgggattgatgtgcaacaagtgtctttggttataaattatgatctacctaccaatcgtgaaaactatattcacaggttactaccggtactacaacaagtac

SEQ ID NO: 559968 - DNA, 100 bp, Homo sapiens
cttttgatgtctgacaacgtggatcgttgttttgaaacgtttctagagaggaaggatctccccagctgtcttcagcaaggccgtctcctgcccagagaaa

SEQ ID NO: 559969 - DNA, 75 bp, Homo sapiens
cgcgggtctccgtggaagtccgtttcgtgagcagcgccaagacgcccagcggcagcaggatgagtgcggaggcaa

SEQ ID NO: 559970 - DNA, 98 bp, Homo sapiens
atcatgacgatgcagcagaatctctgattgagcaaaccacagctctcaacaagcgagtagaagccatgaaacagagttgctggagaatgtaaccctaa

SEQ ID NO: 559971 - DNA, 83 bp, Homo sapiens
tggaacttcgttgcttgcttgcctgtgcgcgcgtgcgcggacatggcctcaaacggtgcgcgcggagccatggttatcatgtc

SEQ ID NO: 559972 - DNA, 100 bp, Homo sapiens
ctgaatccaggaggagacccttctacgcctggttacccaagtgtcgttttagagaattactccaaattcatcatgattgaagacaataaggagaacaaag

SEQ ID NO: 559973 - DNA, 100 bp, Homo sapiens
aaaagctttatggaaactgcaatggatgttgagatcgagatggtgatcatggagcgtagcaagctctcagagctggccgccagcacctccgtgcaggagc

SEQ ID NO: 559974 - DNA, 50 bp, Homo sapiens
ggggaaaatctccccggtgactttcaggctgaccccgcactacatctacc

SEQ ID NO: 559975 - DNA, 82 bp, Homo sapiens
aggactctggagctgacagcgcgcacttcacccgcagttggtattagaaaactactcggatgctccaatgacaccaaaacag

SEQ ID NO: 559976 - DNA, 74 bp, Homo sapiens
gcggggaccgctgtgctctcgtcctcctgcccctgctcgagtcttgcagtgtgcggcccgacgccagcgtttcc

SEQ ID NO: 559977 - DNA, 99 bp, Homo sapiens
ccagcttctgctgtccttctttgtggagagcaaggagcttgaagaaatccgcaaatgtgggatgaaaaacttccgtaacatccaggttgatgaagctaa

SEQ ID NO: 559978 - DNA, 100 bp, Homo sapiens
ttgcaagagcccgacttgaagtggaaaatcaagctaagcgcctactagagcagggtttggagactcagcagcagcacagcaagtggataaaagcacagac

SEQ ID NO: 559979 - DNA, 100 bp, Homo sapiens
tccattccagaaccatggcccaatttgtccgtaaccttgtggagaagaccccggcgctggtgaacgtgatgatgatgatgattttgatgatgaggaagct

SEQ ID NO: 559980 - DNA, 99 bp, Homo sapiens
gcgctgctgcggaggttcaaagtgtccgacgagatcccagctctcctgttggcttcgtgcttggggtagatcttcttcacatattccccctggaaggag

SEQ ID NO: 559981 - DNA, 90 bp, Homo sapiens
tcttttggtggctcgatgttaccctcatattttcagcactaattttagggtgaagcccaacactcctgtcttaatgtgctctgtgcctgg

SEQ ID NO: 559982 - DNA, 75 bp, Homo sapiens
gatgactatgagaactcaacacctccctacaaggaccttcctcccaagccagagatggtggccacacagcaggag

SEQ ID NO: 559983 - DNA, 100 bp, Homo sapiens
ggaagcctcccagtctgaattctgtggattttcgtctaaaaataacaagaatgggaggagaaggtattggtaaaggttttcaaggtgtcatgaaaagatg

SEQ ID NO: 559984 - DNA, 100 bp, Homo sapiens
ctttaactggaactccccattatatgagtcctgaggctctgaaacaccaaggctatgacacaaagtcggacatctggcttctccagggaaagtgaccgag

SEQ ID NO: 559985 - DNA, 100 bp, Homo sapiens
gctgactggctccttagaagctgtgcaagttcaggtggacaatcttcaggaagagtctacagtccatgtaggccgcatgttgaaagaaaatcactgtctt

SEQ ID NO: 559986 - DNA, 99 bp, Homo sapiens
gggctacttcactgtcaaccacccagataaccaggaaccctctggatattgatgcctcgggtgtggttggactgtcatttagtggacaccgaatccaga

SEQ ID NO: 559987 - DNA, 83 bp, Homo sapiens
ctgggatttggaggatttaatacacagcagcagcagcaaactagaggattccctgggagcacccaccagctgagatctgcaca

SEQ ID NO: 559988 - DNA, 74 bp, Homo sapiens
acctggtccagctgcccgcaggggtgctgcttctggccgtgtgtgagaagagcacccccattggcaccagctgc

SEQ ID NO: 559989 - DNA, 100 bp, Homo sapiens
ctggaggaaggggcgcgccgcgtgggagccacgcacatcgtgacaggatcccaattctgggtaacggtgcagaggactgaggccgccgagcgctgtggcc

SEQ ID NO: 559990 - DNA, 75 bp, Homo sapiens
gcggaggcggaggcagaggtggaggcgctttgaaagagcagccatcagcagggaccctttctacgaaatgctcgc

SEQ ID NO: 559991 - DNA, 101 bp, Homo sapiens
caaggccacaactctgcagtggaccacagcattcctgaaatacatccaggaaagacatggagattctcttaaaaagacaccattcgcttttcacccaagat

SEQ ID NO: 559992 - DNA, 99 bp, Homo sapiens
cgctggccgcgggctccatcagcatggctgagcaaatggacaatgccgtgtatacgttcgagaccctcctgcaccaggagctggggaaggggcccacca

SEQ ID NO: 559993 - DNA, 95 bp, Homo sapiens
tgagtttcaacaagtcggagctttttacaggcatttccttcagtgcttcctacagagaacaatggagccagaggataagttctgaacgtcgaaaa

SEQ ID NO: 559994 - DNA, 48 bp, Homo sapiens
tcagcaccggaggtggaagactggaaggcgtggaagtgcgagtggcca

SEQ ID NO: 559995 - DNA, 100 bp, Homo sapiens
ctgcgccgacggctccacctacaaggtattttcaaccaccaggaacttggatacagtgtgctttagaatccagggaacttcttgctttgtgcttgaaaaa

SEQ ID NO: 559996 - DNA, 100 bp, Homo sapiens
ggcggccggcgggaccataagggcttaactcatatatttaacccccctccaaaaaatgtcagaagagatggataatattacagctgaagaaattatagac

SEQ ID NO: 559997 - DNA, 100 bp, Homo sapiens
gtggtggagctgtggcaggcagaagaaggggaactcctgctgcccactcagacaatgcagatcttcgtgaagactctgactggtaagaccatcaccctcg

SEQ ID NO: 559998 - DNA, 83 bp, Homo sapiens
ttccgttgcaatggataagtttggattcaggaaaaggggaagatagtgatgtactcagtataaatgcagatgcttatgacagc

SEQ ID NO: 559999 - DNA, 75 bp, Homo sapiens
gctcagaacagttggatcttgctcagtctctgtcagaggaagatcccttgggccttgttttaggaatctattcca

SEQ ID NO: 560000 - DNA, 98 bp, Homo sapiens
tcttcccgcacgcaatctgcctcggagacgttgataacgatacggattgtctcaaagcttgccaggagcagattgaggcggtgctcctcaatagcctg

SEQ ID NO: 560001 - DNA, 50 bp, Homo sapiens
cagatgctcccttctgctcctggctttatgaaggcaaagaacagatggag

SEQ ID NO: 560002 - DNA, 98 bp, Homo sapiens
ggaaacgcgtgagccaggccgagaggattacctgagctggaattggaagcaattgataaccaatttggacaaccaggaacaggcgatcagattccatg

SEQ ID NO: 560003 - DNA, 96 bp, Homo sapiens
ctcagagatgcctgtaccgtgatgtgacgctggagaacctggcacttatgtcctccctggattcatgttacatgtaaagctgtcctcatttgtgac

SEQ ID NO: 560004 - DNA, 80 bp, Homo sapiens
caggaaagacatggagattctcttaaaaagggaagacactgatcaaggtggcagaagctgaaaagcaactgggagccgcg

SEQ ID NO: 560005 - DNA, 74 bp, Homo sapiens
gctggaatttcctcagattatttatatggacagcctatttgatggctttgcagatggactaggagttgctgaag

SEQ ID NO: 560006 - DNA, 74 bp, Homo sapiens
ggcttctgagacggcggcagcagcggcattcagtttctgtagaaaatgtttcctgactgcaatgagggaaagcg

SEQ ID NO: 560007 - DNA, 82 bp, Homo sapiens
gaattcgccgtgcccgagaatagctccgtccagcagatctattccagaggggagcttcaccacttcattgacggctttaatg

SEQ ID NO: 560008 - DNA, 98 bp, Homo sapiens
aggaagtggaggaggcggctataataatagcaaacatcgatggcctactggggataacattcatgcagaacatcagggagaagagcctgctgagtgca

SEQ ID NO: 560009 - DNA, 75 bp, Homo sapiens
tcccctgcaccatgagctggggcaccgagctctggaaaagttgccagacggccagcattgccactgccagtgcat

SEQ ID NO: 560010 - DNA, 110 bp, Homo sapiens
gacgacagttcaaacaaagaggccgcggaggagaagccggaggaggacaacgactaccaccgcagcgacgagcaggagggtttgcatttgtgtatgaagctcaagatgtg

SEQ ID NO: 560011 - DNA, 74 bp, Homo sapiens
tgaatcataggcaagtggtgtgtggcacaaaatgcaacacggctttttctcctccgtgacagccagagtaatcc

SEQ ID NO: 560012 - DNA, 100 bp, Homo sapiens
gctttttaatgggacctgtgaagcaactgaagaaaatgtttgaagcaacaagattgcttgcaacaattgttatgcttaagttcaccatgtctattctcaa

SEQ ID NO: 560013 - DNA, 100 bp, Homo sapiens
tgccaaaatcagcagtctcctggaggagcagttccagcagggcaagcttcttgccgggcccctcagatgagagctgcacccaggccagcaccagtcgctc

SEQ ID NO: 560014 - DNA, 100 bp, Homo sapiens
gaggacaatgattgcggagcccgctcacttttacctgtttggattaatatgtctctgttcagcaggcattttggagatcaaagatgggtagaaaagatgc

SEQ ID NO: 560015 - DNA, 100 bp, Homo sapiens
agcttgagagaaaagcccccaaaagcagctattcaggcactggtgaggtggattgatgatgaatcttctggcacacctggagcaactccagaacacagtc

SEQ ID NO: 560016 - DNA, 100 bp, Homo sapiens
gcgttacaaactcctaggagggcttgctgtgcggaggccaacgtgcagcggctgaaggagtaccgctccaaactcatcctcttccccaggaagccctcgg

SEQ ID NO: 560017 - DNA, 100 bp, Homo sapiens
ccaggattctcaacctatgcaaccagtccttcattcccgcatttttccaggcacacatgtcttgctggaggtttgttaaatttatttatcttttcaaaaa

SEQ ID NO: 560018 - DNA, 50 bp, Homo sapiens
ctgcaccttctcttactgctggcctggatcatgcggccagatgatgccaa

SEQ ID NO: 560019 - DNA, 98 bp, Homo sapiens
gctgcttctggctgctaatgtggccaccctggggctcctcatggcccggctccttagcacctctccagggagagatgacatgctggacgtggagaccg

SEQ ID NO: 560020 - DNA, 75 bp, Homo sapiens
caatgctgcgaaagctgccaaaagtgacatgcagctcacggatgattgatatccagaccaggatggctgggcgag

SEQ ID NO: 560021 - DNA, 100 bp, Homo sapiens
cccagtatgttttagatggcagtggccacatactttctcagaaaccttcacatcttggtcaagacactctgacctggtcacagccagagacacttggaaa

SEQ ID NO: 560022 - DNA, 90 bp, Homo sapiens
ccaaaaatgtgcatactcacagagttagagagagggatggtgaggcagaggaggtggacacggtggacgtctccggcgtgcccgcagagg

SEQ ID NO: 560023 - DNA, 75 bp, Homo sapiens
ctgcagagaatatcacattccatgtccatatcaggaatgtatcctgtcaggtataatgtcagtgaatggcaagaa

SEQ ID NO: 560024 - DNA, 83 bp, Homo sapiens
ctggtctattcaagttcaagtgaatgatgaccatgaaagctgtggttctaattctaccaaccgtagtactgctgagagcacaa

SEQ ID NO: 560025 - DNA, 100 bp, Homo sapiens
tttgtccctcccagttttagatgatcagagaagaaaactacgcctcagccctgagcaatgtagtaacttttatgtggaaaagtatggaaaaatgtttttc

SEQ ID NO: 560026 - DNA, 101 bp, Homo sapiens
gctcgatccagcaccatggggaagcgggacaatcgggtggttacctgtgcatgacagatgagtggttctctgagtatgtctacgaagtggtggtggacagg

SEQ ID NO: 560027 - DNA, 75 bp, Homo sapiens
aagtcaattaccatcctttaccagggtgtgatgaatgcagactctgctaccattttggctgtttggatcctcctt

SEQ ID NO: 560028 - DNA, 75 bp, Homo sapiens
cgcaagtacagagagtacagccccccatatgcgccgttccggaactttaagatcatttaccgccgctatgctggc

SEQ ID NO: 560029 - DNA, 74 bp, Homo sapiens
cccgagaaccgtcagtttgagccagatgagtgcctggtgaagaatgtgatgggatcactagcatgtctgcggag

SEQ ID NO: 560030 - DNA, 90 bp, Homo sapiens
aatgaaccgtggcaatttcttagagatcaagaataaatttctagctcgaaggtttaaggacccagagttcaacaatacagatcagattga

SEQ ID NO: 560031 - DNA, 100 bp, Homo sapiens
cacacctcgggcccgaccccgggccccccacaagccccatgagggttcgggggtgattaaagctggctttgcaggagaccagattcccaaatactgtttc

SEQ ID NO: 560032 - DNA, 99 bp, Homo sapiens
acagatctctgtctacagtggttcagaccgacatgctgtacagggcggcgactggcggcgcgatggacctgaccgggctcctgctggacgaagaaggca

SEQ ID NO: 560033 - DNA, 75 bp, Homo sapiens
taatcagagtggaggaagtacagccagcaattccaactgatgcaccctgggaggctcaacatgctgacaaatggg

SEQ ID NO: 560034 - DNA, 100 bp, Homo sapiens
tgcgtaccctcaacatcagtggaaacgagatccagagattgccgcagatgctggctcacgttcgaaccctggagagattttattccctcaaagttgcccc

SEQ ID NO: 560035 - DNA, 87 bp, Homo sapiens
gatatgaaactctacttaaagttacagatgattgctgtactagtggataagatgattcgtacacaaatagttgattgtgctgccgta

SEQ ID NO: 560036 - DNA, 75 bp, Homo sapiens
gctggtgcagatcgcacggaaggcaggtggccagacggagatcaaggactggtgattgcagctggaagtgcccat

SEQ ID NO: 560037 - DNA, 75 bp, Homo sapiens
gagcgcgagcggcgcgagaaagatgggagtcccagcttctggagacggggttcctggggatcttcctgtgccctc

SEQ ID NO: 560038 - DNA, 75 bp, Homo sapiens
catcccaggacctaccagaatctgggagttaaatacctgtgcatcccagcagcggattcaccatctcaaaacctg

SEQ ID NO: 560039 - DNA, 83 bp, Homo sapiens
gccggtggggccttcggaaagagagagcaggctgaagaggaacgatatttccgacatcaagccctacagctgcgagcagtgcg

SEQ ID NO: 560040 - DNA, 75 bp, Homo sapiens
tgatgcacaaaataagctggaaaaatctgaggctaggcagctggaagagaaagaccgagtgctaaagaagcagga

SEQ ID NO: 560041 - DNA, 100 bp, Homo sapiens
ggagttcttacaacatggcagacattgacaagatatgttcaaggaatgagtgatttactttcccctcttttatatgtgatggaaaatgaagtggatgcct

SEQ ID NO: 560042 - DNA, 102 bp, Homo sapiens
ccatggagcccgactcggtgattgaggacaagaccatcgagctcatgttctaggcctgattcttcactacctgagacgtctaaaaaggagcacatctcagct

SEQ ID NO: 560043 - DNA, 101 bp, Homo sapiens
tagggacgagatctagaatcaactgagagagatgcttaaaaatcaccagttactttaatgatggtgatttacaagtcaagttaaaatgtccccagaagtgg

SEQ ID NO: 560044 - DNA, 50 bp, Homo sapiens
ctagacttccccaaggcgtgtacccagagacgagttgtactgctgtcaca

SEQ ID NO: 560045 - DNA, 106 bp, Homo sapiens
cgggagaccaggagctcctccaccaggccaaagacttcggcagcctatgaaggggtgctgcagctggtggaggctcgcgggcgctacgaggagctctgcatcgtca

SEQ ID NO: 560046 - DNA, 101 bp, Homo sapiens
ggatgacttctctaatcagttacggtaattaataaaatgtctccaacatctctaaagatcacactaaggcaactcatggaggggtcttcaaagaccttgca

SEQ ID NO: 560047 - DNA, 101 bp, Homo sapiens
cagcgtcaaatcgctcagccaggagatgagatgcaccatccggctgctggacgactcggagatctcctgccacatccagatcgcccaggaccacaccgcag

SEQ ID NO: 560048 - DNA, 75 bp, Homo sapiens
gaggaactgagacgtttcgaattccagatcatcagaaaagcccttactgaggaaaaacgtgtctcaacaaaaaca

SEQ ID NO: 560049 - DNA, 100 bp, Homo sapiens
ctcctgctgctgggcgatacactatcaaagttctctttgcatctcaggaacatctggattatgagattatccagtctctaaatcctgaatttaacaaagc

SEQ ID NO: 560050 - DNA, 75 bp, Homo sapiens
atagacctattggatatggagcctttggtgttgtctgaaaaccagtctatccaagaccaggcacctatgttggaa

SEQ ID NO: 560051 - DNA, 82 bp, Homo sapiens
catactcggtttctgctcagagctcgatgtcaggcatcagatgactgaagacttcctgactcaatgatctttgaggatgtgg

SEQ ID NO: 560052 - DNA, 88 bp, Homo sapiens
ccaggctgcaagaacagtgctgggagacgagttgtactgctgtcacaggaaatggacgctggattacaagcatggcagctcaggcagc

SEQ ID NO: 560053 - DNA, 75 bp, Homo sapiens
atggcagcatttattgcccttccatcaatcttgcaaagaatcttacagaaaatggccttacagcctgggacaaac

SEQ ID NO: 560054 - DNA, 96 bp, Homo sapiens
aagatcttccgggagtgttggaagcaaggtcagggtctaaaattcccaggactccacagctttgcaccagataagcctggaggaatactaatgatg

SEQ ID NO: 560055 - DNA, 100 bp, Homo sapiens
cgccaaccgcaaccattgacgccatgtcgggttattcgagtgaccgagaccgcggccgggaccgagggatgtacagttacccagcacgtgtacctcctcc

SEQ ID NO: 560056 - DNA, 100 bp, Homo sapiens
actgaatactccttccttcctccccacccattcctttaaatccggagggggaaaaaatcccaaggtctgcaaagatcatgatgctgccgccaccgccgcc

SEQ ID NO: 560057 - DNA, 75 bp, Homo sapiens
ttcattggaggtatcaactgtaagaagaggaaagacttgtctcagcggcaacctttggcactgcatccatgagca

SEQ ID NO: 560058 - DNA, 100 bp, Homo sapiens
cgcggtggatacgtcgccatcttggatccgcgggacaagaaaattcatgcgggttggggtgctggaggactgcttcaccttcctgggcatcttcctggcc

SEQ ID NO: 560059 - DNA, 123 bp, Homo sapiens
aaaaaggaaaaaatagaaaaacaaattgctacatccgggcccccaccagaaggtggacttaggaacactgatatttgcatttaatggggaacaaaagatgaagaaggaaaaggaatatattca

SEQ ID NO: 560060 - DNA, 98 bp, Homo sapiens
cgggagttacaccgccaccgccagctccccgcagccaccgccacccattggaatggccaacaggggacctgcatatggcctgagccgggaggtgcagc

SEQ ID NO: 560061 - DNA, 95 bp, Homo sapiens
atgcttctagcaagatccagggcgagtacacgctgaccctcagagatgacctgatcagagccatcaagaaactaaaggcacttggcactggcttc

SEQ ID NO: 560062 - DNA, 104 bp, Homo sapiens
cgcgagcacagagcctcgcctttgccgatccgccgcccgtccacacccgccgccagatgccatggacaatattaccaggcagaaccaattctacgatacccaag

SEQ ID NO: 560063 - DNA, 100 bp, Homo sapiens
tacaagggctgcttcgacggcaacgtcaccttgacggcagtacgcctgcctcacaccttgcgatgcgccaacatcaccatcattgagcaccagaagtgtg

SEQ ID NO: 560064 - DNA, 75 bp, Homo sapiens
ctctgacatgcggacgtgtcgcgtttgcccattgaatcagctgaaaccatatctcgcacctgaggtgcttcataa

SEQ ID NO: 560065 - DNA, 100 bp, Homo sapiens
gtcaccacaaggccaagggcaagtgatttgacaggtattggatattcaggtcctggggccgtgtgggtacggtgatcggtagcaacaaactggaacagat

SEQ ID NO: 560066 - DNA, 100 bp, Homo sapiens
gtgctgcgctactgcgagaacaagtttaacgacaagcacatcaccactctgcaggtattacaagtggataaataatgtgcactgctctgagcccaaaggt

SEQ ID NO: 560067 - DNA, 50 bp, Homo sapiens
ctcatccgggagagccagaccaggagaggcaaagtgtttcatggatttca

SEQ ID NO: 560068 - DNA, 100 bp, Homo sapiens
tatgttagttggaataactggactcttttacactcaactaattggcatcatcacagatgaatttcacccattcatcgaggcacttcttccacatgtccgt

SEQ ID NO: 560069 - DNA, 101 bp, Homo sapiens
cagtacagcgttcacaagacttcatcacctctttgtacatcttctgcaattactcggttttttgccctgacatctcttcgtcttgtgtttttacttgcatt

SEQ ID NO: 560070 - DNA, 81 bp, Homo sapiens
agaaatctggaggcagtatcacctaacggaaaatctctgaaggaaatggaaacaccgttgtcagcacttggaatacaagat

SEQ ID NO: 560071 - DNA, 82 bp, Homo sapiens
ctgacatgcccgtcctatatgacagggttgaaaggaggagcaggaggtactgatggacaaggaggtaccttccggtacacct

SEQ ID NO: 560072 - DNA, 100 bp, Homo sapiens
ccagcgctcggacccccctacccacgctgaacgagagggacacggagcaggattaagcatgaaaatattgttgccctggaagacatttatgaaagcccaa

SEQ ID NO: 560073 - DNA, 89 bp, Homo sapiens
ccactggtcagccttcagggaccctgagcaccgcctggtctctttcctgtggccagcccaggaccgaccagctgggcatgttcacgcac

SEQ ID NO: 560074 - DNA, 90 bp, Homo sapiens
gtcgtggcctggagctcattgcctcagagctttgtaaaaggtacccaggctttatgcgggtggcgctctcagagccccagccagagagga

SEQ ID NO: 560075 - DNA, 90 bp, Homo sapiens
gacttccatcttcatgagtactccaagaagatggttcagttgactattgcaaaggccttgtgaaaaagggtaaagaacaaaacacacagc

SEQ ID NO: 560076 - DNA, 100 bp, Homo sapiens
tgactgtggatttcgaggagtgtctgaaggactcgccccgcttcagtacaaggcgagtggataattccaacacaagactggcagtccaaattgaaagaga

SEQ ID NO: 560077 - DNA, 99 bp, Homo sapiens
cacttcgagatcagcatcttaacaattcatcatggaagtttggttggcttagtggattatccagatgatgaagaggaagatgaagaagaagaatcgtcc

SEQ ID NO: 560078 - DNA, 116 bp, Homo sapiens
gttccacgtgaagctcaccgacagtgccctgagggccttcgagagctaccgcgccagacagacaatgcagatcttcgtgaagactctgactggtaagaccatcaccctcgaggttg

SEQ ID NO: 560079 - DNA, 100 bp, Homo sapiens
atccagaagatcacacagtgttattctggaacttttcaaagcctgactctcttcttgaaacagtggagcatcatacagagtttacttgtggtttagactt

SEQ ID NO: 560080 - DNA, 100 bp, Homo sapiens
cgcgtccaggcctgacagctctgcggctcgggccctgagatcgtcagtatttaaacagatcacatcatgcgtgagtacaagctagtggtccttggttcag

SEQ ID NO: 560081 - DNA, 100 bp, Homo sapiens
ccttcgctgcgatgcctgtataacccagggactggcgcactcacagctttccagggactgttcagtcttacactgaatgaacgtttcagtataaatggtg

SEQ ID NO: 560082 - DNA, 83 bp, Homo sapiens
ctgcaatcgcttgggagagctcctgggccacccctcctttcaggtcaagagtgatcagcagctggactgtgccttggacctaa

SEQ ID NO: 560083 - DNA, 74 bp, Homo sapiens
gttgaccatgacaatggcactgagcctcataccagcgatgaagtcaggtcaattcagtgaagatatgataccca

SEQ ID NO: 560084 - DNA, 75 bp, Homo sapiens
gaaagttggaacctctgacaagaccaagtactaccttcaagatctctatcccagactgtatccagagctctctca

SEQ ID NO: 560085 - DNA, 83 bp, Homo sapiens
ctggtccttaaggatatgtcagatgaaaaagctgttcatttgcaagaggagctcatagctattaattcaaaaaaggaggaact

SEQ ID NO: 560086 - DNA, 50 bp, Homo sapiens
atctctttctccacccatcccgagaacattggatatgtcaagtgaccaga

SEQ ID NO: 560087 - DNA, 83 bp, Homo sapiens
cacaggcatcagtcaggcagatgtttgtcgactggaatggacaaatttacatgtattggagaccagaccagaagcccttctga

SEQ ID NO: 560088 - DNA, 80 bp, Homo sapiens
acggcttagaggacttccctttggatgtagcaaggaagaaattgttcagttcttctcagcagttgcaccaccagcaccac

SEQ ID NO: 560089 - DNA, 89 bp, Homo sapiens
gagctgagtggttgtgtggtcgcgtctcggaaaccggtagcgcttgcagcatgtcatccgtccttggctcaggatttggagagcttgca

SEQ ID NO: 560090 - DNA, 100 bp, Homo sapiens
ttgtggactacgtctgtgcggctgcgtggggctcggccgcgcggactgaaggagactgaaggagccttcacgtaaatgggtccagtcatgcctcccagta

SEQ ID NO: 560091 - DNA, 82 bp, Homo sapiens
gccgcggccatggcgtacgcctatctcttcaagtacatcataatcggcgacacagtgctcatcatcactgtaggggaccttt

SEQ ID NO: 560092 - DNA, 95 bp, Homo sapiens
ccatcggaagatattctcttggtaacagcttctcctgttattaaagcagttacaaatttcaagcaggaacgagtctttgggaacgtggtccaccc

SEQ ID NO: 560093 - DNA, 51 bp, Homo sapiens
agggtcctttatatagaagggagagtagcatccttcggaaagctctggaca

SEQ ID NO: 560094 - DNA, 75 bp, Homo sapiens
ttcaaacgagccagcaatgccttcaaaacttggaacaggttgcacaccgatgctccagaattgtgagggagccat

SEQ ID NO: 560095 - DNA, 75 bp, Homo sapiens
actgtgcgggctgctgctccagagggcggaggtgatggcccgctccctctccccacccccggagctggaagaaag

SEQ ID NO: 560096 - DNA, 100 bp, Homo sapiens
caacttcctcaccagcaccttacaggatcccaaaatggctgggcgaaaacttgctctaaaaaccattgactgggtagcttttgcagagatcataccccag

SEQ ID NO: 560097 - DNA, 78 bp, Homo sapiens
ctgaatattttgcaccctatcaagcagagcggtttcgaagacttggattcagttacaagccctggatatcagactctc

SEQ ID NO: 560098 - DNA, 100 bp, Homo sapiens
gggatttggatgtgggatccggttccttggtgtcatccagccttagcaaaccagaggctgaagggtatgtgattggcagctgtattaaacacattccaat

SEQ ID NO: 560099 - DNA, 90 bp, Homo sapiens
gctttttctggtgtcctgaacctggaagttgtgctttttaagctggtaatgccgctgtcatcaaatatgaggagaaacctccaaaaccag

SEQ ID NO: 560100 - DNA, 50 bp, Homo sapiens
cctcttaccaccgtcatggcagtcccagatccccatattaaggtttctgg

SEQ ID NO: 560101 - DNA, 82 bp, Homo sapiens
cattggagctcatcagactgaccgtgtcttacatcagttcagagagacctgcctagagctggaacgttacctccagagcgag

SEQ ID NO: 560102 - DNA, 98 bp, Homo sapiens
ttttcagaaatcggtttgaagttagaaatgatcatgagcgtcttgttgttcatcgagcactcagtagaggtggcccatggcaaggcgtcctgcaagct

SEQ ID NO: 560103 - DNA, 82 bp, Homo sapiens
gcccttcagtactgttgtacggcttgaagtagaaaatgccatgatgagaaaaactattaaaaaacaggatgaccaaattgag

SEQ ID NO: 560104 - DNA, 75 bp, Homo sapiens
tgaagatagagacaggtctcatcgggaggaaatggagataacaggaggcgcagggttcgtgggctcccatctaac

SEQ ID NO: 560105 - DNA, 90 bp, Homo sapiens
gagcagagccgccatcttcatataaggccggcatttgtaaatccactcatccctgaaagcccagaggaagaggagctctttagacaaggg

SEQ ID NO: 560106 - DNA, 80 bp, Homo sapiens
gtggctttgtgtgagcgcatgctcccagattactacaacaccagagttgtgggttatggaggttttgatgactatggtgg

SEQ ID NO: 560107 - DNA, 100 bp, Homo sapiens
gccaaaaactttaaacttagaagaacattgcaagcacaacctccaagagggaaaacatttctccagattatccactcacccttctagaaggtctaacgac

SEQ ID NO: 560108 - DNA, 89 bp, Homo sapiens
accagtcacccaagtgcattgcctttggaaacgagagaccttcagagaagacatggcttccagaaaagagaatgcgaagagtgcaaaca

SEQ ID NO: 560109 - DNA, 75 bp, Homo sapiens
actaacaggatattcctcatgacattgctgtctgctttccagagtgttgaatcttccaccagaaaacttgatcac

SEQ ID NO: 560110 - DNA, 75 bp, Homo sapiens
caacactgctgagagaaatcaatgacgtgtttgaaggaagacgagctttggagtttaacccttctgccaatccag

SEQ ID NO: 560111 - DNA, 75 bp, Homo sapiens
gaaagaaaattagagtgaatgtagttgcaccaggtactccaaagattcaggtttactcacgtcatccagcagaga

SEQ ID NO: 560112 - DNA, 94 bp, Homo sapiens
gggtgctgggcctctgctgcgtcctgctgaccttcggcaccatgactcctgtgaggatgcagcactccctggcaggtcagacctatgccgtgcc

SEQ ID NO: 560113 - DNA, 100 bp, Homo sapiens
acgacctcagctcccagaggatcaccagcgtggggctagagcaatgtatcttaggctcacttaaggaagctgtagagatgagcccaaggagggaaaccag

SEQ ID NO: 560114 - DNA, 100 bp, Homo sapiens
gccagtttcaacaaccctgacagagcagtggagtatcttttaatgggaattcaagtttggaccaatgctaaggaatgctttagcaagatgtaatcctgtg

SEQ ID NO: 560115 - DNA, 87 bp, Homo sapiens
tggtataaaaatggacactggagtagaagtctctgatattggaagccaagtcaagtctctatttatgaggtggacaagcaagattgt

SEQ ID NO: 560116 - DNA, 100 bp, Homo sapiens
atctccaactgtgggaactctttccagcttgtgtctgtccacaggtcctggctaccctgggaagagacaagaagtaaatgaagaaagaggaagattccag

SEQ ID NO: 560117 - DNA, 75 bp, Homo sapiens
aaaaacatttcaactccctacagttgtgccatgcgtttacttagaaaggcttttaacttatgctgaaatcgacat

SEQ ID NO: 560118 - DNA, 98 bp, Homo sapiens
gtcaagatggcggatactctcccttcggagtttgatgtgatcgtaatagggacggggagcaatggttgcaacatactctgccctgactcacaagacct

SEQ ID NO: 560119 - DNA, 96 bp, Homo sapiens
aaagatcttcaaaaggagcagaaaactttacagcctccacctcctggatgccctcccaatgctgctcagcttgcagtcatgcagggagccaacgtc

SEQ ID NO: 560120 - DNA, 83 bp, Homo sapiens
cacgtggcttccagcacacaggcatctacagtgtcatgatccagaagccgcttacaaacacgcagatggcaagaagattgatg

SEQ ID NO: 560121 - DNA, 83 bp, Homo sapiens
gaaatccttcctgtacctcttgagccaggccgaccccgacccggactcggacaagccaatcctgaggcaaaagaaacatttta

SEQ ID NO: 560122 - DNA, 83 bp, Homo sapiens
tggagtcccttacggccacgaccaagcccgactccagtgggggtgactcatgtgcttctgaggaggaaccaacctttgacccc

SEQ ID NO: 560123 - DNA, 75 bp, Homo sapiens
caacggtcggtgtccccggctgaggcagcgcggccgcagcagccctctttccccacaaataaaccagagaaagat

SEQ ID NO: 560124 - DNA, 75 bp, Homo sapiens
gctcagaactgagaagctgtcaccacaggaggcactggctacaattaggcttctcgacgtcctgtgcgaaatgac

SEQ ID NO: 560125 - DNA, 75 bp, Homo sapiens
caaacgtggagatcaactcctctctgttaatggagtgatgagcaccatgccaggactgcccacccggccctgctt

SEQ ID NO: 560126 - DNA, 95 bp, Homo sapiens
ctctgcattttgtccacatgagaggattacctttccaagccaatgcccaagacattataaacagtctgtgtaaagaaatctactcaagaacggtt

SEQ ID NO: 560127 - DNA, 100 bp, Homo sapiens
ccgtttgttcaggaaccaccagtgacagattgaagaagtagttgtgactttgcagcttggaggtgacaaagagccaacagagacaataggagacttgtca

SEQ ID NO: 560128 - DNA, 74 bp, Homo sapiens
gggacgtgtaccctgtctaccagcctgtgtccgggaccatgtctggagaactaccaccaaacattaacatcaag

SEQ ID NO: 560129 - DNA, 100 bp, Homo sapiens
ccccagctccgtctcggcggcggcggctcgatgcattctatttctcatcatttggctcataactggaggaaggcaccacttttggttcttgccaaatctg

SEQ ID NO: 560130 - DNA, 82 bp, Homo sapiens
taggagctggggagcccttctgcgccacagggacaagcagatcttttgaaatatgctaagaatgagacattggagaacctga

SEQ ID NO: 560131 - DNA, 100 bp, Homo sapiens
cattctggactgcacccctacgggaacccacgaccattatatgctggaatggttccttggtgattctgggggtccacttgtctgtaatggtgtgcttcaa

SEQ ID NO: 560132 - DNA, 86 bp, Homo sapiens
ccttcaaggagcacaagtagctgctcttccaagcaaggaagtcgacaggatttaagtgccctgtatgctcaaaatttgtatcctca

SEQ ID NO: 560133 - DNA, 90 bp, Homo sapiens
aaaaaagcatgcaaagtcattgttacaacagagggagacgctgttgcggcagctggagacgaaccagctggacatggacgccacgctgga

SEQ ID NO: 560134 - DNA, 82 bp, Homo sapiens
cagcagcgccgtcccgtccgacagccaggcccgggagaagtttacccaaggtccagcctagcccctaggcaccatgtcggac

SEQ ID NO: 560135 - DNA, 90 bp, Homo sapiens
gatatttatcattgtgcccagtttctacaaataaaagatgggtggattattttctcgatggagggggtatagaacaggctatgcttacag

SEQ ID NO: 560136 - DNA, 101 bp, Homo sapiens
gtagcaaactgatgacttttccgtgctgatttctttcaacctcgagccataagtgtgatccttggtgacaggtggaagaaaatgaagaatgaagagagaag

SEQ ID NO: 560137 - DNA, 80 bp, Homo sapiens
agacgccctggtgctcaccaagcaaggtttatattctgcagttaaaactttactacaagaaaataacttacaaaatgcaa

SEQ ID NO: 560138 - DNA, 75 bp, Homo sapiens
tggtgttgaaagtgaaatgtcatgcctctgaaaatgaaggtatagagatgcagccttatattcctatggtgttgc

SEQ ID NO: 560139 - DNA, 88 bp, Homo sapiens
ttctctcccaggccacaagacatttcctgctcggaaccttgtttactaattggggattttggcaattgcttggagcatggcagatcct

SEQ ID NO: 560140 - DNA, 75 bp, Homo sapiens
cgggggtgtggggtgttccacgctatgttgggagtgttcgctttcgagatctgcaatgcatctagaacttatctt

SEQ ID NO: 560141 - DNA, 100 bp, Homo sapiens
gccattcagtcctcaatctccttttccttggctacccgtgactctgacatcattagaagcatgccagaacagactggtgaaaagtaaaccttttcaccta

SEQ ID NO: 560142 - DNA, 82 bp, Homo sapiens
cgagcgcgagcggcgcgagaaagaggcttcgacggcttccagggctgctgtcccgatctgtgctctgaggcccccgcccctg

SEQ ID NO: 560143 - DNA, 75 bp, Homo sapiens
ggaaccggagccggttgcgggcagtggacgcggttctgccgagagccggtcaaaatgcagatcttcgtgaaaacc

SEQ ID NO: 560144 - DNA, 101 bp, Homo sapiens
agtgcataggtcccggttggtagagggtttgagtccgcatcgccacagctgaaggctgcgagggactaagagcagagtactaggttttgacaagcttgcat

SEQ ID NO: 560145 - DNA, 100 bp, Homo sapiens
ccggagcgcagcgcggccgcacaggctggaagtgatggagagagtattggaaactgtcccttttgccaacgccttttcatgatcctctggcttaaaggag

SEQ ID NO: 560146 - DNA, 100 bp, Homo sapiens
agaaacctcaggacttgagtaacagcaacatggttttgaggttttgctgaagatattcctgaagaatcatcccaggtgccacactaaaaaaatgatccag

SEQ ID NO: 560147 - DNA, 98 bp, Homo sapiens
gtgagatcgtcagcgctgactccatgcaggtatttaccttgctgtggattgctgactggatggtccatcacttctggaggaaaggaaaggacccggat

SEQ ID NO: 560148 - DNA, 97 bp, Homo sapiens
gcaggacgaggtgtcggcgcgggagcagcacttccacagccaagtgcgggagtccacggaggcaagtgaggcctatctggttggcctttttgaagac

SEQ ID NO: 560149 - DNA, 98 bp, Homo sapiens
caggaaaatttcgatattgaagtgtcaaaatccatagatggaaaagatgggatggtcttttagtaagaacaaaaactgaagatatggtatctcagctt

SEQ ID NO: 560150 - DNA, 82 bp, Homo sapiens
gggtggagtgtaggtcatatcgccgcgaagccatgcagtgacacccgctaagacttgttggtagccatgtcggagccccaca

SEQ ID NO: 560151 - DNA, 75 bp, Homo sapiens
ggttcgtgaagctgttaaacacattggatatgatgattcttccaaaggtggttatggaggaggcggccctggtta

SEQ ID NO: 560152 - DNA, 50 bp, Homo sapiens
gcttccgggagggcggctcgcagacctcccacctcctgccccccatgagg

SEQ ID NO: 560153 - DNA, 100 bp, Homo sapiens
ttcacggccatagcttccaatacaagatgaagttggtatgtggcttcattctggaacctcggctgttgattcaacagagaaagggacagattgttccaac

SEQ ID NO: 560154 - DNA, 100 bp, Homo sapiens
gcttctgataatcaaccaactgttacaatcaaggtctatgaagggaagtgtttgtttatgtcagggctcagtgaggtccagctgaaccatatggatgatc

SEQ ID NO: 560155 - DNA, 83 bp, Homo sapiens
ccggagcgtcccagctgcgaggagggtttggaaatcccttgtctccaggttgctgggattgacttcttgctcaattgaaacac

SEQ ID NO: 560156 - DNA, 100 bp, Homo sapiens
ttatgagaggcttccatatcggtcttgggcgtctttggtactggcttttttaggggtctgcctggggattacccttgctgtggatagaagcaactttaag

SEQ ID NO: 560157 - DNA, 94 bp, Homo sapiens
cccgcactgacagcgggaggcagagggaggaacctggacgccggaagccgggaaatgacaatgcagatcttcgtgaagactctgactggtaaga

SEQ ID NO: 560158 - DNA, 100 bp, Homo sapiens
atagaatgatgccaatgggtggaatgatgccacctggaccaggaataccacctctgatgcctggaatgccaccagctgtgcctctgtgggctgagtgacc

SEQ ID NO: 560159 - DNA, 87 bp, Homo sapiens
actgctcacgttcatcatggtgcctggctgccaggcaggcatttttagatgaattcactaactggtcaagaataaatcccaacaagg

SEQ ID NO: 560160 - DNA, 82 bp, Homo sapiens
tttccgccctaatggaggtctccagtttcgattgtcactgctgttccaagggcacacgcagagggatttggaattcctggag

SEQ ID NO: 560161 - DNA, 75 bp, Homo sapiens
gcggggaaccaaggagacgctcctggcactgcagggaactgctcgcagaaagaagaaggtggttcatagaacagc

SEQ ID NO: 560162 - DNA, 97 bp, Homo sapiens
gcccgtcgccacccgcgtacccggcgcagccagagccaccagcgcagcgctgccatggagcccagcagcaaggctttgtccacccagacccactctg

SEQ ID NO: 560163 - DNA, 100 bp, Homo sapiens
acgcggctgccgtacgtggccctcgatgtgctctgcgtgttgctggctgccttcctatttcaaggaaagacgccaaggtaattttgacccagaggagcaa

SEQ ID NO: 560164 - DNA, 80 bp, Homo sapiens
cgatgttcttctaatactcctcctctaacatgtcagcgttattgtaatgcaattaataatgggacttggtacccaggggg

SEQ ID NO: 560165 - DNA, 50 bp, Homo sapiens
attgactactgccacaattccgggaaatgaggcaagttatcctttggaaa

SEQ ID NO: 560166 - DNA, 100 bp, Homo sapiens
ctatacattgcatcgtttgggcaaagtacttgttcaaagctaaagttgcagacaagatccagctcatcaataatatgctggacaaagtcaatgagatgat

SEQ ID NO: 560167 - DNA, 100 bp, Homo sapiens
atttcccaagagcagcggaaaatgatccagtcacagactcacttttccccttcgtctttctctccctttctgtctttctgtgtctcctccaagaatgaaa

SEQ ID NO: 560168 - DNA, 87 bp, Homo sapiens
ggagctaaacatggaaatattcaagtgggatgtgtagactgttcaatgcaacaaggcaaggttatggaggttttgatgactatggtg

SEQ ID NO: 560169 - DNA, 82 bp, Homo sapiens
aagaaatcctgaagttccctcacattagccagtgtgaagacctccgaaggaccatagagaaccatggagtctggcagtaccg

SEQ ID NO: 560170 - DNA, 98 bp, Homo sapiens
aaaagattgagctgcactgtattcctacagttcggcatggttttcctcatcagcccacagcattagcctttgatccagttcagaaaatcttggctatt

SEQ ID NO: 560171 - DNA, 50 bp, Homo sapiens
gccgtgccctggggctgagccctcaggttgcaaaggagtttggcttccaa

SEQ ID NO: 560172 - DNA, 98 bp, Homo sapiens
catcttaacattgaagccgattttgttattttctgccctgaaccagggcagaagcttatgagatgaggaaggaacagagcatttacgaaaacgaaata

SEQ ID NO: 560173 - DNA, 75 bp, Homo sapiens
taacccttgatcctcctcctaattgcaggtttcccttgggggctttgaaataacaccaccagtggtcttaaggtt

SEQ ID NO: 560174 - DNA, 50 bp, Homo sapiens
ttctctcccctccactttctcccggagaggtgtgggaaatggaactggat

SEQ ID NO: 560175 - DNA, 88 bp, Homo sapiens
gtctgcacgaaataaagctcctgggcaaggggacgtctgcagctgagtgacttaagagattaaaattaatttggttgctgttggttct

SEQ ID NO: 560176 - DNA, 90 bp, Homo sapiens
aagtgcgcaaacttgacactcaccctgaccgtttcaccagtgatcattaaagaatgggcagcttacaaaggaaagtctcctcaaaccccg

SEQ ID NO: 560177 - DNA, 101 bp, Homo sapiens
acatggcgaaggtggagcaggtcctgagcctcgagccgcagcacgagctcaaattccgagggcgcaaaccagaagaagagggtgtggaagataacgggctg

SEQ ID NO: 560178 - DNA, 98 bp, Homo sapiens
caggaatgtttcctcctactcctctttcacctgccaggttcaagtgtctgatgatttgtgagcctcaagtgactactctgtggaatcatctgtccttg

SEQ ID NO: 560179 - DNA, 98 bp, Homo sapiens
ctcggatacgatagaaaatgtaaaggccaagatccaggataaggaagaataagacctggaagtttgttgaaggtctccctattaatgatttctcacgt

SEQ ID NO: 560180 - DNA, 51 bp, Homo sapiens
ggcggcaggaatcctcctccggcgataggctcagaacgcccagcagctcca

SEQ ID NO: 560181 - DNA, 75 bp, Homo sapiens
tggttgagatacttggagaagctcttgttggcaaccagcaggtccccagaagaccatgtctgtgttgagctgtat

SEQ ID NO: 560182 - DNA, 90 bp, Homo sapiens
gcagcagcccctgcccaagtctcaagtccacaggaggcccccctgttgctgactgcctccgggcctgccaggagcagatcgaagccctgc

SEQ ID NO: 560183 - DNA, 83 bp, Homo sapiens
gggaggctgaggatatggtgcagaaggtgcacagccacagcgccgagatggaggaagctcttcgtgggcggtcttgactggag

SEQ ID NO: 560184 - DNA, 96 bp, Homo sapiens
ggctctgaaggcgaacgcttcgctggccatttaggagctctgctcaaagccagacgattcttgagtatcagaacaccaccttctttggtggaacct

SEQ ID NO: 560185 - DNA, 98 bp, Homo sapiens
caggcactccgtcagtgagatggcctccaacaagattgttgtgtccactgtatcctggcttgcttgttctgcgaattcctgaccctttgcaacattgt

SEQ ID NO: 560186 - DNA, 100 bp, Homo sapiens
aacggcttttgaaccagaagcccttgtccttgaagctgcaaaaaatcacctctttatgataactgctttctccatgctcctgatggacagcccctctgca

SEQ ID NO: 560187 - DNA, 90 bp, Homo sapiens
caaaagccttccatgattactggatcctcacaaagctacaagaagcaagagaaccttctccgagcctctgacagagaacactgcctgaag

SEQ ID NO: 560188 - DNA, 100 bp, Homo sapiens
tccttatcagcagatcaaaggataaacttgaccaggtttccagtgaaataaggaaagaatatggcaaagctgatgcaagatgggtttattttgatccaac

SEQ ID NO: 560189 - DNA, 82 bp, Homo sapiens
ggatccagagcgccgcgcacttcgtcatgttcttcgcgccctgagacaagaggagcagcagcggcaccgcccctcaccctgg

SEQ ID NO: 560190 - DNA, 138 bp, Homo sapiens
caaagatctgtccgaaccctactccatttatacctatagatattttatccacaactggccacagctgtgcttcttggttgatccaaaagactacatgttcagtggactgaaggatgaaacagtaggtcgcttacctgg

SEQ ID NO: 560191 - DNA, 83 bp, Homo sapiens
caacaccacaataatccacagccaaggccaagaagcttgagagaagaaaaatttcagaaaaattgtctcaatttgactagaat

SEQ ID NO: 560192 - DNA, 51 bp, Homo sapiens
gcttcgtagcccacggagctgagtgagacggtttaagcggaagcatcttac

SEQ ID NO: 560193 - DNA, 83 bp, Homo sapiens
agcgaagccttgaaaaagctgccctgagacggtgtcccgccgaaagtgacctagagtcccgcagggatgtgaagagagaagaa

SEQ ID NO: 560194 - DNA, 96 bp, Homo sapiens
gccgcctccgagcagcccgccagatgcctctttgacaaggccacttcatcatcaagcttctgcctgcccgcattctcatggaaacccccctcctca

SEQ ID NO: 560195 - DNA, 48 bp, Homo sapiens
caagtaaagaactgagggtcagatttgagaaagatcagtctaaagaaa

SEQ ID NO: 560196 - DNA, 90 bp, Homo sapiens
gtgtttagagcttctagttggcaatggggccgatgtcaatatgaagtgtacacttgactgtgaagtggctgtgagagtgggtggagagtt

SEQ ID NO: 560197 - DNA, 101 bp, Homo sapiens
ccttaacatttgtgttcacaggaactggtaatgtttctaaggccgattcaacagtcattgagaagtggatggatggcgtgaaagacttcttaatgaaacag

SEQ ID NO: 560198 - DNA, 75 bp, Homo sapiens
gtcgtcttccacttgcacgaaagctttcctaggccaaaaagaggaatctcttcacaccttctctttggagccctt

SEQ ID NO: 560199 - DNA, 50 bp, Homo sapiens
tgctcaacgacgaggacctgacgcaggctgaccggttccctgatgtgtta

SEQ ID NO: 560200 - DNA, 90 bp, Homo sapiens
aggagatcgtctctctcatcgaggcccaaaccgccaaggcatcattcttaacaaagaagttaaatattggtgggaaaagagtaaaccttg

SEQ ID NO: 560201 - DNA, 75 bp, Homo sapiens
cacttaaaatgctcaggctataccatgcactagagcatctacctgggtttgacaactattcagccaatgtgatgg

SEQ ID NO: 560202 - DNA, 83 bp, Homo sapiens
ctgactacctgctgtacaccctcaacaaacaccagcgctttgggtgtggacactgccagcggctgcagccgacttggaatgac

SEQ ID NO: 560203 - DNA, 100 bp, Homo sapiens
ctggtgtaccaggcgaagctggccgagcaggctgagcgatacgacggaaggtgggagtcaatcattttgacaagtctcctgaaaggaacagctagcagga

SEQ ID NO: 560204 - DNA, 102 bp, Homo sapiens
actaccgggaagatttacacagatggaaccagaaaagatacgaggctctaggagaggatggtcatccagaggataagccaacgcacatcatcttcggttctg

SEQ ID NO: 560205 - DNA, 89 bp, Homo sapiens
agcacaccagtggggcagtgcctcgagataattgacgaccttgccaacctagtggagaacacagatgaaaaacttcgcaatgaaaccag

SEQ ID NO: 560206 - DNA, 83 bp, Homo sapiens
tgtttctctccctctgcccccccttccccacgcaaccccagatccatttacactttacatggcagtatggagccggcctttca

SEQ ID NO: 560207 - DNA, 82 bp, Homo sapiens
ccatgcccagtgccagtgactggattggcatcttcaaggaagaggatcacctagcccgggtagaagaggcaatcacccgtat

SEQ ID NO: 560208 - DNA, 74 bp, Homo sapiens
ctggcgccgggtcccgcggggaaatctgatcatcggatatcatggagtctggcaagacggcttctcccaagagc

SEQ ID NO: 560209 - DNA, 90 bp, Homo sapiens
gttcgccctagtcatttgcttcacgctactgcagcactggggtgtcagttgttggtccgacccagaacgcttcagttctgctctgcaagg

SEQ ID NO: 560210 - DNA, 99 bp, Homo sapiens
cgcctcatcccactctggaagctgagccggcggcgggaggagctagggctggagcctctccagcctcccgcgaagatcggacagctggcttttaaagga

SEQ ID NO: 560211 - DNA, 75 bp, Homo sapiens
gctgctggggatattacattaggaagtgttcatgttggcaaacatgaattgactgggcataaagtagctgtgaag

SEQ ID NO: 560212 - DNA, 100 bp, Homo sapiens
ggaggaggtggcaggcctcggcggtgcctatggttcatgcttgaagttttaatgacaaagaatgaaaacaatagccatgcctttatgaagaagatggcag

SEQ ID NO: 560213 - DNA, 100 bp, Homo sapiens
aggcagccttttccccatggcagcccctgttctgctacacacagacctggatcctgggagcaaaaaaatcaagtatatcctatcaggtgatggagctggg

SEQ ID NO: 560214 - DNA, 75 bp, Homo sapiens
tgagcttttgattaacaccttaataaccagcggagctgacacagccaaaattcagaaggagctggcggacatcac

SEQ ID NO: 560215 - DNA, 75 bp, Homo sapiens
gtgcggggagctggagaaggagaaccaccagctcagcaagaagcaccagcaacaagtggtgcaggctgtggaacg

SEQ ID NO: 560216 - DNA, 50 bp, Homo sapiens
gatgaagaaacccagcttgatatgttggtcttaacccatatttaactttg

SEQ ID NO: 560217 - DNA, 100 bp, Homo sapiens
tgtgtggtcccaggcgtggccagacccagacgtcctggagatctcaatgcagcctcccaaagtgaaatgcctgaccaagatctggcaccccaacatcaca

SEQ ID NO: 560218 - DNA, 100 bp, Homo sapiens
gcagaaggggctaccatgatcctttcctcctcaaatccagtttgctgatgacatgcaggagttcaccaaattccccaccaaaactggccgaagatctttg

SEQ ID NO: 560219 - DNA, 90 bp, Homo sapiens
ctgttcgacagtcagccgcatcttcttttgcgtcgccagtgagaaggcaaccaaagtgcaggacatcaaaaacaacctgaaagaggcgat

SEQ ID NO: 560220 - DNA, 68 bp, Homo sapiens
gtccagcacccagaaaagagcgactggcaaacaagtcccctcttcaccatatctccactgctaccttg

SEQ ID NO: 560221 - DNA, 118 bp, Homo sapiens
tcaagaggtgcaaaaatcttagctctctcaatctctgtctgaactggatcataaatgacagtactcccctagcatgacaatgagcgtgtgatccattaccaagtctcctcatgaaaac

SEQ ID NO: 560222 - DNA, 98 bp, Homo sapiens
tagaagctgtgccgcccccgccaggtgcaggaagctgtttggagactctggaaaaaggaaagccactcgtagtggttataaacgaaaagttgatgaac

SEQ ID NO: 560223 - DNA, 80 bp, Homo sapiens
gtagctttcatgagcacaggcatcagtcaggcagatgtttgtcgactggaatggttgaatgcaatgataacagaaagcaa

SEQ ID NO: 560224 - DNA, 98 bp, Homo sapiens
gctgagagacggcggcggccgaaagcggagagatgctgggcgtggcggccgggatgacccacagtccctcctcctatgtctccatcctccaaatctgt

SEQ ID NO: 560225 - DNA, 100 bp, Homo sapiens
cttattcctgtccggagacagcctaaggaaaaatcctgggtagaagctggatcagcaagaatgtcactccttatattggtgtccattttcttatctgcag

SEQ ID NO: 560226 - DNA, 80 bp, Homo sapiens
gacaatctcatcattttctccccttcggtagaaggtgtcagctgtgatgcatgtttaaaaggaaattttcgaggtcgcag

SEQ ID NO: 560227 - DNA, 75 bp, Homo sapiens
tcaccatcaacaaagaagaccacacactgggaaacatcattaaatcggaaggaacgtcccagggatggaagtgct

SEQ ID NO: 560228 - DNA, 100 bp, Homo sapiens
ccgaagcctaaattccaggaggttactccacaggatccgctgaacataggatgttgccacaaaatctacctcgtgtatttttctctttcactcatgagct

SEQ ID NO: 560229 - DNA, 75 bp, Homo sapiens
ccgtggcccggatgcaggacagacccctcaggtggcgggacaggcttcattgggacagccctaacccagctgctg

SEQ ID NO: 560230 - DNA, 83 bp, Homo sapiens
cagagtcacacacggtcctaagagctgggcaccaggaagcgaaggctgttcaaatctgaacatcaatgatgtactagggaact

SEQ ID NO: 560231 - DNA, 50 bp, Homo sapiens
tacttcctaggcagaatgcttggaaaggttgcagatattttattccaaac

SEQ ID NO: 560232 - DNA, 100 bp, Homo sapiens
gtcaatcagagcgtcctgtgcggaagggaaaaggccgaggcatcagcgtgtgaagaccgcaaagacgatcccgagtacagttgtgaacagcattgctgct

SEQ ID NO: 560233 - DNA, 100 bp, Homo sapiens
ggcgaaggatgcacccggcaggcttggcggcggcggctgcggggacgccccggctgcggcagcaaggagcgcttccactggcagagccacaacgtgaagc

SEQ ID NO: 560234 - DNA, 90 bp, Homo sapiens
gacaagagagacggcgaggcgcgctccctgcccggcagcgactcggaggagaaggaagccaacatccttttggagccatgaatattgtcc

SEQ ID NO: 560235 - DNA, 96 bp, Homo sapiens
gtgtgctgacttgataagaggcgcaaaagaaaagaatctcaaagtgaaaggaccagttcgaatgcctaccaagatatgagggaaggcaccattgga

SEQ ID NO: 560236 - DNA, 88 bp, Homo sapiens
gaacccgcaccaagctctgctccacactgccaaccggccagaggacgagtgtggagaccagtatgatgtctgtgccatttgcctggat

SEQ ID NO: 560237 - DNA, 100 bp, Homo sapiens
gtattctctatcatcatctgatgaggcacggcaggtagacttgctagcctatattgcaaaaatcactgaaggtttgtttctgcgtcacatgatcttggcc

SEQ ID NO: 560238 - DNA, 50 bp, Homo sapiens
caaattagttccagggcttttcaaaaacgaagggaacgtcatcgtttgga

SEQ ID NO: 560239 - DNA, 75 bp, Homo sapiens
aacacagggatcaaggactttgacttctggctgtctgaggatggagatgaagatgaggaagctgagtcagctacg

SEQ ID NO: 560240 - DNA, 75 bp, Homo sapiens
aaaagactcaggacggacaagcacagtcttcggaagggccatgatccaaaggaaccagagcagttgagaaaactg

SEQ ID NO: 560241 - DNA, 83 bp, Homo sapiens
ccagaaggagctcaccattggctcggcccgacaacaagctcaaatacgtcaccaaatggcagaggacagcaaagcagattact

SEQ ID NO: 560242 - DNA, 96 bp, Homo sapiens
tagaaagtgaaatcagaggagatgtaactatcgctatcaaagtatggtgcaagttggtggattggacttcaagaagaaagagccaatgatgaattt

SEQ ID NO: 560243 - DNA, 83 bp, Homo sapiens
cgtggacacacaagcaccccaataacctcaagggtggcccagttgaaatccttcccttcctctaccttggaagtgcctaccat

SEQ ID NO: 560244 - DNA, 100 bp, Homo sapiens
tccaggccaagagggatccttcacccgtgtctgatccctcatccacctacatcaggcaactggagagcaaagtgaggctgctggagggtgacaagctcct

SEQ ID NO: 560245 - DNA, 51 bp, Homo sapiens
atgatatgggagtataatgttgtgatggagtctgcacgcaaagcatgggag

SEQ ID NO: 560246 - DNA, 76 bp, Homo sapiens
cccgacagccttgctgactatttcaagaagcatggggctgcttttggtccaccgcaaggtggatttcatcctcctt

SEQ ID NO: 560247 - DNA, 74 bp, Homo sapiens
ttcatcgtccataccatcgaggagattgaggtggccacaaagcgggcacaggcctggtgctacagcaaaaacaa

SEQ ID NO: 560248 - DNA, 100 bp, Homo sapiens
gcaagtttacgacaaggaggttcagtggacccttggagccatcctctacaggacccgctttctaccattaaggtatcattgcccagtgcctaagatcttt

SEQ ID NO: 560249 - DNA, 76 bp, Homo sapiens
gatgacttcctccaggactatactttattgatcaacatccttcatagaggaaggaacagagccacagagaaaaatg

SEQ ID NO: 560250 - DNA, 100 bp, Homo sapiens
tggatgacttgcttgggtaaggacatgaagacagttcctgtcataccttttaaagaggagaagaaagctatgctgcaggaaatagctaatcagaaaggag

SEQ ID NO: 560251 - DNA, 100 bp, Homo sapiens
gctgtgcccccgggacccggcgacgggggcgggcgggggcgcttcccgccggcctgggcccctcggcagtgccagccattgccgaaatctaaaaaaactt

SEQ ID NO: 560252 - DNA, 80 bp, Homo sapiens
caaaagccaagaggaggacagttcgctacacagcaatgcatcgagagaggacatgtactcccaggattccatagatctcc

SEQ ID NO: 560253 - DNA, 100 bp, Homo sapiens
accgatgtcggaatgtggcaaaattactgtatatgcacatgctgggctaccctgctcactttggacaggttgctgatcagctctgtgccaagtatagcaa

SEQ ID NO: 560254 - DNA, 75 bp, Homo sapiens
ctcatgctgccttaaaacgacatgacttggtcaagctaggtttcaaggtttgaagatgccgcatttggattggat

SEQ ID NO: 560255 - DNA, 110 bp, Homo sapiens
ggagataaattcccggaaccgcgattcggcgtgtcaggtgactgcttagaaaactgcacagcatctgatgaaattagcgaataagaacatcaaccatgtcttacactcca

SEQ ID NO: 560256 - DNA, 75 bp, Homo sapiens
tggcggcgccgctcatccccctctcccagcagactcggtgaaatacctggagtgctcagctctcacccagagagg

SEQ ID NO: 560257 - DNA, 82 bp, Homo sapiens
cttcggaaagagagagcaggctgaagaggaacgatatttccgtattcatgtgattgaacggcgtgctcttcctgagttcttc

SEQ ID NO: 560258 - DNA, 101 bp, Homo sapiens
ggctccgaggccagagctgtaaggaacccccagaagttcagtctttcagcgaagaatagccagaattcagcaaatcgaaaaggacatacttcgtatacgac

SEQ ID NO: 560259 - DNA, 100 bp, Homo sapiens
cgtctttccgtcctctgaggcgacggccgcggctgcacaggtgtggatgaggtcaccattgtcaacattttgaccaaccgcagcaatgcacagagacagg

SEQ ID NO: 560260 - DNA, 97 bp, Homo sapiens
acttgcctaaatgaggaatgtctttcctaccatctaaaatacgaaggtttctggctggagacttatttttgagctcgctgtaagactgagaaatcac

SEQ ID NO: 560261 - DNA, 82 bp, Homo sapiens
gcagcccgccctccccaagtcgacgccgcaacccggggaaagcagaaactggcgatggaatatgagaggagccctctggaaa

SEQ ID NO: 560262 - DNA, 83 bp, Homo sapiens
cttgtttttggattcagttctcctgtgtgcatggctttccaaaaggatgatgaggaatttaaatccaccttcatcaaactggg

SEQ ID NO: 560263 - DNA, 96 bp, Homo sapiens
gctctccccgcccgcggcccgtgcagagacacctatggctgccgatgaaggctcagcagagaaacaggcaggagaggcccacatggctgcggacgg

SEQ ID NO: 560264 - DNA, 100 bp, Homo sapiens
gatatccagatgctaaaatggacccaatgaacatctgggatgacatcatcacaaatcggagagaagtttgctgaggaatgccttcaagcacaaagtgatg

SEQ ID NO: 560265 - DNA, 100 bp, Homo sapiens
gctccaaggccgtcgccgaccgctacgctgtctactggaacagcagcaaccccagccacccgtgggaaactgttacaacagctgcaatgcagaaataccc

SEQ ID NO: 560266 - DNA, 114 bp, Homo sapiens
agaagaggacgacgacgacgaggaagaggaggtttctgagttggatatgtcaagtgaccagatagctgccaatctgcaagcagttattaatgaagtttgtaggcacagaccgct

SEQ ID NO: 560267 - DNA, 115 bp, Homo sapiens
cagaccttgaaagacaaaactggcactgattcaaattcaacagaatcctctgaaacttccacagggcctatcagtttatcttcagctgtgcacagacagatagaagccatcaaca

SEQ ID NO: 560268 - DNA, 100 bp, Homo sapiens
gagcgcggagccgcgagccccgagccccgagcccggcgcctggctgagtaagatcgcggattcaggtgtggctctatgagcaagtgaatatgcggataga

SEQ ID NO: 560269 - DNA, 116 bp, Homo sapiens
cggcgaaggatgcacccggcaggcttggcggcggcggctgcggggacgccccggctgcacttctgcctggtgtcgaaggtggtgggcagatgccgggcctccatgcctaggtggtg

SEQ ID NO: 560270 - DNA, 100 bp, Homo sapiens
agcacacactatggcgctgaaacggattaataagattctgaagactactttgaggtcaacattccaacagacctacgagcaaaacattctggggaaataa

SEQ ID NO: 560271 - DNA, 95 bp, Homo sapiens
cccccgactccaagcgcgaaaaccccggatggtgaggagcagggcgccctgcgtccggcagaggaggcgagcatcccgctcaggtgatgaggaac

SEQ ID NO: 560272 - DNA, 96 bp, Homo sapiens
ttggcactacctatagtgagacttttggcaaagacatgcgcaaggaaccagcacctatgacagaagatctgctagaagagcagtctgaagttttag

SEQ ID NO: 560273 - DNA, 51 bp, Homo sapiens
ctgcctcagtatctgaacacaaggctggagtgcagtggcgcaatctcggct

SEQ ID NO: 560274 - DNA, 95 bp, Homo sapiens
atttatcacttccttccttactttgtcttggtatactacatggcaaaatgggaaagagtgcctggtgaagaatgtgatgggatcactagcatgtc

SEQ ID NO: 560275 - DNA, 100 bp, Homo sapiens
ctgacactttatactggaaggggtggtgaacttcaaaaaattggggaatgtgttcagagcaacattgttttgttgacacaagcatttagaagaaagtttg

SEQ ID NO: 560276 - DNA, 83 bp, Homo sapiens
ggatgtgaggcgatccgctggcgctagtctgaccctccgccaggcaaaaggaagccctgggcgctgcctatggcacagccaag

SEQ ID NO: 560277 - DNA, 75 bp, Homo sapiens
tgttctcatcgggcaccacgggcgcacccaagtgcatggtgcattccgctggggctggagtgcagtggcgggatc

SEQ ID NO: 560278 - DNA, 83 bp, Homo sapiens
ctccccgcgccgctcgcgcagccatgtccgaggagaagcccaagcggctgagtgaccaggctggggaggatgaggaggaagag

SEQ ID NO: 560279 - DNA, 50 bp, Homo sapiens
ggccaaggccagccggactaaaacaaaggatcagaattcaggctataaat

SEQ ID NO: 560280 - DNA, 74 bp, Homo sapiens
gaatatgccattgaggctatcaagatgatgaggagtctgatgaggaagctgtgaagaaaaccaacaaatgtgta

SEQ ID NO: 560281 - DNA, 90 bp, Homo sapiens
cgttcatagttgactccacagatccggggccccaatacctatgaagacgcagccgcctacatccaagcacaatttgaaagcaaaaaccgc

SEQ ID NO: 560282 - DNA, 98 bp, Homo sapiens
tcgagtccaccctccgggccttctgcccctgatcgcttggttttccttgcagtcgcctgctgctgtcgtcgggaggcagcaattccatttccgtgagg

SEQ ID NO: 560283 - DNA, 90 bp, Homo sapiens
ccacaatggagacgccgccgctgcctcccgcgaagctctatgcagaactgtgccaaggcatcgtggacatagccatttccagtgtcttcc

SEQ ID NO: 560284 - DNA, 50 bp, Homo sapiens
cgggtggagtgtaggtcatatcgccgcgggccaattcctgtccccccagc

SEQ ID NO: 560285 - DNA, 90 bp, Homo sapiens
gaacggatggctgagggagccccgcggatcgtttaggaaagccggccagtttgtgaagtgtggatatgcaggctctaactttccagaaca

SEQ ID NO: 560286 - DNA, 50 bp, Homo sapiens
gggactcagccagaaagctactgagcatcgagagtaaacatgaggttacg

SEQ ID NO: 560287 - DNA, 75 bp, Homo sapiens
gaaaaccacaaccgagacctgcagcaatggccaatgtacatggtggactatgccggcctgaacgtgcagctcccg

SEQ ID NO: 560288 - DNA, 89 bp, Homo sapiens
cctctgatctgcgccgggtcgccacatactgagcaagccatgggccacagccaggaccggctcaccaccttccaggagaaccaagcccg

SEQ ID NO: 560289 - DNA, 75 bp, Homo sapiens
ggcgtgtgcgccgagcgctactcgcaggaggtcttcgaaatggcacctcgaaaggggaaggaaaagaaggaagaa

SEQ ID NO: 560290 - DNA, 75 bp, Homo sapiens
caaaaaagacctttagaagatggagctgttcctgggcatgtacccagaagagcattttatcgagaagcctgtgaa

SEQ ID NO: 560291 - DNA, 50 bp, Homo sapiens
tgcaaactctggaaaaaaacttgggtcatctttgctttgaaccagaccct

SEQ ID NO: 560292 - DNA, 75 bp, Homo sapiens
tcctcctccgctaccaccaccacaccagaaactagcaccagccccaaatttcgagttcatgatcaagtgttgccc

SEQ ID NO: 560293 - DNA, 88 bp, Homo sapiens
aagacgttctcaaggagaaggcagacctggatgtacattgaagatgtcagtttctacatgtgggaagtagacattgaaggctttatgg

SEQ ID NO: 560294 - DNA, 100 bp, Homo sapiens
gtttaactggcacccagtgctcatggtcaccggcttcgtcttcatccagggcatcggaacggaaaacagttcttccttcaaagcatgcagtacctgaagt

SEQ ID NO: 560295 - DNA, 100 bp, Homo sapiens
gacagatcgccggggaggcagcgcgggatcccagcctcaggcgtgcgcggacggtgtgcggtctcgtttcctctcagtccatccacccttcatggggcca

SEQ ID NO: 560296 - DNA, 100 bp, Homo sapiens
cagattcgcagtggtcgcttcttctccttggactggaaggatcaccagcacatatgcggccagtcagcagctgtcaccgtccaggcagacgaagtccacg

SEQ ID NO: 560297 - DNA, 100 bp, Homo sapiens
gttctgagtggagtgacttgttgagtgacctccagaaagcagatccggaaggctgcccagcatggagtatgctcagtcctcaagggcagtgaattcatgt

SEQ ID NO: 560298 - DNA, 100 bp, Homo sapiens
aaacactgggcgacggtggctccagcatgtatcagccgaggtggagctgcggggccctggcatgaaaggcgtgtgctcgcccactgatatcggtgtactc

SEQ ID NO: 560299 - DNA, 101 bp, Homo sapiens
cgttagtcccttaatacaaaggatctcggcccctttccaaacactcctgatgcctcatttgcctctcgcctcttttcgaccaccattttgggggctgaggc

SEQ ID NO: 560300 - DNA, 100 bp, Homo sapiens
ctctgcccccccttccccacgcaaccccagatccatttacactttacagccgccatggcatcagatgaaggcaaactttttgttggagggctgagttttg

SEQ ID NO: 560301 - DNA, 100 bp, Homo sapiens
caccagctactgtgaactctgccacttcaggtttgcagtcgagcgcaaacccaggccgttagtggagtctagagcatgtttggaaaggattcaagaatta

SEQ ID NO: 560302 - DNA, 50 bp, Homo sapiens
agccgtacggcatttcctcatatgagacaaagcatggaggacacaagaat

SEQ ID NO: 560303 - DNA, 100 bp, Homo sapiens
caagattgagtttatttcaacaatggaaggaaatgggtcctgatgaatatgaagagatggaagaagaggaggaggaggaagaggaggaagacgaggatga

SEQ ID NO: 560304 - DNA, 126 bp, Homo sapiens
tgtcaccaacgggaagggccggcccgcctccctggccggggcgcagttcggaggttcagcttcggaaccaaaaagaagcttcccagagccggggccaggagccccaagcgccctctagcagcaaac

SEQ ID NO: 560305 - DNA, 100 bp, Homo sapiens
ttagctgaccatgggcaactttctgggatccagcgagcgacatggtgggaggacacaccatgctccccattcgctggatgcctcctgaaagcatcatgta

SEQ ID NO: 560306 - DNA, 90 bp, Homo sapiens
gaaacccatagaagttgagcactcggtcccaaaaaggcaaaggtttcaagtgccccatttgctccaagtctgtggcttctgacgagatgg

SEQ ID NO: 560307 - DNA, 100 bp, Homo sapiens
tcttttagccatgatggactgcatgttgcaagccttgctgatgataatgagagggtccaagcctggtaagaatgtccagcttcaggagaatgaaatcaga

SEQ ID NO: 560308 - DNA, 100 bp, Homo sapiens
aggatctgattatcagtacgtaggcaagaagccacgttacgagatccgatggaaggtgattgagtctgtgagctctgacggccatgagtacatctacgtg

SEQ ID NO: 560309 - DNA, 90 bp, Homo sapiens
ccctgatggaggaagtgctcctgctgggcctcaaggaccgcgagtcgtgagatggagaataaagaaactctcaaagggttgcacaagatg

SEQ ID NO: 560310 - DNA, 100 bp, Homo sapiens
accccaaaagagtattcttggatcttgcacaggaaggaattaaaggctttaatccagtgtgaccagttgaggaaggagctggagaggcaggcggagcgac

SEQ ID NO: 560311 - DNA, 100 bp, Homo sapiens
gaaaatgcgctcgggctggaccagcagatcgatgctatagaagacaaacaagggaaggttttttttccttttgcatcatggctcaatttggaggacagaa

SEQ ID NO: 560312 - DNA, 82 bp, Homo sapiens
ccagaagacatccttcacccctgtaggtggaatcaactatgaaattataatcatagatgatggaagcccagatggaacaagg

SEQ ID NO: 560313 - DNA, 96 bp, Homo sapiens
aggaaatcatgactgagaaagatatggaattatttcgtgatatccaagaacaagcactgcagttttgtttggctatgccaccacagtcatccccag

SEQ ID NO: 560314 - DNA, 83 bp, Homo sapiens
cctggatgaaaactacaaatcccaggagcacttcacgatgccatggacaatattaccaggcagaaccaattctacgataccca

SEQ ID NO: 560315 - DNA, 100 bp, Homo sapiens
aggaataaacttggccactcaagagcatcagtgatgtggaaccgaacacaggtgtggttcctcagagtgcaccaccagtgccaacagcctcttcccggtt

SEQ ID NO: 560316 - DNA, 50 bp, Homo sapiens
tgtgaaacttaaatttgaagaggactcagaattcatgattgaagaaatgc

SEQ ID NO: 560317 - DNA, 50 bp, Homo sapiens
aaaccttgcttctaggagataaaaagggggcagtacccaaaggaaacgct

SEQ ID NO: 560318 - DNA, 75 bp, Homo sapiens
tcaagtgccagcatggagaagaggagtgcaaattcaacaaggtggaggacggggacaagttctggcggatgcccg

SEQ ID NO: 560319 - DNA, 97 bp, Homo sapiens
cggaggtgcgcggaggcttggtgtgccagctcatttgatatagtcatcgttggtggcggaattgtggggcttgcctctgccagagcactcatcctgc

SEQ ID NO: 560320 - DNA, 100 bp, Homo sapiens
cagaggatccagtgttcaccatcctggccccggaagggtacctgctcttccgagacttctgcctgaaccacctggaggaggccaggcccttggtggaatt

SEQ ID NO: 560321 - DNA, 78 bp, Homo sapiens
ctttacccgcccgcctgctcggcgaccaggtggctctgagggtcctgttccccgaccgctacgtcctacagggcttct

SEQ ID NO: 560322 - DNA, 90 bp, Homo sapiens
agaatttgctaaaagagcggccagagttgttcatccagggagacagcgtgtgtcctgtggccaggcggaaagcagtgagaagcccaacgc

SEQ ID NO: 560323 - DNA, 75 bp, Homo sapiens
tcgggacgtcctggggatgaaggttggcaaggccacaggcttcctcaagaactttctgatcgagcccttcgtccc

SEQ ID NO: 560324 - DNA, 83 bp, Homo sapiens
cgcctcgctcagctccaacatggaatcccagtcagaagttccagcctgccactgttctctgatgccatgccagcaccaactca

SEQ ID NO: 560325 - DNA, 100 bp, Homo sapiens
ctccagtgcctccgacgcctcctgatggtgcgcctagagcggatccgccaggctgagaccctggagcaagtgcgcagcatcatggatgaggcgccactca

SEQ ID NO: 560326 - DNA, 86 bp, Homo sapiens
gagctggttaggaggcacagggcgtcggacctgcacgagctgtctggcctccggtgtggctgtctctgatggtgtcatcaaggtgt

SEQ ID NO: 560327 - DNA, 89 bp, Homo sapiens
aaattaccacattgaagacaatctcaaggaccaaaaaagaacttcgtgtgaaaattttcctgggcacttttccagccattaactccagg

SEQ ID NO: 560328 - DNA, 75 bp, Homo sapiens
ctgttcccatgcaaaccaatgagggagaagtatcggaagaaagcagttccaagagttacactgttagaccttatg

SEQ ID NO: 560329 - DNA, 99 bp, Homo sapiens
tggaattccagttcatgctgcccacatctcatccaaacagtgtgtgcaggaacggagaataaactgagctctctctctgacctggaacagcagtaccga

SEQ ID NO: 560330 - DNA, 100 bp, Homo sapiens
acctccaaagagaacagttaaaagaaatatacccaagctggatgctcagaggcacagttggcgggcagctcccaggtctccatgagtacggcgccgtcgg

SEQ ID NO: 560331 - DNA, 100 bp, Homo sapiens
gccccgcagcggcgccgaggacagtgcagccgagttgcgtctccctcgcgcgaggagaaccaggtgcatcagcgcattgcggagctgaggaaagcaggtc

SEQ ID NO: 560332 - DNA, 100 bp, Homo sapiens
ggcggagagaagaggattccggcgggaactcgactcttggcgccaccgcctcatgcactgtaatcaaagaatcttcaggatggcagcaagtgtttacgag

SEQ ID NO: 560333 - DNA, 100 bp, Homo sapiens
agaagaagccgacgcccatccagctgaacccggcccccgacggctctgcagttaacgggaccagctctgcggacaaatggttatgagccttagagtttct

SEQ ID NO: 560334 - DNA, 83 bp, Homo sapiens
gcatccacactggacgcgagctgcgctgcaaggtggccaaagcattctggatggcaatcgggggagacagagatgaaattgaa

SEQ ID NO: 560335 - DNA, 87 bp, Homo sapiens
atgttcagacactaacagatgccatttatgacattattcttgatatgaagtggtgttggcagtatttggcagtcgtattcagagata

SEQ ID NO: 560336 - DNA, 82 bp, Homo sapiens
caccgacagtgccctgagggccttcgagagctaccgcgccagacaggtctgtgacaagcagggaacaaggcaacggacggcg

SEQ ID NO: 560337 - DNA, 75 bp, Homo sapiens
gctcaaagaaagatgattatctgcaagctttcttcctggtggcagatgacatcatggattcatcccttacccgcc

SEQ ID NO: 560338 - DNA, 82 bp, Homo sapiens
ccgcctcacacgcttcctctccagagtgatcaagtgtgacccgattttcatcttcattggagagaccctcctgtccatgaac

SEQ ID NO: 560339 - DNA, 75 bp, Homo sapiens
tccattcctgagaggccagcccagctgcttcttctgcaggtaacacaagtggcaagacagccgggaacccctacc

SEQ ID NO: 560340 - DNA, 122 bp, Homo sapiens
tgaagatgacacaccctgggccagcacatctccacctcatcaggaaacagctgagacaggtcatggatggaaatgtcataactgcaaagagaacagctgcagtttctgccattgccaccaag

SEQ ID NO: 560341 - DNA, 82 bp, Homo sapiens
ggagagctgtataagagctttatcaagaactatcctgtgcccaaggttgaagcaatgaataaaagactgggctccttggtgg

SEQ ID NO: 560342 - DNA, 75 bp, Homo sapiens
ctacgacgaaattagccagctccgcctggagatgttgcagtaaagatcctaaaggttgtcgacccaaccccagag

SEQ ID NO: 560343 - DNA, 82 bp, Homo sapiens
aggaggaagaggtggccataccgttgaccgctcctccaactaaccagcttattttgccatcagtaactccttcctgttcccc

SEQ ID NO: 560344 - DNA, 100 bp, Homo sapiens
ctggagttctacacacctgaggccttcaactggcgacaggcccctacaaaggcttcagagtagatatctctgccaacatgaggacagaaggactggtgcg

SEQ ID NO: 560345 - DNA, 89 bp, Homo sapiens
gcctgcagcgggagctggacggcgagcgcgagcggcgcgagaaaccatggccatgcagaaaatctttgcccgggaaatcttggactcca

SEQ ID NO: 560346 - DNA, 100 bp, Homo sapiens
tccttggaaattaaggaatgcaattctgccaccatgatggaaggaattactctgcttaatgtaagcaagctgaacattttgaagcttgctcctggtgggc

SEQ ID NO: 560347 - DNA, 90 bp, Homo sapiens
gtttcagggtggagaagaatctgcttgtctatggattgctgtcgtggctgtgatgtgcaaaccccacagatgtccacacatcagttttac

SEQ ID NO: 560348 - DNA, 83 bp, Homo sapiens
ggaaacaatggcatttacagaaagagtcaacagcagtggcaacagatcaatgtaaccactgtgcgggaatatctgccagaagg

SEQ ID NO: 560349 - DNA, 100 bp, Homo sapiens
ggggccgccatcccctcagagcgtcgggatatcgggtggcggctcgggacggaggacgcgctagtggaccctccattttccatatccaggaaaatgtgat

SEQ ID NO: 560350 - DNA, 100 bp, Homo sapiens
ggtcggcccggtccccgccgcacccagcccaggtttttcgttggaatatacgttgcacatttatggcgattctgagtgtgagggcagacttctgccaggc

SEQ ID NO: 560351 - DNA, 51 bp, Homo sapiens
cgagaaccgtcagtttgagccagatgattcttgagtatcagaacaccacct

SEQ ID NO: 560352 - DNA, 101 bp, Homo sapiens
acacacagttacttgccaagacgattgaagaaacttggatttaactggccagaagcaggtattcaaagcagagaacaatccctgggtgacccccattgcag

SEQ ID NO: 560353 - DNA, 101 bp, Homo sapiens
ctctgccactgcacaagaaatgtgtccccacagggatagaagatgaagatgctctcattgctgatgtaaaggtgattgctggcttcaaccgccttcggcag

SEQ ID NO: 560354 - DNA, 75 bp, Homo sapiens
atgacgtccagggctatgccgccaagaccgtctttgagtggcgccctgctcaagccgtggctcttcacggagatc

SEQ ID NO: 560355 - DNA, 82 bp, Homo sapiens
gcctgcagagctgtggcttaccaggcattggttcctgtcaccattgaagtagaggtgccctttgaccttcaccgttacgtta

SEQ ID NO: 560356 - DNA, 75 bp, Homo sapiens
ctcacagctgcagtctaatagtaacacagagccactagaacttatatgtgaaaagtctataggtacttgtaatag

SEQ ID NO: 560357 - DNA, 97 bp, Homo sapiens
agagtggctatggtgggcaaactaagccgattttccggaaaaaggcatccattctggacttgcactcaggggccctgtctgtcgggaagcactttgt

SEQ ID NO: 560358 - DNA, 83 bp, Homo sapiens
gctacatcaagtgatgaaaaacacccacctgaaaatatcattgatgggatgtagtaactggagttagtcccctgctcttcagg

SEQ ID NO: 560359 - DNA, 96 bp, Homo sapiens
tgctgtcaaccctttctttggaagcataatggatgtcactgaggaggtgtgggacaagataacaacgaacttgatgcaagtgataggtttgccaag

SEQ ID NO: 560360 - DNA, 100 bp, Homo sapiens
agcctttgcagtctcgacataagtactggtgatgtacatcgagagagacagcagaaagaccactccaggcaaggagcagcaaagtggcaatgaatacctg

SEQ ID NO: 560361 - DNA, 100 bp, Homo sapiens
cctggcgggtgccctggctaccatggaccatcctgctggtcagcactgcggctgtacgaggatgtcgtccaggaaagattgtgcagatgactgaagcaga

SEQ ID NO: 560362 - DNA, 100 bp, Homo sapiens
gagactcaaagtcctcagagcaagagatgaccttatcacactttcttatatacattcaggtctgtgtatgatgaccaaccaaatgcgcacaagaagttta

SEQ ID NO: 560363 - DNA, 75 bp, Homo sapiens
gacttgtgcaaccagggcaactctgatcttctcgctgggctactgccccactggggagtggctggctgtgggcat

SEQ ID NO: 560364 - DNA, 56 bp, Homo sapiens
actcggacctgagtgaccccatgtggagtgaaggtacacttctagcaactggttcc

SEQ ID NO: 560365 - DNA, 75 bp, Homo sapiens
ctgctgtgtgcggtgctgctgagcttggcctcggcgtcctcggactaaacttcagtggctctgtgaggaactgaa

SEQ ID NO: 560366 - DNA, 96 bp, Homo sapiens
ccctgcccttcaaacgtcggtacgagaagatcgagatcatgccagagggaatctagagcaacagcaaagctgaggtcaaactaccgtaaggatgga

SEQ ID NO: 560367 - DNA, 83 bp, Homo sapiens
aaacccgaatggcaggtcgagcgcgagagtatcagccgcctcatgcagaactatgaaaaggcctgtttaaagaagaaaacccg

SEQ ID NO: 560368 - DNA, 98 bp, Homo sapiens
acaggagcgagagcctgttggaacatgctttcttcaagatggaacaaagactgttgagtatgctccatgtagatcacatattgagctcctggcagctt

SEQ ID NO: 560369 - DNA, 96 bp, Homo sapiens
gaaaaatggagaaaacaagacaagcccattcattcatttgagcatagcaaagttgcatgctgagaatttgaaaaatgaagatgatgtagacactgg

SEQ ID NO: 560370 - DNA, 98 bp, Homo sapiens
ctctgcacattctgcggctaaagatgcgcattagcacagggcaaggcttcccagttgaccactgaaaaacacacatactatctgactgcagattctcc

SEQ ID NO: 560371 - DNA, 101 bp, Homo sapiens
gtccgcccaggcgcagatgcgggccctgctggaccagctcatgggcacggctcgggacgatggcagaaacggtggacacaagcgaaatggtcaacggcgct

SEQ ID NO: 560372 - DNA, 50 bp, Homo sapiens
ttcaacgggactattatgatagggagaatgaagttgaagaggtaaaagag

SEQ ID NO: 560373 - DNA, 100 bp, Homo sapiens
gcatctggattaggcatttagtgatacaaggatccagaataacaaaaactatgtaccagccacattcacacaacaggcattcacaagcccagagttctcc

SEQ ID NO: 560374 - DNA, 111 bp, Homo sapiens
tcgccgttaccttcttgctggcgttggtgggagccgtgctctacctctatccgacaatgcagatcttcgtgaagactctgactggtaagaccatcaccctcgaggttgagc

SEQ ID NO: 560375 - DNA, 82 bp, Homo sapiens
aacagagaaagaagtgataggagggctctgtagcttcgagagctgtgcccaggagtgaacaaccagccctacctctgtgaga

SEQ ID NO: 560376 - DNA, 100 bp, Homo sapiens
tggacgtgctggtgtctgagtggatggggacctgcctgctgaatttcgctaaggagtttgtgatcagtgatcggaaggagctggaggaagatttcatcaa

SEQ ID NO: 560377 - DNA, 75 bp, Homo sapiens
atcagacagaacagttaatcctcaatttaagcctgatctaacccctagaaacagaaatcacctgcccaccacccc

SEQ ID NO: 560378 - DNA, 98 bp, Homo sapiens
ccagtccccgaggcggatccggtgttgcatccttggagcgagctgagagctcgagatgttttactgtgcctggctaactatagtcgagggggtgatgg

SEQ ID NO: 560379 - DNA, 99 bp, Homo sapiens
tgctggtcaccccagctcctcagcagcatgaagaagaggacctggatgatgatgtcatcctgacagaatgttacagaaagggagagaataggaattccc

SEQ ID NO: 560380 - DNA, 75 bp, Homo sapiens
gctggaatgtcatggacttcatcgtggtcctcagtggagagacaagagagacacctccaacttcgacaaagagtt

SEQ ID NO: 560381 - DNA, 82 bp, Homo sapiens
agacacgaagcaaatgaagttttatactacatccagtcctggatgagccaatagctgaagctgtctgtattatcgcagacac

SEQ ID NO: 560382 - DNA, 82 bp, Homo sapiens
cttgtgctcagtgacatcattcaggttgaagaattagccctccaatcaatgatcagttctagaagaggggatgagatgctgt

SEQ ID NO: 560383 - DNA, 100 bp, Homo sapiens
gaaaacagcaggcacccaagcgggcggcaggaggactggaatgaaattgaccccattaaaaagaaagaccttcatcacagcaatggagaagagaaagcac

SEQ ID NO: 560384 - DNA, 75 bp, Homo sapiens
gcacctcggggacattattgcgcgtggaacggctgcttttggaaggttgattcttcaccacactgaaaccattag

SEQ ID NO: 560385 - DNA, 50 bp, Homo sapiens
aatgagagaagtcatatgcccggcacagctccgagctctgtccagtggtg

SEQ ID NO: 560386 - DNA, 82 bp, Homo sapiens
agctgtagagaggaccccggtacatctgaaagccgggaaatggttgatgataattagaagcatgctttccactgaacttccc

SEQ ID NO: 560387 - DNA, 98 bp, Homo sapiens
acaaagatgggcaaggctctgacaatccgggccaggacaaaagatccttcatcaccgaagtgacgttttagaaacagtggtcctgatcaacccttctg

SEQ ID NO: 560388 - DNA, 101 bp, Homo sapiens
cacccacggagcctccggggctgtggacggctgcattcatcgggccgccggccccctgcttaccgacgagtgccggaccctgcagagctgtaagactggca

SEQ ID NO: 560389 - DNA, 95 bp, Homo sapiens
gaagaagcatgatattgagctttacatgcacttgaacagactagaaattgcaccacagatatatgggttagatcctgaaggagctagacgagtgc

SEQ ID NO: 560390 - DNA, 98 bp, Homo sapiens
tgagccaccttgggaacctagctgatgataggggggttccatctcccaacttgtccatttgtggacatcggatacccaaggagacgaagctgaagcag

SEQ ID NO: 560391 - DNA, 98 bp, Homo sapiens
ctgcatggagtcttgtgaaatcgcgtggactgcaacacccagcagcgcgcagcaacaactccaggcccagcatttatcacatggacatggtctccccg

SEQ ID NO: 560392 - DNA, 90 bp, Homo sapiens
tgtgagtcagcctgcagcctcgtcagactcggagacgtctgacagtgacgatgaggttttggaacttgaaggtgaaaaaggagaatgggg

SEQ ID NO: 560393 - DNA, 75 bp, Homo sapiens
caaaaatgtgcatactcacagagttagagagagggatggtggtgttggagagcacaatggctgaacaagtccttc

SEQ ID NO: 560394 - DNA, 82 bp, Homo sapiens
ggtgctgctcgcctacttcctgccggcgcaggccgcggcgagtcctttgcacatgttggcaacacacgcatccgcatcggcc

SEQ ID NO: 560395 - DNA, 100 bp, Homo sapiens
gaaaaagctgccctgagacggtgtcccgccgaaagtgctctatgcccaggtctctgtggctgggctgctccagcctggcggacagcatgccttcgctgcg

SEQ ID NO: 560396 - DNA, 80 bp, Homo sapiens
agcgcggtccctgtattggtctcctgctcctagaggtacaccaggggttggaaaaaccacactaggcaaagaacttgcgt

SEQ ID NO: 560397 - DNA, 98 bp, Homo sapiens
ccagatgatctatccctcctgaaactctaccctccaggggatgaggaaggccataaaattttgagtagaaaaatccagaaatttgaaaatcagtatcg

SEQ ID NO: 560398 - DNA, 80 bp, Homo sapiens
gcttggccacaggagacaacgttgaggtacagacagatgaggtttatataactttccaagacaaggaagttgtgcaaagc

SEQ ID NO: 560399 - DNA, 52 bp, Homo sapiens
cttgttgggcttctcgacggagagaggtgttttgtccagtctgagtcctgtg

SEQ ID NO: 560400 - DNA, 75 bp, Homo sapiens
cacgcaaccccagatccatttacactttacaagcactgcagtttcctcctgaaggctggctccggctctccctca

SEQ ID NO: 560401 - DNA, 100 bp, Homo sapiens
ggctcaggcccttggctgagtgggaatgcgttgggactgcccagctgagctatcagggaaggtggccatccagaaggaggacttgcagaagtaccacaac

SEQ ID NO: 560402 - DNA, 82 bp, Homo sapiens
cccgtgccgcgtctccgcgttcccagcccgggtccccgcgttcacagccccagcgcagggttgtgagtcccggcccagcccc

SEQ ID NO: 560403 - DNA, 100 bp, Homo sapiens
gtggtatccaccccatttggcgtggcggccatctggatcctggactccgtcgggctccgtgcggcgggtttcggggaagacgtggacggatactgcgaca

SEQ ID NO: 560404 - DNA, 71 bp, Homo sapiens
tccggaagtagcaaggctgacaccagctgaccggttccctgatgtgttacctgcttctgctactgatccaa

SEQ ID NO: 560405 - DNA, 100 bp, Homo sapiens
tctacgtgtgctttttcaagggagctgataaagaacttcttcccaaaatgggctcaggaagaggccaaagaagcagaaatgagcagaaaggagttggggc

SEQ ID NO: 560406 - DNA, 82 bp, Homo sapiens
aagttggatttttttttctcagtgcaataagaaagatgacttacttcacaagttggaactttatattgctgttggaatatct

SEQ ID NO: 560407 - DNA, 95 bp, Homo sapiens
ggagttgtcggcgccgcggccgctgcggacggacgctcgcctgccggctgagtgaagctgtggtctaccaatctagacaactcagtggcaagcat

SEQ ID NO: 560408 - DNA, 100 bp, Homo sapiens
gcgatcgagagagaccggagaggtggagaggtctgccatcatggatgttctcgcagaagcaaatggcacctttgccttaaaccttttgaaaacgctgggt

SEQ ID NO: 560409 - DNA, 101 bp, Homo sapiens
caaatggacatcttcctggaagaagatgggaacgtgaattccaaactcaccaaggattcagtgtggaactgtggaaggtgcatcagtgaagaaatggacca

SEQ ID NO: 560410 - DNA, 76 bp, Homo sapiens
agccaatcccaggaggaaaaacggtttcccaaaccactccttatgatccagtgaatattcaagagagctacatttg

SEQ ID NO: 560411 - DNA, 88 bp, Homo sapiens
cagcagaccttggtgatgtgctacagagtcatttgccctggctccatagttcccacccaggattagaaaaaataagtgctatagtatg

SEQ ID NO: 560412 - DNA, 73 bp, Homo sapiens
gagcccatggcatcatagttgtgtatgatgtgacagatcagggagatcttgtgcgaaaactcaaagaagataa

SEQ ID NO: 560413 - DNA, 101 bp, Homo sapiens
accaaacatcagaaatacatccagcatggctggaggcttacctatttctactccatgtaccaccataaacaaagtttgtgcttcaggaatgaaagccatca

SEQ ID NO: 560414 - DNA, 101 bp, Homo sapiens
gatgttacagctgctcatgaaccacttggcaaagaggcagcacccagggtcattcctggagcataaacgatccctgcagaacatgggctagaagaccccac

SEQ ID NO: 560415 - DNA, 97 bp, Homo sapiens
agaagaatttcgatctccgccctggggtcattgtcaggagtacaagcgcaagctagccagagtttccctggtgcgcaaagaactcaggtcccggatc

SEQ ID NO: 560416 - DNA, 100 bp, Homo sapiens
aaaaagctgcacgcaagtgttaaacttctggctatctatgtgcctgctgatgacttgactgaccctgcccctgctactacgtttgcccatttggatgcta

SEQ ID NO: 560417 - DNA, 74 bp, Homo sapiens
ccgctcctgcgggcttagcaggaaagggtgcctaagatttctccacccaggtgaactcctccctcacctccccg

SEQ ID NO: 560418 - DNA, 101 bp, Homo sapiens
agaaccagtggtaattaccatcaatactatggaatgcattttgaaacttaaggatgggatacagagccaaggattgtcaccagtgaagaggtcattattcg

SEQ ID NO: 560419 - DNA, 50 bp, Homo sapiens
ttacagggtgttctagaaaaagagcagtcctgggaactccaacaagggag

SEQ ID NO: 560420 - DNA, 100 bp, Homo sapiens
agctcgaccacagcaagctcctgggaacaccttccaccatgaccacctcagcaagttcccacttaaataaaggcatcaagcaggtgtacatgtccctgcc

SEQ ID NO: 560421 - DNA, 99 bp, Homo sapiens
tcgatatttccttggtcaagagagagcatgattttttggacagagatgccattgaggctctatgcagaatactagttgatcagcaagtttggaaaatag

SEQ ID NO: 560422 - DNA, 82 bp, Homo sapiens
cgacaagcacacactatggcgctgaaacggattaataaggtatggcctcacaagtcttggtctacccaccatatgtttatca

SEQ ID NO: 560423 - DNA, 78 bp, Homo sapiens
aggaaactgaggatgcctggccgcttcgagagctgtgcccaggagtgaacaaccagccctacctctgtgagagtggtc

SEQ ID NO: 560424 - DNA, 51 bp, Homo sapiens
cagcgatggcagcgatgaggaggagtgcaacatggatgggtgcaaaaaaga

SEQ ID NO: 560425 - DNA, 100 bp, Homo sapiens
gcgggagagcggcagcgggaccccagcgcgggcggcggcggctgggcgggagccccagagctctggccaggctgccgcacctctacaggaactttgccgc

SEQ ID NO: 560426 - DNA, 75 bp, Homo sapiens
cggccgtgtcccgaggaagtgcaagacccgcggagctggagtttgttcagatcatcatcatcgtggtggtgatga

SEQ ID NO: 560427 - DNA, 98 bp, Homo sapiens
ggtgcggagagactccttgggggtcgagcacataacggggttcgggtgtctcgtgtgtgaacatcacagacaatgagttacaaggcactaatagttct

SEQ ID NO: 560428 - DNA, 96 bp, Homo sapiens
ttgtgtattacctcattcaaaaatcgaagagacgtggcgattgtggcagaaatttctggatgactattcacgttttgaagattggctgaagtcttc

SEQ ID NO: 560429 - DNA, 100 bp, Homo sapiens
ttcgccaactccgctgcctttgccgccaccatgcccaaaacgtgacaaccatgagtggaaaaaactaattatggttcagcactggcctgagacagtatgc

SEQ ID NO: 560430 - DNA, 100 bp, Homo sapiens
cgcaggactgcagggtctctccaggaatgtaccaggtcatccagggtatcatctctcctgtcaacgacacctatgggaagaaagacctcgcagcttctca

SEQ ID NO: 560431 - DNA, 100 bp, Homo sapiens
catacagacctcaagcctgaaaatattctgtttgtgaattcagactatgagctcacctacaacctagagaaggatccctccccgcggcggcgatggcccg

SEQ ID NO: 560432 - DNA, 90 bp, Homo sapiens
ctcgggcagaggcgacctccccgcgttccatgcgcacagggacagggaccaagatcactccatggatgaaatgacagctgtggtgaaaat

SEQ ID NO: 560433 - DNA, 82 bp, Homo sapiens
gtatgtgaacttccagcagccggcggacgtgtggacgaatgtggaacctcgctctgtggctgtgttcccttggcactcctta

SEQ ID NO: 560434 - DNA, 83 bp, Homo sapiens
ctgcagaggaccatccagtgtgcaaaaggttgcttataaaaagggagtcaaacatctttctgctcttcttgatccagaggtcc

SEQ ID NO: 560435 - DNA, 83 bp, Homo sapiens
gaataagaaacacattccttctcagaacttatgcataccatattgatgatgttaagaagttcaaaccgggttacctggaagct

SEQ ID NO: 560436 - DNA, 83 bp, Homo sapiens
ttcattgtcttttccgcccgcttcgatcgcctcgcgccggctgctctttccggctttcacagctggtagttaacgcaggaggg

SEQ ID NO: 560437 - DNA, 80 bp, Homo sapiens
gtttgcacaagggaggcgacagagacagcagcagtacaaggtgaatatcttaaccagacttgccgcagaattgaacaaat

SEQ ID NO: 560438 - DNA, 100 bp, Homo sapiens
ccgagtgtttaagacggatatggagctggaggttctgcgctataccaataaaatctccagcgaggcccaccgtgagagtttcgctcttgttgcccaggct

SEQ ID NO: 560439 - DNA, 50 bp, Homo sapiens
cgaaaacttaatctacacctacgataaggcggtgtctcagggcagcagcg

SEQ ID NO: 560440 - DNA, 98 bp, Homo sapiens
ggaccccgatggtgtcatcgaggagaatagacatttcccccagtacattcagaaaacatggtttggctcatgatgaaatgaaaagtccccgggaacct

SEQ ID NO: 560441 - DNA, 97 bp, Homo sapiens
agcgtggcagcatggggacctccggggaggcctgccgctgtaagaggttccggttctgtggtgatctggactgtcccgactgggtcctggcagaaat

SEQ ID NO: 560442 - DNA, 74 bp, Homo sapiens
aatgtatccagttttatgctgatgagagctataacttaatgatgaaggagggacgaagaacatcaagtttaaaa

SEQ ID NO: 560443 - DNA, 74 bp, Homo sapiens
aagaggaggaggaggcggaggtccaagcggaaaggaaaccaagtgctacctcctggagcttctcttggaaatgg

SEQ ID NO: 560444 - DNA, 101 bp, Homo sapiens
acctggtggaaaaggttgatctcatagacaagtttgtacatccaaaaaaatgcatccgatgcagatttatggctcctgaacagttgcactgtaaaaaaccc

SEQ ID NO: 560445 - DNA, 144 bp, Homo sapiens
agaggttagacttgtttcttatatgtgatgccattccagcactggactcatggaggctgagcatttattcaggtgtgaccccagcccgtcctcctatcccggtcaccatcccctcggtgggagtggtgaaccccatcctggcca

SEQ ID NO: 560446 - DNA, 90 bp, Homo sapiens
atctaaagcaccagtaaaatatggtgaactcattgtcttaggaacccagactcccatggttatgacaaggaccccgttttggacgtctgg

SEQ ID NO: 560447 - DNA, 82 bp, Homo sapiens
ctgagcctttacttgttgaggagcagtgagtacctatttgggatttctgagtcactcaagggaaaggattaatgccagatgg

SEQ ID NO: 560448 - DNA, 82 bp, Homo sapiens
cttgttcccccaaatgtctgactctgactctcggactgagaaacgcaagatgccatggacaatattaccaggcagaaccaat

SEQ ID NO: 560449 - DNA, 90 bp, Homo sapiens
ctccgaccggctgaggcggcgcggcagcggagggacggcagtctcgcgcgacatgtcatgctgcccaaggacatagccaagctggtccct

SEQ ID NO: 560450 - DNA, 100 bp, Homo sapiens
gggagctctatagtcggagtggagaactgcaagagtttcgctctgctgcccaggctggagtacagtgatgtgatctcctgacgtcaagtgatccattcgc

SEQ ID NO: 560451 - DNA, 100 bp, Homo sapiens
aagaaacctcagacagatcgccggggaggcagcgcgggatcccagcctcaggcgtgcgcggacggtgtgcggagcttggggcttccttggtcgcacccac

SEQ ID NO: 560452 - DNA, 109 bp, Homo sapiens
ctgggtgccggtgctcttcatcaccttcgtggtcgtctggtcctactacgcgtacgtggtggagctctgcgtgtcccgtggccacccaggagcccgatgtgcaaggcag

SEQ ID NO: 560453 - DNA, 75 bp, Homo sapiens
agttaaatgccctcaagtcgacaggggatgggaccctaggcaaacatgctgaagacatatttggtgagttgttta

SEQ ID NO: 560454 - DNA, 98 bp, Homo sapiens
ttcaaagggaatacattgccagaacttggaatactctactggacaaacatttcctccaaggtgtccaaggcagctgcagatttgatggcctactgtga

SEQ ID NO: 560455 - DNA, 87 bp, Homo sapiens
gagaattataggaacctggtctccctgggcctgaccgccgctgcctacagagtcacactcaatcctccgggcaccttccttgaagga

SEQ ID NO: 560456 - DNA, 85 bp, Homo sapiens
cggatggacacggacgtggtcaagctgtattgtaatagagattttgatgatgagaagatccttattcagcaccaaaaagcaaagc

SEQ ID NO: 560457 - DNA, 83 bp, Homo sapiens
ctgacagcgcgcacttcacccgcagttggaccgcctctttttcgtcatggaatatgtaaatggtggagacctcatgtttcaga

SEQ ID NO: 560458 - DNA, 75 bp, Homo sapiens
tggataatgacgacagcaacccgaagacagggaaatttaggagagagttatgtatgtggctccatagagcccttc

SEQ ID NO: 560459 - DNA, 83 bp, Homo sapiens
ggaattttgaagtcaccactgaggaggaattcaccctgttcgtctatggcaatgattcgtgtgaataccttctctcaagtggc

SEQ ID NO: 560460 - DNA, 100 bp, Homo sapiens
ctttccacgacggtgacacgcttccctggattgggtaactgccagtttctgtggctgaatttaagcacttacagcatcttcctagctgggtgtggtggct

SEQ ID NO: 560461 - DNA, 87 bp, Homo sapiens
cggggcgccggcgccgccgcccccgggctcgcggcctgcagggagttaaatacctgtgcatcccagcagcggattcaccatctcaaa

SEQ ID NO: 560462 - DNA, 75 bp, Homo sapiens
gcactgtaaaactttacacattgtgctattcactctgctttacaaggttgctagaacacatcacgtccaagcaga

SEQ ID NO: 560463 - DNA, 75 bp, Homo sapiens
attgacattacacagtgttaacaatgcatccacagaggttttgattcccaccatggccatcacccagtttcggtt

SEQ ID NO: 560464 - DNA, 83 bp, Homo sapiens
cggagccccggctcgcccgtgtgcagagactgtggatattcataaggagaaagtggcacgaagagagattggtattttgacaa

SEQ ID NO: 560465 - DNA, 75 bp, Homo sapiens
gaagattttgaagacaatcgtcacttatacaggtgcacttacagagtgctacgatgaactggggaacagatatca

SEQ ID NO: 560466 - DNA, 98 bp, Homo sapiens
gaatgtcaagtccaagatcggctccactgagaacctgaagcaccagccgggaggcgggaaggaagctcttcgtgggcggtcttgactggagcacgacc

SEQ ID NO: 560467 - DNA, 78 bp, Homo sapiens
gccagcagccgtccggagccagccaacgagcggtattggcaagcttgccagtgtacctgctggtggggctgtagccgt

SEQ ID NO: 560468 - DNA, 96 bp, Homo sapiens
cagcaccatactggaacttcaaaaagttctgaaaacatgttgagttggccaccctgttcaagggcttaggagaaagtcaacacacttcgcaacttg

SEQ ID NO: 560469 - DNA, 114 bp, Homo sapiens
tggtccagggagagcctggggacgacttttacatcatcacggaggttaagaaatatcctctcagttgtcggtactgatgccttgaaaaagaccaaaaaggatgatgagaagtct

SEQ ID NO: 560470 - DNA, 50 bp, Homo sapiens
ccctcgcctcccggccgagctgacggttttaaaatcaaagatgggaaaat

SEQ ID NO: 560471 - DNA, 75 bp, Homo sapiens
gggacggctgccggcctgtgtggtggactgtggcacggggcaattgctggctactttgatatatattttgagaag

SEQ ID NO: 560472 - DNA, 83 bp, Homo sapiens
ctgccaagttgaaaatggacgagtaatcgcctgctttgattcattgaaaaattcagaaggagctggcggacatcactttagac

SEQ ID NO: 560473 - DNA, 100 bp, Homo sapiens
catggggaaaatctccccggtgactttcagacaattgtggcaattaataaagacccagaagctccaattttccaagtggcagattatggaatagttgcag

SEQ ID NO: 560474 - DNA, 80 bp, Homo sapiens
acacgcggttcttctccagcgccctggcctccctcaccttggacacctcgcttggggcgaccattgacgaggtggagacg

SEQ ID NO: 560475 - DNA, 100 bp, Homo sapiens
gaccgtggagttcaagcacgatgacaaactcagtgaagacagtggagccttaatccagatgtatcggaacagtacaacatctaaagagtaaatttggaaa

SEQ ID NO: 560476 - DNA, 74 bp, Homo sapiens
cagtagtggacggccagacagagtccccggaggcaaaaggaagagctgagcttctgaagatcaaccttcgtgag

SEQ ID NO: 560477 - DNA, 75 bp, Homo sapiens
cttcaatgctgttaactggattgagtccagctcttgggatggacacagcattgttggttttgccatgtactattt

SEQ ID NO: 560478 - DNA, 102 bp, Homo sapiens
tcagagtgtgggggttgtgaaagtgcctttcttcctgacgtggagtgtggtgaactcagtgcattgggccaatggttcgacacaggctctgccagccacaac

SEQ ID NO: 560479 - DNA, 96 bp, Homo sapiens
gttcagaggcgtcgggctgctgaacaccgggagctactatgagcacgtgaagagacggggtgtcgccgtgttgcccaggcaggtcttgaactcttg

SEQ ID NO: 560480 - DNA, 82 bp, Homo sapiens
gagcagaatcagcatgaggagcagacaccccaggagaggtgtggcagttgggctcttcgtcaccaaacttcactttggaagg

SEQ ID NO: 560481 - DNA, 75 bp, Homo sapiens
gccggcgccgcccggaccgccaggtgctggagaatctggtaaaagcaccattgtgaagcagatgaggatcctgca

SEQ ID NO: 560482 - DNA, 98 bp, Homo sapiens
tgttttacagtctgttccacatgatcattgtaataagaagaagctcattcacacagaagacccatttaatgatgaacatcaggagaggcaagaggtgg

SEQ ID NO: 560483 - DNA, 100 bp, Homo sapiens
gagggacgtgccaagaagcgcaagaaggggaaactgaggcccaaggaaattgagtatctctgcaaagtcaccagctgagttcgaaccagacagatcctgg

SEQ ID NO: 560484 - DNA, 98 bp, Homo sapiens
cgtctccaagatgtagctaatgaccgtggttcccactgaggtatatttgcttacttaaactaccatgttcctcgaacgagacgagaaatcctggagac

SEQ ID NO: 560485 - DNA, 98 bp, Homo sapiens
gtacaaatgaggctcaggacaatgattttccaacagtttgccaaggcacgagtaacaagctcacgcagttgggcacttttgaagatcattttctcagc

SEQ ID NO: 560486 - DNA, 75 bp, Homo sapiens
agggtgtgttactgaagtgaaatatcaagaagagagttgtatgtacaacccaacaggcaaggcagctaaatgcag

SEQ ID NO: 560487 - DNA, 96 bp, Homo sapiens
gcggaacagcggaggacgaagagcgggacccgagccctgataagctgtcattggaaggaatagtggtacaaagagctgaatgccgaccagctgcca

SEQ ID NO: 560488 - DNA, 88 bp, Homo sapiens
ggcccacgccagacacgacgtctggcaggaacctcggcctcagaggccttatgatgggaaatggagtaaaacaatggtgggatttggg

SEQ ID NO: 560489 - DNA, 100 bp, Homo sapiens
gtgacatcacacaaaaaggatatgaaaagaagaggtcaaagttaattggagcctaccttccgcagcctccgagaatgtatcctgtcaggtataatgtcag

SEQ ID NO: 560490 - DNA, 100 bp, Homo sapiens
cgacggtgtgtgcggaacatggcggagcgcggcaggaagcggccgtgcggcccgggaacgtgatgttctcttcccggggtacacccatttgcagagggcc

SEQ ID NO: 560491 - DNA, 80 bp, Homo sapiens
cagctaagacgccaggacccactggaagcctagaaatggtctattattagcagaagatttttctgcatagttggcacgct

SEQ ID NO: 560492 - DNA, 75 bp, Homo sapiens
ttggcaaccctcctggactaggctgctcttgttaatcacatggatgttgtgaaaagccatacaagtgtacctggg

SEQ ID NO: 560493 - DNA, 82 bp, Homo sapiens
agaacagctgtggaaagaagttgcaaaacactggatgaggtttatataactttccaagacaaggaagttgtgcaaagcctca

SEQ ID NO: 560494 - DNA, 90 bp, Homo sapiens
gaaatactttatactcttggactacatctttctcgggctcagaccctgcgggagattgtgattggcgtcctgcaccaattgaaaaaccag

SEQ ID NO: 560495 - DNA, 75 bp, Homo sapiens
cggggccatgtgcaggaccctaacgacaggcgcctccggcccatttacggccatgaatattgtggttcccttcat

SEQ ID NO: 560496 - DNA, 75 bp, Homo sapiens
cacctggtagagaaataccgcattcttatcacaaaggcagaatccagagaccacatttgaagtatatgttgaagt

SEQ ID NO: 560497 - DNA, 75 bp, Homo sapiens
gctattatggatgctggaattttcattacaaagtggacccatcaacttgtgccagtacagggtctgtgcagtgga

SEQ ID NO: 560498 - DNA, 75 bp, Homo sapiens
atgccaatggtgatgtggatgtggaagaaagtgatgagaattaacactgaatcctccggaaggaattgtagcagg

SEQ ID NO: 560499 - DNA, 50 bp, Homo sapiens
cgtcttagtccactagagctgaatacttcagagagtcagagttgtgccag

SEQ ID NO: 560500 - DNA, 101 bp, Homo sapiens
aaccccgcggggaccctgctggcctcgtgcggcggcgaccggagaatccgcatctggggcacggaggtatgagttggccacaggccgatttccttatccaa

SEQ ID NO: 560501 - DNA, 100 bp, Homo sapiens
cccctgctgctggttctgcccctgctgcagactcctcgtgaagtggcccagcaggctgtggatgcggatgtgcatgctgtgggcataagcaccctcgctg

SEQ ID NO: 560502 - DNA, 100 bp, Homo sapiens
tgggattgacccaactccggagcagtggaagcagattgcttctgtcatgaaggaggcaaaaccttcaactgaggacttgggggataagaaggaaggtgaa

SEQ ID NO: 560503 - DNA, 75 bp, Homo sapiens
cttattattggccctccagatacactttagtggaatgaatcttacttgttgaatatcttctggttactagttgga

SEQ ID NO: 560504 - DNA, 100 bp, Homo sapiens
cgcgggagccgctgcccgaactcccggcccgaactccaggtgacctgagcatctctgcagaccgcctgagtgagaagcgctctcccaacgactttgcctt

SEQ ID NO: 560505 - DNA, 82 bp, Homo sapiens
gccaggtggacaacctgtcatcactgacttctgaaaaatgcagcagcttttttatgagaattacgagcagaacaaaaagggg

SEQ ID NO: 560506 - DNA, 75 bp, Homo sapiens
acctgcacatccacactccgctgctcgacagacaatatgtgcactcatttgtggacgtccaattgtaaagccaga

SEQ ID NO: 560507 - DNA, 122 bp, Homo sapiens
ctgcttcatccttgtttaatgactttggtgccctcaacatctctcagagacgaaaggccaagaagcttgagagaagaaaaatttcagaaaaattgtctcaatttgactagaatatcaatgaa

SEQ ID NO: 560508 - DNA, 75 bp, Homo sapiens
ttcacgactactagaaggggaggggagtggaaaggctctcagtgaaaaagaggcgtggagctatttcctatgaca

SEQ ID NO: 560509 - DNA, 75 bp, Homo sapiens
cttgggagaaagtttcatctgtggatggagtattggtctcggatccgcagagaactgttcattgaggaaattcag

SEQ ID NO: 560510 - DNA, 111 bp, Homo sapiens
tattgatgagctcaaggctggcaaaatcccaaaaccagggccaagggccagatgcagatggctggagatgggtgcagatcccagggatctcgaaattctgagaaagcctct

SEQ ID NO: 560511 - DNA, 99 bp, Homo sapiens
aagaaaggatcctcttaactattcaggatgtgatggaatgtccagaaagagaagtgtatgacccgtctccagtatctccattcatctgctactatgatg

SEQ ID NO: 560512 - DNA, 88 bp, Homo sapiens
ctttgatccagaacttgcagcaacaatagggtgcagcccggaatcccgaggatgtggaccgggagcggcgagaacacgaacgcgagga

SEQ ID NO: 560513 - DNA, 98 bp, Homo sapiens
ataattgaaggcagtaaaagtgaaattaaataggaagatcatcagtcaaggaagacccactggagagaatgggtaccacagaccatgtcatcgtcctg

SEQ ID NO: 560514 - DNA, 90 bp, Homo sapiens
caaagccgcacagctggtaaatgggaaaagaggggtttaaaggtgaaaatccccagcaaggaggaagaggcagatatgtcctcacccaca

SEQ ID NO: 560515 - DNA, 98 bp, Homo sapiens
gagacagcggtgacaggagcagcggccgggagcccttagggaggcaggtgcagcggaactgctgcctgacgctctgcaacttcagcatccccgaggag

SEQ ID NO: 560516 - DNA, 130 bp, Homo sapiens
acaatttccatcaaaaagtgattaagcagagaatggagaagaaggttgattccaggatcccatggtccattattgcctttaccaagtcgttacagaatgggctctcgagatacacctgaacttgttgctt

SEQ ID NO: 560517 - DNA, 107 bp, Homo sapiens
cttggaatcaaagataaatccaaatactgcatatcagaaacaacagatccatccttttacaatccctgctattattcgtccattcagcgtattgaactatgatccac

SEQ ID NO: 560518 - DNA, 100 bp, Homo sapiens
tccattttctttcaactatatttgagcatacccagcaggaggaggcctcaggggggcccacagcccccaaagctgagagtggtcgaagcggaggtggggg

SEQ ID NO: 560519 - DNA, 51 bp, Homo sapiens
cattctcgctaacaactgcccagctttgagctgagtcagtgctgattctct

SEQ ID NO: 560520 - DNA, 75 bp, Homo sapiens
taaacctgaagggcgatcggttacatggacctcagaccagagtggcagcctggtccgacccccagtggcactaac

SEQ ID NO: 560521 - DNA, 100 bp, Homo sapiens
accagacaaatcaaattagtggttttggatcaacactctgtggtaggccagaacacaggccccagtccaagtcctaacccctgctcaaatccaaacactg

SEQ ID NO: 560522 - DNA, 82 bp, Homo sapiens
ccggcatcgtcgcctggtgcgtggactggagactgatgcatgagggggctacggaggcgcaggagcggtggtgatggtctgg

SEQ ID NO: 560523 - DNA, 89 bp, Homo sapiens
cctcagcgcccccagcacgccgccgagtcccgctcgccatggataatgctcggaatatttttcaatgtccattccgctgtgttgattga

SEQ ID NO: 560524 - DNA, 90 bp, Homo sapiens
ctccggggcgcggagaagctgcatcccagaggagcgcgtccaggagcggacccggtacttctactcccgaaggattgacatcaccctgtc

SEQ ID NO: 560525 - DNA, 82 bp, Homo sapiens
acgaggaggaggccatggtggtggccgtaattccgcggcccgagccgatgctcagagcattccacgcctacgggaaggcagg

SEQ ID NO: 560526 - DNA, 111 bp, Homo sapiens
ctgagcccgcggcgctgagccagccgggacggacatgcgcgggagggcgccgcggggcagccgccgctcctccgggcatttttgaaacgttggggttgttggagtggttgg

SEQ ID NO: 560527 - DNA, 100 bp, Homo sapiens
atgtccttggaccgacagttgtttcacaaccccaggtttccccattaactgttcagaaggtcccacagataaaggaggaagaagccagacgacagtcagg

SEQ ID NO: 560528 - DNA, 82 bp, Homo sapiens
ccgcgtccgaggctcgcgggcggcgggcccgggccgaggacgatgatcccgccgggggagtgcacgtacgcgggccggaagc

SEQ ID NO: 560529 - DNA, 95 bp, Homo sapiens
agaggctgttagctatggctggtctggaattaactttcttctctggtgtatatggaacctgtattggtgctacaaataaatttggagcagaagag

SEQ ID NO: 560530 - DNA, 85 bp, Homo sapiens
cagatcctcatgaatgctatgccaaagtgcattcaattcgagcactggcgttaagagttttgagggaaattctgagaaatcaacc

SEQ ID NO: 560531 - DNA, 83 bp, Homo sapiens
ttcggaaccgagagctggaggccactcgacgccagaggatggattacccagtgtcagatgtaccaacagtaccagcaacaggc

SEQ ID NO: 560532 - DNA, 75 bp, Homo sapiens
gcggagaggaggctggaagaggaagatgcctagcacagaccttctgatgttggaattggaacgagcatggagaga

SEQ ID NO: 560533 - DNA, 83 bp, Homo sapiens
ccagcaccagacacttaccagaaatgtctgtcttccaacaaatgttcagtgcctccggagccagcgtggtggccatagacaac

SEQ ID NO: 560534 - DNA, 80 bp, Homo sapiens
tcatgtttcctgtgtgaaattgcttctgtcaaagtctgtatttagaaactatgatcacgaccatgatgggtacatttccc

SEQ ID NO: 560535 - DNA, 100 bp, Homo sapiens
tctgtgagcctagggacccatttctcctcctttgacagggacatcagtggagccttctcagacccacagcacactagcaacttcagacgtcagcaggcgg

SEQ ID NO: 560536 - DNA, 74 bp, Homo sapiens
tgccggctgctccgcaccccggggtcccaggaagggcggcccaggaaggtgctcgggtcttcggggcactgggt

SEQ ID NO: 560537 - DNA, 100 bp, Homo sapiens
ggtgacctgcacacaggagccctccagtcagtactgattgaattactcaaggctgcctctctgcaaagttgaggagttagccctgcgtagccagttacca

SEQ ID NO: 560538 - DNA, 95 bp, Homo sapiens
tatatcatttaaaccacatggctatctaaagagagtatactgtcctcgtaactgtatgcaagcaaatccacattatgctcgtgtaattggaactc

SEQ ID NO: 560539 - DNA, 75 bp, Homo sapiens
gttgcggctggggctggaggggaggaagggacaagaatccttcaagaaacaggaaaaaactcctaaaacaccaaa

SEQ ID NO: 560540 - DNA, 90 bp, Homo sapiens
ctgcaggtagctgccaagtttatgcctgtatccagccttattgtggatttgatgagcctgtcccagacctctgcagcctcaagcggttgt

SEQ ID NO: 560541 - DNA, 101 bp, Homo sapiens
cctcattcacctgcaccccagggtggccccgtctaagctggaggcgttgcagaaggccctggagcctacaggccagagttttgctcttgttgcccaggctg

SEQ ID NO: 560542 - DNA, 75 bp, Homo sapiens
ctcctgtgctgcgaccactgcccggctgccttccacctccagtgctggcaatataaagtcctggttcactctcag

SEQ ID NO: 560543 - DNA, 80 bp, Homo sapiens
gaatcgtatcgtatgtccgctatccagaacctccactctttcgggagcatttcctgaagacgtagtcatgcagcacgtca

SEQ ID NO: 560544 - DNA, 83 bp, Homo sapiens
gcggagcgaacccgagagcgtggagcgggctgggccagatgagcagcaccagcagtaagagggctccgaccacggcaacccag

SEQ ID NO: 560545 - DNA, 100 bp, Homo sapiens
gaagcacagccccgaggtgtgcgaagccaccaaggatgtgtctgcaggccttcgtagaagctttctttttcctggctcagaggaagttcaagatgctgcc

SEQ ID NO: 560546 - DNA, 100 bp, Homo sapiens
cctgggcgggcgcagcgcggccaccgccccgggacccgcgccgctgccctccggctccgcgggcggcccacggcgagggtgataaaagaaaatgtggctg

SEQ ID NO: 560547 - DNA, 96 bp, Homo sapiens
aaagaagttgtcattctttgcacgagtgtgccctggaggatgaaacgtatgcagatggagctgagaccgaggtggactgtaaccgctgtgtctgtg

SEQ ID NO: 560548 - DNA, 100 bp, Homo sapiens
gaagagtcggaaacttaaagaaatatttaacaaagctttggttgatccagtccctgaagaggaaggagaaggaatatgagcatgaaatggagcggctggc

SEQ ID NO: 560549 - DNA, 100 bp, Homo sapiens
ccttccttgcagaggccatggaggacgaggagagacagaagaagctggaggccggcaaagccaaggtgctggatagtttactagtccagtatggagtggt

SEQ ID NO: 560550 - DNA, 97 bp, Homo sapiens
gagaacttcctggaagacaaagcccttatgatcgccatggaatatgcaccaggccaagcagtgaagccgttaccactgacctgccctgacttccagg

SEQ ID NO: 560551 - DNA, 98 bp, Homo sapiens
agaccactacttagataatttgagcaagatttcagaggaagaacttgggaaaaatggaagccagagtgtattgaacaagagatttttcaatcaagact

SEQ ID NO: 560552 - DNA, 101 bp, Homo sapiens
cactctctgcgggtcccgcggctcccgcggcttccggcccactcagcgcctccagaggcctcagacctgtcgcgaaatcgcctttcagaaattcctataga

SEQ ID NO: 560553 - DNA, 75 bp, Homo sapiens
caccaccagcagctgccccacggcttcaccaacatggcccatgttacccagagtctcgctctgtcacccaggctg

SEQ ID NO: 560554 - DNA, 100 bp, Homo sapiens
gcagagccaggtgtacggagagacaatgcagatcttcgtgaagactctgactggtaagaccatcaccctcgaggttgagcccagtgacaccatcgagaat

SEQ ID NO: 560555 - DNA, 96 bp, Homo sapiens
gccgcttcttcagctctgagaccaccgcagcccactccctagatatgaggccccaggattcctggcgaggtcctcctccccttttccagcagcaaa

SEQ ID NO: 560556 - DNA, 100 bp, Homo sapiens
acctgatgacccacggccgcatggtgccgagagggacaggcttctccggaaggaacagattttagctgtggccaggggtaccagtttgaggaggagaacc

SEQ ID NO: 560557 - DNA, 102 bp, Homo sapiens
ccgagaggtaccgggggtgacagctccgggaccggccgaaaggcgaggaaccgctagtgtcagcagtgggatacctgcgcttgaaggacatcatccaccgtg

SEQ ID NO: 560558 - DNA, 74 bp, Homo sapiens
accaatgtcatccttgcagacctcaacctctcagaattatatccagatcgagagacagaagattctgaaagggt

SEQ ID NO: 560559 - DNA, 90 bp, Homo sapiens
ctggttgttccgttgcgagctgcagctgcgatctctgtggtaggcccagtgcctttcagaatttgcccactcatctggtataactggttc

SEQ ID NO: 560560 - DNA, 83 bp, Homo sapiens
ggcccaggacgcccagggccagcgcatcggccacttcgagttccatgatgacagtcatgtccctttccagggacctcaaggac

SEQ ID NO: 560561 - DNA, 75 bp, Homo sapiens
ttgggcaagcccggtttatacagaagcagatggaacattttcaagatgaccttgaatgatgccatgaggaacaag

SEQ ID NO: 560562 - DNA, 75 bp, Homo sapiens
caacttcggtcgtggaggaaacttcagtggtcgtgttcgtcccactgattcaaatgtcagtcctgctatttctat

SEQ ID NO: 560563 - DNA, 75 bp, Homo sapiens
cgcagcccgggcccaggccccggcagcgcctgggacaaggtgaccaaagccacgtaatgtccgtagttcgctcat

SEQ ID NO: 560564 - DNA, 75 bp, Homo sapiens
ctttgaggacacagcctcgctggaggcagtttctgttccagatttcggaaggttcacgagtgttgccgacacgcc

SEQ ID NO: 560565 - DNA, 100 bp, Homo sapiens
tgttggcgctgaggacccggacagccggctgaccggttccctgatgtgttacctgcttctgctactgatccaaactgcagaacttctcattcatccccaa

SEQ ID NO: 560566 - DNA, 50 bp, Homo sapiens
gcggactcttcttcgccttcgagtttctagagaggaaggatctccccagc

SEQ ID NO: 560567 - DNA, 74 bp, Homo sapiens
caggagtgaagctacagaccttcgcgtgctcatcatcactgtaggggacctttgaaagagctgccggagaaggt

SEQ ID NO: 560568 - DNA, 98 bp, Homo sapiens
attattggccctccagatacactttagaaaatatgagagccacacccgtgttcacacaggtgagaagccctttgagtgtgatatttgtcaccagcgct

SEQ ID NO: 560569 - DNA, 83 bp, Homo sapiens
catcccgccttttgaggacggcactccccggagagtaaaggtgggattctatccaaagcttgtgattatatccaggagcttcg

SEQ ID NO: 560570 - DNA, 83 bp, Homo sapiens
ccgacctgggggtggcacagcccaccggggcacagccagagcagcacccaggtgagaagccctaccactgcaactgggacggc

SEQ ID NO: 560571 - DNA, 78 bp, Homo sapiens
tggggccggaggcgggcgaggaaggtttggtgcacctcgatttggaggaagtagggcagggcccttatctggaaagaa

SEQ ID NO: 560572 - DNA, 49 bp, Homo sapiens
gagcggagttgaggcagaagccaggtgctggagaatctggtaaaagcac

SEQ ID NO: 560573 - DNA, 138 bp, Homo sapiens
cccggatgaatacttggatagctggaatgaagaagataaatgcttgctgcataaagtttgtgatacagggagatgaacagcgactgtacgagtttattgttcgccatttcctggcttgctgctcccaggatgctcagg

SEQ ID NO: 560574 - DNA, 110 bp, Homo sapiens
tttgtgggacaaggaacacatttatgatgagcagccccccaatgtcgaggagtgggtagtcaaaccacacactccattaataaggtttcctgacagaagagacaatccta

SEQ ID NO: 560575 - DNA, 88 bp, Homo sapiens
cgagaacgtccactgcgggccggcgaaagctggtacactgaggaggggacggctccgtcttcacattgtgcacagatctgaggatggg

SEQ ID NO: 560576 - DNA, 50 bp, Homo sapiens
gcacgccatgggagccgtgactgacgacccaacatgagtgaagtttcctg

SEQ ID NO: 560577 - DNA, 100 bp, Homo sapiens
gcgaggagccggcgcggtcgcagtctccacggcgcaggcccacggtagcgcagccgctctgagggatcatggcccaagttgcaatgtccaccctccccgt

SEQ ID NO: 560578 - DNA, 88 bp, Homo sapiens
gccttcctcaacgacgcggacatggtcatgagctttgtgaacctggggcgtgatggtgggcatgggtcagaaggattcctatgtgggc

SEQ ID NO: 560579 - DNA, 50 bp, Homo sapiens
gcggaggtcgataagctggaactgatgttacccagcatgccacaatctga

SEQ ID NO: 560580 - DNA, 100 bp, Homo sapiens
gagaaatactttcataacacatcatggggtgatgtttctctctgggaaccttctggaaagaaagtggtgttcactgttggcagaatttgtgccagccgta

SEQ ID NO: 560581 - DNA, 83 bp, Homo sapiens
ataaaaattatttatccaacagctcctcccaggatgaggaagatggagagaatgcccacccatatagaaacagtgaccctgtg

SEQ ID NO: 560582 - DNA, 90 bp, Homo sapiens
tcccaatgctgaagtaagattgtcttggaaatactaagttggattcatgatgttgctatcaaaagttgagaaattgtcagaagaaatcat

SEQ ID NO: 560583 - DNA, 82 bp, Homo sapiens
ggatctgcgggaccgcttcacggaaatgcgcgagatggacctgcaggtgcagagtgaacctgagcaaggtgggcgagtattg

SEQ ID NO: 560584 - DNA, 100 bp, Homo sapiens
ttttcctttctccgcagctctgctcccctagcaacgctcgccacacccttgttttgagatcctctctaagctgagatctgtatctgtggacctgaatgtt

SEQ ID NO: 560585 - DNA, 83 bp, Homo sapiens
agccgatccagcctgcggagcctgtggggcagggcagcgaggtcacaggccccacctttgctgatggcgagctcatccccagg

SEQ ID NO: 560586 - DNA, 90 bp, Homo sapiens
cctggcttaggaaggggagctgaggtccggggcccagttttccggagttgcggagcagcatttctttctattactactatctatgctgag

SEQ ID NO: 560587 - DNA, 100 bp, Homo sapiens
ccgaagtcgtcttcatcggggactccttggtccagctcatgcaccagtgcgagacaaatttacatgtattggagaccagaccagaagcccttctgaatta

SEQ ID NO: 560588 - DNA, 88 bp, Homo sapiens
gtggttactgggctgcatcttgctgaagtatgtcaccgtcagtatcccaagaatcacccaggacattttccagcagttgctgaaacga

SEQ ID NO: 560589 - DNA, 75 bp, Homo sapiens
atcaaggagagaaatcaggaagattatgggagccgattatgtttcgaggggaagtacgtttaaatgtggaagaga

SEQ ID NO: 560590 - DNA, 83 bp, Homo sapiens
cgccgagagccggaggcaatggatgaacagagcgtggaggtcagcccaaggccaaccccactgtcactctgttcccgccctcc

SEQ ID NO: 560591 - DNA, 90 bp, Homo sapiens
ggacgctctcagctctcggcgcacggcccagtcctccccaagaaattccacatggaaacttgataagactggctgtgaatgagttattct

SEQ ID NO: 560592 - DNA, 75 bp, Homo sapiens
aagatggcggacgagaaggacagggaagagggtcaccatgaagttcaatcccttcgttacctcggaccgcagtaa

SEQ ID NO: 560593 - DNA, 96 bp, Homo sapiens
tgcctgaaatccaagccctggtgcagacactgcagggacccttccacacggcagatgggatccggacgggccagcaccgttcactcttccaccccg

SEQ ID NO: 560594 - DNA, 100 bp, Homo sapiens
aggatttggcccagctcatgaattcgagcggctctcataaagatctggctggcaatatacttctgctctgacctatgatgccgttcaagtgatgactgaa

SEQ ID NO: 560595 - DNA, 75 bp, Homo sapiens
ggaggaagagaagcacgaattccgccggcgttgaacttcggatcaagagacaaaactcctcagatagcatctcaa

SEQ ID NO: 560596 - DNA, 74 bp, Homo sapiens
ctttgcaacagaattacagagtatgatgtgtgatgaatgcagactctgctaccattttggctgtttggatcctc

SEQ ID NO: 560597 - DNA, 100 bp, Homo sapiens
actgactgcagcatcgacctccggggctcaagtgatcctttcatctcagcctcctcagtagctgagactacagaacccttaggagaaatcttgagagtgg

SEQ ID NO: 560598 - DNA, 75 bp, Homo sapiens
ggcctcctgccagccccagcccctggagaggatgcagattcctggattttgtgaagggggatttaaaatccatga

SEQ ID NO: 560599 - DNA, 100 bp, Homo sapiens
catcaatcctcatcaaggaaatgctatacttgaaaaggatgcctttgaactctggatctctccacctggtctgattctgtccagaggcctgggaggattg

SEQ ID NO: 560600 - DNA, 100 bp, Homo sapiens
ccgtgggcgtaggaccctctgagccaggaaacctcgacctgtctcccagttggttgcacagcaggttactcagcagtttgtgcctcctacacagtcaaag

SEQ ID NO: 560601 - DNA, 50 bp, Homo sapiens
cccaggtcactgtcacagggcccaatcgtcaagccctctcccagcttaga

SEQ ID NO: 560602 - DNA, 50 bp, Homo sapiens
ctgaagatcatcaccagtgcagccgcaagatggagtttcgctcctgttgc

SEQ ID NO: 560603 - DNA, 75 bp, Homo sapiens
tggggtcctggcggccgaccgagaacgcagcatccacggagttaacaccgtcaccaccttggtggagaacaagaa

SEQ ID NO: 560604 - DNA, 75 bp, Homo sapiens
aaccttcagatcgtggcaagcgagcccggggtagagctccatttatcttaaagaaattggacagcatatgaagac

SEQ ID NO: 560605 - DNA, 98 bp, Homo sapiens
gctagagtattacaacctggaaaggctgacggggtacgggatccaccactgctttgccaggagcatgatgggccacgaggtgaaggtgccgctcctgg

SEQ ID NO: 560606 - DNA, 83 bp, Homo sapiens
atcgccctggccgacaagcacgcaacttccccgggcgctgcctggacaggcctgcctgcgtgctgggacatgtctggcctcca

SEQ ID NO: 560607 - DNA, 98 bp, Homo sapiens
ttccctcagcacacagaggatgatgctgactttgatgaagcccacacatcttgctgacttcactcaagtgcaaaccattcagtattcaaacagtgaag

SEQ ID NO: 560608 - DNA, 100 bp, Homo sapiens
cgctcacagagagctgggctacaggctagcgttcttgcggtgggagttccccaacttcaacagccgaagcaaggacttgctgggtcgctttgttctggcc

SEQ ID NO: 560609 - DNA, 75 bp, Homo sapiens
gtgaattttggcacaaactgggctgctgtgtggtagagaaaccccagccgctgacagcagccatggcgagcggca

SEQ ID NO: 560610 - DNA, 96 bp, Homo sapiens
aagaccattcagatgggatctttccggatcaatccagatggcagccagtcagtggtggaggtgaccctgtggaaggagtcagttgatgggcagtgg

SEQ ID NO: 560611 - DNA, 82 bp, Homo sapiens
gttaacgcgttgattcgttccgtgctgctgcagagtactgggatttaatgaatttgtctgaaaaacatgataagataccaga

SEQ ID NO: 560612 - DNA, 113 bp, Homo sapiens
tccacaatgatttctccagtgctcatcttgttctcgagttttctctgccatgttgctattgcaggacggagaattgaatgatctggcacgggaccctccagcacagtgttcag

SEQ ID NO: 560613 - DNA, 75 bp, Homo sapiens
gagacataagtcccatgaggatcccagagttgtggcagctgggacgcactctctgagatattttcgcctgggcgt

SEQ ID NO: 560614 - DNA, 100 bp, Homo sapiens
agggaccctgtgcaggcctgctcctccgtttgcaaggtttgcctgcaatgagatttcattctctacatttaaaggacatcctttctgagctgctgtgaat

SEQ ID NO: 560615 - DNA, 75 bp, Homo sapiens
gtctgggttctggtgccgcgcagctttccccgattgtcctgggtcacataatgccagctgagcgtaaaaagccag

SEQ ID NO: 560616 - DNA, 75 bp, Homo sapiens
ctctctggtccgcagcggcaacagtaacgaaaaacagggctgattctggactctacttataatatccctaactgc

SEQ ID NO: 560617 - DNA, 75 bp, Homo sapiens
agatgcgacgaggacgatgactgcttagaccacagcgacgaggacgactgccggctgaagaagatgcagagcagc

SEQ ID NO: 560618 - DNA, 100 bp, Homo sapiens
atcttggaggtgaggacgtgcctcgtggtctaaagcttcggcacaagggcccaactggaattccacttacgggaagcagtatatctcaactcagttttgc

SEQ ID NO: 560619 - DNA, 138 bp, Homo sapiens
ctttgcacctgatcgcaacaaatagtcggaacatcacttgcattacgtgcacagacgtcaggcaaggcagtttccccggcatgaaccagagtggacttatggcttccagctctccctacagccagcccatgaacaaca

SEQ ID NO: 560620 - DNA, 98 bp, Homo sapiens
cggcgcccgagtgccggcttctcccctacgcgctacacaagtggagctccttttcctccacctaccttcccgaggcgtctctggccgagcctcttttt

SEQ ID NO: 560621 - DNA, 98 bp, Homo sapiens
ggagcgcggtccctgtattggtctcctgctcctagaggtgttgactttaaggtgaaaacaatttcagtggatggaaataaggctaaacttgcaatatg

SEQ ID NO: 560622 - DNA, 89 bp, Homo sapiens
gaaaagtggcactgaggctctggaacttctgcccagctctccttgatccaagtattttagaacatgctcaagaggtgagcacttaacaa

SEQ ID NO: 560623 - DNA, 51 bp, Homo sapiens
ctacaaccttcgatctcctgacgagaatccctttgcccacgtccagctgaa

SEQ ID NO: 560624 - DNA, 96 bp, Homo sapiens
taacacacttcaagaaaatgtaaacaagtatcagcaagtggaagctgtgctgaatggtttggtggccactgaggtgttgatgtggttttatgtcgg

SEQ ID NO: 560625 - DNA, 75 bp, Homo sapiens
catccgccagaaggtggcgctcacgcaggagctggaggcctggcaggacctgtttgctgtggacacccaagtggg

SEQ ID NO: 560626 - DNA, 90 bp, Homo sapiens
tttgatccctgtgaatgtgtttgctctcatgaacatgcaatgagaagactgatcaatctggcggcttcaatgatccatcctaaagaggtg

SEQ ID NO: 560627 - DNA, 90 bp, Homo sapiens
aaacattaaatgacagttcacataagaagttcttcgatgtatctaaacttggcaccaagtatgcttatgtccctgatgccaaaaatgcac

SEQ ID NO: 560628 - DNA, 89 bp, Homo sapiens
cggcagtacctgcgagtagagacacaattccagaatggacagaactgtaccgctctctttttggccagctccaccctcccgacgaaggc

SEQ ID NO: 560629 - DNA, 98 bp, Homo sapiens
cccaagcggtgtctctcatcctgactggggatccagagtaggagggagcctttggtgggacctcctgccccccgaggtctgcagtctcctgaacccag

SEQ ID NO: 560630 - DNA, 83 bp, Homo sapiens
aaacgaggcgccgcgttggcgcttggacggcgggaaccggctccggagcgagaacgcgcgagcatcagatccatgctgctgct

SEQ ID NO: 560631 - DNA, 75 bp, Homo sapiens
tgtaatcccagctactccagaggctgagatgggaaagggctccttcaagtatgcctgggtcttggataaactgaa

SEQ ID NO: 560632 - DNA, 100 bp, Homo sapiens
aggcaacgtgttggaccttccggagcttctcagaagacagagggttttcttttgagttggagtgccaaactgtatcttacaccaagtaatattgttctgc

SEQ ID NO: 560633 - DNA, 98 bp, Homo sapiens
tccatttcatgatattccaatttatgcagataagatcataggtatattgaactgttcctgaattcatgtccaaaaggaaaataagactctaggggctc

SEQ ID NO: 560634 - DNA, 100 bp, Homo sapiens
gaagatgtgtctggtgaacctgaagcttcaccgagtgcagatacaactatactgtttgtaaaaggagaaggaaaaacgtggtcttcgagaaatgcgagtt

SEQ ID NO: 560635 - DNA, 74 bp, Homo sapiens
caagagcaggagcccggcaccccccgccgacaaggaggggtttcttgaattcctctgagctttctggacttcca

SEQ ID NO: 560636 - DNA, 100 bp, Homo sapiens
tgggttgtccgactgggagcagaggaagccttgaggacctactcacagataggaattgaagatccacatctcaaagaagtggggcttcaccaagttcaat

SEQ ID NO: 560637 - DNA, 100 bp, Homo sapiens
gggagcgagccagcaagcggaagctgcccttcaccgcgggcgccaatggggagcagaaggactcggacacagcggagctggagtttgttcagatcatcat

SEQ ID NO: 560638 - DNA, 100 bp, Homo sapiens
cactctgggggcgccgcagtgttcgtgggatggggcagcgggctgcagctggcggccggaatccgcgcgcagcccgggttcagccgtctgtatatctccc

SEQ ID NO: 560639 - DNA, 90 bp, Homo sapiens
ggaacttcgttgcttgcttgcctgtgcgcgcgtgcgcggacatggcctcaaacggcatgagctctccggacttcgacaaccagacactgg

SEQ ID NO: 560640 - DNA, 98 bp, Homo sapiens
ccaagaaccaggaagccctgcggatggccaacgtggcaggtgctggagaatctggtaaaagcaccattgtgaagcagatgaggatcctgcatgttaat

SEQ ID NO: 560641 - DNA, 82 bp, Homo sapiens
ccgcctgaagcacccaccgaagacgaccatgacgagctctagctggatgggcgcagaggagcctcctcaacaagcccaagag

SEQ ID NO: 560642 - DNA, 98 bp, Homo sapiens
gctgaagcgactgagtccgcgatggaggtatgggccagcagtttcctgccagatattgcccagcgtgaggagcgatctcagcaggcctataagagtca

SEQ ID NO: 560643 - DNA, 100 bp, Homo sapiens
tttcatactccctctggaataccttgggcattgctgaatatgaaaagagctgaatcaatttatgaagaaatgaaacagaaatatggaactcagggttgct

SEQ ID NO: 560644 - DNA, 100 bp, Homo sapiens
cgctgccatccgcaaaggctttctcgcttgtcaccttgccatgtggaagaaactggatgatgattattctccaccgtctaagagaccaaaggccaatgag

SEQ ID NO: 560645 - DNA, 101 bp, Homo sapiens
gacagcctcctggccgccgaagaggccgccgccaagatgggcactgtgccccgactgcggcctcgcctcaatgccattctcttcaagctacaattcagcga

SEQ ID NO: 560646 - DNA, 131 bp, Homo sapiens
cagcgctcctggcgctgctggctgcgctctgcccggcgagtcgggctctggaggaaaagaaaggtgctggagaatctggtaaaagcaccattgtgaagcagatgaggatcctgcatgttaatgggtttaat

SEQ ID NO: 560647 - DNA, 101 bp, Homo sapiens
gagacggcggcagcagcggcattcagactcaggaatttcaagtgtgctatccctatgtgtattgattatatcttcatcctgctcaaatttgctattgaaac

SEQ ID NO: 560648 - DNA, 100 bp, Homo sapiens
gccaagatgtctgacatggaggatgatttcatgtgcgatgatgaggaggactacgacctggcataagatgcacatttttctgctctggagccgggaatga

SEQ ID NO: 560649 - DNA, 59 bp, Homo sapiens
cctccttgcgcctccgattcccaggatgtacagttacccagcacgtgtacctcctcctc

SEQ ID NO: 560650 - DNA, 90 bp, Homo sapiens
gtgagttatcaaaacaccatgtccagaggctcacccatgatgaacagaacttctgatggttgtttacattcagagctctatcaataagag

SEQ ID NO: 560651 - DNA, 100 bp, Homo sapiens
ttagatacttgggttcagccagcaattgcccaaacccaaagtgtggaggactgcatcaaaacatgtaaacaaggacctcggtaatatggaagaaaacaaa

SEQ ID NO: 560652 - DNA, 75 bp, Homo sapiens
agaaaatctcatcactacataaatcatttggtgcaaacagctgcacagcaagtggcagaggataaatttgttttt

SEQ ID NO: 560653 - DNA, 100 bp, Homo sapiens
ccgctgcctgcctgcctggcatctctctctcccgctacaaaagaccccacagctgtagagagagcaaacttgttaaacatggctaaactgagtatcaaag

SEQ ID NO: 560654 - DNA, 87 bp, Homo sapiens
agactcagaatcgaatctcttctccctccccttcttggaaaggcagcaacaggtggaagctgttgagttggaggctaaagaagttct

SEQ ID NO: 560655 - DNA, 75 bp, Homo sapiens
gcgttccccagaccatggcatctacggaagggaggagagggcagtgagagataggaatctcctccaggttcatga

SEQ ID NO: 560656 - DNA, 50 bp, Homo sapiens
cactgaaagcattaaagctatgctcctaactgggcaactcaagattctgg

SEQ ID NO: 560657 - DNA, 75 bp, Homo sapiens
cggggccttccacaccccctccgtgggtgtgtgatgatgataattccgaagaaggcttccacactattcattcag

SEQ ID NO: 560658 - DNA, 82 bp, Homo sapiens
gtcacagccaccaacagtatggaagagactctgatgcaaatagttcttcgtgccatgaaggaggacagtgaaaaagttccga

SEQ ID NO: 560659 - DNA, 75 bp, Homo sapiens
agcctcatcacacaggatccgcccctggacatggaggagaaggtccgcttcaagggataaaaacattcagatggc

SEQ ID NO: 560660 - DNA, 95 bp, Homo sapiens
tatggacaagaagttatcatattcaattagcagagcctcacagacaatggccaaatgtgtcaaagctgtcacagagggtgcccaggcagtagagg

SEQ ID NO: 560661 - DNA, 97 bp, Homo sapiens
attttccttgatggtcaaaagattaaggatcagaattcaggctataaatgaaattggagctggaccatttagtcagttcattaaagcaaaaactcgg

SEQ ID NO: 560662 - DNA, 99 bp, Homo sapiens
ctcctggccaccgactcctacaaggccaagtcctgtatctgccatgtctgtggcgtccacctcaacaggctgcattcctgcctctactgtgtcttcttc

SEQ ID NO: 560663 - DNA, 100 bp, Homo sapiens
gacgaaaactggatatacagagcccagcccagaaaagataccatgtttgtgtggaagtgccccgtgtttgctatgccgatgctgtcctagtggaaacaac

SEQ ID NO: 560664 - DNA, 75 bp, Homo sapiens
cccatcccttcatcaaggagtaccaggccaaggaggatggtttgtttatcagcagagaaatgaagttcacaataa

SEQ ID NO: 560665 - DNA, 74 bp, Homo sapiens
ctgatcccaaaattattgaaaacactcgaagggcaggtatgtttattcctaaaacgaggtgccaatcaacatgc

SEQ ID NO: 560666 - DNA, 100 bp, Homo sapiens
tatggcagcctcactcccagtagtttctgcatttagtgagataagtgttccttgcctgtatctccccttggttcaatagctaccagatttttggaagagg

SEQ ID NO: 560667 - DNA, 76 bp, Homo sapiens
acccccatttggcctgctgggaaccgctccagcttacagctttggaatcgcagacggttgatgatgaagcgccggc

SEQ ID NO: 560668 - DNA, 87 bp, Homo sapiens
gtggagacacggccagatctgccctccagtcagcccaaggccaaccccactgtcactctgttcccgccctcctctgaggagctccaa

SEQ ID NO: 560669 - DNA, 76 bp, Homo sapiens
caaataatgaaaaagttgttgttaaaattctcaaggattcactggcaaaatttgctggcagaaaactgaaagactg

SEQ ID NO: 560670 - DNA, 82 bp, Homo sapiens
gagattaaagatgcagtacgccacggggccgctgctcaagttccagatttgataccatggcctgggagaccatcctgatgga

SEQ ID NO: 560671 - DNA, 75 bp, Homo sapiens
ccggacgcacctctgtttgggggtcctcaggtaggtggagagttttcaaacactgttatcggccagatgaagaaa

SEQ ID NO: 560672 - DNA, 101 bp, Homo sapiens
tgtggagttcggaggaaaagggctcaggaacggaaaacagttcttccttcaaagcatgcagtacctgaagtaatagaagactttctctgcaatttcttgat

SEQ ID NO: 560673 - DNA, 99 bp, Homo sapiens
tggcaggttcgccgggtgtgaggcttcacagcggtccggtgaccaagtcgagagtatatgattgaacgaccagagccagaattccaagacctaaacgaa

SEQ ID NO: 560674 - DNA, 82 bp, Homo sapiens
gaacgaggcaaggagctaaagcagcgtgcgttcagccctggggtggtggtgaagtttattaagaaggagaaggtcttggagg

SEQ ID NO: 560675 - DNA, 98 bp, Homo sapiens
gcagtaccaccctgttgtacatccactggacctaaaatatgaccctgatccagtgatggaatggggagaagatattaaagcagtttcaaaagatgaag

SEQ ID NO: 560676 - DNA, 106 bp, Homo sapiens
gtggtaacgtggctgcaaccttagcgacatcaggaagaacagggtcgaggatcgagatgcagcagcttttttatgagaattacgagcagaacaaaaaggggtacat

SEQ ID NO: 560677 - DNA, 75 bp, Homo sapiens
tgcagttttatccttttctgtacaacatcacttcttctgtttgcagtgcatttaaatcaaacggtattgagatgg

SEQ ID NO: 560678 - DNA, 98 bp, Homo sapiens
gtgacagacactcctgcaacccagttttccagccaccagtgggatgatggagtatgccaaaatggtccaggtcttacatgcatactgtatcatttcag

SEQ ID NO: 560679 - DNA, 75 bp, Homo sapiens
aaggaattgttttggcctaggatcatccagccttgaaaagatcttttgaggtcgaggaggtcgagacacccaact

SEQ ID NO: 560680 - DNA, 82 bp, Homo sapiens
ttcgctgtggcgggaagatggccggatttgaaggtggataatattaatgcagctgtgatggatttgaaaaaaaagaagatcc

SEQ ID NO: 560681 - DNA, 96 bp, Homo sapiens
cacagcccgagaaaccgcagcactacacacttaattcagtgcacaaatgagatgaatgtgaacatcccacagttggcagacagtttatttgaaaga

SEQ ID NO: 560682 - DNA, 82 bp, Homo sapiens
ttcaggtcaccactggatatcagttgcctgtatacaattatcagtttgtgaatagcacaatggaagaagctggactttgtgg

SEQ ID NO: 560683 - DNA, 75 bp, Homo sapiens
ttggatatcccgtgacttccagaggcgtactcttctccaagatctgatgaagagttatcttaaggatcatctttc

SEQ ID NO: 560684 - DNA, 101 bp, Homo sapiens
ggcagtcgcgctgagggactcggctcaggaaccagtgaccttcaaggacgtggccgtggacttcacccaagaagagtgggggcagctggaccttgttcaga

SEQ ID NO: 560685 - DNA, 100 bp, Homo sapiens
ctctgaggatgagctggaggaggggggctgaagcagtgcctactcgacagaaccggtcatcgtacaaagaaatgccacgtgactcaaaggcaaagccaga

SEQ ID NO: 560686 - DNA, 100 bp, Homo sapiens
actccttgggggtcgagcacataacggggttcgggtgtctcgtgtgtgaacatcacagcagggaggagagagcgatggcttttttcacccagaaggccag

SEQ ID NO: 560687 - DNA, 75 bp, Homo sapiens
gatacctttctaacagcccaagccctgaaagcagcagatctcacctgcattggaggatgagacgccacatgaaga

SEQ ID NO: 560688 - DNA, 87 bp, Homo sapiens
tcctgcggcagaagccgagttcaacatcctcctggccaccgactcctacaaggtctattctggataagcaggttttgtgaagacatt

SEQ ID NO: 560689 - DNA, 100 bp, Homo sapiens
ctgggttttacagcacttggccaagctagatgtcaaggtagagtctgggtatgtctgtgaaggtgatcacaagaccatggctaaagctatcaaagacaga

SEQ ID NO: 560690 - DNA, 98 bp, Homo sapiens
aggacgagacgggcaagaaccgttgctgatcttatctgaagcagcagatcagtgggatgagggagactgttcacctgctgtgtactcctgtttggaag

SEQ ID NO: 560691 - DNA, 82 bp, Homo sapiens
ggcgcgcccagagccccgcgtttcagccctagggaagtttggtgccctggttgtcagatgttggaaagcagtaggacggaac

SEQ ID NO: 560692 - DNA, 83 bp, Homo sapiens
cgcacactgctacatcgatgacagaggattcaggtatggcctcacaagtcttggtctacccaccatatgtttatcaaactcag

SEQ ID NO: 560693 - DNA, 50 bp, Homo sapiens
ctcctgcatctgcctccccatgagcaatttacagcaatgagggatttata

SEQ ID NO: 560694 - DNA, 50 bp, Homo sapiens
tcctgggctgcgggcaaggcgttataatggagaatgggatctagctcaaa

SEQ ID NO: 560695 - DNA, 100 bp, Homo sapiens
agatcaaattttccagtggtgctctctgaatatctcatacctattgtagtgaggtacctcacagatccaaacaatcaggaagtaccaccaagaacaggga

SEQ ID NO: 560696 - DNA, 100 bp, Homo sapiens
gatgttaatgatgatgtcaggagggcagcagtagaatcacttgggttcattctattcaggcgacattgactacagcaccgtgctcctcggcatgctggtg

SEQ ID NO: 560697 - DNA, 82 bp, Homo sapiens
cttcccctttccagagagccagaaagaaggggggccctcagcctcttggccttgaacgggctgttcatcttgattcacaaac

SEQ ID NO: 560698 - DNA, 90 bp, Homo sapiens
ccttcttgtggtccagcctccagtcccagagatagagtttcaccatgttgtccagggtggtctcaaaactcctgagctcaagcgatctgc

SEQ ID NO: 560699 - DNA, 75 bp, Homo sapiens
ggggtctgggttctggtgccgcgcagctttccccgcgctcctggttgcagccagaatgcatgacttcaggaggac

SEQ ID NO: 560700 - DNA, 88 bp, Homo sapiens
gcgaggagactctcgggctttgagctcccatcccagatctcaaagtgtttgagcgtgagggagtacagctgaatctgtctttcattcg

SEQ ID NO: 560701 - DNA, 51 bp, Homo sapiens
aatatcccgagatggacttggatggagagcttatggatggagaccaaacat

SEQ ID NO: 560702 - DNA, 123 bp, Homo sapiens
ttttgttgaatttgaagatccccgagatgcagctgatgcagtccgagagctagatggaagccgaggcctgcctggagccccagatcaccccttcctactacaccacttctgacgctgtcattt

SEQ ID NO: 560703 - DNA, 75 bp, Homo sapiens
ccccaaagataacaatcagtttgccagtgcctctttggacaggactatcaagatgtacctgtgtggtctaagctg

SEQ ID NO: 560704 - DNA, 90 bp, Homo sapiens
ttccagcactggactcatggaggctgagcatttattcagatgtcagtattgaatatggtggtgaggcgtgaccctggcaacactgaacct

SEQ ID NO: 560705 - DNA, 99 bp, Homo sapiens
gggtaactctatcggactctcccatcactctgcatggttgaccgttctggaagagtgtttaatggggacagtgggcactctcctgcttgaaaacccact

SEQ ID NO: 560706 - DNA, 100 bp, Homo sapiens
caaggaactgaggaatccagcacgcaaggacatcggaggtgggctagcactgaaactgcttttcaaggcctttgttgaaaataatcctgccattaaatgg

SEQ ID NO: 560707 - DNA, 100 bp, Homo sapiens
cagagtacaaccagctcgtattctcagccacatttattccagcctaggctatacctccctttgaatttgctttcaaagatgagcgtatctcttttactat

SEQ ID NO: 560708 - DNA, 83 bp, Homo sapiens
ggagaagcttcgcagccagctgtaccagggggacttcgtgcacgccatggagggcaaagacaatgcagatcttcgtgaagact

SEQ ID NO: 560709 - DNA, 100 bp, Homo sapiens
ggagaagtgtccggggtagccccgttacagattcaagatggaaaaggtgatgtaaccattacaaatgatggtgctaccattctgaaacaaatgcaagtat

SEQ ID NO: 560710 - DNA, 83 bp, Homo sapiens
ctccttctcaatcttggaacagcacccccttctttaaggtttctctggaaacccccctggtaagtgtggaggaggcgggacac

SEQ ID NO: 560711 - DNA, 82 bp, Homo sapiens
ctcctcctccacctccggcttttgggggatcactgtcctctctcggcagcagggctggaccccaatggagaacaggtggtgt

SEQ ID NO: 560712 - DNA, 75 bp, Homo sapiens
tgttactatgagaaatgaagagctgcttttaagatgacgtccggttgtttgccttcgtgcgcttcaccaccgggg

SEQ ID NO: 560713 - DNA, 75 bp, Homo sapiens
ctacagccatctagtttccctggggatcgtgggactttaccagatcggtttgtaataacacctcgaagacgctat

SEQ ID NO: 560714 - DNA, 76 bp, Homo sapiens
cctcaggcccgtggccgctgtccaggagctctgctctcccctccaggagaggtgctgagaggggaccggattgtca

SEQ ID NO: 560715 - DNA, 83 bp, Homo sapiens
gactggtgatctacgtgtgctttttcaagggagctgataaagaacttcttcccaaaatggtcctgccattgactctaccagag

SEQ ID NO: 560716 - DNA, 51 bp, Homo sapiens
gtttgtggatcaggatgagtatattgttatgggtctgaagtgtaatacctg

SEQ ID NO: 560717 - DNA, 82 bp, Homo sapiens
aatggcagccgcgcattctggaagaatacctggagtagaacagaaaaattattatgtctgtgttcccttgggactcattgga

SEQ ID NO: 560718 - DNA, 100 bp, Homo sapiens
cgactactcaccccgagtgtaaaggtcaatatccaacacagccaacctaccctgtgcagcctcctgggaatccagtataccctcagaccttgcatcttcc

SEQ ID NO: 560719 - DNA, 100 bp, Homo sapiens
taaagttttacaagatttaacctgtcatcaagacctgggattttggtggaagatcataaccaaccattgtttggagttcagtttaactggcacagtaaag

SEQ ID NO: 560720 - DNA, 75 bp, Homo sapiens
gttcacaggtgtttctgcggcagtagagacggggtttcaccgtgttagccaggatggtctcgatctcctgacctc

SEQ ID NO: 560721 - DNA, 75 bp, Homo sapiens
ccccagcagcccccgaaggccctatcaggacatggagtatgaaagacggtgtcttcagtgccctgggtttgcctg

SEQ ID NO: 560722 - DNA, 98 bp, Homo sapiens
gctccaaaaactctttcagtagcagcagcttttaatgaagatgaagataaaatatttacaccagcagctccagttcataccaataaagaagatcctgc

SEQ ID NO: 560723 - DNA, 75 bp, Homo sapiens
gaaaacctttgtgatgatccacttccacttaatgaatgaccttcccctcctccaatgagtcccgccaatgcccca

SEQ ID NO: 560724 - DNA, 83 bp, Homo sapiens
gctggtggcccgggtcttccagaaggctgtagaccagagtatcgagaagttgagccccatatgggggttggcaggcagcagag

SEQ ID NO: 560725 - DNA, 101 bp, Homo sapiens
actcttctcttccaagcgagcaatccaacttagaaataatgtttcattcaagataaggctcgtggcttaggagattgtgacctggcttgcatcattctaag

SEQ ID NO: 560726 - DNA, 89 bp, Homo sapiens
cagaggtgtttaccatgacgataagcaaccagcatttagagctgtttatgaagcactgagaaatgttcaggaagatttgactgaagaga

SEQ ID NO: 560727 - DNA, 75 bp, Homo sapiens
cgactgaggcacagagtgaaggggaggtgccagcccgcgaatccggccggaggtccagtggtttacgtcttggat

SEQ ID NO: 560728 - DNA, 90 bp, Homo sapiens
catagaggacaacgcagatatagaacatttcttttatcacaggtttagatcgctccaattcctgggttaacactggtggtccaaaagctg

SEQ ID NO: 560729 - DNA, 82 bp, Homo sapiens
aatggagaagtaaagattttgctgaaaaggaattcacaattgaaactgaagggaaaacatttcagttaacaaaagacatgat

SEQ ID NO: 560730 - DNA, 82 bp, Homo sapiens
ctcgacctgctaacagaactggaccttttcgcaggaacgaatgcaggaatttgggaactgagctgtgcaagtgctgaagaag

SEQ ID NO: 560731 - DNA, 75 bp, Homo sapiens
ccgggctgagctgtgctacagccatcgccaaggtttgaggaactactggccaacctactaaatgaacaacatcag

SEQ ID NO: 560732 - DNA, 75 bp, Homo sapiens
cagatggtgttcacagtgttggtgtggagtcacagcttgacttttgcaccccagatactcgcccagctggtctgg

SEQ ID NO: 560733 - DNA, 90 bp, Homo sapiens
tgatgatggatccatttctcctattgaggagtcaacaagcagagcccctggaaaactcacatatgtgtcaacaatagtccttgatgcccc

SEQ ID NO: 560734 - DNA, 100 bp, Homo sapiens
gaaaaatgggcccacctcagcccttcggaattttcccaacttcagaaatatgctgagtgtaaaagagtggctctgtttgaactgtcaaatgaaaagagct

SEQ ID NO: 560735 - DNA, 75 bp, Homo sapiens
ccaagccgcaggtggcggcgagcgcggggctcggcccgagctcaggaggttgaggaacaggttagcaccactgag

SEQ ID NO: 560736 - DNA, 90 bp, Homo sapiens
cttttttaattacaattgatggggagagcagtaactacatcaatgctgctcttatggacattctggaacttttcaaagcctgactctctt

SEQ ID NO: 560737 - DNA, 100 bp, Homo sapiens
ctggttgtttctggtgggatcgttggctatgtaaaaacagagtcaaagccaagagctccctgctgattcacaagcacttatgtcacttctgcacttcagt

SEQ ID NO: 560738 - DNA, 74 bp, Homo sapiens
cgtctcatggcgttggaataccggctctcagcggctgacaccagcagtgaaaacactgtggttcctccagaaac

SEQ ID NO: 560739 - DNA, 74 bp, Homo sapiens
aaaatggggagcaggaggctgacaatgaggttcgagaaaatgatcagtggaatgtacctgggtgagattgtccg

SEQ ID NO: 560740 - DNA, 96 bp, Homo sapiens
ctgggaagctggcgtgggcaggccagctgtacctggcctggagctccaggtgctggagaatctggtaaaagcaccattgtgaagcagatgaggatc

SEQ ID NO: 560741 - DNA, 100 bp, Homo sapiens
tctggtggtgggcacaactgtggtgggatacttgccaaatgggaggtttatcaccagatcttcaatctatggagcagattcggcgaattatgcgaccaac

SEQ ID NO: 560742 - DNA, 100 bp, Homo sapiens
ctacatactcatcatggggctcctgtacaaggagcaggccgggctctcgccatgggtcactgtcgcctctgccacgggaagttttcctcgagaagcctgc

SEQ ID NO: 560743 - DNA, 83 bp, Homo sapiens
tgggaatgggggccgagccaattgtgatctgaggcaacttctcctagaatctcaatctcagctcgatgccgccaagagcgaag

SEQ ID NO: 560744 - DNA, 89 bp, Homo sapiens
ctgggcctcaccagtgaggatgaggactatgtctcccccttgcagctgaacggtctgggcaaagtacccacgtttgttcgaatgctggc

SEQ ID NO: 560745 - DNA, 90 bp, Homo sapiens
caaattccaacctcagagccctgacttcctggacatcaccaaccccaaagccgtctacttgtttgcggccccctactactacggcttcta

SEQ ID NO: 560746 - DNA, 91 bp, Homo sapiens
cttgcaattcctgtgtttggaccattgagcagcagattggaaaagtgaatggtgtgcatcacattaagagtcgacttcaatgttcctatga

SEQ ID NO: 560747 - DNA, 100 bp, Homo sapiens
agttcgggaaaccgtattttatcaaggctaaatttattgtgaagaaatcagaagatgaagaagacgccgctaaagatacttatattattgaatgccaagg

SEQ ID NO: 560748 - DNA, 75 bp, Homo sapiens
cagaagctgcgtgagagacagagcgtcctcaagtccctagagaaggtcctgctggttggggcagacaacttcacg

SEQ ID NO: 560749 - DNA, 80 bp, Homo sapiens
atcactcagaagtttgatgtaccatatccagaagacccagcagtttataaaccactctcccaggaagagctgcaaaggat

SEQ ID NO: 560750 - DNA, 96 bp, Homo sapiens
aaaaatgacccaccaatggaagcagctggcttcactgctcagggtcaacatatttcactggcacctattcacaagcttgaagaagctctgtatgaa

SEQ ID NO: 560751 - DNA, 75 bp, Homo sapiens
tgccattccagcactggactcatggaggctgagcatttattcagatggagatggcgatggagatggagcaactgg

SEQ ID NO: 560752 - DNA, 107 bp, Homo sapiens
ctgagaagggggaagaaacgtccgccacccatcccccttgctgcctgggggttcagacttgatttctcgcccaagaacttcaaggtgaaaatgatcatgaagacatc

SEQ ID NO: 560753 - DNA, 100 bp, Homo sapiens
agaggaggcgagaggcgcaaagtgcaatgtgccaccccaagccctcccacctcccctgcttccccggctcctccagcaaaccccctgtcgtctgaatccc

SEQ ID NO: 560754 - DNA, 100 bp, Homo sapiens
agggactgttctgcctacagaacctcagtcagaggagcaactttccaagctggatacacatggagctgtttgggaattttccttgctgctaccgcgctgc

SEQ ID NO: 560755 - DNA, 120 bp, Homo sapiens
caaggatatgctgtattcagctcaggaccaggcaccttctgtggaagaaaacccatatagacagctgccttgtaactgtcatggaagcatgcctggaaagacagcaatagaacttggacc

SEQ ID NO: 560756 - DNA, 82 bp, Homo sapiens
accccggagtcttcctgatccatggacccgatgaacatagacacagatgagctttgatccaaaccttctccacaacaatgga

SEQ ID NO: 560757 - DNA, 100 bp, Homo sapiens
ctgggcatcgccttgctggcctacgtcgcctttactcccctgctggtgcctccctccttggcgcgcttcccacctgcgatcggcgccctcttcgcagtca

SEQ ID NO: 560758 - DNA, 96 bp, Homo sapiens
ggtgatgcaagaagtttctaggaaaggccggacaccaggactgagcagggggaggaacatttaagctgatggaagtggaagtggaagttgctgtac

SEQ ID NO: 560759 - DNA, 87 bp, Homo sapiens
gaagtaccgcgagcaaggagcgcggaatcggggagcgtccggagctagctggatcctctaggcagctttttacctgcacctactcag

SEQ ID NO: 560760 - DNA, 50 bp, Homo sapiens
cgctctgcacgcttgccagcgcggtgcgtgcctgccagtgtagagccggt

SEQ ID NO: 560761 - DNA, 100 bp, Homo sapiens
ctcaccccttcagcgtcgctgcccccagctcagctcttactgcgggccgctccgacggcggtccatcctgggttgattacattttaaatgttaccagaga

SEQ ID NO: 560762 - DNA, 90 bp, Homo sapiens
ggccctgctgaaagtggcgcaaatgtttgtttcgacgccggaccgcgtaagagacgatgatgttgggcacggaaggtggagagggattcg

SEQ ID NO: 560763 - DNA, 98 bp, Homo sapiens
ttctcctggcacccggtgcttatgtctttggctggccgttgctccagggagaactgcaaatatcttcatccacccccacatttaaaaacgcagttgga

SEQ ID NO: 560764 - DNA, 100 bp, Homo sapiens
ggactcggattcgttgcctgagagaattcggtcaacagtggatgaaaaagaacaaaaacaacttcttatggatttggatgtagtaatgcggagtagtgat

SEQ ID NO: 560765 - DNA, 82 bp, Homo sapiens
tttgcagcgtagcccgagtcggtcagcgccggaggggacggcaaaacagaacagaaaggcggagataaaaagaggggtgtta

SEQ ID NO: 560766 - DNA, 101 bp, Homo sapiens
gtttgagagaagtttaagagaagaaatggacatgattgcctaaatcagccaaacacaggtttgcctgagaatacagatcaacccacagaacaaagcggatt

SEQ ID NO: 560767 - DNA, 75 bp, Homo sapiens
gacgggactgccaagagacatgttagaaggacaaaagtcacctgcaccggtgcccgtgacgtacgagctgcccac

SEQ ID NO: 560768 - DNA, 75 bp, Homo sapiens
tccaaagtttgcagaaaagaatatgagaatgagaacgtccacaggtctgtgaagccgcagattctgtcagtgttt

SEQ ID NO: 560769 - DNA, 83 bp, Homo sapiens
cccgctctgagggccccggcccctggatgcacagccccggcgctgggggatatgagactttctactcggaatatcctgagtgt

SEQ ID NO: 560770 - DNA, 95 bp, Homo sapiens
aaaccccagcaaatgtgcaaagtgtgaagcctcagtttaggtcatctggtggttcagaacactcaacagagggctctgtatccttgggggatgga

SEQ ID NO: 560771 - DNA, 100 bp, Homo sapiens
aggtggaccccaagaagaccattcagatgggatctttccggatcaatccagatggcagccagtcagtggtggaggaacagcatatgccatatatgagctg

SEQ ID NO: 560772 - DNA, 50 bp, Homo sapiens
tcatggggtgaagaccatggccacaaagagctctcatttggaagacagtg

SEQ ID NO: 560773 - DNA, 90 bp, Homo sapiens
ctcgaacgcctggcctcaagcgattctcccgcctcggccttccaaaatgctgggattatagatgaagagtctaacctgtctctgcaagct

SEQ ID NO: 560774 - DNA, 90 bp, Homo sapiens
tgatgatggagcatgttctcttagtcagcatccttcaccacacagttggaatcgagcttttcatgcaacacccaacacttataagcggaa

SEQ ID NO: 560775 - DNA, 101 bp, Homo sapiens
gggcgccaccgctgccacctccgcgaggttctaactgaagaggagagaaccctatccaggggggccttgagagacatgctggatcaagtctatcagccctt

SEQ ID NO: 560776 - DNA, 96 bp, Homo sapiens
atgtacctgaacgaagtcgcggtttatttggtcaagatactcacttgtaattattccaaaaaattggagtctgtttgctgttaatttctttgtggg

SEQ ID NO: 560777 - DNA, 76 bp, Homo sapiens
tgacccctgacgagcgcagcaaagagggctctatctggaaccaccaggatcagttccatgacaagaccccttatac

SEQ ID NO: 560778 - DNA, 100 bp, Homo sapiens
gcagcccccgaaggccctatcaggacatggagtatgaaagacgtgtgggccaaactgaaattgcagaaggcttcagaacgatggcagcctgacactgagg

SEQ ID NO: 560779 - DNA, 97 bp, Homo sapiens
ctacagccttcacttaaaagacctgctgcatttggacacggcactgaggcaggaaaagcatatggtccagcagcccactgaggaaaaacgtcaagaa

SEQ ID NO: 560780 - DNA, 96 bp, Homo sapiens
catgcagattatatcgcatcctatggctcaaagaaagatgattatggcttttggagattgtgacttcagtgctgcttcatccaagcatggctgccc

SEQ ID NO: 560781 - DNA, 75 bp, Homo sapiens
gtgcctgcagagagaagccaaggtgttccagggtcacccccgagaggacaacaggcatctggaagtgctctctcg

SEQ ID NO: 560782 - DNA, 100 bp, Homo sapiens
gaagaaataagaaagatctgcagggatgaaaaggaagcgctggggcagaatgaggaatctcccaaacaggaatgagctgaaagccagtggtggcgaaatc

SEQ ID NO: 560783 - DNA, 138 bp, Homo sapiens
acttgcccaagggcttcgcggtgagcgagcgctgcaaggtgcgcctcgtgccgttgcagatccagccaagaaggatcaagaaggtggagaagaaaagaaatctgtgcaaaagaaaaaagtaaaagagttaaaggtgtt

SEQ ID NO: 560784 - DNA, 96 bp, Homo sapiens
ctgaggaagaagctgaggctaaggacatgaagaatgcaaccctctccctgaattctaatgacagtgagccaaaatattaccctatagcagttctgt

SEQ ID NO: 560785 - DNA, 100 bp, Homo sapiens
ggaataggaatcatggcggctgcgctgttcgtgctgctgggattcgcgctgctgggcacccacggagcctccggggctgatattctctaagccgctttca

SEQ ID NO: 560786 - DNA, 75 bp, Homo sapiens
cgcagtggtcgcttcttctccttgctgagatctgtatctgtggacctgaatgttgatccctcgcttcagattgac

SEQ ID NO: 560787 - DNA, 50 bp, Homo sapiens
tcctatccaaacagagacgccgaaaggcattgccacctggggtatcgttg

SEQ ID NO: 560788 - DNA, 100 bp, Homo sapiens
tggagtgcccactgaaaccataaagttgccaccttccagagaagaggtacgagatgacaagacaaccataaagtgtgaaacctccccgccttcctccccg

SEQ ID NO: 560789 - DNA, 98 bp, Homo sapiens
acgtccccgcccctgcccgcggtgggatctgagccaagtctggggagcagggaggagccctgtgccctgtcccaggatccatgggtaggaacaccatg

SEQ ID NO: 560790 - DNA, 49 bp, Homo sapiens
ccgtcgcgccactcctccgagtgtcagcagttgagtctttggagggccc

SEQ ID NO: 560791 - DNA, 88 bp, Homo sapiens
cgccgccgctgccgctgccgctgccgcacctccgtagctgactcggtgaggcggaaccaaccctcctggccatgggaggggccgtggt

SEQ ID NO: 560792 - DNA, 76 bp, Homo sapiens
ctcataaagggatagcagcccctcatgcaggctgagatctgtatctgtggacctgaatgttgatccctcgcttcag

SEQ ID NO: 560793 - DNA, 89 bp, Homo sapiens
acttctccaagtttcaggaaatgatagaaacaactttagatatggatcaggtacaagaaaattccccaggacacagagctggtttggag

SEQ ID NO: 560794 - DNA, 75 bp, Homo sapiens
aagatggaaaaaacttgtttaatggatgctggcccgcgagagacattgatgcattttgctgtgcggctgggactg

SEQ ID NO: 560795 - DNA, 75 bp, Homo sapiens
atcaaatgcagaattcacaagatccaatcccttgtccttaaaagaggtcctatacgttgcttgtggaggcgtggg

SEQ ID NO: 560796 - DNA, 82 bp, Homo sapiens
tcgcccgccaccctgcgctgccgccgctctgaggagttaaagggttgaaaggaggagcaggaggtactgatggacaaggagg

SEQ ID NO: 560797 - DNA, 83 bp, Homo sapiens
gtctctcattggcttctttgagactgaaatggcagatgggcttccccaaggatttattgacattgctacttgagtgtgaacag

SEQ ID NO: 560798 - DNA, 82 bp, Homo sapiens
gaaggcctctctcctgatacagcaggcgctcaccatgttccctggaggctccccacaggtgcaggaagccgccgcccagcca

SEQ ID NO: 560799 - DNA, 98 bp, Homo sapiens
ggtgctaagtggatcctctggccagctgactgcacttcttttttgagaaaggaaggaatatatcctgactgattctgtttcagatagagagccttgcc

SEQ ID NO: 560800 - DNA, 87 bp, Homo sapiens
gaaattccaagttcagattctccagagctggagataagatgggtagactgctacttcccttttacacatccttcctttgagatggag

SEQ ID NO: 560801 - DNA, 88 bp, Homo sapiens
cagtggagcccaaagacccctggagacatgagactgggtgtgttgctgtattgcccaggctggtgtggaactcctggcctcaagcgat

SEQ ID NO: 560802 - DNA, 100 bp, Homo sapiens
caggcctactcctccatcattggactgcagtcccaccaggttgttcccacagcctggaagtctcttccctgacttgttccacgatcaacctctactcacc

SEQ ID NO: 560803 - DNA, 100 bp, Homo sapiens
ccatcgtggtggatcctgttcatggggcccagtcctatgcggagagactgcgtctgggtttggccgtcattcacggggaagctcagtgcacggaactgga

SEQ ID NO: 560804 - DNA, 100 bp, Homo sapiens
gcaaattcctactgtccggctgcgcggctaccgtggccgagctaggaaatgcttccagactgcacacttttacttagaggacagtacatcccctagagtt

SEQ ID NO: 560805 - DNA, 59 bp, Homo sapiens
gcggcgaggactggcgacggcgaggaggtctcacttgccctggaacctctgtcagaaac

SEQ ID NO: 560806 - DNA, 50 bp, Homo sapiens
tggtcagggtcttgctactggcatgccagtttaattggttggggtcagat

SEQ ID NO: 560807 - DNA, 100 bp, Homo sapiens
ggggaacgcatgggaatggacttcagactggtggactgttcatcattctgttgaagaaacgcttaacccaggtgtcgaagtgcagacagactacgtgccc

SEQ ID NO: 560808 - DNA, 100 bp, Homo sapiens
acaataagagcagaggatggaacacttcagtgcattcaagttttctgagtttaaccagtaatgccattcagttgccaatctcaagcaaagcaaacataag

SEQ ID NO: 560809 - DNA, 75 bp, Homo sapiens
gggcggagctgtgcgagagcctcctcacttggggtcagtttgaaaaggaggatcgagctcactgtggagtatcca

SEQ ID NO: 560810 - DNA, 75 bp, Homo sapiens
ccgggggcgtctttcagagcattacggaggaacagcacagcatgctgggctctggatttaaagctgagcgcttaa

SEQ ID NO: 560811 - DNA, 74 bp, Homo sapiens
tctgacttcccagagtggcaacttagctcccggctcacccacccagcagctcagcacctgcgaaatccgtctcc

SEQ ID NO: 560812 - DNA, 83 bp, Homo sapiens
caccgcacatgcagaaccagatgaacggccagatgcctgggtgtccgcaatgttgccagtgtctgtctgcagattggctaccc

SEQ ID NO: 560813 - DNA, 82 bp, Homo sapiens
ctgtcgtctgtgttgtgactgctttggacgtgggagtcacctgaaagccaggaaatgccgctgccatggcccagacactgca

SEQ ID NO: 560814 - DNA, 90 bp, Homo sapiens
agtaatggtgcaaagcctgaacaacggcagcctttaacagttgagcacatgtatgaagacatcagtcaggatcatgtgaagaaaacagtg

SEQ ID NO: 560815 - DNA, 100 bp, Homo sapiens
cgtcactccttccttaaggctctttattaccaagaataatcatgggccagactgggaagaaatctgagaagggaccagtttgttggcggaagcgtgtaaa

SEQ ID NO: 560816 - DNA, 96 bp, Homo sapiens
cctagcgtcctggaattacttcaatcaattaatgttggagaagattgtccagtgtttgatggactctttgagttttgtcagctctcaactggcggt

SEQ ID NO: 560817 - DNA, 74 bp, Homo sapiens
gtaatccaagagaggctaaaggaagaacaacagatggatcccttcaggtgtgtgtggtttcagcgcagcatggc

SEQ ID NO: 560818 - DNA, 51 bp, Homo sapiens
gacttcaactatgctactaaagagcccccctctgaggacctgggaagcctg

SEQ ID NO: 560819 - DNA, 97 bp, Homo sapiens
cctttatccactctatggccttggagaactgccccaaggatttgcaagtactatactggcaattgctggagaagattttgcaattgttgcttctgat

SEQ ID NO: 560820 - DNA, 100 bp, Homo sapiens
cagattcgtgttgaagcctgccacaaggtccacctgttgttgtgggtttttgggtgaccagctctacccttctccaaaagaagagccaagagaaggtcct

SEQ ID NO: 560821 - DNA, 98 bp, Homo sapiens
cagccagtactggtggaatagtctttggccaggtaatctgtaagtcagatgctccaacaggggatgttcttcttgatgaagctctgaagcatgttaag

SEQ ID NO: 560822 - DNA, 95 bp, Homo sapiens
gctgcgggcggacagtctggactcctcaggcctctcctctgagcgctcagactcagaccaaggtgctggagaatctggtaaaagcaccattgtga

SEQ ID NO: 560823 - DNA, 74 bp, Homo sapiens
ggccggaggaccggcctgccggcccccagaacaaggcgctggttttcaatacagaataatcagttggtttacca

SEQ ID NO: 560824 - DNA, 50 bp, Homo sapiens
tccatttctcctattgaggagtcaacctccagggttccttgaaaagaaaa

SEQ ID NO: 560825 - DNA, 100 bp, Homo sapiens
atttatgtcatcaagaagaatgacgatggacacattcagctaacgtattttagcaggtggagtgaggttgaagattcctgtgacagcgatgccatagaga

SEQ ID NO: 560826 - DNA, 87 bp, Homo sapiens
tatgttccagttgaaaatgtacctattgaacagattccacttgtgaagggcactccacagaaggatgttattatcaagtcagatgca

SEQ ID NO: 560827 - DNA, 75 bp, Homo sapiens
aaggcagcttcccacagcaggttggacagttcacagatcatggaagggaagtggttgctgtgtatgttactggtg

SEQ ID NO: 560828 - DNA, 101 bp, Homo sapiens
agtggctgacttgctgattgaggtcggcagctcccgagaagcaggagaagcagagtttttgcactggcaaacttccccagactctgcgaggaaacggaaag

SEQ ID NO: 560829 - DNA, 100 bp, Homo sapiens
ttacgtctgcggaagtgcagctgcctcagttcttagcgcaggatgacgtagctttgccaaagacttagaagctaagcagaaaatgagcttaacatcctgg

SEQ ID NO: 560830 - DNA, 75 bp, Homo sapiens
gtcaagttgccggtggaattggcccaggatgacagctggagaatggagtcaggtcttcaaagcttcacctttctc

SEQ ID NO: 560831 - DNA, 110 bp, Homo sapiens
aagtgaactgggacaattgacaagctccaagggtctggcagaagcttcctccgagactgggcatttcatcctccctggaggtgtcataaaactgagttctgcagttgaag

SEQ ID NO: 560832 - DNA, 82 bp, Homo sapiens
gtgagggcaagctctccctgccgtggctgctcaacaaggagctgggctgcatcaactcggtttggtgcacctcgatttggag

SEQ ID NO: 560833 - DNA, 100 bp, Homo sapiens
aatttcagatacatgttttctcctgtgaaattaaagaggcaagtcctatcattgatcggcctgagtctaatagctttggggacaggaggcatcaaaccct

SEQ ID NO: 560834 - DNA, 90 bp, Homo sapiens
cggtcgctggaatgtgtgtctcacgaggaagtaaaaggcctacaagcccagattgccagctctgggttgaccgtggaggtagatgccccc

SEQ ID NO: 560835 - DNA, 50 bp, Homo sapiens
ttttcctttaaagctggccagtggtgctggggagtcagggaagagcacca

SEQ ID NO: 560836 - DNA, 88 bp, Homo sapiens
ttctccctcagtatttagaccaggagttctacggggaagatgctaagaaatcccgggactatggaagaatcattagtgcccggcactt

SEQ ID NO: 560837 - DNA, 101 bp, Homo sapiens
ctctattgctcatcgattccacatcatgcgagagaaatatccggagaagttcaacagcagaatggtggtttggcctggagtgatgatgcagatggaggccg

SEQ ID NO: 560838 - DNA, 82 bp, Homo sapiens
ctggggccagggaaccctggtcaccgtctcctcaggatctgtgccagttcagaagcaggcgagcctcttccctgatgaaaaa

SEQ ID NO: 560839 - DNA, 100 bp, Homo sapiens
agagggacacgctggtgcatctgtttgccggaggactgcagctgaatatgtaaaatctcgactcccagaggcccttaaacagcatcttcaggactacgag

SEQ ID NO: 560840 - DNA, 73 bp, Homo sapiens
gtcaccttctccagctccttcattccccagcaggttgtacgtggacactataaaggtcagcaaattggcaaag

SEQ ID NO: 560841 - DNA, 82 bp, Homo sapiens
ccagaaggttctctggtggaggcgctcttcctggtgtcccgcccagtagcacttgcacctcctgcgccgccgccccccatcc

SEQ ID NO: 560842 - DNA, 74 bp, Homo sapiens
ctgctcctgctcatggacgacgatgccggctccaggagcagcagtggaggtcgggaacgcctcattgtggagcc

SEQ ID NO: 560843 - DNA, 87 bp, Homo sapiens
tgaggccagcaccgacgcagccctggagaatagcattcctttcgaacaccacggcaagtagctgctcgtctcccatcggaaggcagc

SEQ ID NO: 560844 - DNA, 90 bp, Homo sapiens
aaaaaaagtgtcagagaagatggagttttcaacattagtgtggataatacatgttcattattcagagcaatatactttgctgcttattca

SEQ ID NO: 560845 - DNA, 100 bp, Homo sapiens
agtttgcctatgtgccatttggagctggtgtatgcaacagcgttattgcaacaggctaacgaaaacagacaaaattcaactggaaaagcatgttttggca

SEQ ID NO: 560846 - DNA, 100 bp, Homo sapiens
ccagggactccatcacaaagccgggtctaccgggccgatgcattatgttcaagataaattatttgtgggtctagaacatgctgtacccacttttaatgtc

SEQ ID NO: 560847 - DNA, 50 bp, Homo sapiens
ctcatcgtcagcagggagaggctggtggctcctgcacgtgcgccggctcc

SEQ ID NO: 560848 - DNA, 75 bp, Homo sapiens
gcccagaaagcagttaacagtgccaccggtgttccaactgtttaaaggtgctgataagactgtgaaaggcccaga

SEQ ID NO: 560849 - DNA, 90 bp, Homo sapiens
cagagattagttttagttgcagcatggaacaattacagcaggctctccccggaggctcagccccctctgctccccatgggcaactgccag

SEQ ID NO: 560850 - DNA, 100 bp, Homo sapiens
tctgcaaggctatcatttcacagctgattcctgggagcacatccatttcattggcaagctttccctggacctctatcacactgaagatgatatttacaaa

SEQ ID NO: 560851 - DNA, 74 bp, Homo sapiens
gttcgagcgaaacctggcccgattcagaatagcattcctttcgaacaccacggcaagtagctgctcgtctccca

SEQ ID NO: 560852 - DNA, 82 bp, Homo sapiens
actgctgctgggggacctgaacactaatcggcttagtgagataagatttgtgaccaaatcagtgatgctgtccttgatgccc

SEQ ID NO: 560853 - DNA, 143 bp, Homo sapiens
tatgacctggttatgacccatgctcttcagtggcccagtcttaccgttcagtggcttcctgaagtgactaagagacgcaggtcagaatggaaatgggctgcagaccgggcagctattgtcagccgctggaactggcttcaggc

SEQ ID NO: 560854 - DNA, 90 bp, Homo sapiens
ccgctttcctgcccccactccttttacaagtccttccactttctctctgaggcagaaagagcaagggtttttctctccattttatggttg

SEQ ID NO: 560855 - DNA, 82 bp, Homo sapiens
caccgcggtgcgcaagcgcaaccgtcggtgggtcggggatcggtcgcctgagaggagggtgtgaagacagagaatgaccaca

SEQ ID NO: 560856 - DNA, 75 bp, Homo sapiens
gcatgccctccaaataccgcaagaacatctggatcaagagaggtggagcccagtgacaccatcgaaaatgtgaag

SEQ ID NO: 560857 - DNA, 91 bp, Homo sapiens
cctgtggacatcagcgccatccccgagcagcggtggaagctggagcatcagatccatgctgctgctgactcggagccccacagcttggcac

SEQ ID NO: 560858 - DNA, 126 bp, Homo sapiens
ggaacccaagcagtggcgaagggaatcgcaaggctcttccctgaccattttctactgtccctgcgcgagacattccgtccagctgctatgctgatagaacgatcgtccgactttgggaaaacctgg

SEQ ID NO: 560859 - DNA, 83 bp, Homo sapiens
gctccccagaccagagctgtcaagccccggctttccttaaagtttcccatgtctcaatggactcctgaatataacgagctcta

SEQ ID NO: 560860 - DNA, 96 bp, Homo sapiens
gcgagcacagagcctcgcctttgccgatccgccgcccgtccacacccgccgccagctgcggttggatttctcacgatgtccagtgttatctccatg

SEQ ID NO: 560861 - DNA, 96 bp, Homo sapiens
cttacggaaaaggaacagattgttcctaaaccagaagaggaggttgcccagaagaaaaagatcaccggggaacccttgatccgtcgatcagatgat

SEQ ID NO: 560862 - DNA, 100 bp, Homo sapiens
tgtggaaacagcagatgtaccctcagtacgccacctactattacccccagtatctgcaagccaaggtcagcccaaggccaaccccactgtcactctgttc

SEQ ID NO: 560863 - DNA, 98 bp, Homo sapiens
cacgagcctcagcttcacctccatgggcatcaacatggggagtacatcaagacctggcggccacgctacttcctcctcaagaatgatggcaccttcat

SEQ ID NO: 560864 - DNA, 100 bp, Homo sapiens
agagagaagaggaagagtcttggtctttggaaatatcttttggagctgctggatcaagtatcacttgaaggttgggggccgtcccgctcctaaggcagga

SEQ ID NO: 560865 - DNA, 75 bp, Homo sapiens
gggctcgagcgatcctcccacctcagtctcctgagtagctatgactacgggaagggaaaaggccgaggcatcagc

SEQ ID NO: 560866 - DNA, 100 bp, Homo sapiens
agacctgagtgaacagaagaaaagagcattttaccgatggtatcaacttgagaagacaaaccctggtttcctagaacttgacttgcgtcacacgatcatt

SEQ ID NO: 560867 - DNA, 80 bp, Homo sapiens
taggtgcaggtgccctgaatgcaggttcctatgcgtcactagaatgttcatgaagaagtcttacaagaatatcagaagat

SEQ ID NO: 560868 - DNA, 82 bp, Homo sapiens
gcccgcgccgcatggaggccggctgaggagcgccgctgcctcgcctcgatccagagacaatggccccgatgggatggagccc

SEQ ID NO: 560869 - DNA, 100 bp, Homo sapiens
gttaaagtcattgaggactttccagcaaaggtcggatcatgctaaaaggagataatattactctgctacaaagtgtctccaactagaaatgatcaatgaa

SEQ ID NO: 560870 - DNA, 83 bp, Homo sapiens
gctctgtccgcggagaggagtgggacaactcctaaaggcagaggtggaggagacactgaagcgactgcagagccagaagggag

SEQ ID NO: 560871 - DNA, 74 bp, Homo sapiens
ttgggggccgtcccgctcctaaggcaggaagatggtggccgcaaagaagacgagtcttgctgtgtcgtccaggc

SEQ ID NO: 560872 - DNA, 87 bp, Homo sapiens
ggtgcagagccccaattcctacttcatggatgtgaaatgcccaggagcaatttctacgggagaaggttaaagtcaatggcaaaactg

SEQ ID NO: 560873 - DNA, 75 bp, Homo sapiens
aacggcttctgcgagcagctcaacgaggactttgaggggtgtgcatcaccttcgaccaggccaacctgaccgtca

SEQ ID NO: 560874 - DNA, 75 bp, Homo sapiens
ggcctggagctaggcaaggtggtgactaagaaattcagcaaccaggagacctgtgcctccggagccagcgtggtg

SEQ ID NO: 560875 - DNA, 101 bp, Homo sapiens
agtgaaaatgtgctgcctcgagagccgctgtgtattcctaggaaagataaaggatgcatttgatcgaaacccggaacttcagaacctcctactggacgact

SEQ ID NO: 560876 - DNA, 100 bp, Homo sapiens
gtttggccgcgggcaacctcggagcttatactcctcccagtgacgggtctggagtgcgtgggggaccggctgttggcggtgtcaacagcatctccaccct

SEQ ID NO: 560877 - DNA, 82 bp, Homo sapiens
taggatttccgggagaggctgctgtggaggctgaggaggcggcggcggagatctggttgatcatggccttgccaggttggtg

SEQ ID NO: 560878 - DNA, 100 bp, Homo sapiens
cccgaccccgggccacctgggcccccgggttccgccggcactctcgccaccaccgcgtggctcctgacccctgaggattaccagcgatttctagacctgg

SEQ ID NO: 560879 - DNA, 101 bp, Homo sapiens
ggctaaccaaaagtctgttctgaacaccttccaccatgaccacctcagcaagttcccacttaaataaaggcatcaagcaggtgtacatgtccctgcctcag

SEQ ID NO: 560880 - DNA, 100 bp, Homo sapiens
tcatggatgctgccaattttcattagtgccagcagtagttcccaagggctgtctcagccatccacccagacgactcagtatctgagagcagacacgccca

SEQ ID NO: 560881 - DNA, 76 bp, Homo sapiens
caacccctcaaagacagtgatgttgagttccctgacatcgtggagttctgcgaggccatggccaacgccgggaaga

SEQ ID NO: 560882 - DNA, 100 bp, Homo sapiens
cacaaagagcttgctccctacgatgagaactggttctacacgcgagctgggggggctgtcggggggctgttaggtgcctggatgacaagtggacagttta

SEQ ID NO: 560883 - DNA, 98 bp, Homo sapiens
ttttgggtcgtgctgagccagagttcgcaggagggtatgagaagaagcattgcatgcatttattcagccagagattctggatggcccaaatcagtatt

SEQ ID NO: 560884 - DNA, 100 bp, Homo sapiens
gcagcatcccagtttttggtcttctgtcaaaaacacagggatgaggaaacagagcaaatgcagcgttacaatcaaagacttattgaggaattgaaaaaca

SEQ ID NO: 560885 - DNA, 96 bp, Homo sapiens
ctaatcccccaacgaggaaggaaggagcagttggttcaatctctggtttcccagagctatggggacttcccatccggcgttcctggtcttaggctg

SEQ ID NO: 560886 - DNA, 75 bp, Homo sapiens
gaggaccggagcggaaaaccttctgaaggtcgagctgtgcagttttagcgggtacaagatctaccccggacacgg

SEQ ID NO: 560887 - DNA, 100 bp, Homo sapiens
gtaacgagctgccggggcgcatcgcggtgcaggacgacctggacaacaccgagctgcccttcttcaccctggcctgtgaccagctggcactgggcgtggt

SEQ ID NO: 560888 - DNA, 90 bp, Homo sapiens
aagggctaccaggagaccatctcagggttatgtaccgaaggactctaccgtgtcagcgggaataaaactgaccaagacaatattcaaaag

SEQ ID NO: 560889 - DNA, 100 bp, Homo sapiens
agagcagcagccgcccgcttcaaccccaggggaccagaggaactcagccctgattgcgggagtgagttttccgggagtccctacagccaccctcagtatt

SEQ ID NO: 560890 - DNA, 101 bp, Homo sapiens
cggagcgcatgcagctgctgctgaccctggccttcaaccccgagccgctggtgctacagacaatgaccgtttgccaagtaaaattatctaatggcttactg

SEQ ID NO: 560891 - DNA, 100 bp, Homo sapiens
tttatattcatctcaaaaacaaaattctgaactcaggacttggcaagtgtgaaggaattacaagtccagaaggctcaaaatctatagtggaaggaatcat

SEQ ID NO: 560892 - DNA, 100 bp, Homo sapiens
cgactgggtatatttcctctctgtggtgaactatgacaatgtagtggacacaggttctgaaacagatgaggaagacaagcttcatattgctgaggatgac

SEQ ID NO: 560893 - DNA, 100 bp, Homo sapiens
gagaagacgatctgcacttcgcattttggcattgacatttaattttagggtcctttatatagaagggagagtaggtccagaggtgtccttctaaagctgg

SEQ ID NO: 560894 - DNA, 100 bp, Homo sapiens
agtcgtcttggagacaaggaagcagttctcaacagtggtggacttgctttgtgaagagacagttcatgaacaagagtctttcaggacctggacagtgaag

SEQ ID NO: 560895 - DNA, 128 bp, Homo sapiens
agaaaagcaacgtgatcgtggccttggcccgagatagcctggcattggcgaggcccaagagcagtgatgttttaaatgcacagagagcaggatacaaggcagccatagttcacaatgttgattctgat

SEQ ID NO: 560896 - DNA, 83 bp, Homo sapiens
ctcagccccgtcctcttgtcctcctcagcctcgccgattacacctcaacaagaaggcaactgacaaacagccttatagcaagc

SEQ ID NO: 560897 - DNA, 90 bp, Homo sapiens
ttgcactctagaagggacaatggacttctggctttggccactttacttcctgccagggcagctgcaatgactctccgcacggtattattg

SEQ ID NO: 560898 - DNA, 90 bp, Homo sapiens
catgaatggagcaaaatggcggatcatgtgcagataaataggatttaccaatccttggatgaagtgcttgggaagtctttaagtgccata

SEQ ID NO: 560899 - DNA, 90 bp, Homo sapiens
aaaagaaagaaaactacaggcggggacggcttctcgggtctccaactgaattccttgaagagaaaatggcctaccaggaatacccaaata

SEQ ID NO: 560900 - DNA, 100 bp, Homo sapiens
cccctacatttggagcctggacacgcagtacagcaagggtcaatgcaaccaacttcatggaggcaggagccccagttatgtggaatgggcacagagcaag

SEQ ID NO: 560901 - DNA, 100 bp, Homo sapiens
acggggagcagagcagcaactcacccagcacacaaaatggatctcttacggatcccctaacaacagtgagagagcaatgcgagcagttggagaaatgtgt

SEQ ID NO: 560902 - DNA, 90 bp, Homo sapiens
ggatgaaggtggggtggcgtggcaagccggactaaggaccggggacttcttgattgagatcatcagaaaagcccttactgaggaaaaacg

SEQ ID NO: 560903 - DNA, 75 bp, Homo sapiens
cgatccgggtaaagttccagggaggccgcgaagtcaccaggagactaaagtccatcaaaaacatccagaaaatta

SEQ ID NO: 560904 - DNA, 100 bp, Homo sapiens
acgaattcagttcccacgccaaaccagaccccatggcctgctcagcctcagcgttcacagccatgaatgaaccacagtgcttctacaacgagtccattgc

SEQ ID NO: 560905 - DNA, 100 bp, Homo sapiens
cctggccatgggaggggccgtggtggacgagggccccacaggcgtcaaggccccataccctgaacagcaccagcatgtctaaggcatatcagagcacctt

SEQ ID NO: 560906 - DNA, 101 bp, Homo sapiens
gccaaagaaaaagataaaactgagaaagaattgcccaaaatgagccagagatggaaaataatgtcctgcaagatgaggattgaacagttaaaacaaacaat

SEQ ID NO: 560907 - DNA, 90 bp, Homo sapiens
acccccaaaagctgggaaatgggactttgaacatgtcggggatcgccctcagcagactcgcccaggagaggaaagcatggaggaaagacc

SEQ ID NO: 560908 - DNA, 75 bp, Homo sapiens
ctctctctttctggcctggaggctatccagcgaccagatggcctttgaggatgtggctgtgtacttctcccagga

SEQ ID NO: 560909 - DNA, 60 bp, Homo sapiens
aaattgtcgccattaagaaatattagttcagaagcaggcctagaaattgatagccagcag

SEQ ID NO: 560910 - DNA, 75 bp, Homo sapiens
ggtggcttccgtttgttggtggaggaggtggcaggcctcggcggtctcaccaacggctttgggggtgcgaggagc

SEQ ID NO: 560911 - DNA, 48 bp, Homo sapiens
agatctggatcatcaaagacagttaatggaatttctcagtgacaacaa

SEQ ID NO: 560912 - DNA, 88 bp, Homo sapiens
acccgctttgcagctcagggtgagcccaaggttttgaacgaagaatgtgatcagaactggtacaaggcagagcttaatggaaaagacg

SEQ ID NO: 560913 - DNA, 88 bp, Homo sapiens
cgacacttacatgccatggccttctacgttgtgaaaatggtatatgtggcagcctttgccatatcagcgtatgcatctagctactacc

SEQ ID NO: 560914 - DNA, 99 bp, Homo sapiens
gcgagtctctggagaagccgcagcgcgagttgccgccgctgctgcccggggccggttacagacgttccacgttccgtctccctgtgccagccctcagga

SEQ ID NO: 560915 - DNA, 100 bp, Homo sapiens
gaaggaggaaactatggcctccaggcttccgacggcctggtcctgtggtatatgagtgtaacaaacgctgcaaatgtgacccaaacatgtgcacaaaccg

SEQ ID NO: 560916 - DNA, 99 bp, Homo sapiens
tgacttcccattatgtgattgccatctttgccctgatgagctcctgtttagccactgcaggatcagttcgacagcttagacaagcatacacaatgggga

SEQ ID NO: 560917 - DNA, 100 bp, Homo sapiens
gatgatttcttccaaggaaccaaggcggccctggctgggggaaccactatgatcaatcctgatacagctccagtgatccatggggtggacgttataaaca

SEQ ID NO: 560918 - DNA, 98 bp, Homo sapiens
gacggcgagcccttgggccgcgtctcctttgaggtctgaatttcctgctgctgttcacaaagatgctttttatctttaactttttgttttccccactt

SEQ ID NO: 560919 - DNA, 75 bp, Homo sapiens
ttctgctaatggcatactttgatcctgacttttatgcctcaggttgttgaagattggaaattcatagcccaggtt

SEQ ID NO: 560920 - DNA, 100 bp, Homo sapiens
cctgtgggacgccagtcaccagcaggagcagccaaccagcagcagccatcatggagaaagtgaaattcgttattctacatggaagaaagctgtgatgaag

SEQ ID NO: 560921 - DNA, 100 bp, Homo sapiens
attgacttgcacagtccttctgagattgttaagcagattacttccatcagtattgagccaggagttgaggtggtatgcagatcttcgtgaagaccctgac

SEQ ID NO: 560922 - DNA, 100 bp, Homo sapiens
gcctggagtctgcgaaggccgggacccggttccccggcccacagtgggggtgtgcaaacccgagagaactgggtagagctgaagtttcctgcaccaggca

SEQ ID NO: 560923 - DNA, 90 bp, Homo sapiens
tgcccctactgtaaagacagtgaaggaaggagattacctggggcaattgatgttatcggtcagactataactatcagccgagtagaaggc

SEQ ID NO: 560924 - DNA, 132 bp, Homo sapiens
gttacccgctggacttcctgtacgacctgtatgccgtctgcaaccaccatggcaacctgcaagatccacacaacttaaagatctgctgccgagtgaatggggaagtggtccagagcggcaacaccaaccaga

SEQ ID NO: 560925 - DNA, 95 bp, Homo sapiens
gcgggggcagccgctgagacggtttttcacaagggagagtccggtagtgaaaggcaatgcgctgttagctctaagcagccttgctgtcgtcgtat

SEQ ID NO: 560926 - DNA, 82 bp, Homo sapiens
attgagaagaaacttaatcagaatagcaggtcagaggctttggaagtgataaagcagttaaaagagaaaatgaagatagaac

SEQ ID NO: 560927 - DNA, 75 bp, Homo sapiens
cgcagtggtcgcttcttctccttgctagaacctcagaacctctgcataatgttcaggttttaaatcaaatgataa

SEQ ID NO: 560928 - DNA, 97 bp, Homo sapiens
tctgtggcatctccctgtcccagttatttcctgaacccgaacacagagcccatgagggcccccaaaggcctggcttttgctgagatccaggcccgtc

SEQ ID NO: 560929 - DNA, 75 bp, Homo sapiens
gccccctccccctcgccatgaagctccttccgcttccagccgttcgagtcctatgactccaggccctgcctgccg

SEQ ID NO: 560930 - DNA, 51 bp, Homo sapiens
ctcctcgccgccgtttctgagaagaggaaactcattcaggcaagttcagcc

SEQ ID NO: 560931 - DNA, 100 bp, Homo sapiens
ggaatactgcccgatggtcttccgtaacctgcgggagaggtttggaattgatgatcaagatttccaggtcaaaatgcagatcttcgtgaaaacccttacc

SEQ ID NO: 560932 - DNA, 102 bp, Homo sapiens
cttcggttcgggtgcgctgctcaaggacacggtctacaccgacttcgacggctgaaggtgatgtggccgccctcaaccgacgcatccagctcgttgaggagg

SEQ ID NO: 560933 - DNA, 100 bp, Homo sapiens
gtcggagtccggcggcgacctgcctctgaaacatggcaggctcggatgctggcactactgcagtcttcagttaagcaacaagtagaagctattgaaaaac

SEQ ID NO: 560934 - DNA, 98 bp, Homo sapiens
ggggaaatgcagaaaacagaaacacttcttttattttcctgtaatatatctgtatcatcggagagcttactcacatagcatattggtatatcaaaatg

SEQ ID NO: 560935 - DNA, 75 bp, Homo sapiens
ggccaatgctgaccagcgcgtcatgatgacctaccaggtgccctccaggtgtcaagcacagtcccccaggacccc

SEQ ID NO: 560936 - DNA, 58 bp, Homo sapiens
gctgtccatcctgtgcacaccgagtgtgttcagcctccgttttgtactccagatgaat

SEQ ID NO: 560937 - DNA, 82 bp, Homo sapiens
tcctggtcctcgatccgcccacagacctcaaattcaaagacctccttgaggcccgccgcccgcgggcccacgagtgcctggg

SEQ ID NO: 560938 - DNA, 147 bp, Homo sapiens
gccgacagactgaaggacagcggcaccgccagacggccagaaagttccgccatgagctggggcacggagctgtgggtgctggagaatctggtaaaagcaccattgtgaagcagatgaggatcctgcatgttaatgggtttaatggag

SEQ ID NO: 560939 - DNA, 100 bp, Homo sapiens
gcgaccccagtcggtgctccggggaggtcacctgacgaggaggaggaagaaggcacctacgatcaaactctggagttccgtaggggaggtgatggccagc

SEQ ID NO: 560940 - DNA, 100 bp, Homo sapiens
aaggtggagatctcctgtgctgcgaccactgcccggctgccttccacctccagtgctgtagtttatgccaacgtgacttcattcatacagatgaaccaag

SEQ ID NO: 560941 - DNA, 75 bp, Homo sapiens
gcggtcgaagaaggggacgccgacaaggtacatgtcccagagcaagcacacggaggcccgggagctcatgtactc

SEQ ID NO: 560942 - DNA, 83 bp, Homo sapiens
tctctccctctgcccccccttccccacgcaaccccagatccatttacactttacacatatcccagtagaatacgggcttttcc

SEQ ID NO: 560943 - DNA, 100 bp, Homo sapiens
aaagcttttggacattcctgggggaacgtgctcagtcactttcaatgggcaccaggagaaaggttttggttcttggatctggctacatatctgagcctgt

SEQ ID NO: 560944 - DNA, 100 bp, Homo sapiens
tgagaaaggaaggaatatatcctgactgattttggttgaatctggcgatgtggaacccatggatatggagggctgactatatacaccatgttttttcctg

SEQ ID NO: 560945 - DNA, 96 bp, Homo sapiens
cctgaggattgctgagaaaaggcagagggctctggctgagaacatggccaatgacattgatgagctcattggcattcccttccccaaccacagcag

SEQ ID NO: 560946 - DNA, 100 bp, Homo sapiens
tcaagtatgtcccaaacgtcttgaagaactgaatgtcatcatgtctggaatcaagcgaaccatcaaagaaaccgaccctgattacgaggatgtatctgtg

SEQ ID NO: 560947 - DNA, 83 bp, Homo sapiens
ccgaggccgcggccctgggggcccgcaatccacgccacggaatccccgaggtctctaattaacagaagatggcaaagcccagc

SEQ ID NO: 560948 - DNA, 73 bp, Homo sapiens
accggagtcagaaccctccgcagagtaaagttccaagagcctctgagttcctgccttttttcatctctgaatc

SEQ ID NO: 560949 - DNA, 82 bp, Homo sapiens
taaatacctcaattttgtcaagggtgtggtggacccaagagccatatcagtgctagcaaaatggcagaattcatatagcatc

SEQ ID NO: 560950 - DNA, 51 bp, Homo sapiens
ctgtggatatctgtctaagtaaggactcctcctatttatggagcaggcacc

SEQ ID NO: 560951 - DNA, 83 bp, Homo sapiens
ctcatgagttaagaaacatatttctacagtttacagcgatagctctcctttgattgagaagattcaagcatttgaaaaatttt

SEQ ID NO: 560952 - DNA, 98 bp, Homo sapiens
gccaccatccacgccagccgcaccatgccgctcctaagcctgcacagccgcggcggcagcagcagtgagagttcatagccctgatgaagcaagttact

SEQ ID NO: 560953 - DNA, 83 bp, Homo sapiens
cagggaggatgtcgggacaccccggaagctgggaaatgtttggtgccctggttgtcagatgttggaaagcagtaggacggaac

SEQ ID NO: 560954 - DNA, 100 bp, Homo sapiens
cttcacttccctcggtctgggcttctctgaggcggcgagagatggtcaggtctggagctcgaccgggccagtgagaaagatcagtctaaagaaaaggaga

SEQ ID NO: 560955 - DNA, 97 bp, Homo sapiens
ttaaggttggaaagatggatgctacttcctattctagtgtcatggagaaactccagctgggcccagagattctgcagcgggaaaatccaaggcttat

SEQ ID NO: 560956 - DNA, 75 bp, Homo sapiens
aacccgtgggcctgtggactgcagcctcggcggtcagcagagtctctctgtcacctaagctggagtgcagtggcg

SEQ ID NO: 560957 - DNA, 96 bp, Homo sapiens
cttgggaacaaaatacaaatcatggagccgctggggtcccttttgcctcagatactattttgaaggtctggatgctggtagccggcttcctgctgg

SEQ ID NO: 560958 - DNA, 138 bp, Homo sapiens
cggctgggccctggcactctgtcgatgggcctcttccctccatgggtccctgttcccccatctgtctgttctggagaaggagaagaaacgtaagaagcgaagtgaggatgaatcagagacagaagatgaagaggagaa

SEQ ID NO: 560959 - DNA, 82 bp, Homo sapiens
ctggggtatgattctaatatgggtcagcgccaaactggaggggaatgaaacactaaaagttgtagaactcgacagaagagtg

SEQ ID NO: 560960 - DNA, 100 bp, Homo sapiens
ggacacgccaaacctgagtttctacagaaatgagatccgcttcctgcccaacgggtgagtcagatgattccattctccgattggccaaggccgatggcat

SEQ ID NO: 560961 - DNA, 100 bp, Homo sapiens
ccgcgctggtgcagccaccctcgctccctctgctcttcctcccttcgctcgcaccatggaacttgacaagaggagtcggaagatttagagagcttctcag

SEQ ID NO: 560962 - DNA, 100 bp, Homo sapiens
catgatccagccgggactgattcctttgcagcctaacctggacttcatggacacctttgagcctttccagggtgtgggcccatcgctggatggatctgtc

SEQ ID NO: 560963 - DNA, 100 bp, Homo sapiens
aacttccagcctccagaactgtactccaaagattcaggtttactcacgtcatccagcagagaatggaaagtcaaatttcctgaattgctatgtgtctggg

SEQ ID NO: 560964 - DNA, 73 bp, Homo sapiens
atggagctactgtactggctattggaaggaggagattctgaagataaggagaaattgatgcttcagatgaatg

SEQ ID NO: 560965 - DNA, 98 bp, Homo sapiens
aggattccaagtaactcttatttggaaacttttgagaagaactttgaaagagaaacccataaaataagtgagcaaaatgatgctgataatgctagtgt

SEQ ID NO: 560966 - DNA, 100 bp, Homo sapiens
ctagttgttcagctgatggaaccttaaagggctatggttctgatggtctaaagttgttatcacatgaagaaagtgtatcatttggcgagtctgtactgaa

SEQ ID NO: 560967 - DNA, 75 bp, Homo sapiens
gggcctggcactggccaaggagattgccctgggcgctgcctatggcacagccaagagcggtaccggcattgcggc

SEQ ID NO: 560968 - DNA, 100 bp, Homo sapiens
ctgaaagattgggcaagagaagaattcagaagaaacaaaagtgccaccgaagagacgtgccaccttgcttagcgcccgtcaaggaatgatgtctgcacga

SEQ ID NO: 560969 - DNA, 76 bp, Homo sapiens
gaaagttgtcaatacctgtaaagaagagaatggctctactggtgcaagaacccagcttagactagaaagtctagaa

SEQ ID NO: 560970 - DNA, 98 bp, Homo sapiens
tctagaagaaatgccctccgggtcacaggataagaacagtccactttggaaagtgaagaatggaatccttgggaaggagatgaaaaaaatgagcaaca

SEQ ID NO: 560971 - DNA, 74 bp, Homo sapiens
gcagtggtcgcttcttctccttggtatctttcagatgaaggcattgaagcttgcacaagctctccagacaaagt

SEQ ID NO: 560972 - DNA, 75 bp, Homo sapiens
tccaggagcccagctcacagccaccggtaccttcttccagtcctttgagaaacaaggttttcattccggtactcc

SEQ ID NO: 560973 - DNA, 83 bp, Homo sapiens
gcggcgcgcgagctggagcactcgcgtgtgaccaattcagtgaaaggaacgaatgcgattctctggacctgtttgggactgag

SEQ ID NO: 560974 - DNA, 80 bp, Homo sapiens
aaggagttgtctgtctttaaggacagactgtatgaactggacatctcgttccctcccagagaggaagcagtgcattggtg

SEQ ID NO: 560975 - DNA, 100 bp, Homo sapiens
gatgccgcccgcggcgaggtggcccggaccgcagtgccccaagagaggacctgaaggagaagaaggagaaggtggaggagaaggcaagccggaaagagcg

SEQ ID NO: 560976 - DNA, 100 bp, Homo sapiens
ctccttcggcagtccacccaccgccgccgcctcccaggtgtgtgtggtttcagcgcagcatggctgtggtcatccgtttgcaaggtctcccaattgtggc

SEQ ID NO: 560977 - DNA, 117 bp, Homo sapiens
ttgggttcgtgagatttcatgaagatggcgccaggacgaaggccctactgggcaagagatgtgaagatgtttggcttggtatgccatcacctattcctgcgaaatacattgactact

SEQ ID NO: 560978 - DNA, 110 bp, Homo sapiens
ttcgaaacgtgataagaagcacctggatgagacatttgctacagcatcccacattaagtcaacggatgaatcctccatgttcttccagtttggcccatcaattgaacagc

SEQ ID NO: 560979 - DNA, 99 bp, Homo sapiens
ctgccacggccacgcggatgcctgcgatgccaaagaccccacggacccgttcagagtggaccagatcgtggggcggggcccagcgatcacggacaagga

SEQ ID NO: 560980 - DNA, 100 bp, Homo sapiens
cgggatggtgccacaggaggctgtgcgggccccgctccgcttcgaatgggttgaagccatccttgtcaatatatttggtggtatcgtcaactgtgccatc

SEQ ID NO: 560981 - DNA, 74 bp, Homo sapiens
ggagcgcccagaggcgagccctggtggaggaagagcccactttccttgtggaactgtccagagtgctggcaaat

SEQ ID NO: 560982 - DNA, 96 bp, Homo sapiens
cgaaaggataatggctacttcctgattaaacccactctccacactcaactataaatttccagcaacagtgcacatggcgcatcaaaaacccacacc

SEQ ID NO: 560983 - DNA, 83 bp, Homo sapiens
ctcggagatctgagctacagaagtgcagcactgccagtgaaagatgtagaagataaacctgaacaacaaaccagaacaagaga

SEQ ID NO: 560984 - DNA, 100 bp, Homo sapiens
gttctccagtgccattggcctggtgctgctgatggaggcggtggccgtgctcgtcgggcccccttcgggaggactgaagcgaggctgaaatcttagaatc

SEQ ID NO: 560985 - DNA, 75 bp, Homo sapiens
tgactgtcaagttttagaagaggccccctcttctctcctggaggtcagccggccccttgtggctctcaggccagc

SEQ ID NO: 560986 - DNA, 87 bp, Homo sapiens
agtttctggacactctccgagaggtgaagaggctaagaatattgtacacaaagattcttgatgttcttgaggaaatccctaaaaatg

SEQ ID NO: 560987 - DNA, 75 bp, Homo sapiens
cctccagcttcggatccacagacggaatcaggagcagagatctgcggcggaaagcggcccggctggtggccgcca

SEQ ID NO: 560988 - DNA, 134 bp, Homo sapiens
aggcgatggcggatttagataaactcaacatcgacagcattatccaacggctgctggaaggtactggctgtgatcgaacttctcaaccctcagagacttagatcttccacctcactccctcagccaagcctcca

SEQ ID NO: 560989 - DNA, 49 bp, Homo sapiens
agccagagcctgcagtcccacacggttctaaatggcttctaagaagttg

SEQ ID NO: 560990 - DNA, 84 bp, Homo sapiens
cgaagagctctcctccttcttcctcaactatctcgctgacacgcaggccaccagcttgggctccccacggagggcagcaagtgg

SEQ ID NO: 560991 - DNA, 96 bp, Homo sapiens
ttcggccggcggcatggccctgtcgtccgaacccgaaactatgtgaagcaacactctggattttgaaagacatcttttcatcatgggacagcaaat

SEQ ID NO: 560992 - DNA, 100 bp, Homo sapiens
ccggggaccctgtacgtgtacatcatttacggcatgtacttctgcatgaacatctccagccaggaactcaaagaacctgtaggacaaatcgtatgtacag

SEQ ID NO: 560993 - DNA, 82 bp, Homo sapiens
gtggagattgatggggagcgcatcaaggtacttgaactggcaggaaatgcatcaaaagacttaaaggtaaagcgtattaccc

SEQ ID NO: 560994 - DNA, 100 bp, Homo sapiens
atctgatgccctttcagagagctggagtcaaatgcaaccttaaaatcagtgacaagaaacattccaaacaagcaacagtcttcaagaaattaaactggca

SEQ ID NO: 560995 - DNA, 50 bp, Homo sapiens
cgtcaacctgtcccacagcgaaaggttttttattggcacctcagtctcaa

SEQ ID NO: 560996 - DNA, 100 bp, Homo sapiens
ggaacattgtagagtctgagaaggcccttgtggccctagactggagctggttacagacggaagaagaagagcacagctgcctggagcaggcctcatgatg

SEQ ID NO: 560997 - DNA, 74 bp, Homo sapiens
ctctctctaccacgagcagcgccctgggagccctcacgagtcccgatttgaacatggaattcaatccttcagat

SEQ ID NO: 560998 - DNA, 103 bp, Homo sapiens
ccgcgcttgctgctggtaacagggccttgcctagtgggccttccttcccagttggcgttccgggccgcgtggcggtgaatgccttggctgtaggagaacccgg

SEQ ID NO: 560999 - DNA, 76 bp, Homo sapiens
ggaagagaagatgaatcatacaatatttcagaggtcatgtcaaaagaggcattttttacacttgcacgagatataa

SEQ ID NO: 561000 - DNA, 100 bp, Homo sapiens
cgtccatcttctttgaatctatgccctacaaggaggtcaccatcaaccagagcttgctcacccccctccacgtggagattgaccctgagatccagaaagt

SEQ ID NO: 561001 - DNA, 90 bp, Homo sapiens
ccgggtctggggagtggggaatgaggcgggggtcggcccggggctcggagaatgggcagcagagtcacctgatatgaaaaaggagcaaga

SEQ ID NO: 561002 - DNA, 100 bp, Homo sapiens
aagaggtcttctttcaggcaatcctgcttgctgtgtgcttaatcatttctgcatgtgcaagatgaagaaactgaggttcagagaggttaagagactccac

SEQ ID NO: 561003 - DNA, 83 bp, Homo sapiens
ggcccgcgaggcgggcagccggggcgtccaggaaagaattgggatgtgaatgccgccctcagtgattttgaacagctacgtca

SEQ ID NO: 561004 - DNA, 106 bp, Homo sapiens
actctccagcaccagcttccagttagtggatatagcacaccatccccagccaaggaacgcgttgtggtgatcagcagctcggaagactcagatgccgaaaactcgg

SEQ ID NO: 561005 - DNA, 91 bp, Homo sapiens
aagtagaaattgatcagcaacaactaactcagcagcaacttaatggaaactaggcttctccagggaaagtgaccgaggcagtgaaagaggc

SEQ ID NO: 561006 - DNA, 50 bp, Homo sapiens
cttggccccgtccttacctcacagacagcccacctgaggatattgaccat

SEQ ID NO: 561007 - DNA, 100 bp, Homo sapiens
tggaaaaagaaactggaatctcccaacagagaaattattattttacacaatccaaaggaccgtataattgatgccggcccaaaaggaaattattctcgct

SEQ ID NO: 561008 - DNA, 150 bp, Homo sapiens
tactacatcccgcagtacaagaactggagaggtgaggtggcggcgtgggcagcgattgcgtggtcagtgattgcgagggaggtaccttcttccaaacccggtggcgggacaggcctggccggcctctgcagagacgtccaacctcgtgcg

SEQ ID NO: 561009 - DNA, 96 bp, Homo sapiens
cctgtgtgtgcttcaaatcgtcaccctcatggtcgctccgtggttccccctggaagtcctgggcccattactcgacatgggtcttacgacagttta

SEQ ID NO: 561010 - DNA, 50 bp, Homo sapiens
cctctctctctgcttggtaccacagtttcatgatcaacatgggagactcc

SEQ ID NO: 561011 - DNA, 75 bp, Homo sapiens
cttggttttgagctctgctctgcctgtgatgtcgagaacactggtgaacttgaagatgatttacttggagaagat

SEQ ID NO: 561012 - DNA, 100 bp, Homo sapiens
gccgtctgcaaagtgtccccggcaagaagccacgaaggaagacaggaggtccgaggagaaagcggcagccatggcagcctcaaagaaaacagcccctcca

SEQ ID NO: 561013 - DNA, 82 bp, Homo sapiens
gggaaccctggtcaccgtctcctcagatcatcgtgttcctgtgttacggggcccgcctcaacaagtgggtgctgcagaccta

SEQ ID NO: 561014 - DNA, 50 bp, Homo sapiens
caaactcattagcaacggagcctatgggctgttcggctcttgaatcccag

SEQ ID NO: 561015 - DNA, 82 bp, Homo sapiens
cgggaagtgtgaagcggccaatggcacggaggcctgcgtatctggtggctggacccagagctgacctatggctgcgccaagc

SEQ ID NO: 561016 - DNA, 100 bp, Homo sapiens
atacttaggagaagaatatgtcaaggctgttggtaacctgagaaaatgctccacctcatgtgactctcctattccatctgtttcttcgggatcatcttca

SEQ ID NO: 561017 - DNA, 94 bp, Homo sapiens
cgccgctcaccccgcggccgcaccttcccgccttctcagccttgccttacacccagacaaaactctcgttgcaactggccaagtcgggaaggag

SEQ ID NO: 561018 - DNA, 106 bp, Homo sapiens
cgggcacctccgagcgcaaggacagcgcgaggtccgcgcagcccagcgcagccatccctgggcgctgcctatggcacagccaagagcggtaccggcattgcggcca

SEQ ID NO: 561019 - DNA, 101 bp, Homo sapiens
cgtccatcttggagtctatcatcaatgacatgagagatcttccaaatgttgcccacattcccaaatcagatgctttgtactttgatgactgcatgcagctt

SEQ ID NO: 561020 - DNA, 96 bp, Homo sapiens
atttcacggacattcagcaagattttcagctgaagaacaatgggaactctactagcctgcctttgtctagaaaggttcttaagtcactcaatcctg

SEQ ID NO: 561021 - DNA, 50 bp, Homo sapiens
ccactggctttggctggggacacccgacgacactctggacttcagccaac

SEQ ID NO: 561022 - DNA, 74 bp, Homo sapiens
ccaagcgcacagaaaaacacaagaagattcagccctgtcatcttgtgcaaaaaaccactcaagaaggttattat

SEQ ID NO: 561023 - DNA, 100 bp, Homo sapiens
cgagcagctgcgtcgctgcgagctcatcaaggagagcgaagtcaaggccctgtgcgctaaggccagtatgaaaagacacagactgtactctcagaactga

SEQ ID NO: 561024 - DNA, 100 bp, Homo sapiens
ctggtcttcatcctcatattcctggagtctcagatcaccaccatcctaatgtcctatgatcacgtggaactcacattcaatgacatgaagaacgtgccag

SEQ ID NO: 561025 - DNA, 50 bp, Homo sapiens
agacatgagaagattcatactggaggagatgaccgccgggttctgctatg

SEQ ID NO: 561026 - DNA, 100 bp, Homo sapiens
cctagcagccttctccaaagccacatccttttccgaaacagagcagacaaagttggcgatgctgtcggggattctgctgggcaatggcaccctgcccgcc

SEQ ID NO: 561027 - DNA, 59 bp, Homo sapiens
gtgactaccctggttacctcatatgaaacgttttgatggtaaattacaatcagaatcaa

SEQ ID NO: 561028 - DNA, 75 bp, Homo sapiens
gcaggagaagctgagcctttctggacagaccaacctgtcagtgctgcaagtatccagctcacatagaagacattg

SEQ ID NO: 561029 - DNA, 75 bp, Homo sapiens
cgagcgctgagggtgagtgccgggagctctgaggttgagccccatatgggggttggcaggcagcagagaggcccc

SEQ ID NO: 561030 - DNA, 54 bp, Homo sapiens
ctacaggatggcttggccttgcacataaggaaaatggcagctcccgagcagccg

SEQ ID NO: 561031 - DNA, 75 bp, Homo sapiens
ctagctaaacttcgccaactccgctgcctttgccgccaccatgcccaaaacggggtcggcgctttgcctgatgac

SEQ ID NO: 561032 - DNA, 98 bp, Homo sapiens
cgccgcctgccctcagccgcccgctggccgggagcggagcccctgtggagtggccaaatcaatgaaggtccctgtatatgagaccccagctggatgga

SEQ ID NO: 561033 - DNA, 100 bp, Homo sapiens
cgggccccgggacctgggctgggaacccgcggtggagcgggacacgaacgtgaactggttagtactgcagaaaaaccacgacttaaagaaggccttatac

SEQ ID NO: 561034 - DNA, 75 bp, Homo sapiens
gtgagaggttttctcgctctagggtgtcgaagtgcagacagactacgtgcccctgctgaactcgctggcggccta

SEQ ID NO: 561035 - DNA, 97 bp, Homo sapiens
tgggagtctccgcgtcccgctcgctgggagagagggctgaataattctcatccttcaaggcccaactccagccaatggcaccgacctcctggacctg

SEQ ID NO: 561036 - DNA, 99 bp, Homo sapiens
accggtatattgcaaataccgtagagctgcattaatactacattgtcaaagacaaagacgaacatgagacatgcgatatgagttttaaaaggagagaag

SEQ ID NO: 561037 - DNA, 101 bp, Homo sapiens
ttcgccaagcaggtgcagaagaagtttagcagggcccaggagaagctgctgtaagtaaagatgattccattatttcaagtcttgatgtcactgatattgca

SEQ ID NO: 561038 - DNA, 100 bp, Homo sapiens
tactccttcatggccaccgtcaccaaggcgcccaagaagatcgtcagtatttaaacagatcacatcatgcgtgagtacaagctagtggtccttggttcag

SEQ ID NO: 561039 - DNA, 50 bp, Homo sapiens
tcaccacatcccctggcatccaattcctgtgcagacctgggttcttcaaa

SEQ ID NO: 561040 - DNA, 100 bp, Homo sapiens
cagagttagagagagggatggtggacccagatgatgtggtaccagttggccaaagaagagcctggtgttggtgcatgtgctttggactagcatttatgct

SEQ ID NO: 561041 - DNA, 100 bp, Homo sapiens
tggaggagcagctgcgcccgctgccagcacacgactacttcgagttcttcgccgccgacctgaggtgatggaatatgagaataggattcgagcctactcc

SEQ ID NO: 561042 - DNA, 82 bp, Homo sapiens
gctgtttggaatgtgagatgggcaactctcttgatagagcccaagcagccaagaataaaggcaataaatattttaaagcagg

SEQ ID NO: 561043 - DNA, 75 bp, Homo sapiens
ggaggcgaggaggagagactgtgcagaggccaagaccgttttgcccaagaaggagaaaatgaagctgaggcgtga

SEQ ID NO: 561044 - DNA, 100 bp, Homo sapiens
atgacctacagtgatacagggaaactaagtccagaaacccaatctgccatcgaacaagaaataagaatccttctaaggcatggaaataaccagcctgcaa

SEQ ID NO: 561045 - DNA, 75 bp, Homo sapiens
ggcttgtgatccatgggcgagtctacgatgtcacccgcttcctcaacgagagtgatcagcagctggactgtgcct

SEQ ID NO: 561046 - DNA, 100 bp, Homo sapiens
cacctattcaaataccaaagagaatgggatcaacggagagctgacctcagctgacagagaaacagcagattctgtcccctctgggacgaattaatgaagc

SEQ ID NO: 561047 - DNA, 83 bp, Homo sapiens
cttcatcagccggcacagccaggggcggaggagagaagatgccctgtcctcagctgaccccgcactacatctacccaccagcc

SEQ ID NO: 561048 - DNA, 100 bp, Homo sapiens
cgcgtctcccactacatcatcaacagcagcggcccgcgcccgccggtgccaccgtcgcccgcccagcctccgcccgtgttcatctgtagcttcatggtgg

SEQ ID NO: 561049 - DNA, 100 bp, Homo sapiens
gtgaaggaaaggctttgaagcaaaagtttgatgagattttttcagcaacaaggtgtcattccacacatccacaaatctctgattgggaagaaaggacaac

SEQ ID NO: 561050 - DNA, 100 bp, Homo sapiens
accaaggcaccgtagacaaactctgccgagtggagcagggcgtctctggccgagcctctttttgtggaaaacgacagcagcagcagtggcctggaagacg

SEQ ID NO: 561051 - DNA, 75 bp, Homo sapiens
tagcaaggaaaactcaggaccatgatggctcagtttcccacagctatgaatggtttattcttcagtccaaggaag

SEQ ID NO: 561052 - DNA, 88 bp, Homo sapiens
cctctgtacgcccgttcactgatattaataaggcagcggaaagaagaaatatgaatacggctccatcaagacccagccccacacgaag

SEQ ID NO: 561053 - DNA, 90 bp, Homo sapiens
tacttcctcgtttgacaccttcctggtaataaaagactagtggccttagtgcccatgcccagtgaccctccattcaatacccgaagagcc

SEQ ID NO: 561054 - DNA, 75 bp, Homo sapiens
caaaggtcacctggaaattgccttattggaaaaacatttcttacgtgctgcagggtgcacagctgatcgccgtgg

SEQ ID NO: 561055 - DNA, 51 bp, Homo sapiens
ctacagactaccccttcaaaccacctaagcttgtcctctgctttgagctca

SEQ ID NO: 561056 - DNA, 75 bp, Homo sapiens
ggcagtggcgcttgagttggtcgggggcagcggcagaatcaagccagggaggacttcaaccaggacatcggctgg

SEQ ID NO: 561057 - DNA, 101 bp, Homo sapiens
ggaaggagacagccaaagagctggctcagagagatgcacgaaggagagagagtgagaagtctctagaaaatgaaacactcaataaggaggaagattgccac

SEQ ID NO: 561058 - DNA, 104 bp, Homo sapiens
ctgcaccgacctcgacgtcttgcctgtgtcccacttgttcgcggcctatagcaattctgtggtgttcttggtcacacatttatggagtttctgaagggcagtgg

SEQ ID NO: 561059 - DNA, 75 bp, Homo sapiens
gacaagaagacgggcaacttccaggcacgtgtggttctcaaatataggcattctgatgggaacttgtgtgttaaa

SEQ ID NO: 561060 - DNA, 100 bp, Homo sapiens
tgctgcgcatgcaggagggagaggggcattctcaactctgcctggacaggctgcagctggaggctattcataaggtgactcagcgcattgccacctgcca

SEQ ID NO: 561061 - DNA, 82 bp, Homo sapiens
cctgagaagcaattattaaatgaaagaattaaaaacatgcagttcagtaacacacctggtttggttccgtggctccagatgg

SEQ ID NO: 561062 - DNA, 75 bp, Homo sapiens
agtgtggtctacgagctgtttctcatctttatactcttccaggtggtctttgggaagaagcttcctgcctttgcc

SEQ ID NO: 561063 - DNA, 97 bp, Homo sapiens
cgggatcgtgaccgagaccgtgaccgagagcgtgaccgagagcgcgaatatcgtcatcgttagaagtgtctcctcccaaagacctcgttgtgacaga

SEQ ID NO: 561064 - DNA, 98 bp, Homo sapiens
cagctataacagtggggagaggagaagatttgacttctgaacatcctttgttaggacagtactggcatgaaattgtggaagaaacgctggtttgtgct

SEQ ID NO: 561065 - DNA, 75 bp, Homo sapiens
tggaacatcacataaactgctccacagattatttagaggtgaccaagaatatggcccaggtgaccaaagccctgg

SEQ ID NO: 561066 - DNA, 83 bp, Homo sapiens
gaagcaagagaatctgaacctcgtctgtattcccacttccttccaggatttctggtaggtcctactttaggacaagatgtggt

SEQ ID NO: 561067 - DNA, 100 bp, Homo sapiens
caaaactgggttcagaaccagtggtaattaccatcaatactatggaatgcattttgaaacttaaggatgggatacaggggctaaactgcacggtcaagaa

SEQ ID NO: 561068 - DNA, 82 bp, Homo sapiens
cggctgcacaccaacaagggcgacctcaacctggagctgcactgcgacctggaggcccctggctcaatgatgccacctgcag

SEQ ID NO: 561069 - DNA, 98 bp, Homo sapiens
tcacatccatgtgaaaggccagccaccagttcaggagcacttgggagtgatctaggaaggtgtcttgctgcaggtaactaatgaagaagtggtcaacc

SEQ ID NO: 561070 - DNA, 100 bp, Homo sapiens
atcgcttggttaaaacctgacacttttaacaggatctaaaatgtccactgaggcacaaagagttgatgacagtccaagcactagtggaggaagttccgat

SEQ ID NO: 561071 - DNA, 111 bp, Homo sapiens
ctgataggcaggttaccatcactggatctgctgccagcattagcctggctcaatatctaatcaatgtcaggtagagtacagagagatggatgaaagcttggccaacctctc

SEQ ID NO: 561072 - DNA, 90 bp, Homo sapiens
gcagggcgccctagccttcgcagaaacgatggcggaggaagaagggtcctgtattaataggaagttcacatggtggtgtcaacattgaag

SEQ ID NO: 561073 - DNA, 96 bp, Homo sapiens
tcagcgggaaaaacagtatgcgccgaatgacaagattctgcagatcattacggaattgataaaaacagagaataactgaaactgaaattcatggtc

SEQ ID NO: 561074 - DNA, 101 bp, Homo sapiens
tgtcttcagatcttcacagcacagttcctgggaaggtggagccaccagcctctccctgggagttctgggaaatcgttcattcatttacagatgaacagaaa

SEQ ID NO: 561075 - DNA, 100 bp, Homo sapiens
ggcgggcggtgagcgcccatatgggggttctggagagcggggtgtgggcgggggctcaacccccagacctccagaaatgacgtcagaatcatttgcatcc

SEQ ID NO: 561076 - DNA, 91 bp, Homo sapiens
gcgtccgccgattcctcctccttggtcgccgcgtccttggctggcgtgttttaaaatcaaagatgggaaaatcggagaaaattgcccttcc

SEQ ID NO: 561077 - DNA, 87 bp, Homo sapiens
tctacctctatgaggtagatattaaaccagacaagtgtcctaggagagtgaacaggtgcgttccatggatgaactgaatcatgattt

SEQ ID NO: 561078 - DNA, 97 bp, Homo sapiens
gggagttcagcttttagagcaggtgtatgatcttttggaggaggaggatgaatttgatagagaggatttgttaaggattccaagtaactcttatttg

SEQ ID NO: 561079 - DNA, 98 bp, Homo sapiens
agtgatcactctcaatcccggataaggatgacattcggctgctgccgtcagcattgggtgtgaagaagagaaaacgaggacccaagaagcagaaggag

SEQ ID NO: 561080 - DNA, 90 bp, Homo sapiens
ccatttggggaccagagatggacggtcactcagcctatggagcaaatccagtttgctgatgacatgcaggagttcaccaaattccccacc

SEQ ID NO: 561081 - DNA, 75 bp, Homo sapiens
ctgctctcaactacaacatcgtttcagggtaccagaggtttgaaaaggcatttctcctagctgttgacgttggtg

SEQ ID NO: 561082 - DNA, 80 bp, Homo sapiens
agaagccccacaacggcctcctcttcccccagcacggggactatcacaaattgtggctactaatttgccccctgaagatc

SEQ ID NO: 561083 - DNA, 98 bp, Homo sapiens
gcgaaggcggagcagagttcttctcaggtgtcctgcctgaaggagctggtggcccgagtgctgcagaggctgtgcgagcgcggcgcgaagaacgtgct

SEQ ID NO: 561084 - DNA, 137 bp, Homo sapiens
caacaacttcctgtcctactaccgcctcacacgcttcctctccagagtgatcaagtgtgacccggcactactgcagtcttcagttaagcaacaagtagaagctattgaaaaacagtacatttctgcaattgagaaac

SEQ ID NO: 561085 - DNA, 83 bp, Homo sapiens
cggatggaattctcctgcctgcgggtctttaaagactgagacgccgcaccaggctgcaggccagcccttcaagttcactatcc

SEQ ID NO: 561086 - DNA, 100 bp, Homo sapiens
acggggcagtgaaacaaggcttcttgtatcttcagcagcagcagacgtttggaaaggggctggcaaggtttaattgcttatggatgtcattcacttgtgg

SEQ ID NO: 561087 - DNA, 100 bp, Homo sapiens
gaaaagcctctgggagcagaagggaggctccaagacctcatcaacaattaaggttgggagccacgtgtaccagtgtgtgttgatcttggcttgattcagt

SEQ ID NO: 561088 - DNA, 102 bp, Homo sapiens
ttgcgagtttgccaccttccccaaggggtccgtccgagggatgacctggctcagagtcatagcaatcccacagagtattgatgaggaaactgaagtttggag

SEQ ID NO: 561089 - DNA, 83 bp, Homo sapiens
ggcagatgtttgtcgactggaatggctcgagagctagccttgcagcaggaggaagggaagaccgtgatgtacacagctgtggg

SEQ ID NO: 561090 - DNA, 74 bp, Homo sapiens
tgttcagagtgttgatgagaagaccctatactcagaggcgacaaggcactccacagaaggatgttattatcaag

SEQ ID NO: 561091 - DNA, 100 bp, Homo sapiens
taccttgtgacagaatatgccaaaaatggagaaatttttgcatttcttatactgaagcagtggagatcttaaagcaagcatcccagaacttcacctttac

SEQ ID NO: 561092 - DNA, 75 bp, Homo sapiens
ctccttcaagtacttggcagatcactctcttagcagctttaaggaagcctcctatttcagtttctcaacatgaaa

SEQ ID NO: 561093 - DNA, 76 bp, Homo sapiens
acccggtactgtgcactattctttcccaggaaccattggataaggataaaggtggtcactaactgccaagagagaa

SEQ ID NO: 561094 - DNA, 100 bp, Homo sapiens
catccttcagcagttcttccgagctctccagcagtcatggtcctggatttgcaaggctgaatagaagagatgcaacagggagctgccaccaccgtgtact

SEQ ID NO: 561095 - DNA, 83 bp, Homo sapiens
aaaataaccattctccagatccagggggccagtctttcttcagcaggaaggattccatccgcaccatctatacttcattgcat

SEQ ID NO: 561096 - DNA, 97 bp, Homo sapiens
atacatagcaacgatatttggatatctaacatcgtaaccagagaagaaaggagactcacttatgtgcacaatggtgtcatggagaaactccagctgg

SEQ ID NO: 561097 - DNA, 73 bp, Homo sapiens
caagtacctgacgcggggcaagattctgctgtgcacaggtgttccaggctggtgatgtgccttcggaacgccc

SEQ ID NO: 561098 - DNA, 99 bp, Homo sapiens
aaggccccactcacaatctccttgttcttcgtgggtgtgctgttgggctccttcatttcagggcagctgtcagacagatacatgttataaagccagttt

SEQ ID NO: 561099 - DNA, 51 bp, Homo sapiens
gaagtgcagaggtttttttctgtgctacagcctgctgtcgaggccttcttt

SEQ ID NO: 561100 - DNA, 82 bp, Homo sapiens
cattagatctcacatgcttactccttttgtggaggagaacttagtttcaaccaagctccacgaagatctctgtgagaagagg

SEQ ID NO: 561101 - DNA, 78 bp, Homo sapiens
gcattttggcattgacatttaattttagggtcctttatatagaagggagagtagggtcgacaagaagatgctgaggaa

SEQ ID NO: 561102 - DNA, 83 bp, Homo sapiens
ccggaagccgcgccgccgccgccagattcccaacctgctgagcatccgcacacccactcaggagttggggcccagctcccagt
